United States Patent Application Publication US 2025/0313840 A1 - sequence listing, part 4

SEQ ID NO: 83665 - RNA, 21 nt, synthetic construct
  source 1..21: mol_type = other RNA
ccacacccagcaagacccgca

SEQ ID NO: 83666 - RNA, 21 nt, synthetic construct
  source 1..21: mol_type = other RNA
ccccagtgtgcctggtcagaa

SEQ ID NO: 83667 - RNA, 21 nt, synthetic construct
  source 1..21: mol_type = other RNA
catgccggggccctctggcga

SEQ ID NO: 83668 - RNA, 21 nt, synthetic construct
  source 1..21: mol_type = other RNA
atgccggggccctctggcgga

SEQ ID NO: 83669 - RNA, 21 nt, synthetic construct
  source 1..21: mol_type = other RNA
tgccggggccctctggcggga

SEQ ID NO: 83670 - RNA, 21 nt, synthetic construct
  source 1..21: mol_type = other RNA
gaatgcagcctggactttgga

SEQ ID NO: 83671 - RNA, 21 nt, synthetic construct
  source 1..21: mol_type = other RNA
aatgcagcctggactttggca

SEQ ID NO: 83672 - RNA, 21 nt, synthetic construct
  source 1..21: mol_type = other RNA
ctggatcctcacaaagctgaa

SEQ ID NO: 83673 - RNA, 21 nt, synthetic construct
  source 1..21: mol_type = other RNA
tggatcctcacaaagctgaca

SEQ ID NO: 83674 - RNA, 21 nt, synthetic construct
  source 1..21: mol_type = other RNA
ccactggatccacggccacca

SEQ ID NO: 83675 - RNA, 21 nt, synthetic construct
  source 1..21: mol_type = other RNA
cactggatccacggccaccca

SEQ ID NO: 83676 - RNA, 21 nt, synthetic construct
  source 1..21: mol_type = other RNA
actggatccacggccacccca

SEQ ID NO: 83677 - RNA, 21 nt, synthetic construct
  source 1..21: mol_type = other RNA
ccaccccgtcctccaccccaa

SEQ ID NO: 83678 - RNA, 21 nt, synthetic construct
  source 1..21: mol_type = other RNA
cctccacccaggcaactgcta

SEQ ID NO: 83679 - RNA, 21 nt, synthetic construct
  source 1..21: mol_type = other RNA
ttacagccatcccctcctcca

SEQ ID NO: 83680 - RNA, 21 nt, synthetic construct
  source 1..21: mol_type = other RNA
actccagagactgcccacaca

SEQ ID NO: 83681 - RNA, 21 nt, synthetic construct
  source 1..21: mol_type = other RNA
gcccacacctccacagtgcta

SEQ ID NO: 83682 - RNA, 21 nt, synthetic construct
  source 1..21: mol_type = other RNA
gcacaaccaccacacccacaa

SEQ ID NO: 83683 - RNA, 21 nt, synthetic construct
  source 1..21: mol_type = other RNA
cggtgaccccctcctccgtca

SEQ ID NO: 83684 - RNA, 21 nt, synthetic construct
  source 1..21: mol_type = other RNA
cacagtgctgaccaccaccaa

SEQ ID NO: 83685 - RNA, 21 nt, synthetic construct
  source 1..21: mol_type = other RNA
ccaccaccacaactgtggcca

SEQ ID NO: 83686 - RNA, 21 nt, synthetic construct
  source 1..21: mol_type = other RNA
tctagcacacagaccagtgga

SEQ ID NO: 83687 - RNA, 21 nt, synthetic construct
  source 1..21: mol_type = other RNA
gatcacggccaccggctccaa

SEQ ID NO: 83688 - RNA, 21 nt, synthetic construct
  source 1..21: mol_type = other RNA
ccacatcacagagccttccaa

SEQ ID NO: 83689 - RNA, 21 nt, synthetic construct
  source 1..21: mol_type = other RNA
agccctgtccagccctcacca

SEQ ID NO: 83690 - RNA, 21 nt, synthetic construct
  source 1..21: mol_type = other RNA
cttccccagggacgaccacca

SEQ ID NO: 83691 - RNA, 21 nt, synthetic construct
  source 1..21: mol_type = other RNA
ccacacccagcaagacccgca

SEQ ID NO: 83692 - RNA, 21 nt, synthetic construct
  source 1..21: mol_type = other RNA
ccccagtgtgcctggtcagaa

SEQ ID NO: 83693 - RNA, 21 nt, synthetic construct
  source 1..21: mol_type = other RNA
catgccggggccctctggcga

SEQ ID NO: 83694 - RNA, 21 nt, synthetic construct
  source 1..21: mol_type = other RNA
atgccggggccctctggcgga

SEQ ID NO: 83695 - RNA, 21 nt, synthetic construct
  source 1..21: mol_type = other RNA
tgccggggccctctggcggga

SEQ ID NO: 83696 - RNA, 21 nt, synthetic construct
  source 1..21: mol_type = other RNA
gaatgcagcctggactttgga

SEQ ID NO: 83697 - RNA, 21 nt, synthetic construct
  source 1..21: mol_type = other RNA
aatgcagcctggactttggca

SEQ ID NO: 83698 - RNA, 21 nt, synthetic construct
  source 1..21: mol_type = other RNA
ctgcatccactggatccacga

SEQ ID NO: 83699 - RNA, 21 nt, synthetic construct
  source 1..21: mol_type = other RNA
ccactggatccacggccacca

SEQ ID NO: 83700 - RNA, 21 nt, synthetic construct
  source 1..21: mol_type = other RNA
cactggatccacggccaccca

SEQ ID NO: 83701 - RNA, 21 nt, synthetic construct
  source 1..21: mol_type = other RNA
actggatccacggccacccca

SEQ ID NO: 83702 - RNA, 21 nt, synthetic construct
  source 1..21: mol_type = other RNA
ccaccccgtcctccaccccga

SEQ ID NO: 83703 - RNA, 21 nt, synthetic construct
  source 1..21: mol_type = other RNA
cacagccaccaaatccacaga

SEQ ID NO: 83704 - RNA, 21 nt, synthetic construct
  source 1..21: mol_type = other RNA
ccacagctaccagcgttacaa

SEQ ID NO: 83705 - RNA, 21 nt, synthetic construct
  source 1..21: mol_type = other RNA
ctcctccacccttgggaccaa

SEQ ID NO: 83706 - RNA, 21 nt, synthetic construct
  source 1..21: mol_type = other RNA
cttgggaccaccgggacccta

SEQ ID NO: 83707 - RNA, 21 nt, synthetic construct
  source 1..21: mol_type = other RNA
ccaccgggaccctcccagaaa

SEQ ID NO: 83708 - RNA, 21 nt, synthetic construct
  source 1..21: mol_type = other RNA
ccacaatccacccctcctcca

SEQ ID NO: 83709 - RNA, 21 nt, synthetic construct
  source 1..21: mol_type = other RNA
aatccacccctcctccactca

SEQ ID NO: 83710 - RNA, 21 nt, synthetic construct
  source 1..21: mol_type = other RNA
acccacacctccacagtgcta

SEQ ID NO: 83711 - RNA, 21 nt, synthetic construct
  source 1..21: mol_type = other RNA
gcagccactggccccacggca

SEQ ID NO: 83712 - RNA, 21 nt, synthetic construct
  source 1..21: mol_type = other RNA
ccaccccgtcctccaccccaa

SEQ ID NO: 83713 - RNA, 21 nt, synthetic construct
  source 1..21: mol_type = other RNA
ccactggatccacggccacca

SEQ ID NO: 83714 - RNA, 21 nt, synthetic construct
  source 1..21: mol_type = other RNA
cactggatccacggccaccca

SEQ ID NO: 83715 - RNA, 21 nt, synthetic construct
  source 1..21: mol_type = other RNA
actggatccacggccacccca

SEQ ID NO: 83716 - RNA, 21 nt, synthetic construct
  source 1..21: mol_type = other RNA
ccaccccgtcctccaccccaa

SEQ ID NO: 83717 - RNA, 21 nt, synthetic construct
  source 1..21: mol_type = other RNA
cctccacccaggcaactgcta

SEQ ID NO: 83718 - RNA, 21 nt, synthetic construct
  source 1..21: mol_type = other RNA
ttacagccatcccctcctcca

SEQ ID NO: 83719 - RNA, 21 nt, synthetic construct
  source 1..21: mol_type = other RNA
tcctccactccagagactgta

SEQ ID NO: 83720 - RNA, 21 nt, synthetic construct
  source 1..21: mol_type = other RNA
gcacaaccaccacacccacaa

SEQ ID NO: 83721 - RNA, 21 nt, synthetic construct
  source 1..21: mol_type = other RNA
cctcctccatcccggggacca

SEQ ID NO: 83722 - RNA, 21 nt, synthetic construct
  source 1..21: mol_type = other RNA
ccaccaccacaactgtggcca

SEQ ID NO: 83723 - RNA, 21 nt, synthetic construct
  source 1..21: mol_type = other RNA
tctagcacacagaccagtgga

SEQ ID NO: 83724 - RNA, 21 nt, synthetic construct
  source 1..21: mol_type = other RNA
gatcacggccaccggctccaa

SEQ ID NO: 83725 - RNA, 21 nt, synthetic construct
  source 1..21: mol_type = other RNA
gctgaccagcacggccaccaa

SEQ ID NO: 83726 - RNA, 21 nt, synthetic construct
  source 1..21: mol_type = other RNA
ccaccacacccgcagccacca

SEQ ID NO: 83727 - RNA, 21 nt, synthetic construct
  source 1..21: mol_type = other RNA
acacccgcagccaccagctca

SEQ ID NO: 83728 - RNA, 21 nt, synthetic construct
  source 1..21: mol_type = other RNA
gcacagccacaaaatccacaa

SEQ ID NO: 83729 - RNA, 21 nt, synthetic construct
  source 1..21: mol_type = other RNA
gctttacacccatcccctcca

SEQ ID NO: 83730 - RNA, 21 nt, synthetic construct
  source 1..21: mol_type = other RNA
acccacacctccacagtgcta

SEQ ID NO: 83731 - RNA, 21 nt, synthetic construct
  source 1..21: mol_type = other RNA
ccacaacagccactacaacta

SEQ ID NO: 83732 - RNA, 21 nt, synthetic construct
  source 1..21: mol_type = other RNA
cacaacagccactacaactga

SEQ ID NO: 83733 - RNA, 21 nt, synthetic construct
  source 1..21: mol_type = other RNA
ccactggatccacggccacca

SEQ ID NO: 83734 - RNA, 21 nt, synthetic construct
  source 1..21: mol_type = other RNA
cactggatccacggccaccca

SEQ ID NO: 83735 - RNA, 21 nt, synthetic construct
  source 1..21: mol_type = other RNA
aagtggtgaccaccatggcca

SEQ ID NO: 83736 - RNA, 21 nt, synthetic construct
  source 1..21: mol_type = other RNA
ggggaccacccgcacccctga

SEQ ID NO: 83737 - RNA, 21 nt, synthetic construct
  source 1..21: mol_type = other RNA
agcctgtggccaacgtcacca

SEQ ID NO: 83738 - RNA, 21 nt, synthetic construct
  source 1..21: mol_type = other RNA
cggcctctgccactgccgcta

SEQ ID NO: 83739 - RNA, 21 nt, synthetic construct
  source 1..21: mol_type = other RNA
gtgcatgggaaggaggaggga

SEQ ID NO: 83740 - RNA, 21 nt, synthetic construct
  source 1..21: mol_type = other RNA
gtgtctgtgctggggaccaca

SEQ ID NO: 83741 - RNA, 21 nt, synthetic construct
  source 1..21: mol_type = other RNA
tcaccttcaatggccaagtca

SEQ ID NO: 83742 - RNA, 21 nt, synthetic construct
  source 1..21: mol_type = other RNA
caatggccaagtcttccagga

SEQ ID NO: 83743 - RNA, 21 nt, synthetic construct
  source 1..21: mol_type = other RNA
cgtggctggtccccgacagca

SEQ ID NO: 83744 - RNA, 21 nt, synthetic construct
  source 1..21: mol_type = other RNA
gacagcagaaaggatggctga

SEQ ID NO: 83745 - RNA, 21 nt, synthetic construct
  source 1..21: mol_type = other RNA
ccccatgcccaccacagccga

SEQ ID NO: 83746 - RNA, 21 nt, synthetic construct
  source 1..21: mol_type = other RNA
ccattcttcaacgcctgcata

SEQ ID NO: 83747 - RNA, 21 nt, synthetic construct
  source 1..21: mol_type = other RNA
tgcaggcctgcccctgcgtga

SEQ ID NO: 83748 - RNA, 21 nt, synthetic construct
  source 1..21: mol_type = other RNA
tgcaacacaaccacctgccca

SEQ ID NO: 83749 - RNA, 21 nt, synthetic construct
  source 1..21: mol_type = other RNA
gccagggcaggagtccatcta

SEQ ID NO: 83750 - RNA, 21 nt, synthetic construct
  source 1..21: mol_type = other RNA
cagacctcagctgtgttcgta

SEQ ID NO: 83751 - RNA, 21 nt, synthetic construct
  source 1..21: mol_type = other RNA
catgtgtacctgcctctctga

SEQ ID NO: 83752 - RNA, 21 nt, synthetic construct
  source 1..21: mol_type = other RNA
aggaggatgcctgcaacaata

SEQ ID NO: 83753 - RNA, 21 nt, synthetic construct
  source 1..21: mol_type = other RNA
tacaagagagtggccgggcaa

SEQ ID NO: 83754 - RNA, 21 nt, synthetic construct
  source 1..21: mol_type = other RNA
gtggccgggcagtgctgtgga

SEQ ID NO: 83755 - RNA, 21 nt, synthetic construct
  source 1..21: mol_type = other RNA
ccatttgctgaccccacagca

SEQ ID NO: 83756 - RNA, 21 nt, synthetic construct
  source 1..21: mol_type = other RNA
cttcccggcccaggaggccaa

SEQ ID NO: 83757 - RNA, 21 nt, synthetic construct
  source 1..21: mol_type = other RNA
ccactgctgtctgagaacgta

SEQ ID NO: 83758 - RNA, 21 nt, synthetic construct
  source 1..21: mol_type = other RNA
ccggagcgcccgcgcagcaca

SEQ ID NO: 83759 - RNA, 21 nt, synthetic construct
  source 1..21: mol_type = other RNA
gtccaggcaaggccagctgca

SEQ ID NO: 83760 - RNA, 21 nt, synthetic construct
  source 1..21: mol_type = other RNA
gcccagttttgcaaataaaca

SEQ ID NO: 83761 - RNA, 21 nt, synthetic construct
  source 1..21: mol_type = other RNA
ttgcaaataaaccctgagcaa

SEQ ID NO: 83762 - RNA, 21 nt, synthetic construct
  source 1..21: mol_type = other RNA
tgcaaataaaccctgagcata

SEQ ID NO: 83763 - RNA, 21 nt, synthetic construct
  source 1..21: mol_type = other RNA
cagccatgtggacaactgcaa

SEQ ID NO: 83764 - RNA, 21 nt, synthetic construct
  source 1..21: mol_type = other RNA
caccgcctcctccactctgga

SEQ ID NO: 83765 - RNA, 21 nt, synthetic construct
  source 1..21: mol_type = other RNA
gggtcagcatcccaaagccca

SEQ ID NO: 83766 - RNA, 21 nt, synthetic construct
  source 1..21: mol_type = other RNA
ccggctctgtggccaccccca

SEQ ID NO: 83767 - RNA, 21 nt, synthetic construct
  source 1..21: mol_type = other RNA
ccggctctgtggccaccccca

SEQ ID NO: 83768 - RNA, 21 nt, synthetic construct
  source 1..21: mol_type = other RNA
ccggctctgtggccaccccca

SEQ ID NO: 83769 - RNA, 21 nt, synthetic construct
  source 1..21: mol_type = other RNA
ccggctctgtggccaccccca

SEQ ID NO: 83770 - RNA, 21 nt, synthetic construct
  source 1..21: mol_type = other RNA
ccggctctgtggccaccccca

SEQ ID NO: 83771 - RNA, 21 nt, synthetic construct
  source 1..21: mol_type = other RNA
ctagcacacccacccccacca

SEQ ID NO: 83772 - RNA, 21 nt, synthetic construct
  source 1..21: mol_type = other RNA
agctccccctcccaaagtgca

SEQ ID NO: 83773 - RNA, 21 nt, synthetic construct
  source 1..21: mol_type = other RNA
cggctctgtggccacccccta

SEQ ID NO: 83774 - RNA, 21 nt, synthetic construct
  source 1..21: mol_type = other RNA
cggctctgtggccacccccta

SEQ ID NO: 83775 - RNA, 21 nt, synthetic construct
  source 1..21: mol_type = other RNA
agctccccctcccaaagtgca

SEQ ID NO: 83776 - RNA, 21 nt, synthetic construct
  source 1..21: mol_type = other RNA
cggctctgtggccacccccta

SEQ ID NO: 83777 - RNA, 21 nt, synthetic construct
  source 1..21: mol_type = other RNA
cggctctgtggccacccccta

SEQ ID NO: 83778 - RNA, 21 nt, synthetic construct
  source 1..21: mol_type = other RNA
agctccccctcccaaagtgca

SEQ ID NO: 83779 - RNA, 21 nt, synthetic construct
  source 1..21: mol_type = other RNA
cggctctgtggccacccccta

SEQ ID NO: 83780 - RNA, 21 nt, synthetic construct
  source 1..21: mol_type = other RNA
gccgcctacgaggacttcaaa

SEQ ID NO: 83781 - RNA, 21 nt, synthetic construct
  source 1..21: mol_type = other RNA
cgactgcgagtgtttctgcaa

SEQ ID NO: 83782 - RNA, 21 nt, synthetic construct
  source 1..21: mol_type = other RNA
gaaaagcacagggtgtgcaga

SEQ ID NO: 83783 - RNA, 21 nt, synthetic construct
  source 1..21: mol_type = other RNA
aaaagcacagggtgtgcagca

SEQ ID NO: 83784 - RNA, 21 nt, synthetic construct
  source 1..21: mol_type = other RNA
caccagttccaaagccactta

SEQ ID NO: 83785 - RNA, 21 nt, synthetic construct
  source 1..21: mol_type = other RNA
caccagttccaaagccactta

SEQ ID NO: 83786 - RNA, 21 nt, synthetic construct
  source 1..21: mol_type = other RNA
tgtgcccgcccaggagtgcca

SEQ ID NO: 83787 - RNA, 21 nt, synthetic construct
  source 1..21: mol_type = other RNA
ccgggccacaccagggccaca

SEQ ID NO: 83788 - RNA, 21 nt, synthetic construct
  source 1..21: mol_type = other RNA
tggggcagacaggctggtcca

SEQ ID NO: 83789 - RNA, 21 nt, synthetic construct
  source 1..21: mol_type = other RNA
gccccgcagccccggtgtcta

SEQ ID NO: 83790 - RNA, 21 nt, synthetic construct
  source 1..21: mol_type = other RNA
cccttgactaacaccaccaca

SEQ ID NO: 83791 - RNA, 21 nt, synthetic construct
  source 1..21: mol_type = other RNA
cagccctttccagccctcaca

SEQ ID NO: 83792 - RNA, 21 nt, synthetic construct
  source 1..21: mol_type = other RNA
ggagactttgagacgtttgaa

SEQ ID NO: 83793 - RNA, 21 nt, synthetic construct
  source 1..21: mol_type = other RNA
cccgacatgccgctggaggaa

SEQ ID NO: 83794 - RNA, 21 nt, synthetic construct
  source 1..21: mol_type = other RNA
cttgactaacaccaccaccaa

SEQ ID NO: 83795 - RNA, 21 nt, synthetic construct
  source 1..21: mol_type = other RNA
ggtgacttccactacaagaca

SEQ ID NO: 83796 - RNA, 21 nt, synthetic construct
  source 1..21: mol_type = other RNA
tctgcgaggaccactgtgtga

SEQ ID NO: 83797 - RNA, 21 nt, synthetic construct
  source 1..21: mol_type = other RNA
caggcacagccagcaccgcta

SEQ ID NO: 83798 - RNA, 21 nt, synthetic construct
  source 1..21: mol_type = other RNA
taacaccaccaccagccagga

SEQ ID NO: 83799 - RNA, 21 nt, synthetic construct
  source 1..21: mol_type = other RNA
cacgggcttcacagccaccca

SEQ ID NO: 83800 - RNA, 21 nt, synthetic construct
  source 1..21: mol_type = other RNA
acgggcttcacagccacccca

SEQ ID NO: 83801 - RNA, 21 nt, synthetic construct
  source 1..21: mol_type = other RNA
agccctttccagccctcacca

SEQ ID NO: 83802 - RNA, 21 nt, synthetic construct
  source 1..21: mol_type = other RNA
cacgggcttcacagccaccca

SEQ ID NO: 83803 - RNA, 21 nt, synthetic construct
  source 1..21: mol_type = other RNA
acgggcttcacagccacccca

SEQ ID NO: 83804 - RNA, 21 nt, synthetic construct
  source 1..21: mol_type = other RNA
cacgggcttcacagccaccca

SEQ ID NO: 83805 - RNA, 21 nt, synthetic construct
  source 1..21: mol_type = other RNA
acgggcttcacagccacccca

SEQ ID NO: 83806 - RNA, 21 nt, synthetic construct
  source 1..21: mol_type = other RNA
cacgggcttcacagccaccca

SEQ ID NO: 83807 - RNA, 21 nt, synthetic construct
  source 1..21: mol_type = other RNA
acgggcttcacagccacccca

SEQ ID NO: 83808 - RNA, 21 nt, synthetic construct
  source 1..21: mol_type = other RNA
acattcctgccctgggcgtga

SEQ ID NO: 83809 - RNA, 21 nt, synthetic construct
  source 1..21: mol_type = other RNA
ctaccctgggagagcctgtga

SEQ ID NO: 83810 - RNA, 21 nt, synthetic construct
  source 1..21: mol_type = other RNA
ggtcctctgctgcagtgacga

SEQ ID NO: 83811 - RNA, 21 nt, synthetic construct
  source 1..21: mol_type = other RNA
cccaggacagagacgacaata

SEQ ID NO: 83812 - RNA, 21 nt, synthetic construct
  source 1..21: mol_type = other RNA
tgaccaccacggccactacga

SEQ ID NO: 83813 - RNA, 21 nt, synthetic construct
  source 1..21: mol_type = other RNA
tgaccaccacggccactacga

SEQ ID NO: 83814 - RNA, 21 nt, synthetic construct
  source 1..21: mol_type = other RNA
tgaccaccacggccactacga

SEQ ID NO: 83815 - RNA, 21 nt, synthetic construct
  source 1..21: mol_type = other RNA
tgaccaccacggccactacga

SEQ ID NO: 83816 - RNA, 21 nt, synthetic construct
  source 1..21: mol_type = other RNA
gtccaccatgtccacaatcca

SEQ ID NO: 83817 - RNA, 21 nt, synthetic construct
  source 1..21: mol_type = other RNA
cgtgatggtgcccaccggtta

SEQ ID NO: 83818 - RNA, 21 nt, synthetic construct
  source 1..21: mol_type = other RNA
tctacgcagtgtgcaatcaga

SEQ ID NO: 83819 - RNA, 21 nt, synthetic construct
  source 1..21: mol_type = other RNA
gaggatgcctgcaacaataca

SEQ ID NO: 83820 - RNA, 21 nt, synthetic construct
  source 1..21: mol_type = other RNA
tcctaaatttcccggggagca

SEQ ID NO: 83821 - RNA, 21 nt, synthetic construct
  source 1..21: mol_type = other RNA
ccagagcctggaggcttacga

SEQ ID NO: 83822 - RNA, 21 nt, synthetic construct
  source 1..21: mol_type = other RNA
ccacggccaccacacacggga

SEQ ID NO: 83823 - RNA, 21 nt, synthetic construct
  source 1..21: mol_type = other RNA
ccacggccaccacacacggga

SEQ ID NO: 83824 - RNA, 21 nt, synthetic construct
  source 1..21: mol_type = other RNA
ccacggccaccacacacggga

SEQ ID NO: 83825 - RNA, 21 nt, synthetic construct
  source 1..21: mol_type = other RNA
gggcctatgtgtccctgccaa

SEQ ID NO: 83826 - RNA, 21 nt, synthetic construct
  source 1..21: mol_type = other RNA
ctgtgtgcccgccagggcaga

SEQ ID NO: 83827 - RNA, 21 nt, synthetic construct
  source 1..21: mol_type = other RNA
acatcttggcccaggactaca

SEQ ID NO: 83828 - RNA, 21 nt, synthetic construct
  source 1..21: mol_type = other RNA
ggacctacagctaccaggaca

SEQ ID NO: 83829 - RNA, 21 nt, synthetic construct
  source 1..21: mol_type = other RNA
acccctcctcaactcctggga

SEQ ID NO: 83830 - RNA, 21 nt, synthetic construct
  source 1..21: mol_type = other RNA
gcaccccgcgctccgtgctca

SEQ ID NO: 83831 - RNA, 21 nt, synthetic construct
  source 1..21: mol_type = other RNA
tcccccatcactgaccaccaa

SEQ ID NO: 83832 - RNA, 21 nt, synthetic construct
  source 1..21: mol_type = other RNA
tcccccatcactgaccaccaa

SEQ ID NO: 83833 - RNA, 21 nt, synthetic construct
  source 1..21: mol_type = other RNA
tcccccatcactgaccaccaa

SEQ ID NO: 83834 - RNA, 21 nt, synthetic construct
  source 1..21: mol_type = other RNA
tcccccatcactgaccaccaa

SEQ ID NO: 83835 - RNA, 21 nt, synthetic construct
  source 1..21: mol_type = other RNA
cccgacgtcctcgcccaccca

SEQ ID NO: 83836 - RNA, 21 nt, synthetic construct
  source 1..21: mol_type = other RNA
ccaggcctgccacgacgcgga

SEQ ID NO: 83837 - RNA, 21 nt, synthetic construct
  source 1..21: mol_type = other RNA
ggacacctgccccttgttcta

SEQ ID NO: 83838 - RNA, 21 nt, synthetic construct
  source 1..21: mol_type = other RNA
cgggcggcgcagcttcccgaa

SEQ ID NO: 83839 - RNA, 21 nt, synthetic construct
  source 1..21: mol_type = other RNA
ctcctcaactcctgggacaaa

SEQ ID NO: 83840 - RNA, 21 nt, synthetic construct
  source 1..21: mol_type = other RNA
gttttgcaaataaaccctgaa

SEQ ID NO: 83841 - RNA, 21 nt, synthetic construct
  source 1..21: mol_type = other RNA
ccccgacgtcctcgcccacca

SEQ ID NO: 83842 - RNA, 21 nt, synthetic construct
  source 1..21: mol_type = other RNA
ggctatggcagtgccaggaca

SEQ ID NO: 83843 - RNA, 21 nt, synthetic construct
  source 1..21: mol_type = other RNA
tacatcttggcccaggactaa

SEQ ID NO: 83844 - RNA, 21 nt, synthetic construct
  source 1..21: mol_type = other RNA
ccccgggccacaccaggggca

SEQ ID NO: 83845 - RNA, 21 nt, synthetic construct
  source 1..21: mol_type = other RNA
caacaatactacctgtcccca

SEQ ID NO: 83846 - RNA, 21 nt, synthetic construct
  source 1..21: mol_type = other RNA
cacactaccaaagtgccaaca

SEQ ID NO: 83847 - RNA, 21 nt, synthetic construct
  source 1..21: mol_type = other RNA
gcacctccttcaacaccacca

SEQ ID NO: 83848 - RNA, 21 nt, synthetic construct
  source 1..21: mol_type = other RNA
gtgtgcctggtcagagtggca

SEQ ID NO: 83849 - RNA, 21 nt, synthetic construct
  source 1..21: mol_type = other RNA
gtgtgcctggtcagagtggca

SEQ ID NO: 83850 - RNA, 21 nt, synthetic construct
  source 1..21: mol_type = other RNA
gccacaccaggggcacctcca

SEQ ID NO: 83851 - RNA, 21 nt, synthetic construct
  source 1..21: mol_type = other RNA
gtgtgcctggtcagagtggca

SEQ ID NO: 83852 - RNA, 21 nt, synthetic construct
  source 1..21: mol_type = other RNA
gtgtgcctggtcagagtggca

SEQ ID NO: 83853 - RNA, 21 nt, synthetic construct
  source 1..21: mol_type = other RNA
tcctcatgagagagatccata

SEQ ID NO: 83854 - RNA, 21 nt, synthetic construct
  source 1..21: mol_type = other RNA
ctggtggacagcactgcgtaa

SEQ ID NO: 83855 - RNA, 21 nt, synthetic construct
  source 1..21: mol_type = other RNA
tgttcatgtacgggtgggaaa

SEQ ID NO: 83856 - RNA, 21 nt, synthetic construct
  source 1..21: mol_type = other RNA
cagcgttacagccatccccta

SEQ ID NO: 83857 - RNA, 21 nt, synthetic construct
  source 1..21: mol_type = other RNA
ccgccagttgcaaggacatga

SEQ ID NO: 83858 - RNA, 21 nt, synthetic construct
  source 1..21: mol_type = other RNA
gccccctcaacatgcagcaca

SEQ ID NO: 83859 - RNA, 21 nt, synthetic construct
  source 1..21: mol_type = other RNA
gtggaatgcagcctggactta

SEQ ID NO: 83860 - RNA, 21 nt, synthetic construct
  source 1..21: mol_type = other RNA
gtggaatgcagcctggactta

SEQ ID NO: 83861 - RNA, 21 nt, synthetic construct
  source 1..21: mol_type = other RNA
gtggaatgcagcctggactta

SEQ ID NO: 83862 - RNA, 21 nt, synthetic construct
  source 1..21: mol_type = other RNA
gtggaatgcagcctggactta

SEQ ID NO: 83863 - RNA, 21 nt, synthetic construct
  source 1..21: mol_type = other RNA
acagccaccagttccaaagca

SEQ ID NO: 83864 - RNA, 21 nt, synthetic construct
  source 1..21: mol_type = other RNA
acagccaccagttccaaagca

SEQ ID NO: 83865 - RNA, 21 nt, synthetic construct
  source 1..21: mol_type = other RNA
gggggccagccgcggaactga

SEQ ID NO: 83866 - RNA, 21 nt, synthetic construct
  source 1..21: mol_type = other RNA
gcaagggtccccacagcggaa

SEQ ID NO: 83867 - RNA, 21 nt, synthetic construct
  source 1..21: mol_type = other RNA
agaacagctccccctcccaaa

SEQ ID NO: 83868 - RNA, 21 nt, synthetic construct
  source 1..21: mol_type = other RNA
gtgagcaggtggggaagttca

SEQ ID NO: 83869 - RNA, 21 nt, synthetic construct
  source 1..21: mol_type = other RNA
gtgagcaggtggggaagttca

SEQ ID NO: 83870 - RNA, 21 nt, synthetic construct
  source 1..21: mol_type = other RNA
ggaacagctccccctcccaaa

SEQ ID NO: 83871 - RNA, 21 nt, synthetic construct
  source 1..21: mol_type = other RNA
gccacaccctcctctactcca

SEQ ID NO: 83872 - RNA, 21 nt, synthetic construct
  source 1..21: mol_type = other RNA
gtgagcaggtggggaagttca

SEQ ID NO: 83873 - RNA, 21 nt, synthetic construct
  source 1..21: mol_type = other RNA
gatcctcacaaagctgaccaa

SEQ ID NO: 83874 - RNA, 21 nt, synthetic construct
  source 1..21: mol_type = other RNA
gtgagcaggtggggaagttca

SEQ ID NO: 83875 - RNA, 21 nt, synthetic construct
  source 1..21: mol_type = other RNA
ggaacagctccccctcccaaa

SEQ ID NO: 83876 - RNA, 21 nt, synthetic construct
  source 1..21: mol_type = other RNA
gccgccagttgcaaggacata

SEQ ID NO: 83877 - RNA, 21 nt, synthetic construct
  source 1..21: mol_type = other RNA
cacaactgtggccactggtta

SEQ ID NO: 83878 - RNA, 21 nt, synthetic construct
  source 1..21: mol_type = other RNA
cacaactgtggccactggtta

SEQ ID NO: 83879 - RNA, 21 nt, synthetic construct
  source 1..21: mol_type = other RNA
cacaactgtggccactggtta

SEQ ID NO: 83880 - RNA, 21 nt, synthetic construct
  source 1..21: mol_type = other RNA
cacaactgtggccactggtta

SEQ ID NO: 83881 - RNA, 21 nt, synthetic construct
  source 1..21: mol_type = other RNA
cacaactgtggccactggtta

SEQ ID NO: 83882 - RNA, 21 nt, synthetic construct
  source 1..21: mol_type = other RNA
cctcaactccagggacaacaa

SEQ ID NO: 83883 - RNA, 21 nt, synthetic construct
  source 1..21: mol_type = other RNA
cctcaactccagggacaacaa

SEQ ID NO: 83884 - RNA, 21 nt, synthetic construct
  source 1..21: mol_type = other RNA
cctcaactccagggacaacaa

SEQ ID NO: 83885 - RNA, 21 nt, synthetic construct
  source 1..21: mol_type = other RNA
cgccagttgcaaggacatgga

SEQ ID NO: 83886 - RNA, 21 nt, synthetic construct
  source 1..21: mol_type = other RNA
cggtgacttcccacaccctaa

SEQ ID NO: 83887 - RNA, 21 nt, synthetic construct
  source 1..21: mol_type = other RNA
tctacggccacgccctcctca

SEQ ID NO: 83888 - RNA, 21 nt, synthetic construct
  source 1..21: mol_type = other RNA
tctacggccacgccctcctca

SEQ ID NO: 83889 - RNA, 21 nt, synthetic construct
  source 1..21: mol_type = other RNA
ctgcaggaaccggaggtggga

SEQ ID NO: 83890 - RNA, 21 nt, synthetic construct
  source 1..21: mol_type = other RNA
ggcatctgccaccgcacccta

SEQ ID NO: 83891 - RNA, 21 nt, synthetic construct
  source 1..21: mol_type = other RNA
ctgcccagatgtgtccagcta

SEQ ID NO: 83892 - RNA, 21 nt, synthetic construct
  source 1..21: mol_type = other RNA
tgcaagggtccccacagcgga

SEQ ID NO: 83893 - RNA, 21 nt, synthetic construct
  source 1..21: mol_type = other RNA
actccggagaccacccacaca

SEQ ID NO: 83894 - RNA, 21 nt, synthetic construct
  source 1..21: mol_type = other RNA
actccggagaccacccacaca

SEQ ID NO: 83895 - RNA, 21 nt, synthetic construct
  source 1..21: mol_type = other RNA
cacacccgtggccaccatgta

SEQ ID NO: 83896 - RNA, 21 nt, synthetic construct
  source 1..21: mol_type = other RNA
gcagtccccaccctctcagaa

SEQ ID NO: 83897 - RNA, 21 nt, synthetic construct
  source 1..21: mol_type = other RNA
accagggccaccggctctgta

SEQ ID NO: 83898 - RNA, 21 nt, synthetic construct
  source 1..21: mol_type = other RNA
accagggccaccggctctgta

SEQ ID NO: 83899 - RNA, 21 nt, synthetic construct
  source 1..21: mol_type = other RNA
agtcctcaccaccctgagaca

SEQ ID NO: 83900 - RNA, 21 nt, synthetic construct
  source 1..21: mol_type = other RNA
ctgtgacaatgccatccctca

SEQ ID NO: 83901 - RNA, 21 nt, synthetic construct
  source 1..21: mol_type = other RNA
accttcccaggcgcccttcca

SEQ ID NO: 83902 - RNA, 21 nt, synthetic construct
  source 1..21: mol_type = other RNA
ggctcctggagaggtggtgca

SEQ ID NO: 83903 - RNA, 21 nt, synthetic construct
  source 1..21: mol_type = other RNA
ctgtccacctctcaggccgaa

SEQ ID NO: 83904 - RNA, 21 nt, synthetic construct
  source 1..21: mol_type = other RNA
accggggccaccggctctgta

SEQ ID NO: 83905 - RNA, 21 nt, synthetic construct
  source 1..21: mol_type = other RNA
tccacggccatcccgtcctca

SEQ ID NO: 83906 - RNA, 21 nt, synthetic construct
  source 1..21: mol_type = other RNA
ccacccgggcaactgctggca

SEQ ID NO: 83907 - RNA, 21 nt, synthetic construct
  source 1..21: mol_type = other RNA
ctccctgggcaccgcctggaa

SEQ ID NO: 83908 - RNA, 21 nt, synthetic construct
  source 1..21: mol_type = other RNA
accggggccaccggctctgta

SEQ ID NO: 83909 - RNA, 21 nt, synthetic construct
  source 1..21: mol_type = other RNA
aagggccaccaattccacgga

SEQ ID NO: 83910 - RNA, 21 nt, synthetic construct
  source 1..21: mol_type = other RNA
gccacaaccttgtgcccccga

SEQ ID NO: 83911 - RNA, 21 nt, synthetic construct
  source 1..21: mol_type = other RNA
tacggggttggtgcaacctta

SEQ ID NO: 83912 - RNA, 21 nt, synthetic construct
  source 1..21: mol_type = other RNA
cgcccttccctgccacatgta

SEQ ID NO: 83913 - RNA, 21 nt, synthetic construct
  source 1..21: mol_type = other RNA
aggcaaggcggccgcctgtca

SEQ ID NO: 83914 - RNA, 21 nt, synthetic construct
  source 1..21: mol_type = other RNA
taactcagggctgaggtcgca

SEQ ID NO: 83915 - RNA, 21 nt, synthetic construct
  source 1..21: mol_type = other RNA
actggtggacagcactgcgta

SEQ ID NO: 83916 - RNA, 21 nt, synthetic construct
  source 1..21: mol_type = other RNA
cgggcacctccttcaacacca

SEQ ID NO: 83917 - RNA, 21 nt, synthetic construct
  source 1..21: mol_type = other RNA
accaccgccaccacacctgca

SEQ ID NO: 83918 - RNA, 21 nt, synthetic construct
  source 1..21: mol_type = other RNA
accaccgccaccacacctgca

SEQ ID NO: 83919 - RNA, 21 nt, synthetic construct
  source 1..21: mol_type = other RNA
accaccgccaccacacctgca

SEQ ID NO: 83920 - RNA, 21 nt, synthetic construct
  source 1..21: mol_type = other RNA
accaccgccaccacacctgca

SEQ ID NO: 83921 - RNA, 21 nt, synthetic construct
  source 1..21: mol_type = other RNA
tgcaatgtcaggaggatgcca

SEQ ID NO: 83922 - RNA, 21 nt, synthetic construct
  source 1..21: mol_type = other RNA
ctgagccccctgaacccggca

SEQ ID NO: 83923 - RNA, 21 nt, synthetic construct
  source 1..21: mol_type = other RNA
aactctacgacctgcatggta

SEQ ID NO: 83924 - RNA, 21 nt, synthetic construct
  source 1..21: mol_type = other RNA
caccccctcggccccaggtaa

SEQ ID NO: 83925 - RNA, 21 nt, synthetic construct
  source 1..21: mol_type = other RNA
gggggagttgggccaggtcga

SEQ ID NO: 83926 - RNA, 21 nt, synthetic construct
  source 1..21: mol_type = other RNA
tccaagtactcagcagaggca

SEQ ID NO: 83927 - RNA, 21 nt, synthetic construct
  source 1..21: mol_type = other RNA
acagctcagcgactggaggga

SEQ ID NO: 83928 - RNA, 21 nt, synthetic construct
  source 1..21: mol_type = other RNA
accaccgcctgggtcccccaa

SEQ ID NO: 83929 - RNA, 21 nt, synthetic construct
  source 1..21: mol_type = other RNA
tccacggccaccccgtcctca

SEQ ID NO: 83930 - RNA, 21 nt, synthetic construct
  source 1..21: mol_type = other RNA
cccacggccaccccgtcctca

SEQ ID NO: 83931 - RNA, 21 nt, synthetic construct
  source 1..21: mol_type = other RNA
tccacggccaccccgtcctca

SEQ ID NO: 83932 - RNA, 21 nt, synthetic construct
  source 1..21: mol_type = other RNA
tccacggccaccccgtcctca

SEQ ID NO: 83933 - RNA, 21 nt, synthetic construct
  source 1..21: mol_type = other RNA
cccacggccaccccgtcctca

SEQ ID NO: 83934 - RNA, 21 nt, synthetic construct
  source 1..21: mol_type = other RNA
tccacggccaccccgtcctca

SEQ ID NO: 83935 - RNA, 21 nt, synthetic construct
  source 1..21: mol_type = other RNA
gccaagtcttccaggcccgga

SEQ ID NO: 83936 - RNA, 21 nt, synthetic construct
  source 1..21: mol_type = other RNA
gggagaatgcagggcacacca

SEQ ID NO: 83937 - RNA, 21 nt, synthetic construct
  source 1..21: mol_type = other RNA
tgcagggcacaccatggatga

SEQ ID NO: 83938 - RNA, 21 nt, synthetic construct
  source 1..21: mol_type = other RNA
agtgtggctcaccctgcacga

SEQ ID NO: 83939 - RNA, 21 nt, synthetic construct
  source 1..21: mol_type = other RNA
agcgcgcgcagctctgcgaga

SEQ ID NO: 83940 - RNA, 21 nt, synthetic construct
  source 1..21: mol_type = other RNA
gcccgggcacctccttcaaca

SEQ ID NO: 83941 - RNA, 21 nt, synthetic construct
  source 1..21: mol_type = other RNA
agggcggggcccacatctcca

SEQ ID NO: 83942 - RNA, 21 nt, synthetic construct
  source 1..21: mol_type = other RNA
cgctgccactccatcatcaaa

SEQ ID NO: 83943 - RNA, 21 nt, synthetic construct
  source 1..21: mol_type = other RNA
taaggcggtggcgagagggca

SEQ ID NO: 83944 - RNA, 21 nt, synthetic construct
  source 1..21: mol_type = other RNA
agggccgggtggggacccaca

SEQ ID NO: 83945 - RNA, 21 nt, synthetic construct
  source 1..21: mol_type = other RNA
tgggtccagctcaggccccga

SEQ ID NO: 83946 - RNA, 21 nt, synthetic construct
  source 1..21: mol_type = other RNA
gcctgcaggctccacagaaca

SEQ ID NO: 83947 - RNA, 21 nt, synthetic construct
  source 1..21: mol_type = other RNA
accagcacgcccaggacagaa

SEQ ID NO: 83948 - RNA, 21 nt, synthetic construct
  source 1..21: mol_type = other RNA
ccaccctgagaacagctccca

SEQ ID NO: 83949 - RNA, 21 nt, synthetic construct
  source 1..21: mol_type = other RNA
actggggccaccggctctgta

SEQ ID NO: 83950 - RNA, 21 nt, synthetic construct
  source 1..21: mol_type = other RNA
agaggctccacggtgacccca

SEQ ID NO: 83951 - RNA, 21 nt, synthetic construct
  source 1..21: mol_type = other RNA
gaccaccacggccactacgaa

SEQ ID NO: 83952 - RNA, 21 nt, synthetic construct
  source 1..21: mol_type = other RNA
gacaactcccatccccccaga

SEQ ID NO: 83953 - RNA, 21 nt, synthetic construct
  source 1..21: mol_type = other RNA
gcgcacagcctggacttcgga

SEQ ID NO: 83954 - RNA, 21 nt, synthetic construct
  source 1..21: mol_type = other RNA
tccagccctcaccctagcaga

SEQ ID NO: 83955 - RNA, 21 nt, synthetic construct
  source 1..21: mol_type = other RNA
actgctggcaccccacatgta

SEQ ID NO: 83956 - RNA, 21 nt, synthetic construct
  source 1..21: mol_type = other RNA
gaccaccacggccactacgaa

SEQ ID NO: 83957 - RNA, 21 nt, synthetic construct
  source 1..21: mol_type = other RNA
caccagcagcacagtgactca

SEQ ID NO: 83958 - RNA, 21 nt, synthetic construct
  source 1..21: mol_type = other RNA
gcgcacagcctggacttcgga

SEQ ID NO: 83959 - RNA, 21 nt, synthetic construct
  source 1..21: mol_type = other RNA
cggccacctcaggcaccttga

SEQ ID NO: 83960 - RNA, 21 nt, synthetic construct
  source 1..21: mol_type = other RNA
tccagccctcaccctagcaga

SEQ ID NO: 83961 - RNA, 21 nt, synthetic construct
  source 1..21: mol_type = other RNA
ccaccagctctacggccacga

SEQ ID NO: 83962 - RNA, 21 nt, synthetic construct
  source 1..21: mol_type = other RNA
agaccacagcagccactacga

SEQ ID NO: 83963 - RNA, 21 nt, synthetic construct
  source 1..21: mol_type = other RNA
accaaatccacagctaccaga

SEQ ID NO: 83964 - RNA, 21 nt, synthetic construct
  source 1..21: mol_type = other RNA
cgcctcctccacccgggcaaa

SEQ ID NO: 83965 - RNA, 21 nt, synthetic construct
  source 1..21: mol_type = other RNA
acaaccagggccaccggctca

SEQ ID NO: 83966 - RNA, 21 nt, synthetic construct
  source 1..21: mol_type = other RNA
agaggctccacggtgacccca

SEQ ID NO: 83967 - RNA, 21 nt, synthetic construct
  source 1..21: mol_type = other RNA
gaccaccacggccactacgaa

SEQ ID NO: 83968 - RNA, 21 nt, synthetic construct
  source 1..21: mol_type = other RNA
gacaactcccatccccccaga

SEQ ID NO: 83969 - RNA, 21 nt, synthetic construct
  source 1..21: mol_type = other RNA
caccagcagcacagtgactca

SEQ ID NO: 83970 - RNA, 21 nt, synthetic construct
  source 1..21: mol_type = other RNA
gcgcacagcctggacttcgga

SEQ ID NO: 83971 - RNA, 21 nt, synthetic construct
  source 1..21: mol_type = other RNA
tccagccctcaccctagcaga

SEQ ID NO: 83972 - RNA, 21 nt, synthetic construct
  source 1..21: mol_type = other RNA
ccaccagctctacggccacga

SEQ ID NO: 83973 - RNA, 21 nt, synthetic construct
  source 1..21: mol_type = other RNA
actgctggcaccccacatgta

SEQ ID NO: 83974 - RNA, 21 nt, synthetic construct
  source 1..21: mol_type = other RNA
acaaccagggccaccggctca

SEQ ID NO: 83975 - RNA, 21 nt, synthetic construct
  source 1..21: mol_type = other RNA
gatcaccacggccactacgaa

SEQ ID NO: 83976 - RNA, 21 nt, synthetic construct
  source 1..21: mol_type = other RNA
caccagcagcacagtgactca

SEQ ID NO: 83977 - RNA, 21 nt, synthetic construct
  source 1..21: mol_type = other RNA
gcgcacagcctggacttcgga

SEQ ID NO: 83978 - RNA, 21 nt, synthetic construct
  source 1..21: mol_type = other RNA
cggccacctcaggcaccttga

SEQ ID NO: 83979 - RNA, 21 nt, synthetic construct
  source 1..21: mol_type = other RNA
tccagccctcaccctagcaga

SEQ ID NO: 83980 - RNA, 21 nt, synthetic construct
  source 1..21: mol_type = other RNA
acccccttccccagggacgaa

SEQ ID NO: 83981 - RNA, 21 nt, synthetic construct
  source 1..21: mol_type = other RNA
cccccttccccagggacgaca

SEQ ID NO: 83982 - RNA, 21 nt, synthetic construct
  source 1..21: mol_type = other RNA
accaaatccacagctaccaga

SEQ ID NO: 83983 - RNA, 21 nt, synthetic construct
  source 1..21: mol_type = other RNA
actgctggcaccccacatgta

SEQ ID NO: 83984 - RNA, 21 nt, synthetic construct
  source 1..21: mol_type = other RNA
tgcaactgcccttccagcaca

SEQ ID NO: 83985 - RNA, 21 nt, synthetic construct
  source 1..21: mol_type = other RNA
gaccaccacggccactacgaa

SEQ ID NO: 83986 - RNA, 21 nt, synthetic construct
  source 1..21: mol_type = other RNA
ccctcctccaccctgtggaca

SEQ ID NO: 83987 - RNA, 21 nt, synthetic construct
  source 1..21: mol_type = other RNA
cagaccaccacacccatgtca

SEQ ID NO: 83988 - RNA, 21 nt, synthetic construct
  source 1..21: mol_type = other RNA
tccccaccgccagtgtcctca

SEQ ID NO: 83989 - RNA, 21 nt, synthetic construct
  source 1..21: mol_type = other RNA
atctgcagcatgtggggcgga

SEQ ID NO: 83990 - RNA, 21 nt, synthetic construct
  source 1..21: mol_type = other RNA
tttgggaatctcagcctctaa

SEQ ID NO: 83991 - RNA, 21 nt, synthetic construct
  source 1..21: mol_type = other RNA
ctacctggacaaccactacta

SEQ ID NO: 83992 - RNA, 21 nt, synthetic construct
  source 1..21: mol_type = other RNA
ccaagtcttccaggcccggca

SEQ ID NO: 83993 - RNA, 21 nt, synthetic construct
  source 1..21: mol_type = other RNA
gccagttgcaaggacatggca

SEQ ID NO: 83994 - RNA, 21 nt, synthetic construct
  source 1..21: mol_type = other RNA
gctgggccccgactggcacaa

SEQ ID NO: 83995 - RNA, 21 nt, synthetic construct
  source 1..21: mol_type = other RNA
cccaccacagccgctctgtga

SEQ ID NO: 83996 - RNA, 21 nt, synthetic construct
  source 1..21: mol_type = other RNA
accacagccgctctgtgatca

SEQ ID NO: 83997 - RNA, 21 nt, synthetic construct
  source 1..21: mol_type = other RNA
gccttgaggtgccctgccaga

SEQ ID NO: 83998 - RNA, 21 nt, synthetic construct
  source 1..21: mol_type = other RNA
ccagggcaggagtccatctga

SEQ ID NO: 83999 - RNA, 21 nt, synthetic construct
  source 1..21: mol_type = other RNA
acctgtccccagggctttgaa

SEQ ID NO: 84000 - RNA, 21 nt, synthetic construct
  source 1..21: mol_type = other RNA
accgcctgcctcacgcccgaa

SEQ ID NO: 84001 - RNA, 21 nt, synthetic construct
  source 1..21: mol_type = other RNA
tgatcatgaaaaccttgggca

SEQ ID NO: 84002 - RNA, 21 nt, synthetic construct
  source 1..21: mol_type = other RNA
actcaggagtcctaccctgga

SEQ ID NO: 84003 - RNA, 21 nt, synthetic construct
  source 1..21: mol_type = other RNA
ctcagggctgaggtcgcaaca

SEQ ID NO: 84004 - RNA, 21 nt, synthetic construct
  source 1..21: mol_type = other RNA
tccaacccccagcgcgcgcaa

SEQ ID NO: 84005 - RNA, 21 nt, synthetic construct
  source 1..21: mol_type = other RNA
gctgaccacgaaggccaccaa

SEQ ID NO: 84006 - RNA, 21 nt, synthetic construct
  source 1..21: mol_type = other RNA
gctgaccacgaaggccaccaa

SEQ ID NO: 84007 - RNA, 21 nt, synthetic construct
  source 1..21: mol_type = other RNA
cgccagagtgctgaccaccaa

SEQ ID NO: 84008 - RNA, 21 nt, synthetic construct
  source 1..21: mol_type = other RNA
agctccaaagccactccctta

SEQ ID NO: 84009 - RNA, 21 nt, synthetic construct
  source 1..21: mol_type = other RNA
agctccaaagccactccctta

SEQ ID NO: 84010 - RNA, 21 nt, synthetic construct
  source 1..21: mol_type = other RNA
actgtggggacaacaccacca

SEQ ID NO: 84011 - RNA, 21 nt, synthetic construct
  source 1..21: mol_type = other RNA
caccccggccaccagctctaa

SEQ ID NO: 84012 - RNA, 21 nt, synthetic construct
  source 1..21: mol_type = other RNA
caccccggccaccagctctaa

SEQ ID NO: 84013 - RNA, 21 nt, synthetic construct
  source 1..21: mol_type = other RNA
caccccggccaccagctctaa

SEQ ID NO: 84014 - RNA, 21 nt, synthetic construct
  source 1..21: mol_type = other RNA
cacggtgaccccctcctccga

SEQ ID NO: 84015 - RNA, 21 nt, synthetic construct
  source 1..21: mol_type = other RNA
caccccggccaccagctctaa

SEQ ID NO: 84016 - RNA, 21 nt, synthetic construct
  source 1..21: mol_type = other RNA
gccagagtgctgaccaccaca

SEQ ID NO: 84017 - RNA, 21 nt, synthetic construct
  source 1..21: mol_type = other RNA
acagaccaccacacccacgga

SEQ ID NO: 84018 - RNA, 21 nt, synthetic construct
  source 1..21: mol_type = other RNA
ccagccctcaccctagcagca

SEQ ID NO: 84019 - RNA, 21 nt, synthetic construct
  source 1..21: mol_type = other RNA
acagaccaccacacccacgga

SEQ ID NO: 84020 - RNA, 21 nt, synthetic construct
  source 1..21: mol_type = other RNA
ccagccctcaccctagcagca

SEQ ID NO: 84021 - RNA, 21 nt, synthetic construct
  source 1..21: mol_type = other RNA
ccacagcagccactacgacca

SEQ ID NO: 84022 - RNA, 21 nt, synthetic construct
  source 1..21: mol_type = other RNA
cagccaccagttccaaagcca

SEQ ID NO: 84023 - RNA, 21 nt, synthetic construct
  source 1..21: mol_type = other RNA
acagaccaccacacccacgga

SEQ ID NO: 84024 - RNA, 21 nt, synthetic construct
  source 1..21: mol_type = other RNA
cctctactccagagactgtca

SEQ ID NO: 84025 - RNA, 21 nt, synthetic construct
  source 1..21: mol_type = other RNA
ccagccctcaccctagcagca

SEQ ID NO: 84026 - RNA, 21 nt, synthetic construct
  source 1..21: mol_type = other RNA
acagaccaccacacccacgga

SEQ ID NO: 84027 - RNA, 21 nt, synthetic construct
  source 1..21: mol_type = other RNA
ccagccctcaccctagcagca

SEQ ID NO: 84028 - RNA, 21 nt, synthetic construct
  source 1..21: mol_type = other RNA
cagccaccagttccaaagcca

SEQ ID NO: 84029 - RNA, 21 nt, synthetic construct
  source 1..21: mol_type = other RNA
acagaccaccacacccacgga

SEQ ID NO: 84030 - RNA, 21 nt, synthetic construct
  source 1..21: mol_type = other RNA
gcagaaaggatggctgctgga

SEQ ID NO: 84031 - RNA, 21 nt, synthetic construct
  source 1..21: mol_type = other RNA
cagggcaggagtccatctgca

SEQ ID NO: 84032 - RNA, 21 nt, synthetic construct
  source 1..21: mol_type = other RNA
ccagctgaatgaaacctggga

SEQ ID NO: 84033 - RNA, 21 nt, synthetic construct
  source 1..21: mol_type = other RNA
aacgccaggctgaccccgcta

SEQ ID NO: 84034 - RNA, 21 nt, synthetic construct
  source 1..21: mol_type = other RNA
gcctggtcagagtggctggaa

SEQ ID NO: 84035 - RNA, 21 nt, synthetic construct
  source 1..21: mol_type = other RNA
gcctggtcagagtggctggaa

SEQ ID NO: 84036 - RNA, 21 nt, synthetic construct
  source 1..21: mol_type = other RNA
gcctggtcagagtggctggaa

SEQ ID NO: 84037 - RNA, 21 nt, synthetic construct
  source 1..21: mol_type = other RNA
gcctggtcagagtggctggaa

SEQ ID NO: 84038 - RNA, 21 nt, synthetic construct
  source 1..21: mol_type = other RNA
tggaggggatggcggagggca

SEQ ID NO: 84039 - RNA, 21 nt, synthetic construct
  source 1..21: mol_type = other RNA
acctgcaggaaccggaggtga

SEQ ID NO: 84040 - RNA, 21 nt, synthetic construct
  source 1..21: mol_type = other RNA
gacacctgccccttgttctga

SEQ ID NO: 84041 - RNA, 21 nt, synthetic construct
  source 1..21: mol_type = other RNA
ggcctgggaggcggagactta

SEQ ID NO: 84042 - RNA, 21 nt, synthetic construct
  source 1..21: mol_type = other RNA
ctccaaagccactcccttcta

SEQ ID NO: 84043 - RNA, 21 nt, synthetic construct
  source 1..21: mol_type = other RNA
cccatggccaccatgtccaca

SEQ ID NO: 84044 - RNA, 21 nt, synthetic construct
  source 1..21: mol_type = other RNA
ctccaaagccactcccttcta

SEQ ID NO: 84045 - RNA, 21 nt, synthetic construct
  source 1..21: mol_type = other RNA
tcctcactgtcaccatggtga

SEQ ID NO: 84046 - RNA, 21 nt, synthetic construct
  source 1..21: mol_type = other RNA
gtgaggaggactcctgtcaaa

SEQ ID NO: 84047 - RNA, 21 nt, synthetic construct
  source 1..21: mol_type = other RNA
ctggtccaggcaaggccagca

SEQ ID NO: 84048 - RNA, 21 nt, synthetic construct
  source 1..21: mol_type = other RNA
cttccgcttccctggccttta

SEQ ID NO: 84049 - RNA, 21 nt, synthetic construct
  source 1..21: mol_type = other RNA
cggccaccacacccacagtca

SEQ ID NO: 84050 - RNA, 21 nt, synthetic construct
  source 1..21: mol_type = other RNA
cccacaaccagaggctccaca

SEQ ID NO: 84051 - RNA, 21 nt, synthetic construct
  source 1..21: mol_type = other RNA
cagtgtgcctggtcagagtga

SEQ ID NO: 84052 - RNA, 21 nt, synthetic construct
  source 1..21: mol_type = other RNA
cagcccagggacggcacgcaa

SEQ ID NO: 84053 - RNA, 21 nt, synthetic construct
  source 1..21: mol_type = other RNA
cagtgtgcctggtcagagtga

SEQ ID NO: 84054 - RNA, 21 nt, synthetic construct
  source 1..21: mol_type = other RNA
cccaaagtgctgaccagcaca

SEQ ID NO: 84055 - RNA, 21 nt, synthetic construct
  source 1..21: mol_type = other RNA
ccaaagtgctgaccagcacga

SEQ ID NO: 84056 - RNA, 21 nt, synthetic construct
  source 1..21: mol_type = other RNA
tcaaagtgctgaccagcacga

SEQ ID NO: 84057 - RNA, 21 nt, synthetic construct
  source 1..21: mol_type = other RNA
cggccaccacacccacagtca

SEQ ID NO: 84058 - RNA, 21 nt, synthetic construct
  source 1..21: mol_type = other RNA
cccacaaccagaggctccaca

SEQ ID NO: 84059 - RNA, 21 nt, synthetic construct
  source 1..21: mol_type = other RNA
cagtgtgcctggtcagagtga

SEQ ID NO: 84060 - RNA, 21 nt, synthetic construct
  source 1..21: mol_type = other RNA
cagcccagggacggcacgcaa

SEQ ID NO: 84061 - RNA, 21 nt, synthetic construct
  source 1..21: mol_type = other RNA
cagtgtgcctggtcagagtga

SEQ ID NO: 84062 - RNA, 21 nt, synthetic construct
  source 1..21: mol_type = other RNA
agggcgcctgtcccacctcca

SEQ ID NO: 84063 - RNA, 21 nt, synthetic construct
  source 1..21: mol_type = other RNA
caatgtcaggaggatgcctga

SEQ ID NO: 84064 - RNA, 21 nt, synthetic construct
  source 1..21: mol_type = other RNA
atgcctgctgcagggtaacta

SEQ ID NO: 84065 - RNA, 21 nt, synthetic construct
  source 1..21: mol_type = other RNA
acccttggtacagccaccaca

SEQ ID NO: 84066 - RNA, 21 nt, synthetic construct
  source 1..21: mol_type = other RNA
caccatggccaccacacacga

SEQ ID NO: 84067 - RNA, 21 nt, synthetic construct
  source 1..21: mol_type = other RNA
gactgagtccactggatccaa

SEQ ID NO: 84068 - RNA, 21 nt, synthetic construct
  source 1..21: mol_type = other RNA
gactgagtccactggatccaa

SEQ ID NO: 84069 - RNA, 21 nt, synthetic construct
  source 1..21: mol_type = other RNA
ggccacgtccggccgctggga

SEQ ID NO: 84070 - RNA, 21 nt, synthetic construct
  source 1..21: mol_type = other RNA
ccctgtggagccgagctggga

SEQ ID NO: 84071 - RNA, 21 nt, synthetic construct
  source 1..21: mol_type = other RNA
gagctgggagaatgcagggca

SEQ ID NO: 84072 - RNA, 21 nt, synthetic construct
  source 1..21: mol_type = other RNA
cccccagcgcgcgcagctcta

SEQ ID NO: 84073 - RNA, 21 nt, synthetic construct
  source 1..21: mol_type = other RNA
gactgcagcaacagctcggca

SEQ ID NO: 84074 - RNA, 21 nt, synthetic construct
  source 1..21: mol_type = other RNA
aacaccacccacgggacctta

SEQ ID NO: 84075 - RNA, 21 nt, synthetic construct
  source 1..21: mol_type = other RNA
gcctgggaggcggagacttta

SEQ ID NO: 84076 - RNA, 21 nt, synthetic construct
  source 1..21: mol_type = other RNA
actacaggatccgggtcctca

SEQ ID NO: 84077 - RNA, 21 nt, synthetic construct
  source 1..21: mol_type = other RNA
acacccacagctaccagcgta

SEQ ID NO: 84078 - RNA, 21 nt, synthetic construct
  source 1..21: mol_type = other RNA
accacacccacggccaccata

SEQ ID NO: 84079 - RNA, 21 nt, synthetic construct
  source 1..21: mol_type = other RNA
tccacagtgcttaccgccaca

SEQ ID NO: 84080 - RNA, 21 nt, synthetic construct
  source 1..21: mol_type = other RNA
caccagcaacacagtgactca

SEQ ID NO: 84081 - RNA, 21 nt, synthetic construct
  source 1..21: mol_type = other RNA
accacccacatcacagagcca

SEQ ID NO: 84082 - RNA, 21 nt, synthetic construct
  source 1..21: mol_type = other RNA
cccatgccggggccctctgga

SEQ ID NO: 84083 - RNA, 21 nt, synthetic construct
  source 1..21: mol_type = other RNA
accacacccacggccaccata

SEQ ID NO: 84084 - RNA, 21 nt, synthetic construct
  source 1..21: mol_type = other RNA
ccagcccagggacggcacgca

SEQ ID NO: 84085 - RNA, 21 nt, synthetic construct
  source 1..21: mol_type = other RNA
ccacacccacaaccagaggta

SEQ ID NO: 84086 - RNA, 21 nt, synthetic construct
  source 1..21: mol_type = other RNA
cacctcaggcaccttgggcaa

SEQ ID NO: 84087 - RNA, 21 nt, synthetic construct
  source 1..21: mol_type = other RNA
accacccacatcacagagcca

SEQ ID NO: 84088 - RNA, 21 nt, synthetic construct
  source 1..21: mol_type = other RNA
cccatgccggggccctctgga

SEQ ID NO: 84089 - RNA, 21 nt, synthetic construct
  source 1..21: mol_type = other RNA
ccccgggaacagctcccccta

SEQ ID NO: 84090 - RNA, 21 nt, synthetic construct
  source 1..21: mol_type = other RNA
cacacccatggccaccatgta

SEQ ID NO: 84091 - RNA, 21 nt, synthetic construct
  source 1..21: mol_type = other RNA
acaagggccaccagttccata

SEQ ID NO: 84092 - RNA, 21 nt, synthetic construct
  source 1..21: mol_type = other RNA
acacccacagctaccagcgta

SEQ ID NO: 84093 - RNA, 21 nt, synthetic construct
  source 1..21: mol_type = other RNA
accacacccacggccaccata

SEQ ID NO: 84094 - RNA, 21 nt, synthetic construct
  source 1..21: mol_type = other RNA
accctcctctactccagagaa

SEQ ID NO: 84095 - RNA, 21 nt, synthetic construct
  source 1..21: mol_type = other RNA
accacccacatcacagagcca

SEQ ID NO: 84096 - RNA, 21 nt, synthetic construct
  source 1..21: mol_type = other RNA
cccatgccggggccctctgga

SEQ ID NO: 84097 - RNA, 21 nt, synthetic construct
  source 1..21: mol_type = other RNA
accacacccacggccaccata

SEQ ID NO: 84098 - RNA, 21 nt, synthetic construct
  source 1..21: mol_type = other RNA
ccagcccagggacggcacgca

SEQ ID NO: 84099 - RNA, 21 nt, synthetic construct
  source 1..21: mol_type = other RNA
cacctcaggcaccttgggcaa

SEQ ID NO: 84100 - RNA, 21 nt, synthetic construct
  source 1..21: mol_type = other RNA
accacccacatcacagagcca

SEQ ID NO: 84101 - RNA, 21 nt, synthetic construct
  source 1..21: mol_type = other RNA
cccatgccggggccctctgga

SEQ ID NO: 84102 - RNA, 21 nt, synthetic construct
  source 1..21: mol_type = other RNA
ccccgggaacagctcccccta

SEQ ID NO: 84103 - RNA, 21 nt, synthetic construct
  source 1..21: mol_type = other RNA
accacacccacggccaccata

SEQ ID NO: 84104 - RNA, 21 nt, synthetic construct
  source 1..21: mol_type = other RNA
tccacagtgcttaccgccaca

SEQ ID NO: 84105 - RNA, 21 nt, synthetic construct
  source 1..21: mol_type = other RNA
accacaacagccactacaaca

SEQ ID NO: 84106 - RNA, 21 nt, synthetic construct
  source 1..21: mol_type = other RNA
caccaccctgagacccactga

SEQ ID NO: 84107 - RNA, 21 nt, synthetic construct
  source 1..21: mol_type = other RNA
gccagtgtcctccgccccgca

SEQ ID NO: 84108 - RNA, 21 nt, synthetic construct
  source 1..21: mol_type = other RNA
gacgtggctggtccccgacaa

SEQ ID NO: 84109 - RNA, 21 nt, synthetic construct
  source 1..21: mol_type = other RNA
aaccttcccaggcgcccttca

SEQ ID NO: 84110 - RNA, 21 nt, synthetic construct
  source 1..21: mol_type = other RNA
tgcccagatgtgtccagctga

SEQ ID NO: 84111 - RNA, 21 nt, synthetic construct
  source 1..21: mol_type = other RNA
gccaggtcagagaggggtcaa

SEQ ID NO: 84112 - RNA, 21 nt, synthetic construct
  source 1..21: mol_type = other RNA
ataaaccctgagcattgagta

SEQ ID NO: 84113 - RNA, 21 nt, synthetic construct
  source 1..21: mol_type = other RNA
tcttccgcttccctggcctta

SEQ ID NO: 84114 - RNA, 21 nt, synthetic construct
  source 1..21: mol_type = other RNA
ccgcaccctgctggggccgga

SEQ ID NO: 84115 - RNA, 21 nt, synthetic construct
  source 1..21: mol_type = other RNA
atcacgcactctggctgccta

SEQ ID NO: 84116 - RNA, 21 nt, synthetic construct
  source 1..21: mol_type = other RNA
tgccgcggcctgagtgaggca

SEQ ID NO: 84117 - RNA, 21 nt, synthetic construct
  source 1..21: mol_type = other RNA
gtcccccggggctggtgtcga

SEQ ID NO: 84118 - RNA, 21 nt, synthetic construct
  source 1..21: mol_type = other RNA
gagtgggggctgcattgccga

SEQ ID NO: 84119 - RNA, 21 nt, synthetic construct
  source 1..21: mol_type = other RNA
cgacaatgccatcaatgacta

SEQ ID NO: 84120 - RNA, 21 nt, synthetic construct
  source 1..21: mol_type = other RNA
cccttgttctgtgacttctaa

SEQ ID NO: 84121 - RNA, 21 nt, synthetic construct
  source 1..21: mol_type = other RNA
ctgggtccagctcaggcccca

SEQ ID NO: 84122 - RNA, 21 nt, synthetic construct
  source 1..21: mol_type = other RNA
accccctcggccccaggtaca

SEQ ID NO: 84123 - RNA, 21 nt, synthetic construct
  source 1..21: mol_type = other RNA
cagggccgctggagggcacta

SEQ ID NO: 84124 - RNA, 21 nt, synthetic construct
  source 1..21: mol_type = other RNA
cgggtcctctgctgcagtgaa

SEQ ID NO: 84125 - RNA, 21 nt, synthetic construct
  source 1..21: mol_type = other RNA
tacgagtagcccggggctgaa

SEQ ID NO: 84126 - RNA, 21 nt, synthetic construct
  source 1..21: mol_type = other RNA
cagcccttccagggacgacga

SEQ ID NO: 84127 - RNA, 21 nt, synthetic construct
  source 1..21: mol_type = other RNA
cccacgctggccccaacaaca

SEQ ID NO: 84128 - RNA, 21 nt, synthetic construct
  source 1..21: mol_type = other RNA
accacacccacagtcaccaga

SEQ ID NO: 84129 - RNA, 21 nt, synthetic construct
  source 1..21: mol_type = other RNA
actgcaaccgcccttccagca

SEQ ID NO: 84130 - RNA, 21 nt, synthetic construct
  source 1..21: mol_type = other RNA
accgcccttccagcactgaga

SEQ ID NO: 84131 - RNA, 21 nt, synthetic construct
  source 1..21: mol_type = other RNA
accacacccacaaccagagga

SEQ ID NO: 84132 - RNA, 21 nt, synthetic construct
  source 1..21: mol_type = other RNA
actgcaaccgcccttccagca

SEQ ID NO: 84133 - RNA, 21 nt, synthetic construct
  source 1..21: mol_type = other RNA
accgcccttccagcactgaga

SEQ ID NO: 84134 - RNA, 21 nt, synthetic construct
  source 1..21: mol_type = other RNA
accacacccacaaccagagga

SEQ ID NO: 84135 - RNA, 21 nt, synthetic construct
  source 1..21: mol_type = other RNA
atccacggccatcccgtccta

SEQ ID NO: 84136 - RNA, 21 nt, synthetic construct
  source 1..21: mol_type = other RNA
ccacggccatcccgtcctcca

SEQ ID NO: 84137 - RNA, 21 nt, synthetic construct
  source 1..21: mol_type = other RNA
tgacaagcacagccaccaaaa

SEQ ID NO: 84138 - RNA, 21 nt, synthetic construct
  source 1..21: mol_type = other RNA
atcccctccttcacccttgga

SEQ ID NO: 84139 - RNA, 21 nt, synthetic construct
  source 1..21: mol_type = other RNA
actgcaaccgcccttccagca

SEQ ID NO: 84140 - RNA, 21 nt, synthetic construct
  source 1..21: mol_type = other RNA
accgcccttccagcactgaga

SEQ ID NO: 84141 - RNA, 21 nt, synthetic construct
  source 1..21: mol_type = other RNA
accacacccacaaccagagga

SEQ ID NO: 84142 - RNA, 21 nt, synthetic construct
  source 1..21: mol_type = other RNA
actgcaaccgcccttccagca

SEQ ID NO: 84143 - RNA, 21 nt, synthetic construct
  source 1..21: mol_type = other RNA
accgcccttccagcactgaga

SEQ ID NO: 84144 - RNA, 21 nt, synthetic construct
  source 1..21: mol_type = other RNA
gcccggccaccacacccacaa

SEQ ID NO: 84145 - RNA, 21 nt, synthetic construct
  source 1..21: mol_type = other RNA
tgacaagcacagccaccaaaa

SEQ ID NO: 84146 - RNA, 21 nt, synthetic construct
  source 1..21: mol_type = other RNA
tgacaagcacagccacaaaaa

SEQ ID NO: 84147 - RNA, 21 nt, synthetic construct
  source 1..21: mol_type = other RNA
acaactgcagccactggatca

SEQ ID NO: 84148 - RNA, 21 nt, synthetic construct
  source 1..21: mol_type = other RNA
cgagccggctgccatttctaa

SEQ ID NO: 84149 - RNA, 21 nt, synthetic construct
  source 1..21: mol_type = other RNA
cctgtcccacctccccaccga

SEQ ID NO: 84150 - RNA, 21 nt, synthetic construct
  source 1..21: mol_type = other RNA
gcccccgcgccctcagcatca

SEQ ID NO: 84151 - RNA, 21 nt, synthetic construct
  source 1..21: mol_type = other RNA
cgccctcagcatccactacaa

SEQ ID NO: 84152 - RNA, 21 nt, synthetic construct
  source 1..21: mol_type = other RNA
gtcctcactgtcaccatggta

SEQ ID NO: 84153 - RNA, 21 nt, synthetic construct
  source 1..21: mol_type = other RNA
caccatggtgcatgggaagga

SEQ ID NO: 84154 - RNA, 21 nt, synthetic construct
  source 1..21: mol_type = other RNA
aatggccaagtcttccaggca

SEQ ID NO: 84155 - RNA, 21 nt, synthetic construct
  source 1..21: mol_type = other RNA
cgggacggaaccactgccgca

SEQ ID NO: 84156 - RNA, 21 nt, synthetic construct
  source 1..21: mol_type = other RNA
ccaggtctttgctgagtgcca

SEQ ID NO: 84157 - RNA, 21 nt, synthetic construct
  source 1..21: mol_type = other RNA
tgtgacgcccagggtcagcca

SEQ ID NO: 84158 - RNA, 21 nt, synthetic construct
  source 1..21: mol_type = other RNA
aaccgtgaccaggccccggga

SEQ ID NO: 84159 - RNA, 21 nt, synthetic construct
  source 1..21: mol_type = other RNA
ctacggggttggtgcaaccta

SEQ ID NO: 84160 - RNA, 21 nt, synthetic construct
  source 1..21: mol_type = other RNA
ggcgcccttccctgccacata

SEQ ID NO: 84161 - RNA, 21 nt, synthetic construct
  source 1..21: mol_type = other RNA
tgcctcacgcccgatggccaa

SEQ ID NO: 84162 - RNA, 21 nt, synthetic construct
  source 1..21: mol_type = other RNA
tgtgaggaggactcctgtcaa

SEQ ID NO: 84163 - RNA, 21 nt, synthetic construct
  source 1..21: mol_type = other RNA
gccaggatgtgcattgtctga

SEQ ID NO: 84164 - RNA, 21 nt, synthetic construct
  source 1..21: mol_type = other RNA
gtctgatcatgaaaaccttga

SEQ ID NO: 84165 - RNA, 21 nt, synthetic construct
  source 1..21: mol_type = other RNA
gagccccccggcctgtgtgta

SEQ ID NO: 84166 - RNA, 21 nt, synthetic construct
  source 1..21: mol_type = other RNA
ttctcgcgctgccactccata

SEQ ID NO: 84167 - RNA, 21 nt, synthetic construct
  source 1..21: mol_type = other RNA
acaggatccgggtcctctgca

SEQ ID NO: 84168 - RNA, 21 nt, synthetic construct
  source 1..21: mol_type = other RNA
cacccaggccctgttctcaaa

SEQ ID NO: 84169 - RNA, 21 nt, synthetic construct
  source 1..21: mol_type = other RNA
cttcccacaccctagcagcaa

SEQ ID NO: 84170 - RNA, 21 nt, synthetic construct
  source 1..21: mol_type = other RNA
acccgcacctcgaccctgcta

SEQ ID NO: 84171 - RNA, 21 nt, synthetic construct
  source 1..21: mol_type = other RNA
acccgcacctcgaccctgcta

SEQ ID NO: 84172 - RNA, 21 nt, synthetic construct
  source 1..21: mol_type = other RNA
acccgcacctcgaccctgcta

SEQ ID NO: 84173 - RNA, 21 nt, synthetic construct
  source 1..21: mol_type = other RNA
acccgcacctcgaccctgcta

SEQ ID NO: 84174 - RNA, 21 nt, synthetic construct
  source 1..21: mol_type = other RNA
atttggacagtttttctcgca

SEQ ID NO: 84175 - RNA, 21 nt, synthetic construct
  source 1..21: mol_type = other RNA
ggcatctgcgtgcaggcctga

SEQ ID NO: 84176 - RNA, 21 nt, synthetic construct
  source 1..21: mol_type = other RNA
accaccccgggccacaccaca

SEQ ID NO: 84177 - RNA, 21 nt, synthetic construct
  source 1..21: mol_type = other RNA
accaccccgggccacaccaca

SEQ ID NO: 84178 - RNA, 21 nt, synthetic construct
  source 1..21: mol_type = other RNA
tccagaccgcctgcctcacga

SEQ ID NO: 84179 - RNA, 21 nt, synthetic construct
  source 1..21: mol_type = other RNA
cctgggtcaacagccatgtga

SEQ ID NO: 84180 - RNA, 21 nt, synthetic construct
  source 1..21: mol_type = other RNA
ggaggactcctgtcaagtcca

SEQ ID NO: 84181 - RNA, 21 nt, synthetic construct
  source 1..21: mol_type = other RNA
aaactctacgacctgcatgga

SEQ ID NO: 84182 - RNA, 21 nt, synthetic construct
  source 1..21: mol_type = other RNA
cccaccttcgccgcctgccga

SEQ ID NO: 84183 - RNA, 21 nt, synthetic construct
  source 1..21: mol_type = other RNA
gccctcccggtctccaccgta

SEQ ID NO: 84184 - RNA, 21 nt, synthetic construct
  source 1..21: mol_type = other RNA
aaaagaccaccctatgggtga

SEQ ID NO: 84185 - RNA, 21 nt, synthetic construct
  source 1..21: mol_type = other RNA
caaagagccgctgaccacgaa

SEQ ID NO: 84186 - RNA, 21 nt, synthetic construct
  source 1..21: mol_type = other RNA
accagaggctccacggtgaca

SEQ ID NO: 84187 - RNA, 21 nt, synthetic construct
  source 1..21: mol_type = other RNA
cctctagcacacagaccagta

SEQ ID NO: 84188 - RNA, 21 nt, synthetic construct
  source 1..21: mol_type = other RNA
tgcaggaaccgtgagcaggta

SEQ ID NO: 84189 - RNA, 21 nt, synthetic construct
  source 1..21: mol_type = other RNA
cctctagcacacagaccagta

SEQ ID NO: 84190 - RNA, 21 nt, synthetic construct
  source 1..21: mol_type = other RNA
tgcaggaaccgtgagcaggta

SEQ ID NO: 84191 - RNA, 21 nt, synthetic construct
  source 1..21: mol_type = other RNA
ccatggccaccatgtccacaa

SEQ ID NO: 84192 - RNA, 21 nt, synthetic construct
  source 1..21: mol_type = other RNA
accagaggctccacggtgaca

SEQ ID NO: 84193 - RNA, 21 nt, synthetic construct
  source 1..21: mol_type = other RNA
cctctagcacacagaccagta

SEQ ID NO: 84194 - RNA, 21 nt, synthetic construct
  source 1..21: mol_type = other RNA
cacaccaggggcacctccaga

SEQ ID NO: 84195 - RNA, 21 nt, synthetic construct
  source 1..21: mol_type = other RNA
tgcaggaaccgtgagcaggta

SEQ ID NO: 84196 - RNA, 21 nt, synthetic construct
  source 1..21: mol_type = other RNA
cctctagcacacagaccagta

SEQ ID NO: 84197 - RNA, 21 nt, synthetic construct
  source 1..21: mol_type = other RNA
tgcaggaaccgtgagcaggta

SEQ ID NO: 84198 - RNA, 21 nt, synthetic construct
  source 1..21: mol_type = other RNA
cctccacccttgggaccacca

SEQ ID NO: 84199 - RNA, 21 nt, synthetic construct
  source 1..21: mol_type = other RNA
cctctagcacacagaccagta

SEQ ID NO: 84200 - RNA, 21 nt, synthetic construct
  source 1..21: mol_type = other RNA
acattgaccgcttccagggca

SEQ ID NO: 84201 - RNA, 21 nt, synthetic construct
  source 1..21: mol_type = other RNA
cagttgcaaggacatggccaa

SEQ ID NO: 84202 - RNA, 21 nt, synthetic construct
  source 1..21: mol_type = other RNA
gcccaccacagccgctctgta

SEQ ID NO: 84203 - RNA, 21 nt, synthetic construct
  source 1..21: mol_type = other RNA
gccaggtctttgctgagtgca

SEQ ID NO: 84204 - RNA, 21 nt, synthetic construct
  source 1..21: mol_type = other RNA
gcagcacggattccagctgga

SEQ ID NO: 84205 - RNA, 21 nt, synthetic construct
  source 1..21: mol_type = other RNA
agctggccacgtccggccgca

SEQ ID NO: 84206 - RNA, 21 nt, synthetic construct
  source 1..21: mol_type = other RNA
acccagggccctgtggagcca

SEQ ID NO: 84207 - RNA, 21 nt, synthetic construct
  source 1..21: mol_type = other RNA
cgcttccctggcctttgcaaa

SEQ ID NO: 84208 - RNA, 21 nt, synthetic construct
  source 1..21: mol_type = other RNA
cggctggtgctgacattccta

SEQ ID NO: 84209 - RNA, 21 nt, synthetic construct
  source 1..21: mol_type = other RNA
agcccgggcacctccttcaaa

SEQ ID NO: 84210 - RNA, 21 nt, synthetic construct
  source 1..21: mol_type = other RNA
tccggggggctatggcagtga

SEQ ID NO: 84211 - RNA, 21 nt, synthetic construct
  source 1..21: mol_type = other RNA
gggctatggcagtgccaggaa

SEQ ID NO: 84212 - RNA, 21 nt, synthetic construct
  source 1..21: mol_type = other RNA
gcccccatggtgtacctggaa

SEQ ID NO: 84213 - RNA, 21 nt, synthetic construct
  source 1..21: mol_type = other RNA
cgggtggggacccaccctaca

SEQ ID NO: 84214 - RNA, 21 nt, synthetic construct
  source 1..21: mol_type = other RNA
ggtaccaggtatgccctgtga

SEQ ID NO: 84215 - RNA, 21 nt, synthetic construct
  source 1..21: mol_type = other RNA
gggcggcgcagcttcccgaca

SEQ ID NO: 84216 - RNA, 21 nt, synthetic construct
  source 1..21: mol_type = other RNA
agggccgctggagggcactta

SEQ ID NO: 84217 - RNA, 21 nt, synthetic construct
  source 1..21: mol_type = other RNA
agcccggggctgaccagggca

SEQ ID NO: 84218 - RNA, 21 nt, synthetic construct
  source 1..21: mol_type = other RNA
gggctgaccagggctccccca

SEQ ID NO: 84219 - RNA, 21 nt, synthetic construct
  source 1..21: mol_type = other RNA
gggtggccacatccaccctta

SEQ ID NO: 84220 - RNA, 21 nt, synthetic construct
  source 1..21: mol_type = other RNA
ggccacatccacccttccaaa

SEQ ID NO: 84221 - RNA, 21 nt, synthetic construct
  source 1..21: mol_type = other RNA
acggggagcttgggcacatga

SEQ ID NO: 84222 - RNA, 21 nt, synthetic construct
  source 1..21: mol_type = other RNA
gaccagcacgcccaggacaga

SEQ ID NO: 84223 - RNA, 21 nt, synthetic construct
  source 1..21: mol_type = other RNA
gcccaggacagagacgacaaa

SEQ ID NO: 84224 - RNA, 21 nt, synthetic construct
  source 1..21: mol_type = other RNA
ccacggccaccacacccacaa

SEQ ID NO: 84225 - RNA, 21 nt, synthetic construct
  source 1..21: mol_type = other RNA
cacggccaccacacccacaga

SEQ ID NO: 84226 - RNA, 21 nt, synthetic construct
  source 1..21: mol_type = other RNA
gctccaaagccactccctcca

SEQ ID NO: 84227 - RNA, 21 nt, synthetic construct
  source 1..21: mol_type = other RNA
cccttccagcactgagaagca

SEQ ID NO: 84228 - RNA, 21 nt, synthetic construct
  source 1..21: mol_type = other RNA
tccagagactgcccacaccta

SEQ ID NO: 84229 - RNA, 21 nt, synthetic construct
  source 1..21: mol_type = other RNA
ctggggccaccggctctgtga

SEQ ID NO: 84230 - RNA, 21 nt, synthetic construct
  source 1..21: mol_type = other RNA
tggggccaccggctctgtgga

SEQ ID NO: 84231 - RNA, 21 nt, synthetic construct
  source 1..21: mol_type = other RNA
atcccggggaccacccacaca

SEQ ID NO: 84232 - RNA, 21 nt, synthetic construct
  source 1..21: mol_type = other RNA
actgtggccactggttctata

SEQ ID NO: 84233 - RNA, 21 nt, synthetic construct
  source 1..21: mol_type = other RNA
ccaacccctcctcaactccta

SEQ ID NO: 84234 - RNA, 21 nt, synthetic construct
  source 1..21: mol_type = other RNA
cctcctcaactcctgggacaa

SEQ ID NO: 84235 - RNA, 21 nt, synthetic construct
  source 1..21: mol_type = other RNA
aactcccatccccccagtgca

SEQ ID NO: 84236 - RNA, 21 nt, synthetic construct
  source 1..21: mol_type = other RNA
ccccagcagtccccacacgga

SEQ ID NO: 84237 - RNA, 21 nt, synthetic construct
  source 1..21: mol_type = other RNA
ccagcactcgactccagccca

SEQ ID NO: 84238 - RNA, 21 nt, synthetic construct
  source 1..21: mol_type = other RNA
accacggtggtgaccatggga

SEQ ID NO: 84239 - RNA, 21 nt, synthetic construct
  source 1..21: mol_type = other RNA
cccagtgtgcctggtcagaga

SEQ ID NO: 84240 - RNA, 21 nt, synthetic construct
  source 1..21: mol_type = other RNA
ctttggcctggtctgcaggaa

SEQ ID NO: 84241 - RNA, 21 nt, synthetic construct
  source 1..21: mol_type = other RNA
tcacagagccgagcactacaa

SEQ ID NO: 84242 - RNA, 21 nt, synthetic construct
  source 1..21: mol_type = other RNA
ccttctccagtccagggacta

SEQ ID NO: 84243 - RNA, 21 nt, synthetic construct
  source 1..21: mol_type = other RNA
cttctccagtccagggactga

SEQ ID NO: 84244 - RNA, 21 nt, synthetic construct
  source 1..21: mol_type = other RNA
cccttccagcactgagaagca

SEQ ID NO: 84245 - RNA, 21 nt, synthetic construct
  source 1..21: mol_type = other RNA
cggggccaccggctctgtgga

SEQ ID NO: 84246 - RNA, 21 nt, synthetic construct
  source 1..21: mol_type = other RNA
agcccagggacggcacgcaca

SEQ ID NO: 84247 - RNA, 21 nt, synthetic construct
  source 1..21: mol_type = other RNA
atcccggggaccacccacaca

SEQ ID NO: 84248 - RNA, 21 nt, synthetic construct
  source 1..21: mol_type = other RNA
actgtggccactggttctata

SEQ ID NO: 84249 - RNA, 21 nt, synthetic construct
  source 1..21: mol_type = other RNA
actccagggacaacacctata

SEQ ID NO: 84250 - RNA, 21 nt, synthetic construct
  source 1..21: mol_type = other RNA
cagccaccagcagcacagtga

SEQ ID NO: 84251 - RNA, 21 nt, synthetic construct
  source 1..21: mol_type = other RNA
ccaccagcagcacagtgacta

SEQ ID NO: 84252 - RNA, 21 nt, synthetic construct
  source 1..21: mol_type = other RNA
ccccagcagtccccacacgga

SEQ ID NO: 84253 - RNA, 21 nt, synthetic construct
  source 1..21: mol_type = other RNA
ctcaggcaccttgggcaccaa

SEQ ID NO: 84254 - RNA, 21 nt, synthetic construct
  source 1..21: mol_type = other RNA
ccttccacggggacttcccaa

SEQ ID NO: 84255 - RNA, 21 nt, synthetic construct
  source 1..21: mol_type = other RNA
ccagcactcgactccagccca

SEQ ID NO: 84256 - RNA, 21 nt, synthetic construct
  source 1..21: mol_type = other RNA
cctagcagcaggaccaccgaa

SEQ ID NO: 84257 - RNA, 21 nt, synthetic construct
  source 1..21: mol_type = other RNA
accacggtggtgaccatggga

SEQ ID NO: 84258 - RNA, 21 nt, synthetic construct
  source 1..21: mol_type = other RNA
cccagtgtgcctggtcagaga

SEQ ID NO: 84259 - RNA, 21 nt, synthetic construct
  source 1..21: mol_type = other RNA
ctttggcctggtctgcaggaa

SEQ ID NO: 84260 - RNA, 21 nt, synthetic construct
  source 1..21: mol_type = other RNA
gcagaccacagcagccactaa

SEQ ID NO: 84261 - RNA, 21 nt, synthetic construct
  source 1..21: mol_type = other RNA
gcacggccaccacacccacaa

SEQ ID NO: 84262 - RNA, 21 nt, synthetic construct
  source 1..21: mol_type = other RNA
cacggccaccacacccacaga

SEQ ID NO: 84263 - RNA, 21 nt, synthetic construct
  source 1..21: mol_type = other RNA
gccaccaaatccacagctaca

SEQ ID NO: 84264 - RNA, 21 nt, synthetic construct
  source 1..21: mol_type = other RNA
ccaccaaatccacagctacca

SEQ ID NO: 84265 - RNA, 21 nt, synthetic construct
  source 1..21: mol_type = other RNA
ccccctcctccactccgggga

SEQ ID NO: 84266 - RNA, 21 nt, synthetic construct
  source 1..21: mol_type = other RNA
gcacggccaccacacccacaa

SEQ ID NO: 84267 - RNA, 21 nt, synthetic construct
  source 1..21: mol_type = other RNA
cacggccaccacacccacaga

SEQ ID NO: 84268 - RNA, 21 nt, synthetic construct
  source 1..21: mol_type = other RNA
cagtcatcagctccagagcca

SEQ ID NO: 84269 - RNA, 21 nt, synthetic construct
  source 1..21: mol_type = other RNA
gtcatcagctccagagccaca

SEQ ID NO: 84270 - RNA, 21 nt, synthetic construct
  source 1..21: mol_type = other RNA
tcatcagctccagagccacta

SEQ ID NO: 84271 - RNA, 21 nt, synthetic construct
  source 1..21: mol_type = other RNA
cccttccagcactgagaagca

SEQ ID NO: 84272 - RNA, 21 nt, synthetic construct
  source 1..21: mol_type = other RNA
agccacaccctcctctactca

SEQ ID NO: 84273 - RNA, 21 nt, synthetic construct
  source 1..21: mol_type = other RNA
ccagggccaccggctctgtga

SEQ ID NO: 84274 - RNA, 21 nt, synthetic construct
  source 1..21: mol_type = other RNA
agtgccgactaccacaaccaa

SEQ ID NO: 84275 - RNA, 21 nt, synthetic construct
  source 1..21: mol_type = other RNA
atcccggggaccacccacaca

SEQ ID NO: 84276 - RNA, 21 nt, synthetic construct
  source 1..21: mol_type = other RNA
actgtggccactggttctata

SEQ ID NO: 84277 - RNA, 21 nt, synthetic construct
  source 1..21: mol_type = other RNA
aactcccatccccccagtgca

SEQ ID NO: 84278 - RNA, 21 nt, synthetic construct
  source 1..21: mol_type = other RNA
cagccaccagcagcacagtga

SEQ ID NO: 84279 - RNA, 21 nt, synthetic construct
  source 1..21: mol_type = other RNA
ccaccagcagcacagtgacta

SEQ ID NO: 84280 - RNA, 21 nt, synthetic construct
  source 1..21: mol_type = other RNA
ccccagcagtccccacacgga

SEQ ID NO: 84281 - RNA, 21 nt, synthetic construct
  source 1..21: mol_type = other RNA
ccccagcagcaaccaccagta

SEQ ID NO: 84282 - RNA, 21 nt, synthetic construct
  source 1..21: mol_type = other RNA
ccagcactcgactccagccca

SEQ ID NO: 84283 - RNA, 21 nt, synthetic construct
  source 1..21: mol_type = other RNA
cctagcagcaggaccaccgaa

SEQ ID NO: 84284 - RNA, 21 nt, synthetic construct
  source 1..21: mol_type = other RNA
cccagtgtgcctggtcagaga

SEQ ID NO: 84285 - RNA, 21 nt, synthetic construct
  source 1..21: mol_type = other RNA
ctttggcctggtctgcaggaa

SEQ ID NO: 84286 - RNA, 21 nt, synthetic construct
  source 1..21: mol_type = other RNA
tcacagagccgagcactacaa

SEQ ID NO: 84287 - RNA, 21 nt, synthetic construct
  source 1..21: mol_type = other RNA
ccttctccagtccagggacta

SEQ ID NO: 84288 - RNA, 21 nt, synthetic construct
  source 1..21: mol_type = other RNA
cttctccagtccagggactga

SEQ ID NO: 84289 - RNA, 21 nt, synthetic construct
  source 1..21: mol_type = other RNA
cccttccagcactgagaagca

SEQ ID NO: 84290 - RNA, 21 nt, synthetic construct
  source 1..21: mol_type = other RNA
tccagagactgcccacaccta

SEQ ID NO: 84291 - RNA, 21 nt, synthetic construct
  source 1..21: mol_type = other RNA
ccagggccaccggctctgtga

SEQ ID NO: 84292 - RNA, 21 nt, synthetic construct
  source 1..21: mol_type = other RNA
agtgccgactaccacaaccaa

SEQ ID NO: 84293 - RNA, 21 nt, synthetic construct
  source 1..21: mol_type = other RNA
agcccagggacggcacgcaca

SEQ ID NO: 84294 - RNA, 21 nt, synthetic construct
  source 1..21: mol_type = other RNA
gtcccggggaccacccacaca

SEQ ID NO: 84295 - RNA, 21 nt, synthetic construct
  source 1..21: mol_type = other RNA
actgtggccactggttctata

SEQ ID NO: 84296 - RNA, 21 nt, synthetic construct
  source 1..21: mol_type = other RNA
atcactgatcaccacggccaa

SEQ ID NO: 84297 - RNA, 21 nt, synthetic construct
  source 1..21: mol_type = other RNA
actccagggacaacacctata

SEQ ID NO: 84298 - RNA, 21 nt, synthetic construct
  source 1..21: mol_type = other RNA
cagccaccagcagcacagtga

SEQ ID NO: 84299 - RNA, 21 nt, synthetic construct
  source 1..21: mol_type = other RNA
ccaccagcagcacagtgacta

SEQ ID NO: 84300 - RNA, 21 nt, synthetic construct
  source 1..21: mol_type = other RNA
ccccagcagtccccacacgga

SEQ ID NO: 84301 - RNA, 21 nt, synthetic construct
  source 1..21: mol_type = other RNA
ctcaggcaccttgggcaccaa

SEQ ID NO: 84302 - RNA, 21 nt, synthetic construct
  source 1..21: mol_type = other RNA
ccttccacggggacttcccaa

SEQ ID NO: 84303 - RNA, 21 nt, synthetic construct
  source 1..21: mol_type = other RNA
ccagcactcgactccagccca

SEQ ID NO: 84304 - RNA, 21 nt, synthetic construct
  source 1..21: mol_type = other RNA
cctagcagcaggaccaccgaa

SEQ ID NO: 84305 - RNA, 21 nt, synthetic construct
  source 1..21: mol_type = other RNA
cccagtgtgcctggtcagaga

SEQ ID NO: 84306 - RNA, 21 nt, synthetic construct
  source 1..21: mol_type = other RNA
agcctggtgtccccctgggga

SEQ ID NO: 84307 - RNA, 21 nt, synthetic construct
  source 1..21: mol_type = other RNA
cctgggggagttgggccagga

SEQ ID NO: 84308 - RNA, 21 nt, synthetic construct
  source 1..21: mol_type = other RNA
ctttggcctggtctgcaggaa

SEQ ID NO: 84309 - RNA, 21 nt, synthetic construct
  source 1..21: mol_type = other RNA
tgctgaccagcccggccacca

SEQ ID NO: 84310 - RNA, 21 nt, synthetic construct
  source 1..21: mol_type = other RNA
gaccagcccggccaccacaca

SEQ ID NO: 84311 - RNA, 21 nt, synthetic construct
  source 1..21: mol_type = other RNA
cccggccaccacacccacaga

SEQ ID NO: 84312 - RNA, 21 nt, synthetic construct
  source 1..21: mol_type = other RNA
gccaccaaatccacagctaca

SEQ ID NO: 84313 - RNA, 21 nt, synthetic construct
  source 1..21: mol_type = other RNA
ccaccaaatccacagctacca

SEQ ID NO: 84314 - RNA, 21 nt, synthetic construct
  source 1..21: mol_type = other RNA
ccccctcctccactccgggga

SEQ ID NO: 84315 - RNA, 21 nt, synthetic construct
  source 1..21: mol_type = other RNA
tcacagagccgagcactacaa

SEQ ID NO: 84316 - RNA, 21 nt, synthetic construct
  source 1..21: mol_type = other RNA
gctccaaagccactccctcca

SEQ ID NO: 84317 - RNA, 21 nt, synthetic construct
  source 1..21: mol_type = other RNA
actgcccttccagcactgaga

SEQ ID NO: 84318 - RNA, 21 nt, synthetic construct
  source 1..21: mol_type = other RNA
cccttccagcactgagaagca

SEQ ID NO: 84319 - RNA, 21 nt, synthetic construct
  source 1..21: mol_type = other RNA
cggggccaccggctctgtgga

SEQ ID NO: 84320 - RNA, 21 nt, synthetic construct
  source 1..21: mol_type = other RNA
agtgccgactaccacaaccaa

SEQ ID NO: 84321 - RNA, 21 nt, synthetic construct
  source 1..21: mol_type = other RNA
atcccggggaccacccacaca

SEQ ID NO: 84322 - RNA, 21 nt, synthetic construct
  source 1..21: mol_type = other RNA
actgtggccactggttctata

SEQ ID NO: 84323 - RNA, 21 nt, synthetic construct
  source 1..21: mol_type = other RNA
acaagcacagccacaaaatca

SEQ ID NO: 84324 - RNA, 21 nt, synthetic construct
  source 1..21: mol_type = other RNA
cccctcctccaccctgtggaa

SEQ ID NO: 84325 - RNA, 21 nt, synthetic construct
  source 1..21: mol_type = other RNA
agccactgcctccacggttca

SEQ ID NO: 84326 - RNA, 21 nt, synthetic construct
  source 1..21: mol_type = other RNA
tgctggacccaaagcctgtga

SEQ ID NO: 84327 - RNA, 21 nt, synthetic construct
  source 1..21: mol_type = other RNA
tactgcacggcctctgccaca

SEQ ID NO: 84328 - RNA, 21 nt, synthetic construct
  source 1..21: mol_type = other RNA
actgcacggcctctgccacta

SEQ ID NO: 84329 - RNA, 21 nt, synthetic construct
  source 1..21: mol_type = other RNA
tgcccccgcgccctcagcata

SEQ ID NO: 84330 - RNA, 21 nt, synthetic construct
  source 1..21: mol_type = other RNA
ccctcagcatccactacaaga

SEQ ID NO: 84331 - RNA, 21 nt, synthetic construct
  source 1..21: mol_type = other RNA
gtggacattcctgccctggga

SEQ ID NO: 84332 - RNA, 21 nt, synthetic construct
  source 1..21: mol_type = other RNA
ccttcaatggccaagtcttca

SEQ ID NO: 84333 - RNA, 21 nt, synthetic construct
  source 1..21: mol_type = other RNA
atggccaagtcttccaggcca

SEQ ID NO: 84334 - RNA, 21 nt, synthetic construct
  source 1..21: mol_type = other RNA
cggtgtctagcacacccacca

SEQ ID NO: 84335 - RNA, 21 nt, synthetic construct
  source 1..21: mol_type = other RNA
ccccagagcctgcctgtgtga

SEQ ID NO: 84336 - RNA, 21 nt, synthetic construct
  source 1..21: mol_type = other RNA
ccaacggtgcaatgtcaggaa

SEQ ID NO: 84337 - RNA, 21 nt, synthetic construct
  source 1..21: mol_type = other RNA
aggatgcctgcaacaatacta

SEQ ID NO: 84338 - RNA, 21 nt, synthetic construct
  source 1..21: mol_type = other RNA
aggctgagggtggagtccata

SEQ ID NO: 84339 - RNA, 21 nt, synthetic construct
  source 1..21: mol_type = other RNA
ggctgagggtggagtccatta

SEQ ID NO: 84340 - RNA, 21 nt, synthetic construct
  source 1..21: mol_type = other RNA
cccatggctcccccacacaca

SEQ ID NO: 84341 - RNA, 21 nt, synthetic construct
  source 1..21: mol_type = other RNA
caggaggccactgctgtctga

SEQ ID NO: 84342 - RNA, 21 nt, synthetic construct
  source 1..21: mol_type = other RNA
cctggagccaggatgtgcata

SEQ ID NO: 84343 - RNA, 21 nt, synthetic construct
  source 1..21: mol_type = other RNA
tctgatcatgaaaaccttgga

SEQ ID NO: 84344 - RNA, 21 nt, synthetic construct
  source 1..21: mol_type = other RNA
gcggagccccccggcctgtga

SEQ ID NO: 84345 - RNA, 21 nt, synthetic construct
  source 1..21: mol_type = other RNA
ctccgtgctcctgctgcccaa

SEQ ID NO: 84346 - RNA, 21 nt, synthetic construct
  source 1..21: mol_type = other RNA
ggccccagaagggtgagggga

SEQ ID NO: 84347 - RNA, 21 nt, synthetic construct
  source 1..21: mol_type = other RNA
ggccagcaggacccctttcga

SEQ ID NO: 84348 - RNA, 21 nt, synthetic construct
  source 1..21: mol_type = other RNA
gggagggcgccactcaggaga

SEQ ID NO: 84349 - RNA, 21 nt, synthetic construct
  source 1..21: mol_type = other RNA
cgggcctatgtgtccctgcca

SEQ ID NO: 84350 - RNA, 21 nt, synthetic construct
  source 1..21: mol_type = other RNA
ccaggaagctgcgacaggcaa

SEQ ID NO: 84351 - RNA, 21 nt, synthetic construct
  source 1..21: mol_type = other RNA
cagttttgcaaataaacccta

SEQ ID NO: 84352 - RNA, 21 nt, synthetic construct
  source 1..21: mol_type = other RNA
ctacggccacgccctcctcca

SEQ ID NO: 84353 - RNA, 21 nt, synthetic construct
  source 1..21: mol_type = other RNA
ctacggccacgccctcctcaa

SEQ ID NO: 84354 - RNA, 21 nt, synthetic construct
  source 1..21: mol_type = other RNA
gtgaaaccggccccagaagga

SEQ ID NO: 84355 - RNA, 21 nt, synthetic construct
  source 1..21: mol_type = other RNA
tcagcgaccactgcaggggca

SEQ ID NO: 84356 - RNA, 21 nt, synthetic construct
  source 1..21: mol_type = other RNA
tggagccgagctgggagaata

SEQ ID NO: 84357 - RNA, 21 nt, synthetic construct
  source 1..21: mol_type = other RNA
cttccccaactggaccctgga

SEQ ID NO: 84358 - RNA, 21 nt, synthetic construct
  source 1..21: mol_type = other RNA
ccaccctgagacccactggca

SEQ ID NO: 84359 - RNA, 21 nt, synthetic construct
  source 1..21: mol_type = other RNA
cacccctcctccactccggaa

SEQ ID NO: 84360 - RNA, 21 nt, synthetic construct
  source 1..21: mol_type = other RNA
cacccctcctccactccggaa

SEQ ID NO: 84361 - RNA, 21 nt, synthetic construct
  source 1..21: mol_type = other RNA
agcccctgccctgtgacgcca

SEQ ID NO: 84362 - RNA, 21 nt, synthetic construct
  source 1..21: mol_type = other RNA
gggcatttggacagtttttca

SEQ ID NO: 84363 - RNA, 21 nt, synthetic construct
  source 1..21: mol_type = other RNA
cccgtgccagcccccaggata

SEQ ID NO: 84364 - RNA, 21 nt, synthetic construct
  source 1..21: mol_type = other RNA
acagagtcccccgctctgtca

SEQ ID NO: 84365 - RNA, 21 nt, synthetic construct
  source 1..21: mol_type = other RNA
tccatgcctgctgcagggtaa

SEQ ID NO: 84366 - RNA, 21 nt, synthetic construct
  source 1..21: mol_type = other RNA
gcaggaccaccgagtcaccca

SEQ ID NO: 84367 - RNA, 21 nt, synthetic construct
  source 1..21: mol_type = other RNA
gcaggaccaccgagtcaccca

SEQ ID NO: 84368 - RNA, 21 nt, synthetic construct
  source 1..21: mol_type = other RNA
gcaggaccaccgagtcaccca

SEQ ID NO: 84369 - RNA, 21 nt, synthetic construct
  source 1..21: mol_type = other RNA
cgccttgaggtgccctgccaa

SEQ ID NO: 84370 - RNA, 21 nt, synthetic construct
  source 1..21: mol_type = other RNA
tgtaactgcacacccagtgga

SEQ ID NO: 84371 - RNA, 21 nt, synthetic construct
  source 1..21: mol_type = other RNA
ctacatcaaggtcagcatcca

SEQ ID NO: 84372 - RNA, 21 nt, synthetic construct
  source 1..21: mol_type = other RNA
ccccacccgtgccagccccca

SEQ ID NO: 84373 - RNA, 21 nt, synthetic construct
  source 1..21: mol_type = other RNA
ctgccccttgttctgtgacta

SEQ ID NO: 84374 - RNA, 21 nt, synthetic construct
  source 1..21: mol_type = other RNA
cctagcagcagaaccaccgaa

SEQ ID NO: 84375 - RNA, 21 nt, synthetic construct
  source 1..21: mol_type = other RNA
ccgccagtgtcctccgcccca

SEQ ID NO: 84376 - RNA, 21 nt, synthetic construct
  source 1..21: mol_type = other RNA
aggggatggcggagggctgca

SEQ ID NO: 84377 - RNA, 21 nt, synthetic construct
  source 1..21: mol_type = other RNA
tcctcaactcctgggacaaca

SEQ ID NO: 84378 - RNA, 21 nt, synthetic construct
  source 1..21: mol_type = other RNA
ggatccacggccaccccgtca

SEQ ID NO: 84379 - RNA, 21 nt, synthetic construct
  source 1..21: mol_type = other RNA
ggatccacggccaccccgtca

SEQ ID NO: 84380 - RNA, 21 nt, synthetic construct
  source 1..21: mol_type = other RNA
ggatccacggccaccccgtca

SEQ ID NO: 84381 - RNA, 21 nt, synthetic construct
  source 1..21: mol_type = other RNA
ggatccacggccaccccgtca

SEQ ID NO: 84382 - RNA, 21 nt, synthetic construct
  source 1..21: mol_type = other RNA
ggcctgtgtgtggcaccccga

SEQ ID NO: 84383 - RNA, 21 nt, synthetic construct
  source 1..21: mol_type = other RNA
gtcttccgcttccctggccta

SEQ ID NO: 84384 - RNA, 21 nt, synthetic construct
  source 1..21: mol_type = other RNA
ggcacagccagcaccgcttca

SEQ ID NO: 84385 - RNA, 21 nt, synthetic construct
  source 1..21: mol_type = other RNA
cgacaatgagccccttgacta

SEQ ID NO: 84386 - RNA, 21 nt, synthetic construct
  source 1..21: mol_type = other RNA
agcacacagaccagtggtaca

SEQ ID NO: 84387 - RNA, 21 nt, synthetic construct
  source 1..21: mol_type = other RNA
agcacacagaccagtggtaca

SEQ ID NO: 84388 - RNA, 21 nt, synthetic construct
  source 1..21: mol_type = other RNA
gggccaccagttccatgtcca

SEQ ID NO: 84389 - RNA, 21 nt, synthetic construct
  source 1..21: mol_type = other RNA
ccccacggccaccccgtccta

SEQ ID NO: 84390 - RNA, 21 nt, synthetic construct
  source 1..21: mol_type = other RNA
agcacacagaccagtggtaca

SEQ ID NO: 84391 - RNA, 21 nt, synthetic construct
  source 1..21: mol_type = other RNA
agcacacagaccagtggtaca

SEQ ID NO: 84392 - RNA, 21 nt, synthetic construct
  source 1..21: mol_type = other RNA
ccccacggccaccccgtccta

SEQ ID NO: 84393 - RNA, 21 nt, synthetic construct
  source 1..21: mol_type = other RNA
agcacacagaccagtggtaca

SEQ ID NO: 84394 - RNA, 21 nt, synthetic construct
  source 1..21: mol_type = other RNA
gcagccaccagctccaaagca

SEQ ID NO: 84395 - RNA, 21 nt, synthetic construct
  source 1..21: mol_type = other RNA
cggatcctcactgagctgaca

SEQ ID NO: 84396 - RNA, 21 nt, synthetic construct
  source 1..21: mol_type = other RNA
ccgcacccctgcagtgctcca

SEQ ID NO: 84397 - RNA, 21 nt, synthetic construct
  source 1..21: mol_type = other RNA
gaccaccaccatgcgtgtgga

SEQ ID NO: 84398 - RNA, 21 nt, synthetic construct
  source 1..21: mol_type = other RNA
gcttctgccctgaggaccaga

SEQ ID NO: 84399 - RNA, 21 nt, synthetic construct
  source 1..21: mol_type = other RNA
gcacctacagcccgggcacca

SEQ ID NO: 84400 - RNA, 21 nt, synthetic construct
  source 1..21: mol_type = other RNA
gcgcctgtgtgcccgcccaga

SEQ ID NO: 84401 - RNA, 21 nt, synthetic construct
  source 1..21: mol_type = other RNA
caggtggggcagaaggtgcaa

SEQ ID NO: 84402 - RNA, 21 nt, synthetic construct
  source 1..21: mol_type = other RNA
cctcctccacccaggcaacta

SEQ ID NO: 84403 - RNA, 21 nt, synthetic construct
  source 1..21: mol_type = other RNA
cctcctccacccaggcaacta

SEQ ID NO: 84404 - RNA, 21 nt, synthetic construct
  source 1..21: mol_type = other RNA
caccacacccgtggccaccaa

SEQ ID NO: 84405 - RNA, 21 nt, synthetic construct
  source 1..21: mol_type = other RNA
cctcctccacccaggcaacta

SEQ ID NO: 84406 - RNA, 21 nt, synthetic construct
  source 1..21: mol_type = other RNA
tgccaggaagctgcgacagga

SEQ ID NO: 84407 - RNA, 21 nt, synthetic construct
  source 1..21: mol_type = other RNA
aggtcagcatccggctggtga

SEQ ID NO: 84408 - RNA, 21 nt, synthetic construct
  source 1..21: mol_type = other RNA
cagcagtccccaccctctcaa

SEQ ID NO: 84409 - RNA, 21 nt, synthetic construct
  source 1..21: mol_type = other RNA
tcacggccaccggctccacca

SEQ ID NO: 84410 - RNA, 21 nt, synthetic construct
  source 1..21: mol_type = other RNA
tcacggccaccggctccacca

SEQ ID NO: 84411 - RNA, 21 nt, synthetic construct
  source 1..21: mol_type = other RNA
tcacggccaccggctccacca

SEQ ID NO: 84412 - RNA, 21 nt, synthetic construct
  source 1..21: mol_type = other RNA
tcacggccaccggctccacca

SEQ ID NO: 84413 - RNA, 21 nt, synthetic construct
  source 1..21: mol_type = other RNA
ccacagccaccatgacaagga

SEQ ID NO: 84414 - RNA, 21 nt, synthetic construct
  source 1..21: mol_type = other RNA
gcgcccatggctcccccacaa

SEQ ID NO: 84415 - RNA, 21 nt, synthetic construct
  source 1..21: mol_type = other RNA
aacggccaggtcagagaggga

SEQ ID NO: 84416 - RNA, 21 nt, synthetic construct
  source 1..21: mol_type = other RNA
cggccctcagcggggtggtga

SEQ ID NO: 84417 - RNA, 21 nt, synthetic construct
  source 1..21: mol_type = other RNA
gtacctggactgcagcaacaa

SEQ ID NO: 84418 - RNA, 21 nt, synthetic construct
  source 1..21: mol_type = other RNA
gctatggcagtgccaggacca

SEQ ID NO: 84419 - RNA, 21 nt, synthetic construct
  source 1..21: mol_type = other RNA
gcccctcacagccacccacga

SEQ ID NO: 84420 - RNA, 21 nt, synthetic construct
  source 1..21: mol_type = other RNA
tcaccaccgcctgggtcccca

SEQ ID NO: 84421 - RNA, 21 nt, synthetic construct
  source 1..21: mol_type = other RNA
ccccttctccagggacgacca

SEQ ID NO: 84422 - RNA, 21 nt, synthetic construct
  source 1..21: mol_type = other RNA
ccccttctccagggacgacca

SEQ ID NO: 84423 - RNA, 21 nt, synthetic construct
  source 1..21: mol_type = other RNA
ccccttctccagggacgacca

SEQ ID NO: 84424 - RNA, 21 nt, synthetic construct
  source 1..21: mol_type = other RNA
ctgggggagttgggccaggta

SEQ ID NO: 84425 - RNA, 21 nt, synthetic construct
  source 1..21: mol_type = other RNA
ccactctgggaacagctcaca

SEQ ID NO: 84426 - RNA, 21 nt, synthetic construct
  source 1..21: mol_type = other RNA
cctccccaccgccagtgtcca

SEQ ID NO: 84427 - RNA, 21 nt, synthetic construct
  source 1..21: mol_type = other RNA
gcctctacctggacaaccaca

SEQ ID NO: 84428 - RNA, 21 nt, synthetic construct
  source 1..21: mol_type = other RNA
cctctacctggacaaccacta

SEQ ID NO: 84429 - RNA, 21 nt, synthetic construct
  source 1..21: mol_type = other RNA
agctctgccgcgcccggggaa

SEQ ID NO: 84430 - RNA, 21 nt, synthetic construct
  source 1..21: mol_type = other RNA
gtttccttcgtgcctgtggaa

SEQ ID NO: 84431 - RNA, 21 nt, synthetic construct
  source 1..21: mol_type = other RNA
tacacccatcccctcttccta

SEQ ID NO: 84432 - RNA, 21 nt, synthetic construct
  source 1..21: mol_type = other RNA
ccaccacacccacggccacca

SEQ ID NO: 84433 - RNA, 21 nt, synthetic construct
  source 1..21: mol_type = other RNA
ccagcaacacagtgactccca

SEQ ID NO: 84434 - RNA, 21 nt, synthetic construct
  source 1..21: mol_type = other RNA
ccaccacacccacggccacca

SEQ ID NO: 84435 - RNA, 21 nt, synthetic construct
  source 1..21: mol_type = other RNA
cacccacagtcatcagctcca

SEQ ID NO: 84436 - RNA, 21 nt, synthetic construct
  source 1..21: mol_type = other RNA
ccaccacacccacggccacca

SEQ ID NO: 84437 - RNA, 21 nt, synthetic construct
  source 1..21: mol_type = other RNA
ccaccacacccacggccacca

SEQ ID NO: 84438 - RNA, 21 nt, synthetic construct
  source 1..21: mol_type = other RNA
ccaccacacccacggccacca

SEQ ID NO: 84439 - RNA, 21 nt, synthetic construct
  source 1..21: mol_type = other RNA
cacccacaaccaccacaccca

SEQ ID NO: 84440 - RNA, 21 nt, synthetic construct
  source 1..21: mol_type = other RNA
acaacacccatcaccccagta

SEQ ID NO: 84441 - RNA, 21 nt, synthetic construct
  source 1..21: mol_type = other RNA
ctaggaaccagagcccacaga

SEQ ID NO: 84442 - RNA, 21 nt, synthetic construct
  source 1..21: mol_type = other RNA
catcctgcacacctacaccca

SEQ ID NO: 84443 - RNA, 21 nt, synthetic construct
  source 1..21: mol_type = other RNA
ggatccacggccaccccgaca

SEQ ID NO: 84444 - RNA, 21 nt, synthetic construct
  source 1..21: mol_type = other RNA
caaagccactccctcctccaa

SEQ ID NO: 84445 - RNA, 21 nt, synthetic construct
  source 1..21: mol_type = other RNA
caaagccactccctcctccaa

SEQ ID NO: 84446 - RNA, 21 nt, synthetic construct
  source 1..21: mol_type = other RNA
aggaccagatcctcttcaaca

SEQ ID NO: 84447 - RNA, 21 nt, synthetic construct
  source 1..21: mol_type = other RNA
ccaggactactgtggggacaa

SEQ ID NO: 84448 - RNA, 21 nt, synthetic construct
  source 1..21: mol_type = other RNA
ggacttcaacggcctcccgga

SEQ ID NO: 84449 - RNA, 21 nt, synthetic construct
  source 1..21: mol_type = other RNA
tgccccttgttctgtgactta

SEQ ID NO: 84450 - RNA, 21 nt, synthetic construct
  source 1..21: mol_type = other RNA
gccaccacaactggggccaca

SEQ ID NO: 84451 - RNA, 21 nt, synthetic construct
  source 1..21: mol_type = other RNA
caccccagggaccacctggaa

SEQ ID NO: 84452 - RNA, 21 nt, synthetic construct
  source 1..21: mol_type = other RNA
ccagttccatgtccaccccca

SEQ ID NO: 84453 - RNA, 21 nt, synthetic construct
  source 1..21: mol_type = other RNA
caccccagggaccacctggaa

SEQ ID NO: 84454 - RNA, 21 nt, synthetic construct
  source 1..21: mol_type = other RNA
ccctcctctactccagagaca

SEQ ID NO: 84455 - RNA, 21 nt, synthetic construct
  source 1..21: mol_type = other RNA
caccccagggaccacctggaa

SEQ ID NO: 84456 - RNA, 21 nt, synthetic construct
  source 1..21: mol_type = other RNA
caccccagggaccacctggaa

SEQ ID NO: 84457 - RNA, 21 nt, synthetic construct
  source 1..21: mol_type = other RNA
caccccagggaccacctggaa

SEQ ID NO: 84458 - RNA, 21 nt, synthetic construct
  source 1..21: mol_type = other RNA
acctcctctactccagagaca

SEQ ID NO: 84459 - RNA, 21 nt, synthetic construct
  source 1..21: mol_type = other RNA
caccccagggaccacctggaa

SEQ ID NO: 84460 - RNA, 21 nt, synthetic construct
  source 1..21: mol_type = other RNA
atctcagcctctacctggaca

SEQ ID NO: 84461 - RNA, 21 nt, synthetic construct
  source 1..21: mol_type = other RNA
tctcagcctctacctggacaa

SEQ ID NO: 84462 - RNA, 21 nt, synthetic construct
  source 1..21: mol_type = other RNA
ctgcccccagagcctgcctga

SEQ ID NO: 84463 - RNA, 21 nt, synthetic construct
  source 1..21: mol_type = other RNA
tccccccacccgtgccagcca

SEQ ID NO: 84464 - RNA, 21 nt, synthetic construct
  source 1..21: mol_type = other RNA
cactggcctcctggtggagca

SEQ ID NO: 84465 - RNA, 21 nt, synthetic construct
  source 1..21: mol_type = other RNA
ggggacttcaacggcctccca

SEQ ID NO: 84466 - RNA, 21 nt, synthetic construct
  source 1..21: mol_type = other RNA
gacgccctggcacccaaggaa

SEQ ID NO: 84467 - RNA, 21 nt, synthetic construct
  source 1..21: mol_type = other RNA
cgccctggcacccaaggacca

SEQ ID NO: 84468 - RNA, 21 nt, synthetic construct
  source 1..21: mol_type = other RNA
ggcaccgcccagagcccggca

SEQ ID NO: 84469 - RNA, 21 nt, synthetic construct
  source 1..21: mol_type = other RNA
cgtttgaaaacctgaggcaga

SEQ ID NO: 84470 - RNA, 21 nt, synthetic construct
  source 1..21: mol_type = other RNA
ccacatccacccttccaacaa

SEQ ID NO: 84471 - RNA, 21 nt, synthetic construct
  source 1..21: mol_type = other RNA
acgctcagcccttccagggaa

SEQ ID NO: 84472 - RNA, 21 nt, synthetic construct
  source 1..21: mol_type = other RNA
cctccagcccagggacggcaa

SEQ ID NO: 84473 - RNA, 21 nt, synthetic construct
  source 1..21: mol_type = other RNA
gaccacccacacacccccaga

SEQ ID NO: 84474 - RNA, 21 nt, synthetic construct
  source 1..21: mol_type = other RNA
atcttgggcaccacccacata

SEQ ID NO: 84475 - RNA, 21 nt, synthetic construct
  source 1..21: mol_type = other RNA
agccttccacggtgacttcca

SEQ ID NO: 84476 - RNA, 21 nt, synthetic construct
  source 1..21: mol_type = other RNA
gccttccacggtgacttccca

SEQ ID NO: 84477 - RNA, 21 nt, synthetic construct
  source 1..21: mol_type = other RNA
ccgtcctccaccccagggaca

SEQ ID NO: 84478 - RNA, 21 nt, synthetic construct
  source 1..21: mol_type = other RNA
cctccagcccagggacggcaa

SEQ ID NO: 84479 - RNA, 21 nt, synthetic construct
  source 1..21: mol_type = other RNA
ggggaccacccacacccccaa

SEQ ID NO: 84480 - RNA, 21 nt, synthetic construct
  source 1..21: mol_type = other RNA
gaccacccacacacccccaga

SEQ ID NO: 84481 - RNA, 21 nt, synthetic construct
  source 1..21: mol_type = other RNA
tacacccatcccctccttcaa

SEQ ID NO: 84482 - RNA, 21 nt, synthetic construct
  source 1..21: mol_type = other RNA
ccgtcctccaccccagggaca

SEQ ID NO: 84483 - RNA, 21 nt, synthetic construct
  source 1..21: mol_type = other RNA
cctccagcccagggacggcaa

SEQ ID NO: 84484 - RNA, 21 nt, synthetic construct
  source 1..21: mol_type = other RNA
gaccacccacacacccccaga

SEQ ID NO: 84485 - RNA, 21 nt, synthetic construct
  source 1..21: mol_type = other RNA
atcttgggcaccacccacata

SEQ ID NO: 84486 - RNA, 21 nt, synthetic construct
  source 1..21: mol_type = other RNA
agccttccacggtgacttcca

SEQ ID NO: 84487 - RNA, 21 nt, synthetic construct
  source 1..21: mol_type = other RNA
gccttccacggtgacttccca

SEQ ID NO: 84488 - RNA, 21 nt, synthetic construct
  source 1..21: mol_type = other RNA
ggatcctcacaaagctgacca

SEQ ID NO: 84489 - RNA, 21 nt, synthetic construct
  source 1..21: mol_type = other RNA
ccgtcctccaccccagggaca

SEQ ID NO: 84490 - RNA, 21 nt, synthetic construct
  source 1..21: mol_type = other RNA
cctccagcccagggacggcaa

SEQ ID NO: 84491 - RNA, 21 nt, synthetic construct
  source 1..21: mol_type = other RNA
ggggaccacccacacccccaa

SEQ ID NO: 84492 - RNA, 21 nt, synthetic construct
  source 1..21: mol_type = other RNA
gaccacccacacacccccaga

SEQ ID NO: 84493 - RNA, 21 nt, synthetic construct
  source 1..21: mol_type = other RNA
ccgtcctccaccccagggaca

SEQ ID NO: 84494 - RNA, 21 nt, synthetic construct
  source 1..21: mol_type = other RNA
ccgtcctccaccccagggaca

SEQ ID NO: 84495 - RNA, 21 nt, synthetic construct
  source 1..21: mol_type = other RNA
cctccagcccagggacggcaa

SEQ ID NO: 84496 - RNA, 21 nt, synthetic construct
  source 1..21: mol_type = other RNA
caacacccatcaccccagtga

SEQ ID NO: 84497 - RNA, 21 nt, synthetic construct
  source 1..21: mol_type = other RNA
ccaccacacccatgtccacca

SEQ ID NO: 84498 - RNA, 21 nt, synthetic construct
  source 1..21: mol_type = other RNA
caccacacccatgtccaccaa

SEQ ID NO: 84499 - RNA, 21 nt, synthetic construct
  source 1..21: mol_type = other RNA
gcgcctgtcccacctccccaa

SEQ ID NO: 84500 - RNA, 21 nt, synthetic construct
  source 1..21: mol_type = other RNA
catggtgcatgggaaggagga

SEQ ID NO: 84501 - RNA, 21 nt, synthetic construct
  source 1..21: mol_type = other RNA
acctcacctgcccacccacca

SEQ ID NO: 84502 - RNA, 21 nt, synthetic construct
  source 1..21: mol_type = other RNA
ccacctgcccccagagcctga

SEQ ID NO: 84503 - RNA, 21 nt, synthetic construct
  source 1..21: mol_type = other RNA
gtcccaccttccgctgcagaa

SEQ ID NO: 84504 - RNA, 21 nt, synthetic construct
  source 1..21: mol_type = other RNA
ccccagaagggtgaggggcca

SEQ ID NO: 84505 - RNA, 21 nt, synthetic construct
  source 1..21: mol_type = other RNA
tcctggagaggtggtgcacga

SEQ ID NO: 84506 - RNA, 21 nt, synthetic construct
  source 1..21: mol_type = other RNA
aagcccctgccctgtgacgca

SEQ ID NO: 84507 - RNA, 21 nt, synthetic construct
  source 1..21: mol_type = other RNA
ccgcggaactggaggtgccca

SEQ ID NO: 84508 - RNA, 21 nt, synthetic construct
  source 1..21: mol_type = other RNA
agggcatttggacagttttta

SEQ ID NO: 84509 - RNA, 21 nt, synthetic construct
  source 1..21: mol_type = other RNA
ccctccctgatgtcactggga

SEQ ID NO: 84510 - RNA, 21 nt, synthetic construct
  source 1..21: mol_type = other RNA
cccaacaacaatggcaaccta

SEQ ID NO: 84511 - RNA, 21 nt, synthetic construct
  source 1..21: mol_type = other RNA
cctggaactccagccacaaca

SEQ ID NO: 84512 - RNA, 21 nt, synthetic construct
  source 1..21: mol_type = other RNA
tcctggaactccagccacaaa

SEQ ID NO: 84513 - RNA, 21 nt, synthetic construct
  source 1..21: mol_type = other RNA
ccaccagcaacacagtgacta

SEQ ID NO: 84514 - RNA, 21 nt, synthetic construct
  source 1..21: mol_type = other RNA
cacagtgactccctcctctga

SEQ ID NO: 84515 - RNA, 21 nt, synthetic construct
  source 1..21: mol_type = other RNA
cacagtgactccctcctctga

SEQ ID NO: 84516 - RNA, 21 nt, synthetic construct
  source 1..21: mol_type = other RNA
cacagtgactccctcctctga

SEQ ID NO: 84517 - RNA, 21 nt, synthetic construct
  source 1..21: mol_type = other RNA
ttccaccccaggaacagctca

SEQ ID NO: 84518 - RNA, 21 nt, synthetic construct
  source 1..21: mol_type = other RNA
cacagtgactccctcctctga

SEQ ID NO: 84519 - RNA, 21 nt, synthetic construct
  source 1..21: mol_type = other RNA
cccagctcgtccaccgtggga

SEQ ID NO: 84520 - RNA, 21 nt, synthetic construct
  source 1..21: mol_type = other RNA
accaccctgagacccactgga

SEQ ID NO: 84521 - RNA, 21 nt, synthetic construct
  source 1..21: mol_type = other RNA
cgccagggcaggagtccatca

SEQ ID NO: 84522 - RNA, 21 nt, synthetic construct
  source 1..21: mol_type = other RNA
gtgccgacagcagcttcacca

SEQ ID NO: 84523 - RNA, 21 nt, synthetic construct
  source 1..21: mol_type = other RNA
ctcttccaccccaggaacaga

SEQ ID NO: 84524 - RNA, 21 nt, synthetic construct
  source 1..21: mol_type = other RNA
gtactcccccatcactgatca

SEQ ID NO: 84525 - RNA, 21 nt, synthetic construct
  source 1..21: mol_type = other RNA
tctacctggacaaccactaca

SEQ ID NO: 84526 - RNA, 21 nt, synthetic construct
  source 1..21: mol_type = other RNA
atcctgtggcaccagggctga

SEQ ID NO: 84527 - RNA, 21 nt, synthetic construct
  source 1..21: mol_type = other RNA
cgctgcccttgccggccggca

SEQ ID NO: 84528 - RNA, 21 nt, synthetic construct
  source 1..21: mol_type = other RNA
ccaggacagagacgacaatga

SEQ ID NO: 84529 - RNA, 21 nt, synthetic construct
  source 1..21: mol_type = other RNA
cagtcaccagctccaaagcca

SEQ ID NO: 84530 - RNA, 21 nt, synthetic construct
  source 1..21: mol_type = other RNA
cagtcaccagctccaaagcca

SEQ ID NO: 84531 - RNA, 21 nt, synthetic construct
  source 1..21: mol_type = other RNA
cagtcaccagctccaaagcca

SEQ ID NO: 84532 - RNA, 21 nt, synthetic construct
  source 1..21: mol_type = other RNA
cagtcaccagctccaaagcca

SEQ ID NO: 84533 - RNA, 21 nt, synthetic construct
  source 1..21: mol_type = other RNA
acatgcagcaccaggagtgta

SEQ ID NO: 84534 - RNA, 21 nt, synthetic construct
  source 1..21: mol_type = other RNA
gcggtggcgagagggccggga

SEQ ID NO: 84535 - RNA, 21 nt, synthetic construct
  source 1..21: mol_type = other RNA
cagtgtggctgctacgacaaa

SEQ ID NO: 84536 - RNA, 21 nt, synthetic construct
  source 1..21: mol_type = other RNA
cgcccaggacagagacgacaa

SEQ ID NO: 84537 - RNA, 21 nt, synthetic construct
  source 1..21: mol_type = other RNA
gaacagctccccctcccaaaa

SEQ ID NO: 84538 - RNA, 21 nt, synthetic construct
  source 1..21: mol_type = other RNA
acagtcaccagctccaaagca

SEQ ID NO: 84539 - RNA, 21 nt, synthetic construct
  source 1..21: mol_type = other RNA
tgagaagcacagccaccacaa

SEQ ID NO: 84540 - RNA, 21 nt, synthetic construct
  source 1..21: mol_type = other RNA
gggcatcttgggcaccaccca

SEQ ID NO: 84541 - RNA, 21 nt, synthetic construct
  source 1..21: mol_type = other RNA
acagtcaccagctccaaagca

SEQ ID NO: 84542 - RNA, 21 nt, synthetic construct
  source 1..21: mol_type = other RNA
tgagaagcacagccaccacaa

SEQ ID NO: 84543 - RNA, 21 nt, synthetic construct
  source 1..21: mol_type = other RNA
tccagcccagggacggcacga

SEQ ID NO: 84544 - RNA, 21 nt, synthetic construct
  source 1..21: mol_type = other RNA
gaacagctccccctcccaaaa

SEQ ID NO: 84545 - RNA, 21 nt, synthetic construct
  source 1..21: mol_type = other RNA
ccaccatgtccacaatccaca

SEQ ID NO: 84546 - RNA, 21 nt, synthetic construct
  source 1..21: mol_type = other RNA
tgagaagcacagccaccacaa

SEQ ID NO: 84547 - RNA, 21 nt, synthetic construct
  source 1..21: mol_type = other RNA
gcgttacagccatcccctcta

SEQ ID NO: 84548 - RNA, 21 nt, synthetic construct
  source 1..21: mol_type = other RNA
gggcatcttgggcaccaccca

SEQ ID NO: 84549 - RNA, 21 nt, synthetic construct
  source 1..21: mol_type = other RNA
acagtcaccagctccaaagca

SEQ ID NO: 84550 - RNA, 21 nt, synthetic construct
  source 1..21: mol_type = other RNA
tgagaagcacagccaccacaa

SEQ ID NO: 84551 - RNA, 21 nt, synthetic construct
  source 1..21: mol_type = other RNA
tccagcccagggacggcacga

SEQ ID NO: 84552 - RNA, 21 nt, synthetic construct
  source 1..21: mol_type = other RNA
gaacagctccccctcccaaaa

SEQ ID NO: 84553 - RNA, 21 nt, synthetic construct
  source 1..21: mol_type = other RNA
ccaccatgtccacaatccaca

SEQ ID NO: 84554 - RNA, 21 nt, synthetic construct
  source 1..21: mol_type = other RNA
ccaccagttccacgtccacca

SEQ ID NO: 84555 - RNA, 21 nt, synthetic construct
  source 1..21: mol_type = other RNA
acagtcaccagctccaaagca

SEQ ID NO: 84556 - RNA, 21 nt, synthetic construct
  source 1..21: mol_type = other RNA
tgagaagcacagccaccacaa

SEQ ID NO: 84557 - RNA, 21 nt, synthetic construct
  source 1..21: mol_type = other RNA
ccaccatgtccacaatccaca

SEQ ID NO: 84558 - RNA, 21 nt, synthetic construct
  source 1..21: mol_type = other RNA
acagctcacacccccaaagta

SEQ ID NO: 84559 - RNA, 21 nt, synthetic construct
  source 1..21: mol_type = other RNA
cgtcaccttcaatggccaaga

SEQ ID NO: 84560 - RNA, 21 nt, synthetic construct
  source 1..21: mol_type = other RNA
catgcccaccacagccgctca

SEQ ID NO: 84561 - RNA, 21 nt, synthetic construct
  source 1..21: mol_type = other RNA
cccttccctgccacatgtgta

SEQ ID NO: 84562 - RNA, 21 nt, synthetic construct
  source 1..21: mol_type = other RNA
gtggcgagagggccgggtgga

SEQ ID NO: 84563 - RNA, 21 nt, synthetic construct
  source 1..21: mol_type = other RNA
ggcagagagggtaccaggtaa

SEQ ID NO: 84564 - RNA, 21 nt, synthetic construct
  source 1..21: mol_type = other RNA
ccctccctgcccgtccccgta

SEQ ID NO: 84565 - RNA, 21 nt, synthetic construct
  source 1..21: mol_type = other RNA
cggacacctgccccttgttca

SEQ ID NO: 84566 - RNA, 21 nt, synthetic construct
  source 1..21: mol_type = other RNA
gccacacccagcaagacccga

SEQ ID NO: 84567 - RNA, 21 nt, synthetic construct
  source 1..21: mol_type = other RNA
gccacacccagcaagacccga

SEQ ID NO: 84568 - RNA, 21 nt, synthetic construct
  source 1..21: mol_type = other RNA
gccacacccagcaagacccga

SEQ ID NO: 84569 - RNA, 21 nt, synthetic construct
  source 1..21: mol_type = other RNA
cacggccaccacaaccaggga

SEQ ID NO: 84570 - RNA, 21 nt, synthetic construct
  source 1..21: mol_type = other RNA
gccacacccagcaagacccga

SEQ ID NO: 84571 - RNA, 21 nt, synthetic construct
  source 1..21: mol_type = other RNA
catcccctcctccaccctgta

SEQ ID NO: 84572 - RNA, 21 nt, synthetic construct
  source 1..21: mol_type = other RNA
ccacggccacacccagcaaga

SEQ ID NO: 84573 - RNA, 21 nt, synthetic construct
  source 1..21: mol_type = other RNA
ccacggccacacccagcaaga

SEQ ID NO: 84574 - RNA, 21 nt, synthetic construct
  source 1..21: mol_type = other RNA
cagaccacagcagccactaca

SEQ ID NO: 84575 - RNA, 21 nt, synthetic construct
  source 1..21: mol_type = other RNA
ccacggccacacccagcaaga

SEQ ID NO: 84576 - RNA, 21 nt, synthetic construct
  source 1..21: mol_type = other RNA
cgctgtcctcgccctccccta

SEQ ID NO: 84577 - RNA, 21 nt, synthetic construct
  source 1..21: mol_type = other RNA
ctgaccacagcagccactaca

SEQ ID NO: 84578 - RNA, 21 nt, synthetic construct
  source 1..21: mol_type = other RNA
tccagagccactccctcctca

SEQ ID NO: 84579 - RNA, 21 nt, synthetic construct
  source 1..21: mol_type = other RNA
ccacacacgggcggtccctga

SEQ ID NO: 84580 - RNA, 21 nt, synthetic construct
  source 1..21: mol_type = other RNA
ctgaccacagcagccactaca

SEQ ID NO: 84581 - RNA, 21 nt, synthetic construct
  source 1..21: mol_type = other RNA
cccggggctgaccagggctca

SEQ ID NO: 84582 - RNA, 21 nt, synthetic construct
  source 1..21: mol_type = other RNA
tgcctggtcagagtggctgga

SEQ ID NO: 84583 - RNA, 21 nt, synthetic construct
  source 1..21: mol_type = other RNA
tgcctggtcagagtggctgga

SEQ ID NO: 84584 - RNA, 21 nt, synthetic construct
  source 1..21: mol_type = other RNA
tgcctggtcagagtggctgga

SEQ ID NO: 84585 - RNA, 21 nt, synthetic construct
  source 1..21: mol_type = other RNA
tgcctggtcagagtggctgga

SEQ ID NO: 84586 - RNA, 21 nt, synthetic construct
  source 1..21: mol_type = other RNA
acccccagcgcgcgcagctca

SEQ ID NO: 84587 - RNA, 21 nt, synthetic construct
  source 1..21: mol_type = other RNA
gcggggcccacatctccacca

SEQ ID NO: 84588 - RNA, 21 nt, synthetic construct
  source 1..21: mol_type = other RNA
cgagcttcttcatcgtggtga

SEQ ID NO: 84589 - RNA, 21 nt, synthetic construct
  source 1..21: mol_type = other RNA
gcccggggctgaccagggcta

SEQ ID NO: 84590 - RNA, 21 nt, synthetic construct
  source 1..21: mol_type = other RNA
ccaccacacccacaaccagaa

SEQ ID NO: 84591 - RNA, 21 nt, synthetic construct
  source 1..21: mol_type = other RNA
accacaactgtggccactgga

SEQ ID NO: 84592 - RNA, 21 nt, synthetic construct
  source 1..21: mol_type = other RNA
gggccacaccacggccaccta

SEQ ID NO: 84593 - RNA, 21 nt, synthetic construct
  source 1..21: mol_type = other RNA
ccaccacacccacaaccagaa

SEQ ID NO: 84594 - RNA, 21 nt, synthetic construct
  source 1..21: mol_type = other RNA
accacaactgtggccactgga

SEQ ID NO: 84595 - RNA, 21 nt, synthetic construct
  source 1..21: mol_type = other RNA
gcagcacagtgactccctcca

SEQ ID NO: 84596 - RNA, 21 nt, synthetic construct
  source 1..21: mol_type = other RNA
gatcctcacagagcagaccaa

SEQ ID NO: 84597 - RNA, 21 nt, synthetic construct
  source 1..21: mol_type = other RNA
ccaccacacccacaaccagaa

SEQ ID NO: 84598 - RNA, 21 nt, synthetic construct
  source 1..21: mol_type = other RNA
accacaactgtggccactgga

SEQ ID NO: 84599 - RNA, 21 nt, synthetic construct
  source 1..21: mol_type = other RNA
gcagcacagtgactccctcca

SEQ ID NO: 84600 - RNA, 21 nt, synthetic construct
  source 1..21: mol_type = other RNA
accacaactgtggccactgga

SEQ ID NO: 84601 - RNA, 21 nt, synthetic construct
  source 1..21: mol_type = other RNA
gcagcacagtgactccctcca

SEQ ID NO: 84602 - RNA, 21 nt, synthetic construct
  source 1..21: mol_type = other RNA
gggccacaccacggccaccta

SEQ ID NO: 84603 - RNA, 21 nt, synthetic construct
  source 1..21: mol_type = other RNA
accacaactgtggccactgga

SEQ ID NO: 84604 - RNA, 21 nt, synthetic construct
  source 1..21: mol_type = other RNA
tgaggctgagggtggagtcca

SEQ ID NO: 84605 - RNA, 21 nt, synthetic construct
  source 1..21: mol_type = other RNA
gctgccaggagaggcgggtca

SEQ ID NO: 84606 - RNA, 21 nt, synthetic construct
  source 1..21: mol_type = other RNA
gcccaggaggccactgctgta

SEQ ID NO: 84607 - RNA, 21 nt, synthetic construct
  source 1..21: mol_type = other RNA
ctgctgcccaccccgtgggta

SEQ ID NO: 84608 - RNA, 21 nt, synthetic construct
  source 1..21: mol_type = other RNA
aggggtcagcatcccaaagca

SEQ ID NO: 84609 - RNA, 21 nt, synthetic construct
  source 1..21: mol_type = other RNA
tcaatgggcagcgggaggaga

SEQ ID NO: 84610 - RNA, 21 nt, synthetic construct
  source 1..21: mol_type = other RNA
agccgcactggcctcctggta

SEQ ID NO: 84611 - RNA, 21 nt, synthetic construct
  source 1..21: mol_type = other RNA
gactacatcaaggtcagcata

SEQ ID NO: 84612 - RNA, 21 nt, synthetic construct
  source 1..21: mol_type = other RNA
acccgaagtgcccacccagca

SEQ ID NO: 84613 - RNA, 21 nt, synthetic construct
  source 1..21: mol_type = other RNA
tcgcagactgggtccagctca

SEQ ID NO: 84614 - RNA, 21 nt, synthetic construct
  source 1..21: mol_type = other RNA
accatgtccacagccacacca

SEQ ID NO: 84615 - RNA, 21 nt, synthetic construct
  source 1..21: mol_type = other RNA
tcagcacaaccaccacaccca

SEQ ID NO: 84616 - RNA, 21 nt, synthetic construct
  source 1..21: mol_type = other RNA
aaccacggtggtgaccatgga

SEQ ID NO: 84617 - RNA, 21 nt, synthetic construct
  source 1..21: mol_type = other RNA
tttggcctggtctgcaggaaa

SEQ ID NO: 84618 - RNA, 21 nt, synthetic construct
  source 1..21: mol_type = other RNA
ctcctccacccaggcaactga

SEQ ID NO: 84619 - RNA, 21 nt, synthetic construct
  source 1..21: mol_type = other RNA
accatgtccacagccacacca

SEQ ID NO: 84620 - RNA, 21 nt, synthetic construct
  source 1..21: mol_type = other RNA
tcagcacaaccaccacaccca

SEQ ID NO: 84621 - RNA, 21 nt, synthetic construct
  source 1..21: mol_type = other RNA
aaccacggtggtgaccatgga

SEQ ID NO: 84622 - RNA, 21 nt, synthetic construct
  source 1..21: mol_type = other RNA
tttggcctggtctgcaggaaa

SEQ ID NO: 84623 - RNA, 21 nt, synthetic construct
  source 1..21: mol_type = other RNA
accatgtccacagccacacca

SEQ ID NO: 84624 - RNA, 21 nt, synthetic construct
  source 1..21: mol_type = other RNA
tcagcacaaccaccacaccca

SEQ ID NO: 84625 - RNA, 21 nt, synthetic construct
  source 1..21: mol_type = other RNA
tttggcctggtctgcaggaaa

SEQ ID NO: 84626 - RNA, 21 nt, synthetic construct
  source 1..21: mol_type = other RNA
ctcctccacccaggcaactga

SEQ ID NO: 84627 - RNA, 21 nt, synthetic construct
  source 1..21: mol_type = other RNA
accatgtccacagccacacca

SEQ ID NO: 84628 - RNA, 21 nt, synthetic construct
  source 1..21: mol_type = other RNA
tcagcacaaccaccacaccca

SEQ ID NO: 84629 - RNA, 21 nt, synthetic construct
  source 1..21: mol_type = other RNA
tttggcctggtctgcaggaaa

SEQ ID NO: 84630 - RNA, 21 nt, synthetic construct
  source 1..21: mol_type = other RNA
ctcctccacccaggcaactga

SEQ ID NO: 84631 - RNA, 21 nt, synthetic construct
  source 1..21: mol_type = other RNA
accatgtccacagccacacca

SEQ ID NO: 84632 - RNA, 21 nt, synthetic construct
  source 1..21: mol_type = other RNA
tcagcacaaccaccacaccca

SEQ ID NO: 84633 - RNA, 21 nt, synthetic construct
  source 1..21: mol_type = other RNA
acaatccacacctcctctaca

SEQ ID NO: 84634 - RNA, 21 nt, synthetic construct
  source 1..21: mol_type = other RNA
cagatgtgtccagctgcagga

SEQ ID NO: 84635 - RNA, 21 nt, synthetic construct
  source 1..21: mol_type = other RNA
tggcacaccccccactgccaa

SEQ ID NO: 84636 - RNA, 21 nt, synthetic construct
  source 1..21: mol_type = other RNA
ccatgcctgctgcagggtaaa

SEQ ID NO: 84637 - RNA, 21 nt, synthetic construct
  source 1..21: mol_type = other RNA
gagccgagctgggagaatgca

SEQ ID NO: 84638 - RNA, 21 nt, synthetic construct
  source 1..21: mol_type = other RNA
ccaccttcgccgcctgccgca

SEQ ID NO: 84639 - RNA, 21 nt, synthetic construct
  source 1..21: mol_type = other RNA
ccaccaccgccaccacaccta

SEQ ID NO: 84640 - RNA, 21 nt, synthetic construct
  source 1..21: mol_type = other RNA
ccttccacggtgacttcccaa

SEQ ID NO: 84641 - RNA, 21 nt, synthetic construct
  source 1..21: mol_type = other RNA
ccaccaccgccaccacaccta

SEQ ID NO: 84642 - RNA, 21 nt, synthetic construct
  source 1..21: mol_type = other RNA
gacaagcacagccaccaaata

SEQ ID NO: 84643 - RNA, 21 nt, synthetic construct
  source 1..21: mol_type = other RNA
ccaccaccgccaccacaccta

SEQ ID NO: 84644 - RNA, 21 nt, synthetic construct
  source 1..21: mol_type = other RNA
ccttccacggtgacttcccaa

SEQ ID NO: 84645 - RNA, 21 nt, synthetic construct
  source 1..21: mol_type = other RNA
ccaccaccgccaccacaccta

SEQ ID NO: 84646 - RNA, 21 nt, synthetic construct
  source 1..21: mol_type = other RNA
gacaagcacagccaccaaata

SEQ ID NO: 84647 - RNA, 21 nt, synthetic construct
  source 1..21: mol_type = other RNA
gatggcggagggctgcttcta

SEQ ID NO: 84648 - RNA, 21 nt, synthetic construct
  source 1..21: mol_type = other RNA
tgcaggaaccggaggtgggaa

SEQ ID NO: 84649 - RNA, 21 nt, synthetic construct
  source 1..21: mol_type = other RNA
ccccccagcagtccccacaca

SEQ ID NO: 84650 - RNA, 21 nt, synthetic construct
  source 1..21: mol_type = other RNA
tcccccagcagtccccacaca

SEQ ID NO: 84651 - RNA, 21 nt, synthetic construct
  source 1..21: mol_type = other RNA
ccccccagcagtccccacaca

SEQ ID NO: 84652 - RNA, 21 nt, synthetic construct
  source 1..21: mol_type = other RNA
tcccccagcagtccccacaca

SEQ ID NO: 84653 - RNA, 21 nt, synthetic construct
  source 1..21: mol_type = other RNA
cagcacggccaccacacccga

SEQ ID NO: 84654 - RNA, 21 nt, synthetic construct
  source 1..21: mol_type = other RNA
ctccaccctgtggaccacgta

SEQ ID NO: 84655 - RNA, 21 nt, synthetic construct
  source 1..21: mol_type = other RNA
cccagagcctgcctgtgtgca

SEQ ID NO: 84656 - RNA, 21 nt, synthetic construct
  source 1..21: mol_type = other RNA
tcaacggcctcccggccttca

SEQ ID NO: 84657 - RNA, 21 nt, synthetic construct
  source 1..21: mol_type = other RNA
cccagcgcgcgcagctctgca

SEQ ID NO: 84658 - RNA, 21 nt, synthetic construct
  source 1..21: mol_type = other RNA
cctgctctgtgcagggcggga

SEQ ID NO: 84659 - RNA, 21 nt, synthetic construct
  source 1..21: mol_type = other RNA
gctaagctgcctgggagccta

SEQ ID NO: 84660 - RNA, 21 nt, synthetic construct
  source 1..21: mol_type = other RNA
acctggactgcagcaacagca

SEQ ID NO: 84661 - RNA, 21 nt, synthetic construct
  source 1..21: mol_type = other RNA
gatcctccaagaggggaccta

SEQ ID NO: 84662 - RNA, 21 nt, synthetic construct
  source 1..21: mol_type = other RNA
aacagagtcccccgctctgta

SEQ ID NO: 84663 - RNA, 21 nt, synthetic construct
  source 1..21: mol_type = other RNA
cgcagactgggtccagctcaa

SEQ ID NO: 84664 - RNA, 21 nt, synthetic construct
  source 1..21: mol_type = other RNA
gacgcctgcaggctccacaga

SEQ ID NO: 84665 - RNA, 21 nt, synthetic construct
  source 1..21: mol_type = other RNA
ccctcacagccacccacgcta

SEQ ID NO: 84666 - RNA, 21 nt, synthetic construct
  source 1..21: mol_type = other RNA
tccaccctgagaacagctcca

SEQ ID NO: 84667 - RNA, 21 nt, synthetic construct
  source 1..21: mol_type = other RNA
ccaccacggccaccacaccca

SEQ ID NO: 84668 - RNA, 21 nt, synthetic construct
  source 1..21: mol_type = other RNA
ctgagaagcacagccaccaca

SEQ ID NO: 84669 - RNA, 21 nt, synthetic construct
  source 1..21: mol_type = other RNA
cctccctgggcaccacctgga

SEQ ID NO: 84670 - RNA, 21 nt, synthetic construct
  source 1..21: mol_type = other RNA
atgtccacagccacaccctca

SEQ ID NO: 84671 - RNA, 21 nt, synthetic construct
  source 1..21: mol_type = other RNA
acaccctcctccactccagaa

SEQ ID NO: 84672 - RNA, 21 nt, synthetic construct
  source 1..21: mol_type = other RNA
ggggccaccggctctgtggca

SEQ ID NO: 84673 - RNA, 21 nt, synthetic construct
  source 1..21: mol_type = other RNA
tccagtgtggatcagcacaaa

SEQ ID NO: 84674 - RNA, 21 nt, synthetic construct
  source 1..21: mol_type = other RNA
accaccacacccacaaccaga

SEQ ID NO: 84675 - RNA, 21 nt, synthetic construct
  source 1..21: mol_type = other RNA
tgcagccaccagcaacacaga

SEQ ID NO: 84676 - RNA, 21 nt, synthetic construct
  source 1..21: mol_type = other RNA
agggaccacccacacacccca

SEQ ID NO: 84677 - RNA, 21 nt, synthetic construct
  source 1..21: mol_type = other RNA
cagagccttccacggtgacta

SEQ ID NO: 84678 - RNA, 21 nt, synthetic construct
  source 1..21: mol_type = other RNA
tggactttggcctggtctgca

SEQ ID NO: 84679 - RNA, 21 nt, synthetic construct
  source 1..21: mol_type = other RNA
ctgagaagcacagccaccaca

SEQ ID NO: 84680 - RNA, 21 nt, synthetic construct
  source 1..21: mol_type = other RNA
cctccctgggcaccacctgga

SEQ ID NO: 84681 - RNA, 21 nt, synthetic construct
  source 1..21: mol_type = other RNA
atgtccacagccacaccctca

SEQ ID NO: 84682 - RNA, 21 nt, synthetic construct
  source 1..21: mol_type = other RNA
acaccctcctccactccagaa

SEQ ID NO: 84683 - RNA, 21 nt, synthetic construct
  source 1..21: mol_type = other RNA
ggggccaccggctctgtggca

SEQ ID NO: 84684 - RNA, 21 nt, synthetic construct
  source 1..21: mol_type = other RNA
tccagtgtggatcagcacaaa

SEQ ID NO: 84685 - RNA, 21 nt, synthetic construct
  source 1..21: mol_type = other RNA
accaccacacccacaaccaga

SEQ ID NO: 84686 - RNA, 21 nt, synthetic construct
  source 1..21: mol_type = other RNA
agggaccacccacacacccca

SEQ ID NO: 84687 - RNA, 21 nt, synthetic construct
  source 1..21: mol_type = other RNA
tggactttggcctggtctgca

SEQ ID NO: 84688 - RNA, 21 nt, synthetic construct
  source 1..21: mol_type = other RNA
cacttcctcctccagtccaaa

SEQ ID NO: 84689 - RNA, 21 nt, synthetic construct
  source 1..21: mol_type = other RNA
gctgacaagcacagccaccaa

SEQ ID NO: 84690 - RNA, 21 nt, synthetic construct
  source 1..21: mol_type = other RNA
cccatcccctccttcacccta

SEQ ID NO: 84691 - RNA, 21 nt, synthetic construct
  source 1..21: mol_type = other RNA
gccaccatgtccacaatccaa

SEQ ID NO: 84692 - RNA, 21 nt, synthetic construct
  source 1..21: mol_type = other RNA
acacctccacagtgctgacca

SEQ ID NO: 84693 - RNA, 21 nt, synthetic construct
  source 1..21: mol_type = other RNA
caactgcagccactggcccca

SEQ ID NO: 84694 - RNA, 21 nt, synthetic construct
  source 1..21: mol_type = other RNA
gcctcctccacccgggcaaca

SEQ ID NO: 84695 - RNA, 21 nt, synthetic construct
  source 1..21: mol_type = other RNA
ctgagaagcacagccaccaca

SEQ ID NO: 84696 - RNA, 21 nt, synthetic construct
  source 1..21: mol_type = other RNA
atgtccacagccacaccctca

SEQ ID NO: 84697 - RNA, 21 nt, synthetic construct
  source 1..21: mol_type = other RNA
agggccaccggctctgtggca

SEQ ID NO: 84698 - RNA, 21 nt, synthetic construct
  source 1..21: mol_type = other RNA
tccagtgtggatcagcacaaa

SEQ ID NO: 84699 - RNA, 21 nt, synthetic construct
  source 1..21: mol_type = other RNA
accaccacacccacaaccaga

SEQ ID NO: 84700 - RNA, 21 nt, synthetic construct
  source 1..21: mol_type = other RNA
agggaccacccacacacccca

SEQ ID NO: 84701 - RNA, 21 nt, synthetic construct
  source 1..21: mol_type = other RNA
cagagccttccacggtgacta

SEQ ID NO: 84702 - RNA, 21 nt, synthetic construct
  source 1..21: mol_type = other RNA
tggactttggcctggtctgca

SEQ ID NO: 84703 - RNA, 21 nt, synthetic construct
  source 1..21: mol_type = other RNA
ctgagaagcacagccaccaca

SEQ ID NO: 84704 - RNA, 21 nt, synthetic construct
  source 1..21: mol_type = other RNA
cctccctgggcaccacctgga

SEQ ID NO: 84705 - RNA, 21 nt, synthetic construct
  source 1..21: mol_type = other RNA
atgtccacagccacaccctca

SEQ ID NO: 84706 - RNA, 21 nt, synthetic construct
  source 1..21: mol_type = other RNA
acaccctcctccactccagaa

SEQ ID NO: 84707 - RNA, 21 nt, synthetic construct
  source 1..21: mol_type = other RNA
agggccaccggctctgtggca

SEQ ID NO: 84708 - RNA, 21 nt, synthetic construct
  source 1..21: mol_type = other RNA
tccagtgtggatcagcacaaa

SEQ ID NO: 84709 - RNA, 21 nt, synthetic construct
  source 1..21: mol_type = other RNA
accaccacacccacaaccaga

SEQ ID NO: 84710 - RNA, 21 nt, synthetic construct
  source 1..21: mol_type = other RNA
agggaccacccacacacccca

SEQ ID NO: 84711 - RNA, 21 nt, synthetic construct
  source 1..21: mol_type = other RNA
tggactttggcctggtctgca

SEQ ID NO: 84712 - RNA, 21 nt, synthetic construct
  source 1..21: mol_type = other RNA
accagcccggccaccacacca

SEQ ID NO: 84713 - RNA, 21 nt, synthetic construct
  source 1..21: mol_type = other RNA
cacttcctcctccagtccaaa

SEQ ID NO: 84714 - RNA, 21 nt, synthetic construct
  source 1..21: mol_type = other RNA
gctgacaagcacagccaccaa

SEQ ID NO: 84715 - RNA, 21 nt, synthetic construct
  source 1..21: mol_type = other RNA
cccctcctccacccttgggaa

SEQ ID NO: 84716 - RNA, 21 nt, synthetic construct
  source 1..21: mol_type = other RNA
gccaccatgtccacaatccaa

SEQ ID NO: 84717 - RNA, 21 nt, synthetic construct
  source 1..21: mol_type = other RNA
acacctccacagtgctgacca

SEQ ID NO: 84718 - RNA, 21 nt, synthetic construct
  source 1..21: mol_type = other RNA
caactgcagccactggcccca

SEQ ID NO: 84719 - RNA, 21 nt, synthetic construct
  source 1..21: mol_type = other RNA
ctgagaagcacagccaccaca

SEQ ID NO: 84720 - RNA, 21 nt, synthetic construct
  source 1..21: mol_type = other RNA
cctccctgggcaccacctgga

SEQ ID NO: 84721 - RNA, 21 nt, synthetic construct
  source 1..21: mol_type = other RNA
atgtccacagccacaccctca

SEQ ID NO: 84722 - RNA, 21 nt, synthetic construct
  source 1..21: mol_type = other RNA
acaccctcctccactccagaa

SEQ ID NO: 84723 - RNA, 21 nt, synthetic construct
  source 1..21: mol_type = other RNA
ggggccaccggctctgtggca

SEQ ID NO: 84724 - RNA, 21 nt, synthetic construct
  source 1..21: mol_type = other RNA
tccagtgtggatcagcacaaa

SEQ ID NO: 84725 - RNA, 21 nt, synthetic construct
  source 1..21: mol_type = other RNA
accaccacacccacaaccaga

SEQ ID NO: 84726 - RNA, 21 nt, synthetic construct
  source 1..21: mol_type = other RNA
cacttcctcctccagtccaaa

SEQ ID NO: 84727 - RNA, 21 nt, synthetic construct
  source 1..21: mol_type = other RNA
tcctccaccctgtggaccaca

SEQ ID NO: 84728 - RNA, 21 nt, synthetic construct
  source 1..21: mol_type = other RNA
cctccaccctgtggaccacga

SEQ ID NO: 84729 - RNA, 21 nt, synthetic construct
  source 1..21: mol_type = other RNA
tccaccatgtccacaatccaa

SEQ ID NO: 84730 - RNA, 21 nt, synthetic construct
  source 1..21: mol_type = other RNA
acacctccacagtgctgacca

SEQ ID NO: 84731 - RNA, 21 nt, synthetic construct
  source 1..21: mol_type = other RNA
ggcatttggacagtttttcta

SEQ ID NO: 84732 - RNA, 21 nt, synthetic construct
  source 1..21: mol_type = other RNA
ctggacccaaagcctgtggca

SEQ ID NO: 84733 - RNA, 21 nt, synthetic construct
  source 1..21: mol_type = other RNA
tgcatctgcagcatgtgggga

SEQ ID NO: 84734 - RNA, 21 nt, synthetic construct
  source 1..21: mol_type = other RNA
atcgtcctcactgtcaccata

SEQ ID NO: 84735 - RNA, 21 nt, synthetic construct
  source 1..21: mol_type = other RNA
acagcctgccacctgcaacta

SEQ ID NO: 84736 - RNA, 21 nt, synthetic construct
  source 1..21: mol_type = other RNA
tgctgcccaccccgtgggtga

SEQ ID NO: 84737 - RNA, 21 nt, synthetic construct
  source 1..21: mol_type = other RNA
ttggccttgcccctccctgaa

SEQ ID NO: 84738 - RNA, 21 nt, synthetic construct
  source 1..21: mol_type = other RNA
ccaggtcagagaggggtcaga

SEQ ID NO: 84739 - RNA, 21 nt, synthetic construct
  source 1..21: mol_type = other RNA
ggggtcagcatcccaaagcca

SEQ ID NO: 84740 - RNA, 21 nt, synthetic construct
  source 1..21: mol_type = other RNA
cccagttttgcaaataaacca

SEQ ID NO: 84741 - RNA, 21 nt, synthetic construct
  source 1..21: mol_type = other RNA
atgcagggcacaccatggata

SEQ ID NO: 84742 - RNA, 21 nt, synthetic construct
  source 1..21: mol_type = other RNA
tgggtcagcaactgccagtca

SEQ ID NO: 84743 - RNA, 21 nt, synthetic construct
  source 1..21: mol_type = other RNA
ggggacttcccacaccccaga

SEQ ID NO: 84744 - RNA, 21 nt, synthetic construct
  source 1..21: mol_type = other RNA
ggggacttcccacaccccaga

SEQ ID NO: 84745 - RNA, 21 nt, synthetic construct
  source 1..21: mol_type = other RNA
cttcacagtcaccccctccta

SEQ ID NO: 84746 - RNA, 21 nt, synthetic construct
  source 1..21: mol_type = other RNA
cccatccccccagtgctgaca

SEQ ID NO: 84747 - RNA, 21 nt, synthetic construct
  source 1..21: mol_type = other RNA
cccatccccccagtgctgaca

SEQ ID NO: 84748 - RNA, 21 nt, synthetic construct
  source 1..21: mol_type = other RNA
ctggcacccaaggacccctga

SEQ ID NO: 84749 - RNA, 21 nt, synthetic construct
  source 1..21: mol_type = other RNA
ggccaccggctctgtggccaa

SEQ ID NO: 84750 - RNA, 21 nt, synthetic construct
  source 1..21: mol_type = other RNA
ggccaccggctctgtggccaa

SEQ ID NO: 84751 - RNA, 21 nt, synthetic construct
  source 1..21: mol_type = other RNA
ggccaccggctctgtggccaa

SEQ ID NO: 84752 - RNA, 21 nt, synthetic construct
  source 1..21: mol_type = other RNA
ggccaccggctctgtggccaa

SEQ ID NO: 84753 - RNA, 21 nt, synthetic construct
  source 1..21: mol_type = other RNA
ggccaccggctctgtggccaa

SEQ ID NO: 84754 - RNA, 21 nt, synthetic construct
  source 1..21: mol_type = other RNA
gtggcaccccgcgctccgtga

SEQ ID NO: 84755 - RNA, 21 nt, synthetic construct
  source 1..21: mol_type = other RNA
cccctcaacatgcagcaccaa

SEQ ID NO: 84756 - RNA, 21 nt, synthetic construct
  source 1..21: mol_type = other RNA
actgagtccactggatccaca

SEQ ID NO: 84757 - RNA, 21 nt, synthetic construct
  source 1..21: mol_type = other RNA
tcacaaagctgaccacaacaa

SEQ ID NO: 84758 - RNA, 21 nt, synthetic construct
  source 1..21: mol_type = other RNA
actgagtccactggatccaca

SEQ ID NO: 84759 - RNA, 21 nt, synthetic construct
  source 1..21: mol_type = other RNA
cagggcacaccatggatggca

SEQ ID NO: 84760 - RNA, 21 nt, synthetic construct
  source 1..21: mol_type = other RNA
tgctccaacccccagcgcgca

SEQ ID NO: 84761 - RNA, 21 nt, synthetic construct
  source 1..21: mol_type = other RNA
agcaacacagtgactccctca

SEQ ID NO: 84762 - RNA, 21 nt, synthetic construct
  source 1..21: mol_type = other RNA
accacgacaagggccaccaga

SEQ ID NO: 84763 - RNA, 21 nt, synthetic construct
  source 1..21: mol_type = other RNA
accacgacaagggccaccaga

SEQ ID NO: 84764 - RNA, 21 nt, synthetic construct
  source 1..21: mol_type = other RNA
caagcacagccacaaaatcca

SEQ ID NO: 84765 - RNA, 21 nt, synthetic construct
  source 1..21: mol_type = other RNA
actgtcaccatggtgcatgga

SEQ ID NO: 84766 - RNA, 21 nt, synthetic construct
  source 1..21: mol_type = other RNA
ggctcccccacacacccgtga

SEQ ID NO: 84767 - RNA, 21 nt, synthetic construct
  source 1..21: mol_type = other RNA
gccggagcgcccgcgcagcaa

SEQ ID NO: 84768 - RNA, 21 nt, synthetic construct
  source 1..21: mol_type = other RNA
ggtaactcagggctgaggtca

SEQ ID NO: 84769 - RNA, 21 nt, synthetic construct
  source 1..21: mol_type = other RNA
ccacacctcctctactccaga

SEQ ID NO: 84770 - RNA, 21 nt, synthetic construct
  source 1..21: mol_type = other RNA
aaccagacctgtggcctgtga

SEQ ID NO: 84771 - RNA, 21 nt, synthetic construct
  source 1..21: mol_type = other RNA
acagcctggacttcggccaca

SEQ ID NO: 84772 - RNA, 21 nt, synthetic construct
  source 1..21: mol_type = other RNA
ggcatcttgggcaccacccaa

SEQ ID NO: 84773 - RNA, 21 nt, synthetic construct
  source 1..21: mol_type = other RNA
acagcctggacttcggccaca

SEQ ID NO: 84774 - RNA, 21 nt, synthetic construct
  source 1..21: mol_type = other RNA
acagcctggacttcggccaca

SEQ ID NO: 84775 - RNA, 21 nt, synthetic construct
  source 1..21: mol_type = other RNA
ggcatcttgggcaccacccaa

SEQ ID NO: 84776 - RNA, 21 nt, synthetic construct
  source 1..21: mol_type = other RNA
acagcctggacttcggccaca

SEQ ID NO: 84777 - RNA, 21 nt, synthetic construct
  source 1..21: mol_type = other RNA
tgcccctccctgatgtcacta

SEQ ID NO: 84778 - RNA, 21 nt, synthetic construct
  source 1..21: mol_type = other RNA
gtgttctctgagcactgccga

SEQ ID NO: 84779 - RNA, 21 nt, synthetic construct
  source 1..21: mol_type = other RNA
cctgtgctggctgacatcgaa

SEQ ID NO: 84780 - RNA, 21 nt, synthetic construct
  source 1..21: mol_type = other RNA
cggccccaggtaccaccacca

SEQ ID NO: 84781 - RNA, 21 nt, synthetic construct
  source 1..21: mol_type = other RNA
acaatccacccctcctccaca

SEQ ID NO: 84782 - RNA, 21 nt, synthetic construct
  source 1..21: mol_type = other RNA
acaatccacccctcctccaca

SEQ ID NO: 84783 - RNA, 21 nt, synthetic construct
  source 1..21: mol_type = other RNA
caccatgtccacagccacaca

SEQ ID NO: 84784 - RNA, 21 nt, synthetic construct
  source 1..21: mol_type = other RNA
caccatgtccacagccacaca

SEQ ID NO: 84785 - RNA, 21 nt, synthetic construct
  source 1..21: mol_type = other RNA
caccatgtccacagccacaca

SEQ ID NO: 84786 - RNA, 21 nt, synthetic construct
  source 1..21: mol_type = other RNA
caccatgtccacagccacaca

SEQ ID NO: 84787 - RNA, 21 nt, synthetic construct
  source 1..21: mol_type = other RNA
caccatgtccacagccacaca

SEQ ID NO: 84788 - RNA, 21 nt, synthetic construct
  source 1..21: mol_type = other RNA
gttggctctggcggccatgca

SEQ ID NO: 84789 - RNA, 21 nt, synthetic construct
  source 1..21: mol_type = other RNA
gtggatgcctgccagcccaca

SEQ ID NO: 84790 - RNA, 21 nt, synthetic construct
  source 1..21: mol_type = other RNA
ccagctcaggccccgtgacga

SEQ ID NO: 84791 - RNA, 21 nt, synthetic construct
  source 1..21: mol_type = other RNA
tgtccacctctcaggccgaga

SEQ ID NO: 84792 - RNA, 21 nt, synthetic construct
  source 1..21: mol_type = other RNA
tgctgaccagcacggccacca

SEQ ID NO: 84793 - RNA, 21 nt, synthetic construct
  source 1..21: mol_type = other RNA
tgctgaccagcacggccacca

SEQ ID NO: 84794 - RNA, 21 nt, synthetic construct
  source 1..21: mol_type = other RNA
tgctgaccagcacggccacca

SEQ ID NO: 84795 - RNA, 21 nt, synthetic construct
  source 1..21: mol_type = other RNA
cacagctggaggggatggcga

SEQ ID NO: 84796 - RNA, 21 nt, synthetic construct
  source 1..21: mol_type = other RNA
gcccctccctgatgtcactga

SEQ ID NO: 84797 - RNA, 21 nt, synthetic construct
  source 1..21: mol_type = other RNA
ggacccgctgcccttgccgga

SEQ ID NO: 84798 - RNA, 21 nt, synthetic construct
  source 1..21: mol_type = other RNA
ctcagcggggtggtggaggca

SEQ ID NO: 84799 - RNA, 21 nt, synthetic construct
  source 1..21: mol_type = other RNA
actgcacacccagtggcatca

SEQ ID NO: 84800 - RNA, 21 nt, synthetic construct
  source 1..21: mol_type = other RNA
cggcaccatcatcaggaagga

SEQ ID NO: 84801 - RNA, 21 nt, synthetic construct
  source 1..21: mol_type = other RNA
cccggcctgggaggcggagaa

SEQ ID NO: 84802 - RNA, 21 nt, synthetic construct
  source 1..21: mol_type = other RNA
gtcaccccctcggccccagga

SEQ ID NO: 84803 - RNA, 21 nt, synthetic construct
  source 1..21: mol_type = other RNA
acagagcagaccacagcagca

SEQ ID NO: 84804 - RNA, 21 nt, synthetic construct
  source 1..21: mol_type = other RNA
cccacacctccacagtgctga

SEQ ID NO: 84805 - RNA, 21 nt, synthetic construct
  source 1..21: mol_type = other RNA
cctcaactccagggacaacta

SEQ ID NO: 84806 - RNA, 21 nt, synthetic construct
  source 1..21: mol_type = other RNA
cccacacctccacagtgctga

SEQ ID NO: 84807 - RNA, 21 nt, synthetic construct
  source 1..21: mol_type = other RNA
cccacacctccacagtgctga

SEQ ID NO: 84808 - RNA, 21 nt, synthetic construct
  source 1..21: mol_type = other RNA
gtgcgagtgcatctgcagcaa

SEQ ID NO: 84809 - RNA, 21 nt, synthetic construct
  source 1..21: mol_type = other RNA
agtcttccaggcccggctgca

SEQ ID NO: 84810 - RNA, 21 nt, synthetic construct
  source 1..21: mol_type = other RNA
gtgggtcagcaactgccagta

SEQ ID NO: 84811 - RNA, 21 nt, synthetic construct
  source 1..21: mol_type = other RNA
cagccatcctgcacacctaca

SEQ ID NO: 84812 - RNA, 21 nt, synthetic construct
  source 1..21: mol_type = other RNA
gcaccgcttccaaagagccga

SEQ ID NO: 84813 - RNA, 21 nt, synthetic construct
  source 1..21: mol_type = other RNA
gaggggcagtctgtgagcaga

SEQ ID NO: 84814 - RNA, 21 nt, synthetic construct
  source 1..21: mol_type = other RNA
cttgcccctccctgatgtcaa

SEQ ID NO: 84815 - RNA, 21 nt, synthetic construct
  source 1..21: mol_type = other RNA
gcacggacgaggagggcatca

SEQ ID NO: 84816 - RNA, 21 nt, synthetic construct
  source 1..21: mol_type = other RNA
tgcctgccagcccacttgcca

SEQ ID NO: 84817 - RNA, 21 nt, synthetic construct
  source 1..21: mol_type = other RNA
accccgtcctccaccccggga

SEQ ID NO: 84818 - RNA, 21 nt, synthetic construct
  source 1..21: mol_type = other RNA
ttccacgtccaccccctccta

SEQ ID NO: 84819 - RNA, 21 nt, synthetic construct
  source 1..21: mol_type = other RNA
ctgccactccatcatcaacca

SEQ ID NO: 84820 - RNA, 21 nt, synthetic construct
  source 1..21: mol_type = other RNA
gcacacccagtggcatccaga

SEQ ID NO: 84821 - RNA, 21 nt, synthetic construct
  source 1..21: mol_type = other RNA
tcccacaccctagcagcaaca

SEQ ID NO: 84822 - RNA, 21 nt, synthetic construct
  source 1..21: mol_type = other RNA
acagccaccggctccaccaca

SEQ ID NO: 84823 - RNA, 21 nt, synthetic construct
  source 1..21: mol_type = other RNA
accacacccgcagccaccaga

SEQ ID NO: 84824 - RNA, 21 nt, synthetic construct
  source 1..21: mol_type = other RNA
acccgcacccctgcagtgcta

SEQ ID NO: 84825 - RNA, 21 nt, synthetic construct
  source 1..21: mol_type = other RNA
ccccaccgccagtgtcctcca

SEQ ID NO: 84826 - RNA, 21 nt, synthetic construct
  source 1..21: mol_type = other RNA
aggaggagggcgactgctgta

SEQ ID NO: 84827 - RNA, 21 nt, synthetic construct
  source 1..21: mol_type = other RNA
cctgcccgtccccgtccccca

SEQ ID NO: 84828 - RNA, 21 nt, synthetic construct
  source 1..21: mol_type = other RNA
cccgtccccgtccccccacca

SEQ ID NO: 84829 - RNA, 21 nt, synthetic construct
  source 1..21: mol_type = other RNA
gcactggcctcctggtggaga

SEQ ID NO: 84830 - RNA, 21 nt, synthetic construct
  source 1..21: mol_type = other RNA
gcatctgccaccgcaccctga

SEQ ID NO: 84831 - RNA, 21 nt, synthetic construct
  source 1..21: mol_type = other RNA
ggctgcacctgccccgcggga

SEQ ID NO: 84832 - RNA, 21 nt, synthetic construct
  source 1..21: mol_type = other RNA
ccccatggtgtacctggacta

SEQ ID NO: 84833 - RNA, 21 nt, synthetic construct
  source 1..21: mol_type = other RNA
tgtgtgcacaacgaggccaca

SEQ ID NO: 84834 - RNA, 21 nt, synthetic construct
  source 1..21: mol_type = other RNA
aacacctgcacctgcaggaaa

SEQ ID NO: 84835 - RNA, 21 nt, synthetic construct
  source 1..21: mol_type = other RNA
accacccacgggaccttccga

SEQ ID NO: 84836 - RNA, 21 nt, synthetic construct
  source 1..21: mol_type = other RNA
cctggcacccaaggaccccta

SEQ ID NO: 84837 - RNA, 21 nt, synthetic construct
  source 1..21: mol_type = other RNA
agcaggagggcgtcttcaaga

SEQ ID NO: 84838 - RNA, 21 nt, synthetic construct
  source 1..21: mol_type = other RNA
cacgctcagcccttccaggga

SEQ ID NO: 84839 - RNA, 21 nt, synthetic construct
  source 1..21: mol_type = other RNA
cgctcagcccttccagggaca

SEQ ID NO: 84840 - RNA, 21 nt, synthetic construct
  source 1..21: mol_type = other RNA
agccacccacgctggccccaa

SEQ ID NO: 84841 - RNA, 21 nt, synthetic construct
  source 1..21: mol_type = other RNA
cgtccactggatccacggcca

SEQ ID NO: 84842 - RNA, 21 nt, synthetic construct
  source 1..21: mol_type = other RNA
caccagctccaaagccactca

SEQ ID NO: 84843 - RNA, 21 nt, synthetic construct
  source 1..21: mol_type = other RNA
ttcctccctgggcaccaccta

SEQ ID NO: 84844 - RNA, 21 nt, synthetic construct
  source 1..21: mol_type = other RNA
cccctcctccatcccggggaa

SEQ ID NO: 84845 - RNA, 21 nt, synthetic construct
  source 1..21: mol_type = other RNA
cagtgactccctcctctgcca

SEQ ID NO: 84846 - RNA, 21 nt, synthetic construct
  source 1..21: mol_type = other RNA
cccacatcacagagccttcca

SEQ ID NO: 84847 - RNA, 21 nt, synthetic construct
  source 1..21: mol_type = other RNA
gactccagccctttccagcca

SEQ ID NO: 84848 - RNA, 21 nt, synthetic construct
  source 1..21: mol_type = other RNA
atccgtgcggccggaggggca

SEQ ID NO: 84849 - RNA, 21 nt, synthetic construct
  source 1..21: mol_type = other RNA
agtccactggatccacggcca

SEQ ID NO: 84850 - RNA, 21 nt, synthetic construct
  source 1..21: mol_type = other RNA
caccagctccaaagccactca

SEQ ID NO: 84851 - RNA, 21 nt, synthetic construct
  source 1..21: mol_type = other RNA
ccaaagccactcccttctcca

SEQ ID NO: 84852 - RNA, 21 nt, synthetic construct
  source 1..21: mol_type = other RNA
ctcctccctgggcaccaccta

SEQ ID NO: 84853 - RNA, 21 nt, synthetic construct
  source 1..21: mol_type = other RNA
cccctcctccatcccggggaa

SEQ ID NO: 84854 - RNA, 21 nt, synthetic construct
  source 1..21: mol_type = other RNA
cagtgactccctcctctgcca

SEQ ID NO: 84855 - RNA, 21 nt, synthetic construct
  source 1..21: mol_type = other RNA
cccacatcacagagccttcca

SEQ ID NO: 84856 - RNA, 21 nt, synthetic construct
  source 1..21: mol_type = other RNA
cacaccagggccacctccaga

SEQ ID NO: 84857 - RNA, 21 nt, synthetic construct
  source 1..21: mol_type = other RNA
atccgtgcggccggaggggca

SEQ ID NO: 84858 - RNA, 21 nt, synthetic construct
  source 1..21: mol_type = other RNA
ccacgaccaccacaaccagga

SEQ ID NO: 84859 - RNA, 21 nt, synthetic construct
  source 1..21: mol_type = other RNA
cccctcctccatcccggggaa

SEQ ID NO: 84860 - RNA, 21 nt, synthetic construct
  source 1..21: mol_type = other RNA
cagtgactccctcctctgcca

SEQ ID NO: 84861 - RNA, 21 nt, synthetic construct
  source 1..21: mol_type = other RNA
cccacatcacagagccttcca

SEQ ID NO: 84862 - RNA, 21 nt, synthetic construct
  source 1..21: mol_type = other RNA
atccgtgcggccggaggggca

SEQ ID NO: 84863 - RNA, 21 nt, synthetic construct
  source 1..21: mol_type = other RNA
agtccactggatccacggcca

SEQ ID NO: 84864 - RNA, 21 nt, synthetic construct
  source 1..21: mol_type = other RNA
caccagctccaaagccactca

SEQ ID NO: 84865 - RNA, 21 nt, synthetic construct
  source 1..21: mol_type = other RNA
ccaaagccactcccttctcca

SEQ ID NO: 84866 - RNA, 21 nt, synthetic construct
  source 1..21: mol_type = other RNA
ctcctccctgggcaccaccta

SEQ ID NO: 84867 - RNA, 21 nt, synthetic construct
  source 1..21: mol_type = other RNA
cttccaccccaggaacagcta

SEQ ID NO: 84868 - RNA, 21 nt, synthetic construct
  source 1..21: mol_type = other RNA
cagtgactccctcctctgcca

SEQ ID NO: 84869 - RNA, 21 nt, synthetic construct
  source 1..21: mol_type = other RNA
cccacatcacagagccttcca

SEQ ID NO: 84870 - RNA, 21 nt, synthetic construct
  source 1..21: mol_type = other RNA
atccgtgcggccggaggggca

SEQ ID NO: 84871 - RNA, 21 nt, synthetic construct
  source 1..21: mol_type = other RNA
cgtccactggatccacggcca

SEQ ID NO: 84872 - RNA, 21 nt, synthetic construct
  source 1..21: mol_type = other RNA
caccagctccaaagccactca

SEQ ID NO: 84873 - RNA, 21 nt, synthetic construct
  source 1..21: mol_type = other RNA
ctcctccctgggcaccaccta

SEQ ID NO: 84874 - RNA, 21 nt, synthetic construct
  source 1..21: mol_type = other RNA
cccctcctccatcccggggaa

SEQ ID NO: 84875 - RNA, 21 nt, synthetic construct
  source 1..21: mol_type = other RNA
caccagctccaaagccactta

SEQ ID NO: 84876 - RNA, 21 nt, synthetic construct
  source 1..21: mol_type = other RNA
ctcactgagctgaccacaaca

SEQ ID NO: 84877 - RNA, 21 nt, synthetic construct
  source 1..21: mol_type = other RNA
ctgagctgaccacaacagcca

SEQ ID NO: 84878 - RNA, 21 nt, synthetic construct
  source 1..21: mol_type = other RNA
ggttccacggccaccgcctca

SEQ ID NO: 84879 - RNA, 21 nt, synthetic construct
  source 1..21: mol_type = other RNA
gtgaccaccatggccactata

SEQ ID NO: 84880 - RNA, 21 nt, synthetic construct
  source 1..21: mol_type = other RNA
ccaccgtggggaccacccgca

SEQ ID NO: 84881 - RNA, 21 nt, synthetic construct
  source 1..21: mol_type = other RNA
tccggcaggtgaatgagacca

SEQ ID NO: 84882 - RNA, 21 nt, synthetic construct
  source 1..21: mol_type = other RNA
gctgcccccgcgccctcagca

SEQ ID NO: 84883 - RNA, 21 nt, synthetic construct
  source 1..21: mol_type = other RNA
aaggaggagggcctgatccta

SEQ ID NO: 84884 - RNA, 21 nt, synthetic construct
  source 1..21: mol_type = other RNA
gtcttccaggcccggctgcca

SEQ ID NO: 84885 - RNA, 21 nt, synthetic construct
  source 1..21: mol_type = other RNA
acaccccccactgccagccca

SEQ ID NO: 84886 - RNA, 21 nt, synthetic construct
  source 1..21: mol_type = other RNA
gctggaggggatggcggagga

SEQ ID NO: 84887 - RNA, 21 nt, synthetic construct
  source 1..21: mol_type = other RNA
gtgcaggcctgcccctgcgta

SEQ ID NO: 84888 - RNA, 21 nt, synthetic construct
  source 1..21: mol_type = other RNA
aggcctgcccctgcgtgggaa

SEQ ID NO: 84889 - RNA, 21 nt, synthetic construct
  source 1..21: mol_type = other RNA
tcaggaggatgcctgcaacaa

SEQ ID NO: 84890 - RNA, 21 nt, synthetic construct
  source 1..21: mol_type = other RNA
caggaggatgcctgcaacaaa

SEQ ID NO: 84891 - RNA, 21 nt, synthetic construct
  source 1..21: mol_type = other RNA
gcagaaccaccgagtcaccca

SEQ ID NO: 84892 - RNA, 21 nt, synthetic construct
  source 1..21: mol_type = other RNA
cgcgtgccggacgctggtgta

SEQ ID NO: 84893 - RNA, 21 nt, synthetic construct
  source 1..21: mol_type = other RNA
gagctggatcccaaatacgca

SEQ ID NO: 84894 - RNA, 21 nt, synthetic construct
  source 1..21: mol_type = other RNA
aatgcagggcacaccatggaa

SEQ ID NO: 84895 - RNA, 21 nt, synthetic construct
  source 1..21: mol_type = other RNA
cctacgcccaggcctgccaca

SEQ ID NO: 84896 - RNA, 21 nt, synthetic construct
  source 1..21: mol_type = other RNA
gctctgtgatctgatgctgaa

SEQ ID NO: 84897 - RNA, 21 nt, synthetic construct
  source 1..21: mol_type = other RNA
ccaccgcctgggtcccccaca

SEQ ID NO: 84898 - RNA, 21 nt, synthetic construct
  source 1..21: mol_type = other RNA
agcgagctgtccacctctcaa

SEQ ID NO: 84899 - RNA, 21 nt, synthetic construct
  source 1..21: mol_type = other RNA
agggcgccactcaggagtcca

SEQ ID NO: 84900 - RNA, 21 nt, synthetic construct
  source 1..21: mol_type = other RNA
gcccgtccccgtccccccaca

SEQ ID NO: 84901 - RNA, 21 nt, synthetic construct
  source 1..21: mol_type = other RNA
cccgctgcccttgccggccga

SEQ ID NO: 84902 - RNA, 21 nt, synthetic construct
  source 1..21: mol_type = other RNA
ccgctgcccttgccggccgga

SEQ ID NO: 84903 - RNA, 21 nt, synthetic construct
  source 1..21: mol_type = other RNA
ctgagctgcggaagtgcggca

SEQ ID NO: 84904 - RNA, 21 nt, synthetic construct
  source 1..21: mol_type = other RNA
actcgggtggcgactgcgaga

SEQ ID NO: 84905 - RNA, 21 nt, synthetic construct
  source 1..21: mol_type = other RNA
tcgggtggcgactgcgagtga

SEQ ID NO: 84906 - RNA, 21 nt, synthetic construct
  source 1..21: mol_type = other RNA
gcaccacctggacccgcctaa

SEQ ID NO: 84907 - RNA, 21 nt, synthetic construct
  source 1..21: mol_type = other RNA
tccagcccagggacggcacta

SEQ ID NO: 84908 - RNA, 21 nt, synthetic construct
  source 1..21: mol_type = other RNA
gactccctcctctgccctaga

SEQ ID NO: 84909 - RNA, 21 nt, synthetic construct
  source 1..21: mol_type = other RNA
gacgaccaccccgggccacaa

SEQ ID NO: 84910 - RNA, 21 nt, synthetic construct
  source 1..21: mol_type = other RNA
gcaccacctggacccgcctaa

SEQ ID NO: 84911 - RNA, 21 nt, synthetic construct
  source 1..21: mol_type = other RNA
gactccctcctctgccctaga

SEQ ID NO: 84912 - RNA, 21 nt, synthetic construct
  source 1..21: mol_type = other RNA
ccctgtcccccagcagtccca

SEQ ID NO: 84913 - RNA, 21 nt, synthetic construct
  source 1..21: mol_type = other RNA
gacgaccaccccgggccacaa

SEQ ID NO: 84914 - RNA, 21 nt, synthetic construct
  source 1..21: mol_type = other RNA
catggccaccatgtccacaaa

SEQ ID NO: 84915 - RNA, 21 nt, synthetic construct
  source 1..21: mol_type = other RNA
tccagcccagggacggcacta

SEQ ID NO: 84916 - RNA, 21 nt, synthetic construct
  source 1..21: mol_type = other RNA
gactccctcctctgccctaga

SEQ ID NO: 84917 - RNA, 21 nt, synthetic construct
  source 1..21: mol_type = other RNA
gacgaccaccccgggccacaa

SEQ ID NO: 84918 - RNA, 21 nt, synthetic construct
  source 1..21: mol_type = other RNA
gcaccacctggacccgcctaa

SEQ ID NO: 84919 - RNA, 21 nt, synthetic construct
  source 1..21: mol_type = other RNA
acggtgaccccctcctccgta

SEQ ID NO: 84920 - RNA, 21 nt, synthetic construct
  source 1..21: mol_type = other RNA
cccatcactgatcaccacgga

SEQ ID NO: 84921 - RNA, 21 nt, synthetic construct
  source 1..21: mol_type = other RNA
gactccctcctctgccctaga

SEQ ID NO: 84922 - RNA, 21 nt, synthetic construct
  source 1..21: mol_type = other RNA
ccctgtcccccagcagtccca

SEQ ID NO: 84923 - RNA, 21 nt, synthetic construct
  source 1..21: mol_type = other RNA
gacgaccaccccgggccacaa

SEQ ID NO: 84924 - RNA, 21 nt, synthetic construct
  source 1..21: mol_type = other RNA
gcaccacctggacccgcctaa

SEQ ID NO: 84925 - RNA, 21 nt, synthetic construct
  source 1..21: mol_type = other RNA
tccagcccagggacggcacta

SEQ ID NO: 84926 - RNA, 21 nt, synthetic construct
  source 1..21: mol_type = other RNA
cggagccccccggcctgtgta

SEQ ID NO: 84927 - RNA, 21 nt, synthetic construct
  source 1..21: mol_type = other RNA
ctggggcagacaggctggtca

SEQ ID NO: 84928 - RNA, 21 nt, synthetic construct
  source 1..21: mol_type = other RNA
acctccacagtgcttaccaca

SEQ ID NO: 84929 - RNA, 21 nt, synthetic construct
  source 1..21: mol_type = other RNA
acctccacagtgcttaccaca

SEQ ID NO: 84930 - RNA, 21 nt, synthetic construct
  source 1..21: mol_type = other RNA
acctccacagtgcttaccaca

SEQ ID NO: 84931 - RNA, 21 nt, synthetic construct
  source 1..21: mol_type = other RNA
gaggccactgctgtctgagaa

SEQ ID NO: 84932 - RNA, 21 nt, synthetic construct
  source 1..21: mol_type = other RNA
cgatgggcttggcgcctgcta

SEQ ID NO: 84933 - RNA, 21 nt, synthetic construct
  source 1..21: mol_type = other RNA
cagaccaccacacccatggca

SEQ ID NO: 84934 - RNA, 21 nt, synthetic construct
  source 1..21: mol_type = other RNA
cagccccgcagccccggtgta

SEQ ID NO: 84935 - RNA, 21 nt, synthetic construct
  source 1..21: mol_type = other RNA
tccagtgctgacaagcacaga

SEQ ID NO: 84936 - RNA, 21 nt, synthetic construct
  source 1..21: mol_type = other RNA
tccagtgctgacaagcacaga

SEQ ID NO: 84937 - RNA, 21 nt, synthetic construct
  source 1..21: mol_type = other RNA
tccagtgctgacaagcacaga

SEQ ID NO: 84938 - RNA, 21 nt, synthetic construct
  source 1..21: mol_type = other RNA
atgcccacaacgccaggctga

SEQ ID NO: 84939 - RNA, 21 nt, synthetic construct
  source 1..21: mol_type = other RNA
gccgaacaccatggccaccaa

SEQ ID NO: 84940 - RNA, 21 nt, synthetic construct
  source 1..21: mol_type = other RNA
ctacaactgcagccactggca

SEQ ID NO: 84941 - RNA, 21 nt, synthetic construct
  source 1..21: mol_type = other RNA
ctacaactgcagccactggca

SEQ ID NO: 84942 - RNA, 21 nt, synthetic construct
  source 1..21: mol_type = other RNA
cgagaccgaggtcaacatcaa

SEQ ID NO: 84943 - RNA, 21 nt, synthetic construct
  source 1..21: mol_type = other RNA
catgaaaaccttgggcctcca

SEQ ID NO: 84944 - RNA, 21 nt, synthetic construct
  source 1..21: mol_type = other RNA
ggagtgggggctgcattgcca

SEQ ID NO: 84945 - RNA, 21 nt, synthetic construct
  source 1..21: mol_type = other RNA
gccaccatgtccacagccaca

SEQ ID NO: 84946 - RNA, 21 nt, synthetic construct
  source 1..21: mol_type = other RNA
gccaccatgtccacagccaca

SEQ ID NO: 84947 - RNA, 21 nt, synthetic construct
  source 1..21: mol_type = other RNA
cggggaccacccacaccccca

SEQ ID NO: 84948 - RNA, 21 nt, synthetic construct
  source 1..21: mol_type = other RNA
ctgcagccactggccccacga

SEQ ID NO: 84949 - RNA, 21 nt, synthetic construct
  source 1..21: mol_type = other RNA
gccaccatgtccacagccaca

SEQ ID NO: 84950 - RNA, 21 nt, synthetic construct
  source 1..21: mol_type = other RNA
acacgggcggtccctgcccca

SEQ ID NO: 84951 - RNA, 21 nt, synthetic construct
  source 1..21: mol_type = other RNA
cacgggcggtccctgccccca

SEQ ID NO: 84952 - RNA, 21 nt, synthetic construct
  source 1..21: mol_type = other RNA
gccaccatgtccacagccaca

SEQ ID NO: 84953 - RNA, 21 nt, synthetic construct
  source 1..21: mol_type = other RNA
cggggaccacccacaccccca

SEQ ID NO: 84954 - RNA, 21 nt, synthetic construct
  source 1..21: mol_type = other RNA
ctgcagccactggccccacga

SEQ ID NO: 84955 - RNA, 21 nt, synthetic construct
  source 1..21: mol_type = other RNA
gccaccatgtccacagccaca

SEQ ID NO: 84956 - RNA, 21 nt, synthetic construct
  source 1..21: mol_type = other RNA
gccactatgcccacagccaca

SEQ ID NO: 84957 - RNA, 21 nt, synthetic construct
  source 1..21: mol_type = other RNA
ccacccgcacccctgcagtga

SEQ ID NO: 84958 - RNA, 21 nt, synthetic construct
  source 1..21: mol_type = other RNA
cttcaccgtgctggctgagca

SEQ ID NO: 84959 - RNA, 21 nt, synthetic construct
  source 1..21: mol_type = other RNA
acccagcaagacccgcaccta

SEQ ID NO: 84960 - RNA, 21 nt, synthetic construct
  source 1..21: mol_type = other RNA
acccagcaagacccgcaccta

SEQ ID NO: 84961 - RNA, 21 nt, synthetic construct
  source 1..21: mol_type = other RNA
acccagcaagacccgcaccta

SEQ ID NO: 84962 - RNA, 21 nt, synthetic construct
  source 1..21: mol_type = other RNA
acccagcaagacccgcaccta

SEQ ID NO: 84963 - RNA, 21 nt, synthetic construct
  source 1..21: mol_type = other RNA
caatcagcactgtgacattga

SEQ ID NO: 84964 - RNA, 21 nt, synthetic construct
  source 1..21: mol_type = other RNA
cggcgtgcttgtgtctgtgca

SEQ ID NO: 84965 - RNA, 21 nt, synthetic construct
  source 1..21: mol_type = other RNA
acccgctgcccttgccggcca

SEQ ID NO: 84966 - RNA, 21 nt, synthetic construct
  source 1..21: mol_type = other RNA
catgggggctgtgagtggcaa

SEQ ID NO: 84967 - RNA, 21 nt, synthetic construct
  source 1..21: mol_type = other RNA
gcaggaaccgtgagcaggtga

SEQ ID NO: 84968 - RNA, 21 nt, synthetic construct
  source 1..21: mol_type = other RNA
gcaggaaccgtgagcaggtga

SEQ ID NO: 84969 - RNA, 21 nt, synthetic construct
  source 1..21: mol_type = other RNA
gcaggaaccgtgagcaggtga

SEQ ID NO: 84970 - RNA, 21 nt, synthetic construct
  source 1..21: mol_type = other RNA
gcaggaaccgtgagcaggtga

SEQ ID NO: 84971 - RNA, 21 nt, synthetic construct
  source 1..21: mol_type = other RNA
accacacccgtggccaccata

SEQ ID NO: 84972 - RNA, 21 nt, synthetic construct
  source 1..21: mol_type = other RNA
actacatcaaggtcagcatca

SEQ ID NO: 84973 - RNA, 21 nt, synthetic construct
  source 1..21: mol_type = other RNA
cggacacctgctccaacccca

SEQ ID NO: 84974 - RNA, 21 nt, synthetic construct
  source 1..21: mol_type = other RNA
actgccccaagtcccagcgca

SEQ ID NO: 84975 - RNA, 21 nt, synthetic construct
  source 1..21: mol_type = other RNA
tcgtgcctgtggacggctgca

SEQ ID NO: 84976 - RNA, 21 nt, synthetic construct
  source 1..21: mol_type = other RNA
tgggagtgggggctgcattga

SEQ ID NO: 84977 - RNA, 21 nt, synthetic construct
  source 1..21: mol_type = other RNA
tctccccctcctgcccggaca

SEQ ID NO: 84978 - RNA, 21 nt, synthetic construct
  source 1..21: mol_type = other RNA
agcccggcctgggaggcggaa

SEQ ID NO: 84979 - RNA, 21 nt, synthetic construct
  source 1..21: mol_type = other RNA
gggcacatggcgcccctcaca

SEQ ID NO: 84980 - RNA, 21 nt, synthetic construct
  source 1..21: mol_type = other RNA
ctccaaagccactccctccta

SEQ ID NO: 84981 - RNA, 21 nt, synthetic construct
  source 1..21: mol_type = other RNA
gggccaccggctctgtggcca

SEQ ID NO: 84982 - RNA, 21 nt, synthetic construct
  source 1..21: mol_type = other RNA
ccacggtgaccccctcctcca

SEQ ID NO: 84983 - RNA, 21 nt, synthetic construct
  source 1..21: mol_type = other RNA
accacccacacacccccagta

SEQ ID NO: 84984 - RNA, 21 nt, synthetic construct
  source 1..21: mol_type = other RNA
tgggctgtgagccccagtgta

SEQ ID NO: 84985 - RNA, 21 nt, synthetic construct
  source 1..21: mol_type = other RNA
gggccaccggctctgtggcca

SEQ ID NO: 84986 - RNA, 21 nt, synthetic construct
  source 1..21: mol_type = other RNA
ccacggtgaccccctcctcca

SEQ ID NO: 84987 - RNA, 21 nt, synthetic construct
  source 1..21: mol_type = other RNA
accacccacacacccccagta

SEQ ID NO: 84988 - RNA, 21 nt, synthetic construct
  source 1..21: mol_type = other RNA
tgggctgtgagccccagtgta

SEQ ID NO: 84989 - RNA, 21 nt, synthetic construct
  source 1..21: mol_type = other RNA
gccaccagttccaaagccaca

SEQ ID NO: 84990 - RNA, 21 nt, synthetic construct
  source 1..21: mol_type = other RNA
gttccaaagccacttcctcca

SEQ ID NO: 84991 - RNA, 21 nt, synthetic construct
  source 1..21: mol_type = other RNA
ccacccttccagtgctgacaa

SEQ ID NO: 84992 - RNA, 21 nt, synthetic construct
  source 1..21: mol_type = other RNA
tcacagagctgaccacagcaa

SEQ ID NO: 84993 - RNA, 21 nt, synthetic construct
  source 1..21: mol_type = other RNA
cacagagctgaccacagcaga

SEQ ID NO: 84994 - RNA, 21 nt, synthetic construct
  source 1..21: mol_type = other RNA
acagagctgaccacagcagca

SEQ ID NO: 84995 - RNA, 21 nt, synthetic construct
  source 1..21: mol_type = other RNA
aactgcagccactggccccaa

SEQ ID NO: 84996 - RNA, 21 nt, synthetic construct
  source 1..21: mol_type = other RNA
accacacccacagtcatcaga

SEQ ID NO: 84997 - RNA, 21 nt, synthetic construct
  source 1..21: mol_type = other RNA
gggccaccggctctgtggcca

SEQ ID NO: 84998 - RNA, 21 nt, synthetic construct
  source 1..21: mol_type = other RNA
ccacggtgaccccctcctcca

SEQ ID NO: 84999 - RNA, 21 nt, synthetic construct
  source 1..21: mol_type = other RNA
accacccacacacccccagta

SEQ ID NO: 85000 - RNA, 21 nt, synthetic construct
  source 1..21: mol_type = other RNA
cacagccacacccagcaagaa

SEQ ID NO: 85001 - RNA, 21 nt, synthetic construct
  source 1..21: mol_type = other RNA
gggccaccggctctgtggcca

SEQ ID NO: 85002 - RNA, 21 nt, synthetic construct
  source 1..21: mol_type = other RNA
caccacacccacaaccagtga

SEQ ID NO: 85003 - RNA, 21 nt, synthetic construct
  source 1..21: mol_type = other RNA
ccacggtgaccccctcctcca

SEQ ID NO: 85004 - RNA, 21 nt, synthetic construct
  source 1..21: mol_type = other RNA
accacccacacacccccagta

SEQ ID NO: 85005 - RNA, 21 nt, synthetic construct
  source 1..21: mol_type = other RNA
gccaccagttccaaagccaca

SEQ ID NO: 85006 - RNA, 21 nt, synthetic construct
  source 1..21: mol_type = other RNA
gttccaaagccacttcctcca

SEQ ID NO: 85007 - RNA, 21 nt, synthetic construct
  source 1..21: mol_type = other RNA
ccacccttccagtgctgacaa

SEQ ID NO: 85008 - RNA, 21 nt, synthetic construct
  source 1..21: mol_type = other RNA
tcacagagctgaccacagcaa

SEQ ID NO: 85009 - RNA, 21 nt, synthetic construct
  source 1..21: mol_type = other RNA
cacagagctgaccacagcaga

SEQ ID NO: 85010 - RNA, 21 nt, synthetic construct
  source 1..21: mol_type = other RNA
acagagctgaccacagcagca

SEQ ID NO: 85011 - RNA, 21 nt, synthetic construct
  source 1..21: mol_type = other RNA
aactgcagccactggccccaa

SEQ ID NO: 85012 - RNA, 21 nt, synthetic construct
  source 1..21: mol_type = other RNA
ctccaaagccactccctccta

SEQ ID NO: 85013 - RNA, 21 nt, synthetic construct
  source 1..21: mol_type = other RNA
gggccaccggctctgtggcca

SEQ ID NO: 85014 - RNA, 21 nt, synthetic construct
  source 1..21: mol_type = other RNA
caccacacccacaaccagtga

SEQ ID NO: 85015 - RNA, 21 nt, synthetic construct
  source 1..21: mol_type = other RNA
ccacggtgaccccctcctcca

SEQ ID NO: 85016 - RNA, 21 nt, synthetic construct
  source 1..21: mol_type = other RNA
ccagctccaaagccacttcca

SEQ ID NO: 85017 - RNA, 21 nt, synthetic construct
  source 1..21: mol_type = other RNA
gctccaaagccacttcctcca

SEQ ID NO: 85018 - RNA, 21 nt, synthetic construct
  source 1..21: mol_type = other RNA
ccacccttccagtgctgacaa

SEQ ID NO: 85019 - RNA, 21 nt, synthetic construct
  source 1..21: mol_type = other RNA
caactgcagccactggatcca

SEQ ID NO: 85020 - RNA, 21 nt, synthetic construct
  source 1..21: mol_type = other RNA
cctcaccaccctgagacccaa

SEQ ID NO: 85021 - RNA, 21 nt, synthetic construct
  source 1..21: mol_type = other RNA
aatcagcactgtgacattgaa

SEQ ID NO: 85022 - RNA, 21 nt, synthetic construct
  source 1..21: mol_type = other RNA
ggcacaccccccactgccaga

SEQ ID NO: 85023 - RNA, 21 nt, synthetic construct
  source 1..21: mol_type = other RNA
tgctgagccaggtctttgcta

SEQ ID NO: 85024 - RNA, 21 nt, synthetic construct
  source 1..21: mol_type = other RNA
aacccctgctgccccgagaca

SEQ ID NO: 85025 - RNA, 21 nt, synthetic construct
  source 1..21: mol_type = other RNA
ctgcctgtgtgcccgccagga

SEQ ID NO: 85026 - RNA, 21 nt, synthetic construct
  source 1..21: mol_type = other RNA
catttgctgaccccacagcca

SEQ ID NO: 85027 - RNA, 21 nt, synthetic construct
  source 1..21: mol_type = other RNA
cctgctgccaggagaggcgga

SEQ ID NO: 85028 - RNA, 21 nt, synthetic construct
  source 1..21: mol_type = other RNA
cgtggatgagtgtggctgcaa

SEQ ID NO: 85029 - RNA, 21 nt, synthetic construct
  source 1..21: mol_type = other RNA
gcccatggctcccccacacaa

SEQ ID NO: 85030 - RNA, 21 nt, synthetic construct
  source 1..21: mol_type = other RNA
aggaggccactgctgtctgaa

SEQ ID NO: 85031 - RNA, 21 nt, synthetic construct
  source 1..21: mol_type = other RNA
ggaggccactgctgtctgaga

SEQ ID NO: 85032 - RNA, 21 nt, synthetic construct
  source 1..21: mol_type = other RNA
acggccggagcgcccgcgcaa

SEQ ID NO: 85033 - RNA, 21 nt, synthetic construct
  source 1..21: mol_type = other RNA
gcagcacctggggtgacttca

SEQ ID NO: 85034 - RNA, 21 nt, synthetic construct
  source 1..21: mol_type = other RNA
atcaaggtcagcatccggcta

SEQ ID NO: 85035 - RNA, 21 nt, synthetic construct
  source 1..21: mol_type = other RNA
accgcaccctgctggggccga

SEQ ID NO: 85036 - RNA, 21 nt, synthetic construct
  source 1..21: mol_type = other RNA
ccccggacctgccccctcaaa

SEQ ID NO: 85037 - RNA, 21 nt, synthetic construct
  source 1..21: mol_type = other RNA
gcacggtgctggatgacatca

SEQ ID NO: 85038 - RNA, 21 nt, synthetic construct
  source 1..21: mol_type = other RNA
tctcgcgctgccactccatca

SEQ ID NO: 85039 - RNA, 21 nt, synthetic construct
  source 1..21: mol_type = other RNA
gaggactgcccctgtgtgcaa

SEQ ID NO: 85040 - RNA, 21 nt, synthetic construct
  source 1..21: mol_type = other RNA
cctgggtcccccactccacga

SEQ ID NO: 85041 - RNA, 21 nt, synthetic construct
  source 1..21: mol_type = other RNA
ccagccagggcacgacccgca

SEQ ID NO: 85042 - RNA, 21 nt, synthetic construct
  source 1..21: mol_type = other RNA
gcactgagaagcacagccaca

SEQ ID NO: 85043 - RNA, 21 nt, synthetic construct
  source 1..21: mol_type = other RNA
ccaccggctctgtggccacca

SEQ ID NO: 85044 - RNA, 21 nt, synthetic construct
  source 1..21: mol_type = other RNA
ccccaggaacagctcacacta

SEQ ID NO: 85045 - RNA, 21 nt, synthetic construct
  source 1..21: mol_type = other RNA
cacagagccttccacggtgaa

SEQ ID NO: 85046 - RNA, 21 nt, synthetic construct
  source 1..21: mol_type = other RNA
acggtggtgaccatgggctga

SEQ ID NO: 85047 - RNA, 21 nt, synthetic construct
  source 1..21: mol_type = other RNA
agcactacagccaccgtgaca

SEQ ID NO: 85048 - RNA, 21 nt, synthetic construct
  source 1..21: mol_type = other RNA
gcactgagaagcacagccaca

SEQ ID NO: 85049 - RNA, 21 nt, synthetic construct
  source 1..21: mol_type = other RNA
ccaccggctctgtggccacca

SEQ ID NO: 85050 - RNA, 21 nt, synthetic construct
  source 1..21: mol_type = other RNA
ccccaggaacagctcacacta

SEQ ID NO: 85051 - RNA, 21 nt, synthetic construct
  source 1..21: mol_type = other RNA
gcaccttgggcaccacccaca

SEQ ID NO: 85052 - RNA, 21 nt, synthetic construct
  source 1..21: mol_type = other RNA
acggtggtgaccatgggctga

SEQ ID NO: 85053 - RNA, 21 nt, synthetic construct
  source 1..21: mol_type = other RNA
caccgggaccctcccagaaca

SEQ ID NO: 85054 - RNA, 21 nt, synthetic construct
  source 1..21: mol_type = other RNA
agcactacagccaccgtgaca

SEQ ID NO: 85055 - RNA, 21 nt, synthetic construct
  source 1..21: mol_type = other RNA
ccacacccacagtcatcagca

SEQ ID NO: 85056 - RNA, 21 nt, synthetic construct
  source 1..21: mol_type = other RNA
cacacccacagtcatcagcta

SEQ ID NO: 85057 - RNA, 21 nt, synthetic construct
  source 1..21: mol_type = other RNA
gcactgagaagcacagccaca

SEQ ID NO: 85058 - RNA, 21 nt, synthetic construct
  source 1..21: mol_type = other RNA
ccaccggctctgtggccacca

SEQ ID NO: 85059 - RNA, 21 nt, synthetic construct
  source 1..21: mol_type = other RNA
ccccaggaacagctcacacta

SEQ ID NO: 85060 - RNA, 21 nt, synthetic construct
  source 1..21: mol_type = other RNA
cacagagccttccacggtgaa

SEQ ID NO: 85061 - RNA, 21 nt, synthetic construct
  source 1..21: mol_type = other RNA
agcactacagccaccgtgaca

SEQ ID NO: 85062 - RNA, 21 nt, synthetic construct
  source 1..21: mol_type = other RNA
gcactgagaagcacagccaca

SEQ ID NO: 85063 - RNA, 21 nt, synthetic construct
  source 1..21: mol_type = other RNA
ccaccggctctgtggccacca

SEQ ID NO: 85064 - RNA, 21 nt, synthetic construct
  source 1..21: mol_type = other RNA
cctcttccaccccaggaacaa

SEQ ID NO: 85065 - RNA, 21 nt, synthetic construct
  source 1..21: mol_type = other RNA
ccccaggaacagctcacacta

SEQ ID NO: 85066 - RNA, 21 nt, synthetic construct
  source 1..21: mol_type = other RNA
ctccgtcccggggaccaccca

SEQ ID NO: 85067 - RNA, 21 nt, synthetic construct
  source 1..21: mol_type = other RNA
gcaccttgggcaccacccaca

SEQ ID NO: 85068 - RNA, 21 nt, synthetic construct
  source 1..21: mol_type = other RNA
cccaaagtgctgaccagccca

SEQ ID NO: 85069 - RNA, 21 nt, synthetic construct
  source 1..21: mol_type = other RNA
aagtgctgaccagcccggcca

SEQ ID NO: 85070 - RNA, 21 nt, synthetic construct
  source 1..21: mol_type = other RNA
caccgggaccctcccagaaca

SEQ ID NO: 85071 - RNA, 21 nt, synthetic construct
  source 1..21: mol_type = other RNA
agcactacagccaccgtgaca

SEQ ID NO: 85072 - RNA, 21 nt, synthetic construct
  source 1..21: mol_type = other RNA
gcactgagaagcacagccaca

SEQ ID NO: 85073 - RNA, 21 nt, synthetic construct
  source 1..21: mol_type = other RNA
ccaccggctctgtggccacca

SEQ ID NO: 85074 - RNA, 21 nt, synthetic construct
  source 1..21: mol_type = other RNA
ccccaggaacagctcacacta

SEQ ID NO: 85075 - RNA, 21 nt, synthetic construct
  source 1..21: mol_type = other RNA
accatgacaagggccaccaaa

SEQ ID NO: 85076 - RNA, 21 nt, synthetic construct
  source 1..21: mol_type = other RNA
ctgggaacagctcacacccca

SEQ ID NO: 85077 - RNA, 21 nt, synthetic construct
  source 1..21: mol_type = other RNA
cactgtcaccatggtgcatga

SEQ ID NO: 85078 - RNA, 21 nt, synthetic construct
  source 1..21: mol_type = other RNA
gtgtcggtgcagtgcaagcca

SEQ ID NO: 85079 - RNA, 21 nt, synthetic construct
  source 1..21: mol_type = other RNA
tgacgcccagggtcagcccca

SEQ ID NO: 85080 - RNA, 21 nt, synthetic construct
  source 1..21: mol_type = other RNA
caggcgcccttccctgccaca

SEQ ID NO: 85081 - RNA, 21 nt, synthetic construct
  source 1..21: mol_type = other RNA
ccatgtggacaactgcaccga

SEQ ID NO: 85082 - RNA, 21 nt, synthetic construct
  source 1..21: mol_type = other RNA
tgctgccaggagaggcgggta

SEQ ID NO: 85083 - RNA, 21 nt, synthetic construct
  source 1..21: mol_type = other RNA
ccatcctgcacacctacacca

SEQ ID NO: 85084 - RNA, 21 nt, synthetic construct
  source 1..21: mol_type = other RNA
atggctcccccacacacccga

SEQ ID NO: 85085 - RNA, 21 nt, synthetic construct
  source 1..21: mol_type = other RNA
ccgtgccagcccccaggatga

SEQ ID NO: 85086 - RNA, 21 nt, synthetic construct
  source 1..21: mol_type = other RNA
gcagggcggggcccacatcta

SEQ ID NO: 85087 - RNA, 21 nt, synthetic construct
  source 1..21: mol_type = other RNA
tgtgtgcccgcccaggagtga

SEQ ID NO: 85088 - RNA, 21 nt, synthetic construct
  source 1..21: mol_type = other RNA
agcactgagaagcacagccaa

SEQ ID NO: 85089 - RNA, 21 nt, synthetic construct
  source 1..21: mol_type = other RNA
agcactgagaagcacagccaa

SEQ ID NO: 85090 - RNA, 21 nt, synthetic construct
  source 1..21: mol_type = other RNA
cagggccacctccaggaccaa

SEQ ID NO: 85091 - RNA, 21 nt, synthetic construct
  source 1..21: mol_type = other RNA
agcactgagaagcacagccaa

SEQ ID NO: 85092 - RNA, 21 nt, synthetic construct
  source 1..21: mol_type = other RNA
caccacaaccagggccaccga

SEQ ID NO: 85093 - RNA, 21 nt, synthetic construct
  source 1..21: mol_type = other RNA
agcactgagaagcacagccaa

SEQ ID NO: 85094 - RNA, 21 nt, synthetic construct
  source 1..21: mol_type = other RNA
caccacaaccagggccaccga

SEQ ID NO: 85095 - RNA, 21 nt, synthetic construct
  source 1..21: mol_type = other RNA
agcactgagaagcacagccaa

SEQ ID NO: 85096 - RNA, 21 nt, synthetic construct
  source 1..21: mol_type = other RNA
cctgagacccactggcttcca

SEQ ID NO: 85097 - RNA, 21 nt, synthetic construct
  source 1..21: mol_type = other RNA
cccaggcgcccttccctgcca

SEQ ID NO: 85098 - RNA, 21 nt, synthetic construct
  source 1..21: mol_type = other RNA
ctcagccatcctgcacaccta

SEQ ID NO: 85099 - RNA, 21 nt, synthetic construct
  source 1..21: mol_type = other RNA
ttcccggcccaggaggccaca

SEQ ID NO: 85100 - RNA, 21 nt, synthetic construct
  source 1..21: mol_type = other RNA
ccctgagaacagctcccccta

SEQ ID NO: 85101 - RNA, 21 nt, synthetic construct
  source 1..21: mol_type = other RNA
tgtggatcagcacaaccacca

SEQ ID NO: 85102 - RNA, 21 nt, synthetic construct
  source 1..21: mol_type = other RNA
ggccaccggctccaccaccaa

SEQ ID NO: 85103 - RNA, 21 nt, synthetic construct
  source 1..21: mol_type = other RNA
tgtggatcagcacaaccacca

SEQ ID NO: 85104 - RNA, 21 nt, synthetic construct
  source 1..21: mol_type = other RNA
cacccacaaccagaggttcca

SEQ ID NO: 85105 - RNA, 21 nt, synthetic construct
  source 1..21: mol_type = other RNA
ggccaccggctccaccaccaa

SEQ ID NO: 85106 - RNA, 21 nt, synthetic construct
  source 1..21: mol_type = other RNA
accaccacacccatggccaca

SEQ ID NO: 85107 - RNA, 21 nt, synthetic construct
  source 1..21: mol_type = other RNA
tgctgaccacgaaggccacca

SEQ ID NO: 85108 - RNA, 21 nt, synthetic construct
  source 1..21: mol_type = other RNA
tgtggatcagcacaaccacca

SEQ ID NO: 85109 - RNA, 21 nt, synthetic construct
  source 1..21: mol_type = other RNA
agccaccggctccaccaccaa

SEQ ID NO: 85110 - RNA, 21 nt, synthetic construct
  source 1..21: mol_type = other RNA
tgtggatcagcacaaccacca

SEQ ID NO: 85111 - RNA, 21 nt, synthetic construct
  source 1..21: mol_type = other RNA
ggccaccggctccaccaccaa

SEQ ID NO: 85112 - RNA, 21 nt, synthetic construct
  source 1..21: mol_type = other RNA
tgctgaccacgaaggccacca

SEQ ID NO: 85113 - RNA, 21 nt, synthetic construct
  source 1..21: mol_type = other RNA
tgtggatcagcacaaccacca

SEQ ID NO: 85114 - RNA, 21 nt, synthetic construct
  source 1..21: mol_type = other RNA
ggccaccggctccaccaccaa

SEQ ID NO: 85115 - RNA, 21 nt, synthetic construct
  source 1..21: mol_type = other RNA
ctactgcacggcctctgccaa

SEQ ID NO: 85116 - RNA, 21 nt, synthetic construct
  source 1..21: mol_type = other RNA
gctcagccatcctgcacacca

SEQ ID NO: 85117 - RNA, 21 nt, synthetic construct
  source 1..21: mol_type = other RNA
caaataaaccctgagcattga

SEQ ID NO: 85118 - RNA, 21 nt, synthetic construct
  source 1..21: mol_type = other RNA
cagcccccaggatgggtgcca

SEQ ID NO: 85119 - RNA, 21 nt, synthetic construct
  source 1..21: mol_type = other RNA
caacggctccgtcctcatcaa

SEQ ID NO: 85120 - RNA, 21 nt, synthetic construct
  source 1..21: mol_type = other RNA
gaggagggcatctgccaccga

SEQ ID NO: 85121 - RNA, 21 nt, synthetic construct
  source 1..21: mol_type = other RNA
tggaaggctgctacccgaaga

SEQ ID NO: 85122 - RNA, 21 nt, synthetic construct
  source 1..21: mol_type = other RNA
ggaaggctgctacccgaagta

SEQ ID NO: 85123 - RNA, 21 nt, synthetic construct
  source 1..21: mol_type = other RNA
ccactgcaggggacgtgccaa

SEQ ID NO: 85124 - RNA, 21 nt, synthetic construct
  source 1..21: mol_type = other RNA
cccagatacacaagcacccta

SEQ ID NO: 85125 - RNA, 21 nt, synthetic construct
  source 1..21: mol_type = other RNA
gcacgcccaggacagagacga

SEQ ID NO: 85126 - RNA, 21 nt, synthetic construct
  source 1..21: mol_type = other RNA
accacaactggggccaccgga

SEQ ID NO: 85127 - RNA, 21 nt, synthetic construct
  source 1..21: mol_type = other RNA
ggactttggcctggtctgcaa

SEQ ID NO: 85128 - RNA, 21 nt, synthetic construct
  source 1..21: mol_type = other RNA
aagccactcccttctccagta

SEQ ID NO: 85129 - RNA, 21 nt, synthetic construct
  source 1..21: mol_type = other RNA
caacccctcctcaactccaga

SEQ ID NO: 85130 - RNA, 21 nt, synthetic construct
  source 1..21: mol_type = other RNA
ggactttggcctggtctgcaa

SEQ ID NO: 85131 - RNA, 21 nt, synthetic construct
  source 1..21: mol_type = other RNA
aaatccacagctaccagctta

SEQ ID NO: 85132 - RNA, 21 nt, synthetic construct
  source 1..21: mol_type = other RNA
tccctgggcaccgcctggaca

SEQ ID NO: 85133 - RNA, 21 nt, synthetic construct
  source 1..21: mol_type = other RNA
caacccctcctcaactccaga

SEQ ID NO: 85134 - RNA, 21 nt, synthetic construct
  source 1..21: mol_type = other RNA
ggactttggcctggtctgcaa

SEQ ID NO: 85135 - RNA, 21 nt, synthetic construct
  source 1..21: mol_type = other RNA
aagccactcccttctccagta

SEQ ID NO: 85136 - RNA, 21 nt, synthetic construct
  source 1..21: mol_type = other RNA
caacccctcctcaactccaga

SEQ ID NO: 85137 - RNA, 21 nt, synthetic construct
  source 1..21: mol_type = other RNA
ggactttggcctggtctgcaa

SEQ ID NO: 85138 - RNA, 21 nt, synthetic construct
  source 1..21: mol_type = other RNA
cagtccagggactgcaactga

SEQ ID NO: 85139 - RNA, 21 nt, synthetic construct
  source 1..21: mol_type = other RNA
caacccctcctcaactccaga

SEQ ID NO: 85140 - RNA, 21 nt, synthetic construct
  source 1..21: mol_type = other RNA
aagcacagccacaaaatccaa

SEQ ID NO: 85141 - RNA, 21 nt, synthetic construct
  source 1..21: mol_type = other RNA
aaatccacagctaccagctta

SEQ ID NO: 85142 - RNA, 21 nt, synthetic construct
  source 1..21: mol_type = other RNA
ctgtggaccacgtggaccgta

SEQ ID NO: 85143 - RNA, 21 nt, synthetic construct
  source 1..21: mol_type = other RNA
ccatgtccaccatgtccacaa

SEQ ID NO: 85144 - RNA, 21 nt, synthetic construct
  source 1..21: mol_type = other RNA
gccaccaattccacggccaca

SEQ ID NO: 85145 - RNA, 21 nt, synthetic construct
  source 1..21: mol_type = other RNA
ctgcagcatgtggggcggcta

SEQ ID NO: 85146 - RNA, 21 nt, synthetic construct
  source 1..21: mol_type = other RNA
tgcccgtccccgtccccccaa

SEQ ID NO: 85147 - RNA, 21 nt, synthetic construct
  source 1..21: mol_type = other RNA
ggtgtgcagcacctggggtga

SEQ ID NO: 85148 - RNA, 21 nt, synthetic construct
  source 1..21: mol_type = other RNA
ggggctggtgctggaggcgta

SEQ ID NO: 85149 - RNA, 21 nt, synthetic construct
  source 1..21: mol_type = other RNA
tggtgctggaggcgtccaaca

SEQ ID NO: 85150 - RNA, 21 nt, synthetic construct
  source 1..21: mol_type = other RNA
gccctgctggagctggatcca

SEQ ID NO: 85151 - RNA, 21 nt, synthetic construct
  source 1..21: mol_type = other RNA
gccaggctgaccccgctccaa

SEQ ID NO: 85152 - RNA, 21 nt, synthetic construct
  source 1..21: mol_type = other RNA
tgcacggacgaggagggcata

SEQ ID NO: 85153 - RNA, 21 nt, synthetic construct
  source 1..21: mol_type = other RNA
cggacgaggagggcatctgca

SEQ ID NO: 85154 - RNA, 21 nt, synthetic construct
  source 1..21: mol_type = other RNA
ctggaggtgccctgagctcta

SEQ ID NO: 85155 - RNA, 21 nt, synthetic construct
  source 1..21: mol_type = other RNA
tgcacggacacctgctccaaa

SEQ ID NO: 85156 - RNA, 21 nt, synthetic construct
  source 1..21: mol_type = other RNA
cgcgcgcagctctgcgaggaa

SEQ ID NO: 85157 - RNA, 21 nt, synthetic construct
  source 1..21: mol_type = other RNA
gcagctctgcgaggaccacta

SEQ ID NO: 85158 - RNA, 21 nt, synthetic construct
  source 1..21: mol_type = other RNA
ccaatgccaggaacagcttta

SEQ ID NO: 85159 - RNA, 21 nt, synthetic construct
  source 1..21: mol_type = other RNA
cgcgctgccactccatcatca

SEQ ID NO: 85160 - RNA, 21 nt, synthetic construct
  source 1..21: mol_type = other RNA
ctgccccaagtcccagcgcta

SEQ ID NO: 85161 - RNA, 21 nt, synthetic construct
  source 1..21: mol_type = other RNA
gcctgccagcccacttgccga

SEQ ID NO: 85162 - RNA, 21 nt, synthetic construct
  source 1..21: mol_type = other RNA
tccttcgtgcctgtggacgga

SEQ ID NO: 85163 - RNA, 21 nt, synthetic construct
  source 1..21: mol_type = other RNA
acggctgcacctgccccgcga

SEQ ID NO: 85164 - RNA, 21 nt, synthetic construct
  source 1..21: mol_type = other RNA
cggctgcacctgccccgcgga

SEQ ID NO: 85165 - RNA, 21 nt, synthetic construct
  source 1..21: mol_type = other RNA
gtgctggctcctggagaggta

SEQ ID NO: 85166 - RNA, 21 nt, synthetic construct
  source 1..21: mol_type = other RNA
tgctggctcctggagaggtga

SEQ ID NO: 85167 - RNA, 21 nt, synthetic construct
  source 1..21: mol_type = other RNA
gtgcagcccccatggtgtaca

SEQ ID NO: 85168 - RNA, 21 nt, synthetic construct
  source 1..21: mol_type = other RNA
acacctgcacctgcaggaaca

SEQ ID NO: 85169 - RNA, 21 nt, synthetic construct
  source 1..21: mol_type = other RNA
tgcacctgcaggaaccggaga

SEQ ID NO: 85170 - RNA, 21 nt, synthetic construct
  source 1..21: mol_type = other RNA
cagctttgaaggcagctgcga

SEQ ID NO: 85171 - RNA, 21 nt, synthetic construct
  source 1..21: mol_type = other RNA
tgaaggcagctgcgagtacaa

SEQ ID NO: 85172 - RNA, 21 nt, synthetic construct
  source 1..21: mol_type = other RNA
gctgatcctccaagaggggaa

SEQ ID NO: 85173 - RNA, 21 nt, synthetic construct
  source 1..21: mol_type = other RNA
gggccgggtggggacccacca

SEQ ID NO: 85174 - RNA, 21 nt, synthetic construct
  source 1..21: mol_type = other RNA
ccctcctgcccggacgcccta

SEQ ID NO: 85175 - RNA, 21 nt, synthetic construct
  source 1..21: mol_type = other RNA
cctgccccttgttctgtgaca

SEQ ID NO: 85176 - RNA, 21 nt, synthetic construct
  source 1..21: mol_type = other RNA
tgggggctgtgagtggcacta

SEQ ID NO: 85177 - RNA, 21 nt, synthetic construct
  source 1..21: mol_type = other RNA
cctggaaggctgctacccgaa

SEQ ID NO: 85178 - RNA, 21 nt, synthetic construct
  source 1..21: mol_type = other RNA
ctggaaggctgctacccgaaa

SEQ ID NO: 85179 - RNA, 21 nt, synthetic construct
  source 1..21: mol_type = other RNA
gcaccatcatcaggaaggcta

SEQ ID NO: 85180 - RNA, 21 nt, synthetic construct
  source 1..21: mol_type = other RNA
accatcatcaggaaggctgta

SEQ ID NO: 85181 - RNA, 21 nt, synthetic construct
  source 1..21: mol_type = other RNA
catcaggaaggctgtggcata

SEQ ID NO: 85182 - RNA, 21 nt, synthetic construct
  source 1..21: mol_type = other RNA
gccattcaccttcaccaccga

SEQ ID NO: 85183 - RNA, 21 nt, synthetic construct
  source 1..21: mol_type = other RNA
cagagcccggcctgggaggca

SEQ ID NO: 85184 - RNA, 21 nt, synthetic construct
  source 1..21: mol_type = other RNA
gtaccaggtatgccctgtgca

SEQ ID NO: 85185 - RNA, 21 nt, synthetic construct
  source 1..21: mol_type = other RNA
tatgccctgtgctggctgaca

SEQ ID NO: 85186 - RNA, 21 nt, synthetic construct
  source 1..21: mol_type = other RNA
gtgaccgcatgcgggggctga

SEQ ID NO: 85187 - RNA, 21 nt, synthetic construct
  source 1..21: mol_type = other RNA
cgccaacagccaacagagtca

SEQ ID NO: 85188 - RNA, 21 nt, synthetic construct
  source 1..21: mol_type = other RNA
gggtccagctcaggccccgta

SEQ ID NO: 85189 - RNA, 21 nt, synthetic construct
  source 1..21: mol_type = other RNA
tcagggccgctggagggcaca

SEQ ID NO: 85190 - RNA, 21 nt, synthetic construct
  source 1..21: mol_type = other RNA
atgccagcagcctaaggacaa

SEQ ID NO: 85191 - RNA, 21 nt, synthetic construct
  source 1..21: mol_type = other RNA
ctggcacaggtggggcagaaa

SEQ ID NO: 85192 - RNA, 21 nt, synthetic construct
  source 1..21: mol_type = other RNA
actgggagcaggagggcgtca

SEQ ID NO: 85193 - RNA, 21 nt, synthetic construct
  source 1..21: mol_type = other RNA
ccccggccagcaccacagcaa

SEQ ID NO: 85194 - RNA, 21 nt, synthetic construct
  source 1..21: mol_type = other RNA
ggggtggccacatccacccta

SEQ ID NO: 85195 - RNA, 21 nt, synthetic construct
  source 1..21: mol_type = other RNA
aggcacagccagcaccgctta

SEQ ID NO: 85196 - RNA, 21 nt, synthetic construct
  source 1..21: mol_type = other RNA
cgagaccagcacgcccaggaa

SEQ ID NO: 85197 - RNA, 21 nt, synthetic construct
  source 1..21: mol_type = other RNA
ccaccaccagccagggcacga

SEQ ID NO: 85198 - RNA, 21 nt, synthetic construct
  source 1..21: mol_type = other RNA
cctccaccctgagaacagcta

SEQ ID NO: 85199 - RNA, 21 nt, synthetic construct
  source 1..21: mol_type = other RNA
cagctccaaagccactcccta

SEQ ID NO: 85200 - RNA, 21 nt, synthetic construct
  source 1..21: mol_type = other RNA
cttccagcactgagaagcaca

SEQ ID NO: 85201 - RNA, 21 nt, synthetic construct
  source 1..21: mol_type = other RNA
cgccacggccaccacaactga

SEQ ID NO: 85202 - RNA, 21 nt, synthetic construct
  source 1..21: mol_type = other RNA
tagcacacagaccagtggtaa

SEQ ID NO: 85203 - RNA, 21 nt, synthetic construct
  source 1..21: mol_type = other RNA
cccatcactgaccaccacgga

SEQ ID NO: 85204 - RNA, 21 nt, synthetic construct
  source 1..21: mol_type = other RNA
tgactccctcctctgccctaa

SEQ ID NO: 85205 - RNA, 21 nt, synthetic construct
  source 1..21: mol_type = other RNA
atccctgccccccagcagtca

SEQ ID NO: 85206 - RNA, 21 nt, synthetic construct
  source 1..21: mol_type = other RNA
cggccacctccaggaccacaa

SEQ ID NO: 85207 - RNA, 21 nt, synthetic construct
  source 1..21: mol_type = other RNA
acctccaggaccacagccaca

SEQ ID NO: 85208 - RNA, 21 nt, synthetic construct
  source 1..21: mol_type = other RNA
agtgtgcctggtcagagtgga

SEQ ID NO: 85209 - RNA, 21 nt, synthetic construct
  source 1..21: mol_type = other RNA
accccgtcctccaccccagga

SEQ ID NO: 85210 - RNA, 21 nt, synthetic construct
  source 1..21: mol_type = other RNA
cagctccaaagccactcccta

SEQ ID NO: 85211 - RNA, 21 nt, synthetic construct
  source 1..21: mol_type = other RNA
tcccttctccagtccagggaa

SEQ ID NO: 85212 - RNA, 21 nt, synthetic construct
  source 1..21: mol_type = other RNA
cttccagcactgagaagcaca

SEQ ID NO: 85213 - RNA, 21 nt, synthetic construct
  source 1..21: mol_type = other RNA
gactgtccacacctccacaga

SEQ ID NO: 85214 - RNA, 21 nt, synthetic construct
  source 1..21: mol_type = other RNA
caccacggccaccacaaccga

SEQ ID NO: 85215 - RNA, 21 nt, synthetic construct
  source 1..21: mol_type = other RNA
tagcacacagaccagtggtaa

SEQ ID NO: 85216 - RNA, 21 nt, synthetic construct
  source 1..21: mol_type = other RNA
cccatcactgaccaccacgga

SEQ ID NO: 85217 - RNA, 21 nt, synthetic construct
  source 1..21: mol_type = other RNA
cctcctcaactccagggacaa

SEQ ID NO: 85218 - RNA, 21 nt, synthetic construct
  source 1..21: mol_type = other RNA
tgactccctcctctgccctaa

SEQ ID NO: 85219 - RNA, 21 nt, synthetic construct
  source 1..21: mol_type = other RNA
atccctgtcccccagcagtca

SEQ ID NO: 85220 - RNA, 21 nt, synthetic construct
  source 1..21: mol_type = other RNA
ctgtcccccagcagtccccaa

SEQ ID NO: 85221 - RNA, 21 nt, synthetic construct
  source 1..21: mol_type = other RNA
ccccagcagcaaccaccggta

SEQ ID NO: 85222 - RNA, 21 nt, synthetic construct
  source 1..21: mol_type = other RNA
agtgtgcctggtcagagtgga

SEQ ID NO: 85223 - RNA, 21 nt, synthetic construct
  source 1..21: mol_type = other RNA
ccttccagtgctgacaagcaa

SEQ ID NO: 85224 - RNA, 21 nt, synthetic construct
  source 1..21: mol_type = other RNA
cctccacagtgctgaccacga

SEQ ID NO: 85225 - RNA, 21 nt, synthetic construct
  source 1..21: mol_type = other RNA
cccctcctccactccggggaa

SEQ ID NO: 85226 - RNA, 21 nt, synthetic construct
  source 1..21: mol_type = other RNA
accacagcagccactacaaca

SEQ ID NO: 85227 - RNA, 21 nt, synthetic construct
  source 1..21: mol_type = other RNA
accccgtcctccaccccagga

SEQ ID NO: 85228 - RNA, 21 nt, synthetic construct
  source 1..21: mol_type = other RNA
cttccagcactgagaagcaca

SEQ ID NO: 85229 - RNA, 21 nt, synthetic construct
  source 1..21: mol_type = other RNA
ccctgggcaccgcctggacca

SEQ ID NO: 85230 - RNA, 21 nt, synthetic construct
  source 1..21: mol_type = other RNA
gactgtccacacctccacaga

SEQ ID NO: 85231 - RNA, 21 nt, synthetic construct
  source 1..21: mol_type = other RNA
tagcacacagaccagtggtaa

SEQ ID NO: 85232 - RNA, 21 nt, synthetic construct
  source 1..21: mol_type = other RNA
cccatcactgaccaccacgga

SEQ ID NO: 85233 - RNA, 21 nt, synthetic construct
  source 1..21: mol_type = other RNA
cctcctcaactccagggacaa

SEQ ID NO: 85234 - RNA, 21 nt, synthetic construct
  source 1..21: mol_type = other RNA
tgactccctcctctgccctaa

SEQ ID NO: 85235 - RNA, 21 nt, synthetic construct
  source 1..21: mol_type = other RNA
gtccctgccccccagcagtca

SEQ ID NO: 85236 - RNA, 21 nt, synthetic construct
  source 1..21: mol_type = other RNA
acctccaggaccacagccaca

SEQ ID NO: 85237 - RNA, 21 nt, synthetic construct
  source 1..21: mol_type = other RNA
agtgtgcctggtcagagtgga

SEQ ID NO: 85238 - RNA, 21 nt, synthetic construct
  source 1..21: mol_type = other RNA
accccgtcctccaccccagga

SEQ ID NO: 85239 - RNA, 21 nt, synthetic construct
  source 1..21: mol_type = other RNA
cagctccaaagccactcccta

SEQ ID NO: 85240 - RNA, 21 nt, synthetic construct
  source 1..21: mol_type = other RNA
tcccttctccagtccagggaa

SEQ ID NO: 85241 - RNA, 21 nt, synthetic construct
  source 1..21: mol_type = other RNA
cttccagcactgagaagcaca

SEQ ID NO: 85242 - RNA, 21 nt, synthetic construct
  source 1..21: mol_type = other RNA
accacggccaccacaaccaga

SEQ ID NO: 85243 - RNA, 21 nt, synthetic construct
  source 1..21: mol_type = other RNA
acagtcaccccctcctccaga

SEQ ID NO: 85244 - RNA, 21 nt, synthetic construct
  source 1..21: mol_type = other RNA
ccccctcctccgtcccgggga

SEQ ID NO: 85245 - RNA, 21 nt, synthetic construct
  source 1..21: mol_type = other RNA
tagcacacagaccagtggtaa

SEQ ID NO: 85246 - RNA, 21 nt, synthetic construct
  source 1..21: mol_type = other RNA
cctcctcaactccagggacaa

SEQ ID NO: 85247 - RNA, 21 nt, synthetic construct
  source 1..21: mol_type = other RNA
tgactccctcctctgccctaa

SEQ ID NO: 85248 - RNA, 21 nt, synthetic construct
  source 1..21: mol_type = other RNA
atccctgtcccccagcagtca

SEQ ID NO: 85249 - RNA, 21 nt, synthetic construct
  source 1..21: mol_type = other RNA
ctgtcccccagcagtccccaa

SEQ ID NO: 85250 - RNA, 21 nt, synthetic construct
  source 1..21: mol_type = other RNA
ccccagcagcaaccaccggta

SEQ ID NO: 85251 - RNA, 21 nt, synthetic construct
  source 1..21: mol_type = other RNA
agtgtgcctggtcagagtgga

SEQ ID NO: 85252 - RNA, 21 nt, synthetic construct
  source 1..21: mol_type = other RNA
tgaccagcccggccaccacaa

SEQ ID NO: 85253 - RNA, 21 nt, synthetic construct
  source 1..21: mol_type = other RNA
ccttccagtgctgacaagcaa

SEQ ID NO: 85254 - RNA, 21 nt, synthetic construct
  source 1..21: mol_type = other RNA
cctccacagtgctgaccacga

SEQ ID NO: 85255 - RNA, 21 nt, synthetic construct
  source 1..21: mol_type = other RNA
cccctcctccactccggggaa

SEQ ID NO: 85256 - RNA, 21 nt, synthetic construct
  source 1..21: mol_type = other RNA
accacagcagccactacaaca

SEQ ID NO: 85257 - RNA, 21 nt, synthetic construct
  source 1..21: mol_type = other RNA
accccgtcctccaccccagga

SEQ ID NO: 85258 - RNA, 21 nt, synthetic construct
  source 1..21: mol_type = other RNA
accccgtcctccaccccagga

SEQ ID NO: 85259 - RNA, 21 nt, synthetic construct
  source 1..21: mol_type = other RNA
cagctccaaagccactcccta

SEQ ID NO: 85260 - RNA, 21 nt, synthetic construct
  source 1..21: mol_type = other RNA
cttccagcactgagaagcaca

SEQ ID NO: 85261 - RNA, 21 nt, synthetic construct
  source 1..21: mol_type = other RNA
gactgtccacacctccacaga

SEQ ID NO: 85262 - RNA, 21 nt, synthetic construct
  source 1..21: mol_type = other RNA
cgccacggccaccacaaccga

SEQ ID NO: 85263 - RNA, 21 nt, synthetic construct
  source 1..21: mol_type = other RNA
cccacaaccaccacacccaca

SEQ ID NO: 85264 - RNA, 21 nt, synthetic construct
  source 1..21: mol_type = other RNA
tagcacacagaccagtggtaa

SEQ ID NO: 85265 - RNA, 21 nt, synthetic construct
  source 1..21: mol_type = other RNA
cccatcactgaccaccacgga

SEQ ID NO: 85266 - RNA, 21 nt, synthetic construct
  source 1..21: mol_type = other RNA
cctcctcaactccagggacaa

SEQ ID NO: 85267 - RNA, 21 nt, synthetic construct
  source 1..21: mol_type = other RNA
accccagtgctgaccagcaca

SEQ ID NO: 85268 - RNA, 21 nt, synthetic construct
  source 1..21: mol_type = other RNA
gcacggccaccacacccgcaa

SEQ ID NO: 85269 - RNA, 21 nt, synthetic construct
  source 1..21: mol_type = other RNA
cacggccaccacacccgcaga

SEQ ID NO: 85270 - RNA, 21 nt, synthetic construct
  source 1..21: mol_type = other RNA
ccttccagtgctgacaagcaa

SEQ ID NO: 85271 - RNA, 21 nt, synthetic construct
  source 1..21: mol_type = other RNA
cacaaaatccacagctaccaa

SEQ ID NO: 85272 - RNA, 21 nt, synthetic construct
  source 1..21: mol_type = other RNA
gaccaccacacccatgtccaa

SEQ ID NO: 85273 - RNA, 21 nt, synthetic construct
  source 1..21: mol_type = other RNA
acacccatgtccaccatgtca

SEQ ID NO: 85274 - RNA, 21 nt, synthetic construct
  source 1..21: mol_type = other RNA
cccatgtccaccatgtccaca

SEQ ID NO: 85275 - RNA, 21 nt, synthetic construct
  source 1..21: mol_type = other RNA
cagccaccatgacaagggcca

SEQ ID NO: 85276 - RNA, 21 nt, synthetic construct
  source 1..21: mol_type = other RNA
gggccaccaattccacggcca

SEQ ID NO: 85277 - RNA, 21 nt, synthetic construct
  source 1..21: mol_type = other RNA
ccacagccactgcctccacga

SEQ ID NO: 85278 - RNA, 21 nt, synthetic construct
  source 1..21: mol_type = other RNA
agcctgccaaccttcagcgta

SEQ ID NO: 85279 - RNA, 21 nt, synthetic construct
  source 1..21: mol_type = other RNA
agtgcatctgcagcatgtgga

SEQ ID NO: 85280 - RNA, 21 nt, synthetic construct
  source 1..21: mol_type = other RNA
caccttccggggcaactgcaa

SEQ ID NO: 85281 - RNA, 21 nt, synthetic construct
  source 1..21: mol_type = other RNA
cgcgccctcagcatccactaa

SEQ ID NO: 85282 - RNA, 21 nt, synthetic construct
  source 1..21: mol_type = other RNA
aaggatggctgctgggcccca

SEQ ID NO: 85283 - RNA, 21 nt, synthetic construct
  source 1..21: mol_type = other RNA
tgcccaccacagccgctctga

SEQ ID NO: 85284 - RNA, 21 nt, synthetic construct
  source 1..21: mol_type = other RNA
ggaccagatcctcttcaacga

SEQ ID NO: 85285 - RNA, 21 nt, synthetic construct
  source 1..21: mol_type = other RNA
gacgcccagggtcagccccca

SEQ ID NO: 85286 - RNA, 21 nt, synthetic construct
  source 1..21: mol_type = other RNA
gaccaggccccgggccgagaa

SEQ ID NO: 85287 - RNA, 21 nt, synthetic construct
  source 1..21: mol_type = other RNA
accaggccccgggccgagaaa

SEQ ID NO: 85288 - RNA, 21 nt, synthetic construct
  source 1..21: mol_type = other RNA
tgcccgccagggcaggagtca

SEQ ID NO: 85289 - RNA, 21 nt, synthetic construct
  source 1..21: mol_type = other RNA
gcacccaggaggagggcgaca

SEQ ID NO: 85290 - RNA, 21 nt, synthetic construct
  source 1..21: mol_type = other RNA
tgtcaggaggatgcctgcaaa

SEQ ID NO: 85291 - RNA, 21 nt, synthetic construct
  source 1..21: mol_type = other RNA
aacagccatgtggacaactga

SEQ ID NO: 85292 - RNA, 21 nt, synthetic construct
  source 1..21: mol_type = other RNA
agcctgcatcctgcccagata

SEQ ID NO: 85293 - RNA, 21 nt, synthetic construct
  source 1..21: mol_type = other RNA
cctgtggcaccagggctgcga

SEQ ID NO: 85294 - RNA, 21 nt, synthetic construct
  source 1..21: mol_type = other RNA
accttctgcgagggctcctga

SEQ ID NO: 85295 - RNA, 21 nt, synthetic construct
  source 1..21: mol_type = other RNA
tcccccacacacccgtggcta

SEQ ID NO: 85296 - RNA, 21 nt, synthetic construct
  source 1..21: mol_type = other RNA
tgcggagccccccggcctgta

SEQ ID NO: 85297 - RNA, 21 nt, synthetic construct
  source 1..21: mol_type = other RNA
gctcctgctgcccaccccgta

SEQ ID NO: 85298 - RNA, 21 nt, synthetic construct
  source 1..21: mol_type = other RNA
ctcctgctgcccaccccgtga

SEQ ID NO: 85299 - RNA, 21 nt, synthetic construct
  source 1..21: mol_type = other RNA
cggccgctggggcagacagga

SEQ ID NO: 85300 - RNA, 21 nt, synthetic construct
  source 1..21: mol_type = other RNA
tggtccaggcaaggccagcta

SEQ ID NO: 85301 - RNA, 21 nt, synthetic construct
  source 1..21: mol_type = other RNA
tgctgccaggaagctgcgaca

SEQ ID NO: 85302 - RNA, 21 nt, synthetic construct
  source 1..21: mol_type = other RNA
gctgccaggaagctgcgacaa

SEQ ID NO: 85303 - RNA, 21 nt, synthetic construct
  source 1..21: mol_type = other RNA
gtaactcagggctgaggtcga

SEQ ID NO: 85304 - RNA, 21 nt, synthetic construct
  source 1..21: mol_type = other RNA
gcctggacttcggccacctca

SEQ ID NO: 85305 - RNA, 21 nt, synthetic construct
  source 1..21: mol_type = other RNA
tcgggcatcttgggcaccaca

SEQ ID NO: 85306 - RNA, 21 nt, synthetic construct
  source 1..21: mol_type = other RNA
tcctcaactccagggacaaca

SEQ ID NO: 85307 - RNA, 21 nt, synthetic construct
  source 1..21: mol_type = other RNA
gcctggacttcggccacctca

SEQ ID NO: 85308 - RNA, 21 nt, synthetic construct
  source 1..21: mol_type = other RNA
ctccagggacgacctggatca

SEQ ID NO: 85309 - RNA, 21 nt, synthetic construct
  source 1..21: mol_type = other RNA
caccacacccatggccaccaa

SEQ ID NO: 85310 - RNA, 21 nt, synthetic construct
  source 1..21: mol_type = other RNA
tcctcaactccagggacaaca

SEQ ID NO: 85311 - RNA, 21 nt, synthetic construct
  source 1..21: mol_type = other RNA
gcctggacttcggccacctca

SEQ ID NO: 85312 - RNA, 21 nt, synthetic construct
  source 1..21: mol_type = other RNA
tcgggcatcttgggcaccaca

SEQ ID NO: 85313 - RNA, 21 nt, synthetic construct
  source 1..21: mol_type = other RNA
tcctcaactccagggacaaca

SEQ ID NO: 85314 - RNA, 21 nt, synthetic construct
  source 1..21: mol_type = other RNA
gcctggacttcggccacctca

SEQ ID NO: 85315 - RNA, 21 nt, synthetic construct
  source 1..21: mol_type = other RNA
tcctcaactccagggacaaca

SEQ ID NO: 85316 - RNA, 21 nt, synthetic construct
  source 1..21: mol_type = other RNA
cggtgggtcagcaactgccaa

SEQ ID NO: 85317 - RNA, 21 nt, synthetic construct
  source 1..21: mol_type = other RNA
ctgcaaccgcccttccagcaa

SEQ ID NO: 85318 - RNA, 21 nt, synthetic construct
  source 1..21: mol_type = other RNA
ctgcaaccgcccttccagcaa

SEQ ID NO: 85319 - RNA, 21 nt, synthetic construct
  source 1..21: mol_type = other RNA
agggccacctccaggaccaca

SEQ ID NO: 85320 - RNA, 21 nt, synthetic construct
  source 1..21: mol_type = other RNA
ctgcaaccgcccttccagcaa

SEQ ID NO: 85321 - RNA, 21 nt, synthetic construct
  source 1..21: mol_type = other RNA
ctgcaaccgcccttccagcaa

SEQ ID NO: 85322 - RNA, 21 nt, synthetic construct
  source 1..21: mol_type = other RNA
cctggaaggcccaggctgcca

SEQ ID NO: 85323 - RNA, 21 nt, synthetic construct
  source 1..21: mol_type = other RNA
cagccctgtccagccctcaca

SEQ ID NO: 85324 - RNA, 21 nt, synthetic construct
  source 1..21: mol_type = other RNA
cagccctgtccagccctcaca

SEQ ID NO: 85325 - RNA, 21 nt, synthetic construct
  source 1..21: mol_type = other RNA
cagccctgtccagccctcaca

SEQ ID NO: 85326 - RNA, 21 nt, synthetic construct
  source 1..21: mol_type = other RNA
ctggaggggatggcggaggga

SEQ ID NO: 85327 - RNA, 21 nt, synthetic construct
  source 1..21: mol_type = other RNA
tgtgaggctgagggtggagta

SEQ ID NO: 85328 - RNA, 21 nt, synthetic construct
  source 1..21: mol_type = other RNA
actacgtgttctctgagcaca

SEQ ID NO: 85329 - RNA, 21 nt, synthetic construct
  source 1..21: mol_type = other RNA
caacgccaggctgaccccgca

SEQ ID NO: 85330 - RNA, 21 nt, synthetic construct
  source 1..21: mol_type = other RNA
tgccctgagctctgcccccga

SEQ ID NO: 85331 - RNA, 21 nt, synthetic construct
  source 1..21: mol_type = other RNA
caccatcatcaggaaggctga

SEQ ID NO: 85332 - RNA, 21 nt, synthetic construct
  source 1..21: mol_type = other RNA
gcctgggtcccccactccaca

SEQ ID NO: 85333 - RNA, 21 nt, synthetic construct
  source 1..21: mol_type = other RNA
ggccgagaccagcacgcccaa

SEQ ID NO: 85334 - RNA, 21 nt, synthetic construct
  source 1..21: mol_type = other RNA
ggcaccacctggacccgccta

SEQ ID NO: 85335 - RNA, 21 nt, synthetic construct
  source 1..21: mol_type = other RNA
acggccacctccaggaccaca

SEQ ID NO: 85336 - RNA, 21 nt, synthetic construct
  source 1..21: mol_type = other RNA
caggaccacagccacggccaa

SEQ ID NO: 85337 - RNA, 21 nt, synthetic construct
  source 1..21: mol_type = other RNA
cggtggtgaccatgggctgta

SEQ ID NO: 85338 - RNA, 21 nt, synthetic construct
  source 1..21: mol_type = other RNA
tgagcaggtggggaagttcaa

SEQ ID NO: 85339 - RNA, 21 nt, synthetic construct
  source 1..21: mol_type = other RNA
ggcaccacctggacccgccta

SEQ ID NO: 85340 - RNA, 21 nt, synthetic construct
  source 1..21: mol_type = other RNA
cggtggtgaccatgggctgta

SEQ ID NO: 85341 - RNA, 21 nt, synthetic construct
  source 1..21: mol_type = other RNA
tgagcaggtggggaagttcaa

SEQ ID NO: 85342 - RNA, 21 nt, synthetic construct
  source 1..21: mol_type = other RNA
gaccaccacacccatggccaa

SEQ ID NO: 85343 - RNA, 21 nt, synthetic construct
  source 1..21: mol_type = other RNA
caccgcctcctccacccggga

SEQ ID NO: 85344 - RNA, 21 nt, synthetic construct
  source 1..21: mol_type = other RNA
gctccagagccactccctcca

SEQ ID NO: 85345 - RNA, 21 nt, synthetic construct
  source 1..21: mol_type = other RNA
tgagcaggtggggaagttcaa

SEQ ID NO: 85346 - RNA, 21 nt, synthetic construct
  source 1..21: mol_type = other RNA
ggcaccacctggacccgccta

SEQ ID NO: 85347 - RNA, 21 nt, synthetic construct
  source 1..21: mol_type = other RNA
ccacaaccagtggctccacga

SEQ ID NO: 85348 - RNA, 21 nt, synthetic construct
  source 1..21: mol_type = other RNA
gaccccctcctccgtcccgga

SEQ ID NO: 85349 - RNA, 21 nt, synthetic construct
  source 1..21: mol_type = other RNA
accccctcctccgtcccggga

SEQ ID NO: 85350 - RNA, 21 nt, synthetic construct
  source 1..21: mol_type = other RNA
cccagcctggtgtccccctga

SEQ ID NO: 85351 - RNA, 21 nt, synthetic construct
  source 1..21: mol_type = other RNA
tgagcaggtggggaagttcaa

SEQ ID NO: 85352 - RNA, 21 nt, synthetic construct
  source 1..21: mol_type = other RNA
ggcaccacctggacccgccta

SEQ ID NO: 85353 - RNA, 21 nt, synthetic construct
  source 1..21: mol_type = other RNA
ccacaaccagtggctccacga

SEQ ID NO: 85354 - RNA, 21 nt, synthetic construct
  source 1..21: mol_type = other RNA
cggccaccacacccgcagcca

SEQ ID NO: 85355 - RNA, 21 nt, synthetic construct
  source 1..21: mol_type = other RNA
atcccctcctccaccctgtga

SEQ ID NO: 85356 - RNA, 21 nt, synthetic construct
  source 1..21: mol_type = other RNA
accacagccaccatgacaaga

SEQ ID NO: 85357 - RNA, 21 nt, synthetic construct
  source 1..21: mol_type = other RNA
gcctcctccactctgggaaca

SEQ ID NO: 85358 - RNA, 21 nt, synthetic construct
  source 1..21: mol_type = other RNA
gggaaggaggagggcctgata

SEQ ID NO: 85359 - RNA, 21 nt, synthetic construct
  source 1..21: mol_type = other RNA
gtgctggggaccaccaccata

SEQ ID NO: 85360 - RNA, 21 nt, synthetic construct
  source 1..21: mol_type = other RNA
ccacagctggaggggatggca

SEQ ID NO: 85361 - RNA, 21 nt, synthetic construct
  source 1..21: mol_type = other RNA
gggggctatggcagtgccaga

SEQ ID NO: 85362 - RNA, 21 nt, synthetic construct
  source 1..21: mol_type = other RNA
agtcccagcgctacgcctaca

SEQ ID NO: 85363 - RNA, 21 nt, synthetic construct
  source 1..21: mol_type = other RNA
gtgtacctggactgcagcaaa

SEQ ID NO: 85364 - RNA, 21 nt, synthetic construct
  source 1..21: mol_type = other RNA
tgcaaccgcccttccagcaca

SEQ ID NO: 85365 - RNA, 21 nt, synthetic construct
  source 1..21: mol_type = other RNA
actgaccaccacggccactaa

SEQ ID NO: 85366 - RNA, 21 nt, synthetic construct
  source 1..21: mol_type = other RNA
ccaccaacccctcctcaacta

SEQ ID NO: 85367 - RNA, 21 nt, synthetic construct
  source 1..21: mol_type = other RNA
accctagcagcaaccaccgga

SEQ ID NO: 85368 - RNA, 21 nt, synthetic construct
  source 1..21: mol_type = other RNA
tgcaaccgcccttccagcaca

SEQ ID NO: 85369 - RNA, 21 nt, synthetic construct
  source 1..21: mol_type = other RNA
actgaccaccacggccactaa

SEQ ID NO: 85370 - RNA, 21 nt, synthetic construct
  source 1..21: mol_type = other RNA
ccaccaacccctcctcaacta

SEQ ID NO: 85371 - RNA, 21 nt, synthetic construct
  source 1..21: mol_type = other RNA
tgccgaacaccacggccacca

SEQ ID NO: 85372 - RNA, 21 nt, synthetic construct
  source 1..21: mol_type = other RNA
tccctgtcccccagcagtcca

SEQ ID NO: 85373 - RNA, 21 nt, synthetic construct
  source 1..21: mol_type = other RNA
cggggacttcccacaccccaa

SEQ ID NO: 85374 - RNA, 21 nt, synthetic construct
  source 1..21: mol_type = other RNA
ggatcctcacagagcccagca

SEQ ID NO: 85375 - RNA, 21 nt, synthetic construct
  source 1..21: mol_type = other RNA
tgcaaccgcccttccagcaca

SEQ ID NO: 85376 - RNA, 21 nt, synthetic construct
  source 1..21: mol_type = other RNA
actgaccaccacggccactaa

SEQ ID NO: 85377 - RNA, 21 nt, synthetic construct
  source 1..21: mol_type = other RNA
ccaccaacccctcctcaacta

SEQ ID NO: 85378 - RNA, 21 nt, synthetic construct
  source 1..21: mol_type = other RNA
tgccgaacaccacggccacca

SEQ ID NO: 85379 - RNA, 21 nt, synthetic construct
  source 1..21: mol_type = other RNA
tgcaaccgcccttccagcaca

SEQ ID NO: 85380 - RNA, 21 nt, synthetic construct
  source 1..21: mol_type = other RNA
ccaccaacccctcctcaacta

SEQ ID NO: 85381 - RNA, 21 nt, synthetic construct
  source 1..21: mol_type = other RNA
tgccgaacaccacggccacca

SEQ ID NO: 85382 - RNA, 21 nt, synthetic construct
  source 1..21: mol_type = other RNA
tccctgtcccccagcagtcca

SEQ ID NO: 85383 - RNA, 21 nt, synthetic construct
  source 1..21: mol_type = other RNA
cggggacttcccacaccccaa

SEQ ID NO: 85384 - RNA, 21 nt, synthetic construct
  source 1..21: mol_type = other RNA
actgaccaccacggccactaa

SEQ ID NO: 85385 - RNA, 21 nt, synthetic construct
  source 1..21: mol_type = other RNA
ccaccaacccctcctcaacta

SEQ ID NO: 85386 - RNA, 21 nt, synthetic construct
  source 1..21: mol_type = other RNA
agacgtggctggtccccgaca

SEQ ID NO: 85387 - RNA, 21 nt, synthetic construct
  source 1..21: mol_type = other RNA
tcctgcccggacgccctggca

SEQ ID NO: 85388 - RNA, 21 nt, synthetic construct
  source 1..21: mol_type = other RNA
catgggcatctgcgtgcagga

SEQ ID NO: 85389 - RNA, 21 nt, synthetic construct
  source 1..21: mol_type = other RNA
tacctggccgcctgcgcccaa

SEQ ID NO: 85390 - RNA, 21 nt, synthetic construct
  source 1..21: mol_type = other RNA
cctcctgcccggacgccctga

SEQ ID NO: 85391 - RNA, 21 nt, synthetic construct
  source 1..21: mol_type = other RNA
catgtcctggaactccagcca

SEQ ID NO: 85392 - RNA, 21 nt, synthetic construct
  source 1..21: mol_type = other RNA
tccagggacgacggggagcta

SEQ ID NO: 85393 - RNA, 21 nt, synthetic construct
  source 1..21: mol_type = other RNA
gaccacccacaccgccacaga

SEQ ID NO: 85394 - RNA, 21 nt, synthetic construct
  source 1..21: mol_type = other RNA
gaccacccacaccgccacaga

SEQ ID NO: 85395 - RNA, 21 nt, synthetic construct
  source 1..21: mol_type = other RNA
aaatccacagctaccagcgta

SEQ ID NO: 85396 - RNA, 21 nt, synthetic construct
  source 1..21: mol_type = other RNA
ccccgcgctccgtgctcctga

SEQ ID NO: 85397 - RNA, 21 nt, synthetic construct
  source 1..21: mol_type = other RNA
gccctgtggagccgagctgga

SEQ ID NO: 85398 - RNA, 21 nt, synthetic construct
  source 1..21: mol_type = other RNA
cgaggagggcatctgccacca

SEQ ID NO: 85399 - RNA, 21 nt, synthetic construct
  source 1..21: mol_type = other RNA
acctggccgcctgcgcccaga

SEQ ID NO: 85400 - RNA, 21 nt, synthetic construct
  source 1..21: mol_type = other RNA
cgaggaccactgtgtggacga

SEQ ID NO: 85401 - RNA, 21 nt, synthetic construct
  source 1..21: mol_type = other RNA
ctggtgcagctggtgccacta

SEQ ID NO: 85402 - RNA, 21 nt, synthetic construct
  source 1..21: mol_type = other RNA
agctacgagctgatcctccaa

SEQ ID NO: 85403 - RNA, 21 nt, synthetic construct
  source 1..21: mol_type = other RNA
ctggtccagctggtacaatga

SEQ ID NO: 85404 - RNA, 21 nt, synthetic construct
  source 1..21: mol_type = other RNA
tgggcaccgcccagagcccga

SEQ ID NO: 85405 - RNA, 21 nt, synthetic construct
  source 1..21: mol_type = other RNA
agcacccttggtacagccaca

SEQ ID NO: 85406 - RNA, 21 nt, synthetic construct
  source 1..21: mol_type = other RNA
tcccatccccccagtgctgaa

SEQ ID NO: 85407 - RNA, 21 nt, synthetic construct
  source 1..21: mol_type = other RNA
cccttctccagtccagggaca

SEQ ID NO: 85408 - RNA, 21 nt, synthetic construct
  source 1..21: mol_type = other RNA
gcagccccacatcggccccaa

SEQ ID NO: 85409 - RNA, 21 nt, synthetic construct
  source 1..21: mol_type = other RNA
gccaccagttccatgtccaca

SEQ ID NO: 85410 - RNA, 21 nt, synthetic construct
  source 1..21: mol_type = other RNA
acccgggcaactgctggcaca

SEQ ID NO: 85411 - RNA, 21 nt, synthetic construct
  source 1..21: mol_type = other RNA
tcccatccccccagtgctgaa

SEQ ID NO: 85412 - RNA, 21 nt, synthetic construct
  source 1..21: mol_type = other RNA
cccttctccagtccagggaca

SEQ ID NO: 85413 - RNA, 21 nt, synthetic construct
  source 1..21: mol_type = other RNA
acggccaccacaaccagggca

SEQ ID NO: 85414 - RNA, 21 nt, synthetic construct
  source 1..21: mol_type = other RNA
ggccaccacacccgcagccaa

SEQ ID NO: 85415 - RNA, 21 nt, synthetic construct
  source 1..21: mol_type = other RNA
tgctgacaagcacagccacaa

SEQ ID NO: 85416 - RNA, 21 nt, synthetic construct
  source 1..21: mol_type = other RNA
gctgacaagcacagccacaaa

SEQ ID NO: 85417 - RNA, 21 nt, synthetic construct
  source 1..21: mol_type = other RNA
gccaccctgtcctccacccca

SEQ ID NO: 85418 - RNA, 21 nt, synthetic construct
  source 1..21: mol_type = other RNA
ccatccctctccggcaggtga

SEQ ID NO: 85419 - RNA, 21 nt, synthetic construct
  source 1..21: mol_type = other RNA
tctgtgctggggaccaccaca

SEQ ID NO: 85420 - RNA, 21 nt, synthetic construct
  source 1..21: mol_type = other RNA
cggggcccacatctccaccta

SEQ ID NO: 85421 - RNA, 21 nt, synthetic construct
  source 1..21: mol_type = other RNA
ccgtgctggctgagctgcgga

SEQ ID NO: 85422 - RNA, 21 nt, synthetic construct
  source 1..21: mol_type = other RNA
cccccggccagcaccacagca

SEQ ID NO: 85423 - RNA, 21 nt, synthetic construct
  source 1..21: mol_type = other RNA
acgagcgagctgtccacctca

SEQ ID NO: 85424 - RNA, 21 nt, synthetic construct
  source 1..21: mol_type = other RNA
ggatcagcacaaccaccacaa

SEQ ID NO: 85425 - RNA, 21 nt, synthetic construct
  source 1..21: mol_type = other RNA
ctccaccaccaacccctccta

SEQ ID NO: 85426 - RNA, 21 nt, synthetic construct
  source 1..21: mol_type = other RNA
tgtgagcaccacggccacgaa

SEQ ID NO: 85427 - RNA, 21 nt, synthetic construct
  source 1..21: mol_type = other RNA
gcaccacggccacgacaccca

SEQ ID NO: 85428 - RNA, 21 nt, synthetic construct
  source 1..21: mol_type = other RNA
ggatcagcacaaccaccacaa

SEQ ID NO: 85429 - RNA, 21 nt, synthetic construct
  source 1..21: mol_type = other RNA
ctccaccaccaacccctccta

SEQ ID NO: 85430 - RNA, 21 nt, synthetic construct
  source 1..21: mol_type = other RNA
caaccacccttccagtgctga

SEQ ID NO: 85431 - RNA, 21 nt, synthetic construct
  source 1..21: mol_type = other RNA
ccaccacacccatggccacca

SEQ ID NO: 85432 - RNA, 21 nt, synthetic construct
  source 1..21: mol_type = other RNA
cagagcccagcactacagcca

SEQ ID NO: 85433 - RNA, 21 nt, synthetic construct
  source 1..21: mol_type = other RNA
cgaccaccacaaccagggcca

SEQ ID NO: 85434 - RNA, 21 nt, synthetic construct
  source 1..21: mol_type = other RNA
ggatcagcacaaccaccacaa

SEQ ID NO: 85435 - RNA, 21 nt, synthetic construct
  source 1..21: mol_type = other RNA
ctccaccaccaacccctccta

SEQ ID NO: 85436 - RNA, 21 nt, synthetic construct
  source 1..21: mol_type = other RNA
tgtgagcaccacggccacgaa

SEQ ID NO: 85437 - RNA, 21 nt, synthetic construct
  source 1..21: mol_type = other RNA
gcaccacggccacgacaccca

SEQ ID NO: 85438 - RNA, 21 nt, synthetic construct
  source 1..21: mol_type = other RNA
ggatcagcacaaccaccacaa

SEQ ID NO: 85439 - RNA, 21 nt, synthetic construct
  source 1..21: mol_type = other RNA
ctccaccaccaacccctccta

SEQ ID NO: 85440 - RNA, 21 nt, synthetic construct
  source 1..21: mol_type = other RNA
caaccacccttccagtgctga

SEQ ID NO: 85441 - RNA, 21 nt, synthetic construct
  source 1..21: mol_type = other RNA
tgtgagcaccacggccacgaa

SEQ ID NO: 85442 - RNA, 21 nt, synthetic construct
  source 1..21: mol_type = other RNA
gcaccacggccacgacaccca

SEQ ID NO: 85443 - RNA, 21 nt, synthetic construct
  source 1..21: mol_type = other RNA
ccagggactgcaactgcccta

SEQ ID NO: 85444 - RNA, 21 nt, synthetic construct
  source 1..21: mol_type = other RNA
ggatcagcacaaccaccacaa

SEQ ID NO: 85445 - RNA, 21 nt, synthetic construct
  source 1..21: mol_type = other RNA
ctccaccaccaacccctccta

SEQ ID NO: 85446 - RNA, 21 nt, synthetic construct
  source 1..21: mol_type = other RNA
caaccacccttccagtgctga

SEQ ID NO: 85447 - RNA, 21 nt, synthetic construct
  source 1..21: mol_type = other RNA
gtctgtgctggggaccaccaa

SEQ ID NO: 85448 - RNA, 21 nt, synthetic construct
  source 1..21: mol_type = other RNA
tctgcgtgcaggcctgcccca

SEQ ID NO: 85449 - RNA, 21 nt, synthetic construct
  source 1..21: mol_type = other RNA
aggcgcccttccctgccacaa

SEQ ID NO: 85450 - RNA, 21 nt, synthetic construct
  source 1..21: mol_type = other RNA
tgggcctcctctgcggagcca

SEQ ID NO: 85451 - RNA, 21 nt, synthetic construct
  source 1..21: mol_type = other RNA
ggcctcctctgcggagcccca

SEQ ID NO: 85452 - RNA, 21 nt, synthetic construct
  source 1..21: mol_type = other RNA
acccacaaccagaggctccaa

SEQ ID NO: 85453 - RNA, 21 nt, synthetic construct
  source 1..21: mol_type = other RNA
acccacaaccagaggctccaa

SEQ ID NO: 85454 - RNA, 21 nt, synthetic construct
  source 1..21: mol_type = other RNA
gtccccccacccgtgccagca

SEQ ID NO: 85455 - RNA, 21 nt, synthetic construct
  source 1..21: mol_type = other RNA
gggcacgacccgctgtcaaca

SEQ ID NO: 85456 - RNA, 21 nt, synthetic construct
  source 1..21: mol_type = other RNA
acggccaccccgtcctccaca

SEQ ID NO: 85457 - RNA, 21 nt, synthetic construct
  source 1..21: mol_type = other RNA
acggccaccccgtcctccaca

SEQ ID NO: 85458 - RNA, 21 nt, synthetic construct
  source 1..21: mol_type = other RNA
acggccaccccgtcctccaca

SEQ ID NO: 85459 - RNA, 21 nt, synthetic construct
  source 1..21: mol_type = other RNA
acggccaccccgtcctccaca

SEQ ID NO: 85460 - RNA, 21 nt, synthetic construct
  source 1..21: mol_type = other RNA
acggccaccccgtcctccaca

SEQ ID NO: 85461 - RNA, 21 nt, synthetic construct
  source 1..21: mol_type = other RNA
acggccaccccgtcctccaca

SEQ ID NO: 85462 - RNA, 21 nt, synthetic construct
  source 1..21: mol_type = other RNA
ggccaccctgtcctccaccca

SEQ ID NO: 85463 - RNA, 21 nt, synthetic construct
  source 1..21: mol_type = other RNA
caatgggcagcgggaggagca

SEQ ID NO: 85464 - RNA, 21 nt, synthetic construct
  source 1..21: mol_type = other RNA
ggcacctgctctgtgcaggga

SEQ ID NO: 85465 - RNA, 21 nt, synthetic construct
  source 1..21: mol_type = other RNA
ctcctgcccggacgccctgga

SEQ ID NO: 85466 - RNA, 21 nt, synthetic construct
  source 1..21: mol_type = other RNA
ggcacaggtggggcagaagga

SEQ ID NO: 85467 - RNA, 21 nt, synthetic construct
  source 1..21: mol_type = other RNA
cagtccagggactgcaaccga

SEQ ID NO: 85468 - RNA, 21 nt, synthetic construct
  source 1..21: mol_type = other RNA
gatcagcacaaccaccacaca

SEQ ID NO: 85469 - RNA, 21 nt, synthetic construct
  source 1..21: mol_type = other RNA
cagtccagggactgcaaccga

SEQ ID NO: 85470 - RNA, 21 nt, synthetic construct
  source 1..21: mol_type = other RNA
gatcagcacaaccaccacaca

SEQ ID NO: 85471 - RNA, 21 nt, synthetic construct
  source 1..21: mol_type = other RNA
cagcacggccaccacacccaa

SEQ ID NO: 85472 - RNA, 21 nt, synthetic construct
  source 1..21: mol_type = other RNA
ctgctggcaccctcaaagtga

SEQ ID NO: 85473 - RNA, 21 nt, synthetic construct
  source 1..21: mol_type = other RNA
cagcacggccaccacacccaa

SEQ ID NO: 85474 - RNA, 21 nt, synthetic construct
  source 1..21: mol_type = other RNA
cagtccagggactgcaaccga

SEQ ID NO: 85475 - RNA, 21 nt, synthetic construct
  source 1..21: mol_type = other RNA
gatcagcacaaccaccacaca

SEQ ID NO: 85476 - RNA, 21 nt, synthetic construct
  source 1..21: mol_type = other RNA
cagtccagggactgcaaccga

SEQ ID NO: 85477 - RNA, 21 nt, synthetic construct
  source 1..21: mol_type = other RNA
cacagtcaccccctcctccaa

SEQ ID NO: 85478 - RNA, 21 nt, synthetic construct
  source 1..21: mol_type = other RNA
gatcagcacaaccaccacaca

SEQ ID NO: 85479 - RNA, 21 nt, synthetic construct
  source 1..21: mol_type = other RNA
gatcagcacaaccaccacaca

SEQ ID NO: 85480 - RNA, 21 nt, synthetic construct
  source 1..21: mol_type = other RNA
tctgggaacagctcacaccca

SEQ ID NO: 85481 - RNA, 21 nt, synthetic construct
  source 1..21: mol_type = other RNA
gctgtcctcgccctcccctga

SEQ ID NO: 85482 - RNA, 21 nt, synthetic construct
  source 1..21: mol_type = other RNA
ccaagacgtggctggtcccca

SEQ ID NO: 85483 - RNA, 21 nt, synthetic construct
  source 1..21: mol_type = other RNA
cagaaaggatggctgctggga

SEQ ID NO: 85484 - RNA, 21 nt, synthetic construct
  source 1..21: mol_type = other RNA
gccccgggccgagaaccccta

SEQ ID NO: 85485 - RNA, 21 nt, synthetic construct
  source 1..21: mol_type = other RNA
gtgcaacacaaccacctgcca

SEQ ID NO: 85486 - RNA, 21 nt, synthetic construct
  source 1..21: mol_type = other RNA
ggagccccccggcctgtgtga

SEQ ID NO: 85487 - RNA, 21 nt, synthetic construct
  source 1..21: mol_type = other RNA
tggccttgcccctccctgata

SEQ ID NO: 85488 - RNA, 21 nt, synthetic construct
  source 1..21: mol_type = other RNA
gtccctgccacggccggagca

SEQ ID NO: 85489 - RNA, 21 nt, synthetic construct
  source 1..21: mol_type = other RNA
tgccagcccccaggatgggta

SEQ ID NO: 85490 - RNA, 21 nt, synthetic construct
  source 1..21: mol_type = other RNA
ccccaggatgggtgccccgaa

SEQ ID NO: 85491 - RNA, 21 nt, synthetic construct
  source 1..21: mol_type = other RNA
ccagggccctgtggagccgaa

SEQ ID NO: 85492 - RNA, 21 nt, synthetic construct
  source 1..21: mol_type = other RNA
cctgtggagccgagctgggaa

SEQ ID NO: 85493 - RNA, 21 nt, synthetic construct
  source 1..21: mol_type = other RNA
tggggtgacttccactacaaa

SEQ ID NO: 85494 - RNA, 21 nt, synthetic construct
  source 1..21: mol_type = other RNA
gggctggtgctggaggcgtca

SEQ ID NO: 85495 - RNA, 21 nt, synthetic construct
  source 1..21: mol_type = other RNA
gtcctcatcaatgggcagcga

SEQ ID NO: 85496 - RNA, 21 nt, synthetic construct
  source 1..21: mol_type = other RNA
cgccaggctgaccccgctcca

SEQ ID NO: 85497 - RNA, 21 nt, synthetic construct
  source 1..21: mol_type = other RNA
tggccgcctgcgcccaggaca

SEQ ID NO: 85498 - RNA, 21 nt, synthetic construct
  source 1..21: mol_type = other RNA
cccacctgcccgtgtgccaca

SEQ ID NO: 85499 - RNA, 21 nt, synthetic construct
  source 1..21: mol_type = other RNA
gctcctgcacctgctccggga

SEQ ID NO: 85500 - RNA, 21 nt, synthetic construct
  source 1..21: mol_type = other RNA
tctgtgcagggcggggcccaa

SEQ ID NO: 85501 - RNA, 21 nt, synthetic construct
  source 1..21: mol_type = other RNA
tggtgcagacaggcctgggga

SEQ ID NO: 85502 - RNA, 21 nt, synthetic construct
  source 1..21: mol_type = other RNA
acctggaaggcccaggctgca

SEQ ID NO: 85503 - RNA, 21 nt, synthetic construct
  source 1..21: mol_type = other RNA
tacgcccggcactggtgctca

SEQ ID NO: 85504 - RNA, 21 nt, synthetic construct
  source 1..21: mol_type = other RNA
gtgccttctcgcgctgccaca

SEQ ID NO: 85505 - RNA, 21 nt, synthetic construct
  source 1..21: mol_type = other RNA
cctgccagcccacttgccgca

SEQ ID NO: 85506 - RNA, 21 nt, synthetic construct
  source 1..21: mol_type = other RNA
ggactgcagcaacagctcgga

SEQ ID NO: 85507 - RNA, 21 nt, synthetic construct
  source 1..21: mol_type = other RNA
gcacctgcaggaaccggagga

SEQ ID NO: 85508 - RNA, 21 nt, synthetic construct
  source 1..21: mol_type = other RNA
acgggatggccgtgtcctgga

SEQ ID NO: 85509 - RNA, 21 nt, synthetic construct
  source 1..21: mol_type = other RNA
ggtggcgactgcgagtgttta

SEQ ID NO: 85510 - RNA, 21 nt, synthetic construct
  source 1..21: mol_type = other RNA
agctgtaactgcacacccaga

SEQ ID NO: 85511 - RNA, 21 nt, synthetic construct
  source 1..21: mol_type = other RNA
gcccagagcccggcctgggaa

SEQ ID NO: 85512 - RNA, 21 nt, synthetic construct
  source 1..21: mol_type = other RNA
cagccctcagccctccctcaa

SEQ ID NO: 85513 - RNA, 21 nt, synthetic construct
  source 1..21: mol_type = other RNA
gaaaagaccaccctatgggta

SEQ ID NO: 85514 - RNA, 21 nt, synthetic construct
  source 1..21: mol_type = other RNA
agggctcccccggccagcaca

SEQ ID NO: 85515 - RNA, 21 nt, synthetic construct
  source 1..21: mol_type = other RNA
caccacggccaccacacccaa

SEQ ID NO: 85516 - RNA, 21 nt, synthetic construct
  source 1..21: mol_type = other RNA
gccaccggctctgtggccaca

SEQ ID NO: 85517 - RNA, 21 nt, synthetic construct
  source 1..21: mol_type = other RNA
cctcctccaccccaggaacaa

SEQ ID NO: 85518 - RNA, 21 nt, synthetic construct
  source 1..21: mol_type = other RNA
cccaggaacagctcacactaa

SEQ ID NO: 85519 - RNA, 21 nt, synthetic construct
  source 1..21: mol_type = other RNA
ccacacccacaaccagaggca

SEQ ID NO: 85520 - RNA, 21 nt, synthetic construct
  source 1..21: mol_type = other RNA
accctcctctagcacacagaa

SEQ ID NO: 85521 - RNA, 21 nt, synthetic construct
  source 1..21: mol_type = other RNA
ctgaccaccacggccactaca

SEQ ID NO: 85522 - RNA, 21 nt, synthetic construct
  source 1..21: mol_type = other RNA
accagcaacacagtgactcca

SEQ ID NO: 85523 - RNA, 21 nt, synthetic construct
  source 1..21: mol_type = other RNA
ctgccccccagcagtccccaa

SEQ ID NO: 85524 - RNA, 21 nt, synthetic construct
  source 1..21: mol_type = other RNA
tgggcaccacccacatcacaa

SEQ ID NO: 85525 - RNA, 21 nt, synthetic construct
  source 1..21: mol_type = other RNA
taaccacggtggtgaccatga

SEQ ID NO: 85526 - RNA, 21 nt, synthetic construct
  source 1..21: mol_type = other RNA
ggtggtgaccatgggctgtga

SEQ ID NO: 85527 - RNA, 21 nt, synthetic construct
  source 1..21: mol_type = other RNA
agagtggctggactacagcta

SEQ ID NO: 85528 - RNA, 21 nt, synthetic construct
  source 1..21: mol_type = other RNA
gcagcctggactttggcctga

SEQ ID NO: 85529 - RNA, 21 nt, synthetic construct
  source 1..21: mol_type = other RNA
gccaccggctctgtggccaca

SEQ ID NO: 85530 - RNA, 21 nt, synthetic construct
  source 1..21: mol_type = other RNA
cctcctccaccccaggaacaa

SEQ ID NO: 85531 - RNA, 21 nt, synthetic construct
  source 1..21: mol_type = other RNA
cccaggaacagctcacactaa

SEQ ID NO: 85532 - RNA, 21 nt, synthetic construct
  source 1..21: mol_type = other RNA
accctcctctagcacacagaa

SEQ ID NO: 85533 - RNA, 21 nt, synthetic construct
  source 1..21: mol_type = other RNA
ctgaccaccacggccactaca

SEQ ID NO: 85534 - RNA, 21 nt, synthetic construct
  source 1..21: mol_type = other RNA
tcaggcaccttgggcaccaca

SEQ ID NO: 85535 - RNA, 21 nt, synthetic construct
  source 1..21: mol_type = other RNA
tgggcaccacccacatcacaa

SEQ ID NO: 85536 - RNA, 21 nt, synthetic construct
  source 1..21: mol_type = other RNA
ccacaccccagcagcaaccaa

SEQ ID NO: 85537 - RNA, 21 nt, synthetic construct
  source 1..21: mol_type = other RNA
taaccacggtggtgaccatga

SEQ ID NO: 85538 - RNA, 21 nt, synthetic construct
  source 1..21: mol_type = other RNA
ggtggtgaccatgggctgtga

SEQ ID NO: 85539 - RNA, 21 nt, synthetic construct
  source 1..21: mol_type = other RNA
agagtggctggactacagcta

SEQ ID NO: 85540 - RNA, 21 nt, synthetic construct
  source 1..21: mol_type = other RNA
gcagcctggactttggcctga

SEQ ID NO: 85541 - RNA, 21 nt, synthetic construct
  source 1..21: mol_type = other RNA
tcctccaccccgggaacagca

SEQ ID NO: 85542 - RNA, 21 nt, synthetic construct
  source 1..21: mol_type = other RNA
agaccaccacacccatggcca

SEQ ID NO: 85543 - RNA, 21 nt, synthetic construct
  source 1..21: mol_type = other RNA
cctcctccactccggagacca

SEQ ID NO: 85544 - RNA, 21 nt, synthetic construct
  source 1..21: mol_type = other RNA
aagggccaccagttccatgta

SEQ ID NO: 85545 - RNA, 21 nt, synthetic construct
  source 1..21: mol_type = other RNA
caccagttccatgtccaccca

SEQ ID NO: 85546 - RNA, 21 nt, synthetic construct
  source 1..21: mol_type = other RNA
tgaccacagcagccactacaa

SEQ ID NO: 85547 - RNA, 21 nt, synthetic construct
  source 1..21: mol_type = other RNA
gaccacagcagccactacaaa

SEQ ID NO: 85548 - RNA, 21 nt, synthetic construct
  source 1..21: mol_type = other RNA
cacagcagccactacaactga

SEQ ID NO: 85549 - RNA, 21 nt, synthetic construct
  source 1..21: mol_type = other RNA
cccgggcaactgctggcacca

SEQ ID NO: 85550 - RNA, 21 nt, synthetic construct
  source 1..21: mol_type = other RNA
ttcctccctgggcaccgccta

SEQ ID NO: 85551 - RNA, 21 nt, synthetic construct
  source 1..21: mol_type = other RNA
tcctccctgggcaccgcctga

SEQ ID NO: 85552 - RNA, 21 nt, synthetic construct
  source 1..21: mol_type = other RNA
cacgaccaccacaaccaggga

SEQ ID NO: 85553 - RNA, 21 nt, synthetic construct
  source 1..21: mol_type = other RNA
gccaccggctctgtggccaca

SEQ ID NO: 85554 - RNA, 21 nt, synthetic construct
  source 1..21: mol_type = other RNA
cctcctccaccccaggaacaa

SEQ ID NO: 85555 - RNA, 21 nt, synthetic construct
  source 1..21: mol_type = other RNA
cccaggaacagctcacactaa

SEQ ID NO: 85556 - RNA, 21 nt, synthetic construct
  source 1..21: mol_type = other RNA
ccacacccacaaccagaggca

SEQ ID NO: 85557 - RNA, 21 nt, synthetic construct
  source 1..21: mol_type = other RNA
accctcctctagcacacagaa

SEQ ID NO: 85558 - RNA, 21 nt, synthetic construct
  source 1..21: mol_type = other RNA
ctgaccaccacggccactaca

SEQ ID NO: 85559 - RNA, 21 nt, synthetic construct
  source 1..21: mol_type = other RNA
ctgccccccagcagtccccaa

SEQ ID NO: 85560 - RNA, 21 nt, synthetic construct
  source 1..21: mol_type = other RNA
tgggcaccacccacatcacaa

SEQ ID NO: 85561 - RNA, 21 nt, synthetic construct
  source 1..21: mol_type = other RNA
ccacaccccagcagcaaccaa

SEQ ID NO: 85562 - RNA, 21 nt, synthetic construct
  source 1..21: mol_type = other RNA
agagtggctggactacagcta

SEQ ID NO: 85563 - RNA, 21 nt, synthetic construct
  source 1..21: mol_type = other RNA
gcagcctggactttggcctga

SEQ ID NO: 85564 - RNA, 21 nt, synthetic construct
  source 1..21: mol_type = other RNA
gccaccggctctgtggccaca

SEQ ID NO: 85565 - RNA, 21 nt, synthetic construct
  source 1..21: mol_type = other RNA
cccaggaacagctcacactaa

SEQ ID NO: 85566 - RNA, 21 nt, synthetic construct
  source 1..21: mol_type = other RNA
accctcctctagcacacagaa

SEQ ID NO: 85567 - RNA, 21 nt, synthetic construct
  source 1..21: mol_type = other RNA
tcaggcaccttgggcaccaca

SEQ ID NO: 85568 - RNA, 21 nt, synthetic construct
  source 1..21: mol_type = other RNA
tgggcaccacccacatcacaa

SEQ ID NO: 85569 - RNA, 21 nt, synthetic construct
  source 1..21: mol_type = other RNA
ccacaccccagcagcaaccaa

SEQ ID NO: 85570 - RNA, 21 nt, synthetic construct
  source 1..21: mol_type = other RNA
tccccagggacgaccacccca

SEQ ID NO: 85571 - RNA, 21 nt, synthetic construct
  source 1..21: mol_type = other RNA
agagtggctggactacagcta

SEQ ID NO: 85572 - RNA, 21 nt, synthetic construct
  source 1..21: mol_type = other RNA
gcagcctggactttggcctga

SEQ ID NO: 85573 - RNA, 21 nt, synthetic construct
  source 1..21: mol_type = other RNA
tcctccaccccgggaacagca

SEQ ID NO: 85574 - RNA, 21 nt, synthetic construct
  source 1..21: mol_type = other RNA
ctgaccagcccggccaccaca

SEQ ID NO: 85575 - RNA, 21 nt, synthetic construct
  source 1..21: mol_type = other RNA
cctcctccactccggagacca

SEQ ID NO: 85576 - RNA, 21 nt, synthetic construct
  source 1..21: mol_type = other RNA
acaagggccaccagttccaca

SEQ ID NO: 85577 - RNA, 21 nt, synthetic construct
  source 1..21: mol_type = other RNA
caccagttccacgtccaccca

SEQ ID NO: 85578 - RNA, 21 nt, synthetic construct
  source 1..21: mol_type = other RNA
tgaccacagcagccactacaa

SEQ ID NO: 85579 - RNA, 21 nt, synthetic construct
  source 1..21: mol_type = other RNA
gaccacagcagccactacaaa

SEQ ID NO: 85580 - RNA, 21 nt, synthetic construct
  source 1..21: mol_type = other RNA
cacagcagccactacaactga

SEQ ID NO: 85581 - RNA, 21 nt, synthetic construct
  source 1..21: mol_type = other RNA
agtccagggactgcaactgca

SEQ ID NO: 85582 - RNA, 21 nt, synthetic construct
  source 1..21: mol_type = other RNA
gccaccggctctgtggccaca

SEQ ID NO: 85583 - RNA, 21 nt, synthetic construct
  source 1..21: mol_type = other RNA
cctcctccaccccaggaacaa

SEQ ID NO: 85584 - RNA, 21 nt, synthetic construct
  source 1..21: mol_type = other RNA
cccaggaacagctcacactaa

SEQ ID NO: 85585 - RNA, 21 nt, synthetic construct
  source 1..21: mol_type = other RNA
accctcctctagcacacagaa

SEQ ID NO: 85586 - RNA, 21 nt, synthetic construct
  source 1..21: mol_type = other RNA
ctgaccaccacggccactaca

SEQ ID NO: 85587 - RNA, 21 nt, synthetic construct
  source 1..21: mol_type = other RNA
acccatcaccccagtgctgaa

SEQ ID NO: 85588 - RNA, 21 nt, synthetic construct
  source 1..21: mol_type = other RNA
agccaccagctccaaagccaa

SEQ ID NO: 85589 - RNA, 21 nt, synthetic construct
  source 1..21: mol_type = other RNA
gccaccagctccaaagccaca

SEQ ID NO: 85590 - RNA, 21 nt, synthetic construct
  source 1..21: mol_type = other RNA
catgtccaccatgtccacaaa

SEQ ID NO: 85591 - RNA, 21 nt, synthetic construct
  source 1..21: mol_type = other RNA
catgtccacaatccacaccta

SEQ ID NO: 85592 - RNA, 21 nt, synthetic construct
  source 1..21: mol_type = other RNA
gcagcctgccaaccttcagca

SEQ ID NO: 85593 - RNA, 21 nt, synthetic construct
  source 1..21: mol_type = other RNA
cccgctgtcctcgccctccca

SEQ ID NO: 85594 - RNA, 21 nt, synthetic construct
  source 1..21: mol_type = other RNA
gcatctgcagcatgtggggca

SEQ ID NO: 85595 - RNA, 21 nt, synthetic construct
  source 1..21: mol_type = other RNA
tgggaaggaggagggcctgaa

SEQ ID NO: 85596 - RNA, 21 nt, synthetic construct
  source 1..21: mol_type = other RNA
ggaaggaggagggcctgatca

SEQ ID NO: 85597 - RNA, 21 nt, synthetic construct
  source 1..21: mol_type = other RNA
gaaggaggagggcctgatcca

SEQ ID NO: 85598 - RNA, 21 nt, synthetic construct
  source 1..21: mol_type = other RNA
ccctgggcgtgagcgtcacca

SEQ ID NO: 85599 - RNA, 21 nt, synthetic construct
  source 1..21: mol_type = other RNA
ttctgccctgaggaccagata

SEQ ID NO: 85600 - RNA, 21 nt, synthetic construct
  source 1..21: mol_type = other RNA
gggcaggagtccatctgcaca

SEQ ID NO: 85601 - RNA, 21 nt, synthetic construct
  source 1..21: mol_type = other RNA
tccatctgcacccaggaggaa

SEQ ID NO: 85602 - RNA, 21 nt, synthetic construct
  source 1..21: mol_type = other RNA
cgatggccagccagtccagca

SEQ ID NO: 85603 - RNA, 21 nt, synthetic construct
  source 1..21: mol_type = other RNA
tggccagccagtccagctgaa

SEQ ID NO: 85604 - RNA, 21 nt, synthetic construct
  source 1..21: mol_type = other RNA
tacctctgtgaggctgaggga

SEQ ID NO: 85605 - RNA, 21 nt, synthetic construct
  source 1..21: mol_type = other RNA
tgtggcaccagggctgcgaga

SEQ ID NO: 85606 - RNA, 21 nt, synthetic construct
  source 1..21: mol_type = other RNA
ctgccaggagaggcgggtcca

SEQ ID NO: 85607 - RNA, 21 nt, synthetic construct
  source 1..21: mol_type = other RNA
tcatgaaaaccttgggcctca

SEQ ID NO: 85608 - RNA, 21 nt, synthetic construct
  source 1..21: mol_type = other RNA
cggccggagcgcccgcgcaga

SEQ ID NO: 85609 - RNA, 21 nt, synthetic construct
  source 1..21: mol_type = other RNA
tccctgcccgtccccgtccca

SEQ ID NO: 85610 - RNA, 21 nt, synthetic construct
  source 1..21: mol_type = other RNA
aggcctagtgggctccaggca

SEQ ID NO: 85611 - RNA, 21 nt, synthetic construct
  source 1..21: mol_type = other RNA
ggcctagtgggctccaggcca

SEQ ID NO: 85612 - RNA, 21 nt, synthetic construct
  source 1..21: mol_type = other RNA
gcctagtgggctccaggccta

SEQ ID NO: 85613 - RNA, 21 nt, synthetic construct
  source 1..21: mol_type = other RNA
cctagtgggctccaggcctga

SEQ ID NO: 85614 - RNA, 21 nt, synthetic construct
  source 1..21: mol_type = other RNA
gccgcactggcctcctggtga

SEQ ID NO: 85615 - RNA, 21 nt, synthetic construct
  source 1..21: mol_type = other RNA
ccgcactggcctcctggtgga

SEQ ID NO: 85616 - RNA, 21 nt, synthetic construct
  source 1..21: mol_type = other RNA
ggtggagcagagcggggacta

SEQ ID NO: 85617 - RNA, 21 nt, synthetic construct
  source 1..21: mol_type = other RNA
catcaaggtcagcatccggca

SEQ ID NO: 85618 - RNA, 21 nt, synthetic construct
  source 1..21: mol_type = other RNA
ggcctgtgtggggacttcaaa

SEQ ID NO: 85619 - RNA, 21 nt, synthetic construct
  source 1..21: mol_type = other RNA
gcctgtgtggggacttcaaca

SEQ ID NO: 85620 - RNA, 21 nt, synthetic construct
  source 1..21: mol_type = other RNA
ggaggtgccctgagctctgca

SEQ ID NO: 85621 - RNA, 21 nt, synthetic construct
  source 1..21: mol_type = other RNA
gtgtggacggctgcttctgca

SEQ ID NO: 85622 - RNA, 21 nt, synthetic construct
  source 1..21: mol_type = other RNA
ctgcctgtgccaatgccagga

SEQ ID NO: 85623 - RNA, 21 nt, synthetic construct
  source 1..21: mol_type = other RNA
tcgcgctgccactccatcata

SEQ ID NO: 85624 - RNA, 21 nt, synthetic construct
  source 1..21: mol_type = other RNA
tgccactccatcatcaaccca

SEQ ID NO: 85625 - RNA, 21 nt, synthetic construct
  source 1..21: mol_type = other RNA
gacggctgcacctgccccgca

SEQ ID NO: 85626 - RNA, 21 nt, synthetic construct
  source 1..21: mol_type = other RNA
tgccccgcgggcaccttccta

SEQ ID NO: 85627 - RNA, 21 nt, synthetic construct
  source 1..21: mol_type = other RNA
cccgcccaggagtgcccctga

SEQ ID NO: 85628 - RNA, 21 nt, synthetic construct
  source 1..21: mol_type = other RNA
tggtgcacgacgagggcgcca

SEQ ID NO: 85629 - RNA, 21 nt, synthetic construct
  source 1..21: mol_type = other RNA
ctggactgcagcaacagctca

SEQ ID NO: 85630 - RNA, 21 nt, synthetic construct
  source 1..21: mol_type = other RNA
aaggcagctgcgagtacatca

SEQ ID NO: 85631 - RNA, 21 nt, synthetic construct
  source 1..21: mol_type = other RNA
ggactactgtggggacaacaa

SEQ ID NO: 85632 - RNA, 21 nt, synthetic construct
  source 1..21: mol_type = other RNA
acaacaccacccacgggacca

SEQ ID NO: 85633 - RNA, 21 nt, synthetic construct
  source 1..21: mol_type = other RNA
agctctccccctcctgcccga

SEQ ID NO: 85634 - RNA, 21 nt, synthetic construct
  source 1..21: mol_type = other RNA
ctctccccctcctgcccggaa

SEQ ID NO: 85635 - RNA, 21 nt, synthetic construct
  source 1..21: mol_type = other RNA
tggctgcctacgcccaggcca

SEQ ID NO: 85636 - RNA, 21 nt, synthetic construct
  source 1..21: mol_type = other RNA
ggctgcctacgcccaggccta

SEQ ID NO: 85637 - RNA, 21 nt, synthetic construct
  source 1..21: mol_type = other RNA
ctacgcccaggcctgccacga

SEQ ID NO: 85638 - RNA, 21 nt, synthetic construct
  source 1..21: mol_type = other RNA
gactccggacacctgccccta

SEQ ID NO: 85639 - RNA, 21 nt, synthetic construct
  source 1..21: mol_type = other RNA
acggcaccatcatcaggaaga

SEQ ID NO: 85640 - RNA, 21 nt, synthetic construct
  source 1..21: mol_type = other RNA
accgcctgggtcccccactca

SEQ ID NO: 85641 - RNA, 21 nt, synthetic construct
  source 1..21: mol_type = other RNA
gtccagctggtacaatgggca

SEQ ID NO: 85642 - RNA, 21 nt, synthetic construct
  source 1..21: mol_type = other RNA
gcaccgcccagagcccggcca

SEQ ID NO: 85643 - RNA, 21 nt, synthetic construct
  source 1..21: mol_type = other RNA
tgccctgtgctggctgacata

SEQ ID NO: 85644 - RNA, 21 nt, synthetic construct
  source 1..21: mol_type = other RNA
ctccccggccccaggcaccaa

SEQ ID NO: 85645 - RNA, 21 nt, synthetic construct
  source 1..21: mol_type = other RNA
cccaggcaccagccctcagca

SEQ ID NO: 85646 - RNA, 21 nt, synthetic construct
  source 1..21: mol_type = other RNA
gtgcctaccccaacccagaca

SEQ ID NO: 85647 - RNA, 21 nt, synthetic construct
  source 1..21: mol_type = other RNA
cccaactggaccctggcacaa

SEQ ID NO: 85648 - RNA, 21 nt, synthetic construct
  source 1..21: mol_type = other RNA
tggaccctggcacaggtggga

SEQ ID NO: 85649 - RNA, 21 nt, synthetic construct
  source 1..21: mol_type = other RNA
ccggccagcaccacagcagta

SEQ ID NO: 85650 - RNA, 21 nt, synthetic construct
  source 1..21: mol_type = other RNA
atggcgcccctcacagccaca

SEQ ID NO: 85651 - RNA, 21 nt, synthetic construct
  source 1..21: mol_type = other RNA
agaccagcacgcccaggacaa

SEQ ID NO: 85652 - RNA, 21 nt, synthetic construct
  source 1..21: mol_type = other RNA
gactaacaccaccaccagcca

SEQ ID NO: 85653 - RNA, 21 nt, synthetic construct
  source 1..21: mol_type = other RNA
actaacaccaccaccagccaa

SEQ ID NO: 85654 - RNA, 21 nt, synthetic construct
  source 1..21: mol_type = other RNA
caccaccagccagggcacgaa

SEQ ID NO: 85655 - RNA, 21 nt, synthetic construct
  source 1..21: mol_type = other RNA
ccactccctcctccagtccaa

SEQ ID NO: 85656 - RNA, 21 nt, synthetic construct
  source 1..21: mol_type = other RNA
agaagcacagccaccacacca

SEQ ID NO: 85657 - RNA, 21 nt, synthetic construct
  source 1..21: mol_type = other RNA
ccctgggcaccacctggacca

SEQ ID NO: 85658 - RNA, 21 nt, synthetic construct
  source 1..21: mol_type = other RNA
caccacacccacggccaccaa

SEQ ID NO: 85659 - RNA, 21 nt, synthetic construct
  source 1..21: mol_type = other RNA
cacccacggccaccatgtcca

SEQ ID NO: 85660 - RNA, 21 nt, synthetic construct
  source 1..21: mol_type = other RNA
ccgccacggccaccacaacta

SEQ ID NO: 85661 - RNA, 21 nt, synthetic construct
  source 1..21: mol_type = other RNA
caccggctctgtggccaccca

SEQ ID NO: 85662 - RNA, 21 nt, synthetic construct
  source 1..21: mol_type = other RNA
accggctctgtggccacccca

SEQ ID NO: 85663 - RNA, 21 nt, synthetic construct
  source 1..21: mol_type = other RNA
ctcctccatcccggggaccaa

SEQ ID NO: 85664 - RNA, 21 nt, synthetic construct
  source 1..21: mol_type = other RNA
tcctccatcccggggaccaca

SEQ ID NO: 85665 - RNA, 21 nt, synthetic construct
  source 1..21: mol_type = other RNA
accgccacagtgctgaccaca

SEQ ID NO: 85666 - RNA, 21 nt, synthetic construct
  source 1..21: mol_type = other RNA
caccaccacaactgtggccaa

SEQ ID NO: 85667 - RNA, 21 nt, synthetic construct
  source 1..21: mol_type = other RNA
ctctagcacacagaccagtga

SEQ ID NO: 85668 - RNA, 21 nt, synthetic construct
  source 1..21: mol_type = other RNA
tcactgaccaccacggccaca

SEQ ID NO: 85669 - RNA, 21 nt, synthetic construct
  source 1..21: mol_type = other RNA
caccggctccaccaccaacca

SEQ ID NO: 85670 - RNA, 21 nt, synthetic construct
  source 1..21: mol_type = other RNA
atccccccagtgctgaccaca

SEQ ID NO: 85671 - RNA, 21 nt, synthetic construct
  source 1..21: mol_type = other RNA
tccccccagtgctgaccacca

SEQ ID NO: 85672 - RNA, 21 nt, synthetic construct
  source 1..21: mol_type = other RNA
agtgactccctcctctgccca

SEQ ID NO: 85673 - RNA, 21 nt, synthetic construct
  source 1..21: mol_type = other RNA
cgatccctgccccccagcaga

SEQ ID NO: 85674 - RNA, 21 nt, synthetic construct
  source 1..21: mol_type = other RNA
ctggacttcggccacctcgga

SEQ ID NO: 85675 - RNA, 21 nt, synthetic construct
  source 1..21: mol_type = other RNA
cgactccagccctttccagca

SEQ ID NO: 85676 - RNA, 21 nt, synthetic construct
  source 1..21: mol_type = other RNA
ctttccagccctcaccctaga

SEQ ID NO: 85677 - RNA, 21 nt, synthetic construct
  source 1..21: mol_type = other RNA
cacctccaggaccacagccaa

SEQ ID NO: 85678 - RNA, 21 nt, synthetic construct
  source 1..21: mol_type = other RNA
cacggtggtgaccatgggcta

SEQ ID NO: 85679 - RNA, 21 nt, synthetic construct
  source 1..21: mol_type = other RNA
gtgccgtgcccaggcccagca

SEQ ID NO: 85680 - RNA, 21 nt, synthetic construct
  source 1..21: mol_type = other RNA
gccgtgcccaggcccagccta

SEQ ID NO: 85681 - RNA, 21 nt, synthetic construct
  source 1..21: mol_type = other RNA
gcactacagccaccgtgacga

SEQ ID NO: 85682 - RNA, 21 nt, synthetic construct
  source 1..21: mol_type = other RNA
gatccacggccaccgcctcca

SEQ ID NO: 85683 - RNA, 21 nt, synthetic construct
  source 1..21: mol_type = other RNA
cacgacacccacagtcaccaa

SEQ ID NO: 85684 - RNA, 21 nt, synthetic construct
  source 1..21: mol_type = other RNA
ttctccagtccagggactgca

SEQ ID NO: 85685 - RNA, 21 nt, synthetic construct
  source 1..21: mol_type = other RNA
agaagcacagccaccacacca

SEQ ID NO: 85686 - RNA, 21 nt, synthetic construct
  source 1..21: mol_type = other RNA
ccctgggcaccacctggacca

SEQ ID NO: 85687 - RNA, 21 nt, synthetic construct
  source 1..21: mol_type = other RNA
caccacacccacggccaccaa

SEQ ID NO: 85688 - RNA, 21 nt, synthetic construct
  source 1..21: mol_type = other RNA
cacccacggccaccatgtcca

SEQ ID NO: 85689 - RNA, 21 nt, synthetic construct
  source 1..21: mol_type = other RNA
caccggctctgtggccaccca

SEQ ID NO: 85690 - RNA, 21 nt, synthetic construct
  source 1..21: mol_type = other RNA
accggctctgtggccacccca

SEQ ID NO: 85691 - RNA, 21 nt, synthetic construct
  source 1..21: mol_type = other RNA
cacaaccagaggttccacgga

SEQ ID NO: 85692 - RNA, 21 nt, synthetic construct
  source 1..21: mol_type = other RNA
ctcctccatcccggggaccaa

SEQ ID NO: 85693 - RNA, 21 nt, synthetic construct
  source 1..21: mol_type = other RNA
tcctccatcccggggaccaca

SEQ ID NO: 85694 - RNA, 21 nt, synthetic construct
  source 1..21: mol_type = other RNA
caccaccacaactgtggccaa

SEQ ID NO: 85695 - RNA, 21 nt, synthetic construct
  source 1..21: mol_type = other RNA
ctctagcacacagaccagtga

SEQ ID NO: 85696 - RNA, 21 nt, synthetic construct
  source 1..21: mol_type = other RNA
tcactgaccaccacggccaca

SEQ ID NO: 85697 - RNA, 21 nt, synthetic construct
  source 1..21: mol_type = other RNA
caccggctccaccaccaacca

SEQ ID NO: 85698 - RNA, 21 nt, synthetic construct
  source 1..21: mol_type = other RNA
atccccccagtgctgaccaca

SEQ ID NO: 85699 - RNA, 21 nt, synthetic construct
  source 1..21: mol_type = other RNA
tccccccagtgctgaccacca

SEQ ID NO: 85700 - RNA, 21 nt, synthetic construct
  source 1..21: mol_type = other RNA
agtgactccctcctctgccca

SEQ ID NO: 85701 - RNA, 21 nt, synthetic construct
  source 1..21: mol_type = other RNA
gggcgatccctgtcccccaga

SEQ ID NO: 85702 - RNA, 21 nt, synthetic construct
  source 1..21: mol_type = other RNA
cacggtggtgaccatgggcta

SEQ ID NO: 85703 - RNA, 21 nt, synthetic construct
  source 1..21: mol_type = other RNA
gtgccgtgcccaggcccagca

SEQ ID NO: 85704 - RNA, 21 nt, synthetic construct
  source 1..21: mol_type = other RNA
gccgtgcccaggcccagccta

SEQ ID NO: 85705 - RNA, 21 nt, synthetic construct
  source 1..21: mol_type = other RNA
ccagggacgacctggatccta

SEQ ID NO: 85706 - RNA, 21 nt, synthetic construct
  source 1..21: mol_type = other RNA
cagagcagaccacagcagcca

SEQ ID NO: 85707 - RNA, 21 nt, synthetic construct
  source 1..21: mol_type = other RNA
agtgctgaccagcacggccaa

SEQ ID NO: 85708 - RNA, 21 nt, synthetic construct
  source 1..21: mol_type = other RNA
cggccaccacacccacagcca

SEQ ID NO: 85709 - RNA, 21 nt, synthetic construct
  source 1..21: mol_type = other RNA
acaagcacagccaccaaatca

SEQ ID NO: 85710 - RNA, 21 nt, synthetic construct
  source 1..21: mol_type = other RNA
acagccaccaaatccacagca

SEQ ID NO: 85711 - RNA, 21 nt, synthetic construct
  source 1..21: mol_type = other RNA
gaccacccacacctccacaga

SEQ ID NO: 85712 - RNA, 21 nt, synthetic construct
  source 1..21: mol_type = other RNA
ccacccacacctccacagtga

SEQ ID NO: 85713 - RNA, 21 nt, synthetic construct
  source 1..21: mol_type = other RNA
cacctccacagtgctgaccaa

SEQ ID NO: 85714 - RNA, 21 nt, synthetic construct
  source 1..21: mol_type = other RNA
gttccatgtccaccccctcca

SEQ ID NO: 85715 - RNA, 21 nt, synthetic construct
  source 1..21: mol_type = other RNA
actacaactgcagccactgga

SEQ ID NO: 85716 - RNA, 21 nt, synthetic construct
  source 1..21: mol_type = other RNA
cactggccccacggccaccca

SEQ ID NO: 85717 - RNA, 21 nt, synthetic construct
  source 1..21: mol_type = other RNA
tcctcacagagcccagcacta

SEQ ID NO: 85718 - RNA, 21 nt, synthetic construct
  source 1..21: mol_type = other RNA
gcactacagccaccgtgacga

SEQ ID NO: 85719 - RNA, 21 nt, synthetic construct
  source 1..21: mol_type = other RNA
gatccacggccaccgcctcca

SEQ ID NO: 85720 - RNA, 21 nt, synthetic construct
  source 1..21: mol_type = other RNA
agtgctgaccagcacggccaa

SEQ ID NO: 85721 - RNA, 21 nt, synthetic construct
  source 1..21: mol_type = other RNA
ccactccctcctccagtccaa

SEQ ID NO: 85722 - RNA, 21 nt, synthetic construct
  source 1..21: mol_type = other RNA
agaagcacagccaccacacca

SEQ ID NO: 85723 - RNA, 21 nt, synthetic construct
  source 1..21: mol_type = other RNA
caccacacccacggccaccaa

SEQ ID NO: 85724 - RNA, 21 nt, synthetic construct
  source 1..21: mol_type = other RNA
cacccacggccaccatgtcca

SEQ ID NO: 85725 - RNA, 21 nt, synthetic construct
  source 1..21: mol_type = other RNA
caccggctctgtggccaccca

SEQ ID NO: 85726 - RNA, 21 nt, synthetic construct
  source 1..21: mol_type = other RNA
accggctctgtggccacccca

SEQ ID NO: 85727 - RNA, 21 nt, synthetic construct
  source 1..21: mol_type = other RNA
ctcctccatcccggggaccaa

SEQ ID NO: 85728 - RNA, 21 nt, synthetic construct
  source 1..21: mol_type = other RNA
tcctccatcccggggaccaca

SEQ ID NO: 85729 - RNA, 21 nt, synthetic construct
  source 1..21: mol_type = other RNA
accgccacagtgctgaccaca

SEQ ID NO: 85730 - RNA, 21 nt, synthetic construct
  source 1..21: mol_type = other RNA
caccaccacaactgtggccaa

SEQ ID NO: 85731 - RNA, 21 nt, synthetic construct
  source 1..21: mol_type = other RNA
ctctagcacacagaccagtga

SEQ ID NO: 85732 - RNA, 21 nt, synthetic construct
  source 1..21: mol_type = other RNA
tcactgaccaccacggccaca

SEQ ID NO: 85733 - RNA, 21 nt, synthetic construct
  source 1..21: mol_type = other RNA
caccggctccaccaccaacca

SEQ ID NO: 85734 - RNA, 21 nt, synthetic construct
  source 1..21: mol_type = other RNA
atccccccagtgctgaccaca

SEQ ID NO: 85735 - RNA, 21 nt, synthetic construct
  source 1..21: mol_type = other RNA
tccccccagtgctgaccacca

SEQ ID NO: 85736 - RNA, 21 nt, synthetic construct
  source 1..21: mol_type = other RNA
agtgactccctcctctgccca

SEQ ID NO: 85737 - RNA, 21 nt, synthetic construct
  source 1..21: mol_type = other RNA
ctggacttcggccacctcgga

SEQ ID NO: 85738 - RNA, 21 nt, synthetic construct
  source 1..21: mol_type = other RNA
cacctccaggaccacagccaa

SEQ ID NO: 85739 - RNA, 21 nt, synthetic construct
  source 1..21: mol_type = other RNA
gtgccgtgcccaggcccagca

SEQ ID NO: 85740 - RNA, 21 nt, synthetic construct
  source 1..21: mol_type = other RNA
gccgtgcccaggcccagccta

SEQ ID NO: 85741 - RNA, 21 nt, synthetic construct
  source 1..21: mol_type = other RNA
gcactacagccaccgtgacga

SEQ ID NO: 85742 - RNA, 21 nt, synthetic construct
  source 1..21: mol_type = other RNA
gatccacggccaccgcctcca

SEQ ID NO: 85743 - RNA, 21 nt, synthetic construct
  source 1..21: mol_type = other RNA
cacgacacccacagtcaccaa

SEQ ID NO: 85744 - RNA, 21 nt, synthetic construct
  source 1..21: mol_type = other RNA
ttctccagtccagggactgca

SEQ ID NO: 85745 - RNA, 21 nt, synthetic construct
  source 1..21: mol_type = other RNA
agaagcacagccaccacacca

SEQ ID NO: 85746 - RNA, 21 nt, synthetic construct
  source 1..21: mol_type = other RNA
ccctgggcaccacctggacca

SEQ ID NO: 85747 - RNA, 21 nt, synthetic construct
  source 1..21: mol_type = other RNA
caccacacccacggccaccaa

SEQ ID NO: 85748 - RNA, 21 nt, synthetic construct
  source 1..21: mol_type = other RNA
cacccacggccaccatgtcca

SEQ ID NO: 85749 - RNA, 21 nt, synthetic construct
  source 1..21: mol_type = other RNA
caccggctctgtggccaccca

SEQ ID NO: 85750 - RNA, 21 nt, synthetic construct
  source 1..21: mol_type = other RNA
accggctctgtggccacccca

SEQ ID NO: 85751 - RNA, 21 nt, synthetic construct
  source 1..21: mol_type = other RNA
tgtggccaccccctcttccaa

SEQ ID NO: 85752 - RNA, 21 nt, synthetic construct
  source 1..21: mol_type = other RNA
accccctcttccaccccagga

SEQ ID NO: 85753 - RNA, 21 nt, synthetic construct
  source 1..21: mol_type = other RNA
acgcacgcctccagtgtggaa

SEQ ID NO: 85754 - RNA, 21 nt, synthetic construct
  source 1..21: mol_type = other RNA
tgaccccctcctccgtcccga

SEQ ID NO: 85755 - RNA, 21 nt, synthetic construct
  source 1..21: mol_type = other RNA
caccaccacaactgtggccaa

SEQ ID NO: 85756 - RNA, 21 nt, synthetic construct
  source 1..21: mol_type = other RNA
ctctagcacacagaccagtga

SEQ ID NO: 85757 - RNA, 21 nt, synthetic construct
  source 1..21: mol_type = other RNA
caccggctccaccaccaacca

SEQ ID NO: 85758 - RNA, 21 nt, synthetic construct
  source 1..21: mol_type = other RNA
atccccccagtgctgaccaca

SEQ ID NO: 85759 - RNA, 21 nt, synthetic construct
  source 1..21: mol_type = other RNA
tccccccagtgctgaccacca

SEQ ID NO: 85760 - RNA, 21 nt, synthetic construct
  source 1..21: mol_type = other RNA
agtgactccctcctctgccca

SEQ ID NO: 85761 - RNA, 21 nt, synthetic construct
  source 1..21: mol_type = other RNA
gggcgatccctgtcccccaga

SEQ ID NO: 85762 - RNA, 21 nt, synthetic construct
  source 1..21: mol_type = other RNA
gtgccgtgcccaggcccagca

SEQ ID NO: 85763 - RNA, 21 nt, synthetic construct
  source 1..21: mol_type = other RNA
gccgtgcccaggcccagccta

SEQ ID NO: 85764 - RNA, 21 nt, synthetic construct
  source 1..21: mol_type = other RNA
tggtgtccccctgggggagta

SEQ ID NO: 85765 - RNA, 21 nt, synthetic construct
  source 1..21: mol_type = other RNA
tcccaaagtgctgaccagcca

SEQ ID NO: 85766 - RNA, 21 nt, synthetic construct
  source 1..21: mol_type = other RNA
cggccaccacacccacagcca

SEQ ID NO: 85767 - RNA, 21 nt, synthetic construct
  source 1..21: mol_type = other RNA
acaagcacagccaccaaatca

SEQ ID NO: 85768 - RNA, 21 nt, synthetic construct
  source 1..21: mol_type = other RNA
acagccaccaaatccacagca

SEQ ID NO: 85769 - RNA, 21 nt, synthetic construct
  source 1..21: mol_type = other RNA
aacagaccaccacacccgtga

SEQ ID NO: 85770 - RNA, 21 nt, synthetic construct
  source 1..21: mol_type = other RNA
gaccacccacacctccacaga

SEQ ID NO: 85771 - RNA, 21 nt, synthetic construct
  source 1..21: mol_type = other RNA
ccacccacacctccacagtga

SEQ ID NO: 85772 - RNA, 21 nt, synthetic construct
  source 1..21: mol_type = other RNA
cacctccacagtgctgaccaa

SEQ ID NO: 85773 - RNA, 21 nt, synthetic construct
  source 1..21: mol_type = other RNA
actacaactgcagccactgga

SEQ ID NO: 85774 - RNA, 21 nt, synthetic construct
  source 1..21: mol_type = other RNA
cactggccccacggccaccca

SEQ ID NO: 85775 - RNA, 21 nt, synthetic construct
  source 1..21: mol_type = other RNA
gcactacagccaccgtgacga

SEQ ID NO: 85776 - RNA, 21 nt, synthetic construct
  source 1..21: mol_type = other RNA
gatccacggccaccgcctcca

SEQ ID NO: 85777 - RNA, 21 nt, synthetic construct
  source 1..21: mol_type = other RNA
cacgacacccacagtcaccaa

SEQ ID NO: 85778 - RNA, 21 nt, synthetic construct
  source 1..21: mol_type = other RNA
ccactccctcctccagtccaa

SEQ ID NO: 85779 - RNA, 21 nt, synthetic construct
  source 1..21: mol_type = other RNA
agaagcacagccaccacacca

SEQ ID NO: 85780 - RNA, 21 nt, synthetic construct
  source 1..21: mol_type = other RNA
ccctgggcaccacctggacca

SEQ ID NO: 85781 - RNA, 21 nt, synthetic construct
  source 1..21: mol_type = other RNA
caccacacccacggccaccaa

SEQ ID NO: 85782 - RNA, 21 nt, synthetic construct
  source 1..21: mol_type = other RNA
cacccacggccaccatgtcca

SEQ ID NO: 85783 - RNA, 21 nt, synthetic construct
  source 1..21: mol_type = other RNA
ccgccacggccaccacaacca

SEQ ID NO: 85784 - RNA, 21 nt, synthetic construct
  source 1..21: mol_type = other RNA
caccggctctgtggccaccca

SEQ ID NO: 85785 - RNA, 21 nt, synthetic construct
  source 1..21: mol_type = other RNA
accggctctgtggccacccca

SEQ ID NO: 85786 - RNA, 21 nt, synthetic construct
  source 1..21: mol_type = other RNA
ctcctccatcccggggaccaa

SEQ ID NO: 85787 - RNA, 21 nt, synthetic construct
  source 1..21: mol_type = other RNA
tcctccatcccggggaccaca

SEQ ID NO: 85788 - RNA, 21 nt, synthetic construct
  source 1..21: mol_type = other RNA
caccaccacaactgtggccaa

SEQ ID NO: 85789 - RNA, 21 nt, synthetic construct
  source 1..21: mol_type = other RNA
ctctagcacacagaccagtga

SEQ ID NO: 85790 - RNA, 21 nt, synthetic construct
  source 1..21: mol_type = other RNA
tcactgaccaccacggccaca

SEQ ID NO: 85791 - RNA, 21 nt, synthetic construct
  source 1..21: mol_type = other RNA
caccggctccaccaccaacca

SEQ ID NO: 85792 - RNA, 21 nt, synthetic construct
  source 1..21: mol_type = other RNA
agtgctgaccagcacggccaa

SEQ ID NO: 85793 - RNA, 21 nt, synthetic construct
  source 1..21: mol_type = other RNA
caccacacccgcagccaccaa

SEQ ID NO: 85794 - RNA, 21 nt, synthetic construct
  source 1..21: mol_type = other RNA
cacccgcagccaccagctcca

SEQ ID NO: 85795 - RNA, 21 nt, synthetic construct
  source 1..21: mol_type = other RNA
agctccaaagccacttcctca

SEQ ID NO: 85796 - RNA, 21 nt, synthetic construct
  source 1..21: mol_type = other RNA
ccagcacagaccaccacacca

SEQ ID NO: 85797 - RNA, 21 nt, synthetic construct
  source 1..21: mol_type = other RNA
accaccacacccatgtccaca

SEQ ID NO: 85798 - RNA, 21 nt, synthetic construct
  source 1..21: mol_type = other RNA
gaccacccacacctccacaga

SEQ ID NO: 85799 - RNA, 21 nt, synthetic construct
  source 1..21: mol_type = other RNA
ccacccacacctccacagtga

SEQ ID NO: 85800 - RNA, 21 nt, synthetic construct
  source 1..21: mol_type = other RNA
cacctccacagtgctgaccaa

SEQ ID NO: 85801 - RNA, 21 nt, synthetic construct
  source 1..21: mol_type = other RNA
attccacggccacaccctcca

SEQ ID NO: 85802 - RNA, 21 nt, synthetic construct
  source 1..21: mol_type = other RNA
actacaactgcagccactgga

SEQ ID NO: 85803 - RNA, 21 nt, synthetic construct
  source 1..21: mol_type = other RNA
ccacggccaccctgtcctcca

SEQ ID NO: 85804 - RNA, 21 nt, synthetic construct
  source 1..21: mol_type = other RNA
tatgcccacagccactgccta

SEQ ID NO: 85805 - RNA, 21 nt, synthetic construct
  source 1..21: mol_type = other RNA
tccccagcagcctgccaacca

SEQ ID NO: 85806 - RNA, 21 nt, synthetic construct
  source 1..21: mol_type = other RNA
gacccactggcttccccagca

SEQ ID NO: 85807 - RNA, 21 nt, synthetic construct
  source 1..21: mol_type = other RNA
gggcgcctgtcccacctccca

SEQ ID NO: 85808 - RNA, 21 nt, synthetic construct
  source 1..21: mol_type = other RNA
ctgtcccacctccccaccgca

SEQ ID NO: 85809 - RNA, 21 nt, synthetic construct
  source 1..21: mol_type = other RNA
cccacctccccaccgccagta

SEQ ID NO: 85810 - RNA, 21 nt, synthetic construct
  source 1..21: mol_type = other RNA
accgccagtgtcctccgccca

SEQ ID NO: 85811 - RNA, 21 nt, synthetic construct
  source 1..21: mol_type = other RNA
gccccgctgtcctcgccctca

SEQ ID NO: 85812 - RNA, 21 nt, synthetic construct
  source 1..21: mol_type = other RNA
ccccgctgtcctcgccctcca

SEQ ID NO: 85813 - RNA, 21 nt, synthetic construct
  source 1..21: mol_type = other RNA
tgtcctcgccctcccctgcca

SEQ ID NO: 85814 - RNA, 21 nt, synthetic construct
  source 1..21: mol_type = other RNA
tgcacggcctctgccactgca

SEQ ID NO: 85815 - RNA, 21 nt, synthetic construct
  source 1..21: mol_type = other RNA
tcgtcctcactgtcaccatga

SEQ ID NO: 85816 - RNA, 21 nt, synthetic construct
  source 1..21: mol_type = other RNA
gcgtgcttgtgtctgtgctga

SEQ ID NO: 85817 - RNA, 21 nt, synthetic construct
  source 1..21: mol_type = other RNA
gtgcttgtgtctgtgctggga

SEQ ID NO: 85818 - RNA, 21 nt, synthetic construct
  source 1..21: mol_type = other RNA
tgcttgtgtctgtgctgggga

SEQ ID NO: 85819 - RNA, 21 nt, synthetic construct
  source 1..21: mol_type = other RNA
ggatggctgctgggccccgaa

SEQ ID NO: 85820 - RNA, 21 nt, synthetic construct
  source 1..21: mol_type = other RNA
ccacaaccttgtgcccccgga

SEQ ID NO: 85821 - RNA, 21 nt, synthetic construct
  source 1..21: mol_type = other RNA
ggagggctgcttctgccctga

SEQ ID NO: 85822 - RNA, 21 nt, synthetic construct
  source 1..21: mol_type = other RNA
gtgacgcccagggtcagccca

SEQ ID NO: 85823 - RNA, 21 nt, synthetic construct
  source 1..21: mol_type = other RNA
agaacccctgctgccccgaga

SEQ ID NO: 85824 - RNA, 21 nt, synthetic construct
  source 1..21: mol_type = other RNA
gcaacacaaccacctgcccca

SEQ ID NO: 85825 - RNA, 21 nt, synthetic construct
  source 1..21: mol_type = other RNA
aacacaaccacctgcccccaa

SEQ ID NO: 85826 - RNA, 21 nt, synthetic construct
  source 1..21: mol_type = other RNA
ctgcagacctcagctgtgtta

SEQ ID NO: 85827 - RNA, 21 nt, synthetic construct
  source 1..21: mol_type = other RNA
ccacatgtgtacctgcctcta

SEQ ID NO: 85828 - RNA, 21 nt, synthetic construct
  source 1..21: mol_type = other RNA
actacctgtccccagggctta

SEQ ID NO: 85829 - RNA, 21 nt, synthetic construct
  source 1..21: mol_type = other RNA
cgcccgatggccagccagtca

SEQ ID NO: 85830 - RNA, 21 nt, synthetic construct
  source 1..21: mol_type = other RNA
ccagccagtccagctgaatga

SEQ ID NO: 85831 - RNA, 21 nt, synthetic construct
  source 1..21: mol_type = other RNA
gggtcaacagccatgtggaca

SEQ ID NO: 85832 - RNA, 21 nt, synthetic construct
  source 1..21: mol_type = other RNA
cagcctgcatcctgcccagaa

SEQ ID NO: 85833 - RNA, 21 nt, synthetic construct
  source 1..21: mol_type = other RNA
gaggtcaacatcaccttctga

SEQ ID NO: 85834 - RNA, 21 nt, synthetic construct
  source 1..21: mol_type = other RNA
aggtcaacatcaccttctgca

SEQ ID NO: 85835 - RNA, 21 nt, synthetic construct
  source 1..21: mol_type = other RNA
ccttctgcgagggctcctgca

SEQ ID NO: 85836 - RNA, 21 nt, synthetic construct
  source 1..21: mol_type = other RNA
cttctgcgagggctcctgcca

SEQ ID NO: 85837 - RNA, 21 nt, synthetic construct
  source 1..21: mol_type = other RNA
acgtggatgagtgtggctgca

SEQ ID NO: 85838 - RNA, 21 nt, synthetic construct
  source 1..21: mol_type = other RNA
cctgcgcccatggctccccca

SEQ ID NO: 85839 - RNA, 21 nt, synthetic construct
  source 1..21: mol_type = other RNA
cccggcccaggaggccactga

SEQ ID NO: 85840 - RNA, 21 nt, synthetic construct
  source 1..21: mol_type = other RNA
ccggcccaggaggccactgca

SEQ ID NO: 85841 - RNA, 21 nt, synthetic construct
  source 1..21: mol_type = other RNA
agccaggatgtgcattgtcta

SEQ ID NO: 85842 - RNA, 21 nt, synthetic construct
  source 1..21: mol_type = other RNA
gctccgtgctcctgctgccca

SEQ ID NO: 85843 - RNA, 21 nt, synthetic construct
  source 1..21: mol_type = other RNA
cgtgctcctgctgcccaccca

SEQ ID NO: 85844 - RNA, 21 nt, synthetic construct
  source 1..21: mol_type = other RNA
gtgctcctgctgcccacccca

SEQ ID NO: 85845 - RNA, 21 nt, synthetic construct
  source 1..21: mol_type = other RNA
cgtccggccgctggggcagaa

SEQ ID NO: 85846 - RNA, 21 nt, synthetic construct
  source 1..21: mol_type = other RNA
ccgctggggcagacaggctga

SEQ ID NO: 85847 - RNA, 21 nt, synthetic construct
  source 1..21: mol_type = other RNA
ccctgcccgtccccgtcccca

SEQ ID NO: 85848 - RNA, 21 nt, synthetic construct
  source 1..21: mol_type = other RNA
cgagctgggagaatgcaggga

SEQ ID NO: 85849 - RNA, 21 nt, synthetic construct
  source 1..21: mol_type = other RNA
caggcacggtgctggatgaca

SEQ ID NO: 85850 - RNA, 21 nt, synthetic construct
  source 1..21: mol_type = other RNA
cggtgctggatgacatcacga

SEQ ID NO: 85851 - RNA, 21 nt, synthetic construct
  source 1..21: mol_type = other RNA
ctgccccgcgggcaccttcca

SEQ ID NO: 85852 - RNA, 21 nt, synthetic construct
  source 1..21: mol_type = other RNA
ccttgttctgtgacttctaca

SEQ ID NO: 85853 - RNA, 21 nt, synthetic construct
  source 1..21: mol_type = other RNA
tggcacaggtggggcagaaga

SEQ ID NO: 85854 - RNA, 21 nt, synthetic construct
  source 1..21: mol_type = other RNA
gctcccccggccagcaccaca

SEQ ID NO: 85855 - RNA, 21 nt, synthetic construct
  source 1..21: mol_type = other RNA
cttccaacacgctcagcccta

SEQ ID NO: 85856 - RNA, 21 nt, synthetic construct
  source 1..21: mol_type = other RNA
acacccacggccaccatgtca

SEQ ID NO: 85857 - RNA, 21 nt, synthetic construct
  source 1..21: mol_type = other RNA
caccaccgccaccacacctga

SEQ ID NO: 85858 - RNA, 21 nt, synthetic construct
  source 1..21: mol_type = other RNA
actccctcctctgccctagga

SEQ ID NO: 85859 - RNA, 21 nt, synthetic construct
  source 1..21: mol_type = other RNA
ctcgggcatcttgggcaccaa

SEQ ID NO: 85860 - RNA, 21 nt, synthetic construct
  source 1..21: mol_type = other RNA
tgccgtgcccaggcccagcca

SEQ ID NO: 85861 - RNA, 21 nt, synthetic construct
  source 1..21: mol_type = other RNA
gcaccccggccaccagctcta

SEQ ID NO: 85862 - RNA, 21 nt, synthetic construct
  source 1..21: mol_type = other RNA
ccactcccttctccagtccaa

SEQ ID NO: 85863 - RNA, 21 nt, synthetic construct
  source 1..21: mol_type = other RNA
acacccacggccaccatgtca

SEQ ID NO: 85864 - RNA, 21 nt, synthetic construct
  source 1..21: mol_type = other RNA
ccggggaccacccacacccca

SEQ ID NO: 85865 - RNA, 21 nt, synthetic construct
  source 1..21: mol_type = other RNA
caccaccgccaccacacctga

SEQ ID NO: 85866 - RNA, 21 nt, synthetic construct
  source 1..21: mol_type = other RNA
actccctcctctgccctagga

SEQ ID NO: 85867 - RNA, 21 nt, synthetic construct
  source 1..21: mol_type = other RNA
tgccgtgcccaggcccagcca

SEQ ID NO: 85868 - RNA, 21 nt, synthetic construct
  source 1..21: mol_type = other RNA
gcaccccggccaccagctcta

SEQ ID NO: 85869 - RNA, 21 nt, synthetic construct
  source 1..21: mol_type = other RNA
ctgacaagcacagccaccaaa

SEQ ID NO: 85870 - RNA, 21 nt, synthetic construct
  source 1..21: mol_type = other RNA
acacccatggccaccatgtca

SEQ ID NO: 85871 - RNA, 21 nt, synthetic construct
  source 1..21: mol_type = other RNA
acacccacggccaccatgtca

SEQ ID NO: 85872 - RNA, 21 nt, synthetic construct
  source 1..21: mol_type = other RNA
caccaccgccaccacacctga

SEQ ID NO: 85873 - RNA, 21 nt, synthetic construct
  source 1..21: mol_type = other RNA
actccctcctctgccctagga

SEQ ID NO: 85874 - RNA, 21 nt, synthetic construct
  source 1..21: mol_type = other RNA
ctcgggcatcttgggcaccaa

SEQ ID NO: 85875 - RNA, 21 nt, synthetic construct
  source 1..21: mol_type = other RNA
tgccgtgcccaggcccagcca

SEQ ID NO: 85876 - RNA, 21 nt, synthetic construct
  source 1..21: mol_type = other RNA
gcaccccggccaccagctcta

SEQ ID NO: 85877 - RNA, 21 nt, synthetic construct
  source 1..21: mol_type = other RNA
ccactcccttctccagtccaa

SEQ ID NO: 85878 - RNA, 21 nt, synthetic construct
  source 1..21: mol_type = other RNA
acacccacggccaccatgtca

SEQ ID NO: 85879 - RNA, 21 nt, synthetic construct
  source 1..21: mol_type = other RNA
tctgtggccaccccctcttca

SEQ ID NO: 85880 - RNA, 21 nt, synthetic construct
  source 1..21: mol_type = other RNA
cacgcacgcctccagtgtgga

SEQ ID NO: 85881 - RNA, 21 nt, synthetic construct
  source 1..21: mol_type = other RNA
ccggggaccacccacacccca

SEQ ID NO: 85882 - RNA, 21 nt, synthetic construct
  source 1..21: mol_type = other RNA
caccaccgccaccacacctga

SEQ ID NO: 85883 - RNA, 21 nt, synthetic construct
  source 1..21: mol_type = other RNA
actccctcctctgccctagga

SEQ ID NO: 85884 - RNA, 21 nt, synthetic construct
  source 1..21: mol_type = other RNA
tgccgtgcccaggcccagcca

SEQ ID NO: 85885 - RNA, 21 nt, synthetic construct
  source 1..21: mol_type = other RNA
gcaccccggccaccagctcta

SEQ ID NO: 85886 - RNA, 21 nt, synthetic construct
  source 1..21: mol_type = other RNA
ctgacaagcacagccaccaaa

SEQ ID NO: 85887 - RNA, 21 nt, synthetic construct
  source 1..21: mol_type = other RNA
tacacccatcccctcctccaa

SEQ ID NO: 85888 - RNA, 21 nt, synthetic construct
  source 1..21: mol_type = other RNA
acacccacggccaccatgtca

SEQ ID NO: 85889 - RNA, 21 nt, synthetic construct
  source 1..21: mol_type = other RNA
cacacccgcagccaccagcta

SEQ ID NO: 85890 - RNA, 21 nt, synthetic construct
  source 1..21: mol_type = other RNA
tacacccatcccctcctccaa

SEQ ID NO: 85891 - RNA, 21 nt, synthetic construct
  source 1..21: mol_type = other RNA
aactgcagccactggatccaa

SEQ ID NO: 85892 - RNA, 21 nt, synthetic construct
  source 1..21: mol_type = other RNA
accgtggggaccacccgcaca

SEQ ID NO: 85893 - RNA, 21 nt, synthetic construct
  source 1..21: mol_type = other RNA
gggcctgatcctgtttgacca

SEQ ID NO: 85894 - RNA, 21 nt, synthetic construct
  source 1..21: mol_type = other RNA
cgtgcttgtgtctgtgctgga

SEQ ID NO: 85895 - RNA, 21 nt, synthetic construct
  source 1..21: mol_type = other RNA
cttgtgtctgtgctggggaca

SEQ ID NO: 85896 - RNA, 21 nt, synthetic construct
  source 1..21: mol_type = other RNA
ccacagccgctctgtgatcta

SEQ ID NO: 85897 - RNA, 21 nt, synthetic construct
  source 1..21: mol_type = other RNA
cgacctcacctgcccacccaa

SEQ ID NO: 85898 - RNA, 21 nt, synthetic construct
  source 1..21: mol_type = other RNA
atctgcacccaggaggaggga

SEQ ID NO: 85899 - RNA, 21 nt, synthetic construct
  source 1..21: mol_type = other RNA
ctgggtcaacagccatgtgga

SEQ ID NO: 85900 - RNA, 21 nt, synthetic construct
  source 1..21: mol_type = other RNA
tgtgtccagctgcagggggaa

SEQ ID NO: 85901 - RNA, 21 nt, synthetic construct
  source 1..21: mol_type = other RNA
acaggcaaggcggccgcctga

SEQ ID NO: 85902 - RNA, 21 nt, synthetic construct
  source 1..21: mol_type = other RNA
tggtggagcagagcggggaca

SEQ ID NO: 85903 - RNA, 21 nt, synthetic construct
  source 1..21: mol_type = other RNA
caccgcaccctgctggggcca

SEQ ID NO: 85904 - RNA, 21 nt, synthetic construct
  source 1..21: mol_type = other RNA
ctccttcaacaccacctgcaa

SEQ ID NO: 85905 - RNA, 21 nt, synthetic construct
  source 1..21: mol_type = other RNA
cctacaagcctggagagacca

SEQ ID NO: 85906 - RNA, 21 nt, synthetic construct
  source 1..21: mol_type = other RNA
ccgcccagagcccggcctgga

SEQ ID NO: 85907 - RNA, 21 nt, synthetic construct
  source 1..21: mol_type = other RNA
ctgtgcctaccccaacccaga

SEQ ID NO: 85908 - RNA, 21 nt, synthetic construct
  source 1..21: mol_type = other RNA
caacccagaccacagcaacca

SEQ ID NO: 85909 - RNA, 21 nt, synthetic construct
  source 1..21: mol_type = other RNA
gtgccacaaccccgccaccga

SEQ ID NO: 85910 - RNA, 21 nt, synthetic construct
  source 1..21: mol_type = other RNA
ggggctgaccagggctcccca

SEQ ID NO: 85911 - RNA, 21 nt, synthetic construct
  source 1..21: mol_type = other RNA
ggctcccccggccagcaccaa

SEQ ID NO: 85912 - RNA, 21 nt, synthetic construct
  source 1..21: mol_type = other RNA
caggacagagacgacaatgaa

SEQ ID NO: 85913 - RNA, 21 nt, synthetic construct
  source 1..21: mol_type = other RNA
tggatcagcacaaccaccaca

SEQ ID NO: 85914 - RNA, 21 nt, synthetic construct
  source 1..21: mol_type = other RNA
cggctccaccaccaaccccta

SEQ ID NO: 85915 - RNA, 21 nt, synthetic construct
  source 1..21: mol_type = other RNA
cctgccccccagcagtcccca

SEQ ID NO: 85916 - RNA, 21 nt, synthetic construct
  source 1..21: mol_type = other RNA
agcaccccggccaccagctca

SEQ ID NO: 85917 - RNA, 21 nt, synthetic construct
  source 1..21: mol_type = other RNA
gtccacacctccacagtgcta

SEQ ID NO: 85918 - RNA, 21 nt, synthetic construct
  source 1..21: mol_type = other RNA
tggatcagcacaaccaccaca

SEQ ID NO: 85919 - RNA, 21 nt, synthetic construct
  source 1..21: mol_type = other RNA
cggctccaccaccaaccccta

SEQ ID NO: 85920 - RNA, 21 nt, synthetic construct
  source 1..21: mol_type = other RNA
ggcgatccctgtcccccagca

SEQ ID NO: 85921 - RNA, 21 nt, synthetic construct
  source 1..21: mol_type = other RNA
aggcaccttgggcaccaccca

SEQ ID NO: 85922 - RNA, 21 nt, synthetic construct
  source 1..21: mol_type = other RNA
gacttcccacaccccagcaga

SEQ ID NO: 85923 - RNA, 21 nt, synthetic construct
  source 1..21: mol_type = other RNA
agcaccccggccaccagctca

SEQ ID NO: 85924 - RNA, 21 nt, synthetic construct
  source 1..21: mol_type = other RNA
tcctcctccagtccaaggaca

SEQ ID NO: 85925 - RNA, 21 nt, synthetic construct
  source 1..21: mol_type = other RNA
tgtccaccccctcctccacta

SEQ ID NO: 85926 - RNA, 21 nt, synthetic construct
  source 1..21: mol_type = other RNA
gtccacacctccacagtgcta

SEQ ID NO: 85927 - RNA, 21 nt, synthetic construct
  source 1..21: mol_type = other RNA
tggatcagcacaaccaccaca

SEQ ID NO: 85928 - RNA, 21 nt, synthetic construct
  source 1..21: mol_type = other RNA
cggctccaccaccaaccccta

SEQ ID NO: 85929 - RNA, 21 nt, synthetic construct
  source 1..21: mol_type = other RNA
cctgccccccagcagtcccca

SEQ ID NO: 85930 - RNA, 21 nt, synthetic construct
  source 1..21: mol_type = other RNA
gacttcccacaccccagcaga

SEQ ID NO: 85931 - RNA, 21 nt, synthetic construct
  source 1..21: mol_type = other RNA
agcaccccggccaccagctca

SEQ ID NO: 85932 - RNA, 21 nt, synthetic construct
  source 1..21: mol_type = other RNA
aaagctgaccacaacagccaa

SEQ ID NO: 85933 - RNA, 21 nt, synthetic construct
  source 1..21: mol_type = other RNA
tggatcagcacaaccaccaca

SEQ ID NO: 85934 - RNA, 21 nt, synthetic construct
  source 1..21: mol_type = other RNA
cggctccaccaccaaccccta

SEQ ID NO: 85935 - RNA, 21 nt, synthetic construct
  source 1..21: mol_type = other RNA
ggcgatccctgtcccccagca

SEQ ID NO: 85936 - RNA, 21 nt, synthetic construct
  source 1..21: mol_type = other RNA
aggcaccttgggcaccaccca

SEQ ID NO: 85937 - RNA, 21 nt, synthetic construct
  source 1..21: mol_type = other RNA
gacttcccacaccccagcaga

SEQ ID NO: 85938 - RNA, 21 nt, synthetic construct
  source 1..21: mol_type = other RNA
agcaccccggccaccagctca

SEQ ID NO: 85939 - RNA, 21 nt, synthetic construct
  source 1..21: mol_type = other RNA
tcctcctccagtccaaggaca

SEQ ID NO: 85940 - RNA, 21 nt, synthetic construct
  source 1..21: mol_type = other RNA
cctcctccacccttgggacca

SEQ ID NO: 85941 - RNA, 21 nt, synthetic construct
  source 1..21: mol_type = other RNA
cgtccaccccctcctccacta

SEQ ID NO: 85942 - RNA, 21 nt, synthetic construct
  source 1..21: mol_type = other RNA
gtccacacctccacagtgcta

SEQ ID NO: 85943 - RNA, 21 nt, synthetic construct
  source 1..21: mol_type = other RNA
tggatcagcacaaccaccaca

SEQ ID NO: 85944 - RNA, 21 nt, synthetic construct
  source 1..21: mol_type = other RNA
cggctccaccaccaaccccta

SEQ ID NO: 85945 - RNA, 21 nt, synthetic construct
  source 1..21: mol_type = other RNA
tcctcctccagtccaaggaca

SEQ ID NO: 85946 - RNA, 21 nt, synthetic construct
  source 1..21: mol_type = other RNA
cctcctctactccagagacca

SEQ ID NO: 85947 - RNA, 21 nt, synthetic construct
  source 1..21: mol_type = other RNA
tgggaacagctcacaccccca

SEQ ID NO: 85948 - RNA, 21 nt, synthetic construct
  source 1..21: mol_type = other RNA
ccaccgccagtgtcctccgca

SEQ ID NO: 85949 - RNA, 21 nt, synthetic construct
  source 1..21: mol_type = other RNA
ctgtcctcgccctcccctgca

SEQ ID NO: 85950 - RNA, 21 nt, synthetic construct
  source 1..21: mol_type = other RNA
gcttgtgtctgtgctggggaa

SEQ ID NO: 85951 - RNA, 21 nt, synthetic construct
  source 1..21: mol_type = other RNA
tgcagacctcagctgtgttca

SEQ ID NO: 85952 - RNA, 21 nt, synthetic construct
  source 1..21: mol_type = other RNA
tcccaggcgcccttccctgca

SEQ ID NO: 85953 - RNA, 21 nt, synthetic construct
  source 1..21: mol_type = other RNA
cagctgaatgaaacctgggta

SEQ ID NO: 85954 - RNA, 21 nt, synthetic construct
  source 1..21: mol_type = other RNA
caccttggccttgcccctcca

SEQ ID NO: 85955 - RNA, 21 nt, synthetic construct
  source 1..21: mol_type = other RNA
gcagacaggctggtccaggca

SEQ ID NO: 85956 - RNA, 21 nt, synthetic construct
  source 1..21: mol_type = other RNA
gcctgtccatgcctgctgcaa

SEQ ID NO: 85957 - RNA, 21 nt, synthetic construct
  source 1..21: mol_type = other RNA
tggctctggcggccatgctca

SEQ ID NO: 85958 - RNA, 21 nt, synthetic construct
  source 1..21: mol_type = other RNA
tccgcttccctggcctttgca

SEQ ID NO: 85959 - RNA, 21 nt, synthetic construct
  source 1..21: mol_type = other RNA
gctggagctggatcccaaata

SEQ ID NO: 85960 - RNA, 21 nt, synthetic construct
  source 1..21: mol_type = other RNA
gacctgtggcctgtgtgggga

SEQ ID NO: 85961 - RNA, 21 nt, synthetic construct
  source 1..21: mol_type = other RNA
ccacaacgccaggctgaccca

SEQ ID NO: 85962 - RNA, 21 nt, synthetic construct
  source 1..21: mol_type = other RNA
actgcacggacgaggagggca

SEQ ID NO: 85963 - RNA, 21 nt, synthetic construct
  source 1..21: mol_type = other RNA
cacctgcccgtgtgccaccta

SEQ ID NO: 85964 - RNA, 21 nt, synthetic construct
  source 1..21: mol_type = other RNA
tctgcccccggacctgcccca

SEQ ID NO: 85965 - RNA, 21 nt, synthetic construct
  source 1..21: mol_type = other RNA
aacatgcagcaccaggagtga

SEQ ID NO: 85966 - RNA, 21 nt, synthetic construct
  source 1..21: mol_type = other RNA
ccctgcacggacacctgctca

SEQ ID NO: 85967 - RNA, 21 nt, synthetic construct
  source 1..21: mol_type = other RNA
actgtgtggacggctgcttca

SEQ ID NO: 85968 - RNA, 21 nt, synthetic construct
  source 1..21: mol_type = other RNA
ctatggcagtgccaggaccta

SEQ ID NO: 85969 - RNA, 21 nt, synthetic construct
  source 1..21: mol_type = other RNA
gtgcagacaggcctggggcta

SEQ ID NO: 85970 - RNA, 21 nt, synthetic construct
  source 1..21: mol_type = other RNA
cctcagcggggtggtggagga

SEQ ID NO: 85971 - RNA, 21 nt, synthetic construct
  source 1..21: mol_type = other RNA
aggcccaggctgcctgtgcca

SEQ ID NO: 85972 - RNA, 21 nt, synthetic construct
  source 1..21: mol_type = other RNA
acgcccggcactggtgctcga

SEQ ID NO: 85973 - RNA, 21 nt, synthetic construct
  source 1..21: mol_type = other RNA
agctcagcgactggagggaca

SEQ ID NO: 85974 - RNA, 21 nt, synthetic construct
  source 1..21: mol_type = other RNA
aggcggtggcgagagggccga

SEQ ID NO: 85975 - RNA, 21 nt, synthetic construct
  source 1..21: mol_type = other RNA
cacctgccccttgttctgtga

SEQ ID NO: 85976 - RNA, 21 nt, synthetic construct
  source 1..21: mol_type = other RNA
ccacatgggggctgtgagtga

SEQ ID NO: 85977 - RNA, 21 nt, synthetic construct
  source 1..21: mol_type = other RNA
ccatcatcaggaaggctgtga

SEQ ID NO: 85978 - RNA, 21 nt, synthetic construct
  source 1..21: mol_type = other RNA
ttcaccaccgcctgggtccca

SEQ ID NO: 85979 - RNA, 21 nt, synthetic construct
  source 1..21: mol_type = other RNA
ccagagcccggcctgggagga

SEQ ID NO: 85980 - RNA, 21 nt, synthetic construct
  source 1..21: mol_type = other RNA
caggcaccagccctcagccca

SEQ ID NO: 85981 - RNA, 21 nt, synthetic construct
  source 1..21: mol_type = other RNA
cctcagccctccctcagtgca

SEQ ID NO: 85982 - RNA, 21 nt, synthetic construct
  source 1..21: mol_type = other RNA
agcttccccaactggacccta

SEQ ID NO: 85983 - RNA, 21 nt, synthetic construct
  source 1..21: mol_type = other RNA
ccccgccaccgaccacagaga

SEQ ID NO: 85984 - RNA, 21 nt, synthetic construct
  source 1..21: mol_type = other RNA
cgccaccgaccacagagctga

SEQ ID NO: 85985 - RNA, 21 nt, synthetic construct
  source 1..21: mol_type = other RNA
cgaccacagagctggagacga

SEQ ID NO: 85986 - RNA, 21 nt, synthetic construct
  source 1..21: mol_type = other RNA
cccctcacagccacccacgca

SEQ ID NO: 85987 - RNA, 21 nt, synthetic construct
  source 1..21: mol_type = other RNA
cagccacccacgctggcccca

SEQ ID NO: 85988 - RNA, 21 nt, synthetic construct
  source 1..21: mol_type = other RNA
gagaccagcacgcccaggaca

SEQ ID NO: 85989 - RNA, 21 nt, synthetic construct
  source 1..21: mol_type = other RNA
gccaccccgacctccacccta

SEQ ID NO: 85990 - RNA, 21 nt, synthetic construct
  source 1..21: mol_type = other RNA
cacccacagtcaccagctcca

SEQ ID NO: 85991 - RNA, 21 nt, synthetic construct
  source 1..21: mol_type = other RNA
aaagccactccctcctccaga

SEQ ID NO: 85992 - RNA, 21 nt, synthetic construct
  source 1..21: mol_type = other RNA
aagccactccctcctccagta

SEQ ID NO: 85993 - RNA, 21 nt, synthetic construct
  source 1..21: mol_type = other RNA
cacggtgaccccctcctccaa

SEQ ID NO: 85994 - RNA, 21 nt, synthetic construct
  source 1..21: mol_type = other RNA
tccaccaccaacccctcctca

SEQ ID NO: 85995 - RNA, 21 nt, synthetic construct
  source 1..21: mol_type = other RNA
caacccctcctcaactcctga

SEQ ID NO: 85996 - RNA, 21 nt, synthetic construct
  source 1..21: mol_type = other RNA
cacacctgcagccaccagcaa

SEQ ID NO: 85997 - RNA, 21 nt, synthetic construct
  source 1..21: mol_type = other RNA
cctcaccctagcagcagaaca

SEQ ID NO: 85998 - RNA, 21 nt, synthetic construct
  source 1..21: mol_type = other RNA
acgaccaccccgggccacaca

SEQ ID NO: 85999 - RNA, 21 nt, synthetic construct
  source 1..21: mol_type = other RNA
gccacctccaggaccacagca

SEQ ID NO: 86000 - RNA, 21 nt, synthetic construct
  source 1..21: mol_type = other RNA
ggatccacggccaccgcctca

SEQ ID NO: 86001 - RNA, 21 nt, synthetic construct
  source 1..21: mol_type = other RNA
cacccacagtcaccagctcca

SEQ ID NO: 86002 - RNA, 21 nt, synthetic construct
  source 1..21: mol_type = other RNA
ctgtccacacctccacagtga

SEQ ID NO: 86003 - RNA, 21 nt, synthetic construct
  source 1..21: mol_type = other RNA
tgtccacacctccacagtgca

SEQ ID NO: 86004 - RNA, 21 nt, synthetic construct
  source 1..21: mol_type = other RNA
cacggtgaccccctcctccaa

SEQ ID NO: 86005 - RNA, 21 nt, synthetic construct
  source 1..21: mol_type = other RNA
tccaccaccaacccctcctca

SEQ ID NO: 86006 - RNA, 21 nt, synthetic construct
  source 1..21: mol_type = other RNA
cacacctgcagccaccagcaa

SEQ ID NO: 86007 - RNA, 21 nt, synthetic construct
  source 1..21: mol_type = other RNA
caccttgggcaccacccacaa

SEQ ID NO: 86008 - RNA, 21 nt, synthetic construct
  source 1..21: mol_type = other RNA
acgaccaccccgggccacaca

SEQ ID NO: 86009 - RNA, 21 nt, synthetic construct
  source 1..21: mol_type = other RNA
agccactacaactgcagccaa

SEQ ID NO: 86010 - RNA, 21 nt, synthetic construct
  source 1..21: mol_type = other RNA
gccactacaactgcagccaca

SEQ ID NO: 86011 - RNA, 21 nt, synthetic construct
  source 1..21: mol_type = other RNA
ggatccacggccaccgcctca

SEQ ID NO: 86012 - RNA, 21 nt, synthetic construct
  source 1..21: mol_type = other RNA
gagccactccctcctccagta

SEQ ID NO: 86013 - RNA, 21 nt, synthetic construct
  source 1..21: mol_type = other RNA
cacagccacaccctcctctaa

SEQ ID NO: 86014 - RNA, 21 nt, synthetic construct
  source 1..21: mol_type = other RNA
ctgtccacacctccacagtga

SEQ ID NO: 86015 - RNA, 21 nt, synthetic construct
  source 1..21: mol_type = other RNA
tgtccacacctccacagtgca

SEQ ID NO: 86016 - RNA, 21 nt, synthetic construct
  source 1..21: mol_type = other RNA
ccaccacaaccagggccacca

SEQ ID NO: 86017 - RNA, 21 nt, synthetic construct
  source 1..21: mol_type = other RNA
cacggtgaccccctcctccaa

SEQ ID NO: 86018 - RNA, 21 nt, synthetic construct
  source 1..21: mol_type = other RNA
tccaccaccaacccctcctca

SEQ ID NO: 86019 - RNA, 21 nt, synthetic construct
  source 1..21: mol_type = other RNA
cacacctgcagccaccagcaa

SEQ ID NO: 86020 - RNA, 21 nt, synthetic construct
  source 1..21: mol_type = other RNA
acgaccaccccgggccacaca

SEQ ID NO: 86021 - RNA, 21 nt, synthetic construct
  source 1..21: mol_type = other RNA
ccaggaccacagccacagcca

SEQ ID NO: 86022 - RNA, 21 nt, synthetic construct
  source 1..21: mol_type = other RNA
ggatccacggccaccgcctca

SEQ ID NO: 86023 - RNA, 21 nt, synthetic construct
  source 1..21: mol_type = other RNA
cacccacagtcaccagctcca

SEQ ID NO: 86024 - RNA, 21 nt, synthetic construct
  source 1..21: mol_type = other RNA
ccaccacaaccagggccacca

SEQ ID NO: 86025 - RNA, 21 nt, synthetic construct
  source 1..21: mol_type = other RNA
tcttccaccccaggaacagca

SEQ ID NO: 86026 - RNA, 21 nt, synthetic construct
  source 1..21: mol_type = other RNA
tccaccaccaacccctcctca

SEQ ID NO: 86027 - RNA, 21 nt, synthetic construct
  source 1..21: mol_type = other RNA
cacacctgcagccaccagcaa

SEQ ID NO: 86028 - RNA, 21 nt, synthetic construct
  source 1..21: mol_type = other RNA
caccttgggcaccacccacaa

SEQ ID NO: 86029 - RNA, 21 nt, synthetic construct
  source 1..21: mol_type = other RNA
acgaccaccccgggccacaca

SEQ ID NO: 86030 - RNA, 21 nt, synthetic construct
  source 1..21: mol_type = other RNA
gcctggtgtccccctggggga

SEQ ID NO: 86031 - RNA, 21 nt, synthetic construct
  source 1..21: mol_type = other RNA
atccacagctaccagcgttaa

SEQ ID NO: 86032 - RNA, 21 nt, synthetic construct
  source 1..21: mol_type = other RNA
ccacacccgtggccaccatga

SEQ ID NO: 86033 - RNA, 21 nt, synthetic construct
  source 1..21: mol_type = other RNA
agccactacaactgcagccaa

SEQ ID NO: 86034 - RNA, 21 nt, synthetic construct
  source 1..21: mol_type = other RNA
gccactacaactgcagccaca

SEQ ID NO: 86035 - RNA, 21 nt, synthetic construct
  source 1..21: mol_type = other RNA
ggatccacggccaccgcctca

SEQ ID NO: 86036 - RNA, 21 nt, synthetic construct
  source 1..21: mol_type = other RNA
cacccacagtcaccagctcca

SEQ ID NO: 86037 - RNA, 21 nt, synthetic construct
  source 1..21: mol_type = other RNA
aaagccactccctcctccaga

SEQ ID NO: 86038 - RNA, 21 nt, synthetic construct
  source 1..21: mol_type = other RNA
aagccactccctcctccagta

SEQ ID NO: 86039 - RNA, 21 nt, synthetic construct
  source 1..21: mol_type = other RNA
ctgtccacacctccacagtga

SEQ ID NO: 86040 - RNA, 21 nt, synthetic construct
  source 1..21: mol_type = other RNA
tgtccacacctccacagtgca

SEQ ID NO: 86041 - RNA, 21 nt, synthetic construct
  source 1..21: mol_type = other RNA
acacccacaaccaccacacca

SEQ ID NO: 86042 - RNA, 21 nt, synthetic construct
  source 1..21: mol_type = other RNA
cacggtgaccccctcctccaa

SEQ ID NO: 86043 - RNA, 21 nt, synthetic construct
  source 1..21: mol_type = other RNA
tccaccaccaacccctcctca

SEQ ID NO: 86044 - RNA, 21 nt, synthetic construct
  source 1..21: mol_type = other RNA
gccaccacacccgcagccaca

SEQ ID NO: 86045 - RNA, 21 nt, synthetic construct
  source 1..21: mol_type = other RNA
acccgcagccaccagctccaa

SEQ ID NO: 86046 - RNA, 21 nt, synthetic construct
  source 1..21: mol_type = other RNA
agtgctgaccaccacagccaa

SEQ ID NO: 86047 - RNA, 21 nt, synthetic construct
  source 1..21: mol_type = other RNA
tgctgaccaccacagccacca

SEQ ID NO: 86048 - RNA, 21 nt, synthetic construct
  source 1..21: mol_type = other RNA
gctgaccaccacagccaccaa

SEQ ID NO: 86049 - RNA, 21 nt, synthetic construct
  source 1..21: mol_type = other RNA
agccactacaactgcagccaa

SEQ ID NO: 86050 - RNA, 21 nt, synthetic construct
  source 1..21: mol_type = other RNA
gccactacaactgcagccaca

SEQ ID NO: 86051 - RNA, 21 nt, synthetic construct
  source 1..21: mol_type = other RNA
tgagacccactggcttcccca

SEQ ID NO: 86052 - RNA, 21 nt, synthetic construct
  source 1..21: mol_type = other RNA
cgccccgctgtcctcgcccta

SEQ ID NO: 86053 - RNA, 21 nt, synthetic construct
  source 1..21: mol_type = other RNA
aggaggagggcctgatcctga

SEQ ID NO: 86054 - RNA, 21 nt, synthetic construct
  source 1..21: mol_type = other RNA
tggctgctgggccccgactga

SEQ ID NO: 86055 - RNA, 21 nt, synthetic construct
  source 1..21: mol_type = other RNA
cacaccccccactgccagcca

SEQ ID NO: 86056 - RNA, 21 nt, synthetic construct
  source 1..21: mol_type = other RNA
agcccacagctggaggggata

SEQ ID NO: 86057 - RNA, 21 nt, synthetic construct
  source 1..21: mol_type = other RNA
gcaggagtccatctgcaccca

SEQ ID NO: 86058 - RNA, 21 nt, synthetic construct
  source 1..21: mol_type = other RNA
gagtccatctgcacccaggaa

SEQ ID NO: 86059 - RNA, 21 nt, synthetic construct
  source 1..21: mol_type = other RNA
ccaggaggagggcgactgcta

SEQ ID NO: 86060 - RNA, 21 nt, synthetic construct
  source 1..21: mol_type = other RNA
ttcccaggcgcccttccctga

SEQ ID NO: 86061 - RNA, 21 nt, synthetic construct
  source 1..21: mol_type = other RNA
acaatactacctgtccccaga

SEQ ID NO: 86062 - RNA, 21 nt, synthetic construct
  source 1..21: mol_type = other RNA
ggccagccagtccagctgaaa

SEQ ID NO: 86063 - RNA, 21 nt, synthetic construct
  source 1..21: mol_type = other RNA
cctctgtgaggctgagggtga

SEQ ID NO: 86064 - RNA, 21 nt, synthetic construct
  source 1..21: mol_type = other RNA
gtggcttcccggcccaggaga

SEQ ID NO: 86065 - RNA, 21 nt, synthetic construct
  source 1..21: mol_type = other RNA
tggcttcccggcccaggagga

SEQ ID NO: 86066 - RNA, 21 nt, synthetic construct
  source 1..21: mol_type = other RNA
ccagaagggtgaggggccaga

SEQ ID NO: 86067 - RNA, 21 nt, synthetic construct
  source 1..21: mol_type = other RNA
caaggccagctgctgccagga

SEQ ID NO: 86068 - RNA, 21 nt, synthetic construct
  source 1..21: mol_type = other RNA
ttttgcaaataaaccctgaga

SEQ ID NO: 86069 - RNA, 21 nt, synthetic construct
  source 1..21: mol_type = other RNA
cccggcccggctccctcccta

SEQ ID NO: 86070 - RNA, 21 nt, synthetic construct
  source 1..21: mol_type = other RNA
cggcccggctccctccctgca

SEQ ID NO: 86071 - RNA, 21 nt, synthetic construct
  source 1..21: mol_type = other RNA
ggcccggctccctccctgcca

SEQ ID NO: 86072 - RNA, 21 nt, synthetic construct
  source 1..21: mol_type = other RNA
gcccggctccctccctgccca

SEQ ID NO: 86073 - RNA, 21 nt, synthetic construct
  source 1..21: mol_type = other RNA
cccggctccctccctgcccga

SEQ ID NO: 86074 - RNA, 21 nt, synthetic construct
  source 1..21: mol_type = other RNA
ccggctccctccctgcccgta

SEQ ID NO: 86075 - RNA, 21 nt, synthetic construct
  source 1..21: mol_type = other RNA
gctccctccctgcccgtccca

SEQ ID NO: 86076 - RNA, 21 nt, synthetic construct
  source 1..21: mol_type = other RNA
ctccctccctgcccgtcccca

SEQ ID NO: 86077 - RNA, 21 nt, synthetic construct
  source 1..21: mol_type = other RNA
tccctccctgcccgtccccga

SEQ ID NO: 86078 - RNA, 21 nt, synthetic construct
  source 1..21: mol_type = other RNA
cctccctgcccgtccccgtca

SEQ ID NO: 86079 - RNA, 21 nt, synthetic construct
  source 1..21: mol_type = other RNA
cgtccccgtccccccacccga

SEQ ID NO: 86080 - RNA, 21 nt, synthetic construct
  source 1..21: mol_type = other RNA
tccccgtccccccacccgtga

SEQ ID NO: 86081 - RNA, 21 nt, synthetic construct
  source 1..21: mol_type = other RNA
ccccccacccgtgccagccca

SEQ ID NO: 86082 - RNA, 21 nt, synthetic construct
  source 1..21: mol_type = other RNA
cccacccgtgccagcccccaa

SEQ ID NO: 86083 - RNA, 21 nt, synthetic construct
  source 1..21: mol_type = other RNA
ccacccgtgccagcccccaga

SEQ ID NO: 86084 - RNA, 21 nt, synthetic construct
  source 1..21: mol_type = other RNA
acccgtgccagcccccaggaa

SEQ ID NO: 86085 - RNA, 21 nt, synthetic construct
  source 1..21: mol_type = other RNA
gcccccaggatgggtgcccca

SEQ ID NO: 86086 - RNA, 21 nt, synthetic construct
  source 1..21: mol_type = other RNA
tcgtggtgccgcaggcagaga

SEQ ID NO: 86087 - RNA, 21 nt, synthetic construct
  source 1..21: mol_type = other RNA
cgtggtgccgcaggcagagaa

SEQ ID NO: 86088 - RNA, 21 nt, synthetic construct
  source 1..21: mol_type = other RNA
ggcagagacccagggccctga

SEQ ID NO: 86089 - RNA, 21 nt, synthetic construct
  source 1..21: mol_type = other RNA
gcagagacccagggccctgta

SEQ ID NO: 86090 - RNA, 21 nt, synthetic construct
  source 1..21: mol_type = other RNA
agagacccagggccctgtgga

SEQ ID NO: 86091 - RNA, 21 nt, synthetic construct
  source 1..21: mol_type = other RNA
agacccagggccctgtggaga

SEQ ID NO: 86092 - RNA, 21 nt, synthetic construct
  source 1..21: mol_type = other RNA
cccagggccctgtggagccga

SEQ ID NO: 86093 - RNA, 21 nt, synthetic construct
  source 1..21: mol_type = other RNA
cagggccctgtggagccgaga

SEQ ID NO: 86094 - RNA, 21 nt, synthetic construct
  source 1..21: mol_type = other RNA
tgtggagccgagctgggagaa

SEQ ID NO: 86095 - RNA, 21 nt, synthetic construct
  source 1..21: mol_type = other RNA
cgtcctcgcccacccggcgca

SEQ ID NO: 86096 - RNA, 21 nt, synthetic construct
  source 1..21: mol_type = other RNA
gggtgtgcagcacctggggta

SEQ ID NO: 86097 - RNA, 21 nt, synthetic construct
  source 1..21: mol_type = other RNA
gtgtgcagcacctggggtgaa

SEQ ID NO: 86098 - RNA, 21 nt, synthetic construct
  source 1..21: mol_type = other RNA
tagtgggctccaggcctgtga

SEQ ID NO: 86099 - RNA, 21 nt, synthetic construct
  source 1..21: mol_type = other RNA
agtgggctccaggcctgtgga

SEQ ID NO: 86100 - RNA, 21 nt, synthetic construct
  source 1..21: mol_type = other RNA
aatgggcagcgggaggagcta

SEQ ID NO: 86101 - RNA, 21 nt, synthetic construct
  source 1..21: mol_type = other RNA
cgcactggcctcctggtggaa

SEQ ID NO: 86102 - RNA, 21 nt, synthetic construct
  source 1..21: mol_type = other RNA
ggcctcctggtggagcagaga

SEQ ID NO: 86103 - RNA, 21 nt, synthetic construct
  source 1..21: mol_type = other RNA
gcctcctggtggagcagagca

SEQ ID NO: 86104 - RNA, 21 nt, synthetic construct
  source 1..21: mol_type = other RNA
cctcctggtggagcagagcga

SEQ ID NO: 86105 - RNA, 21 nt, synthetic construct
  source 1..21: mol_type = other RNA
tcctggtggagcagagcggga

SEQ ID NO: 86106 - RNA, 21 nt, synthetic construct
  source 1..21: mol_type = other RNA
cctggtggagcagagcgggga

SEQ ID NO: 86107 - RNA, 21 nt, synthetic construct
  source 1..21: mol_type = other RNA
ctggtggagcagagcggggaa

SEQ ID NO: 86108 - RNA, 21 nt, synthetic construct
  source 1..21: mol_type = other RNA
tgccctgctggagctggatca

SEQ ID NO: 86109 - RNA, 21 nt, synthetic construct
  source 1..21: mol_type = other RNA
ctgctggagctggatcccaaa

SEQ ID NO: 86110 - RNA, 21 nt, synthetic construct
  source 1..21: mol_type = other RNA
ctggagctggatcccaaataa

SEQ ID NO: 86111 - RNA, 21 nt, synthetic construct
  source 1..21: mol_type = other RNA
accagacctgtggcctgtgta

SEQ ID NO: 86112 - RNA, 21 nt, synthetic construct
  source 1..21: mol_type = other RNA
ccagacctgtggcctgtgtga

SEQ ID NO: 86113 - RNA, 21 nt, synthetic construct
  source 1..21: mol_type = other RNA
ctgtggcctgtgtggggacta

SEQ ID NO: 86114 - RNA, 21 nt, synthetic construct
  source 1..21: mol_type = other RNA
ccaggctgaccccgctccaga

SEQ ID NO: 86115 - RNA, 21 nt, synthetic construct
  source 1..21: mol_type = other RNA
gggcatctgccaccgcaccca

SEQ ID NO: 86116 - RNA, 21 nt, synthetic construct
  source 1..21: mol_type = other RNA
ctgccaccgcaccctgctgga

SEQ ID NO: 86117 - RNA, 21 nt, synthetic construct
  source 1..21: mol_type = other RNA
ccaccgcaccctgctggggca

SEQ ID NO: 86118 - RNA, 21 nt, synthetic construct
  source 1..21: mol_type = other RNA
cgcaccctgctggggccggca

SEQ ID NO: 86119 - RNA, 21 nt, synthetic construct
  source 1..21: mol_type = other RNA
gcaccctgctggggccggcca

SEQ ID NO: 86120 - RNA, 21 nt, synthetic construct
  source 1..21: mol_type = other RNA
acgcactggtggacagcacta

SEQ ID NO: 86121 - RNA, 21 nt, synthetic construct
  source 1..21: mol_type = other RNA
ccacctgcccgtgtgccacca

SEQ ID NO: 86122 - RNA, 21 nt, synthetic construct
  source 1..21: mol_type = other RNA
cgcggggggccagccgcggaa

SEQ ID NO: 86123 - RNA, 21 nt, synthetic construct
  source 1..21: mol_type = other RNA
cgcggaactggaggtgcccta

SEQ ID NO: 86124 - RNA, 21 nt, synthetic construct
  source 1..21: mol_type = other RNA
aactggaggtgccctgagcta

SEQ ID NO: 86125 - RNA, 21 nt, synthetic construct
  source 1..21: mol_type = other RNA
tggaggtgccctgagctctga

SEQ ID NO: 86126 - RNA, 21 nt, synthetic construct
  source 1..21: mol_type = other RNA
ggtgccctgagctctgcccca

SEQ ID NO: 86127 - RNA, 21 nt, synthetic construct
  source 1..21: mol_type = other RNA
tgcccccggacctgcccccta

SEQ ID NO: 86128 - RNA, 21 nt, synthetic construct
  source 1..21: mol_type = other RNA
agcaccaggagtgtggctcaa

SEQ ID NO: 86129 - RNA, 21 nt, synthetic construct
  source 1..21: mol_type = other RNA
gcaccaggagtgtggctcaca

SEQ ID NO: 86130 - RNA, 21 nt, synthetic construct
  source 1..21: mol_type = other RNA
caccaggagtgtggctcacca

SEQ ID NO: 86131 - RNA, 21 nt, synthetic construct
  source 1..21: mol_type = other RNA
gcacggacacctgctccaaca

SEQ ID NO: 86132 - RNA, 21 nt, synthetic construct
  source 1..21: mol_type = other RNA
ccagcgcgcgcagctctgcga

SEQ ID NO: 86133 - RNA, 21 nt, synthetic construct
  source 1..21: mol_type = other RNA
cgcagctctgcgaggaccaca

SEQ ID NO: 86134 - RNA, 21 nt, synthetic construct
  source 1..21: mol_type = other RNA
acagcccgggcacctccttca

SEQ ID NO: 86135 - RNA, 21 nt, synthetic construct
  source 1..21: mol_type = other RNA
cctccttcaacaccacctgca

SEQ ID NO: 86136 - RNA, 21 nt, synthetic construct
  source 1..21: mol_type = other RNA
ctcctgcacctgctccgggga

SEQ ID NO: 86137 - RNA, 21 nt, synthetic construct
  source 1..21: mol_type = other RNA
ccgtgccctggcacctgctca

SEQ ID NO: 86138 - RNA, 21 nt, synthetic construct
  source 1..21: mol_type = other RNA
cgtgccctggcacctgctcta

SEQ ID NO: 86139 - RNA, 21 nt, synthetic construct
  source 1..21: mol_type = other RNA
tgccctggcacctgctctgta

SEQ ID NO: 86140 - RNA, 21 nt, synthetic construct
  source 1..21: mol_type = other RNA
ccctggcacctgctctgtgca

SEQ ID NO: 86141 - RNA, 21 nt, synthetic construct
  source 1..21: mol_type = other RNA
cctggcacctgctctgtgcaa

SEQ ID NO: 86142 - RNA, 21 nt, synthetic construct
  source 1..21: mol_type = other RNA
gcacctgctctgtgcagggca

SEQ ID NO: 86143 - RNA, 21 nt, synthetic construct
  source 1..21: mol_type = other RNA
gctctgtgcagggcggggcca

SEQ ID NO: 86144 - RNA, 21 nt, synthetic construct
  source 1..21: mol_type = other RNA
tgtgcagggcggggcccacaa

SEQ ID NO: 86145 - RNA, 21 nt, synthetic construct
  source 1..21: mol_type = other RNA
gacagcagcttcaccgtgcta

SEQ ID NO: 86146 - RNA, 21 nt, synthetic construct
  source 1..21: mol_type = other RNA
accgtgctggctgagctgcga

SEQ ID NO: 86147 - RNA, 21 nt, synthetic construct
  source 1..21: mol_type = other RNA
cgtgctggctgagctgcggaa

SEQ ID NO: 86148 - RNA, 21 nt, synthetic construct
  source 1..21: mol_type = other RNA
gtgctggctgagctgcggaaa

SEQ ID NO: 86149 - RNA, 21 nt, synthetic construct
  source 1..21: mol_type = other RNA
tgctggctgagctgcggaaga

SEQ ID NO: 86150 - RNA, 21 nt, synthetic construct
  source 1..21: mol_type = other RNA
ttcttcatcgtggtgcagaca

SEQ ID NO: 86151 - RNA, 21 nt, synthetic construct
  source 1..21: mol_type = other RNA
cgtggtgcagacaggcctgga

SEQ ID NO: 86152 - RNA, 21 nt, synthetic construct
  source 1..21: mol_type = other RNA
gtggtgcagacaggcctggga

SEQ ID NO: 86153 - RNA, 21 nt, synthetic construct
  source 1..21: mol_type = other RNA
ggtgcagacaggcctggggca

SEQ ID NO: 86154 - RNA, 21 nt, synthetic construct
  source 1..21: mol_type = other RNA
tgcagacaggcctggggctga

SEQ ID NO: 86155 - RNA, 21 nt, synthetic construct
  source 1..21: mol_type = other RNA
cagacaggcctggggctgcaa

SEQ ID NO: 86156 - RNA, 21 nt, synthetic construct
  source 1..21: mol_type = other RNA
tggggctgcagctgctggtga

SEQ ID NO: 86157 - RNA, 21 nt, synthetic construct
  source 1..21: mol_type = other RNA
gccctcagcggggtggtggaa

SEQ ID NO: 86158 - RNA, 21 nt, synthetic construct
  source 1..21: mol_type = other RNA
ccctcagcggggtggtggaga

SEQ ID NO: 86159 - RNA, 21 nt, synthetic construct
  source 1..21: mol_type = other RNA
cagcggggtggtggaggccaa

SEQ ID NO: 86160 - RNA, 21 nt, synthetic construct
  source 1..21: mol_type = other RNA
gtggtggaggccacgggcgca

SEQ ID NO: 86161 - RNA, 21 nt, synthetic construct
  source 1..21: mol_type = other RNA
aacacctggaaggcccaggca

SEQ ID NO: 86162 - RNA, 21 nt, synthetic construct
  source 1..21: mol_type = other RNA
acacctggaaggcccaggcta

SEQ ID NO: 86163 - RNA, 21 nt, synthetic construct
  source 1..21: mol_type = other RNA
tggaaggcccaggctgcctga

SEQ ID NO: 86164 - RNA, 21 nt, synthetic construct
  source 1..21: mol_type = other RNA
ggaaggcccaggctgcctgta

SEQ ID NO: 86165 - RNA, 21 nt, synthetic construct
  source 1..21: mol_type = other RNA
aaggcccaggctgcctgtgca

SEQ ID NO: 86166 - RNA, 21 nt, synthetic construct
  source 1..21: mol_type = other RNA
caggctgcctgtgccaatgca

SEQ ID NO: 86167 - RNA, 21 nt, synthetic construct
  source 1..21: mol_type = other RNA
gatcccaacagtgccttctca

SEQ ID NO: 86168 - RNA, 21 nt, synthetic construct
  source 1..21: mol_type = other RNA
gctgccactccatcatcaaca

SEQ ID NO: 86169 - RNA, 21 nt, synthetic construct
  source 1..21: mol_type = other RNA
ctccatcatcaaccccaagca

SEQ ID NO: 86170 - RNA, 21 nt, synthetic construct
  source 1..21: mol_type = other RNA
tccatcatcaaccccaagcca

SEQ ID NO: 86171 - RNA, 21 nt, synthetic construct
  source 1..21: mol_type = other RNA
ttccactcgaactgcatgtta

SEQ ID NO: 86172 - RNA, 21 nt, synthetic construct
  source 1..21: mol_type = other RNA
ttcgtgcctgtggacggctga

SEQ ID NO: 86173 - RNA, 21 nt, synthetic construct
  source 1..21: mol_type = other RNA
ggacggctgcacctgccccga

SEQ ID NO: 86174 - RNA, 21 nt, synthetic construct
  source 1..21: mol_type = other RNA
cgcccaggagtgcccctgcta

SEQ ID NO: 86175 - RNA, 21 nt, synthetic construct
  source 1..21: mol_type = other RNA
tggctcctggagaggtggtga

SEQ ID NO: 86176 - RNA, 21 nt, synthetic construct
  source 1..21: mol_type = other RNA
ctaagctgcctgggagcctca

SEQ ID NO: 86177 - RNA, 21 nt, synthetic construct
  source 1..21: mol_type = other RNA
gcagaaaagcacagggtgtga

SEQ ID NO: 86178 - RNA, 21 nt, synthetic construct
  source 1..21: mol_type = other RNA
tacctggactgcagcaacaga

SEQ ID NO: 86179 - RNA, 21 nt, synthetic construct
  source 1..21: mol_type = other RNA
tcggatgggagtgggggctga

SEQ ID NO: 86180 - RNA, 21 nt, synthetic construct
  source 1..21: mol_type = other RNA
gatgggagtgggggctgcata

SEQ ID NO: 86181 - RNA, 21 nt, synthetic construct
  source 1..21: mol_type = other RNA
gcaacacctgcacctgcagga

SEQ ID NO: 86182 - RNA, 21 nt, synthetic construct
  source 1..21: mol_type = other RNA
caacacctgcacctgcaggaa

SEQ ID NO: 86183 - RNA, 21 nt, synthetic construct
  source 1..21: mol_type = other RNA
ctactgtggggacaacaccaa

SEQ ID NO: 86184 - RNA, 21 nt, synthetic construct
  source 1..21: mol_type = other RNA
aaggcggtggcgagagggcca

SEQ ID NO: 86185 - RNA, 21 nt, synthetic construct
  source 1..21: mol_type = other RNA
gagagggccgggtggggacca

SEQ ID NO: 86186 - RNA, 21 nt, synthetic construct
  source 1..21: mol_type = other RNA
gctctccccctcctgcccgga

SEQ ID NO: 86187 - RNA, 21 nt, synthetic construct
  source 1..21: mol_type = other RNA
ggcacccaaggacccctgcaa

SEQ ID NO: 86188 - RNA, 21 nt, synthetic construct
  source 1..21: mol_type = other RNA
ggactccggacacctgcccca

SEQ ID NO: 86189 - RNA, 21 nt, synthetic construct
  source 1..21: mol_type = other RNA
acacctgccccttgttctgta

SEQ ID NO: 86190 - RNA, 21 nt, synthetic construct
  source 1..21: mol_type = other RNA
acatgggggctgtgagtggca

SEQ ID NO: 86191 - RNA, 21 nt, synthetic construct
  source 1..21: mol_type = other RNA
atgggggctgtgagtggcaca

SEQ ID NO: 86192 - RNA, 21 nt, synthetic construct
  source 1..21: mol_type = other RNA
aagtgcccacccagccagcca

SEQ ID NO: 86193 - RNA, 21 nt, synthetic construct
  source 1..21: mol_type = other RNA
agtgcccacccagccagccca

SEQ ID NO: 86194 - RNA, 21 nt, synthetic construct
  source 1..21: mol_type = other RNA
tcatcaggaaggctgtggcaa

SEQ ID NO: 86195 - RNA, 21 nt, synthetic construct
  source 1..21: mol_type = other RNA
atcaggaaggctgtggcatga

SEQ ID NO: 86196 - RNA, 21 nt, synthetic construct
  source 1..21: mol_type = other RNA
gcatgtcctggaactccagca

SEQ ID NO: 86197 - RNA, 21 nt, synthetic construct
  source 1..21: mol_type = other RNA
ccattcaccttcaccaccgca

SEQ ID NO: 86198 - RNA, 21 nt, synthetic construct
  source 1..21: mol_type = other RNA
ttcaccttcaccaccgcctga

SEQ ID NO: 86199 - RNA, 21 nt, synthetic construct
  source 1..21: mol_type = other RNA
tcaccttcaccaccgcctgga

SEQ ID NO: 86200 - RNA, 21 nt, synthetic construct
  source 1..21: mol_type = other RNA
cgcctgggtcccccactccaa

SEQ ID NO: 86201 - RNA, 21 nt, synthetic construct
  source 1..21: mol_type = other RNA
cggccctcccggtctccacca

SEQ ID NO: 86202 - RNA, 21 nt, synthetic construct
  source 1..21: mol_type = other RNA
ggccctcccggtctccaccga

SEQ ID NO: 86203 - RNA, 21 nt, synthetic construct
  source 1..21: mol_type = other RNA
tccagctggtacaatgggcaa

SEQ ID NO: 86204 - RNA, 21 nt, synthetic construct
  source 1..21: mol_type = other RNA
cagctggtacaatgggcacca

SEQ ID NO: 86205 - RNA, 21 nt, synthetic construct
  source 1..21: mol_type = other RNA
cgcccagagcccggcctggga

SEQ ID NO: 86206 - RNA, 21 nt, synthetic construct
  source 1..21: mol_type = other RNA
agagcccggcctgggaggcga

SEQ ID NO: 86207 - RNA, 21 nt, synthetic construct
  source 1..21: mol_type = other RNA
gagcccggcctgggaggcgga

SEQ ID NO: 86208 - RNA, 21 nt, synthetic construct
  source 1..21: mol_type = other RNA
gcccggcctgggaggcggaga

SEQ ID NO: 86209 - RNA, 21 nt, synthetic construct
  source 1..21: mol_type = other RNA
cgctggaggagctgggccaga

SEQ ID NO: 86210 - RNA, 21 nt, synthetic construct
  source 1..21: mol_type = other RNA
aggagctgggccagcaggtga

SEQ ID NO: 86211 - RNA, 21 nt, synthetic construct
  source 1..21: mol_type = other RNA
cgtgccctgtggcccctccca

SEQ ID NO: 86212 - RNA, 21 nt, synthetic construct
  source 1..21: mol_type = other RNA
tgccctgtggcccctccccga

SEQ ID NO: 86213 - RNA, 21 nt, synthetic construct
  source 1..21: mol_type = other RNA
gccctgtggcccctccccgga

SEQ ID NO: 86214 - RNA, 21 nt, synthetic construct
  source 1..21: mol_type = other RNA
ccctgtggcccctccccggca

SEQ ID NO: 86215 - RNA, 21 nt, synthetic construct
  source 1..21: mol_type = other RNA
cctgtggcccctccccggcca

SEQ ID NO: 86216 - RNA, 21 nt, synthetic construct
  source 1..21: mol_type = other RNA
cccctccccggccccaggcaa

SEQ ID NO: 86217 - RNA, 21 nt, synthetic construct
  source 1..21: mol_type = other RNA
ggccccaggcaccagccctca

SEQ ID NO: 86218 - RNA, 21 nt, synthetic construct
  source 1..21: mol_type = other RNA
gccccaggcaccagccctcaa

SEQ ID NO: 86219 - RNA, 21 nt, synthetic construct
  source 1..21: mol_type = other RNA
ccccaggcaccagccctcaga

SEQ ID NO: 86220 - RNA, 21 nt, synthetic construct
  source 1..21: mol_type = other RNA
ccaggcaccagccctcagcca

SEQ ID NO: 86221 - RNA, 21 nt, synthetic construct
  source 1..21: mol_type = other RNA
accagccctcagccctcccta

SEQ ID NO: 86222 - RNA, 21 nt, synthetic construct
  source 1..21: mol_type = other RNA
gccctcagccctccctcagta

SEQ ID NO: 86223 - RNA, 21 nt, synthetic construct
  source 1..21: mol_type = other RNA
tcagccctccctcagtgccaa

SEQ ID NO: 86224 - RNA, 21 nt, synthetic construct
  source 1..21: mol_type = other RNA
ccaacccagaccacagcaaca

SEQ ID NO: 86225 - RNA, 21 nt, synthetic construct
  source 1..21: mol_type = other RNA
gtccagctcaggccccgtgaa

SEQ ID NO: 86226 - RNA, 21 nt, synthetic construct
  source 1..21: mol_type = other RNA
tcaccccctcggccccaggta

SEQ ID NO: 86227 - RNA, 21 nt, synthetic construct
  source 1..21: mol_type = other RNA
gatcagggccgctggagggca

SEQ ID NO: 86228 - RNA, 21 nt, synthetic construct
  source 1..21: mol_type = other RNA
gatccgggtcctctgctgcaa

SEQ ID NO: 86229 - RNA, 21 nt, synthetic construct
  source 1..21: mol_type = other RNA
ccaccgaccacagagctggaa

SEQ ID NO: 86230 - RNA, 21 nt, synthetic construct
  source 1..21: mol_type = other RNA
accacagagctggagacggca

SEQ ID NO: 86231 - RNA, 21 nt, synthetic construct
  source 1..21: mol_type = other RNA
ccacagagctggagacggcca

SEQ ID NO: 86232 - RNA, 21 nt, synthetic construct
  source 1..21: mol_type = other RNA
accaccaccaccacccaggca

SEQ ID NO: 86233 - RNA, 21 nt, synthetic construct
  source 1..21: mol_type = other RNA
ccaccaccaccacccaggcca

SEQ ID NO: 86234 - RNA, 21 nt, synthetic construct
  source 1..21: mol_type = other RNA
accaccaccacccaggcccta

SEQ ID NO: 86235 - RNA, 21 nt, synthetic construct
  source 1..21: mol_type = other RNA
ccaccacccaggccctgttca

SEQ ID NO: 86236 - RNA, 21 nt, synthetic construct
  source 1..21: mol_type = other RNA
caccacccaggccctgttcta

SEQ ID NO: 86237 - RNA, 21 nt, synthetic construct
  source 1..21: mol_type = other RNA
ccacccaggccctgttctcaa

SEQ ID NO: 86238 - RNA, 21 nt, synthetic construct
  source 1..21: mol_type = other RNA
tagcccggggctgaccaggga

SEQ ID NO: 86239 - RNA, 21 nt, synthetic construct
  source 1..21: mol_type = other RNA
ccggggctgaccagggctcca

SEQ ID NO: 86240 - RNA, 21 nt, synthetic construct
  source 1..21: mol_type = other RNA
tgaccagggctcccccggcca

SEQ ID NO: 86241 - RNA, 21 nt, synthetic construct
  source 1..21: mol_type = other RNA
accagggctcccccggccaga

SEQ ID NO: 86242 - RNA, 21 nt, synthetic construct
  source 1..21: mol_type = other RNA
cagggctcccccggccagcaa

SEQ ID NO: 86243 - RNA, 21 nt, synthetic construct
  source 1..21: mol_type = other RNA
ctcagaaggactgacatccca

SEQ ID NO: 86244 - RNA, 21 nt, synthetic construct
  source 1..21: mol_type = other RNA
cgcctgcaggctccacagaaa

SEQ ID NO: 86245 - RNA, 21 nt, synthetic construct
  source 1..21: mol_type = other RNA
aacacgctcagcccttccaga

SEQ ID NO: 86246 - RNA, 21 nt, synthetic construct
  source 1..21: mol_type = other RNA
acacgctcagcccttccagga

SEQ ID NO: 86247 - RNA, 21 nt, synthetic construct
  source 1..21: mol_type = other RNA
acatggcgcccctcacagcca

SEQ ID NO: 86248 - RNA, 21 nt, synthetic construct
  source 1..21: mol_type = other RNA
tggcgcccctcacagccacca

SEQ ID NO: 86249 - RNA, 21 nt, synthetic construct
  source 1..21: mol_type = other RNA
cgcccctcacagccacccaca

SEQ ID NO: 86250 - RNA, 21 nt, synthetic construct
  source 1..21: mol_type = other RNA
gcccgacaggcacagccagca

SEQ ID NO: 86251 - RNA, 21 nt, synthetic construct
  source 1..21: mol_type = other RNA
cccgacaggcacagccagcaa

SEQ ID NO: 86252 - RNA, 21 nt, synthetic construct
  source 1..21: mol_type = other RNA
cgacaggcacagccagcacca

SEQ ID NO: 86253 - RNA, 21 nt, synthetic construct
  source 1..21: mol_type = other RNA
gacaggcacagccagcaccga

SEQ ID NO: 86254 - RNA, 21 nt, synthetic construct
  source 1..21: mol_type = other RNA
agctgtccacctctcaggcca

SEQ ID NO: 86255 - RNA, 21 nt, synthetic construct
  source 1..21: mol_type = other RNA
ttgactaacaccaccaccaga

SEQ ID NO: 86256 - RNA, 21 nt, synthetic construct
  source 1..21: mol_type = other RNA
acaccaccaccagccagggca

SEQ ID NO: 86257 - RNA, 21 nt, synthetic construct
  source 1..21: mol_type = other RNA
accaccaccagccagggcaca

SEQ ID NO: 86258 - RNA, 21 nt, synthetic construct
  source 1..21: mol_type = other RNA
ccaccagccagggcacgacca

SEQ ID NO: 86259 - RNA, 21 nt, synthetic construct
  source 1..21: mol_type = other RNA
cggccaccccgacctccacca

SEQ ID NO: 86260 - RNA, 21 nt, synthetic construct
  source 1..21: mol_type = other RNA
ggccaccccgacctccaccca

SEQ ID NO: 86261 - RNA, 21 nt, synthetic construct
  source 1..21: mol_type = other RNA
ccaccccgacctccaccctga

SEQ ID NO: 86262 - RNA, 21 nt, synthetic construct
  source 1..21: mol_type = other RNA
gagaacagctccccctcccaa

SEQ ID NO: 86263 - RNA, 21 nt, synthetic construct
  source 1..21: mol_type = other RNA
accacggccaccacacccaca

SEQ ID NO: 86264 - RNA, 21 nt, synthetic construct
  source 1..21: mol_type = other RNA
acggccaccacacccacagta

SEQ ID NO: 86265 - RNA, 21 nt, synthetic construct
  source 1..21: mol_type = other RNA
ggccaccacacccacagtcaa

SEQ ID NO: 86266 - RNA, 21 nt, synthetic construct
  source 1..21: mol_type = other RNA
ccaccacacccacagtcacca

SEQ ID NO: 86267 - RNA, 21 nt, synthetic construct
  source 1..21: mol_type = other RNA
acacccacagtcaccagctca

SEQ ID NO: 86268 - RNA, 21 nt, synthetic construct
  source 1..21: mol_type = other RNA
acccacagtcaccagctccaa

SEQ ID NO: 86269 - RNA, 21 nt, synthetic construct
  source 1..21: mol_type = other RNA
cccacagtcaccagctccaaa

SEQ ID NO: 86270 - RNA, 21 nt, synthetic construct
  source 1..21: mol_type = other RNA
tcaccagctccaaagccacta

SEQ ID NO: 86271 - RNA, 21 nt, synthetic construct
  source 1..21: mol_type = other RNA
tccaaagccactccctcctca

SEQ ID NO: 86272 - RNA, 21 nt, synthetic construct
  source 1..21: mol_type = other RNA
ccaaagccactccctcctcca

SEQ ID NO: 86273 - RNA, 21 nt, synthetic construct
  source 1..21: mol_type = other RNA
agccactccctcctccagtca

SEQ ID NO: 86274 - RNA, 21 nt, synthetic construct
  source 1..21: mol_type = other RNA
actccctcctccagtccagga

SEQ ID NO: 86275 - RNA, 21 nt, synthetic construct
  source 1..21: mol_type = other RNA
acccatcccctcttcctccca

SEQ ID NO: 86276 - RNA, 21 nt, synthetic construct
  source 1..21: mol_type = other RNA
tcccctcttcctccctgggca

SEQ ID NO: 86277 - RNA, 21 nt, synthetic construct
  source 1..21: mol_type = other RNA
ccctcttcctccctgggcaca

SEQ ID NO: 86278 - RNA, 21 nt, synthetic construct
  source 1..21: mol_type = other RNA
cctcttcctccctgggcacca

SEQ ID NO: 86279 - RNA, 21 nt, synthetic construct
  source 1..21: mol_type = other RNA
ctcttcctccctgggcaccaa

SEQ ID NO: 86280 - RNA, 21 nt, synthetic construct
  source 1..21: mol_type = other RNA
tcttcctccctgggcaccaca

SEQ ID NO: 86281 - RNA, 21 nt, synthetic construct
  source 1..21: mol_type = other RNA
tcctccctgggcaccacctga

SEQ ID NO: 86282 - RNA, 21 nt, synthetic construct
  source 1..21: mol_type = other RNA
tccctgggcaccacctggaca

SEQ ID NO: 86283 - RNA, 21 nt, synthetic construct
  source 1..21: mol_type = other RNA
cctgggcaccacctggaccca

SEQ ID NO: 86284 - RNA, 21 nt, synthetic construct
  source 1..21: mol_type = other RNA
ctgggcaccacctggacccga

SEQ ID NO: 86285 - RNA, 21 nt, synthetic construct
  source 1..21: mol_type = other RNA
tgggcaccacctggacccgca

SEQ ID NO: 86286 - RNA, 21 nt, synthetic construct
  source 1..21: mol_type = other RNA
gggcaccacctggacccgcca

SEQ ID NO: 86287 - RNA, 21 nt, synthetic construct
  source 1..21: mol_type = other RNA
tatcacagaccaccacaccca

SEQ ID NO: 86288 - RNA, 21 nt, synthetic construct
  source 1..21: mol_type = other RNA
cggccaccatgtccacagcca

SEQ ID NO: 86289 - RNA, 21 nt, synthetic construct
  source 1..21: mol_type = other RNA
ccaccatgtccacagccacaa

SEQ ID NO: 86290 - RNA, 21 nt, synthetic construct
  source 1..21: mol_type = other RNA
ccatgtccacagccacaccca

SEQ ID NO: 86291 - RNA, 21 nt, synthetic construct
  source 1..21: mol_type = other RNA
cacaccctcctccactccaga

SEQ ID NO: 86292 - RNA, 21 nt, synthetic construct
  source 1..21: mol_type = other RNA
actgcccacacctccacagta

SEQ ID NO: 86293 - RNA, 21 nt, synthetic construct
  source 1..21: mol_type = other RNA
taccgccacggccaccacaaa

SEQ ID NO: 86294 - RNA, 21 nt, synthetic construct
  source 1..21: mol_type = other RNA
gctctgtggccaccccctcca

SEQ ID NO: 86295 - RNA, 21 nt, synthetic construct
  source 1..21: mol_type = other RNA
ctctgtggccaccccctccta

SEQ ID NO: 86296 - RNA, 21 nt, synthetic construct
  source 1..21: mol_type = other RNA
tctgtggccaccccctcctca

SEQ ID NO: 86297 - RNA, 21 nt, synthetic construct
  source 1..21: mol_type = other RNA
ctgtggccaccccctcctcca

SEQ ID NO: 86298 - RNA, 21 nt, synthetic construct
  source 1..21: mol_type = other RNA
tgtggccaccccctcctccaa

SEQ ID NO: 86299 - RNA, 21 nt, synthetic construct
  source 1..21: mol_type = other RNA
accccctcctccaccccagga

SEQ ID NO: 86300 - RNA, 21 nt, synthetic construct
  source 1..21: mol_type = other RNA
ccctcctccaccccaggaaca

SEQ ID NO: 86301 - RNA, 21 nt, synthetic construct
  source 1..21: mol_type = other RNA
ccacgggcttcacagccacca

SEQ ID NO: 86302 - RNA, 21 nt, synthetic construct
  source 1..21: mol_type = other RNA
gcttcacagccaccccctcca

SEQ ID NO: 86303 - RNA, 21 nt, synthetic construct
  source 1..21: mol_type = other RNA
tcacagccaccccctcctcca

SEQ ID NO: 86304 - RNA, 21 nt, synthetic construct
  source 1..21: mol_type = other RNA
ctcctccagcccagggacgga

SEQ ID NO: 86305 - RNA, 21 nt, synthetic construct
  source 1..21: mol_type = other RNA
tcctccagcccagggacggca

SEQ ID NO: 86306 - RNA, 21 nt, synthetic construct
  source 1..21: mol_type = other RNA
cctccagtgtggatcagcaca

SEQ ID NO: 86307 - RNA, 21 nt, synthetic construct
  source 1..21: mol_type = other RNA
acggtgaccccctcctccata

SEQ ID NO: 86308 - RNA, 21 nt, synthetic construct
  source 1..21: mol_type = other RNA
gtgaccccctcctccatccca

SEQ ID NO: 86309 - RNA, 21 nt, synthetic construct
  source 1..21: mol_type = other RNA
gaccccctcctccatcccgga

SEQ ID NO: 86310 - RNA, 21 nt, synthetic construct
  source 1..21: mol_type = other RNA
ccccctcctccatcccgggga

SEQ ID NO: 86311 - RNA, 21 nt, synthetic construct
  source 1..21: mol_type = other RNA
ccctcctccatcccggggaca

SEQ ID NO: 86312 - RNA, 21 nt, synthetic construct
  source 1..21: mol_type = other RNA
gccacagtgctgaccaccaca

SEQ ID NO: 86313 - RNA, 21 nt, synthetic construct
  source 1..21: mol_type = other RNA
tgctgaccaccaccaccacaa

SEQ ID NO: 86314 - RNA, 21 nt, synthetic construct
  source 1..21: mol_type = other RNA
gctgaccaccaccaccacaaa

SEQ ID NO: 86315 - RNA, 21 nt, synthetic construct
  source 1..21: mol_type = other RNA
accaccaccaccacaactgta

SEQ ID NO: 86316 - RNA, 21 nt, synthetic construct
  source 1..21: mol_type = other RNA
ccaccacaactgtggccacta

SEQ ID NO: 86317 - RNA, 21 nt, synthetic construct
  source 1..21: mol_type = other RNA
gtggccactggttctatggca

SEQ ID NO: 86318 - RNA, 21 nt, synthetic construct
  source 1..21: mol_type = other RNA
cactgaccaccacggccacta

SEQ ID NO: 86319 - RNA, 21 nt, synthetic construct
  source 1..21: mol_type = other RNA
acggccaccggctccaccaca

SEQ ID NO: 86320 - RNA, 21 nt, synthetic construct
  source 1..21: mol_type = other RNA
ccaccggctccaccaccaaca

SEQ ID NO: 86321 - RNA, 21 nt, synthetic construct
  source 1..21: mol_type = other RNA
ccaccaccaacccctcctcaa

SEQ ID NO: 86322 - RNA, 21 nt, synthetic construct
  source 1..21: mol_type = other RNA
accaccaacccctcctcaaca

SEQ ID NO: 86323 - RNA, 21 nt, synthetic construct
  source 1..21: mol_type = other RNA
accaacccctcctcaactcca

SEQ ID NO: 86324 - RNA, 21 nt, synthetic construct
  source 1..21: mol_type = other RNA
ggacaactcccatccccccaa

SEQ ID NO: 86325 - RNA, 21 nt, synthetic construct
  source 1..21: mol_type = other RNA
acaactcccatccccccagta

SEQ ID NO: 86326 - RNA, 21 nt, synthetic construct
  source 1..21: mol_type = other RNA
ctcccatccccccagtgctga

SEQ ID NO: 86327 - RNA, 21 nt, synthetic construct
  source 1..21: mol_type = other RNA
ccccccagtgctgaccaccaa

SEQ ID NO: 86328 - RNA, 21 nt, synthetic construct
  source 1..21: mol_type = other RNA
ccccagtgctgaccaccacca

SEQ ID NO: 86329 - RNA, 21 nt, synthetic construct
  source 1..21: mol_type = other RNA
gctgaccaccaccgccaccaa

SEQ ID NO: 86330 - RNA, 21 nt, synthetic construct
  source 1..21: mol_type = other RNA
accaccaccgccaccacacca

SEQ ID NO: 86331 - RNA, 21 nt, synthetic construct
  source 1..21: mol_type = other RNA
ccaccgccaccacacctgcaa

SEQ ID NO: 86332 - RNA, 21 nt, synthetic construct
  source 1..21: mol_type = other RNA
accgccaccacacctgcagca

SEQ ID NO: 86333 - RNA, 21 nt, synthetic construct
  source 1..21: mol_type = other RNA
ccgccaccacacctgcagcca

SEQ ID NO: 86334 - RNA, 21 nt, synthetic construct
  source 1..21: mol_type = other RNA
acacctgcagccaccagcaaa

SEQ ID NO: 86335 - RNA, 21 nt, synthetic construct
  source 1..21: mol_type = other RNA
acctgcagccaccagcaacaa

SEQ ID NO: 86336 - RNA, 21 nt, synthetic construct
  source 1..21: mol_type = other RNA
ctgcagccaccagcaacacaa

SEQ ID NO: 86337 - RNA, 21 nt, synthetic construct
  source 1..21: mol_type = other RNA
cagccaccagcaacacagtga

SEQ ID NO: 86338 - RNA, 21 nt, synthetic construct
  source 1..21: mol_type = other RNA
gccaccagcaacacagtgaca

SEQ ID NO: 86339 - RNA, 21 nt, synthetic construct
  source 1..21: mol_type = other RNA
gtgactccctcctctgcccta

SEQ ID NO: 86340 - RNA, 21 nt, synthetic construct
  source 1..21: mol_type = other RNA
acccacacacccccagtgcca

SEQ ID NO: 86341 - RNA, 21 nt, synthetic construct
  source 1..21: mol_type = other RNA
ccacacacccccagtgccgaa

SEQ ID NO: 86342 - RNA, 21 nt, synthetic construct
  source 1..21: mol_type = other RNA
gaacaccatggccaccacaca

SEQ ID NO: 86343 - RNA, 21 nt, synthetic construct
  source 1..21: mol_type = other RNA
gatccctgccccccagcagta

SEQ ID NO: 86344 - RNA, 21 nt, synthetic construct
  source 1..21: mol_type = other RNA
tccctgccccccagcagtcca

SEQ ID NO: 86345 - RNA, 21 nt, synthetic construct
  source 1..21: mol_type = other RNA
ccctgccccccagcagtccca

SEQ ID NO: 86346 - RNA, 21 nt, synthetic construct
  source 1..21: mol_type = other RNA
tgccccccagcagtccccaca

SEQ ID NO: 86347 - RNA, 21 nt, synthetic construct
  source 1..21: mol_type = other RNA
actccagccctttccagccca

SEQ ID NO: 86348 - RNA, 21 nt, synthetic construct
  source 1..21: mol_type = other RNA
ctccagccctttccagcccta

SEQ ID NO: 86349 - RNA, 21 nt, synthetic construct
  source 1..21: mol_type = other RNA
agtcacccccttctccaggga

SEQ ID NO: 86350 - RNA, 21 nt, synthetic construct
  source 1..21: mol_type = other RNA
gtcacccccttctccagggaa

SEQ ID NO: 86351 - RNA, 21 nt, synthetic construct
  source 1..21: mol_type = other RNA
tcacccccttctccagggaca

SEQ ID NO: 86352 - RNA, 21 nt, synthetic construct
  source 1..21: mol_type = other RNA
cacccccttctccagggacga

SEQ ID NO: 86353 - RNA, 21 nt, synthetic construct
  source 1..21: mol_type = other RNA
cccccttctccagggacgaca

SEQ ID NO: 86354 - RNA, 21 nt, synthetic construct
  source 1..21: mol_type = other RNA
ccttctccagggacgaccaca

SEQ ID NO: 86355 - RNA, 21 nt, synthetic construct
  source 1..21: mol_type = other RNA
cgaccaccccgggccacacca

SEQ ID NO: 86356 - RNA, 21 nt, synthetic construct
  source 1..21: mol_type = other RNA
cgggccacaccacggccacca

SEQ ID NO: 86357 - RNA, 21 nt, synthetic construct
  source 1..21: mol_type = other RNA
cacaccacggccacctccaga

SEQ ID NO: 86358 - RNA, 21 nt, synthetic construct
  source 1..21: mol_type = other RNA
ccacctccaggaccacagcca

SEQ ID NO: 86359 - RNA, 21 nt, synthetic construct
  source 1..21: mol_type = other RNA
cctccaggaccacagccacga

SEQ ID NO: 86360 - RNA, 21 nt, synthetic construct
  source 1..21: mol_type = other RNA
aggaccacagccacggccaca

SEQ ID NO: 86361 - RNA, 21 nt, synthetic construct
  source 1..21: mol_type = other RNA
gaccacagccacggccacaca

SEQ ID NO: 86362 - RNA, 21 nt, synthetic construct
  source 1..21: mol_type = other RNA
accacagccacggccacacca

SEQ ID NO: 86363 - RNA, 21 nt, synthetic construct
  source 1..21: mol_type = other RNA
cacagccacggccacacccaa

SEQ ID NO: 86364 - RNA, 21 nt, synthetic construct
  source 1..21: mol_type = other RNA
acagccacggccacacccaga

SEQ ID NO: 86365 - RNA, 21 nt, synthetic construct
  source 1..21: mol_type = other RNA
cagccacggccacacccagca

SEQ ID NO: 86366 - RNA, 21 nt, synthetic construct
  source 1..21: mol_type = other RNA
agccacggccacacccagcaa

SEQ ID NO: 86367 - RNA, 21 nt, synthetic construct
  source 1..21: mol_type = other RNA
gccacggccacacccagcaaa

SEQ ID NO: 86368 - RNA, 21 nt, synthetic construct
  source 1..21: mol_type = other RNA
atgggctgtgagccccagtga

SEQ ID NO: 86369 - RNA, 21 nt, synthetic construct
  source 1..21: mol_type = other RNA
tggtcagagtggctggactaa

SEQ ID NO: 86370 - RNA, 21 nt, synthetic construct
  source 1..21: mol_type = other RNA
gtgcggccggaggggccgtca

SEQ ID NO: 86371 - RNA, 21 nt, synthetic construct
  source 1..21: mol_type = other RNA
ccgtgcccaggcccagcctga

SEQ ID NO: 86372 - RNA, 21 nt, synthetic construct
  source 1..21: mol_type = other RNA
atgcagcctggactttggcca

SEQ ID NO: 86373 - RNA, 21 nt, synthetic construct
  source 1..21: mol_type = other RNA
tgcagcctggactttggccta

SEQ ID NO: 86374 - RNA, 21 nt, synthetic construct
  source 1..21: mol_type = other RNA
agcctggactttggcctggta

SEQ ID NO: 86375 - RNA, 21 nt, synthetic construct
  source 1..21: mol_type = other RNA
ggcctggtctgcaggaaccga

SEQ ID NO: 86376 - RNA, 21 nt, synthetic construct
  source 1..21: mol_type = other RNA
tacggccatgccctcctccaa

SEQ ID NO: 86377 - RNA, 21 nt, synthetic construct
  source 1..21: mol_type = other RNA
ggccatgccctcctccactca

SEQ ID NO: 86378 - RNA, 21 nt, synthetic construct
  source 1..21: mol_type = other RNA
cgactgagtccactggatcca

SEQ ID NO: 86379 - RNA, 21 nt, synthetic construct
  source 1..21: mol_type = other RNA
ccccgtcctccaccccaggga

SEQ ID NO: 86380 - RNA, 21 nt, synthetic construct
  source 1..21: mol_type = other RNA
cccgtcctccaccccagggaa

SEQ ID NO: 86381 - RNA, 21 nt, synthetic construct
  source 1..21: mol_type = other RNA
cgtcctccaccccagggacca

SEQ ID NO: 86382 - RNA, 21 nt, synthetic construct
  source 1..21: mol_type = other RNA
gtcctccaccccagggaccaa

SEQ ID NO: 86383 - RNA, 21 nt, synthetic construct
  source 1..21: mol_type = other RNA
cctccaccccagggaccacca

SEQ ID NO: 86384 - RNA, 21 nt, synthetic construct
  source 1..21: mol_type = other RNA
ctccaccccagggaccaccta

SEQ ID NO: 86385 - RNA, 21 nt, synthetic construct
  source 1..21: mol_type = other RNA
tccaccccagggaccacctga

SEQ ID NO: 86386 - RNA, 21 nt, synthetic construct
  source 1..21: mol_type = other RNA
ccaccccagggaccacctgga

SEQ ID NO: 86387 - RNA, 21 nt, synthetic construct
  source 1..21: mol_type = other RNA
ccaccgcctcctccacccaga

SEQ ID NO: 86388 - RNA, 21 nt, synthetic construct
  source 1..21: mol_type = other RNA
tcctccacccaggcaactgca

SEQ ID NO: 86389 - RNA, 21 nt, synthetic construct
  source 1..21: mol_type = other RNA
acacccacagtcaccagctca

SEQ ID NO: 86390 - RNA, 21 nt, synthetic construct
  source 1..21: mol_type = other RNA
acccacagtcaccagctccaa

SEQ ID NO: 86391 - RNA, 21 nt, synthetic construct
  source 1..21: mol_type = other RNA
cccacagtcaccagctccaaa

SEQ ID NO: 86392 - RNA, 21 nt, synthetic construct
  source 1..21: mol_type = other RNA
tcaccagctccaaagccacta

SEQ ID NO: 86393 - RNA, 21 nt, synthetic construct
  source 1..21: mol_type = other RNA
gctccaaagccactcccttca

SEQ ID NO: 86394 - RNA, 21 nt, synthetic construct
  source 1..21: mol_type = other RNA
tccaaagccactcccttctca

SEQ ID NO: 86395 - RNA, 21 nt, synthetic construct
  source 1..21: mol_type = other RNA
tacagccatcccctcctccta

SEQ ID NO: 86396 - RNA, 21 nt, synthetic construct
  source 1..21: mol_type = other RNA
acagccatcccctcctcctca

SEQ ID NO: 86397 - RNA, 21 nt, synthetic construct
  source 1..21: mol_type = other RNA
cctcctcctccctgggcacca

SEQ ID NO: 86398 - RNA, 21 nt, synthetic construct
  source 1..21: mol_type = other RNA
tcctccctgggcaccacctga

SEQ ID NO: 86399 - RNA, 21 nt, synthetic construct
  source 1..21: mol_type = other RNA
tccctgggcaccacctggaca

SEQ ID NO: 86400 - RNA, 21 nt, synthetic construct
  source 1..21: mol_type = other RNA
cctgggcaccacctggaccca

SEQ ID NO: 86401 - RNA, 21 nt, synthetic construct
  source 1..21: mol_type = other RNA
ctgggcaccacctggacccga

SEQ ID NO: 86402 - RNA, 21 nt, synthetic construct
  source 1..21: mol_type = other RNA
tgggcaccacctggacccgca

SEQ ID NO: 86403 - RNA, 21 nt, synthetic construct
  source 1..21: mol_type = other RNA
gggcaccacctggacccgcca

SEQ ID NO: 86404 - RNA, 21 nt, synthetic construct
  source 1..21: mol_type = other RNA
tatcacagaccaccacaccca

SEQ ID NO: 86405 - RNA, 21 nt, synthetic construct
  source 1..21: mol_type = other RNA
cggccaccatgtccacagcca

SEQ ID NO: 86406 - RNA, 21 nt, synthetic construct
  source 1..21: mol_type = other RNA
ccaccatgtccacagccacaa

SEQ ID NO: 86407 - RNA, 21 nt, synthetic construct
  source 1..21: mol_type = other RNA
ccatgtccacagccacaccca

SEQ ID NO: 86408 - RNA, 21 nt, synthetic construct
  source 1..21: mol_type = other RNA
cacaccctcctccactccaga

SEQ ID NO: 86409 - RNA, 21 nt, synthetic construct
  source 1..21: mol_type = other RNA
gctctgtggccaccccctcca

SEQ ID NO: 86410 - RNA, 21 nt, synthetic construct
  source 1..21: mol_type = other RNA
ctctgtggccaccccctccta

SEQ ID NO: 86411 - RNA, 21 nt, synthetic construct
  source 1..21: mol_type = other RNA
tctgtggccaccccctcctca

SEQ ID NO: 86412 - RNA, 21 nt, synthetic construct
  source 1..21: mol_type = other RNA
ctgtggccaccccctcctcca

SEQ ID NO: 86413 - RNA, 21 nt, synthetic construct
  source 1..21: mol_type = other RNA
tgtggccaccccctcctccaa

SEQ ID NO: 86414 - RNA, 21 nt, synthetic construct
  source 1..21: mol_type = other RNA
accccctcctccaccccagga

SEQ ID NO: 86415 - RNA, 21 nt, synthetic construct
  source 1..21: mol_type = other RNA
ccctcctccaccccaggaaca

SEQ ID NO: 86416 - RNA, 21 nt, synthetic construct
  source 1..21: mol_type = other RNA
ccacgggcttcacagccacca

SEQ ID NO: 86417 - RNA, 21 nt, synthetic construct
  source 1..21: mol_type = other RNA
gcttcacagccaccccctcca

SEQ ID NO: 86418 - RNA, 21 nt, synthetic construct
  source 1..21: mol_type = other RNA
tcacagccaccccctcctcca

SEQ ID NO: 86419 - RNA, 21 nt, synthetic construct
  source 1..21: mol_type = other RNA
ctcctccagcccagggacgga

SEQ ID NO: 86420 - RNA, 21 nt, synthetic construct
  source 1..21: mol_type = other RNA
tcctccagcccagggacggca

SEQ ID NO: 86421 - RNA, 21 nt, synthetic construct
  source 1..21: mol_type = other RNA
acccacaaccagaggttccaa

SEQ ID NO: 86422 - RNA, 21 nt, synthetic construct
  source 1..21: mol_type = other RNA
cccacaaccagaggttccaca

SEQ ID NO: 86423 - RNA, 21 nt, synthetic construct
  source 1..21: mol_type = other RNA
acggtgaccccctcctccata

SEQ ID NO: 86424 - RNA, 21 nt, synthetic construct
  source 1..21: mol_type = other RNA
gtgaccccctcctccatccca

SEQ ID NO: 86425 - RNA, 21 nt, synthetic construct
  source 1..21: mol_type = other RNA
gaccccctcctccatcccgga

SEQ ID NO: 86426 - RNA, 21 nt, synthetic construct
  source 1..21: mol_type = other RNA
ccccctcctccatcccgggga

SEQ ID NO: 86427 - RNA, 21 nt, synthetic construct
  source 1..21: mol_type = other RNA
ccctcctccatcccggggaca

SEQ ID NO: 86428 - RNA, 21 nt, synthetic construct
  source 1..21: mol_type = other RNA
cccccacagtgctgaccacca

SEQ ID NO: 86429 - RNA, 21 nt, synthetic construct
  source 1..21: mol_type = other RNA
ccccacagtgctgaccaccaa

SEQ ID NO: 86430 - RNA, 21 nt, synthetic construct
  source 1..21: mol_type = other RNA
cccacagtgctgaccaccaca

SEQ ID NO: 86431 - RNA, 21 nt, synthetic construct
  source 1..21: mol_type = other RNA
tgctgaccaccaccaccacaa

SEQ ID NO: 86432 - RNA, 21 nt, synthetic construct
  source 1..21: mol_type = other RNA
gctgaccaccaccaccacaaa

SEQ ID NO: 86433 - RNA, 21 nt, synthetic construct
  source 1..21: mol_type = other RNA
accaccaccaccacaactgta

SEQ ID NO: 86434 - RNA, 21 nt, synthetic construct
  source 1..21: mol_type = other RNA
ccaccacaactgtggccacta

SEQ ID NO: 86435 - RNA, 21 nt, synthetic construct
  source 1..21: mol_type = other RNA
gtggccactggttctatggca

SEQ ID NO: 86436 - RNA, 21 nt, synthetic construct
  source 1..21: mol_type = other RNA
cactgaccaccacggccacta

SEQ ID NO: 86437 - RNA, 21 nt, synthetic construct
  source 1..21: mol_type = other RNA
acggccaccggctccaccaca

SEQ ID NO: 86438 - RNA, 21 nt, synthetic construct
  source 1..21: mol_type = other RNA
ccaccggctccaccaccaaca

SEQ ID NO: 86439 - RNA, 21 nt, synthetic construct
  source 1..21: mol_type = other RNA
ccaccaccaacccctcctcaa

SEQ ID NO: 86440 - RNA, 21 nt, synthetic construct
  source 1..21: mol_type = other RNA
accaccaacccctcctcaaca

SEQ ID NO: 86441 - RNA, 21 nt, synthetic construct
  source 1..21: mol_type = other RNA
accaacccctcctcaactcca

SEQ ID NO: 86442 - RNA, 21 nt, synthetic construct
  source 1..21: mol_type = other RNA
ccaacccctcctcaactccaa

SEQ ID NO: 86443 - RNA, 21 nt, synthetic construct
  source 1..21: mol_type = other RNA
acccctcctcaactccaggga

SEQ ID NO: 86444 - RNA, 21 nt, synthetic construct
  source 1..21: mol_type = other RNA
ccctcctcaactccagggaca

SEQ ID NO: 86445 - RNA, 21 nt, synthetic construct
  source 1..21: mol_type = other RNA
ctcctcaactccagggacaaa

SEQ ID NO: 86446 - RNA, 21 nt, synthetic construct
  source 1..21: mol_type = other RNA
ccccccagtgctgaccaccaa

SEQ ID NO: 86447 - RNA, 21 nt, synthetic construct
  source 1..21: mol_type = other RNA
ccccagtgctgaccaccacca

SEQ ID NO: 86448 - RNA, 21 nt, synthetic construct
  source 1..21: mol_type = other RNA
gctgaccaccaccgccaccaa

SEQ ID NO: 86449 - RNA, 21 nt, synthetic construct
  source 1..21: mol_type = other RNA
accaccaccgccaccacacca

SEQ ID NO: 86450 - RNA, 21 nt, synthetic construct
  source 1..21: mol_type = other RNA
ccaccgccaccacacctgcaa

SEQ ID NO: 86451 - RNA, 21 nt, synthetic construct
  source 1..21: mol_type = other RNA
accgccaccacacctgcagca

SEQ ID NO: 86452 - RNA, 21 nt, synthetic construct
  source 1..21: mol_type = other RNA
ccgccaccacacctgcagcca

SEQ ID NO: 86453 - RNA, 21 nt, synthetic construct
  source 1..21: mol_type = other RNA
acacctgcagccaccagcaga

SEQ ID NO: 86454 - RNA, 21 nt, synthetic construct
  source 1..21: mol_type = other RNA
tgcagccaccagcagcacaga

SEQ ID NO: 86455 - RNA, 21 nt, synthetic construct
  source 1..21: mol_type = other RNA
agccaccagcagcacagtgaa

SEQ ID NO: 86456 - RNA, 21 nt, synthetic construct
  source 1..21: mol_type = other RNA
cagcacagtgactccctccta

SEQ ID NO: 86457 - RNA, 21 nt, synthetic construct
  source 1..21: mol_type = other RNA
agcacagtgactccctcctca

SEQ ID NO: 86458 - RNA, 21 nt, synthetic construct
  source 1..21: mol_type = other RNA
gtgactccctcctctgcccta

SEQ ID NO: 86459 - RNA, 21 nt, synthetic construct
  source 1..21: mol_type = other RNA
acccacacacccccagtgcca

SEQ ID NO: 86460 - RNA, 21 nt, synthetic construct
  source 1..21: mol_type = other RNA
ccacacacccccagtgccgaa

SEQ ID NO: 86461 - RNA, 21 nt, synthetic construct
  source 1..21: mol_type = other RNA
gaacaccacggccaccacaca

SEQ ID NO: 86462 - RNA, 21 nt, synthetic construct
  source 1..21: mol_type = other RNA
tgtcccccagcagtccccaca

SEQ ID NO: 86463 - RNA, 21 nt, synthetic construct
  source 1..21: mol_type = other RNA
ttcggccacctcaggcaccta

SEQ ID NO: 86464 - RNA, 21 nt, synthetic construct
  source 1..21: mol_type = other RNA
ggccacctcaggcaccttgga

SEQ ID NO: 86465 - RNA, 21 nt, synthetic construct
  source 1..21: mol_type = other RNA
cctcaggcaccttgggcacca

SEQ ID NO: 86466 - RNA, 21 nt, synthetic construct
  source 1..21: mol_type = other RNA
ggcaccttgggcaccacccaa

SEQ ID NO: 86467 - RNA, 21 nt, synthetic construct
  source 1..21: mol_type = other RNA
gggacttcccacaccccagca

SEQ ID NO: 86468 - RNA, 21 nt, synthetic construct
  source 1..21: mol_type = other RNA
ttcccacaccccagcagcaaa

SEQ ID NO: 86469 - RNA, 21 nt, synthetic construct
  source 1..21: mol_type = other RNA
ctgtccagccctcaccctaga

SEQ ID NO: 86470 - RNA, 21 nt, synthetic construct
  source 1..21: mol_type = other RNA
agtcacccccttctccaggga

SEQ ID NO: 86471 - RNA, 21 nt, synthetic construct
  source 1..21: mol_type = other RNA
gtcacccccttctccagggaa

SEQ ID NO: 86472 - RNA, 21 nt, synthetic construct
  source 1..21: mol_type = other RNA
tcacccccttctccagggaca

SEQ ID NO: 86473 - RNA, 21 nt, synthetic construct
  source 1..21: mol_type = other RNA
cacccccttctccagggacga

SEQ ID NO: 86474 - RNA, 21 nt, synthetic construct
  source 1..21: mol_type = other RNA
cccccttctccagggacgaca

SEQ ID NO: 86475 - RNA, 21 nt, synthetic construct
  source 1..21: mol_type = other RNA
ccttctccagggacgaccaca

SEQ ID NO: 86476 - RNA, 21 nt, synthetic construct
  source 1..21: mol_type = other RNA
cgaccaccccgggccacacca

SEQ ID NO: 86477 - RNA, 21 nt, synthetic construct
  source 1..21: mol_type = other RNA
ggccacaccagggccacctca

SEQ ID NO: 86478 - RNA, 21 nt, synthetic construct
  source 1..21: mol_type = other RNA
gccacaccagggccacctcca

SEQ ID NO: 86479 - RNA, 21 nt, synthetic construct
  source 1..21: mol_type = other RNA
ccacaccagggccacctccaa

SEQ ID NO: 86480 - RNA, 21 nt, synthetic construct
  source 1..21: mol_type = other RNA
acaccagggccacctccagga

SEQ ID NO: 86481 - RNA, 21 nt, synthetic construct
  source 1..21: mol_type = other RNA
caccagggccacctccaggaa

SEQ ID NO: 86482 - RNA, 21 nt, synthetic construct
  source 1..21: mol_type = other RNA
accagggccacctccaggaca

SEQ ID NO: 86483 - RNA, 21 nt, synthetic construct
  source 1..21: mol_type = other RNA
ccagggccacctccaggacca

SEQ ID NO: 86484 - RNA, 21 nt, synthetic construct
  source 1..21: mol_type = other RNA
gggccacctccaggaccacga

SEQ ID NO: 86485 - RNA, 21 nt, synthetic construct
  source 1..21: mol_type = other RNA
ccacggccacggccacaccca

SEQ ID NO: 86486 - RNA, 21 nt, synthetic construct
  source 1..21: mol_type = other RNA
cacggccacggccacacccaa

SEQ ID NO: 86487 - RNA, 21 nt, synthetic construct
  source 1..21: mol_type = other RNA
acggccacggccacacccaga

SEQ ID NO: 86488 - RNA, 21 nt, synthetic construct
  source 1..21: mol_type = other RNA
ggccacggccacacccagcaa

SEQ ID NO: 86489 - RNA, 21 nt, synthetic construct
  source 1..21: mol_type = other RNA
gccacggccacacccagcaaa

SEQ ID NO: 86490 - RNA, 21 nt, synthetic construct
  source 1..21: mol_type = other RNA
atgggctgtgagccccagtga

SEQ ID NO: 86491 - RNA, 21 nt, synthetic construct
  source 1..21: mol_type = other RNA
tggtcagagtggctggactaa

SEQ ID NO: 86492 - RNA, 21 nt, synthetic construct
  source 1..21: mol_type = other RNA
gtgcggccggaggggccgtca

SEQ ID NO: 86493 - RNA, 21 nt, synthetic construct
  source 1..21: mol_type = other RNA
ccgtgcccaggcccagcctga

SEQ ID NO: 86494 - RNA, 21 nt, synthetic construct
  source 1..21: mol_type = other RNA
atgcagcctggactttggcca

SEQ ID NO: 86495 - RNA, 21 nt, synthetic construct
  source 1..21: mol_type = other RNA
tgcagcctggactttggccta

SEQ ID NO: 86496 - RNA, 21 nt, synthetic construct
  source 1..21: mol_type = other RNA
agcctggactttggcctggta

SEQ ID NO: 86497 - RNA, 21 nt, synthetic construct
  source 1..21: mol_type = other RNA
ggcctggtctgcaggaaccga

SEQ ID NO: 86498 - RNA, 21 nt, synthetic construct
  source 1..21: mol_type = other RNA
gccaccagctctacggccaca

SEQ ID NO: 86499 - RNA, 21 nt, synthetic construct
  source 1..21: mol_type = other RNA
actccagggacgacctggata

SEQ ID NO: 86500 - RNA, 21 nt, synthetic construct
  source 1..21: mol_type = other RNA
agagcagaccacagcagccaa

SEQ ID NO: 86501 - RNA, 21 nt, synthetic construct
  source 1..21: mol_type = other RNA
agcagaccacagcagccacta

SEQ ID NO: 86502 - RNA, 21 nt, synthetic construct
  source 1..21: mol_type = other RNA
gggaacagctccccctcccaa

SEQ ID NO: 86503 - RNA, 21 nt, synthetic construct
  source 1..21: mol_type = other RNA
ctgaccagcacggccaccaca

SEQ ID NO: 86504 - RNA, 21 nt, synthetic construct
  source 1..21: mol_type = other RNA
ccagcacggccaccacaccca

SEQ ID NO: 86505 - RNA, 21 nt, synthetic construct
  source 1..21: mol_type = other RNA
agcacggccaccacacccaca

SEQ ID NO: 86506 - RNA, 21 nt, synthetic construct
  source 1..21: mol_type = other RNA
ttccaaagccacttcctccta

SEQ ID NO: 86507 - RNA, 21 nt, synthetic construct
  source 1..21: mol_type = other RNA
aaagccacttcctcctccaga

SEQ ID NO: 86508 - RNA, 21 nt, synthetic construct
  source 1..21: mol_type = other RNA
agccacttcctcctccagtca

SEQ ID NO: 86509 - RNA, 21 nt, synthetic construct
  source 1..21: mol_type = other RNA
gccacttcctcctccagtcca

SEQ ID NO: 86510 - RNA, 21 nt, synthetic construct
  source 1..21: mol_type = other RNA
ccacttcctcctccagtccaa

SEQ ID NO: 86511 - RNA, 21 nt, synthetic construct
  source 1..21: mol_type = other RNA
acttcctcctccagtccaaga

SEQ ID NO: 86512 - RNA, 21 nt, synthetic construct
  source 1..21: mol_type = other RNA
ttcctcctccagtccaaggaa

SEQ ID NO: 86513 - RNA, 21 nt, synthetic construct
  source 1..21: mol_type = other RNA
acccatcccctccttcaccca

SEQ ID NO: 86514 - RNA, 21 nt, synthetic construct
  source 1..21: mol_type = other RNA
ccctccttcacccttgggaca

SEQ ID NO: 86515 - RNA, 21 nt, synthetic construct
  source 1..21: mol_type = other RNA
ctccttcacccttgggaccaa

SEQ ID NO: 86516 - RNA, 21 nt, synthetic construct
  source 1..21: mol_type = other RNA
accgggaccctcccagaacaa

SEQ ID NO: 86517 - RNA, 21 nt, synthetic construct
  source 1..21: mol_type = other RNA
acagaccaccacacccatgga

SEQ ID NO: 86518 - RNA, 21 nt, synthetic construct
  source 1..21: mol_type = other RNA
acccatggccaccatgtccaa

SEQ ID NO: 86519 - RNA, 21 nt, synthetic construct
  source 1..21: mol_type = other RNA
acccctcctccactccggaga

SEQ ID NO: 86520 - RNA, 21 nt, synthetic construct
  source 1..21: mol_type = other RNA
accacccacacctccacagta

SEQ ID NO: 86521 - RNA, 21 nt, synthetic construct
  source 1..21: mol_type = other RNA
ctgaccacgaaggccaccaca

SEQ ID NO: 86522 - RNA, 21 nt, synthetic construct
  source 1..21: mol_type = other RNA
agggccaccagttccatgtca

SEQ ID NO: 86523 - RNA, 21 nt, synthetic construct
  source 1..21: mol_type = other RNA
tccatgtccaccccctcctca

SEQ ID NO: 86524 - RNA, 21 nt, synthetic construct
  source 1..21: mol_type = other RNA
ccatgtccaccccctcctcca

SEQ ID NO: 86525 - RNA, 21 nt, synthetic construct
  source 1..21: mol_type = other RNA
catgtccaccccctcctccaa

SEQ ID NO: 86526 - RNA, 21 nt, synthetic construct
  source 1..21: mol_type = other RNA
ccaccccctcctccactccga

SEQ ID NO: 86527 - RNA, 21 nt, synthetic construct
  source 1..21: mol_type = other RNA
gcagccactacaactgcagca

SEQ ID NO: 86528 - RNA, 21 nt, synthetic construct
  source 1..21: mol_type = other RNA
cagccactacaactgcagcca

SEQ ID NO: 86529 - RNA, 21 nt, synthetic construct
  source 1..21: mol_type = other RNA
tacaactgcagccactggcca

SEQ ID NO: 86530 - RNA, 21 nt, synthetic construct
  source 1..21: mol_type = other RNA
acaactgcagccactggccca

SEQ ID NO: 86531 - RNA, 21 nt, synthetic construct
  source 1..21: mol_type = other RNA
tgcagccactggccccacgga

SEQ ID NO: 86532 - RNA, 21 nt, synthetic construct
  source 1..21: mol_type = other RNA
gccactggccccacggccaca

SEQ ID NO: 86533 - RNA, 21 nt, synthetic construct
  source 1..21: mol_type = other RNA
tggccccacggccaccccgta

SEQ ID NO: 86534 - RNA, 21 nt, synthetic construct
  source 1..21: mol_type = other RNA
ccccgtcctccaccccaggga

SEQ ID NO: 86535 - RNA, 21 nt, synthetic construct
  source 1..21: mol_type = other RNA
cccgtcctccaccccagggaa

SEQ ID NO: 86536 - RNA, 21 nt, synthetic construct
  source 1..21: mol_type = other RNA
cgtcctccaccccagggacca

SEQ ID NO: 86537 - RNA, 21 nt, synthetic construct
  source 1..21: mol_type = other RNA
gtcctccaccccagggaccaa

SEQ ID NO: 86538 - RNA, 21 nt, synthetic construct
  source 1..21: mol_type = other RNA
cctccaccccagggaccacca

SEQ ID NO: 86539 - RNA, 21 nt, synthetic construct
  source 1..21: mol_type = other RNA
ctccaccccagggaccaccta

SEQ ID NO: 86540 - RNA, 21 nt, synthetic construct
  source 1..21: mol_type = other RNA
tccaccccagggaccacctga

SEQ ID NO: 86541 - RNA, 21 nt, synthetic construct
  source 1..21: mol_type = other RNA
ccaccccagggaccacctgga

SEQ ID NO: 86542 - RNA, 21 nt, synthetic construct
  source 1..21: mol_type = other RNA
agcccagcactacagccacca

SEQ ID NO: 86543 - RNA, 21 nt, synthetic construct
  source 1..21: mol_type = other RNA
ccaccgcctcctccacccgga

SEQ ID NO: 86544 - RNA, 21 nt, synthetic construct
  source 1..21: mol_type = other RNA
accgcctcctccacccgggca

SEQ ID NO: 86545 - RNA, 21 nt, synthetic construct
  source 1..21: mol_type = other RNA
ccgcctcctccacccgggcaa

SEQ ID NO: 86546 - RNA, 21 nt, synthetic construct
  source 1..21: mol_type = other RNA
ctgaccagcacggccaccaca

SEQ ID NO: 86547 - RNA, 21 nt, synthetic construct
  source 1..21: mol_type = other RNA
ccagcacggccaccacaccca

SEQ ID NO: 86548 - RNA, 21 nt, synthetic construct
  source 1..21: mol_type = other RNA
agcacggccaccacacccaca

SEQ ID NO: 86549 - RNA, 21 nt, synthetic construct
  source 1..21: mol_type = other RNA
acggccaccacacccacagta

SEQ ID NO: 86550 - RNA, 21 nt, synthetic construct
  source 1..21: mol_type = other RNA
ggccaccacacccacagtcaa

SEQ ID NO: 86551 - RNA, 21 nt, synthetic construct
  source 1..21: mol_type = other RNA
acacccacagtcatcagctca

SEQ ID NO: 86552 - RNA, 21 nt, synthetic construct
  source 1..21: mol_type = other RNA
acccacagtcatcagctccaa

SEQ ID NO: 86553 - RNA, 21 nt, synthetic construct
  source 1..21: mol_type = other RNA
cccacagtcatcagctccaga

SEQ ID NO: 86554 - RNA, 21 nt, synthetic construct
  source 1..21: mol_type = other RNA
acagtcatcagctccagagca

SEQ ID NO: 86555 - RNA, 21 nt, synthetic construct
  source 1..21: mol_type = other RNA
cagctccagagccactcccta

SEQ ID NO: 86556 - RNA, 21 nt, synthetic construct
  source 1..21: mol_type = other RNA
ccagagccactccctcctcca

SEQ ID NO: 86557 - RNA, 21 nt, synthetic construct
  source 1..21: mol_type = other RNA
cagagccactccctcctccaa

SEQ ID NO: 86558 - RNA, 21 nt, synthetic construct
  source 1..21: mol_type = other RNA
agccactccctcctccagtca

SEQ ID NO: 86559 - RNA, 21 nt, synthetic construct
  source 1..21: mol_type = other RNA
actccctcctccagtccagga

SEQ ID NO: 86560 - RNA, 21 nt, synthetic construct
  source 1..21: mol_type = other RNA
gttacagccatcccctcttca

SEQ ID NO: 86561 - RNA, 21 nt, synthetic construct
  source 1..21: mol_type = other RNA
tcccctcttcctccctgggca

SEQ ID NO: 86562 - RNA, 21 nt, synthetic construct
  source 1..21: mol_type = other RNA
ccctcttcctccctgggcaca

SEQ ID NO: 86563 - RNA, 21 nt, synthetic construct
  source 1..21: mol_type = other RNA
cctcttcctccctgggcacca

SEQ ID NO: 86564 - RNA, 21 nt, synthetic construct
  source 1..21: mol_type = other RNA
ctcttcctccctgggcaccga

SEQ ID NO: 86565 - RNA, 21 nt, synthetic construct
  source 1..21: mol_type = other RNA
tcttcctccctgggcaccgca

SEQ ID NO: 86566 - RNA, 21 nt, synthetic construct
  source 1..21: mol_type = other RNA
cttcctccctgggcaccgcca

SEQ ID NO: 86567 - RNA, 21 nt, synthetic construct
  source 1..21: mol_type = other RNA
cctccctgggcaccgcctgga

SEQ ID NO: 86568 - RNA, 21 nt, synthetic construct
  source 1..21: mol_type = other RNA
tatcacagaccaccacaccca

SEQ ID NO: 86569 - RNA, 21 nt, synthetic construct
  source 1..21: mol_type = other RNA
cggccaccatgtccacagcca

SEQ ID NO: 86570 - RNA, 21 nt, synthetic construct
  source 1..21: mol_type = other RNA
ccaccatgtccacagccacaa

SEQ ID NO: 86571 - RNA, 21 nt, synthetic construct
  source 1..21: mol_type = other RNA
ccatgtccacagccacaccca

SEQ ID NO: 86572 - RNA, 21 nt, synthetic construct
  source 1..21: mol_type = other RNA
ccacagccacaccctcctcta

SEQ ID NO: 86573 - RNA, 21 nt, synthetic construct
  source 1..21: mol_type = other RNA
cagccacaccctcctctacta

SEQ ID NO: 86574 - RNA, 21 nt, synthetic construct
  source 1..21: mol_type = other RNA
ccacaccctcctctactccaa

SEQ ID NO: 86575 - RNA, 21 nt, synthetic construct
  source 1..21: mol_type = other RNA
taccaccacgaccaccacaaa

SEQ ID NO: 86576 - RNA, 21 nt, synthetic construct
  source 1..21: mol_type = other RNA
accaccacgaccaccacaaca

SEQ ID NO: 86577 - RNA, 21 nt, synthetic construct
  source 1..21: mol_type = other RNA
ccaccacgaccaccacaacca

SEQ ID NO: 86578 - RNA, 21 nt, synthetic construct
  source 1..21: mol_type = other RNA
caccacgaccaccacaaccaa

SEQ ID NO: 86579 - RNA, 21 nt, synthetic construct
  source 1..21: mol_type = other RNA
accacgaccaccacaaccaga

SEQ ID NO: 86580 - RNA, 21 nt, synthetic construct
  source 1..21: mol_type = other RNA
accaccacaaccagggccaca

SEQ ID NO: 86581 - RNA, 21 nt, synthetic construct
  source 1..21: mol_type = other RNA
caaccagggccaccggctcta

SEQ ID NO: 86582 - RNA, 21 nt, synthetic construct
  source 1..21: mol_type = other RNA
aaccagggccaccggctctga

SEQ ID NO: 86583 - RNA, 21 nt, synthetic construct
  source 1..21: mol_type = other RNA
gctctgtggccaccccctcca

SEQ ID NO: 86584 - RNA, 21 nt, synthetic construct
  source 1..21: mol_type = other RNA
ctctgtggccaccccctccta

SEQ ID NO: 86585 - RNA, 21 nt, synthetic construct
  source 1..21: mol_type = other RNA
tctgtggccaccccctcctca

SEQ ID NO: 86586 - RNA, 21 nt, synthetic construct
  source 1..21: mol_type = other RNA
ctgtggccaccccctcctcca

SEQ ID NO: 86587 - RNA, 21 nt, synthetic construct
  source 1..21: mol_type = other RNA
tgtggccaccccctcctccaa

SEQ ID NO: 86588 - RNA, 21 nt, synthetic construct
  source 1..21: mol_type = other RNA
accccctcctccaccccagga

SEQ ID NO: 86589 - RNA, 21 nt, synthetic construct
  source 1..21: mol_type = other RNA
ccctcctccaccccaggaaca

SEQ ID NO: 86590 - RNA, 21 nt, synthetic construct
  source 1..21: mol_type = other RNA
aagtgccgactaccacaacca

SEQ ID NO: 86591 - RNA, 21 nt, synthetic construct
  source 1..21: mol_type = other RNA
ccacgggcttcacagccacca

SEQ ID NO: 86592 - RNA, 21 nt, synthetic construct
  source 1..21: mol_type = other RNA
gcttcacagccaccccctcca

SEQ ID NO: 86593 - RNA, 21 nt, synthetic construct
  source 1..21: mol_type = other RNA
tcacagccaccccctcctcca

SEQ ID NO: 86594 - RNA, 21 nt, synthetic construct
  source 1..21: mol_type = other RNA
ctcctccagcccagggacgga

SEQ ID NO: 86595 - RNA, 21 nt, synthetic construct
  source 1..21: mol_type = other RNA
tcctccagcccagggacggca

SEQ ID NO: 86596 - RNA, 21 nt, synthetic construct
  source 1..21: mol_type = other RNA
cctccagtgtggatcagcaca

SEQ ID NO: 86597 - RNA, 21 nt, synthetic construct
  source 1..21: mol_type = other RNA
acggtgaccccctcctccata

SEQ ID NO: 86598 - RNA, 21 nt, synthetic construct
  source 1..21: mol_type = other RNA
gtgaccccctcctccatccca

SEQ ID NO: 86599 - RNA, 21 nt, synthetic construct
  source 1..21: mol_type = other RNA
gaccccctcctccatcccgga

SEQ ID NO: 86600 - RNA, 21 nt, synthetic construct
  source 1..21: mol_type = other RNA
ccccctcctccatcccgggga

SEQ ID NO: 86601 - RNA, 21 nt, synthetic construct
  source 1..21: mol_type = other RNA
ccctcctccatcccggggaca

SEQ ID NO: 86602 - RNA, 21 nt, synthetic construct
  source 1..21: mol_type = other RNA
gccacagtgctgaccaccaca

SEQ ID NO: 86603 - RNA, 21 nt, synthetic construct
  source 1..21: mol_type = other RNA
tgctgaccaccaccaccacaa

SEQ ID NO: 86604 - RNA, 21 nt, synthetic construct
  source 1..21: mol_type = other RNA
gctgaccaccaccaccacaaa

SEQ ID NO: 86605 - RNA, 21 nt, synthetic construct
  source 1..21: mol_type = other RNA
accaccaccaccacaactgta

SEQ ID NO: 86606 - RNA, 21 nt, synthetic construct
  source 1..21: mol_type = other RNA
ccaccacaactgtggccacta

SEQ ID NO: 86607 - RNA, 21 nt, synthetic construct
  source 1..21: mol_type = other RNA
gtggccactggttctatggca

SEQ ID NO: 86608 - RNA, 21 nt, synthetic construct
  source 1..21: mol_type = other RNA
cactgaccaccacggccacta

SEQ ID NO: 86609 - RNA, 21 nt, synthetic construct
  source 1..21: mol_type = other RNA
ccaccggctccaccaccaaca

SEQ ID NO: 86610 - RNA, 21 nt, synthetic construct
  source 1..21: mol_type = other RNA
ccaccaccaacccctcctcaa

SEQ ID NO: 86611 - RNA, 21 nt, synthetic construct
  source 1..21: mol_type = other RNA
accaccaacccctcctcaaca

SEQ ID NO: 86612 - RNA, 21 nt, synthetic construct
  source 1..21: mol_type = other RNA
accaacccctcctcaactcca

SEQ ID NO: 86613 - RNA, 21 nt, synthetic construct
  source 1..21: mol_type = other RNA
ccaacccctcctcaactccaa

SEQ ID NO: 86614 - RNA, 21 nt, synthetic construct
  source 1..21: mol_type = other RNA
acccctcctcaactccaggga

SEQ ID NO: 86615 - RNA, 21 nt, synthetic construct
  source 1..21: mol_type = other RNA
ccctcctcaactccagggaca

SEQ ID NO: 86616 - RNA, 21 nt, synthetic construct
  source 1..21: mol_type = other RNA
ctcctcaactccagggacaaa

SEQ ID NO: 86617 - RNA, 21 nt, synthetic construct
  source 1..21: mol_type = other RNA
ggacaactcccatccccccaa

SEQ ID NO: 86618 - RNA, 21 nt, synthetic construct
  source 1..21: mol_type = other RNA
acaactcccatccccccagta

SEQ ID NO: 86619 - RNA, 21 nt, synthetic construct
  source 1..21: mol_type = other RNA
ctcccatccccccagtgctga

SEQ ID NO: 86620 - RNA, 21 nt, synthetic construct
  source 1..21: mol_type = other RNA
ccccccagtgctgaccaccaa

SEQ ID NO: 86621 - RNA, 21 nt, synthetic construct
  source 1..21: mol_type = other RNA
ccccagtgctgaccaccacca

SEQ ID NO: 86622 - RNA, 21 nt, synthetic construct
  source 1..21: mol_type = other RNA
gctgaccaccaccgccaccaa

SEQ ID NO: 86623 - RNA, 21 nt, synthetic construct
  source 1..21: mol_type = other RNA
accaccaccgccaccacacca

SEQ ID NO: 86624 - RNA, 21 nt, synthetic construct
  source 1..21: mol_type = other RNA
ccaccgccaccacacctgcaa

SEQ ID NO: 86625 - RNA, 21 nt, synthetic construct
  source 1..21: mol_type = other RNA
accgccaccacacctgcagca

SEQ ID NO: 86626 - RNA, 21 nt, synthetic construct
  source 1..21: mol_type = other RNA
ccgccaccacacctgcagcca

SEQ ID NO: 86627 - RNA, 21 nt, synthetic construct
  source 1..21: mol_type = other RNA
acacctgcagccaccagcaga

SEQ ID NO: 86628 - RNA, 21 nt, synthetic construct
  source 1..21: mol_type = other RNA
tgcagccaccagcagcacaga

SEQ ID NO: 86629 - RNA, 21 nt, synthetic construct
  source 1..21: mol_type = other RNA
agccaccagcagcacagtgaa

SEQ ID NO: 86630 - RNA, 21 nt, synthetic construct
  source 1..21: mol_type = other RNA
cagcacagtgactccctccta

SEQ ID NO: 86631 - RNA, 21 nt, synthetic construct
  source 1..21: mol_type = other RNA
agcacagtgactccctcctca

SEQ ID NO: 86632 - RNA, 21 nt, synthetic construct
  source 1..21: mol_type = other RNA
gtgactccctcctctgcccta

SEQ ID NO: 86633 - RNA, 21 nt, synthetic construct
  source 1..21: mol_type = other RNA
acccacacacccccagtgcca

SEQ ID NO: 86634 - RNA, 21 nt, synthetic construct
  source 1..21: mol_type = other RNA
ccacacacccccagtgccgaa

SEQ ID NO: 86635 - RNA, 21 nt, synthetic construct
  source 1..21: mol_type = other RNA
gaacaccacggccaccacaca

SEQ ID NO: 86636 - RNA, 21 nt, synthetic construct
  source 1..21: mol_type = other RNA
cggccaccacacacgggcgga

SEQ ID NO: 86637 - RNA, 21 nt, synthetic construct
  source 1..21: mol_type = other RNA
cggtccctgccccccagcaga

SEQ ID NO: 86638 - RNA, 21 nt, synthetic construct
  source 1..21: mol_type = other RNA
ggtccctgccccccagcagta

SEQ ID NO: 86639 - RNA, 21 nt, synthetic construct
  source 1..21: mol_type = other RNA
tccctgccccccagcagtcca

SEQ ID NO: 86640 - RNA, 21 nt, synthetic construct
  source 1..21: mol_type = other RNA
ccctgccccccagcagtccca

SEQ ID NO: 86641 - RNA, 21 nt, synthetic construct
  source 1..21: mol_type = other RNA
tgccccccagcagtccccaca

SEQ ID NO: 86642 - RNA, 21 nt, synthetic construct
  source 1..21: mol_type = other RNA
ttcccacaccccagcagcaaa

SEQ ID NO: 86643 - RNA, 21 nt, synthetic construct
  source 1..21: mol_type = other RNA
accccagcagcaaccaccaga

SEQ ID NO: 86644 - RNA, 21 nt, synthetic construct
  source 1..21: mol_type = other RNA
gcagcaaccaccagtaccaca

SEQ ID NO: 86645 - RNA, 21 nt, synthetic construct
  source 1..21: mol_type = other RNA
ctgtccagccctcaccctaga

SEQ ID NO: 86646 - RNA, 21 nt, synthetic construct
  source 1..21: mol_type = other RNA
agtcacccccttctccaggga

SEQ ID NO: 86647 - RNA, 21 nt, synthetic construct
  source 1..21: mol_type = other RNA
gtcacccccttctccagggaa

SEQ ID NO: 86648 - RNA, 21 nt, synthetic construct
  source 1..21: mol_type = other RNA
tcacccccttctccagggaca

SEQ ID NO: 86649 - RNA, 21 nt, synthetic construct
  source 1..21: mol_type = other RNA
cacccccttctccagggacga

SEQ ID NO: 86650 - RNA, 21 nt, synthetic construct
  source 1..21: mol_type = other RNA
cccccttctccagggacgaca

SEQ ID NO: 86651 - RNA, 21 nt, synthetic construct
  source 1..21: mol_type = other RNA
ccttctccagggacgaccaca

SEQ ID NO: 86652 - RNA, 21 nt, synthetic construct
  source 1..21: mol_type = other RNA
cgaccaccccgggccacacca

SEQ ID NO: 86653 - RNA, 21 nt, synthetic construct
  source 1..21: mol_type = other RNA
acaccaggggcacctccagga

SEQ ID NO: 86654 - RNA, 21 nt, synthetic construct
  source 1..21: mol_type = other RNA
caccaggggcacctccaggaa

SEQ ID NO: 86655 - RNA, 21 nt, synthetic construct
  source 1..21: mol_type = other RNA
aggggcacctccaggaccaca

SEQ ID NO: 86656 - RNA, 21 nt, synthetic construct
  source 1..21: mol_type = other RNA
gggcacctccaggaccacaga

SEQ ID NO: 86657 - RNA, 21 nt, synthetic construct
  source 1..21: mol_type = other RNA
ggcacctccaggaccacagca

SEQ ID NO: 86658 - RNA, 21 nt, synthetic construct
  source 1..21: mol_type = other RNA
gcacctccaggaccacagcca

SEQ ID NO: 86659 - RNA, 21 nt, synthetic construct
  source 1..21: mol_type = other RNA
cctccaggaccacagccacaa

SEQ ID NO: 86660 - RNA, 21 nt, synthetic construct
  source 1..21: mol_type = other RNA
caggaccacagccacagccaa

SEQ ID NO: 86661 - RNA, 21 nt, synthetic construct
  source 1..21: mol_type = other RNA
ggtggtgaccacgggctgtga

SEQ ID NO: 86662 - RNA, 21 nt, synthetic construct
  source 1..21: mol_type = other RNA
tggtcagagtggctggactaa

SEQ ID NO: 86663 - RNA, 21 nt, synthetic construct
  source 1..21: mol_type = other RNA
gcagtctgtgagcagccccta

SEQ ID NO: 86664 - RNA, 21 nt, synthetic construct
  source 1..21: mol_type = other RNA
ccgtgcccaggcccagcctga

SEQ ID NO: 86665 - RNA, 21 nt, synthetic construct
  source 1..21: mol_type = other RNA
atgcagcctggactttggcca

SEQ ID NO: 86666 - RNA, 21 nt, synthetic construct
  source 1..21: mol_type = other RNA
tgcagcctggactttggccta

SEQ ID NO: 86667 - RNA, 21 nt, synthetic construct
  source 1..21: mol_type = other RNA
agcctggactttggcctggta

SEQ ID NO: 86668 - RNA, 21 nt, synthetic construct
  source 1..21: mol_type = other RNA
ggcctggtctgcaggaaccga

SEQ ID NO: 86669 - RNA, 21 nt, synthetic construct
  source 1..21: mol_type = other RNA
gccaccagctctacggccaca

SEQ ID NO: 86670 - RNA, 21 nt, synthetic construct
  source 1..21: mol_type = other RNA
caaagctgaccacaacagcca

SEQ ID NO: 86671 - RNA, 21 nt, synthetic construct
  source 1..21: mol_type = other RNA
cgactgagtccactggatcca

SEQ ID NO: 86672 - RNA, 21 nt, synthetic construct
  source 1..21: mol_type = other RNA
ccccgtcctccaccccaggga

SEQ ID NO: 86673 - RNA, 21 nt, synthetic construct
  source 1..21: mol_type = other RNA
cccgtcctccaccccagggaa

SEQ ID NO: 86674 - RNA, 21 nt, synthetic construct
  source 1..21: mol_type = other RNA
cgtcctccaccccagggacca

SEQ ID NO: 86675 - RNA, 21 nt, synthetic construct
  source 1..21: mol_type = other RNA
gtcctccaccccagggaccaa

SEQ ID NO: 86676 - RNA, 21 nt, synthetic construct
  source 1..21: mol_type = other RNA
cctccaccccagggaccacca

SEQ ID NO: 86677 - RNA, 21 nt, synthetic construct
  source 1..21: mol_type = other RNA
ctccaccccagggaccaccta

SEQ ID NO: 86678 - RNA, 21 nt, synthetic construct
  source 1..21: mol_type = other RNA
tccaccccagggaccacctga

SEQ ID NO: 86679 - RNA, 21 nt, synthetic construct
  source 1..21: mol_type = other RNA
ccaccccagggaccacctgga

SEQ ID NO: 86680 - RNA, 21 nt, synthetic construct
  source 1..21: mol_type = other RNA
ccaccgcctcctccacccaga

SEQ ID NO: 86681 - RNA, 21 nt, synthetic construct
  source 1..21: mol_type = other RNA
tcctccacccaggcaactgca

SEQ ID NO: 86682 - RNA, 21 nt, synthetic construct
  source 1..21: mol_type = other RNA
acacccacagtcaccagctca

SEQ ID NO: 86683 - RNA, 21 nt, synthetic construct
  source 1..21: mol_type = other RNA
acccacagtcaccagctccaa

SEQ ID NO: 86684 - RNA, 21 nt, synthetic construct
  source 1..21: mol_type = other RNA
cccacagtcaccagctccaaa

SEQ ID NO: 86685 - RNA, 21 nt, synthetic construct
  source 1..21: mol_type = other RNA
tcaccagctccaaagccacta

SEQ ID NO: 86686 - RNA, 21 nt, synthetic construct
  source 1..21: mol_type = other RNA
gctccaaagccactcccttca

SEQ ID NO: 86687 - RNA, 21 nt, synthetic construct
  source 1..21: mol_type = other RNA
tccaaagccactcccttctca

SEQ ID NO: 86688 - RNA, 21 nt, synthetic construct
  source 1..21: mol_type = other RNA
tacagccatcccctcctccta

SEQ ID NO: 86689 - RNA, 21 nt, synthetic construct
  source 1..21: mol_type = other RNA
acagccatcccctcctcctca

SEQ ID NO: 86690 - RNA, 21 nt, synthetic construct
  source 1..21: mol_type = other RNA
cctcctcctccctgggcacca

SEQ ID NO: 86691 - RNA, 21 nt, synthetic construct
  source 1..21: mol_type = other RNA
tcctccctgggcaccacctga

SEQ ID NO: 86692 - RNA, 21 nt, synthetic construct
  source 1..21: mol_type = other RNA
tccctgggcaccacctggaca

SEQ ID NO: 86693 - RNA, 21 nt, synthetic construct
  source 1..21: mol_type = other RNA
cctgggcaccacctggaccca

SEQ ID NO: 86694 - RNA, 21 nt, synthetic construct
  source 1..21: mol_type = other RNA
ctgggcaccacctggacccga

SEQ ID NO: 86695 - RNA, 21 nt, synthetic construct
  source 1..21: mol_type = other RNA
tgggcaccacctggacccgca

SEQ ID NO: 86696 - RNA, 21 nt, synthetic construct
  source 1..21: mol_type = other RNA
gggcaccacctggacccgcca

SEQ ID NO: 86697 - RNA, 21 nt, synthetic construct
  source 1..21: mol_type = other RNA
tatcacagaccaccacaccca

SEQ ID NO: 86698 - RNA, 21 nt, synthetic construct
  source 1..21: mol_type = other RNA
cggccaccatgtccacagcca

SEQ ID NO: 86699 - RNA, 21 nt, synthetic construct
  source 1..21: mol_type = other RNA
ccaccatgtccacagccacaa

SEQ ID NO: 86700 - RNA, 21 nt, synthetic construct
  source 1..21: mol_type = other RNA
ccatgtccacagccacaccca

SEQ ID NO: 86701 - RNA, 21 nt, synthetic construct
  source 1..21: mol_type = other RNA
cacaccctcctccactccaga

SEQ ID NO: 86702 - RNA, 21 nt, synthetic construct
  source 1..21: mol_type = other RNA
actgcccacacctccacagta

SEQ ID NO: 86703 - RNA, 21 nt, synthetic construct
  source 1..21: mol_type = other RNA
caccacggccaccacaaccaa

SEQ ID NO: 86704 - RNA, 21 nt, synthetic construct
  source 1..21: mol_type = other RNA
gccaccacaaccagggccaca

SEQ ID NO: 86705 - RNA, 21 nt, synthetic construct
  source 1..21: mol_type = other RNA
caaccagggccaccggctcta

SEQ ID NO: 86706 - RNA, 21 nt, synthetic construct
  source 1..21: mol_type = other RNA
aaccagggccaccggctctga

SEQ ID NO: 86707 - RNA, 21 nt, synthetic construct
  source 1..21: mol_type = other RNA
gtggccaccccctcttccaca

SEQ ID NO: 86708 - RNA, 21 nt, synthetic construct
  source 1..21: mol_type = other RNA
tggccaccccctcttccacca

SEQ ID NO: 86709 - RNA, 21 nt, synthetic construct
  source 1..21: mol_type = other RNA
ggccaccccctcttccaccca

SEQ ID NO: 86710 - RNA, 21 nt, synthetic construct
  source 1..21: mol_type = other RNA
aagtgccgactaccacaacca

SEQ ID NO: 86711 - RNA, 21 nt, synthetic construct
  source 1..21: mol_type = other RNA
gcttcacagtcaccccctcca

SEQ ID NO: 86712 - RNA, 21 nt, synthetic construct
  source 1..21: mol_type = other RNA
tcaccccctcctccagcccaa

SEQ ID NO: 86713 - RNA, 21 nt, synthetic construct
  source 1..21: mol_type = other RNA
ctcctccagcccagggacgga

SEQ ID NO: 86714 - RNA, 21 nt, synthetic construct
  source 1..21: mol_type = other RNA
tcctccagcccagggacggca

SEQ ID NO: 86715 - RNA, 21 nt, synthetic construct
  source 1..21: mol_type = other RNA
cctccagtgtggatcagcaca

SEQ ID NO: 86716 - RNA, 21 nt, synthetic construct
  source 1..21: mol_type = other RNA
ccaccacacccacaaccagta

SEQ ID NO: 86717 - RNA, 21 nt, synthetic construct
  source 1..21: mol_type = other RNA
caaccagtggctccacggtga

SEQ ID NO: 86718 - RNA, 21 nt, synthetic construct
  source 1..21: mol_type = other RNA
cgtcccggggaccacccacaa

SEQ ID NO: 86719 - RNA, 21 nt, synthetic construct
  source 1..21: mol_type = other RNA
cccccacagtgctgaccacca

SEQ ID NO: 86720 - RNA, 21 nt, synthetic construct
  source 1..21: mol_type = other RNA
ccccacagtgctgaccaccaa

SEQ ID NO: 86721 - RNA, 21 nt, synthetic construct
  source 1..21: mol_type = other RNA
cccacagtgctgaccaccaca

SEQ ID NO: 86722 - RNA, 21 nt, synthetic construct
  source 1..21: mol_type = other RNA
tgctgaccaccaccaccacaa

SEQ ID NO: 86723 - RNA, 21 nt, synthetic construct
  source 1..21: mol_type = other RNA
gctgaccaccaccaccacaaa

SEQ ID NO: 86724 - RNA, 21 nt, synthetic construct
  source 1..21: mol_type = other RNA
accaccaccaccacaactgta

SEQ ID NO: 86725 - RNA, 21 nt, synthetic construct
  source 1..21: mol_type = other RNA
ccaccacaactgtggccacta

SEQ ID NO: 86726 - RNA, 21 nt, synthetic construct
  source 1..21: mol_type = other RNA
gtggccactggttctatggca

SEQ ID NO: 86727 - RNA, 21 nt, synthetic construct
  source 1..21: mol_type = other RNA
acggccaccggctccaccaca

SEQ ID NO: 86728 - RNA, 21 nt, synthetic construct
  source 1..21: mol_type = other RNA
ccaccggctccaccaccaaca

SEQ ID NO: 86729 - RNA, 21 nt, synthetic construct
  source 1..21: mol_type = other RNA
ccaccaccaacccctcctcaa

SEQ ID NO: 86730 - RNA, 21 nt, synthetic construct
  source 1..21: mol_type = other RNA
accaccaacccctcctcaaca

SEQ ID NO: 86731 - RNA, 21 nt, synthetic construct
  source 1..21: mol_type = other RNA
accaacccctcctcaactcca

SEQ ID NO: 86732 - RNA, 21 nt, synthetic construct
  source 1..21: mol_type = other RNA
ccaacccctcctcaactccaa

SEQ ID NO: 86733 - RNA, 21 nt, synthetic construct
  source 1..21: mol_type = other RNA
acccctcctcaactccaggga

SEQ ID NO: 86734 - RNA, 21 nt, synthetic construct
  source 1..21: mol_type = other RNA
ccctcctcaactccagggaca

SEQ ID NO: 86735 - RNA, 21 nt, synthetic construct
  source 1..21: mol_type = other RNA
ctcctcaactccagggacaaa

SEQ ID NO: 86736 - RNA, 21 nt, synthetic construct
  source 1..21: mol_type = other RNA
ccccccagtgctgaccaccaa

SEQ ID NO: 86737 - RNA, 21 nt, synthetic construct
  source 1..21: mol_type = other RNA
ccccagtgctgaccaccacca

SEQ ID NO: 86738 - RNA, 21 nt, synthetic construct
  source 1..21: mol_type = other RNA
gctgaccaccaccgccaccaa

SEQ ID NO: 86739 - RNA, 21 nt, synthetic construct
  source 1..21: mol_type = other RNA
accaccaccgccaccacacca

SEQ ID NO: 86740 - RNA, 21 nt, synthetic construct
  source 1..21: mol_type = other RNA
ccaccgccaccacacctgcaa

SEQ ID NO: 86741 - RNA, 21 nt, synthetic construct
  source 1..21: mol_type = other RNA
accgccaccacacctgcagca

SEQ ID NO: 86742 - RNA, 21 nt, synthetic construct
  source 1..21: mol_type = other RNA
ccgccaccacacctgcagcca

SEQ ID NO: 86743 - RNA, 21 nt, synthetic construct
  source 1..21: mol_type = other RNA
acacctgcagccaccagcaga

SEQ ID NO: 86744 - RNA, 21 nt, synthetic construct
  source 1..21: mol_type = other RNA
tgcagccaccagcagcacaga

SEQ ID NO: 86745 - RNA, 21 nt, synthetic construct
  source 1..21: mol_type = other RNA
agccaccagcagcacagtgaa

SEQ ID NO: 86746 - RNA, 21 nt, synthetic construct
  source 1..21: mol_type = other RNA
cagcacagtgactccctccta

SEQ ID NO: 86747 - RNA, 21 nt, synthetic construct
  source 1..21: mol_type = other RNA
agcacagtgactccctcctca

SEQ ID NO: 86748 - RNA, 21 nt, synthetic construct
  source 1..21: mol_type = other RNA
gtgactccctcctctgcccta

SEQ ID NO: 86749 - RNA, 21 nt, synthetic construct
  source 1..21: mol_type = other RNA
acccacacacccccagtgcca

SEQ ID NO: 86750 - RNA, 21 nt, synthetic construct
  source 1..21: mol_type = other RNA
ccacacacccccagtgccgaa

SEQ ID NO: 86751 - RNA, 21 nt, synthetic construct
  source 1..21: mol_type = other RNA
gaacaccacggccaccacaca

SEQ ID NO: 86752 - RNA, 21 nt, synthetic construct
  source 1..21: mol_type = other RNA
tgtcccccagcagtccccaca

SEQ ID NO: 86753 - RNA, 21 nt, synthetic construct
  source 1..21: mol_type = other RNA
ttcggccacctcaggcaccta

SEQ ID NO: 86754 - RNA, 21 nt, synthetic construct
  source 1..21: mol_type = other RNA
ggccacctcaggcaccttgga

SEQ ID NO: 86755 - RNA, 21 nt, synthetic construct
  source 1..21: mol_type = other RNA
cctcaggcaccttgggcacca

SEQ ID NO: 86756 - RNA, 21 nt, synthetic construct
  source 1..21: mol_type = other RNA
ggcaccttgggcaccacccaa

SEQ ID NO: 86757 - RNA, 21 nt, synthetic construct
  source 1..21: mol_type = other RNA
gggacttcccacaccccagca

SEQ ID NO: 86758 - RNA, 21 nt, synthetic construct
  source 1..21: mol_type = other RNA
ttcccacaccccagcagcaaa

SEQ ID NO: 86759 - RNA, 21 nt, synthetic construct
  source 1..21: mol_type = other RNA
ctgtccagccctcaccctaga

SEQ ID NO: 86760 - RNA, 21 nt, synthetic construct
  source 1..21: mol_type = other RNA
cgaccaccccgggccacacca

SEQ ID NO: 86761 - RNA, 21 nt, synthetic construct
  source 1..21: mol_type = other RNA
cgggccacaccacggccacca

SEQ ID NO: 86762 - RNA, 21 nt, synthetic construct
  source 1..21: mol_type = other RNA
cacaccacggccacctccaga

SEQ ID NO: 86763 - RNA, 21 nt, synthetic construct
  source 1..21: mol_type = other RNA
ccacggccacggccacaccca

SEQ ID NO: 86764 - RNA, 21 nt, synthetic construct
  source 1..21: mol_type = other RNA
cacggccacggccacacccaa

SEQ ID NO: 86765 - RNA, 21 nt, synthetic construct
  source 1..21: mol_type = other RNA
acggccacggccacacccaga

SEQ ID NO: 86766 - RNA, 21 nt, synthetic construct
  source 1..21: mol_type = other RNA
ggccacggccacacccagcaa

SEQ ID NO: 86767 - RNA, 21 nt, synthetic construct
  source 1..21: mol_type = other RNA
gccacggccacacccagcaaa

SEQ ID NO: 86768 - RNA, 21 nt, synthetic construct
  source 1..21: mol_type = other RNA
ggtggtgaccacgggctgtga

SEQ ID NO: 86769 - RNA, 21 nt, synthetic construct
  source 1..21: mol_type = other RNA
tggtcagagtggctggactaa

SEQ ID NO: 86770 - RNA, 21 nt, synthetic construct
  source 1..21: mol_type = other RNA
gtgcggccggaggggccgtca

SEQ ID NO: 86771 - RNA, 21 nt, synthetic construct
  source 1..21: mol_type = other RNA
ccgtgcccaggcccagcctga

SEQ ID NO: 86772 - RNA, 21 nt, synthetic construct
  source 1..21: mol_type = other RNA
ctggtgtccccctgggggaga

SEQ ID NO: 86773 - RNA, 21 nt, synthetic construct
  source 1..21: mol_type = other RNA
atgcagcctggactttggcca

SEQ ID NO: 86774 - RNA, 21 nt, synthetic construct
  source 1..21: mol_type = other RNA
tgcagcctggactttggccta

SEQ ID NO: 86775 - RNA, 21 nt, synthetic construct
  source 1..21: mol_type = other RNA
agcctggactttggcctggta

SEQ ID NO: 86776 - RNA, 21 nt, synthetic construct
  source 1..21: mol_type = other RNA
ggcctggtctgcaggaaccga

SEQ ID NO: 86777 - RNA, 21 nt, synthetic construct
  source 1..21: mol_type = other RNA
tacggccatgccctcctccaa

SEQ ID NO: 86778 - RNA, 21 nt, synthetic construct
  source 1..21: mol_type = other RNA
ggccatgccctcctccactca

SEQ ID NO: 86779 - RNA, 21 nt, synthetic construct
  source 1..21: mol_type = other RNA
caccccgtcctccaccccgga

SEQ ID NO: 86780 - RNA, 21 nt, synthetic construct
  source 1..21: mol_type = other RNA
gggaacagctccccctcccaa

SEQ ID NO: 86781 - RNA, 21 nt, synthetic construct
  source 1..21: mol_type = other RNA
agcccggccaccacacccaca

SEQ ID NO: 86782 - RNA, 21 nt, synthetic construct
  source 1..21: mol_type = other RNA
ttccaaagccacttcctccta

SEQ ID NO: 86783 - RNA, 21 nt, synthetic construct
  source 1..21: mol_type = other RNA
aaagccacttcctcctccaga

SEQ ID NO: 86784 - RNA, 21 nt, synthetic construct
  source 1..21: mol_type = other RNA
agccacttcctcctccagtca

SEQ ID NO: 86785 - RNA, 21 nt, synthetic construct
  source 1..21: mol_type = other RNA
gccacttcctcctccagtcca

SEQ ID NO: 86786 - RNA, 21 nt, synthetic construct
  source 1..21: mol_type = other RNA
ccacttcctcctccagtccaa

SEQ ID NO: 86787 - RNA, 21 nt, synthetic construct
  source 1..21: mol_type = other RNA
acttcctcctccagtccaaga

SEQ ID NO: 86788 - RNA, 21 nt, synthetic construct
  source 1..21: mol_type = other RNA
ttcctcctccagtccaaggaa

SEQ ID NO: 86789 - RNA, 21 nt, synthetic construct
  source 1..21: mol_type = other RNA
acacccatcccctcctccaca

SEQ ID NO: 86790 - RNA, 21 nt, synthetic construct
  source 1..21: mol_type = other RNA
tcccctcctccacccttggga

SEQ ID NO: 86791 - RNA, 21 nt, synthetic construct
  source 1..21: mol_type = other RNA
tcctccacccttgggaccaca

SEQ ID NO: 86792 - RNA, 21 nt, synthetic construct
  source 1..21: mol_type = other RNA
accgggaccctcccagaacaa

SEQ ID NO: 86793 - RNA, 21 nt, synthetic construct
  source 1..21: mol_type = other RNA
cccgtggccaccatgtccaca

SEQ ID NO: 86794 - RNA, 21 nt, synthetic construct
  source 1..21: mol_type = other RNA
acccctcctccactccggaga

SEQ ID NO: 86795 - RNA, 21 nt, synthetic construct
  source 1..21: mol_type = other RNA
accacccacacctccacagta

SEQ ID NO: 86796 - RNA, 21 nt, synthetic construct
  source 1..21: mol_type = other RNA
ctgaccacgaaggccaccaca

SEQ ID NO: 86797 - RNA, 21 nt, synthetic construct
  source 1..21: mol_type = other RNA
tccacgtccaccccctcctca

SEQ ID NO: 86798 - RNA, 21 nt, synthetic construct
  source 1..21: mol_type = other RNA
ccacgtccaccccctcctcca

SEQ ID NO: 86799 - RNA, 21 nt, synthetic construct
  source 1..21: mol_type = other RNA
cacgtccaccccctcctccaa

SEQ ID NO: 86800 - RNA, 21 nt, synthetic construct
  source 1..21: mol_type = other RNA
ccaccccctcctccactccga

SEQ ID NO: 86801 - RNA, 21 nt, synthetic construct
  source 1..21: mol_type = other RNA
gcagccactacaactgcagca

SEQ ID NO: 86802 - RNA, 21 nt, synthetic construct
  source 1..21: mol_type = other RNA
cagccactacaactgcagcca

SEQ ID NO: 86803 - RNA, 21 nt, synthetic construct
  source 1..21: mol_type = other RNA
tacaactgcagccactggcca

SEQ ID NO: 86804 - RNA, 21 nt, synthetic construct
  source 1..21: mol_type = other RNA
acaactgcagccactggccca

SEQ ID NO: 86805 - RNA, 21 nt, synthetic construct
  source 1..21: mol_type = other RNA
tgcagccactggccccacgga

SEQ ID NO: 86806 - RNA, 21 nt, synthetic construct
  source 1..21: mol_type = other RNA
gccactggccccacggccaca

SEQ ID NO: 86807 - RNA, 21 nt, synthetic construct
  source 1..21: mol_type = other RNA
tggccccacggccaccccgta

SEQ ID NO: 86808 - RNA, 21 nt, synthetic construct
  source 1..21: mol_type = other RNA
ccccgtcctccaccccaggga

SEQ ID NO: 86809 - RNA, 21 nt, synthetic construct
  source 1..21: mol_type = other RNA
cccgtcctccaccccagggaa

SEQ ID NO: 86810 - RNA, 21 nt, synthetic construct
  source 1..21: mol_type = other RNA
cgtcctccaccccagggacca

SEQ ID NO: 86811 - RNA, 21 nt, synthetic construct
  source 1..21: mol_type = other RNA
gtcctccaccccagggaccaa

SEQ ID NO: 86812 - RNA, 21 nt, synthetic construct
  source 1..21: mol_type = other RNA
cctccaccccagggaccacca

SEQ ID NO: 86813 - RNA, 21 nt, synthetic construct
  source 1..21: mol_type = other RNA
ctccaccccagggaccaccta

SEQ ID NO: 86814 - RNA, 21 nt, synthetic construct
  source 1..21: mol_type = other RNA
tccaccccagggaccacctga

SEQ ID NO: 86815 - RNA, 21 nt, synthetic construct
  source 1..21: mol_type = other RNA
ccaccccagggaccacctgga

SEQ ID NO: 86816 - RNA, 21 nt, synthetic construct
  source 1..21: mol_type = other RNA
ccccgtcctccaccccaggga

SEQ ID NO: 86817 - RNA, 21 nt, synthetic construct
  source 1..21: mol_type = other RNA
cccgtcctccaccccagggaa

SEQ ID NO: 86818 - RNA, 21 nt, synthetic construct
  source 1..21: mol_type = other RNA
cgtcctccaccccagggacca

SEQ ID NO: 86819 - RNA, 21 nt, synthetic construct
  source 1..21: mol_type = other RNA
gtcctccaccccagggaccaa

SEQ ID NO: 86820 - RNA, 21 nt, synthetic construct
  source 1..21: mol_type = other RNA
cctccaccccagggaccacca

SEQ ID NO: 86821 - RNA, 21 nt, synthetic construct
  source 1..21: mol_type = other RNA
ctccaccccagggaccaccta

SEQ ID NO: 86822 - RNA, 21 nt, synthetic construct
  source 1..21: mol_type = other RNA
tccaccccagggaccacctga

SEQ ID NO: 86823 - RNA, 21 nt, synthetic construct
  source 1..21: mol_type = other RNA
ccaccccagggaccacctgga

SEQ ID NO: 86824 - RNA, 21 nt, synthetic construct
  source 1..21: mol_type = other RNA
ccaccgcctcctccacccaga

SEQ ID NO: 86825 - RNA, 21 nt, synthetic construct
  source 1..21: mol_type = other RNA
tcctccacccaggcaactgca

SEQ ID NO: 86826 - RNA, 21 nt, synthetic construct
  source 1..21: mol_type = other RNA
acacccacagtcaccagctca

SEQ ID NO: 86827 - RNA, 21 nt, synthetic construct
  source 1..21: mol_type = other RNA
acccacagtcaccagctccaa

SEQ ID NO: 86828 - RNA, 21 nt, synthetic construct
  source 1..21: mol_type = other RNA
cccacagtcaccagctccaaa

SEQ ID NO: 86829 - RNA, 21 nt, synthetic construct
  source 1..21: mol_type = other RNA
tcaccagctccaaagccacta

SEQ ID NO: 86830 - RNA, 21 nt, synthetic construct
  source 1..21: mol_type = other RNA
tccaaagccactccctcctca

SEQ ID NO: 86831 - RNA, 21 nt, synthetic construct
  source 1..21: mol_type = other RNA
ccaaagccactccctcctcca

SEQ ID NO: 86832 - RNA, 21 nt, synthetic construct
  source 1..21: mol_type = other RNA
agccactccctcctccagtca

SEQ ID NO: 86833 - RNA, 21 nt, synthetic construct
  source 1..21: mol_type = other RNA
actccctcctccagtccagga

SEQ ID NO: 86834 - RNA, 21 nt, synthetic construct
  source 1..21: mol_type = other RNA
tacagccatcccctcctccta

SEQ ID NO: 86835 - RNA, 21 nt, synthetic construct
  source 1..21: mol_type = other RNA
acagccatcccctcctcctca

SEQ ID NO: 86836 - RNA, 21 nt, synthetic construct
  source 1..21: mol_type = other RNA
cctcctcctccctgggcacca

SEQ ID NO: 86837 - RNA, 21 nt, synthetic construct
  source 1..21: mol_type = other RNA
tcctccctgggcaccacctga

SEQ ID NO: 86838 - RNA, 21 nt, synthetic construct
  source 1..21: mol_type = other RNA
tccctgggcaccacctggaca

SEQ ID NO: 86839 - RNA, 21 nt, synthetic construct
  source 1..21: mol_type = other RNA
cctgggcaccacctggaccca

SEQ ID NO: 86840 - RNA, 21 nt, synthetic construct
  source 1..21: mol_type = other RNA
ctgggcaccacctggacccga

SEQ ID NO: 86841 - RNA, 21 nt, synthetic construct
  source 1..21: mol_type = other RNA
tgggcaccacctggacccgca

SEQ ID NO: 86842 - RNA, 21 nt, synthetic construct
  source 1..21: mol_type = other RNA
gggcaccacctggacccgcca

SEQ ID NO: 86843 - RNA, 21 nt, synthetic construct
  source 1..21: mol_type = other RNA
tatcacagaccaccacaccca

SEQ ID NO: 86844 - RNA, 21 nt, synthetic construct
  source 1..21: mol_type = other RNA
cggccaccatgtccacagcca

SEQ ID NO: 86845 - RNA, 21 nt, synthetic construct
  source 1..21: mol_type = other RNA
ccaccatgtccacagccacaa

SEQ ID NO: 86846 - RNA, 21 nt, synthetic construct
  source 1..21: mol_type = other RNA
ccatgtccacagccacaccca

SEQ ID NO: 86847 - RNA, 21 nt, synthetic construct
  source 1..21: mol_type = other RNA
cacaccctcctccactccaga

SEQ ID NO: 86848 - RNA, 21 nt, synthetic construct
  source 1..21: mol_type = other RNA
taccgccacggccaccacaaa

SEQ ID NO: 86849 - RNA, 21 nt, synthetic construct
  source 1..21: mol_type = other RNA
gctctgtggccaccccctcca

SEQ ID NO: 86850 - RNA, 21 nt, synthetic construct
  source 1..21: mol_type = other RNA
ctctgtggccaccccctccta

SEQ ID NO: 86851 - RNA, 21 nt, synthetic construct
  source 1..21: mol_type = other RNA
tctgtggccaccccctcctca

SEQ ID NO: 86852 - RNA, 21 nt, synthetic construct
  source 1..21: mol_type = other RNA
ctgtggccaccccctcctcca

SEQ ID NO: 86853 - RNA, 21 nt, synthetic construct
  source 1..21: mol_type = other RNA
tgtggccaccccctcctccaa

SEQ ID NO: 86854 - RNA, 21 nt, synthetic construct
  source 1..21: mol_type = other RNA
accccctcctccaccccagga

SEQ ID NO: 86855 - RNA, 21 nt, synthetic construct
  source 1..21: mol_type = other RNA
ccctcctccaccccaggaaca

SEQ ID NO: 86856 - RNA, 21 nt, synthetic construct
  source 1..21: mol_type = other RNA
aagtgccgactaccacaacca

SEQ ID NO: 86857 - RNA, 21 nt, synthetic construct
  source 1..21: mol_type = other RNA
ccacgggcttcacagccacca

SEQ ID NO: 86858 - RNA, 21 nt, synthetic construct
  source 1..21: mol_type = other RNA
gcttcacagccaccccctcca

SEQ ID NO: 86859 - RNA, 21 nt, synthetic construct
  source 1..21: mol_type = other RNA
tcacagccaccccctcctcca

SEQ ID NO: 86860 - RNA, 21 nt, synthetic construct
  source 1..21: mol_type = other RNA
ctcctccagcccagggacgga

SEQ ID NO: 86861 - RNA, 21 nt, synthetic construct
  source 1..21: mol_type = other RNA
tcctccagcccagggacggca

SEQ ID NO: 86862 - RNA, 21 nt, synthetic construct
  source 1..21: mol_type = other RNA
cctccagtgtggatcagcaca

SEQ ID NO: 86863 - RNA, 21 nt, synthetic construct
  source 1..21: mol_type = other RNA
aaccaccacacccacaaccaa

SEQ ID NO: 86864 - RNA, 21 nt, synthetic construct
  source 1..21: mol_type = other RNA
accaccacacccacaaccaca

SEQ ID NO: 86865 - RNA, 21 nt, synthetic construct
  source 1..21: mol_type = other RNA
ccaccacacccacaaccacca

SEQ ID NO: 86866 - RNA, 21 nt, synthetic construct
  source 1..21: mol_type = other RNA
caccacacccacaaccaccaa

SEQ ID NO: 86867 - RNA, 21 nt, synthetic construct
  source 1..21: mol_type = other RNA
accacacccacaaccaccaca

SEQ ID NO: 86868 - RNA, 21 nt, synthetic construct
  source 1..21: mol_type = other RNA
ccacacccacaaccaccacaa

SEQ ID NO: 86869 - RNA, 21 nt, synthetic construct
  source 1..21: mol_type = other RNA
cacacccacaaccaccacaca

SEQ ID NO: 86870 - RNA, 21 nt, synthetic construct
  source 1..21: mol_type = other RNA
acccacaaccaccacacccaa

SEQ ID NO: 86871 - RNA, 21 nt, synthetic construct
  source 1..21: mol_type = other RNA
ccaccacacccacaaccagta

SEQ ID NO: 86872 - RNA, 21 nt, synthetic construct
  source 1..21: mol_type = other RNA
caaccagtggctccacggtga

SEQ ID NO: 86873 - RNA, 21 nt, synthetic construct
  source 1..21: mol_type = other RNA
acggtgaccccctcctccata

SEQ ID NO: 86874 - RNA, 21 nt, synthetic construct
  source 1..21: mol_type = other RNA
gtgaccccctcctccatccca

SEQ ID NO: 86875 - RNA, 21 nt, synthetic construct
  source 1..21: mol_type = other RNA
gaccccctcctccatcccgga

SEQ ID NO: 86876 - RNA, 21 nt, synthetic construct
  source 1..21: mol_type = other RNA
ccccctcctccatcccgggga

SEQ ID NO: 86877 - RNA, 21 nt, synthetic construct
  source 1..21: mol_type = other RNA
ccctcctccatcccggggaca

SEQ ID NO: 86878 - RNA, 21 nt, synthetic construct
  source 1..21: mol_type = other RNA
cagagtgctgaccaccaccaa

SEQ ID NO: 86879 - RNA, 21 nt, synthetic construct
  source 1..21: mol_type = other RNA
tgctgaccaccaccaccacaa

SEQ ID NO: 86880 - RNA, 21 nt, synthetic construct
  source 1..21: mol_type = other RNA
gctgaccaccaccaccacaaa

SEQ ID NO: 86881 - RNA, 21 nt, synthetic construct
  source 1..21: mol_type = other RNA
accaccaccaccacaactgta

SEQ ID NO: 86882 - RNA, 21 nt, synthetic construct
  source 1..21: mol_type = other RNA
ccaccacaactgtggccacta

SEQ ID NO: 86883 - RNA, 21 nt, synthetic construct
  source 1..21: mol_type = other RNA
gtggccactggttctatggca

SEQ ID NO: 86884 - RNA, 21 nt, synthetic construct
  source 1..21: mol_type = other RNA
cactgaccaccacggccacta

SEQ ID NO: 86885 - RNA, 21 nt, synthetic construct
  source 1..21: mol_type = other RNA
acggccaccggctccaccaca

SEQ ID NO: 86886 - RNA, 21 nt, synthetic construct
  source 1..21: mol_type = other RNA
ccaccggctccaccaccaaca

SEQ ID NO: 86887 - RNA, 21 nt, synthetic construct
  source 1..21: mol_type = other RNA
ccaccaccaacccctcctcaa

SEQ ID NO: 86888 - RNA, 21 nt, synthetic construct
  source 1..21: mol_type = other RNA
accaccaacccctcctcaaca

SEQ ID NO: 86889 - RNA, 21 nt, synthetic construct
  source 1..21: mol_type = other RNA
accaacccctcctcaactcca

SEQ ID NO: 86890 - RNA, 21 nt, synthetic construct
  source 1..21: mol_type = other RNA
ccaacccctcctcaactccaa

SEQ ID NO: 86891 - RNA, 21 nt, synthetic construct
  source 1..21: mol_type = other RNA
acccctcctcaactccaggga

SEQ ID NO: 86892 - RNA, 21 nt, synthetic construct
  source 1..21: mol_type = other RNA
ccctcctcaactccagggaca

SEQ ID NO: 86893 - RNA, 21 nt, synthetic construct
  source 1..21: mol_type = other RNA
ctcctcaactccagggacaaa

SEQ ID NO: 86894 - RNA, 21 nt, synthetic construct
  source 1..21: mol_type = other RNA
aacacccatcaccccagtgca

SEQ ID NO: 86895 - RNA, 21 nt, synthetic construct
  source 1..21: mol_type = other RNA
cccatcaccccagtgctgaca

SEQ ID NO: 86896 - RNA, 21 nt, synthetic construct
  source 1..21: mol_type = other RNA
ccatcaccccagtgctgacca

SEQ ID NO: 86897 - RNA, 21 nt, synthetic construct
  source 1..21: mol_type = other RNA
ctgaccagcacggccaccaca

SEQ ID NO: 86898 - RNA, 21 nt, synthetic construct
  source 1..21: mol_type = other RNA
ccagcacggccaccacaccca

SEQ ID NO: 86899 - RNA, 21 nt, synthetic construct
  source 1..21: mol_type = other RNA
ccgcagccaccagctccaaaa

SEQ ID NO: 86900 - RNA, 21 nt, synthetic construct
  source 1..21: mol_type = other RNA
ccaccagctccaaagccacta

SEQ ID NO: 86901 - RNA, 21 nt, synthetic construct
  source 1..21: mol_type = other RNA
cagctccaaagccacttccta

SEQ ID NO: 86902 - RNA, 21 nt, synthetic construct
  source 1..21: mol_type = other RNA
ctccaaagccacttcctccta

SEQ ID NO: 86903 - RNA, 21 nt, synthetic construct
  source 1..21: mol_type = other RNA
aaagccacttcctcctccaga

SEQ ID NO: 86904 - RNA, 21 nt, synthetic construct
  source 1..21: mol_type = other RNA
agccacttcctcctccagtca

SEQ ID NO: 86905 - RNA, 21 nt, synthetic construct
  source 1..21: mol_type = other RNA
gccacttcctcctccagtcca

SEQ ID NO: 86906 - RNA, 21 nt, synthetic construct
  source 1..21: mol_type = other RNA
ccacttcctcctccagtccaa

SEQ ID NO: 86907 - RNA, 21 nt, synthetic construct
  source 1..21: mol_type = other RNA
acttcctcctccagtccaaga

SEQ ID NO: 86908 - RNA, 21 nt, synthetic construct
  source 1..21: mol_type = other RNA
ttcctcctccagtccaaggaa

SEQ ID NO: 86909 - RNA, 21 nt, synthetic construct
  source 1..21: mol_type = other RNA
acacccatcccctcctccaca

SEQ ID NO: 86910 - RNA, 21 nt, synthetic construct
  source 1..21: mol_type = other RNA
tcccctcctccaccctgtgga

SEQ ID NO: 86911 - RNA, 21 nt, synthetic construct
  source 1..21: mol_type = other RNA
ctcctccaccctgtggaccaa

SEQ ID NO: 86912 - RNA, 21 nt, synthetic construct
  source 1..21: mol_type = other RNA
tcccagcacagaccaccacaa

SEQ ID NO: 86913 - RNA, 21 nt, synthetic construct
  source 1..21: mol_type = other RNA
cccagcacagaccaccacaca

SEQ ID NO: 86914 - RNA, 21 nt, synthetic construct
  source 1..21: mol_type = other RNA
accacacccatgtccaccata

SEQ ID NO: 86915 - RNA, 21 nt, synthetic construct
  source 1..21: mol_type = other RNA
ccacacccatgtccaccatga

SEQ ID NO: 86916 - RNA, 21 nt, synthetic construct
  source 1..21: mol_type = other RNA
acccatgtccaccatgtccaa

SEQ ID NO: 86917 - RNA, 21 nt, synthetic construct
  source 1..21: mol_type = other RNA
accacccacacctccacagta

SEQ ID NO: 86918 - RNA, 21 nt, synthetic construct
  source 1..21: mol_type = other RNA
cctccacagtgctgaccacca

SEQ ID NO: 86919 - RNA, 21 nt, synthetic construct
  source 1..21: mol_type = other RNA
ctccacagtgctgaccaccaa

SEQ ID NO: 86920 - RNA, 21 nt, synthetic construct
  source 1..21: mol_type = other RNA
tccacagtgctgaccaccaca

SEQ ID NO: 86921 - RNA, 21 nt, synthetic construct
  source 1..21: mol_type = other RNA
cagtgctgaccaccacagcca

SEQ ID NO: 86922 - RNA, 21 nt, synthetic construct
  source 1..21: mol_type = other RNA
cactgagctgaccacaacaga

SEQ ID NO: 86923 - RNA, 21 nt, synthetic construct
  source 1..21: mol_type = other RNA
acagccactacaactgcagca

SEQ ID NO: 86924 - RNA, 21 nt, synthetic construct
  source 1..21: mol_type = other RNA
cagccactacaactgcagcca

SEQ ID NO: 86925 - RNA, 21 nt, synthetic construct
  source 1..21: mol_type = other RNA
atccacggccaccctgtccta

SEQ ID NO: 86926 - RNA, 21 nt, synthetic construct
  source 1..21: mol_type = other RNA
acggccaccctgtcctccaca

SEQ ID NO: 86927 - RNA, 21 nt, synthetic construct
  source 1..21: mol_type = other RNA
cggccaccctgtcctccacca

SEQ ID NO: 86928 - RNA, 21 nt, synthetic construct
  source 1..21: mol_type = other RNA
ccaccctgtcctccaccccaa

SEQ ID NO: 86929 - RNA, 21 nt, synthetic construct
  source 1..21: mol_type = other RNA
accctgtcctccaccccagga

SEQ ID NO: 86930 - RNA, 21 nt, synthetic construct
  source 1..21: mol_type = other RNA
ccctgtcctccaccccaggga

SEQ ID NO: 86931 - RNA, 21 nt, synthetic construct
  source 1..21: mol_type = other RNA
tgtcctccaccccagggacca

SEQ ID NO: 86932 - RNA, 21 nt, synthetic construct
  source 1..21: mol_type = other RNA
gtcctccaccccagggaccaa

SEQ ID NO: 86933 - RNA, 21 nt, synthetic construct
  source 1..21: mol_type = other RNA
cctccaccccagggaccacca

SEQ ID NO: 86934 - RNA, 21 nt, synthetic construct
  source 1..21: mol_type = other RNA
ctccaccccagggaccaccta

SEQ ID NO: 86935 - RNA, 21 nt, synthetic construct
  source 1..21: mol_type = other RNA
tccaccccagggaccacctga

SEQ ID NO: 86936 - RNA, 21 nt, synthetic construct
  source 1..21: mol_type = other RNA
ccaccccagggaccacctgga

SEQ ID NO: 86937 - RNA, 21 nt, synthetic construct
  source 1..21: mol_type = other RNA
gttccacggccaccgcctcca

SEQ ID NO: 86938 - RNA, 21 nt, synthetic construct
  source 1..21: mol_type = other RNA
cggccaccgcctcctccacta

SEQ ID NO: 86939 - RNA, 21 nt, synthetic construct
  source 1..21: mol_type = other RNA
ccaccgcctcctccactctga

SEQ ID NO: 86940 - RNA, 21 nt, synthetic construct
  source 1..21: mol_type = other RNA
accgcctcctccactctggga

SEQ ID NO: 86941 - RNA, 21 nt, synthetic construct
  source 1..21: mol_type = other RNA
ccgcctcctccactctgggaa

SEQ ID NO: 86942 - RNA, 21 nt, synthetic construct
  source 1..21: mol_type = other RNA
ggtgaccaccatggccactaa

SEQ ID NO: 86943 - RNA, 21 nt, synthetic construct
  source 1..21: mol_type = other RNA
ccatggccactatgcccacaa

SEQ ID NO: 86944 - RNA, 21 nt, synthetic construct
  source 1..21: mol_type = other RNA
ccactatgcccacagccacta

SEQ ID NO: 86945 - RNA, 21 nt, synthetic construct
  source 1..21: mol_type = other RNA
atgcccacagccactgcctca

SEQ ID NO: 86946 - RNA, 21 nt, synthetic construct
  source 1..21: mol_type = other RNA
tgcccacagccactgcctcca

SEQ ID NO: 86947 - RNA, 21 nt, synthetic construct
  source 1..21: mol_type = other RNA
gcccacagccactgcctccaa

SEQ ID NO: 86948 - RNA, 21 nt, synthetic construct
  source 1..21: mol_type = other RNA
cacagccactgcctccacgga

SEQ ID NO: 86949 - RNA, 21 nt, synthetic construct
  source 1..21: mol_type = other RNA
acagccactgcctccacggta

SEQ ID NO: 86950 - RNA, 21 nt, synthetic construct
  source 1..21: mol_type = other RNA
gcacccctgcagtgctcccca

SEQ ID NO: 86951 - RNA, 21 nt, synthetic construct
  source 1..21: mol_type = other RNA
ctccccagcagcctgccaaca

SEQ ID NO: 86952 - RNA, 21 nt, synthetic construct
  source 1..21: mol_type = other RNA
ctcaccaccctgagacccaca

SEQ ID NO: 86953 - RNA, 21 nt, synthetic construct
  source 1..21: mol_type = other RNA
cactggcttccccagctccca

SEQ ID NO: 86954 - RNA, 21 nt, synthetic construct
  source 1..21: mol_type = other RNA
ctggcttccccagctcccaca

SEQ ID NO: 86955 - RNA, 21 nt, synthetic construct
  source 1..21: mol_type = other RNA
tggcttccccagctcccacta

SEQ ID NO: 86956 - RNA, 21 nt, synthetic construct
  source 1..21: mol_type = other RNA
ggcttccccagctcccactta

SEQ ID NO: 86957 - RNA, 21 nt, synthetic construct
  source 1..21: mol_type = other RNA
gcttccccagctcccacttca

SEQ ID NO: 86958 - RNA, 21 nt, synthetic construct
  source 1..21: mol_type = other RNA
tgcaatcagcactgtgacata

SEQ ID NO: 86959 - RNA, 21 nt, synthetic construct
  source 1..21: mol_type = other RNA
cgcctgtcccacctccccaca

SEQ ID NO: 86960 - RNA, 21 nt, synthetic construct
  source 1..21: mol_type = other RNA
gcctgtcccacctccccacca

SEQ ID NO: 86961 - RNA, 21 nt, synthetic construct
  source 1..21: mol_type = other RNA
tgtcccacctccccaccgcca

SEQ ID NO: 86962 - RNA, 21 nt, synthetic construct
  source 1..21: mol_type = other RNA
gtcccacctccccaccgccaa

SEQ ID NO: 86963 - RNA, 21 nt, synthetic construct
  source 1..21: mol_type = other RNA
tcccacctccccaccgccaga

SEQ ID NO: 86964 - RNA, 21 nt, synthetic construct
  source 1..21: mol_type = other RNA
ccacctccccaccgccagtga

SEQ ID NO: 86965 - RNA, 21 nt, synthetic construct
  source 1..21: mol_type = other RNA
tgtcctccgccccgctgtcca

SEQ ID NO: 86966 - RNA, 21 nt, synthetic construct
  source 1..21: mol_type = other RNA
ccgccccgctgtcctcgccca

SEQ ID NO: 86967 - RNA, 21 nt, synthetic construct
  source 1..21: mol_type = other RNA
ccgctgtcctcgccctcccca

SEQ ID NO: 86968 - RNA, 21 nt, synthetic construct
  source 1..21: mol_type = other RNA
gtcctcgccctcccctgccca

SEQ ID NO: 86969 - RNA, 21 nt, synthetic construct
  source 1..21: mol_type = other RNA
tcctcgccctcccctgcccca

SEQ ID NO: 86970 - RNA, 21 nt, synthetic construct
  source 1..21: mol_type = other RNA
aatctcagcctctacctggaa

SEQ ID NO: 86971 - RNA, 21 nt, synthetic construct
  source 1..21: mol_type = other RNA
acctggacaaccactactgca

SEQ ID NO: 86972 - RNA, 21 nt, synthetic construct
  source 1..21: mol_type = other RNA
acggcctctgccactgccgca

SEQ ID NO: 86973 - RNA, 21 nt, synthetic construct
  source 1..21: mol_type = other RNA
ggcctctgccactgccgctga

SEQ ID NO: 86974 - RNA, 21 nt, synthetic construct
  source 1..21: mol_type = other RNA
gcctctgccactgccgctgca

SEQ ID NO: 86975 - RNA, 21 nt, synthetic construct
  source 1..21: mol_type = other RNA
ctgccgctgccgcccgctgca

SEQ ID NO: 86976 - RNA, 21 nt, synthetic construct
  source 1..21: mol_type = other RNA
ccgctgccgcccgctgcccca

SEQ ID NO: 86977 - RNA, 21 nt, synthetic construct
  source 1..21: mol_type = other RNA
gcccgctgcccccgcgcccta

SEQ ID NO: 86978 - RNA, 21 nt, synthetic construct
  source 1..21: mol_type = other RNA
ccgctgcccccgcgccctcaa

SEQ ID NO: 86979 - RNA, 21 nt, synthetic construct
  source 1..21: mol_type = other RNA
tgcatgggaaggaggagggca

SEQ ID NO: 86980 - RNA, 21 nt, synthetic construct
  source 1..21: mol_type = other RNA
gcatgggaaggaggagggcca

SEQ ID NO: 86981 - RNA, 21 nt, synthetic construct
  source 1..21: mol_type = other RNA
catgggaaggaggagggccta

SEQ ID NO: 86982 - RNA, 21 nt, synthetic construct
  source 1..21: mol_type = other RNA
atgggaaggaggagggcctga

SEQ ID NO: 86983 - RNA, 21 nt, synthetic construct
  source 1..21: mol_type = other RNA
ggcgtgcttgtgtctgtgcta

SEQ ID NO: 86984 - RNA, 21 nt, synthetic construct
  source 1..21: mol_type = other RNA
gctggggaccaccaccatgca

SEQ ID NO: 86985 - RNA, 21 nt, synthetic construct
  source 1..21: mol_type = other RNA
gcgtgtggacattcctgccca

SEQ ID NO: 86986 - RNA, 21 nt, synthetic construct
  source 1..21: mol_type = other RNA
tggccaagtcttccaggccca

SEQ ID NO: 86987 - RNA, 21 nt, synthetic construct
  source 1..21: mol_type = other RNA
caagtcttccaggcccggcta

SEQ ID NO: 86988 - RNA, 21 nt, synthetic construct
  source 1..21: mol_type = other RNA
tgctgggccccgactggcaca

SEQ ID NO: 86989 - RNA, 21 nt, synthetic construct
  source 1..21: mol_type = other RNA
gcacaccccccactgccagca

SEQ ID NO: 86990 - RNA, 21 nt, synthetic construct
  source 1..21: mol_type = other RNA
accccccactgccagccccga

SEQ ID NO: 86991 - RNA, 21 nt, synthetic construct
  source 1..21: mol_type = other RNA
cccccactgccagccccgcaa

SEQ ID NO: 86992 - RNA, 21 nt, synthetic construct
  source 1..21: mol_type = other RNA
cacccacccccaccccatgca

SEQ ID NO: 86993 - RNA, 21 nt, synthetic construct
  source 1..21: mol_type = other RNA
cccacccccaccccatgccca

SEQ ID NO: 86994 - RNA, 21 nt, synthetic construct
  source 1..21: mol_type = other RNA
ccaccccatgcccaccacaga

SEQ ID NO: 86995 - RNA, 21 nt, synthetic construct
  source 1..21: mol_type = other RNA
cccatgcccaccacagccgca

SEQ ID NO: 86996 - RNA, 21 nt, synthetic construct
  source 1..21: mol_type = other RNA
ccatgcccaccacagccgcta

SEQ ID NO: 86997 - RNA, 21 nt, synthetic construct
  source 1..21: mol_type = other RNA
gagccaggtctttgctgagta

SEQ ID NO: 86998 - RNA, 21 nt, synthetic construct
  source 1..21: mol_type = other RNA
agccaggtctttgctgagtga

SEQ ID NO: 86999 - RNA, 21 nt, synthetic construct
  source 1..21: mol_type = other RNA
ccctgccagagcctggaggca

SEQ ID NO: 87000 - RNA, 21 nt, synthetic construct
  source 1..21: mol_type = other RNA
ggaaccagagcccacagctga

SEQ ID NO: 87001 - RNA, 21 nt, synthetic construct
  source 1..21: mol_type = other RNA
gaaccagagcccacagctgga

SEQ ID NO: 87002 - RNA, 21 nt, synthetic construct
  source 1..21: mol_type = other RNA
aaccagagcccacagctggaa

SEQ ID NO: 87003 - RNA, 21 nt, synthetic construct
  source 1..21: mol_type = other RNA
accagagcccacagctggaga

SEQ ID NO: 87004 - RNA, 21 nt, synthetic construct
  source 1..21: mol_type = other RNA
acagctggaggggatggcgga

SEQ ID NO: 87005 - RNA, 21 nt, synthetic construct
  source 1..21: mol_type = other RNA
agctggaggggatggcggaga

SEQ ID NO: 87006 - RNA, 21 nt, synthetic construct
  source 1..21: mol_type = other RNA
gctgcttctgccctgaggaca

SEQ ID NO: 87007 - RNA, 21 nt, synthetic construct
  source 1..21: mol_type = other RNA
cttctgccctgaggaccagaa

SEQ ID NO: 87008 - RNA, 21 nt, synthetic construct
  source 1..21: mol_type = other RNA
tctgccctgaggaccagatca

SEQ ID NO: 87009 - RNA, 21 nt, synthetic construct
  source 1..21: mol_type = other RNA
caggcctgcccctgcgtggga

SEQ ID NO: 87010 - RNA, 21 nt, synthetic construct
  source 1..21: mol_type = other RNA
ggcctgcccctgcgtgggaca

SEQ ID NO: 87011 - RNA, 21 nt, synthetic construct
  source 1..21: mol_type = other RNA
gtcagcaactgccagtcctga

SEQ ID NO: 87012 - RNA, 21 nt, synthetic construct
  source 1..21: mol_type = other RNA
acgcccagggtcagcccccga

SEQ ID NO: 87013 - RNA, 21 nt, synthetic construct
  source 1..21: mol_type = other RNA
tgaccaggccccgggccgaga

SEQ ID NO: 87014 - RNA, 21 nt, synthetic construct
  source 1..21: mol_type = other RNA
caacacaaccacctgccccca

SEQ ID NO: 87015 - RNA, 21 nt, synthetic construct
  source 1..21: mol_type = other RNA
caaccacctgcccccagagca

SEQ ID NO: 87016 - RNA, 21 nt, synthetic construct
  source 1..21: mol_type = other RNA
aaccacctgcccccagagcca

SEQ ID NO: 87017 - RNA, 21 nt, synthetic construct
  source 1..21: mol_type = other RNA
cacctgcccccagagcctgca

SEQ ID NO: 87018 - RNA, 21 nt, synthetic construct
  source 1..21: mol_type = other RNA
cctgcccccagagcctgccta

SEQ ID NO: 87019 - RNA, 21 nt, synthetic construct
  source 1..21: mol_type = other RNA
tgcccccagagcctgcctgta

SEQ ID NO: 87020 - RNA, 21 nt, synthetic construct
  source 1..21: mol_type = other RNA
gtgcccgccagggcaggagta

SEQ ID NO: 87021 - RNA, 21 nt, synthetic construct
  source 1..21: mol_type = other RNA
gcccgccagggcaggagtcca

SEQ ID NO: 87022 - RNA, 21 nt, synthetic construct
  source 1..21: mol_type = other RNA
agtccatctgcacccaggaga

SEQ ID NO: 87023 - RNA, 21 nt, synthetic construct
  source 1..21: mol_type = other RNA
gtccatctgcacccaggagga

SEQ ID NO: 87024 - RNA, 21 nt, synthetic construct
  source 1..21: mol_type = other RNA
ccatctgcacccaggaggaga

SEQ ID NO: 87025 - RNA, 21 nt, synthetic construct
  source 1..21: mol_type = other RNA
tctgcacccaggaggagggca

SEQ ID NO: 87026 - RNA, 21 nt, synthetic construct
  source 1..21: mol_type = other RNA
tgcacccaggaggagggcgaa

SEQ ID NO: 87027 - RNA, 21 nt, synthetic construct
  source 1..21: mol_type = other RNA
ccgctgcagacctcagctgta

SEQ ID NO: 87028 - RNA, 21 nt, synthetic construct
  source 1..21: mol_type = other RNA
cgctgcagacctcagctgtga

SEQ ID NO: 87029 - RNA, 21 nt, synthetic construct
  source 1..21: mol_type = other RNA
ccttcccaggcgcccttccca

SEQ ID NO: 87030 - RNA, 21 nt, synthetic construct
  source 1..21: mol_type = other RNA
ctacctgtccccagggcttta

SEQ ID NO: 87031 - RNA, 21 nt, synthetic construct
  source 1..21: mol_type = other RNA
ctgtccccagggctttgagta

SEQ ID NO: 87032 - RNA, 21 nt, synthetic construct
  source 1..21: mol_type = other RNA
atggccagccagtccagctga

SEQ ID NO: 87033 - RNA, 21 nt, synthetic construct
  source 1..21: mol_type = other RNA
tcaacagccatgtggacaaca

SEQ ID NO: 87034 - RNA, 21 nt, synthetic construct
  source 1..21: mol_type = other RNA
acctctgtgaggctgagggta

SEQ ID NO: 87035 - RNA, 21 nt, synthetic construct
  source 1..21: mol_type = other RNA
ctctgtgaggctgagggtgga

SEQ ID NO: 87036 - RNA, 21 nt, synthetic construct
  source 1..21: mol_type = other RNA
tctgtgaggctgagggtggaa

SEQ ID NO: 87037 - RNA, 21 nt, synthetic construct
  source 1..21: mol_type = other RNA
ctgtgaggctgagggtggaga

SEQ ID NO: 87038 - RNA, 21 nt, synthetic construct
  source 1..21: mol_type = other RNA
cctgcatcctgcccagatgta

SEQ ID NO: 87039 - RNA, 21 nt, synthetic construct
  source 1..21: mol_type = other RNA
atgtgtccagctgcaggggga

SEQ ID NO: 87040 - RNA, 21 nt, synthetic construct
  source 1..21: mol_type = other RNA
agggctgcgagaccgaggtca

SEQ ID NO: 87041 - RNA, 21 nt, synthetic construct
  source 1..21: mol_type = other RNA
tgcgagggctcctgccccgga

SEQ ID NO: 87042 - RNA, 21 nt, synthetic construct
  source 1..21: mol_type = other RNA
gcgagggctcctgccccggaa

SEQ ID NO: 87043 - RNA, 21 nt, synthetic construct
  source 1..21: mol_type = other RNA
tactcagcagaggcccaggca

SEQ ID NO: 87044 - RNA, 21 nt, synthetic construct
  source 1..21: mol_type = other RNA
tgcacctgctgccaggagaga

SEQ ID NO: 87045 - RNA, 21 nt, synthetic construct
  source 1..21: mol_type = other RNA
ctgctgccaggagaggcggga

SEQ ID NO: 87046 - RNA, 21 nt, synthetic construct
  source 1..21: mol_type = other RNA
acacccgtggcttcccggcca

SEQ ID NO: 87047 - RNA, 21 nt, synthetic construct
  source 1..21: mol_type = other RNA
cgtggcttcccggcccaggaa

SEQ ID NO: 87048 - RNA, 21 nt, synthetic construct
  source 1..21: mol_type = other RNA
ggcttcccggcccaggaggca

SEQ ID NO: 87049 - RNA, 21 nt, synthetic construct
  source 1..21: mol_type = other RNA
gcttcccggcccaggaggcca

SEQ ID NO: 87050 - RNA, 21 nt, synthetic construct
  source 1..21: mol_type = other RNA
cggcccaggaggccactgcta

SEQ ID NO: 87051 - RNA, 21 nt, synthetic construct
  source 1..21: mol_type = other RNA
ccaggaggccactgctgtcta

SEQ ID NO: 87052 - RNA, 21 nt, synthetic construct
  source 1..21: mol_type = other RNA
cgttctgcctccatccccata

SEQ ID NO: 87053 - RNA, 21 nt, synthetic construct
  source 1..21: mol_type = other RNA
gtccacctggagccaggatga

SEQ ID NO: 87054 - RNA, 21 nt, synthetic construct
  source 1..21: mol_type = other RNA
gcattgtctgatcatgaaaaa

SEQ ID NO: 87055 - RNA, 21 nt, synthetic construct
  source 1..21: mol_type = other RNA
cattgtctgatcatgaaaaca

SEQ ID NO: 87056 - RNA, 21 nt, synthetic construct
  source 1..21: mol_type = other RNA
gggcctcctctgcggagccca

SEQ ID NO: 87057 - RNA, 21 nt, synthetic construct
  source 1..21: mol_type = other RNA
cctcctctgcggagcccccca

SEQ ID NO: 87058 - RNA, 21 nt, synthetic construct
  source 1..21: mol_type = other RNA
ctctgcggagccccccggcca

SEQ ID NO: 87059 - RNA, 21 nt, synthetic construct
  source 1..21: mol_type = other RNA
tctgcggagccccccggccta

SEQ ID NO: 87060 - RNA, 21 nt, synthetic construct
  source 1..21: mol_type = other RNA
ccccccggcctgtgtgtggca

SEQ ID NO: 87061 - RNA, 21 nt, synthetic construct
  source 1..21: mol_type = other RNA
cggccccagaagggtgaggga

SEQ ID NO: 87062 - RNA, 21 nt, synthetic construct
  source 1..21: mol_type = other RNA
agaagggtgaggggccagcaa

SEQ ID NO: 87063 - RNA, 21 nt, synthetic construct
  source 1..21: mol_type = other RNA
gggccagcaggacccctttca

SEQ ID NO: 87064 - RNA, 21 nt, synthetic construct
  source 1..21: mol_type = other RNA
ccttggccttgcccctcccta

SEQ ID NO: 87065 - RNA, 21 nt, synthetic construct
  source 1..21: mol_type = other RNA
cttggccttgcccctccctga

SEQ ID NO: 87066 - RNA, 21 nt, synthetic construct
  source 1..21: mol_type = other RNA
cacggccggagcgcccgcgca

SEQ ID NO: 87067 - RNA, 21 nt, synthetic construct
  source 1..21: mol_type = other RNA
aggctggtccaggcaaggcca

SEQ ID NO: 87068 - RNA, 21 nt, synthetic construct
  source 1..21: mol_type = other RNA
ggtccaggcaaggccagctga

SEQ ID NO: 87069 - RNA, 21 nt, synthetic construct
  source 1..21: mol_type = other RNA
ggcaaggccagctgctgccaa

SEQ ID NO: 87070 - RNA, 21 nt, synthetic construct
  source 1..21: mol_type = other RNA
gcaaggccagctgctgccaga

SEQ ID NO: 87071 - RNA, 21 nt, synthetic construct
  source 1..21: mol_type = other RNA
aaggccagctgctgccaggaa

SEQ ID NO: 87072 - RNA, 21 nt, synthetic construct
  source 1..21: mol_type = other RNA
gccagctgctgccaggaagca

SEQ ID NO: 87073 - RNA, 21 nt, synthetic construct
  source 1..21: mol_type = other RNA
agctgctgccaggaagctgca

SEQ ID NO: 87074 - RNA, 21 nt, synthetic construct
  source 1..21: mol_type = other RNA
ctgctgccaggaagctgcgaa

SEQ ID NO: 87075 - RNA, 21 nt, synthetic construct
  source 1..21: mol_type = other RNA
aggaagctgcgacaggcaaga

SEQ ID NO: 87076 - RNA, 21 nt, synthetic construct
  source 1..21: mol_type = other RNA
caggtcagagaggggtcagca

SEQ ID NO: 87077 - RNA, 21 nt, synthetic construct
  source 1..21: mol_type = other RNA
cagagaggggtcagcatccca

SEQ ID NO: 87078 - RNA, 21 nt, synthetic construct
  source 1..21: mol_type = other RNA
gcaaataaaccctgagcatta

SEQ ID NO: 87079 - RNA, 21 nt, synthetic construct
  source 1..21: mol_type = other RNA
acagccatgtggacaactgca

SEQ ID NO: 87080 - RNA, 21 nt, synthetic construct
  source 1..21: mol_type = other RNA
gtggaggccacgggcgcagca

SEQ ID NO: 87081 - RNA, 21 nt, synthetic construct
  source 1..21: mol_type = other RNA
cagctccccctcccaaagtga

SEQ ID NO: 87082 - RNA, 21 nt, synthetic construct
  source 1..21: mol_type = other RNA
cagctccccctcccaaagtga

SEQ ID NO: 87083 - RNA, 21 nt, synthetic construct
  source 1..21: mol_type = other RNA
cagctccccctcccaaagtga

SEQ ID NO: 87084 - RNA, 21 nt, synthetic construct
  source 1..21: mol_type = other RNA
actttgagacgtttgaaaaca

SEQ ID NO: 87085 - RNA, 21 nt, synthetic construct
  source 1..21: mol_type = other RNA
ccatggtgcatgggaaggaga

SEQ ID NO: 87086 - RNA, 21 nt, synthetic construct
  source 1..21: mol_type = other RNA
gacgtcctcgcccacccggca

SEQ ID NO: 87087 - RNA, 21 nt, synthetic construct
  source 1..21: mol_type = other RNA
gccagagctgtaactgcacaa

SEQ ID NO: 87088 - RNA, 21 nt, synthetic construct
  source 1..21: mol_type = other RNA
ctccagggacaactcccatca

SEQ ID NO: 87089 - RNA, 21 nt, synthetic construct
  source 1..21: mol_type = other RNA
taagctgcctgggagcctcta

SEQ ID NO: 87090 - RNA, 21 nt, synthetic construct
  source 1..21: mol_type = other RNA
atcaccccagtgctgaccaga

SEQ ID NO: 87091 - RNA, 21 nt, synthetic construct
  source 1..21: mol_type = other RNA
acagccgcactggcctcctga

SEQ ID NO: 87092 - RNA, 21 nt, synthetic construct
  source 1..21: mol_type = other RNA
ggtcagcatcccaaagcccca

SEQ ID NO: 87093 - RNA, 21 nt, synthetic construct
  source 1..21: mol_type = other RNA
tcccccggccagcaccacaga

SEQ ID NO: 87094 - RNA, 21 nt, synthetic construct
  source 1..21: mol_type = other RNA
gctctgtggccaccccctcta

SEQ ID NO: 87095 - RNA, 21 nt, synthetic construct
  source 1..21: mol_type = other RNA
caccccagtgctgaccagcaa

SEQ ID NO: 87096 - RNA, 21 nt, synthetic construct
  source 1..21: mol_type = other RNA
ttacagccgcactggcctcca

SEQ ID NO: 87097 - RNA, 21 nt, synthetic construct
  source 1..21: mol_type = other RNA
acagccacccacgctggccca

SEQ ID NO: 87098 - RNA, 21 nt, synthetic construct
  source 1..21: mol_type = other RNA
ctgcggagccccccggcctga

SEQ ID NO: 87099 - RNA, 21 nt, synthetic construct
  source 1..21: mol_type = other RNA
cagccgcactggcctcctgga

SEQ ID NO: 87100 - RNA, 21 nt, synthetic construct
  source 1..21: mol_type = other RNA
cgctgccccacctgcccgtga

SEQ ID NO: 87101 - RNA, 21 nt, synthetic construct
  source 1..21: mol_type = other RNA
ggcccaggctgcctgtgccaa

SEQ ID NO: 87102 - RNA, 21 nt, synthetic construct
  source 1..21: mol_type = other RNA
ggagctgggccagcaggtgga

SEQ ID NO: 87103 - RNA, 21 nt, synthetic construct
  source 1..21: mol_type = other RNA
cccggccccaggcaccagcca

SEQ ID NO: 87104 - RNA, 21 nt, synthetic construct
  source 1..21: mol_type = other RNA
ccaccaccacccaggccctga

SEQ ID NO: 87105 - RNA, 21 nt, synthetic construct
  source 1..21: mol_type = other RNA
tcagctccagagccactccca

SEQ ID NO: 87106 - RNA, 21 nt, synthetic construct
  source 1..21: mol_type = other RNA
aggaccacagccacagccaca

SEQ ID NO: 87107 - RNA, 21 nt, synthetic construct
  source 1..21: mol_type = other RNA
cggagggctgcttctgcccta

SEQ ID NO: 87108 - RNA, 21 nt, synthetic construct
  source 1..21: mol_type = other RNA
ggcaccagccctcagccctca

SEQ ID NO: 87109 - RNA, 21 nt, synthetic construct
  source 1..21: mol_type = other RNA
cttcccaggcgcccttcccta

SEQ ID NO: 87110 - RNA, 21 nt, synthetic construct
  source 1..21: mol_type = other RNA
acgggcggtccctgcccccca

SEQ ID NO: 87111 - RNA, 21 nt, synthetic construct
  source 1..21: mol_type = other RNA
cgggcggtccctgccccccaa

SEQ ID NO: 87112 - RNA, 21 nt, synthetic construct
  source 1..21: mol_type = other RNA
tcagagaggggtcagcatcca

SEQ ID NO: 87113 - RNA, 21 nt, synthetic construct
  source 1..21: mol_type = other RNA
gctcccccacacacccgtgga

SEQ ID NO: 87114 - RNA, 21 nt, synthetic construct
  source 1..21: mol_type = other RNA
ctcccccacacacccgtggca

SEQ ID NO: 87115 - RNA, 21 nt, synthetic construct
  source 1..21: mol_type = other RNA
agacccactggcttccccaga

SEQ ID NO: 87116 - RNA, 21 nt, synthetic construct
  source 1..21: mol_type = other RNA
ggggcagacaggctggtccaa

SEQ ID NO: 87117 - RNA, 21 nt, synthetic construct
  source 1..21: mol_type = other RNA
tgaccaccaccgccaccacaa

SEQ ID NO: 87118 - RNA, 21 nt, synthetic construct
  source 1..21: mol_type = other RNA
tgaccaccaccgccaccacaa

SEQ ID NO: 87119 - RNA, 21 nt, synthetic construct
  source 1..21: mol_type = other RNA
tgaccaccaccgccaccacaa

SEQ ID NO: 87120 - RNA, 21 nt, synthetic construct
  source 1..21: mol_type = other RNA
tgaccaccaccgccaccacaa

SEQ ID NO: 87121 - RNA, 21 nt, synthetic construct
  source 1..21: mol_type = other RNA
gggcggtccctgccccccaga

SEQ ID NO: 87122 - RNA, 21 nt, synthetic construct
  source 1..21: mol_type = other RNA
gagtcacccccttccccagga

SEQ ID NO: 87123 - RNA, 21 nt, synthetic construct
  source 1..21: mol_type = other RNA
gtcacccccttccccagggaa

SEQ ID NO: 87124 - RNA, 21 nt, synthetic construct
  source 1..21: mol_type = other RNA
aggcaccagccctcagcccta

SEQ ID NO: 87125 - RNA, 21 nt, synthetic construct
  source 1..21: mol_type = other RNA
cgagtcacccccttccccaga

SEQ ID NO: 87126 - RNA, 21 nt, synthetic construct
  source 1..21: mol_type = other RNA
acccggcccggctccctccca

SEQ ID NO: 87127 - RNA, 21 nt, synthetic construct
  source 1..21: mol_type = other RNA
cttcacagccaccccctccta

SEQ ID NO: 87128 - RNA, 21 nt, synthetic construct
  source 1..21: mol_type = other RNA
cttcacagccaccccctccta

SEQ ID NO: 87129 - RNA, 21 nt, synthetic construct
  source 1..21: mol_type = other RNA
cttcacagccaccccctccta

SEQ ID NO: 87130 - RNA, 21 nt, synthetic construct
  source 1..21: mol_type = other RNA
cttcacagccaccccctccta

SEQ ID NO: 87131 - RNA, 21 nt, synthetic construct
  source 1..21: mol_type = other RNA
gagacccactggcttccccaa

SEQ ID NO: 87132 - RNA, 21 nt, synthetic construct
  source 1..21: mol_type = other RNA
tgccgctgccgcccgctgcca

SEQ ID NO: 87133 - RNA, 21 nt, synthetic construct
  source 1..21: mol_type = other RNA
ttgcaaggacatggccaagaa

SEQ ID NO: 87134 - RNA, 21 nt, synthetic construct
  source 1..21: mol_type = other RNA
ctgccagccccgcagccccga

SEQ ID NO: 87135 - RNA, 21 nt, synthetic construct
  source 1..21: mol_type = other RNA
agccccgcagccccggtgtca

SEQ ID NO: 87136 - RNA, 21 nt, synthetic construct
  source 1..21: mol_type = other RNA
tccagctcaggccccgtgaca

SEQ ID NO: 87137 - RNA, 21 nt, synthetic construct
  source 1..21: mol_type = other RNA
accccagcagcaaccaccgga

SEQ ID NO: 87138 - RNA, 21 nt, synthetic construct
  source 1..21: mol_type = other RNA
accccagcagcaaccaccgga

SEQ ID NO: 87139 - RNA, 21 nt, synthetic construct
  source 1..21: mol_type = other RNA
ccccagcagcctgccaaccta

SEQ ID NO: 87140 - RNA, 21 nt, synthetic construct
  source 1..21: mol_type = other RNA
ccctttccagccctcacccta

SEQ ID NO: 87141 - RNA, 21 nt, synthetic construct
  source 1..21: mol_type = other RNA
cccactgccagccccgcagca

SEQ ID NO: 87142 - RNA, 21 nt, synthetic construct
  source 1..21: mol_type = other RNA
gagacccagggccctgtggaa

SEQ ID NO: 87143 - RNA, 21 nt, synthetic construct
  source 1..21: mol_type = other RNA
ctcccccggccagcaccacaa

SEQ ID NO: 87144 - RNA, 21 nt, synthetic construct
  source 1..21: mol_type = other RNA
gctccaccaccaacccctcca

SEQ ID NO: 87145 - RNA, 21 nt, synthetic construct
  source 1..21: mol_type = other RNA
gctccaccaccaacccctcca

SEQ ID NO: 87146 - RNA, 21 nt, synthetic construct
  source 1..21: mol_type = other RNA
gctccaccaccaacccctcca

SEQ ID NO: 87147 - RNA, 21 nt, synthetic construct
  source 1..21: mol_type = other RNA
gctccaccaccaacccctcca

SEQ ID NO: 87148 - RNA, 21 nt, synthetic construct
  source 1..21: mol_type = other RNA
gctccaccaccaacccctcca

SEQ ID NO: 87149 - RNA, 21 nt, synthetic construct
  source 1..21: mol_type = other RNA
ctgcgagggctcctgccccga

SEQ ID NO: 87150 - RNA, 21 nt, synthetic construct
  source 1..21: mol_type = other RNA
ggatccacggccaccctgtca

SEQ ID NO: 87151 - RNA, 21 nt, synthetic construct
  source 1..21: mol_type = other RNA
ccagagcccacagctggagga

SEQ ID NO: 87152 - RNA, 21 nt, synthetic construct
  source 1..21: mol_type = other RNA
aggatggctgctgggccccga

SEQ ID NO: 87153 - RNA, 21 nt, synthetic construct
  source 1..21: mol_type = other RNA
acctgtggcctgtgtggggaa

SEQ ID NO: 87154 - RNA, 21 nt, synthetic construct
  source 1..21: mol_type = other RNA
gcgcgcagctctgcgaggaca

SEQ ID NO: 87155 - RNA, 21 nt, synthetic construct
  source 1..21: mol_type = other RNA
cacctgcacctgcaggaacca

SEQ ID NO: 87156 - RNA, 21 nt, synthetic construct
  source 1..21: mol_type = other RNA
gcaccagccctcagccctcca

SEQ ID NO: 87157 - RNA, 21 nt, synthetic construct
  source 1..21: mol_type = other RNA
cccggccagcaccacagcaga

SEQ ID NO: 87158 - RNA, 21 nt, synthetic construct
  source 1..21: mol_type = other RNA
aacaccaccaccagccaggga

SEQ ID NO: 87159 - RNA, 21 nt, synthetic construct
  source 1..21: mol_type = other RNA
agactgcccacacctccacaa

SEQ ID NO: 87160 - RNA, 21 nt, synthetic construct
  source 1..21: mol_type = other RNA
gactgcccacacctccacaga

SEQ ID NO: 87161 - RNA, 21 nt, synthetic construct
  source 1..21: mol_type = other RNA
ccccctcctccaccccaggaa

SEQ ID NO: 87162 - RNA, 21 nt, synthetic construct
  source 1..21: mol_type = other RNA
cctttccagccctcaccctaa

SEQ ID NO: 87163 - RNA, 21 nt, synthetic construct
  source 1..21: mol_type = other RNA
ccacaccacggccacctccaa

SEQ ID NO: 87164 - RNA, 21 nt, synthetic construct
  source 1..21: mol_type = other RNA
ccaggaccacagccacggcca

SEQ ID NO: 87165 - RNA, 21 nt, synthetic construct
  source 1..21: mol_type = other RNA
agccatcccctcctcctccca

SEQ ID NO: 87166 - RNA, 21 nt, synthetic construct
  source 1..21: mol_type = other RNA
gccatcccctcctcctcccta

SEQ ID NO: 87167 - RNA, 21 nt, synthetic construct
  source 1..21: mol_type = other RNA
ctcctccactccagagactga

SEQ ID NO: 87168 - RNA, 21 nt, synthetic construct
  source 1..21: mol_type = other RNA
ccccctcctccaccccaggaa

SEQ ID NO: 87169 - RNA, 21 nt, synthetic construct
  source 1..21: mol_type = other RNA
gatccctgtcccccagcagta

SEQ ID NO: 87170 - RNA, 21 nt, synthetic construct
  source 1..21: mol_type = other RNA
ccactggccccacggccacca

SEQ ID NO: 87171 - RNA, 21 nt, synthetic construct
  source 1..21: mol_type = other RNA
ccccctcctccaccccaggaa

SEQ ID NO: 87172 - RNA, 21 nt, synthetic construct
  source 1..21: mol_type = other RNA
agccatcccctcctcctccca

SEQ ID NO: 87173 - RNA, 21 nt, synthetic construct
  source 1..21: mol_type = other RNA
gccatcccctcctcctcccta

SEQ ID NO: 87174 - RNA, 21 nt, synthetic construct
  source 1..21: mol_type = other RNA
agactgcccacacctccacaa

SEQ ID NO: 87175 - RNA, 21 nt, synthetic construct
  source 1..21: mol_type = other RNA
gactgcccacacctccacaga

SEQ ID NO: 87176 - RNA, 21 nt, synthetic construct
  source 1..21: mol_type = other RNA
gatccctgtcccccagcagta

SEQ ID NO: 87177 - RNA, 21 nt, synthetic construct
  source 1..21: mol_type = other RNA
ccacaccacggccacctccaa

SEQ ID NO: 87178 - RNA, 21 nt, synthetic construct
  source 1..21: mol_type = other RNA
catcccctcctccacccttga

SEQ ID NO: 87179 - RNA, 21 nt, synthetic construct
  source 1..21: mol_type = other RNA
ccactggccccacggccacca

SEQ ID NO: 87180 - RNA, 21 nt, synthetic construct
  source 1..21: mol_type = other RNA
agccatcccctcctcctccca

SEQ ID NO: 87181 - RNA, 21 nt, synthetic construct
  source 1..21: mol_type = other RNA
gccatcccctcctcctcccta

SEQ ID NO: 87182 - RNA, 21 nt, synthetic construct
  source 1..21: mol_type = other RNA
ctcctccactccagagactga

SEQ ID NO: 87183 - RNA, 21 nt, synthetic construct
  source 1..21: mol_type = other RNA
ccccctcctccaccccaggaa

SEQ ID NO: 87184 - RNA, 21 nt, synthetic construct
  source 1..21: mol_type = other RNA
gccgctgccgcccgctgccca

SEQ ID NO: 87185 - RNA, 21 nt, synthetic construct
  source 1..21: mol_type = other RNA
ccccactgccagccccgcaga

SEQ ID NO: 87186 - RNA, 21 nt, synthetic construct
  source 1..21: mol_type = other RNA
ccactgccagccccgcagcca

SEQ ID NO: 87187 - RNA, 21 nt, synthetic construct
  source 1..21: mol_type = other RNA
cactgccagccccgcagccca

SEQ ID NO: 87188 - RNA, 21 nt, synthetic construct
  source 1..21: mol_type = other RNA
cagagcccacagctggaggga

SEQ ID NO: 87189 - RNA, 21 nt, synthetic construct
  source 1..21: mol_type = other RNA
agagcccacagctggagggga

SEQ ID NO: 87190 - RNA, 21 nt, synthetic construct
  source 1..21: mol_type = other RNA
acctgcccccagagcctgcca

SEQ ID NO: 87191 - RNA, 21 nt, synthetic construct
  source 1..21: mol_type = other RNA
gagtgtggctcaccctgcaca

SEQ ID NO: 87192 - RNA, 21 nt, synthetic construct
  source 1..21: mol_type = other RNA
gccaccacacccacagtcaca

SEQ ID NO: 87193 - RNA, 21 nt, synthetic construct
  source 1..21: mol_type = other RNA
aacagccaacagagtccccca

SEQ ID NO: 87194 - RNA, 21 nt, synthetic construct
  source 1..21: mol_type = other RNA
aggccactgctgtctgagaaa

SEQ ID NO: 87195 - RNA, 21 nt, synthetic construct
  source 1..21: mol_type = other RNA
cagtccccaccctctcagaaa

SEQ ID NO: 87196 - RNA, 21 nt, synthetic construct
  source 1..21: mol_type = other RNA
accatggccaccacacacgga

SEQ ID NO: 87197 - RNA, 21 nt, synthetic construct
  source 1..21: mol_type = other RNA
gcagggtaactcagggctgaa

SEQ ID NO: 87198 - RNA, 21 nt, synthetic construct
  source 1..21: mol_type = other RNA
ctgctggacccaaagcctgta

SEQ ID NO: 87199 - RNA, 21 nt, synthetic construct
  source 1..21: mol_type = other RNA
caccacacccacagtcaccaa

SEQ ID NO: 87200 - RNA, 21 nt, synthetic construct
  source 1..21: mol_type = other RNA
gcagccaccagcagcacagta

SEQ ID NO: 87201 - RNA, 21 nt, synthetic construct
  source 1..21: mol_type = other RNA
cctgtcccccagcagtcccca

SEQ ID NO: 87202 - RNA, 21 nt, synthetic construct
  source 1..21: mol_type = other RNA
gcagccaccagcagcacagta

SEQ ID NO: 87203 - RNA, 21 nt, synthetic construct
  source 1..21: mol_type = other RNA
gcagccaccagcagcacagta

SEQ ID NO: 87204 - RNA, 21 nt, synthetic construct
  source 1..21: mol_type = other RNA
cctgtcccccagcagtcccca

SEQ ID NO: 87205 - RNA, 21 nt, synthetic construct
  source 1..21: mol_type = other RNA
ccagagcctgcctgtgtgcca

SEQ ID NO: 87206 - RNA, 21 nt, synthetic construct
  source 1..21: mol_type = other RNA
gggcggggcccacatctccaa

SEQ ID NO: 87207 - RNA, 21 nt, synthetic construct
  source 1..21: mol_type = other RNA
caccgccagtgtcctccgcca

SEQ ID NO: 87208 - RNA, 21 nt, synthetic construct
  source 1..21: mol_type = other RNA
agggctcctgccccggagcga

SEQ ID NO: 87209 - RNA, 21 nt, synthetic construct
  source 1..21: mol_type = other RNA
gggcaccgcccagagcccgga

SEQ ID NO: 87210 - RNA, 21 nt, synthetic construct
  source 1..21: mol_type = other RNA
ggcggggcccacatctccaca

SEQ ID NO: 87211 - RNA, 21 nt, synthetic construct
  source 1..21: mol_type = other RNA
tccccctcctgcccggacgca

SEQ ID NO: 87212 - RNA, 21 nt, synthetic construct
  source 1..21: mol_type = other RNA
ccctgggagagcctgtggcca

SEQ ID NO: 87213 - RNA, 21 nt, synthetic construct
  source 1..21: mol_type = other RNA
gtcccagcacagaccaccaca

SEQ ID NO: 87214 - RNA, 21 nt, synthetic construct
  source 1..21: mol_type = other RNA
ccctcctccacccttgggaca

SEQ ID NO: 87215 - RNA, 21 nt, synthetic construct
  source 1..21: mol_type = other RNA
gccaccacacccacagtcata

SEQ ID NO: 87216 - RNA, 21 nt, synthetic construct
  source 1..21: mol_type = other RNA
gggctcctgccccggagcgta

SEQ ID NO: 87217 - RNA, 21 nt, synthetic construct
  source 1..21: mol_type = other RNA
gccaccagcagcacagtgaca

SEQ ID NO: 87218 - RNA, 21 nt, synthetic construct
  source 1..21: mol_type = other RNA
accccctcctccactccggga

SEQ ID NO: 87219 - RNA, 21 nt, synthetic construct
  source 1..21: mol_type = other RNA
gccaccagcagcacagtgaca

SEQ ID NO: 87220 - RNA, 21 nt, synthetic construct
  source 1..21: mol_type = other RNA
gccaccagcagcacagtgaca

SEQ ID NO: 87221 - RNA, 21 nt, synthetic construct
  source 1..21: mol_type = other RNA
accccctcctccactccggga

SEQ ID NO: 87222 - RNA, 21 nt, synthetic construct
  source 1..21: mol_type = other RNA
agaacagaccaccacacccaa

SEQ ID NO: 87223 - RNA, 21 nt, synthetic construct
  source 1..21: mol_type = other RNA
agaacagaccaccacacccga

SEQ ID NO: 87224 - RNA, 21 nt, synthetic construct
  source 1..21: mol_type = other RNA
agagcctgcctgtgtgcccga

SEQ ID NO: 87225 - RNA, 21 nt, synthetic construct
  source 1..21: mol_type = other RNA
cagggtgtgcagcccccatga

SEQ ID NO: 87226 - RNA, 21 nt, synthetic construct
  source 1..21: mol_type = other RNA
ctgtccacctggagccaggaa

SEQ ID NO: 87227 - RNA, 21 nt, synthetic construct
  source 1..21: mol_type = other RNA
agctcctgcacctgctccgga

SEQ ID NO: 87228 - RNA, 21 nt, synthetic construct
  source 1..21: mol_type = other RNA
gcagacaggcctggggctgca

SEQ ID NO: 87229 - RNA, 21 nt, synthetic construct
  source 1..21: mol_type = other RNA
caccaccaccaccacccagga

SEQ ID NO: 87230 - RNA, 21 nt, synthetic construct
  source 1..21: mol_type = other RNA
accccctcctccatcccggga

SEQ ID NO: 87231 - RNA, 21 nt, synthetic construct
  source 1..21: mol_type = other RNA
ggccacctccaggaccacaga

SEQ ID NO: 87232 - RNA, 21 nt, synthetic construct
  source 1..21: mol_type = other RNA
ccacagccacggccacaccca

SEQ ID NO: 87233 - RNA, 21 nt, synthetic construct
  source 1..21: mol_type = other RNA
accccctcctccatcccggga

SEQ ID NO: 87234 - RNA, 21 nt, synthetic construct
  source 1..21: mol_type = other RNA
gtccaccccctcctccactca

SEQ ID NO: 87235 - RNA, 21 nt, synthetic construct
  source 1..21: mol_type = other RNA
accccctcctccatcccggga

SEQ ID NO: 87236 - RNA, 21 nt, synthetic construct
  source 1..21: mol_type = other RNA
gtccaccccctcctccactca

SEQ ID NO: 87237 - RNA, 21 nt, synthetic construct
  source 1..21: mol_type = other RNA
accccctcctccatcccggga

SEQ ID NO: 87238 - RNA, 21 nt, synthetic construct
  source 1..21: mol_type = other RNA
cgctggggcagacaggctgga

SEQ ID NO: 87239 - RNA, 21 nt, synthetic construct
  source 1..21: mol_type = other RNA
accccggccaccagctctaca

SEQ ID NO: 87240 - RNA, 21 nt, synthetic construct
  source 1..21: mol_type = other RNA
accccggccaccagctctaca

SEQ ID NO: 87241 - RNA, 21 nt, synthetic construct
  source 1..21: mol_type = other RNA
accccggccaccagctctaca

SEQ ID NO: 87242 - RNA, 21 nt, synthetic construct
  source 1..21: mol_type = other RNA
accccggccaccagctctaca

SEQ ID NO: 87243 - RNA, 21 nt, synthetic construct
  source 1..21: mol_type = other RNA
ccctcagccctccctcagtga

SEQ ID NO: 87244 - RNA, 21 nt, synthetic construct
  source 1..21: mol_type = other RNA
cacagaccaccacacccacga

SEQ ID NO: 87245 - RNA, 21 nt, synthetic construct
  source 1..21: mol_type = other RNA
cacagaccaccacacccacga

SEQ ID NO: 87246 - RNA, 21 nt, synthetic construct
  source 1..21: mol_type = other RNA
cacagaccaccacacccacga

SEQ ID NO: 87247 - RNA, 21 nt, synthetic construct
  source 1..21: mol_type = other RNA
cacagaccaccacacccacga

SEQ ID NO: 87248 - RNA, 21 nt, synthetic construct
  source 1..21: mol_type = other RNA
cacagaccaccacacccacga

SEQ ID NO: 87249 - RNA, 21 nt, synthetic construct
  source 1..21: mol_type = other RNA
cggatgggagtgggggctgca

SEQ ID NO: 87250 - RNA, 21 nt, synthetic construct
  source 1..21: mol_type = other RNA
cgcctcctccacccaggcaaa

SEQ ID NO: 87251 - RNA, 21 nt, synthetic construct
  source 1..21: mol_type = other RNA
cgcctcctccacccaggcaaa

SEQ ID NO: 87252 - RNA, 21 nt, synthetic construct
  source 1..21: mol_type = other RNA
cgcctcctccacccaggcaaa

SEQ ID NO: 87253 - RNA, 21 nt, synthetic construct
  source 1..21: mol_type = other RNA
tacagcctgccacctgcaaca

SEQ ID NO: 87254 - RNA, 21 nt, synthetic construct
  source 1..21: mol_type = other RNA
gctggtccaggcaaggccaga

SEQ ID NO: 87255 - RNA, 21 nt, synthetic construct
  source 1..21: mol_type = other RNA
ccctgtgtgcacaacgaggca

SEQ ID NO: 87256 - RNA, 21 nt, synthetic construct
  source 1..21: mol_type = other RNA
cacccacaaccagaggctcca

SEQ ID NO: 87257 - RNA, 21 nt, synthetic construct
  source 1..21: mol_type = other RNA
cacccacaaccagaggctcca

SEQ ID NO: 87258 - RNA, 21 nt, synthetic construct
  source 1..21: mol_type = other RNA
ctgcacggcctctgccactga

SEQ ID NO: 87259 - RNA, 21 nt, synthetic construct
  source 1..21: mol_type = other RNA
ttccatgtccaccccctccta

SEQ ID NO: 87260 - RNA, 21 nt, synthetic construct
  source 1..21: mol_type = other RNA
cctccttcacccttgggacca

SEQ ID NO: 87261 - RNA, 21 nt, synthetic construct
  source 1..21: mol_type = other RNA
ccctcctcctccctgggcaca

SEQ ID NO: 87262 - RNA, 21 nt, synthetic construct
  source 1..21: mol_type = other RNA
ccctcctcctccctgggcaca

SEQ ID NO: 87263 - RNA, 21 nt, synthetic construct
  source 1..21: mol_type = other RNA
ccctcctcctccctgggcaca

SEQ ID NO: 87264 - RNA, 21 nt, synthetic construct
  source 1..21: mol_type = other RNA
gcccacagctggaggggatga

SEQ ID NO: 87265 - RNA, 21 nt, synthetic construct
  source 1..21: mol_type = other RNA
actgtccacacctccacagta

SEQ ID NO: 87266 - RNA, 21 nt, synthetic construct
  source 1..21: mol_type = other RNA
actgtccacacctccacagta

SEQ ID NO: 87267 - RNA, 21 nt, synthetic construct
  source 1..21: mol_type = other RNA
actgtccacacctccacagta

SEQ ID NO: 87268 - RNA, 21 nt, synthetic construct
  source 1..21: mol_type = other RNA
ggccactgctgtctgagaaca

SEQ ID NO: 87269 - RNA, 21 nt, synthetic construct
  source 1..21: mol_type = other RNA
agtccccaccctctcagaaga

SEQ ID NO: 87270 - RNA, 21 nt, synthetic construct
  source 1..21: mol_type = other RNA
aggggctggtgctggaggcga

SEQ ID NO: 87271 - RNA, 21 nt, synthetic construct
  source 1..21: mol_type = other RNA
tccccggccccaggcaccaga

SEQ ID NO: 87272 - RNA, 21 nt, synthetic construct
  source 1..21: mol_type = other RNA
gtccccaccctctcagaagga

SEQ ID NO: 87273 - RNA, 21 nt, synthetic construct
  source 1..21: mol_type = other RNA
tccccaccctctcagaaggaa

SEQ ID NO: 87274 - RNA, 21 nt, synthetic construct
  source 1..21: mol_type = other RNA
gccaccggctccaccaccaaa

SEQ ID NO: 87275 - RNA, 21 nt, synthetic construct
  source 1..21: mol_type = other RNA
gccaccggctccaccaccaaa

SEQ ID NO: 87276 - RNA, 21 nt, synthetic construct
  source 1..21: mol_type = other RNA
gatcctcacagagcccagcaa

SEQ ID NO: 87277 - RNA, 21 nt, synthetic construct
  source 1..21: mol_type = other RNA
agagccactccctcctccaga

SEQ ID NO: 87278 - RNA, 21 nt, synthetic construct
  source 1..21: mol_type = other RNA
agccatcccctcttcctccca

SEQ ID NO: 87279 - RNA, 21 nt, synthetic construct
  source 1..21: mol_type = other RNA
gccaccggctccaccaccaaa

SEQ ID NO: 87280 - RNA, 21 nt, synthetic construct
  source 1..21: mol_type = other RNA
gccaccggctccaccaccaaa

SEQ ID NO: 87281 - RNA, 21 nt, synthetic construct
  source 1..21: mol_type = other RNA
atcccctcctccacccttgga

SEQ ID NO: 87282 - RNA, 21 nt, synthetic construct
  source 1..21: mol_type = other RNA
gccaccggctccaccaccaaa

SEQ ID NO: 87283 - RNA, 21 nt, synthetic construct
  source 1..21: mol_type = other RNA
ccgcccgctgcccccgcgcca

SEQ ID NO: 87284 - RNA, 21 nt, synthetic construct
  source 1..21: mol_type = other RNA
aagtcttccaggcccggctga

SEQ ID NO: 87285 - RNA, 21 nt, synthetic construct
  source 1..21: mol_type = other RNA
gcccccagagcctgcctgtga

SEQ ID NO: 87286 - RNA, 21 nt, synthetic construct
  source 1..21: mol_type = other RNA
tgcacacctacacccacgtga

SEQ ID NO: 87287 - RNA, 21 nt, synthetic construct
  source 1..21: mol_type = other RNA
cagtgctgacaagcacagcca

SEQ ID NO: 87288 - RNA, 21 nt, synthetic construct
  source 1..21: mol_type = other RNA
cagtgctgacaagcacagcca

SEQ ID NO: 87289 - RNA, 21 nt, synthetic construct
  source 1..21: mol_type = other RNA
cagtgctgacaagcacagcca

SEQ ID NO: 87290 - RNA, 21 nt, synthetic construct
  source 1..21: mol_type = other RNA
ccctcctcaactcctgggaca

SEQ ID NO: 87291 - RNA, 21 nt, synthetic construct
  source 1..21: mol_type = other RNA
gcaaccttcccaggcgcccta

SEQ ID NO: 87292 - RNA, 21 nt, synthetic construct
  source 1..21: mol_type = other RNA
tcacagagccttccacggtga

SEQ ID NO: 87293 - RNA, 21 nt, synthetic construct
  source 1..21: mol_type = other RNA
tcacagagccttccacggtga

SEQ ID NO: 87294 - RNA, 21 nt, synthetic construct
  source 1..21: mol_type = other RNA
tgtgcagcccccatggtgtaa

SEQ ID NO: 87295 - RNA, 21 nt, synthetic construct
  source 1..21: mol_type = other RNA
agctccagagccactccctca

SEQ ID NO: 87296 - RNA, 21 nt, synthetic construct
  source 1..21: mol_type = other RNA
tccggccgctggggcagacaa

SEQ ID NO: 87297 - RNA, 21 nt, synthetic construct
  source 1..21: mol_type = other RNA
aacccagaccacagcaaccga

SEQ ID NO: 87298 - RNA, 21 nt, synthetic construct
  source 1..21: mol_type = other RNA
gaagtgcccacccagccagca

SEQ ID NO: 87299 - RNA, 21 nt, synthetic construct
  source 1..21: mol_type = other RNA
gtgctggaggcgtccaacgga

SEQ ID NO: 87300 - RNA, 21 nt, synthetic construct
  source 1..21: mol_type = other RNA
ggaactgggagcaggagggca

SEQ ID NO: 87301 - RNA, 21 nt, synthetic construct
  source 1..21: mol_type = other RNA
tcccggcccaggaggccacta

SEQ ID NO: 87302 - RNA, 21 nt, synthetic construct
  source 1..21: mol_type = other RNA
tcacagagccttccacgggga

SEQ ID NO: 87303 - RNA, 21 nt, synthetic construct
  source 1..21: mol_type = other RNA
tcacagagccttccacgggga

SEQ ID NO: 87304 - RNA, 21 nt, synthetic construct
  source 1..21: mol_type = other RNA
ggggtgacttccactacaaga

SEQ ID NO: 87305 - RNA, 21 nt, synthetic construct
  source 1..21: mol_type = other RNA
cagctcctgcacctgctccga

SEQ ID NO: 87306 - RNA, 21 nt, synthetic construct
  source 1..21: mol_type = other RNA
ctgctggtgcagctggtgcca

SEQ ID NO: 87307 - RNA, 21 nt, synthetic construct
  source 1..21: mol_type = other RNA
gaccaccaccgccaccacaca

SEQ ID NO: 87308 - RNA, 21 nt, synthetic construct
  source 1..21: mol_type = other RNA
ccgcctcctccacccaggcaa

SEQ ID NO: 87309 - RNA, 21 nt, synthetic construct
  source 1..21: mol_type = other RNA
gaccaccaccgccaccacaca

SEQ ID NO: 87310 - RNA, 21 nt, synthetic construct
  source 1..21: mol_type = other RNA
gaccaccaccgccaccacaca

SEQ ID NO: 87311 - RNA, 21 nt, synthetic construct
  source 1..21: mol_type = other RNA
ccgcctcctccacccaggcaa

SEQ ID NO: 87312 - RNA, 21 nt, synthetic construct
  source 1..21: mol_type = other RNA
gaccaccaccgccaccacaca

SEQ ID NO: 87313 - RNA, 21 nt, synthetic construct
  source 1..21: mol_type = other RNA
ccgcctcctccacccaggcaa

SEQ ID NO: 87314 - RNA, 21 nt, synthetic construct
  source 1..21: mol_type = other RNA
agagggccgggtggggaccca

SEQ ID NO: 87315 - RNA, 21 nt, synthetic construct
  source 1..21: mol_type = other RNA
cagggacgacctggatcctca

SEQ ID NO: 87316 - RNA, 21 nt, synthetic construct
  source 1..21: mol_type = other RNA
agcagaggcccaggccatgca

SEQ ID NO: 87317 - RNA, 21 nt, synthetic construct
  source 1..21: mol_type = other RNA
acttcccacaccccagcagca

SEQ ID NO: 87318 - RNA, 21 nt, synthetic construct
  source 1..21: mol_type = other RNA
acttcccacaccccagcagca

SEQ ID NO: 87319 - RNA, 21 nt, synthetic construct
  source 1..21: mol_type = other RNA
acttcccacaccccagcagca

SEQ ID NO: 87320 - RNA, 21 nt, synthetic construct
  source 1..21: mol_type = other RNA
cggctccctccctgcccgtca

SEQ ID NO: 87321 - RNA, 21 nt, synthetic construct
  source 1..21: mol_type = other RNA
agcccccaggatgggtgccca

SEQ ID NO: 87322 - RNA, 21 nt, synthetic construct
  source 1..21: mol_type = other RNA
cctgctggagctggatcccaa

SEQ ID NO: 87323 - RNA, 21 nt, synthetic construct
  source 1..21: mol_type = other RNA
ctggggctgcagctgctggta

SEQ ID NO: 87324 - RNA, 21 nt, synthetic construct
  source 1..21: mol_type = other RNA
ggatgggagtgggggctgcaa

SEQ ID NO: 87325 - RNA, 21 nt, synthetic construct
  source 1..21: mol_type = other RNA
ccatcccctcttcctccctga

SEQ ID NO: 87326 - RNA, 21 nt, synthetic construct
  source 1..21: mol_type = other RNA
tcacagaccaccacacccaca

SEQ ID NO: 87327 - RNA, 21 nt, synthetic construct
  source 1..21: mol_type = other RNA
ggccaccatgtccacagccaa

SEQ ID NO: 87328 - RNA, 21 nt, synthetic construct
  source 1..21: mol_type = other RNA
tgtccacagccacaccctcca

SEQ ID NO: 87329 - RNA, 21 nt, synthetic construct
  source 1..21: mol_type = other RNA
gtccacagccacaccctccta

SEQ ID NO: 87330 - RNA, 21 nt, synthetic construct
  source 1..21: mol_type = other RNA
cgtgcccaggcccagcctgga

SEQ ID NO: 87331 - RNA, 21 nt, synthetic construct
  source 1..21: mol_type = other RNA
caccgcctcctccacccagga

SEQ ID NO: 87332 - RNA, 21 nt, synthetic construct
  source 1..21: mol_type = other RNA
tcacagaccaccacacccaca

SEQ ID NO: 87333 - RNA, 21 nt, synthetic construct
  source 1..21: mol_type = other RNA
ggccaccatgtccacagccaa

SEQ ID NO: 87334 - RNA, 21 nt, synthetic construct
  source 1..21: mol_type = other RNA
tgtccacagccacaccctcca

SEQ ID NO: 87335 - RNA, 21 nt, synthetic construct
  source 1..21: mol_type = other RNA
gtccacagccacaccctccta

SEQ ID NO: 87336 - RNA, 21 nt, synthetic construct
  source 1..21: mol_type = other RNA
cttcccacaccccagcagcaa

SEQ ID NO: 87337 - RNA, 21 nt, synthetic construct
  source 1..21: mol_type = other RNA
cgtgcccaggcccagcctgga

SEQ ID NO: 87338 - RNA, 21 nt, synthetic construct
  source 1..21: mol_type = other RNA
ccatcccctcttcctccctga

SEQ ID NO: 87339 - RNA, 21 nt, synthetic construct
  source 1..21: mol_type = other RNA
tcacagaccaccacacccaca

SEQ ID NO: 87340 - RNA, 21 nt, synthetic construct
  source 1..21: mol_type = other RNA
ggccaccatgtccacagccaa

SEQ ID NO: 87341 - RNA, 21 nt, synthetic construct
  source 1..21: mol_type = other RNA
tgtccacagccacaccctcca

SEQ ID NO: 87342 - RNA, 21 nt, synthetic construct
  source 1..21: mol_type = other RNA
gtccacagccacaccctccta

SEQ ID NO: 87343 - RNA, 21 nt, synthetic construct
  source 1..21: mol_type = other RNA
tccacagccacaccctcctca

SEQ ID NO: 87344 - RNA, 21 nt, synthetic construct
  source 1..21: mol_type = other RNA
cttcccacaccccagcagcaa

SEQ ID NO: 87345 - RNA, 21 nt, synthetic construct
  source 1..21: mol_type = other RNA
cgtgcccaggcccagcctgga

SEQ ID NO: 87346 - RNA, 21 nt, synthetic construct
  source 1..21: mol_type = other RNA
caccgcctcctccacccagga

SEQ ID NO: 87347 - RNA, 21 nt, synthetic construct
  source 1..21: mol_type = other RNA
tcacagaccaccacacccaca

SEQ ID NO: 87348 - RNA, 21 nt, synthetic construct
  source 1..21: mol_type = other RNA
ggccaccatgtccacagccaa

SEQ ID NO: 87349 - RNA, 21 nt, synthetic construct
  source 1..21: mol_type = other RNA
tgtccacagccacaccctcca

SEQ ID NO: 87350 - RNA, 21 nt, synthetic construct
  source 1..21: mol_type = other RNA
gtccacagccacaccctccta

SEQ ID NO: 87351 - RNA, 21 nt, synthetic construct
  source 1..21: mol_type = other RNA
cccctcttccaccccaggaaa

SEQ ID NO: 87352 - RNA, 21 nt, synthetic construct
  source 1..21: mol_type = other RNA
cttcccacaccccagcagcaa

SEQ ID NO: 87353 - RNA, 21 nt, synthetic construct
  source 1..21: mol_type = other RNA
cgtgcccaggcccagcctgga

SEQ ID NO: 87354 - RNA, 21 nt, synthetic construct
  source 1..21: mol_type = other RNA
caccgcctcctccacccagga

SEQ ID NO: 87355 - RNA, 21 nt, synthetic construct
  source 1..21: mol_type = other RNA
tcacagaccaccacacccaca

SEQ ID NO: 87356 - RNA, 21 nt, synthetic construct
  source 1..21: mol_type = other RNA
ggccaccatgtccacagccaa

SEQ ID NO: 87357 - RNA, 21 nt, synthetic construct
  source 1..21: mol_type = other RNA
tgtccacagccacaccctcca

SEQ ID NO: 87358 - RNA, 21 nt, synthetic construct
  source 1..21: mol_type = other RNA
gtccacagccacaccctccta

SEQ ID NO: 87359 - RNA, 21 nt, synthetic construct
  source 1..21: mol_type = other RNA
gcacagaccaccacacccata

SEQ ID NO: 87360 - RNA, 21 nt, synthetic construct
  source 1..21: mol_type = other RNA
ccactggcttccccagctcca

SEQ ID NO: 87361 - RNA, 21 nt, synthetic construct
  source 1..21: mol_type = other RNA
cctgctggacccaaagcctga

SEQ ID NO: 87362 - RNA, 21 nt, synthetic construct
  source 1..21: mol_type = other RNA
tgtgctggggaccaccaccaa

SEQ ID NO: 87363 - RNA, 21 nt, synthetic construct
  source 1..21: mol_type = other RNA
actgccagccccgcagcccca

SEQ ID NO: 87364 - RNA, 21 nt, synthetic construct
  source 1..21: mol_type = other RNA
ctcagcagaggcccaggccaa

SEQ ID NO: 87365 - RNA, 21 nt, synthetic construct
  source 1..21: mol_type = other RNA
agccctcagccctccctcaga

SEQ ID NO: 87366 - RNA, 21 nt, synthetic construct
  source 1..21: mol_type = other RNA
cagcagaggcccaggccatga

SEQ ID NO: 87367 - RNA, 21 nt, synthetic construct
  source 1..21: mol_type = other RNA
accgcctcctccacccaggca

SEQ ID NO: 87368 - RNA, 21 nt, synthetic construct
  source 1..21: mol_type = other RNA
accgcctcctccacccaggca

SEQ ID NO: 87369 - RNA, 21 nt, synthetic construct
  source 1..21: mol_type = other RNA
agtcacccccttccccaggga

SEQ ID NO: 87370 - RNA, 21 nt, synthetic construct
  source 1..21: mol_type = other RNA
accgcctcctccacccaggca

SEQ ID NO: 87371 - RNA, 21 nt, synthetic construct
  source 1..21: mol_type = other RNA
cgatccctgtcccccagcaga

SEQ ID NO: 87372 - RNA, 21 nt, synthetic construct
  source 1..21: mol_type = other RNA
acagccacagccacacccaga

SEQ ID NO: 87373 - RNA, 21 nt, synthetic construct
  source 1..21: mol_type = other RNA
cagccacagccacacccagca

SEQ ID NO: 87374 - RNA, 21 nt, synthetic construct
  source 1..21: mol_type = other RNA
cgatccctgtcccccagcaga

SEQ ID NO: 87375 - RNA, 21 nt, synthetic construct
  source 1..21: mol_type = other RNA
actacaagggcagggtctgca

SEQ ID NO: 87376 - RNA, 21 nt, synthetic construct
  source 1..21: mol_type = other RNA
gtgtgagtggacagagtggta

SEQ ID NO: 87377 - RNA, 21 nt, synthetic construct
  source 1..21: mol_type = other RNA
ctacaagggcagggtctgcga

SEQ ID NO: 87378 - RNA, 21 nt, synthetic construct
  source 1..21: mol_type = other RNA
gtaccaccacctgccagccca

SEQ ID NO: 87379 - RNA, 21 nt, synthetic construct
  source 1..21: mol_type = other RNA
ccgtctgtgagcagcccctga

SEQ ID NO: 87380 - RNA, 21 nt, synthetic construct
  source 1..21: mol_type = other RNA
ccgtctgtgagcagcccctga

SEQ ID NO: 87381 - RNA, 21 nt, synthetic construct
  source 1..21: mol_type = other RNA
ccgtctgtgagcagcccctga

SEQ ID NO: 87382 - RNA, 21 nt, synthetic construct
  source 1..21: mol_type = other RNA
gtactacgaggcctgcgtgaa

SEQ ID NO: 87383 - RNA, 21 nt, synthetic construct
  source 1..21: mol_type = other RNA
tcaaggcccaggggctggtga

SEQ ID NO: 87384 - RNA, 21 nt, synthetic construct
  source 1..21: mol_type = other RNA
ctggagggacggcgtctgcaa

SEQ ID NO: 87385 - RNA, 21 nt, synthetic construct
  source 1..21: mol_type = other RNA
gtctgtgagcagcccctggga

SEQ ID NO: 87386 - RNA, 21 nt, synthetic construct
  source 1..21: mol_type = other RNA
gtctgtgagcagcccctggga

SEQ ID NO: 87387 - RNA, 21 nt, synthetic construct
  source 1..21: mol_type = other RNA
gtctgtgagcagcccctggga

SEQ ID NO: 87388 - RNA, 21 nt, synthetic construct
  source 1..21: mol_type = other RNA
gtctgtgagcagcccctggga

SEQ ID NO: 87389 - RNA, 21 nt, synthetic construct
  source 1..21: mol_type = other RNA
gacggctgcttctgcccccca

SEQ ID NO: 87390 - RNA, 21 nt, synthetic construct
  source 1..21: mol_type = other RNA
ccagaagcagtgcagcatcca

SEQ ID NO: 87391 - RNA, 21 nt, synthetic construct
  source 1..21: mol_type = other RNA
ggacgtgggctgtttcagcaa

SEQ ID NO: 87392 - RNA, 21 nt, synthetic construct
  source 1..21: mol_type = other RNA
caagtacatgcagaactgcca

SEQ ID NO: 87393 - RNA, 21 nt, synthetic construct
  source 1..21: mol_type = other RNA
caggaaaaccggctgctgcta

SEQ ID NO: 87394 - RNA, 21 nt, synthetic construct
  source 1..21: mol_type = other RNA
tccacccgtcactgtcttcca

SEQ ID NO: 87395 - RNA, 21 nt, synthetic construct
  source 1..21: mol_type = other RNA
gggagcctcaggaaaaccgga

SEQ ID NO: 87396 - RNA, 21 nt, synthetic construct
  source 1..21: mol_type = other RNA
gcgggcctgtgtgtgtcctga

SEQ ID NO: 87397 - RNA, 21 nt, synthetic construct
  source 1..21: mol_type = other RNA
gggcctgtgtgtgtcctggca

SEQ ID NO: 87398 - RNA, 21 nt, synthetic construct
  source 1..21: mol_type = other RNA
cgtctgtgagcagcccctgga

SEQ ID NO: 87399 - RNA, 21 nt, synthetic construct
  source 1..21: mol_type = other RNA
cgtctgtgagcagcccctgga

SEQ ID NO: 87400 - RNA, 21 nt, synthetic construct
  source 1..21: mol_type = other RNA
cgtctgtgagcagcccctgga

SEQ ID NO: 87401 - RNA, 21 nt, synthetic construct
  source 1..21: mol_type = other RNA
gcggagcgaggactgcctgta

SEQ ID NO: 87402 - RNA, 21 nt, synthetic construct
  source 1..21: mol_type = other RNA
ggacccctgcacggccaacca

SEQ ID NO: 87403 - RNA, 21 nt, synthetic construct
  source 1..21: mol_type = other RNA
ccaaccccttccgcaagtcca

SEQ ID NO: 87404 - RNA, 21 nt, synthetic construct
  source 1..21: mol_type = other RNA
cggagcgaggactgcctgtga

SEQ ID NO: 87405 - RNA, 21 nt, synthetic construct
  source 1..21: mol_type = other RNA
actgcaacacctgcacctgca

SEQ ID NO: 87406 - RNA, 21 nt, synthetic construct
  source 1..21: mol_type = other RNA
aaggccatcaagctcttcgta

SEQ ID NO: 87407 - RNA, 21 nt, synthetic construct
  source 1..21: mol_type = other RNA
tgcacggccaaccccttccga

SEQ ID NO: 87408 - RNA, 21 nt, synthetic construct
  source 1..21: mol_type = other RNA
ttccgcaagtcctgggcccaa

SEQ ID NO: 87409 - RNA, 21 nt, synthetic construct
  source 1..21: mol_type = other RNA
tccgcaagtcctgggcccaga

SEQ ID NO: 87410 - RNA, 21 nt, synthetic construct
  source 1..21: mol_type = other RNA
cgggcctgtgtgtgtcctgga

SEQ ID NO: 87411 - RNA, 21 nt, synthetic construct
  source 1..21: mol_type = other RNA
cctcctcagtcctcaccacca

SEQ ID NO: 87412 - RNA, 21 nt, synthetic construct
  source 1..21: mol_type = other RNA
ctcctcagtcctcaccaccca

SEQ ID NO: 87413 - RNA, 21 nt, synthetic construct
  source 1..21: mol_type = other RNA
accccgcccaccagggccaga

SEQ ID NO: 87414 - RNA, 21 nt, synthetic construct
  source 1..21: mol_type = other RNA
ggcaccacccacatcacagaa

SEQ ID NO: 87415 - RNA, 21 nt, synthetic construct
  source 1..21: mol_type = other RNA
ggcaccacccacatcacagaa

SEQ ID NO: 87416 - RNA, 21 nt, synthetic construct
  source 1..21: mol_type = other RNA
ggcaccacccacatcacagaa

SEQ ID NO: 87417 - RNA, 21 nt, synthetic construct
  source 1..21: mol_type = other RNA
ggcaccacccacatcacagaa

SEQ ID NO: 87418 - RNA, 21 nt, synthetic construct
  source 1..21: mol_type = other RNA
atcaatgactttgccacgcga

SEQ ID NO: 87419 - RNA, 21 nt, synthetic construct
  source 1..21: mol_type = other RNA
gccagcacggagcctgctgta

SEQ ID NO: 87420 - RNA, 21 nt, synthetic construct
  source 1..21: mol_type = other RNA
actgtcccaggggtggccaca

SEQ ID NO: 87421 - RNA, 21 nt, synthetic construct
  source 1..21: mol_type = other RNA
cagactgggtccagctcagga

SEQ ID NO: 87422 - RNA, 21 nt, synthetic construct
  source 1..21: mol_type = other RNA
agactgggtccagctcaggca

SEQ ID NO: 87423 - RNA, 21 nt, synthetic construct
  source 1..21: mol_type = other RNA
tgtgtcctcctcagtcctcaa

SEQ ID NO: 87424 - RNA, 21 nt, synthetic construct
  source 1..21: mol_type = other RNA
gccgggcagtgctgtggggaa

SEQ ID NO: 87425 - RNA, 21 nt, synthetic construct
  source 1..21: mol_type = other RNA
tctctgcagaaaagcacagga

SEQ ID NO: 87426 - RNA, 21 nt, synthetic construct
  source 1..21: mol_type = other RNA
ctcccaggttgactccaccaa

SEQ ID NO: 87427 - RNA, 21 nt, synthetic construct
  source 1..21: mol_type = other RNA
tcagcaactgccagtcctgca

SEQ ID NO: 87428 - RNA, 21 nt, synthetic construct
  source 1..21: mol_type = other RNA
cagctcccacttctctactca

SEQ ID NO: 87429 - RNA, 21 nt, synthetic construct
  source 1..21: mol_type = other RNA
ggagaggacagtgccctgcta

SEQ ID NO: 87430 - RNA, 21 nt, synthetic construct
  source 1..21: mol_type = other RNA
acaagggcagggtctgcggca

SEQ ID NO: 87431 - RNA, 21 nt, synthetic construct
  source 1..21: mol_type = other RNA
cacagccaccacacccacaga

SEQ ID NO: 87432 - RNA, 21 nt, synthetic construct
  source 1..21: mol_type = other RNA
cacagccaccacacccacaga

SEQ ID NO: 87433 - RNA, 21 nt, synthetic construct
  source 1..21: mol_type = other RNA
cacagccaccacacccacaga

SEQ ID NO: 87434 - RNA, 21 nt, synthetic construct
  source 1..21: mol_type = other RNA
cacagccaccacacccacaga

SEQ ID NO: 87435 - RNA, 21 nt, synthetic construct
  source 1..21: mol_type = other RNA
cacagccaccacacccacaga

SEQ ID NO: 87436 - RNA, 21 nt, synthetic construct
  source 1..21: mol_type = other RNA
catcaaggcccaggggctgga

SEQ ID NO: 87437 - RNA, 21 nt, synthetic construct
  source 1..21: mol_type = other RNA
tgcctgtgcgccgcgctgtca

SEQ ID NO: 87438 - RNA, 21 nt, synthetic construct
  source 1..21: mol_type = other RNA
tgcacgcctgtgccgccaaga

SEQ ID NO: 87439 - RNA, 21 nt, synthetic construct
  source 1..21: mol_type = other RNA
cgactgcaacacctgcaccta

SEQ ID NO: 87440 - RNA, 21 nt, synthetic construct
  source 1..21: mol_type = other RNA
gactgcaacacctgcacctga

SEQ ID NO: 87441 - RNA, 21 nt, synthetic construct
  source 1..21: mol_type = other RNA
cctcctctgccctagggacca

SEQ ID NO: 87442 - RNA, 21 nt, synthetic construct
  source 1..21: mol_type = other RNA
cctcctctgccctagggacca

SEQ ID NO: 87443 - RNA, 21 nt, synthetic construct
  source 1..21: mol_type = other RNA
cctcctctgccctagggacca

SEQ ID NO: 87444 - RNA, 21 nt, synthetic construct
  source 1..21: mol_type = other RNA
cctcctctgccctagggacca

SEQ ID NO: 87445 - RNA, 21 nt, synthetic construct
  source 1..21: mol_type = other RNA
acctgcctctctggggacaca

SEQ ID NO: 87446 - RNA, 21 nt, synthetic construct
  source 1..21: mol_type = other RNA
atgtgcacgcctgtgccgcca

SEQ ID NO: 87447 - RNA, 21 nt, synthetic construct
  source 1..21: mol_type = other RNA
tggggatcttcctggtcatca

SEQ ID NO: 87448 - RNA, 21 nt, synthetic construct
  source 1..21: mol_type = other RNA
tgggaacttcaaccagaacca

SEQ ID NO: 87449 - RNA, 21 nt, synthetic construct
  source 1..21: mol_type = other RNA
aggactgcctgtgcgccgcga

SEQ ID NO: 87450 - RNA, 21 nt, synthetic construct
  source 1..21: mol_type = other RNA
ctctgcagaaaagcacaggga

SEQ ID NO: 87451 - RNA, 21 nt, synthetic construct
  source 1..21: mol_type = other RNA
caagggcagggtctgcggcca

SEQ ID NO: 87452 - RNA, 21 nt, synthetic construct
  source 1..21: mol_type = other RNA
aagggcagggtctgcggccta

SEQ ID NO: 87453 - RNA, 21 nt, synthetic construct
  source 1..21: mol_type = other RNA
cgaggcctgcgtgaacgacga

SEQ ID NO: 87454 - RNA, 21 nt, synthetic construct
  source 1..21: mol_type = other RNA
cagtgggcactgcctggtgga

SEQ ID NO: 87455 - RNA, 21 nt, synthetic construct
  source 1..21: mol_type = other RNA
ccagcacggagcctgctgtga

SEQ ID NO: 87456 - RNA, 21 nt, synthetic construct
  source 1..21: mol_type = other RNA
gcacagccaccacacccacaa

SEQ ID NO: 87457 - RNA, 21 nt, synthetic construct
  source 1..21: mol_type = other RNA
accctgctgcccagcagccca

SEQ ID NO: 87458 - RNA, 21 nt, synthetic construct
  source 1..21: mol_type = other RNA
tgccccagcaccccggccaca

SEQ ID NO: 87459 - RNA, 21 nt, synthetic construct
  source 1..21: mol_type = other RNA
gcacagccaccacacccacaa

SEQ ID NO: 87460 - RNA, 21 nt, synthetic construct
  source 1..21: mol_type = other RNA
accctgctgcccagcagccca

SEQ ID NO: 87461 - RNA, 21 nt, synthetic construct
  source 1..21: mol_type = other RNA
tgccccagcaccccggccaca

SEQ ID NO: 87462 - RNA, 21 nt, synthetic construct
  source 1..21: mol_type = other RNA
ccaccacacccacagccacca

SEQ ID NO: 87463 - RNA, 21 nt, synthetic construct
  source 1..21: mol_type = other RNA
gcacagccaccacacccacaa

SEQ ID NO: 87464 - RNA, 21 nt, synthetic construct
  source 1..21: mol_type = other RNA
accctgctgcccagcagccca

SEQ ID NO: 87465 - RNA, 21 nt, synthetic construct
  source 1..21: mol_type = other RNA
tgccccagcaccccggccaca

SEQ ID NO: 87466 - RNA, 21 nt, synthetic construct
  source 1..21: mol_type = other RNA
gcacagccaccacacccacaa

SEQ ID NO: 87467 - RNA, 21 nt, synthetic construct
  source 1..21: mol_type = other RNA
accctgctgcccagcagccca

SEQ ID NO: 87468 - RNA, 21 nt, synthetic construct
  source 1..21: mol_type = other RNA
tgccccagcaccccggccaca

SEQ ID NO: 87469 - RNA, 21 nt, synthetic construct
  source 1..21: mol_type = other RNA
ccaccacacccacagccacca

SEQ ID NO: 87470 - RNA, 21 nt, synthetic construct
  source 1..21: mol_type = other RNA
gcacagccaccacacccacaa

SEQ ID NO: 87471 - RNA, 21 nt, synthetic construct
  source 1..21: mol_type = other RNA
ttccaggcccggctgccctaa

SEQ ID NO: 87472 - RNA, 21 nt, synthetic construct
  source 1..21: mol_type = other RNA
cagcaactgccagtcctgcga

SEQ ID NO: 87473 - RNA, 21 nt, synthetic construct
  source 1..21: mol_type = other RNA
ccacagcctgcatcctgccca

SEQ ID NO: 87474 - RNA, 21 nt, synthetic construct
  source 1..21: mol_type = other RNA
gtgtccagctgcagggggaga

SEQ ID NO: 87475 - RNA, 21 nt, synthetic construct
  source 1..21: mol_type = other RNA
caagtcctgggcccagaagca

SEQ ID NO: 87476 - RNA, 21 nt, synthetic construct
  source 1..21: mol_type = other RNA
gatggccacttcatcacctta

SEQ ID NO: 87477 - RNA, 21 nt, synthetic construct
  source 1..21: mol_type = other RNA
ggagcgaggactgcctgtgca

SEQ ID NO: 87478 - RNA, 21 nt, synthetic construct
  source 1..21: mol_type = other RNA
accctggagaactgcacggta

SEQ ID NO: 87479 - RNA, 21 nt, synthetic construct
  source 1..21: mol_type = other RNA
gagcggagcgaggactgccta

SEQ ID NO: 87480 - RNA, 21 nt, synthetic construct
  source 1..21: mol_type = other RNA
agcggagcgaggactgcctga

SEQ ID NO: 87481 - RNA, 21 nt, synthetic construct
  source 1..21: mol_type = other RNA
gcacggccaaccccttccgca

SEQ ID NO: 87482 - RNA, 21 nt, synthetic construct
  source 1..21: mol_type = other RNA
gccaaccccttccgcaagtca

SEQ ID NO: 87483 - RNA, 21 nt, synthetic construct
  source 1..21: mol_type = other RNA
gagcgaggactgcctgtgcga

SEQ ID NO: 87484 - RNA, 21 nt, synthetic construct
  source 1..21: mol_type = other RNA
agcgaggactgcctgtgcgca

SEQ ID NO: 87485 - RNA, 21 nt, synthetic construct
  source 1..21: mol_type = other RNA
ctgcacggccaaccccttcca

SEQ ID NO: 87486 - RNA, 21 nt, synthetic construct
  source 1..21: mol_type = other RNA
atcaaggcccaggggctggta

SEQ ID NO: 87487 - RNA, 21 nt, synthetic construct
  source 1..21: mol_type = other RNA
ccacacccacagctaccagca

SEQ ID NO: 87488 - RNA, 21 nt, synthetic construct
  source 1..21: mol_type = other RNA
ccacacccacagctaccagca

SEQ ID NO: 87489 - RNA, 21 nt, synthetic construct
  source 1..21: mol_type = other RNA
ccacacccacagctaccagca

SEQ ID NO: 87490 - RNA, 21 nt, synthetic construct
  source 1..21: mol_type = other RNA
gagaggacagtgccctgctga

SEQ ID NO: 87491 - RNA, 21 nt, synthetic construct
  source 1..21: mol_type = other RNA
tgtttgacacctgcaactgta

SEQ ID NO: 87492 - RNA, 21 nt, synthetic construct
  source 1..21: mol_type = other RNA
acacctgcaactgtgagcgga

SEQ ID NO: 87493 - RNA, 21 nt, synthetic construct
  source 1..21: mol_type = other RNA
gtgcgccgcgctgtcctccta

SEQ ID NO: 87494 - RNA, 21 nt, synthetic construct
  source 1..21: mol_type = other RNA
cccggtgtcagtggacagaga

SEQ ID NO: 87495 - RNA, 21 nt, synthetic construct
  source 1..21: mol_type = other RNA
cggtgtcagtggacagagtga

SEQ ID NO: 87496 - RNA, 21 nt, synthetic construct
  source 1..21: mol_type = other RNA
gtggcactaccagccctgcga

SEQ ID NO: 87497 - RNA, 21 nt, synthetic construct
  source 1..21: mol_type = other RNA
agtggcactaccagccctgca

SEQ ID NO: 87498 - RNA, 21 nt, synthetic construct
  source 1..21: mol_type = other RNA
gacacctgcaactgtgagcga

SEQ ID NO: 87499 - RNA, 21 nt, synthetic construct
  source 1..21: mol_type = other RNA
cacctgcaactgtgagcggaa

SEQ ID NO: 87500 - RNA, 21 nt, synthetic construct
  source 1..21: mol_type = other RNA
gcaagtcctgggcccagaaga

SEQ ID NO: 87501 - RNA, 21 nt, synthetic construct
  source 1..21: mol_type = other RNA
agaagcagtgcagcatcctca

SEQ ID NO: 87502 - RNA, 21 nt, synthetic construct
  source 1..21: mol_type = other RNA
cgcaagtcctgggcccagaaa

SEQ ID NO: 87503 - RNA, 21 nt, synthetic construct
  source 1..21: mol_type = other RNA
aagtcctgggcccagaagcaa

SEQ ID NO: 87504 - RNA, 21 nt, synthetic construct
  source 1..21: mol_type = other RNA
agtcctgggcccagaagcaga

SEQ ID NO: 87505 - RNA, 21 nt, synthetic construct
  source 1..21: mol_type = other RNA
ctgggcccagaagcagtgcaa

SEQ ID NO: 87506 - RNA, 21 nt, synthetic construct
  source 1..21: mol_type = other RNA
gggcccagaagcagtgcagca

SEQ ID NO: 87507 - RNA, 21 nt, synthetic construct
  source 1..21: mol_type = other RNA
cccagaagcagtgcagcatca

SEQ ID NO: 87508 - RNA, 21 nt, synthetic construct
  source 1..21: mol_type = other RNA
tgcgcccacgcggggggccaa

SEQ ID NO: 87509 - RNA, 21 nt, synthetic construct
  source 1..21: mol_type = other RNA
agaacccactgtcccagggga

SEQ ID NO: 87510 - RNA, 21 nt, synthetic construct
  source 1..21: mol_type = other RNA
tcaggaaaaccggctgctgca

SEQ ID NO: 87511 - RNA, 21 nt, synthetic construct
  source 1..21: mol_type = other RNA
tacgtgccctgtggcccctca

SEQ ID NO: 87512 - RNA, 21 nt, synthetic construct
  source 1..21: mol_type = other RNA
ggccagcaggtggactgtgaa

SEQ ID NO: 87513 - RNA, 21 nt, synthetic construct
  source 1..21: mol_type = other RNA
cgtggcccagtgtggctgcta

SEQ ID NO: 87514 - RNA, 21 nt, synthetic construct
  source 1..21: mol_type = other RNA
tggtgtgcaggaactgggaga

SEQ ID NO: 87515 - RNA, 21 nt, synthetic construct
  source 1..21: mol_type = other RNA
gggccaggtcgtggaatgcaa

SEQ ID NO: 87516 - RNA, 21 nt, synthetic construct
  source 1..21: mol_type = other RNA
gggccaggtcgtggaatgcaa

SEQ ID NO: 87517 - RNA, 21 nt, synthetic construct
  source 1..21: mol_type = other RNA
gggccaggtcgtggaatgcaa

SEQ ID NO: 87518 - RNA, 21 nt, synthetic construct
  source 1..21: mol_type = other RNA
gggccaggtcgtggaatgcaa

SEQ ID NO: 87519 - RNA, 21 nt, synthetic construct
  source 1..21: mol_type = other RNA
gggcagaaggtgcactgtgaa

SEQ ID NO: 87520 - RNA, 21 nt, synthetic construct
  source 1..21: mol_type = other RNA
gaccccgcccaccagggccaa

SEQ ID NO: 87521 - RNA, 21 nt, synthetic construct
  source 1..21: mol_type = other RNA
caggactacaagggcagggta

SEQ ID NO: 87522 - RNA, 21 nt, synthetic construct
  source 1..21: mol_type = other RNA
ctccctgcttctgcagggcaa

SEQ ID NO: 87523 - RNA, 21 nt, synthetic construct
  source 1..21: mol_type = other RNA
cctctctgcagaaaagcacaa

SEQ ID NO: 87524 - RNA, 21 nt, synthetic construct
  source 1..21: mol_type = other RNA
ccgcctgccgctcccaggtta

SEQ ID NO: 87525 - RNA, 21 nt, synthetic construct
  source 1..21: mol_type = other RNA
gtgcaggaactgggagcagga

SEQ ID NO: 87526 - RNA, 21 nt, synthetic construct
  source 1..21: mol_type = other RNA
gccatgccctcctccactcca

SEQ ID NO: 87527 - RNA, 21 nt, synthetic construct
  source 1..21: mol_type = other RNA
gccatgccctcctccactcca

SEQ ID NO: 87528 - RNA, 21 nt, synthetic construct
  source 1..21: mol_type = other RNA
caacaccacctgcagctccta

SEQ ID NO: 87529 - RNA, 21 nt, synthetic construct
  source 1..21: mol_type = other RNA
cggcaccacctgctccaagga

SEQ ID NO: 87530 - RNA, 21 nt, synthetic construct
  source 1..21: mol_type = other RNA
gaaccccagtgggcactgcca

SEQ ID NO: 87531 - RNA, 21 nt, synthetic construct
  source 1..21: mol_type = other RNA
gcctggcctggaaggctgcta

SEQ ID NO: 87532 - RNA, 21 nt, synthetic construct
  source 1..21: mol_type = other RNA
gcctgcacctgcacctatgaa

SEQ ID NO: 87533 - RNA, 21 nt, synthetic construct
  source 1..21: mol_type = other RNA
gggccagcaggtggactgtga

SEQ ID NO: 87534 - RNA, 21 nt, synthetic construct
  source 1..21: mol_type = other RNA
tgccagcacggagcctgctga

SEQ ID NO: 87535 - RNA, 21 nt, synthetic construct
  source 1..21: mol_type = other RNA
ccacacctgcagccaccagca

SEQ ID NO: 87536 - RNA, 21 nt, synthetic construct
  source 1..21: mol_type = other RNA
ccagcaccccggccaccagca

SEQ ID NO: 87537 - RNA, 21 nt, synthetic construct
  source 1..21: mol_type = other RNA
ccacacctgcagccaccagca

SEQ ID NO: 87538 - RNA, 21 nt, synthetic construct
  source 1..21: mol_type = other RNA
ccagcaccccggccaccagca

SEQ ID NO: 87539 - RNA, 21 nt, synthetic construct
  source 1..21: mol_type = other RNA
gccacgccctcctccactcca

SEQ ID NO: 87540 - RNA, 21 nt, synthetic construct
  source 1..21: mol_type = other RNA
ccacacctgcagccaccagca

SEQ ID NO: 87541 - RNA, 21 nt, synthetic construct
  source 1..21: mol_type = other RNA
ccagcaccccggccaccagca

SEQ ID NO: 87542 - RNA, 21 nt, synthetic construct
  source 1..21: mol_type = other RNA
ccacacctgcagccaccagca

SEQ ID NO: 87543 - RNA, 21 nt, synthetic construct
  source 1..21: mol_type = other RNA
ccagcaccccggccaccagca

SEQ ID NO: 87544 - RNA, 21 nt, synthetic construct
  source 1..21: mol_type = other RNA
tctactccctgcttctgcaga

SEQ ID NO: 87545 - RNA, 21 nt, synthetic construct
  source 1..21: mol_type = other RNA
agcaccagtgcacctgctgca

SEQ ID NO: 87546 - RNA, 21 nt, synthetic construct
  source 1..21: mol_type = other RNA
aaccccttccgcaagtcctga

SEQ ID NO: 87547 - RNA, 21 nt, synthetic construct
  source 1..21: mol_type = other RNA
agccctccctcagtgccagca

SEQ ID NO: 87548 - RNA, 21 nt, synthetic construct
  source 1..21: mol_type = other RNA
ccggctgctgctactcctgta

SEQ ID NO: 87549 - RNA, 21 nt, synthetic construct
  source 1..21: mol_type = other RNA
agtgcacctgctgccaggaga

SEQ ID NO: 87550 - RNA, 21 nt, synthetic construct
  source 1..21: mol_type = other RNA
gcgggtgtgcagcacctggga

SEQ ID NO: 87551 - RNA, 21 nt, synthetic construct
  source 1..21: mol_type = other RNA
gtgccgctgccccacctgcca

SEQ ID NO: 87552 - RNA, 21 nt, synthetic construct
  source 1..21: mol_type = other RNA
cggccaaccccttccgcaaga

SEQ ID NO: 87553 - RNA, 21 nt, synthetic construct
  source 1..21: mol_type = other RNA
tggcactaccagccctgcgga

SEQ ID NO: 87554 - RNA, 21 nt, synthetic construct
  source 1..21: mol_type = other RNA
gggcagggtctgcggcctgta

SEQ ID NO: 87555 - RNA, 21 nt, synthetic construct
  source 1..21: mol_type = other RNA
ccctgcacggccaacccctta

SEQ ID NO: 87556 - RNA, 21 nt, synthetic construct
  source 1..21: mol_type = other RNA
gaagcagtgcagcatcctcca

SEQ ID NO: 87557 - RNA, 21 nt, synthetic construct
  source 1..21: mol_type = other RNA
gggcgggtgtgcagcacctga

SEQ ID NO: 87558 - RNA, 21 nt, synthetic construct
  source 1..21: mol_type = other RNA
caccacctgctccaaggccaa

SEQ ID NO: 87559 - RNA, 21 nt, synthetic construct
  source 1..21: mol_type = other RNA
cccctgcacggccaaccccta

SEQ ID NO: 87560 - RNA, 21 nt, synthetic construct
  source 1..21: mol_type = other RNA
ggcctgtgtgtgtcctggcga

SEQ ID NO: 87561 - RNA, 21 nt, synthetic construct
  source 1..21: mol_type = other RNA
tggcctggaaggctgctacca

SEQ ID NO: 87562 - RNA, 21 nt, synthetic construct
  source 1..21: mol_type = other RNA
tccccagcctgagccccctga

SEQ ID NO: 87563 - RNA, 21 nt, synthetic construct
  source 1..21: mol_type = other RNA
ggcgggtgtgcagcacctgga

SEQ ID NO: 87564 - RNA, 21 nt, synthetic construct
  source 1..21: mol_type = other RNA
ccactacaagaccttcgacga

SEQ ID NO: 87565 - RNA, 21 nt, synthetic construct
  source 1..21: mol_type = other RNA
ggacagtgccctgctggagca

SEQ ID NO: 87566 - RNA, 21 nt, synthetic construct
  source 1..21: mol_type = other RNA
acggctgcttctgccccccaa

SEQ ID NO: 87567 - RNA, 21 nt, synthetic construct
  source 1..21: mol_type = other RNA
cggctgcttctgccccccaga

SEQ ID NO: 87568 - RNA, 21 nt, synthetic construct
  source 1..21: mol_type = other RNA
ggctgcagctgctggtgcaga

SEQ ID NO: 87569 - RNA, 21 nt, synthetic construct
  source 1..21: mol_type = other RNA
gctgctggtgcagctggtgca

SEQ ID NO: 87570 - RNA, 21 nt, synthetic construct
  source 1..21: mol_type = other RNA
tttgacacctgcaactgtgaa

SEQ ID NO: 87571 - RNA, 21 nt, synthetic construct
  source 1..21: mol_type = other RNA
ttgacacctgcaactgtgaga

SEQ ID NO: 87572 - RNA, 21 nt, synthetic construct
  source 1..21: mol_type = other RNA
tgacacctgcaactgtgagca

SEQ ID NO: 87573 - RNA, 21 nt, synthetic construct
  source 1..21: mol_type = other RNA
actgtgagcggagcgaggaca

SEQ ID NO: 87574 - RNA, 21 nt, synthetic construct
  source 1..21: mol_type = other RNA
tgagcggagcgaggactgcca

SEQ ID NO: 87575 - RNA, 21 nt, synthetic construct
  source 1..21: mol_type = other RNA
ctgcaacacctgcacctgcaa

SEQ ID NO: 87576 - RNA, 21 nt, synthetic construct
  source 1..21: mol_type = other RNA
ccaccggctctgcctgggcaa

SEQ ID NO: 87577 - RNA, 21 nt, synthetic construct
  source 1..21: mol_type = other RNA
ccggcaccacctgctccaaga

SEQ ID NO: 87578 - RNA, 21 nt, synthetic construct
  source 1..21: mol_type = other RNA
ggcaccacctgctccaaggca

SEQ ID NO: 87579 - RNA, 21 nt, synthetic construct
  source 1..21: mol_type = other RNA
gcaccacctgctccaaggcca

SEQ ID NO: 87580 - RNA, 21 nt, synthetic construct
  source 1..21: mol_type = other RNA
accacctgctccaaggccata

SEQ ID NO: 87581 - RNA, 21 nt, synthetic construct
  source 1..21: mol_type = other RNA
ccacctgctccaaggccatca

SEQ ID NO: 87582 - RNA, 21 nt, synthetic construct
  source 1..21: mol_type = other RNA
cacctgctccaaggccatcaa

SEQ ID NO: 87583 - RNA, 21 nt, synthetic construct
  source 1..21: mol_type = other RNA
cctgctccaaggccatcaaga

SEQ ID NO: 87584 - RNA, 21 nt, synthetic construct
  source 1..21: mol_type = other RNA
agggcagggtctgcggcctga

SEQ ID NO: 87585 - RNA, 21 nt, synthetic construct
  source 1..21: mol_type = other RNA
ggcagggtctgcggcctgtga

SEQ ID NO: 87586 - RNA, 21 nt, synthetic construct
  source 1..21: mol_type = other RNA
ggtctgcggcctgtgcgggaa

SEQ ID NO: 87587 - RNA, 21 nt, synthetic construct
  source 1..21: mol_type = other RNA
aaggacccctgcacggccaaa

SEQ ID NO: 87588 - RNA, 21 nt, synthetic construct
  source 1..21: mol_type = other RNA
cctgcacggccaaccccttca

SEQ ID NO: 87589 - RNA, 21 nt, synthetic construct
  source 1..21: mol_type = other RNA
accccttccgcaagtcctgga

SEQ ID NO: 87590 - RNA, 21 nt, synthetic construct
  source 1..21: mol_type = other RNA
ccccttccgcaagtcctggga

SEQ ID NO: 87591 - RNA, 21 nt, synthetic construct
  source 1..21: mol_type = other RNA
cccttccgcaagtcctgggca

SEQ ID NO: 87592 - RNA, 21 nt, synthetic construct
  source 1..21: mol_type = other RNA
ccttccgcaagtcctgggcca

SEQ ID NO: 87593 - RNA, 21 nt, synthetic construct
  source 1..21: mol_type = other RNA
cctgggcccagaagcagtgca

SEQ ID NO: 87594 - RNA, 21 nt, synthetic construct
  source 1..21: mol_type = other RNA
aagcagtgcagcatcctccaa

SEQ ID NO: 87595 - RNA, 21 nt, synthetic construct
  source 1..21: mol_type = other RNA
gcctgtgtgtgtcctggcgga

SEQ ID NO: 87596 - RNA, 21 nt, synthetic construct
  source 1..21: mol_type = other RNA
cctgtgtgtgtcctggcggaa

SEQ ID NO: 87597 - RNA, 21 nt, synthetic construct
  source 1..21: mol_type = other RNA
ctgtgtgtgtcctggcggaca

SEQ ID NO: 87598 - RNA, 21 nt, synthetic construct
  source 1..21: mol_type = other RNA
gcactgcctggtggacctgca

SEQ ID NO: 87599 - RNA, 21 nt, synthetic construct
  source 1..21: mol_type = other RNA
cctggcctggaaggctgctaa

SEQ ID NO: 87600 - RNA, 21 nt, synthetic construct
  source 1..21: mol_type = other RNA
ctggcctggaaggctgctaca

SEQ ID NO: 87601 - RNA, 21 nt, synthetic construct
  source 1..21: mol_type = other RNA
ggcctggaaggctgctaccca

SEQ ID NO: 87602 - RNA, 21 nt, synthetic construct
  source 1..21: mol_type = other RNA
tgcccacccagccagccctta

SEQ ID NO: 87603 - RNA, 21 nt, synthetic construct
  source 1..21: mol_type = other RNA
ccccctcctccagcccaggga

SEQ ID NO: 87604 - RNA, 21 nt, synthetic construct
  source 1..21: mol_type = other RNA
ccccctcctccagcccaggga

SEQ ID NO: 87605 - RNA, 21 nt, synthetic construct
  source 1..21: mol_type = other RNA
ccccctcctccagcccaggga

SEQ ID NO: 87606 - RNA, 21 nt, synthetic construct
  source 1..21: mol_type = other RNA
ccccctcctccagcccaggga

SEQ ID NO: 87607 - RNA, 21 nt, synthetic construct
  source 1..21: mol_type = other RNA
ccccctcctccagcccaggga

SEQ ID NO: 87608 - RNA, 21 nt, synthetic construct
  source 1..21: mol_type = other RNA
ctcgccctcccctgcccctga

SEQ ID NO: 87609 - RNA, 21 nt, synthetic construct
  source 1..21: mol_type = other RNA
agacctggaccctggagaaca

SEQ ID NO: 87610 - RNA, 21 nt, synthetic construct
  source 1..21: mol_type = other RNA
cttccaggcccggctgcccta

SEQ ID NO: 87611 - RNA, 21 nt, synthetic construct
  source 1..21: mol_type = other RNA
cggctgctgctactcctgtga

SEQ ID NO: 87612 - RNA, 21 nt, synthetic construct
  source 1..21: mol_type = other RNA
gcagctgctggtgcagctgga

SEQ ID NO: 87613 - RNA, 21 nt, synthetic construct
  source 1..21: mol_type = other RNA
gtgcccacccagccagcccta

SEQ ID NO: 87614 - RNA, 21 nt, synthetic construct
  source 1..21: mol_type = other RNA
caggaactgggagcaggagga

SEQ ID NO: 87615 - RNA, 21 nt, synthetic construct
  source 1..21: mol_type = other RNA
gcccacccagccagcccttca

SEQ ID NO: 87616 - RNA, 21 nt, synthetic construct
  source 1..21: mol_type = other RNA
ctctgctcaacccagcccaga

SEQ ID NO: 87617 - RNA, 21 nt, synthetic construct
  source 1..21: mol_type = other RNA
cacctggatcctcacagagca

SEQ ID NO: 87618 - RNA, 21 nt, synthetic construct
  source 1..21: mol_type = other RNA
cacctggatcctcacagagca

SEQ ID NO: 87619 - RNA, 21 nt, synthetic construct
  source 1..21: mol_type = other RNA
cacctggatcctcacagagca

SEQ ID NO: 87620 - RNA, 21 nt, synthetic construct
  source 1..21: mol_type = other RNA
cacctggatcctcacagagca

SEQ ID NO: 87621 - RNA, 21 nt, synthetic construct
  source 1..21: mol_type = other RNA
cacctggatcctcacagagca

SEQ ID NO: 87622 - RNA, 21 nt, synthetic construct
  source 1..21: mol_type = other RNA
aacgtcacctgcgtgaacaaa

SEQ ID NO: 87623 - RNA, 21 nt, synthetic construct
  source 1..21: mol_type = other RNA
cccagcccagttttgcaaata

SEQ ID NO: 87624 - RNA, 21 nt, synthetic construct
  source 1..21: mol_type = other RNA
tcaacccagcccagttttgca

SEQ ID NO: 87625 - RNA, 21 nt, synthetic construct
  source 1..21: mol_type = other RNA
cgtgaccaggccccgggccga

SEQ ID NO: 87626 - RNA, 21 nt, synthetic construct
  source 1..21: mol_type = other RNA
caccacacccacagccaccaa

SEQ ID NO: 87627 - RNA, 21 nt, synthetic construct
  source 1..21: mol_type = other RNA
caccacacccacagccaccaa

SEQ ID NO: 87628 - RNA, 21 nt, synthetic construct
  source 1..21: mol_type = other RNA
gtcggtgcagtgcaagcccca

SEQ ID NO: 87629 - RNA, 21 nt, synthetic construct
  source 1..21: mol_type = other RNA
ccttcagcgtgtccactgtga

SEQ ID NO: 87630 - RNA, 21 nt, synthetic construct
  source 1..21: mol_type = other RNA
acacccacagccaccagttca

SEQ ID NO: 87631 - RNA, 21 nt, synthetic construct
  source 1..21: mol_type = other RNA
acacccacagccaccagttca

SEQ ID NO: 87632 - RNA, 21 nt, synthetic construct
  source 1..21: mol_type = other RNA
cacagccaccagttccaaaga

SEQ ID NO: 87633 - RNA, 21 nt, synthetic construct
  source 1..21: mol_type = other RNA
cacagccaccagttccaaaga

SEQ ID NO: 87634 - RNA, 21 nt, synthetic construct
  source 1..21: mol_type = other RNA
aagggtgaggggccagcagga

SEQ ID NO: 87635 - RNA, 21 nt, synthetic construct
  source 1..21: mol_type = other RNA
gccacaccctcctccactcca

SEQ ID NO: 87636 - RNA, 21 nt, synthetic construct
  source 1..21: mol_type = other RNA
gccacaccctcctccactcca

SEQ ID NO: 87637 - RNA, 21 nt, synthetic construct
  source 1..21: mol_type = other RNA
gccacaccctcctccactcca

SEQ ID NO: 87638 - RNA, 21 nt, synthetic construct
  source 1..21: mol_type = other RNA
gccacaccctcctccactcca

SEQ ID NO: 87639 - RNA, 21 nt, synthetic construct
  source 1..21: mol_type = other RNA
ctctgtccacctggagccaga

SEQ ID NO: 87640 - RNA, 21 nt, synthetic construct
  source 1..21: mol_type = other RNA
cacctgcccacccaccaaaga

SEQ ID NO: 87641 - RNA, 21 nt, synthetic construct
  source 1..21: mol_type = other RNA
cctggggccgagtgcctccga

SEQ ID NO: 87642 - RNA, 21 nt, synthetic construct
  source 1..21: mol_type = other RNA
ctggggccgagtgcctccgga

SEQ ID NO: 87643 - RNA, 21 nt, synthetic construct
  source 1..21: mol_type = other RNA
gacggccaccaccaccaccaa

SEQ ID NO: 87644 - RNA, 21 nt, synthetic construct
  source 1..21: mol_type = other RNA
acggccaccaccaccaccaca

SEQ ID NO: 87645 - RNA, 21 nt, synthetic construct
  source 1..21: mol_type = other RNA
cccacagcggagaactgccaa

SEQ ID NO: 87646 - RNA, 21 nt, synthetic construct
  source 1..21: mol_type = other RNA
tccactacaagaccttcgaca

SEQ ID NO: 87647 - RNA, 21 nt, synthetic construct
  source 1..21: mol_type = other RNA
gaggccgacgtcacctgcaga

SEQ ID NO: 87648 - RNA, 21 nt, synthetic construct
  source 1..21: mol_type = other RNA
ttgtcatcaaggcccagggga

SEQ ID NO: 87649 - RNA, 21 nt, synthetic construct
  source 1..21: mol_type = other RNA
ggccaccacaactggggccaa

SEQ ID NO: 87650 - RNA, 21 nt, synthetic construct
  source 1..21: mol_type = other RNA
gcctgggagcctctctgcaga

SEQ ID NO: 87651 - RNA, 21 nt, synthetic construct
  source 1..21: mol_type = other RNA
acagcggagaactgccagaga

SEQ ID NO: 87652 - RNA, 21 nt, synthetic construct
  source 1..21: mol_type = other RNA
cgactgctgtcccaccttcca

SEQ ID NO: 87653 - RNA, 21 nt, synthetic construct
  source 1..21: mol_type = other RNA
cttaccaccacggccaccaca

SEQ ID NO: 87654 - RNA, 21 nt, synthetic construct
  source 1..21: mol_type = other RNA
cttaccaccacggccaccaca

SEQ ID NO: 87655 - RNA, 21 nt, synthetic construct
  source 1..21: mol_type = other RNA
cgactccagccctgtccagca

SEQ ID NO: 87656 - RNA, 21 nt, synthetic construct
  source 1..21: mol_type = other RNA
gactccagccctgtccagcca

SEQ ID NO: 87657 - RNA, 21 nt, synthetic construct
  source 1..21: mol_type = other RNA
cgactccagccctgtccagca

SEQ ID NO: 87658 - RNA, 21 nt, synthetic construct
  source 1..21: mol_type = other RNA
gactccagccctgtccagcca

SEQ ID NO: 87659 - RNA, 21 nt, synthetic construct
  source 1..21: mol_type = other RNA
cgactccagccctgtccagca

SEQ ID NO: 87660 - RNA, 21 nt, synthetic construct
  source 1..21: mol_type = other RNA
gactccagccctgtccagcca

SEQ ID NO: 87661 - RNA, 21 nt, synthetic construct
  source 1..21: mol_type = other RNA
agcagtgcagcatcctccaca

SEQ ID NO: 87662 - RNA, 21 nt, synthetic construct
  source 1..21: mol_type = other RNA
ctccagccctgtccagcccta

SEQ ID NO: 87663 - RNA, 21 nt, synthetic construct
  source 1..21: mol_type = other RNA
ctccagccctgtccagcccta

SEQ ID NO: 87664 - RNA, 21 nt, synthetic construct
  source 1..21: mol_type = other RNA
ctccagccctgtccagcccta

SEQ ID NO: 87665 - RNA, 21 nt, synthetic construct
  source 1..21: mol_type = other RNA
actccagccctgtccagccca

SEQ ID NO: 87666 - RNA, 21 nt, synthetic construct
  source 1..21: mol_type = other RNA
actccagccctgtccagccca

SEQ ID NO: 87667 - RNA, 21 nt, synthetic construct
  source 1..21: mol_type = other RNA
actccagccctgtccagccca

SEQ ID NO: 87668 - RNA, 21 nt, synthetic construct
  source 1..21: mol_type = other RNA
tcgactccagccctgtccaga

SEQ ID NO: 87669 - RNA, 21 nt, synthetic construct
  source 1..21: mol_type = other RNA
ttacagccatcccctcttcca

SEQ ID NO: 87670 - RNA, 21 nt, synthetic construct
  source 1..21: mol_type = other RNA
tcgactccagccctgtccaga

SEQ ID NO: 87671 - RNA, 21 nt, synthetic construct
  source 1..21: mol_type = other RNA
tcgactccagccctgtccaga

SEQ ID NO: 87672 - RNA, 21 nt, synthetic construct
  source 1..21: mol_type = other RNA
acttccactacaagaccttca

SEQ ID NO: 87673 - RNA, 21 nt, synthetic construct
  source 1..21: mol_type = other RNA
ccccacagcggagaactgcca

SEQ ID NO: 87674 - RNA, 21 nt, synthetic construct
  source 1..21: mol_type = other RNA
gctctgcccccggacctgcca

SEQ ID NO: 87675 - RNA, 21 nt, synthetic construct
  source 1..21: mol_type = other RNA
ggtactcccccatcactgaca

SEQ ID NO: 87676 - RNA, 21 nt, synthetic construct
  source 1..21: mol_type = other RNA
ggtactcccccatcactgaca

SEQ ID NO: 87677 - RNA, 21 nt, synthetic construct
  source 1..21: mol_type = other RNA
ggtactcccccatcactgaca

SEQ ID NO: 87678 - RNA, 21 nt, synthetic construct
  source 1..21: mol_type = other RNA
ggtactcccccatcactgaca

SEQ ID NO: 87679 - RNA, 21 nt, synthetic construct
  source 1..21: mol_type = other RNA
ggactacatcaaggtcagcaa

SEQ ID NO: 87680 - RNA, 21 nt, synthetic construct
  source 1..21: mol_type = other RNA
gctaccagcgttacagccata

SEQ ID NO: 87681 - RNA, 21 nt, synthetic construct
  source 1..21: mol_type = other RNA
accgaggtcaacatcacctta

SEQ ID NO: 87682 - RNA, 21 nt, synthetic construct
  source 1..21: mol_type = other RNA
cttcgacggcgacgtcttcca

SEQ ID NO: 87683 - RNA, 21 nt, synthetic construct
  source 1..21: mol_type = other RNA
agttttgcaaataaaccctga

SEQ ID NO: 87684 - RNA, 21 nt, synthetic construct
  source 1..21: mol_type = other RNA
aacaatactacctgtccccaa

SEQ ID NO: 87685 - RNA, 21 nt, synthetic construct
  source 1..21: mol_type = other RNA
tccacctggagccaggatgta

SEQ ID NO: 87686 - RNA, 21 nt, synthetic construct
  source 1..21: mol_type = other RNA
gcagactgggtccagctcaga

SEQ ID NO: 87687 - RNA, 21 nt, synthetic construct
  source 1..21: mol_type = other RNA
gccctagggaccacccacaca

SEQ ID NO: 87688 - RNA, 21 nt, synthetic construct
  source 1..21: mol_type = other RNA
gccctagggaccacccacaca

SEQ ID NO: 87689 - RNA, 21 nt, synthetic construct
  source 1..21: mol_type = other RNA
gccctagggaccacccacaca

SEQ ID NO: 87690 - RNA, 21 nt, synthetic construct
  source 1..21: mol_type = other RNA
gccctagggaccacccacaca

SEQ ID NO: 87691 - RNA, 21 nt, synthetic construct
  source 1..21: mol_type = other RNA
acgccattcaccttcaccaca

SEQ ID NO: 87692 - RNA, 21 nt, synthetic construct
  source 1..21: mol_type = other RNA
aaagccactcccttctccaga

SEQ ID NO: 87693 - RNA, 21 nt, synthetic construct
  source 1..21: mol_type = other RNA
aaagccactcccttctccaga

SEQ ID NO: 87694 - RNA, 21 nt, synthetic construct
  source 1..21: mol_type = other RNA
caccgtgctggctgagctgca

SEQ ID NO: 87695 - RNA, 21 nt, synthetic construct
  source 1..21: mol_type = other RNA
cgcccttccagcactgagaaa

SEQ ID NO: 87696 - RNA, 21 nt, synthetic construct
  source 1..21: mol_type = other RNA
cgcccttccagcactgagaaa

SEQ ID NO: 87697 - RNA, 21 nt, synthetic construct
  source 1..21: mol_type = other RNA
cgcccttccagcactgagaaa

SEQ ID NO: 87698 - RNA, 21 nt, synthetic construct
  source 1..21: mol_type = other RNA
cgcccttccagcactgagaaa

SEQ ID NO: 87699 - RNA, 21 nt, synthetic construct
  source 1..21: mol_type = other RNA
aaagtgctgaccagcccggca

SEQ ID NO: 87700 - RNA, 21 nt, synthetic construct
  source 1..21: mol_type = other RNA
tgcccttccagcactgagaaa

SEQ ID NO: 87701 - RNA, 21 nt, synthetic construct
  source 1..21: mol_type = other RNA
gagggcatctgccaccgcaca

SEQ ID NO: 87702 - RNA, 21 nt, synthetic construct
  source 1..21: mol_type = other RNA
agcctggagagaccatcagga

SEQ ID NO: 87703 - RNA, 21 nt, synthetic construct
  source 1..21: mol_type = other RNA
ccgccttgaggtgccctgcca

SEQ ID NO: 87704 - RNA, 21 nt, synthetic construct
  source 1..21: mol_type = other RNA
tccacggccccaccttcgcca

SEQ ID NO: 87705 - RNA, 21 nt, synthetic construct
  source 1..21: mol_type = other RNA
acaagcccggccctcccggta

SEQ ID NO: 87706 - RNA, 21 nt, synthetic construct
  source 1..21: mol_type = other RNA
gagggctgcttctgccctgaa

SEQ ID NO: 87707 - RNA, 21 nt, synthetic construct
  source 1..21: mol_type = other RNA
ccgcaggcagagacccaggga

SEQ ID NO: 87708 - RNA, 21 nt, synthetic construct
  source 1..21: mol_type = other RNA
tcaccgtgctggctgagctga

SEQ ID NO: 87709 - RNA, 21 nt, synthetic construct
  source 1..21: mol_type = other RNA
cgactggagggacggcgtcta

SEQ ID NO: 87710 - RNA, 21 nt, synthetic construct
  source 1..21: mol_type = other RNA
actggagggacggcgtctgca

SEQ ID NO: 87711 - RNA, 21 nt, synthetic construct
  source 1..21: mol_type = other RNA
ggtgtgcagcccccatggtga

SEQ ID NO: 87712 - RNA, 21 nt, synthetic construct
  source 1..21: mol_type = other RNA
cactggagtttgggaacagca

SEQ ID NO: 87713 - RNA, 21 nt, synthetic construct
  source 1..21: mol_type = other RNA
ccagtccagggactgcaacca

SEQ ID NO: 87714 - RNA, 21 nt, synthetic construct
  source 1..21: mol_type = other RNA
tccagcactgagaagcacaga

SEQ ID NO: 87715 - RNA, 21 nt, synthetic construct
  source 1..21: mol_type = other RNA
cttcctccctgggcaccacca

SEQ ID NO: 87716 - RNA, 21 nt, synthetic construct
  source 1..21: mol_type = other RNA
ggtgcgcacagcctggactta

SEQ ID NO: 87717 - RNA, 21 nt, synthetic construct
  source 1..21: mol_type = other RNA
gacctggatcctcacagagca

SEQ ID NO: 87718 - RNA, 21 nt, synthetic construct
  source 1..21: mol_type = other RNA
acctggatcctcacagagcta

SEQ ID NO: 87719 - RNA, 21 nt, synthetic construct
  source 1..21: mol_type = other RNA
ccagtccagggactgcaacca

SEQ ID NO: 87720 - RNA, 21 nt, synthetic construct
  source 1..21: mol_type = other RNA
tccagcactgagaagcacaga

SEQ ID NO: 87721 - RNA, 21 nt, synthetic construct
  source 1..21: mol_type = other RNA
ggtgcgcacagcctggactta

SEQ ID NO: 87722 - RNA, 21 nt, synthetic construct
  source 1..21: mol_type = other RNA
gacctggatcctcacagagca

SEQ ID NO: 87723 - RNA, 21 nt, synthetic construct
  source 1..21: mol_type = other RNA
gacctggatcctcacagagca

SEQ ID NO: 87724 - RNA, 21 nt, synthetic construct
  source 1..21: mol_type = other RNA
acctggatcctcacagagcta

SEQ ID NO: 87725 - RNA, 21 nt, synthetic construct
  source 1..21: mol_type = other RNA
ccagtccagggactgcaacca

SEQ ID NO: 87726 - RNA, 21 nt, synthetic construct
  source 1..21: mol_type = other RNA
tccagcactgagaagcacaga

SEQ ID NO: 87727 - RNA, 21 nt, synthetic construct
  source 1..21: mol_type = other RNA
ggtgcgcacagcctggactta

SEQ ID NO: 87728 - RNA, 21 nt, synthetic construct
  source 1..21: mol_type = other RNA
ccagtccagggactgcaacca

SEQ ID NO: 87729 - RNA, 21 nt, synthetic construct
  source 1..21: mol_type = other RNA
tccagcactgagaagcacaga

SEQ ID NO: 87730 - RNA, 21 nt, synthetic construct
  source 1..21: mol_type = other RNA
ggtgcgcacagcctggactta

SEQ ID NO: 87731 - RNA, 21 nt, synthetic construct
  source 1..21: mol_type = other RNA
gacctggatcctcacagagca

SEQ ID NO: 87732 - RNA, 21 nt, synthetic construct
  source 1..21: mol_type = other RNA
acctggatcctcacagagcta

SEQ ID NO: 87733 - RNA, 21 nt, synthetic construct
  source 1..21: mol_type = other RNA
gacctggatcctcacagagca

SEQ ID NO: 87734 - RNA, 21 nt, synthetic construct
  source 1..21: mol_type = other RNA
acctggatcctcacagagcta

SEQ ID NO: 87735 - RNA, 21 nt, synthetic construct
  source 1..21: mol_type = other RNA
cacctggatcctcacagagca

SEQ ID NO: 87736 - RNA, 21 nt, synthetic construct
  source 1..21: mol_type = other RNA
acctggatcctcacagagcta

SEQ ID NO: 87737 - RNA, 21 nt, synthetic construct
  source 1..21: mol_type = other RNA
tccagcactgagaagcacaga

SEQ ID NO: 87738 - RNA, 21 nt, synthetic construct
  source 1..21: mol_type = other RNA
cctcatgagagagatccatga

SEQ ID NO: 87739 - RNA, 21 nt, synthetic construct
  source 1..21: mol_type = other RNA
caaccgcccttccagcactga

SEQ ID NO: 87740 - RNA, 21 nt, synthetic construct
  source 1..21: mol_type = other RNA
caaccgcccttccagcactga

SEQ ID NO: 87741 - RNA, 21 nt, synthetic construct
  source 1..21: mol_type = other RNA
caaccgcccttccagcactga

SEQ ID NO: 87742 - RNA, 21 nt, synthetic construct
  source 1..21: mol_type = other RNA
caaccgcccttccagcactga

SEQ ID NO: 87743 - RNA, 21 nt, synthetic construct
  source 1..21: mol_type = other RNA
atttctacgcagtgtgcaata

SEQ ID NO: 87744 - RNA, 21 nt, synthetic construct
  source 1..21: mol_type = other RNA
agctttacacccatcccctca

SEQ ID NO: 87745 - RNA, 21 nt, synthetic construct
  source 1..21: mol_type = other RNA
agctttacacccatcccctca

SEQ ID NO: 87746 - RNA, 21 nt, synthetic construct
  source 1..21: mol_type = other RNA
ctatgcccacagccactgcca

SEQ ID NO: 87747 - RNA, 21 nt, synthetic construct
  source 1..21: mol_type = other RNA
gcccgcccaggagtgccccta

SEQ ID NO: 87748 - RNA, 21 nt, synthetic construct
  source 1..21: mol_type = other RNA
gcggtgccccgacgtcctcga

SEQ ID NO: 87749 - RNA, 21 nt, synthetic construct
  source 1..21: mol_type = other RNA
ctgggcgtgagcgtcacctta

SEQ ID NO: 87750 - RNA, 21 nt, synthetic construct
  source 1..21: mol_type = other RNA
ctggagagaccatcagggtca

SEQ ID NO: 87751 - RNA, 21 nt, synthetic construct
  source 1..21: mol_type = other RNA
cagatcctcttcaacgcacaa

SEQ ID NO: 87752 - RNA, 21 nt, synthetic construct
  source 1..21: mol_type = other RNA
actgggacgccctggaacaaa

SEQ ID NO: 87753 - RNA, 21 nt, synthetic construct
  source 1..21: mol_type = other RNA
ttgcggagtgccacgcactga

SEQ ID NO: 87754 - RNA, 21 nt, synthetic construct
  source 1..21: mol_type = other RNA
acccacatgggggctgtgaga

SEQ ID NO: 87755 - RNA, 21 nt, synthetic construct
  source 1..21: mol_type = other RNA
gtgtgcaatcagcactgtgaa

SEQ ID NO: 87756 - RNA, 21 nt, synthetic construct
  source 1..21: mol_type = other RNA
gcttccagtgtggatcagcaa

SEQ ID NO: 87757 - RNA, 21 nt, synthetic construct
  source 1..21: mol_type = other RNA
ccgcacctcgaccctgctgca

SEQ ID NO: 87758 - RNA, 21 nt, synthetic construct
  source 1..21: mol_type = other RNA
ctacgactgagtccactggaa

SEQ ID NO: 87759 - RNA, 21 nt, synthetic construct
  source 1..21: mol_type = other RNA
ccgcacctcgaccctgctgca

SEQ ID NO: 87760 - RNA, 21 nt, synthetic construct
  source 1..21: mol_type = other RNA
ccgcacctcgaccctgctgca

SEQ ID NO: 87761 - RNA, 21 nt, synthetic construct
  source 1..21: mol_type = other RNA
ctacgactgagtccactggaa

SEQ ID NO: 87762 - RNA, 21 nt, synthetic construct
  source 1..21: mol_type = other RNA
ccgcacctcgaccctgctgca

SEQ ID NO: 87763 - RNA, 21 nt, synthetic construct
  source 1..21: mol_type = other RNA
gccctgtgacgcccagggtca

SEQ ID NO: 87764 - RNA, 21 nt, synthetic construct
  source 1..21: mol_type = other RNA
gccctcaccctagcagcagga

SEQ ID NO: 87765 - RNA, 21 nt, synthetic construct
  source 1..21: mol_type = other RNA
gccctcaccctagcagcagga

SEQ ID NO: 87766 - RNA, 21 nt, synthetic construct
  source 1..21: mol_type = other RNA
gtggtgaccacgggctgtgaa

SEQ ID NO: 87767 - RNA, 21 nt, synthetic construct
  source 1..21: mol_type = other RNA
gccctcaccctagcagcagga

SEQ ID NO: 87768 - RNA, 21 nt, synthetic construct
  source 1..21: mol_type = other RNA
gtggtgaccacgggctgtgaa

SEQ ID NO: 87769 - RNA, 21 nt, synthetic construct
  source 1..21: mol_type = other RNA
ggagacggtgcccttgcacta

SEQ ID NO: 87770 - RNA, 21 nt, synthetic construct
  source 1..21: mol_type = other RNA
gagacggtgcccttgcactga

SEQ ID NO: 87771 - RNA, 21 nt, synthetic construct
  source 1..21: mol_type = other RNA
ctgcacggacgaggagggcaa

SEQ ID NO: 87772 - RNA, 21 nt, synthetic construct
  source 1..21: mol_type = other RNA
atcttggcccaggactactga

SEQ ID NO: 87773 - RNA, 21 nt, synthetic construct
  source 1..21: mol_type = other RNA
gatccacggccaccccgtcca

SEQ ID NO: 87774 - RNA, 21 nt, synthetic construct
  source 1..21: mol_type = other RNA
gatccacggccaccccgtcca

SEQ ID NO: 87775 - RNA, 21 nt, synthetic construct
  source 1..21: mol_type = other RNA
gatccacggccaccccgtcca

SEQ ID NO: 87776 - RNA, 21 nt, synthetic construct
  source 1..21: mol_type = other RNA
gatccacggccaccccgtcca

SEQ ID NO: 87777 - RNA, 21 nt, synthetic construct
  source 1..21: mol_type = other RNA
cctggagagaccatcagggta

SEQ ID NO: 87778 - RNA, 21 nt, synthetic construct
  source 1..21: mol_type = other RNA
accccgggccacaccagggga

SEQ ID NO: 87779 - RNA, 21 nt, synthetic construct
  source 1..21: mol_type = other RNA
aacagctcacactaccaaaga

SEQ ID NO: 87780 - RNA, 21 nt, synthetic construct
  source 1..21: mol_type = other RNA
aacagctcacactaccaaaga

SEQ ID NO: 87781 - RNA, 21 nt, synthetic construct
  source 1..21: mol_type = other RNA
aacagctcacactaccaaaga

SEQ ID NO: 87782 - RNA, 21 nt, synthetic construct
  source 1..21: mol_type = other RNA
aacagctcacactaccaaaga

SEQ ID NO: 87783 - RNA, 21 nt, synthetic construct
  source 1..21: mol_type = other RNA
aacagctcacactaccaaaga

SEQ ID NO: 87784 - RNA, 21 nt, synthetic construct
  source 1..21: mol_type = other RNA
ccaccacagccgctctgtgaa

SEQ ID NO: 87785 - RNA, 21 nt, synthetic construct
  source 1..21: mol_type = other RNA
tcctcaccaccctgagaccca

SEQ ID NO: 87786 - RNA, 21 nt, synthetic construct
  source 1..21: mol_type = other RNA
cggggagcggtgggtcagcaa

SEQ ID NO: 87787 - RNA, 21 nt, synthetic construct
  source 1..21: mol_type = other RNA
gccggaggggccgtctgtgaa

SEQ ID NO: 87788 - RNA, 21 nt, synthetic construct
  source 1..21: mol_type = other RNA
gccggaggggccgtctgtgaa

SEQ ID NO: 87789 - RNA, 21 nt, synthetic construct
  source 1..21: mol_type = other RNA
gccggaggggccgtctgtgaa

SEQ ID NO: 87790 - RNA, 21 nt, synthetic construct
  source 1..21: mol_type = other RNA
gcgctccgtgctcctgctgca

SEQ ID NO: 87791 - RNA, 21 nt, synthetic construct
  source 1..21: mol_type = other RNA
gctctgcgaggaccactgtga

SEQ ID NO: 87792 - RNA, 21 nt, synthetic construct
  source 1..21: mol_type = other RNA
cttcaacaccacctgcagcta

SEQ ID NO: 87793 - RNA, 21 nt, synthetic construct
  source 1..21: mol_type = other RNA
gtggtgaccatgggctgtgaa

SEQ ID NO: 87794 - RNA, 21 nt, synthetic construct
  source 1..21: mol_type = other RNA
gtggtgaccatgggctgtgaa

SEQ ID NO: 87795 - RNA, 21 nt, synthetic construct
  source 1..21: mol_type = other RNA
cagcatcccaaagccccctca

SEQ ID NO: 87796 - RNA, 21 nt, synthetic construct
  source 1..21: mol_type = other RNA
cttggcccaggactactgtga

SEQ ID NO: 87797 - RNA, 21 nt, synthetic construct
  source 1..21: mol_type = other RNA
ccgtggtgggggacgcactga

SEQ ID NO: 87798 - RNA, 21 nt, synthetic construct
  source 1..21: mol_type = other RNA
ggatccgggtcctctgctgca

SEQ ID NO: 87799 - RNA, 21 nt, synthetic construct
  source 1..21: mol_type = other RNA
tgcagtgacgaccactgcaga

SEQ ID NO: 87800 - RNA, 21 nt, synthetic construct
  source 1..21: mol_type = other RNA
gggaatctcagcctctaccta

SEQ ID NO: 87801 - RNA, 21 nt, synthetic construct
  source 1..21: mol_type = other RNA
ctgcccccgcgccctcagcaa

SEQ ID NO: 87802 - RNA, 21 nt, synthetic construct
  source 1..21: mol_type = other RNA
tcgacggcgacgtcttccgca

SEQ ID NO: 87803 - RNA, 21 nt, synthetic construct
  source 1..21: mol_type = other RNA
ccgcctgggtcccccactcca

SEQ ID NO: 87804 - RNA, 21 nt, synthetic construct
  source 1..21: mol_type = other RNA
ctccacccaggcaactgctga

SEQ ID NO: 87805 - RNA, 21 nt, synthetic construct
  source 1..21: mol_type = other RNA
agtctgtgagcagcccctgga

SEQ ID NO: 87806 - RNA, 21 nt, synthetic construct
  source 1..21: mol_type = other RNA
ctccacccaggcaactgctga

SEQ ID NO: 87807 - RNA, 21 nt, synthetic construct
  source 1..21: mol_type = other RNA
ctccacccaggcaactgctga

SEQ ID NO: 87808 - RNA, 21 nt, synthetic construct
  source 1..21: mol_type = other RNA
ccgatggccagccagtccaga

SEQ ID NO: 87809 - RNA, 21 nt, synthetic construct
  source 1..21: mol_type = other RNA
aatgggcgggtgtgcagcaca

SEQ ID NO: 87810 - RNA, 21 nt, synthetic construct
  source 1..21: mol_type = other RNA
ttcgacggcgacgtcttccga

SEQ ID NO: 87811 - RNA, 21 nt, synthetic construct
  source 1..21: mol_type = other RNA
accttcgacggcgacgtctta

SEQ ID NO: 87812 - RNA, 21 nt, synthetic construct
  source 1..21: mol_type = other RNA
ccttcgacggcgacgtcttca

SEQ ID NO: 87813 - RNA, 21 nt, synthetic construct
  source 1..21: mol_type = other RNA
caccgtggggaccacccgcaa

SEQ ID NO: 87814 - RNA, 21 nt, synthetic construct
  source 1..21: mol_type = other RNA
tgcatgtttgacacctgcaaa

SEQ ID NO: 87815 - RNA, 21 nt, synthetic construct
  source 1..21: mol_type = other RNA
gcatgtttgacacctgcaaca

SEQ ID NO: 87816 - RNA, 21 nt, synthetic construct
  source 1..21: mol_type = other RNA
tttccttcgtgcctgtggaca

SEQ ID NO: 87817 - RNA, 21 nt, synthetic construct
  source 1..21: mol_type = other RNA
gcctggagagaccatcaggga

SEQ ID NO: 87818 - RNA, 21 nt, synthetic construct
  source 1..21: mol_type = other RNA
tttgggaacagctggaagcta

SEQ ID NO: 87819 - RNA, 21 nt, synthetic construct
  source 1..21: mol_type = other RNA
acccaaggacccctgcacgga

SEQ ID NO: 87820 - RNA, 21 nt, synthetic construct
  source 1..21: mol_type = other RNA
cccaaggacccctgcacggca

SEQ ID NO: 87821 - RNA, 21 nt, synthetic construct
  source 1..21: mol_type = other RNA
gtgaccatgggctgtgagcca

SEQ ID NO: 87822 - RNA, 21 nt, synthetic construct
  source 1..21: mol_type = other RNA
ctttgacacctactccaacaa

SEQ ID NO: 87823 - RNA, 21 nt, synthetic construct
  source 1..21: mol_type = other RNA
tccacccaggcaactgctgga

SEQ ID NO: 87824 - RNA, 21 nt, synthetic construct
  source 1..21: mol_type = other RNA
gtgaccatgggctgtgagcca

SEQ ID NO: 87825 - RNA, 21 nt, synthetic construct
  source 1..21: mol_type = other RNA
ctttgacacctactccaacaa

SEQ ID NO: 87826 - RNA, 21 nt, synthetic construct
  source 1..21: mol_type = other RNA
ctttgacacctactccaacaa

SEQ ID NO: 87827 - RNA, 21 nt, synthetic construct
  source 1..21: mol_type = other RNA
tccacccaggcaactgctgga

SEQ ID NO: 87828 - RNA, 21 nt, synthetic construct
  source 1..21: mol_type = other RNA
ctttgacacctactccaacaa

SEQ ID NO: 87829 - RNA, 21 nt, synthetic construct
  source 1..21: mol_type = other RNA
tccacccaggcaactgctgga

SEQ ID NO: 87830 - RNA, 21 nt, synthetic construct
  source 1..21: mol_type = other RNA
tcctcagtcctcaccacccta

SEQ ID NO: 87831 - RNA, 21 nt, synthetic construct
  source 1..21: mol_type = other RNA
gcctgatcctgtttgaccaaa

SEQ ID NO: 87832 - RNA, 21 nt, synthetic construct
  source 1..21: mol_type = other RNA
ctttgctgagtgccacaacca

SEQ ID NO: 87833 - RNA, 21 nt, synthetic construct
  source 1..21: mol_type = other RNA
gatgtgtccagctgcagggga

SEQ ID NO: 87834 - RNA, 21 nt, synthetic construct
  source 1..21: mol_type = other RNA
ctcctctgcggagccccccga

SEQ ID NO: 87835 - RNA, 21 nt, synthetic construct
  source 1..21: mol_type = other RNA
ccacggccggagcgcccgcga

SEQ ID NO: 87836 - RNA, 21 nt, synthetic construct
  source 1..21: mol_type = other RNA
tcccctccttcacccttggga

SEQ ID NO: 87837 - RNA, 21 nt, synthetic construct
  source 1..21: mol_type = other RNA
catcctgtggcaccagggcta

SEQ ID NO: 87838 - RNA, 21 nt, synthetic construct
  source 1..21: mol_type = other RNA
cccctccttcacccttgggaa

SEQ ID NO: 87839 - RNA, 21 nt, synthetic construct
  source 1..21: mol_type = other RNA
ccagcccggccaccacaccca

SEQ ID NO: 87840 - RNA, 21 nt, synthetic construct
  source 1..21: mol_type = other RNA
gggaacagctcacacccccaa

SEQ ID NO: 87841 - RNA, 21 nt, synthetic construct
  source 1..21: mol_type = other RNA
accatcctgtggcaccaggga

SEQ ID NO: 87842 - RNA, 21 nt, synthetic construct
  source 1..21: mol_type = other RNA
ccacctggagccaggatgtga

SEQ ID NO: 87843 - RNA, 21 nt, synthetic construct
  source 1..21: mol_type = other RNA
gcacccaaggacccctgcaca

SEQ ID NO: 87844 - RNA, 21 nt, synthetic construct
  source 1..21: mol_type = other RNA
gactggagggacggcgtctga

SEQ ID NO: 87845 - RNA, 21 nt, synthetic construct
  source 1..21: mol_type = other RNA
acagctccccctcccaaagta

SEQ ID NO: 87846 - RNA, 21 nt, synthetic construct
  source 1..21: mol_type = other RNA
caccaccaccacaactgtgga

SEQ ID NO: 87847 - RNA, 21 nt, synthetic construct
  source 1..21: mol_type = other RNA
caccaccaccacaactgtgga

SEQ ID NO: 87848 - RNA, 21 nt, synthetic construct
  source 1..21: mol_type = other RNA
acagctccccctcccaaagta

SEQ ID NO: 87849 - RNA, 21 nt, synthetic construct
  source 1..21: mol_type = other RNA
caccaccaccacaactgtgga

SEQ ID NO: 87850 - RNA, 21 nt, synthetic construct
  source 1..21: mol_type = other RNA
ccacaccaggggcacctccaa

SEQ ID NO: 87851 - RNA, 21 nt, synthetic construct
  source 1..21: mol_type = other RNA
caccaccaccacaactgtgga

SEQ ID NO: 87852 - RNA, 21 nt, synthetic construct
  source 1..21: mol_type = other RNA
acagctccccctcccaaagta

SEQ ID NO: 87853 - RNA, 21 nt, synthetic construct
  source 1..21: mol_type = other RNA
caccaccaccacaactgtgga

SEQ ID NO: 87854 - RNA, 21 nt, synthetic construct
  source 1..21: mol_type = other RNA
tcctctgcggagccccccgga

SEQ ID NO: 87855 - RNA, 21 nt, synthetic construct
  source 1..21: mol_type = other RNA
acgcctgcaggctccacagaa

SEQ ID NO: 87856 - RNA, 21 nt, synthetic construct
  source 1..21: mol_type = other RNA
gtcctccgccccgctgtccta

SEQ ID NO: 87857 - RNA, 21 nt, synthetic construct
  source 1..21: mol_type = other RNA
acctggagccaggatgtgcaa

SEQ ID NO: 87858 - RNA, 21 nt, synthetic construct
  source 1..21: mol_type = other RNA
gcatcctgcccagatgtgtca

SEQ ID NO: 87859 - RNA, 21 nt, synthetic construct
  source 1..21: mol_type = other RNA
tgtgcagcacctggggtgaca

SEQ ID NO: 87860 - RNA, 21 nt, synthetic construct
  source 1..21: mol_type = other RNA
acaggcacagccagcaccgca

SEQ ID NO: 87861 - RNA, 21 nt, synthetic construct
  source 1..21: mol_type = other RNA
acagtgactccctcctctgca

SEQ ID NO: 87862 - RNA, 21 nt, synthetic construct
  source 1..21: mol_type = other RNA
caaagccactcccttctccaa

SEQ ID NO: 87863 - RNA, 21 nt, synthetic construct
  source 1..21: mol_type = other RNA
acagtgactccctcctctgca

SEQ ID NO: 87864 - RNA, 21 nt, synthetic construct
  source 1..21: mol_type = other RNA
agagctgaccacagcagccaa

SEQ ID NO: 87865 - RNA, 21 nt, synthetic construct
  source 1..21: mol_type = other RNA
acagtgactccctcctctgca

SEQ ID NO: 87866 - RNA, 21 nt, synthetic construct
  source 1..21: mol_type = other RNA
caaagccactcccttctccaa

SEQ ID NO: 87867 - RNA, 21 nt, synthetic construct
  source 1..21: mol_type = other RNA
acagtgactccctcctctgca

SEQ ID NO: 87868 - RNA, 21 nt, synthetic construct
  source 1..21: mol_type = other RNA
agagctgaccacagcagccaa

SEQ ID NO: 87869 - RNA, 21 nt, synthetic construct
  source 1..21: mol_type = other RNA
acccaggaggagggcgactga

SEQ ID NO: 87870 - RNA, 21 nt, synthetic construct
  source 1..21: mol_type = other RNA
ctgcatcctgcccagatgtga

SEQ ID NO: 87871 - RNA, 21 nt, synthetic construct
  source 1..21: mol_type = other RNA
tcctcacagagcagaccacaa

SEQ ID NO: 87872 - RNA, 21 nt, synthetic construct
  source 1..21: mol_type = other RNA
tcctccgccccgctgtcctca

SEQ ID NO: 87873 - RNA, 21 nt, synthetic construct
  source 1..21: mol_type = other RNA
cacctggagccaggatgtgca

SEQ ID NO: 87874 - RNA, 21 nt, synthetic construct
  source 1..21: mol_type = other RNA
gaaggcccaggctgcctgtga

SEQ ID NO: 87875 - RNA, 21 nt, synthetic construct
  source 1..21: mol_type = other RNA
acacccatcccctcttcctca

SEQ ID NO: 87876 - RNA, 21 nt, synthetic construct
  source 1..21: mol_type = other RNA
cccatcccctcctccacccta

SEQ ID NO: 87877 - RNA, 21 nt, synthetic construct
  source 1..21: mol_type = other RNA
cccatcccctcctccacccta

SEQ ID NO: 87878 - RNA, 21 nt, synthetic construct
  source 1..21: mol_type = other RNA
actgagctgaccacaacagca

SEQ ID NO: 87879 - RNA, 21 nt, synthetic construct
  source 1..21: mol_type = other RNA
gggctgcttctgccctgagga

SEQ ID NO: 87880 - RNA, 21 nt, synthetic construct
  source 1..21: mol_type = other RNA
cctctgcggagccccccggca

SEQ ID NO: 87881 - RNA, 21 nt, synthetic construct
  source 1..21: mol_type = other RNA
gtggagccgagctgggagaaa

SEQ ID NO: 87882 - RNA, 21 nt, synthetic construct
  source 1..21: mol_type = other RNA
gccactccctcctccagtcca

SEQ ID NO: 87883 - RNA, 21 nt, synthetic construct
  source 1..21: mol_type = other RNA
gccactccctcctccagtcca

SEQ ID NO: 87884 - RNA, 21 nt, synthetic construct
  source 1..21: mol_type = other RNA
gccactccctcctccagtcca

SEQ ID NO: 87885 - RNA, 21 nt, synthetic construct
  source 1..21: mol_type = other RNA
cgacagcagaaaggatggcta

SEQ ID NO: 87886 - RNA, 21 nt, synthetic construct
  source 1..21: mol_type = other RNA
ctggcacctgctctgtgcaga

SEQ ID NO: 87887 - RNA, 21 nt, synthetic construct
  source 1..21: mol_type = other RNA
tgcagggcggggcccacatca

SEQ ID NO: 87888 - RNA, 21 nt, synthetic construct
  source 1..21: mol_type = other RNA
gtcggatgggagtgggggcta

SEQ ID NO: 87889 - RNA, 21 nt, synthetic construct
  source 1..21: mol_type = other RNA
ctggagtttgggaacagctga

SEQ ID NO: 87890 - RNA, 21 nt, synthetic construct
  source 1..21: mol_type = other RNA
ggagtttgggaacagctggaa

SEQ ID NO: 87891 - RNA, 21 nt, synthetic construct
  source 1..21: mol_type = other RNA
agtttgggaacagctggaaga

SEQ ID NO: 87892 - RNA, 21 nt, synthetic construct
  source 1..21: mol_type = other RNA
ggaagctctccccctcctgca

SEQ ID NO: 87893 - RNA, 21 nt, synthetic construct
  source 1..21: mol_type = other RNA
aagctctccccctcctgccca

SEQ ID NO: 87894 - RNA, 21 nt, synthetic construct
  source 1..21: mol_type = other RNA
ccccaccttcgccgcctgcca

SEQ ID NO: 87895 - RNA, 21 nt, synthetic construct
  source 1..21: mol_type = other RNA
catcatcaggaaggctgtgga

SEQ ID NO: 87896 - RNA, 21 nt, synthetic construct
  source 1..21: mol_type = other RNA
cagtctgtgagcagcccctga

SEQ ID NO: 87897 - RNA, 21 nt, synthetic construct
  source 1..21: mol_type = other RNA
acacccgtggccaccatgtca

SEQ ID NO: 87898 - RNA, 21 nt, synthetic construct
  source 1..21: mol_type = other RNA
cccccaggatgggtgccccga

SEQ ID NO: 87899 - RNA, 21 nt, synthetic construct
  source 1..21: mol_type = other RNA
gtgcagcacctggggtgacta

SEQ ID NO: 87900 - RNA, 21 nt, synthetic construct
  source 1..21: mol_type = other RNA
gctggtgctggaggcgtccaa

SEQ ID NO: 87901 - RNA, 21 nt, synthetic construct
  source 1..21: mol_type = other RNA
ctggtgctggaggcgtccaaa

SEQ ID NO: 87902 - RNA, 21 nt, synthetic construct
  source 1..21: mol_type = other RNA
gcagctcctgcacctgctcca

SEQ ID NO: 87903 - RNA, 21 nt, synthetic construct
  source 1..21: mol_type = other RNA
gccctggcacctgctctgtga

SEQ ID NO: 87904 - RNA, 21 nt, synthetic construct
  source 1..21: mol_type = other RNA
tggcacctgctctgtgcagga

SEQ ID NO: 87905 - RNA, 21 nt, synthetic construct
  source 1..21: mol_type = other RNA
ggggctgcagctgctggtgca

SEQ ID NO: 87906 - RNA, 21 nt, synthetic construct
  source 1..21: mol_type = other RNA
agctaagctgcctgggagcca

SEQ ID NO: 87907 - RNA, 21 nt, synthetic construct
  source 1..21: mol_type = other RNA
tgtcccccggggctggtgtca

SEQ ID NO: 87908 - RNA, 21 nt, synthetic construct
  source 1..21: mol_type = other RNA
gcactggagtttgggaacaga

SEQ ID NO: 87909 - RNA, 21 nt, synthetic construct
  source 1..21: mol_type = other RNA
actggagtttgggaacagcta

SEQ ID NO: 87910 - RNA, 21 nt, synthetic construct
  source 1..21: mol_type = other RNA
tggagtttgggaacagctgga

SEQ ID NO: 87911 - RNA, 21 nt, synthetic construct
  source 1..21: mol_type = other RNA
gagtttgggaacagctggaaa

SEQ ID NO: 87912 - RNA, 21 nt, synthetic construct
  source 1..21: mol_type = other RNA
gtttgggaacagctggaagca

SEQ ID NO: 87913 - RNA, 21 nt, synthetic construct
  source 1..21: mol_type = other RNA
acagctggaagctctccccca

SEQ ID NO: 87914 - RNA, 21 nt, synthetic construct
  source 1..21: mol_type = other RNA
cagctggaagctctcccccta

SEQ ID NO: 87915 - RNA, 21 nt, synthetic construct
  source 1..21: mol_type = other RNA
gctggaagctctccccctcca

SEQ ID NO: 87916 - RNA, 21 nt, synthetic construct
  source 1..21: mol_type = other RNA
gaagctctccccctcctgcca

SEQ ID NO: 87917 - RNA, 21 nt, synthetic construct
  source 1..21: mol_type = other RNA
cctccacggccccaccttcga

SEQ ID NO: 87918 - RNA, 21 nt, synthetic construct
  source 1..21: mol_type = other RNA
ctccacggccccaccttcgca

SEQ ID NO: 87919 - RNA, 21 nt, synthetic construct
  source 1..21: mol_type = other RNA
cggccccaccttcgccgccta

SEQ ID NO: 87920 - RNA, 21 nt, synthetic construct
  source 1..21: mol_type = other RNA
ggccccaccttcgccgcctga

SEQ ID NO: 87921 - RNA, 21 nt, synthetic construct
  source 1..21: mol_type = other RNA
cacatgggggctgtgagtgga

SEQ ID NO: 87922 - RNA, 21 nt, synthetic construct
  source 1..21: mol_type = other RNA
cgccattcaccttcaccacca

SEQ ID NO: 87923 - RNA, 21 nt, synthetic construct
  source 1..21: mol_type = other RNA
attcaccttcaccaccgccta

SEQ ID NO: 87924 - RNA, 21 nt, synthetic construct
  source 1..21: mol_type = other RNA
accgcccagagcccggcctga

SEQ ID NO: 87925 - RNA, 21 nt, synthetic construct
  source 1..21: mol_type = other RNA
cggcctgggaggcggagacta

SEQ ID NO: 87926 - RNA, 21 nt, synthetic construct
  source 1..21: mol_type = other RNA
caccagccctcagccctccca

SEQ ID NO: 87927 - RNA, 21 nt, synthetic construct
  source 1..21: mol_type = other RNA
ccagccctcagccctccctca

SEQ ID NO: 87928 - RNA, 21 nt, synthetic construct
  source 1..21: mol_type = other RNA
cctggcacaggtggggcagaa

SEQ ID NO: 87929 - RNA, 21 nt, synthetic construct
  source 1..21: mol_type = other RNA
cacagagctggagacggccaa

SEQ ID NO: 87930 - RNA, 21 nt, synthetic construct
  source 1..21: mol_type = other RNA
acagagctggagacggccaca

SEQ ID NO: 87931 - RNA, 21 nt, synthetic construct
  source 1..21: mol_type = other RNA
caccaccaccacccaggccca

SEQ ID NO: 87932 - RNA, 21 nt, synthetic construct
  source 1..21: mol_type = other RNA
gccagcaccacagcagtccca

SEQ ID NO: 87933 - RNA, 21 nt, synthetic construct
  source 1..21: mol_type = other RNA
ccagcactgagaagcacagca

SEQ ID NO: 87934 - RNA, 21 nt, synthetic construct
  source 1..21: mol_type = other RNA
cagcactgagaagcacagcca

SEQ ID NO: 87935 - RNA, 21 nt, synthetic construct
  source 1..21: mol_type = other RNA
cacccatcccctcttcctcca

SEQ ID NO: 87936 - RNA, 21 nt, synthetic construct
  source 1..21: mol_type = other RNA
atcccctcttcctccctggga

SEQ ID NO: 87937 - RNA, 21 nt, synthetic construct
  source 1..21: mol_type = other RNA
cccctcttcctccctgggcaa

SEQ ID NO: 87938 - RNA, 21 nt, synthetic construct
  source 1..21: mol_type = other RNA
accaccaccacaactgtggca

SEQ ID NO: 87939 - RNA, 21 nt, synthetic construct
  source 1..21: mol_type = other RNA
gccccccagcagtccccacaa

SEQ ID NO: 87940 - RNA, 21 nt, synthetic construct
  source 1..21: mol_type = other RNA
acaccacggccacctccagga

SEQ ID NO: 87941 - RNA, 21 nt, synthetic construct
  source 1..21: mol_type = other RNA
cggccaccgcctcctccacca

SEQ ID NO: 87942 - RNA, 21 nt, synthetic construct
  source 1..21: mol_type = other RNA
ccagcactgagaagcacagca

SEQ ID NO: 87943 - RNA, 21 nt, synthetic construct
  source 1..21: mol_type = other RNA
cagcactgagaagcacagcca

SEQ ID NO: 87944 - RNA, 21 nt, synthetic construct
  source 1..21: mol_type = other RNA
tcccctcctcctccctgggca

SEQ ID NO: 87945 - RNA, 21 nt, synthetic construct
  source 1..21: mol_type = other RNA
cctcctccctgggcaccacca

SEQ ID NO: 87946 - RNA, 21 nt, synthetic construct
  source 1..21: mol_type = other RNA
accaccaccacaactgtggca

SEQ ID NO: 87947 - RNA, 21 nt, synthetic construct
  source 1..21: mol_type = other RNA
gtcccccagcagtccccacaa

SEQ ID NO: 87948 - RNA, 21 nt, synthetic construct
  source 1..21: mol_type = other RNA
ggaccacggccacggccacaa

SEQ ID NO: 87949 - RNA, 21 nt, synthetic construct
  source 1..21: mol_type = other RNA
acggccaccacacccacagca

SEQ ID NO: 87950 - RNA, 21 nt, synthetic construct
  source 1..21: mol_type = other RNA
caaagccacttcctcctccaa

SEQ ID NO: 87951 - RNA, 21 nt, synthetic construct
  source 1..21: mol_type = other RNA
tccacccctcctccactccga

SEQ ID NO: 87952 - RNA, 21 nt, synthetic construct
  source 1..21: mol_type = other RNA
cagagctgaccacagcagcca

SEQ ID NO: 87953 - RNA, 21 nt, synthetic construct
  source 1..21: mol_type = other RNA
gagctgaccacagcagccaca

SEQ ID NO: 87954 - RNA, 21 nt, synthetic construct
  source 1..21: mol_type = other RNA
agccactggccccacggccaa

SEQ ID NO: 87955 - RNA, 21 nt, synthetic construct
  source 1..21: mol_type = other RNA
cggccaccgcctcctccacca

SEQ ID NO: 87956 - RNA, 21 nt, synthetic construct
  source 1..21: mol_type = other RNA
ccagcactgagaagcacagca

SEQ ID NO: 87957 - RNA, 21 nt, synthetic construct
  source 1..21: mol_type = other RNA
cagcactgagaagcacagcca

SEQ ID NO: 87958 - RNA, 21 nt, synthetic construct
  source 1..21: mol_type = other RNA
atcccctcttcctccctggga

SEQ ID NO: 87959 - RNA, 21 nt, synthetic construct
  source 1..21: mol_type = other RNA
cccctcttcctccctgggcaa

SEQ ID NO: 87960 - RNA, 21 nt, synthetic construct
  source 1..21: mol_type = other RNA
ttaccaccacgaccaccacaa

SEQ ID NO: 87961 - RNA, 21 nt, synthetic construct
  source 1..21: mol_type = other RNA
accaccaccacaactgtggca

SEQ ID NO: 87962 - RNA, 21 nt, synthetic construct
  source 1..21: mol_type = other RNA
ggcggtccctgccccccagca

SEQ ID NO: 87963 - RNA, 21 nt, synthetic construct
  source 1..21: mol_type = other RNA
gcggtccctgccccccagcaa

SEQ ID NO: 87964 - RNA, 21 nt, synthetic construct
  source 1..21: mol_type = other RNA
gccccccagcagtccccacaa

SEQ ID NO: 87965 - RNA, 21 nt, synthetic construct
  source 1..21: mol_type = other RNA
tccaggaccacagccacagca

SEQ ID NO: 87966 - RNA, 21 nt, synthetic construct
  source 1..21: mol_type = other RNA
cggccaccgcctcctccacca

SEQ ID NO: 87967 - RNA, 21 nt, synthetic construct
  source 1..21: mol_type = other RNA
ccagcactgagaagcacagca

SEQ ID NO: 87968 - RNA, 21 nt, synthetic construct
  source 1..21: mol_type = other RNA
cagcactgagaagcacagcca

SEQ ID NO: 87969 - RNA, 21 nt, synthetic construct
  source 1..21: mol_type = other RNA
tcccctcctcctccctgggca

SEQ ID NO: 87970 - RNA, 21 nt, synthetic construct
  source 1..21: mol_type = other RNA
cctcctccctgggcaccacca

SEQ ID NO: 87971 - RNA, 21 nt, synthetic construct
  source 1..21: mol_type = other RNA
caccccctcttccaccccaga

SEQ ID NO: 87972 - RNA, 21 nt, synthetic construct
  source 1..21: mol_type = other RNA
accaccaccacaactgtggca

SEQ ID NO: 87973 - RNA, 21 nt, synthetic construct
  source 1..21: mol_type = other RNA
gtcccccagcagtccccacaa

SEQ ID NO: 87974 - RNA, 21 nt, synthetic construct
  source 1..21: mol_type = other RNA
acaccacggccacctccagga

SEQ ID NO: 87975 - RNA, 21 nt, synthetic construct
  source 1..21: mol_type = other RNA
ggaccacggccacggccacaa

SEQ ID NO: 87976 - RNA, 21 nt, synthetic construct
  source 1..21: mol_type = other RNA
gctgaccagcccggccaccaa

SEQ ID NO: 87977 - RNA, 21 nt, synthetic construct
  source 1..21: mol_type = other RNA
ccggccaccacacccacagca

SEQ ID NO: 87978 - RNA, 21 nt, synthetic construct
  source 1..21: mol_type = other RNA
caaagccacttcctcctccaa

SEQ ID NO: 87979 - RNA, 21 nt, synthetic construct
  source 1..21: mol_type = other RNA
acccatcccctcctccaccca

SEQ ID NO: 87980 - RNA, 21 nt, synthetic construct
  source 1..21: mol_type = other RNA
tccacccctcctccactccga

SEQ ID NO: 87981 - RNA, 21 nt, synthetic construct
  source 1..21: mol_type = other RNA
cagagctgaccacagcagcca

SEQ ID NO: 87982 - RNA, 21 nt, synthetic construct
  source 1..21: mol_type = other RNA
gagctgaccacagcagccaca

SEQ ID NO: 87983 - RNA, 21 nt, synthetic construct
  source 1..21: mol_type = other RNA
agccactggccccacggccaa

SEQ ID NO: 87984 - RNA, 21 nt, synthetic construct
  source 1..21: mol_type = other RNA
cggccaccgcctcctccacca

SEQ ID NO: 87985 - RNA, 21 nt, synthetic construct
  source 1..21: mol_type = other RNA
actgcaactgcccttccagca

SEQ ID NO: 87986 - RNA, 21 nt, synthetic construct
  source 1..21: mol_type = other RNA
ccagcactgagaagcacagca

SEQ ID NO: 87987 - RNA, 21 nt, synthetic construct
  source 1..21: mol_type = other RNA
cagcactgagaagcacagcca

SEQ ID NO: 87988 - RNA, 21 nt, synthetic construct
  source 1..21: mol_type = other RNA
tcccctcctcctccctgggca

SEQ ID NO: 87989 - RNA, 21 nt, synthetic construct
  source 1..21: mol_type = other RNA
cctcctccctgggcaccacca

SEQ ID NO: 87990 - RNA, 21 nt, synthetic construct
  source 1..21: mol_type = other RNA
accaccaccacaactgtggca

SEQ ID NO: 87991 - RNA, 21 nt, synthetic construct
  source 1..21: mol_type = other RNA
cacccatcaccccagtgctga

SEQ ID NO: 87992 - RNA, 21 nt, synthetic construct
  source 1..21: mol_type = other RNA
caaagccacttcctcctccaa

SEQ ID NO: 87993 - RNA, 21 nt, synthetic construct
  source 1..21: mol_type = other RNA
cacagccacaaaatccacaga

SEQ ID NO: 87994 - RNA, 21 nt, synthetic construct
  source 1..21: mol_type = other RNA
acagccacaaaatccacagca

SEQ ID NO: 87995 - RNA, 21 nt, synthetic construct
  source 1..21: mol_type = other RNA
acccatcccctcctccaccca

SEQ ID NO: 87996 - RNA, 21 nt, synthetic construct
  source 1..21: mol_type = other RNA
ccctgtggaccacgtggacca

SEQ ID NO: 87997 - RNA, 21 nt, synthetic construct
  source 1..21: mol_type = other RNA
tgaccaccacagccaccatga

SEQ ID NO: 87998 - RNA, 21 nt, synthetic construct
  source 1..21: mol_type = other RNA
gaccaccacagccaccatgaa

SEQ ID NO: 87999 - RNA, 21 nt, synthetic construct
  source 1..21: mol_type = other RNA
cccacagccactgcctccaca

SEQ ID NO: 88000 - RNA, 21 nt, synthetic construct
  source 1..21: mol_type = other RNA
ggtgcatgggaaggaggagga

SEQ ID NO: 88001 - RNA, 21 nt, synthetic construct
  source 1..21: mol_type = other RNA
ggaggagggcctgatcctgta

SEQ ID NO: 88002 - RNA, 21 nt, synthetic construct
  source 1..21: mol_type = other RNA
gccgccttgaggtgccctgca

SEQ ID NO: 88003 - RNA, 21 nt, synthetic construct
  source 1..21: mol_type = other RNA
cccccagagcctgcctgtgta

SEQ ID NO: 88004 - RNA, 21 nt, synthetic construct
  source 1..21: mol_type = other RNA
atcctgcccagatgtgtccaa

SEQ ID NO: 88005 - RNA, 21 nt, synthetic construct
  source 1..21: mol_type = other RNA
ccatcctgtggcaccagggca

SEQ ID NO: 88006 - RNA, 21 nt, synthetic construct
  source 1..21: mol_type = other RNA
ccatggctcccccacacacca

SEQ ID NO: 88007 - RNA, 21 nt, synthetic construct
  source 1..21: mol_type = other RNA
tccgtgctcctgctgcccaca

SEQ ID NO: 88008 - RNA, 21 nt, synthetic construct
  source 1..21: mol_type = other RNA
aggccagctgctgccaggaaa

SEQ ID NO: 88009 - RNA, 21 nt, synthetic construct
  source 1..21: mol_type = other RNA
ggccagctgctgccaggaaga

SEQ ID NO: 88010 - RNA, 21 nt, synthetic construct
  source 1..21: mol_type = other RNA
gccgcaggcagagacccagga

SEQ ID NO: 88011 - RNA, 21 nt, synthetic construct
  source 1..21: mol_type = other RNA
ggtggggcagaaggtgcacta

SEQ ID NO: 88012 - RNA, 21 nt, synthetic construct
  source 1..21: mol_type = other RNA
ggcttcacagtcaccccctca

SEQ ID NO: 88013 - RNA, 21 nt, synthetic construct
  source 1..21: mol_type = other RNA
aacttcgacgacaatgccata

SEQ ID NO: 88014 - RNA, 21 nt, synthetic construct
  source 1..21: mol_type = other RNA
tgctgcagggtaactcaggga

SEQ ID NO: 88015 - RNA, 21 nt, synthetic construct
  source 1..21: mol_type = other RNA
aacagccactacaactgcaga

SEQ ID NO: 88016 - RNA, 21 nt, synthetic construct
  source 1..21: mol_type = other RNA
cctgcatggtgactgcagcta

SEQ ID NO: 88017 - RNA, 21 nt, synthetic construct
  source 1..21: mol_type = other RNA
tgccctgtgacgcccagggta

SEQ ID NO: 88018 - RNA, 21 nt, synthetic construct
  source 1..21: mol_type = other RNA
tgcaagcccctgccctgtgaa

SEQ ID NO: 88019 - RNA, 21 nt, synthetic construct
  source 1..21: mol_type = other RNA
gaccacccgcacccctgcaga

SEQ ID NO: 88020 - RNA, 21 nt, synthetic construct
  source 1..21: mol_type = other RNA
ggctctgtggccaccccctca

SEQ ID NO: 88021 - RNA, 21 nt, synthetic construct
  source 1..21: mol_type = other RNA
ggctctgtggccaccccctca

SEQ ID NO: 88022 - RNA, 21 nt, synthetic construct
  source 1..21: mol_type = other RNA
cccgggccacaccagggccaa

SEQ ID NO: 88023 - RNA, 21 nt, synthetic construct
  source 1..21: mol_type = other RNA
ggctctgtggccaccccctca

SEQ ID NO: 88024 - RNA, 21 nt, synthetic construct
  source 1..21: mol_type = other RNA
ggctctgtggccaccccctca

SEQ ID NO: 88025 - RNA, 21 nt, synthetic construct
  source 1..21: mol_type = other RNA
ggctctgtggccaccccctca

SEQ ID NO: 88026 - RNA, 21 nt, synthetic construct
  source 1..21: mol_type = other RNA
cctgtccatgcctgctgcaga

SEQ ID NO: 88027 - RNA, 21 nt, synthetic construct
  source 1..21: mol_type = other RNA
aagcctggagagaccatcaga

SEQ ID NO: 88028 - RNA, 21 nt, synthetic construct
  source 1..21: mol_type = other RNA
cactccagagactgcccacaa

SEQ ID NO: 88029 - RNA, 21 nt, synthetic construct
  source 1..21: mol_type = other RNA
cactccagagactgcccacaa

SEQ ID NO: 88030 - RNA, 21 nt, synthetic construct
  source 1..21: mol_type = other RNA
cacccaaggacccctgcacga

SEQ ID NO: 88031 - RNA, 21 nt, synthetic construct
  source 1..21: mol_type = other RNA
ccccctcctgcccggacgcca

SEQ ID NO: 88032 - RNA, 21 nt, synthetic construct
  source 1..21: mol_type = other RNA
gcaagcccctgccctgtgaca

SEQ ID NO: 88033 - RNA, 21 nt, synthetic construct
  source 1..21: mol_type = other RNA
ctgcagccactggatccacga

SEQ ID NO: 88034 - RNA, 21 nt, synthetic construct
  source 1..21: mol_type = other RNA
atgggcagcgggaggagctga

SEQ ID NO: 88035 - RNA, 21 nt, synthetic construct
  source 1..21: mol_type = other RNA
agcacacccacccccacccca

SEQ ID NO: 88036 - RNA, 21 nt, synthetic construct
  source 1..21: mol_type = other RNA
aggcccaggggctggtgctga

SEQ ID NO: 88037 - RNA, 21 nt, synthetic construct
  source 1..21: mol_type = other RNA
tgggcagcgggaggagctgca

SEQ ID NO: 88038 - RNA, 21 nt, synthetic construct
  source 1..21: mol_type = other RNA
gccgctggaggagctgggcca

SEQ ID NO: 88039 - RNA, 21 nt, synthetic construct
  source 1..21: mol_type = other RNA
tagcacacccacccccaccca

SEQ ID NO: 88040 - RNA, 21 nt, synthetic construct
  source 1..21: mol_type = other RNA
acacccacccccaccccatga

SEQ ID NO: 88041 - RNA, 21 nt, synthetic construct
  source 1..21: mol_type = other RNA
ggacgccctggcacccaagga

SEQ ID NO: 88042 - RNA, 21 nt, synthetic construct
  source 1..21: mol_type = other RNA
cacagtcatcagctccagaga

SEQ ID NO: 88043 - RNA, 21 nt, synthetic construct
  source 1..21: mol_type = other RNA
ggccacacccagcaagaccca

SEQ ID NO: 88044 - RNA, 21 nt, synthetic construct
  source 1..21: mol_type = other RNA
ggccacacccagcaagaccca

SEQ ID NO: 88045 - RNA, 21 nt, synthetic construct
  source 1..21: mol_type = other RNA
agccacacccagcaagaccca

SEQ ID NO: 88046 - RNA, 21 nt, synthetic construct
  source 1..21: mol_type = other RNA
ggccacacccagcaagaccca

SEQ ID NO: 88047 - RNA, 21 nt, synthetic construct
  source 1..21: mol_type = other RNA
acacctcctctactccagaga

SEQ ID NO: 88048 - RNA, 21 nt, synthetic construct
  source 1..21: mol_type = other RNA
ggtgaccccctcctccgtcca

SEQ ID NO: 88049 - RNA, 21 nt, synthetic construct
  source 1..21: mol_type = other RNA
ccacacccgcagccaccagca

SEQ ID NO: 88050 - RNA, 21 nt, synthetic construct
  source 1..21: mol_type = other RNA
ccacacccacagctaccagca

SEQ ID NO: 88051 - RNA, 21 nt, synthetic construct
  source 1..21: mol_type = other RNA
ccacacccacagctaccagca

SEQ ID NO: 88052 - RNA, 21 nt, synthetic construct
  source 1..21: mol_type = other RNA
aacagctccccctcccaaaga

SEQ ID NO: 88053 - RNA, 21 nt, synthetic construct
  source 1..21: mol_type = other RNA
aacagctccccctcccaaaga

SEQ ID NO: 88054 - RNA, 21 nt, synthetic construct
  source 1..21: mol_type = other RNA
aacagctccccctcccaaaga

SEQ ID NO: 88055 - RNA, 21 nt, synthetic construct
  source 1..21: mol_type = other RNA
atgtttgacacctgcaactga

SEQ ID NO: 88056 - RNA, 21 nt, synthetic construct
  source 1..21: mol_type = other RNA
cagcatcctccacggccccaa

SEQ ID NO: 88057 - RNA, 21 nt, synthetic construct
  source 1..21: mol_type = other RNA
cacagtcaccagctccaaaga

SEQ ID NO: 88058 - RNA, 21 nt, synthetic construct
  source 1..21: mol_type = other RNA
cacagtcaccagctccaaaga

SEQ ID NO: 88059 - RNA, 21 nt, synthetic construct
  source 1..21: mol_type = other RNA
cacagtcaccagctccaaaga

SEQ ID NO: 88060 - RNA, 21 nt, synthetic construct
  source 1..21: mol_type = other RNA
cacagtcaccagctccaaaga

SEQ ID NO: 88061 - RNA, 21 nt, synthetic construct
  source 1..21: mol_type = other RNA
gagcccacagctggaggggaa

SEQ ID NO: 88062 - RNA, 21 nt, synthetic construct
  source 1..21: mol_type = other RNA
cccaccgccagtgtcctccga

SEQ ID NO: 88063 - RNA, 21 nt, synthetic construct
  source 1..21: mol_type = other RNA
ctagtgggctccaggcctgta

SEQ ID NO: 88064 - RNA, 21 nt, synthetic construct
  source 1..21: mol_type = other RNA
gctgcctacgcccaggcctga

SEQ ID NO: 88065 - RNA, 21 nt, synthetic construct
  source 1..21: mol_type = other RNA
cacccatcccctcctccacca

SEQ ID NO: 88066 - RNA, 21 nt, synthetic construct
  source 1..21: mol_type = other RNA
cacccatcccctcctccacca

SEQ ID NO: 88067 - RNA, 21 nt, synthetic construct
  source 1..21: mol_type = other RNA
gagggctcctgccccggagca

SEQ ID NO: 88068 - RNA, 21 nt, synthetic construct
  source 1..21: mol_type = other RNA
caccccgtcctccaccccaga

SEQ ID NO: 88069 - RNA, 21 nt, synthetic construct
  source 1..21: mol_type = other RNA
caccccgtcctccaccccaga

SEQ ID NO: 88070 - RNA, 21 nt, synthetic construct
  source 1..21: mol_type = other RNA
caccccgtcctccaccccaga

SEQ ID NO: 88071 - RNA, 21 nt, synthetic construct
  source 1..21: mol_type = other RNA
caccccgtcctccaccccaga

SEQ ID NO: 88072 - RNA, 21 nt, synthetic construct
  source 1..21: mol_type = other RNA
caccccgtcctccaccccaga

SEQ ID NO: 88073 - RNA, 21 nt, synthetic construct
  source 1..21: mol_type = other RNA
agggctgcttctgccctgaga

SEQ ID NO: 88074 - RNA, 21 nt, synthetic construct
  source 1..21: mol_type = other RNA
gactggcgaggtgcaaccgga

SEQ ID NO: 88075 - RNA, 21 nt, synthetic construct
  source 1..21: mol_type = other RNA
ggctccacggtgaccccctca

SEQ ID NO: 88076 - RNA, 21 nt, synthetic construct
  source 1..21: mol_type = other RNA
ggttccacggtgaccccctca

SEQ ID NO: 88077 - RNA, 21 nt, synthetic construct
  source 1..21: mol_type = other RNA
ggctccacggtgaccccctca

SEQ ID NO: 88078 - RNA, 21 nt, synthetic construct
  source 1..21: mol_type = other RNA
ggctccacggtgaccccctca

SEQ ID NO: 88079 - RNA, 21 nt, synthetic construct
  source 1..21: mol_type = other RNA
ggctccacggtgaccccctca

SEQ ID NO: 88080 - RNA, 21 nt, synthetic construct
  source 1..21: mol_type = other RNA
gatatcgtcctcactgtcaca

SEQ ID NO: 88081 - RNA, 21 nt, synthetic construct
  source 1..21: mol_type = other RNA
gagtgccgggcggcgcagcta

SEQ ID NO: 88082 - RNA, 21 nt, synthetic construct
  source 1..21: mol_type = other RNA
agctgggagaatgcagggcaa

SEQ ID NO: 88083 - RNA, 21 nt, synthetic construct
  source 1..21: mol_type = other RNA
gtcagcatccggctggtgcta

SEQ ID NO: 88084 - RNA, 21 nt, synthetic construct
  source 1..21: mol_type = other RNA
gacctgcatggtgactgcaga

SEQ ID NO: 88085 - RNA, 21 nt, synthetic construct
  source 1..21: mol_type = other RNA
ccttctcgcgctgccactcca

SEQ ID NO: 88086 - RNA, 21 nt, synthetic construct
  source 1..21: mol_type = other RNA
atcagggccgctggagggcaa

SEQ ID NO: 88087 - RNA, 21 nt, synthetic construct
  source 1..21: mol_type = other RNA
gtggggcagaaggtgcactga

SEQ ID NO: 88088 - RNA, 21 nt, synthetic construct
  source 1..21: mol_type = other RNA
gacggggagcttgggcacata

SEQ ID NO: 88089 - RNA, 21 nt, synthetic construct
  source 1..21: mol_type = other RNA
cgcccgacaggcacagccaga

SEQ ID NO: 88090 - RNA, 21 nt, synthetic construct
  source 1..21: mol_type = other RNA
cctgagaacagctccccctca

SEQ ID NO: 88091 - RNA, 21 nt, synthetic construct
  source 1..21: mol_type = other RNA
accacggccaccacaaccgga

SEQ ID NO: 88092 - RNA, 21 nt, synthetic construct
  source 1..21: mol_type = other RNA
ctcccaaagtgctgaccagca

SEQ ID NO: 88093 - RNA, 21 nt, synthetic construct
  source 1..21: mol_type = other RNA
ccctcaaagtgctgaccagca

SEQ ID NO: 88094 - RNA, 21 nt, synthetic construct
  source 1..21: mol_type = other RNA
ctcccaaagtgctgaccagca

SEQ ID NO: 88095 - RNA, 21 nt, synthetic construct
  source 1..21: mol_type = other RNA
gccacggccaccacaaccgga

SEQ ID NO: 88096 - RNA, 21 nt, synthetic construct
  source 1..21: mol_type = other RNA
cttcaatggccaagtcttcca

SEQ ID NO: 88097 - RNA, 21 nt, synthetic construct
  source 1..21: mol_type = other RNA
agcagaaaggatggctgctga

SEQ ID NO: 88098 - RNA, 21 nt, synthetic construct
  source 1..21: mol_type = other RNA
ggggatggcggagggctgcta

SEQ ID NO: 88099 - RNA, 21 nt, synthetic construct
  source 1..21: mol_type = other RNA
gggcagacaggctggtccaga

SEQ ID NO: 88100 - RNA, 21 nt, synthetic construct
  source 1..21: mol_type = other RNA
aggtcagagaggggtcagcaa

SEQ ID NO: 88101 - RNA, 21 nt, synthetic construct
  source 1..21: mol_type = other RNA
ccggctggtgctgacattcca

SEQ ID NO: 88102 - RNA, 21 nt, synthetic construct
  source 1..21: mol_type = other RNA
cagggcggggcccacatctca

SEQ ID NO: 88103 - RNA, 21 nt, synthetic construct
  source 1..21: mol_type = other RNA
gcccacatctccacctatgaa

SEQ ID NO: 88104 - RNA, 21 nt, synthetic construct
  source 1..21: mol_type = other RNA
atggtgtacctggactgcaga

SEQ ID NO: 88105 - RNA, 21 nt, synthetic construct
  source 1..21: mol_type = other RNA
agcgttacagccatcccctca

SEQ ID NO: 88106 - RNA, 21 nt, synthetic construct
  source 1..21: mol_type = other RNA
cattgaccgcttccagggcga

SEQ ID NO: 88107 - RNA, 21 nt, synthetic construct
  source 1..21: mol_type = other RNA
agccaccatgacaagggccaa

SEQ ID NO: 88108 - RNA, 21 nt, synthetic construct
  source 1..21: mol_type = other RNA
cctccgccccgctgtcctcga

SEQ ID NO: 88109 - RNA, 21 nt, synthetic construct
  source 1..21: mol_type = other RNA
tacctggacaaccactactga

SEQ ID NO: 88110 - RNA, 21 nt, synthetic construct
  source 1..21: mol_type = other RNA
cagcagaaaggatggctgcta

SEQ ID NO: 88111 - RNA, 21 nt, synthetic construct
  source 1..21: mol_type = other RNA
ccaccttggccttgcccctca

SEQ ID NO: 88112 - RNA, 21 nt, synthetic construct
  source 1..21: mol_type = other RNA
gtccatgcctgctgcagggta

SEQ ID NO: 88113 - RNA, 21 nt, synthetic construct
  source 1..21: mol_type = other RNA
ccaaatccacagctaccagca

SEQ ID NO: 88114 - RNA, 21 nt, synthetic construct
  source 1..21: mol_type = other RNA
agcagccactacaactgcaga

SEQ ID NO: 88115 - RNA, 21 nt, synthetic construct
  source 1..21: mol_type = other RNA
ccaaatccacagctaccagca

SEQ ID NO: 88116 - RNA, 21 nt, synthetic construct
  source 1..21: mol_type = other RNA
agcagccactacaactgcaga

SEQ ID NO: 88117 - RNA, 21 nt, synthetic construct
  source 1..21: mol_type = other RNA
caaaatccacagctaccagca

SEQ ID NO: 88118 - RNA, 21 nt, synthetic construct
  source 1..21: mol_type = other RNA
gctgtggggagtgcgtccaga

SEQ ID NO: 88119 - RNA, 21 nt, synthetic construct
  source 1..21: mol_type = other RNA
gaggggtcagcatcccaaaga

SEQ ID NO: 88120 - RNA, 21 nt, synthetic construct
  source 1..21: mol_type = other RNA
ctccctgcccgtccccgtcca

SEQ ID NO: 88121 - RNA, 21 nt, synthetic construct
  source 1..21: mol_type = other RNA
ggtgccgcaggcagagaccca

SEQ ID NO: 88122 - RNA, 21 nt, synthetic construct
  source 1..21: mol_type = other RNA
gagtgcgagtgcatctgcaga

SEQ ID NO: 88123 - RNA, 21 nt, synthetic construct
  source 1..21: mol_type = other RNA
tgtcccaccttccgctgcaga

SEQ ID NO: 88124 - RNA, 21 nt, synthetic construct
  source 1..21: mol_type = other RNA
ctggcacaccccccactgcca

SEQ ID NO: 88125 - RNA, 21 nt, synthetic construct
  source 1..21: mol_type = other RNA
gaactgggagcaggagggcga

SEQ ID NO: 88126 - RNA, 21 nt, synthetic construct
  source 1..21: mol_type = other RNA
agccagcaccgcttccaaaga

SEQ ID NO: 88127 - RNA, 21 nt, synthetic construct
  source 1..21: mol_type = other RNA
caccacacccacaaccagaga

SEQ ID NO: 88128 - RNA, 21 nt, synthetic construct
  source 1..21: mol_type = other RNA
caccacacccacaaccagaga

SEQ ID NO: 88129 - RNA, 21 nt, synthetic construct
  source 1..21: mol_type = other RNA
caccctcctctactccagaga

SEQ ID NO: 88130 - RNA, 21 nt, synthetic construct
  source 1..21: mol_type = other RNA
caccacacccacaaccagaga

SEQ ID NO: 88131 - RNA, 21 nt, synthetic construct
  source 1..21: mol_type = other RNA
gaccacccacaccgccagaga

SEQ ID NO: 88132 - RNA, 21 nt, synthetic construct
  source 1..21: mol_type = other RNA
ggacccctttcgggagggcga

SEQ ID NO: 88133 - RNA, 21 nt, synthetic construct
  source 1..21: mol_type = other RNA
gcccccggacctgccccctca

SEQ ID NO: 88134 - RNA, 21 nt, synthetic construct
  source 1..21: mol_type = other RNA
aacccacatgggggctgtgaa

SEQ ID NO: 88135 - RNA, 21 nt, synthetic construct
  source 1..21: mol_type = other RNA
aacaatggcaacctccagaga

SEQ ID NO: 88136 - RNA, 21 nt, synthetic construct
  source 1..21: mol_type = other RNA
tgactaacaccaccaccagca

SEQ ID NO: 88137 - RNA, 21 nt, synthetic construct
  source 1..21: mol_type = other RNA
ctaacaccaccaccagccaga

SEQ ID NO: 88138 - RNA, 21 nt, synthetic construct
  source 1..21: mol_type = other RNA
caccaccaccagccagggcaa

SEQ ID NO: 88139 - RNA, 21 nt, synthetic construct
  source 1..21: mol_type = other RNA
caccgccaccacacctgcaga

SEQ ID NO: 88140 - RNA, 21 nt, synthetic construct
  source 1..21: mol_type = other RNA
cactcccttctccagtccaga

SEQ ID NO: 88141 - RNA, 21 nt, synthetic construct
  source 1..21: mol_type = other RNA
caccgccaccacacctgcaga

SEQ ID NO: 88142 - RNA, 21 nt, synthetic construct
  source 1..21: mol_type = other RNA
agttccatgtccaccccctca

SEQ ID NO: 88143 - RNA, 21 nt, synthetic construct
  source 1..21: mol_type = other RNA
caccgccaccacacctgcaga

SEQ ID NO: 88144 - RNA, 21 nt, synthetic construct
  source 1..21: mol_type = other RNA
cactcccttctccagtccaga

SEQ ID NO: 88145 - RNA, 21 nt, synthetic construct
  source 1..21: mol_type = other RNA
caccgccaccacacctgcaga

SEQ ID NO: 88146 - RNA, 21 nt, synthetic construct
  source 1..21: mol_type = other RNA
ggctccaccaccaacccctca

SEQ ID NO: 88147 - RNA, 21 nt, synthetic construct
  source 1..21: mol_type = other RNA
ggctccaccaccaacccctca

SEQ ID NO: 88148 - RNA, 21 nt, synthetic construct
  source 1..21: mol_type = other RNA
ggctccaccaccaacccctca

SEQ ID NO: 88149 - RNA, 21 nt, synthetic construct
  source 1..21: mol_type = other RNA
ggctccaccaccaacccctca

SEQ ID NO: 88150 - RNA, 21 nt, synthetic construct
  source 1..21: mol_type = other RNA
ggctccaccaccaacccctca

SEQ ID NO: 88151 - RNA, 21 nt, synthetic construct
  source 1..21: mol_type = other RNA
gcaggaaccggaggtgggaga

SEQ ID NO: 88152 - RNA, 21 nt, synthetic construct
  source 1..21: mol_type = other RNA
ccagatgtgtccagctgcaga

SEQ ID NO: 88153 - RNA, 21 nt, synthetic construct
  source 1..21: mol_type = other RNA
ctgtggagccgagctgggaga

SEQ ID NO: 88154 - RNA, 21 nt, synthetic construct
  source 1..21: mol_type = other RNA
cgcactggtggacagcactga

SEQ ID NO: 88155 - RNA, 21 nt, synthetic construct
  source 1..21: mol_type = other RNA
ggcttcacagccaccccctca

SEQ ID NO: 88156 - RNA, 21 nt, synthetic construct
  source 1..21: mol_type = other RNA
ggcttcacagccaccccctca

SEQ ID NO: 88157 - RNA, 21 nt, synthetic construct
  source 1..21: mol_type = other RNA
gaccaccacaaccagggccaa

SEQ ID NO: 88158 - RNA, 21 nt, synthetic construct
  source 1..21: mol_type = other RNA
ggcttcacagccaccccctca

SEQ ID NO: 88159 - RNA, 21 nt, synthetic construct
  source 1..21: mol_type = other RNA
tggtgaccacgggctgtgaga

SEQ ID NO: 88160 - RNA, 21 nt, synthetic construct
  source 1..21: mol_type = other RNA
ctgtggccaccccctcttcca

SEQ ID NO: 88161 - RNA, 21 nt, synthetic construct
  source 1..21: mol_type = other RNA
tggtgaccacgggctgtgaga

SEQ ID NO: 88162 - RNA, 21 nt, synthetic construct
  source 1..21: mol_type = other RNA
ggcttcacagccaccccctca

SEQ ID NO: 88163 - RNA, 21 nt, synthetic construct
  source 1..21: mol_type = other RNA
ctacaactgcagccactggaa

SEQ ID NO: 88164 - RNA, 21 nt, synthetic construct
  source 1..21: mol_type = other RNA
tgcatcagcgaccactgcaga

SEQ ID NO: 88165 - RNA, 21 nt, synthetic construct
  source 1..21: mol_type = other RNA
aaggcccaggggctggtgcta

SEQ ID NO: 88166 - RNA, 21 nt, synthetic construct
  source 1..21: mol_type = other RNA
tctgccaccgcaccctgctga

SEQ ID NO: 88167 - RNA, 21 nt, synthetic construct
  source 1..21: mol_type = other RNA
cacctgctctgtgcagggcga

SEQ ID NO: 88168 - RNA, 21 nt, synthetic construct
  source 1..21: mol_type = other RNA
gcccaggctgcctgtgccaaa

SEQ ID NO: 88169 - RNA, 21 nt, synthetic construct
  source 1..21: mol_type = other RNA
acctgccccgcgggcacctta

SEQ ID NO: 88170 - RNA, 21 nt, synthetic construct
  source 1..21: mol_type = other RNA
gaagctaagctgcctgggaga

SEQ ID NO: 88171 - RNA, 21 nt, synthetic construct
  source 1..21: mol_type = other RNA
tgcaacacctgcacctgcaga

SEQ ID NO: 88172 - RNA, 21 nt, synthetic construct
  source 1..21: mol_type = other RNA
ctacagctttgaaggcagcta

SEQ ID NO: 88173 - RNA, 21 nt, synthetic construct
  source 1..21: mol_type = other RNA
tcttggcccaggactactgta

SEQ ID NO: 88174 - RNA, 21 nt, synthetic construct
  source 1..21: mol_type = other RNA
ccccggccccaggcaccagca

SEQ ID NO: 88175 - RNA, 21 nt, synthetic construct
  source 1..21: mol_type = other RNA
atccgggtcctctgctgcaga

SEQ ID NO: 88176 - RNA, 21 nt, synthetic construct
  source 1..21: mol_type = other RNA
accacccaggccctgttctca

SEQ ID NO: 88177 - RNA, 21 nt, synthetic construct
  source 1..21: mol_type = other RNA
ttccagcactgagaagcacaa

SEQ ID NO: 88178 - RNA, 21 nt, synthetic construct
  source 1..21: mol_type = other RNA
ttccagcactgagaagcacaa

SEQ ID NO: 88179 - RNA, 21 nt, synthetic construct
  source 1..21: mol_type = other RNA
ctgcagccaccagcagcacaa

SEQ ID NO: 88180 - RNA, 21 nt, synthetic construct
  source 1..21: mol_type = other RNA
tcggccacctcaggcacctta

SEQ ID NO: 88181 - RNA, 21 nt, synthetic construct
  source 1..21: mol_type = other RNA
cccgggaacagctccccctca

SEQ ID NO: 88182 - RNA, 21 nt, synthetic construct
  source 1..21: mol_type = other RNA
cttcctcctccagtccaagga

SEQ ID NO: 88183 - RNA, 21 nt, synthetic construct
  source 1..21: mol_type = other RNA
tccaccccctcctccactcca

SEQ ID NO: 88184 - RNA, 21 nt, synthetic construct
  source 1..21: mol_type = other RNA
atcagctccagagccactcca

SEQ ID NO: 88185 - RNA, 21 nt, synthetic construct
  source 1..21: mol_type = other RNA
ttccagcactgagaagcacaa

SEQ ID NO: 88186 - RNA, 21 nt, synthetic construct
  source 1..21: mol_type = other RNA
ctgcagccaccagcagcacaa

SEQ ID NO: 88187 - RNA, 21 nt, synthetic construct
  source 1..21: mol_type = other RNA
ttccagcactgagaagcacaa

SEQ ID NO: 88188 - RNA, 21 nt, synthetic construct
  source 1..21: mol_type = other RNA
ggccaccacaaccagggccaa

SEQ ID NO: 88189 - RNA, 21 nt, synthetic construct
  source 1..21: mol_type = other RNA
ctgcagccaccagcagcacaa

SEQ ID NO: 88190 - RNA, 21 nt, synthetic construct
  source 1..21: mol_type = other RNA
tcggccacctcaggcacctta

SEQ ID NO: 88191 - RNA, 21 nt, synthetic construct
  source 1..21: mol_type = other RNA
cccgggaacagctccccctca

SEQ ID NO: 88192 - RNA, 21 nt, synthetic construct
  source 1..21: mol_type = other RNA
cttcctcctccagtccaagga

SEQ ID NO: 88193 - RNA, 21 nt, synthetic construct
  source 1..21: mol_type = other RNA
tccaccccctcctccactcca

SEQ ID NO: 88194 - RNA, 21 nt, synthetic construct
  source 1..21: mol_type = other RNA
gtccagggactgcaactgcca

SEQ ID NO: 88195 - RNA, 21 nt, synthetic construct
  source 1..21: mol_type = other RNA
ttccagcactgagaagcacaa

SEQ ID NO: 88196 - RNA, 21 nt, synthetic construct
  source 1..21: mol_type = other RNA
tcaccccagtgctgaccagca

SEQ ID NO: 88197 - RNA, 21 nt, synthetic construct
  source 1..21: mol_type = other RNA
cgcagccaccagctccaaaga

SEQ ID NO: 88198 - RNA, 21 nt, synthetic construct
  source 1..21: mol_type = other RNA
cttcctcctccagtccaagga

SEQ ID NO: 88199 - RNA, 21 nt, synthetic construct
  source 1..21: mol_type = other RNA
aacagctcacacccccaaaga

SEQ ID NO: 88200 - RNA, 21 nt, synthetic construct
  source 1..21: mol_type = other RNA
cagccactgcctccacggtta

SEQ ID NO: 88201 - RNA, 21 nt, synthetic construct
  source 1..21: mol_type = other RNA
gcatttggacagtttttctca

SEQ ID NO: 88202 - RNA, 21 nt, synthetic construct
  source 1..21: mol_type = other RNA
gcacggcctctgccactgcca

SEQ ID NO: 88203 - RNA, 21 nt, synthetic construct
  source 1..21: mol_type = other RNA
acaaccacctgcccccagaga

SEQ ID NO: 88204 - RNA, 21 nt, synthetic construct
  source 1..21: mol_type = other RNA
ctgcacccaggaggagggcga

SEQ ID NO: 88205 - RNA, 21 nt, synthetic construct
  source 1..21: mol_type = other RNA
caggaggagggcgactgctga

SEQ ID NO: 88206 - RNA, 21 nt, synthetic construct
  source 1..21: mol_type = other RNA
cctgtccccagggctttgaga

SEQ ID NO: 88207 - RNA, 21 nt, synthetic construct
  source 1..21: mol_type = other RNA
tccaggcaaggccagctgcta

SEQ ID NO: 88208 - RNA, 21 nt, synthetic construct
  source 1..21: mol_type = other RNA
ccaggcaaggccagctgctga

SEQ ID NO: 88209 - RNA, 21 nt, synthetic construct
  source 1..21: mol_type = other RNA
caggcaaggccagctgctgca

SEQ ID NO: 88210 - RNA, 21 nt, synthetic construct
  source 1..21: mol_type = other RNA
tgggcgggtgtgcagcaccta

SEQ ID NO: 88211 - RNA, 21 nt, synthetic construct
  source 1..21: mol_type = other RNA
cccccggacctgccccctcaa

SEQ ID NO: 88212 - RNA, 21 nt, synthetic construct
  source 1..21: mol_type = other RNA
tacaagcctggagagaccata

SEQ ID NO: 88213 - RNA, 21 nt, synthetic construct
  source 1..21: mol_type = other RNA
aacagctggaagctctcccca

SEQ ID NO: 88214 - RNA, 21 nt, synthetic construct
  source 1..21: mol_type = other RNA
aagcccggccctcccggtcta

SEQ ID NO: 88215 - RNA, 21 nt, synthetic construct
  source 1..21: mol_type = other RNA
acatgccgctggaggagctga

SEQ ID NO: 88216 - RNA, 21 nt, synthetic construct
  source 1..21: mol_type = other RNA
catgccgctggaggagctgga

SEQ ID NO: 88217 - RNA, 21 nt, synthetic construct
  source 1..21: mol_type = other RNA
atccacccctcctccactcca

SEQ ID NO: 88218 - RNA, 21 nt, synthetic construct
  source 1..21: mol_type = other RNA
atccacccctcctccactcca

SEQ ID NO: 88219 - RNA, 21 nt, synthetic construct
  source 1..21: mol_type = other RNA
gtccccagggctttgagtaca

SEQ ID NO: 88220 - RNA, 21 nt, synthetic construct
  source 1..21: mol_type = other RNA
caaggacccctgcacggccaa

SEQ ID NO: 88221 - RNA, 21 nt, synthetic construct
  source 1..21: mol_type = other RNA
cctccccggccccaggcacca

SEQ ID NO: 88222 - RNA, 21 nt, synthetic construct
  source 1..21: mol_type = other RNA
gcgatccctgtcccccagcaa

SEQ ID NO: 88223 - RNA, 21 nt, synthetic construct
  source 1..21: mol_type = other RNA
tcccgtcctccaccccgggaa

SEQ ID NO: 88224 - RNA, 21 nt, synthetic construct
  source 1..21: mol_type = other RNA
gcgatccctgtcccccagcaa

SEQ ID NO: 88225 - RNA, 21 nt, synthetic construct
  source 1..21: mol_type = other RNA
ccccgtcctccaccccgggaa

SEQ ID NO: 88226 - RNA, 21 nt, synthetic construct
  source 1..21: mol_type = other RNA
catgtttgacacctgcaacta

SEQ ID NO: 88227 - RNA, 21 nt, synthetic construct
  source 1..21: mol_type = other RNA
ggaacagctggaagctctcca

SEQ ID NO: 88228 - RNA, 21 nt, synthetic construct
  source 1..21: mol_type = other RNA
cagccaccggctccaccacca

SEQ ID NO: 88229 - RNA, 21 nt, synthetic construct
  source 1..21: mol_type = other RNA
gaacagctggaagctctccca

SEQ ID NO: 88230 - RNA, 21 nt, synthetic construct
  source 1..21: mol_type = other RNA
catcctccacggccccaccta

SEQ ID NO: 88231 - RNA, 21 nt, synthetic construct
  source 1..21: mol_type = other RNA
ccactccagagactgcccaca

SEQ ID NO: 88232 - RNA, 21 nt, synthetic construct
  source 1..21: mol_type = other RNA
cggccaccggctccaccacca

SEQ ID NO: 88233 - RNA, 21 nt, synthetic construct
  source 1..21: mol_type = other RNA
tggtgaccatgggctgtgaga

SEQ ID NO: 88234 - RNA, 21 nt, synthetic construct
  source 1..21: mol_type = other RNA
cagccatcccctcctcctcca

SEQ ID NO: 88235 - RNA, 21 nt, synthetic construct
  source 1..21: mol_type = other RNA
cggccaccggctccaccacca

SEQ ID NO: 88236 - RNA, 21 nt, synthetic construct
  source 1..21: mol_type = other RNA
tggtgaccatgggctgtgaga

SEQ ID NO: 88237 - RNA, 21 nt, synthetic construct
  source 1..21: mol_type = other RNA
cagccatcccctcctcctcca

SEQ ID NO: 88238 - RNA, 21 nt, synthetic construct
  source 1..21: mol_type = other RNA
ccactccagagactgcccaca

SEQ ID NO: 88239 - RNA, 21 nt, synthetic construct
  source 1..21: mol_type = other RNA
cggccaccggctccaccacca

SEQ ID NO: 88240 - RNA, 21 nt, synthetic construct
  source 1..21: mol_type = other RNA
cagccatcccctcctcctcca

SEQ ID NO: 88241 - RNA, 21 nt, synthetic construct
  source 1..21: mol_type = other RNA
cggccaccggctccaccacca

SEQ ID NO: 88242 - RNA, 21 nt, synthetic construct
  source 1..21: mol_type = other RNA
tctttgctgagtgccacaaca

SEQ ID NO: 88243 - RNA, 21 nt, synthetic construct
  source 1..21: mol_type = other RNA
tcctgcccagatgtgtccaga

SEQ ID NO: 88244 - RNA, 21 nt, synthetic construct
  source 1..21: mol_type = other RNA
acccgtggcttcccggcccaa

SEQ ID NO: 88245 - RNA, 21 nt, synthetic construct
  source 1..21: mol_type = other RNA
atgggcgggtgtgcagcacca

SEQ ID NO: 88246 - RNA, 21 nt, synthetic construct
  source 1..21: mol_type = other RNA
cgggtgtgcagcacctgggga

SEQ ID NO: 88247 - RNA, 21 nt, synthetic construct
  source 1..21: mol_type = other RNA
gtgacttccactacaagacca

SEQ ID NO: 88248 - RNA, 21 nt, synthetic construct
  source 1..21: mol_type = other RNA
cactacaagaccttcgacgga

SEQ ID NO: 88249 - RNA, 21 nt, synthetic construct
  source 1..21: mol_type = other RNA
ggcccaggggctggtgctgga

SEQ ID NO: 88250 - RNA, 21 nt, synthetic construct
  source 1..21: mol_type = other RNA
actggcctcctggtggagcaa

SEQ ID NO: 88251 - RNA, 21 nt, synthetic construct
  source 1..21: mol_type = other RNA
ctggcctcctggtggagcaga

SEQ ID NO: 88252 - RNA, 21 nt, synthetic construct
  source 1..21: mol_type = other RNA
agtgccctgctggagctggaa

SEQ ID NO: 88253 - RNA, 21 nt, synthetic construct
  source 1..21: mol_type = other RNA
tcctgcacctgctccggggga

SEQ ID NO: 88254 - RNA, 21 nt, synthetic construct
  source 1..21: mol_type = other RNA
cctgcacctgctccgggggga

SEQ ID NO: 88255 - RNA, 21 nt, synthetic construct
  source 1..21: mol_type = other RNA
ggcctggggctgcagctgcta

SEQ ID NO: 88256 - RNA, 21 nt, synthetic construct
  source 1..21: mol_type = other RNA
gcctggggctgcagctgctga

SEQ ID NO: 88257 - RNA, 21 nt, synthetic construct
  source 1..21: mol_type = other RNA
agcggggtggtggaggccaca

SEQ ID NO: 88258 - RNA, 21 nt, synthetic construct
  source 1..21: mol_type = other RNA
gctgcctgtgccaatgccaga

SEQ ID NO: 88259 - RNA, 21 nt, synthetic construct
  source 1..21: mol_type = other RNA
cgaactgcatgtttgacacca

SEQ ID NO: 88260 - RNA, 21 nt, synthetic construct
  source 1..21: mol_type = other RNA
cctgccccgcgggcaccttca

SEQ ID NO: 88261 - RNA, 21 nt, synthetic construct
  source 1..21: mol_type = other RNA
gcagcaacagctcggcgggca

SEQ ID NO: 88262 - RNA, 21 nt, synthetic construct
  source 1..21: mol_type = other RNA
caagcctggagagaccatcaa

SEQ ID NO: 88263 - RNA, 21 nt, synthetic construct
  source 1..21: mol_type = other RNA
ttgggaacagctggaagctca

SEQ ID NO: 88264 - RNA, 21 nt, synthetic construct
  source 1..21: mol_type = other RNA
tgggaacagctggaagctcta

SEQ ID NO: 88265 - RNA, 21 nt, synthetic construct
  source 1..21: mol_type = other RNA
gggaacagctggaagctctca

SEQ ID NO: 88266 - RNA, 21 nt, synthetic construct
  source 1..21: mol_type = other RNA
agctggaagctctccccctca

SEQ ID NO: 88267 - RNA, 21 nt, synthetic construct
  source 1..21: mol_type = other RNA
cccctcctgcccggacgccca

SEQ ID NO: 88268 - RNA, 21 nt, synthetic construct
  source 1..21: mol_type = other RNA
ccaaggacccctgcacggcca

SEQ ID NO: 88269 - RNA, 21 nt, synthetic construct
  source 1..21: mol_type = other RNA
gtgcagcatcctccacggcca

SEQ ID NO: 88270 - RNA, 21 nt, synthetic construct
  source 1..21: mol_type = other RNA
gcagcatcctccacggcccca

SEQ ID NO: 88271 - RNA, 21 nt, synthetic construct
  source 1..21: mol_type = other RNA
gcatcctccacggccccacca

SEQ ID NO: 88272 - RNA, 21 nt, synthetic construct
  source 1..21: mol_type = other RNA
atcctccacggccccacctta

SEQ ID NO: 88273 - RNA, 21 nt, synthetic construct
  source 1..21: mol_type = other RNA
acctgccccttgttctgtgaa

SEQ ID NO: 88274 - RNA, 21 nt, synthetic construct
  source 1..21: mol_type = other RNA
caagcccggccctcccggtca

SEQ ID NO: 88275 - RNA, 21 nt, synthetic construct
  source 1..21: mol_type = other RNA
ccgctggaggagctgggccaa

SEQ ID NO: 88276 - RNA, 21 nt, synthetic construct
  source 1..21: mol_type = other RNA
ctggaggagctgggccagcaa

SEQ ID NO: 88277 - RNA, 21 nt, synthetic construct
  source 1..21: mol_type = other RNA
ggaggagctgggccagcagga

SEQ ID NO: 88278 - RNA, 21 nt, synthetic construct
  source 1..21: mol_type = other RNA
ccctccccggccccaggcaca

SEQ ID NO: 88279 - RNA, 21 nt, synthetic construct
  source 1..21: mol_type = other RNA
ccggccccaggcaccagccca

SEQ ID NO: 88280 - RNA, 21 nt, synthetic construct
  source 1..21: mol_type = other RNA
cggccccaggcaccagcccta

SEQ ID NO: 88281 - RNA, 21 nt, synthetic construct
  source 1..21: mol_type = other RNA
ccagggctcccccggccagca

SEQ ID NO: 88282 - RNA, 21 nt, synthetic construct
  source 1..21: mol_type = other RNA
ggcgcccctcacagccaccca

SEQ ID NO: 88283 - RNA, 21 nt, synthetic construct
  source 1..21: mol_type = other RNA
cacggccaccccgacctccaa

SEQ ID NO: 88284 - RNA, 21 nt, synthetic construct
  source 1..21: mol_type = other RNA
ccacacccacagtcaccagca

SEQ ID NO: 88285 - RNA, 21 nt, synthetic construct
  source 1..21: mol_type = other RNA
tggccaccccctcctccacca

SEQ ID NO: 88286 - RNA, 21 nt, synthetic construct
  source 1..21: mol_type = other RNA
ggccaccccctcctccaccca

SEQ ID NO: 88287 - RNA, 21 nt, synthetic construct
  source 1..21: mol_type = other RNA
gccaccccctcctccacccca

SEQ ID NO: 88288 - RNA, 21 nt, synthetic construct
  source 1..21: mol_type = other RNA
ctgaccaccaccaccacaaca

SEQ ID NO: 88289 - RNA, 21 nt, synthetic construct
  source 1..21: mol_type = other RNA
tgaccaccaccaccacaacta

SEQ ID NO: 88290 - RNA, 21 nt, synthetic construct
  source 1..21: mol_type = other RNA
ccaccaccaccacaactgtga

SEQ ID NO: 88291 - RNA, 21 nt, synthetic construct
  source 1..21: mol_type = other RNA
ctgaccaccaccgccaccaca

SEQ ID NO: 88292 - RNA, 21 nt, synthetic construct
  source 1..21: mol_type = other RNA
cgacacccacagtcaccagca

SEQ ID NO: 88293 - RNA, 21 nt, synthetic construct
  source 1..21: mol_type = other RNA
catcccctcctcctccctgga

SEQ ID NO: 88294 - RNA, 21 nt, synthetic construct
  source 1..21: mol_type = other RNA
tggccaccccctcctccacca

SEQ ID NO: 88295 - RNA, 21 nt, synthetic construct
  source 1..21: mol_type = other RNA
ggccaccccctcctccaccca

SEQ ID NO: 88296 - RNA, 21 nt, synthetic construct
  source 1..21: mol_type = other RNA
gccaccccctcctccacccca

SEQ ID NO: 88297 - RNA, 21 nt, synthetic construct
  source 1..21: mol_type = other RNA
ctgaccaccaccaccacaaca

SEQ ID NO: 88298 - RNA, 21 nt, synthetic construct
  source 1..21: mol_type = other RNA
tgaccaccaccaccacaacta

SEQ ID NO: 88299 - RNA, 21 nt, synthetic construct
  source 1..21: mol_type = other RNA
ccaccaccaccacaactgtga

SEQ ID NO: 88300 - RNA, 21 nt, synthetic construct
  source 1..21: mol_type = other RNA
ctgaccaccaccgccaccaca

SEQ ID NO: 88301 - RNA, 21 nt, synthetic construct
  source 1..21: mol_type = other RNA
tcccacaccccagcagcaaca

SEQ ID NO: 88302 - RNA, 21 nt, synthetic construct
  source 1..21: mol_type = other RNA
cccgtcctccaccccgggaaa

SEQ ID NO: 88303 - RNA, 21 nt, synthetic construct
  source 1..21: mol_type = other RNA
atgtccaccccctcctccaca

SEQ ID NO: 88304 - RNA, 21 nt, synthetic construct
  source 1..21: mol_type = other RNA
tggccaccccctcctccacca

SEQ ID NO: 88305 - RNA, 21 nt, synthetic construct
  source 1..21: mol_type = other RNA
ggccaccccctcctccaccca

SEQ ID NO: 88306 - RNA, 21 nt, synthetic construct
  source 1..21: mol_type = other RNA
gccaccccctcctccacccca

SEQ ID NO: 88307 - RNA, 21 nt, synthetic construct
  source 1..21: mol_type = other RNA
ctgaccaccaccaccacaaca

SEQ ID NO: 88308 - RNA, 21 nt, synthetic construct
  source 1..21: mol_type = other RNA
tgaccaccaccaccacaacta

SEQ ID NO: 88309 - RNA, 21 nt, synthetic construct
  source 1..21: mol_type = other RNA
ccaccaccaccacaactgtga

SEQ ID NO: 88310 - RNA, 21 nt, synthetic construct
  source 1..21: mol_type = other RNA
ctgaccaccaccgccaccaca

SEQ ID NO: 88311 - RNA, 21 nt, synthetic construct
  source 1..21: mol_type = other RNA
tcccacaccccagcagcaaca

SEQ ID NO: 88312 - RNA, 21 nt, synthetic construct
  source 1..21: mol_type = other RNA
ggaccacagccacagccacaa

SEQ ID NO: 88313 - RNA, 21 nt, synthetic construct
  source 1..21: mol_type = other RNA
gaccacagccacagccacaca

SEQ ID NO: 88314 - RNA, 21 nt, synthetic construct
  source 1..21: mol_type = other RNA
cgacacccacagtcaccagca

SEQ ID NO: 88315 - RNA, 21 nt, synthetic construct
  source 1..21: mol_type = other RNA
catcccctcctcctccctgga

SEQ ID NO: 88316 - RNA, 21 nt, synthetic construct
  source 1..21: mol_type = other RNA
ctgaccaccaccaccacaaca

SEQ ID NO: 88317 - RNA, 21 nt, synthetic construct
  source 1..21: mol_type = other RNA
tgaccaccaccaccacaacta

SEQ ID NO: 88318 - RNA, 21 nt, synthetic construct
  source 1..21: mol_type = other RNA
ccaccaccaccacaactgtga

SEQ ID NO: 88319 - RNA, 21 nt, synthetic construct
  source 1..21: mol_type = other RNA
ctgaccaccaccgccaccaca

SEQ ID NO: 88320 - RNA, 21 nt, synthetic construct
  source 1..21: mol_type = other RNA
tcccacaccccagcagcaaca

SEQ ID NO: 88321 - RNA, 21 nt, synthetic construct
  source 1..21: mol_type = other RNA
cccgtcctccaccccgggaaa

SEQ ID NO: 88322 - RNA, 21 nt, synthetic construct
  source 1..21: mol_type = other RNA
acccgtggccaccatgtccaa

SEQ ID NO: 88323 - RNA, 21 nt, synthetic construct
  source 1..21: mol_type = other RNA
acgtccaccccctcctccaca

SEQ ID NO: 88324 - RNA, 21 nt, synthetic construct
  source 1..21: mol_type = other RNA
cgacacccacagtcaccagca

SEQ ID NO: 88325 - RNA, 21 nt, synthetic construct
  source 1..21: mol_type = other RNA
catcccctcctcctccctgga

SEQ ID NO: 88326 - RNA, 21 nt, synthetic construct
  source 1..21: mol_type = other RNA
tggccaccccctcctccacca

SEQ ID NO: 88327 - RNA, 21 nt, synthetic construct
  source 1..21: mol_type = other RNA
ggccaccccctcctccaccca

SEQ ID NO: 88328 - RNA, 21 nt, synthetic construct
  source 1..21: mol_type = other RNA
gccaccccctcctccacccca

SEQ ID NO: 88329 - RNA, 21 nt, synthetic construct
  source 1..21: mol_type = other RNA
ctgaccaccaccaccacaaca

SEQ ID NO: 88330 - RNA, 21 nt, synthetic construct
  source 1..21: mol_type = other RNA
tgaccaccaccaccacaacta

SEQ ID NO: 88331 - RNA, 21 nt, synthetic construct
  source 1..21: mol_type = other RNA
ccaccaccaccacaactgtga

SEQ ID NO: 88332 - RNA, 21 nt, synthetic construct
  source 1..21: mol_type = other RNA
ctgaccaccacagccaccata

SEQ ID NO: 88333 - RNA, 21 nt, synthetic construct
  source 1..21: mol_type = other RNA
cctctgccactgccgctgcca

SEQ ID NO: 88334 - RNA, 21 nt, synthetic construct
  source 1..21: mol_type = other RNA
ctctgccactgccgctgccga

SEQ ID NO: 88335 - RNA, 21 nt, synthetic construct
  source 1..21: mol_type = other RNA
cgcccgctgcccccgcgccca

SEQ ID NO: 88336 - RNA, 21 nt, synthetic construct
  source 1..21: mol_type = other RNA
gcggagggctgcttctgccca

SEQ ID NO: 88337 - RNA, 21 nt, synthetic construct
  source 1..21: mol_type = other RNA
tgccctgaggaccagatccta

SEQ ID NO: 88338 - RNA, 21 nt, synthetic construct
  source 1..21: mol_type = other RNA
tccgctgcagacctcagctga

SEQ ID NO: 88339 - RNA, 21 nt, synthetic construct
  source 1..21: mol_type = other RNA
tgtccccagggctttgagtaa

SEQ ID NO: 88340 - RNA, 21 nt, synthetic construct
  source 1..21: mol_type = other RNA
tccccagggctttgagtacaa

SEQ ID NO: 88341 - RNA, 21 nt, synthetic construct
  source 1..21: mol_type = other RNA
gccagccagtccagctgaata

SEQ ID NO: 88342 - RNA, 21 nt, synthetic construct
  source 1..21: mol_type = other RNA
cccgtggcttcccggcccaga

SEQ ID NO: 88343 - RNA, 21 nt, synthetic construct
  source 1..21: mol_type = other RNA
ttgcccctccctgatgtcaca

SEQ ID NO: 88344 - RNA, 21 nt, synthetic construct
  source 1..21: mol_type = other RNA
cggccagcaccacagcagtca

SEQ ID NO: 88345 - RNA, 21 nt, synthetic construct
  source 1..21: mol_type = other RNA
caccccctcctccactccgga

SEQ ID NO: 88346 - RNA, 21 nt, synthetic construct
  source 1..21: mol_type = other RNA
caccccctcctccactccgga

SEQ ID NO: 88347 - RNA, 21 nt, synthetic construct
  source 1..21: mol_type = other RNA
ctgcccgtccccgtcccccca

SEQ ID NO: 88348 - RNA, 21 nt, synthetic construct
  source 1..21: mol_type = other RNA
ctggaagctctccccctccta

SEQ ID NO: 88349 - RNA, 21 nt, synthetic construct
  source 1..21: mol_type = other RNA
catcccctcttcctccctgga

SEQ ID NO: 88350 - RNA, 21 nt, synthetic construct
  source 1..21: mol_type = other RNA
cagccatcccctcttcctcca

SEQ ID NO: 88351 - RNA, 21 nt, synthetic construct
  source 1..21: mol_type = other RNA
catcccctcttcctccctgga

SEQ ID NO: 88352 - RNA, 21 nt, synthetic construct
  source 1..21: mol_type = other RNA
tggaagctctccccctcctga

SEQ ID NO: 88353 - RNA, 21 nt, synthetic construct
  source 1..21: mol_type = other RNA
gacaggcctggggctgcagca

SEQ ID NO: 88354 - RNA, 21 nt, synthetic construct
  source 1..21: mol_type = other RNA
ctggctcctggagaggtggta

SEQ ID NO: 88355 - RNA, 21 nt, synthetic construct
  source 1..21: mol_type = other RNA
tcctccacggccccaccttca

SEQ ID NO: 88356 - RNA, 21 nt, synthetic construct
  source 1..21: mol_type = other RNA
caccccctcctccaccccaga

SEQ ID NO: 88357 - RNA, 21 nt, synthetic construct
  source 1..21: mol_type = other RNA
caccccctcctccaccccaga

SEQ ID NO: 88358 - RNA, 21 nt, synthetic construct
  source 1..21: mol_type = other RNA
caccccctcctccaccccaga

SEQ ID NO: 88359 - RNA, 21 nt, synthetic construct
  source 1..21: mol_type = other RNA
caccccctcctccaccccaga

SEQ ID NO: 88360 - RNA, 21 nt, synthetic construct
  source 1..21: mol_type = other RNA
gcacacccacccccaccccaa

SEQ ID NO: 88361 - RNA, 21 nt, synthetic construct
  source 1..21: mol_type = other RNA
ggcccaggaggccactgctga

SEQ ID NO: 88362 - RNA, 21 nt, synthetic construct
  source 1..21: mol_type = other RNA
accgccacggccaccacaaca

SEQ ID NO: 88363 - RNA, 21 nt, synthetic construct
  source 1..21: mol_type = other RNA
accgccacggccaccacaaca

SEQ ID NO: 88364 - RNA, 21 nt, synthetic construct
  source 1..21: mol_type = other RNA
atcctcacagagcccagcaca

SEQ ID NO: 88365 - RNA, 21 nt, synthetic construct
  source 1..21: mol_type = other RNA
accggctccaccaccaaccca

SEQ ID NO: 88366 - RNA, 21 nt, synthetic construct
  source 1..21: mol_type = other RNA
accggctccaccaccaaccca

SEQ ID NO: 88367 - RNA, 21 nt, synthetic construct
  source 1..21: mol_type = other RNA
accggctccaccaccaaccca

SEQ ID NO: 88368 - RNA, 21 nt, synthetic construct
  source 1..21: mol_type = other RNA
accggctccaccaccaaccca

SEQ ID NO: 88369 - RNA, 21 nt, synthetic construct
  source 1..21: mol_type = other RNA
accggctccaccaccaaccca

SEQ ID NO: 88370 - RNA, 21 nt, synthetic construct
  source 1..21: mol_type = other RNA
gcggtgggtcagcaactgcca

SEQ ID NO: 88371 - RNA, 21 nt, synthetic construct
  source 1..21: mol_type = other RNA
agacaggcctggggctgcaga

SEQ ID NO: 88372 - RNA, 21 nt, synthetic construct
  source 1..21: mol_type = other RNA
cccagagcccggcctgggaga

SEQ ID NO: 88373 - RNA, 21 nt, synthetic construct
  source 1..21: mol_type = other RNA
cctggggctgcagctgctgga

SEQ ID NO: 88374 - RNA, 21 nt, synthetic construct
  source 1..21: mol_type = other RNA
ccatcccctcctcctccctga

SEQ ID NO: 88375 - RNA, 21 nt, synthetic construct
  source 1..21: mol_type = other RNA
ccatcccctcctcctccctga

SEQ ID NO: 88376 - RNA, 21 nt, synthetic construct
  source 1..21: mol_type = other RNA
ccatcccctcctcctccctga

SEQ ID NO: 88377 - RNA, 21 nt, synthetic construct
  source 1..21: mol_type = other RNA
ccaaagagcatagagtgccga

SEQ ID NO: 88378 - RNA, 21 nt, synthetic construct
  source 1..21: mol_type = other RNA
agagcatagagtgccgggcga

SEQ ID NO: 88379 - RNA, 21 nt, synthetic construct
  source 1..21: mol_type = other RNA
gaatactcacgccagtgcgca

SEQ ID NO: 88380 - RNA, 21 nt, synthetic construct
  source 1..21: mol_type = other RNA
agaactaccccgaggtaagca

SEQ ID NO: 88381 - RNA, 21 nt, synthetic construct
  source 1..21: mol_type = other RNA
gagaactaccccgaggtaaga

SEQ ID NO: 88382 - RNA, 21 nt, synthetic construct
  source 1..21: mol_type = other RNA
ccagatcctcttcaacgcaca

SEQ ID NO: 88383 - RNA, 21 nt, synthetic construct
  source 1..21: mol_type = other RNA
cctggatcctcacaaagccga

SEQ ID NO: 88384 - RNA, 21 nt, synthetic construct
  source 1..21: mol_type = other RNA
gtcaagtccgcatcaacacga

SEQ ID NO: 88385 - RNA, 21 nt, synthetic construct
  source 1..21: mol_type = other RNA
gcccctgcgtgggacccgata

SEQ ID NO: 88386 - RNA, 21 nt, synthetic construct
  source 1..21: mol_type = other RNA
caaccgtcccggcttcgtaaa

SEQ ID NO: 88387 - RNA, 21 nt, synthetic construct
  source 1..21: mol_type = other RNA
caaagtgtacaagccatgcga

SEQ ID NO: 88388 - RNA, 21 nt, synthetic construct
  source 1..21: mol_type = other RNA
ataagaccgaccgagccggca

SEQ ID NO: 88389 - RNA, 21 nt, synthetic construct
  source 1..21: mol_type = other RNA
actctggggacgacccggata

SEQ ID NO: 88390 - RNA, 21 nt, synthetic construct
  source 1..21: mol_type = other RNA
cgagaactgcctgaaagcgga

SEQ ID NO: 88391 - RNA, 21 nt, synthetic construct
  source 1..21: mol_type = other RNA
ggcggagaactaccccgagga

SEQ ID NO: 88392 - RNA, 21 nt, synthetic construct
  source 1..21: mol_type = other RNA
cctacggggatggccacttca

SEQ ID NO: 88393 - RNA, 21 nt, synthetic construct
  source 1..21: mol_type = other RNA
ccgggcggagaactaccccga

SEQ ID NO: 88394 - RNA, 21 nt, synthetic construct
  source 1..21: mol_type = other RNA
agagtgccgggcggagaacta

SEQ ID NO: 88395 - RNA, 21 nt, synthetic construct
  source 1..21: mol_type = other RNA
aaagagcatagagtgccggga

SEQ ID NO: 88396 - RNA, 21 nt, synthetic construct
  source 1..21: mol_type = other RNA
gtgccgggcggagaactacca

SEQ ID NO: 88397 - RNA, 21 nt, synthetic construct
  source 1..21: mol_type = other RNA
tgccgggcggagaactaccca

SEQ ID NO: 88398 - RNA, 21 nt, synthetic construct
  source 1..21: mol_type = other RNA
caaagagcatagagtgccgga

SEQ ID NO: 88399 - RNA, 21 nt, synthetic construct
  source 1..21: mol_type = other RNA
gccgggcggagaactacccca

SEQ ID NO: 88400 - RNA, 21 nt, synthetic construct
  source 1..21: mol_type = other RNA
agcatagagtgccgggcggaa

SEQ ID NO: 88401 - RNA, 21 nt, synthetic construct
  source 1..21: mol_type = other RNA
cgggcggagaactaccccgaa

SEQ ID NO: 88402 - RNA, 21 nt, synthetic construct
  source 1..21: mol_type = other RNA
tcaacatgtgcttcaactaca

SEQ ID NO: 88403 - RNA, 21 nt, synthetic construct
  source 1..21: mol_type = other RNA
ccagtggcatccagtgcgcta

SEQ ID NO: 88404 - RNA, 21 nt, synthetic construct
  source 1..21: mol_type = other RNA
aggcggggacatggaaactta

SEQ ID NO: 88405 - RNA, 21 nt, synthetic construct
  source 1..21: mol_type = other RNA
gcaccaaagagcatagagtga

SEQ ID NO: 88406 - RNA, 21 nt, synthetic construct
  source 1..21: mol_type = other RNA
aagagcatagagtgccgggca

SEQ ID NO: 88407 - RNA, 21 nt, synthetic construct
  source 1..21: mol_type = other RNA
gagcatagagtgccgggcgga

SEQ ID NO: 88408 - RNA, 21 nt, synthetic construct
  source 1..21: mol_type = other RNA
gagtgccgggcggagaactaa

SEQ ID NO: 88409 - RNA, 21 nt, synthetic construct
  source 1..21: mol_type = other RNA
agtgccgggcggagaactaca

SEQ ID NO: 88410 - RNA, 21 nt, synthetic construct
  source 1..21: mol_type = other RNA
accagacaggcaggttcaaca

SEQ ID NO: 88411 - RNA, 21 nt, synthetic construct
  source 1..21: mol_type = other RNA
aggcaggttcaacatgtgcta

SEQ ID NO: 88412 - RNA, 21 nt, synthetic construct
  source 1..21: mol_type = other RNA
caacatgtgcttcaactacaa

SEQ ID NO: 88413 - RNA, 21 nt, synthetic construct
  source 1..21: mol_type = other RNA
tgctgtgacgactacagccaa

SEQ ID NO: 88414 - RNA, 21 nt, synthetic construct
  source 1..21: mol_type = other RNA
ctgtgacgactacagccacta

SEQ ID NO: 88415 - RNA, 21 nt, synthetic construct
  source 1..21: mol_type = other RNA
gacgactacagccactgccca

SEQ ID NO: 88416 - RNA, 21 nt, synthetic construct
  source 1..21: mol_type = other RNA
tgggcaccaaagagcatagaa

SEQ ID NO: 88417 - RNA, 21 nt, synthetic construct
  source 1..21: mol_type = other RNA
ggcaagatgtgctgggcacca

SEQ ID NO: 88418 - RNA, 21 nt, synthetic construct
  source 1..21: mol_type = other RNA
gggcaccaaagagcatagaga

SEQ ID NO: 88419 - RNA, 21 nt, synthetic construct
  source 1..21: mol_type = other RNA
cctgccagccccggtgtcaga

SEQ ID NO: 88420 - RNA, 21 nt, synthetic construct
  source 1..21: mol_type = other RNA
gaccagacaggcaggttcaaa

SEQ ID NO: 88421 - RNA, 21 nt, synthetic construct
  source 1..21: mol_type = other RNA
tgctgggggcaagatgtgcta

SEQ ID NO: 88422 - RNA, 21 nt, synthetic construct
  source 1..21: mol_type = other RNA
gggcaagatgtgctgggcaca

SEQ ID NO: 88423 - RNA, 21 nt, synthetic construct
  source 1..21: mol_type = other RNA
gctgctgggggcaagatgtga

SEQ ID NO: 88424 - RNA, 21 nt, synthetic construct
  source 1..21: mol_type = other RNA
ctgctgggggcaagatgtgca

SEQ ID NO: 88425 - RNA, 21 nt, synthetic construct
  source 1..21: mol_type = other RNA
gctgtgacgactacagccaca

SEQ ID NO: 88426 - RNA, 21 nt, synthetic construct
  source 1..21: mol_type = other RNA
tgtgacgactacagccactga

SEQ ID NO: 88427 - RNA, 21 nt, synthetic construct
  source 1..21: mol_type = other RNA
ctgtttcagcacacactgcga

SEQ ID NO: 88428 - RNA, 21 nt, synthetic construct
  source 1..21: mol_type = other RNA
ggcccagtgtggctgctacga

SEQ ID NO: 88429 - RNA, 21 nt, synthetic construct
  source 1..21: mol_type = other RNA
caggcggggacatggaaacta

SEQ ID NO: 88430 - RNA, 21 nt, synthetic construct
  source 1..21: mol_type = other RNA
cagacaggcaggttcaacata

SEQ ID NO: 88431 - RNA, 21 nt, synthetic construct
  source 1..21: mol_type = other RNA
gacaggcaggttcaacatgta

SEQ ID NO: 88432 - RNA, 21 nt, synthetic construct
  source 1..21: mol_type = other RNA
caggcaggttcaacatgtgca

SEQ ID NO: 88433 - RNA, 21 nt, synthetic construct
  source 1..21: mol_type = other RNA
aggttcaacatgtgcttcaaa

SEQ ID NO: 88434 - RNA, 21 nt, synthetic construct
  source 1..21: mol_type = other RNA
gttcaacatgtgcttcaacta

SEQ ID NO: 88435 - RNA, 21 nt, synthetic construct
  source 1..21: mol_type = other RNA
accaaagagcatagagtgcca

SEQ ID NO: 88436 - RNA, 21 nt, synthetic construct
  source 1..21: mol_type = other RNA
gaaaacatcagggctgctgga

SEQ ID NO: 88437 - RNA, 21 nt, synthetic construct
  source 1..21: mol_type = other RNA
ctgccagccccggtgtcagta

SEQ ID NO: 88438 - RNA, 21 nt, synthetic construct
  source 1..21: mol_type = other RNA
tgtgctgggcaccaaagagca

SEQ ID NO: 88439 - RNA, 21 nt, synthetic construct
  source 1..21: mol_type = other RNA
acaggcaggttcaacatgtga

SEQ ID NO: 88440 - RNA, 21 nt, synthetic construct
  source 1..21: mol_type = other RNA
ggttcaacatgtgcttcaaca

SEQ ID NO: 88441 - RNA, 21 nt, synthetic construct
  source 1..21: mol_type = other RNA
gagctgccttacagccgcaca

SEQ ID NO: 88442 - RNA, 21 nt, synthetic construct
  source 1..21: mol_type = other RNA
actgcagctacgttctgtcca

SEQ ID NO: 88443 - RNA, 21 nt, synthetic construct
  source 1..21: mol_type = other RNA
ggaggggacgttgagtcctaa

SEQ ID NO: 88444 - RNA, 21 nt, synthetic construct
  source 1..21: mol_type = other RNA
tgagaactacgcccggcacta

SEQ ID NO: 88445 - RNA, 21 nt, synthetic construct
  source 1..21: mol_type = other RNA
caccctgttcacaccctcgaa

SEQ ID NO: 88446 - RNA, 21 nt, synthetic construct
  source 1..21: mol_type = other RNA
gtttcagcaagaacggcgtga

SEQ ID NO: 88447 - RNA, 21 nt, synthetic construct
  source 1..21: mol_type = other RNA
atccagtgcgctcacagccta

SEQ ID NO: 88448 - RNA, 21 nt, synthetic construct
  source 1..21: mol_type = other RNA
tttgttccacccgtcactgta

SEQ ID NO: 88449 - RNA, 21 nt, synthetic construct
  source 1..21: mol_type = other RNA
gcagtgcccctgcacccacga

SEQ ID NO: 88450 - RNA, 21 nt, synthetic construct
  source 1..21: mol_type = other RNA
gcccctgtcggcagccaacaa

SEQ ID NO: 88451 - RNA, 21 nt, synthetic construct
  source 1..21: mol_type = other RNA
ggaggggccgtctgtgagcaa

SEQ ID NO: 88452 - RNA, 21 nt, synthetic construct
  source 1..21: mol_type = other RNA
ggaggggccgtctgtgagcaa

SEQ ID NO: 88453 - RNA, 21 nt, synthetic construct
  source 1..21: mol_type = other RNA
ggaggggccgtctgtgagcaa

SEQ ID NO: 88454 - RNA, 21 nt, synthetic construct
  source 1..21: mol_type = other RNA
gaacctgcagaagttggatga

SEQ ID NO: 88455 - RNA, 21 nt, synthetic construct
  source 1..21: mol_type = other RNA
gcagtgcccggacccgctgca

SEQ ID NO: 88456 - RNA, 21 nt, synthetic construct
  source 1..21: mol_type = other RNA
gatgtgctacaactacaggaa

SEQ ID NO: 88457 - RNA, 21 nt, synthetic construct
  source 1..21: mol_type = other RNA
gaggagctgccttacagccga

SEQ ID NO: 88458 - RNA, 21 nt, synthetic construct
  source 1..21: mol_type = other RNA
ggagaactgccagagctgtaa

SEQ ID NO: 88459 - RNA, 21 nt, synthetic construct
  source 1..21: mol_type = other RNA
ttctgccccccaggcacggta

SEQ ID NO: 88460 - RNA, 21 nt, synthetic construct
  source 1..21: mol_type = other RNA
ttcaacatgtgcttcaactaa

SEQ ID NO: 88461 - RNA, 21 nt, synthetic construct
  source 1..21: mol_type = other RNA
cgagaacatcccctgtgggaa

SEQ ID NO: 88462 - RNA, 21 nt, synthetic construct
  source 1..21: mol_type = other RNA
gtggcccagtgtggctgctaa

SEQ ID NO: 88463 - RNA, 21 nt, synthetic construct
  source 1..21: mol_type = other RNA
gctggaccccgcccaccagga

SEQ ID NO: 88464 - RNA, 21 nt, synthetic construct
  source 1..21: mol_type = other RNA
ccctgctggggccggccttta

SEQ ID NO: 88465 - RNA, 21 nt, synthetic construct
  source 1..21: mol_type = other RNA
gccttcaacgagttctatgca

SEQ ID NO: 88466 - RNA, 21 nt, synthetic construct
  source 1..21: mol_type = other RNA
gtttcagcacacactgcgtga

SEQ ID NO: 88467 - RNA, 21 nt, synthetic construct
  source 1..21: mol_type = other RNA
ccagtgcgcccacgcggggga

SEQ ID NO: 88468 - RNA, 21 nt, synthetic construct
  source 1..21: mol_type = other RNA
tctgcagggcatttggacaga

SEQ ID NO: 88469 - RNA, 21 nt, synthetic construct
  source 1..21: mol_type = other RNA
tgtcagtggacagagtggtta

SEQ ID NO: 88470 - RNA, 21 nt, synthetic construct
  source 1..21: mol_type = other RNA
tgggtcccccactccacgaca

SEQ ID NO: 88471 - RNA, 21 nt, synthetic construct
  source 1..21: mol_type = other RNA
ccccgaggtaagcatcgacca

SEQ ID NO: 88472 - RNA, 21 nt, synthetic construct
  source 1..21: mol_type = other RNA
actaccccgaggtaagcatca

SEQ ID NO: 88473 - RNA, 21 nt, synthetic construct
  source 1..21: mol_type = other RNA
ctaccccgaggtaagcatcga

SEQ ID NO: 88474 - RNA, 21 nt, synthetic construct
  source 1..21: mol_type = other RNA
accccgaggtaagcatcgaca

SEQ ID NO: 88475 - RNA, 21 nt, synthetic construct
  source 1..21: mol_type = other RNA
acaaccagagggacgactgta

SEQ ID NO: 88476 - RNA, 21 nt, synthetic construct
  source 1..21: mol_type = other RNA
aactaccccgaggtaagcata

SEQ ID NO: 88477 - RNA, 21 nt, synthetic construct
  source 1..21: mol_type = other RNA
gcggagaactaccccgaggta

SEQ ID NO: 88478 - RNA, 21 nt, synthetic construct
  source 1..21: mol_type = other RNA
cggagaactaccccgaggtaa

SEQ ID NO: 88479 - RNA, 21 nt, synthetic construct
  source 1..21: mol_type = other RNA
gaactaccccgaggtaagcaa

SEQ ID NO: 88480 - RNA, 21 nt, synthetic construct
  source 1..21: mol_type = other RNA
acctgcagcctggagacggga

SEQ ID NO: 88481 - RNA, 21 nt, synthetic construct
  source 1..21: mol_type = other RNA
cccgaggtaagcatcgaccaa

SEQ ID NO: 88482 - RNA, 21 nt, synthetic construct
  source 1..21: mol_type = other RNA
gggacgacctggatcctcaca

SEQ ID NO: 88483 - RNA, 21 nt, synthetic construct
  source 1..21: mol_type = other RNA
gggacgacctggatcctcaca

SEQ ID NO: 88484 - RNA, 21 nt, synthetic construct
  source 1..21: mol_type = other RNA
gggacgacctggatcctcaca

SEQ ID NO: 88485 - RNA, 21 nt, synthetic construct
  source 1..21: mol_type = other RNA
gggacgacctggatcctcaca

SEQ ID NO: 88486 - RNA, 21 nt, synthetic construct
  source 1..21: mol_type = other RNA
gggacgacctggatcctcaca

SEQ ID NO: 88487 - RNA, 21 nt, synthetic construct
  source 1..21: mol_type = other RNA
gggacgacctggatcctcaca

SEQ ID NO: 88488 - RNA, 21 nt, synthetic construct
  source 1..21: mol_type = other RNA
gggacgacctggatcctcaca

SEQ ID NO: 88489 - RNA, 21 nt, synthetic construct
  source 1..21: mol_type = other RNA
tgctcaacccagcccagttta

SEQ ID NO: 88490 - RNA, 21 nt, synthetic construct
  source 1..21: mol_type = other RNA
taccccgaggtaagcatcgaa

SEQ ID NO: 88491 - RNA, 21 nt, synthetic construct
  source 1..21: mol_type = other RNA
ccacagccaccagttccaaaa

SEQ ID NO: 88492 - RNA, 21 nt, synthetic construct
  source 1..21: mol_type = other RNA
ccacagccaccagttccaaaa

SEQ ID NO: 88493 - RNA, 21 nt, synthetic construct
  source 1..21: mol_type = other RNA
gtcactgggacgccctggaaa

SEQ ID NO: 88494 - RNA, 21 nt, synthetic construct
  source 1..21: mol_type = other RNA
ggagaactaccccgaggtaaa

SEQ ID NO: 88495 - RNA, 21 nt, synthetic construct
  source 1..21: mol_type = other RNA
caaagtgtcggacccgagcca

SEQ ID NO: 88496 - RNA, 21 nt, synthetic construct
  source 1..21: mol_type = other RNA
ggggacgacctggatcctcaa

SEQ ID NO: 88497 - RNA, 21 nt, synthetic construct
  source 1..21: mol_type = other RNA
ggggacgacctggatcctcaa

SEQ ID NO: 88498 - RNA, 21 nt, synthetic construct
  source 1..21: mol_type = other RNA
ggggacgacctggatcctcaa

SEQ ID NO: 88499 - RNA, 21 nt, synthetic construct
  source 1..21: mol_type = other RNA
ggggacgacctggatcctcaa

SEQ ID NO: 88500 - RNA, 21 nt, synthetic construct
  source 1..21: mol_type = other RNA
ggggacgacctggatcctcaa

SEQ ID NO: 88501 - RNA, 21 nt, synthetic construct
  source 1..21: mol_type = other RNA
ggggacgacctggatcctcaa

SEQ ID NO: 88502 - RNA, 21 nt, synthetic construct
  source 1..21: mol_type = other RNA
gatgtgcttcaactatgaaaa

SEQ ID NO: 88503 - RNA, 21 nt, synthetic construct
  source 1..21: mol_type = other RNA
gatgtgcttcaactatgaaaa

SEQ ID NO: 88504 - RNA, 21 nt, synthetic construct
  source 1..21: mol_type = other RNA
gatgtgcttcaactatgaaaa

SEQ ID NO: 88505 - RNA, 21 nt, synthetic construct
  source 1..21: mol_type = other RNA
gatgtgcttcaactatgaaaa

SEQ ID NO: 88506 - RNA, 21 nt, synthetic construct
  source 1..21: mol_type = other RNA
ccctcctccactctggggaca

SEQ ID NO: 88507 - RNA, 21 nt, synthetic construct
  source 1..21: mol_type = other RNA
cctcctccactctggggacga

SEQ ID NO: 88508 - RNA, 21 nt, synthetic construct
  source 1..21: mol_type = other RNA
cacccgtgttgtcatcaagga

SEQ ID NO: 88509 - RNA, 21 nt, synthetic construct
  source 1..21: mol_type = other RNA
caaagtgctgactaccacaaa

SEQ ID NO: 88510 - RNA, 21 nt, synthetic construct
  source 1..21: mol_type = other RNA
ccacagtgcttaccaccacga

SEQ ID NO: 88511 - RNA, 21 nt, synthetic construct
  source 1..21: mol_type = other RNA
ccacagtgcttaccaccacga

SEQ ID NO: 88512 - RNA, 21 nt, synthetic construct
  source 1..21: mol_type = other RNA
agccactacgactgcatccaa

SEQ ID NO: 88513 - RNA, 21 nt, synthetic construct
  source 1..21: mol_type = other RNA
ggctgacctgcaagaacgaaa

SEQ ID NO: 88514 - RNA, 21 nt, synthetic construct
  source 1..21: mol_type = other RNA
ccactacgactgcgtccacta

SEQ ID NO: 88515 - RNA, 21 nt, synthetic construct
  source 1..21: mol_type = other RNA
ccactacgactgcgtccacta

SEQ ID NO: 88516 - RNA, 21 nt, synthetic construct
  source 1..21: mol_type = other RNA
catcgaccaggtcgggcagga

SEQ ID NO: 88517 - RNA, 21 nt, synthetic construct
  source 1..21: mol_type = other RNA
taagcatcgaccaggtcggga

SEQ ID NO: 88518 - RNA, 21 nt, synthetic construct
  source 1..21: mol_type = other RNA
gaacgaagaccagacaggcaa

SEQ ID NO: 88519 - RNA, 21 nt, synthetic construct
  source 1..21: mol_type = other RNA
ctacaacgtgcgtgtgcttta

SEQ ID NO: 88520 - RNA, 21 nt, synthetic construct
  source 1..21: mol_type = other RNA
gctgacctgcaagaacgaaga

SEQ ID NO: 88521 - RNA, 21 nt, synthetic construct
  source 1..21: mol_type = other RNA
actacaacgtgcgtgtgctta

SEQ ID NO: 88522 - RNA, 21 nt, synthetic construct
  source 1..21: mol_type = other RNA
gtgctttgctgtgacgactaa

SEQ ID NO: 88523 - RNA, 21 nt, synthetic construct
  source 1..21: mol_type = other RNA
acaacagccactacgactgaa

SEQ ID NO: 88524 - RNA, 21 nt, synthetic construct
  source 1..21: mol_type = other RNA
acaacagccactacgactgaa

SEQ ID NO: 88525 - RNA, 21 nt, synthetic construct
  source 1..21: mol_type = other RNA
caactacaacgtgcgtgtgca

SEQ ID NO: 88526 - RNA, 21 nt, synthetic construct
  source 1..21: mol_type = other RNA
aactacaacgtgcgtgtgcta

SEQ ID NO: 88527 - RNA, 21 nt, synthetic construct
  source 1..21: mol_type = other RNA
cctcaactccggggacgacca

SEQ ID NO: 88528 - RNA, 21 nt, synthetic construct
  source 1..21: mol_type = other RNA
cctcaactccggggacgacca

SEQ ID NO: 88529 - RNA, 21 nt, synthetic construct
  source 1..21: mol_type = other RNA
aggtaagcatcgaccaggtca

SEQ ID NO: 88530 - RNA, 21 nt, synthetic construct
  source 1..21: mol_type = other RNA
gcactcgactccagccctgta

SEQ ID NO: 88531 - RNA, 21 nt, synthetic construct
  source 1..21: mol_type = other RNA
gcactcgactccagccctgta

SEQ ID NO: 88532 - RNA, 21 nt, synthetic construct
  source 1..21: mol_type = other RNA
gcactcgactccagccctgta

SEQ ID NO: 88533 - RNA, 21 nt, synthetic construct
  source 1..21: mol_type = other RNA
agccactacgactgcgtccaa

SEQ ID NO: 88534 - RNA, 21 nt, synthetic construct
  source 1..21: mol_type = other RNA
agccactacgactgcgtccaa

SEQ ID NO: 88535 - RNA, 21 nt, synthetic construct
  source 1..21: mol_type = other RNA
cacaaagccgaccacaacaga

SEQ ID NO: 88536 - RNA, 21 nt, synthetic construct
  source 1..21: mol_type = other RNA
tacgactgcgtccactggata

SEQ ID NO: 88537 - RNA, 21 nt, synthetic construct
  source 1..21: mol_type = other RNA
tacgactgcgtccactggata

SEQ ID NO: 88538 - RNA, 21 nt, synthetic construct
  source 1..21: mol_type = other RNA
ggatcctcacaaagccgacca

SEQ ID NO: 88539 - RNA, 21 nt, synthetic construct
  source 1..21: mol_type = other RNA
aagaacgaagaccagacagga

SEQ ID NO: 88540 - RNA, 21 nt, synthetic construct
  source 1..21: mol_type = other RNA
tcaactccggggacgacctga

SEQ ID NO: 88541 - RNA, 21 nt, synthetic construct
  source 1..21: mol_type = other RNA
tcaactccggggacgacctga

SEQ ID NO: 88542 - RNA, 21 nt, synthetic construct
  source 1..21: mol_type = other RNA
gaggtaagcatcgaccaggta

SEQ ID NO: 88543 - RNA, 21 nt, synthetic construct
  source 1..21: mol_type = other RNA
cacaacagccactacgactga

SEQ ID NO: 88544 - RNA, 21 nt, synthetic construct
  source 1..21: mol_type = other RNA
cacaacagccactacgactga

SEQ ID NO: 88545 - RNA, 21 nt, synthetic construct
  source 1..21: mol_type = other RNA
caacagccactacgactgaga

SEQ ID NO: 88546 - RNA, 21 nt, synthetic construct
  source 1..21: mol_type = other RNA
cacaacagccactacgactga

SEQ ID NO: 88547 - RNA, 21 nt, synthetic construct
  source 1..21: mol_type = other RNA
caacagccactacgactgaga

SEQ ID NO: 88548 - RNA, 21 nt, synthetic construct
  source 1..21: mol_type = other RNA
cacaacagccactacgactga

SEQ ID NO: 88549 - RNA, 21 nt, synthetic construct
  source 1..21: mol_type = other RNA
cacaacagccactacgactga

SEQ ID NO: 88550 - RNA, 21 nt, synthetic construct
  source 1..21: mol_type = other RNA
gccactacgactgcgtccaca

SEQ ID NO: 88551 - RNA, 21 nt, synthetic construct
  source 1..21: mol_type = other RNA
gccactacgactgcgtccaca

SEQ ID NO: 88552 - RNA, 21 nt, synthetic construct
  source 1..21: mol_type = other RNA
gtaagcatcgaccaggtcgga

SEQ ID NO: 88553 - RNA, 21 nt, synthetic construct
  source 1..21: mol_type = other RNA
ttcaactacaacgtgcgtgta

SEQ ID NO: 88554 - RNA, 21 nt, synthetic construct
  source 1..21: mol_type = other RNA
tcaactacaacgtgcgtgtga

SEQ ID NO: 88555 - RNA, 21 nt, synthetic construct
  source 1..21: mol_type = other RNA
ttgctgtgacgactacagcca

SEQ ID NO: 88556 - RNA, 21 nt, synthetic construct
  source 1..21: mol_type = other RNA
ctcctcaactccggggacgaa

SEQ ID NO: 88557 - RNA, 21 nt, synthetic construct
  source 1..21: mol_type = other RNA
ctcaactccggggacgaccta

SEQ ID NO: 88558 - RNA, 21 nt, synthetic construct
  source 1..21: mol_type = other RNA
aacagccactacgactgcgta

SEQ ID NO: 88559 - RNA, 21 nt, synthetic construct
  source 1..21: mol_type = other RNA
actacgactgcgtccactgga

SEQ ID NO: 88560 - RNA, 21 nt, synthetic construct
  source 1..21: mol_type = other RNA
ctcctcaactccggggacgaa

SEQ ID NO: 88561 - RNA, 21 nt, synthetic construct
  source 1..21: mol_type = other RNA
ctcaactccggggacgaccta

SEQ ID NO: 88562 - RNA, 21 nt, synthetic construct
  source 1..21: mol_type = other RNA
aacagccactacgactgcata

SEQ ID NO: 88563 - RNA, 21 nt, synthetic construct
  source 1..21: mol_type = other RNA
acagccactacgactgcatca

SEQ ID NO: 88564 - RNA, 21 nt, synthetic construct
  source 1..21: mol_type = other RNA
aacagccactacgactgcgta

SEQ ID NO: 88565 - RNA, 21 nt, synthetic construct
  source 1..21: mol_type = other RNA
actacgactgcgtccactgga

SEQ ID NO: 88566 - RNA, 21 nt, synthetic construct
  source 1..21: mol_type = other RNA
ctccaagaggggacctttaaa

SEQ ID NO: 88567 - RNA, 21 nt, synthetic construct
  source 1..21: mol_type = other RNA
ttcccaacctcaggggttgca

SEQ ID NO: 88568 - RNA, 21 nt, synthetic construct
  source 1..21: mol_type = other RNA
aagcatcgaccaggtcgggca

SEQ ID NO: 88569 - RNA, 21 nt, synthetic construct
  source 1..21: mol_type = other RNA
agcatcgaccaggtcgggcaa

SEQ ID NO: 88570 - RNA, 21 nt, synthetic construct
  source 1..21: mol_type = other RNA
gagacggggctgacctgcaaa

SEQ ID NO: 88571 - RNA, 21 nt, synthetic construct
  source 1..21: mol_type = other RNA
gacggggctgacctgcaagaa

SEQ ID NO: 88572 - RNA, 21 nt, synthetic construct
  source 1..21: mol_type = other RNA
ggggctgacctgcaagaacga

SEQ ID NO: 88573 - RNA, 21 nt, synthetic construct
  source 1..21: mol_type = other RNA
gggctgacctgcaagaacgaa

SEQ ID NO: 88574 - RNA, 21 nt, synthetic construct
  source 1..21: mol_type = other RNA
caagaacgaagaccagacaga

SEQ ID NO: 88575 - RNA, 21 nt, synthetic construct
  source 1..21: mol_type = other RNA
aacatgtgcttcaactacaaa

SEQ ID NO: 88576 - RNA, 21 nt, synthetic construct
  source 1..21: mol_type = other RNA
gcttcaactacaacgtgcgta

SEQ ID NO: 88577 - RNA, 21 nt, synthetic construct
  source 1..21: mol_type = other RNA
tgtgctttgctgtgacgacta

SEQ ID NO: 88578 - RNA, 21 nt, synthetic construct
  source 1..21: mol_type = other RNA
tcctcaactccggggacgaca

SEQ ID NO: 88579 - RNA, 21 nt, synthetic construct
  source 1..21: mol_type = other RNA
cgacctggatcctcacaaaga

SEQ ID NO: 88580 - RNA, 21 nt, synthetic construct
  source 1..21: mol_type = other RNA
tggatcctcacaaagccgaca

SEQ ID NO: 88581 - RNA, 21 nt, synthetic construct
  source 1..21: mol_type = other RNA
ctcacaaagccgaccacaaca

SEQ ID NO: 88582 - RNA, 21 nt, synthetic construct
  source 1..21: mol_type = other RNA
tcacaaagccgaccacaacaa

SEQ ID NO: 88583 - RNA, 21 nt, synthetic construct
  source 1..21: mol_type = other RNA
caacagccactacgactgcga

SEQ ID NO: 88584 - RNA, 21 nt, synthetic construct
  source 1..21: mol_type = other RNA
acagccactacgactgcgtca

SEQ ID NO: 88585 - RNA, 21 nt, synthetic construct
  source 1..21: mol_type = other RNA
cagccactacgactgcgtcca

SEQ ID NO: 88586 - RNA, 21 nt, synthetic construct
  source 1..21: mol_type = other RNA
gactgcgtccactggatccaa

SEQ ID NO: 88587 - RNA, 21 nt, synthetic construct
  source 1..21: mol_type = other RNA
tcctcaactccggggacgaca

SEQ ID NO: 88588 - RNA, 21 nt, synthetic construct
  source 1..21: mol_type = other RNA
cgacctggatcctcacaaaga

SEQ ID NO: 88589 - RNA, 21 nt, synthetic construct
  source 1..21: mol_type = other RNA
caacagccactacgactgcaa

SEQ ID NO: 88590 - RNA, 21 nt, synthetic construct
  source 1..21: mol_type = other RNA
cagccactacgactgcatcca

SEQ ID NO: 88591 - RNA, 21 nt, synthetic construct
  source 1..21: mol_type = other RNA
gccactacgactgcatccaca

SEQ ID NO: 88592 - RNA, 21 nt, synthetic construct
  source 1..21: mol_type = other RNA
caacagccactacgactgcga

SEQ ID NO: 88593 - RNA, 21 nt, synthetic construct
  source 1..21: mol_type = other RNA
acagccactacgactgcgtca

SEQ ID NO: 88594 - RNA, 21 nt, synthetic construct
  source 1..21: mol_type = other RNA
cagccactacgactgcgtcca

SEQ ID NO: 88595 - RNA, 21 nt, synthetic construct
  source 1..21: mol_type = other RNA
gactgcgtccactggatccaa

SEQ ID NO: 88596 - RNA, 21 nt, synthetic construct
  source 1..21: mol_type = other RNA
gtcatctacaataagaccgaa

SEQ ID NO: 88597 - RNA, 21 nt, synthetic construct
  source 1..21: mol_type = other RNA
agaccagacaggcaggttcaa

SEQ ID NO: 88598 - RNA, 21 nt, synthetic construct
  source 1..21: mol_type = other RNA
acaaagccgaccacaacagca

SEQ ID NO: 88599 - RNA, 21 nt, synthetic construct
  source 1..21: mol_type = other RNA
tgcttcaactacaacgtgcga

SEQ ID NO: 88600 - RNA, 21 nt, synthetic construct
  source 1..21: mol_type = other RNA
cgaccacaacagccactacga

SEQ ID NO: 88601 - RNA, 21 nt, synthetic construct
  source 1..21: mol_type = other RNA
tgaccacaacagccactacga

SEQ ID NO: 88602 - RNA, 21 nt, synthetic construct
  source 1..21: mol_type = other RNA
tgaccacaacagccactacga

SEQ ID NO: 88603 - RNA, 21 nt, synthetic construct
  source 1..21: mol_type = other RNA
tgaccacaacagccactacga

SEQ ID NO: 88604 - RNA, 21 nt, synthetic construct
  source 1..21: mol_type = other RNA
tgaccacaacagccactacga

SEQ ID NO: 88605 - RNA, 21 nt, synthetic construct
  source 1..21: mol_type = other RNA
ggagacggggctgacctgcaa

SEQ ID NO: 88606 - RNA, 21 nt, synthetic construct
  source 1..21: mol_type = other RNA
agacggggctgacctgcaaga

SEQ ID NO: 88607 - RNA, 21 nt, synthetic construct
  source 1..21: mol_type = other RNA
tgacctgcaagaacgaagaca

SEQ ID NO: 88608 - RNA, 21 nt, synthetic construct
  source 1..21: mol_type = other RNA
gcaagaacgaagaccagacaa

SEQ ID NO: 88609 - RNA, 21 nt, synthetic construct
  source 1..21: mol_type = other RNA
ccacgccctcctcaactccga

SEQ ID NO: 88610 - RNA, 21 nt, synthetic construct
  source 1..21: mol_type = other RNA
caaagccgaccacaacagcca

SEQ ID NO: 88611 - RNA, 21 nt, synthetic construct
  source 1..21: mol_type = other RNA
aaagccgaccacaacagccaa

SEQ ID NO: 88612 - RNA, 21 nt, synthetic construct
  source 1..21: mol_type = other RNA
ccacgccctcctcaactccga

SEQ ID NO: 88613 - RNA, 21 nt, synthetic construct
  source 1..21: mol_type = other RNA
ctggatcctcacaaagccgaa

SEQ ID NO: 88614 - RNA, 21 nt, synthetic construct
  source 1..21: mol_type = other RNA
cttcccaacctcaggggttga

SEQ ID NO: 88615 - RNA, 21 nt, synthetic construct
  source 1..21: mol_type = other RNA
tgcaggcggggacatggaaaa

SEQ ID NO: 88616 - RNA, 21 nt, synthetic construct
  source 1..21: mol_type = other RNA
cgtgtgctttgctgtgacgaa

SEQ ID NO: 88617 - RNA, 21 nt, synthetic construct
  source 1..21: mol_type = other RNA
gccctcctcaactccggggaa

SEQ ID NO: 88618 - RNA, 21 nt, synthetic construct
  source 1..21: mol_type = other RNA
gccctcctcaactccggggaa

SEQ ID NO: 88619 - RNA, 21 nt, synthetic construct
  source 1..21: mol_type = other RNA
agaacgaagaccagacaggca

SEQ ID NO: 88620 - RNA, 21 nt, synthetic construct
  source 1..21: mol_type = other RNA
gaccacaacagccactacgaa

SEQ ID NO: 88621 - RNA, 21 nt, synthetic construct
  source 1..21: mol_type = other RNA
gaccacaacagccactacgaa

SEQ ID NO: 88622 - RNA, 21 nt, synthetic construct
  source 1..21: mol_type = other RNA
gaccacaacagccactacgaa

SEQ ID NO: 88623 - RNA, 21 nt, synthetic construct
  source 1..21: mol_type = other RNA
gaccacaacagccactacgaa

SEQ ID NO: 88624 - RNA, 21 nt, synthetic construct
  source 1..21: mol_type = other RNA
gaccacaacagccactacgaa

SEQ ID NO: 88625 - RNA, 21 nt, synthetic construct
  source 1..21: mol_type = other RNA
tacaacgtgcgtgtgctttga

SEQ ID NO: 88626 - RNA, 21 nt, synthetic construct
  source 1..21: mol_type = other RNA
cgactgcatccactggatcca

SEQ ID NO: 88627 - RNA, 21 nt, synthetic construct
  source 1..21: mol_type = other RNA
gaccacaacagccactacaaa

SEQ ID NO: 88628 - RNA, 21 nt, synthetic construct
  source 1..21: mol_type = other RNA
cactacgactgcgtccactga

SEQ ID NO: 88629 - RNA, 21 nt, synthetic construct
  source 1..21: mol_type = other RNA
cactacgactgcgtccactga

SEQ ID NO: 88630 - RNA, 21 nt, synthetic construct
  source 1..21: mol_type = other RNA
gtccccgtccccccacccgta

SEQ ID NO: 88631 - RNA, 21 nt, synthetic construct
  source 1..21: mol_type = other RNA
cgcctgcgcccaggacctgta

SEQ ID NO: 88632 - RNA, 21 nt, synthetic construct
  source 1..21: mol_type = other RNA
gccgacagcagcttcaccgta

SEQ ID NO: 88633 - RNA, 21 nt, synthetic construct
  source 1..21: mol_type = other RNA
acaccacccacgggaccttca

SEQ ID NO: 88634 - RNA, 21 nt, synthetic construct
  source 1..21: mol_type = other RNA
ctcacctcgcagactgggtca

SEQ ID NO: 88635 - RNA, 21 nt, synthetic construct
  source 1..21: mol_type = other RNA
tcccaacctcaggggttgcaa

SEQ ID NO: 88636 - RNA, 21 nt, synthetic construct
  source 1..21: mol_type = other RNA
gcatcgaccaggtcgggcaga

SEQ ID NO: 88637 - RNA, 21 nt, synthetic construct
  source 1..21: mol_type = other RNA
tcgaccaggtcgggcaggtga

SEQ ID NO: 88638 - RNA, 21 nt, synthetic construct
  source 1..21: mol_type = other RNA
cgaccaggtcgggcaggtgca

SEQ ID NO: 88639 - RNA, 21 nt, synthetic construct
  source 1..21: mol_type = other RNA
accaggtcgggcaggtgctga

SEQ ID NO: 88640 - RNA, 21 nt, synthetic construct
  source 1..21: mol_type = other RNA
caggtcgggcaggtgctgaca

SEQ ID NO: 88641 - RNA, 21 nt, synthetic construct
  source 1..21: mol_type = other RNA
acgaagaccagacaggcagga

SEQ ID NO: 88642 - RNA, 21 nt, synthetic construct
  source 1..21: mol_type = other RNA
accagctccacggccacgcca

SEQ ID NO: 88643 - RNA, 21 nt, synthetic construct
  source 1..21: mol_type = other RNA
actccggggacgacctggata

SEQ ID NO: 88644 - RNA, 21 nt, synthetic construct
  source 1..21: mol_type = other RNA
ctccggggacgacctggatca

SEQ ID NO: 88645 - RNA, 21 nt, synthetic construct
  source 1..21: mol_type = other RNA
agccgaccacaacagccacta

SEQ ID NO: 88646 - RNA, 21 nt, synthetic construct
  source 1..21: mol_type = other RNA
acagagccttccacggtgaca

SEQ ID NO: 88647 - RNA, 21 nt, synthetic construct
  source 1..21: mol_type = other RNA
actccggggacgacctggata

SEQ ID NO: 88648 - RNA, 21 nt, synthetic construct
  source 1..21: mol_type = other RNA
ctccggggacgacctggatca

SEQ ID NO: 88649 - RNA, 21 nt, synthetic construct
  source 1..21: mol_type = other RNA
agctgaccacaacagccacta

SEQ ID NO: 88650 - RNA, 21 nt, synthetic construct
  source 1..21: mol_type = other RNA
accacggccaccacacacgga

SEQ ID NO: 88651 - RNA, 21 nt, synthetic construct
  source 1..21: mol_type = other RNA
accagcacggccaccacacca

SEQ ID NO: 88652 - RNA, 21 nt, synthetic construct
  source 1..21: mol_type = other RNA
actccggggacgacctggata

SEQ ID NO: 88653 - RNA, 21 nt, synthetic construct
  source 1..21: mol_type = other RNA
ctccggggacgacctggatca

SEQ ID NO: 88654 - RNA, 21 nt, synthetic construct
  source 1..21: mol_type = other RNA
accagcacggccaccacacca

SEQ ID NO: 88655 - RNA, 21 nt, synthetic construct
  source 1..21: mol_type = other RNA
accacggccaccacacacgga

SEQ ID NO: 88656 - RNA, 21 nt, synthetic construct
  source 1..21: mol_type = other RNA
acagagccttccacggtgaca

SEQ ID NO: 88657 - RNA, 21 nt, synthetic construct
  source 1..21: mol_type = other RNA
actccggggacgacctggata

SEQ ID NO: 88658 - RNA, 21 nt, synthetic construct
  source 1..21: mol_type = other RNA
ctccggggacgacctggatca

SEQ ID NO: 88659 - RNA, 21 nt, synthetic construct
  source 1..21: mol_type = other RNA
agctgaccacaacagccacta

SEQ ID NO: 88660 - RNA, 21 nt, synthetic construct
  source 1..21: mol_type = other RNA
accacggccaccacacacgga

SEQ ID NO: 88661 - RNA, 21 nt, synthetic construct
  source 1..21: mol_type = other RNA
actccggggacgacctggata

SEQ ID NO: 88662 - RNA, 21 nt, synthetic construct
  source 1..21: mol_type = other RNA
ctccggggacgacctggatca

SEQ ID NO: 88663 - RNA, 21 nt, synthetic construct
  source 1..21: mol_type = other RNA
agctgaccacaacagccacta

SEQ ID NO: 88664 - RNA, 21 nt, synthetic construct
  source 1..21: mol_type = other RNA
acgactgcatccactggatca

SEQ ID NO: 88665 - RNA, 21 nt, synthetic construct
  source 1..21: mol_type = other RNA
actccggggacgacctggata

SEQ ID NO: 88666 - RNA, 21 nt, synthetic construct
  source 1..21: mol_type = other RNA
ctccggggacgacctggatca

SEQ ID NO: 88667 - RNA, 21 nt, synthetic construct
  source 1..21: mol_type = other RNA
agctgaccacaacagccacta

SEQ ID NO: 88668 - RNA, 21 nt, synthetic construct
  source 1..21: mol_type = other RNA
accagcacggccaccacacca

SEQ ID NO: 88669 - RNA, 21 nt, synthetic construct
  source 1..21: mol_type = other RNA
agctgaccacaacagccacta

SEQ ID NO: 88670 - RNA, 21 nt, synthetic construct
  source 1..21: mol_type = other RNA
acccaaagcctgtggccaaca

SEQ ID NO: 88671 - RNA, 21 nt, synthetic construct
  source 1..21: mol_type = other RNA
cgctgcccccgcgccctcaga

SEQ ID NO: 88672 - RNA, 21 nt, synthetic construct
  source 1..21: mol_type = other RNA
acggccacgccctcctcaaca

SEQ ID NO: 88673 - RNA, 21 nt, synthetic construct
  source 1..21: mol_type = other RNA
acggccacgccctcctcaaca

SEQ ID NO: 88674 - RNA, 21 nt, synthetic construct
  source 1..21: mol_type = other RNA
acgacctggatcctcacaaaa

SEQ ID NO: 88675 - RNA, 21 nt, synthetic construct
  source 1..21: mol_type = other RNA
tcacagagctgaccacaacaa

SEQ ID NO: 88676 - RNA, 21 nt, synthetic construct
  source 1..21: mol_type = other RNA
acgacctggatcctcacaaaa

SEQ ID NO: 88677 - RNA, 21 nt, synthetic construct
  source 1..21: mol_type = other RNA
tcacagagctgaccacaacaa

SEQ ID NO: 88678 - RNA, 21 nt, synthetic construct
  source 1..21: mol_type = other RNA
tacgactgcatccactggata

SEQ ID NO: 88679 - RNA, 21 nt, synthetic construct
  source 1..21: mol_type = other RNA
tcacagagctgaccacaacaa

SEQ ID NO: 88680 - RNA, 21 nt, synthetic construct
  source 1..21: mol_type = other RNA
tcacctcgcagactgggtcca

SEQ ID NO: 88681 - RNA, 21 nt, synthetic construct
  source 1..21: mol_type = other RNA
acctccttcaacaccacctga

SEQ ID NO: 88682 - RNA, 21 nt, synthetic construct
  source 1..21: mol_type = other RNA
ggtccagctcaggccccgtga

SEQ ID NO: 88683 - RNA, 21 nt, synthetic construct
  source 1..21: mol_type = other RNA
accaccacccaggccctgtta

SEQ ID NO: 88684 - RNA, 21 nt, synthetic construct
  source 1..21: mol_type = other RNA
tcaggggttgcaggcggggaa

SEQ ID NO: 88685 - RNA, 21 nt, synthetic construct
  source 1..21: mol_type = other RNA
ttgcaggcggggacatggaaa

SEQ ID NO: 88686 - RNA, 21 nt, synthetic construct
  source 1..21: mol_type = other RNA
ccctcctcaactccggggaca

SEQ ID NO: 88687 - RNA, 21 nt, synthetic construct
  source 1..21: mol_type = other RNA
accacggccacgacacccaca

SEQ ID NO: 88688 - RNA, 21 nt, synthetic construct
  source 1..21: mol_type = other RNA
ccacggccacgacacccacaa

SEQ ID NO: 88689 - RNA, 21 nt, synthetic construct
  source 1..21: mol_type = other RNA
ccctgtccagccctcacccta

SEQ ID NO: 88690 - RNA, 21 nt, synthetic construct
  source 1..21: mol_type = other RNA
ctcctctactccagagactga

SEQ ID NO: 88691 - RNA, 21 nt, synthetic construct
  source 1..21: mol_type = other RNA
ccctgtccagccctcacccta

SEQ ID NO: 88692 - RNA, 21 nt, synthetic construct
  source 1..21: mol_type = other RNA
ccctcctcaactccggggaca

SEQ ID NO: 88693 - RNA, 21 nt, synthetic construct
  source 1..21: mol_type = other RNA
accacggccacgacacccaca

SEQ ID NO: 88694 - RNA, 21 nt, synthetic construct
  source 1..21: mol_type = other RNA
ccacggccacgacacccacaa

SEQ ID NO: 88695 - RNA, 21 nt, synthetic construct
  source 1..21: mol_type = other RNA
ccctgtccagccctcacccta

SEQ ID NO: 88696 - RNA, 21 nt, synthetic construct
  source 1..21: mol_type = other RNA
accacggccacgacacccaca

SEQ ID NO: 88697 - RNA, 21 nt, synthetic construct
  source 1..21: mol_type = other RNA
ccacggccacgacacccacaa

SEQ ID NO: 88698 - RNA, 21 nt, synthetic construct
  source 1..21: mol_type = other RNA
ctcctctactccagagaccaa

SEQ ID NO: 88699 - RNA, 21 nt, synthetic construct
  source 1..21: mol_type = other RNA
actgcaggggacgtgccacaa

SEQ ID NO: 88700 - RNA, 21 nt, synthetic construct
  source 1..21: mol_type = other RNA
ccagtgccgaacaccacggca

SEQ ID NO: 88701 - RNA, 21 nt, synthetic construct
  source 1..21: mol_type = other RNA
ccagtgccgaacaccacggca

SEQ ID NO: 88702 - RNA, 21 nt, synthetic construct
  source 1..21: mol_type = other RNA
ccagtgccgaacaccacggca

SEQ ID NO: 88703 - RNA, 21 nt, synthetic construct
  source 1..21: mol_type = other RNA
acagtgcttaccgccacggca

SEQ ID NO: 88704 - RNA, 21 nt, synthetic construct
  source 1..21: mol_type = other RNA
acagtgcttaccgccacggca

SEQ ID NO: 88705 - RNA, 21 nt, synthetic construct
  source 1..21: mol_type = other RNA
cagcagcctaaggacatagaa

SEQ ID NO: 88706 - RNA, 21 nt, synthetic construct
  source 1..21: mol_type = other RNA
acagtgcttaccaccacgaca

SEQ ID NO: 88707 - RNA, 21 nt, synthetic construct
  source 1..21: mol_type = other RNA
tgagaacgttctgcctccata

SEQ ID NO: 88708 - RNA, 21 nt, synthetic construct
  source 1..21: mol_type = other RNA
ctgcccttgccggccggcaaa

SEQ ID NO: 88709 - RNA, 21 nt, synthetic construct
  source 1..21: mol_type = other RNA
cccttggtacagccaccacga

SEQ ID NO: 88710 - RNA, 21 nt, synthetic construct
  source 1..21: mol_type = other RNA
cacggccacgccctcctcaaa

SEQ ID NO: 88711 - RNA, 21 nt, synthetic construct
  source 1..21: mol_type = other RNA
tacggccacgccctcctcaaa

SEQ ID NO: 88712 - RNA, 21 nt, synthetic construct
  source 1..21: mol_type = other RNA
catgacaagggccaccaatta

SEQ ID NO: 88713 - RNA, 21 nt, synthetic construct
  source 1..21: mol_type = other RNA
atcacagagccttccacggta

SEQ ID NO: 88714 - RNA, 21 nt, synthetic construct
  source 1..21: mol_type = other RNA
atcacagagccttccacggta

SEQ ID NO: 88715 - RNA, 21 nt, synthetic construct
  source 1..21: mol_type = other RNA
cctgcagcgtttccttcgtga

SEQ ID NO: 88716 - RNA, 21 nt, synthetic construct
  source 1..21: mol_type = other RNA
cagcagccactacgaccgcaa

SEQ ID NO: 88717 - RNA, 21 nt, synthetic construct
  source 1..21: mol_type = other RNA
gggacggcactcacgcctcca

SEQ ID NO: 88718 - RNA, 21 nt, synthetic construct
  source 1..21: mol_type = other RNA
gggacggcactcacgcctcca

SEQ ID NO: 88719 - RNA, 21 nt, synthetic construct
  source 1..21: mol_type = other RNA
gggacggcactcacgcctcca

SEQ ID NO: 88720 - RNA, 21 nt, synthetic construct
  source 1..21: mol_type = other RNA
acagtgctgaccacgaaggca

SEQ ID NO: 88721 - RNA, 21 nt, synthetic construct
  source 1..21: mol_type = other RNA
acagtgctgaccacgaaggca

SEQ ID NO: 88722 - RNA, 21 nt, synthetic construct
  source 1..21: mol_type = other RNA
gtgtgctttgctgtgacgaca

SEQ ID NO: 88723 - RNA, 21 nt, synthetic construct
  source 1..21: mol_type = other RNA
agaggggacctttaaggcgga

SEQ ID NO: 88724 - RNA, 21 nt, synthetic construct
  source 1..21: mol_type = other RNA
agccggctgccatttctacga

SEQ ID NO: 88725 - RNA, 21 nt, synthetic construct
  source 1..21: mol_type = other RNA
ccctgctacgctcacggcaca

SEQ ID NO: 88726 - RNA, 21 nt, synthetic construct
  source 1..21: mol_type = other RNA
gctcacactaccaaagtgcca

SEQ ID NO: 88727 - RNA, 21 nt, synthetic construct
  source 1..21: mol_type = other RNA
gctcacactaccaaagtgcca

SEQ ID NO: 88728 - RNA, 21 nt, synthetic construct
  source 1..21: mol_type = other RNA
gctcacactaccaaagtgcca

SEQ ID NO: 88729 - RNA, 21 nt, synthetic construct
  source 1..21: mol_type = other RNA
gctcacactaccaaagtgcca

SEQ ID NO: 88730 - RNA, 21 nt, synthetic construct
  source 1..21: mol_type = other RNA
ccagcaggacccctttcggga

SEQ ID NO: 88731 - RNA, 21 nt, synthetic construct
  source 1..21: mol_type = other RNA
gtgctgaccacgaaggccaca

SEQ ID NO: 88732 - RNA, 21 nt, synthetic construct
  source 1..21: mol_type = other RNA
gtgctgaccacgaaggccaca

SEQ ID NO: 88733 - RNA, 21 nt, synthetic construct
  source 1..21: mol_type = other RNA
tggagagaccatcagggtcga

SEQ ID NO: 88734 - RNA, 21 nt, synthetic construct
  source 1..21: mol_type = other RNA
actgcaggggccgccttgaga

SEQ ID NO: 88735 - RNA, 21 nt, synthetic construct
  source 1..21: mol_type = other RNA
catgtgcttcaactacaacga

SEQ ID NO: 88736 - RNA, 21 nt, synthetic construct
  source 1..21: mol_type = other RNA
ccacctcgggcatcttgggca

SEQ ID NO: 88737 - RNA, 21 nt, synthetic construct
  source 1..21: mol_type = other RNA
ccacctcgggcatcttgggca

SEQ ID NO: 88738 - RNA, 21 nt, synthetic construct
  source 1..21: mol_type = other RNA
gggacggcacgcacgcttcca

SEQ ID NO: 88739 - RNA, 21 nt, synthetic construct
  source 1..21: mol_type = other RNA
gggacggaaccactgccgcca

SEQ ID NO: 88740 - RNA, 21 nt, synthetic construct
  source 1..21: mol_type = other RNA
ccgtgtcgtcctgctggacca

SEQ ID NO: 88741 - RNA, 21 nt, synthetic construct
  source 1..21: mol_type = other RNA
cctggacccgcctatcacaga

SEQ ID NO: 88742 - RNA, 21 nt, synthetic construct
  source 1..21: mol_type = other RNA
cctctggcggggactttgaca

SEQ ID NO: 88743 - RNA, 21 nt, synthetic construct
  source 1..21: mol_type = other RNA
cctggacccgcctatcacaga

SEQ ID NO: 88744 - RNA, 21 nt, synthetic construct
  source 1..21: mol_type = other RNA
cctctggcggggactttgaca

SEQ ID NO: 88745 - RNA, 21 nt, synthetic construct
  source 1..21: mol_type = other RNA
cctggacccgcctatcacaga

SEQ ID NO: 88746 - RNA, 21 nt, synthetic construct
  source 1..21: mol_type = other RNA
cctctggcggggactttgaca

SEQ ID NO: 88747 - RNA, 21 nt, synthetic construct
  source 1..21: mol_type = other RNA
cctggacccgcctatcacaga

SEQ ID NO: 88748 - RNA, 21 nt, synthetic construct
  source 1..21: mol_type = other RNA
cctctggcggggactttgaca

SEQ ID NO: 88749 - RNA, 21 nt, synthetic construct
  source 1..21: mol_type = other RNA
cctggacccgcctatcacaga

SEQ ID NO: 88750 - RNA, 21 nt, synthetic construct
  source 1..21: mol_type = other RNA
ggtgcaaccggtggcctgtga

SEQ ID NO: 88751 - RNA, 21 nt, synthetic construct
  source 1..21: mol_type = other RNA
gggagtgcgtccagaccgcca

SEQ ID NO: 88752 - RNA, 21 nt, synthetic construct
  source 1..21: mol_type = other RNA
cagcaccgcttccaaagagca

SEQ ID NO: 88753 - RNA, 21 nt, synthetic construct
  source 1..21: mol_type = other RNA
ggtgacaaccgtgtcgtccta

SEQ ID NO: 88754 - RNA, 21 nt, synthetic construct
  source 1..21: mol_type = other RNA
aagctgcgacaggcaaggcga

SEQ ID NO: 88755 - RNA, 21 nt, synthetic construct
  source 1..21: mol_type = other RNA
tggctcaccctgcacggacaa

SEQ ID NO: 88756 - RNA, 21 nt, synthetic construct
  source 1..21: mol_type = other RNA
gatgacatcacgcactctgga

SEQ ID NO: 88757 - RNA, 21 nt, synthetic construct
  source 1..21: mol_type = other RNA
acctgctccggggggctatga

SEQ ID NO: 88758 - RNA, 21 nt, synthetic construct
  source 1..21: mol_type = other RNA
tgagaaactctacgacctgca

SEQ ID NO: 88759 - RNA, 21 nt, synthetic construct
  source 1..21: mol_type = other RNA
gagctgcggaagtgcggccta

SEQ ID NO: 88760 - RNA, 21 nt, synthetic construct
  source 1..21: mol_type = other RNA
caatgccaggaacagctttga

SEQ ID NO: 88761 - RNA, 21 nt, synthetic construct
  source 1..21: mol_type = other RNA
aggagtgcccctgctacgcta

SEQ ID NO: 88762 - RNA, 21 nt, synthetic construct
  source 1..21: mol_type = other RNA
tggagaggtggtgcacgacga

SEQ ID NO: 88763 - RNA, 21 nt, synthetic construct
  source 1..21: mol_type = other RNA
gggagtgggggctgcattgca

SEQ ID NO: 88764 - RNA, 21 nt, synthetic construct
  source 1..21: mol_type = other RNA
agcagcagaaccaccgagtca

SEQ ID NO: 88765 - RNA, 21 nt, synthetic construct
  source 1..21: mol_type = other RNA
atcacagagccttccacggga

SEQ ID NO: 88766 - RNA, 21 nt, synthetic construct
  source 1..21: mol_type = other RNA
ccagcagcaaccaccggtaca

SEQ ID NO: 88767 - RNA, 21 nt, synthetic construct
  source 1..21: mol_type = other RNA
cccttgggaccaccgggacca

SEQ ID NO: 88768 - RNA, 21 nt, synthetic construct
  source 1..21: mol_type = other RNA
caaagtgccgactaccacaaa

SEQ ID NO: 88769 - RNA, 21 nt, synthetic construct
  source 1..21: mol_type = other RNA
caaagtgccgactaccacaaa

SEQ ID NO: 88770 - RNA, 21 nt, synthetic construct
  source 1..21: mol_type = other RNA
atcacagagccttccacggga

SEQ ID NO: 88771 - RNA, 21 nt, synthetic construct
  source 1..21: mol_type = other RNA
ccagcagcaaccaccggtaca

SEQ ID NO: 88772 - RNA, 21 nt, synthetic construct
  source 1..21: mol_type = other RNA
cccttgggaccaccgggacca

SEQ ID NO: 88773 - RNA, 21 nt, synthetic construct
  source 1..21: mol_type = other RNA
caaagtgccgactaccacaaa

SEQ ID NO: 88774 - RNA, 21 nt, synthetic construct
  source 1..21: mol_type = other RNA
accggttccacggccaccgca

SEQ ID NO: 88775 - RNA, 21 nt, synthetic construct
  source 1..21: mol_type = other RNA
gctggacccaaagcctgtgga

SEQ ID NO: 88776 - RNA, 21 nt, synthetic construct
  source 1..21: mol_type = other RNA
ccctgctgccccgagacggta

SEQ ID NO: 88777 - RNA, 21 nt, synthetic construct
  source 1..21: mol_type = other RNA
aatggcaccttctacggggta

SEQ ID NO: 88778 - RNA, 21 nt, synthetic construct
  source 1..21: mol_type = other RNA
gatgcctgcaacaatactaca

SEQ ID NO: 88779 - RNA, 21 nt, synthetic construct
  source 1..21: mol_type = other RNA
atcaacacgaccatcctgtga

SEQ ID NO: 88780 - RNA, 21 nt, synthetic construct
  source 1..21: mol_type = other RNA
gatgtgcattgtctgatcata

SEQ ID NO: 88781 - RNA, 21 nt, synthetic construct
  source 1..21: mol_type = other RNA
catgcctgctgcagggtaaca

SEQ ID NO: 88782 - RNA, 21 nt, synthetic construct
  source 1..21: mol_type = other RNA
agaggggtcagcatcccaaaa

SEQ ID NO: 88783 - RNA, 21 nt, synthetic construct
  source 1..21: mol_type = other RNA
acgaggagggcatctgccaca

SEQ ID NO: 88784 - RNA, 21 nt, synthetic construct
  source 1..21: mol_type = other RNA
agctggtgccactcatgcaga

SEQ ID NO: 88785 - RNA, 21 nt, synthetic construct
  source 1..21: mol_type = other RNA
atgtgcgccaacagccaacaa

SEQ ID NO: 88786 - RNA, 21 nt, synthetic construct
  source 1..21: mol_type = other RNA
cctggacttcggccacctcga

SEQ ID NO: 88787 - RNA, 21 nt, synthetic construct
  source 1..21: mol_type = other RNA
cctcaaagtgctgaccagcaa

SEQ ID NO: 88788 - RNA, 21 nt, synthetic construct
  source 1..21: mol_type = other RNA
cctggacttcggccacctcga

SEQ ID NO: 88789 - RNA, 21 nt, synthetic construct
  source 1..21: mol_type = other RNA
gatgtgcgccaacagccaaca

SEQ ID NO: 88790 - RNA, 21 nt, synthetic construct
  source 1..21: mol_type = other RNA
tagcagcaggaccaccgagta

SEQ ID NO: 88791 - RNA, 21 nt, synthetic construct
  source 1..21: mol_type = other RNA
tagcagcaggaccaccgagta

SEQ ID NO: 88792 - RNA, 21 nt, synthetic construct
  source 1..21: mol_type = other RNA
tagcagcaggaccaccgagta

SEQ ID NO: 88793 - RNA, 21 nt, synthetic construct
  source 1..21: mol_type = other RNA
agcatccactacaagtccata

SEQ ID NO: 88794 - RNA, 21 nt, synthetic construct
  source 1..21: mol_type = other RNA
accttcaatggccaagtctta

SEQ ID NO: 88795 - RNA, 21 nt, synthetic construct
  source 1..21: mol_type = other RNA
cggacggcggcgtgttcctca

SEQ ID NO: 88796 - RNA, 21 nt, synthetic construct
  source 1..21: mol_type = other RNA
accttcaccaccgcctgggta

SEQ ID NO: 88797 - RNA, 21 nt, synthetic construct
  source 1..21: mol_type = other RNA
agctggtacaatgggcaccga

SEQ ID NO: 88798 - RNA, 21 nt, synthetic construct
  source 1..21: mol_type = other RNA
cctggactttggcctggtcta

SEQ ID NO: 88799 - RNA, 21 nt, synthetic construct
  source 1..21: mol_type = other RNA
cctggactttggcctggtcta

SEQ ID NO: 88800 - RNA, 21 nt, synthetic construct
  source 1..21: mol_type = other RNA
acagcagccactacaactgca

SEQ ID NO: 88801 - RNA, 21 nt, synthetic construct
  source 1..21: mol_type = other RNA
ccacagtgcttaccaccacga

SEQ ID NO: 88802 - RNA, 21 nt, synthetic construct
  source 1..21: mol_type = other RNA
cctggactttggcctggtcta

SEQ ID NO: 88803 - RNA, 21 nt, synthetic construct
  source 1..21: mol_type = other RNA
cctggactttggcctggtcta

SEQ ID NO: 88804 - RNA, 21 nt, synthetic construct
  source 1..21: mol_type = other RNA
acagcagccactacaactgca

SEQ ID NO: 88805 - RNA, 21 nt, synthetic construct
  source 1..21: mol_type = other RNA
ggaggggatggcggagggcta

SEQ ID NO: 88806 - RNA, 21 nt, synthetic construct
  source 1..21: mol_type = other RNA
ctgccctgtgacgcccaggga

SEQ ID NO: 88807 - RNA, 21 nt, synthetic construct
  source 1..21: mol_type = other RNA
tccctgatgtcactgggacga

SEQ ID NO: 88808 - RNA, 21 nt, synthetic construct
  source 1..21: mol_type = other RNA
gccaacagccaacagagtcca

SEQ ID NO: 88809 - RNA, 21 nt, synthetic construct
  source 1..21: mol_type = other RNA
caacagccaacagagtcccca

SEQ ID NO: 88810 - RNA, 21 nt, synthetic construct
  source 1..21: mol_type = other RNA
cgaggtaagcatcgaccagga

SEQ ID NO: 88811 - RNA, 21 nt, synthetic construct
  source 1..21: mol_type = other RNA
atgtgcttcaactacaacgta

SEQ ID NO: 88812 - RNA, 21 nt, synthetic construct
  source 1..21: mol_type = other RNA
acgccctcctcaactccggga

SEQ ID NO: 88813 - RNA, 21 nt, synthetic construct
  source 1..21: mol_type = other RNA
cctggtcagagtggctggaca

SEQ ID NO: 88814 - RNA, 21 nt, synthetic construct
  source 1..21: mol_type = other RNA
ctcacagagctgaccacaaca

SEQ ID NO: 88815 - RNA, 21 nt, synthetic construct
  source 1..21: mol_type = other RNA
cctggtcagagtggctggaca

SEQ ID NO: 88816 - RNA, 21 nt, synthetic construct
  source 1..21: mol_type = other RNA
agggacgacctggatcctcaa

SEQ ID NO: 88817 - RNA, 21 nt, synthetic construct
  source 1..21: mol_type = other RNA
acctccacagtgctgaccaca

SEQ ID NO: 88818 - RNA, 21 nt, synthetic construct
  source 1..21: mol_type = other RNA
cctggtcagagtggctggaca

SEQ ID NO: 88819 - RNA, 21 nt, synthetic construct
  source 1..21: mol_type = other RNA
acgccctcctcaactccggga

SEQ ID NO: 88820 - RNA, 21 nt, synthetic construct
  source 1..21: mol_type = other RNA
cctggtcagagtggctggaca

SEQ ID NO: 88821 - RNA, 21 nt, synthetic construct
  source 1..21: mol_type = other RNA
ctcacagagctgaccacaaca

SEQ ID NO: 88822 - RNA, 21 nt, synthetic construct
  source 1..21: mol_type = other RNA
acctccacagtgctgaccaca

SEQ ID NO: 88823 - RNA, 21 nt, synthetic construct
  source 1..21: mol_type = other RNA
ctcacagagctgaccacaaca

SEQ ID NO: 88824 - RNA, 21 nt, synthetic construct
  source 1..21: mol_type = other RNA
acctccacagtgctgaccaca

SEQ ID NO: 88825 - RNA, 21 nt, synthetic construct
  source 1..21: mol_type = other RNA
cagctcgtccaccgtggggaa

SEQ ID NO: 88826 - RNA, 21 nt, synthetic construct
  source 1..21: mol_type = other RNA
tgcagcatgtggggcggctca

SEQ ID NO: 88827 - RNA, 21 nt, synthetic construct
  source 1..21: mol_type = other RNA
tgaggtgccctgccagagcca

SEQ ID NO: 88828 - RNA, 21 nt, synthetic construct
  source 1..21: mol_type = other RNA
accaggggcacctccaggaca

SEQ ID NO: 88829 - RNA, 21 nt, synthetic construct
  source 1..21: mol_type = other RNA
caaagtgctgaccagcacgga

SEQ ID NO: 88830 - RNA, 21 nt, synthetic construct
  source 1..21: mol_type = other RNA
caaagtgctgaccagcacgga

SEQ ID NO: 88831 - RNA, 21 nt, synthetic construct
  source 1..21: mol_type = other RNA
gggacggcacgcacgcctcca

SEQ ID NO: 88832 - RNA, 21 nt, synthetic construct
  source 1..21: mol_type = other RNA
ggctggtccccgacagcagaa

SEQ ID NO: 88833 - RNA, 21 nt, synthetic construct
  source 1..21: mol_type = other RNA
aggagaggcgggtccacgaga

SEQ ID NO: 88834 - RNA, 21 nt, synthetic construct
  source 1..21: mol_type = other RNA
accaccacggccaccacacca

SEQ ID NO: 88835 - RNA, 21 nt, synthetic construct
  source 1..21: mol_type = other RNA
cgggcatcttgggcaccacca

SEQ ID NO: 88836 - RNA, 21 nt, synthetic construct
  source 1..21: mol_type = other RNA
cgggcatcttgggcaccacca

SEQ ID NO: 88837 - RNA, 21 nt, synthetic construct
  source 1..21: mol_type = other RNA
ggtgcaaccttcccaggcgca

SEQ ID NO: 88838 - RNA, 21 nt, synthetic construct
  source 1..21: mol_type = other RNA
gcagcagaaccaccgagtcaa

SEQ ID NO: 88839 - RNA, 21 nt, synthetic construct
  source 1..21: mol_type = other RNA
ggaccctcccagaacagacca

SEQ ID NO: 88840 - RNA, 21 nt, synthetic construct
  source 1..21: mol_type = other RNA
ggaccctcccagaacagacca

SEQ ID NO: 88841 - RNA, 21 nt, synthetic construct
  source 1..21: mol_type = other RNA
ctcacagagcagaccacagca

SEQ ID NO: 88842 - RNA, 21 nt, synthetic construct
  source 1..21: mol_type = other RNA
gcacttatgccagcagcctaa

SEQ ID NO: 88843 - RNA, 21 nt, synthetic construct
  source 1..21: mol_type = other RNA
gctctggcggccatgctcgta

SEQ ID NO: 88844 - RNA, 21 nt, synthetic construct
  source 1..21: mol_type = other RNA
gcctgctgtgcctaccccaaa

SEQ ID NO: 88845 - RNA, 21 nt, synthetic construct
  source 1..21: mol_type = other RNA
caacagtgccttctcgcgcta

SEQ ID NO: 88846 - RNA, 21 nt, synthetic construct
  source 1..21: mol_type = other RNA
ctgcattgccgaggaggacta

SEQ ID NO: 88847 - RNA, 21 nt, synthetic construct
  source 1..21: mol_type = other RNA
gctgcagtgacgaccactgca

SEQ ID NO: 88848 - RNA, 21 nt, synthetic construct
  source 1..21: mol_type = other RNA
gcgccctcagcatccactaca

SEQ ID NO: 88849 - RNA, 21 nt, synthetic construct
  source 1..21: mol_type = other RNA
gcagcaggaccaccgagtcaa

SEQ ID NO: 88850 - RNA, 21 nt, synthetic construct
  source 1..21: mol_type = other RNA
gcagcaggaccaccgagtcaa

SEQ ID NO: 88851 - RNA, 21 nt, synthetic construct
  source 1..21: mol_type = other RNA
gcagcaggaccaccgagtcaa

SEQ ID NO: 88852 - RNA, 21 nt, synthetic construct
  source 1..21: mol_type = other RNA
agcagcaggaccaccgagtca

SEQ ID NO: 88853 - RNA, 21 nt, synthetic construct
  source 1..21: mol_type = other RNA
agcagcaggaccaccgagtca

SEQ ID NO: 88854 - RNA, 21 nt, synthetic construct
  source 1..21: mol_type = other RNA
agcagcaggaccaccgagtca

SEQ ID NO: 88855 - RNA, 21 nt, synthetic construct
  source 1..21: mol_type = other RNA
ccagcagcctgccaaccttca

SEQ ID NO: 88856 - RNA, 21 nt, synthetic construct
  source 1..21: mol_type = other RNA
cctcccaaagtgctgaccaga

SEQ ID NO: 88857 - RNA, 21 nt, synthetic construct
  source 1..21: mol_type = other RNA
cctcccaaagtgctgaccaga

SEQ ID NO: 88858 - RNA, 21 nt, synthetic construct
  source 1..21: mol_type = other RNA
acctgctgccaggagaggcga

SEQ ID NO: 88859 - RNA, 21 nt, synthetic construct
  source 1..21: mol_type = other RNA
ccaggctgcctgtgccaatga

SEQ ID NO: 88860 - RNA, 21 nt, synthetic construct
  source 1..21: mol_type = other RNA
ctgacctgcaagaacgaagaa

SEQ ID NO: 88861 - RNA, 21 nt, synthetic construct
  source 1..21: mol_type = other RNA
ctgccctgggcgtgagcgtca

SEQ ID NO: 88862 - RNA, 21 nt, synthetic construct
  source 1..21: mol_type = other RNA
gaaggtgcactgtgacgtcca

SEQ ID NO: 88863 - RNA, 21 nt, synthetic construct
  source 1..21: mol_type = other RNA
gtgctgactaccacaaccaca

SEQ ID NO: 88864 - RNA, 21 nt, synthetic construct
  source 1..21: mol_type = other RNA
gtgggctgtttcagcacacaa

SEQ ID NO: 88865 - RNA, 21 nt, synthetic construct
  source 1..21: mol_type = other RNA
gtgccagcacggagcctgcta

SEQ ID NO: 88866 - RNA, 21 nt, synthetic construct
  source 1..21: mol_type = other RNA
ggctgctgggggcaagatgta

SEQ ID NO: 88867 - RNA, 21 nt, synthetic construct
  source 1..21: mol_type = other RNA
caccaaagagcatagagtgca

SEQ ID NO: 88868 - RNA, 21 nt, synthetic construct
  source 1..21: mol_type = other RNA
gggcggagaactaccccgaga

SEQ ID NO: 88869 - RNA, 21 nt, synthetic construct
  source 1..21: mol_type = other RNA
aacagctttgaggacccctga

SEQ ID NO: 88870 - RNA, 21 nt, synthetic construct
  source 1..21: mol_type = other RNA
tgctgggcaccaaagagcata

SEQ ID NO: 88871 - RNA, 21 nt, synthetic construct
  source 1..21: mol_type = other RNA
atagagtgccgggcggagaaa

SEQ ID NO: 88872 - RNA, 21 nt, synthetic construct
  source 1..21: mol_type = other RNA
catagagtgccgggcggagaa

SEQ ID NO: 88873 - RNA, 21 nt, synthetic construct
  source 1..21: mol_type = other RNA
ctgggcaccaaagagcataga

SEQ ID NO: 88874 - RNA, 21 nt, synthetic construct
  source 1..21: mol_type = other RNA
aaaacatcagggctgctggga

SEQ ID NO: 88875 - RNA, 21 nt, synthetic construct
  source 1..21: mol_type = other RNA
agctttgaggacccctgctca

SEQ ID NO: 88876 - RNA, 21 nt, synthetic construct
  source 1..21: mol_type = other RNA
gcacccctggggccgagtgca

SEQ ID NO: 88877 - RNA, 21 nt, synthetic construct
  source 1..21: mol_type = other RNA
agcctaaggacatagagtgca

SEQ ID NO: 88878 - RNA, 21 nt, synthetic construct
  source 1..21: mol_type = other RNA
gcctaaggacatagagtgcca

SEQ ID NO: 88879 - RNA, 21 nt, synthetic construct
  source 1..21: mol_type = other RNA
ggcaccaaagagcatagagta

SEQ ID NO: 88880 - RNA, 21 nt, synthetic construct
  source 1..21: mol_type = other RNA
gcatagagtgccgggcggaga

SEQ ID NO: 88881 - RNA, 21 nt, synthetic construct
  source 1..21: mol_type = other RNA
ccagacaggcaggttcaacaa

SEQ ID NO: 88882 - RNA, 21 nt, synthetic construct
  source 1..21: mol_type = other RNA
tagagtgccgggcggagaaca

SEQ ID NO: 88883 - RNA, 21 nt, synthetic construct
  source 1..21: mol_type = other RNA
tgcaggtgtttgtcaggctga

SEQ ID NO: 88884 - RNA, 21 nt, synthetic construct
  source 1..21: mol_type = other RNA
cagctttgaggacccctgcta

SEQ ID NO: 88885 - RNA, 21 nt, synthetic construct
  source 1..21: mol_type = other RNA
aaaacctgaggcagagaggga

SEQ ID NO: 88886 - RNA, 21 nt, synthetic construct
  source 1..21: mol_type = other RNA
tgacgtggacttcccaaccta

SEQ ID NO: 88887 - RNA, 21 nt, synthetic construct
  source 1..21: mol_type = other RNA
gacgtggacttcccaacctca

SEQ ID NO: 88888 - RNA, 21 nt, synthetic construct
  source 1..21: mol_type = other RNA
ttttgaaaacatcagggctga

SEQ ID NO: 88889 - RNA, 21 nt, synthetic construct
  source 1..21: mol_type = other RNA
tttgaaaacatcagggctgca

SEQ ID NO: 88890 - RNA, 21 nt, synthetic construct
  source 1..21: mol_type = other RNA
gcaagatgtgctgggcaccaa

SEQ ID NO: 88891 - RNA, 21 nt, synthetic construct
  source 1..21: mol_type = other RNA
gaaaacctgaggcagagagga

SEQ ID NO: 88892 - RNA, 21 nt, synthetic construct
  source 1..21: mol_type = other RNA
gcaggcggggacatggaaaca

SEQ ID NO: 88893 - RNA, 21 nt, synthetic construct
  source 1..21: mol_type = other RNA
gctgggggcaagatgtgctga

SEQ ID NO: 88894 - RNA, 21 nt, synthetic construct
  source 1..21: mol_type = other RNA
gggctgctgggggcaagatga

SEQ ID NO: 88895 - RNA, 21 nt, synthetic construct
  source 1..21: mol_type = other RNA
ttgacgtggacttcccaacca

SEQ ID NO: 88896 - RNA, 21 nt, synthetic construct
  source 1..21: mol_type = other RNA
gctgggcaccaaagagcataa

SEQ ID NO: 88897 - RNA, 21 nt, synthetic construct
  source 1..21: mol_type = other RNA
caggttcaacatgtgcttcaa

SEQ ID NO: 88898 - RNA, 21 nt, synthetic construct
  source 1..21: mol_type = other RNA
gggggcaagatgtgctgggca

SEQ ID NO: 88899 - RNA, 21 nt, synthetic construct
  source 1..21: mol_type = other RNA
cgcccaccagggccagatgta

SEQ ID NO: 88900 - RNA, 21 nt, synthetic construct
  source 1..21: mol_type = other RNA
acagctttgaggacccctgca

SEQ ID NO: 88901 - RNA, 21 nt, synthetic construct
  source 1..21: mol_type = other RNA
ctggagacggccaccaccaca

SEQ ID NO: 88902 - RNA, 21 nt, synthetic construct
  source 1..21: mol_type = other RNA
cgtggacttcccaacctcaga

SEQ ID NO: 88903 - RNA, 21 nt, synthetic construct
  source 1..21: mol_type = other RNA
aaacatcagggctgctgggga

SEQ ID NO: 88904 - RNA, 21 nt, synthetic construct
  source 1..21: mol_type = other RNA
caagatgtgctgggcaccaaa

SEQ ID NO: 88905 - RNA, 21 nt, synthetic construct
  source 1..21: mol_type = other RNA
agacaggcaggttcaacatga

SEQ ID NO: 88906 - RNA, 21 nt, synthetic construct
  source 1..21: mol_type = other RNA
ggcaggttcaacatgtgctta

SEQ ID NO: 88907 - RNA, 21 nt, synthetic construct
  source 1..21: mol_type = other RNA
caccgtgctggctcctggaga

SEQ ID NO: 88908 - RNA, 21 nt, synthetic construct
  source 1..21: mol_type = other RNA
ggcggggacatggaaacttta

SEQ ID NO: 88909 - RNA, 21 nt, synthetic construct
  source 1..21: mol_type = other RNA
ggcccagcctggtgtccccca

SEQ ID NO: 88910 - RNA, 21 nt, synthetic construct
  source 1..21: mol_type = other RNA
ggcccagcctggtgtccccca

SEQ ID NO: 88911 - RNA, 21 nt, synthetic construct
  source 1..21: mol_type = other RNA
ggcccagcctggtgtccccca

SEQ ID NO: 88912 - RNA, 21 nt, synthetic construct
  source 1..21: mol_type = other RNA
ggcccagcctggtgtccccca

SEQ ID NO: 88913 - RNA, 21 nt, synthetic construct
  source 1..21: mol_type = other RNA
tgaaaacctgaggcagagaga

SEQ ID NO: 88914 - RNA, 21 nt, synthetic construct
  source 1..21: mol_type = other RNA
catggaaacttttgaaaacaa

SEQ ID NO: 88915 - RNA, 21 nt, synthetic construct
  source 1..21: mol_type = other RNA
cttttgaaaacatcagggcta

SEQ ID NO: 88916 - RNA, 21 nt, synthetic construct
  source 1..21: mol_type = other RNA
agggctgctgggggcaagata

SEQ ID NO: 88917 - RNA, 21 nt, synthetic construct
  source 1..21: mol_type = other RNA
caccacagcagtccccaccca

SEQ ID NO: 88918 - RNA, 21 nt, synthetic construct
  source 1..21: mol_type = other RNA
tgggggcaagatgtgctggga

SEQ ID NO: 88919 - RNA, 21 nt, synthetic construct
  source 1..21: mol_type = other RNA
ttccccagctcccacttctca

SEQ ID NO: 88920 - RNA, 21 nt, synthetic construct
  source 1..21: mol_type = other RNA
gcggggacatggaaactttta

SEQ ID NO: 88921 - RNA, 21 nt, synthetic construct
  source 1..21: mol_type = other RNA
acgtggacttcccaacctcaa

SEQ ID NO: 88922 - RNA, 21 nt, synthetic construct
  source 1..21: mol_type = other RNA
ctggaccccgcccaccaggga

SEQ ID NO: 88923 - RNA, 21 nt, synthetic construct
  source 1..21: mol_type = other RNA
gtggacttcccaacctcagga

SEQ ID NO: 88924 - RNA, 21 nt, synthetic construct
  source 1..21: mol_type = other RNA
gcaccgtgctggctcctggaa

SEQ ID NO: 88925 - RNA, 21 nt, synthetic construct
  source 1..21: mol_type = other RNA
ctccacggccacgccctccta

SEQ ID NO: 88926 - RNA, 21 nt, synthetic construct
  source 1..21: mol_type = other RNA
cacccctggggccgagtgcca

SEQ ID NO: 88927 - RNA, 21 nt, synthetic construct
  source 1..21: mol_type = other RNA
gaggcctgcacctgcacctaa

SEQ ID NO: 88928 - RNA, 21 nt, synthetic construct
  source 1..21: mol_type = other RNA
ccacagaacccactgtcccaa

SEQ ID NO: 88929 - RNA, 21 nt, synthetic construct
  source 1..21: mol_type = other RNA
cccctgcccctggctgtgaca

SEQ ID NO: 88930 - RNA, 21 nt, synthetic construct
  source 1..21: mol_type = other RNA
aggcctgcacctgcacctata

SEQ ID NO: 88931 - RNA, 21 nt, synthetic construct
  source 1..21: mol_type = other RNA
ggacatggaaacttttgaaaa

SEQ ID NO: 88932 - RNA, 21 nt, synthetic construct
  source 1..21: mol_type = other RNA
gtgctgggcaccaaagagcaa

SEQ ID NO: 88933 - RNA, 21 nt, synthetic construct
  source 1..21: mol_type = other RNA
cttccccagcctgagccccca

SEQ ID NO: 88934 - RNA, 21 nt, synthetic construct
  source 1..21: mol_type = other RNA
tttgggaacctgcagaagtta

SEQ ID NO: 88935 - RNA, 21 nt, synthetic construct
  source 1..21: mol_type = other RNA
atgcaggtgtttgtcaggcta

SEQ ID NO: 88936 - RNA, 21 nt, synthetic construct
  source 1..21: mol_type = other RNA
ggtggacctgcctggcctgga

SEQ ID NO: 88937 - RNA, 21 nt, synthetic construct
  source 1..21: mol_type = other RNA
taccaccacctgccagcccca

SEQ ID NO: 88938 - RNA, 21 nt, synthetic construct
  source 1..21: mol_type = other RNA
ccaccacctgccagccccgga

SEQ ID NO: 88939 - RNA, 21 nt, synthetic construct
  source 1..21: mol_type = other RNA
gctggagacggccaccaccaa

SEQ ID NO: 88940 - RNA, 21 nt, synthetic construct
  source 1..21: mol_type = other RNA
gcaccacagcagtccccacca

SEQ ID NO: 88941 - RNA, 21 nt, synthetic construct
  source 1..21: mol_type = other RNA
cggggacatggaaacttttga

SEQ ID NO: 88942 - RNA, 21 nt, synthetic construct
  source 1..21: mol_type = other RNA
ggggacatggaaacttttgaa

SEQ ID NO: 88943 - RNA, 21 nt, synthetic construct
  source 1..21: mol_type = other RNA
gacatggaaacttttgaaaaa

SEQ ID NO: 88944 - RNA, 21 nt, synthetic construct
  source 1..21: mol_type = other RNA
acatggaaacttttgaaaaca

SEQ ID NO: 88945 - RNA, 21 nt, synthetic construct
  source 1..21: mol_type = other RNA
gaaacttttgaaaacatcaga

SEQ ID NO: 88946 - RNA, 21 nt, synthetic construct
  source 1..21: mol_type = other RNA
acttttgaaaacatcagggca

SEQ ID NO: 88947 - RNA, 21 nt, synthetic construct
  source 1..21: mol_type = other RNA
aacatcagggctgctggggga

SEQ ID NO: 88948 - RNA, 21 nt, synthetic construct
  source 1..21: mol_type = other RNA
tcagggctgctgggggcaaga

SEQ ID NO: 88949 - RNA, 21 nt, synthetic construct
  source 1..21: mol_type = other RNA
ctgggggcaagatgtgctgga

SEQ ID NO: 88950 - RNA, 21 nt, synthetic construct
  source 1..21: mol_type = other RNA
ggggcaagatgtgctgggcaa

SEQ ID NO: 88951 - RNA, 21 nt, synthetic construct
  source 1..21: mol_type = other RNA
aagatgtgctgggcaccaaaa

SEQ ID NO: 88952 - RNA, 21 nt, synthetic construct
  source 1..21: mol_type = other RNA
gcaggttcaacatgtgcttca

SEQ ID NO: 88953 - RNA, 21 nt, synthetic construct
  source 1..21: mol_type = other RNA
gtgacgactacagccactgca

SEQ ID NO: 88954 - RNA, 21 nt, synthetic construct
  source 1..21: mol_type = other RNA
gctccacggccacgccctcca

SEQ ID NO: 88955 - RNA, 21 nt, synthetic construct
  source 1..21: mol_type = other RNA
accccctcctccagcccagga

SEQ ID NO: 88956 - RNA, 21 nt, synthetic construct
  source 1..21: mol_type = other RNA
tgctgcccagcagccccacaa

SEQ ID NO: 88957 - RNA, 21 nt, synthetic construct
  source 1..21: mol_type = other RNA
aggcccagcctggtgtcccca

SEQ ID NO: 88958 - RNA, 21 nt, synthetic construct
  source 1..21: mol_type = other RNA
gcccagcctggtgtcccccta

SEQ ID NO: 88959 - RNA, 21 nt, synthetic construct
  source 1..21: mol_type = other RNA
accccctcctccagcccagga

SEQ ID NO: 88960 - RNA, 21 nt, synthetic construct
  source 1..21: mol_type = other RNA
tgctgcccagcagccccacaa

SEQ ID NO: 88961 - RNA, 21 nt, synthetic construct
  source 1..21: mol_type = other RNA
aggcccagcctggtgtcccca

SEQ ID NO: 88962 - RNA, 21 nt, synthetic construct
  source 1..21: mol_type = other RNA
gcccagcctggtgtcccccta

SEQ ID NO: 88963 - RNA, 21 nt, synthetic construct
  source 1..21: mol_type = other RNA
gccctcctccactccagggaa

SEQ ID NO: 88964 - RNA, 21 nt, synthetic construct
  source 1..21: mol_type = other RNA
accccctcctccagcccagga

SEQ ID NO: 88965 - RNA, 21 nt, synthetic construct
  source 1..21: mol_type = other RNA
tgctgcccagcagccccacaa

SEQ ID NO: 88966 - RNA, 21 nt, synthetic construct
  source 1..21: mol_type = other RNA
aggcccagcctggtgtcccca

SEQ ID NO: 88967 - RNA, 21 nt, synthetic construct
  source 1..21: mol_type = other RNA
gcccagcctggtgtcccccta

SEQ ID NO: 88968 - RNA, 21 nt, synthetic construct
  source 1..21: mol_type = other RNA
accccctcctccagcccagga

SEQ ID NO: 88969 - RNA, 21 nt, synthetic construct
  source 1..21: mol_type = other RNA
tgctgcccagcagccccacaa

SEQ ID NO: 88970 - RNA, 21 nt, synthetic construct
  source 1..21: mol_type = other RNA
aggcccagcctggtgtcccca

SEQ ID NO: 88971 - RNA, 21 nt, synthetic construct
  source 1..21: mol_type = other RNA
gcccagcctggtgtcccccta

SEQ ID NO: 88972 - RNA, 21 nt, synthetic construct
  source 1..21: mol_type = other RNA
accccctcctccagcccagga

SEQ ID NO: 88973 - RNA, 21 nt, synthetic construct
  source 1..21: mol_type = other RNA
agtgctccccagcagcctgca

SEQ ID NO: 88974 - RNA, 21 nt, synthetic construct
  source 1..21: mol_type = other RNA
aaacttttgaaaacatcagga

SEQ ID NO: 88975 - RNA, 21 nt, synthetic construct
  source 1..21: mol_type = other RNA
atgtgctacaactacaggata

SEQ ID NO: 88976 - RNA, 21 nt, synthetic construct
  source 1..21: mol_type = other RNA
cctgcaggctccacagaacca

SEQ ID NO: 88977 - RNA, 21 nt, synthetic construct
  source 1..21: mol_type = other RNA
ccagcagccccacatcggcca

SEQ ID NO: 88978 - RNA, 21 nt, synthetic construct
  source 1..21: mol_type = other RNA
ccagcagccccacatcggcca

SEQ ID NO: 88979 - RNA, 21 nt, synthetic construct
  source 1..21: mol_type = other RNA
ccagcagccccacatcggcca

SEQ ID NO: 88980 - RNA, 21 nt, synthetic construct
  source 1..21: mol_type = other RNA
ccagcagccccacatcggcca

SEQ ID NO: 88981 - RNA, 21 nt, synthetic construct
  source 1..21: mol_type = other RNA
gctggactacagctaccccaa

SEQ ID NO: 88982 - RNA, 21 nt, synthetic construct
  source 1..21: mol_type = other RNA
gctggactacagctaccccaa

SEQ ID NO: 88983 - RNA, 21 nt, synthetic construct
  source 1..21: mol_type = other RNA
gctggactacagctaccccaa

SEQ ID NO: 88984 - RNA, 21 nt, synthetic construct
  source 1..21: mol_type = other RNA
gctggactacagctaccccaa

SEQ ID NO: 88985 - RNA, 21 nt, synthetic construct
  source 1..21: mol_type = other RNA
caaagtgctgaccaccacgga

SEQ ID NO: 88986 - RNA, 21 nt, synthetic construct
  source 1..21: mol_type = other RNA
ggagaactgcacggtggccaa

SEQ ID NO: 88987 - RNA, 21 nt, synthetic construct
  source 1..21: mol_type = other RNA
tggagagctacgagctgatca

SEQ ID NO: 88988 - RNA, 21 nt, synthetic construct
  source 1..21: mol_type = other RNA
cgctacatggggatcttccta

SEQ ID NO: 88989 - RNA, 21 nt, synthetic construct
  source 1..21: mol_type = other RNA
cacccgtcactgtcttcccca

SEQ ID NO: 88990 - RNA, 21 nt, synthetic construct
  source 1..21: mol_type = other RNA
aagcacctgcccatcaaagta

SEQ ID NO: 88991 - RNA, 21 nt, synthetic construct
  source 1..21: mol_type = other RNA
tggacggcggggacacggcca

SEQ ID NO: 88992 - RNA, 21 nt, synthetic construct
  source 1..21: mol_type = other RNA
ggcatccagtgcgctcacaga

SEQ ID NO: 88993 - RNA, 21 nt, synthetic construct
  source 1..21: mol_type = other RNA
tggctgcctgcccctcgggca

SEQ ID NO: 88994 - RNA, 21 nt, synthetic construct
  source 1..21: mol_type = other RNA
gatgtgctgggcaccaaagaa

SEQ ID NO: 88995 - RNA, 21 nt, synthetic construct
  source 1..21: mol_type = other RNA
tcagtgccagcacggagccta

SEQ ID NO: 88996 - RNA, 21 nt, synthetic construct
  source 1..21: mol_type = other RNA
gcgtgtccggctgtgtctgta

SEQ ID NO: 88997 - RNA, 21 nt, synthetic construct
  source 1..21: mol_type = other RNA
gcagtgccaggacctgccgta

SEQ ID NO: 88998 - RNA, 21 nt, synthetic construct
  source 1..21: mol_type = other RNA
gctcccaggttgactccacca

SEQ ID NO: 88999 - RNA, 21 nt, synthetic construct
  source 1..21: mol_type = other RNA
gctcacagccttgaggcctga

SEQ ID NO: 89000 - RNA, 21 nt, synthetic construct
  source 1..21: mol_type = other RNA
ccgcccaccagggccagatga

SEQ ID NO: 89001 - RNA, 21 nt, synthetic construct
  source 1..21: mol_type = other RNA
ggctgcctgcccctcgggcaa

SEQ ID NO: 89002 - RNA, 21 nt, synthetic construct
  source 1..21: mol_type = other RNA
ctggctgcctgcccctcggga

SEQ ID NO: 89003 - RNA, 21 nt, synthetic construct
  source 1..21: mol_type = other RNA
cgggcacccctggggccgaga

SEQ ID NO: 89004 - RNA, 21 nt, synthetic construct
  source 1..21: mol_type = other RNA
gctcccacttctctactccca

SEQ ID NO: 89005 - RNA, 21 nt, synthetic construct
  source 1..21: mol_type = other RNA
acgaggagacggtgcccttga

SEQ ID NO: 89006 - RNA, 21 nt, synthetic construct
  source 1..21: mol_type = other RNA
ctgccctacagcctcttccaa

SEQ ID NO: 89007 - RNA, 21 nt, synthetic construct
  source 1..21: mol_type = other RNA
ccagtgcgctcacagccttga

SEQ ID NO: 89008 - RNA, 21 nt, synthetic construct
  source 1..21: mol_type = other RNA
caccctgctggggccggccta

SEQ ID NO: 89009 - RNA, 21 nt, synthetic construct
  source 1..21: mol_type = other RNA
tcccctgtgggaccaccggca

SEQ ID NO: 89010 - RNA, 21 nt, synthetic construct
  source 1..21: mol_type = other RNA
aaacctgccggaaccccagta

SEQ ID NO: 89011 - RNA, 21 nt, synthetic construct
  source 1..21: mol_type = other RNA
gcccctggctgtgacaatgca

SEQ ID NO: 89012 - RNA, 21 nt, synthetic construct
  source 1..21: mol_type = other RNA
cctgcagaagttggatgggca

SEQ ID NO: 89013 - RNA, 21 nt, synthetic construct
  source 1..21: mol_type = other RNA
actccatctacacgcagctga

SEQ ID NO: 89014 - RNA, 21 nt, synthetic construct
  source 1..21: mol_type = other RNA
gctggacgtgggctgtttcaa

SEQ ID NO: 89015 - RNA, 21 nt, synthetic construct
  source 1..21: mol_type = other RNA
atgtgctgggcaccaaagaga

SEQ ID NO: 89016 - RNA, 21 nt, synthetic construct
  source 1..21: mol_type = other RNA
acctccaggaccacggccaca

SEQ ID NO: 89017 - RNA, 21 nt, synthetic construct
  source 1..21: mol_type = other RNA
acctccaggaccacggccaca

SEQ ID NO: 89018 - RNA, 21 nt, synthetic construct
  source 1..21: mol_type = other RNA
ctgaccccacagcctgcatca

SEQ ID NO: 89019 - RNA, 21 nt, synthetic construct
  source 1..21: mol_type = other RNA
cagcagccccacatcggccca

SEQ ID NO: 89020 - RNA, 21 nt, synthetic construct
  source 1..21: mol_type = other RNA
ccccctgcgggagttgggcca

SEQ ID NO: 89021 - RNA, 21 nt, synthetic construct
  source 1..21: mol_type = other RNA
cagcagccccacatcggccca

SEQ ID NO: 89022 - RNA, 21 nt, synthetic construct
  source 1..21: mol_type = other RNA
ccccctgcgggagttgggcca

SEQ ID NO: 89023 - RNA, 21 nt, synthetic construct
  source 1..21: mol_type = other RNA
cagcagccccacatcggccca

SEQ ID NO: 89024 - RNA, 21 nt, synthetic construct
  source 1..21: mol_type = other RNA
ccccctgcgggagttgggcca

SEQ ID NO: 89025 - RNA, 21 nt, synthetic construct
  source 1..21: mol_type = other RNA
cagcagccccacatcggccca

SEQ ID NO: 89026 - RNA, 21 nt, synthetic construct
  source 1..21: mol_type = other RNA
acccctggggccgagtgccta

SEQ ID NO: 89027 - RNA, 21 nt, synthetic construct
  source 1..21: mol_type = other RNA
gtgctgacaagcacagccaca

SEQ ID NO: 89028 - RNA, 21 nt, synthetic construct
  source 1..21: mol_type = other RNA
gtgctgacaagcacagccaca

SEQ ID NO: 89029 - RNA, 21 nt, synthetic construct
  source 1..21: mol_type = other RNA
caccctgcctaaaaacctgca

SEQ ID NO: 89030 - RNA, 21 nt, synthetic construct
  source 1..21: mol_type = other RNA
ctcacagccttgaggcctgca

SEQ ID NO: 89031 - RNA, 21 nt, synthetic construct
  source 1..21: mol_type = other RNA
atgccctcctccactccggga

SEQ ID NO: 89032 - RNA, 21 nt, synthetic construct
  source 1..21: mol_type = other RNA
atgccctcctccactccggga

SEQ ID NO: 89033 - RNA, 21 nt, synthetic construct
  source 1..21: mol_type = other RNA
tatggcaacaccctcctctaa

SEQ ID NO: 89034 - RNA, 21 nt, synthetic construct
  source 1..21: mol_type = other RNA
tatggcaacaccctcctctaa

SEQ ID NO: 89035 - RNA, 21 nt, synthetic construct
  source 1..21: mol_type = other RNA
tatggcaacaccctcctctaa

SEQ ID NO: 89036 - RNA, 21 nt, synthetic construct
  source 1..21: mol_type = other RNA
tatggcaacaccctcctctaa

SEQ ID NO: 89037 - RNA, 21 nt, synthetic construct
  source 1..21: mol_type = other RNA
tatggcaacaccctcctctaa

SEQ ID NO: 89038 - RNA, 21 nt, synthetic construct
  source 1..21: mol_type = other RNA
ccagcaggtggactgtgacca

SEQ ID NO: 89039 - RNA, 21 nt, synthetic construct
  source 1..21: mol_type = other RNA
ctccagtttgggaacctgcaa

SEQ ID NO: 89040 - RNA, 21 nt, synthetic construct
  source 1..21: mol_type = other RNA
tctggctgcctgcccctcgga

SEQ ID NO: 89041 - RNA, 21 nt, synthetic construct
  source 1..21: mol_type = other RNA
tctctggggacacccaggaca

SEQ ID NO: 89042 - RNA, 21 nt, synthetic construct
  source 1..21: mol_type = other RNA
tgaccaccacggccaccacaa

SEQ ID NO: 89043 - RNA, 21 nt, synthetic construct
  source 1..21: mol_type = other RNA
cctggacggcggggacacgga

SEQ ID NO: 89044 - RNA, 21 nt, synthetic construct
  source 1..21: mol_type = other RNA
gggacggcgtctgcaccaaga

SEQ ID NO: 89045 - RNA, 21 nt, synthetic construct
  source 1..21: mol_type = other RNA
gggcagtgcccctgcacccaa

SEQ ID NO: 89046 - RNA, 21 nt, synthetic construct
  source 1..21: mol_type = other RNA
cagctgcccctgtcggcagca

SEQ ID NO: 89047 - RNA, 21 nt, synthetic construct
  source 1..21: mol_type = other RNA
gggagtgcagccaccggctca

SEQ ID NO: 89048 - RNA, 21 nt, synthetic construct
  source 1..21: mol_type = other RNA
ccgtgtcctgggaccggaaga

SEQ ID NO: 89049 - RNA, 21 nt, synthetic construct
  source 1..21: mol_type = other RNA
gtgctgaccaccacggccaca

SEQ ID NO: 89050 - RNA, 21 nt, synthetic construct
  source 1..21: mol_type = other RNA
gagcagcggtttcagcaagaa

SEQ ID NO: 89051 - RNA, 21 nt, synthetic construct
  source 1..21: mol_type = other RNA
gaacggagaggacagtgccca

SEQ ID NO: 89052 - RNA, 21 nt, synthetic construct
  source 1..21: mol_type = other RNA
cagcaccccggccaccagcta

SEQ ID NO: 89053 - RNA, 21 nt, synthetic construct
  source 1..21: mol_type = other RNA
cagcaccccggccaccagcta

SEQ ID NO: 89054 - RNA, 21 nt, synthetic construct
  source 1..21: mol_type = other RNA
cagcaccccggccaccagcta

SEQ ID NO: 89055 - RNA, 21 nt, synthetic construct
  source 1..21: mol_type = other RNA
cagcaccccggccaccagcta

SEQ ID NO: 89056 - RNA, 21 nt, synthetic construct
  source 1..21: mol_type = other RNA
cagctgcagggggagcctcaa

SEQ ID NO: 89057 - RNA, 21 nt, synthetic construct
  source 1..21: mol_type = other RNA
acagcagtccccaccctctca

SEQ ID NO: 89058 - RNA, 21 nt, synthetic construct
  source 1..21: mol_type = other RNA
cctggaccctggagaactgca

SEQ ID NO: 89059 - RNA, 21 nt, synthetic construct
  source 1..21: mol_type = other RNA
cggagaggacagtgccctgca

SEQ ID NO: 89060 - RNA, 21 nt, synthetic construct
  source 1..21: mol_type = other RNA
acctgctccaacccccagcga

SEQ ID NO: 89061 - RNA, 21 nt, synthetic construct
  source 1..21: mol_type = other RNA
tggacggctgcttctgcccca

SEQ ID NO: 89062 - RNA, 21 nt, synthetic construct
  source 1..21: mol_type = other RNA
tggcagtgccaggacctgcca

SEQ ID NO: 89063 - RNA, 21 nt, synthetic construct
  source 1..21: mol_type = other RNA
cagctgctggtgcagctggta

SEQ ID NO: 89064 - RNA, 21 nt, synthetic construct
  source 1..21: mol_type = other RNA
gagtgcagccaccggctctga

SEQ ID NO: 89065 - RNA, 21 nt, synthetic construct
  source 1..21: mol_type = other RNA
aaacctgaggcagagagggta

SEQ ID NO: 89066 - RNA, 21 nt, synthetic construct
  source 1..21: mol_type = other RNA
tggagacggccaccaccacca

SEQ ID NO: 89067 - RNA, 21 nt, synthetic construct
  source 1..21: mol_type = other RNA
cagcaccacagcagtccccaa

SEQ ID NO: 89068 - RNA, 21 nt, synthetic construct
  source 1..21: mol_type = other RNA
acgccctcctccactccagga

SEQ ID NO: 89069 - RNA, 21 nt, synthetic construct
  source 1..21: mol_type = other RNA
gcagtgctccccagcagccta

SEQ ID NO: 89070 - RNA, 21 nt, synthetic construct
  source 1..21: mol_type = other RNA
ggaccctggagaactgcacga

SEQ ID NO: 89071 - RNA, 21 nt, synthetic construct
  source 1..21: mol_type = other RNA
gtgccctgccagagcctggaa

SEQ ID NO: 89072 - RNA, 21 nt, synthetic construct
  source 1..21: mol_type = other RNA
ttgctgaccccacagcctgca

SEQ ID NO: 89073 - RNA, 21 nt, synthetic construct
  source 1..21: mol_type = other RNA
ccagtgcacctgctgccagga

SEQ ID NO: 89074 - RNA, 21 nt, synthetic construct
  source 1..21: mol_type = other RNA
cctgcagctcctgcacctgca

SEQ ID NO: 89075 - RNA, 21 nt, synthetic construct
  source 1..21: mol_type = other RNA
tgcagctgctggtgcagctga

SEQ ID NO: 89076 - RNA, 21 nt, synthetic construct
  source 1..21: mol_type = other RNA
cccgcccaccagggccagata

SEQ ID NO: 89077 - RNA, 21 nt, synthetic construct
  source 1..21: mol_type = other RNA
aaccggaggtgggagtgcaga

SEQ ID NO: 89078 - RNA, 21 nt, synthetic construct
  source 1..21: mol_type = other RNA
aatgaggaccagatgaagtga

SEQ ID NO: 89079 - RNA, 21 nt, synthetic construct
  source 1..21: mol_type = other RNA
tgaggcctgcacctgcaccta

SEQ ID NO: 89080 - RNA, 21 nt, synthetic construct
  source 1..21: mol_type = other RNA
cccaggtaccaccacctgcca

SEQ ID NO: 89081 - RNA, 21 nt, synthetic construct
  source 1..21: mol_type = other RNA
gaccaccacggccaccacaca

SEQ ID NO: 89082 - RNA, 21 nt, synthetic construct
  source 1..21: mol_type = other RNA
accacggccacctccaggaca

SEQ ID NO: 89083 - RNA, 21 nt, synthetic construct
  source 1..21: mol_type = other RNA
accacggccacctccaggaca

SEQ ID NO: 89084 - RNA, 21 nt, synthetic construct
  source 1..21: mol_type = other RNA
actgtgtcctcctcagtccta

SEQ ID NO: 89085 - RNA, 21 nt, synthetic construct
  source 1..21: mol_type = other RNA
tttgctgaccccacagcctga

SEQ ID NO: 89086 - RNA, 21 nt, synthetic construct
  source 1..21: mol_type = other RNA
gctgcagggggagcctcagga

SEQ ID NO: 89087 - RNA, 21 nt, synthetic construct
  source 1..21: mol_type = other RNA
ctgcagggggagcctcaggaa

SEQ ID NO: 89088 - RNA, 21 nt, synthetic construct
  source 1..21: mol_type = other RNA
ctgcagctcctgcacctgcta

SEQ ID NO: 89089 - RNA, 21 nt, synthetic construct
  source 1..21: mol_type = other RNA
agggtctgcggcctgtgcgga

SEQ ID NO: 89090 - RNA, 21 nt, synthetic construct
  source 1..21: mol_type = other RNA
gatgtgcggcctgtgtgggaa

SEQ ID NO: 89091 - RNA, 21 nt, synthetic construct
  source 1..21: mol_type = other RNA
ccagtgcggcacctgcaccaa

SEQ ID NO: 89092 - RNA, 21 nt, synthetic construct
  source 1..21: mol_type = other RNA
ctgtgcgggaacttcgacgaa

SEQ ID NO: 89093 - RNA, 21 nt, synthetic construct
  source 1..21: mol_type = other RNA
acagtgccctgctggagctga

SEQ ID NO: 89094 - RNA, 21 nt, synthetic construct
  source 1..21: mol_type = other RNA
gacgacctggatcctcacaga

SEQ ID NO: 89095 - RNA, 21 nt, synthetic construct
  source 1..21: mol_type = other RNA
gacgacctggatcctcacaga

SEQ ID NO: 89096 - RNA, 21 nt, synthetic construct
  source 1..21: mol_type = other RNA
gacgacctggatcctcacaga

SEQ ID NO: 89097 - RNA, 21 nt, synthetic construct
  source 1..21: mol_type = other RNA
gacgacctggatcctcacaga

SEQ ID NO: 89098 - RNA, 21 nt, synthetic construct
  source 1..21: mol_type = other RNA
gacgacctggatcctcacaga

SEQ ID NO: 89099 - RNA, 21 nt, synthetic construct
  source 1..21: mol_type = other RNA
ggacgacctggatcctcacaa

SEQ ID NO: 89100 - RNA, 21 nt, synthetic construct
  source 1..21: mol_type = other RNA
ggacgacctggatcctcacaa

SEQ ID NO: 89101 - RNA, 21 nt, synthetic construct
  source 1..21: mol_type = other RNA
ggacgacctggatcctcacaa

SEQ ID NO: 89102 - RNA, 21 nt, synthetic construct
  source 1..21: mol_type = other RNA
ggacgacctggatcctcacaa

SEQ ID NO: 89103 - RNA, 21 nt, synthetic construct
  source 1..21: mol_type = other RNA
ggacgacctggatcctcacaa

SEQ ID NO: 89104 - RNA, 21 nt, synthetic construct
  source 1..21: mol_type = other RNA
caggtgctgacctgcagccta

SEQ ID NO: 89105 - RNA, 21 nt, synthetic construct
  source 1..21: mol_type = other RNA
acgacctggatcctcacagaa

SEQ ID NO: 89106 - RNA, 21 nt, synthetic construct
  source 1..21: mol_type = other RNA
acgacctggatcctcacagaa

SEQ ID NO: 89107 - RNA, 21 nt, synthetic construct
  source 1..21: mol_type = other RNA
acgacctggatcctcacagaa

SEQ ID NO: 89108 - RNA, 21 nt, synthetic construct
  source 1..21: mol_type = other RNA
acgacctggatcctcacagaa

SEQ ID NO: 89109 - RNA, 21 nt, synthetic construct
  source 1..21: mol_type = other RNA
acgacctggatcctcacagaa

SEQ ID NO: 89110 - RNA, 21 nt, synthetic construct
  source 1..21: mol_type = other RNA
cctggatcctcacagagccga

SEQ ID NO: 89111 - RNA, 21 nt, synthetic construct
  source 1..21: mol_type = other RNA
cctggatcctcacagagccga

SEQ ID NO: 89112 - RNA, 21 nt, synthetic construct
  source 1..21: mol_type = other RNA
cctggatcctcacagagccga

SEQ ID NO: 89113 - RNA, 21 nt, synthetic construct
  source 1..21: mol_type = other RNA
cctggatcctcacagagccga

SEQ ID NO: 89114 - RNA, 21 nt, synthetic construct
  source 1..21: mol_type = other RNA
cagcccagttttgcaaataaa

SEQ ID NO: 89115 - RNA, 21 nt, synthetic construct
  source 1..21: mol_type = other RNA
tgacctgcagcctggagacga

SEQ ID NO: 89116 - RNA, 21 nt, synthetic construct
  source 1..21: mol_type = other RNA
catcccaaagccccctctgca

SEQ ID NO: 89117 - RNA, 21 nt, synthetic construct
  source 1..21: mol_type = other RNA
tgcagcctggagacggggcta

SEQ ID NO: 89118 - RNA, 21 nt, synthetic construct
  source 1..21: mol_type = other RNA
cctggatcctcacagagccca

SEQ ID NO: 89119 - RNA, 21 nt, synthetic construct
  source 1..21: mol_type = other RNA
aggcagagacccagggcccta

SEQ ID NO: 89120 - RNA, 21 nt, synthetic construct
  source 1..21: mol_type = other RNA
ggcaggtgctgacctgcagca

SEQ ID NO: 89121 - RNA, 21 nt, synthetic construct
  source 1..21: mol_type = other RNA
ggtgctgacctgcagcctgga

SEQ ID NO: 89122 - RNA, 21 nt, synthetic construct
  source 1..21: mol_type = other RNA
tgctgacctgcagcctggaga

SEQ ID NO: 89123 - RNA, 21 nt, synthetic construct
  source 1..21: mol_type = other RNA
gacctgcagcctggagacgga

SEQ ID NO: 89124 - RNA, 21 nt, synthetic construct
  source 1..21: mol_type = other RNA
gcagcctggagacggggctga

SEQ ID NO: 89125 - RNA, 21 nt, synthetic construct
  source 1..21: mol_type = other RNA
gatcctcacagagctgaccaa

SEQ ID NO: 89126 - RNA, 21 nt, synthetic construct
  source 1..21: mol_type = other RNA
gatcctcacagagctgaccaa

SEQ ID NO: 89127 - RNA, 21 nt, synthetic construct
  source 1..21: mol_type = other RNA
gatcctcacagagctgaccaa

SEQ ID NO: 89128 - RNA, 21 nt, synthetic construct
  source 1..21: mol_type = other RNA
gatcctcacagagctgaccaa

SEQ ID NO: 89129 - RNA, 21 nt, synthetic construct
  source 1..21: mol_type = other RNA
gatcctcacagagctgaccaa

SEQ ID NO: 89130 - RNA, 21 nt, synthetic construct
  source 1..21: mol_type = other RNA
tccacggccacaccctcctca

SEQ ID NO: 89131 - RNA, 21 nt, synthetic construct
  source 1..21: mol_type = other RNA
tcacctgcccacccaccaaaa

SEQ ID NO: 89132 - RNA, 21 nt, synthetic construct
  source 1..21: mol_type = other RNA
gctcaacccagcccagtttta

SEQ ID NO: 89133 - RNA, 21 nt, synthetic construct
  source 1..21: mol_type = other RNA
agcccagttttgcaaataaaa

SEQ ID NO: 89134 - RNA, 21 nt, synthetic construct
  source 1..21: mol_type = other RNA
gcaggtgctgacctgcagcca

SEQ ID NO: 89135 - RNA, 21 nt, synthetic construct
  source 1..21: mol_type = other RNA
gctgacctgcagcctggagaa

SEQ ID NO: 89136 - RNA, 21 nt, synthetic construct
  source 1..21: mol_type = other RNA
cctccatccccatgctctgta

SEQ ID NO: 89137 - RNA, 21 nt, synthetic construct
  source 1..21: mol_type = other RNA
cgctggtgttggctctggcga

SEQ ID NO: 89138 - RNA, 21 nt, synthetic construct
  source 1..21: mol_type = other RNA
gcgtgtccactgtgtcctcca

SEQ ID NO: 89139 - RNA, 21 nt, synthetic construct
  source 1..21: mol_type = other RNA
cctgcagcctggagacgggga

SEQ ID NO: 89140 - RNA, 21 nt, synthetic construct
  source 1..21: mol_type = other RNA
gagctgccacacgctggacga

SEQ ID NO: 89141 - RNA, 21 nt, synthetic construct
  source 1..21: mol_type = other RNA
gggagagcctgtggcccacca

SEQ ID NO: 89142 - RNA, 21 nt, synthetic construct
  source 1..21: mol_type = other RNA
ctgctcaacccagcccagtta

SEQ ID NO: 89143 - RNA, 21 nt, synthetic construct
  source 1..21: mol_type = other RNA
tcgggcaggtgctgacctgca

SEQ ID NO: 89144 - RNA, 21 nt, synthetic construct
  source 1..21: mol_type = other RNA
gcagtgcaagcccctgcccta

SEQ ID NO: 89145 - RNA, 21 nt, synthetic construct
  source 1..21: mol_type = other RNA
gggtgaggggccagcaggaca

SEQ ID NO: 89146 - RNA, 21 nt, synthetic construct
  source 1..21: mol_type = other RNA
atgtgcttcaactatgaaata

SEQ ID NO: 89147 - RNA, 21 nt, synthetic construct
  source 1..21: mol_type = other RNA
atgtgcttcaactatgaaata

SEQ ID NO: 89148 - RNA, 21 nt, synthetic construct
  source 1..21: mol_type = other RNA
atgtgcttcaactatgaaata

SEQ ID NO: 89149 - RNA, 21 nt, synthetic construct
  source 1..21: mol_type = other RNA
atgtgcttcaactatgaaata

SEQ ID NO: 89150 - RNA, 21 nt, synthetic construct
  source 1..21: mol_type = other RNA
cagtgcaagcccctgccctga

SEQ ID NO: 89151 - RNA, 21 nt, synthetic construct
  source 1..21: mol_type = other RNA
tgaggggccagcaggacccca

SEQ ID NO: 89152 - RNA, 21 nt, synthetic construct
  source 1..21: mol_type = other RNA
gtggcccaccttggccttgca

SEQ ID NO: 89153 - RNA, 21 nt, synthetic construct
  source 1..21: mol_type = other RNA
cgggcaggtgctgacctgcaa

SEQ ID NO: 89154 - RNA, 21 nt, synthetic construct
  source 1..21: mol_type = other RNA
gtgctgacctgcagcctggaa

SEQ ID NO: 89155 - RNA, 21 nt, synthetic construct
  source 1..21: mol_type = other RNA
cggccatgccctcctccacta

SEQ ID NO: 89156 - RNA, 21 nt, synthetic construct
  source 1..21: mol_type = other RNA
cggccatgccctcctccacta

SEQ ID NO: 89157 - RNA, 21 nt, synthetic construct
  source 1..21: mol_type = other RNA
ctgacctgcagcctggagaca

SEQ ID NO: 89158 - RNA, 21 nt, synthetic construct
  source 1..21: mol_type = other RNA
ccacagcggagaactgccaga

SEQ ID NO: 89159 - RNA, 21 nt, synthetic construct
  source 1..21: mol_type = other RNA
cacagcggagaactgccagaa

SEQ ID NO: 89160 - RNA, 21 nt, synthetic construct
  source 1..21: mol_type = other RNA
cactgccccagcaccccggca

SEQ ID NO: 89161 - RNA, 21 nt, synthetic construct
  source 1..21: mol_type = other RNA
cactgccccagcaccccggca

SEQ ID NO: 89162 - RNA, 21 nt, synthetic construct
  source 1..21: mol_type = other RNA
cactgccccagcaccccggca

SEQ ID NO: 89163 - RNA, 21 nt, synthetic construct
  source 1..21: mol_type = other RNA
cactgccccagcaccccggca

SEQ ID NO: 89164 - RNA, 21 nt, synthetic construct
  source 1..21: mol_type = other RNA
ctgctccctcagtgtggagaa

SEQ ID NO: 89165 - RNA, 21 nt, synthetic construct
  source 1..21: mol_type = other RNA
ttaccaccacggccaccacaa

SEQ ID NO: 89166 - RNA, 21 nt, synthetic construct
  source 1..21: mol_type = other RNA
ttaccaccacggccaccacaa

SEQ ID NO: 89167 - RNA, 21 nt, synthetic construct
  source 1..21: mol_type = other RNA
ccctcctccactccagagaca

SEQ ID NO: 89168 - RNA, 21 nt, synthetic construct
  source 1..21: mol_type = other RNA
ccctcctccactccagagaca

SEQ ID NO: 89169 - RNA, 21 nt, synthetic construct
  source 1..21: mol_type = other RNA
ccctcctccactccagagaca

SEQ ID NO: 89170 - RNA, 21 nt, synthetic construct
  source 1..21: mol_type = other RNA
ccctcctccactccagagaca

SEQ ID NO: 89171 - RNA, 21 nt, synthetic construct
  source 1..21: mol_type = other RNA
tacagccatcccctcttccta

SEQ ID NO: 89172 - RNA, 21 nt, synthetic construct
  source 1..21: mol_type = other RNA
acagtgcttaccaccacggca

SEQ ID NO: 89173 - RNA, 21 nt, synthetic construct
  source 1..21: mol_type = other RNA
acagtgcttaccaccacggca

SEQ ID NO: 89174 - RNA, 21 nt, synthetic construct
  source 1..21: mol_type = other RNA
gcccctgcacccacggcggca

SEQ ID NO: 89175 - RNA, 21 nt, synthetic construct
  source 1..21: mol_type = other RNA
gcagtgctgtggggagtgcga

SEQ ID NO: 89176 - RNA, 21 nt, synthetic construct
  source 1..21: mol_type = other RNA
cccctgctccctcagtgtgga

SEQ ID NO: 89177 - RNA, 21 nt, synthetic construct
  source 1..21: mol_type = other RNA
gcccctgggcctcgagtgcca

SEQ ID NO: 89178 - RNA, 21 nt, synthetic construct
  source 1..21: mol_type = other RNA
gcccctgggcctcgagtgcca

SEQ ID NO: 89179 - RNA, 21 nt, synthetic construct
  source 1..21: mol_type = other RNA
gcccctgggcctcgagtgcca

SEQ ID NO: 89180 - RNA, 21 nt, synthetic construct
  source 1..21: mol_type = other RNA
gcccctgggcctcgagtgcca

SEQ ID NO: 89181 - RNA, 21 nt, synthetic construct
  source 1..21: mol_type = other RNA
ccctgctccctcagtgtggaa

SEQ ID NO: 89182 - RNA, 21 nt, synthetic construct
  source 1..21: mol_type = other RNA
gccctgagctctgcccccgga

SEQ ID NO: 89183 - RNA, 21 nt, synthetic construct
  source 1..21: mol_type = other RNA
acccctgctccctcagtgtga

SEQ ID NO: 89184 - RNA, 21 nt, synthetic construct
  source 1..21: mol_type = other RNA
gagcagcccctgggcctcgaa

SEQ ID NO: 89185 - RNA, 21 nt, synthetic construct
  source 1..21: mol_type = other RNA
gagcagcccctgggcctcgaa

SEQ ID NO: 89186 - RNA, 21 nt, synthetic construct
  source 1..21: mol_type = other RNA
gagcagcccctgggcctcgaa

SEQ ID NO: 89187 - RNA, 21 nt, synthetic construct
  source 1..21: mol_type = other RNA
gagcagcccctgggcctcgaa

SEQ ID NO: 89188 - RNA, 21 nt, synthetic construct
  source 1..21: mol_type = other RNA
acccctgcagtgctccccaga

SEQ ID NO: 89189 - RNA, 21 nt, synthetic construct
  source 1..21: mol_type = other RNA
cctgcagtgctccccagcaga

SEQ ID NO: 89190 - RNA, 21 nt, synthetic construct
  source 1..21: mol_type = other RNA
gggcagtgctgtggggagtga

SEQ ID NO: 89191 - RNA, 21 nt, synthetic construct
  source 1..21: mol_type = other RNA
tcctccagtccagggactgca

SEQ ID NO: 89192 - RNA, 21 nt, synthetic construct
  source 1..21: mol_type = other RNA
taccaccacggccaccacaaa

SEQ ID NO: 89193 - RNA, 21 nt, synthetic construct
  source 1..21: mol_type = other RNA
tcctccagtccagggactgca

SEQ ID NO: 89194 - RNA, 21 nt, synthetic construct
  source 1..21: mol_type = other RNA
taccaccacggccaccacaaa

SEQ ID NO: 89195 - RNA, 21 nt, synthetic construct
  source 1..21: mol_type = other RNA
tcctccagtccagggactgca

SEQ ID NO: 89196 - RNA, 21 nt, synthetic construct
  source 1..21: mol_type = other RNA
cagcacagaccaccacaccca

SEQ ID NO: 89197 - RNA, 21 nt, synthetic construct
  source 1..21: mol_type = other RNA
ccgaggtaagcatcgaccaga

SEQ ID NO: 89198 - RNA, 21 nt, synthetic construct
  source 1..21: mol_type = other RNA
atcgaccaggtcgggcaggta

SEQ ID NO: 89199 - RNA, 21 nt, synthetic construct
  source 1..21: mol_type = other RNA
cactacgactgcatccactga

SEQ ID NO: 89200 - RNA, 21 nt, synthetic construct
  source 1..21: mol_type = other RNA
acaacagccactacgactgca

SEQ ID NO: 89201 - RNA, 21 nt, synthetic construct
  source 1..21: mol_type = other RNA
acaacagccactacgactgca

SEQ ID NO: 89202 - RNA, 21 nt, synthetic construct
  source 1..21: mol_type = other RNA
acaacagccactacgactgca

SEQ ID NO: 89203 - RNA, 21 nt, synthetic construct
  source 1..21: mol_type = other RNA
tgcaagaacgaagaccagaca

SEQ ID NO: 89204 - RNA, 21 nt, synthetic construct
  source 1..21: mol_type = other RNA
ggggttgcaggcggggacata

SEQ ID NO: 89205 - RNA, 21 nt, synthetic construct
  source 1..21: mol_type = other RNA
ggccacgccctcctcaactca

SEQ ID NO: 89206 - RNA, 21 nt, synthetic construct
  source 1..21: mol_type = other RNA
gatcctcacaaagccgaccaa

SEQ ID NO: 89207 - RNA, 21 nt, synthetic construct
  source 1..21: mol_type = other RNA
ggccacgccctcctcaactca

SEQ ID NO: 89208 - RNA, 21 nt, synthetic construct
  source 1..21: mol_type = other RNA
cggccacgccctcctcaacta

SEQ ID NO: 89209 - RNA, 21 nt, synthetic construct
  source 1..21: mol_type = other RNA
atcctcacaaagccgaccaca

SEQ ID NO: 89210 - RNA, 21 nt, synthetic construct
  source 1..21: mol_type = other RNA
cggccacgccctcctcaacta

SEQ ID NO: 89211 - RNA, 21 nt, synthetic construct
  source 1..21: mol_type = other RNA
accaccctatgggtgacccca

SEQ ID NO: 89212 - RNA, 21 nt, synthetic construct
  source 1..21: mol_type = other RNA
ccctcacctcgcagactggga

SEQ ID NO: 89213 - RNA, 21 nt, synthetic construct
  source 1..21: mol_type = other RNA
gggttgcaggcggggacatga

SEQ ID NO: 89214 - RNA, 21 nt, synthetic construct
  source 1..21: mol_type = other RNA
gcgtgtgctttgctgtgacga

SEQ ID NO: 89215 - RNA, 21 nt, synthetic construct
  source 1..21: mol_type = other RNA
gacttcccaacctcaggggta

SEQ ID NO: 89216 - RNA, 21 nt, synthetic construct
  source 1..21: mol_type = other RNA
ggttgcaggcggggacatgga

SEQ ID NO: 89217 - RNA, 21 nt, synthetic construct
  source 1..21: mol_type = other RNA
ctgcaagaacgaagaccagaa

SEQ ID NO: 89218 - RNA, 21 nt, synthetic construct
  source 1..21: mol_type = other RNA
aagaccagacaggcaggttca

SEQ ID NO: 89219 - RNA, 21 nt, synthetic construct
  source 1..21: mol_type = other RNA
acatgtgcttcaactacaaca

SEQ ID NO: 89220 - RNA, 21 nt, synthetic construct
  source 1..21: mol_type = other RNA
tgtgcttcaactacaacgtga

SEQ ID NO: 89221 - RNA, 21 nt, synthetic construct
  source 1..21: mol_type = other RNA
gctttgctgtgacgactacaa

SEQ ID NO: 89222 - RNA, 21 nt, synthetic construct
  source 1..21: mol_type = other RNA
tttgctgtgacgactacagca

SEQ ID NO: 89223 - RNA, 21 nt, synthetic construct
  source 1..21: mol_type = other RNA
aactccggggacgacctggaa

SEQ ID NO: 89224 - RNA, 21 nt, synthetic construct
  source 1..21: mol_type = other RNA
gacctggatcctcacaaagca

SEQ ID NO: 89225 - RNA, 21 nt, synthetic construct
  source 1..21: mol_type = other RNA
acgactgcgtccactggatca

SEQ ID NO: 89226 - RNA, 21 nt, synthetic construct
  source 1..21: mol_type = other RNA
cactccggggacgacctggaa

SEQ ID NO: 89227 - RNA, 21 nt, synthetic construct
  source 1..21: mol_type = other RNA
cactccggggacgacctggaa

SEQ ID NO: 89228 - RNA, 21 nt, synthetic construct
  source 1..21: mol_type = other RNA
gccactacgatcacagccaca

SEQ ID NO: 89229 - RNA, 21 nt, synthetic construct
  source 1..21: mol_type = other RNA
aactccggggacgacctggaa

SEQ ID NO: 89230 - RNA, 21 nt, synthetic construct
  source 1..21: mol_type = other RNA
gacctggatcctcacaaagca

SEQ ID NO: 89231 - RNA, 21 nt, synthetic construct
  source 1..21: mol_type = other RNA
cactccggggacgacctggaa

SEQ ID NO: 89232 - RNA, 21 nt, synthetic construct
  source 1..21: mol_type = other RNA
ccactacgactgcatccacta

SEQ ID NO: 89233 - RNA, 21 nt, synthetic construct
  source 1..21: mol_type = other RNA
actacgactgcatccactgga

SEQ ID NO: 89234 - RNA, 21 nt, synthetic construct
  source 1..21: mol_type = other RNA
cactccggggacgacctggaa

SEQ ID NO: 89235 - RNA, 21 nt, synthetic construct
  source 1..21: mol_type = other RNA
acgactgcgtccactggatca

SEQ ID NO: 89236 - RNA, 21 nt, synthetic construct
  source 1..21: mol_type = other RNA
gcactcgactccagcccttta

SEQ ID NO: 89237 - RNA, 21 nt, synthetic construct
  source 1..21: mol_type = other RNA
cagtaccccagccaccagcta

SEQ ID NO: 89238 - RNA, 21 nt, synthetic construct
  source 1..21: mol_type = other RNA
cccaacctcaggggttgcaga

SEQ ID NO: 89239 - RNA, 21 nt, synthetic construct
  source 1..21: mol_type = other RNA
aacgaagaccagacaggcaga

SEQ ID NO: 89240 - RNA, 21 nt, synthetic construct
  source 1..21: mol_type = other RNA
tccggggacgacctggatcca

SEQ ID NO: 89241 - RNA, 21 nt, synthetic construct
  source 1..21: mol_type = other RNA
tccggggacgacctggatcca

SEQ ID NO: 89242 - RNA, 21 nt, synthetic construct
  source 1..21: mol_type = other RNA
ctggatcctcacagagctgaa

SEQ ID NO: 89243 - RNA, 21 nt, synthetic construct
  source 1..21: mol_type = other RNA
cacagagctgaccacaacaga

SEQ ID NO: 89244 - RNA, 21 nt, synthetic construct
  source 1..21: mol_type = other RNA
tccggggacgacctggatcca

SEQ ID NO: 89245 - RNA, 21 nt, synthetic construct
  source 1..21: mol_type = other RNA
ctggatcctcacagagctgaa

SEQ ID NO: 89246 - RNA, 21 nt, synthetic construct
  source 1..21: mol_type = other RNA
tccggggacgacctggatcca

SEQ ID NO: 89247 - RNA, 21 nt, synthetic construct
  source 1..21: mol_type = other RNA
tccggggacgacctggatcca

SEQ ID NO: 89248 - RNA, 21 nt, synthetic construct
  source 1..21: mol_type = other RNA
ctggatcctcacagagctgaa

SEQ ID NO: 89249 - RNA, 21 nt, synthetic construct
  source 1..21: mol_type = other RNA
cacagagctgaccacaacaga

SEQ ID NO: 89250 - RNA, 21 nt, synthetic construct
  source 1..21: mol_type = other RNA
tccggggacgacctggatcca

SEQ ID NO: 89251 - RNA, 21 nt, synthetic construct
  source 1..21: mol_type = other RNA
ctggatcctcacagagctgaa

SEQ ID NO: 89252 - RNA, 21 nt, synthetic construct
  source 1..21: mol_type = other RNA
ctggatcctcacagagctgaa

SEQ ID NO: 89253 - RNA, 21 nt, synthetic construct
  source 1..21: mol_type = other RNA
cacagagctgaccacaacaga

SEQ ID NO: 89254 - RNA, 21 nt, synthetic construct
  source 1..21: mol_type = other RNA
tgaccacaacagccactacaa

SEQ ID NO: 89255 - RNA, 21 nt, synthetic construct
  source 1..21: mol_type = other RNA
tcagcgactggagggacggca

SEQ ID NO: 89256 - RNA, 21 nt, synthetic construct
  source 1..21: mol_type = other RNA
ggtaagcatcgaccaggtcga

SEQ ID NO: 89257 - RNA, 21 nt, synthetic construct
  source 1..21: mol_type = other RNA
cctgcaagaacgaagaccaga

SEQ ID NO: 89258 - RNA, 21 nt, synthetic construct
  source 1..21: mol_type = other RNA
tgcgtgtgctttgctgtgaca

SEQ ID NO: 89259 - RNA, 21 nt, synthetic construct
  source 1..21: mol_type = other RNA
cctcctcaactccggggacga

SEQ ID NO: 89260 - RNA, 21 nt, synthetic construct
  source 1..21: mol_type = other RNA
cctcctcaactccggggacga

SEQ ID NO: 89261 - RNA, 21 nt, synthetic construct
  source 1..21: mol_type = other RNA
gaacccctgctgccccgagaa

SEQ ID NO: 89262 - RNA, 21 nt, synthetic construct
  source 1..21: mol_type = other RNA
ctggagacggggctgacctga

SEQ ID NO: 89263 - RNA, 21 nt, synthetic construct
  source 1..21: mol_type = other RNA
tgctttgctgtgacgactaca

SEQ ID NO: 89264 - RNA, 21 nt, synthetic construct
  source 1..21: mol_type = other RNA
gccacgccctcctcaactcca

SEQ ID NO: 89265 - RNA, 21 nt, synthetic construct
  source 1..21: mol_type = other RNA
cacgccctcctcaactccgga

SEQ ID NO: 89266 - RNA, 21 nt, synthetic construct
  source 1..21: mol_type = other RNA
gccacgccctcctcaactcca

SEQ ID NO: 89267 - RNA, 21 nt, synthetic construct
  source 1..21: mol_type = other RNA
cacgccctcctcaactccgga

SEQ ID NO: 89268 - RNA, 21 nt, synthetic construct
  source 1..21: mol_type = other RNA
tcagcatccactacaagtcca

SEQ ID NO: 89269 - RNA, 21 nt, synthetic construct
  source 1..21: mol_type = other RNA
cctcacctcgcagactgggta

SEQ ID NO: 89270 - RNA, 21 nt, synthetic construct
  source 1..21: mol_type = other RNA
gacctgcaagaacgaagacca

SEQ ID NO: 89271 - RNA, 21 nt, synthetic construct
  source 1..21: mol_type = other RNA
cgtgcgtgtgctttgctgtga

SEQ ID NO: 89272 - RNA, 21 nt, synthetic construct
  source 1..21: mol_type = other RNA
accacaacagccactacgaca

SEQ ID NO: 89273 - RNA, 21 nt, synthetic construct
  source 1..21: mol_type = other RNA
accacaacagccactacgaca

SEQ ID NO: 89274 - RNA, 21 nt, synthetic construct
  source 1..21: mol_type = other RNA
accacaacagccactacgaca

SEQ ID NO: 89275 - RNA, 21 nt, synthetic construct
  source 1..21: mol_type = other RNA
accacaacagccactacgaca

SEQ ID NO: 89276 - RNA, 21 nt, synthetic construct
  source 1..21: mol_type = other RNA
accacaacagccactacgaca

SEQ ID NO: 89277 - RNA, 21 nt, synthetic construct
  source 1..21: mol_type = other RNA
aacctcaggggttgcaggcga

SEQ ID NO: 89278 - RNA, 21 nt, synthetic construct
  source 1..21: mol_type = other RNA
cagccactgccccagtaccca

SEQ ID NO: 89279 - RNA, 21 nt, synthetic construct
  source 1..21: mol_type = other RNA
gccactgccccagtaccccaa

SEQ ID NO: 89280 - RNA, 21 nt, synthetic construct
  source 1..21: mol_type = other RNA
ccacaacagccactacgacta

SEQ ID NO: 89281 - RNA, 21 nt, synthetic construct
  source 1..21: mol_type = other RNA
ccacaacagccactacgacta

SEQ ID NO: 89282 - RNA, 21 nt, synthetic construct
  source 1..21: mol_type = other RNA
cggccatcccgtcctccacca

SEQ ID NO: 89283 - RNA, 21 nt, synthetic construct
  source 1..21: mol_type = other RNA
ccacaacagccactacgacta

SEQ ID NO: 89284 - RNA, 21 nt, synthetic construct
  source 1..21: mol_type = other RNA
ccacaacagccactacgacta

SEQ ID NO: 89285 - RNA, 21 nt, synthetic construct
  source 1..21: mol_type = other RNA
ccacaacagccactacgacta

SEQ ID NO: 89286 - RNA, 21 nt, synthetic construct
  source 1..21: mol_type = other RNA
ggctgcctgtgccaatgccaa

SEQ ID NO: 89287 - RNA, 21 nt, synthetic construct
  source 1..21: mol_type = other RNA
cagcgactggagggacggcga

SEQ ID NO: 89288 - RNA, 21 nt, synthetic construct
  source 1..21: mol_type = other RNA
cctcaggggttgcaggcggga

SEQ ID NO: 89289 - RNA, 21 nt, synthetic construct
  source 1..21: mol_type = other RNA
aggtcgggcaggtgctgacca

SEQ ID NO: 89290 - RNA, 21 nt, synthetic construct
  source 1..21: mol_type = other RNA
gcctggagacggggctgacca

SEQ ID NO: 89291 - RNA, 21 nt, synthetic construct
  source 1..21: mol_type = other RNA
cctggagacggggctgaccta

SEQ ID NO: 89292 - RNA, 21 nt, synthetic construct
  source 1..21: mol_type = other RNA
acctgcaagaacgaagaccaa

SEQ ID NO: 89293 - RNA, 21 nt, synthetic construct
  source 1..21: mol_type = other RNA
gtgcttcaactacaacgtgca

SEQ ID NO: 89294 - RNA, 21 nt, synthetic construct
  source 1..21: mol_type = other RNA
cttcaactacaacgtgcgtga

SEQ ID NO: 89295 - RNA, 21 nt, synthetic construct
  source 1..21: mol_type = other RNA
ctttgctgtgacgactacaga

SEQ ID NO: 89296 - RNA, 21 nt, synthetic construct
  source 1..21: mol_type = other RNA
ctacagccactgccccagtaa

SEQ ID NO: 89297 - RNA, 21 nt, synthetic construct
  source 1..21: mol_type = other RNA
agccactgccccagtacccca

SEQ ID NO: 89298 - RNA, 21 nt, synthetic construct
  source 1..21: mol_type = other RNA
cactgccccagtaccccagca

SEQ ID NO: 89299 - RNA, 21 nt, synthetic construct
  source 1..21: mol_type = other RNA
ctgccccagtaccccagccaa

SEQ ID NO: 89300 - RNA, 21 nt, synthetic construct
  source 1..21: mol_type = other RNA
cccagtaccccagccaccaga

SEQ ID NO: 89301 - RNA, 21 nt, synthetic construct
  source 1..21: mol_type = other RNA
gtaccccagccaccagctcca

SEQ ID NO: 89302 - RNA, 21 nt, synthetic construct
  source 1..21: mol_type = other RNA
cgccctcctcaactccgggga

SEQ ID NO: 89303 - RNA, 21 nt, synthetic construct
  source 1..21: mol_type = other RNA
caactccggggacgacctgga

SEQ ID NO: 89304 - RNA, 21 nt, synthetic construct
  source 1..21: mol_type = other RNA
ccggggacgacctggatccta

SEQ ID NO: 89305 - RNA, 21 nt, synthetic construct
  source 1..21: mol_type = other RNA
ggacgacctggatcctcacaa

SEQ ID NO: 89306 - RNA, 21 nt, synthetic construct
  source 1..21: mol_type = other RNA
gccgaccacaacagccactaa

SEQ ID NO: 89307 - RNA, 21 nt, synthetic construct
  source 1..21: mol_type = other RNA
ccgaccacaacagccactaca

SEQ ID NO: 89308 - RNA, 21 nt, synthetic construct
  source 1..21: mol_type = other RNA
actgcgtccactggatccaca

SEQ ID NO: 89309 - RNA, 21 nt, synthetic construct
  source 1..21: mol_type = other RNA
ggtcagagtggctggactaca

SEQ ID NO: 89310 - RNA, 21 nt, synthetic construct
  source 1..21: mol_type = other RNA
ccggggacgacctggatccta

SEQ ID NO: 89311 - RNA, 21 nt, synthetic construct
  source 1..21: mol_type = other RNA
ctgaccacaacagccactaca

SEQ ID NO: 89312 - RNA, 21 nt, synthetic construct
  source 1..21: mol_type = other RNA
gggccacaccagggccaccta

SEQ ID NO: 89313 - RNA, 21 nt, synthetic construct
  source 1..21: mol_type = other RNA
ggtcagagtggctggactaca

SEQ ID NO: 89314 - RNA, 21 nt, synthetic construct
  source 1..21: mol_type = other RNA
ccggggacgacctggatccta

SEQ ID NO: 89315 - RNA, 21 nt, synthetic construct
  source 1..21: mol_type = other RNA
ggtcagagtggctggactaca

SEQ ID NO: 89316 - RNA, 21 nt, synthetic construct
  source 1..21: mol_type = other RNA
cgccctcctcaactccgggga

SEQ ID NO: 89317 - RNA, 21 nt, synthetic construct
  source 1..21: mol_type = other RNA
caactccggggacgacctgga

SEQ ID NO: 89318 - RNA, 21 nt, synthetic construct
  source 1..21: mol_type = other RNA
ccggggacgacctggatccta

SEQ ID NO: 89319 - RNA, 21 nt, synthetic construct
  source 1..21: mol_type = other RNA
ggacgacctggatcctcacaa

SEQ ID NO: 89320 - RNA, 21 nt, synthetic construct
  source 1..21: mol_type = other RNA
ctgaccacaacagccactaca

SEQ ID NO: 89321 - RNA, 21 nt, synthetic construct
  source 1..21: mol_type = other RNA
ggtcagagtggctggactaca

SEQ ID NO: 89322 - RNA, 21 nt, synthetic construct
  source 1..21: mol_type = other RNA
ccggggacgacctggatccta

SEQ ID NO: 89323 - RNA, 21 nt, synthetic construct
  source 1..21: mol_type = other RNA
ctgaccacaacagccactaca

SEQ ID NO: 89324 - RNA, 21 nt, synthetic construct
  source 1..21: mol_type = other RNA
ccggggacgacctggatccta

SEQ ID NO: 89325 - RNA, 21 nt, synthetic construct
  source 1..21: mol_type = other RNA
ctgaccacaacagccactaca

SEQ ID NO: 89326 - RNA, 21 nt, synthetic construct
  source 1..21: mol_type = other RNA
actgcgtccactggatccaca

SEQ ID NO: 89327 - RNA, 21 nt, synthetic construct
  source 1..21: mol_type = other RNA
ctgaccacaacagccactaca

SEQ ID NO: 89328 - RNA, 21 nt, synthetic construct
  source 1..21: mol_type = other RNA
caccccatgcccaccacagca

SEQ ID NO: 89329 - RNA, 21 nt, synthetic construct
  source 1..21: mol_type = other RNA
caacctcaggggttgcaggca

SEQ ID NO: 89330 - RNA, 21 nt, synthetic construct
  source 1..21: mol_type = other RNA
cctggatcctcacaaagctga

SEQ ID NO: 89331 - RNA, 21 nt, synthetic construct
  source 1..21: mol_type = other RNA
tcctcacaaagccgaccacaa

SEQ ID NO: 89332 - RNA, 21 nt, synthetic construct
  source 1..21: mol_type = other RNA
tacagccaccacgggaggcca

SEQ ID NO: 89333 - RNA, 21 nt, synthetic construct
  source 1..21: mol_type = other RNA
acctggatcctcacaaagcca

SEQ ID NO: 89334 - RNA, 21 nt, synthetic construct
  source 1..21: mol_type = other RNA
gactgcatccactggatccaa

SEQ ID NO: 89335 - RNA, 21 nt, synthetic construct
  source 1..21: mol_type = other RNA
caggggttgcaggcggggaca

SEQ ID NO: 89336 - RNA, 21 nt, synthetic construct
  source 1..21: mol_type = other RNA
acaacgtgcgtgtgctttgca

SEQ ID NO: 89337 - RNA, 21 nt, synthetic construct
  source 1..21: mol_type = other RNA
caacgtgcgtgtgctttgcta

SEQ ID NO: 89338 - RNA, 21 nt, synthetic construct
  source 1..21: mol_type = other RNA
ctcctggagaggtggtgcaca

SEQ ID NO: 89339 - RNA, 21 nt, synthetic construct
  source 1..21: mol_type = other RNA
cccccagcagtccccacacga

SEQ ID NO: 89340 - RNA, 21 nt, synthetic construct
  source 1..21: mol_type = other RNA
cccccagcagtccccacacga

SEQ ID NO: 89341 - RNA, 21 nt, synthetic construct
  source 1..21: mol_type = other RNA
cccccagcagtccccacacga

SEQ ID NO: 89342 - RNA, 21 nt, synthetic construct
  source 1..21: mol_type = other RNA
cccccagcagtccccacacga

SEQ ID NO: 89343 - RNA, 21 nt, synthetic construct
  source 1..21: mol_type = other RNA
gtggcaccagggctgcgagaa

SEQ ID NO: 89344 - RNA, 21 nt, synthetic construct
  source 1..21: mol_type = other RNA
caggctgacgacttcacggca

SEQ ID NO: 89345 - RNA, 21 nt, synthetic construct
  source 1..21: mol_type = other RNA
agccactcccttctccagtca

SEQ ID NO: 89346 - RNA, 21 nt, synthetic construct
  source 1..21: mol_type = other RNA
agccaccaaatccacagctaa

SEQ ID NO: 89347 - RNA, 21 nt, synthetic construct
  source 1..21: mol_type = other RNA
agccactcccttctccagtca

SEQ ID NO: 89348 - RNA, 21 nt, synthetic construct
  source 1..21: mol_type = other RNA
agccaccaaatccacagctaa

SEQ ID NO: 89349 - RNA, 21 nt, synthetic construct
  source 1..21: mol_type = other RNA
aggggttgcaggcggggacaa

SEQ ID NO: 89350 - RNA, 21 nt, synthetic construct
  source 1..21: mol_type = other RNA
cagctccacggccacgcccta

SEQ ID NO: 89351 - RNA, 21 nt, synthetic construct
  source 1..21: mol_type = other RNA
ctccaggaccacagccacgga

SEQ ID NO: 89352 - RNA, 21 nt, synthetic construct
  source 1..21: mol_type = other RNA
gagctgaccacaacagccaca

SEQ ID NO: 89353 - RNA, 21 nt, synthetic construct
  source 1..21: mol_type = other RNA
accacacccatggccaccata

SEQ ID NO: 89354 - RNA, 21 nt, synthetic construct
  source 1..21: mol_type = other RNA
ccaggggcacctccaggacca

SEQ ID NO: 89355 - RNA, 21 nt, synthetic construct
  source 1..21: mol_type = other RNA
aagctgaccacaacagccaca

SEQ ID NO: 89356 - RNA, 21 nt, synthetic construct
  source 1..21: mol_type = other RNA
gagctgaccacaacagccaca

SEQ ID NO: 89357 - RNA, 21 nt, synthetic construct
  source 1..21: mol_type = other RNA
gagctgaccacaacagccaca

SEQ ID NO: 89358 - RNA, 21 nt, synthetic construct
  source 1..21: mol_type = other RNA
caccacagccaccatgacaaa

SEQ ID NO: 89359 - RNA, 21 nt, synthetic construct
  source 1..21: mol_type = other RNA
gagctgaccacaacagccaca

SEQ ID NO: 89360 - RNA, 21 nt, synthetic construct
  source 1..21: mol_type = other RNA
tggcaccagggctgcgagaca

SEQ ID NO: 89361 - RNA, 21 nt, synthetic construct
  source 1..21: mol_type = other RNA
acttcccaacctcaggggtta

SEQ ID NO: 89362 - RNA, 21 nt, synthetic construct
  source 1..21: mol_type = other RNA
cctccacagtgcttaccacca

SEQ ID NO: 89363 - RNA, 21 nt, synthetic construct
  source 1..21: mol_type = other RNA
cctccacagtgcttaccacca

SEQ ID NO: 89364 - RNA, 21 nt, synthetic construct
  source 1..21: mol_type = other RNA
cctccacagtgcttaccacca

SEQ ID NO: 89365 - RNA, 21 nt, synthetic construct
  source 1..21: mol_type = other RNA
gccctgtccagccctcaccca

SEQ ID NO: 89366 - RNA, 21 nt, synthetic construct
  source 1..21: mol_type = other RNA
gccctgtccagccctcaccca

SEQ ID NO: 89367 - RNA, 21 nt, synthetic construct
  source 1..21: mol_type = other RNA
gccctgtccagccctcaccca

SEQ ID NO: 89368 - RNA, 21 nt, synthetic construct
  source 1..21: mol_type = other RNA
tcctgcacacctacacccaca

SEQ ID NO: 89369 - RNA, 21 nt, synthetic construct
  source 1..21: mol_type = other RNA
ctgtggcccctccccggccca

SEQ ID NO: 89370 - RNA, 21 nt, synthetic construct
  source 1..21: mol_type = other RNA
acgtgcgtgtgctttgctgta

SEQ ID NO: 89371 - RNA, 21 nt, synthetic construct
  source 1..21: mol_type = other RNA
agtccagggactgcaaccgca

SEQ ID NO: 89372 - RNA, 21 nt, synthetic construct
  source 1..21: mol_type = other RNA
gcccttccagcactgagaaga

SEQ ID NO: 89373 - RNA, 21 nt, synthetic construct
  source 1..21: mol_type = other RNA
atcctcacagagctgaccaca

SEQ ID NO: 89374 - RNA, 21 nt, synthetic construct
  source 1..21: mol_type = other RNA
agagctgaccacaacagccaa

SEQ ID NO: 89375 - RNA, 21 nt, synthetic construct
  source 1..21: mol_type = other RNA
agtccagggactgcaaccgca

SEQ ID NO: 89376 - RNA, 21 nt, synthetic construct
  source 1..21: mol_type = other RNA
gcccttccagcactgagaaga

SEQ ID NO: 89377 - RNA, 21 nt, synthetic construct
  source 1..21: mol_type = other RNA
atcctcacagagctgaccaca

SEQ ID NO: 89378 - RNA, 21 nt, synthetic construct
  source 1..21: mol_type = other RNA
agtccagggactgcaaccgca

SEQ ID NO: 89379 - RNA, 21 nt, synthetic construct
  source 1..21: mol_type = other RNA
gcccttccagcactgagaaga

SEQ ID NO: 89380 - RNA, 21 nt, synthetic construct
  source 1..21: mol_type = other RNA
agtccagggactgcaaccgca

SEQ ID NO: 89381 - RNA, 21 nt, synthetic construct
  source 1..21: mol_type = other RNA
gcccttccagcactgagaaga

SEQ ID NO: 89382 - RNA, 21 nt, synthetic construct
  source 1..21: mol_type = other RNA
atcctcacagagctgaccaca

SEQ ID NO: 89383 - RNA, 21 nt, synthetic construct
  source 1..21: mol_type = other RNA
agagctgaccacaacagccaa

SEQ ID NO: 89384 - RNA, 21 nt, synthetic construct
  source 1..21: mol_type = other RNA
atcctcacagagctgaccaca

SEQ ID NO: 89385 - RNA, 21 nt, synthetic construct
  source 1..21: mol_type = other RNA
atcctcacagagctgaccaca

SEQ ID NO: 89386 - RNA, 21 nt, synthetic construct
  source 1..21: mol_type = other RNA
agagctgaccacaacagccaa

SEQ ID NO: 89387 - RNA, 21 nt, synthetic construct
  source 1..21: mol_type = other RNA
gcccttccagcactgagaaga

SEQ ID NO: 89388 - RNA, 21 nt, synthetic construct
  source 1..21: mol_type = other RNA
tgagctgaccacaacagccaa

SEQ ID NO: 89389 - RNA, 21 nt, synthetic construct
  source 1..21: mol_type = other RNA
accctgggagagcctgtggca

SEQ ID NO: 89390 - RNA, 21 nt, synthetic construct
  source 1..21: mol_type = other RNA
agtggccgggcagtgctgtga

SEQ ID NO: 89391 - RNA, 21 nt, synthetic construct
  source 1..21: mol_type = other RNA
cacccaggcaactgctggcaa

SEQ ID NO: 89392 - RNA, 21 nt, synthetic construct
  source 1..21: mol_type = other RNA
cctggatcctcacagagcaga

SEQ ID NO: 89393 - RNA, 21 nt, synthetic construct
  source 1..21: mol_type = other RNA
cacccaggcaactgctggcaa

SEQ ID NO: 89394 - RNA, 21 nt, synthetic construct
  source 1..21: mol_type = other RNA
cacccaggcaactgctggcaa

SEQ ID NO: 89395 - RNA, 21 nt, synthetic construct
  source 1..21: mol_type = other RNA
tcctcacagagctgaccacaa

SEQ ID NO: 89396 - RNA, 21 nt, synthetic construct
  source 1..21: mol_type = other RNA
tcctcacagagctgaccacaa

SEQ ID NO: 89397 - RNA, 21 nt, synthetic construct
  source 1..21: mol_type = other RNA
tcctcacagagctgaccacaa

SEQ ID NO: 89398 - RNA, 21 nt, synthetic construct
  source 1..21: mol_type = other RNA
tcctcacagagctgaccacaa

SEQ ID NO: 89399 - RNA, 21 nt, synthetic construct
  source 1..21: mol_type = other RNA
tcctcacagagctgaccacaa

SEQ ID NO: 89400 - RNA, 21 nt, synthetic construct
  source 1..21: mol_type = other RNA
acggggctgacctgcaagaaa

SEQ ID NO: 89401 - RNA, 21 nt, synthetic construct
  source 1..21: mol_type = other RNA
gctggtgctgacattcctgta

SEQ ID NO: 89402 - RNA, 21 nt, synthetic construct
  source 1..21: mol_type = other RNA
cggggctgacctgcaagaaca

SEQ ID NO: 89403 - RNA, 21 nt, synthetic construct
  source 1..21: mol_type = other RNA
gcctcctccacccaggcaaca

SEQ ID NO: 89404 - RNA, 21 nt, synthetic construct
  source 1..21: mol_type = other RNA
gcctcctccacccaggcaaca

SEQ ID NO: 89405 - RNA, 21 nt, synthetic construct
  source 1..21: mol_type = other RNA
gcctcctccacccaggcaaca

SEQ ID NO: 89406 - RNA, 21 nt, synthetic construct
  source 1..21: mol_type = other RNA
ccggccctcccggtctccaca

SEQ ID NO: 89407 - RNA, 21 nt, synthetic construct
  source 1..21: mol_type = other RNA
ctcaggggttgcaggcgggga

SEQ ID NO: 89408 - RNA, 21 nt, synthetic construct
  source 1..21: mol_type = other RNA
gcacagggtgtgcagccccca

SEQ ID NO: 89409 - RNA, 21 nt, synthetic construct
  source 1..21: mol_type = other RNA
gccccagtaccccagccacca

SEQ ID NO: 89410 - RNA, 21 nt, synthetic construct
  source 1..21: mol_type = other RNA
ccagccaccagctccacggca

SEQ ID NO: 89411 - RNA, 21 nt, synthetic construct
  source 1..21: mol_type = other RNA
cagccaccagctccacggcca

SEQ ID NO: 89412 - RNA, 21 nt, synthetic construct
  source 1..21: mol_type = other RNA
ggatcctcacagagctgacca

SEQ ID NO: 89413 - RNA, 21 nt, synthetic construct
  source 1..21: mol_type = other RNA
ggatcctcacagagctgacca

SEQ ID NO: 89414 - RNA, 21 nt, synthetic construct
  source 1..21: mol_type = other RNA
ggatcctcacagagctgacca

SEQ ID NO: 89415 - RNA, 21 nt, synthetic construct
  source 1..21: mol_type = other RNA
ggatcctcacagagctgacca

SEQ ID NO: 89416 - RNA, 21 nt, synthetic construct
  source 1..21: mol_type = other RNA
ggatcctcacagagctgacca

SEQ ID NO: 89417 - RNA, 21 nt, synthetic construct
  source 1..21: mol_type = other RNA
aggaaccagagcccacagcta

SEQ ID NO: 89418 - RNA, 21 nt, synthetic construct
  source 1..21: mol_type = other RNA
ctgcaactgcccttccagcaa

SEQ ID NO: 89419 - RNA, 21 nt, synthetic construct
  source 1..21: mol_type = other RNA
cacaaccacctgcccccagaa

SEQ ID NO: 89420 - RNA, 21 nt, synthetic construct
  source 1..21: mol_type = other RNA
gctcctggagaggtggtgcaa

SEQ ID NO: 89421 - RNA, 21 nt, synthetic construct
  source 1..21: mol_type = other RNA
caccaccacccaggccctgta

SEQ ID NO: 89422 - RNA, 21 nt, synthetic construct
  source 1..21: mol_type = other RNA
cgaagaccagacaggcaggta

SEQ ID NO: 89423 - RNA, 21 nt, synthetic construct
  source 1..21: mol_type = other RNA
cgactacagccactgccccaa

SEQ ID NO: 89424 - RNA, 21 nt, synthetic construct
  source 1..21: mol_type = other RNA
tccaggaccacagccacggca

SEQ ID NO: 89425 - RNA, 21 nt, synthetic construct
  source 1..21: mol_type = other RNA
tggatcctcacagagctgaca

SEQ ID NO: 89426 - RNA, 21 nt, synthetic construct
  source 1..21: mol_type = other RNA
tggatcctcacagagctgaca

SEQ ID NO: 89427 - RNA, 21 nt, synthetic construct
  source 1..21: mol_type = other RNA
acaaccagtggctccacggta

SEQ ID NO: 89428 - RNA, 21 nt, synthetic construct
  source 1..21: mol_type = other RNA
cacccccttccccagggacga

SEQ ID NO: 89429 - RNA, 21 nt, synthetic construct
  source 1..21: mol_type = other RNA
tggatcctcacagagctgaca

SEQ ID NO: 89430 - RNA, 21 nt, synthetic construct
  source 1..21: mol_type = other RNA
tggatcctcacagagctgaca

SEQ ID NO: 89431 - RNA, 21 nt, synthetic construct
  source 1..21: mol_type = other RNA
tggatcctcacagagctgaca

SEQ ID NO: 89432 - RNA, 21 nt, synthetic construct
  source 1..21: mol_type = other RNA
acaaccagtggctccacggta

SEQ ID NO: 89433 - RNA, 21 nt, synthetic construct
  source 1..21: mol_type = other RNA
gatggccagccagtccagcta

SEQ ID NO: 89434 - RNA, 21 nt, synthetic construct
  source 1..21: mol_type = other RNA
gctgctgccaggaagctgcga

SEQ ID NO: 89435 - RNA, 21 nt, synthetic construct
  source 1..21: mol_type = other RNA
ccactgccccagtaccccaga

SEQ ID NO: 89436 - RNA, 21 nt, synthetic construct
  source 1..21: mol_type = other RNA
cctcctccagcccagggacga

SEQ ID NO: 89437 - RNA, 21 nt, synthetic construct
  source 1..21: mol_type = other RNA
ccacccacacacccccagtga

SEQ ID NO: 89438 - RNA, 21 nt, synthetic construct
  source 1..21: mol_type = other RNA
cctcctccagcccagggacga

SEQ ID NO: 89439 - RNA, 21 nt, synthetic construct
  source 1..21: mol_type = other RNA
ccacccacacacccccagtga

SEQ ID NO: 89440 - RNA, 21 nt, synthetic construct
  source 1..21: mol_type = other RNA
cctcctccagcccagggacga

SEQ ID NO: 89441 - RNA, 21 nt, synthetic construct
  source 1..21: mol_type = other RNA
ccacccacacacccccagtga

SEQ ID NO: 89442 - RNA, 21 nt, synthetic construct
  source 1..21: mol_type = other RNA
cctcctccagcccagggacga

SEQ ID NO: 89443 - RNA, 21 nt, synthetic construct
  source 1..21: mol_type = other RNA
ccacccacacacccccagtga

SEQ ID NO: 89444 - RNA, 21 nt, synthetic construct
  source 1..21: mol_type = other RNA
cctcctccagcccagggacga

SEQ ID NO: 89445 - RNA, 21 nt, synthetic construct
  source 1..21: mol_type = other RNA
tgctccccagcagcctgccaa

SEQ ID NO: 89446 - RNA, 21 nt, synthetic construct
  source 1..21: mol_type = other RNA
acgactacagccactgcccca

SEQ ID NO: 89447 - RNA, 21 nt, synthetic construct
  source 1..21: mol_type = other RNA
aagccgaccacaacagccaca

SEQ ID NO: 89448 - RNA, 21 nt, synthetic construct
  source 1..21: mol_type = other RNA
acccccacagtgctgaccaca

SEQ ID NO: 89449 - RNA, 21 nt, synthetic construct
  source 1..21: mol_type = other RNA
cacaaccagtggctccacgga

SEQ ID NO: 89450 - RNA, 21 nt, synthetic construct
  source 1..21: mol_type = other RNA
acccccacagtgctgaccaca

SEQ ID NO: 89451 - RNA, 21 nt, synthetic construct
  source 1..21: mol_type = other RNA
cacaaccagtggctccacgga

SEQ ID NO: 89452 - RNA, 21 nt, synthetic construct
  source 1..21: mol_type = other RNA
cacagggtgtgcagcccccaa

SEQ ID NO: 89453 - RNA, 21 nt, synthetic construct
  source 1..21: mol_type = other RNA
acctcaggggttgcaggcgga

SEQ ID NO: 89454 - RNA, 21 nt, synthetic construct
  source 1..21: mol_type = other RNA
cagcctggagacggggctgaa

SEQ ID NO: 89455 - RNA, 21 nt, synthetic construct
  source 1..21: mol_type = other RNA
cgccaccacacctgcagccaa

SEQ ID NO: 89456 - RNA, 21 nt, synthetic construct
  source 1..21: mol_type = other RNA
cgccaccacacctgcagccaa

SEQ ID NO: 89457 - RNA, 21 nt, synthetic construct
  source 1..21: mol_type = other RNA
cgccaccacacctgcagccaa

SEQ ID NO: 89458 - RNA, 21 nt, synthetic construct
  source 1..21: mol_type = other RNA
caggggcacctccaggaccaa

SEQ ID NO: 89459 - RNA, 21 nt, synthetic construct
  source 1..21: mol_type = other RNA
cgccaccacacctgcagccaa

SEQ ID NO: 89460 - RNA, 21 nt, synthetic construct
  source 1..21: mol_type = other RNA
cccgcagccaccagctccaaa

SEQ ID NO: 89461 - RNA, 21 nt, synthetic construct
  source 1..21: mol_type = other RNA
atgtccaccatgtccacaata

SEQ ID NO: 89462 - RNA, 21 nt, synthetic construct
  source 1..21: mol_type = other RNA
accacctgcccccagagccta

SEQ ID NO: 89463 - RNA, 21 nt, synthetic construct
  source 1..21: mol_type = other RNA
cctgcacacctacacccacga

SEQ ID NO: 89464 - RNA, 21 nt, synthetic construct
  source 1..21: mol_type = other RNA
ccggcccggctccctccctga

SEQ ID NO: 89465 - RNA, 21 nt, synthetic construct
  source 1..21: mol_type = other RNA
cagagacccagggccctgtga

SEQ ID NO: 89466 - RNA, 21 nt, synthetic construct
  source 1..21: mol_type = other RNA
actggaggtgccctgagctca

SEQ ID NO: 89467 - RNA, 21 nt, synthetic construct
  source 1..21: mol_type = other RNA
gaggtgccctgagctctgcca

SEQ ID NO: 89468 - RNA, 21 nt, synthetic construct
  source 1..21: mol_type = other RNA
aggtgccctgagctctgccca

SEQ ID NO: 89469 - RNA, 21 nt, synthetic construct
  source 1..21: mol_type = other RNA
cacctccttcaacaccaccta

SEQ ID NO: 89470 - RNA, 21 nt, synthetic construct
  source 1..21: mol_type = other RNA
aggctgacgacttcacggcca

SEQ ID NO: 89471 - RNA, 21 nt, synthetic construct
  source 1..21: mol_type = other RNA
ggggtggtggaggccacggga

SEQ ID NO: 89472 - RNA, 21 nt, synthetic construct
  source 1..21: mol_type = other RNA
gggtggtggaggccacgggca

SEQ ID NO: 89473 - RNA, 21 nt, synthetic construct
  source 1..21: mol_type = other RNA
ggtggtggaggccacgggcga

SEQ ID NO: 89474 - RNA, 21 nt, synthetic construct
  source 1..21: mol_type = other RNA
tcccccggggctggtgtcgga

SEQ ID NO: 89475 - RNA, 21 nt, synthetic construct
  source 1..21: mol_type = other RNA
ccggcctgggaggcggagaca

SEQ ID NO: 89476 - RNA, 21 nt, synthetic construct
  source 1..21: mol_type = other RNA
ggcccctccccggccccagga

SEQ ID NO: 89477 - RNA, 21 nt, synthetic construct
  source 1..21: mol_type = other RNA
gcccctccccggccccaggca

SEQ ID NO: 89478 - RNA, 21 nt, synthetic construct
  source 1..21: mol_type = other RNA
gttgcaggcggggacatggaa

SEQ ID NO: 89479 - RNA, 21 nt, synthetic construct
  source 1..21: mol_type = other RNA
ccaggtcgggcaggtgctgaa

SEQ ID NO: 89480 - RNA, 21 nt, synthetic construct
  source 1..21: mol_type = other RNA
ggtcgggcaggtgctgaccta

SEQ ID NO: 89481 - RNA, 21 nt, synthetic construct
  source 1..21: mol_type = other RNA
gtcgggcaggtgctgacctga

SEQ ID NO: 89482 - RNA, 21 nt, synthetic construct
  source 1..21: mol_type = other RNA
agcctggagacggggctgaca

SEQ ID NO: 89483 - RNA, 21 nt, synthetic construct
  source 1..21: mol_type = other RNA
gactacagccactgccccaga

SEQ ID NO: 89484 - RNA, 21 nt, synthetic construct
  source 1..21: mol_type = other RNA
actacagccactgccccagta

SEQ ID NO: 89485 - RNA, 21 nt, synthetic construct
  source 1..21: mol_type = other RNA
tacagccactgccccagtaca

SEQ ID NO: 89486 - RNA, 21 nt, synthetic construct
  source 1..21: mol_type = other RNA
acagccactgccccagtacca

SEQ ID NO: 89487 - RNA, 21 nt, synthetic construct
  source 1..21: mol_type = other RNA
tgccccagtaccccagccaca

SEQ ID NO: 89488 - RNA, 21 nt, synthetic construct
  source 1..21: mol_type = other RNA
ccccagtaccccagccaccaa

SEQ ID NO: 89489 - RNA, 21 nt, synthetic construct
  source 1..21: mol_type = other RNA
agtaccccagccaccagctca

SEQ ID NO: 89490 - RNA, 21 nt, synthetic construct
  source 1..21: mol_type = other RNA
taccccagccaccagctccaa

SEQ ID NO: 89491 - RNA, 21 nt, synthetic construct
  source 1..21: mol_type = other RNA
cccagccaccagctccacgga

SEQ ID NO: 89492 - RNA, 21 nt, synthetic construct
  source 1..21: mol_type = other RNA
agccaccagctccacggccaa

SEQ ID NO: 89493 - RNA, 21 nt, synthetic construct
  source 1..21: mol_type = other RNA
gccaccagctccacggccaca

SEQ ID NO: 89494 - RNA, 21 nt, synthetic construct
  source 1..21: mol_type = other RNA
ccaccagctccacggccacga

SEQ ID NO: 89495 - RNA, 21 nt, synthetic construct
  source 1..21: mol_type = other RNA
caccagctccacggccacgca

SEQ ID NO: 89496 - RNA, 21 nt, synthetic construct
  source 1..21: mol_type = other RNA
ccagctccacggccacgccca

SEQ ID NO: 89497 - RNA, 21 nt, synthetic construct
  source 1..21: mol_type = other RNA
agctccacggccacgccctca

SEQ ID NO: 89498 - RNA, 21 nt, synthetic construct
  source 1..21: mol_type = other RNA
ccacggccacgccctcctcaa

SEQ ID NO: 89499 - RNA, 21 nt, synthetic construct
  source 1..21: mol_type = other RNA
cggggacgacctggatcctca

SEQ ID NO: 89500 - RNA, 21 nt, synthetic construct
  source 1..21: mol_type = other RNA
cgactgcgtccactggatcca

SEQ ID NO: 89501 - RNA, 21 nt, synthetic construct
  source 1..21: mol_type = other RNA
ctccccctcccaaagtgctga

SEQ ID NO: 89502 - RNA, 21 nt, synthetic construct
  source 1..21: mol_type = other RNA
tccagtccagggactgcaaca

SEQ ID NO: 89503 - RNA, 21 nt, synthetic construct
  source 1..21: mol_type = other RNA
cccatcccctcttcctcccta

SEQ ID NO: 89504 - RNA, 21 nt, synthetic construct
  source 1..21: mol_type = other RNA
gtggccaccccctcctccaca

SEQ ID NO: 89505 - RNA, 21 nt, synthetic construct
  source 1..21: mol_type = other RNA
cggtgaccccctcctccatca

SEQ ID NO: 89506 - RNA, 21 nt, synthetic construct
  source 1..21: mol_type = other RNA
cacctgcagccaccagcaaca

SEQ ID NO: 89507 - RNA, 21 nt, synthetic construct
  source 1..21: mol_type = other RNA
cacccacacacccccagtgca

SEQ ID NO: 89508 - RNA, 21 nt, synthetic construct
  source 1..21: mol_type = other RNA
cggtgcgcacagcctggacta

SEQ ID NO: 89509 - RNA, 21 nt, synthetic construct
  source 1..21: mol_type = other RNA
tgcccaggcccagcctggtga

SEQ ID NO: 89510 - RNA, 21 nt, synthetic construct
  source 1..21: mol_type = other RNA
cggggacgacctggatcctca

SEQ ID NO: 89511 - RNA, 21 nt, synthetic construct
  source 1..21: mol_type = other RNA
cagagctgaccacaacagcca

SEQ ID NO: 89512 - RNA, 21 nt, synthetic construct
  source 1..21: mol_type = other RNA
gctgaccacaacagccactaa

SEQ ID NO: 89513 - RNA, 21 nt, synthetic construct
  source 1..21: mol_type = other RNA
ggccaccccgtcctccaccca

SEQ ID NO: 89514 - RNA, 21 nt, synthetic construct
  source 1..21: mol_type = other RNA
gccaccccgtcctccacccca

SEQ ID NO: 89515 - RNA, 21 nt, synthetic construct
  source 1..21: mol_type = other RNA
tccacggccaccgcctcctca

SEQ ID NO: 89516 - RNA, 21 nt, synthetic construct
  source 1..21: mol_type = other RNA
ccacggccaccgcctcctcca

SEQ ID NO: 89517 - RNA, 21 nt, synthetic construct
  source 1..21: mol_type = other RNA
ccacccaggcaactgctggca

SEQ ID NO: 89518 - RNA, 21 nt, synthetic construct
  source 1..21: mol_type = other RNA
tccagtccagggactgcaaca

SEQ ID NO: 89519 - RNA, 21 nt, synthetic construct
  source 1..21: mol_type = other RNA
gtggccaccccctcctccaca

SEQ ID NO: 89520 - RNA, 21 nt, synthetic construct
  source 1..21: mol_type = other RNA
cggtgaccccctcctccatca

SEQ ID NO: 89521 - RNA, 21 nt, synthetic construct
  source 1..21: mol_type = other RNA
cacctgcagccaccagcagca

SEQ ID NO: 89522 - RNA, 21 nt, synthetic construct
  source 1..21: mol_type = other RNA
acctgcagccaccagcagcaa

SEQ ID NO: 89523 - RNA, 21 nt, synthetic construct
  source 1..21: mol_type = other RNA
cacccacacacccccagtgca

SEQ ID NO: 89524 - RNA, 21 nt, synthetic construct
  source 1..21: mol_type = other RNA
cggtgcgcacagcctggacta

SEQ ID NO: 89525 - RNA, 21 nt, synthetic construct
  source 1..21: mol_type = other RNA
cgggccacaccagggccacca

SEQ ID NO: 89526 - RNA, 21 nt, synthetic construct
  source 1..21: mol_type = other RNA
gaccacggccacggccacaca

SEQ ID NO: 89527 - RNA, 21 nt, synthetic construct
  source 1..21: mol_type = other RNA
tgcccaggcccagcctggtga

SEQ ID NO: 89528 - RNA, 21 nt, synthetic construct
  source 1..21: mol_type = other RNA
gagcagaccacagcagccaca

SEQ ID NO: 89529 - RNA, 21 nt, synthetic construct
  source 1..21: mol_type = other RNA
ctccccctcccaaagtgctga

SEQ ID NO: 89530 - RNA, 21 nt, synthetic construct
  source 1..21: mol_type = other RNA
ggccaccacacccacagccaa

SEQ ID NO: 89531 - RNA, 21 nt, synthetic construct
  source 1..21: mol_type = other RNA
ccaaagccacttcctcctcca

SEQ ID NO: 89532 - RNA, 21 nt, synthetic construct
  source 1..21: mol_type = other RNA
acacccatcccctccttcaca

SEQ ID NO: 89533 - RNA, 21 nt, synthetic construct
  source 1..21: mol_type = other RNA
cggggacgacctggatcctca

SEQ ID NO: 89534 - RNA, 21 nt, synthetic construct
  source 1..21: mol_type = other RNA
actggccccacggccacccca

SEQ ID NO: 89535 - RNA, 21 nt, synthetic construct
  source 1..21: mol_type = other RNA
ggccaccccgtcctccaccca

SEQ ID NO: 89536 - RNA, 21 nt, synthetic construct
  source 1..21: mol_type = other RNA
gccaccccgtcctccacccca

SEQ ID NO: 89537 - RNA, 21 nt, synthetic construct
  source 1..21: mol_type = other RNA
tccacggccaccgcctcctca

SEQ ID NO: 89538 - RNA, 21 nt, synthetic construct
  source 1..21: mol_type = other RNA
ccacggccaccgcctcctcca

SEQ ID NO: 89539 - RNA, 21 nt, synthetic construct
  source 1..21: mol_type = other RNA
tccagtccagggactgcaaca

SEQ ID NO: 89540 - RNA, 21 nt, synthetic construct
  source 1..21: mol_type = other RNA
acagccatcccctcttcctca

SEQ ID NO: 89541 - RNA, 21 nt, synthetic construct
  source 1..21: mol_type = other RNA
gccatcccctcttcctcccta

SEQ ID NO: 89542 - RNA, 21 nt, synthetic construct
  source 1..21: mol_type = other RNA
gtggccaccccctcctccaca

SEQ ID NO: 89543 - RNA, 21 nt, synthetic construct
  source 1..21: mol_type = other RNA
cggtgaccccctcctccatca

SEQ ID NO: 89544 - RNA, 21 nt, synthetic construct
  source 1..21: mol_type = other RNA
cacctgcagccaccagcagca

SEQ ID NO: 89545 - RNA, 21 nt, synthetic construct
  source 1..21: mol_type = other RNA
acctgcagccaccagcagcaa

SEQ ID NO: 89546 - RNA, 21 nt, synthetic construct
  source 1..21: mol_type = other RNA
cacccacacacccccagtgca

SEQ ID NO: 89547 - RNA, 21 nt, synthetic construct
  source 1..21: mol_type = other RNA
cggtgcgcacagcctggacta

SEQ ID NO: 89548 - RNA, 21 nt, synthetic construct
  source 1..21: mol_type = other RNA
aaccaccagtaccacccagca

SEQ ID NO: 89549 - RNA, 21 nt, synthetic construct
  source 1..21: mol_type = other RNA
ctccaggaccacagccacaga

SEQ ID NO: 89550 - RNA, 21 nt, synthetic construct
  source 1..21: mol_type = other RNA
ccacagccacacccagcaaga

SEQ ID NO: 89551 - RNA, 21 nt, synthetic construct
  source 1..21: mol_type = other RNA
tgcccaggcccagcctggtga

SEQ ID NO: 89552 - RNA, 21 nt, synthetic construct
  source 1..21: mol_type = other RNA
cggggacgacctggatcctca

SEQ ID NO: 89553 - RNA, 21 nt, synthetic construct
  source 1..21: mol_type = other RNA
gctgaccacaacagccactaa

SEQ ID NO: 89554 - RNA, 21 nt, synthetic construct
  source 1..21: mol_type = other RNA
ggccaccccgtcctccaccca

SEQ ID NO: 89555 - RNA, 21 nt, synthetic construct
  source 1..21: mol_type = other RNA
gccaccccgtcctccacccca

SEQ ID NO: 89556 - RNA, 21 nt, synthetic construct
  source 1..21: mol_type = other RNA
tccacggccaccgcctcctca

SEQ ID NO: 89557 - RNA, 21 nt, synthetic construct
  source 1..21: mol_type = other RNA
ccacggccaccgcctcctcca

SEQ ID NO: 89558 - RNA, 21 nt, synthetic construct
  source 1..21: mol_type = other RNA
ccacccaggcaactgctggca

SEQ ID NO: 89559 - RNA, 21 nt, synthetic construct
  source 1..21: mol_type = other RNA
tccagtccagggactgcaaca

SEQ ID NO: 89560 - RNA, 21 nt, synthetic construct
  source 1..21: mol_type = other RNA
gccaccccctcttccacccca

SEQ ID NO: 89561 - RNA, 21 nt, synthetic construct
  source 1..21: mol_type = other RNA
ccaccccctcttccaccccaa

SEQ ID NO: 89562 - RNA, 21 nt, synthetic construct
  source 1..21: mol_type = other RNA
ccccctcttccaccccaggaa

SEQ ID NO: 89563 - RNA, 21 nt, synthetic construct
  source 1..21: mol_type = other RNA
agtcaccccctcctccagcca

SEQ ID NO: 89564 - RNA, 21 nt, synthetic construct
  source 1..21: mol_type = other RNA
cacctgcagccaccagcagca

SEQ ID NO: 89565 - RNA, 21 nt, synthetic construct
  source 1..21: mol_type = other RNA
acctgcagccaccagcagcaa

SEQ ID NO: 89566 - RNA, 21 nt, synthetic construct
  source 1..21: mol_type = other RNA
cacccacacacccccagtgca

SEQ ID NO: 89567 - RNA, 21 nt, synthetic construct
  source 1..21: mol_type = other RNA
cggtgcgcacagcctggacta

SEQ ID NO: 89568 - RNA, 21 nt, synthetic construct
  source 1..21: mol_type = other RNA
gaccacggccacggccacaca

SEQ ID NO: 89569 - RNA, 21 nt, synthetic construct
  source 1..21: mol_type = other RNA
tgcccaggcccagcctggtga

SEQ ID NO: 89570 - RNA, 21 nt, synthetic construct
  source 1..21: mol_type = other RNA
cggggacgacctggatcctca

SEQ ID NO: 89571 - RNA, 21 nt, synthetic construct
  source 1..21: mol_type = other RNA
cagagctgaccacaacagcca

SEQ ID NO: 89572 - RNA, 21 nt, synthetic construct
  source 1..21: mol_type = other RNA
gctgaccacaacagccactaa

SEQ ID NO: 89573 - RNA, 21 nt, synthetic construct
  source 1..21: mol_type = other RNA
actgcatccactggatccaca

SEQ ID NO: 89574 - RNA, 21 nt, synthetic construct
  source 1..21: mol_type = other RNA
ggccaccccgtcctccaccca

SEQ ID NO: 89575 - RNA, 21 nt, synthetic construct
  source 1..21: mol_type = other RNA
gccaccccgtcctccacccca

SEQ ID NO: 89576 - RNA, 21 nt, synthetic construct
  source 1..21: mol_type = other RNA
ctccccctcccaaagtgctga

SEQ ID NO: 89577 - RNA, 21 nt, synthetic construct
  source 1..21: mol_type = other RNA
ggccaccacacccacagccaa

SEQ ID NO: 89578 - RNA, 21 nt, synthetic construct
  source 1..21: mol_type = other RNA
ccaaagccacttcctcctcca

SEQ ID NO: 89579 - RNA, 21 nt, synthetic construct
  source 1..21: mol_type = other RNA
cggggacgacctggatcctca

SEQ ID NO: 89580 - RNA, 21 nt, synthetic construct
  source 1..21: mol_type = other RNA
actggccccacggccacccca

SEQ ID NO: 89581 - RNA, 21 nt, synthetic construct
  source 1..21: mol_type = other RNA
ggccaccccgtcctccaccca

SEQ ID NO: 89582 - RNA, 21 nt, synthetic construct
  source 1..21: mol_type = other RNA
gccaccccgtcctccacccca

SEQ ID NO: 89583 - RNA, 21 nt, synthetic construct
  source 1..21: mol_type = other RNA
cagagctgaccacaacagcca

SEQ ID NO: 89584 - RNA, 21 nt, synthetic construct
  source 1..21: mol_type = other RNA
gctgaccacaacagccactaa

SEQ ID NO: 89585 - RNA, 21 nt, synthetic construct
  source 1..21: mol_type = other RNA
cgactgcgtccactggatcca

SEQ ID NO: 89586 - RNA, 21 nt, synthetic construct
  source 1..21: mol_type = other RNA
ggccaccccgtcctccaccca

SEQ ID NO: 89587 - RNA, 21 nt, synthetic construct
  source 1..21: mol_type = other RNA
gccaccccgtcctccacccca

SEQ ID NO: 89588 - RNA, 21 nt, synthetic construct
  source 1..21: mol_type = other RNA
tccacggccaccgcctcctca

SEQ ID NO: 89589 - RNA, 21 nt, synthetic construct
  source 1..21: mol_type = other RNA
ccacggccaccgcctcctcca

SEQ ID NO: 89590 - RNA, 21 nt, synthetic construct
  source 1..21: mol_type = other RNA
ccacccaggcaactgctggca

SEQ ID NO: 89591 - RNA, 21 nt, synthetic construct
  source 1..21: mol_type = other RNA
tccagtccagggactgcaaca

SEQ ID NO: 89592 - RNA, 21 nt, synthetic construct
  source 1..21: mol_type = other RNA
gtggccaccccctcctccaca

SEQ ID NO: 89593 - RNA, 21 nt, synthetic construct
  source 1..21: mol_type = other RNA
cggtgaccccctcctccatca

SEQ ID NO: 89594 - RNA, 21 nt, synthetic construct
  source 1..21: mol_type = other RNA
accagctccaaagccacttca

SEQ ID NO: 89595 - RNA, 21 nt, synthetic construct
  source 1..21: mol_type = other RNA
ccaaagccacttcctcctcca

SEQ ID NO: 89596 - RNA, 21 nt, synthetic construct
  source 1..21: mol_type = other RNA
ccatcccctcctccaccctga

SEQ ID NO: 89597 - RNA, 21 nt, synthetic construct
  source 1..21: mol_type = other RNA
accaccacagccaccatgaca

SEQ ID NO: 89598 - RNA, 21 nt, synthetic construct
  source 1..21: mol_type = other RNA
ccaccacagccaccatgacaa

SEQ ID NO: 89599 - RNA, 21 nt, synthetic construct
  source 1..21: mol_type = other RNA
ttccacggccacaccctccta

SEQ ID NO: 89600 - RNA, 21 nt, synthetic construct
  source 1..21: mol_type = other RNA
gctgaccacaacagccactaa

SEQ ID NO: 89601 - RNA, 21 nt, synthetic construct
  source 1..21: mol_type = other RNA
cctgtcctccaccccagggaa

SEQ ID NO: 89602 - RNA, 21 nt, synthetic construct
  source 1..21: mol_type = other RNA
ctgtcctccaccccagggaca

SEQ ID NO: 89603 - RNA, 21 nt, synthetic construct
  source 1..21: mol_type = other RNA
tccacggccaccgcctcctca

SEQ ID NO: 89604 - RNA, 21 nt, synthetic construct
  source 1..21: mol_type = other RNA
ccacggccaccgcctcctcca

SEQ ID NO: 89605 - RNA, 21 nt, synthetic construct
  source 1..21: mol_type = other RNA
acccactggcttccccagcta

SEQ ID NO: 89606 - RNA, 21 nt, synthetic construct
  source 1..21: mol_type = other RNA
cccactggcttccccagctca

SEQ ID NO: 89607 - RNA, 21 nt, synthetic construct
  source 1..21: mol_type = other RNA
gccactgccgctgccgcccga

SEQ ID NO: 89608 - RNA, 21 nt, synthetic construct
  source 1..21: mol_type = other RNA
cccgctgcccccgcgccctca

SEQ ID NO: 89609 - RNA, 21 nt, synthetic construct
  source 1..21: mol_type = other RNA
tcaatggccaagtcttccaga

SEQ ID NO: 89610 - RNA, 21 nt, synthetic construct
  source 1..21: mol_type = other RNA
acccacccccaccccatgcca

SEQ ID NO: 89611 - RNA, 21 nt, synthetic construct
  source 1..21: mol_type = other RNA
ccacccccaccccatgcccaa

SEQ ID NO: 89612 - RNA, 21 nt, synthetic construct
  source 1..21: mol_type = other RNA
gacctcacctgcccacccaca

SEQ ID NO: 89613 - RNA, 21 nt, synthetic construct
  source 1..21: mol_type = other RNA
taggaaccagagcccacagca

SEQ ID NO: 89614 - RNA, 21 nt, synthetic construct
  source 1..21: mol_type = other RNA
tacctgtccccagggctttga

SEQ ID NO: 89615 - RNA, 21 nt, synthetic construct
  source 1..21: mol_type = other RNA
gctccccctcccaaagtgcta

SEQ ID NO: 89616 - RNA, 21 nt, synthetic construct
  source 1..21: mol_type = other RNA
gctccccctcccaaagtgcta

SEQ ID NO: 89617 - RNA, 21 nt, synthetic construct
  source 1..21: mol_type = other RNA
gctccccctcccaaagtgcta

SEQ ID NO: 89618 - RNA, 21 nt, synthetic construct
  source 1..21: mol_type = other RNA
ccatcccctcctccaccctta

SEQ ID NO: 89619 - RNA, 21 nt, synthetic construct
  source 1..21: mol_type = other RNA
gccaccgcctcctccactcta

SEQ ID NO: 89620 - RNA, 21 nt, synthetic construct
  source 1..21: mol_type = other RNA
cctcctccactctgggaacaa

SEQ ID NO: 89621 - RNA, 21 nt, synthetic construct
  source 1..21: mol_type = other RNA
tggtgcatgggaaggaggaga

SEQ ID NO: 89622 - RNA, 21 nt, synthetic construct
  source 1..21: mol_type = other RNA
gtgcccaggcccagcctggta

SEQ ID NO: 89623 - RNA, 21 nt, synthetic construct
  source 1..21: mol_type = other RNA
gtgcccaggcccagcctggta

SEQ ID NO: 89624 - RNA, 21 nt, synthetic construct
  source 1..21: mol_type = other RNA
gtgcccaggcccagcctggta

SEQ ID NO: 89625 - RNA, 21 nt, synthetic construct
  source 1..21: mol_type = other RNA
gtgcccaggcccagcctggta

SEQ ID NO: 89626 - RNA, 21 nt, synthetic construct
  source 1..21: mol_type = other RNA
accagttccaaagccacttca

SEQ ID NO: 89627 - RNA, 21 nt, synthetic construct
  source 1..21: mol_type = other RNA
accagttccaaagccacttca

SEQ ID NO: 89628 - RNA, 21 nt, synthetic construct
  source 1..21: mol_type = other RNA
aagcacagggtgtgcagccca

SEQ ID NO: 89629 - RNA, 21 nt, synthetic construct
  source 1..21: mol_type = other RNA
agcacagggtgtgcagcccca

SEQ ID NO: 89630 - RNA, 21 nt, synthetic construct
  source 1..21: mol_type = other RNA
cacggccaccgcctcctccaa

SEQ ID NO: 89631 - RNA, 21 nt, synthetic construct
  source 1..21: mol_type = other RNA
ccagttccaaagccacttcca

SEQ ID NO: 89632 - RNA, 21 nt, synthetic construct
  source 1..21: mol_type = other RNA
cacggccaccgcctcctccaa

SEQ ID NO: 89633 - RNA, 21 nt, synthetic construct
  source 1..21: mol_type = other RNA
cacggccaccgcctcctccaa

SEQ ID NO: 89634 - RNA, 21 nt, synthetic construct
  source 1..21: mol_type = other RNA
ccagttccaaagccacttcca

SEQ ID NO: 89635 - RNA, 21 nt, synthetic construct
  source 1..21: mol_type = other RNA
cacggccaccgcctcctccaa

SEQ ID NO: 89636 - RNA, 21 nt, synthetic construct
  source 1..21: mol_type = other RNA
cacggccaccgcctcctccaa

SEQ ID NO: 89637 - RNA, 21 nt, synthetic construct
  source 1..21: mol_type = other RNA
aaagcacagggtgtgcagcca

SEQ ID NO: 89638 - RNA, 21 nt, synthetic construct
  source 1..21: mol_type = other RNA
cggccaccccgtcctccacca

SEQ ID NO: 89639 - RNA, 21 nt, synthetic construct
  source 1..21: mol_type = other RNA
cggccaccccgtcctccacca

SEQ ID NO: 89640 - RNA, 21 nt, synthetic construct
  source 1..21: mol_type = other RNA
cggccaccccgtcctccacca

SEQ ID NO: 89641 - RNA, 21 nt, synthetic construct
  source 1..21: mol_type = other RNA
cggccaccccgtcctccacca

SEQ ID NO: 89642 - RNA, 21 nt, synthetic construct
  source 1..21: mol_type = other RNA
cggccaccccgtcctccacca

SEQ ID NO: 89643 - RNA, 21 nt, synthetic construct
  source 1..21: mol_type = other RNA
cggccaccccgtcctccacca

SEQ ID NO: 89644 - RNA, 21 nt, synthetic construct
  source 1..21: mol_type = other RNA
gcggggtggtggaggccacga

SEQ ID NO: 89645 - RNA, 21 nt, synthetic construct
  source 1..21: mol_type = other RNA
tgccgctggaggagctgggca

SEQ ID NO: 89646 - RNA, 21 nt, synthetic construct
  source 1..21: mol_type = other RNA
actgccccagtaccccagcca

SEQ ID NO: 89647 - RNA, 21 nt, synthetic construct
  source 1..21: mol_type = other RNA
gccctttccagccctcaccca

SEQ ID NO: 89648 - RNA, 21 nt, synthetic construct
  source 1..21: mol_type = other RNA
agccacagccacacccagcaa

SEQ ID NO: 89649 - RNA, 21 nt, synthetic construct
  source 1..21: mol_type = other RNA
gccacagccacacccagcaaa

SEQ ID NO: 89650 - RNA, 21 nt, synthetic construct
  source 1..21: mol_type = other RNA
accccatgcccaccacagcca

SEQ ID NO: 89651 - RNA, 21 nt, synthetic construct
  source 1..21: mol_type = other RNA
ctcacagagccgagcactata

SEQ ID NO: 89652 - RNA, 21 nt, synthetic construct
  source 1..21: mol_type = other RNA
gaacaaactaagcatgtgcga

SEQ ID NO: 89653 - RNA, 21 nt, synthetic construct
  source 1..21: mol_type = other RNA
ccacagtgcttaccgccacga

SEQ ID NO: 89654 - RNA, 21 nt, synthetic construct
  source 1..21: mol_type = other RNA
ccacagtgcttaccgccacga

SEQ ID NO: 89655 - RNA, 21 nt, synthetic construct
  source 1..21: mol_type = other RNA
gccagagcctggaggcttaca

SEQ ID NO: 89656 - RNA, 21 nt, synthetic construct
  source 1..21: mol_type = other RNA
ccacacccatggccaccatga

SEQ ID NO: 89657 - RNA, 21 nt, synthetic construct
  source 1..21: mol_type = other RNA
cctcacagagccgagcactaa

SEQ ID NO: 89658 - RNA, 21 nt, synthetic construct
  source 1..21: mol_type = other RNA
cctcacagagccgagcactaa

SEQ ID NO: 89659 - RNA, 21 nt, synthetic construct
  source 1..21: mol_type = other RNA
cctcacagagccgagcactaa

SEQ ID NO: 89660 - RNA, 21 nt, synthetic construct
  source 1..21: mol_type = other RNA
cctcacagagccgagcactaa

SEQ ID NO: 89661 - RNA, 21 nt, synthetic construct
  source 1..21: mol_type = other RNA
tccacggccacgccctcctca

SEQ ID NO: 89662 - RNA, 21 nt, synthetic construct
  source 1..21: mol_type = other RNA
gctggctgacatcgagtgcca

SEQ ID NO: 89663 - RNA, 21 nt, synthetic construct
  source 1..21: mol_type = other RNA
gacattcctgtggaacggaga

SEQ ID NO: 89664 - RNA, 21 nt, synthetic construct
  source 1..21: mol_type = other RNA
agcagcaaccaccagtaccaa

SEQ ID NO: 89665 - RNA, 21 nt, synthetic construct
  source 1..21: mol_type = other RNA
accttcagcgtgtccactgta

SEQ ID NO: 89666 - RNA, 21 nt, synthetic construct
  source 1..21: mol_type = other RNA
gagtgcatctgcagcatgtga

SEQ ID NO: 89667 - RNA, 21 nt, synthetic construct
  source 1..21: mol_type = other RNA
atgccctgtgctggctgacaa

SEQ ID NO: 89668 - RNA, 21 nt, synthetic construct
  source 1..21: mol_type = other RNA
agcatcccaaagccccctcta

SEQ ID NO: 89669 - RNA, 21 nt, synthetic construct
  source 1..21: mol_type = other RNA
tctgcaggaaccgtgagcaga

SEQ ID NO: 89670 - RNA, 21 nt, synthetic construct
  source 1..21: mol_type = other RNA
tctgcaggaaccgtgagcaga

SEQ ID NO: 89671 - RNA, 21 nt, synthetic construct
  source 1..21: mol_type = other RNA
cctcacagagcagaccacaga

SEQ ID NO: 89672 - RNA, 21 nt, synthetic construct
  source 1..21: mol_type = other RNA
gtgctgaccagcacggccaca

SEQ ID NO: 89673 - RNA, 21 nt, synthetic construct
  source 1..21: mol_type = other RNA
gtgctgaccagcacggccaca

SEQ ID NO: 89674 - RNA, 21 nt, synthetic construct
  source 1..21: mol_type = other RNA
tctgcaggaaccgtgagcaga

SEQ ID NO: 89675 - RNA, 21 nt, synthetic construct
  source 1..21: mol_type = other RNA
tctgcaggaaccgtgagcaga

SEQ ID NO: 89676 - RNA, 21 nt, synthetic construct
  source 1..21: mol_type = other RNA
ccagtgctgaccagcacggca

SEQ ID NO: 89677 - RNA, 21 nt, synthetic construct
  source 1..21: mol_type = other RNA
gtgctgaccagcacggccaca

SEQ ID NO: 89678 - RNA, 21 nt, synthetic construct
  source 1..21: mol_type = other RNA
acagcagaaaggatggctgca

SEQ ID NO: 89679 - RNA, 21 nt, synthetic construct
  source 1..21: mol_type = other RNA
ggctggtccaggcaaggccaa

SEQ ID NO: 89680 - RNA, 21 nt, synthetic construct
  source 1..21: mol_type = other RNA
aatccacagctaccagcttta

SEQ ID NO: 89681 - RNA, 21 nt, synthetic construct
  source 1..21: mol_type = other RNA
agccacaaaatccacagctaa

SEQ ID NO: 89682 - RNA, 21 nt, synthetic construct
  source 1..21: mol_type = other RNA
aatccacagctaccagcttta

SEQ ID NO: 89683 - RNA, 21 nt, synthetic construct
  source 1..21: mol_type = other RNA
tgtccacctggagccaggata

SEQ ID NO: 89684 - RNA, 21 nt, synthetic construct
  source 1..21: mol_type = other RNA
gcctgctgcagggtaactcaa

SEQ ID NO: 89685 - RNA, 21 nt, synthetic construct
  source 1..21: mol_type = other RNA
tgtgacaatgccatccctcta

SEQ ID NO: 89686 - RNA, 21 nt, synthetic construct
  source 1..21: mol_type = other RNA
cacctcgggcatcttgggcaa

SEQ ID NO: 89687 - RNA, 21 nt, synthetic construct
  source 1..21: mol_type = other RNA
ccacctcaggcaccttgggca

SEQ ID NO: 89688 - RNA, 21 nt, synthetic construct
  source 1..21: mol_type = other RNA
cacctcgggcatcttgggcaa

SEQ ID NO: 89689 - RNA, 21 nt, synthetic construct
  source 1..21: mol_type = other RNA
ccacctcaggcaccttgggca

SEQ ID NO: 89690 - RNA, 21 nt, synthetic construct
  source 1..21: mol_type = other RNA
agcatccggtcgacggcggca

SEQ ID NO: 89691 - RNA, 21 nt, synthetic construct
  source 1..21: mol_type = other RNA
agcagcacagtgactccctca

SEQ ID NO: 89692 - RNA, 21 nt, synthetic construct
  source 1..21: mol_type = other RNA
agcagcacagtgactccctca

SEQ ID NO: 89693 - RNA, 21 nt, synthetic construct
  source 1..21: mol_type = other RNA
agcagcacagtgactccctca

SEQ ID NO: 89694 - RNA, 21 nt, synthetic construct
  source 1..21: mol_type = other RNA
cggaagaccagcgtgttcata

SEQ ID NO: 89695 - RNA, 21 nt, synthetic construct
  source 1..21: mol_type = other RNA
accacggccacggccacacca

SEQ ID NO: 89696 - RNA, 21 nt, synthetic construct
  source 1..21: mol_type = other RNA
accacggccacggccacacca

SEQ ID NO: 89697 - RNA, 21 nt, synthetic construct
  source 1..21: mol_type = other RNA
cccctgaacccggcgcacaaa

SEQ ID NO: 89698 - RNA, 21 nt, synthetic construct
  source 1..21: mol_type = other RNA
ccagcagcctaaggacataga

SEQ ID NO: 89699 - RNA, 21 nt, synthetic construct
  source 1..21: mol_type = other RNA
caaagtgccaactaccacaaa

SEQ ID NO: 89700 - RNA, 21 nt, synthetic construct
  source 1..21: mol_type = other RNA
ctcacagagccgagcactaca

SEQ ID NO: 89701 - RNA, 21 nt, synthetic construct
  source 1..21: mol_type = other RNA
ctcacagagccgagcactaca

SEQ ID NO: 89702 - RNA, 21 nt, synthetic construct
  source 1..21: mol_type = other RNA
ctcacagagccgagcactaca

SEQ ID NO: 89703 - RNA, 21 nt, synthetic construct
  source 1..21: mol_type = other RNA
ccacagtgctgaccacgaaga

SEQ ID NO: 89704 - RNA, 21 nt, synthetic construct
  source 1..21: mol_type = other RNA
ccacagtgctgaccacgaaga

SEQ ID NO: 89705 - RNA, 21 nt, synthetic construct
  source 1..21: mol_type = other RNA
cctcacaaagctgaccacaaa

SEQ ID NO: 89706 - RNA, 21 nt, synthetic construct
  source 1..21: mol_type = other RNA
cgtgcaaccgtcccggcttca

SEQ ID NO: 89707 - RNA, 21 nt, synthetic construct
  source 1..21: mol_type = other RNA
taaccgtgaccaggccccgga

SEQ ID NO: 89708 - RNA, 21 nt, synthetic construct
  source 1..21: mol_type = other RNA
gcccctgctacgctcacggca

SEQ ID NO: 89709 - RNA, 21 nt, synthetic construct
  source 1..21: mol_type = other RNA
gctcacactaccaaagtgcta

SEQ ID NO: 89710 - RNA, 21 nt, synthetic construct
  source 1..21: mol_type = other RNA
ggctggtgtcggatgggagta

SEQ ID NO: 89711 - RNA, 21 nt, synthetic construct
  source 1..21: mol_type = other RNA
ccagtgccgaacaccatggca

SEQ ID NO: 89712 - RNA, 21 nt, synthetic construct
  source 1..21: mol_type = other RNA
tagcagcagaaccaccgagta

SEQ ID NO: 89713 - RNA, 21 nt, synthetic construct
  source 1..21: mol_type = other RNA
gtgctgaccagcccggccaca

SEQ ID NO: 89714 - RNA, 21 nt, synthetic construct
  source 1..21: mol_type = other RNA
cctcccagaacagaccaccaa

SEQ ID NO: 89715 - RNA, 21 nt, synthetic construct
  source 1..21: mol_type = other RNA
cctcccagaacagaccaccaa

SEQ ID NO: 89716 - RNA, 21 nt, synthetic construct
  source 1..21: mol_type = other RNA
agcatccggctggtgctgaca

SEQ ID NO: 89717 - RNA, 21 nt, synthetic construct
  source 1..21: mol_type = other RNA
cctcccaaagtgctgaccaca

SEQ ID NO: 89718 - RNA, 21 nt, synthetic construct
  source 1..21: mol_type = other RNA
gagcaccacggccacgacaca

SEQ ID NO: 89719 - RNA, 21 nt, synthetic construct
  source 1..21: mol_type = other RNA
ccagcagcacagtgactccca

SEQ ID NO: 89720 - RNA, 21 nt, synthetic construct
  source 1..21: mol_type = other RNA
ccagcagcacagtgactccca

SEQ ID NO: 89721 - RNA, 21 nt, synthetic construct
  source 1..21: mol_type = other RNA
gagcaccacggccacgacaca

SEQ ID NO: 89722 - RNA, 21 nt, synthetic construct
  source 1..21: mol_type = other RNA
ccagcagcacagtgactccca

SEQ ID NO: 89723 - RNA, 21 nt, synthetic construct
  source 1..21: mol_type = other RNA
gagcaccacggccacgacaca

SEQ ID NO: 89724 - RNA, 21 nt, synthetic construct
  source 1..21: mol_type = other RNA
acagtgctgaccaccacagca

SEQ ID NO: 89725 - RNA, 21 nt, synthetic construct
  source 1..21: mol_type = other RNA
gctcacacccccaaagtggta

SEQ ID NO: 89726 - RNA, 21 nt, synthetic construct
  source 1..21: mol_type = other RNA
caaagtggtgaccaccatgga

SEQ ID NO: 89727 - RNA, 21 nt, synthetic construct
  source 1..21: mol_type = other RNA
acccctgctgccccgagacga

SEQ ID NO: 89728 - RNA, 21 nt, synthetic construct
  source 1..21: mol_type = other RNA
accttgggcctcctctgcgga

SEQ ID NO: 89729 - RNA, 21 nt, synthetic construct
  source 1..21: mol_type = other RNA
tgccaccgcaccctgctggga

SEQ ID NO: 89730 - RNA, 21 nt, synthetic construct
  source 1..21: mol_type = other RNA
cctcacaaagccgaccacaaa

SEQ ID NO: 89731 - RNA, 21 nt, synthetic construct
  source 1..21: mol_type = other RNA
actttggcctggtctgcagga

SEQ ID NO: 89732 - RNA, 21 nt, synthetic construct
  source 1..21: mol_type = other RNA
ccggggccaccggctctgtga

SEQ ID NO: 89733 - RNA, 21 nt, synthetic construct
  source 1..21: mol_type = other RNA
gccacctcaggcaccttggga

SEQ ID NO: 89734 - RNA, 21 nt, synthetic construct
  source 1..21: mol_type = other RNA
actttggcctggtctgcagga

SEQ ID NO: 89735 - RNA, 21 nt, synthetic construct
  source 1..21: mol_type = other RNA
cctcacagagctgaccacaga

SEQ ID NO: 89736 - RNA, 21 nt, synthetic construct
  source 1..21: mol_type = other RNA
ctcacagagctgaccacagca

SEQ ID NO: 89737 - RNA, 21 nt, synthetic construct
  source 1..21: mol_type = other RNA
gctgaccacagcagccactaa

SEQ ID NO: 89738 - RNA, 21 nt, synthetic construct
  source 1..21: mol_type = other RNA
actttggcctggtctgcagga

SEQ ID NO: 89739 - RNA, 21 nt, synthetic construct
  source 1..21: mol_type = other RNA
gccacctcaggcaccttggga

SEQ ID NO: 89740 - RNA, 21 nt, synthetic construct
  source 1..21: mol_type = other RNA
actttggcctggtctgcagga

SEQ ID NO: 89741 - RNA, 21 nt, synthetic construct
  source 1..21: mol_type = other RNA
cctcacagagctgaccacaga

SEQ ID NO: 89742 - RNA, 21 nt, synthetic construct
  source 1..21: mol_type = other RNA
ctcacagagctgaccacagca

SEQ ID NO: 89743 - RNA, 21 nt, synthetic construct
  source 1..21: mol_type = other RNA
gctgaccacagcagccactaa

SEQ ID NO: 89744 - RNA, 21 nt, synthetic construct
  source 1..21: mol_type = other RNA
ccggggccaccggctctgtga

SEQ ID NO: 89745 - RNA, 21 nt, synthetic construct
  source 1..21: mol_type = other RNA
gagccggctgccatttctaca

SEQ ID NO: 89746 - RNA, 21 nt, synthetic construct
  source 1..21: mol_type = other RNA
gggccgccttgaggtgcccta

SEQ ID NO: 89747 - RNA, 21 nt, synthetic construct
  source 1..21: mol_type = other RNA
gccaggagaggcgggtccaca

SEQ ID NO: 89748 - RNA, 21 nt, synthetic construct
  source 1..21: mol_type = other RNA
gtccggccgctggggcagaca

SEQ ID NO: 89749 - RNA, 21 nt, synthetic construct
  source 1..21: mol_type = other RNA
atcctgcacacctacacccaa

SEQ ID NO: 89750 - RNA, 21 nt, synthetic construct
  source 1..21: mol_type = other RNA
tacggccacgccctcctccaa

SEQ ID NO: 89751 - RNA, 21 nt, synthetic construct
  source 1..21: mol_type = other RNA
cccctcccaaagtgctgacca

SEQ ID NO: 89752 - RNA, 21 nt, synthetic construct
  source 1..21: mol_type = other RNA
cccctcccaaagtgctgacca

SEQ ID NO: 89753 - RNA, 21 nt, synthetic construct
  source 1..21: mol_type = other RNA
cccctcccaaagtgctgacca

SEQ ID NO: 89754 - RNA, 21 nt, synthetic construct
  source 1..21: mol_type = other RNA
cccctcctcaactccagggaa

SEQ ID NO: 89755 - RNA, 21 nt, synthetic construct
  source 1..21: mol_type = other RNA
cccctcctcaactccagggaa

SEQ ID NO: 89756 - RNA, 21 nt, synthetic construct
  source 1..21: mol_type = other RNA
cccctcctcaactccagggaa

SEQ ID NO: 89757 - RNA, 21 nt, synthetic construct
  source 1..21: mol_type = other RNA
cccctcctcaactccagggaa

SEQ ID NO: 89758 - RNA, 21 nt, synthetic construct
  source 1..21: mol_type = other RNA
tggtgaccaccatggccacta

SEQ ID NO: 89759 - RNA, 21 nt, synthetic construct
  source 1..21: mol_type = other RNA
cccggccctcccggtctccaa

SEQ ID NO: 89760 - RNA, 21 nt, synthetic construct
  source 1..21: mol_type = other RNA
tggaatgcagcctggacttta

SEQ ID NO: 89761 - RNA, 21 nt, synthetic construct
  source 1..21: mol_type = other RNA
tggaatgcagcctggacttta

SEQ ID NO: 89762 - RNA, 21 nt, synthetic construct
  source 1..21: mol_type = other RNA
tggaatgcagcctggacttta

SEQ ID NO: 89763 - RNA, 21 nt, synthetic construct
  source 1..21: mol_type = other RNA
tggaatgcagcctggacttta

SEQ ID NO: 89764 - RNA, 21 nt, synthetic construct
  source 1..21: mol_type = other RNA
ttggcccaggactactgtgga

SEQ ID NO: 89765 - RNA, 21 nt, synthetic construct
  source 1..21: mol_type = other RNA
ctcaacatgcagcaccaggaa

SEQ ID NO: 89766 - RNA, 21 nt, synthetic construct
  source 1..21: mol_type = other RNA
ttcaacaccacctgcagctca

SEQ ID NO: 89767 - RNA, 21 nt, synthetic construct
  source 1..21: mol_type = other RNA
ctcacagccacccacgctgga

SEQ ID NO: 89768 - RNA, 21 nt, synthetic construct
  source 1..21: mol_type = other RNA
ggtgcaagggtccccacagca

SEQ ID NO: 89769 - RNA, 21 nt, synthetic construct
  source 1..21: mol_type = other RNA
cctcacagagctgaccacaaa

SEQ ID NO: 89770 - RNA, 21 nt, synthetic construct
  source 1..21: mol_type = other RNA
cctcacagagctgaccacaaa

SEQ ID NO: 89771 - RNA, 21 nt, synthetic construct
  source 1..21: mol_type = other RNA
cctcacagagctgaccacaaa

SEQ ID NO: 89772 - RNA, 21 nt, synthetic construct
  source 1..21: mol_type = other RNA
ggctggtgctgacattcctga

SEQ ID NO: 89773 - RNA, 21 nt, synthetic construct
  source 1..21: mol_type = other RNA
gatgcctgccagcccacttga

SEQ ID NO: 89774 - RNA, 21 nt, synthetic construct
  source 1..21: mol_type = other RNA
cctcacagagcccagcactaa

SEQ ID NO: 89775 - RNA, 21 nt, synthetic construct
  source 1..21: mol_type = other RNA
ctcacagagcccagcactaca

SEQ ID NO: 89776 - RNA, 21 nt, synthetic construct
  source 1..21: mol_type = other RNA
actgcagccactggatccaca

SEQ ID NO: 89777 - RNA, 21 nt, synthetic construct
  source 1..21: mol_type = other RNA
tcagcagaggcccaggccata

SEQ ID NO: 89778 - RNA, 21 nt, synthetic construct
  source 1..21: mol_type = other RNA
gctggtccagctggtacaata

SEQ ID NO: 89779 - RNA, 21 nt, synthetic construct
  source 1..21: mol_type = other RNA
ctggtcagagtggctggacta

SEQ ID NO: 89780 - RNA, 21 nt, synthetic construct
  source 1..21: mol_type = other RNA
ctggtcagagtggctggacta

SEQ ID NO: 89781 - RNA, 21 nt, synthetic construct
  source 1..21: mol_type = other RNA
ctggtcagagtggctggacta

SEQ ID NO: 89782 - RNA, 21 nt, synthetic construct
  source 1..21: mol_type = other RNA
ctggtcagagtggctggacta

SEQ ID NO: 89783 - RNA, 21 nt, synthetic construct
  source 1..21: mol_type = other RNA
ggctgcttctgccctgaggaa

SEQ ID NO: 89784 - RNA, 21 nt, synthetic construct
  source 1..21: mol_type = other RNA
cactgccgctgccgcccgcta

SEQ ID NO: 89785 - RNA, 21 nt, synthetic construct
  source 1..21: mol_type = other RNA
tacgcccaggcctgccacgaa

SEQ ID NO: 89786 - RNA, 21 nt, synthetic construct
  source 1..21: mol_type = other RNA
cccctcctcctccctgggcaa

SEQ ID NO: 89787 - RNA, 21 nt, synthetic construct
  source 1..21: mol_type = other RNA
cccctcctcctccctgggcaa

SEQ ID NO: 89788 - RNA, 21 nt, synthetic construct
  source 1..21: mol_type = other RNA
cccctcctcctccctgggcaa

SEQ ID NO: 89789 - RNA, 21 nt, synthetic construct
  source 1..21: mol_type = other RNA
ccactgccgctgccgcccgca

SEQ ID NO: 89790 - RNA, 21 nt, synthetic construct
  source 1..21: mol_type = other RNA
gccagccccgcagccccggta

SEQ ID NO: 89791 - RNA, 21 nt, synthetic construct
  source 1..21: mol_type = other RNA
acgccctggaacaaactaaga

SEQ ID NO: 89792 - RNA, 21 nt, synthetic construct
  source 1..21: mol_type = other RNA
ctgccctagggaccacccaca

SEQ ID NO: 89793 - RNA, 21 nt, synthetic construct
  source 1..21: mol_type = other RNA
ctgccctagggaccacccaca

SEQ ID NO: 89794 - RNA, 21 nt, synthetic construct
  source 1..21: mol_type = other RNA
ctgccctagggaccacccaca

SEQ ID NO: 89795 - RNA, 21 nt, synthetic construct
  source 1..21: mol_type = other RNA
ctgccctagggaccacccaca

SEQ ID NO: 89796 - RNA, 21 nt, synthetic construct
  source 1..21: mol_type = other RNA
ggtgcaatgtcaggaggatga

SEQ ID NO: 89797 - RNA, 21 nt, synthetic construct
  source 1..21: mol_type = other RNA
gctgagctgcggaagtgcgga

SEQ ID NO: 89798 - RNA, 21 nt, synthetic construct
  source 1..21: mol_type = other RNA
atgctgagccaggtctttgca

SEQ ID NO: 89799 - RNA, 21 nt, synthetic construct
  source 1..21: mol_type = other RNA
ggaggggcagtctgtgagcaa

SEQ ID NO: 89800 - RNA, 21 nt, synthetic construct
  source 1..21: mol_type = other RNA
caaagtgctgaccagcccgga

SEQ ID NO: 89801 - RNA, 21 nt, synthetic construct
  source 1..21: mol_type = other RNA
ccacagtgctgaccaccacaa

SEQ ID NO: 89802 - RNA, 21 nt, synthetic construct
  source 1..21: mol_type = other RNA
catggctcccccacacaccca

SEQ ID NO: 89803 - RNA, 21 nt, synthetic construct
  source 1..21: mol_type = other RNA
agccccccggcctgtgtgtga

SEQ ID NO: 89804 - RNA, 21 nt, synthetic construct
  source 1..21: mol_type = other RNA
gccccccggcctgtgtgtgga

SEQ ID NO: 89805 - RNA, 21 nt, synthetic construct
  source 1..21: mol_type = other RNA
aggacggaaactactatgaca

SEQ ID NO: 89806 - RNA, 21 nt, synthetic construct
  source 1..21: mol_type = other RNA
cagctgcgagtacatcttgga

SEQ ID NO: 89807 - RNA, 21 nt, synthetic construct
  source 1..21: mol_type = other RNA
ccagtgctgaccaccaccgca

SEQ ID NO: 89808 - RNA, 21 nt, synthetic construct
  source 1..21: mol_type = other RNA
gtgctgaccaccaccgccaca

SEQ ID NO: 89809 - RNA, 21 nt, synthetic construct
  source 1..21: mol_type = other RNA
tagcagcaaccaccggtacca

SEQ ID NO: 89810 - RNA, 21 nt, synthetic construct
  source 1..21: mol_type = other RNA
agcagcaaccaccggtaccaa

SEQ ID NO: 89811 - RNA, 21 nt, synthetic construct
  source 1..21: mol_type = other RNA
ccagtgctgaccaccaccgca

SEQ ID NO: 89812 - RNA, 21 nt, synthetic construct
  source 1..21: mol_type = other RNA
gtgctgaccaccaccgccaca

SEQ ID NO: 89813 - RNA, 21 nt, synthetic construct
  source 1..21: mol_type = other RNA
cagcagcaaccaccggtacca

SEQ ID NO: 89814 - RNA, 21 nt, synthetic construct
  source 1..21: mol_type = other RNA
agcagcaaccaccggtaccaa

SEQ ID NO: 89815 - RNA, 21 nt, synthetic construct
  source 1..21: mol_type = other RNA
ccagtgctgaccaccaccgca

SEQ ID NO: 89816 - RNA, 21 nt, synthetic construct
  source 1..21: mol_type = other RNA
gtgctgaccaccaccgccaca

SEQ ID NO: 89817 - RNA, 21 nt, synthetic construct
  source 1..21: mol_type = other RNA
cagcagcaaccaccagtacca

SEQ ID NO: 89818 - RNA, 21 nt, synthetic construct
  source 1..21: mol_type = other RNA
ccagtgctgaccaccaccgca

SEQ ID NO: 89819 - RNA, 21 nt, synthetic construct
  source 1..21: mol_type = other RNA
gtgctgaccaccaccgccaca

SEQ ID NO: 89820 - RNA, 21 nt, synthetic construct
  source 1..21: mol_type = other RNA
cagcagcaaccaccggtacca

SEQ ID NO: 89821 - RNA, 21 nt, synthetic construct
  source 1..21: mol_type = other RNA
agcagcaaccaccggtaccaa

SEQ ID NO: 89822 - RNA, 21 nt, synthetic construct
  source 1..21: mol_type = other RNA
ccccctgggggagttgggcca

SEQ ID NO: 89823 - RNA, 21 nt, synthetic construct
  source 1..21: mol_type = other RNA
gtgtgcgtgtgcaacacaaca

SEQ ID NO: 89824 - RNA, 21 nt, synthetic construct
  source 1..21: mol_type = other RNA
caatactacctgtccccagga

SEQ ID NO: 89825 - RNA, 21 nt, synthetic construct
  source 1..21: mol_type = other RNA
gcgaggaccactgtgtggaca

SEQ ID NO: 89826 - RNA, 21 nt, synthetic construct
  source 1..21: mol_type = other RNA
cagcagcacagtgactcccta

SEQ ID NO: 89827 - RNA, 21 nt, synthetic construct
  source 1..21: mol_type = other RNA
cctggacttcggccacctcaa

SEQ ID NO: 89828 - RNA, 21 nt, synthetic construct
  source 1..21: mol_type = other RNA
cagcagcacagtgactcccta

SEQ ID NO: 89829 - RNA, 21 nt, synthetic construct
  source 1..21: mol_type = other RNA
cagcagcacagtgactcccta

SEQ ID NO: 89830 - RNA, 21 nt, synthetic construct
  source 1..21: mol_type = other RNA
cctggacttcggccacctcaa

SEQ ID NO: 89831 - RNA, 21 nt, synthetic construct
  source 1..21: mol_type = other RNA
gatggctgctgggccccgaca

SEQ ID NO: 89832 - RNA, 21 nt, synthetic construct
  source 1..21: mol_type = other RNA
cggctcagccatcctgcacaa

SEQ ID NO: 89833 - RNA, 21 nt, synthetic construct
  source 1..21: mol_type = other RNA
atgtgcgggcctatgtgtcca

SEQ ID NO: 89834 - RNA, 21 nt, synthetic construct
  source 1..21: mol_type = other RNA
gcccctgtgtgcacaacgaga

SEQ ID NO: 89835 - RNA, 21 nt, synthetic construct
  source 1..21: mol_type = other RNA
aatggcaacctccagagctca

SEQ ID NO: 89836 - RNA, 21 nt, synthetic construct
  source 1..21: mol_type = other RNA
gtcaacatcaccttctgcgaa

SEQ ID NO: 89837 - RNA, 21 nt, synthetic construct
  source 1..21: mol_type = other RNA
gctgcagggtaactcagggca

SEQ ID NO: 89838 - RNA, 21 nt, synthetic construct
  source 1..21: mol_type = other RNA
cagcacctggggtgacttcca

SEQ ID NO: 89839 - RNA, 21 nt, synthetic construct
  source 1..21: mol_type = other RNA
ccagcagcaaccaccagtaca

SEQ ID NO: 89840 - RNA, 21 nt, synthetic construct
  source 1..21: mol_type = other RNA
gctggctgagctgcggaagta

SEQ ID NO: 89841 - RNA, 21 nt, synthetic construct
  source 1..21: mol_type = other RNA
cggagactttgagacgtttga

SEQ ID NO: 89842 - RNA, 21 nt, synthetic construct
  source 1..21: mol_type = other RNA
accctgagaacagctccccca

SEQ ID NO: 89843 - RNA, 21 nt, synthetic construct
  source 1..21: mol_type = other RNA
cagcagccactacaactgcaa

SEQ ID NO: 89844 - RNA, 21 nt, synthetic construct
  source 1..21: mol_type = other RNA
cagcagccactacaactgcaa

SEQ ID NO: 89845 - RNA, 21 nt, synthetic construct
  source 1..21: mol_type = other RNA
gaatctcagcctctacctgga

SEQ ID NO: 89846 - RNA, 21 nt, synthetic construct
  source 1..21: mol_type = other RNA
cctggacaaccactactgcaa

SEQ ID NO: 89847 - RNA, 21 nt, synthetic construct
  source 1..21: mol_type = other RNA
tcctgctgcccaccccgtgga

SEQ ID NO: 89848 - RNA, 21 nt, synthetic construct
  source 1..21: mol_type = other RNA
cgcagcacggattccagctga

SEQ ID NO: 89849 - RNA, 21 nt, synthetic construct
  source 1..21: mol_type = other RNA
tgccgacagcagcttcaccga

SEQ ID NO: 89850 - RNA, 21 nt, synthetic construct
  source 1..21: mol_type = other RNA
ccaacagccaacagagtccca

SEQ ID NO: 89851 - RNA, 21 nt, synthetic construct
  source 1..21: mol_type = other RNA
ccctcccaaagtgctgaccaa

SEQ ID NO: 89852 - RNA, 21 nt, synthetic construct
  source 1..21: mol_type = other RNA
cctgtccagccctcaccctaa

SEQ ID NO: 89853 - RNA, 21 nt, synthetic construct
  source 1..21: mol_type = other RNA
ccctcccaaagtgctgaccaa

SEQ ID NO: 89854 - RNA, 21 nt, synthetic construct
  source 1..21: mol_type = other RNA
cctgtccagccctcaccctaa

SEQ ID NO: 89855 - RNA, 21 nt, synthetic construct
  source 1..21: mol_type = other RNA
cctgtccagccctcaccctaa

SEQ ID NO: 89856 - RNA, 21 nt, synthetic construct
  source 1..21: mol_type = other RNA
ccctcccaaagtgctgaccaa

SEQ ID NO: 89857 - RNA, 21 nt, synthetic construct
  source 1..21: mol_type = other RNA
cagccacaaaatccacagcta

SEQ ID NO: 89858 - RNA, 21 nt, synthetic construct
  source 1..21: mol_type = other RNA
ctgcacacctacacccacgta

SEQ ID NO: 89859 - RNA, 21 nt, synthetic construct
  source 1..21: mol_type = other RNA
aagcacccttggtacagccaa

SEQ ID NO: 89860 - RNA, 21 nt, synthetic construct
  source 1..21: mol_type = other RNA
gtgcccttgcactgtcctaaa

SEQ ID NO: 89861 - RNA, 21 nt, synthetic construct
  source 1..21: mol_type = other RNA
caatgccatcaatgactttga

SEQ ID NO: 89862 - RNA, 21 nt, synthetic construct
  source 1..21: mol_type = other RNA
gtgctgacaagcacagccaca

SEQ ID NO: 89863 - RNA, 21 nt, synthetic construct
  source 1..21: mol_type = other RNA
gctggtgcagctggtgccaca

SEQ ID NO: 89864 - RNA, 21 nt, synthetic construct
  source 1..21: mol_type = other RNA
cagcagcttcaccgtgctgga

SEQ ID NO: 89865 - RNA, 21 nt, synthetic construct
  source 1..21: mol_type = other RNA
ccggatccacggccaccgcca

SEQ ID NO: 89866 - RNA, 21 nt, synthetic construct
  source 1..21: mol_type = other RNA
ccggatccacggccaccgcca

SEQ ID NO: 89867 - RNA, 21 nt, synthetic construct
  source 1..21: mol_type = other RNA
ccggatccacggccaccgcca

SEQ ID NO: 89868 - RNA, 21 nt, synthetic construct
  source 1..21: mol_type = other RNA
ccggatccacggccaccgcca

SEQ ID NO: 89869 - RNA, 21 nt, synthetic construct
  source 1..21: mol_type = other RNA
gctcccactattccaccttta

SEQ ID NO: 89870 - RNA, 21 nt, synthetic construct
  source 1..21: mol_type = other RNA
gtgcattgtctgatcatgaaa

SEQ ID NO: 89871 - RNA, 21 nt, synthetic construct
  source 1..21: mol_type = other RNA
aggagtgtggctcaccctgca

SEQ ID NO: 89872 - RNA, 21 nt, synthetic construct
  source 1..21: mol_type = other RNA
cggagaccacccacacctcca

SEQ ID NO: 89873 - RNA, 21 nt, synthetic construct
  source 1..21: mol_type = other RNA
ccacagtcatcagctccagaa

SEQ ID NO: 89874 - RNA, 21 nt, synthetic construct
  source 1..21: mol_type = other RNA
cggagaccacccacacctcca

SEQ ID NO: 89875 - RNA, 21 nt, synthetic construct
  source 1..21: mol_type = other RNA
cagcagcctgccaaccttcaa

SEQ ID NO: 89876 - RNA, 21 nt, synthetic construct
  source 1..21: mol_type = other RNA
tggactgcagcaacagctcga

SEQ ID NO: 89877 - RNA, 21 nt, synthetic construct
  source 1..21: mol_type = other RNA
tggcgagagggccgggtggga

SEQ ID NO: 89878 - RNA, 21 nt, synthetic construct
  source 1..21: mol_type = other RNA
gccctgggcgtgagcgtcaca

SEQ ID NO: 89879 - RNA, 21 nt, synthetic construct
  source 1..21: mol_type = other RNA
ctgccagagcctggaggctta

SEQ ID NO: 89880 - RNA, 21 nt, synthetic construct
  source 1..21: mol_type = other RNA
caaccgtgtcgtcctgctgga

SEQ ID NO: 89881 - RNA, 21 nt, synthetic construct
  source 1..21: mol_type = other RNA
cctcacagccacccacgctga

SEQ ID NO: 89882 - RNA, 21 nt, synthetic construct
  source 1..21: mol_type = other RNA
actctgggaacagctcacaca

SEQ ID NO: 89883 - RNA, 21 nt, synthetic construct
  source 1..21: mol_type = other RNA
tgtgcaatcagcactgtgaca

SEQ ID NO: 89884 - RNA, 21 nt, synthetic construct
  source 1..21: mol_type = other RNA
tgtgcaacacaaccacctgca

SEQ ID NO: 89885 - RNA, 21 nt, synthetic construct
  source 1..21: mol_type = other RNA
acaagagagtggccgggcaga

SEQ ID NO: 89886 - RNA, 21 nt, synthetic construct
  source 1..21: mol_type = other RNA
atcacagccaccggctccaca

SEQ ID NO: 89887 - RNA, 21 nt, synthetic construct
  source 1..21: mol_type = other RNA
cctgcaggaaccggaggtgga

SEQ ID NO: 89888 - RNA, 21 nt, synthetic construct
  source 1..21: mol_type = other RNA
cgctacagctttgaaggcaga

SEQ ID NO: 89889 - RNA, 21 nt, synthetic construct
  source 1..21: mol_type = other RNA
ctgtgctggctgacatcgaga

SEQ ID NO: 89890 - RNA, 21 nt, synthetic construct
  source 1..21: mol_type = other RNA
gaggagctgggccagcaggta

SEQ ID NO: 89891 - RNA, 21 nt, synthetic construct
  source 1..21: mol_type = other RNA
tccttcacccttgggaccaca

SEQ ID NO: 89892 - RNA, 21 nt, synthetic construct
  source 1..21: mol_type = other RNA
ctgtgctggggaccaccacca

SEQ ID NO: 89893 - RNA, 21 nt, synthetic construct
  source 1..21: mol_type = other RNA
gacattcctgccctgggcgta

SEQ ID NO: 89894 - RNA, 21 nt, synthetic construct
  source 1..21: mol_type = other RNA
tgaccagcacggccaccacaa

SEQ ID NO: 89895 - RNA, 21 nt, synthetic construct
  source 1..21: mol_type = other RNA
tgaccagcacggccaccacaa

SEQ ID NO: 89896 - RNA, 21 nt, synthetic construct
  source 1..21: mol_type = other RNA
tgaccagcacggccaccacaa

SEQ ID NO: 89897 - RNA, 21 nt, synthetic construct
  source 1..21: mol_type = other RNA
ccggatcctcactgagctgaa

SEQ ID NO: 89898 - RNA, 21 nt, synthetic construct
  source 1..21: mol_type = other RNA
tgtgacattgaccgcttccaa

SEQ ID NO: 89899 - RNA, 21 nt, synthetic construct
  source 1..21: mol_type = other RNA
caccctgcacggacacctgca

SEQ ID NO: 89900 - RNA, 21 nt, synthetic construct
  source 1..21: mol_type = other RNA
ctgtgcgacctcacctgccca

SEQ ID NO: 89901 - RNA, 21 nt, synthetic construct
  source 1..21: mol_type = other RNA
catgtgcgggcctatgtgtca

SEQ ID NO: 89902 - RNA, 21 nt, synthetic construct
  source 1..21: mol_type = other RNA
gtgctgacattcctgtggaaa

SEQ ID NO: 89903 - RNA, 21 nt, synthetic construct
  source 1..21: mol_type = other RNA
aatgtgccgacagcagcttca

SEQ ID NO: 89904 - RNA, 21 nt, synthetic construct
  source 1..21: mol_type = other RNA
ccaagaggggacctttaagga

SEQ ID NO: 89905 - RNA, 21 nt, synthetic construct
  source 1..21: mol_type = other RNA
acgccctggcacccaaggaca

SEQ ID NO: 89906 - RNA, 21 nt, synthetic construct
  source 1..21: mol_type = other RNA
gcctgcttgatcgccatctga

SEQ ID NO: 89907 - RNA, 21 nt, synthetic construct
  source 1..21: mol_type = other RNA
actggaccctggcacaggtga

SEQ ID NO: 89908 - RNA, 21 nt, synthetic construct
  source 1..21: mol_type = other RNA
ccgcccttccagcactgagaa

SEQ ID NO: 89909 - RNA, 21 nt, synthetic construct
  source 1..21: mol_type = other RNA
gaaccgtgagcaggtggggaa

SEQ ID NO: 89910 - RNA, 21 nt, synthetic construct
  source 1..21: mol_type = other RNA
ccgcccttccagcactgagaa

SEQ ID NO: 89911 - RNA, 21 nt, synthetic construct
  source 1..21: mol_type = other RNA
gaaccgtgagcaggtggggaa

SEQ ID NO: 89912 - RNA, 21 nt, synthetic construct
  source 1..21: mol_type = other RNA
ccgcccttccagcactgagaa

SEQ ID NO: 89913 - RNA, 21 nt, synthetic construct
  source 1..21: mol_type = other RNA
gaaccgtgagcaggtggggaa

SEQ ID NO: 89914 - RNA, 21 nt, synthetic construct
  source 1..21: mol_type = other RNA
ccgcccttccagcactgagaa

SEQ ID NO: 89915 - RNA, 21 nt, synthetic construct
  source 1..21: mol_type = other RNA
gaaccgtgagcaggtggggaa

SEQ ID NO: 89916 - RNA, 21 nt, synthetic construct
  source 1..21: mol_type = other RNA
ctgcccttccagcactgagaa

SEQ ID NO: 89917 - RNA, 21 nt, synthetic construct
  source 1..21: mol_type = other RNA
caccctgtggaccacgtggaa

SEQ ID NO: 89918 - RNA, 21 nt, synthetic construct
  source 1..21: mol_type = other RNA
tctgcagcatgtggggcggca

SEQ ID NO: 89919 - RNA, 21 nt, synthetic construct
  source 1..21: mol_type = other RNA
cgagaacccctgctgccccga

SEQ ID NO: 89920 - RNA, 21 nt, synthetic construct
  source 1..21: mol_type = other RNA
gcgcccttccctgccacatga

SEQ ID NO: 89921 - RNA, 21 nt, synthetic construct
  source 1..21: mol_type = other RNA
gtcaacagccatgtggacaaa

SEQ ID NO: 89922 - RNA, 21 nt, synthetic construct
  source 1..21: mol_type = other RNA
tgcagcaccaggagtgtggca

SEQ ID NO: 89923 - RNA, 21 nt, synthetic construct
  source 1..21: mol_type = other RNA
cagcaccaggagtgtggctca

SEQ ID NO: 89924 - RNA, 21 nt, synthetic construct
  source 1..21: mol_type = other RNA
ggaccctggcacaggtgggga

SEQ ID NO: 89925 - RNA, 21 nt, synthetic construct
  source 1..21: mol_type = other RNA
tgagaacagctccccctccca

SEQ ID NO: 89926 - RNA, 21 nt, synthetic construct
  source 1..21: mol_type = other RNA
ccagtgctgacaagcacagca

SEQ ID NO: 89927 - RNA, 21 nt, synthetic construct
  source 1..21: mol_type = other RNA
ccagtgctgacaagcacagca

SEQ ID NO: 89928 - RNA, 21 nt, synthetic construct
  source 1..21: mol_type = other RNA
ccagtgctgacaagcacagca

SEQ ID NO: 89929 - RNA, 21 nt, synthetic construct
  source 1..21: mol_type = other RNA
caccctgagacccactggcta

SEQ ID NO: 89930 - RNA, 21 nt, synthetic construct
  source 1..21: mol_type = other RNA
taccctgggagagcctgtgga

SEQ ID NO: 89931 - RNA, 21 nt, synthetic construct
  source 1..21: mol_type = other RNA
atcacagaccaccacacccaa

SEQ ID NO: 89932 - RNA, 21 nt, synthetic construct
  source 1..21: mol_type = other RNA
actcccatccccccagtgcta

SEQ ID NO: 89933 - RNA, 21 nt, synthetic construct
  source 1..21: mol_type = other RNA
atcacagaccaccacacccaa

SEQ ID NO: 89934 - RNA, 21 nt, synthetic construct
  source 1..21: mol_type = other RNA
accttgggcaccacccacata

SEQ ID NO: 89935 - RNA, 21 nt, synthetic construct
  source 1..21: mol_type = other RNA
atcacagaccaccacacccaa

SEQ ID NO: 89936 - RNA, 21 nt, synthetic construct
  source 1..21: mol_type = other RNA
actcccatccccccagtgcta

SEQ ID NO: 89937 - RNA, 21 nt, synthetic construct
  source 1..21: mol_type = other RNA
atcacagaccaccacacccaa

SEQ ID NO: 89938 - RNA, 21 nt, synthetic construct
  source 1..21: mol_type = other RNA
ttcacagtcaccccctcctca

SEQ ID NO: 89939 - RNA, 21 nt, synthetic construct
  source 1..21: mol_type = other RNA
accttgggcaccacccacata

SEQ ID NO: 89940 - RNA, 21 nt, synthetic construct
  source 1..21: mol_type = other RNA
atcacagaccaccacacccaa

SEQ ID NO: 89941 - RNA, 21 nt, synthetic construct
  source 1..21: mol_type = other RNA
ctccagtccaaggactgcaaa

SEQ ID NO: 89942 - RNA, 21 nt, synthetic construct
  source 1..21: mol_type = other RNA
ctccagtccaaggactgcaaa

SEQ ID NO: 89943 - RNA, 21 nt, synthetic construct
  source 1..21: mol_type = other RNA
ctccagtccaaggactgcaaa

SEQ ID NO: 89944 - RNA, 21 nt, synthetic construct
  source 1..21: mol_type = other RNA
cacccgtggcttcccggccca

SEQ ID NO: 89945 - RNA, 21 nt, synthetic construct
  source 1..21: mol_type = other RNA
cacccgtgccagcccccagga

SEQ ID NO: 89946 - RNA, 21 nt, synthetic construct
  source 1..21: mol_type = other RNA
ggctggtgctggaggcgtcca

SEQ ID NO: 89947 - RNA, 21 nt, synthetic construct
  source 1..21: mol_type = other RNA
ccctgctggagctggatccca

SEQ ID NO: 89948 - RNA, 21 nt, synthetic construct
  source 1..21: mol_type = other RNA
gtgccctgagctctgccccca

SEQ ID NO: 89949 - RNA, 21 nt, synthetic construct
  source 1..21: mol_type = other RNA
gtgccctggcacctgctctga

SEQ ID NO: 89950 - RNA, 21 nt, synthetic construct
  source 1..21: mol_type = other RNA
acagcagcttcaccgtgctga

SEQ ID NO: 89951 - RNA, 21 nt, synthetic construct
  source 1..21: mol_type = other RNA
acagtgccttctcgcgctgca

SEQ ID NO: 89952 - RNA, 21 nt, synthetic construct
  source 1..21: mol_type = other RNA
actccatcatcaaccccaaga

SEQ ID NO: 89953 - RNA, 21 nt, synthetic construct
  source 1..21: mol_type = other RNA
tggacggctgcacctgcccca

SEQ ID NO: 89954 - RNA, 21 nt, synthetic construct
  source 1..21: mol_type = other RNA
gctggctcctggagaggtgga

SEQ ID NO: 89955 - RNA, 21 nt, synthetic construct
  source 1..21: mol_type = other RNA
cctggactgcagcaacagcta

SEQ ID NO: 89956 - RNA, 21 nt, synthetic construct
  source 1..21: mol_type = other RNA
actgcagcaacagctcggcga

SEQ ID NO: 89957 - RNA, 21 nt, synthetic construct
  source 1..21: mol_type = other RNA
ccgaggaggactgcccctgta

SEQ ID NO: 89958 - RNA, 21 nt, synthetic construct
  source 1..21: mol_type = other RNA
cttgttctgtgacttctacaa

SEQ ID NO: 89959 - RNA, 21 nt, synthetic construct
  source 1..21: mol_type = other RNA
gtgccctgtggcccctcccca

SEQ ID NO: 89960 - RNA, 21 nt, synthetic construct
  source 1..21: mol_type = other RNA
ctggccccaacaacaatggca

SEQ ID NO: 89961 - RNA, 21 nt, synthetic construct
  source 1..21: mol_type = other RNA
caccctgagaacagctcccca

SEQ ID NO: 89962 - RNA, 21 nt, synthetic construct
  source 1..21: mol_type = other RNA
ctccagtccagggactgcaaa

SEQ ID NO: 89963 - RNA, 21 nt, synthetic construct
  source 1..21: mol_type = other RNA
ttcacagccaccccctcctca

SEQ ID NO: 89964 - RNA, 21 nt, synthetic construct
  source 1..21: mol_type = other RNA
cctccatcccggggaccacca

SEQ ID NO: 89965 - RNA, 21 nt, synthetic construct
  source 1..21: mol_type = other RNA
ccacagtgctgaccaccacca

SEQ ID NO: 89966 - RNA, 21 nt, synthetic construct
  source 1..21: mol_type = other RNA
cctgcagccaccagcaacaca

SEQ ID NO: 89967 - RNA, 21 nt, synthetic construct
  source 1..21: mol_type = other RNA
acacagtgactccctcctcta

SEQ ID NO: 89968 - RNA, 21 nt, synthetic construct
  source 1..21: mol_type = other RNA
ccagcagtccccacacggtga

SEQ ID NO: 89969 - RNA, 21 nt, synthetic construct
  source 1..21: mol_type = other RNA
ctccagtccagggactgcaaa

SEQ ID NO: 89970 - RNA, 21 nt, synthetic construct
  source 1..21: mol_type = other RNA
ttcacagccaccccctcctca

SEQ ID NO: 89971 - RNA, 21 nt, synthetic construct
  source 1..21: mol_type = other RNA
cctccatcccggggaccacca

SEQ ID NO: 89972 - RNA, 21 nt, synthetic construct
  source 1..21: mol_type = other RNA
ccacagtgctgaccaccacca

SEQ ID NO: 89973 - RNA, 21 nt, synthetic construct
  source 1..21: mol_type = other RNA
gcacagtgactccctcctcta

SEQ ID NO: 89974 - RNA, 21 nt, synthetic construct
  source 1..21: mol_type = other RNA
ccagcagtccccacacggtga

SEQ ID NO: 89975 - RNA, 21 nt, synthetic construct
  source 1..21: mol_type = other RNA
acagcagccactacgaccgca

SEQ ID NO: 89976 - RNA, 21 nt, synthetic construct
  source 1..21: mol_type = other RNA
actgcagccactggccccaca

SEQ ID NO: 89977 - RNA, 21 nt, synthetic construct
  source 1..21: mol_type = other RNA
ctccagtccagggactgcaaa

SEQ ID NO: 89978 - RNA, 21 nt, synthetic construct
  source 1..21: mol_type = other RNA
ttcacagccaccccctcctca

SEQ ID NO: 89979 - RNA, 21 nt, synthetic construct
  source 1..21: mol_type = other RNA
cctccatcccggggaccacca

SEQ ID NO: 89980 - RNA, 21 nt, synthetic construct
  source 1..21: mol_type = other RNA
ccacagtgctgaccaccacca

SEQ ID NO: 89981 - RNA, 21 nt, synthetic construct
  source 1..21: mol_type = other RNA
gcacagtgactccctcctcta

SEQ ID NO: 89982 - RNA, 21 nt, synthetic construct
  source 1..21: mol_type = other RNA
ccagcagtccccacacggtga

SEQ ID NO: 89983 - RNA, 21 nt, synthetic construct
  source 1..21: mol_type = other RNA
gggcagtctgtgagcagccca

SEQ ID NO: 89984 - RNA, 21 nt, synthetic construct
  source 1..21: mol_type = other RNA
ctccagtccagggactgcaaa

SEQ ID NO: 89985 - RNA, 21 nt, synthetic construct
  source 1..21: mol_type = other RNA
tcacagtcaccccctcctcca

SEQ ID NO: 89986 - RNA, 21 nt, synthetic construct
  source 1..21: mol_type = other RNA
ccacagtgctgaccaccacca

SEQ ID NO: 89987 - RNA, 21 nt, synthetic construct
  source 1..21: mol_type = other RNA
gcacagtgactccctcctcta

SEQ ID NO: 89988 - RNA, 21 nt, synthetic construct
  source 1..21: mol_type = other RNA
ccagcagtccccacacggtga

SEQ ID NO: 89989 - RNA, 21 nt, synthetic construct
  source 1..21: mol_type = other RNA
tgcatccactggatccacgga

SEQ ID NO: 89990 - RNA, 21 nt, synthetic construct
  source 1..21: mol_type = other RNA
actgcagccactggccccaca

SEQ ID NO: 89991 - RNA, 21 nt, synthetic construct
  source 1..21: mol_type = other RNA
ctccagtccagggactgcaaa

SEQ ID NO: 89992 - RNA, 21 nt, synthetic construct
  source 1..21: mol_type = other RNA
ttcacagccaccccctcctca

SEQ ID NO: 89993 - RNA, 21 nt, synthetic construct
  source 1..21: mol_type = other RNA
cctccatcccggggaccacca

SEQ ID NO: 89994 - RNA, 21 nt, synthetic construct
  source 1..21: mol_type = other RNA
gtgctgaccaccacagccaca

SEQ ID NO: 89995 - RNA, 21 nt, synthetic construct
  source 1..21: mol_type = other RNA
accctgagacccactggctta

SEQ ID NO: 89996 - RNA, 21 nt, synthetic construct
  source 1..21: mol_type = other RNA
actggcttccccagctcccaa

SEQ ID NO: 89997 - RNA, 21 nt, synthetic construct
  source 1..21: mol_type = other RNA
caatgccatccctctccggca

SEQ ID NO: 89998 - RNA, 21 nt, synthetic construct
  source 1..21: mol_type = other RNA
tcctgctggacccaaagccta

SEQ ID NO: 89999 - RNA, 21 nt, synthetic construct
  source 1..21: mol_type = other RNA
gccctgaggaccagatcctca

SEQ ID NO: 90000 - RNA, 21 nt, synthetic construct
  source 1..21: mol_type = other RNA
gctgcagacctcagctgtgta

SEQ ID NO: 90001 - RNA, 21 nt, synthetic construct
  source 1..21: mol_type = other RNA
accttggccttgcccctccca

SEQ ID NO: 90002 - RNA, 21 nt, synthetic construct
  source 1..21: mol_type = other RNA
cagctgctgccaggaagctga

SEQ ID NO: 90003 - RNA, 21 nt, synthetic construct
  source 1..21: mol_type = other RNA
gcccaggggctggtgctggaa

SEQ ID NO: 90004 - RNA, 21 nt, synthetic construct
  source 1..21: mol_type = other RNA
cccaggggctggtgctggaga

SEQ ID NO: 90005 - RNA, 21 nt, synthetic construct
  source 1..21: mol_type = other RNA
ccaggggctggtgctggagga

SEQ ID NO: 90006 - RNA, 21 nt, synthetic construct
  source 1..21: mol_type = other RNA
caggggctggtgctggaggca

SEQ ID NO: 90007 - RNA, 21 nt, synthetic construct
  source 1..21: mol_type = other RNA
gtgccctgctggagctggata

SEQ ID NO: 90008 - RNA, 21 nt, synthetic construct
  source 1..21: mol_type = other RNA
ctgcacctgctccggggggca

SEQ ID NO: 90009 - RNA, 21 nt, synthetic construct
  source 1..21: mol_type = other RNA
tgcacctgctccggggggcta

SEQ ID NO: 90010 - RNA, 21 nt, synthetic construct
  source 1..21: mol_type = other RNA
acctgctctgtgcagggcgga

SEQ ID NO: 90011 - RNA, 21 nt, synthetic construct
  source 1..21: mol_type = other RNA
tgctggtgcagctggtgccaa

SEQ ID NO: 90012 - RNA, 21 nt, synthetic construct
  source 1..21: mol_type = other RNA
tggtgcagctggtgccactca

SEQ ID NO: 90013 - RNA, 21 nt, synthetic construct
  source 1..21: mol_type = other RNA
atcatcaggaaggctgtggca

SEQ ID NO: 90014 - RNA, 21 nt, synthetic construct
  source 1..21: mol_type = other RNA
cgctggtccagctggtacaaa

SEQ ID NO: 90015 - RNA, 21 nt, synthetic construct
  source 1..21: mol_type = other RNA
atgccgctggaggagctggga

SEQ ID NO: 90016 - RNA, 21 nt, synthetic construct
  source 1..21: mol_type = other RNA
accaccagccagggcacgaca

SEQ ID NO: 90017 - RNA, 21 nt, synthetic construct
  source 1..21: mol_type = other RNA
ccctcctccagcccagggaca

SEQ ID NO: 90018 - RNA, 21 nt, synthetic construct
  source 1..21: mol_type = other RNA
gaccaccaccaccacaactga

SEQ ID NO: 90019 - RNA, 21 nt, synthetic construct
  source 1..21: mol_type = other RNA
tggcctggtctgcaggaacca

SEQ ID NO: 90020 - RNA, 21 nt, synthetic construct
  source 1..21: mol_type = other RNA
atccacggccaccgcctccta

SEQ ID NO: 90021 - RNA, 21 nt, synthetic construct
  source 1..21: mol_type = other RNA
acggccaccgcctcctccaca

SEQ ID NO: 90022 - RNA, 21 nt, synthetic construct
  source 1..21: mol_type = other RNA
gccaccgcctcctccacccaa

SEQ ID NO: 90023 - RNA, 21 nt, synthetic construct
  source 1..21: mol_type = other RNA
actcccttctccagtccagga

SEQ ID NO: 90024 - RNA, 21 nt, synthetic construct
  source 1..21: mol_type = other RNA
tcctcctccctgggcaccaca

SEQ ID NO: 90025 - RNA, 21 nt, synthetic construct
  source 1..21: mol_type = other RNA
accaccacggccaccacaaca

SEQ ID NO: 90026 - RNA, 21 nt, synthetic construct
  source 1..21: mol_type = other RNA
ccaccacggccaccacaacca

SEQ ID NO: 90027 - RNA, 21 nt, synthetic construct
  source 1..21: mol_type = other RNA
ccctcctccagcccagggaca

SEQ ID NO: 90028 - RNA, 21 nt, synthetic construct
  source 1..21: mol_type = other RNA
gaccaccaccaccacaactga

SEQ ID NO: 90029 - RNA, 21 nt, synthetic construct
  source 1..21: mol_type = other RNA
cctgcagccaccagcagcaca

SEQ ID NO: 90030 - RNA, 21 nt, synthetic construct
  source 1..21: mol_type = other RNA
cggccacggccacacccagca

SEQ ID NO: 90031 - RNA, 21 nt, synthetic construct
  source 1..21: mol_type = other RNA
tggcctggtctgcaggaacca

SEQ ID NO: 90032 - RNA, 21 nt, synthetic construct
  source 1..21: mol_type = other RNA
gaccagcacggccaccacaca

SEQ ID NO: 90033 - RNA, 21 nt, synthetic construct
  source 1..21: mol_type = other RNA
agttccaaagccacttcctca

SEQ ID NO: 90034 - RNA, 21 nt, synthetic construct
  source 1..21: mol_type = other RNA
tccaaagccacttcctcctca

SEQ ID NO: 90035 - RNA, 21 nt, synthetic construct
  source 1..21: mol_type = other RNA
agtgctgacaagcacagccaa

SEQ ID NO: 90036 - RNA, 21 nt, synthetic construct
  source 1..21: mol_type = other RNA
agctgaccacagcagccacta

SEQ ID NO: 90037 - RNA, 21 nt, synthetic construct
  source 1..21: mol_type = other RNA
atccacggccaccgcctccta

SEQ ID NO: 90038 - RNA, 21 nt, synthetic construct
  source 1..21: mol_type = other RNA
acggccaccgcctcctccaca

SEQ ID NO: 90039 - RNA, 21 nt, synthetic construct
  source 1..21: mol_type = other RNA
gccaccgcctcctccacccga

SEQ ID NO: 90040 - RNA, 21 nt, synthetic construct
  source 1..21: mol_type = other RNA
gaccagcacggccaccacaca

SEQ ID NO: 90041 - RNA, 21 nt, synthetic construct
  source 1..21: mol_type = other RNA
ccctcctccagcccagggaca

SEQ ID NO: 90042 - RNA, 21 nt, synthetic construct
  source 1..21: mol_type = other RNA
gaccaccaccaccacaactga

SEQ ID NO: 90043 - RNA, 21 nt, synthetic construct
  source 1..21: mol_type = other RNA
cctgcagccaccagcagcaca

SEQ ID NO: 90044 - RNA, 21 nt, synthetic construct
  source 1..21: mol_type = other RNA
ggggcacctccaggaccacaa

SEQ ID NO: 90045 - RNA, 21 nt, synthetic construct
  source 1..21: mol_type = other RNA
tggcctggtctgcaggaacca

SEQ ID NO: 90046 - RNA, 21 nt, synthetic construct
  source 1..21: mol_type = other RNA
atccacggccaccgcctccta

SEQ ID NO: 90047 - RNA, 21 nt, synthetic construct
  source 1..21: mol_type = other RNA
acggccaccgcctcctccaca

SEQ ID NO: 90048 - RNA, 21 nt, synthetic construct
  source 1..21: mol_type = other RNA
gccaccgcctcctccacccaa

SEQ ID NO: 90049 - RNA, 21 nt, synthetic construct
  source 1..21: mol_type = other RNA
actcccttctccagtccagga

SEQ ID NO: 90050 - RNA, 21 nt, synthetic construct
  source 1..21: mol_type = other RNA
tcctcctccctgggcaccaca

SEQ ID NO: 90051 - RNA, 21 nt, synthetic construct
  source 1..21: mol_type = other RNA
accaccacggccaccacaaca

SEQ ID NO: 90052 - RNA, 21 nt, synthetic construct
  source 1..21: mol_type = other RNA
ccaccacggccaccacaacca

SEQ ID NO: 90053 - RNA, 21 nt, synthetic construct
  source 1..21: mol_type = other RNA
gtcaccccctcctccagccca

SEQ ID NO: 90054 - RNA, 21 nt, synthetic construct
  source 1..21: mol_type = other RNA
ccctcctccagcccagggaca

SEQ ID NO: 90055 - RNA, 21 nt, synthetic construct
  source 1..21: mol_type = other RNA
gaccaccaccaccacaactga

SEQ ID NO: 90056 - RNA, 21 nt, synthetic construct
  source 1..21: mol_type = other RNA
cctgcagccaccagcagcaca

SEQ ID NO: 90057 - RNA, 21 nt, synthetic construct
  source 1..21: mol_type = other RNA
tcacccccttccccagggaca

SEQ ID NO: 90058 - RNA, 21 nt, synthetic construct
  source 1..21: mol_type = other RNA
cggccacggccacacccagca

SEQ ID NO: 90059 - RNA, 21 nt, synthetic construct
  source 1..21: mol_type = other RNA
tggcctggtctgcaggaacca

SEQ ID NO: 90060 - RNA, 21 nt, synthetic construct
  source 1..21: mol_type = other RNA
agttccaaagccacttcctca

SEQ ID NO: 90061 - RNA, 21 nt, synthetic construct
  source 1..21: mol_type = other RNA
tccaaagccacttcctcctca

SEQ ID NO: 90062 - RNA, 21 nt, synthetic construct
  source 1..21: mol_type = other RNA
agtgctgacaagcacagccaa

SEQ ID NO: 90063 - RNA, 21 nt, synthetic construct
  source 1..21: mol_type = other RNA
agctgaccacagcagccacta

SEQ ID NO: 90064 - RNA, 21 nt, synthetic construct
  source 1..21: mol_type = other RNA
atccacggccaccgcctccta

SEQ ID NO: 90065 - RNA, 21 nt, synthetic construct
  source 1..21: mol_type = other RNA
acggccaccgcctcctccaca

SEQ ID NO: 90066 - RNA, 21 nt, synthetic construct
  source 1..21: mol_type = other RNA
gccaccgcctcctccacccaa

SEQ ID NO: 90067 - RNA, 21 nt, synthetic construct
  source 1..21: mol_type = other RNA
tcctcctccctgggcaccaca

SEQ ID NO: 90068 - RNA, 21 nt, synthetic construct
  source 1..21: mol_type = other RNA
ccctcctccagcccagggaca

SEQ ID NO: 90069 - RNA, 21 nt, synthetic construct
  source 1..21: mol_type = other RNA
gaccaccaccaccacaactga

SEQ ID NO: 90070 - RNA, 21 nt, synthetic construct
  source 1..21: mol_type = other RNA
acacccatcaccccagtgcta

SEQ ID NO: 90071 - RNA, 21 nt, synthetic construct
  source 1..21: mol_type = other RNA
gaccagcacggccaccacaca

SEQ ID NO: 90072 - RNA, 21 nt, synthetic construct
  source 1..21: mol_type = other RNA
tccaaagccacttcctcctca

SEQ ID NO: 90073 - RNA, 21 nt, synthetic construct
  source 1..21: mol_type = other RNA
agtgctgacaagcacagccaa

SEQ ID NO: 90074 - RNA, 21 nt, synthetic construct
  source 1..21: mol_type = other RNA
cctcctccaccctgtggacca

SEQ ID NO: 90075 - RNA, 21 nt, synthetic construct
  source 1..21: mol_type = other RNA
agcacagaccaccacacccaa

SEQ ID NO: 90076 - RNA, 21 nt, synthetic construct
  source 1..21: mol_type = other RNA
caccctgtcctccaccccaga

SEQ ID NO: 90077 - RNA, 21 nt, synthetic construct
  source 1..21: mol_type = other RNA
ttccacggccaccgcctccta

SEQ ID NO: 90078 - RNA, 21 nt, synthetic construct
  source 1..21: mol_type = other RNA
acggccaccgcctcctccaca

SEQ ID NO: 90079 - RNA, 21 nt, synthetic construct
  source 1..21: mol_type = other RNA
ctttgggaatctcagcctcta

SEQ ID NO: 90080 - RNA, 21 nt, synthetic construct
  source 1..21: mol_type = other RNA
tgccactgccgctgccgccca

SEQ ID NO: 90081 - RNA, 21 nt, synthetic construct
  source 1..21: mol_type = other RNA
actgccgctgccgcccgctga

SEQ ID NO: 90082 - RNA, 21 nt, synthetic construct
  source 1..21: mol_type = other RNA
gccgcccgctgcccccgcgca

SEQ ID NO: 90083 - RNA, 21 nt, synthetic construct
  source 1..21: mol_type = other RNA
ccagccccgcagccccggtga

SEQ ID NO: 90084 - RNA, 21 nt, synthetic construct
  source 1..21: mol_type = other RNA
cccccaccccatgcccaccaa

SEQ ID NO: 90085 - RNA, 21 nt, synthetic construct
  source 1..21: mol_type = other RNA
cccaccccatgcccaccacaa

SEQ ID NO: 90086 - RNA, 21 nt, synthetic construct
  source 1..21: mol_type = other RNA
ggggccgccttgaggtgccca

SEQ ID NO: 90087 - RNA, 21 nt, synthetic construct
  source 1..21: mol_type = other RNA
ggccgccttgaggtgccctga

SEQ ID NO: 90088 - RNA, 21 nt, synthetic construct
  source 1..21: mol_type = other RNA
cctgccagagcctggaggcta

SEQ ID NO: 90089 - RNA, 21 nt, synthetic construct
  source 1..21: mol_type = other RNA
tgccagagcctggaggcttaa

SEQ ID NO: 90090 - RNA, 21 nt, synthetic construct
  source 1..21: mol_type = other RNA
acacaaccacctgcccccaga

SEQ ID NO: 90091 - RNA, 21 nt, synthetic construct
  source 1..21: mol_type = other RNA
actcagcagaggcccaggcca

SEQ ID NO: 90092 - RNA, 21 nt, synthetic construct
  source 1..21: mol_type = other RNA
tgccaggagaggcgggtccaa

SEQ ID NO: 90093 - RNA, 21 nt, synthetic construct
  source 1..21: mol_type = other RNA
cccaggaggccactgctgtca

SEQ ID NO: 90094 - RNA, 21 nt, synthetic construct
  source 1..21: mol_type = other RNA
cccaccttggccttgccccta

SEQ ID NO: 90095 - RNA, 21 nt, synthetic construct
  source 1..21: mol_type = other RNA
aggcaaggccagctgctgcca

SEQ ID NO: 90096 - RNA, 21 nt, synthetic construct
  source 1..21: mol_type = other RNA
ccagctgctgccaggaagcta

SEQ ID NO: 90097 - RNA, 21 nt, synthetic construct
  source 1..21: mol_type = other RNA
aagctgcctgggagcctctca

SEQ ID NO: 90098 - RNA, 21 nt, synthetic construct
  source 1..21: mol_type = other RNA
tatggcagtgccaggacctga

SEQ ID NO: 90099 - RNA, 21 nt, synthetic construct
  source 1..21: mol_type = other RNA
cacacccacccccaccccata

SEQ ID NO: 90100 - RNA, 21 nt, synthetic construct
  source 1..21: mol_type = other RNA
ttgctgagtgccacaacctta

SEQ ID NO: 90101 - RNA, 21 nt, synthetic construct
  source 1..21: mol_type = other RNA
cacagccacagccacacccaa

SEQ ID NO: 90102 - RNA, 21 nt, synthetic construct
  source 1..21: mol_type = other RNA
gcgagagggccgggtggggaa

SEQ ID NO: 90103 - RNA, 21 nt, synthetic construct
  source 1..21: mol_type = other RNA
gtgctgaccaccaccaccaca

SEQ ID NO: 90104 - RNA, 21 nt, synthetic construct
  source 1..21: mol_type = other RNA
gtgctgaccaccaccaccaca

SEQ ID NO: 90105 - RNA, 21 nt, synthetic construct
  source 1..21: mol_type = other RNA
gtgctgaccaccaccaccaca

SEQ ID NO: 90106 - RNA, 21 nt, synthetic construct
  source 1..21: mol_type = other RNA
gtgctgaccaccaccaccaca

SEQ ID NO: 90107 - RNA, 21 nt, synthetic construct
  source 1..21: mol_type = other RNA
gtgctgaccaccaccaccaca

SEQ ID NO: 90108 - RNA, 21 nt, synthetic construct
  source 1..21: mol_type = other RNA
ctggccccacggccaccccga

SEQ ID NO: 90109 - RNA, 21 nt, synthetic construct
  source 1..21: mol_type = other RNA
ctggccccacggccaccccga

SEQ ID NO: 90110 - RNA, 21 nt, synthetic construct
  source 1..21: mol_type = other RNA
cctgtggcctgtgtggggaca

SEQ ID NO: 90111 - RNA, 21 nt, synthetic construct
  source 1..21: mol_type = other RNA
ggcgagagggccgggtgggga

SEQ ID NO: 90112 - RNA, 21 nt, synthetic construct
  source 1..21: mol_type = other RNA
tggagacggggctgacctgca

SEQ ID NO: 90113 - RNA, 21 nt, synthetic construct
  source 1..21: mol_type = other RNA
tgggcccagaagcagtgcaga

SEQ ID NO: 90114 - RNA, 21 nt, synthetic construct
  source 1..21: mol_type = other RNA
tggacttcccaacctcaggga

SEQ ID NO: 90115 - RNA, 21 nt, synthetic construct
  source 1..21: mol_type = other RNA
tgaaaacatcagggctgctga

SEQ ID NO: 90116 - RNA, 21 nt, synthetic construct
  source 1..21: mol_type = other RNA
agatgtgctgggcaccaaaga

SEQ ID NO: 90117 - RNA, 21 nt, synthetic construct
  source 1..21: mol_type = other RNA
gggacatggaaacttttgaaa

SEQ ID NO: 90118 - RNA, 21 nt, synthetic construct
  source 1..21: mol_type = other RNA
cagccaccacacccacagcta

SEQ ID NO: 90119 - RNA, 21 nt, synthetic construct
  source 1..21: mol_type = other RNA
cagccaccacacccacagcta

SEQ ID NO: 90120 - RNA, 21 nt, synthetic construct
  source 1..21: mol_type = other RNA
cagccaccacacccacagcta

SEQ ID NO: 90121 - RNA, 21 nt, synthetic construct
  source 1..21: mol_type = other RNA
cagccaccacacccacagcta

SEQ ID NO: 90122 - RNA, 21 nt, synthetic construct
  source 1..21: mol_type = other RNA
cagccaccacacccacagcta

SEQ ID NO: 90123 - RNA, 21 nt, synthetic construct
  source 1..21: mol_type = other RNA
cccccaggcacggtgctggaa

SEQ ID NO: 90124 - RNA, 21 nt, synthetic construct
  source 1..21: mol_type = other RNA
tacaagggcagggtctgcgga

SEQ ID NO: 90125 - RNA, 21 nt, synthetic construct
  source 1..21: mol_type = other RNA
acatcagggctgctgggggca

SEQ ID NO: 90126 - RNA, 21 nt, synthetic construct
  source 1..21: mol_type = other RNA
atcagggctgctgggggcaaa

SEQ ID NO: 90127 - RNA, 21 nt, synthetic construct
  source 1..21: mol_type = other RNA
ctgaccaccacggccaccaca

SEQ ID NO: 90128 - RNA, 21 nt, synthetic construct
  source 1..21: mol_type = other RNA
acagccaccacacccacagca

SEQ ID NO: 90129 - RNA, 21 nt, synthetic construct
  source 1..21: mol_type = other RNA
agccaccacacccacagctaa

SEQ ID NO: 90130 - RNA, 21 nt, synthetic construct
  source 1..21: mol_type = other RNA
acagccaccacacccacagca

SEQ ID NO: 90131 - RNA, 21 nt, synthetic construct
  source 1..21: mol_type = other RNA
agccaccacacccacagctaa

SEQ ID NO: 90132 - RNA, 21 nt, synthetic construct
  source 1..21: mol_type = other RNA
acagccaccacacccacagca

SEQ ID NO: 90133 - RNA, 21 nt, synthetic construct
  source 1..21: mol_type = other RNA
agccaccacacccacagctaa

SEQ ID NO: 90134 - RNA, 21 nt, synthetic construct
  source 1..21: mol_type = other RNA
acagccaccacacccacagca

SEQ ID NO: 90135 - RNA, 21 nt, synthetic construct
  source 1..21: mol_type = other RNA
agccaccacacccacagctaa

SEQ ID NO: 90136 - RNA, 21 nt, synthetic construct
  source 1..21: mol_type = other RNA
acagccaccacacccacagca

SEQ ID NO: 90137 - RNA, 21 nt, synthetic construct
  source 1..21: mol_type = other RNA
agccaccacacccacagctaa

SEQ ID NO: 90138 - RNA, 21 nt, synthetic construct
  source 1..21: mol_type = other RNA
aacttttgaaaacatcaggga

SEQ ID NO: 90139 - RNA, 21 nt, synthetic construct
  source 1..21: mol_type = other RNA
cagggctgctgggggcaagaa

SEQ ID NO: 90140 - RNA, 21 nt, synthetic construct
  source 1..21: mol_type = other RNA
ggacttcccaacctcagggga

SEQ ID NO: 90141 - RNA, 21 nt, synthetic construct
  source 1..21: mol_type = other RNA
ttgaaaacatcagggctgcta

SEQ ID NO: 90142 - RNA, 21 nt, synthetic construct
  source 1..21: mol_type = other RNA
tgacgactacagccactgcca

SEQ ID NO: 90143 - RNA, 21 nt, synthetic construct
  source 1..21: mol_type = other RNA
ggctgcttctgccccccagga

SEQ ID NO: 90144 - RNA, 21 nt, synthetic construct
  source 1..21: mol_type = other RNA
gtttgacacctgcaactgtga

SEQ ID NO: 90145 - RNA, 21 nt, synthetic construct
  source 1..21: mol_type = other RNA
accggcaccacctgctccaaa

SEQ ID NO: 90146 - RNA, 21 nt, synthetic construct
  source 1..21: mol_type = other RNA
atggaaacttttgaaaacata

SEQ ID NO: 90147 - RNA, 21 nt, synthetic construct
  source 1..21: mol_type = other RNA
tggaaacttttgaaaacatca

SEQ ID NO: 90148 - RNA, 21 nt, synthetic construct
  source 1..21: mol_type = other RNA
ggaaacttttgaaaacatcaa

SEQ ID NO: 90149 - RNA, 21 nt, synthetic construct
  source 1..21: mol_type = other RNA
caccccctcctccagcccaga

SEQ ID NO: 90150 - RNA, 21 nt, synthetic construct
  source 1..21: mol_type = other RNA
caccccctcctccagcccaga

SEQ ID NO: 90151 - RNA, 21 nt, synthetic construct
  source 1..21: mol_type = other RNA
caccccctcctccagcccaga

SEQ ID NO: 90152 - RNA, 21 nt, synthetic construct
  source 1..21: mol_type = other RNA
caccccctcctccagcccaga

SEQ ID NO: 90153 - RNA, 21 nt, synthetic construct
  source 1..21: mol_type = other RNA
caccccctcctccagcccaga

SEQ ID NO: 90154 - RNA, 21 nt, synthetic construct
  source 1..21: mol_type = other RNA
tcttccaggcccggctgccca

SEQ ID NO: 90155 - RNA, 21 nt, synthetic construct
  source 1..21: mol_type = other RNA
ggctgctgctactcctgtgaa

SEQ ID NO: 90156 - RNA, 21 nt, synthetic construct
  source 1..21: mol_type = other RNA
gctgctgctactcctgtgaga

SEQ ID NO: 90157 - RNA, 21 nt, synthetic construct
  source 1..21: mol_type = other RNA
cctgctgcccagcagccccaa

SEQ ID NO: 90158 - RNA, 21 nt, synthetic construct
  source 1..21: mol_type = other RNA
cctgctgcccagcagccccaa

SEQ ID NO: 90159 - RNA, 21 nt, synthetic construct
  source 1..21: mol_type = other RNA
cctgctgcccagcagccccaa

SEQ ID NO: 90160 - RNA, 21 nt, synthetic construct
  source 1..21: mol_type = other RNA
cctgctgcccagcagccccaa

SEQ ID NO: 90161 - RNA, 21 nt, synthetic construct
  source 1..21: mol_type = other RNA
ctgtgcgccgcgctgtcctca

SEQ ID NO: 90162 - RNA, 21 nt, synthetic construct
  source 1..21: mol_type = other RNA
cgaccctgctgcccagcagca

SEQ ID NO: 90163 - RNA, 21 nt, synthetic construct
  source 1..21: mol_type = other RNA
cgaccctgctgcccagcagca

SEQ ID NO: 90164 - RNA, 21 nt, synthetic construct
  source 1..21: mol_type = other RNA
cgaccctgctgcccagcagca

SEQ ID NO: 90165 - RNA, 21 nt, synthetic construct
  source 1..21: mol_type = other RNA
cgaccctgctgcccagcagca

SEQ ID NO: 90166 - RNA, 21 nt, synthetic construct
  source 1..21: mol_type = other RNA
tatgtgcacgcctgtgccgca

SEQ ID NO: 90167 - RNA, 21 nt, synthetic construct
  source 1..21: mol_type = other RNA
gggagtgtgcagtgactggca

SEQ ID NO: 90168 - RNA, 21 nt, synthetic construct
  source 1..21: mol_type = other RNA
ggagacggccaccaccaccaa

SEQ ID NO: 90169 - RNA, 21 nt, synthetic construct
  source 1..21: mol_type = other RNA
ccctgctgcccagcagcccca

SEQ ID NO: 90170 - RNA, 21 nt, synthetic construct
  source 1..21: mol_type = other RNA
ccctgctgcccagcagcccca

SEQ ID NO: 90171 - RNA, 21 nt, synthetic construct
  source 1..21: mol_type = other RNA
ccctgctgcccagcagcccca

SEQ ID NO: 90172 - RNA, 21 nt, synthetic construct
  source 1..21: mol_type = other RNA
ccctgctgcccagcagcccca

SEQ ID NO: 90173 - RNA, 21 nt, synthetic construct
  source 1..21: mol_type = other RNA
ccactgtgtcctcctcagtca

SEQ ID NO: 90174 - RNA, 21 nt, synthetic construct
  source 1..21: mol_type = other RNA
cactgtgtcctcctcagtcca

SEQ ID NO: 90175 - RNA, 21 nt, synthetic construct
  source 1..21: mol_type = other RNA
tgcagggggagcctcaggaaa

SEQ ID NO: 90176 - RNA, 21 nt, synthetic construct
  source 1..21: mol_type = other RNA
gtcctgggcccagaagcagta

SEQ ID NO: 90177 - RNA, 21 nt, synthetic construct
  source 1..21: mol_type = other RNA
tcctgggcccagaagcagtga

SEQ ID NO: 90178 - RNA, 21 nt, synthetic construct
  source 1..21: mol_type = other RNA
ggcccagaagcagtgcagcaa

SEQ ID NO: 90179 - RNA, 21 nt, synthetic construct
  source 1..21: mol_type = other RNA
gcccagaagcagtgcagcata

SEQ ID NO: 90180 - RNA, 21 nt, synthetic construct
  source 1..21: mol_type = other RNA
tgctacaactacaggatccga

SEQ ID NO: 90181 - RNA, 21 nt, synthetic construct
  source 1..21: mol_type = other RNA
tctgcagaaaagcacagggta

SEQ ID NO: 90182 - RNA, 21 nt, synthetic construct
  source 1..21: mol_type = other RNA
tcccctgcccctggctgtgaa

SEQ ID NO: 90183 - RNA, 21 nt, synthetic construct
  source 1..21: mol_type = other RNA
ccctgcttctgcagggcatta

SEQ ID NO: 90184 - RNA, 21 nt, synthetic construct
  source 1..21: mol_type = other RNA
cagcaccagtgcacctgctga

SEQ ID NO: 90185 - RNA, 21 nt, synthetic construct
  source 1..21: mol_type = other RNA
cctggctgtgacaatgccata

SEQ ID NO: 90186 - RNA, 21 nt, synthetic construct
  source 1..21: mol_type = other RNA
actctggctgcctgcccctca

SEQ ID NO: 90187 - RNA, 21 nt, synthetic construct
  source 1..21: mol_type = other RNA
ctgcagctgctggtgcagcta

SEQ ID NO: 90188 - RNA, 21 nt, synthetic construct
  source 1..21: mol_type = other RNA
atgtgcggcctgtgtgggaaa

SEQ ID NO: 90189 - RNA, 21 nt, synthetic construct
  source 1..21: mol_type = other RNA
gcgaggactgcctgtgcgcca

SEQ ID NO: 90190 - RNA, 21 nt, synthetic construct
  source 1..21: mol_type = other RNA
acctgctccaaggccatcaaa

SEQ ID NO: 90191 - RNA, 21 nt, synthetic construct
  source 1..21: mol_type = other RNA
gaccctggagaactgcacgga

SEQ ID NO: 90192 - RNA, 21 nt, synthetic construct
  source 1..21: mol_type = other RNA
acccctgcacggccaacccca

SEQ ID NO: 90193 - RNA, 21 nt, synthetic construct
  source 1..21: mol_type = other RNA
gaccctgctgcccagcagcca

SEQ ID NO: 90194 - RNA, 21 nt, synthetic construct
  source 1..21: mol_type = other RNA
gaccctgctgcccagcagcca

SEQ ID NO: 90195 - RNA, 21 nt, synthetic construct
  source 1..21: mol_type = other RNA
gaccctgctgcccagcagcca

SEQ ID NO: 90196 - RNA, 21 nt, synthetic construct
  source 1..21: mol_type = other RNA
gaccctgctgcccagcagcca

SEQ ID NO: 90197 - RNA, 21 nt, synthetic construct
  source 1..21: mol_type = other RNA
tcgccctcccctgcccctgga

SEQ ID NO: 90198 - RNA, 21 nt, synthetic construct
  source 1..21: mol_type = other RNA
tgcagcaccagtgcacctgca

SEQ ID NO: 90199 - RNA, 21 nt, synthetic construct
  source 1..21: mol_type = other RNA
cagtgcacctgctgccaggaa

SEQ ID NO: 90200 - RNA, 21 nt, synthetic construct
  source 1..21: mol_type = other RNA
gctgcagctgctggtgcagca

SEQ ID NO: 90201 - RNA, 21 nt, synthetic construct
  source 1..21: mol_type = other RNA
catcagggctgctgggggcaa

SEQ ID NO: 90202 - RNA, 21 nt, synthetic construct
  source 1..21: mol_type = other RNA
gcaggcagagacccagggcca

SEQ ID NO: 90203 - RNA, 21 nt, synthetic construct
  source 1..21: mol_type = other RNA
ctgcagcctggagacggggca

SEQ ID NO: 90204 - RNA, 21 nt, synthetic construct
  source 1..21: mol_type = other RNA
agacggccaccaccaccacca

SEQ ID NO: 90205 - RNA, 21 nt, synthetic construct
  source 1..21: mol_type = other RNA
aggtgctgacctgcagcctga

SEQ ID NO: 90206 - RNA, 21 nt, synthetic construct
  source 1..21: mol_type = other RNA
acgcccttctgtgtccctgca

SEQ ID NO: 90207 - RNA, 21 nt, synthetic construct
  source 1..21: mol_type = other RNA
agtgcaagcccctgccctgta

SEQ ID NO: 90208 - RNA, 21 nt, synthetic construct
  source 1..21: mol_type = other RNA
gggcaggtgctgacctgcaga

SEQ ID NO: 90209 - RNA, 21 nt, synthetic construct
  source 1..21: mol_type = other RNA
ccaccaccaccaccacccaga

SEQ ID NO: 90210 - RNA, 21 nt, synthetic construct
  source 1..21: mol_type = other RNA
actgccccagcaccccggcca

SEQ ID NO: 90211 - RNA, 21 nt, synthetic construct
  source 1..21: mol_type = other RNA
actgccccagcaccccggcca

SEQ ID NO: 90212 - RNA, 21 nt, synthetic construct
  source 1..21: mol_type = other RNA
actgccccagcaccccggcca

SEQ ID NO: 90213 - RNA, 21 nt, synthetic construct
  source 1..21: mol_type = other RNA
actgccccagcaccccggcca

SEQ ID NO: 90214 - RNA, 21 nt, synthetic construct
  source 1..21: mol_type = other RNA
gcagtgcagcatcctccacga

SEQ ID NO: 90215 - RNA, 21 nt, synthetic construct
  source 1..21: mol_type = other RNA
ctacgactgcgtccactggaa

SEQ ID NO: 90216 - RNA, 21 nt, synthetic construct
  source 1..21: mol_type = other RNA
ctacgactgcgtccactggaa

SEQ ID NO: 90217 - RNA, 21 nt, synthetic construct
  source 1..21: mol_type = other RNA
gacgacctggatcctcacaaa

SEQ ID NO: 90218 - RNA, 21 nt, synthetic construct
  source 1..21: mol_type = other RNA
gacgacctggatcctcacaaa

SEQ ID NO: 90219 - RNA, 21 nt, synthetic construct
  source 1..21: mol_type = other RNA
ggtgaccatgggctgtgagca

SEQ ID NO: 90220 - RNA, 21 nt, synthetic construct
  source 1..21: mol_type = other RNA
ggtgaccatgggctgtgagca

SEQ ID NO: 90221 - RNA, 21 nt, synthetic construct
  source 1..21: mol_type = other RNA
ccacccacgctggccccaaca

SEQ ID NO: 90222 - RNA, 21 nt, synthetic construct
  source 1..21: mol_type = other RNA
gtgcgtgtgctttgctgtgaa

SEQ ID NO: 90223 - RNA, 21 nt, synthetic construct
  source 1..21: mol_type = other RNA
ccagtaccccagccaccagca

SEQ ID NO: 90224 - RNA, 21 nt, synthetic construct
  source 1..21: mol_type = other RNA
ccagccctttccagccctcaa

SEQ ID NO: 90225 - RNA, 21 nt, synthetic construct
  source 1..21: mol_type = other RNA
acctggatcctcacaaagcta

SEQ ID NO: 90226 - RNA, 21 nt, synthetic construct
  source 1..21: mol_type = other RNA
ccaacctcaggggttgcagga

SEQ ID NO: 90227 - RNA, 21 nt, synthetic construct
  source 1..21: mol_type = other RNA
acagagctgaccacaacagca

SEQ ID NO: 90228 - RNA, 21 nt, synthetic construct
  source 1..21: mol_type = other RNA
acagagctgaccacaacagca

SEQ ID NO: 90229 - RNA, 21 nt, synthetic construct
  source 1..21: mol_type = other RNA
acagagctgaccacaacagca

SEQ ID NO: 90230 - RNA, 21 nt, synthetic construct
  source 1..21: mol_type = other RNA
cgcaggcagagacccagggca

SEQ ID NO: 90231 - RNA, 21 nt, synthetic construct
  source 1..21: mol_type = other RNA
tgtggcccctccccggcccca

SEQ ID NO: 90232 - RNA, 21 nt, synthetic construct
  source 1..21: mol_type = other RNA
tggcccctccccggccccaga

SEQ ID NO: 90233 - RNA, 21 nt, synthetic construct
  source 1..21: mol_type = other RNA
accctggcacaggtggggcaa

SEQ ID NO: 90234 - RNA, 21 nt, synthetic construct
  source 1..21: mol_type = other RNA
ccctggcacaggtggggcaga

SEQ ID NO: 90235 - RNA, 21 nt, synthetic construct
  source 1..21: mol_type = other RNA
aacgtgcgtgtgctttgctga

SEQ ID NO: 90236 - RNA, 21 nt, synthetic construct
  source 1..21: mol_type = other RNA
ccccagccaccagctccacga

SEQ ID NO: 90237 - RNA, 21 nt, synthetic construct
  source 1..21: mol_type = other RNA
tccagccctttccagccctca

SEQ ID NO: 90238 - RNA, 21 nt, synthetic construct
  source 1..21: mol_type = other RNA
cctggatcctcacagagctga

SEQ ID NO: 90239 - RNA, 21 nt, synthetic construct
  source 1..21: mol_type = other RNA
ggccaccgcctcctccaccca

SEQ ID NO: 90240 - RNA, 21 nt, synthetic construct
  source 1..21: mol_type = other RNA
ccacccctcctccactccgga

SEQ ID NO: 90241 - RNA, 21 nt, synthetic construct
  source 1..21: mol_type = other RNA
cctggatcctcacagagctga

SEQ ID NO: 90242 - RNA, 21 nt, synthetic construct
  source 1..21: mol_type = other RNA
ggccaccgcctcctccaccca

SEQ ID NO: 90243 - RNA, 21 nt, synthetic construct
  source 1..21: mol_type = other RNA
ggccaccgcctcctccaccca

SEQ ID NO: 90244 - RNA, 21 nt, synthetic construct
  source 1..21: mol_type = other RNA
cctggatcctcacagagctga

SEQ ID NO: 90245 - RNA, 21 nt, synthetic construct
  source 1..21: mol_type = other RNA
ccacccctcctccactccgga

SEQ ID NO: 90246 - RNA, 21 nt, synthetic construct
  source 1..21: mol_type = other RNA
cctggatcctcacagagctga

SEQ ID NO: 90247 - RNA, 21 nt, synthetic construct
  source 1..21: mol_type = other RNA
cctggatcctcacagagctga

SEQ ID NO: 90248 - RNA, 21 nt, synthetic construct
  source 1..21: mol_type = other RNA
ggccaccgcctcctccaccca

SEQ ID NO: 90249 - RNA, 21 nt, synthetic construct
  source 1..21: mol_type = other RNA
ccccccactgccagccccgca

SEQ ID NO: 90250 - RNA, 21 nt, synthetic construct
  source 1..21: mol_type = other RNA
cacccccaccccatgcccaca

SEQ ID NO: 90251 - RNA, 21 nt, synthetic construct
  source 1..21: mol_type = other RNA
cctgcccagatgtgtccagca

SEQ ID NO: 90252 - RNA, 21 nt, synthetic construct
  source 1..21: mol_type = other RNA
agatgtgtccagctgcaggga

SEQ ID NO: 90253 - RNA, 21 nt, synthetic construct
  source 1..21: mol_type = other RNA
ggccaccgcctcctccactca

SEQ ID NO: 90254 - RNA, 21 nt, synthetic construct
  source 1..21: mol_type = other RNA
atggcagtgccaggacctgca

SEQ ID NO: 90255 - RNA, 21 nt, synthetic construct
  source 1..21: mol_type = other RNA
gaccaggtcgggcaggtgcta

SEQ ID NO: 90256 - RNA, 21 nt, synthetic construct
  source 1..21: mol_type = other RNA
ctacgactgcatccactggaa

SEQ ID NO: 90257 - RNA, 21 nt, synthetic construct
  source 1..21: mol_type = other RNA
gctccccagcagcctgccaaa

SEQ ID NO: 90258 - RNA, 21 nt, synthetic construct
  source 1..21: mol_type = other RNA
gaagaccagacaggcaggtta

SEQ ID NO: 90259 - RNA, 21 nt, synthetic construct
  source 1..21: mol_type = other RNA
accagctccaaagccactcca

SEQ ID NO: 90260 - RNA, 21 nt, synthetic construct
  source 1..21: mol_type = other RNA
caccctcctccactccagaga

SEQ ID NO: 90261 - RNA, 21 nt, synthetic construct
  source 1..21: mol_type = other RNA
accagctccaaagccactcca

SEQ ID NO: 90262 - RNA, 21 nt, synthetic construct
  source 1..21: mol_type = other RNA
caccctcctccactccagaga

SEQ ID NO: 90263 - RNA, 21 nt, synthetic construct
  source 1..21: mol_type = other RNA
accagctccaaagccactcca

SEQ ID NO: 90264 - RNA, 21 nt, synthetic construct
  source 1..21: mol_type = other RNA
caccctcctccactccagaga

SEQ ID NO: 90265 - RNA, 21 nt, synthetic construct
  source 1..21: mol_type = other RNA
accagctccaaagccactcca

SEQ ID NO: 90266 - RNA, 21 nt, synthetic construct
  source 1..21: mol_type = other RNA
caccctcctccactccagaga

SEQ ID NO: 90267 - RNA, 21 nt, synthetic construct
  source 1..21: mol_type = other RNA
cggggtggtggaggccacgga

SEQ ID NO: 90268 - RNA, 21 nt, synthetic construct
  source 1..21: mol_type = other RNA
ctgcagcaacagctcggcgga

SEQ ID NO: 90269 - RNA, 21 nt, synthetic construct
  source 1..21: mol_type = other RNA
gctggaggagctgggccagca

SEQ ID NO: 90270 - RNA, 21 nt, synthetic construct
  source 1..21: mol_type = other RNA
accccagccaccagctccaca

SEQ ID NO: 90271 - RNA, 21 nt, synthetic construct
  source 1..21: mol_type = other RNA
ccaccccctcctccaccccaa

SEQ ID NO: 90272 - RNA, 21 nt, synthetic construct
  source 1..21: mol_type = other RNA
ccaccccctcctccaccccaa

SEQ ID NO: 90273 - RNA, 21 nt, synthetic construct
  source 1..21: mol_type = other RNA
ccaccccctcctccaccccaa

SEQ ID NO: 90274 - RNA, 21 nt, synthetic construct
  source 1..21: mol_type = other RNA
ccaccccctcctccaccccaa

SEQ ID NO: 90275 - RNA, 21 nt, synthetic construct
  source 1..21: mol_type = other RNA
tgccgcccgctgcccccgcga

SEQ ID NO: 90276 - RNA, 21 nt, synthetic construct
  source 1..21: mol_type = other RNA
cggagtgccacgcactggtga

SEQ ID NO: 90277 - RNA, 21 nt, synthetic construct
  source 1..21: mol_type = other RNA
gctttgggaatctcagcctca

SEQ ID NO: 90278 - RNA, 21 nt, synthetic construct
  source 1..21: mol_type = other RNA
accacagccacagccacacca

SEQ ID NO: 90279 - RNA, 21 nt, synthetic construct
  source 1..21: mol_type = other RNA
cgctgccgcccgctgccccca

SEQ ID NO: 90280 - RNA, 21 nt, synthetic construct
  source 1..21: mol_type = other RNA
ctgccgcccgctgcccccgca

SEQ ID NO: 90281 - RNA, 21 nt, synthetic construct
  source 1..21: mol_type = other RNA
cacccgtggccaccatgtcca

SEQ ID NO: 90282 - RNA, 21 nt, synthetic construct
  source 1..21: mol_type = other RNA
gaccctggcacaggtggggca

SEQ ID NO: 90283 - RNA, 21 nt, synthetic construct
  source 1..21: mol_type = other RNA
tgcatcctgcccagatgtgta

SEQ ID NO: 90284 - RNA, 21 nt, synthetic construct
  source 1..21: mol_type = other RNA
tgcagcacctggggtgactta

SEQ ID NO: 90285 - RNA, 21 nt, synthetic construct
  source 1..21: mol_type = other RNA
gtggcccctccccggccccaa

SEQ ID NO: 90286 - RNA, 21 nt, synthetic construct
  source 1..21: mol_type = other RNA
ccacagtcaccagctccaaaa

SEQ ID NO: 90287 - RNA, 21 nt, synthetic construct
  source 1..21: mol_type = other RNA
ccacagtcaccagctccaaaa

SEQ ID NO: 90288 - RNA, 21 nt, synthetic construct
  source 1..21: mol_type = other RNA
ctcccttctccagtccaggga

SEQ ID NO: 90289 - RNA, 21 nt, synthetic construct
  source 1..21: mol_type = other RNA
ccacagtcaccagctccaaaa

SEQ ID NO: 90290 - RNA, 21 nt, synthetic construct
  source 1..21: mol_type = other RNA
ctcccttctccagtccaggga

SEQ ID NO: 90291 - RNA, 21 nt, synthetic construct
  source 1..21: mol_type = other RNA
ccacagtcaccagctccaaaa

SEQ ID NO: 90292 - RNA, 21 nt, synthetic construct
  source 1..21: mol_type = other RNA
gcccctgccctgtgacgccca

SEQ ID NO: 90293 - RNA, 21 nt, synthetic construct
  source 1..21: mol_type = other RNA
atcccctcctcctccctggga

SEQ ID NO: 90294 - RNA, 21 nt, synthetic construct
  source 1..21: mol_type = other RNA
aagccacttcctcctccagta

SEQ ID NO: 90295 - RNA, 21 nt, synthetic construct
  source 1..21: mol_type = other RNA
atcccctcctcctccctggga

SEQ ID NO: 90296 - RNA, 21 nt, synthetic construct
  source 1..21: mol_type = other RNA
aagccacttcctcctccagta

SEQ ID NO: 90297 - RNA, 21 nt, synthetic construct
  source 1..21: mol_type = other RNA
atcccctcctcctccctggga

SEQ ID NO: 90298 - RNA, 21 nt, synthetic construct
  source 1..21: mol_type = other RNA
aagccacttcctcctccagta

SEQ ID NO: 90299 - RNA, 21 nt, synthetic construct
  source 1..21: mol_type = other RNA
ctgccactgccgctgccgcca

SEQ ID NO: 90300 - RNA, 21 nt, synthetic construct
  source 1..21: mol_type = other RNA
acccccaccccatgcccacca

SEQ ID NO: 90301 - RNA, 21 nt, synthetic construct
  source 1..21: mol_type = other RNA
tgctcctgctgcccaccccga

SEQ ID NO: 90302 - RNA, 21 nt, synthetic construct
  source 1..21: mol_type = other RNA
tccccctcccaaagtgctgaa

SEQ ID NO: 90303 - RNA, 21 nt, synthetic construct
  source 1..21: mol_type = other RNA
ccccctcccaaagtgctgaca

SEQ ID NO: 90304 - RNA, 21 nt, synthetic construct
  source 1..21: mol_type = other RNA
tccccctcccaaagtgctgaa

SEQ ID NO: 90305 - RNA, 21 nt, synthetic construct
  source 1..21: mol_type = other RNA
ccccctcccaaagtgctgaca

SEQ ID NO: 90306 - RNA, 21 nt, synthetic construct
  source 1..21: mol_type = other RNA
tccccctcccaaagtgctgaa

SEQ ID NO: 90307 - RNA, 21 nt, synthetic construct
  source 1..21: mol_type = other RNA
ccccctcccaaagtgctgaca

SEQ ID NO: 90308 - RNA, 21 nt, synthetic construct
  source 1..21: mol_type = other RNA
tgcagctcctgcacctgctca

SEQ ID NO: 90309 - RNA, 21 nt, synthetic construct
  source 1..21: mol_type = other RNA
cgcctcctccactctgggaaa

SEQ ID NO: 90310 - RNA, 21 nt, synthetic construct
  source 1..21: mol_type = other RNA
gctgccgcccgctgcccccga

SEQ ID NO: 90311 - RNA, 21 nt, synthetic construct
  source 1..21: mol_type = other RNA
gcccggccctcccggtctcca

SEQ ID NO: 90312 - RNA, 21 nt, synthetic construct
  source 1..21: mol_type = other RNA
agcccggccctcccggtctca

SEQ ID NO: 90313 - RNA, 21 nt, synthetic construct
  source 1..21: mol_type = other RNA
ccccctgaacccggcgcacaa

SEQ ID NO: 90314 - RNA, 21 nt, synthetic construct
  source 1..21: mol_type = other RNA
aggagacggtgcccttgcaca

SEQ ID NO: 90315 - RNA, 21 nt, synthetic construct
  source 1..21: mol_type = other RNA
gagctgcgggttctctgctga

SEQ ID NO: 90316 - RNA, 21 nt, synthetic construct
  source 1..21: mol_type = other RNA
acgaggacttcaacgtccaga

SEQ ID NO: 90317 - RNA, 21 nt, synthetic construct
  source 1..21: mol_type = other RNA
tccttcaacaccacctgcaga

SEQ ID NO: 90318 - RNA, 21 nt, synthetic construct
  source 1..21: mol_type = other RNA
ctccagtgtggatcagcacaa

SEQ ID NO: 90319 - RNA, 21 nt, synthetic construct
  source 1..21: mol_type = other RNA
ttccagtgtggatcagcacaa

SEQ ID NO: 90320 - RNA, 21 nt, synthetic construct
  source 1..21: mol_type = other RNA
ttccagtgctgacaagcacaa

SEQ ID NO: 90321 - RNA, 21 nt, synthetic construct
  source 1..21: mol_type = other RNA
ctccagtgtggatcagcacaa

SEQ ID NO: 90322 - RNA, 21 nt, synthetic construct
  source 1..21: mol_type = other RNA
ctccagtgtggatcagcacaa

SEQ ID NO: 90323 - RNA, 21 nt, synthetic construct
  source 1..21: mol_type = other RNA
ttccagtgctgacaagcacaa

SEQ ID NO: 90324 - RNA, 21 nt, synthetic construct
  source 1..21: mol_type = other RNA
ctccagtgtggatcagcacaa

SEQ ID NO: 90325 - RNA, 21 nt, synthetic construct
  source 1..21: mol_type = other RNA
ttccagtgctgacaagcacaa

SEQ ID NO: 90326 - RNA, 21 nt, synthetic construct
  source 1..21: mol_type = other RNA
aaacctgggtcaacagccata

SEQ ID NO: 90327 - RNA, 21 nt, synthetic construct
  source 1..21: mol_type = other RNA
gactttggcctggtctgcaga

SEQ ID NO: 90328 - RNA, 21 nt, synthetic construct
  source 1..21: mol_type = other RNA
gactttggcctggtctgcaga

SEQ ID NO: 90329 - RNA, 21 nt, synthetic construct
  source 1..21: mol_type = other RNA
gactttggcctggtctgcaga

SEQ ID NO: 90330 - RNA, 21 nt, synthetic construct
  source 1..21: mol_type = other RNA
gactttggcctggtctgcaga

SEQ ID NO: 90331 - RNA, 21 nt, synthetic construct
  source 1..21: mol_type = other RNA
cagtgcagcatcctccacgga

SEQ ID NO: 90332 - RNA, 21 nt, synthetic construct
  source 1..21: mol_type = other RNA
acagtgctgaccaccaccaca

SEQ ID NO: 90333 - RNA, 21 nt, synthetic construct
  source 1..21: mol_type = other RNA
acagtgctgaccaccaccaca

SEQ ID NO: 90334 - RNA, 21 nt, synthetic construct
  source 1..21: mol_type = other RNA
acagtgctgaccaccaccaca

SEQ ID NO: 90335 - RNA, 21 nt, synthetic construct
  source 1..21: mol_type = other RNA
acagtgctgaccaccaccaca

SEQ ID NO: 90336 - RNA, 21 nt, synthetic construct
  source 1..21: mol_type = other RNA
tgcagcaacagctcggcggga

SEQ ID NO: 90337 - RNA, 21 nt, synthetic construct
  source 1..21: mol_type = other RNA
tgcagcatcctccacggccca

SEQ ID NO: 90338 - RNA, 21 nt, synthetic construct
  source 1..21: mol_type = other RNA
agcatcctccacggccccaca

SEQ ID NO: 90339 - RNA, 21 nt, synthetic construct
  source 1..21: mol_type = other RNA
ctgccctgaggaccagatcca

SEQ ID NO: 90340 - RNA, 21 nt, synthetic construct
  source 1..21: mol_type = other RNA
acaggcctggggctgcagcta

SEQ ID NO: 90341 - RNA, 21 nt, synthetic construct
  source 1..21: mol_type = other RNA
caggcctggggctgcagctga

SEQ ID NO: 90342 - RNA, 21 nt, synthetic construct
  source 1..21: mol_type = other RNA
aggcctggggctgcagctgca

SEQ ID NO: 90343 - RNA, 21 nt, synthetic construct
  source 1..21: mol_type = other RNA
acaagcctggagagaccatca

SEQ ID NO: 90344 - RNA, 21 nt, synthetic construct
  source 1..21: mol_type = other RNA
tggaggagctgggccagcaga

SEQ ID NO: 90345 - RNA, 21 nt, synthetic construct
  source 1..21: mol_type = other RNA
cggccaccaccaccaccacca

SEQ ID NO: 90346 - RNA, 21 nt, synthetic construct
  source 1..21: mol_type = other RNA
ggccaccaccaccaccaccca

SEQ ID NO: 90347 - RNA, 21 nt, synthetic construct
  source 1..21: mol_type = other RNA
gccaccaccaccaccacccaa

SEQ ID NO: 90348 - RNA, 21 nt, synthetic construct
  source 1..21: mol_type = other RNA
ctcctcctccctgggcaccaa

SEQ ID NO: 90349 - RNA, 21 nt, synthetic construct
  source 1..21: mol_type = other RNA
cagttccaaagccacttccta

SEQ ID NO: 90350 - RNA, 21 nt, synthetic construct
  source 1..21: mol_type = other RNA
ccacagccacagccacaccca

SEQ ID NO: 90351 - RNA, 21 nt, synthetic construct
  source 1..21: mol_type = other RNA
ctcctcctccctgggcaccaa

SEQ ID NO: 90352 - RNA, 21 nt, synthetic construct
  source 1..21: mol_type = other RNA
cagttccaaagccacttccta

SEQ ID NO: 90353 - RNA, 21 nt, synthetic construct
  source 1..21: mol_type = other RNA
ctcctcctccctgggcaccaa

SEQ ID NO: 90354 - RNA, 21 nt, synthetic construct
  source 1..21: mol_type = other RNA
tctgccactgccgctgccgca

SEQ ID NO: 90355 - RNA, 21 nt, synthetic construct
  source 1..21: mol_type = other RNA
tgccagccccgcagccccgga

SEQ ID NO: 90356 - RNA, 21 nt, synthetic construct
  source 1..21: mol_type = other RNA
ccccaccccatgcccaccaca

SEQ ID NO: 90357 - RNA, 23 nt, synthetic construct
  source 1..23: mol_type = other RNA
taggcgcccgcgtcattgaggaa

SEQ ID NO: 90358 - RNA, 23 nt, synthetic construct
  source 1..23: mol_type = other RNA
tgtgctgaaacagcccacgtcca

SEQ ID NO: 90359 - RNA, 23 nt, synthetic construct
  source 1..23: mol_type = other RNA
tagcggcagacctcgcggacaca

SEQ ID NO: 90360 - RNA, 23 nt, synthetic construct
  source 1..23: mol_type = other RNA
tttatcgtaggactcaacgtccc

SEQ ID NO: 90361 - RNA, 23 nt, synthetic construct
  source 1..23: mol_type = other RNA
tgatgcactcgcactcatagtgg

SEQ ID NO: 90362 - RNA, 23 nt, synthetic construct
  source 1..23: mol_type = other RNA
ttttcttggacagaacgtagctg

SEQ ID NO: 90363 - RNA, 23 nt, synthetic construct
  source 1..23: mol_type = other RNA
tcgtcccctccaagttgttcaga

SEQ ID NO: 90364 - RNA, 23 nt, synthetic construct
  source 1..23: mol_type = other RNA
tgcactcgcactcatagtggaag

SEQ ID NO: 90365 - RNA, 23 nt, synthetic construct
  source 1..23: mol_type = other RNA
tgccgttcttgctgaaaccgctg

SEQ ID NO: 90366 - RNA, 23 nt, synthetic construct
  source 1..23: mol_type = other RNA
tagacacaagcacgccgttcttg

SEQ ID NO: 90367 - RNA, 23 nt, synthetic construct
  source 1..23: mol_type = other RNA
tccaaactggagcggggtcagcc

SEQ ID NO: 90368 - RNA, 23 nt, synthetic construct
  source 1..23: mol_type = other RNA
ttgcttgttcacgcaggtgacgt

SEQ ID NO: 90369 - RNA, 23 nt, synthetic construct
  source 1..23: mol_type = other RNA
tgcgtgagtattccacaaaggtg

SEQ ID NO: 90370 - RNA, 23 nt, synthetic construct
  source 1..23: mol_type = other RNA
tgtgttggcgaaggctgcgcccg

SEQ ID NO: 90371 - RNA, 23 nt, synthetic construct
  source 1..23: mol_type = other RNA
ttatcgtaggactcaacgtcccc

SEQ ID NO: 90372 - RNA, 23 nt, synthetic construct
  source 1..23: mol_type = other RNA
tgagccagcacggtgccgtgagc

SEQ ID NO: 90373 - RNA, 23 nt, synthetic construct
  source 1..23: mol_type = other RNA
ttagtacttggtggagtcaacct

SEQ ID NO: 90374 - RNA, 23 nt, synthetic construct
  source 1..23: mol_type = other RNA
tggacgatatccatggacttgta

SEQ ID NO: 90375 - RNA, 23 nt, synthetic construct
  source 1..23: mol_type = other RNA
ttcttggacagaacgtagctgca

SEQ ID NO: 90376 - RNA, 23 nt, synthetic construct
  source 1..23: mol_type = other RNA
tgtgtaagaggtgccgtcaaagg

SEQ ID NO: 90377 - RNA, 23 nt, synthetic construct
  source 1..23: mol_type = other RNA
taccggaatttggtcaaacagga

SEQ ID NO: 90378 - RNA, 23 nt, synthetic construct
  source 1..23: mol_type = other RNA
tacgatgaagaagctcgagggtg

SEQ ID NO: 90379 - RNA, 23 nt, synthetic construct
  source 1..23: mol_type = other RNA
tgtgccgtcaaaggtggaatagt

SEQ ID NO: 90380 - RNA, 23 nt, synthetic construct
  source 1..23: mol_type = other RNA
tgtacttggtgcagacgccgtcc

SEQ ID NO: 90381 - RNA, 23 nt, synthetic construct
  source 1..23: mol_type = other RNA
tcctggtgcagtcggatgaacac

SEQ ID NO: 90382 - RNA, 23 nt, synthetic construct
  source 1..23: mol_type = other RNA
tctcgtagtacttggtggagtca

SEQ ID NO: 90383 - RNA, 23 nt, synthetic construct
  source 1..23: mol_type = other RNA
tgcactcatagtggaagtcacag

SEQ ID NO: 90384 - RNA, 23 nt, synthetic construct
  source 1..23: mol_type = other RNA
tggtcgtccccggagtggaggag

SEQ ID NO: 90385 - RNA, 23 nt, synthetic construct
  source 1..23: mol_type = other RNA
tggtcgtccccggagtggaggag

SEQ ID NO: 90386 - RNA, 23 nt, synthetic construct
  source 1..23: mol_type = other RNA
tggtcgtccccggagtggaggag

SEQ ID NO: 90387 - RNA, 23 nt, synthetic construct
  source 1..23: mol_type = other RNA
tgctcaccggaatttggtcaaac

SEQ ID NO: 90388 - RNA, 23 nt, synthetic construct
  source 1..23: mol_type = other RNA
tgtgcccactggggttccggcag

SEQ ID NO: 90389 - RNA, 23 nt, synthetic construct
  source 1..23: mol_type = other RNA
tagcagaacacacggatttcata

SEQ ID NO: 90390 - RNA, 23 nt, synthetic construct
  source 1..23: mol_type = other RNA
tagcagaacacacggatttcata

SEQ ID NO: 90391 - RNA, 23 nt, synthetic construct
  source 1..23: mol_type = other RNA
tagcagaacacacggatttcata

SEQ ID NO: 90392 - RNA, 23 nt, synthetic construct
  source 1..23: mol_type = other RNA
tggccacagggcacgtattcgca

SEQ ID NO: 90393 - RNA, 23 nt, synthetic construct
  source 1..23: mol_type = other RNA
tgtgggcgcactggcgtgagtat

SEQ ID NO: 90394 - RNA, 23 nt, synthetic construct
  source 1..23: mol_type = other RNA
ttgtacttggtgcagacgccgtc

SEQ ID NO: 90395 - RNA, 23 nt, synthetic construct
  source 1..23: mol_type = other RNA
tcgccaggctcgtggtcagcggc

SEQ ID NO: 90396 - RNA, 23 nt, synthetic construct
  source 1..23: mol_type = other RNA
tatatccatggacttgtagtgga

SEQ ID NO: 90397 - RNA, 23 nt, synthetic construct
  source 1..23: mol_type = other RNA
ttggtgcagtcggatgaacacgc

SEQ ID NO: 90398 - RNA, 23 nt, synthetic construct
  source 1..23: mol_type = other RNA
tccgttcttgctgaaaccgctgc

SEQ ID NO: 90399 - RNA, 23 nt, synthetic construct
  source 1..23: mol_type = other RNA
taacgtcccctccaagttgttca

SEQ ID NO: 90400 - RNA, 23 nt, synthetic construct
  source 1..23: mol_type = other RNA
tcgctgctcaccggaatttggtc

SEQ ID NO: 90401 - RNA, 23 nt, synthetic construct
  source 1..23: mol_type = other RNA
tttgtcacccacgcacctggcca

SEQ ID NO: 90402 - RNA, 23 nt, synthetic construct
  source 1..23: mol_type = other RNA
tgcgcccgcgtcattgaggaagg

SEQ ID NO: 90403 - RNA, 23 nt, synthetic construct
  source 1..23: mol_type = other RNA
ttggtgttgtagatgacgtcctg

SEQ ID NO: 90404 - RNA, 23 nt, synthetic construct
  source 1..23: mol_type = other RNA
tttcccaaactggagcggggtca

SEQ ID NO: 90405 - RNA, 23 nt, synthetic construct
  source 1..23: mol_type = other RNA
tgtcctggtgcagtcggatgaac

SEQ ID NO: 90406 - RNA, 23 nt, synthetic construct
  source 1..23: mol_type = other RNA
tgttacagctctggcagttctcc

SEQ ID NO: 90407 - RNA, 23 nt, synthetic construct
  source 1..23: mol_type = other RNA
taggacccggatcctgtagttgt

SEQ ID NO: 90408 - RNA, 23 nt, synthetic construct
  source 1..23: mol_type = other RNA
tgtaagaggtgccgtcaaaggtg

SEQ ID NO: 90409 - RNA, 23 nt, synthetic construct
  source 1..23: mol_type = other RNA
ttgacgatgcggaaggtcccgtg

SEQ ID NO: 90410 - RNA, 23 nt, synthetic construct
  source 1..23: mol_type = other RNA
tcttatcgtaggactcaacgtcc

SEQ ID NO: 90411 - RNA, 23 nt, synthetic construct
  source 1..23: mol_type = other RNA
tggtgtaagaggtgccgtcaaag

SEQ ID NO: 90412 - RNA, 23 nt, synthetic construct
  source 1..23: mol_type = other RNA
tgatgaagaagctcgagggtgtg

SEQ ID NO: 90413 - RNA, 23 nt, synthetic construct
  source 1..23: mol_type = other RNA
tagtgcggctgtaaggcagctcc

SEQ ID NO: 90414 - RNA, 23 nt, synthetic construct
  source 1..23: mol_type = other RNA
taggacgatatccatggacttgt

SEQ ID NO: 90415 - RNA, 23 nt, synthetic construct
  source 1..23: mol_type = other RNA
ttggcgtgagtattccacaaagg

SEQ ID NO: 90416 - RNA, 23 nt, synthetic construct
  source 1..23: mol_type = other RNA
tgccgtagttgcagcagaacaca

SEQ ID NO: 90417 - RNA, 23 nt, synthetic construct
  source 1..23: mol_type = other RNA
tgccgtagttgcagcagaacaca

SEQ ID NO: 90418 - RNA, 23 nt, synthetic construct
  source 1..23: mol_type = other RNA
tactgggccacgcacttcatctg

SEQ ID NO: 90419 - RNA, 23 nt, synthetic construct
  source 1..23: mol_type = other RNA
taagaggtgccgtcaaaggtgga

SEQ ID NO: 90420 - RNA, 23 nt, synthetic construct
  source 1..23: mol_type = other RNA
tacaagcacgccgttcttgctga

SEQ ID NO: 90421 - RNA, 23 nt, synthetic construct
  source 1..23: mol_type = other RNA
tgacgtcggcctcactcaggccg

SEQ ID NO: 90422 - RNA, 23 nt, synthetic construct
  source 1..23: mol_type = other RNA
tagtcgtcagcctggttctggtt

SEQ ID NO: 90423 - RNA, 23 nt, synthetic construct
  source 1..23: mol_type = other RNA
ttgccgtcaaaggtggaatagtg

SEQ ID NO: 90424 - RNA, 23 nt, synthetic construct
  source 1..23: mol_type = other RNA
ttaagaggtgccgtcaaaggtgg

SEQ ID NO: 90425 - RNA, 23 nt, synthetic construct
  source 1..23: mol_type = other RNA
tcagccggttttcctgaggctcc

SEQ ID NO: 90426 - RNA, 23 nt, synthetic construct
  source 1..23: mol_type = other RNA
tcacgcacctggccaccgtgcag

SEQ ID NO: 90427 - RNA, 23 nt, synthetic construct
  source 1..23: mol_type = other RNA
tattccacgacctggcccaactc

SEQ ID NO: 90428 - RNA, 23 nt, synthetic construct
  source 1..23: mol_type = other RNA
tattccacgacctggcccaactc

SEQ ID NO: 90429 - RNA, 23 nt, synthetic construct
  source 1..23: mol_type = other RNA
tattccacgacctggcccaactc

SEQ ID NO: 90430 - RNA, 23 nt, synthetic construct
  source 1..23: mol_type = other RNA
tattccacgacctggcccaactc

SEQ ID NO: 90431 - RNA, 23 nt, synthetic construct
  source 1..23: mol_type = other RNA
ttcggtgttgttgtggaagaggc

SEQ ID NO: 90432 - RNA, 23 nt, synthetic construct
  source 1..23: mol_type = other RNA
ttcgtccctctggttgttggtgc

SEQ ID NO: 90433 - RNA, 23 nt, synthetic construct
  source 1..23: mol_type = other RNA
tggcgtgcagccacactcatcca

SEQ ID NO: 90434 - RNA, 23 nt, synthetic construct
  source 1..23: mol_type = other RNA
tacgatatccatggacttgtagt

SEQ ID NO: 90435 - RNA, 23 nt, synthetic construct
  source 1..23: mol_type = other RNA
tgccgggcgtagttctcattctc

SEQ ID NO: 90436 - RNA, 23 nt, synthetic construct
  source 1..23: mol_type = other RNA
tcccacaggggatgttctcggtg

SEQ ID NO: 90437 - RNA, 23 nt, synthetic construct
  source 1..23: mol_type = other RNA
ttcagacttggggtagtcctcat

SEQ ID NO: 90438 - RNA, 23 nt, synthetic construct
  source 1..23: mol_type = other RNA
tcctgatcttatcgtaggactca

SEQ ID NO: 90439 - RNA, 23 nt, synthetic construct
  source 1..23: mol_type = other RNA
tgcacgccgttcttgctgaaacc

SEQ ID NO: 90440 - RNA, 23 nt, synthetic construct
  source 1..23: mol_type = other RNA
ttgatgaagtggccatccccgta

SEQ ID NO: 90441 - RNA, 23 nt, synthetic construct
  source 1..23: mol_type = other RNA
tacgggtggaacaaagctcacgc

SEQ ID NO: 90442 - RNA, 23 nt, synthetic construct
  source 1..23: mol_type = other RNA
ttgttcagacttggggtagtcct

SEQ ID NO: 90443 - RNA, 23 nt, synthetic construct
  source 1..23: mol_type = other RNA
ttaggtcctgtcctcataggtgc

SEQ ID NO: 90444 - RNA, 23 nt, synthetic construct
  source 1..23: mol_type = other RNA
tcgatgaagaagctcgagggtgt

SEQ ID NO: 90445 - RNA, 23 nt, synthetic construct
  source 1..23: mol_type = other RNA
ttcgcactcatagtggaagtcac

SEQ ID NO: 90446 - RNA, 23 nt, synthetic construct
  source 1..23: mol_type = other RNA
tgctgcattccacgacctggccc

SEQ ID NO: 90447 - RNA, 23 nt, synthetic construct
  source 1..23: mol_type = other RNA
tgctgcattccacgacctggccc

SEQ ID NO: 90448 - RNA, 23 nt, synthetic construct
  source 1..23: mol_type = other RNA
tgctgcattccacgacctggccc

SEQ ID NO: 90449 - RNA, 23 nt, synthetic construct
  source 1..23: mol_type = other RNA
tgctgcattccacgacctggccc

SEQ ID NO: 90450 - RNA, 23 nt, synthetic construct
  source 1..23: mol_type = other RNA
tcgtcaaaccactctgtccactc

SEQ ID NO: 90451 - RNA, 23 nt, synthetic construct
  source 1..23: mol_type = other RNA
tccgggcgtagttctcattctcc

SEQ ID NO: 90452 - RNA, 23 nt, synthetic construct
  source 1..23: mol_type = other RNA
tttacagctctggcagttctccg

SEQ ID NO: 90453 - RNA, 23 nt, synthetic construct
  source 1..23: mol_type = other RNA
ttagttgtagcacatcttgaaga

SEQ ID NO: 90454 - RNA, 23 nt, synthetic construct
  source 1..23: mol_type = other RNA
ttcgtaggactcaacgtcccctc

SEQ ID NO: 90455 - RNA, 23 nt, synthetic construct
  source 1..23: mol_type = other RNA
tatgaggacataggtgcagttgc

SEQ ID NO: 90456 - RNA, 23 nt, synthetic construct
  source 1..23: mol_type = other RNA
tccccccgcgtgggcgcactggc

SEQ ID NO: 90457 - RNA, 23 nt, synthetic construct
  source 1..23: mol_type = other RNA
tggtagtcctcatcaaaccactc

SEQ ID NO: 90458 - RNA, 23 nt, synthetic construct
  source 1..23: mol_type = other RNA
tgcactgctccgtgggcccatcc

SEQ ID NO: 90459 - RNA, 23 nt, synthetic construct
  source 1..23: mol_type = other RNA
tgtaggtggcctcgttgtgcaca

SEQ ID NO: 90460 - RNA, 23 nt, synthetic construct
  source 1..23: mol_type = other RNA
tcacacacaggcccgcgtcgtgg

SEQ ID NO: 90461 - RNA, 23 nt, synthetic construct
  source 1..23: mol_type = other RNA
tgtggtgttgtagatgacgtcct

SEQ ID NO: 90462 - RNA, 23 nt, synthetic construct
  source 1..23: mol_type = other RNA
tgtagctggacgttgaagtcctc

SEQ ID NO: 90463 - RNA, 23 nt, synthetic construct
  source 1..23: mol_type = other RNA
tgtcctgtcctcataggtgcagg

SEQ ID NO: 90464 - RNA, 23 nt, synthetic construct
  source 1..23: mol_type = other RNA
tctcaacgtcccctccaagttgt

SEQ ID NO: 90465 - RNA, 23 nt, synthetic construct
  source 1..23: mol_type = other RNA
tctcgagggtgtgaacagggtga

SEQ ID NO: 90466 - RNA, 23 nt, synthetic construct
  source 1..23: mol_type = other RNA
tgctcgagggtgtgaacagggtg

SEQ ID NO: 90467 - RNA, 23 nt, synthetic construct
  source 1..23: mol_type = other RNA
tatgttctcggtgacgatgcgga

SEQ ID NO: 90468 - RNA, 23 nt, synthetic construct
  source 1..23: mol_type = other RNA
tggtgtccggagtccgccaggac

SEQ ID NO: 90469 - RNA, 23 nt, synthetic construct
  source 1..23: mol_type = other RNA
tgcaccgacgtcatagtagtttc

SEQ ID NO: 90470 - RNA, 23 nt, synthetic construct
  source 1..23: mol_type = other RNA
ttcggttgacagcgggtcgtgcc

SEQ ID NO: 90471 - RNA, 23 nt, synthetic construct
  source 1..23: mol_type = other RNA
tgacgtcatagtagtttccgtcc

SEQ ID NO: 90472 - RNA, 23 nt, synthetic construct
  source 1..23: mol_type = other RNA
tccggctcggtcggtcttattgt

SEQ ID NO: 90473 - RNA, 23 nt, synthetic construct
  source 1..23: mol_type = other RNA
tgccgtgatcgtagtggccgtgg

SEQ ID NO: 90474 - RNA, 23 nt, synthetic construct
  source 1..23: mol_type = other RNA
tgccgtgatcgtagtggccgtgg

SEQ ID NO: 90475 - RNA, 23 nt, synthetic construct
  source 1..23: mol_type = other RNA
tgccgtgatcgtagtggccgtgg

SEQ ID NO: 90476 - RNA, 23 nt, synthetic construct
  source 1..23: mol_type = other RNA
tgccgtgatcgtagtggccgtgg

SEQ ID NO: 90477 - RNA, 23 nt, synthetic construct
  source 1..23: mol_type = other RNA
tcttcggttgacagcgggtcgtg

SEQ ID NO: 90478 - RNA, 23 nt, synthetic construct
  source 1..23: mol_type = other RNA
tacgtcccctgcagtggtcgtca

SEQ ID NO: 90479 - RNA, 23 nt, synthetic construct
  source 1..23: mol_type = other RNA
tggatcggtcaggcgcgagcacc

SEQ ID NO: 90480 - RNA, 23 nt, synthetic construct
  source 1..23: mol_type = other RNA
tggtagtcggcactttggtagtg

SEQ ID NO: 90481 - RNA, 23 nt, synthetic construct
  source 1..23: mol_type = other RNA
tggtagtcggcactttggtagtg

SEQ ID NO: 90482 - RNA, 23 nt, synthetic construct
  source 1..23: mol_type = other RNA
tggtagtcggcactttggtagtg

SEQ ID NO: 90483 - RNA, 23 nt, synthetic construct
  source 1..23: mol_type = other RNA
tcacagggcacgtattcgcagca

SEQ ID NO: 90484 - RNA, 23 nt, synthetic construct
  source 1..23: mol_type = other RNA
ttagtcggcactttggtagtgtg

SEQ ID NO: 90485 - RNA, 23 nt, synthetic construct
  source 1..23: mol_type = other RNA
tgtagtcggcactttggtagtgt

SEQ ID NO: 90486 - RNA, 23 nt, synthetic construct
  source 1..23: mol_type = other RNA
ttagtcggcactttggtagtgtg

SEQ ID NO: 90487 - RNA, 23 nt, synthetic construct
  source 1..23: mol_type = other RNA
tgtagtcggcactttggtagtgt

SEQ ID NO: 90488 - RNA, 23 nt, synthetic construct
  source 1..23: mol_type = other RNA
ttagtcggcactttggtagtgtg

SEQ ID NO: 90489 - RNA, 23 nt, synthetic construct
  source 1..23: mol_type = other RNA
tgtagtcggcactttggtagtgt

SEQ ID NO: 90490 - RNA, 23 nt, synthetic construct
  source 1..23: mol_type = other RNA
ttttaggaaacccatcgggtccc

SEQ ID NO: 90491 - RNA, 23 nt, synthetic construct
  source 1..23: mol_type = other RNA
ttgttcggcactgggggtgtgtg

SEQ ID NO: 90492 - RNA, 23 nt, synthetic construct
  source 1..23: mol_type = other RNA
ttgttcggcactgggggtgtgtg

SEQ ID NO: 90493 - RNA, 23 nt, synthetic construct
  source 1..23: mol_type = other RNA
ttgttcggcactgggggtgtgtg

SEQ ID NO: 90494 - RNA, 23 nt, synthetic construct
  source 1..23: mol_type = other RNA
ttgttcggcactgggggtgtgtg

SEQ ID NO: 90495 - RNA, 23 nt, synthetic construct
  source 1..23: mol_type = other RNA
tgatcggtcaggcgcgagcacca

SEQ ID NO: 90496 - RNA, 23 nt, synthetic construct
  source 1..23: mol_type = other RNA
tagatccccatgtagcgtatctt

SEQ ID NO: 90497 - RNA, 23 nt, synthetic construct
  source 1..23: mol_type = other RNA
taactcccgcagggggacaccag

SEQ ID NO: 90498 - RNA, 23 nt, synthetic construct
  source 1..23: mol_type = other RNA
ttcaaggctgtgagcgcactgga

SEQ ID NO: 90499 - RNA, 23 nt, synthetic construct
  source 1..23: mol_type = other RNA
tatcgtaggactcaacgtcccct

SEQ ID NO: 90500 - RNA, 23 nt, synthetic construct
  source 1..23: mol_type = other RNA
taactcccgcagggggacaccag

SEQ ID NO: 90501 - RNA, 23 nt, synthetic construct
  source 1..23: mol_type = other RNA
taactcccgcagggggacaccag

SEQ ID NO: 90502 - RNA, 23 nt, synthetic construct
  source 1..23: mol_type = other RNA
tttcacgcaggtgacgttggcca

SEQ ID NO: 90503 - RNA, 23 nt, synthetic construct
  source 1..23: mol_type = other RNA
ttcccaaactccagtgcgtcccc

SEQ ID NO: 90504 - RNA, 23 nt, synthetic construct
  source 1..23: mol_type = other RNA
tcggccctgatcttatcgtagga

SEQ ID NO: 90505 - RNA, 23 nt, synthetic construct
  source 1..23: mol_type = other RNA
tcggctcggtcggtcttattgta

SEQ ID NO: 90506 - RNA, 23 nt, synthetic construct
  source 1..23: mol_type = other RNA
tttgcaccgacgtcatagtagtt

SEQ ID NO: 90507 - RNA, 23 nt, synthetic construct
  source 1..23: mol_type = other RNA
tcgcagggggacaccaggctggg

SEQ ID NO: 90508 - RNA, 23 nt, synthetic construct
  source 1..23: mol_type = other RNA
tcgcagggggacaccaggctggg

SEQ ID NO: 90509 - RNA, 23 nt, synthetic construct
  source 1..23: mol_type = other RNA
tcgcagggggacaccaggctggg

SEQ ID NO: 90510 - RNA, 23 nt, synthetic construct
  source 1..23: mol_type = other RNA
taagtcgtcagcctggttctggt

SEQ ID NO: 90511 - RNA, 23 nt, synthetic construct
  source 1..23: mol_type = other RNA
tttagcttcccacccgtacatga

SEQ ID NO: 90512 - RNA, 23 nt, synthetic construct
  source 1..23: mol_type = other RNA
tgaagatccccatgtagcgtatc

SEQ ID NO: 90513 - RNA, 23 nt, synthetic construct
  source 1..23: mol_type = other RNA
tgccacagggcacgtattcgcag

SEQ ID NO: 90514 - RNA, 23 nt, synthetic construct
  source 1..23: mol_type = other RNA
tatccaccacgtaggcgtagcgc

SEQ ID NO: 90515 - RNA, 23 nt, synthetic construct
  source 1..23: mol_type = other RNA
tcggttgacagcgggtcgtgccc

SEQ ID NO: 90516 - RNA, 23 nt, synthetic construct
  source 1..23: mol_type = other RNA
tagtgctgggtggtaccggtggt

SEQ ID NO: 90517 - RNA, 23 nt, synthetic construct
  source 1..23: mol_type = other RNA
tactggaagcgtgcgtgccgtcc

SEQ ID NO: 90518 - RNA, 23 nt, synthetic construct
  source 1..23: mol_type = other RNA
tagtgctgggtggtaccggtggt

SEQ ID NO: 90519 - RNA, 23 nt, synthetic construct
  source 1..23: mol_type = other RNA
tagtgctgggtggtaccggtggt

SEQ ID NO: 90520 - RNA, 23 nt, synthetic construct
  source 1..23: mol_type = other RNA
tctcggcgtagctggacgttgaa

SEQ ID NO: 90521 - RNA, 23 nt, synthetic construct
  source 1..23: mol_type = other RNA
tgcccactaggcctcggcgtagc

SEQ ID NO: 90522 - RNA, 23 nt, synthetic construct
  source 1..23: mol_type = other RNA
tgccagtgcggctgtaaggcagc

SEQ ID NO: 90523 - RNA, 23 nt, synthetic construct
  source 1..23: mol_type = other RNA
tgtcaccatgcaggtcgtagagt

SEQ ID NO: 90524 - RNA, 23 nt, synthetic construct
  source 1..23: mol_type = other RNA
tggagttgaggaacacgccgccg

SEQ ID NO: 90525 - RNA, 23 nt, synthetic construct
  source 1..23: mol_type = other RNA
tccacgtaggcgtagcgctggga

SEQ ID NO: 90526 - RNA, 23 nt, synthetic construct
  source 1..23: mol_type = other RNA
ttcaaagctgtagcgatcgccat

SEQ ID NO: 90527 - RNA, 23 nt, synthetic construct
  source 1..23: mol_type = other RNA
tcttcaaagctgtagcgatcgcc

SEQ ID NO: 90528 - RNA, 23 nt, synthetic construct
  source 1..23: mol_type = other RNA
taacacgctggtcttccggtccc

SEQ ID NO: 90529 - RNA, 23 nt, synthetic construct
  source 1..23: mol_type = other RNA
tacccgcagctcgtagtcgtgac

SEQ ID NO: 90530 - RNA, 23 nt, synthetic construct
  source 1..23: mol_type = other RNA
tgtgcccaagctccccgtcgtcc

SEQ ID NO: 90531 - RNA, 23 nt, synthetic construct
  source 1..23: mol_type = other RNA
tgtgttggcgccaggctcgtggt

SEQ ID NO: 90532 - RNA, 23 nt, synthetic construct
  source 1..23: mol_type = other RNA
taaggggctcattgtcgtctctg

SEQ ID NO: 90533 - RNA, 23 nt, synthetic construct
  source 1..23: mol_type = other RNA
ttcaaggggctcattgtcgtctc

SEQ ID NO: 90534 - RNA, 23 nt, synthetic construct
  source 1..23: mol_type = other RNA
tggggatgggtgtaacgctggta

SEQ ID NO: 90535 - RNA, 23 nt, synthetic construct
  source 1..23: mol_type = other RNA
taggggatgggtgtaacgctggt

SEQ ID NO: 90536 - RNA, 23 nt, synthetic construct
  source 1..23: mol_type = other RNA
tggggatgggtgtaacgctggta

SEQ ID NO: 90537 - RNA, 23 nt, synthetic construct
  source 1..23: mol_type = other RNA
taggggatgggtgtaacgctggt

SEQ ID NO: 90538 - RNA, 23 nt, synthetic construct
  source 1..23: mol_type = other RNA
tggctggctcgggtccgacactt

SEQ ID NO: 90539 - RNA, 23 nt, synthetic construct
  source 1..23: mol_type = other RNA
tgcagaggccgtgcagtagtggt

SEQ ID NO: 90540 - RNA, 23 nt, synthetic construct
  source 1..23: mol_type = other RNA
tcgcggcagagctctgcgtaagc

SEQ ID NO: 90541 - RNA, 23 nt, synthetic construct
  source 1..23: mol_type = other RNA
tcggttacgaagccgggacggtt

SEQ ID NO: 90542 - RNA, 23 nt, synthetic construct
  source 1..23: mol_type = other RNA
tgtcacggttacgaagccgggac

SEQ ID NO: 90543 - RNA, 23 nt, synthetic construct
  source 1..23: mol_type = other RNA
tgtgttgcacacgcacaccgtct

SEQ ID NO: 90544 - RNA, 23 nt, synthetic construct
  source 1..23: mol_type = other RNA
tgggacacataggcccgcacatg

SEQ ID NO: 90545 - RNA, 23 nt, synthetic construct
  source 1..23: mol_type = other RNA
tcgtggccagctggaatccgtgc

SEQ ID NO: 90546 - RNA, 23 nt, synthetic construct
  source 1..23: mol_type = other RNA
tagccggttttcctgaggctccc

SEQ ID NO: 90547 - RNA, 23 nt, synthetic construct
  source 1..23: mol_type = other RNA
tccccgcgtgggcgcactggcgt

SEQ ID NO: 90548 - RNA, 23 nt, synthetic construct
  source 1..23: mol_type = other RNA
tgcgccgcccggcactcgatgtc

SEQ ID NO: 90549 - RNA, 23 nt, synthetic construct
  source 1..23: mol_type = other RNA
tatagggtggtcttttcggttgc

SEQ ID NO: 90550 - RNA, 23 nt, synthetic construct
  source 1..23: mol_type = other RNA
tggcgtagctggacgttgaagtc

SEQ ID NO: 90551 - RNA, 23 nt, synthetic construct
  source 1..23: mol_type = other RNA
tccaccacggaccggctacgcgt

SEQ ID NO: 90552 - RNA, 23 nt, synthetic construct
  source 1..23: mol_type = other RNA
ttagtcagcactttggtagtgtg

SEQ ID NO: 90553 - RNA, 23 nt, synthetic construct
  source 1..23: mol_type = other RNA
tcatagggtggtcttttcggttg

SEQ ID NO: 90554 - RNA, 23 nt, synthetic construct
  source 1..23: mol_type = other RNA
tccactaggcctcggcgtagctg

SEQ ID NO: 90555 - RNA, 23 nt, synthetic construct
  source 1..23: mol_type = other RNA
tcacgatgaagaagctcgagggt

SEQ ID NO: 90556 - RNA, 23 nt, synthetic construct
  source 1..23: mol_type = other RNA
ttgagtacttggacgctccgggg

SEQ ID NO: 90557 - RNA, 23 nt, synthetic construct
  source 1..23: mol_type = other RNA
tcgtagtcgtgacagagcggggg

SEQ ID NO: 90558 - RNA, 23 nt, synthetic construct
  source 1..23: mol_type = other RNA
tgtggaacaaagctcacgcgccg

SEQ ID NO: 90559 - RNA, 23 nt, synthetic construct
  source 1..23: mol_type = other RNA
ttgcaccgacgtcatagtagttt

SEQ ID NO: 90560 - RNA, 23 nt, synthetic construct
  source 1..23: mol_type = other RNA
tagtgcgtggcactccgcaaagg

SEQ ID NO: 90561 - RNA, 23 nt, synthetic construct
  source 1..23: mol_type = other RNA
tggttgcaccaaccccgtagaag

SEQ ID NO: 90562 - RNA, 23 nt, synthetic construct
  source 1..23: mol_type = other RNA
ttgccattgtacgaacacagctg

SEQ ID NO: 90563 - RNA, 23 nt, synthetic construct
  source 1..23: mol_type = other RNA
tagaacccgcagctcgtagtcgt

SEQ ID NO: 90564 - RNA, 23 nt, synthetic construct
  source 1..23: mol_type = other RNA
tgccgtcgaccggatgctcgggg

SEQ ID NO: 90565 - RNA, 23 nt, synthetic construct
  source 1..23: mol_type = other RNA
tccccatgtagcgtatcttgtag

SEQ ID NO: 90566 - RNA, 23 nt, synthetic construct
  source 1..23: mol_type = other RNA
tgcagctcgtagtcgtgacagag

SEQ ID NO: 90567 - RNA, 23 nt, synthetic construct
  source 1..23: mol_type = other RNA
tccagcggccctgatcttatcgt

SEQ ID NO: 90568 - RNA, 23 nt, synthetic construct
  source 1..23: mol_type = other RNA
ttccacactggaagcgtgcgtgc

SEQ ID NO: 90569 - RNA, 23 nt, synthetic construct
  source 1..23: mol_type = other RNA
tgggtgtaaagctggtagctgtg

SEQ ID NO: 90570 - RNA, 23 nt, synthetic construct
  source 1..23: mol_type = other RNA
tgggtgtaaagctggtagctgtg

SEQ ID NO: 90571 - RNA, 23 nt, synthetic construct
  source 1..23: mol_type = other RNA
tgctactcgtaggctgcggcgtt

SEQ ID NO: 90572 - RNA, 23 nt, synthetic construct
  source 1..23: mol_type = other RNA
tcggctacgcgtggcaaagtcat

SEQ ID NO: 90573 - RNA, 23 nt, synthetic construct
  source 1..23: mol_type = other RNA
tccggctacgcgtggcaaagtca

SEQ ID NO: 90574 - RNA, 23 nt, synthetic construct
  source 1..23: mol_type = other RNA
ttgtgggcatagaactcgttgaa

SEQ ID NO: 90575 - RNA, 23 nt, synthetic construct
  source 1..23: mol_type = other RNA
tacagacacaagcacgccgttct

SEQ ID NO: 90576 - RNA, 23 nt, synthetic construct
  source 1..23: mol_type = other RNA
tccagtgccgggcgtagttctca

SEQ ID NO: 90577 - RNA, 23 nt, synthetic construct
  source 1..23: mol_type = other RNA
tcatgtacttggtgcagacgccg

SEQ ID NO: 90578 - RNA, 23 nt, synthetic construct
  source 1..23: mol_type = other RNA
tatgcactcgcactcatagtgga

SEQ ID NO: 90579 - RNA, 23 nt, synthetic construct
  source 1..23: mol_type = other RNA
taccgctgctcaccggaatttgg

SEQ ID NO: 90580 - RNA, 23 nt, synthetic construct
  source 1..23: mol_type = other RNA
tgttctcggtgacgatgcggaag

SEQ ID NO: 90581 - RNA, 23 nt, synthetic construct
  source 1..23: mol_type = other RNA
tgcttgtaggtggcctcgttgtg

SEQ ID NO: 90582 - RNA, 23 nt, synthetic construct
  source 1..23: mol_type = other RNA
tgcacacgcgtcgttcacgcagg

SEQ ID NO: 90583 - RNA, 23 nt, synthetic construct
  source 1..23: mol_type = other RNA
tggcacacgcgtcgttcacgcag

SEQ ID NO: 90584 - RNA, 23 nt, synthetic construct
  source 1..23: mol_type = other RNA
taggcacacgcgtcgttcacgca

SEQ ID NO: 90585 - RNA, 23 nt, synthetic construct
  source 1..23: mol_type = other RNA
tgtgggcatagaactcgttgaag

SEQ ID NO: 90586 - RNA, 23 nt, synthetic construct
  source 1..23: mol_type = other RNA
tgcagttctcgttgtccgtcagg

SEQ ID NO: 90587 - RNA, 23 nt, synthetic construct
  source 1..23: mol_type = other RNA
tgccacaggtctggttggcgtat

SEQ ID NO: 90588 - RNA, 23 nt, synthetic construct
  source 1..23: mol_type = other RNA
tgcaccgtctcctcgtggacccg

SEQ ID NO: 90589 - RNA, 23 nt, synthetic construct
  source 1..23: mol_type = other RNA
taccggctacgcgtggcaaagtc

SEQ ID NO: 90590 - RNA, 23 nt, synthetic construct
  source 1..23: mol_type = other RNA
ttgatcttatcgtaggactcaac

SEQ ID NO: 90591 - RNA, 23 nt, synthetic construct
  source 1..23: mol_type = other RNA
tcgatgcggaaggtcccgtgggt

SEQ ID NO: 90592 - RNA, 23 nt, synthetic construct
  source 1..23: mol_type = other RNA
tgaaaccgctgctcaccggaatt

SEQ ID NO: 90593 - RNA, 23 nt, synthetic construct
  source 1..23: mol_type = other RNA
ttccactcacacttcggttgaca

SEQ ID NO: 90594 - RNA, 23 nt, synthetic construct
  source 1..23: mol_type = other RNA
tgatgttctcggtgacgatgcgg

SEQ ID NO: 90595 - RNA, 23 nt, synthetic construct
  source 1..23: mol_type = other RNA
tctcaccggaatttggtcaaaca

SEQ ID NO: 90596 - RNA, 23 nt, synthetic construct
  source 1..23: mol_type = other RNA
tacaggtctggttggcgtatttg

SEQ ID NO: 90597 - RNA, 23 nt, synthetic construct
  source 1..23: mol_type = other RNA
tcagatgcactcgcactcatagt

SEQ ID NO: 90598 - RNA, 23 nt, synthetic construct
  source 1..23: mol_type = other RNA
tcaggctgcattccacgacctgg

SEQ ID NO: 90599 - RNA, 23 nt, synthetic construct
  source 1..23: mol_type = other RNA
tcaggctgcattccacgacctgg

SEQ ID NO: 90600 - RNA, 23 nt, synthetic construct
  source 1..23: mol_type = other RNA
tcaggctgcattccacgacctgg

SEQ ID NO: 90601 - RNA, 23 nt, synthetic construct
  source 1..23: mol_type = other RNA
tcaggctgcattccacgacctgg

SEQ ID NO: 90602 - RNA, 23 nt, synthetic construct
  source 1..23: mol_type = other RNA
tagccgtgcagaaacactcgcag

SEQ ID NO: 90603 - RNA, 23 nt, synthetic construct
  source 1..23: mol_type = other RNA
tgttgtgggcatagaactcgttg

SEQ ID NO: 90604 - RNA, 23 nt, synthetic construct
  source 1..23: mol_type = other RNA
tcccaccacggaccggctacgcg

SEQ ID NO: 90605 - RNA, 23 nt, synthetic construct
  source 1..23: mol_type = other RNA
tcccaaactccagtgcgtccccc

SEQ ID NO: 90606 - RNA, 23 nt, synthetic construct
  source 1..23: mol_type = other RNA
tttccgcagatggcgatcaagca

SEQ ID NO: 90607 - RNA, 23 nt, synthetic construct
  source 1..23: mol_type = other RNA
tgcggcagagctctgcgtaagcc

SEQ ID NO: 90608 - RNA, 23 nt, synthetic construct
  source 1..23: mol_type = other RNA
tcctcggcgtagctggacgttga

SEQ ID NO: 90609 - RNA, 23 nt, synthetic construct
  source 1..23: mol_type = other RNA
tgcttccgcagatggcgatcaag

SEQ ID NO: 90610 - RNA, 23 nt, synthetic construct
  source 1..23: mol_type = other RNA
tctgcacaccaggccgaagtgga

SEQ ID NO: 90611 - RNA, 23 nt, synthetic construct
  source 1..23: mol_type = other RNA
tcatcacggtggctatagtgctc

SEQ ID NO: 90612 - RNA, 23 nt, synthetic construct
  source 1..23: mol_type = other RNA
tcagccggctcggtcggtcttat

SEQ ID NO: 90613 - RNA, 23 nt, synthetic construct
  source 1..23: mol_type = other RNA
tcgcagctcgtagtcgtgacaga

SEQ ID NO: 90614 - RNA, 23 nt, synthetic construct
  source 1..23: mol_type = other RNA
tccatcccgtgggtctcgatgac

SEQ ID NO: 90615 - RNA, 23 nt, synthetic construct
  source 1..23: mol_type = other RNA
ttgggtgggcacttcgggtagca

SEQ ID NO: 90616 - RNA, 23 nt, synthetic construct
  source 1..23: mol_type = other RNA
tcttagcttcccacccgtacatg

SEQ ID NO: 90617 - RNA, 23 nt, synthetic construct
  source 1..23: mol_type = other RNA
tgtggccgtggcggtaagcactg

SEQ ID NO: 90618 - RNA, 23 nt, synthetic construct
  source 1..23: mol_type = other RNA
tgtggccgtggcggtaagcactg

SEQ ID NO: 90619 - RNA, 23 nt, synthetic construct
  source 1..23: mol_type = other RNA
tgacactgaaccctcgtcacaca

SEQ ID NO: 90620 - RNA, 23 nt, synthetic construct
  source 1..23: mol_type = other RNA
tcgtggatccagtggttgcggtc

SEQ ID NO: 90621 - RNA, 23 nt, synthetic construct
  source 1..23: mol_type = other RNA
tgtcagcactgtggcggtgtggg

SEQ ID NO: 90622 - RNA, 23 nt, synthetic construct
  source 1..23: mol_type = other RNA
tgggacagggatcgcccgtgtgt

SEQ ID NO: 90623 - RNA, 23 nt, synthetic construct
  source 1..23: mol_type = other RNA
tgtcagcactgtggcggtgtggg

SEQ ID NO: 90624 - RNA, 23 nt, synthetic construct
  source 1..23: mol_type = other RNA
tgggacagggatcgcccgtgtgt

SEQ ID NO: 90625 - RNA, 23 nt, synthetic construct
  source 1..23: mol_type = other RNA
tcgcaggcacacgcgtcgttcac

SEQ ID NO: 90626 - RNA, 23 nt, synthetic construct
  source 1..23: mol_type = other RNA
tgttctcagggtggaggtcgggg

SEQ ID NO: 90627 - RNA, 23 nt, synthetic construct
  source 1..23: mol_type = other RNA
ttgggatcggtcaggcgcgagca

SEQ ID NO: 90628 - RNA, 23 nt, synthetic construct
  source 1..23: mol_type = other RNA
tacacgctggtcttccggtccca

SEQ ID NO: 90629 - RNA, 23 nt, synthetic construct
  source 1..23: mol_type = other RNA
tgagtcgcaggcacacgcgtcgt

SEQ ID NO: 90630 - RNA, 23 nt, synthetic construct
  source 1..23: mol_type = other RNA
tacatcagcccccgcatgcggtc

SEQ ID NO: 90631 - RNA, 23 nt, synthetic construct
  source 1..23: mol_type = other RNA
tcacagacacaagcacgccgttc

SEQ ID NO: 90632 - RNA, 23 nt, synthetic construct
  source 1..23: mol_type = other RNA
tgccattgaaggtgacgctcacg

SEQ ID NO: 90633 - RNA, 23 nt, synthetic construct
  source 1..23: mol_type = other RNA
tgcacacgcacaccgtctcgggg

SEQ ID NO: 90634 - RNA, 23 nt, synthetic construct
  source 1..23: mol_type = other RNA
tgagtgctgggtggtaccggtgg

SEQ ID NO: 90635 - RNA, 23 nt, synthetic construct
  source 1..23: mol_type = other RNA
tgagtgctgggtggtaccggtgg

SEQ ID NO: 90636 - RNA, 23 nt, synthetic construct
  source 1..23: mol_type = other RNA
tgagtgctgggtggtaccggtgg

SEQ ID NO: 90637 - RNA, 23 nt, synthetic construct
  source 1..23: mol_type = other RNA
taccgacactgaaccctcgtcac

SEQ ID NO: 90638 - RNA, 23 nt, synthetic construct
  source 1..23: mol_type = other RNA
tatcacggtggctatagtgctcg

SEQ ID NO: 90639 - RNA, 23 nt, synthetic construct
  source 1..23: mol_type = other RNA
tttggccattgaaggtgacgctc

SEQ ID NO: 90640 - RNA, 23 nt, synthetic construct
  source 1..23: mol_type = other RNA
ttgcccatgtgtgcgttgaagag

SEQ ID NO: 90641 - RNA, 23 nt, synthetic construct
  source 1..23: mol_type = other RNA
tccaccgctccccgggaaattta

SEQ ID NO: 90642 - RNA, 23 nt, synthetic construct
  source 1..23: mol_type = other RNA
tacccgcccattgtgcgccgggt

SEQ ID NO: 90643 - RNA, 23 nt, synthetic construct
  source 1..23: mol_type = other RNA
tacacggcgccctcgtcgtgcac

SEQ ID NO: 90644 - RNA, 23 nt, synthetic construct
  source 1..23: mol_type = other RNA
tgccttcaaagctgtagcgatcg

SEQ ID NO: 90645 - RNA, 23 nt, synthetic construct
  source 1..23: mol_type = other RNA
taaggcactgttgggatcggtca

SEQ ID NO: 90646 - RNA, 23 nt, synthetic construct
  source 1..23: mol_type = other RNA
tggccatcccgtgggtctcgatg

SEQ ID NO: 90647 - RNA, 23 nt, synthetic construct
  source 1..23: mol_type = other RNA
tgccgtggcagggacacataggc

SEQ ID NO: 90648 - RNA, 23 nt, synthetic construct
  source 1..23: mol_type = other RNA
ttgatccacactggaggcgtgag

SEQ ID NO: 90649 - RNA, 23 nt, synthetic construct
  source 1..23: mol_type = other RNA
ttgatccacactggaggcgtgag

SEQ ID NO: 90650 - RNA, 23 nt, synthetic construct
  source 1..23: mol_type = other RNA
ttgatccacactggaggcgtgcg

SEQ ID NO: 90651 - RNA, 23 nt, synthetic construct
  source 1..23: mol_type = other RNA
ttgatccacactggaggcgtgag

SEQ ID NO: 90652 - RNA, 23 nt, synthetic construct
  source 1..23: mol_type = other RNA
tggcggggttgtggcacgtcccc

SEQ ID NO: 90653 - RNA, 23 nt, synthetic construct
  source 1..23: mol_type = other RNA
tcttgatgtagtccccgctctgc

SEQ ID NO: 90654 - RNA, 23 nt, synthetic construct
  source 1..23: mol_type = other RNA
tgaaggtgccattgtacgaacac

SEQ ID NO: 90655 - RNA, 23 nt, synthetic construct
  source 1..23: mol_type = other RNA
tgcaggcacacgcgtcgttcacg

SEQ ID NO: 90656 - RNA, 23 nt, synthetic construct
  source 1..23: mol_type = other RNA
tgctgcacacccgcccattgtgc

SEQ ID NO: 90657 - RNA, 23 nt, synthetic construct
  source 1..23: mol_type = other RNA
tggtgacagtgaggacgatatcc

SEQ ID NO: 90658 - RNA, 23 nt, synthetic construct
  source 1..23: mol_type = other RNA
tctctccaggcttgtaggtggcc

SEQ ID NO: 90659 - RNA, 23 nt, synthetic construct
  source 1..23: mol_type = other RNA
tgggacccttgcaccgacgtcat

SEQ ID NO: 90660 - RNA, 23 nt, synthetic construct
  source 1..23: mol_type = other RNA
tggcatgtcgggaagctgcgccg

SEQ ID NO: 90661 - RNA, 23 nt, synthetic construct
  source 1..23: mol_type = other RNA
tcctccagcggcatgtcgggaag

SEQ ID NO: 90662 - RNA, 23 nt, synthetic construct
  source 1..23: mol_type = other RNA
tatgctgcagatgcactcgcact

SEQ ID NO: 90663 - RNA, 23 nt, synthetic construct
  source 1..23: mol_type = other RNA
ttctgacctggccgttgcgacct

SEQ ID NO: 90664 - RNA, 23 nt, synthetic construct
  source 1..23: mol_type = other RNA
tccaccacgtaggcgtagcgctg

SEQ ID NO: 90665 - RNA, 23 nt, synthetic construct
  source 1..23: mol_type = other RNA
tcctcctcgtccgtgcagttgcc

SEQ ID NO: 90666 - RNA, 23 nt, synthetic construct
  source 1..23: mol_type = other RNA
ttccaccacgtaggcgtagcgct

SEQ ID NO: 90667 - RNA, 23 nt, synthetic construct
  source 1..23: mol_type = other RNA
tgccatcccgtgggtctcgatga

SEQ ID NO: 90668 - RNA, 23 nt, synthetic construct
  source 1..23: mol_type = other RNA
ttggacgttgaagtcctcgtagg

SEQ ID NO: 90669 - RNA, 23 nt, synthetic construct
  source 1..23: mol_type = other RNA
tgtcgtcgaagttcccgcacagg

SEQ ID NO: 90670 - RNA, 23 nt, synthetic construct
  source 1..23: mol_type = other RNA
tctcctccagcggcatgtcggga

SEQ ID NO: 90671 - RNA, 23 nt, synthetic construct
  source 1..23: mol_type = other RNA
tccacaaaggtggcacacgggca

SEQ ID NO: 90672 - RNA, 23 nt, synthetic construct
  source 1..23: mol_type = other RNA
ttgccttcaaagctgtagcgatc

SEQ ID NO: 90673 - RNA, 23 nt, synthetic construct
  source 1..23: mol_type = other RNA
tcagccccgggctactcgtaggc

SEQ ID NO: 90674 - RNA, 23 nt, synthetic construct
  source 1..23: mol_type = other RNA
ttctcagggtggaggtcggggtg

SEQ ID NO: 90675 - RNA, 23 nt, synthetic construct
  source 1..23: mol_type = other RNA
tgatgcccgaggtggccgaagtc

SEQ ID NO: 90676 - RNA, 23 nt, synthetic construct
  source 1..23: mol_type = other RNA
tgatgcccgaggtggccgaagtc

SEQ ID NO: 90677 - RNA, 23 nt, synthetic construct
  source 1..23: mol_type = other RNA
tggtgccacaggatggtcgtgtt

SEQ ID NO: 90678 - RNA, 23 nt, synthetic construct
  source 1..23: mol_type = other RNA
ttctgttggctgttggcgcacat

SEQ ID NO: 90679 - RNA, 23 nt, synthetic construct
  source 1..23: mol_type = other RNA
tgtggacagtctctggagtagag

SEQ ID NO: 90680 - RNA, 23 nt, synthetic construct
  source 1..23: mol_type = other RNA
ttctcattcacctgccggagagg

SEQ ID NO: 90681 - RNA, 23 nt, synthetic construct
  source 1..23: mol_type = other RNA
tgcagcagaacacacggatttca

SEQ ID NO: 90682 - RNA, 23 nt, synthetic construct
  source 1..23: mol_type = other RNA
tgcagcagaacacacggatttca

SEQ ID NO: 90683 - RNA, 23 nt, synthetic construct
  source 1..23: mol_type = other RNA
tgcagcagaacacacggatttca

SEQ ID NO: 90684 - RNA, 23 nt, synthetic construct
  source 1..23: mol_type = other RNA
tgcagcagaacacacggatttca

SEQ ID NO: 90685 - RNA, 23 nt, synthetic construct
  source 1..23: mol_type = other RNA
tgtggccatccccgtaggccacg

SEQ ID NO: 90686 - RNA, 23 nt, synthetic construct
  source 1..23: mol_type = other RNA
tgtcgttcacgcaggcctcgtag

SEQ ID NO: 90687 - RNA, 23 nt, synthetic construct
  source 1..23: mol_type = other RNA
tcccgcagggctggtagtgccac

SEQ ID NO: 90688 - RNA, 23 nt, synthetic construct
  source 1..23: mol_type = other RNA
ttggtggccgtggtggtaagcac

SEQ ID NO: 90689 - RNA, 23 nt, synthetic construct
  source 1..23: mol_type = other RNA
ttggtggccgtggtggtaagcac

SEQ ID NO: 90690 - RNA, 23 nt, synthetic construct
  source 1..23: mol_type = other RNA
tgaggggatgggtgtaacgctgg

SEQ ID NO: 90691 - RNA, 23 nt, synthetic construct
  source 1..23: mol_type = other RNA
tgaggggatgggtgtaacgctgg

SEQ ID NO: 90692 - RNA, 23 nt, synthetic construct
  source 1..23: mol_type = other RNA
tggaagatccccatgtagcgtat

SEQ ID NO: 90693 - RNA, 23 nt, synthetic construct
  source 1..23: mol_type = other RNA
ttgctgattgcacactgcgtaga

SEQ ID NO: 90694 - RNA, 23 nt, synthetic construct
  source 1..23: mol_type = other RNA
tagacgtcgccgtcgaaggtctt

SEQ ID NO: 90695 - RNA, 23 nt, synthetic construct
  source 1..23: mol_type = other RNA
tagcggaagacgtcgccgtcgaa

SEQ ID NO: 90696 - RNA, 23 nt, synthetic construct
  source 1..23: mol_type = other RNA
ttcaaacatgcagttcgagtgga

SEQ ID NO: 90697 - RNA, 23 nt, synthetic construct
  source 1..23: mol_type = other RNA
tgtgtcaaacatgcagttcgagt

SEQ ID NO: 90698 - RNA, 23 nt, synthetic construct
  source 1..23: mol_type = other RNA
tcctcacagaggtacacggtgca

SEQ ID NO: 90699 - RNA, 23 nt, synthetic construct
  source 1..23: mol_type = other RNA
tgtcgccgtcgaaggtcttgtag

SEQ ID NO: 90700 - RNA, 23 nt, synthetic construct
  source 1..23: mol_type = other RNA
tggacggttgcacggcgggggct

SEQ ID NO: 90701 - RNA, 23 nt, synthetic construct
  source 1..23: mol_type = other RNA
tagtcaccatgcaggtcgtagag

SEQ ID NO: 90702 - RNA, 23 nt, synthetic construct
  source 1..23: mol_type = other RNA
tatgtagcgtatcttgtagggtg

SEQ ID NO: 90703 - RNA, 23 nt, synthetic construct
  source 1..23: mol_type = other RNA
tatggctgagccgttaggacagt

SEQ ID NO: 90704 - RNA, 23 nt, synthetic construct
  source 1..23: mol_type = other RNA
taaggtgccattgtacgaacaca

SEQ ID NO: 90705 - RNA, 23 nt, synthetic construct
  source 1..23: mol_type = other RNA
ttcacagaggtacacggtgcagt

SEQ ID NO: 90706 - RNA, 23 nt, synthetic construct
  source 1..23: mol_type = other RNA
taagcggaagacgtcgccgtcga

SEQ ID NO: 90707 - RNA, 23 nt, synthetic construct
  source 1..23: mol_type = other RNA
tgtggtggccgtggcggtaagca

SEQ ID NO: 90708 - RNA, 23 nt, synthetic construct
  source 1..23: mol_type = other RNA
tgtggtggccgtggcggtaagca

SEQ ID NO: 90709 - RNA, 23 nt, synthetic construct
  source 1..23: mol_type = other RNA
tccacagggcacgtattcgcagc

SEQ ID NO: 90710 - RNA, 23 nt, synthetic construct
  source 1..23: mol_type = other RNA
tgaaggcactgttgggatcggtc

SEQ ID NO: 90711 - RNA, 23 nt, synthetic construct
  source 1..23: mol_type = other RNA
tcgtcatagtagtttccgtcctt

SEQ ID NO: 90712 - RNA, 23 nt, synthetic construct
  source 1..23: mol_type = other RNA
tcctccggccgcacggatgttgg

SEQ ID NO: 90713 - RNA, 23 nt, synthetic construct
  source 1..23: mol_type = other RNA
tcctccggccgcacggatgttgg

SEQ ID NO: 90714 - RNA, 23 nt, synthetic construct
  source 1..23: mol_type = other RNA
tcctccggccgcacggatgttgg

SEQ ID NO: 90715 - RNA, 23 nt, synthetic construct
  source 1..23: mol_type = other RNA
tcctccggccgcacggatgttgg

SEQ ID NO: 90716 - RNA, 23 nt, synthetic construct
  source 1..23: mol_type = other RNA
tgtgccattgtacgaacacagct

SEQ ID NO: 90717 - RNA, 23 nt, synthetic construct
  source 1..23: mol_type = other RNA
tcctgacattgcaccgttgggtc

SEQ ID NO: 90718 - RNA, 23 nt, synthetic construct
  source 1..23: mol_type = other RNA
taggatggctgagccgttaggac

SEQ ID NO: 90719 - RNA, 23 nt, synthetic construct
  source 1..23: mol_type = other RNA
tgggtgtaacgctggtagctgtg

SEQ ID NO: 90720 - RNA, 23 nt, synthetic construct
  source 1..23: mol_type = other RNA
ttggttattggggccgatgtggg

SEQ ID NO: 90721 - RNA, 23 nt, synthetic construct
  source 1..23: mol_type = other RNA
tgggtgtaacgctggtagctgtg

SEQ ID NO: 90722 - RNA, 23 nt, synthetic construct
  source 1..23: mol_type = other RNA
tagctcgctcgtgagtgttggcg

SEQ ID NO: 90723 - RNA, 23 nt, synthetic construct
  source 1..23: mol_type = other RNA
tggacgttgaagtcctcgtaggc

SEQ ID NO: 90724 - RNA, 23 nt, synthetic construct
  source 1..23: mol_type = other RNA
tctcggtcggtcttattgtagat

SEQ ID NO: 90725 - RNA, 23 nt, synthetic construct
  source 1..23: mol_type = other RNA
tgcaccgccatccatggtgtgcc

SEQ ID NO: 90726 - RNA, 23 nt, synthetic construct
  source 1..23: mol_type = other RNA
tggccgtgatcgtagtggccgtg

SEQ ID NO: 90727 - RNA, 23 nt, synthetic construct
  source 1..23: mol_type = other RNA
tggccgtgatcgtagtggccgtg

SEQ ID NO: 90728 - RNA, 23 nt, synthetic construct
  source 1..23: mol_type = other RNA
tggccgtgatcgtagtggccgtg

SEQ ID NO: 90729 - RNA, 23 nt, synthetic construct
  source 1..23: mol_type = other RNA
tggccgtgatcgtagtggccgtg

SEQ ID NO: 90730 - RNA, 23 nt, synthetic construct
  source 1..23: mol_type = other RNA
taacccgcagctcgtagtcgtga

SEQ ID NO: 90731 - RNA, 23 nt, synthetic construct
  source 1..23: mol_type = other RNA
taccacgtaggcgtagcgctggg

SEQ ID NO: 90732 - RNA, 23 nt, synthetic construct
  source 1..23: mol_type = other RNA
tggtgagggccgccgtcgaccgg

SEQ ID NO: 90733 - RNA, 23 nt, synthetic construct
  source 1..23: mol_type = other RNA
tagccccgggctactcgtaggct

SEQ ID NO: 90734 - RNA, 23 nt, synthetic construct
  source 1..23: mol_type = other RNA
ttggaagcgtgcgtgccgtccct

SEQ ID NO: 90735 - RNA, 23 nt, synthetic construct
  source 1..23: mol_type = other RNA
tgggatcggtcaggcgcgagcac

SEQ ID NO: 90736 - RNA, 23 nt, synthetic construct
  source 1..23: mol_type = other RNA
tcaccacgtaggcgtagcgctgg

SEQ ID NO: 90737 - RNA, 23 nt, synthetic construct
  source 1..23: mol_type = other RNA
tagtcgccacccgagtcgcaggc

SEQ ID NO: 90738 - RNA, 23 nt, synthetic construct
  source 1..23: mol_type = other RNA
tgggtgggcacttcgggtagcag

SEQ ID NO: 90739 - RNA, 23 nt, synthetic construct
  source 1..23: mol_type = other RNA
tcgagggggtgaccgtcacgggg

SEQ ID NO: 90740 - RNA, 23 nt, synthetic construct
  source 1..23: mol_type = other RNA
ttcgtgagtgttggcgccaggct

SEQ ID NO: 90741 - RNA, 23 nt, synthetic construct
  source 1..23: mol_type = other RNA
tgatgggtgtaacgctggtagct

SEQ ID NO: 90742 - RNA, 23 nt, synthetic construct
  source 1..23: mol_type = other RNA
tggtctgtgataggcgggtccag

SEQ ID NO: 90743 - RNA, 23 nt, synthetic construct
  source 1..23: mol_type = other RNA
ttggaggcgtgagtgccgtccct

SEQ ID NO: 90744 - RNA, 23 nt, synthetic construct
  source 1..23: mol_type = other RNA
tcggtggccgtgatcgtagtggc

SEQ ID NO: 90745 - RNA, 23 nt, synthetic construct
  source 1..23: mol_type = other RNA
tggtctgtgataggcgggtccag

SEQ ID NO: 90746 - RNA, 23 nt, synthetic construct
  source 1..23: mol_type = other RNA
tcggtggccgtgatcgtagtggc

SEQ ID NO: 90747 - RNA, 23 nt, synthetic construct
  source 1..23: mol_type = other RNA
tcagcactggggggataggtgtt

SEQ ID NO: 90748 - RNA, 23 nt, synthetic construct
  source 1..23: mol_type = other RNA
tggtctgtgataggcgggtccag

SEQ ID NO: 90749 - RNA, 23 nt, synthetic construct
  source 1..23: mol_type = other RNA
ttggaggcgtgagtgccgtccct

SEQ ID NO: 90750 - RNA, 23 nt, synthetic construct
  source 1..23: mol_type = other RNA
tggtctgtgataggcgggtccag

SEQ ID NO: 90751 - RNA, 23 nt, synthetic construct
  source 1..23: mol_type = other RNA
tcggtggccgtgatcgtagtggc

SEQ ID NO: 90752 - RNA, 23 nt, synthetic construct
  source 1..23: mol_type = other RNA
tcagcactggggggataggtgtt

SEQ ID NO: 90753 - RNA, 23 nt, synthetic construct
  source 1..23: mol_type = other RNA
tgatgggtgtaacgctggtagct

SEQ ID NO: 90754 - RNA, 23 nt, synthetic construct
  source 1..23: mol_type = other RNA
tggtctgtgataggcgggtccag

SEQ ID NO: 90755 - RNA, 23 nt, synthetic construct
  source 1..23: mol_type = other RNA
ttggaggcgtgagtgccgtccct

SEQ ID NO: 90756 - RNA, 23 nt, synthetic construct
  source 1..23: mol_type = other RNA
tcggtggccgtgatcgtagtggc

SEQ ID NO: 90757 - RNA, 23 nt, synthetic construct
  source 1..23: mol_type = other RNA
tgtgctgggacggtccacgtggt

SEQ ID NO: 90758 - RNA, 23 nt, synthetic construct
  source 1..23: mol_type = other RNA
tcggcagagctctgcgtaagcct

SEQ ID NO: 90759 - RNA, 23 nt, synthetic construct
  source 1..23: mol_type = other RNA
tggccaccggttgcacctcgcca

SEQ ID NO: 90760 - RNA, 23 nt, synthetic construct
  source 1..23: mol_type = other RNA
tcacgcacaccgtctcggggcag

SEQ ID NO: 90761 - RNA, 23 nt, synthetic construct
  source 1..23: mol_type = other RNA
tgaaggttgcaccaaccccgtag

SEQ ID NO: 90762 - RNA, 23 nt, synthetic construct
  source 1..23: mol_type = other RNA
tcctcgcggacacacacggtgga

SEQ ID NO: 90763 - RNA, 23 nt, synthetic construct
  source 1..23: mol_type = other RNA
tcaggatggctgagccgttagga

SEQ ID NO: 90764 - RNA, 23 nt, synthetic construct
  source 1..23: mol_type = other RNA
ttggaggcgtgcgtgccgtccct

SEQ ID NO: 90765 - RNA, 23 nt, synthetic construct
  source 1..23: mol_type = other RNA
tgcccgtggttgtggtagtcagc

SEQ ID NO: 90766 - RNA, 23 nt, synthetic construct
  source 1..23: mol_type = other RNA
tgcccgtggttgtggtagtcggc

SEQ ID NO: 90767 - RNA, 23 nt, synthetic construct
  source 1..23: mol_type = other RNA
tgcccgtggttgtggtagtcggc

SEQ ID NO: 90768 - RNA, 23 nt, synthetic construct
  source 1..23: mol_type = other RNA
tgcccgtggttgtggtagtcggc

SEQ ID NO: 90769 - RNA, 23 nt, synthetic construct
  source 1..23: mol_type = other RNA
tcgttgaagaatgggcccggggg

SEQ ID NO: 90770 - RNA, 23 nt, synthetic construct
  source 1..23: mol_type = other RNA
taatttaggaaacccatcgggtc

SEQ ID NO: 90771 - RNA, 23 nt, synthetic construct
  source 1..23: mol_type = other RNA
tacggtggctatagtgctcggct

SEQ ID NO: 90772 - RNA, 23 nt, synthetic construct
  source 1..23: mol_type = other RNA
ttggagcctgcaggcgtcgtggg

SEQ ID NO: 90773 - RNA, 23 nt, synthetic construct
  source 1..23: mol_type = other RNA
tagggtcgaggtgcgggtcttgc

SEQ ID NO: 90774 - RNA, 23 nt, synthetic construct
  source 1..23: mol_type = other RNA
tagggtcgaggtgcgggtcttgc

SEQ ID NO: 90775 - RNA, 23 nt, synthetic construct
  source 1..23: mol_type = other RNA
tagggtcgaggtgcgggtcttgc

SEQ ID NO: 90776 - RNA, 23 nt, synthetic construct
  source 1..23: mol_type = other RNA
tagggtcgaggtgcgggtcttgc

SEQ ID NO: 90777 - RNA, 23 nt, synthetic construct
  source 1..23: mol_type = other RNA
tagcttagcttcccacccgtaca

SEQ ID NO: 90778 - RNA, 23 nt, synthetic construct
  source 1..23: mol_type = other RNA
ttcatagtagtttccgtccttgt

SEQ ID NO: 90779 - RNA, 23 nt, synthetic construct
  source 1..23: mol_type = other RNA
tcataagtgccctccagcggccc

SEQ ID NO: 90780 - RNA, 23 nt, synthetic construct
  source 1..23: mol_type = other RNA
tgcataagtgccctccagcggcc

SEQ ID NO: 90781 - RNA, 23 nt, synthetic construct
  source 1..23: mol_type = other RNA
tctgagtacttggacgctccggg

SEQ ID NO: 90782 - RNA, 23 nt, synthetic construct
  source 1..23: mol_type = other RNA
ttgacttccccgggcgagaaaaa

SEQ ID NO: 90783 - RNA, 23 nt, synthetic construct
  source 1..23: mol_type = other RNA
ttggacagctcgctcgtgagtgt

SEQ ID NO: 90784 - RNA, 23 nt, synthetic construct
  source 1..23: mol_type = other RNA
tgcacggtgccgtgagcgtagca

SEQ ID NO: 90785 - RNA, 23 nt, synthetic construct
  source 1..23: mol_type = other RNA
ttggagttgaggaacacgccgcc

SEQ ID NO: 90786 - RNA, 23 nt, synthetic construct
  source 1..23: mol_type = other RNA
ttccacaaaggtggcacacgggc

SEQ ID NO: 90787 - RNA, 23 nt, synthetic construct
  source 1..23: mol_type = other RNA
tgccggtggccgtgatcgtagtg

SEQ ID NO: 90788 - RNA, 23 nt, synthetic construct
  source 1..23: mol_type = other RNA
tgccggtggccgtgatcgtagtg

SEQ ID NO: 90789 - RNA, 23 nt, synthetic construct
  source 1..23: mol_type = other RNA
tgccggtggccgtgatcgtagtg

SEQ ID NO: 90790 - RNA, 23 nt, synthetic construct
  source 1..23: mol_type = other RNA
tgccggtggccgtgatcgtagtg

SEQ ID NO: 90791 - RNA, 23 nt, synthetic construct
  source 1..23: mol_type = other RNA
tccattgtacgaacacagctgag

SEQ ID NO: 90792 - RNA, 23 nt, synthetic construct
  source 1..23: mol_type = other RNA
tcgtccgcttggacccggatggc

SEQ ID NO: 90793 - RNA, 23 nt, synthetic construct
  source 1..23: mol_type = other RNA
ttcacggttacgaagccgggacg

SEQ ID NO: 90794 - RNA, 23 nt, synthetic construct
  source 1..23: mol_type = other RNA
tcttgcaccgacgtcatagtagt

SEQ ID NO: 90795 - RNA, 23 nt, synthetic construct
  source 1..23: mol_type = other RNA
tggacccttgcaccgacgtcata

SEQ ID NO: 90796 - RNA, 23 nt, synthetic construct
  source 1..23: mol_type = other RNA
tctcttggaggatcagctcgtag

SEQ ID NO: 90797 - RNA, 23 nt, synthetic construct
  source 1..23: mol_type = other RNA
tcgtggttattggggccgatgtg

SEQ ID NO: 90798 - RNA, 23 nt, synthetic construct
  source 1..23: mol_type = other RNA
tcaggtggcaggctgtatggggc

SEQ ID NO: 90799 - RNA, 23 nt, synthetic construct
  source 1..23: mol_type = other RNA
tgtgccacaggatggtcgtgttg

SEQ ID NO: 90800 - RNA, 23 nt, synthetic construct
  source 1..23: mol_type = other RNA
ttgttgagggggcaggtccgggg

SEQ ID NO: 90801 - RNA, 23 nt, synthetic construct
  source 1..23: mol_type = other RNA
ttggttatgggggccgatgtggg

SEQ ID NO: 90802 - RNA, 23 nt, synthetic construct
  source 1..23: mol_type = other RNA
tgatccacactggaagcgtgcgt

SEQ ID NO: 90803 - RNA, 23 nt, synthetic construct
  source 1..23: mol_type = other RNA
ttggttatgggggccgatgtggg

SEQ ID NO: 90804 - RNA, 23 nt, synthetic construct
  source 1..23: mol_type = other RNA
ttggttatgggggccgatgtggg

SEQ ID NO: 90805 - RNA, 23 nt, synthetic construct
  source 1..23: mol_type = other RNA
tggtcacggttacgaagccggga

SEQ ID NO: 90806 - RNA, 23 nt, synthetic construct
  source 1..23: mol_type = other RNA
tacataggcccgcacatgcttag

SEQ ID NO: 90807 - RNA, 23 nt, synthetic construct
  source 1..23: mol_type = other RNA
tcgtaggctgcggcgttgagaac

SEQ ID NO: 90808 - RNA, 23 nt, synthetic construct
  source 1..23: mol_type = other RNA
tcacggtgccgtgagcgtagcag

SEQ ID NO: 90809 - RNA, 23 nt, synthetic construct
  source 1..23: mol_type = other RNA
ttggcggggttgtggcacgtccc

SEQ ID NO: 90810 - RNA, 23 nt, synthetic construct
  source 1..23: mol_type = other RNA
tcgttgtgggcatagaactcgtt

SEQ ID NO: 90811 - RNA, 23 nt, synthetic construct
  source 1..23: mol_type = other RNA
ttctcgccaccgccttaaaggtc

SEQ ID NO: 90812 - RNA, 23 nt, synthetic construct
  source 1..23: mol_type = other RNA
tctcgtagtcgtgacagagcggg

SEQ ID NO: 90813 - RNA, 23 nt, synthetic construct
  source 1..23: mol_type = other RNA
tcacggttgtcacccacgcacct

SEQ ID NO: 90814 - RNA, 23 nt, synthetic construct
  source 1..23: mol_type = other RNA
ttggccgtgatcgtagtggccgt

SEQ ID NO: 90815 - RNA, 23 nt, synthetic construct
  source 1..23: mol_type = other RNA
ttggccgtgatcgtagtggccgt

SEQ ID NO: 90816 - RNA, 23 nt, synthetic construct
  source 1..23: mol_type = other RNA
ttggccgtgatcgtagtggccgt

SEQ ID NO: 90817 - RNA, 23 nt, synthetic construct
  source 1..23: mol_type = other RNA
ttggccgtgatcgtagtggccgt

SEQ ID NO: 90818 - RNA, 23 nt, synthetic construct
  source 1..23: mol_type = other RNA
tcgacactgaaccctcgtcacac

SEQ ID NO: 90819 - RNA, 23 nt, synthetic construct
  source 1..23: mol_type = other RNA
tttgatgcggacttgacaggagt

SEQ ID NO: 90820 - RNA, 23 nt, synthetic construct
  source 1..23: mol_type = other RNA
ttgtcggcacatttcttggacag

SEQ ID NO: 90821 - RNA, 23 nt, synthetic construct
  source 1..23: mol_type = other RNA
tggccgaagtggacgtcacagtg

SEQ ID NO: 90822 - RNA, 23 nt, synthetic construct
  source 1..23: mol_type = other RNA
tacggttgtcacccacgcacctg

SEQ ID NO: 90823 - RNA, 23 nt, synthetic construct
  source 1..23: mol_type = other RNA
tactaggcctcggcgtagctgga

SEQ ID NO: 90824 - RNA, 23 nt, synthetic construct
  source 1..23: mol_type = other RNA
tcaccgacgtcatagtagtttcc

SEQ ID NO: 90825 - RNA, 23 nt, synthetic construct
  source 1..23: mol_type = other RNA
tggacgacacggttgtcacccac

SEQ ID NO: 90826 - RNA, 23 nt, synthetic construct
  source 1..23: mol_type = other RNA
tgacggttgcacggcgggggctg

SEQ ID NO: 90827 - RNA, 23 nt, synthetic construct
  source 1..23: mol_type = other RNA
tgcttagcttcccacccgtacat

SEQ ID NO: 90828 - RNA, 23 nt, synthetic construct
  source 1..23: mol_type = other RNA
tttccgtccttgtcgtagcagcc

SEQ ID NO: 90829 - RNA, 23 nt, synthetic construct
  source 1..23: mol_type = other RNA
tgtcggcactttggtagtgtgag

SEQ ID NO: 90830 - RNA, 23 nt, synthetic construct
  source 1..23: mol_type = other RNA
tgtcggcactttggtagtgtgag

SEQ ID NO: 90831 - RNA, 23 nt, synthetic construct
  source 1..23: mol_type = other RNA
tgtcggcactttggtagtgtgag

SEQ ID NO: 90832 - RNA, 23 nt, synthetic construct
  source 1..23: mol_type = other RNA
tctcgctcgtgagtgttggcgcc

SEQ ID NO: 90833 - RNA, 23 nt, synthetic construct
  source 1..23: mol_type = other RNA
ttcgcacaggccaccggttgcac

SEQ ID NO: 90834 - RNA, 23 nt, synthetic construct
  source 1..23: mol_type = other RNA
tcgtcgaccggatgctcggggtc

SEQ ID NO: 90835 - RNA, 23 nt, synthetic construct
  source 1..23: mol_type = other RNA
ttagcgatcgccatcaaaggtga

SEQ ID NO: 90836 - RNA, 23 nt, synthetic construct
  source 1..23: mol_type = other RNA
tgtcgaccggatgctcggggtca

SEQ ID NO: 90837 - RNA, 23 nt, synthetic construct
  source 1..23: mol_type = other RNA
ttagtcgtgacagagcgggggac

SEQ ID NO: 90838 - RNA, 23 nt, synthetic construct
  source 1..23: mol_type = other RNA
tcggacttgacaggagtcctcct

SEQ ID NO: 90839 - RNA, 23 nt, synthetic construct
  source 1..23: mol_type = other RNA
tcgttaggacagtgcaagggcac

SEQ ID NO: 90840 - RNA, 23 nt, synthetic construct
  source 1..23: mol_type = other RNA
tttcggttgacagcgggtcgtgc

SEQ ID NO: 90841 - RNA, 23 nt, synthetic construct
  source 1..23: mol_type = other RNA
tcagttgccggccggcaagggca

SEQ ID NO: 90842 - RNA, 23 nt, synthetic construct
  source 1..23: mol_type = other RNA
tccaaccccgtagaaggtgccat

SEQ ID NO: 90843 - RNA, 23 nt, synthetic construct
  source 1..23: mol_type = other RNA
tggtcgtgttgatgcggacttga

SEQ ID NO: 90844 - RNA, 23 nt, synthetic construct
  source 1..23: mol_type = other RNA
tgtccgcttggacccggatggcc

SEQ ID NO: 90845 - RNA, 23 nt, synthetic construct
  source 1..23: mol_type = other RNA
tcagtcgaccctgatggtctctc

SEQ ID NO: 90846 - RNA, 23 nt, synthetic construct
  source 1..23: mol_type = other RNA
tgtagcgatcgccatcaaaggtg

SEQ ID NO: 90847 - RNA, 23 nt, synthetic construct
  source 1..23: mol_type = other RNA
tagtcgtgacagagcgggggact

SEQ ID NO: 90848 - RNA, 23 nt, synthetic construct
  source 1..23: mol_type = other RNA
tgtagtcgtgacagagcggggga

SEQ ID NO: 90849 - RNA, 23 nt, synthetic construct
  source 1..23: mol_type = other RNA
tacttcggttgacagcgggtcgt

SEQ ID NO: 90850 - RNA, 23 nt, synthetic construct
  source 1..23: mol_type = other RNA
tggtgtaacgctggtagctgtgg

SEQ ID NO: 90851 - RNA, 23 nt, synthetic construct
  source 1..23: mol_type = other RNA
tggtgtaacgctggtagctgtgg

SEQ ID NO: 90852 - RNA, 23 nt, synthetic construct
  source 1..23: mol_type = other RNA
tccgggcgagaaaaactgtccaa

SEQ ID NO: 90853 - RNA, 23 nt, synthetic construct
  source 1..23: mol_type = other RNA
ttacgaagccgggacggttgcac

SEQ ID NO: 90854 - RNA, 23 nt, synthetic construct
  source 1..23: mol_type = other RNA
tgttacgaagccgggacggttgc

SEQ ID NO: 90855 - RNA, 23 nt, synthetic construct
  source 1..23: mol_type = other RNA
tcctggtcacggttacgaagccg

SEQ ID NO: 90856 - RNA, 23 nt, synthetic construct
  source 1..23: mol_type = other RNA
ttgtacgaacacagctgaggtct

SEQ ID NO: 90857 - RNA, 23 nt, synthetic construct
  source 1..23: mol_type = other RNA
ttgatgcggacttgacaggagtc

SEQ ID NO: 90858 - RNA, 23 nt, synthetic construct
  source 1..23: mol_type = other RNA
ttggccgttgcgacctcagccct

SEQ ID NO: 90859 - RNA, 23 nt, synthetic construct
  source 1..23: mol_type = other RNA
tcgctccccgggaaatttaggaa

SEQ ID NO: 90860 - RNA, 23 nt, synthetic construct
  source 1..23: mol_type = other RNA
ttccgtccttgtcgtagcagcca

SEQ ID NO: 90861 - RNA, 23 nt, synthetic construct
  source 1..23: mol_type = other RNA
tctccccgggaaatttaggaaac

SEQ ID NO: 90862 - RNA, 23 nt, synthetic construct
  source 1..23: mol_type = other RNA
taccggtggttgctgctagggtg

SEQ ID NO: 90863 - RNA, 23 nt, synthetic construct
  source 1..23: mol_type = other RNA
tcactaggcctcggcgtagctgg

SEQ ID NO: 90864 - RNA, 23 nt, synthetic construct
  source 1..23: mol_type = other RNA
tttgcggtcgtagtggctgctgt

SEQ ID NO: 90865 - RNA, 23 nt, synthetic construct
  source 1..23: mol_type = other RNA
taatagtgggagccgccccacat

SEQ ID NO: 90866 - RNA, 23 nt, synthetic construct
  source 1..23: mol_type = other RNA
tcgggaaatttaggaaacccatc

SEQ ID NO: 90867 - RNA, 23 nt, synthetic construct
  source 1..23: mol_type = other RNA
tcggtcggtcttattgtagatga

SEQ ID NO: 90868 - RNA, 23 nt, synthetic construct
  source 1..23: mol_type = other RNA
tcgtgatcgtagtggccgtggtg

SEQ ID NO: 90869 - RNA, 23 nt, synthetic construct
  source 1..23: mol_type = other RNA
tcgtgatcgtagtggccgtggtg

SEQ ID NO: 90870 - RNA, 23 nt, synthetic construct
  source 1..23: mol_type = other RNA
tcgtgatcgtagtggccgtggtg

SEQ ID NO: 90871 - RNA, 23 nt, synthetic construct
  source 1..23: mol_type = other RNA
tcgtgatcgtagtggccgtggtg

SEQ ID NO: 90872 - RNA, 23 nt, synthetic construct
  source 1..23: mol_type = other RNA
ttccggccgcacggatgttggag

SEQ ID NO: 90873 - RNA, 23 nt, synthetic construct
  source 1..23: mol_type = other RNA
ttccggccgcacggatgttggag

SEQ ID NO: 90874 - RNA, 23 nt, synthetic construct
  source 1..23: mol_type = other RNA
ttccggccgcacggatgttggag

SEQ ID NO: 90875 - RNA, 23 nt, synthetic construct
  source 1..23: mol_type = other RNA
ttccggccgcacggatgttggag

SEQ ID NO: 90876 - RNA, 23 nt, synthetic construct
  source 1..23: mol_type = other RNA
tgacggagccgttggacgcctcc

SEQ ID NO: 90877 - RNA, 23 nt, synthetic construct
  source 1..23: mol_type = other RNA
tgcgatcaagcaggcgccaagcc

SEQ ID NO: 90878 - RNA, 23 nt, synthetic construct
  source 1..23: mol_type = other RNA
tcgacacggttgtcacccacgca

SEQ ID NO: 90879 - RNA, 23 nt, synthetic construct
  source 1..23: mol_type = other RNA
tgctagacaccggggctgcgggg

SEQ ID NO: 90880 - RNA, 23 nt, synthetic construct
  source 1..23: mol_type = other RNA
tccgcacatgcttagtttgttcc

SEQ ID NO: 90881 - RNA, 23 nt, synthetic construct
  source 1..23: mol_type = other RNA
tggctcggtcggtcttattgtag

SEQ ID NO: 90882 - RNA, 23 nt, synthetic construct
  source 1..23: mol_type = other RNA
tacacgcacaccgtctcggggca

SEQ ID NO: 90883 - RNA, 23 nt, synthetic construct
  source 1..23: mol_type = other RNA
tagcgtccggcacgcgctcgggg

SEQ ID NO: 90884 - RNA, 23 nt, synthetic construct
  source 1..23: mol_type = other RNA
tcccatgtagcgtatcttgtagg

SEQ ID NO: 90885 - RNA, 23 nt, synthetic construct
  source 1..23: mol_type = other RNA
tgcgtagcgctgggacttggggc

SEQ ID NO: 90886 - RNA, 23 nt, synthetic construct
  source 1..23: mol_type = other RNA
ttcgtgacagagcgggggactct

SEQ ID NO: 90887 - RNA, 23 nt, synthetic construct
  source 1..23: mol_type = other RNA
ttggtagttggcactttggtagt

SEQ ID NO: 90888 - RNA, 23 nt, synthetic construct
  source 1..23: mol_type = other RNA
tatcgcccgtgtgtggtggccat

SEQ ID NO: 90889 - RNA, 23 nt, synthetic construct
  source 1..23: mol_type = other RNA
taccaccgtggttatgggggccg

SEQ ID NO: 90890 - RNA, 23 nt, synthetic construct
  source 1..23: mol_type = other RNA
tgccgcacggatgttggagtagg

SEQ ID NO: 90891 - RNA, 23 nt, synthetic construct
  source 1..23: mol_type = other RNA
tatcgcccgtgtgtggtggccgt

SEQ ID NO: 90892 - RNA, 23 nt, synthetic construct
  source 1..23: mol_type = other RNA
ttattggggccgatgtggggctg

SEQ ID NO: 90893 - RNA, 23 nt, synthetic construct
  source 1..23: mol_type = other RNA
tgccgcacggatgttggagtagg

SEQ ID NO: 90894 - RNA, 23 nt, synthetic construct
  source 1..23: mol_type = other RNA
ttggtagtcggcactttggtagt

SEQ ID NO: 90895 - RNA, 23 nt, synthetic construct
  source 1..23: mol_type = other RNA
taccaccgtggttatgggggccg

SEQ ID NO: 90896 - RNA, 23 nt, synthetic construct
  source 1..23: mol_type = other RNA
tgccgcacggatgttggagtagg

SEQ ID NO: 90897 - RNA, 23 nt, synthetic construct
  source 1..23: mol_type = other RNA
ttggtagtcggcactttggtagt

SEQ ID NO: 90898 - RNA, 23 nt, synthetic construct
  source 1..23: mol_type = other RNA
tatcgcccgtgtgtggtggccgt

SEQ ID NO: 90899 - RNA, 23 nt, synthetic construct
  source 1..23: mol_type = other RNA
taccaccgtggttatgggggccg

SEQ ID NO: 90900 - RNA, 23 nt, synthetic construct
  source 1..23: mol_type = other RNA
tgccgcacggatgttggagtagg

SEQ ID NO: 90901 - RNA, 23 nt, synthetic construct
  source 1..23: mol_type = other RNA
ttggtagtcggcactttggtagt

SEQ ID NO: 90902 - RNA, 23 nt, synthetic construct
  source 1..23: mol_type = other RNA
tgacggtccacgtggtccacagg

SEQ ID NO: 90903 - RNA, 23 nt, synthetic construct
  source 1..23: mol_type = other RNA
tcccatgtgtgcgttgaagagga

SEQ ID NO: 90904 - RNA, 23 nt, synthetic construct
  source 1..23: mol_type = other RNA
tagcgcggggtgccacacacagg

SEQ ID NO: 90905 - RNA, 23 nt, synthetic construct
  source 1..23: mol_type = other RNA
tgcgttgaagaatgggcccgggg

SEQ ID NO: 90906 - RNA, 23 nt, synthetic construct
  source 1..23: mol_type = other RNA
tcgggctactcgtaggctgcggc

SEQ ID NO: 90907 - RNA, 23 nt, synthetic construct
  source 1..23: mol_type = other RNA
tccgggctactcgtaggctgcgg

SEQ ID NO: 90908 - RNA, 23 nt, synthetic construct
  source 1..23: mol_type = other RNA
ttcggtcggtcttattgtagatg

SEQ ID NO: 90909 - RNA, 23 nt, synthetic construct
  source 1..23: mol_type = other RNA
tgaccgcccgtgtgtggtggccg

SEQ ID NO: 90910 - RNA, 23 nt, synthetic construct
  source 1..23: mol_type = other RNA
tcccgcacatgcttagtttgttc

SEQ ID NO: 90911 - RNA, 23 nt, synthetic construct
  source 1..23: mol_type = other RNA
tagtcgaccctgatggtctctcc

SEQ ID NO: 90912 - RNA, 23 nt, synthetic construct
  source 1..23: mol_type = other RNA
tcggcgttgagaacagggcctgg

SEQ ID NO: 90913 - RNA, 23 nt, synthetic construct
  source 1..23: mol_type = other RNA
tctgtcggcacatttcttggaca

SEQ ID NO: 90914 - RNA, 23 nt, synthetic construct
  source 1..23: mol_type = other RNA
taccgtggttattggggccgatg

SEQ ID NO: 90915 - RNA, 23 nt, synthetic construct
  source 1..23: mol_type = other RNA
tgcgcgagcaccagtgccgggcg

SEQ ID NO: 90916 - RNA, 23 nt, synthetic construct
  source 1..23: mol_type = other RNA
tataagtgccctccagcggccct

SEQ ID NO: 90917 - RNA, 23 nt, synthetic construct
  source 1..23: mol_type = other RNA
tggacgcactccccacagcactg

SEQ ID NO: 90918 - RNA, 23 nt, synthetic construct
  source 1..23: mol_type = other RNA
ttgaaggtgacgctcacgcccag

SEQ ID NO: 90919 - RNA, 23 nt, synthetic construct
  source 1..23: mol_type = other RNA
tgatccccatgtagcgtatcttg

SEQ ID NO: 90920 - RNA, 23 nt, synthetic construct
  source 1..23: mol_type = other RNA
tggtggaacaaagctcacgcgcc

SEQ ID NO: 90921 - RNA, 23 nt, synthetic construct
  source 1..23: mol_type = other RNA
tgtcgcacaggccaccggttgca

SEQ ID NO: 90922 - RNA, 23 nt, synthetic construct
  source 1..23: mol_type = other RNA
tgtggttattggggccgatgtgg

SEQ ID NO: 90923 - RNA, 23 nt, synthetic construct
  source 1..23: mol_type = other RNA
tccggatcctgtagttgtagcac

SEQ ID NO: 90924 - RNA, 23 nt, synthetic construct
  source 1..23: mol_type = other RNA
tccaacaccagcgtccggcacgc

SEQ ID NO: 90925 - RNA, 23 nt, synthetic construct
  source 1..23: mol_type = other RNA
tgacacaagcacgccgttcttgc

SEQ ID NO: 90926 - RNA, 23 nt, synthetic construct
  source 1..23: mol_type = other RNA
tggatgttctcggtgacgatgcg

SEQ ID NO: 90927 - RNA, 23 nt, synthetic construct
  source 1..23: mol_type = other RNA
tccactcacacttcggttgacag

SEQ ID NO: 90928 - RNA, 23 nt, synthetic construct
  source 1..23: mol_type = other RNA
tttcttggacagaacgtagctgc

SEQ ID NO: 90929 - RNA, 23 nt, synthetic construct
  source 1..23: mol_type = other RNA
tatgtacttggtgcagacgccgt

SEQ ID NO: 90930 - RNA, 23 nt, synthetic construct
  source 1..23: mol_type = other RNA
tacacacaggcccgcgtcgtggc

SEQ ID NO: 90931 - RNA, 23 nt, synthetic construct
  source 1..23: mol_type = other RNA
tcacacttcggttgacagcgggt

SEQ ID NO: 90932 - RNA, 23 nt, synthetic construct
  source 1..23: mol_type = other RNA
tggagccagcacggtgccgtgag

SEQ ID NO: 90933 - RNA, 23 nt, synthetic construct
  source 1..23: mol_type = other RNA
tcaccagtgccgggcgtagttct

SEQ ID NO: 90934 - RNA, 23 nt, synthetic construct
  source 1..23: mol_type = other RNA
tttgtaggtggcctcgttgtgca

SEQ ID NO: 90935 - RNA, 23 nt, synthetic construct
  source 1..23: mol_type = other RNA
tagtgcccactggggttccggca

SEQ ID NO: 90936 - RNA, 23 nt, synthetic construct
  source 1..23: mol_type = other RNA
tatccatggacttgtagtggatg

SEQ ID NO: 90937 - RNA, 23 nt, synthetic construct
  source 1..23: mol_type = other RNA
ttgggcgcactggcgtgagtatt

SEQ ID NO: 90938 - RNA, 23 nt, synthetic construct
  source 1..23: mol_type = other RNA
tgggcgcactggcgtgagtattc

SEQ ID NO: 90939 - RNA, 23 nt, synthetic construct
  source 1..23: mol_type = other RNA
tgtaggactcaacgtcccctcca

SEQ ID NO: 90940 - RNA, 23 nt, synthetic construct
  source 1..23: mol_type = other RNA
tcattgcaccgttgggtcctggg

SEQ ID NO: 90941 - RNA, 23 nt, synthetic construct
  source 1..23: mol_type = other RNA
tactcacacttcggttgacagcg

SEQ ID NO: 90942 - RNA, 23 nt, synthetic construct
  source 1..23: mol_type = other RNA
taggctgcattccacgacctggc

SEQ ID NO: 90943 - RNA, 23 nt, synthetic construct
  source 1..23: mol_type = other RNA
taggctgcattccacgacctggc

SEQ ID NO: 90944 - RNA, 23 nt, synthetic construct
  source 1..23: mol_type = other RNA
taggctgcattccacgacctggc

SEQ ID NO: 90945 - RNA, 23 nt, synthetic construct
  source 1..23: mol_type = other RNA
taggctgcattccacgacctggc

SEQ ID NO: 90946 - RNA, 23 nt, synthetic construct
  source 1..23: mol_type = other RNA
ttgtccactcacacttcggttga

SEQ ID NO: 90947 - RNA, 23 nt, synthetic construct
  source 1..23: mol_type = other RNA
tggcgcccgcgtcattgaggaag

SEQ ID NO: 90948 - RNA, 23 nt, synthetic construct
  source 1..23: mol_type = other RNA
taggactcaacgtcccctccaag

SEQ ID NO: 90949 - RNA, 23 nt, synthetic construct
  source 1..23: mol_type = other RNA
tcaggcgcccgcgtcattgagga

SEQ ID NO: 90950 - RNA, 23 nt, synthetic construct
  source 1..23: mol_type = other RNA
tactggcgtgagtattccacaaa

SEQ ID NO: 90951 - RNA, 23 nt, synthetic construct
  source 1..23: mol_type = other RNA
tgcccatcggtggtgttgtagat

SEQ ID NO: 90952 - RNA, 23 nt, synthetic construct
  source 1..23: mol_type = other RNA
taccagcggcagacctcgcggac

SEQ ID NO: 90953 - RNA, 23 nt, synthetic construct
  source 1..23: mol_type = other RNA
tgcaccagtgccgggcgtagttc

SEQ ID NO: 90954 - RNA, 23 nt, synthetic construct
  source 1..23: mol_type = other RNA
tggacccggatcctgtagttgta

SEQ ID NO: 90955 - RNA, 23 nt, synthetic construct
  source 1..23: mol_type = other RNA
tcaccggaatttggtcaaacagg

SEQ ID NO: 90956 - RNA, 23 nt, synthetic construct
  source 1..23: mol_type = other RNA
tcactcacacttcggttgacagc

SEQ ID NO: 90957 - RNA, 23 nt, synthetic construct
  source 1..23: mol_type = other RNA
tccccgtaggccacgcaggtgcc

SEQ ID NO: 90958 - RNA, 23 nt, synthetic construct
  source 1..23: mol_type = other RNA
tgaggacgatatccatggacttg

SEQ ID NO: 90959 - RNA, 23 nt, synthetic construct
  source 1..23: mol_type = other RNA
tccgctgctcaccggaatttggt

SEQ ID NO: 90960 - RNA, 23 nt, synthetic construct
  source 1..23: mol_type = other RNA
tgatgttggctgccgacaggggc

SEQ ID NO: 90961 - RNA, 23 nt, synthetic construct
  source 1..23: mol_type = other RNA
ttgcggctgtaaggcagctcctc

SEQ ID NO: 90962 - RNA, 23 nt, synthetic construct
  source 1..23: mol_type = other RNA
tgcagatgcactcgcactcatag

SEQ ID NO: 90963 - RNA, 23 nt, synthetic construct
  source 1..23: mol_type = other RNA
tgtgttgcagtcgaccctgatgg

SEQ ID NO: 90964 - RNA, 23 nt, synthetic construct
  source 1..23: mol_type = other RNA
tgccatccccgtaggccacgcag

SEQ ID NO: 90965 - RNA, 23 nt, synthetic construct
  source 1..23: mol_type = other RNA
tcccatcggtggtgttgtagatg

SEQ ID NO: 90966 - RNA, 23 nt, synthetic construct
  source 1..23: mol_type = other RNA
tcgtaggactcaacgtcccctcc

SEQ ID NO: 90967 - RNA, 23 nt, synthetic construct
  source 1..23: mol_type = other RNA
tgtgggcccatccaacttctgca

SEQ ID NO: 90968 - RNA, 23 nt, synthetic construct
  source 1..23: mol_type = other RNA
ttccggagtccgccaggacacac

SEQ ID NO: 90969 - RNA, 23 nt, synthetic construct
  source 1..23: mol_type = other RNA
tatgaagaagctcgagggtgtga

SEQ ID NO: 90970 - RNA, 23 nt, synthetic construct
  source 1..23: mol_type = other RNA
tccatccccgtaggccacgcagg

SEQ ID NO: 90971 - RNA, 23 nt, synthetic construct
  source 1..23: mol_type = other RNA
ttgacgtcggcctcactcaggcc

SEQ ID NO: 90972 - RNA, 23 nt, synthetic construct
  source 1..23: mol_type = other RNA
tgtgacgtcggcctcactcaggc

SEQ ID NO: 90973 - RNA, 23 nt, synthetic construct
  source 1..23: mol_type = other RNA
tagtgacgggtggaacaaagctc

SEQ ID NO: 90974 - RNA, 23 nt, synthetic construct
  source 1..23: mol_type = other RNA
tcacttcggttgacagcgggtcg

SEQ ID NO: 90975 - RNA, 23 nt, synthetic construct
  source 1..23: mol_type = other RNA
tctggcgtgagtattccacaaag

SEQ ID NO: 90976 - RNA, 23 nt, synthetic construct
  source 1..23: mol_type = other RNA
tagcccatcggtggtgttgtaga

SEQ ID NO: 90977 - RNA, 23 nt, synthetic construct
  source 1..23: mol_type = other RNA
tggttgcacctcgccagtcactg

SEQ ID NO: 90978 - RNA, 23 nt, synthetic construct
  source 1..23: mol_type = other RNA
tcggttgcacctcgccagtcact

SEQ ID NO: 90979 - RNA, 23 nt, synthetic construct
  source 1..23: mol_type = other RNA
tacccacgcacctggccaccgtg

SEQ ID NO: 90980 - RNA, 23 nt, synthetic construct
  source 1..23: mol_type = other RNA
tacacttcggttgacagcgggtc

SEQ ID NO: 90981 - RNA, 23 nt, synthetic construct
  source 1..23: mol_type = other RNA
tgttgcacctcgccagtcactgc

SEQ ID NO: 90982 - RNA, 23 nt, synthetic construct
  source 1..23: mol_type = other RNA
tacttggtgcagacgccgtccct

SEQ ID NO: 90983 - RNA, 23 nt, synthetic construct
  source 1..23: mol_type = other RNA
tggcgtgagtattccacaaaggt

SEQ ID NO: 90984 - RNA, 23 nt, synthetic construct
  source 1..23: mol_type = other RNA
tctgatcttatcgtaggactcaa

SEQ ID NO: 90985 - RNA, 23 nt, synthetic construct
  source 1..23: mol_type = other RNA
tcggcctggcactctatgtcctt

SEQ ID NO: 90986 - RNA, 23 nt, synthetic construct
  source 1..23: mol_type = other RNA
ttgcatgtacttggtgcagacgc

SEQ ID NO: 90987 - RNA, 23 nt, synthetic construct
  source 1..23: mol_type = other RNA
tcactggcgtgagtattccacaa

SEQ ID NO: 90988 - RNA, 23 nt, synthetic construct
  source 1..23: mol_type = other RNA
tagatgcactcgcactcatagtg

SEQ ID NO: 90989 - RNA, 23 nt, synthetic construct
  source 1..23: mol_type = other RNA
tttgcagtcgaccctgatggtct

SEQ ID NO: 90990 - RNA, 23 nt, synthetic construct
  source 1..23: mol_type = other RNA
tgtcttccggtcccaggacacgg

SEQ ID NO: 90991 - RNA, 23 nt, synthetic construct
  source 1..23: mol_type = other RNA
ttgtaggtggcctcgttgtgcac

SEQ ID NO: 90992 - RNA, 23 nt, synthetic construct
  source 1..23: mol_type = other RNA
ttgttctcggtgacgatgcggaa

SEQ ID NO: 90993 - RNA, 23 nt, synthetic construct
  source 1..23: mol_type = other RNA
tggtgttgcagtcgaccctgatg

SEQ ID NO: 90994 - RNA, 23 nt, synthetic construct
  source 1..23: mol_type = other RNA
tgacgatatccatggacttgtag

SEQ ID NO: 90995 - RNA, 23 nt, synthetic construct
  source 1..23: mol_type = other RNA
tgctgctcaccggaatttggtca

SEQ ID NO: 90996 - RNA, 23 nt, synthetic construct
  source 1..23: mol_type = other RNA
tacacaagcacgccgttcttgct

SEQ ID NO: 90997 - RNA, 23 nt, synthetic construct
  source 1..23: mol_type = other RNA
tgccgtcaaaggtggaatagtgg

SEQ ID NO: 90998 - RNA, 23 nt, synthetic construct
  source 1..23: mol_type = other RNA
tccacgcacctggccaccgtgca

SEQ ID NO: 90999 - RNA, 23 nt, synthetic construct
  source 1..23: mol_type = other RNA
tttggacagaacgtagctgcagt

SEQ ID NO: 91000 - RNA, 23 nt, synthetic construct
  source 1..23: mol_type = other RNA
ttgttgcagtcgaccctgatggt

SEQ ID NO: 91001 - RNA, 23 nt, synthetic construct
  source 1..23: mol_type = other RNA
tgaggacataggtgcagttgccc

SEQ ID NO: 91002 - RNA, 23 nt, synthetic construct
  source 1..23: mol_type = other RNA
ttccacgacctggcccaactccc

SEQ ID NO: 91003 - RNA, 23 nt, synthetic construct
  source 1..23: mol_type = other RNA
ttggacagaacgtagctgcagtc

SEQ ID NO: 91004 - RNA, 23 nt, synthetic construct
  source 1..23: mol_type = other RNA
taggcagttctcgttgtccgtca

SEQ ID NO: 91005 - RNA, 23 nt, synthetic construct
  source 1..23: mol_type = other RNA
ttgaagaagctcgagggtgtgaa

SEQ ID NO: 91006 - RNA, 23 nt, synthetic construct
  source 1..23: mol_type = other RNA
tcaggtgttgcagtcgaccctga

SEQ ID NO: 91007 - RNA, 23 nt, synthetic construct
  source 1..23: mol_type = other RNA
tctcggtgacgatgcggaaggtc

SEQ ID NO: 91008 - RNA, 23 nt, synthetic construct
  source 1..23: mol_type = other RNA
ttccacgacctggcccaactccc

SEQ ID NO: 91009 - RNA, 23 nt, synthetic construct
  source 1..23: mol_type = other RNA
ttcggcctggcactctatgtcct

SEQ ID NO: 91010 - RNA, 23 nt, synthetic construct
  source 1..23: mol_type = other RNA
tggtgtgggaagtcaccgtggaa

SEQ ID NO: 91011 - RNA, 23 nt, synthetic construct
  source 1..23: mol_type = other RNA
tgctgtaaagctggtagctgtgg

SEQ ID NO: 91012 - RNA, 23 nt, synthetic construct
  source 1..23: mol_type = other RNA
tggtgtgggaagtcaccgtggaa

SEQ ID NO: 91013 - RNA, 23 nt, synthetic construct
  source 1..23: mol_type = other RNA
tgctgtaaagctggtagctgtgg

SEQ ID NO: 91014 - RNA, 23 nt, synthetic construct
  source 1..23: mol_type = other RNA
tgctgtaaagctggtagctgtgg

SEQ ID NO: 91015 - RNA, 23 nt, synthetic construct
  source 1..23: mol_type = other RNA
tggtgcttgttcacgcaggtgac

SEQ ID NO: 91016 - RNA, 23 nt, synthetic construct
  source 1..23: mol_type = other RNA
taagcacgccgttcttgctgaaa

SEQ ID NO: 91017 - RNA, 23 nt, synthetic construct
  source 1..23: mol_type = other RNA
tcagacacaagcacgccgttctt

SEQ ID NO: 91018 - RNA, 23 nt, synthetic construct
  source 1..23: mol_type = other RNA
tcagtgacgggtggaacaaagct

SEQ ID NO: 91019 - RNA, 23 nt, synthetic construct
  source 1..23: mol_type = other RNA
tgacagtgacgggtggaacaaag

SEQ ID NO: 91020 - RNA, 23 nt, synthetic construct
  source 1..23: mol_type = other RNA
tagacagtgacgggtggaacaaa

SEQ ID NO: 91021 - RNA, 23 nt, synthetic construct
  source 1..23: mol_type = other RNA
ttccacgacctggcccaactccc

SEQ ID NO: 91022 - RNA, 23 nt, synthetic construct
  source 1..23: mol_type = other RNA
ttccacgacctggcccaactccc

SEQ ID NO: 91023 - RNA, 23 nt, synthetic construct
  source 1..23: mol_type = other RNA
tgagtattccacaaaggtggcac

SEQ ID NO: 91024 - RNA, 23 nt, synthetic construct
  source 1..23: mol_type = other RNA
tggcgcactggcgtgagtattcc

SEQ ID NO: 91025 - RNA, 23 nt, synthetic construct
  source 1..23: mol_type = other RNA
tgccccccgcgtgggcgcactgg

SEQ ID NO: 91026 - RNA, 23 nt, synthetic construct
  source 1..23: mol_type = other RNA
tacccggatggccgtgtccccgc

SEQ ID NO: 91027 - RNA, 23 nt, synthetic construct
  source 1..23: mol_type = other RNA
ttcggtgacgatgcggaaggtcc

SEQ ID NO: 91028 - RNA, 23 nt, synthetic construct
  source 1..23: mol_type = other RNA
tgactcaacgtcccctccaagtt

SEQ ID NO: 91029 - RNA, 23 nt, synthetic construct
  source 1..23: mol_type = other RNA
tttgcaccgttgggtcctgggtg

SEQ ID NO: 91030 - RNA, 23 nt, synthetic construct
  source 1..23: mol_type = other RNA
tcgggcgtagttctcattctcca

SEQ ID NO: 91031 - RNA, 23 nt, synthetic construct
  source 1..23: mol_type = other RNA
tgttggcgcacatcagcccccgc

SEQ ID NO: 91032 - RNA, 23 nt, synthetic construct
  source 1..23: mol_type = other RNA
tcccgcgtcattgaggaaggtgc

SEQ ID NO: 91033 - RNA, 23 nt, synthetic construct
  source 1..23: mol_type = other RNA
tcaacgtcccctccaagttgttc

SEQ ID NO: 91034 - RNA, 23 nt, synthetic construct
  source 1..23: mol_type = other RNA
tgtgccgggcgtagttctcattc

SEQ ID NO: 91035 - RNA, 23 nt, synthetic construct
  source 1..23: mol_type = other RNA
tagtgtgtgctgaaacagcccac

SEQ ID NO: 91036 - RNA, 23 nt, synthetic construct
  source 1..23: mol_type = other RNA
tcactcgcactcatagtggaagt

SEQ ID NO: 91037 - RNA, 23 nt, synthetic construct
  source 1..23: mol_type = other RNA
ttgccgggcgtagttctcattct

SEQ ID NO: 91038 - RNA, 23 nt, synthetic construct
  source 1..23: mol_type = other RNA
tgagtagcagcagccggttttcc

SEQ ID NO: 91039 - RNA, 23 nt, synthetic construct
  source 1..23: mol_type = other RNA
tactccgcaaaggccggccccag

SEQ ID NO: 91040 - RNA, 23 nt, synthetic construct
  source 1..23: mol_type = other RNA
tcatccccgtaggccacgcaggt

SEQ ID NO: 91041 - RNA, 23 nt, synthetic construct
  source 1..23: mol_type = other RNA
taacagggtgatgttggctgccg

SEQ ID NO: 91042 - RNA, 23 nt, synthetic construct
  source 1..23: mol_type = other RNA
tacgtccagcgtgtggcagctcc

SEQ ID NO: 91043 - RNA, 23 nt, synthetic construct
  source 1..23: mol_type = other RNA
tccgtaggccacgcaggtgccca

SEQ ID NO: 91044 - RNA, 23 nt, synthetic construct
  source 1..23: mol_type = other RNA
tcggtgacgatgcggaaggtccc

SEQ ID NO: 91045 - RNA, 23 nt, synthetic construct
  source 1..23: mol_type = other RNA
tagtcctggtgcagtcggatgaa

SEQ ID NO: 91046 - RNA, 23 nt, synthetic construct
  source 1..23: mol_type = other RNA
ttgtatctgggggatgtcagtcc

SEQ ID NO: 91047 - RNA, 23 nt, synthetic construct
  source 1..23: mol_type = other RNA
tgccgtagttgcagcagaacaca

SEQ ID NO: 91048 - RNA, 23 nt, synthetic construct
  source 1..23: mol_type = other RNA
tgtgtccggagtccgccaggaca

SEQ ID NO: 91049 - RNA, 23 nt, synthetic construct
  source 1..23: mol_type = other RNA
tgtcctcataggtgcaggtgcag

SEQ ID NO: 91050 - RNA, 23 nt, synthetic construct
  source 1..23: mol_type = other RNA
tttgtagatgacgtcctggtagc

SEQ ID NO: 91051 - RNA, 23 nt, synthetic construct
  source 1..23: mol_type = other RNA
tggtgttgtagatgacgtcctgg

SEQ ID NO: 91052 - RNA, 23 nt, synthetic construct
  source 1..23: mol_type = other RNA
tgccgtagttgcagcagaacaca

SEQ ID NO: 91053 - RNA, 23 nt, synthetic construct
  source 1..23: mol_type = other RNA
tggatcctgtagttgtagcacat

SEQ ID NO: 91054 - RNA, 23 nt, synthetic construct
  source 1..23: mol_type = other RNA
tccatcggtggtgttgtagatga

SEQ ID NO: 91055 - RNA, 23 nt, synthetic construct
  source 1..23: mol_type = other RNA
ttatccatggacttgtagtggat

SEQ ID NO: 91056 - RNA, 23 nt, synthetic construct
  source 1..23: mol_type = other RNA
tgcgccaggctcgtggtcagcgg

SEQ ID NO: 91057 - RNA, 23 nt, synthetic construct
  source 1..23: mol_type = other RNA
tggaccagcggcagacctcgcgg

SEQ ID NO: 91058 - RNA, 23 nt, synthetic construct
  source 1..23: mol_type = other RNA
taggtgtccggagtccgccagga

SEQ ID NO: 91059 - RNA, 23 nt, synthetic construct
  source 1..23: mol_type = other RNA
tcatcggtggtgttgtagatgac

SEQ ID NO: 91060 - RNA, 23 nt, synthetic construct
  source 1..23: mol_type = other RNA
tggctgttggcgcacatcagccc

SEQ ID NO: 91061 - RNA, 23 nt, synthetic construct
  source 1..23: mol_type = other RNA
tatgcggaaggtcccgtgggtgg

SEQ ID NO: 91062 - RNA, 23 nt, synthetic construct
  source 1..23: mol_type = other RNA
tagtcctcatcaaaccactctgt

SEQ ID NO: 91063 - RNA, 23 nt, synthetic construct
  source 1..23: mol_type = other RNA
tggcatagaactcgttgaaggcc

SEQ ID NO: 91064 - RNA, 23 nt, synthetic construct
  source 1..23: mol_type = other RNA
tgggtagtcctcatcaaaccact

SEQ ID NO: 91065 - RNA, 23 nt, synthetic construct
  source 1..23: mol_type = other RNA
tggggtagtcctcatcaaaccac

SEQ ID NO: 91066 - RNA, 23 nt, synthetic construct
  source 1..23: mol_type = other RNA
tttcagacttggggtagtcctca

SEQ ID NO: 91067 - RNA, 23 nt, synthetic construct
  source 1..23: mol_type = other RNA
ttcaacgtcccctccaagttgtt

SEQ ID NO: 91068 - RNA, 23 nt, synthetic construct
  source 1..23: mol_type = other RNA
tctcggcctggcactctatgtcc

SEQ ID NO: 91069 - RNA, 23 nt, synthetic construct
  source 1..23: mol_type = other RNA
ttctcggcctggcactctatgtc

SEQ ID NO: 91070 - RNA, 23 nt, synthetic construct
  source 1..23: mol_type = other RNA
tagttggggaagctctcggcctg

SEQ ID NO: 91071 - RNA, 23 nt, synthetic construct
  source 1..23: mol_type = other RNA
tgtgccggtggtcccacagggga

SEQ ID NO: 91072 - RNA, 23 nt, synthetic construct
  source 1..23: mol_type = other RNA
tgtccaaatgccctgcagaagca

SEQ ID NO: 91073 - RNA, 23 nt, synthetic construct
  source 1..23: mol_type = other RNA
tacgtcaaaccactctgtccact

SEQ ID NO: 91074 - RNA, 23 nt, synthetic construct
  source 1..23: mol_type = other RNA
tcctggccaccgtgcagttctcc

SEQ ID NO: 91075 - RNA, 23 nt, synthetic construct
  source 1..23: mol_type = other RNA
tcccacgcacctggccaccgtgc

SEQ ID NO: 91076 - RNA, 23 nt, synthetic construct
  source 1..23: mol_type = other RNA
tgtacttggtggagtcaacctgg

SEQ ID NO: 91077 - RNA, 23 nt, synthetic construct
  source 1..23: mol_type = other RNA
tgacccggatcctgtagttgtag

SEQ ID NO: 91078 - RNA, 23 nt, synthetic construct
  source 1..23: mol_type = other RNA
tcacaagcacgccgttcttgctg

SEQ ID NO: 91079 - RNA, 23 nt, synthetic construct
  source 1..23: mol_type = other RNA
tctcggtgttgttgtggaagagg

SEQ ID NO: 91080 - RNA, 23 nt, synthetic construct
  source 1..23: mol_type = other RNA
tccctcggtgttgttgtggaaga

SEQ ID NO: 91081 - RNA, 23 nt, synthetic construct
  source 1..23: mol_type = other RNA
tgaatgggcccgggggcacaagg

SEQ ID NO: 91082 - RNA, 23 nt, synthetic construct
  source 1..23: mol_type = other RNA
tgtgacgggtggaacaaagctca

SEQ ID NO: 91083 - RNA, 23 nt, synthetic construct
  source 1..23: mol_type = other RNA
ttcactgcacactccccgggcgc

SEQ ID NO: 91084 - RNA, 23 nt, synthetic construct
  source 1..23: mol_type = other RNA
ttccgcaaaggccggccccagca

SEQ ID NO: 91085 - RNA, 23 nt, synthetic construct
  source 1..23: mol_type = other RNA
tggcactccgcaaaggccggccc

SEQ ID NO: 91086 - RNA, 23 nt, synthetic construct
  source 1..23: mol_type = other RNA
tgctgcgtgtagatggagttgag

SEQ ID NO: 91087 - RNA, 23 nt, synthetic construct
  source 1..23: mol_type = other RNA
ttggaccagcggcagacctcgcg

SEQ ID NO: 91088 - RNA, 23 nt, synthetic construct
  source 1..23: mol_type = other RNA
tagctcgagggtgtgaacagggt

SEQ ID NO: 91089 - RNA, 23 nt, synthetic construct
  source 1..23: mol_type = other RNA
tcagcctggttctggttgaagtt

SEQ ID NO: 91090 - RNA, 23 nt, synthetic construct
  source 1..23: mol_type = other RNA
tgcatgtacttggtgcagacgcc

SEQ ID NO: 91091 - RNA, 23 nt, synthetic construct
  source 1..23: mol_type = other RNA
tcgcccgcgtcattgaggaaggt

SEQ ID NO: 91092 - RNA, 23 nt, synthetic construct
  source 1..23: mol_type = other RNA
tggcacacaggcgcccgcgtcat

SEQ ID NO: 91093 - RNA, 23 nt, synthetic construct
  source 1..23: mol_type = other RNA
tggtgacgtcggcctcactcagg

SEQ ID NO: 91094 - RNA, 23 nt, synthetic construct
  source 1..23: mol_type = other RNA
tatgaagtggccatccccgtagg

SEQ ID NO: 91095 - RNA, 23 nt, synthetic construct
  source 1..23: mol_type = other RNA
tgctgaaacagcccacgtccagc

SEQ ID NO: 91096 - RNA, 23 nt, synthetic construct
  source 1..23: mol_type = other RNA
tactcccgcagggggacaccagg

SEQ ID NO: 91097 - RNA, 23 nt, synthetic construct
  source 1..23: mol_type = other RNA
taggtggggcagcggcacaggtc

SEQ ID NO: 91098 - RNA, 23 nt, synthetic construct
  source 1..23: mol_type = other RNA
ttgcgtgtagatggagttgagga

SEQ ID NO: 91099 - RNA, 23 nt, synthetic construct
  source 1..23: mol_type = other RNA
tacttggggcagttctgcatgta

SEQ ID NO: 91100 - RNA, 23 nt, synthetic construct
  source 1..23: mol_type = other RNA
tgtagttgtagcacatcttgaag

SEQ ID NO: 91101 - RNA, 23 nt, synthetic construct
  source 1..23: mol_type = other RNA
tactcccgcagggggacaccagg

SEQ ID NO: 91102 - RNA, 23 nt, synthetic construct
  source 1..23: mol_type = other RNA
tactcccgcagggggacaccagg

SEQ ID NO: 91103 - RNA, 23 nt, synthetic construct
  source 1..23: mol_type = other RNA
ttccggcaggtttttaggcaggg

SEQ ID NO: 91104 - RNA, 23 nt, synthetic construct
  source 1..23: mol_type = other RNA
ttctgtccactcacacttcggtt

SEQ ID NO: 91105 - RNA, 23 nt, synthetic construct
  source 1..23: mol_type = other RNA
tgatgaagtggccatccccgtag

SEQ ID NO: 91106 - RNA, 23 nt, synthetic construct
  source 1..23: mol_type = other RNA
tccaggctcgtggtcagcggctc

SEQ ID NO: 91107 - RNA, 23 nt, synthetic construct
  source 1..23: mol_type = other RNA
ttcacacttcggttgacagcggg

SEQ ID NO: 91108 - RNA, 23 nt, synthetic construct
  source 1..23: mol_type = other RNA
tgcaggtgttgcagtcgaccctg

SEQ ID NO: 91109 - RNA, 23 nt, synthetic construct
  source 1..23: mol_type = other RNA
tacagccggacacgcagtgtgtg

SEQ ID NO: 91110 - RNA, 23 nt, synthetic construct
  source 1..23: mol_type = other RNA
tctggtgcagtcggatgaacacg

SEQ ID NO: 91111 - RNA, 23 nt, synthetic construct
  source 1..23: mol_type = other RNA
tcacgtcaaaccactctgtccac

SEQ ID NO: 91112 - RNA, 23 nt, synthetic construct
  source 1..23: mol_type = other RNA
tgacacgcagtgtgtgctgaaac

SEQ ID NO: 91113 - RNA, 23 nt, synthetic construct
  source 1..23: mol_type = other RNA
tcactgggccacgcacttcatct

SEQ ID NO: 91114 - RNA, 23 nt, synthetic construct
  source 1..23: mol_type = other RNA
tcctcaaggctgtgagcgcactg

SEQ ID NO: 91115 - RNA, 23 nt, synthetic construct
  source 1..23: mol_type = other RNA
ttcctgtcctcataggtgcaggt

SEQ ID NO: 91116 - RNA, 23 nt, synthetic construct
  source 1..23: mol_type = other RNA
tgaagacagtgacgggtggaaca

SEQ ID NO: 91117 - RNA, 23 nt, synthetic construct
  source 1..23: mol_type = other RNA
tggttgttggtgcaggtgccgca

SEQ ID NO: 91118 - RNA, 23 nt, synthetic construct
  source 1..23: mol_type = other RNA
ttgaagaatgggcccgggggcac

SEQ ID NO: 91119 - RNA, 23 nt, synthetic construct
  source 1..23: mol_type = other RNA
ttaaggcagctcctcccgctgcc

SEQ ID NO: 91120 - RNA, 23 nt, synthetic construct
  source 1..23: mol_type = other RNA
tccgggcactgctccgtgggccc

SEQ ID NO: 91121 - RNA, 23 nt, synthetic construct
  source 1..23: mol_type = other RNA
tggtccgggcactgctccgtggg

SEQ ID NO: 91122 - RNA, 23 nt, synthetic construct
  source 1..23: mol_type = other RNA
tttgggaagtccacgtcaaacca

SEQ ID NO: 91123 - RNA, 23 nt, synthetic construct
  source 1..23: mol_type = other RNA
tagaggtgccgtcaaaggtggaa

SEQ ID NO: 91124 - RNA, 23 nt, synthetic construct
  source 1..23: mol_type = other RNA
tcgcgctgggggttggagcaggt

SEQ ID NO: 91125 - RNA, 23 nt, synthetic construct
  source 1..23: mol_type = other RNA
tccagcggcagacctcgcggaca

SEQ ID NO: 91126 - RNA, 23 nt, synthetic construct
  source 1..23: mol_type = other RNA
tcacggcaggtcctggcactgcc

SEQ ID NO: 91127 - RNA, 23 nt, synthetic construct
  source 1..23: mol_type = other RNA
tcgtgtagatggagttgaggaac

SEQ ID NO: 91128 - RNA, 23 nt, synthetic construct
  source 1..23: mol_type = other RNA
tgcgtgtagatggagttgaggaa

SEQ ID NO: 91129 - RNA, 23 nt, synthetic construct
  source 1..23: mol_type = other RNA
tggaggatcagctcgtagctctc

SEQ ID NO: 91130 - RNA, 23 nt, synthetic construct
  source 1..23: mol_type = other RNA
tggtgcagccgtccacaggcacg

SEQ ID NO: 91131 - RNA, 23 nt, synthetic construct
  source 1..23: mol_type = other RNA
ttgggccacgcacttcatctggt

SEQ ID NO: 91132 - RNA, 23 nt, synthetic construct
  source 1..23: mol_type = other RNA
tagagccggtggctgcactccca

SEQ ID NO: 91133 - RNA, 23 nt, synthetic construct
  source 1..23: mol_type = other RNA
tccggtggtcccacaggggatgt

SEQ ID NO: 91134 - RNA, 23 nt, synthetic construct
  source 1..23: mol_type = other RNA
tcgtagtacttggtggagtcaac

SEQ ID NO: 91135 - RNA, 23 nt, synthetic construct
  source 1..23: mol_type = other RNA
tacgccgttcttgctgaaaccgc

SEQ ID NO: 91136 - RNA, 23 nt, synthetic construct
  source 1..23: mol_type = other RNA
tctcgccagtcactgcacactcc

SEQ ID NO: 91137 - RNA, 23 nt, synthetic construct
  source 1..23: mol_type = other RNA
tcccgcgtgggcgcactggcgtg

SEQ ID NO: 91138 - RNA, 23 nt, synthetic construct
  source 1..23: mol_type = other RNA
tccgttgggtcctgggtgtcccc

SEQ ID NO: 91139 - RNA, 23 nt, synthetic construct
  source 1..23: mol_type = other RNA
ttagctggacgttgaagtcctcg

SEQ ID NO: 91140 - RNA, 23 nt, synthetic construct
  source 1..23: mol_type = other RNA
tcgtagctggacgttgaagtcct

SEQ ID NO: 91141 - RNA, 23 nt, synthetic construct
  source 1..23: mol_type = other RNA
tagctggacgttgaagtcctcgt

SEQ ID NO: 91142 - RNA, 23 nt, synthetic construct
  source 1..23: mol_type = other RNA
tagccggacacgcagtgtgtgct

SEQ ID NO: 91143 - RNA, 23 nt, synthetic construct
  source 1..23: mol_type = other RNA
ttaggtggcctcgttgtgcacac

SEQ ID NO: 91144 - RNA, 23 nt, synthetic construct
  source 1..23: mol_type = other RNA
tagacacagccggacacgcagtg

SEQ ID NO: 91145 - RNA, 23 nt, synthetic construct
  source 1..23: mol_type = other RNA
taggcttgtaggtggcctcgttg

SEQ ID NO: 91146 - RNA, 23 nt, synthetic construct
  source 1..23: mol_type = other RNA
tcccgtaggccacgcaggtgccc

SEQ ID NO: 91147 - RNA, 23 nt, synthetic construct
  source 1..23: mol_type = other RNA
tacacacacaggcccgcgtcgtg

SEQ ID NO: 91148 - RNA, 23 nt, synthetic construct
  source 1..23: mol_type = other RNA
tccggagtccgccaggacacaca

SEQ ID NO: 91149 - RNA, 23 nt, synthetic construct
  source 1..23: mol_type = other RNA
tgcaggtgtccggagtccgccag

SEQ ID NO: 91150 - RNA, 23 nt, synthetic construct
  source 1..23: mol_type = other RNA
taggcagggtgccccgcagggct

SEQ ID NO: 91151 - RNA, 23 nt, synthetic construct
  source 1..23: mol_type = other RNA
tcggtggtgttgtagatgacgtc

SEQ ID NO: 91152 - RNA, 23 nt, synthetic construct
  source 1..23: mol_type = other RNA
tgccaggctcgtggtcagcggct

SEQ ID NO: 91153 - RNA, 23 nt, synthetic construct
  source 1..23: mol_type = other RNA
ttggtctcggcctgagaggtgga

SEQ ID NO: 91154 - RNA, 23 nt, synthetic construct
  source 1..23: mol_type = other RNA
tggtgccgtcaaaggtggaatag

SEQ ID NO: 91155 - RNA, 23 nt, synthetic construct
  source 1..23: mol_type = other RNA
ttgctcaccggaatttggtcaaa

SEQ ID NO: 91156 - RNA, 23 nt, synthetic construct
  source 1..23: mol_type = other RNA
tgacgatgcggaaggtcccgtgg

SEQ ID NO: 91157 - RNA, 23 nt, synthetic construct
  source 1..23: mol_type = other RNA
tgtgacgatgcggaaggtcccgt

SEQ ID NO: 91158 - RNA, 23 nt, synthetic construct
  source 1..23: mol_type = other RNA
tcacctcgccagtcactgcacac

SEQ ID NO: 91159 - RNA, 23 nt, synthetic construct
  source 1..23: mol_type = other RNA
tggtgacgatgcggaaggtcccg

SEQ ID NO: 91160 - RNA, 23 nt, synthetic construct
  source 1..23: mol_type = other RNA
ttcgtagtacttggtggagtcaa

SEQ ID NO: 91161 - RNA, 23 nt, synthetic construct
  source 1..23: mol_type = other RNA
ttgtccggagtccgccaggacac

SEQ ID NO: 91162 - RNA, 23 nt, synthetic construct
  source 1..23: mol_type = other RNA
ttcggtggtgttgtagatgacgt

SEQ ID NO: 91163 - RNA, 23 nt, synthetic construct
  source 1..23: mol_type = other RNA
tgacacacacaggcccgcgtcgt

SEQ ID NO: 91164 - RNA, 23 nt, synthetic construct
  source 1..23: mol_type = other RNA
tatcggtggtgttgtagatgacg

SEQ ID NO: 91165 - RNA, 23 nt, synthetic construct
  source 1..23: mol_type = other RNA
taagcccatcggtggtgttgtag

SEQ ID NO: 91166 - RNA, 23 nt, synthetic construct
  source 1..23: mol_type = other RNA
tgaccagcggcagacctcgcgga

SEQ ID NO: 91167 - RNA, 23 nt, synthetic construct
  source 1..23: mol_type = other RNA
ttgttggcgcacatcagcccccg

SEQ ID NO: 91168 - RNA, 23 nt, synthetic construct
  source 1..23: mol_type = other RNA
tgctgttggcgcacatcagcccc

SEQ ID NO: 91169 - RNA, 23 nt, synthetic construct
  source 1..23: mol_type = other RNA
ttgcaccgttgggtcctgggtgt

SEQ ID NO: 91170 - RNA, 23 nt, synthetic construct
  source 1..23: mol_type = other RNA
tatcaaaccactctgtccactga

SEQ ID NO: 91171 - RNA, 23 nt, synthetic construct
  source 1..23: mol_type = other RNA
tgggtggtcttttcggttgctgt

SEQ ID NO: 91172 - RNA, 23 nt, synthetic construct
  source 1..23: mol_type = other RNA
tgtagtcctcatcaaaccactct

SEQ ID NO: 91173 - RNA, 23 nt, synthetic construct
  source 1..23: mol_type = other RNA
tcagttggggaagctctcggcct

SEQ ID NO: 91174 - RNA, 23 nt, synthetic construct
  source 1..23: mol_type = other RNA
tgatatccatggacttgtagtgg

SEQ ID NO: 91175 - RNA, 23 nt, synthetic construct
  source 1..23: mol_type = other RNA
tgatcctgtagttgtagcacatc

SEQ ID NO: 91176 - RNA, 23 nt, synthetic construct
  source 1..23: mol_type = other RNA
tggctgtgagcgcactggatgcc

SEQ ID NO: 91177 - RNA, 23 nt, synthetic construct
  source 1..23: mol_type = other RNA
ttcccaaactggagcggggtcag

SEQ ID NO: 91178 - RNA, 23 nt, synthetic construct
  source 1..23: mol_type = other RNA
tctgtaaagctggtagctgtggg

SEQ ID NO: 91179 - RNA, 23 nt, synthetic construct
  source 1..23: mol_type = other RNA
tctgtaaagctggtagctgtggg

SEQ ID NO: 91180 - RNA, 23 nt, synthetic construct
  source 1..23: mol_type = other RNA
tctgtaaagctggtagctgtggg

SEQ ID NO: 91181 - RNA, 23 nt, synthetic construct
  source 1..23: mol_type = other RNA
tgggccgggcttgtcgtggagtg

SEQ ID NO: 91182 - RNA, 23 nt, synthetic construct
  source 1..23: mol_type = other RNA
ttctcatgaggacataggtgcag

SEQ ID NO: 91183 - RNA, 23 nt, synthetic construct
  source 1..23: mol_type = other RNA
ttcaacctgggagcggcaggcgg

SEQ ID NO: 91184 - RNA, 23 nt, synthetic construct
  source 1..23: mol_type = other RNA
tagaagctcgagggtgtgaacag

SEQ ID NO: 91185 - RNA, 23 nt, synthetic construct
  source 1..23: mol_type = other RNA
taagaagctcgagggtgtgaaca

SEQ ID NO: 91186 - RNA, 23 nt, synthetic construct
  source 1..23: mol_type = other RNA
ttgtagttgtagcacatcttgaa

SEQ ID NO: 91187 - RNA, 23 nt, synthetic construct
  source 1..23: mol_type = other RNA
ttgtccactgacaccggggctgg

SEQ ID NO: 91188 - RNA, 23 nt, synthetic construct
  source 1..23: mol_type = other RNA
tgggcacggcaggtcctggcact

SEQ ID NO: 91189 - RNA, 23 nt, synthetic construct
  source 1..23: mol_type = other RNA
tttccggcaggtttttaggcagg

SEQ ID NO: 91190 - RNA, 23 nt, synthetic construct
  source 1..23: mol_type = other RNA
tgtggtcccacaggggatgttct

SEQ ID NO: 91191 - RNA, 23 nt, synthetic construct
  source 1..23: mol_type = other RNA
tggtcctgtcctcataggtgcag

SEQ ID NO: 91192 - RNA, 23 nt, synthetic construct
  source 1..23: mol_type = other RNA
tacaggcgcccgcgtcattgagg

SEQ ID NO: 91193 - RNA, 23 nt, synthetic construct
  source 1..23: mol_type = other RNA
ttccgtgctggcactgagggagg

SEQ ID NO: 91194 - RNA, 23 nt, synthetic construct
  source 1..23: mol_type = other RNA
tatgttggctgccgacaggggca

SEQ ID NO: 91195 - RNA, 23 nt, synthetic construct
  source 1..23: mol_type = other RNA
tgtaaagctggtagctgtgggtg

SEQ ID NO: 91196 - RNA, 23 nt, synthetic construct
  source 1..23: mol_type = other RNA
tgtaaagctggtagctgtgggtg

SEQ ID NO: 91197 - RNA, 23 nt, synthetic construct
  source 1..23: mol_type = other RNA
tgcgggtccgggcactgctccgt

SEQ ID NO: 91198 - RNA, 23 nt, synthetic construct
  source 1..23: mol_type = other RNA
tcggctggccccccgcgtgggcg

SEQ ID NO: 91199 - RNA, 23 nt, synthetic construct
  source 1..23: mol_type = other RNA
tgcacacaggcgcccgcgtcatt

SEQ ID NO: 91200 - RNA, 23 nt, synthetic construct
  source 1..23: mol_type = other RNA
tccggacacgcagtgtgtgctga

SEQ ID NO: 91201 - RNA, 23 nt, synthetic construct
  source 1..23: mol_type = other RNA
tgtaaagctggtagctgtgggtg

SEQ ID NO: 91202 - RNA, 23 nt, synthetic construct
  source 1..23: mol_type = other RNA
ttcaaaggtggaatagtgggagc

SEQ ID NO: 91203 - RNA, 23 nt, synthetic construct
  source 1..23: mol_type = other RNA
tatctggtcctcattgaagaagg

SEQ ID NO: 91204 - RNA, 23 nt, synthetic construct
  source 1..23: mol_type = other RNA
tggatctctctcatgaggacata

SEQ ID NO: 91205 - RNA, 23 nt, synthetic construct
  source 1..23: mol_type = other RNA
tgaaggtgaatggcgttgtggct

SEQ ID NO: 91206 - RNA, 23 nt, synthetic construct
  source 1..23: mol_type = other RNA
ttgaaggtgaatggcgttgtggc

SEQ ID NO: 91207 - RNA, 23 nt, synthetic construct
  source 1..23: mol_type = other RNA
ttagtcctcatcaaaccactctg

SEQ ID NO: 91208 - RNA, 23 nt, synthetic construct
  source 1..23: mol_type = other RNA
tgtaggcacagcaggctccgtgc

SEQ ID NO: 91209 - RNA, 23 nt, synthetic construct
  source 1..23: mol_type = other RNA
tctgctcaccggaatttggtcaa

SEQ ID NO: 91210 - RNA, 23 nt, synthetic construct
  source 1..23: mol_type = other RNA
ttgaggacgatatccatggactt

SEQ ID NO: 91211 - RNA, 23 nt, synthetic construct
  source 1..23: mol_type = other RNA
ttcgagtggaagggcttggggtt

SEQ ID NO: 91212 - RNA, 23 nt, synthetic construct
  source 1..23: mol_type = other RNA
tgtgggttgtagaagtcacagaa

SEQ ID NO: 91213 - RNA, 23 nt, synthetic construct
  source 1..23: mol_type = other RNA
tggcctggcactctatgtcctta

SEQ ID NO: 91214 - RNA, 23 nt, synthetic construct
  source 1..23: mol_type = other RNA
tgttcttgctgaaaccgctgctc

SEQ ID NO: 91215 - RNA, 23 nt, synthetic construct
  source 1..23: mol_type = other RNA
tgaggagggtgttgccatagaac

SEQ ID NO: 91216 - RNA, 23 nt, synthetic construct
  source 1..23: mol_type = other RNA
tgaggagggtgttgccatagaac

SEQ ID NO: 91217 - RNA, 23 nt, synthetic construct
  source 1..23: mol_type = other RNA
tgaggagggtgttgccatagaac

SEQ ID NO: 91218 - RNA, 23 nt, synthetic construct
  source 1..23: mol_type = other RNA
tgaggagggtgttgccatagaac

SEQ ID NO: 91219 - RNA, 23 nt, synthetic construct
  source 1..23: mol_type = other RNA
tgaggagggtgttgccatagaac

SEQ ID NO: 91220 - RNA, 23 nt, synthetic construct
  source 1..23: mol_type = other RNA
tagcacgccgttcttgctgaaac

SEQ ID NO: 91221 - RNA, 23 nt, synthetic construct
  source 1..23: mol_type = other RNA
tagaatgggcccgggggcacaag

SEQ ID NO: 91222 - RNA, 23 nt, synthetic construct
  source 1..23: mol_type = other RNA
tgcaccgttgggtcctgggtgtc

SEQ ID NO: 91223 - RNA, 23 nt, synthetic construct
  source 1..23: mol_type = other RNA
tggtagtgccactcacagccccc

SEQ ID NO: 91224 - RNA, 23 nt, synthetic construct
  source 1..23: mol_type = other RNA
ttcacccacgcacctggccaccg

SEQ ID NO: 91225 - RNA, 23 nt, synthetic construct
  source 1..23: mol_type = other RNA
tcggtcacagtccacctgctggc

SEQ ID NO: 91226 - RNA, 23 nt, synthetic construct
  source 1..23: mol_type = other RNA
tgctgtagggcagccgggcctgg

SEQ ID NO: 91227 - RNA, 23 nt, synthetic construct
  source 1..23: mol_type = other RNA
tgtatctgggggatgtcagtcct

SEQ ID NO: 91228 - RNA, 23 nt, synthetic construct
  source 1..23: mol_type = other RNA
tacgtcacagtgcaccttctgcc

SEQ ID NO: 91229 - RNA, 23 nt, synthetic construct
  source 1..23: mol_type = other RNA
tggaagctctcggcctggcactc

SEQ ID NO: 91230 - RNA, 23 nt, synthetic construct
  source 1..23: mol_type = other RNA
tcgtcaaaggtggaatagtggga

SEQ ID NO: 91231 - RNA, 23 nt, synthetic construct
  source 1..23: mol_type = other RNA
tgacccggatggccgtgtccccg

SEQ ID NO: 91232 - RNA, 23 nt, synthetic construct
  source 1..23: mol_type = other RNA
tgtagtacttggtggagtcaacc

SEQ ID NO: 91233 - RNA, 23 nt, synthetic construct
  source 1..23: mol_type = other RNA
tgggcagcggcacaggtcctggg

SEQ ID NO: 91234 - RNA, 23 nt, synthetic construct
  source 1..23: mol_type = other RNA
ttcctcattgaagaagggctggc

SEQ ID NO: 91235 - RNA, 23 nt, synthetic construct
  source 1..23: mol_type = other RNA
tgttgcagtcgaccctgatggtc

SEQ ID NO: 91236 - RNA, 23 nt, synthetic construct
  source 1..23: mol_type = other RNA
tggtcctcattgaagaagggctg

SEQ ID NO: 91237 - RNA, 23 nt, synthetic construct
  source 1..23: mol_type = other RNA
tacactgggccacgcacttcatc

SEQ ID NO: 91238 - RNA, 23 nt, synthetic construct
  source 1..23: mol_type = other RNA
tcggtggtcccacaggggatgtt

SEQ ID NO: 91239 - RNA, 23 nt, synthetic construct
  source 1..23: mol_type = other RNA
tgggccacgcacttcatctggtc

SEQ ID NO: 91240 - RNA, 23 nt, synthetic construct
  source 1..23: mol_type = other RNA
tgtgggtgcaggggcactgcccg

SEQ ID NO: 91241 - RNA, 23 nt, synthetic construct
  source 1..23: mol_type = other RNA
tttttcggttgctgtggtctggg

SEQ ID NO: 91242 - RNA, 23 nt, synthetic construct
  source 1..23: mol_type = other RNA
tggcggggtccagcctgacaaac

SEQ ID NO: 91243 - RNA, 23 nt, synthetic construct
  source 1..23: mol_type = other RNA
tactgtcctctccgttccacagg

SEQ ID NO: 91244 - RNA, 23 nt, synthetic construct
  source 1..23: mol_type = other RNA
tgccggacacgcagtgtgtgctg

SEQ ID NO: 91245 - RNA, 23 nt, synthetic construct
  source 1..23: mol_type = other RNA
tttaggcagggtgccccgcaggg

SEQ ID NO: 91246 - RNA, 23 nt, synthetic construct
  source 1..23: mol_type = other RNA
tggccacgcacttcatctggtcc

SEQ ID NO: 91247 - RNA, 23 nt, synthetic construct
  source 1..23: mol_type = other RNA
tgctccgtgctggcactgaggga

SEQ ID NO: 91248 - RNA, 23 nt, synthetic construct
  source 1..23: mol_type = other RNA
tggactcaacgtcccctccaagt

SEQ ID NO: 91249 - RNA, 23 nt, synthetic construct
  source 1..23: mol_type = other RNA
tcacccacgcacctggccaccgt

SEQ ID NO: 91250 - RNA, 23 nt, synthetic construct
  source 1..23: mol_type = other RNA
tcacgacctggcccaactcccgc

SEQ ID NO: 91251 - RNA, 23 nt, synthetic construct
  source 1..23: mol_type = other RNA
tcacgacctggcccaactcccgc

SEQ ID NO: 91252 - RNA, 23 nt, synthetic construct
  source 1..23: mol_type = other RNA
tcacgacctggcccaactcccgc

SEQ ID NO: 91253 - RNA, 23 nt, synthetic construct
  source 1..23: mol_type = other RNA
tcgcacatctggccctggtgggc

SEQ ID NO: 91254 - RNA, 23 nt, synthetic construct
  source 1..23: mol_type = other RNA
tcacgacctggcccaactccccc

SEQ ID NO: 91255 - RNA, 23 nt, synthetic construct
  source 1..23: mol_type = other RNA
tgcagtggttccgtcccgctgga

SEQ ID NO: 91256 - RNA, 23 nt, synthetic construct
  source 1..23: mol_type = other RNA
tcccgctggagacagtcgtccct

SEQ ID NO: 91257 - RNA, 23 nt, synthetic construct
  source 1..23: mol_type = other RNA
tcacacggatttcatagttgaag

SEQ ID NO: 91258 - RNA, 23 nt, synthetic construct
  source 1..23: mol_type = other RNA
tcacacggatttcatagttgaag

SEQ ID NO: 91259 - RNA, 23 nt, synthetic construct
  source 1..23: mol_type = other RNA
tcacacggatttcatagttgaag

SEQ ID NO: 91260 - RNA, 23 nt, synthetic construct
  source 1..23: mol_type = other RNA
tcacacggatttcatagttgaag

SEQ ID NO: 91261 - RNA, 23 nt, synthetic construct
  source 1..23: mol_type = other RNA
tgctggctcgggtccgacacttt

SEQ ID NO: 91262 - RNA, 23 nt, synthetic construct
  source 1..23: mol_type = other RNA
tgcgttgtgggcatagaactcgt

SEQ ID NO: 91263 - RNA, 23 nt, synthetic construct
  source 1..23: mol_type = other RNA
tgaacacacggatttcatagttg

SEQ ID NO: 91264 - RNA, 23 nt, synthetic construct
  source 1..23: mol_type = other RNA
tgaacacacggatttcatagttg

SEQ ID NO: 91265 - RNA, 23 nt, synthetic construct
  source 1..23: mol_type = other RNA
tgaacacacggatttcatagttg

SEQ ID NO: 91266 - RNA, 23 nt, synthetic construct
  source 1..23: mol_type = other RNA
tgaacacacggatttcatagttg

SEQ ID NO: 91267 - RNA, 23 nt, synthetic construct
  source 1..23: mol_type = other RNA
tccgctggagacagtcgtccctc

SEQ ID NO: 91268 - RNA, 23 nt, synthetic construct
  source 1..23: mol_type = other RNA
tagggcgtcccagtgacatcagg

SEQ ID NO: 91269 - RNA, 23 nt, synthetic construct
  source 1..23: mol_type = other RNA
tcggatttcatagttgaagcaca

SEQ ID NO: 91270 - RNA, 23 nt, synthetic construct
  source 1..23: mol_type = other RNA
tcggatttcatagttgaagcaca

SEQ ID NO: 91271 - RNA, 23 nt, synthetic construct
  source 1..23: mol_type = other RNA
tcggatttcatagttgaagcaca

SEQ ID NO: 91272 - RNA, 23 nt, synthetic construct
  source 1..23: mol_type = other RNA
tcggatttcatagttgaagcaca

SEQ ID NO: 91273 - RNA, 23 nt, synthetic construct
  source 1..23: mol_type = other RNA
ttcgtccccggagtggaggaggg

SEQ ID NO: 91274 - RNA, 23 nt, synthetic construct
  source 1..23: mol_type = other RNA
tagtggttccgtcccgctggaga

SEQ ID NO: 91275 - RNA, 23 nt, synthetic construct
  source 1..23: mol_type = other RNA
ttcgtccccggagtggaggaggg

SEQ ID NO: 91276 - RNA, 23 nt, synthetic construct
  source 1..23: mol_type = other RNA
tcgatatccatggacttgtagtg

SEQ ID NO: 91277 - RNA, 23 nt, synthetic construct
  source 1..23: mol_type = other RNA
tcgagggtgtgaacagggtgatg

SEQ ID NO: 91278 - RNA, 23 nt, synthetic construct
  source 1..23: mol_type = other RNA
tgttcacgcaggtgacgttggcc

SEQ ID NO: 91279 - RNA, 23 nt, synthetic construct
  source 1..23: mol_type = other RNA
tcgctggagacagtcgtccctct

SEQ ID NO: 91280 - RNA, 23 nt, synthetic construct
  source 1..23: mol_type = other RNA
tacacggatttcatagttgaagc

SEQ ID NO: 91281 - RNA, 23 nt, synthetic construct
  source 1..23: mol_type = other RNA
tacacggatttcatagttgaagc

SEQ ID NO: 91282 - RNA, 23 nt, synthetic construct
  source 1..23: mol_type = other RNA
tacacggatttcatagttgaagc

SEQ ID NO: 91283 - RNA, 23 nt, synthetic construct
  source 1..23: mol_type = other RNA
tacacggatttcatagttgaagc

SEQ ID NO: 91284 - RNA, 23 nt, synthetic construct
  source 1..23: mol_type = other RNA
ttggcgttgtgggcatagaactc

SEQ ID NO: 91285 - RNA, 23 nt, synthetic construct
  source 1..23: mol_type = other RNA
tcacggatttcatagttgaagca

SEQ ID NO: 91286 - RNA, 23 nt, synthetic construct
  source 1..23: mol_type = other RNA
tcacggatttcatagttgaagca

SEQ ID NO: 91287 - RNA, 23 nt, synthetic construct
  source 1..23: mol_type = other RNA
tagcagaacacacggatttcata

SEQ ID NO: 91288 - RNA, 23 nt, synthetic construct
  source 1..23: mol_type = other RNA
tgatttcatagttgaagcacatc

SEQ ID NO: 91289 - RNA, 23 nt, synthetic construct
  source 1..23: mol_type = other RNA
tgcagaacacacggatttcatag

SEQ ID NO: 91290 - RNA, 23 nt, synthetic construct
  source 1..23: mol_type = other RNA
tgatttcatagttgaagcacatc

SEQ ID NO: 91291 - RNA, 23 nt, synthetic construct
  source 1..23: mol_type = other RNA
tgcagaacacacggatttcatag

SEQ ID NO: 91292 - RNA, 23 nt, synthetic construct
  source 1..23: mol_type = other RNA
tgatttcatagttgaagcacatc

SEQ ID NO: 91293 - RNA, 23 nt, synthetic construct
  source 1..23: mol_type = other RNA
tgcagaacacacggatttcatag

SEQ ID NO: 91294 - RNA, 23 nt, synthetic construct
  source 1..23: mol_type = other RNA
tgatttcatagttgaagcacatc

SEQ ID NO: 91295 - RNA, 23 nt, synthetic construct
  source 1..23: mol_type = other RNA
tgcagaacacacggatttcatag

SEQ ID NO: 91296 - RNA, 23 nt, synthetic construct
  source 1..23: mol_type = other RNA
tgcttgttcacgcaggtgacgtt

SEQ ID NO: 91297 - RNA, 23 nt, synthetic construct
  source 1..23: mol_type = other RNA
tcagtggttccgtcccgctggag

SEQ ID NO: 91298 - RNA, 23 nt, synthetic construct
  source 1..23: mol_type = other RNA
tacggaccggctacgcgtggcaa

SEQ ID NO: 91299 - RNA, 23 nt, synthetic construct
  source 1..23: mol_type = other RNA
tatgcggtcacagtccacctgct

SEQ ID NO: 91300 - RNA, 23 nt, synthetic construct
  source 1..23: mol_type = other RNA
tacggatttcatagttgaagcac

SEQ ID NO: 91301 - RNA, 23 nt, synthetic construct
  source 1..23: mol_type = other RNA
tacggatttcatagttgaagcac

SEQ ID NO: 91302 - RNA, 23 nt, synthetic construct
  source 1..23: mol_type = other RNA
tacggatttcatagttgaagcac

SEQ ID NO: 91303 - RNA, 23 nt, synthetic construct
  source 1..23: mol_type = other RNA
tacggatttcatagttgaagcac

SEQ ID NO: 91304 - RNA, 23 nt, synthetic construct
  source 1..23: mol_type = other RNA
tcttgttcacgcaggtgacgttg

SEQ ID NO: 91305 - RNA, 23 nt, synthetic construct
  source 1..23: mol_type = other RNA
tccgacactttgatgggcaggtg

SEQ ID NO: 91306 - RNA, 23 nt, synthetic construct
  source 1..23: mol_type = other RNA
tagtcgtccctctggttgttggt

SEQ ID NO: 91307 - RNA, 23 nt, synthetic construct
  source 1..23: mol_type = other RNA
ttggagacagtcgtccctctggt

SEQ ID NO: 91308 - RNA, 23 nt, synthetic construct
  source 1..23: mol_type = other RNA
tctggagacagtcgtccctctgg

SEQ ID NO: 91309 - RNA, 23 nt, synthetic construct
  source 1..23: mol_type = other RNA
ttcccgctggagacagtcgtccc

SEQ ID NO: 91310 - RNA, 23 nt, synthetic construct
  source 1..23: mol_type = other RNA
ttgtacactttggtgggtgggca

SEQ ID NO: 91311 - RNA, 23 nt, synthetic construct
  source 1..23: mol_type = other RNA
tggacacagaagggcgtgcagcc

SEQ ID NO: 91312 - RNA, 23 nt, synthetic construct
  source 1..23: mol_type = other RNA
tagacagtcgtccctctggttgt

SEQ ID NO: 91313 - RNA, 23 nt, synthetic construct
  source 1..23: mol_type = other RNA
tacacagaagggcgtgcagccac

SEQ ID NO: 91314 - RNA, 23 nt, synthetic construct
  source 1..23: mol_type = other RNA
tgcgtgtggcagctccggaggca

SEQ ID NO: 91315 - RNA, 23 nt, synthetic construct
  source 1..23: mol_type = other RNA
tagcgtgtggcagctccggaggc

SEQ ID NO: 91316 - RNA, 23 nt, synthetic construct
  source 1..23: mol_type = other RNA
tgctccggaggcactcggcccca

SEQ ID NO: 91317 - RNA, 23 nt, synthetic construct
  source 1..23: mol_type = other RNA
tcacggatttcatagttgaagca

SEQ ID NO: 91318 - RNA, 23 nt, synthetic construct
  source 1..23: mol_type = other RNA
tgcttgtacactttggtgggtgg

SEQ ID NO: 91319 - RNA, 23 nt, synthetic construct
  source 1..23: mol_type = other RNA
tcacggatttcatagttgaagca

SEQ ID NO: 91320 - RNA, 23 nt, synthetic construct
  source 1..23: mol_type = other RNA
tagctccggaggcactcggcccc

SEQ ID NO: 91321 - RNA, 23 nt, synthetic construct
  source 1..23: mol_type = other RNA
ttgcacactccccgggcgcggca

SEQ ID NO: 91322 - RNA, 23 nt, synthetic construct
  source 1..23: mol_type = other RNA
tgtggttccgtcccgctggagac

SEQ ID NO: 91323 - RNA, 23 nt, synthetic construct
  source 1..23: mol_type = other RNA
tcactttggtgggtgggcaggtg

SEQ ID NO: 91324 - RNA, 23 nt, synthetic construct
  source 1..23: mol_type = other RNA
tgccgccagagccaacaccagcg

SEQ ID NO: 91325 - RNA, 23 nt, synthetic construct
  source 1..23: mol_type = other RNA
tggttccgtcccgctggagacag

SEQ ID NO: 91326 - RNA, 23 nt, synthetic construct
  source 1..23: mol_type = other RNA
tcagcgtgtggcagctccggagg

SEQ ID NO: 91327 - RNA, 23 nt, synthetic construct
  source 1..23: mol_type = other RNA
tgttccgtcccgctggagacagt

SEQ ID NO: 91328 - RNA, 23 nt, synthetic construct
  source 1..23: mol_type = other RNA
tgacacagaagggcgtgcagcca

SEQ ID NO: 91329 - RNA, 23 nt, synthetic construct
  source 1..23: mol_type = other RNA
tggtgggacagcagtcgccctcc

SEQ ID NO: 91330 - RNA, 23 nt, synthetic construct
  source 1..23: mol_type = other RNA
tccgtcccgctggagacagtcgt

SEQ ID NO: 91331 - RNA, 23 nt, synthetic construct
  source 1..23: mol_type = other RNA
ttggacgagctgggaaccgtgga

SEQ ID NO: 91332 - RNA, 23 nt, synthetic construct
  source 1..23: mol_type = other RNA
tacactccccgggcgcggcagag

SEQ ID NO: 91333 - RNA, 23 nt, synthetic construct
  source 1..23: mol_type = other RNA
tacgctgcaggtgacgtcggcct

SEQ ID NO: 91334 - RNA, 23 nt, synthetic construct
  source 1..23: mol_type = other RNA
tgatgacaacacgggtgaccaca

SEQ ID NO: 91335 - RNA, 23 nt, synthetic construct
  source 1..23: mol_type = other RNA
tcgggctgtaggtgcggccgccg

SEQ ID NO: 91336 - RNA, 23 nt, synthetic construct
  source 1..23: mol_type = other RNA
tgggcagtggccgtagttgcagc

SEQ ID NO: 91337 - RNA, 23 nt, synthetic construct
  source 1..23: mol_type = other RNA
tgtggtggtaagcactgtggagg

SEQ ID NO: 91338 - RNA, 23 nt, synthetic construct
  source 1..23: mol_type = other RNA
tggccgtggtggtaagcactgtg

SEQ ID NO: 91339 - RNA, 23 nt, synthetic construct
  source 1..23: mol_type = other RNA
tgtagtcagcactttggtagtgt

SEQ ID NO: 91340 - RNA, 23 nt, synthetic construct
  source 1..23: mol_type = other RNA
tgttgtggtagtcagcactttgg

SEQ ID NO: 91341 - RNA, 23 nt, synthetic construct
  source 1..23: mol_type = other RNA
tggttgtggtagtcagcactttg

SEQ ID NO: 91342 - RNA, 23 nt, synthetic construct
  source 1..23: mol_type = other RNA
tgggcagtggccgtagttgcagc

SEQ ID NO: 91343 - RNA, 23 nt, synthetic construct
  source 1..23: mol_type = other RNA
tgtggtggtaagcactgtggagg

SEQ ID NO: 91344 - RNA, 23 nt, synthetic construct
  source 1..23: mol_type = other RNA
tgggcagtggccgtagttgcagc

SEQ ID NO: 91345 - RNA, 23 nt, synthetic construct
  source 1..23: mol_type = other RNA
tgtggtggtaagcactgtggagg

SEQ ID NO: 91346 - RNA, 23 nt, synthetic construct
  source 1..23: mol_type = other RNA
tggccgtggtggtaagcactgtg

SEQ ID NO: 91347 - RNA, 23 nt, synthetic construct
  source 1..23: mol_type = other RNA
tgggcagtggccgtagttgcagc

SEQ ID NO: 91348 - RNA, 23 nt, synthetic construct
  source 1..23: mol_type = other RNA
tacacggtgcagttgtccacatg

SEQ ID NO: 91349 - RNA, 23 nt, synthetic construct
  source 1..23: mol_type = other RNA
tgtacacggtgcagttgtccaca

SEQ ID NO: 91350 - RNA, 23 nt, synthetic construct
  source 1..23: mol_type = other RNA
tgtgggacagcagtcgccctcct

SEQ ID NO: 91351 - RNA, 23 nt, synthetic construct
  source 1..23: mol_type = other RNA
tgctctggcagttctccgctgtg

SEQ ID NO: 91352 - RNA, 23 nt, synthetic construct
  source 1..23: mol_type = other RNA
tgaaacgctgcaggtgacgtcgg

SEQ ID NO: 91353 - RNA, 23 nt, synthetic construct
  source 1..23: mol_type = other RNA
ttggctcgggtccgacactttga

SEQ ID NO: 91354 - RNA, 23 nt, synthetic construct
  source 1..23: mol_type = other RNA
taaactccagtgcgtcccccacc

SEQ ID NO: 91355 - RNA, 23 nt, synthetic construct
  source 1..23: mol_type = other RNA
tcaaactccagtgcgtcccccac

SEQ ID NO: 91356 - RNA, 23 nt, synthetic construct
  source 1..23: mol_type = other RNA
tgtggtagtcagcactttggtag

SEQ ID NO: 91357 - RNA, 23 nt, synthetic construct
  source 1..23: mol_type = other RNA
ttccgtcccgctggagacagtcg

SEQ ID NO: 91358 - RNA, 23 nt, synthetic construct
  source 1..23: mol_type = other RNA
tttccgtcccgctggagacagtc

SEQ ID NO: 91359 - RNA, 23 nt, synthetic construct
  source 1..23: mol_type = other RNA
tacaacacgggtgaccacaggcc

SEQ ID NO: 91360 - RNA, 23 nt, synthetic construct
  source 1..23: mol_type = other RNA
tcaacacgggtgaccacaggcct

SEQ ID NO: 91361 - RNA, 23 nt, synthetic construct
  source 1..23: mol_type = other RNA
ttttcggttgctgtggtctgggt

SEQ ID NO: 91362 - RNA, 23 nt, synthetic construct
  source 1..23: mol_type = other RNA
ttggccgtagttgcagcagaaca

SEQ ID NO: 91363 - RNA, 23 nt, synthetic construct
  source 1..23: mol_type = other RNA
ttggccgtagttgcagcagaaca

SEQ ID NO: 91364 - RNA, 23 nt, synthetic construct
  source 1..23: mol_type = other RNA
ttggccgtagttgcagcagaaca

SEQ ID NO: 91365 - RNA, 23 nt, synthetic construct
  source 1..23: mol_type = other RNA
ttggccgtagttgcagcagaaca

SEQ ID NO: 91366 - RNA, 23 nt, synthetic construct
  source 1..23: mol_type = other RNA
tggccgtagttgcagcagaacac

SEQ ID NO: 91367 - RNA, 23 nt, synthetic construct
  source 1..23: mol_type = other RNA
tagtggccgtagttgcagcagaa

SEQ ID NO: 91368 - RNA, 23 nt, synthetic construct
  source 1..23: mol_type = other RNA
tggccgtagttgcagcagaacac

SEQ ID NO: 91369 - RNA, 23 nt, synthetic construct
  source 1..23: mol_type = other RNA
taacgctgcaggtgacgtcggcc

SEQ ID NO: 91370 - RNA, 23 nt, synthetic construct
  source 1..23: mol_type = other RNA
tcagtggccgtagttgcagcaga

SEQ ID NO: 91371 - RNA, 23 nt, synthetic construct
  source 1..23: mol_type = other RNA
tcagtggccgtagttgcagcaga

SEQ ID NO: 91372 - RNA, 23 nt, synthetic construct
  source 1..23: mol_type = other RNA
tcagtggccgtagttgcagcaga

SEQ ID NO: 91373 - RNA, 23 nt, synthetic construct
  source 1..23: mol_type = other RNA
tcagtggccgtagttgcagcaga

SEQ ID NO: 91374 - RNA, 23 nt, synthetic construct
  source 1..23: mol_type = other RNA
tacagctctggcagttctccgct

SEQ ID NO: 91375 - RNA, 23 nt, synthetic construct
  source 1..23: mol_type = other RNA
tttcggttgctgtggtctgggtt

SEQ ID NO: 91376 - RNA, 23 nt, synthetic construct
  source 1..23: mol_type = other RNA
tactccagtgcgtcccccaccac

SEQ ID NO: 91377 - RNA, 23 nt, synthetic construct
  source 1..23: mol_type = other RNA
tagtggccgtagttgcagcagaa

SEQ ID NO: 91378 - RNA, 23 nt, synthetic construct
  source 1..23: mol_type = other RNA
taggaaacgctgcaggtgacgtc

SEQ ID NO: 91379 - RNA, 23 nt, synthetic construct
  source 1..23: mol_type = other RNA
taccgacgtcatagtagtttccg

SEQ ID NO: 91380 - RNA, 23 nt, synthetic construct
  source 1..23: mol_type = other RNA
tgccctgatcttatcgtaggact

SEQ ID NO: 91381 - RNA, 23 nt, synthetic construct
  source 1..23: mol_type = other RNA
tggccgtagttgcagcagaacac

SEQ ID NO: 91382 - RNA, 23 nt, synthetic construct
  source 1..23: mol_type = other RNA
tagtggccgtagttgcagcagaa

SEQ ID NO: 91383 - RNA, 23 nt, synthetic construct
  source 1..23: mol_type = other RNA
tccaccggttgcacctcgccagt

SEQ ID NO: 91384 - RNA, 23 nt, synthetic construct
  source 1..23: mol_type = other RNA
ttggtcgtgttgatgcggacttg

SEQ ID NO: 91385 - RNA, 23 nt, synthetic construct
  source 1..23: mol_type = other RNA
tggccgtagttgcagcagaacac

SEQ ID NO: 91386 - RNA, 23 nt, synthetic construct
  source 1..23: mol_type = other RNA
tagtggccgtagttgcagcagaa

SEQ ID NO: 91387 - RNA, 23 nt, synthetic construct
  source 1..23: mol_type = other RNA
tgaacccgcagctcgtagtcgtg

SEQ ID NO: 91388 - RNA, 23 nt, synthetic construct
  source 1..23: mol_type = other RNA
tcaccaaccccgtagaaggtgcc

SEQ ID NO: 91389 - RNA, 23 nt, synthetic construct
  source 1..23: mol_type = other RNA
tagagaacccgcagctcgtagtc

SEQ ID NO: 91390 - RNA, 23 nt, synthetic construct
  source 1..23: mol_type = other RNA
tgcaggacgacacggttgtcacc

SEQ ID NO: 91391 - RNA, 23 nt, synthetic construct
  source 1..23: mol_type = other RNA
taactccagtgcgtcccccacca

SEQ ID NO: 91392 - RNA, 23 nt, synthetic construct
  source 1..23: mol_type = other RNA
taccgctccccgggaaatttagg

SEQ ID NO: 91393 - RNA, 23 nt, synthetic construct
  source 1..23: mol_type = other RNA
tacgtcatagtagtttccgtcct

SEQ ID NO: 91394 - RNA, 23 nt, synthetic construct
  source 1..23: mol_type = other RNA
tagtggttgcggtcgtagtggct

SEQ ID NO: 91395 - RNA, 23 nt, synthetic construct
  source 1..23: mol_type = other RNA
tggaacaaagctcacgcgccggg

SEQ ID NO: 91396 - RNA, 23 nt, synthetic construct
  source 1..23: mol_type = other RNA
tgacgacacggttgtcacccacg

SEQ ID NO: 91397 - RNA, 23 nt, synthetic construct
  source 1..23: mol_type = other RNA
tgagtggcgccctcccgaaaggg

SEQ ID NO: 91398 - RNA, 23 nt, synthetic construct
  source 1..23: mol_type = other RNA
tacccttgcaccgacgtcatagt

SEQ ID NO: 91399 - RNA, 23 nt, synthetic construct
  source 1..23: mol_type = other RNA
tgtggacagctcgctcgtgagtg

SEQ ID NO: 91400 - RNA, 23 nt, synthetic construct
  source 1..23: mol_type = other RNA
tgtagcgtatcttgtagggtggg

SEQ ID NO: 91401 - RNA, 23 nt, synthetic construct
  source 1..23: mol_type = other RNA
tcacggttacgaagccgggacgg

SEQ ID NO: 91402 - RNA, 23 nt, synthetic construct
  source 1..23: mol_type = other RNA
tgcggccctgatcttatcgtagg

SEQ ID NO: 91403 - RNA, 23 nt, synthetic construct
  source 1..23: mol_type = other RNA
taaagctcacgcgccgggtgggc

SEQ ID NO: 91404 - RNA, 23 nt, synthetic construct
  source 1..23: mol_type = other RNA
tcagtggttgcggtcgtagtggc

SEQ ID NO: 91405 - RNA, 23 nt, synthetic construct
  source 1..23: mol_type = other RNA
tccccgggctactcgtaggctgc

SEQ ID NO: 91406 - RNA, 23 nt, synthetic construct
  source 1..23: mol_type = other RNA
tagctcgtagtcgtgacagagcg

SEQ ID NO: 91407 - RNA, 23 nt, synthetic construct
  source 1..23: mol_type = other RNA
tgccgccttgcctgtcgcagctt

SEQ ID NO: 91408 - RNA, 23 nt, synthetic construct
  source 1..23: mol_type = other RNA
tatccccatgtagcgtatcttgt

SEQ ID NO: 91409 - RNA, 23 nt, synthetic construct
  source 1..23: mol_type = other RNA
tccttgcaccgacgtcatagtag

SEQ ID NO: 91410 - RNA, 23 nt, synthetic construct
  source 1..23: mol_type = other RNA
tcccgggctactcgtaggctgcg

SEQ ID NO: 91411 - RNA, 23 nt, synthetic construct
  source 1..23: mol_type = other RNA
tgccccgggctactcgtaggctg

SEQ ID NO: 91412 - RNA, 23 nt, synthetic construct
  source 1..23: mol_type = other RNA
tcaaagctcacgcgccgggtggg

SEQ ID NO: 91413 - RNA, 23 nt, synthetic construct
  source 1..23: mol_type = other RNA
tgatccagtggttgcggtcgtag

SEQ ID NO: 91414 - RNA, 23 nt, synthetic construct
  source 1..23: mol_type = other RNA
tgagtacttggacgctccggggc

SEQ ID NO: 91415 - RNA, 23 nt, synthetic construct
  source 1..23: mol_type = other RNA
tctcactcaggccgcggcaagtg

SEQ ID NO: 91416 - RNA, 23 nt, synthetic construct
  source 1..23: mol_type = other RNA
tcctggccgttgcgacctcagcc

SEQ ID NO: 91417 - RNA, 23 nt, synthetic construct
  source 1..23: mol_type = other RNA
tggatccagtggttgcggtcgta

SEQ ID NO: 91418 - RNA, 23 nt, synthetic construct
  source 1..23: mol_type = other RNA
tcatgaacacacggcgccctcgt

SEQ ID NO: 91419 - RNA, 23 nt, synthetic construct
  source 1..23: mol_type = other RNA
tgcagtcgccacccgagtcgcag

SEQ ID NO: 91420 - RNA, 23 nt, synthetic construct
  source 1..23: mol_type = other RNA
tccagtggttgcggtcgtagtgg

SEQ ID NO: 91421 - RNA, 23 nt, synthetic construct
  source 1..23: mol_type = other RNA
tcacgccgccgtccgcttggacc

SEQ ID NO: 91422 - RNA, 23 nt, synthetic construct
  source 1..23: mol_type = other RNA
tttgaggaacacgccgccgtccg

SEQ ID NO: 91423 - RNA, 23 nt, synthetic construct
  source 1..23: mol_type = other RNA
tacatgaacacacggcgccctcg

SEQ ID NO: 91424 - RNA, 23 nt, synthetic construct
  source 1..23: mol_type = other RNA
tcttggaggatcagctcgtagct

SEQ ID NO: 91425 - RNA, 23 nt, synthetic construct
  source 1..23: mol_type = other RNA
tgctcgctcgtgagtgttggcgc

SEQ ID NO: 91426 - RNA, 23 nt, synthetic construct
  source 1..23: mol_type = other RNA
tgggggtcaccgtggaacctctg

SEQ ID NO: 91427 - RNA, 23 nt, synthetic construct
  source 1..23: mol_type = other RNA
tggccgtgcagtagtggttgtcc

SEQ ID NO: 91428 - RNA, 23 nt, synthetic construct
  source 1..23: mol_type = other RNA
tcagtgaggacgatatccatgga

SEQ ID NO: 91429 - RNA, 23 nt, synthetic construct
  source 1..23: mol_type = other RNA
tgctgagtacttggacgctccgg

SEQ ID NO: 91430 - RNA, 23 nt, synthetic construct
  source 1..23: mol_type = other RNA
tttggcgtatttgggatccagct

SEQ ID NO: 91431 - RNA, 23 nt, synthetic construct
  source 1..23: mol_type = other RNA
tcaggtcgtagagtttctcatca

SEQ ID NO: 91432 - RNA, 23 nt, synthetic construct
  source 1..23: mol_type = other RNA
tgaacacgccgccgtccgcttgg

SEQ ID NO: 91433 - RNA, 23 nt, synthetic construct
  source 1..23: mol_type = other RNA
taaacacctgcatgagtggcacc

SEQ ID NO: 91434 - RNA, 23 nt, synthetic construct
  source 1..23: mol_type = other RNA
taggcactgttgggatcggtcag

SEQ ID NO: 91435 - RNA, 23 nt, synthetic construct
  source 1..23: mol_type = other RNA
tcatccaccacgtaggcgtagcg

SEQ ID NO: 91436 - RNA, 23 nt, synthetic construct
  source 1..23: mol_type = other RNA
ttgacgtcctggtagctgtaggt

SEQ ID NO: 91437 - RNA, 23 nt, synthetic construct
  source 1..23: mol_type = other RNA
tcctcaggttttcaaacgtctca

SEQ ID NO: 91438 - RNA, 23 nt, synthetic construct
  source 1..23: mol_type = other RNA
tacatcttgaagacgccctcctg

SEQ ID NO: 91439 - RNA, 23 nt, synthetic construct
  source 1..23: mol_type = other RNA
tgcggggttgtggcacgtcccct

SEQ ID NO: 91440 - RNA, 23 nt, synthetic construct
  source 1..23: mol_type = other RNA
tcccgtggtggctgtaccaaggg

SEQ ID NO: 91441 - RNA, 23 nt, synthetic construct
  source 1..23: mol_type = other RNA
ttctgtgataggcgggtccaggt

SEQ ID NO: 91442 - RNA, 23 nt, synthetic construct
  source 1..23: mol_type = other RNA
tctccggccgcacggatgttgga

SEQ ID NO: 91443 - RNA, 23 nt, synthetic construct
  source 1..23: mol_type = other RNA
ttctgtgataggcgggtccaggt

SEQ ID NO: 91444 - RNA, 23 nt, synthetic construct
  source 1..23: mol_type = other RNA
tctccggccgcacggatgttgga

SEQ ID NO: 91445 - RNA, 23 nt, synthetic construct
  source 1..23: mol_type = other RNA
ttggttgcggtcgtagtggctgc

SEQ ID NO: 91446 - RNA, 23 nt, synthetic construct
  source 1..23: mol_type = other RNA
ttctgtgataggcgggtccaggc

SEQ ID NO: 91447 - RNA, 23 nt, synthetic construct
  source 1..23: mol_type = other RNA
tctccggccgcacggatgttgga

SEQ ID NO: 91448 - RNA, 23 nt, synthetic construct
  source 1..23: mol_type = other RNA
ttctgtgataggcgggtccaggt

SEQ ID NO: 91449 - RNA, 23 nt, synthetic construct
  source 1..23: mol_type = other RNA
tacactggaggcgtgcgtgccgt

SEQ ID NO: 91450 - RNA, 23 nt, synthetic construct
  source 1..23: mol_type = other RNA
tctccggccgcacggatgttgga

SEQ ID NO: 91451 - RNA, 23 nt, synthetic construct
  source 1..23: mol_type = other RNA
ttctgtgataggcgggtccaggt

SEQ ID NO: 91452 - RNA, 23 nt, synthetic construct
  source 1..23: mol_type = other RNA
tggaattggtggcccttgtcatg

SEQ ID NO: 91453 - RNA, 23 nt, synthetic construct
  source 1..23: mol_type = other RNA
tcggtggccgtggaaccggtggg

SEQ ID NO: 91454 - RNA, 23 nt, synthetic construct
  source 1..23: mol_type = other RNA
ttgattgcacactgcgtagaaat

SEQ ID NO: 91455 - RNA, 23 nt, synthetic construct
  source 1..23: mol_type = other RNA
tgattcccaaagcgtgcatggat

SEQ ID NO: 91456 - RNA, 23 nt, synthetic construct
  source 1..23: mol_type = other RNA
tcagaggccgtgcagtagtggtt

SEQ ID NO: 91457 - RNA, 23 nt, synthetic construct
  source 1..23: mol_type = other RNA
tcttgcactgcaccgacactgaa

SEQ ID NO: 91458 - RNA, 23 nt, synthetic construct
  source 1..23: mol_type = other RNA
tgcttgcactgcaccgacactga

SEQ ID NO: 91459 - RNA, 23 nt, synthetic construct
  source 1..23: mol_type = other RNA
tgatggtcgtgttgatgcggact

SEQ ID NO: 91460 - RNA, 23 nt, synthetic construct
  source 1..23: mol_type = other RNA
ttcggcgtagctggacgttgaag

SEQ ID NO: 91461 - RNA, 23 nt, synthetic construct
  source 1..23: mol_type = other RNA
tacggtgccgtgagcgtagcagg

SEQ ID NO: 91462 - RNA, 23 nt, synthetic construct
  source 1..23: mol_type = other RNA
taactcgttgaaggccgggaggc

SEQ ID NO: 91463 - RNA, 23 nt, synthetic construct
  source 1..23: mol_type = other RNA
tgggccaagatgtactcgcagct

SEQ ID NO: 91464 - RNA, 23 nt, synthetic construct
  source 1..23: mol_type = other RNA
tggcggtggccgtggaaccggtg

SEQ ID NO: 91465 - RNA, 23 nt, synthetic construct
  source 1..23: mol_type = other RNA
taggctgtatggggccgcatggc

SEQ ID NO: 91466 - RNA, 23 nt, synthetic construct
  source 1..23: mol_type = other RNA
ttgggtgtaaagctggtagctgt

SEQ ID NO: 91467 - RNA, 23 nt, synthetic construct
  source 1..23: mol_type = other RNA
ttgggtgtaaagctggtagctgt

SEQ ID NO: 91468 - RNA, 23 nt, synthetic construct
  source 1..23: mol_type = other RNA
tggtgccgtgagcgtagcagggg

SEQ ID NO: 91469 - RNA, 23 nt, synthetic construct
  source 1..23: mol_type = other RNA
tagcttcccacccgtacatgaac

SEQ ID NO: 91470 - RNA, 23 nt, synthetic construct
  source 1..23: mol_type = other RNA
tgggatgggtgtaacgctggtag

SEQ ID NO: 91471 - RNA, 23 nt, synthetic construct
  source 1..23: mol_type = other RNA
tgggatgggtgtaacgctggtag

SEQ ID NO: 91472 - RNA, 23 nt, synthetic construct
  source 1..23: mol_type = other RNA
taggccgggaggccgttgaagtc

SEQ ID NO: 91473 - RNA, 23 nt, synthetic construct
  source 1..23: mol_type = other RNA
tggggacagggatcgcccgtgtg

SEQ ID NO: 91474 - RNA, 23 nt, synthetic construct
  source 1..23: mol_type = other RNA
tggggacagggatcgcccgtgtg

SEQ ID NO: 91475 - RNA, 23 nt, synthetic construct
  source 1..23: mol_type = other RNA
tacacataggcccgcacatgctt

SEQ ID NO: 91476 - RNA, 23 nt, synthetic construct
  source 1..23: mol_type = other RNA
tgcctggcgttgtgggcatagaa

SEQ ID NO: 91477 - RNA, 23 nt, synthetic construct
  source 1..23: mol_type = other RNA
tagtaggtgtcaaagtccccgcc

SEQ ID NO: 91478 - RNA, 23 nt, synthetic construct
  source 1..23: mol_type = other RNA
tagtaggtgtcaaagtccccgcc

SEQ ID NO: 91479 - RNA, 23 nt, synthetic construct
  source 1..23: mol_type = other RNA
tagtaggtgtcaaagtccccgcc

SEQ ID NO: 91480 - RNA, 23 nt, synthetic construct
  source 1..23: mol_type = other RNA
tagtaggtgtcaaagtccccgcc

SEQ ID NO: 91481 - RNA, 23 nt, synthetic construct
  source 1..23: mol_type = other RNA
tagaactcgttgaaggccgggag

SEQ ID NO: 91482 - RNA, 23 nt, synthetic construct
  source 1..23: mol_type = other RNA
tagggggtgactcggtggtcctg

SEQ ID NO: 91483 - RNA, 23 nt, synthetic construct
  source 1..23: mol_type = other RNA
tagggggtgactcggtggtcctg

SEQ ID NO: 91484 - RNA, 23 nt, synthetic construct
  source 1..23: mol_type = other RNA
tagggggtgactcggtggtcctg

SEQ ID NO: 91485 - RNA, 23 nt, synthetic construct
  source 1..23: mol_type = other RNA
tcccgcagctcgtagtcgtgaca

SEQ ID NO: 91486 - RNA, 23 nt, synthetic construct
  source 1..23: mol_type = other RNA
tagggtggtcttttcggttgctg

SEQ ID NO: 91487 - RNA, 23 nt, synthetic construct
  source 1..23: mol_type = other RNA
tggacagggatcgcccgtgtgtg

SEQ ID NO: 91488 - RNA, 23 nt, synthetic construct
  source 1..23: mol_type = other RNA
tggacagggatcgcccgtgtgtg

SEQ ID NO: 91489 - RNA, 23 nt, synthetic construct
  source 1..23: mol_type = other RNA
ttggcggcagtggttccgtcccg

SEQ ID NO: 91490 - RNA, 23 nt, synthetic construct
  source 1..23: mol_type = other RNA
tctggcggcagtggttccgtccc

SEQ ID NO: 91491 - RNA, 23 nt, synthetic construct
  source 1..23: mol_type = other RNA
ttgggcaggtgaggtcgcacagg

SEQ ID NO: 91492 - RNA, 23 nt, synthetic construct
  source 1..23: mol_type = other RNA
tccagtcgctgagctgtacgccc

SEQ ID NO: 91493 - RNA, 23 nt, synthetic construct
  source 1..23: mol_type = other RNA
tcgtacatgaacacacggcgccc

SEQ ID NO: 91494 - RNA, 23 nt, synthetic construct
  source 1..23: mol_type = other RNA
tgtttccgtccttgtcgtagcag

SEQ ID NO: 91495 - RNA, 23 nt, synthetic construct
  source 1..23: mol_type = other RNA
tcgcacaccgtctcggggcagca

SEQ ID NO: 91496 - RNA, 23 nt, synthetic construct
  source 1..23: mol_type = other RNA
tggccggtttcacccacggggtg

SEQ ID NO: 91497 - RNA, 23 nt, synthetic construct
  source 1..23: mol_type = other RNA
tacgttgaagtcctcgtaggcgg

SEQ ID NO: 91498 - RNA, 23 nt, synthetic construct
  source 1..23: mol_type = other RNA
tgacgttgaagtcctcgtaggcg

SEQ ID NO: 91499 - RNA, 23 nt, synthetic construct
  source 1..23: mol_type = other RNA
tcgttgaagtcctcgtaggcggc

SEQ ID NO: 91500 - RNA, 23 nt, synthetic construct
  source 1..23: mol_type = other RNA
tcacactgcgtagaaatggcagc

SEQ ID NO: 91501 - RNA, 23 nt, synthetic construct
  source 1..23: mol_type = other RNA
tcactgcaccgacactgaaccct

SEQ ID NO: 91502 - RNA, 23 nt, synthetic construct
  source 1..23: mol_type = other RNA
tggccgccttgcctgtcgcagct

SEQ ID NO: 91503 - RNA, 23 nt, synthetic construct
  source 1..23: mol_type = other RNA
tagcgtatcttgtagggtgggtc

SEQ ID NO: 91504 - RNA, 23 nt, synthetic construct
  source 1..23: mol_type = other RNA
tacccatcgggtcccacgcaggg

SEQ ID NO: 91505 - RNA, 23 nt, synthetic construct
  source 1..23: mol_type = other RNA
tacacggttgtcacccacgcacc

SEQ ID NO: 91506 - RNA, 23 nt, synthetic construct
  source 1..23: mol_type = other RNA
ttgcgtggcactccgcaaaggcc

SEQ ID NO: 91507 - RNA, 23 nt, synthetic construct
  source 1..23: mol_type = other RNA
taggcccgcacatgcttagtttg

SEQ ID NO: 91508 - RNA, 23 nt, synthetic construct
  source 1..23: mol_type = other RNA
tcgggcgagaaaaactgtccaaa

SEQ ID NO: 91509 - RNA, 23 nt, synthetic construct
  source 1..23: mol_type = other RNA
tcccgggcgagaaaaactgtcca

SEQ ID NO: 91510 - RNA, 23 nt, synthetic construct
  source 1..23: mol_type = other RNA
tcaccggttgcacctcgccagtc

SEQ ID NO: 91511 - RNA, 23 nt, synthetic construct
  source 1..23: mol_type = other RNA
tgtcgtgttgatgcggacttgac

SEQ ID NO: 91512 - RNA, 23 nt, synthetic construct
  source 1..23: mol_type = other RNA
tgcccgcacatgcttagtttgtt

SEQ ID NO: 91513 - RNA, 23 nt, synthetic construct
  source 1..23: mol_type = other RNA
ttagatgacgtcctggtagctgt

SEQ ID NO: 91514 - RNA, 23 nt, synthetic construct
  source 1..23: mol_type = other RNA
tggtcggtcttattgtagatgac

SEQ ID NO: 91515 - RNA, 23 nt, synthetic construct
  source 1..23: mol_type = other RNA
tacgggatggccgtggatccagt

SEQ ID NO: 91516 - RNA, 23 nt, synthetic construct
  source 1..23: mol_type = other RNA
ttgaccgtcacggggcctgagct

SEQ ID NO: 91517 - RNA, 23 nt, synthetic construct
  source 1..23: mol_type = other RNA
tacgccgccgtccgcttggaccc

SEQ ID NO: 91518 - RNA, 23 nt, synthetic construct
  source 1..23: mol_type = other RNA
tacgtattcgcagcagagaaccc

SEQ ID NO: 91519 - RNA, 23 nt, synthetic construct
  source 1..23: mol_type = other RNA
tgccgttgcgacctcagccctga

SEQ ID NO: 91520 - RNA, 23 nt, synthetic construct
  source 1..23: mol_type = other RNA
ttggcgatcaagcaggcgccaag

SEQ ID NO: 91521 - RNA, 23 nt, synthetic construct
  source 1..23: mol_type = other RNA
tcgtgttggaagggtggatgtgg

SEQ ID NO: 91522 - RNA, 23 nt, synthetic construct
  source 1..23: mol_type = other RNA
tgtgtaacgctggtagctgtggg

SEQ ID NO: 91523 - RNA, 23 nt, synthetic construct
  source 1..23: mol_type = other RNA
ttgatcgtagtggccgtggtggt

SEQ ID NO: 91524 - RNA, 23 nt, synthetic construct
  source 1..23: mol_type = other RNA
ttgatcgtagtggccgtggtggt

SEQ ID NO: 91525 - RNA, 23 nt, synthetic construct
  source 1..23: mol_type = other RNA
ttgatcgtagtggccgtggtggt

SEQ ID NO: 91526 - RNA, 23 nt, synthetic construct
  source 1..23: mol_type = other RNA
taggcgtgcgtgccgtccctggg

SEQ ID NO: 91527 - RNA, 23 nt, synthetic construct
  source 1..23: mol_type = other RNA
ttgatcgtagtggccgtggtgat

SEQ ID NO: 91528 - RNA, 23 nt, synthetic construct
  source 1..23: mol_type = other RNA
tgtgtaacgctggtagctgtgga

SEQ ID NO: 91529 - RNA, 23 nt, synthetic construct
  source 1..23: mol_type = other RNA
ttgatcgtagtggccgtggtggt

SEQ ID NO: 91530 - RNA, 23 nt, synthetic construct
  source 1..23: mol_type = other RNA
tagtcggatgaacacgctggtct

SEQ ID NO: 91531 - RNA, 23 nt, synthetic construct
  source 1..23: mol_type = other RNA
tccccgcatgcggtcacagtcca

SEQ ID NO: 91532 - RNA, 23 nt, synthetic construct
  source 1..23: mol_type = other RNA
tgtcgtcactgcagcagaggacc

SEQ ID NO: 91533 - RNA, 23 nt, synthetic construct
  source 1..23: mol_type = other RNA
tgaatagtgggagccgccccaca

SEQ ID NO: 91534 - RNA, 23 nt, synthetic construct
  source 1..23: mol_type = other RNA
taagcgtgcatggatctctctca

SEQ ID NO: 91535 - RNA, 23 nt, synthetic construct
  source 1..23: mol_type = other RNA
tacagggcacgtattcgcagcag

SEQ ID NO: 91536 - RNA, 23 nt, synthetic construct
  source 1..23: mol_type = other RNA
tcgtggcactccgcaaaggccgg

SEQ ID NO: 91537 - RNA, 23 nt, synthetic construct
  source 1..23: mol_type = other RNA
tgctatagtgctcggctctgtga

SEQ ID NO: 91538 - RNA, 23 nt, synthetic construct
  source 1..23: mol_type = other RNA
tcaccgccttaaaggtcccctct

SEQ ID NO: 91539 - RNA, 23 nt, synthetic construct
  source 1..23: mol_type = other RNA
tggctgtgatcgtagtggccgtg

SEQ ID NO: 91540 - RNA, 23 nt, synthetic construct
  source 1..23: mol_type = other RNA
tcgtgaagtcgtcagcctggttc

SEQ ID NO: 91541 - RNA, 23 nt, synthetic construct
  source 1..23: mol_type = other RNA
tcgatcgccatcaaaggtgatga

SEQ ID NO: 91542 - RNA, 23 nt, synthetic construct
  source 1..23: mol_type = other RNA
tctcgccaccgccttaaaggtcc

SEQ ID NO: 91543 - RNA, 23 nt, synthetic construct
  source 1..23: mol_type = other RNA
ttcgaccggatgctcggggtcac

SEQ ID NO: 91544 - RNA, 23 nt, synthetic construct
  source 1..23: mol_type = other RNA
ttggtcgtcactgcagcagagga

SEQ ID NO: 91545 - RNA, 23 nt, synthetic construct
  source 1..23: mol_type = other RNA
tttgtggcacgtcccctgcagtg

SEQ ID NO: 91546 - RNA, 23 nt, synthetic construct
  source 1..23: mol_type = other RNA
tcggggttgtggcacgtcccctg

SEQ ID NO: 91547 - RNA, 23 nt, synthetic construct
  source 1..23: mol_type = other RNA
ttgtgataggcgggtccaggtgg

SEQ ID NO: 91548 - RNA, 23 nt, synthetic construct
  source 1..23: mol_type = other RNA
tgatcgcccgtgtgtggtggcca

SEQ ID NO: 91549 - RNA, 23 nt, synthetic construct
  source 1..23: mol_type = other RNA
tgatccggtgggcaccgtcacgg

SEQ ID NO: 91550 - RNA, 23 nt, synthetic construct
  source 1..23: mol_type = other RNA
ttgtgataggcgggtccaggtgg

SEQ ID NO: 91551 - RNA, 23 nt, synthetic construct
  source 1..23: mol_type = other RNA
tgatcgcccgtgtgtggtggccg

SEQ ID NO: 91552 - RNA, 23 nt, synthetic construct
  source 1..23: mol_type = other RNA
tttattggggccgatgtggggct

SEQ ID NO: 91553 - RNA, 23 nt, synthetic construct
  source 1..23: mol_type = other RNA
tgatccggtgggcaccgtcacgg

SEQ ID NO: 91554 - RNA, 23 nt, synthetic construct
  source 1..23: mol_type = other RNA
ttgtgataggcgggtccaggcgg

SEQ ID NO: 91555 - RNA, 23 nt, synthetic construct
  source 1..23: mol_type = other RNA
taccgcccgtgtgtggtggccgt

SEQ ID NO: 91556 - RNA, 23 nt, synthetic construct
  source 1..23: mol_type = other RNA
tgaacacgctggtcttccggtcc

SEQ ID NO: 91557 - RNA, 23 nt, synthetic construct
  source 1..23: mol_type = other RNA
tccccggaaggtgtaagaggtgc

SEQ ID NO: 91558 - RNA, 23 nt, synthetic construct
  source 1..23: mol_type = other RNA
tgcggtctggacgcactccccac

SEQ ID NO: 91559 - RNA, 23 nt, synthetic construct
  source 1..23: mol_type = other RNA
tggcccgcacatgcttagtttgt

SEQ ID NO: 91560 - RNA, 23 nt, synthetic construct
  source 1..23: mol_type = other RNA
ttgcggcaccacgagcatggccg

SEQ ID NO: 91561 - RNA, 23 nt, synthetic construct
  source 1..23: mol_type = other RNA
tgagttgaggaacacgccgccgt

SEQ ID NO: 91562 - RNA, 23 nt, synthetic construct
  source 1..23: mol_type = other RNA
ttgccgtgagcgtagcaggggca

SEQ ID NO: 91563 - RNA, 23 nt, synthetic construct
  source 1..23: mol_type = other RNA
tgtcgtgcaccacctctccagga

SEQ ID NO: 91564 - RNA, 23 nt, synthetic construct
  source 1..23: mol_type = other RNA
tgcagtcggatgaacacgctggt

SEQ ID NO: 91565 - RNA, 23 nt, synthetic construct
  source 1..23: mol_type = other RNA
tttgcttccgcagatggcgatca

SEQ ID NO: 91566 - RNA, 23 nt, synthetic construct
  source 1..23: mol_type = other RNA
tcgcggacacacacggtggagac

SEQ ID NO: 91567 - RNA, 23 nt, synthetic construct
  source 1..23: mol_type = other RNA
tagcggcatgtcgggaagctgcg

SEQ ID NO: 91568 - RNA, 23 nt, synthetic construct
  source 1..23: mol_type = other RNA
tcaccgtggttatgggggccgat

SEQ ID NO: 91569 - RNA, 23 nt, synthetic construct
  source 1..23: mol_type = other RNA
tgggataggtgttgtccctggag

SEQ ID NO: 91570 - RNA, 23 nt, synthetic construct
  source 1..23: mol_type = other RNA
tcaccgtggttatgggggccgat

SEQ ID NO: 91571 - RNA, 23 nt, synthetic construct
  source 1..23: mol_type = other RNA
tgggataggtgttgtccctggag

SEQ ID NO: 91572 - RNA, 23 nt, synthetic construct
  source 1..23: mol_type = other RNA
tcaccgtggttatgggggccgat

SEQ ID NO: 91573 - RNA, 23 nt, synthetic construct
  source 1..23: mol_type = other RNA
tccgacactgaaccctcgtcaca

SEQ ID NO: 91574 - RNA, 23 nt, synthetic construct
  source 1..23: mol_type = other RNA
tgatccggtgggcaccgtcacgg

SEQ ID NO: 91575 - RNA, 23 nt, synthetic construct
  source 1..23: mol_type = other RNA
ttgtgataggcgggtccaggtgg

SEQ ID NO: 91576 - RNA, 23 nt, synthetic construct
  source 1..23: mol_type = other RNA
tgatcgcccgtgtgtggtggccg

SEQ ID NO: 91577 - RNA, 23 nt, synthetic construct
  source 1..23: mol_type = other RNA
tgatccggtgggcaccgtcacgg

SEQ ID NO: 91578 - RNA, 23 nt, synthetic construct
  source 1..23: mol_type = other RNA
tggtttcacccacggggtgggca

SEQ ID NO: 91579 - RNA, 23 nt, synthetic construct
  source 1..23: mol_type = other RNA
ttagtagtttccgtccttgtcgt

SEQ ID NO: 91580 - RNA, 23 nt, synthetic construct
  source 1..23: mol_type = other RNA
tccggccgcacggatgttggagt

SEQ ID NO: 91581 - RNA, 23 nt, synthetic construct
  source 1..23: mol_type = other RNA
tccggccgcacggatgttggagt

SEQ ID NO: 91582 - RNA, 23 nt, synthetic construct
  source 1..23: mol_type = other RNA
tccggccgcacggatgttggagt

SEQ ID NO: 91583 - RNA, 23 nt, synthetic construct
  source 1..23: mol_type = other RNA
tccggccgcacggatgttggagt

SEQ ID NO: 91584 - RNA, 23 nt, synthetic construct
  source 1..23: mol_type = other RNA
ttgtgataggcgggtccaggtgg

SEQ ID NO: 91585 - RNA, 23 nt, synthetic construct
  source 1..23: mol_type = other RNA
tccgtgatcgtagtggccgtggt

SEQ ID NO: 91586 - RNA, 23 nt, synthetic construct
  source 1..23: mol_type = other RNA
tccgtgatcgtagtggccgtggt

SEQ ID NO: 91587 - RNA, 23 nt, synthetic construct
  source 1..23: mol_type = other RNA
tccgtgatcgtagtggccgtggt

SEQ ID NO: 91588 - RNA, 23 nt, synthetic construct
  source 1..23: mol_type = other RNA
tccgtgatcgtagtggccgtggt

SEQ ID NO: 91589 - RNA, 23 nt, synthetic construct
  source 1..23: mol_type = other RNA
tctctcgccaccgccttaaaggt

SEQ ID NO: 91590 - RNA, 23 nt, synthetic construct
  source 1..23: mol_type = other RNA
tgccgcatggcttgtacactttg

SEQ ID NO: 91591 - RNA, 23 nt, synthetic construct
  source 1..23: mol_type = other RNA
tgccgggacggttgcacggcggg

SEQ ID NO: 91592 - RNA, 23 nt, synthetic construct
  source 1..23: mol_type = other RNA
tagccgggacggttgcacggcgg

SEQ ID NO: 91593 - RNA, 23 nt, synthetic construct
  source 1..23: mol_type = other RNA
tggacagctcgctcgtgagtgtt

SEQ ID NO: 91594 - RNA, 23 nt, synthetic construct
  source 1..23: mol_type = other RNA
tatccagtggttgcggtcgtagt

SEQ ID NO: 91595 - RNA, 23 nt, synthetic construct
  source 1..23: mol_type = other RNA
tccgtggttgtggtagtcggcac

SEQ ID NO: 91596 - RNA, 23 nt, synthetic construct
  source 1..23: mol_type = other RNA
tccgtggttgtggtagtcggcac

SEQ ID NO: 91597 - RNA, 23 nt, synthetic construct
  source 1..23: mol_type = other RNA
tactgtgaagcccgtggttgtgg

SEQ ID NO: 91598 - RNA, 23 nt, synthetic construct
  source 1..23: mol_type = other RNA
tccgtggttgtggtagtcggcac

SEQ ID NO: 91599 - RNA, 23 nt, synthetic construct
  source 1..23: mol_type = other RNA
tcctctcgccaccgccttaaagg

SEQ ID NO: 91600 - RNA, 23 nt, synthetic construct
  source 1..23: mol_type = other RNA
ttggggggataggtgttgtccct

SEQ ID NO: 91601 - RNA, 23 nt, synthetic construct
  source 1..23: mol_type = other RNA
ttggggggataggtgttgtccct

SEQ ID NO: 91602 - RNA, 23 nt, synthetic construct
  source 1..23: mol_type = other RNA
tgaactcgttgaaggccgggagg

SEQ ID NO: 91603 - RNA, 23 nt, synthetic construct
  source 1..23: mol_type = other RNA
tacacgccgccgtccgcttggac

SEQ ID NO: 91604 - RNA, 23 nt, synthetic construct
  source 1..23: mol_type = other RNA
tgatggtgccgttgcttccgcag

SEQ ID NO: 91605 - RNA, 23 nt, synthetic construct
  source 1..23: mol_type = other RNA
taggccgaagtggacgtcacagt

SEQ ID NO: 91606 - RNA, 23 nt, synthetic construct
  source 1..23: mol_type = other RNA
tggtcgaggtgcgggtcttgctg

SEQ ID NO: 91607 - RNA, 23 nt, synthetic construct
  source 1..23: mol_type = other RNA
tggtcgaggtgcgggtcttgctg

SEQ ID NO: 91608 - RNA, 23 nt, synthetic construct
  source 1..23: mol_type = other RNA
tggtcgaggtgcgggtcttgctg

SEQ ID NO: 91609 - RNA, 23 nt, synthetic construct
  source 1..23: mol_type = other RNA
tggtcgaggtgcgggtcttgctg

SEQ ID NO: 91610 - RNA, 23 nt, synthetic construct
  source 1..23: mol_type = other RNA
tgccattgtacgaacacagctga

SEQ ID NO: 91611 - RNA, 23 nt, synthetic construct
  source 1..23: mol_type = other RNA
tgccatagccccccggagcaggt

SEQ ID NO: 91612 - RNA, 23 nt, synthetic construct
  source 1..23: mol_type = other RNA
ttgatggcattgtcgtcgaagtt

SEQ ID NO: 91613 - RNA, 23 nt, synthetic construct
  source 1..23: mol_type = other RNA
tatagtagtttccgtccttgtcg

SEQ ID NO: 91614 - RNA, 23 nt, synthetic construct
  source 1..23: mol_type = other RNA
tatgggtgtaacgctggtagctg

SEQ ID NO: 91615 - RNA, 23 nt, synthetic construct
  source 1..23: mol_type = other RNA
tgtgctagaggagggtgttgcca

SEQ ID NO: 91616 - RNA, 23 nt, synthetic construct
  source 1..23: mol_type = other RNA
tggttatgggggccgatgtgggg

SEQ ID NO: 91617 - RNA, 23 nt, synthetic construct
  source 1..23: mol_type = other RNA
tgcatggggtagctgtagtccag

SEQ ID NO: 91618 - RNA, 23 nt, synthetic construct
  source 1..23: mol_type = other RNA
tggtgtcaaagtccccgccagag

SEQ ID NO: 91619 - RNA, 23 nt, synthetic construct
  source 1..23: mol_type = other RNA
tgtgctagaggagggtgttgcca

SEQ ID NO: 91620 - RNA, 23 nt, synthetic construct
  source 1..23: mol_type = other RNA
tgcatggggtagctgtagtccag

SEQ ID NO: 91621 - RNA, 23 nt, synthetic construct
  source 1..23: mol_type = other RNA
tggtgtcaaagtccccgccagag

SEQ ID NO: 91622 - RNA, 23 nt, synthetic construct
  source 1..23: mol_type = other RNA
ttggatccagtggttgcggtcgt

SEQ ID NO: 91623 - RNA, 23 nt, synthetic construct
  source 1..23: mol_type = other RNA
tggctgtaacgctggtagctgtg

SEQ ID NO: 91624 - RNA, 23 nt, synthetic construct
  source 1..23: mol_type = other RNA
tgtgctagaggagggtgttgcca

SEQ ID NO: 91625 - RNA, 23 nt, synthetic construct
  source 1..23: mol_type = other RNA
tggcagggaccgcccgtgtgtgg

SEQ ID NO: 91626 - RNA, 23 nt, synthetic construct
  source 1..23: mol_type = other RNA
tggttatgggggccgatgtgggg

SEQ ID NO: 91627 - RNA, 23 nt, synthetic construct
  source 1..23: mol_type = other RNA
tgcatggggtagctgtagtccag

SEQ ID NO: 91628 - RNA, 23 nt, synthetic construct
  source 1..23: mol_type = other RNA
tggtgtcaaagtccccgccagag

SEQ ID NO: 91629 - RNA, 23 nt, synthetic construct
  source 1..23: mol_type = other RNA
tgtgctagaggagggtgttgcca

SEQ ID NO: 91630 - RNA, 23 nt, synthetic construct
  source 1..23: mol_type = other RNA
tggttatgggggccgatgtgggg

SEQ ID NO: 91631 - RNA, 23 nt, synthetic construct
  source 1..23: mol_type = other RNA
tgcatggggtagctgtagtccag

SEQ ID NO: 91632 - RNA, 23 nt, synthetic construct
  source 1..23: mol_type = other RNA
tggtgtcaaagtccccgccagag

SEQ ID NO: 91633 - RNA, 23 nt, synthetic construct
  source 1..23: mol_type = other RNA
tatgggtgtaacgctggtagctg

SEQ ID NO: 91634 - RNA, 23 nt, synthetic construct
  source 1..23: mol_type = other RNA
tgtgctagaggagggtgttgcca

SEQ ID NO: 91635 - RNA, 23 nt, synthetic construct
  source 1..23: mol_type = other RNA
tccatcacggtggctatagtgct

SEQ ID NO: 91636 - RNA, 23 nt, synthetic construct
  source 1..23: mol_type = other RNA
tgcccgggggcacaaggttgtgg

SEQ ID NO: 91637 - RNA, 23 nt, synthetic construct
  source 1..23: mol_type = other RNA
taggcgttgaagaatgggcccgg

SEQ ID NO: 91638 - RNA, 23 nt, synthetic construct
  source 1..23: mol_type = other RNA
tcctcgtcacacacgcaggactg

SEQ ID NO: 91639 - RNA, 23 nt, synthetic construct
  source 1..23: mol_type = other RNA
tcccgtagaaggtgccattgtac

SEQ ID NO: 91640 - RNA, 23 nt, synthetic construct
  source 1..23: mol_type = other RNA
tagcaggacgacacggttgtcac

SEQ ID NO: 91641 - RNA, 23 nt, synthetic construct
  source 1..23: mol_type = other RNA
tctgcaccgacactgaaccctcg

SEQ ID NO: 91642 - RNA, 23 nt, synthetic construct
  source 1..23: mol_type = other RNA
tgggcagggatcgcccgtgtgtg

SEQ ID NO: 91643 - RNA, 23 nt, synthetic construct
  source 1..23: mol_type = other RNA
ttccccgggcgagaaaaactgtc

SEQ ID NO: 91644 - RNA, 23 nt, synthetic construct
  source 1..23: mol_type = other RNA
tgaaccctcgtcacacacgcagg

SEQ ID NO: 91645 - RNA, 23 nt, synthetic construct
  source 1..23: mol_type = other RNA
tgtcgagtgctgggtggtaccgg

SEQ ID NO: 91646 - RNA, 23 nt, synthetic construct
  source 1..23: mol_type = other RNA
tgtcgagtgctgggtggtaccgg

SEQ ID NO: 91647 - RNA, 23 nt, synthetic construct
  source 1..23: mol_type = other RNA
tgtcgagtgctgggtggtactgg

SEQ ID NO: 91648 - RNA, 23 nt, synthetic construct
  source 1..23: mol_type = other RNA
tgtcgagtgctgggtggtaccgg

SEQ ID NO: 91649 - RNA, 23 nt, synthetic construct
  source 1..23: mol_type = other RNA
tcagctcgctcgtgagtgttggc

SEQ ID NO: 91650 - RNA, 23 nt, synthetic construct
  source 1..23: mol_type = other RNA
tgtcggatgaacacgctggtctt

SEQ ID NO: 91651 - RNA, 23 nt, synthetic construct
  source 1..23: mol_type = other RNA
tgaagcgtgcgtgccgtccctgg

SEQ ID NO: 91652 - RNA, 23 nt, synthetic construct
  source 1..23: mol_type = other RNA
tgccgtccgcttggacccggatg

SEQ ID NO: 91653 - RNA, 23 nt, synthetic construct
  source 1..23: mol_type = other RNA
taccaccgtggttattggggccg

SEQ ID NO: 91654 - RNA, 23 nt, synthetic construct
  source 1..23: mol_type = other RNA
tcattgtgcgccgggttcagggg

SEQ ID NO: 91655 - RNA, 23 nt, synthetic construct
  source 1..23: mol_type = other RNA
tgcacgaaggaaacgctgcaggt

SEQ ID NO: 91656 - RNA, 23 nt, synthetic construct
  source 1..23: mol_type = other RNA
taaggccgggaggccgttgaagt

SEQ ID NO: 91657 - RNA, 23 nt, synthetic construct
  source 1..23: mol_type = other RNA
tcgcacaggccaccggttgcacc

SEQ ID NO: 91658 - RNA, 23 nt, synthetic construct
  source 1..23: mol_type = other RNA
tccgctccccgggaaatttagga

SEQ ID NO: 91659 - RNA, 23 nt, synthetic construct
  source 1..23: mol_type = other RNA
tgtcacccatagggtggtctttt

SEQ ID NO: 91660 - RNA, 23 nt, synthetic construct
  source 1..23: mol_type = other RNA
ttaggtgttgtccctggagttga

SEQ ID NO: 91661 - RNA, 23 nt, synthetic construct
  source 1..23: mol_type = other RNA
tggaccgcccgtgtgtggtggcc

SEQ ID NO: 91662 - RNA, 23 nt, synthetic construct
  source 1..23: mol_type = other RNA
ttaggtgttgtccctggagttga

SEQ ID NO: 91663 - RNA, 23 nt, synthetic construct
  source 1..23: mol_type = other RNA
tcggttgtcacccacgcacctgg

SEQ ID NO: 91664 - RNA, 23 nt, synthetic construct
  source 1..23: mol_type = other RNA
tcacaccgtctcggggcagcagg

SEQ ID NO: 91665 - RNA, 23 nt, synthetic construct
  source 1..23: mol_type = other RNA
tgaacgttctcagacagcagtgg

SEQ ID NO: 91666 - RNA, 23 nt, synthetic construct
  source 1..23: mol_type = other RNA
ttgcacactgcgtagaaatggca

SEQ ID NO: 91667 - RNA, 23 nt, synthetic construct
  source 1..23: mol_type = other RNA
tgacacggttgtcacccacgcac

SEQ ID NO: 91668 - RNA, 23 nt, synthetic construct
  source 1..23: mol_type = other RNA
tgtacatgaacacacggcgccct

SEQ ID NO: 91669 - RNA, 23 nt, synthetic construct
  source 1..23: mol_type = other RNA
tccgcatgcggtcacagtccacc

SEQ ID NO: 91670 - RNA, 23 nt, synthetic construct
  source 1..23: mol_type = other RNA
tataggcccgcacatgcttagtt

SEQ ID NO: 91671 - RNA, 23 nt, synthetic construct
  source 1..23: mol_type = other RNA
tgggaccgcccgtgtgtggtggc

SEQ ID NO: 91672 - RNA, 23 nt, synthetic construct
  source 1..23: mol_type = other RNA
tggatccggtgggcaccgtcacg

SEQ ID NO: 91673 - RNA, 23 nt, synthetic construct
  source 1..23: mol_type = other RNA
tggatccggtgggcaccgtcacg

SEQ ID NO: 91674 - RNA, 23 nt, synthetic construct
  source 1..23: mol_type = other RNA
tggatccggtgggcaccgtcacg

SEQ ID NO: 91675 - RNA, 23 nt, synthetic construct
  source 1..23: mol_type = other RNA
tggatccggtgggcaccgtcacg

SEQ ID NO: 91676 - RNA, 23 nt, synthetic construct
  source 1..23: mol_type = other RNA
tgctcgtagtcgtgacagagcgg

SEQ ID NO: 91677 - RNA, 23 nt, synthetic construct
  source 1..23: mol_type = other RNA
tggtgttcggcactgggggtgtg

SEQ ID NO: 91678 - RNA, 23 nt, synthetic construct
  source 1..23: mol_type = other RNA
tggtgttcggcactgggggtgtg

SEQ ID NO: 91679 - RNA, 23 nt, synthetic construct
  source 1..23: mol_type = other RNA
tctcaggttttcaaacgtctcaa

SEQ ID NO: 91680 - RNA, 23 nt, synthetic construct
  source 1..23: mol_type = other RNA
tttaggaaacccatcgggtccca

SEQ ID NO: 91681 - RNA, 23 nt, synthetic construct
  source 1..23: mol_type = other RNA
tacaggcccgcgtcgtggcaggc

SEQ ID NO: 91682 - RNA, 23 nt, synthetic construct
  source 1..23: mol_type = other RNA
tcctgatgatggtgccgttgctt

SEQ ID NO: 91683 - RNA, 23 nt, synthetic construct
  source 1..23: mol_type = other RNA
tgtggcggggttgtggcacgtcc

SEQ ID NO: 91684 - RNA, 23 nt, synthetic construct
  source 1..23: mol_type = other RNA
ttggtcggtggcggggttgtggc

SEQ ID NO: 91685 - RNA, 23 nt, synthetic construct
  source 1..23: mol_type = other RNA
tgtacttggacgctccggggcag

SEQ ID NO: 91686 - RNA, 23 nt, synthetic construct
  source 1..23: mol_type = other RNA
tgagccgttggacgcctccagca

SEQ ID NO: 91687 - RNA, 23 nt, synthetic construct
  source 1..23: mol_type = other RNA
tgcctcaggttttcaaacgtctc

SEQ ID NO: 91688 - RNA, 23 nt, synthetic construct
  source 1..23: mol_type = other RNA
ttgcctcaggttttcaaacgtct

SEQ ID NO: 91689 - RNA, 23 nt, synthetic construct
  source 1..23: mol_type = other RNA
ttgttgttggggccagcgtgggt

SEQ ID NO: 91690 - RNA, 23 nt, synthetic construct
  source 1..23: mol_type = other RNA
tgcaccaaccccgtagaaggtgc

SEQ ID NO: 91691 - RNA, 23 nt, synthetic construct
  source 1..23: mol_type = other RNA
tgccgttaggacagtgcaagggc

SEQ ID NO: 91692 - RNA, 23 nt, synthetic construct
  source 1..23: mol_type = other RNA
tgcggccgccttgcctgtcgcag

SEQ ID NO: 91693 - RNA, 23 nt, synthetic construct
  source 1..23: mol_type = other RNA
tgtagtttccgtccttgtcgtag

SEQ ID NO: 91694 - RNA, 23 nt, synthetic construct
  source 1..23: mol_type = other RNA
taagatccccatgtagcgtatct

SEQ ID NO: 91695 - RNA, 23 nt, synthetic construct
  source 1..23: mol_type = other RNA
tggttggcgtatttgggatccag

SEQ ID NO: 91696 - RNA, 23 nt, synthetic construct
  source 1..23: mol_type = other RNA
tttggacccggatggccgtgtcc

SEQ ID NO: 91697 - RNA, 23 nt, synthetic construct
  source 1..23: mol_type = other RNA
tggtgttcggcactgggggtgtg

SEQ ID NO: 91698 - RNA, 23 nt, synthetic construct
  source 1..23: mol_type = other RNA
tggtgttcggcactgggggtgtg

SEQ ID NO: 91699 - RNA, 23 nt, synthetic construct
  source 1..23: mol_type = other RNA
taggcgtagcgctgggacttggg

SEQ ID NO: 91700 - RNA, 23 nt, synthetic construct
  source 1..23: mol_type = other RNA
tgcgtagcaggggcactcctggg

SEQ ID NO: 91701 - RNA, 23 nt, synthetic construct
  source 1..23: mol_type = other RNA
tgccggtttcacccacggggtgg

SEQ ID NO: 91702 - RNA, 23 nt, synthetic construct
  source 1..23: mol_type = other RNA
taccgtcacggggcctgagctgg

SEQ ID NO: 91703 - RNA, 23 nt, synthetic construct
  source 1..23: mol_type = other RNA
tttagtcaaggggctcattgtcg

SEQ ID NO: 91704 - RNA, 23 nt, synthetic construct
  source 1..23: mol_type = other RNA
taagcgtgcgtgccgtccctggg

SEQ ID NO: 91705 - RNA, 23 nt, synthetic construct
  source 1..23: mol_type = other RNA
ttggatccggtgggcaccgtcac

SEQ ID NO: 91706 - RNA, 23 nt, synthetic construct
  source 1..23: mol_type = other RNA
ttggatccggtgggcaccgtcac

SEQ ID NO: 91707 - RNA, 23 nt, synthetic construct
  source 1..23: mol_type = other RNA
ttggatccggtgggcaccgtcac

SEQ ID NO: 91708 - RNA, 23 nt, synthetic construct
  source 1..23: mol_type = other RNA
ttggatccggtgggcaccgtcac

SEQ ID NO: 91709 - RNA, 23 nt, synthetic construct
  source 1..23: mol_type = other RNA
tcgtattcgcagcagagaacccg

SEQ ID NO: 91710 - RNA, 23 nt, synthetic construct
  source 1..23: mol_type = other RNA
tagtcgagtgctgggtggtaccg

SEQ ID NO: 91711 - RNA, 23 nt, synthetic construct
  source 1..23: mol_type = other RNA
tagtcgagtgctgggtggtaccg

SEQ ID NO: 91712 - RNA, 23 nt, synthetic construct
  source 1..23: mol_type = other RNA
tagtcgagtgctgggtggtactg

SEQ ID NO: 91713 - RNA, 23 nt, synthetic construct
  source 1..23: mol_type = other RNA
tagtcgagtgctgggtggtaccg

SEQ ID NO: 91714 - RNA, 23 nt, synthetic construct
  source 1..23: mol_type = other RNA
taatccgtgctgcgcgggcgctc

SEQ ID NO: 91715 - RNA, 23 nt, synthetic construct
  source 1..23: mol_type = other RNA
ttatggggccgcatggcttgtac

SEQ ID NO: 91716 - RNA, 23 nt, synthetic construct
  source 1..23: mol_type = other RNA
tgtttgttccagggcgtcccagt

SEQ ID NO: 91717 - RNA, 23 nt, synthetic construct
  source 1..23: mol_type = other RNA
tcacgtattcgcagcagagaacc

SEQ ID NO: 91718 - RNA, 23 nt, synthetic construct
  source 1..23: mol_type = other RNA
tgggcatacctggtaccctctct

SEQ ID NO: 91719 - RNA, 23 nt, synthetic construct
  source 1..23: mol_type = other RNA
taccaaccccgtagaaggtgcca

SEQ ID NO: 91720 - RNA, 23 nt, synthetic construct
  source 1..23: mol_type = other RNA
tcgcgagaaggcactgttgggat

SEQ ID NO: 91721 - RNA, 23 nt, synthetic construct
  source 1..23: mol_type = other RNA
tccgagggggtgaccgtcacggg

SEQ ID NO: 91722 - RNA, 23 nt, synthetic construct
  source 1..23: mol_type = other RNA
tgcgtgagtgccgtccctgggct

SEQ ID NO: 91723 - RNA, 23 nt, synthetic construct
  source 1..23: mol_type = other RNA
taggtcgtccctggagtggagga

SEQ ID NO: 91724 - RNA, 23 nt, synthetic construct
  source 1..23: mol_type = other RNA
tgcgtgagtgccgtccctgggct

SEQ ID NO: 91725 - RNA, 23 nt, synthetic construct
  source 1..23: mol_type = other RNA
tgcgtgagtgccgtccctgggct

SEQ ID NO: 91726 - RNA, 23 nt, synthetic construct
  source 1..23: mol_type = other RNA
tagattcccaaagcgtgcatgga

SEQ ID NO: 91727 - RNA, 23 nt, synthetic construct
  source 1..23: mol_type = other RNA
tcaggacgacacggttgtcaccc

SEQ ID NO: 91728 - RNA, 23 nt, synthetic construct
  source 1..23: mol_type = other RNA
tgggatcgcccgtgtgtggtggc

SEQ ID NO: 91729 - RNA, 23 nt, synthetic construct
  source 1..23: mol_type = other RNA
tgggatcgcccgtgtgtggtggc

SEQ ID NO: 91730 - RNA, 23 nt, synthetic construct
  source 1..23: mol_type = other RNA
tgggatcgcccgtgtgtggtggc

SEQ ID NO: 91731 - RNA, 23 nt, synthetic construct
  source 1..23: mol_type = other RNA
taatggcagccggctcggtcggt

SEQ ID NO: 91732 - RNA, 23 nt, synthetic construct
  source 1..23: mol_type = other RNA
tgtcgtagagtttctcatcatag

SEQ ID NO: 91733 - RNA, 23 nt, synthetic construct
  source 1..23: mol_type = other RNA
tatgacgtcctggtagctgtagg

SEQ ID NO: 91734 - RNA, 23 nt, synthetic construct
  source 1..23: mol_type = other RNA
ttcgcggacacacacggtggaga

SEQ ID NO: 91735 - RNA, 23 nt, synthetic construct
  source 1..23: mol_type = other RNA
tcggcatgtcgggaagctgcgcc

SEQ ID NO: 91736 - RNA, 23 nt, synthetic construct
  source 1..23: mol_type = other RNA
tggcacgtattcgcagcagagaa

SEQ ID NO: 91737 - RNA, 23 nt, synthetic construct
  source 1..23: mol_type = other RNA
tccccgggcgagaaaaactgtcc

SEQ ID NO: 91738 - RNA, 23 nt, synthetic construct
  source 1..23: mol_type = other RNA
tgctcggtcggtcttattgtaga

SEQ ID NO: 91739 - RNA, 23 nt, synthetic construct
  source 1..23: mol_type = other RNA
taggtcgcacaggccaccggttg

SEQ ID NO: 91740 - RNA, 23 nt, synthetic construct
  source 1..23: mol_type = other RNA
tttgtgttgcacacgcacaccgt

SEQ ID NO: 91741 - RNA, 23 nt, synthetic construct
  source 1..23: mol_type = other RNA
ttgccacaggatggtcgtgttga

SEQ ID NO: 91742 - RNA, 23 nt, synthetic construct
  source 1..23: mol_type = other RNA
tgagtcgagtgctgggtggtacc

SEQ ID NO: 91743 - RNA, 23 nt, synthetic construct
  source 1..23: mol_type = other RNA
tgagtcgagtgctgggtggtacc

SEQ ID NO: 91744 - RNA, 23 nt, synthetic construct
  source 1..23: mol_type = other RNA
tgagtcgagtgctgggtggtact

SEQ ID NO: 91745 - RNA, 23 nt, synthetic construct
  source 1..23: mol_type = other RNA
tgagtcgagtgctgggtggtacc

SEQ ID NO: 91746 - RNA, 23 nt, synthetic construct
  source 1..23: mol_type = other RNA
tgtggcgccctcccgaaaggggt

SEQ ID NO: 91747 - RNA, 23 nt, synthetic construct
  source 1..23: mol_type = other RNA
tgcggacttgacaggagtcctcc

SEQ ID NO: 91748 - RNA, 23 nt, synthetic construct
  source 1..23: mol_type = other RNA
tccgtcgaccggatgctcggggt

SEQ ID NO: 91749 - RNA, 23 nt, synthetic construct
  source 1..23: mol_type = other RNA
tctgagcgtcaccgctttcaggc

SEQ ID NO: 91750 - RNA, 23 nt, synthetic construct
  source 1..23: mol_type = other RNA
tgtcgccacccgagtcgcaggca

SEQ ID NO: 91751 - RNA, 23 nt, synthetic construct
  source 1..23: mol_type = other RNA
ttgataggcgggtccaggcggtg

SEQ ID NO: 91752 - RNA, 23 nt, synthetic construct
  source 1..23: mol_type = other RNA
tatcccgtgggtctcgatgacca

SEQ ID NO: 91753 - RNA, 23 nt, synthetic construct
  source 1..23: mol_type = other RNA
tagttgccggccggcaagggcag

SEQ ID NO: 91754 - RNA, 23 nt, synthetic construct
  source 1..23: mol_type = other RNA
tctgtagcgatcgccatcaaagg

SEQ ID NO: 91755 - RNA, 23 nt, synthetic construct
  source 1..23: mol_type = other RNA
tacgtaggcgtagcgctgggact

SEQ ID NO: 91756 - RNA, 23 nt, synthetic construct
  source 1..23: mol_type = other RNA
tgcgatcgccatcaaaggtgatg

SEQ ID NO: 91757 - RNA, 23 nt, synthetic construct
  source 1..23: mol_type = other RNA
ttagcgtatcttgtagggtgggt

SEQ ID NO: 91758 - RNA, 23 nt, synthetic construct
  source 1..23: mol_type = other RNA
tcagagtgcgtgatgtcatccag

SEQ ID NO: 91759 - RNA, 23 nt, synthetic construct
  source 1..23: mol_type = other RNA
ttcggatgaacacgctggtcttc

SEQ ID NO: 91760 - RNA, 23 nt, synthetic construct
  source 1..23: mol_type = other RNA
tcggcactcgatgtcagccagca

SEQ ID NO: 91761 - RNA, 23 nt, synthetic construct
  source 1..23: mol_type = other RNA
tgtgaccgtcacggggcctgagc

SEQ ID NO: 91762 - RNA, 23 nt, synthetic construct
  source 1..23: mol_type = other RNA
ttactcgtaggctgcggcgttga

SEQ ID NO: 91763 - RNA, 23 nt, synthetic construct
  source 1..23: mol_type = other RNA
ttgataggcgggtccaggtggtg

SEQ ID NO: 91764 - RNA, 23 nt, synthetic construct
  source 1..23: mol_type = other RNA
tccgtggcggtaagcactgtgga

SEQ ID NO: 91765 - RNA, 23 nt, synthetic construct
  source 1..23: mol_type = other RNA
ttgataggcgggtccaggtggtg

SEQ ID NO: 91766 - RNA, 23 nt, synthetic construct
  source 1..23: mol_type = other RNA
ttgataggcgggtccaggtggtg

SEQ ID NO: 91767 - RNA, 23 nt, synthetic construct
  source 1..23: mol_type = other RNA
ttgataggcgggtccaggtggtg

SEQ ID NO: 91768 - RNA, 23 nt, synthetic construct
  source 1..23: mol_type = other RNA
tccgtggcggtaagcactgtgga

SEQ ID NO: 91769 - RNA, 23 nt, synthetic construct
  source 1..23: mol_type = other RNA
tttgccccggaaggtgtaagagg

SEQ ID NO: 91770 - RNA, 23 nt, synthetic construct
  source 1..23: mol_type = other RNA
tacggttgcacggcgggggctga

SEQ ID NO: 91771 - RNA, 23 nt, synthetic construct
  source 1..23: mol_type = other RNA
tggttacgaagccgggacggttg

SEQ ID NO: 91772 - RNA, 23 nt, synthetic construct
  source 1..23: mol_type = other RNA
tatggtcgtgttgatgcggactt

SEQ ID NO: 91773 - RNA, 23 nt, synthetic construct
  source 1..23: mol_type = other RNA
tcagaacgttctcagacagcagt

SEQ ID NO: 91774 - RNA, 23 nt, synthetic construct
  source 1..23: mol_type = other RNA
tctcccgaaaggggtcctgctgg

SEQ ID NO: 91775 - RNA, 23 nt, synthetic construct
  source 1..23: mol_type = other RNA
tccgtccgcttggacccggatgg

SEQ ID NO: 91776 - RNA, 23 nt, synthetic construct
  source 1..23: mol_type = other RNA
tgtgataggcgggtccaggtggt

SEQ ID NO: 91777 - RNA, 23 nt, synthetic construct
  source 1..23: mol_type = other RNA
tcggatgttggagtaggtgtcaa

SEQ ID NO: 91778 - RNA, 23 nt, synthetic construct
  source 1..23: mol_type = other RNA
tgtgataggcgggtccaggtggt

SEQ ID NO: 91779 - RNA, 23 nt, synthetic construct
  source 1..23: mol_type = other RNA
tcggatgttggagtaggtgtcaa

SEQ ID NO: 91780 - RNA, 23 nt, synthetic construct
  source 1..23: mol_type = other RNA
tgtgataggcgggtccaggcggt

SEQ ID NO: 91781 - RNA, 23 nt, synthetic construct
  source 1..23: mol_type = other RNA
ttcgagtgctgggtggtactggt

SEQ ID NO: 91782 - RNA, 23 nt, synthetic construct
  source 1..23: mol_type = other RNA
tcggatgttggagtaggtgtcaa

SEQ ID NO: 91783 - RNA, 23 nt, synthetic construct
  source 1..23: mol_type = other RNA
tgtgataggcgggtccaggtggt

SEQ ID NO: 91784 - RNA, 23 nt, synthetic construct
  source 1..23: mol_type = other RNA
tcggatgttggagtaggtgtcaa

SEQ ID NO: 91785 - RNA, 23 nt, synthetic construct
  source 1..23: mol_type = other RNA
tgtgataggcgggtccaggtggt

SEQ ID NO: 91786 - RNA, 23 nt, synthetic construct
  source 1..23: mol_type = other RNA
ttgagccgttaggacagtgcaag

SEQ ID NO: 91787 - RNA, 23 nt, synthetic construct
  source 1..23: mol_type = other RNA
tccgttgcgacctcagccctgag

SEQ ID NO: 91788 - RNA, 23 nt, synthetic construct
  source 1..23: mol_type = other RNA
tgtgttgatgcggacttgacagg

SEQ ID NO: 91789 - RNA, 23 nt, synthetic construct
  source 1..23: mol_type = other RNA
tcgtcggggcaccgccatccatg

SEQ ID NO: 91790 - RNA, 23 nt, synthetic construct
  source 1..23: mol_type = other RNA
tggtcgtagagtttctcatcata

SEQ ID NO: 91791 - RNA, 23 nt, synthetic construct
  source 1..23: mol_type = other RNA
tgggcacgtattcgcagcagaga

SEQ ID NO: 91792 - RNA, 23 nt, synthetic construct
  source 1..23: mol_type = other RNA
tcgtagtggccgtggtgatcagt

SEQ ID NO: 91793 - RNA, 23 nt, synthetic construct
  source 1..23: mol_type = other RNA
tcacggtggctatagtgctcggc

SEQ ID NO: 91794 - RNA, 23 nt, synthetic construct
  source 1..23: mol_type = other RNA
tgattgcacactgcgtagaaatg

SEQ ID NO: 91795 - RNA, 23 nt, synthetic construct
  source 1..23: mol_type = other RNA
tccatcgggtcccacgcaggggc

SEQ ID NO: 91796 - RNA, 23 nt, synthetic construct
  source 1..23: mol_type = other RNA
tagcgtcaccgctttcaggcagt

SEQ ID NO: 91797 - RNA, 23 nt, synthetic construct
  source 1..23: mol_type = other RNA
tggccctgatcttatcgtaggac

SEQ ID NO: 91798 - RNA, 23 nt, synthetic construct
  source 1..23: mol_type = other RNA
tagcggccctgatcttatcgtag

SEQ ID NO: 91799 - RNA, 23 nt, synthetic construct
  source 1..23: mol_type = other RNA
tgggacggttgcacggcgggggc

SEQ ID NO: 91800 - RNA, 23 nt, synthetic construct
  source 1..23: mol_type = other RNA
tctcacgcgccgggtgggcgagg

SEQ ID NO: 91801 - RNA, 23 nt, synthetic construct
  source 1..23: mol_type = other RNA
taagctcacgcgccgggtgggcg

SEQ ID NO: 91802 - RNA, 23 nt, synthetic construct
  source 1..23: mol_type = other RNA
tacaaagctcacgcgccgggtgg

SEQ ID NO: 91803 - RNA, 23 nt, synthetic construct
  source 1..23: mol_type = other RNA
tagagtgcgtgatgtcatccagc

SEQ ID NO: 91804 - RNA, 23 nt, synthetic construct
  source 1..23: mol_type = other RNA
tccgccgtccgcttggacccgga

SEQ ID NO: 91805 - RNA, 23 nt, synthetic construct
  source 1..23: mol_type = other RNA
tcccacccgtacatgaacacacg

SEQ ID NO: 91806 - RNA, 23 nt, synthetic construct
  source 1..23: mol_type = other RNA
tcagcttagcttcccacccgtac

SEQ ID NO: 91807 - RNA, 23 nt, synthetic construct
  source 1..23: mol_type = other RNA
ttgtagcgtatcttgtagggtgg

SEQ ID NO: 91808 - RNA, 23 nt, synthetic construct
  source 1..23: mol_type = other RNA
tctactcgtaggctgcggcgttg

SEQ ID NO: 91809 - RNA, 23 nt, synthetic construct
  source 1..23: mol_type = other RNA
tcgtggttatgggggccgatgtg

SEQ ID NO: 91810 - RNA, 23 nt, synthetic construct
  source 1..23: mol_type = other RNA
tggggggataggtgttgtccctg

SEQ ID NO: 91811 - RNA, 23 nt, synthetic construct
  source 1..23: mol_type = other RNA
tgctgtaacgctggtagctgtgg

SEQ ID NO: 91812 - RNA, 23 nt, synthetic construct
  source 1..23: mol_type = other RNA
ttgtgatcgtagtggccgtggtg

SEQ ID NO: 91813 - RNA, 23 nt, synthetic construct
  source 1..23: mol_type = other RNA
tcgtggttatgggggccgatgtg

SEQ ID NO: 91814 - RNA, 23 nt, synthetic construct
  source 1..23: mol_type = other RNA
tggggggataggtgttgtccctg

SEQ ID NO: 91815 - RNA, 23 nt, synthetic construct
  source 1..23: mol_type = other RNA
tcgtggttatgggggccgatgtg

SEQ ID NO: 91816 - RNA, 23 nt, synthetic construct
  source 1..23: mol_type = other RNA
tcactgcgtagaaatggcagccg

SEQ ID NO: 91817 - RNA, 23 nt, synthetic construct
  source 1..23: mol_type = other RNA
tgccccggaaggtgtaagaggtg

SEQ ID NO: 91818 - RNA, 23 nt, synthetic construct
  source 1..23: mol_type = other RNA
tagcgtgcatggatctctctcat

SEQ ID NO: 91819 - RNA, 23 nt, synthetic construct
  source 1..23: mol_type = other RNA
tcaaagcgtgcatggatctctct

SEQ ID NO: 91820 - RNA, 23 nt, synthetic construct
  source 1..23: mol_type = other RNA
tcgtgcagtagtggttgtccagg

SEQ ID NO: 91821 - RNA, 23 nt, synthetic construct
  source 1..23: mol_type = other RNA
ttcaaggcggcccctgcagtggt

SEQ ID NO: 91822 - RNA, 23 nt, synthetic construct
  source 1..23: mol_type = other RNA
ttgcaccgacactgaaccctcgt

SEQ ID NO: 91823 - RNA, 23 nt, synthetic construct
  source 1..23: mol_type = other RNA
tgcagaacgttctcagacagcag

SEQ ID NO: 91824 - RNA, 23 nt, synthetic construct
  source 1..23: mol_type = other RNA
ttaggcccgcacatgcttagttt

SEQ ID NO: 91825 - RNA, 23 nt, synthetic construct
  source 1..23: mol_type = other RNA
tcgttgcgacctcagccctgagt

SEQ ID NO: 91826 - RNA, 23 nt, synthetic construct
  source 1..23: mol_type = other RNA
ttcgtagtcgtgacagagcgggg

SEQ ID NO: 91827 - RNA, 23 nt, synthetic construct
  source 1..23: mol_type = other RNA
tgaaacccatcgggtcccacgca

SEQ ID NO: 91828 - RNA, 23 nt, synthetic construct
  source 1..23: mol_type = other RNA
tgcagggatcgcccgtgtgtggt

SEQ ID NO: 91829 - RNA, 23 nt, synthetic construct
  source 1..23: mol_type = other RNA
tcggtcaggcgcgagcaccagtg

SEQ ID NO: 91830 - RNA, 23 nt, synthetic construct
  source 1..23: mol_type = other RNA
tcgtaggcgtagcgctgggactt

SEQ ID NO: 91831 - RNA, 23 nt, synthetic construct
  source 1..23: mol_type = other RNA
tcggtgccgtgagcgtagcaggg

SEQ ID NO: 91832 - RNA, 23 nt, synthetic construct
  source 1..23: mol_type = other RNA
tcattgatggcattgtcgtcgaa

SEQ ID NO: 91833 - RNA, 23 nt, synthetic construct
  source 1..23: mol_type = other RNA
taccggatgctcggggtcaccca

SEQ ID NO: 91834 - RNA, 23 nt, synthetic construct
  source 1..23: mol_type = other RNA
tgaccggatgctcggggtcaccc

SEQ ID NO: 91835 - RNA, 23 nt, synthetic construct
  source 1..23: mol_type = other RNA
tacttccccgggcgagaaaaact

SEQ ID NO: 91836 - RNA, 23 nt, synthetic construct
  source 1..23: mol_type = other RNA
tacgacacggttgtcacccacgc

SEQ ID NO: 91837 - RNA, 23 nt, synthetic construct
  source 1..23: mol_type = other RNA
taaacccatcgggtcccacgcag

SEQ ID NO: 91838 - RNA, 23 nt, synthetic construct
  source 1..23: mol_type = other RNA
tcaaactggagcggggtcagcct

SEQ ID NO: 91839 - RNA, 23 nt, synthetic construct
  source 1..23: mol_type = other RNA
tgtggcactccgcaaaggccggc

SEQ ID NO: 91840 - RNA, 23 nt, synthetic construct
  source 1..23: mol_type = other RNA
tatcggtcaggcgcgagcaccag

SEQ ID NO: 91841 - RNA, 23 nt, synthetic construct
  source 1..23: mol_type = other RNA
tgccaccgccttaaaggtcccct

SEQ ID NO: 91842 - RNA, 23 nt, synthetic construct
  source 1..23: mol_type = other RNA
ttgtgggttgtagaagtcacaga

SEQ ID NO: 91843 - RNA, 23 nt, synthetic construct
  source 1..23: mol_type = other RNA
tatggcgatcaagcaggcgccaa

SEQ ID NO: 91844 - RNA, 23 nt, synthetic construct
  source 1..23: mol_type = other RNA
tcgttgcttccgcagatggcgat

SEQ ID NO: 91845 - RNA, 23 nt, synthetic construct
  source 1..23: mol_type = other RNA
tagagcgggggactctgttggct

SEQ ID NO: 91846 - RNA, 23 nt, synthetic construct
  source 1..23: mol_type = other RNA
tgggctactcgtaggctgcggcg

SEQ ID NO: 91847 - RNA, 23 nt, synthetic construct
  source 1..23: mol_type = other RNA
tatgggggagtaccactggtctg

SEQ ID NO: 91848 - RNA, 23 nt, synthetic construct
  source 1..23: mol_type = other RNA
tggatcgcccgtgtgtggtggcc

SEQ ID NO: 91849 - RNA, 23 nt, synthetic construct
  source 1..23: mol_type = other RNA
tgagtaggtgtcaaagtccccgc

SEQ ID NO: 91850 - RNA, 23 nt, synthetic construct
  source 1..23: mol_type = other RNA
tgtggatccggtgggcaccgtca

SEQ ID NO: 91851 - RNA, 23 nt, synthetic construct
  source 1..23: mol_type = other RNA
tatgggggagtaccactggtctg

SEQ ID NO: 91852 - RNA, 23 nt, synthetic construct
  source 1..23: mol_type = other RNA
tggatcgcccgtgtgtggtggcc

SEQ ID NO: 91853 - RNA, 23 nt, synthetic construct
  source 1..23: mol_type = other RNA
tgagtaggtgtcaaagtccccgc

SEQ ID NO: 91854 - RNA, 23 nt, synthetic construct
  source 1..23: mol_type = other RNA
tgtggatccggtgggcaccgtca

SEQ ID NO: 91855 - RNA, 23 nt, synthetic construct
  source 1..23: mol_type = other RNA
tatgggggagtaccactggtctg

SEQ ID NO: 91856 - RNA, 23 nt, synthetic construct
  source 1..23: mol_type = other RNA
tgagtaggtgtcaaagtccccgc

SEQ ID NO: 91857 - RNA, 23 nt, synthetic construct
  source 1..23: mol_type = other RNA
tgtggatccggtgggcaccgtca

SEQ ID NO: 91858 - RNA, 23 nt, synthetic construct
  source 1..23: mol_type = other RNA
tatgggggagtaccactggtctg

SEQ ID NO: 91859 - RNA, 23 nt, synthetic construct
  source 1..23: mol_type = other RNA
tggatcgcccgtgtgtggtggcc

SEQ ID NO: 91860 - RNA, 23 nt, synthetic construct
  source 1..23: mol_type = other RNA
tgagtaggtgtcaaagtccccgc

SEQ ID NO: 91861 - RNA, 23 nt, synthetic construct
  source 1..23: mol_type = other RNA
tgtggatccggtgggcaccgtca

SEQ ID NO: 91862 - RNA, 23 nt, synthetic construct
  source 1..23: mol_type = other RNA
tatgggggagtaccactggtctg

SEQ ID NO: 91863 - RNA, 23 nt, synthetic construct
  source 1..23: mol_type = other RNA
tcggtggctatagtgctcggctc

SEQ ID NO: 91864 - RNA, 23 nt, synthetic construct
  source 1..23: mol_type = other RNA
tccgtgcagtagtggttgtccag

SEQ ID NO: 91865 - RNA, 23 nt, synthetic construct
  source 1..23: mol_type = other RNA
tgccgtgcagtagtggttgtcca

SEQ ID NO: 91866 - RNA, 23 nt, synthetic construct
  source 1..23: mol_type = other RNA
tccgcatggcttgtacactttgg

SEQ ID NO: 91867 - RNA, 23 nt, synthetic construct
  source 1..23: mol_type = other RNA
tcgggacggttgcacggcggggg

SEQ ID NO: 91868 - RNA, 23 nt, synthetic construct
  source 1..23: mol_type = other RNA
tgcaggtacacatgtggcaggga

SEQ ID NO: 91869 - RNA, 23 nt, synthetic construct
  source 1..23: mol_type = other RNA
tttgacctcggtctcgcagccct

SEQ ID NO: 91870 - RNA, 23 nt, synthetic construct
  source 1..23: mol_type = other RNA
tgagcgcggggtgccacacacag

SEQ ID NO: 91871 - RNA, 23 nt, synthetic construct
  source 1..23: mol_type = other RNA
ttggaatccgtgctgcgcgggcg

SEQ ID NO: 91872 - RNA, 23 nt, synthetic construct
  source 1..23: mol_type = other RNA
tgcgaggacgtcggggcaccgcc

SEQ ID NO: 91873 - RNA, 23 nt, synthetic construct
  source 1..23: mol_type = other RNA
tgctcacgcgccgggtgggcgag

SEQ ID NO: 91874 - RNA, 23 nt, synthetic construct
  source 1..23: mol_type = other RNA
tgagcccactaggcctcggcgta

SEQ ID NO: 91875 - RNA, 23 nt, synthetic construct
  source 1..23: mol_type = other RNA
tgcaccagccggatgctgacctt

SEQ ID NO: 91876 - RNA, 23 nt, synthetic construct
  source 1..23: mol_type = other RNA
tatagaactcgttgaaggccggg

SEQ ID NO: 91877 - RNA, 23 nt, synthetic construct
  source 1..23: mol_type = other RNA
taggtacgcagtgctgtccacca

SEQ ID NO: 91878 - RNA, 23 nt, synthetic construct
  source 1..23: mol_type = other RNA
tccaggtacgcagtgctgtccac

SEQ ID NO: 91879 - RNA, 23 nt, synthetic construct
  source 1..23: mol_type = other RNA
tgccaggtacgcagtgctgtcca

SEQ ID NO: 91880 - RNA, 23 nt, synthetic construct
  source 1..23: mol_type = other RNA
ttccgtgcagggtgagccacact

SEQ ID NO: 91881 - RNA, 23 nt, synthetic construct
  source 1..23: mol_type = other RNA
ttcaccgctttcaggcagttctc

SEQ ID NO: 91882 - RNA, 23 nt, synthetic construct
  source 1..23: mol_type = other RNA
tcaaacacctgcatgagtggcac

SEQ ID NO: 91883 - RNA, 23 nt, synthetic construct
  source 1..23: mol_type = other RNA
tcccgctgagggccgtgaagtcg

SEQ ID NO: 91884 - RNA, 23 nt, synthetic construct
  source 1..23: mol_type = other RNA
tggcgcgagcaccagtgccgggc

SEQ ID NO: 91885 - RNA, 23 nt, synthetic construct
  source 1..23: mol_type = other RNA
tggtcaggcgcgagcaccagtgc

SEQ ID NO: 91886 - RNA, 23 nt, synthetic construct
  source 1..23: mol_type = other RNA
tgcactgttgggatcggtcaggc

SEQ ID NO: 91887 - RNA, 23 nt, synthetic construct
  source 1..23: mol_type = other RNA
tggcgtagcgctgggacttgggg

SEQ ID NO: 91888 - RNA, 23 nt, synthetic construct
  source 1..23: mol_type = other RNA
tgccgcggcaagtgggctggcag

SEQ ID NO: 91889 - RNA, 23 nt, synthetic construct
  source 1..23: mol_type = other RNA
tctcaggccgcggcaagtgggct

SEQ ID NO: 91890 - RNA, 23 nt, synthetic construct
  source 1..23: mol_type = other RNA
tacacacggcgccctcgtcgtgc

SEQ ID NO: 91891 - RNA, 23 nt, synthetic construct
  source 1..23: mol_type = other RNA
taacacacggcgccctcgtcgtg

SEQ ID NO: 91892 - RNA, 23 nt, synthetic construct
  source 1..23: mol_type = other RNA
tccatccgacaccagccccgggg

SEQ ID NO: 91893 - RNA, 23 nt, synthetic construct
  source 1..23: mol_type = other RNA
tccaccgccttaaaggtcccctc

SEQ ID NO: 91894 - RNA, 23 nt, synthetic construct
  source 1..23: mol_type = other RNA
tccatgtagcgtatcttgtaggg

SEQ ID NO: 91895 - RNA, 23 nt, synthetic construct
  source 1..23: mol_type = other RNA
tcagtcggatgaacacgctggtc

SEQ ID NO: 91896 - RNA, 23 nt, synthetic construct
  source 1..23: mol_type = other RNA
ttagtttccgtccttgtcgtagc

SEQ ID NO: 91897 - RNA, 23 nt, synthetic construct
  source 1..23: mol_type = other RNA
ttggcgttgtggctggagttcca

SEQ ID NO: 91898 - RNA, 23 nt, synthetic construct
  source 1..23: mol_type = other RNA
tgtgaatggcgttgtggctggag

SEQ ID NO: 91899 - RNA, 23 nt, synthetic construct
  source 1..23: mol_type = other RNA
tgacctcgcggacacacacggtg

SEQ ID NO: 91900 - RNA, 23 nt, synthetic construct
  source 1..23: mol_type = other RNA
tagacctcgcggacacacacggt

SEQ ID NO: 91901 - RNA, 23 nt, synthetic construct
  source 1..23: mol_type = other RNA
tccggcactcgatgtcagccagc

SEQ ID NO: 91902 - RNA, 23 nt, synthetic construct
  source 1..23: mol_type = other RNA
tcccggcactcgatgtcagccag

SEQ ID NO: 91903 - RNA, 23 nt, synthetic construct
  source 1..23: mol_type = other RNA
tcgcccggcactcgatgtcagcc

SEQ ID NO: 91904 - RNA, 23 nt, synthetic construct
  source 1..23: mol_type = other RNA
tcccgcatgcggtcacagtccac

SEQ ID NO: 91905 - RNA, 23 nt, synthetic construct
  source 1..23: mol_type = other RNA
tgagcgggggactctgttggctg

SEQ ID NO: 91906 - RNA, 23 nt, synthetic construct
  source 1..23: mol_type = other RNA
tcgaccggatgctcggggtcacc

SEQ ID NO: 91907 - RNA, 23 nt, synthetic construct
  source 1..23: mol_type = other RNA
tgaccgtcacggggcctgagctg

SEQ ID NO: 91908 - RNA, 23 nt, synthetic construct
  source 1..23: mol_type = other RNA
ttgcggcgttgagaacagggcct

SEQ ID NO: 91909 - RNA, 23 nt, synthetic construct
  source 1..23: mol_type = other RNA
tctgcggcgttgagaacagggcc

SEQ ID NO: 91910 - RNA, 23 nt, synthetic construct
  source 1..23: mol_type = other RNA
tgctgcggcgttgagaacagggc

SEQ ID NO: 91911 - RNA, 23 nt, synthetic construct
  source 1..23: mol_type = other RNA
tggctgcggcgttgagaacaggg

SEQ ID NO: 91912 - RNA, 23 nt, synthetic construct
  source 1..23: mol_type = other RNA
tggctactcgtaggctgcggcgt

SEQ ID NO: 91913 - RNA, 23 nt, synthetic construct
  source 1..23: mol_type = other RNA
ttcccgtggtggctgtaccaagg

SEQ ID NO: 91914 - RNA, 23 nt, synthetic construct
  source 1..23: mol_type = other RNA
tgttggcgccaggctcgtggtca

SEQ ID NO: 91915 - RNA, 23 nt, synthetic construct
  source 1..23: mol_type = other RNA
ttagtcaaggggctcattgtcgt

SEQ ID NO: 91916 - RNA, 23 nt, synthetic construct
  source 1..23: mol_type = other RNA
tgttagtcaaggggctcattgtc

SEQ ID NO: 91917 - RNA, 23 nt, synthetic construct
  source 1..23: mol_type = other RNA
ttggtgttagtcaaggggctcat

SEQ ID NO: 91918 - RNA, 23 nt, synthetic construct
  source 1..23: mol_type = other RNA
ttgggtgtaacgctggtagctgt

SEQ ID NO: 91919 - RNA, 23 nt, synthetic construct
  source 1..23: mol_type = other RNA
ttggcggtaagcactgtggaggt

SEQ ID NO: 91920 - RNA, 23 nt, synthetic construct
  source 1..23: mol_type = other RNA
tgtggtagttggcactttggtag

SEQ ID NO: 91921 - RNA, 23 nt, synthetic construct
  source 1..23: mol_type = other RNA
ttgtggtagttggcactttggta

SEQ ID NO: 91922 - RNA, 23 nt, synthetic construct
  source 1..23: mol_type = other RNA
tcgtgagtgccgtccctgggctg

SEQ ID NO: 91923 - RNA, 23 nt, synthetic construct
  source 1..23: mol_type = other RNA
tgtgtgctagaggagggtgttgc

SEQ ID NO: 91924 - RNA, 23 nt, synthetic construct
  source 1..23: mol_type = other RNA
tgatcgtagtggccgtggtggtc

SEQ ID NO: 91925 - RNA, 23 nt, synthetic construct
  source 1..23: mol_type = other RNA
tgctgtgcgcaccgtgtggggac

SEQ ID NO: 91926 - RNA, 23 nt, synthetic construct
  source 1..23: mol_type = other RNA
tggctgtgcgcaccgtgtgggga

SEQ ID NO: 91927 - RNA, 23 nt, synthetic construct
  source 1..23: mol_type = other RNA
tggtggtaccggtggttgctgct

SEQ ID NO: 91928 - RNA, 23 nt, synthetic construct
  source 1..23: mol_type = other RNA
tggagtcgagtgctgggtggtac

SEQ ID NO: 91929 - RNA, 23 nt, synthetic construct
  source 1..23: mol_type = other RNA
tgtcaccaccgtggttatggggg

SEQ ID NO: 91930 - RNA, 23 nt, synthetic construct
  source 1..23: mol_type = other RNA
tgccccggcatggggtagctgta

SEQ ID NO: 91931 - RNA, 23 nt, synthetic construct
  source 1..23: mol_type = other RNA
tctgggcacggcactcgaggccc

SEQ ID NO: 91932 - RNA, 23 nt, synthetic construct
  source 1..23: mol_type = other RNA
tgtgtgctagaggagggtgttgc

SEQ ID NO: 91933 - RNA, 23 nt, synthetic construct
  source 1..23: mol_type = other RNA
tgatcgtagtggccgtggtggtc

SEQ ID NO: 91934 - RNA, 23 nt, synthetic construct
  source 1..23: mol_type = other RNA
tgataggtgttgtccctggagtt

SEQ ID NO: 91935 - RNA, 23 nt, synthetic construct
  source 1..23: mol_type = other RNA
tccgtggtgttcggcactggggg

SEQ ID NO: 91936 - RNA, 23 nt, synthetic construct
  source 1..23: mol_type = other RNA
tgctgtgcgcaccgtgtggggac

SEQ ID NO: 91937 - RNA, 23 nt, synthetic construct
  source 1..23: mol_type = other RNA
tggctgtgcgcaccgtgtgggga

SEQ ID NO: 91938 - RNA, 23 nt, synthetic construct
  source 1..23: mol_type = other RNA
tggtggtaccggtggttgctgct

SEQ ID NO: 91939 - RNA, 23 nt, synthetic construct
  source 1..23: mol_type = other RNA
tggagtcgagtgctgggtggtac

SEQ ID NO: 91940 - RNA, 23 nt, synthetic construct
  source 1..23: mol_type = other RNA
tgccccggcatggggtagctgta

SEQ ID NO: 91941 - RNA, 23 nt, synthetic construct
  source 1..23: mol_type = other RNA
tctgggcacggcactcgaggccc

SEQ ID NO: 91942 - RNA, 23 nt, synthetic construct
  source 1..23: mol_type = other RNA
tggatggccgtggatccagtggt

SEQ ID NO: 91943 - RNA, 23 nt, synthetic construct
  source 1..23: mol_type = other RNA
tataggcgggtccaggcggtgcc

SEQ ID NO: 91944 - RNA, 23 nt, synthetic construct
  source 1..23: mol_type = other RNA
tgtggtagtcggcactttggtag

SEQ ID NO: 91945 - RNA, 23 nt, synthetic construct
  source 1..23: mol_type = other RNA
tcgtgagtgccgtccctgggctg

SEQ ID NO: 91946 - RNA, 23 nt, synthetic construct
  source 1..23: mol_type = other RNA
tgtgtgctagaggagggtgttgc

SEQ ID NO: 91947 - RNA, 23 nt, synthetic construct
  source 1..23: mol_type = other RNA
tgatcgtagtggccgtggtggtc

SEQ ID NO: 91948 - RNA, 23 nt, synthetic construct
  source 1..23: mol_type = other RNA
tccgtggtgttcggcactggggg

SEQ ID NO: 91949 - RNA, 23 nt, synthetic construct
  source 1..23: mol_type = other RNA
tgctgtgcgcaccgtgtggggac

SEQ ID NO: 91950 - RNA, 23 nt, synthetic construct
  source 1..23: mol_type = other RNA
tggctgtgcgcaccgtgtgggga

SEQ ID NO: 91951 - RNA, 23 nt, synthetic construct
  source 1..23: mol_type = other RNA
tggagtcgagtgctgggtggtac

SEQ ID NO: 91952 - RNA, 23 nt, synthetic construct
  source 1..23: mol_type = other RNA
tgtcaccaccgtggttatggggg

SEQ ID NO: 91953 - RNA, 23 nt, synthetic construct
  source 1..23: mol_type = other RNA
tgccccggcatggggtagctgta

SEQ ID NO: 91954 - RNA, 23 nt, synthetic construct
  source 1..23: mol_type = other RNA
tctgggcacggcactcgaggccc

SEQ ID NO: 91955 - RNA, 23 nt, synthetic construct
  source 1..23: mol_type = other RNA
tgtggtagtcggcactttggtag

SEQ ID NO: 91956 - RNA, 23 nt, synthetic construct
  source 1..23: mol_type = other RNA
tgtgtgctagaggagggtgttgc

SEQ ID NO: 91957 - RNA, 23 nt, synthetic construct
  source 1..23: mol_type = other RNA
tgatcgtagtggccgtggtgatc

SEQ ID NO: 91958 - RNA, 23 nt, synthetic construct
  source 1..23: mol_type = other RNA
tgataggtgttgtccctggagtt

SEQ ID NO: 91959 - RNA, 23 nt, synthetic construct
  source 1..23: mol_type = other RNA
tccgtggtgttcggcactggggg

SEQ ID NO: 91960 - RNA, 23 nt, synthetic construct
  source 1..23: mol_type = other RNA
tgctgtgcgcaccgtgtggggac

SEQ ID NO: 91961 - RNA, 23 nt, synthetic construct
  source 1..23: mol_type = other RNA
tggctgtgcgcaccgtgtgggga

SEQ ID NO: 91962 - RNA, 23 nt, synthetic construct
  source 1..23: mol_type = other RNA
tggtggtaccggtggttgctgct

SEQ ID NO: 91963 - RNA, 23 nt, synthetic construct
  source 1..23: mol_type = other RNA
tggagtcgagtgctgggtggtac

SEQ ID NO: 91964 - RNA, 23 nt, synthetic construct
  source 1..23: mol_type = other RNA
tgtcaccaccgtggttatggggg

SEQ ID NO: 91965 - RNA, 23 nt, synthetic construct
  source 1..23: mol_type = other RNA
tgccccggcatggggtagctgta

SEQ ID NO: 91966 - RNA, 23 nt, synthetic construct
  source 1..23: mol_type = other RNA
tctgggcacggcactcgaggccc

SEQ ID NO: 91967 - RNA, 23 nt, synthetic construct
  source 1..23: mol_type = other RNA
ttgggtgtaacgctggtagctgt

SEQ ID NO: 91968 - RNA, 23 nt, synthetic construct
  source 1..23: mol_type = other RNA
ttggcggtaagcactgtggaggt

SEQ ID NO: 91969 - RNA, 23 nt, synthetic construct
  source 1..23: mol_type = other RNA
tgtggtagtcggcactttggtag

SEQ ID NO: 91970 - RNA, 23 nt, synthetic construct
  source 1..23: mol_type = other RNA
tcgtgagtgccgtccctgggctg

SEQ ID NO: 91971 - RNA, 23 nt, synthetic construct
  source 1..23: mol_type = other RNA
tgtgtgctagaggagggtgttgc

SEQ ID NO: 91972 - RNA, 23 nt, synthetic construct
  source 1..23: mol_type = other RNA
tgatcgtagtggccgtggtggtc

SEQ ID NO: 91973 - RNA, 23 nt, synthetic construct
  source 1..23: mol_type = other RNA
ttgggacggtccacgtggtccac

SEQ ID NO: 91974 - RNA, 23 nt, synthetic construct
  source 1..23: mol_type = other RNA
tgccgtggaaccggtgggcacca

SEQ ID NO: 91975 - RNA, 23 nt, synthetic construct
  source 1..23: mol_type = other RNA
ttggacacgctgaaggttggcag

SEQ ID NO: 91976 - RNA, 23 nt, synthetic construct
  source 1..23: mol_type = other RNA
tggacaggcgccctggaagcggt

SEQ ID NO: 91977 - RNA, 23 nt, synthetic construct
  source 1..23: mol_type = other RNA
tgtgaggacgatatccatggact

SEQ ID NO: 91978 - RNA, 23 nt, synthetic construct
  source 1..23: mol_type = other RNA
ttgtccacacgcatggtggtggt

SEQ ID NO: 91979 - RNA, 23 nt, synthetic construct
  source 1..23: mol_type = other RNA
taccagccacgtcttggccatgt

SEQ ID NO: 91980 - RNA, 23 nt, synthetic construct
  source 1..23: mol_type = other RNA
tgtgtgccagtcggggcccagca

SEQ ID NO: 91981 - RNA, 23 nt, synthetic construct
  source 1..23: mol_type = other RNA
tgcagtggtcgctgatgcaggcg

SEQ ID NO: 91982 - RNA, 23 nt, synthetic construct
  source 1..23: mol_type = other RNA
tgggccgcatggcttgtacactt

SEQ ID NO: 91983 - RNA, 23 nt, synthetic construct
  source 1..23: mol_type = other RNA
tcatgtgtgcgttgaagaggatc

SEQ ID NO: 91984 - RNA, 23 nt, synthetic construct
  source 1..23: mol_type = other RNA
tggaaatttaggaaacccatcgg

SEQ ID NO: 91985 - RNA, 23 nt, synthetic construct
  source 1..23: mol_type = other RNA
tcattgtacgaacacagctgagg

SEQ ID NO: 91986 - RNA, 23 nt, synthetic construct
  source 1..23: mol_type = other RNA
tgcaggcggtctggacgcactcc

SEQ ID NO: 91987 - RNA, 23 nt, synthetic construct
  source 1..23: mol_type = other RNA
tggcaggcggtctggacgcactc

SEQ ID NO: 91988 - RNA, 23 nt, synthetic construct
  source 1..23: mol_type = other RNA
tgccatcgggcgtgaggcaggcg

SEQ ID NO: 91989 - RNA, 23 nt, synthetic construct
  source 1..23: mol_type = other RNA
tacttggacgctccggggcagga

SEQ ID NO: 91990 - RNA, 23 nt, synthetic construct
  source 1..23: mol_type = other RNA
tgagccgttaggacagtgcaagg

SEQ ID NO: 91991 - RNA, 23 nt, synthetic construct
  source 1..23: mol_type = other RNA
tgctgagccgttaggacagtgca

SEQ ID NO: 91992 - RNA, 23 nt, synthetic construct
  source 1..23: mol_type = other RNA
ttgttgcacacgcacaccgtctc

SEQ ID NO: 91993 - RNA, 23 nt, synthetic construct
  source 1..23: mol_type = other RNA
tgaccttgatgtagtccccgctc

SEQ ID NO: 91994 - RNA, 23 nt, synthetic construct
  source 1..23: mol_type = other RNA
tgtgcgtggcactccgcaaaggc

SEQ ID NO: 91995 - RNA, 23 nt, synthetic construct
  source 1..23: mol_type = other RNA
tggctgagcgtcaccgctttcag

SEQ ID NO: 91996 - RNA, 23 nt, synthetic construct
  source 1..23: mol_type = other RNA
tcacgtaggcgtagcgctgggac

SEQ ID NO: 91997 - RNA, 23 nt, synthetic construct
  source 1..23: mol_type = other RNA
ttagcttcccacccgtacatgaa

SEQ ID NO: 91998 - RNA, 23 nt, synthetic construct
  source 1..23: mol_type = other RNA
ttatcttgtagggtgggtcccca

SEQ ID NO: 91999 - RNA, 23 nt, synthetic construct
  source 1..23: mol_type = other RNA
taggcgtgagtgccgtccctggg

SEQ ID NO: 92000 - RNA, 23 nt, synthetic construct
  source 1..23: mol_type = other RNA
tctggaagcgtgcgtgccgtccc

SEQ ID NO: 92001 - RNA, 23 nt, synthetic construct
  source 1..23: mol_type = other RNA
taggcgtgagtgccgtccctggg

SEQ ID NO: 92002 - RNA, 23 nt, synthetic construct
  source 1..23: mol_type = other RNA
taggcgtgagtgccgtccctggg

SEQ ID NO: 92003 - RNA, 23 nt, synthetic construct
  source 1..23: mol_type = other RNA
ttcagtgaggatccgggtcgtcc

SEQ ID NO: 92004 - RNA, 23 nt, synthetic construct
  source 1..23: mol_type = other RNA
tggtcgctgatgcaggcgttgaa

SEQ ID NO: 92005 - RNA, 23 nt, synthetic construct
  source 1..23: mol_type = other RNA
tggtacacggtgcagttgtccac

SEQ ID NO: 92006 - RNA, 23 nt, synthetic construct
  source 1..23: mol_type = other RNA
tagtacttggacgctccggggca

SEQ ID NO: 92007 - RNA, 23 nt, synthetic construct
  source 1..23: mol_type = other RNA
tgaacaaagctcacgcgccgggt

SEQ ID NO: 92008 - RNA, 23 nt, synthetic construct
  source 1..23: mol_type = other RNA
ttcacggtggctatagtgctcgg

SEQ ID NO: 92009 - RNA, 23 nt, synthetic construct
  source 1..23: mol_type = other RNA
tgccgcccggcactcgatgtcag

SEQ ID NO: 92010 - RNA, 23 nt, synthetic construct
  source 1..23: mol_type = other RNA
ttggtctgtgataggcgggtcca

SEQ ID NO: 92011 - RNA, 23 nt, synthetic construct
  source 1..23: mol_type = other RNA
tgggtggtaccggtggttgctgc

SEQ ID NO: 92012 - RNA, 23 nt, synthetic construct
  source 1..23: mol_type = other RNA
ttggtctgtgataggcgggtcca

SEQ ID NO: 92013 - RNA, 23 nt, synthetic construct
  source 1..23: mol_type = other RNA
tccacactggaagcgtgcgtgcc

SEQ ID NO: 92014 - RNA, 23 nt, synthetic construct
  source 1..23: mol_type = other RNA
tgggtggtaccggtggttgctgc

SEQ ID NO: 92015 - RNA, 23 nt, synthetic construct
  source 1..23: mol_type = other RNA
ttggtctgtgataggcgggtcca

SEQ ID NO: 92016 - RNA, 23 nt, synthetic construct
  source 1..23: mol_type = other RNA
ttggtctgtgataggcgggtcca

SEQ ID NO: 92017 - RNA, 23 nt, synthetic construct
  source 1..23: mol_type = other RNA
tgggtggtaccggtggttgctgc

SEQ ID NO: 92018 - RNA, 23 nt, synthetic construct
  source 1..23: mol_type = other RNA
ttggtctgtgataggcgggtcca

SEQ ID NO: 92019 - RNA, 23 nt, synthetic construct
  source 1..23: mol_type = other RNA
tactcatccacgtgggtgtaggt

SEQ ID NO: 92020 - RNA, 23 nt, synthetic construct
  source 1..23: mol_type = other RNA
tccagtgcggctgtaaggcagct

SEQ ID NO: 92021 - RNA, 23 nt, synthetic construct
  source 1..23: mol_type = other RNA
tgcgtggcactccgcaaaggccg

SEQ ID NO: 92022 - RNA, 23 nt, synthetic construct
  source 1..23: mol_type = other RNA
ttcattgaggaaggtgcccgcgg

SEQ ID NO: 92023 - RNA, 23 nt, synthetic construct
  source 1..23: mol_type = other RNA
tgtgctgggtggtaccggtggtt

SEQ ID NO: 92024 - RNA, 23 nt, synthetic construct
  source 1..23: mol_type = other RNA
tcggccgcacggatgttggagta

SEQ ID NO: 92025 - RNA, 23 nt, synthetic construct
  source 1..23: mol_type = other RNA
tacggtggctgtagtgctcggct

SEQ ID NO: 92026 - RNA, 23 nt, synthetic construct
  source 1..23: mol_type = other RNA
tgtgctgggtggtaccggtggtt

SEQ ID NO: 92027 - RNA, 23 nt, synthetic construct
  source 1..23: mol_type = other RNA
tcggccgcacggatgttggagta

SEQ ID NO: 92028 - RNA, 23 nt, synthetic construct
  source 1..23: mol_type = other RNA
tcggccgcacggatgttggagta

SEQ ID NO: 92029 - RNA, 23 nt, synthetic construct
  source 1..23: mol_type = other RNA
tacggtggctgtagtgctcggct

SEQ ID NO: 92030 - RNA, 23 nt, synthetic construct
  source 1..23: mol_type = other RNA
tgtgctgggtggtaccggtggtt

SEQ ID NO: 92031 - RNA, 23 nt, synthetic construct
  source 1..23: mol_type = other RNA
tcggccgcacggatgttggagta

SEQ ID NO: 92032 - RNA, 23 nt, synthetic construct
  source 1..23: mol_type = other RNA
tacggtggctgtagtgctcggct

SEQ ID NO: 92033 - RNA, 23 nt, synthetic construct
  source 1..23: mol_type = other RNA
tcagcactctggcggtgtgggtg

SEQ ID NO: 92034 - RNA, 23 nt, synthetic construct
  source 1..23: mol_type = other RNA
tctgtgctgggacggtccacgtg

SEQ ID NO: 92035 - RNA, 23 nt, synthetic construct
  source 1..23: mol_type = other RNA
tggcagccggctcggtcggtctt

SEQ ID NO: 92036 - RNA, 23 nt, synthetic construct
  source 1..23: mol_type = other RNA
tacactgaaccctcgtcacacac

SEQ ID NO: 92037 - RNA, 23 nt, synthetic construct
  source 1..23: mol_type = other RNA
tcacagaggtacacggtgcagtt

SEQ ID NO: 92038 - RNA, 23 nt, synthetic construct
  source 1..23: mol_type = other RNA
tcataggcccgcacatgcttagt

SEQ ID NO: 92039 - RNA, 23 nt, synthetic construct
  source 1..23: mol_type = other RNA
ttggaacaaagctcacgcgccgg

SEQ ID NO: 92040 - RNA, 23 nt, synthetic construct
  source 1..23: mol_type = other RNA
ttgtccaccagtgcgtggcactc

SEQ ID NO: 92041 - RNA, 23 nt, synthetic construct
  source 1..23: mol_type = other RNA
tccaggctgagcgtcaccgcttt

SEQ ID NO: 92042 - RNA, 23 nt, synthetic construct
  source 1..23: mol_type = other RNA
tggcgaaggctgcgcccgtggcc

SEQ ID NO: 92043 - RNA, 23 nt, synthetic construct
  source 1..23: mol_type = other RNA
ttacatgaacacacggcgccctc

SEQ ID NO: 92044 - RNA, 23 nt, synthetic construct
  source 1..23: mol_type = other RNA
tctgtggggtcagcaaatggact

SEQ ID NO: 92045 - RNA, 23 nt, synthetic construct
  source 1..23: mol_type = other RNA
taaacgtctcaaagtctccgcct

SEQ ID NO: 92046 - RNA, 23 nt, synthetic construct
  source 1..23: mol_type = other RNA
tggccccggcatggggtagctgt

SEQ ID NO: 92047 - RNA, 23 nt, synthetic construct
  source 1..23: mol_type = other RNA
tggccccggcatggggtagctgt

SEQ ID NO: 92048 - RNA, 23 nt, synthetic construct
  source 1..23: mol_type = other RNA
tggccccggcatggggtagctgt

SEQ ID NO: 92049 - RNA, 23 nt, synthetic construct
  source 1..23: mol_type = other RNA
tggccccggcatggggtagctgt

SEQ ID NO: 92050 - RNA, 23 nt, synthetic construct
  source 1..23: mol_type = other RNA
ttaggaaacccatcgggtcccac

SEQ ID NO: 92051 - RNA, 23 nt, synthetic construct
  source 1..23: mol_type = other RNA
ttggctgagccgttaggacagtg

SEQ ID NO: 92052 - RNA, 23 nt, synthetic construct
  source 1..23: mol_type = other RNA
tcagcgtccggcacgcgctcggg

SEQ ID NO: 92053 - RNA, 23 nt, synthetic construct
  source 1..23: mol_type = other RNA
tgtccaccagtgcgtggcactcc

SEQ ID NO: 92054 - RNA, 23 nt, synthetic construct
  source 1..23: mol_type = other RNA
taggcggccaggtacgcagtgct

SEQ ID NO: 92055 - RNA, 23 nt, synthetic construct
  source 1..23: mol_type = other RNA
tagttgaggaacacgccgccgtc

SEQ ID NO: 92056 - RNA, 23 nt, synthetic construct
  source 1..23: mol_type = other RNA
ttcggtcaggcgcgagcaccagt

SEQ ID NO: 92057 - RNA, 23 nt, synthetic construct
  source 1..23: mol_type = other RNA
tgcgcgagaaggcactgttggga

SEQ ID NO: 92058 - RNA, 23 nt, synthetic construct
  source 1..23: mol_type = other RNA
tacggcgccctcgtcgtgcacca

SEQ ID NO: 92059 - RNA, 23 nt, synthetic construct
  source 1..23: mol_type = other RNA
tgctgtagcgatcgccatcaaag

SEQ ID NO: 92060 - RNA, 23 nt, synthetic construct
  source 1..23: mol_type = other RNA
tttggctgttggcgcacatcagc

SEQ ID NO: 92061 - RNA, 23 nt, synthetic construct
  source 1..23: mol_type = other RNA
tcgtgacagagcgggggactctg

SEQ ID NO: 92062 - RNA, 23 nt, synthetic construct
  source 1..23: mol_type = other RNA
tcgcagcagagaacccgcagctc

SEQ ID NO: 92063 - RNA, 23 nt, synthetic construct
  source 1..23: mol_type = other RNA
tggtcacccatagggtggtcttt

SEQ ID NO: 92064 - RNA, 23 nt, synthetic construct
  source 1..23: mol_type = other RNA
tggccgccgtcgaccggatgctc

SEQ ID NO: 92065 - RNA, 23 nt, synthetic construct
  source 1..23: mol_type = other RNA
tagaggggatgggtgtaacgctg

SEQ ID NO: 92066 - RNA, 23 nt, synthetic construct
  source 1..23: mol_type = other RNA
tggccgtggcggtaagcactgtg

SEQ ID NO: 92067 - RNA, 23 nt, synthetic construct
  source 1..23: mol_type = other RNA
tgccggtggccccggttgtggtg

SEQ ID NO: 92068 - RNA, 23 nt, synthetic construct
  source 1..23: mol_type = other RNA
tcccgtggttgtggtagtcggca

SEQ ID NO: 92069 - RNA, 23 nt, synthetic construct
  source 1..23: mol_type = other RNA
tcccgtggttgtggtagtcggca

SEQ ID NO: 92070 - RNA, 23 nt, synthetic construct
  source 1..23: mol_type = other RNA
tggccgtggcggtaagcactgtg

SEQ ID NO: 92071 - RNA, 23 nt, synthetic construct
  source 1..23: mol_type = other RNA
tgccggtggccccggttgtggtg

SEQ ID NO: 92072 - RNA, 23 nt, synthetic construct
  source 1..23: mol_type = other RNA
tcccgtggttgtggtagtcggca

SEQ ID NO: 92073 - RNA, 23 nt, synthetic construct
  source 1..23: mol_type = other RNA
tggtggccgtggaaccggtgggc

SEQ ID NO: 92074 - RNA, 23 nt, synthetic construct
  source 1..23: mol_type = other RNA
tttgcacactgcgtagaaatggc

SEQ ID NO: 92075 - RNA, 23 nt, synthetic construct
  source 1..23: mol_type = other RNA
tggttgtccaggtagaggctgag

SEQ ID NO: 92076 - RNA, 23 nt, synthetic construct
  source 1..23: mol_type = other RNA
tgcagagctctgcgtaagcctcc

SEQ ID NO: 92077 - RNA, 23 nt, synthetic construct
  source 1..23: mol_type = other RNA
tggcagagctctgcgtaagcctc

SEQ ID NO: 92078 - RNA, 23 nt, synthetic construct
  source 1..23: mol_type = other RNA
tggaaacccatcgggtcccacgc

SEQ ID NO: 92079 - RNA, 23 nt, synthetic construct
  source 1..23: mol_type = other RNA
tctggtcacggttacgaagccgg

SEQ ID NO: 92080 - RNA, 23 nt, synthetic construct
  source 1..23: mol_type = other RNA
ttcgtgttgatgcggacttgaca

SEQ ID NO: 92081 - RNA, 23 nt, synthetic construct
  source 1..23: mol_type = other RNA
tccacaggatggtcgtgttgatg

SEQ ID NO: 92082 - RNA, 23 nt, synthetic construct
  source 1..23: mol_type = other RNA
tctgagccgttaggacagtgcaa

SEQ ID NO: 92083 - RNA, 23 nt, synthetic construct
  source 1..23: mol_type = other RNA
tggcacgcgctcggggcacccat

SEQ ID NO: 92084 - RNA, 23 nt, synthetic construct
  source 1..23: mol_type = other RNA
tggagcccactaggcctcggcgt

SEQ ID NO: 92085 - RNA, 23 nt, synthetic construct
  source 1..23: mol_type = other RNA
tacggagccgttggacgcctcca

SEQ ID NO: 92086 - RNA, 23 nt, synthetic construct
  source 1..23: mol_type = other RNA
taggacggagccgttggacgcct

SEQ ID NO: 92087 - RNA, 23 nt, synthetic construct
  source 1..23: mol_type = other RNA
taggccagtgcggctgtaaggca

SEQ ID NO: 92088 - RNA, 23 nt, synthetic construct
  source 1..23: mol_type = other RNA
tgaggccgttgaagtccccacac

SEQ ID NO: 92089 - RNA, 23 nt, synthetic construct
  source 1..23: mol_type = other RNA
tctcctcgtccgtgcagttgccg

SEQ ID NO: 92090 - RNA, 23 nt, synthetic construct
  source 1..23: mol_type = other RNA
tccctcctcgtccgtgcagttgc

SEQ ID NO: 92091 - RNA, 23 nt, synthetic construct
  source 1..23: mol_type = other RNA
tttccacaaaggtggcacacggg

SEQ ID NO: 92092 - RNA, 23 nt, synthetic construct
  source 1..23: mol_type = other RNA
tagccagagtgcgtgatgtcatc

SEQ ID NO: 92093 - RNA, 23 nt, synthetic construct
  source 1..23: mol_type = other RNA
tgaggtgcccgggctgtaggtgc

SEQ ID NO: 92094 - RNA, 23 nt, synthetic construct
  source 1..23: mol_type = other RNA
tgtttctcatcataggtggagat

SEQ ID NO: 92095 - RNA, 23 nt, synthetic construct
  source 1..23: mol_type = other RNA
ttcagccagcacggtgaagctgc

SEQ ID NO: 92096 - RNA, 23 nt, synthetic construct
  source 1..23: mol_type = other RNA
tgcttggacccggatggccgtgt

SEQ ID NO: 92097 - RNA, 23 nt, synthetic construct
  source 1..23: mol_type = other RNA
tgccgccgtccgcttggacccgg

SEQ ID NO: 92098 - RNA, 23 nt, synthetic construct
  source 1..23: mol_type = other RNA
tacacctgcatgagtggcaccag

SEQ ID NO: 92099 - RNA, 23 nt, synthetic construct
  source 1..23: mol_type = other RNA
tcttcccacccgtacatgaacac

SEQ ID NO: 92100 - RNA, 23 nt, synthetic construct
  source 1..23: mol_type = other RNA
tagctgtagcgatcgccatcaaa

SEQ ID NO: 92101 - RNA, 23 nt, synthetic construct
  source 1..23: mol_type = other RNA
tcctgggccaagatgtactcgca

SEQ ID NO: 92102 - RNA, 23 nt, synthetic construct
  source 1..23: mol_type = other RNA
tgatgaacacgctggtcttccgg

SEQ ID NO: 92103 - RNA, 23 nt, synthetic construct
  source 1..23: mol_type = other RNA
tcatagtagtttccgtccttgtc

SEQ ID NO: 92104 - RNA, 23 nt, synthetic construct
  source 1..23: mol_type = other RNA
tcccttgcaccgacgtcatagta

SEQ ID NO: 92105 - RNA, 23 nt, synthetic construct
  source 1..23: mol_type = other RNA
tgatggcgatcaagcaggcgcca

SEQ ID NO: 92106 - RNA, 23 nt, synthetic construct
  source 1..23: mol_type = other RNA
tccgcccggcactcgatgtcagc

SEQ ID NO: 92107 - RNA, 23 nt, synthetic construct
  source 1..23: mol_type = other RNA
ttggctgttggcgcacatcagcc

SEQ ID NO: 92108 - RNA, 23 nt, synthetic construct
  source 1..23: mol_type = other RNA
tgggccgccgtcgaccggatgct

SEQ ID NO: 92109 - RNA, 23 nt, synthetic construct
  source 1..23: mol_type = other RNA
tagggccgccgtcgaccggatgc

SEQ ID NO: 92110 - RNA, 23 nt, synthetic construct
  source 1..23: mol_type = other RNA
tcagcggccctgatcttatcgta

SEQ ID NO: 92111 - RNA, 23 nt, synthetic construct
  source 1..23: mol_type = other RNA
taggctgcggcgttgagaacagg

SEQ ID NO: 92112 - RNA, 23 nt, synthetic construct
  source 1..23: mol_type = other RNA
tctgtgaggggcgccatgtgccc

SEQ ID NO: 92113 - RNA, 23 nt, synthetic construct
  source 1..23: mol_type = other RNA
tctgtgcctgtcgggcgagctct

SEQ ID NO: 92114 - RNA, 23 nt, synthetic construct
  source 1..23: mol_type = other RNA
tagcggctctttggaagcggtgc

SEQ ID NO: 92115 - RNA, 23 nt, synthetic construct
  source 1..23: mol_type = other RNA
ttggaagggcggttgcagtccct

SEQ ID NO: 92116 - RNA, 23 nt, synthetic construct
  source 1..23: mol_type = other RNA
ttgtggtggtctgtgataggcgg

SEQ ID NO: 92117 - RNA, 23 nt, synthetic construct
  source 1..23: mol_type = other RNA
tggtagttggcactttggtagtg

SEQ ID NO: 92118 - RNA, 23 nt, synthetic construct
  source 1..23: mol_type = other RNA
ttaccggtggttgctgctagggt

SEQ ID NO: 92119 - RNA, 23 nt, synthetic construct
  source 1..23: mol_type = other RNA
tgtaccggtggttgctgctaggg

SEQ ID NO: 92120 - RNA, 23 nt, synthetic construct
  source 1..23: mol_type = other RNA
tgtcgaggtgcgggtcttgctgg

SEQ ID NO: 92121 - RNA, 23 nt, synthetic construct
  source 1..23: mol_type = other RNA
ttgggcacggcactcgaggccca

SEQ ID NO: 92122 - RNA, 23 nt, synthetic construct
  source 1..23: mol_type = other RNA
ttggaagggcggttgcagtccct

SEQ ID NO: 92123 - RNA, 23 nt, synthetic construct
  source 1..23: mol_type = other RNA
ttgtggtggtctgtgataggcgg

SEQ ID NO: 92124 - RNA, 23 nt, synthetic construct
  source 1..23: mol_type = other RNA
tagggggtcaccgtggaacctct

SEQ ID NO: 92125 - RNA, 23 nt, synthetic construct
  source 1..23: mol_type = other RNA
tgtcgaggtgcgggtcttgctgg

SEQ ID NO: 92126 - RNA, 23 nt, synthetic construct
  source 1..23: mol_type = other RNA
ttgggcacggcactcgaggccca

SEQ ID NO: 92127 - RNA, 23 nt, synthetic construct
  source 1..23: mol_type = other RNA
tggtgtaaagctggtagctgtgg

SEQ ID NO: 92128 - RNA, 23 nt, synthetic construct
  source 1..23: mol_type = other RNA
ttggaagggcggttgcagtccct

SEQ ID NO: 92129 - RNA, 23 nt, synthetic construct
  source 1..23: mol_type = other RNA
ttgtggtggtctgtgataggcgg

SEQ ID NO: 92130 - RNA, 23 nt, synthetic construct
  source 1..23: mol_type = other RNA
tagtcggcactttggtagtgtga

SEQ ID NO: 92131 - RNA, 23 nt, synthetic construct
  source 1..23: mol_type = other RNA
tgtcgaggtgcgggtcttgctgg

SEQ ID NO: 92132 - RNA, 23 nt, synthetic construct
  source 1..23: mol_type = other RNA
tagcccgtggtcaccaccgtggt

SEQ ID NO: 92133 - RNA, 23 nt, synthetic construct
  source 1..23: mol_type = other RNA
ttgggcacggcactcgaggccca

SEQ ID NO: 92134 - RNA, 23 nt, synthetic construct
  source 1..23: mol_type = other RNA
ttggaagggcggttgcagtccct

SEQ ID NO: 92135 - RNA, 23 nt, synthetic construct
  source 1..23: mol_type = other RNA
ttgtggtggtctgtgataggcgg

SEQ ID NO: 92136 - RNA, 23 nt, synthetic construct
  source 1..23: mol_type = other RNA
tagtcggcactttggtagtgtga

SEQ ID NO: 92137 - RNA, 23 nt, synthetic construct
  source 1..23: mol_type = other RNA
tactggaggcgtgcgtgccgtcc

SEQ ID NO: 92138 - RNA, 23 nt, synthetic construct
  source 1..23: mol_type = other RNA
tgtcgaggtgcgggtcttgctgg

SEQ ID NO: 92139 - RNA, 23 nt, synthetic construct
  source 1..23: mol_type = other RNA
tagcccgtggtcaccaccgtggt

SEQ ID NO: 92140 - RNA, 23 nt, synthetic construct
  source 1..23: mol_type = other RNA
ttgggcacggcactcgaggccca

SEQ ID NO: 92141 - RNA, 23 nt, synthetic construct
  source 1..23: mol_type = other RNA
tgggggtggacgtggaactggtg

SEQ ID NO: 92142 - RNA, 23 nt, synthetic construct
  source 1..23: mol_type = other RNA
ttgtggtggtctgtgataggcgg

SEQ ID NO: 92143 - RNA, 23 nt, synthetic construct
  source 1..23: mol_type = other RNA
tagtcggcactttggtagtgtga

SEQ ID NO: 92144 - RNA, 23 nt, synthetic construct
  source 1..23: mol_type = other RNA
tggtgtaaagctggtagctgtgg

SEQ ID NO: 92145 - RNA, 23 nt, synthetic construct
  source 1..23: mol_type = other RNA
tttccccgggcgagaaaaactgt

SEQ ID NO: 92146 - RNA, 23 nt, synthetic construct
  source 1..23: mol_type = other RNA
tgacttccccgggcgagaaaaac

SEQ ID NO: 92147 - RNA, 23 nt, synthetic construct
  source 1..23: mol_type = other RNA
taaatggcagccggctcggtcgg

SEQ ID NO: 92148 - RNA, 23 nt, synthetic construct
  source 1..23: mol_type = other RNA
tgaaatggcagccggctcggtcg

SEQ ID NO: 92149 - RNA, 23 nt, synthetic construct
  source 1..23: mol_type = other RNA
taagcggtcaatgtcacagtgct

SEQ ID NO: 92150 - RNA, 23 nt, synthetic construct
  source 1..23: mol_type = other RNA
tacagcggggcggaggacactgg

SEQ ID NO: 92151 - RNA, 23 nt, synthetic construct
  source 1..23: mol_type = other RNA
tattcccaaagcgtgcatggatc

SEQ ID NO: 92152 - RNA, 23 nt, synthetic construct
  source 1..23: mol_type = other RNA
tacagtgaggacgatatccatgg

SEQ ID NO: 92153 - RNA, 23 nt, synthetic construct
  source 1..23: mol_type = other RNA
tattgaaggtgacgctcacgccc

SEQ ID NO: 92154 - RNA, 23 nt, synthetic construct
  source 1..23: mol_type = other RNA
tccattgaaggtgacgctcacgc

SEQ ID NO: 92155 - RNA, 23 nt, synthetic construct
  source 1..23: mol_type = other RNA
tgtccttgcaactggcggcagtg

SEQ ID NO: 92156 - RNA, 23 nt, synthetic construct
  source 1..23: mol_type = other RNA
ttgtccttgcaactggcggcagt

SEQ ID NO: 92157 - RNA, 23 nt, synthetic construct
  source 1..23: mol_type = other RNA
tgtgggtgtgctagacaccgggg

SEQ ID NO: 92158 - RNA, 23 nt, synthetic construct
  source 1..23: mol_type = other RNA
tgggcacaaggttgtggcactca

SEQ ID NO: 92159 - RNA, 23 nt, synthetic construct
  source 1..23: mol_type = other RNA
ttgcagtggtcgctgatgcaggc

SEQ ID NO: 92160 - RNA, 23 nt, synthetic construct
  source 1..23: mol_type = other RNA
tagagctctgcgtaagcctccag

SEQ ID NO: 92161 - RNA, 23 nt, synthetic construct
  source 1..23: mol_type = other RNA
tcgggtcccacgcaggggcaggc

SEQ ID NO: 92162 - RNA, 23 nt, synthetic construct
  source 1..23: mol_type = other RNA
ttgaaccctcgtcacacacgcag

SEQ ID NO: 92163 - RNA, 23 nt, synthetic construct
  source 1..23: mol_type = other RNA
tgcctggtcacggttacgaagcc

SEQ ID NO: 92164 - RNA, 23 nt, synthetic construct
  source 1..23: mol_type = other RNA
tgggcctggtcacggttacgaag

SEQ ID NO: 92165 - RNA, 23 nt, synthetic construct
  source 1..23: mol_type = other RNA
tacaggatggtcgtgttgatgcg

SEQ ID NO: 92166 - RNA, 23 nt, synthetic construct
  source 1..23: mol_type = other RNA
tggctgagccgttaggacagtgc

SEQ ID NO: 92167 - RNA, 23 nt, synthetic construct
  source 1..23: mol_type = other RNA
tcgcagaggaggcccaaggtttt

SEQ ID NO: 92168 - RNA, 23 nt, synthetic construct
  source 1..23: mol_type = other RNA
tgcgccctcccgaaaggggtcct

SEQ ID NO: 92169 - RNA, 23 nt, synthetic construct
  source 1..23: mol_type = other RNA
tagggacacataggcccgcacat

SEQ ID NO: 92170 - RNA, 23 nt, synthetic construct
  source 1..23: mol_type = other RNA
tcgcgctcggggcacccatcctg

SEQ ID NO: 92171 - RNA, 23 nt, synthetic construct
  source 1..23: mol_type = other RNA
tacgcgctcggggcacccatcct

SEQ ID NO: 92172 - RNA, 23 nt, synthetic construct
  source 1..23: mol_type = other RNA
tgtccggcacgcgctcggggcac

SEQ ID NO: 92173 - RNA, 23 nt, synthetic construct
  source 1..23: mol_type = other RNA
tggccgccagagccaacaccagc

SEQ ID NO: 92174 - RNA, 23 nt, synthetic construct
  source 1..23: mol_type = other RNA
ttggccgccagagccaacaccag

SEQ ID NO: 92175 - RNA, 23 nt, synthetic construct
  source 1..23: mol_type = other RNA
taccacgagcatggccgccagag

SEQ ID NO: 92176 - RNA, 23 nt, synthetic construct
  source 1..23: mol_type = other RNA
tcaccacgagcatggccgccaga

SEQ ID NO: 92177 - RNA, 23 nt, synthetic construct
  source 1..23: mol_type = other RNA
tctgcctgcggcaccacgagcat

SEQ ID NO: 92178 - RNA, 23 nt, synthetic construct
  source 1..23: mol_type = other RNA
ttctgcctgcggcaccacgagca

SEQ ID NO: 92179 - RNA, 23 nt, synthetic construct
  source 1..23: mol_type = other RNA
tcaccgccatccatggtgtgccc

SEQ ID NO: 92180 - RNA, 23 nt, synthetic construct
  source 1..23: mol_type = other RNA
tcggggcaccgccatccatggtg

SEQ ID NO: 92181 - RNA, 23 nt, synthetic construct
  source 1..23: mol_type = other RNA
ttcacgcgccgggtgggcgagga

SEQ ID NO: 92182 - RNA, 23 nt, synthetic construct
  source 1..23: mol_type = other RNA
tgtagttgcaaaggccagggaag

SEQ ID NO: 92183 - RNA, 23 nt, synthetic construct
  source 1..23: mol_type = other RNA
tcgtagttgcaaaggccagggaa

SEQ ID NO: 92184 - RNA, 23 nt, synthetic construct
  source 1..23: mol_type = other RNA
tagcccactaggcctcggcgtag

SEQ ID NO: 92185 - RNA, 23 nt, synthetic construct
  source 1..23: mol_type = other RNA
tggagccgttggacgcctccagc

SEQ ID NO: 92186 - RNA, 23 nt, synthetic construct
  source 1..23: mol_type = other RNA
tcggagccgttggacgcctccag

SEQ ID NO: 92187 - RNA, 23 nt, synthetic construct
  source 1..23: mol_type = other RNA
tatgaggacggagccgttggacg

SEQ ID NO: 92188 - RNA, 23 nt, synthetic construct
  source 1..23: mol_type = other RNA
tggccagtgcggctgtaaggcag

SEQ ID NO: 92189 - RNA, 23 nt, synthetic construct
  source 1..23: mol_type = other RNA
taatgtcagcaccagccggatgc

SEQ ID NO: 92190 - RNA, 23 nt, synthetic construct
  source 1..23: mol_type = other RNA
ttggcgtatttgggatccagctc

SEQ ID NO: 92191 - RNA, 23 nt, synthetic construct
  source 1..23: mol_type = other RNA
tgttggcgtatttgggatccagc

SEQ ID NO: 92192 - RNA, 23 nt, synthetic construct
  source 1..23: mol_type = other RNA
tctcgttgaaggccgggaggccg

SEQ ID NO: 92193 - RNA, 23 nt, synthetic construct
  source 1..23: mol_type = other RNA
tactcgttgaaggccgggaggcc

SEQ ID NO: 92194 - RNA, 23 nt, synthetic construct
  source 1..23: mol_type = other RNA
tctggcgttgtgggcatagaact

SEQ ID NO: 92195 - RNA, 23 nt, synthetic construct
  source 1..23: mol_type = other RNA
taaactggagcggggtcagcctg

SEQ ID NO: 92196 - RNA, 23 nt, synthetic construct
  source 1..23: mol_type = other RNA
tgttgccggccggcaagggcagc

SEQ ID NO: 92197 - RNA, 23 nt, synthetic construct
  source 1..23: mol_type = other RNA
tgcagttgccggccggcaagggc

SEQ ID NO: 92198 - RNA, 23 nt, synthetic construct
  source 1..23: mol_type = other RNA
tgtgcagttgccggccggcaagg

SEQ ID NO: 92199 - RNA, 23 nt, synthetic construct
  source 1..23: mol_type = other RNA
ttccaccagtgcgtggcactccg

SEQ ID NO: 92200 - RNA, 23 nt, synthetic construct
  source 1..23: mol_type = other RNA
tctgtccaccagtgcgtggcact

SEQ ID NO: 92201 - RNA, 23 nt, synthetic construct
  source 1..23: mol_type = other RNA
tcaggtacgcagtgctgtccacc

SEQ ID NO: 92202 - RNA, 23 nt, synthetic construct
  source 1..23: mol_type = other RNA
tggccaggtacgcagtgctgtcc

SEQ ID NO: 92203 - RNA, 23 nt, synthetic construct
  source 1..23: mol_type = other RNA
tgcggccaggtacgcagtgctgt

SEQ ID NO: 92204 - RNA, 23 nt, synthetic construct
  source 1..23: mol_type = other RNA
taaaggtggcacacgggcaggtg

SEQ ID NO: 92205 - RNA, 23 nt, synthetic construct
  source 1..23: mol_type = other RNA
tattccacaaaggtggcacacgg

SEQ ID NO: 92206 - RNA, 23 nt, synthetic construct
  source 1..23: mol_type = other RNA
ttattccacaaaggtggcacacg

SEQ ID NO: 92207 - RNA, 23 nt, synthetic construct
  source 1..23: mol_type = other RNA
tccagttccgcggctggcccccc

SEQ ID NO: 92208 - RNA, 23 nt, synthetic construct
  source 1..23: mol_type = other RNA
tctccagttccgcggctggcccc

SEQ ID NO: 92209 - RNA, 23 nt, synthetic construct
  source 1..23: mol_type = other RNA
tatgttgagggggcaggtccggg

SEQ ID NO: 92210 - RNA, 23 nt, synthetic construct
  source 1..23: mol_type = other RNA
tcatgttgagggggcaggtccgg

SEQ ID NO: 92211 - RNA, 23 nt, synthetic construct
  source 1..23: mol_type = other RNA
tgctgcatgttgagggggcaggt

SEQ ID NO: 92212 - RNA, 23 nt, synthetic construct
  source 1..23: mol_type = other RNA
taggtgtccgtgcagggtgagcc

SEQ ID NO: 92213 - RNA, 23 nt, synthetic construct
  source 1..23: mol_type = other RNA
tccatagccccccggagcaggtg

SEQ ID NO: 92214 - RNA, 23 nt, synthetic construct
  source 1..23: mol_type = other RNA
tcctggcactgccatagcccccc

SEQ ID NO: 92215 - RNA, 23 nt, synthetic construct
  source 1..23: mol_type = other RNA
tcataggtggagatgtgggcccc

SEQ ID NO: 92216 - RNA, 23 nt, synthetic construct
  source 1..23: mol_type = other RNA
tcatcataggtggagatgtgggc

SEQ ID NO: 92217 - RNA, 23 nt, synthetic construct
  source 1..23: mol_type = other RNA
tctcatcataggtggagatgtgg

SEQ ID NO: 92218 - RNA, 23 nt, synthetic construct
  source 1..23: mol_type = other RNA
taggtcgtagagtttctcatcat

SEQ ID NO: 92219 - RNA, 23 nt, synthetic construct
  source 1..23: mol_type = other RNA
tacgtagctgcagtcaccatgca

SEQ ID NO: 92220 - RNA, 23 nt, synthetic construct
  source 1..23: mol_type = other RNA
tgtcaggccgcacttccgcagct

SEQ ID NO: 92221 - RNA, 23 nt, synthetic construct
  source 1..23: mol_type = other RNA
ttcgttgtccgtcaggccgcact

SEQ ID NO: 92222 - RNA, 23 nt, synthetic construct
  source 1..23: mol_type = other RNA
tctcgttgtccgtcaggccgcac

SEQ ID NO: 92223 - RNA, 23 nt, synthetic construct
  source 1..23: mol_type = other RNA
tgttctcgttgtccgtcaggccg

SEQ ID NO: 92224 - RNA, 23 nt, synthetic construct
  source 1..23: mol_type = other RNA
taccgctttcaggcagttctcgt

SEQ ID NO: 92225 - RNA, 23 nt, synthetic construct
  source 1..23: mol_type = other RNA
tgtcaccgctttcaggcagttct

SEQ ID NO: 92226 - RNA, 23 nt, synthetic construct
  source 1..23: mol_type = other RNA
tgctgagcgtcaccgctttcagg

SEQ ID NO: 92227 - RNA, 23 nt, synthetic construct
  source 1..23: mol_type = other RNA
tccgcttggacccggatggccgt

SEQ ID NO: 92228 - RNA, 23 nt, synthetic construct
  source 1..23: mol_type = other RNA
tcgccgtccgcttggacccggat

SEQ ID NO: 92229 - RNA, 23 nt, synthetic construct
  source 1..23: mol_type = other RNA
ttgcaccacgatgaagaagctcg

SEQ ID NO: 92230 - RNA, 23 nt, synthetic construct
  source 1..23: mol_type = other RNA
taacacctgcatgagtggcacca

SEQ ID NO: 92231 - RNA, 23 nt, synthetic construct
  source 1..23: mol_type = other RNA
tcgctgagggccgtgaagtcgtc

SEQ ID NO: 92232 - RNA, 23 nt, synthetic construct
  source 1..23: mol_type = other RNA
tccccgctgagggccgtgaagtc

SEQ ID NO: 92233 - RNA, 23 nt, synthetic construct
  source 1..23: mol_type = other RNA
tcgaaggctgcgcccgtggcctc

SEQ ID NO: 92234 - RNA, 23 nt, synthetic construct
  source 1..23: mol_type = other RNA
tgcgagaaggcactgttgggatc

SEQ ID NO: 92235 - RNA, 23 nt, synthetic construct
  source 1..23: mol_type = other RNA
tcagcgcgagaaggcactgttgg

SEQ ID NO: 92236 - RNA, 23 nt, synthetic construct
  source 1..23: mol_type = other RNA
ttcactcaggccgcggcaagtgg

SEQ ID NO: 92237 - RNA, 23 nt, synthetic construct
  source 1..23: mol_type = other RNA
ttgagcgtagcaggggcactcct

SEQ ID NO: 92238 - RNA, 23 nt, synthetic construct
  source 1..23: mol_type = other RNA
tccgtgagcgtagcaggggcact

SEQ ID NO: 92239 - RNA, 23 nt, synthetic construct
  source 1..23: mol_type = other RNA
tcagcacggtgccgtgagcgtag

SEQ ID NO: 92240 - RNA, 23 nt, synthetic construct
  source 1..23: mol_type = other RNA
tagccagcacggtgccgtgagcg

SEQ ID NO: 92241 - RNA, 23 nt, synthetic construct
  source 1..23: mol_type = other RNA
ttcgtcgtgcaccacctctccag

SEQ ID NO: 92242 - RNA, 23 nt, synthetic construct
  source 1..23: mol_type = other RNA
tctcgtcgtgcaccacctctcca

SEQ ID NO: 92243 - RNA, 23 nt, synthetic construct
  source 1..23: mol_type = other RNA
tgaacacacggcgccctcgtcgt

SEQ ID NO: 92244 - RNA, 23 nt, synthetic construct
  source 1..23: mol_type = other RNA
ttgaacacacggcgccctcgtcg

SEQ ID NO: 92245 - RNA, 23 nt, synthetic construct
  source 1..23: mol_type = other RNA
tatgaacacacggcgccctcgtc

SEQ ID NO: 92246 - RNA, 23 nt, synthetic construct
  source 1..23: mol_type = other RNA
tgcttcccacccgtacatgaaca

SEQ ID NO: 92247 - RNA, 23 nt, synthetic construct
  source 1..23: mol_type = other RNA
taggtacaccatgggggctgcac

SEQ ID NO: 92248 - RNA, 23 nt, synthetic construct
  source 1..23: mol_type = other RNA
tcaggtacaccatgggggctgca

SEQ ID NO: 92249 - RNA, 23 nt, synthetic construct
  source 1..23: mol_type = other RNA
tccaggtacaccatgggggctgc

SEQ ID NO: 92250 - RNA, 23 nt, synthetic construct
  source 1..23: mol_type = other RNA
tgtcctcctcggcaatgcagccc

SEQ ID NO: 92251 - RNA, 23 nt, synthetic construct
  source 1..23: mol_type = other RNA
ttgtagcgatcgccatcaaaggt

SEQ ID NO: 92252 - RNA, 23 nt, synthetic construct
  source 1..23: mol_type = other RNA
taagctgtagcgatcgccatcaa

SEQ ID NO: 92253 - RNA, 23 nt, synthetic construct
  source 1..23: mol_type = other RNA
taaagctgtagcgatcgccatca

SEQ ID NO: 92254 - RNA, 23 nt, synthetic construct
  source 1..23: mol_type = other RNA
tcaagatgtactcgcagctgcct

SEQ ID NO: 92255 - RNA, 23 nt, synthetic construct
  source 1..23: mol_type = other RNA
tgccttaaaggtcccctcttgga

SEQ ID NO: 92256 - RNA, 23 nt, synthetic construct
  source 1..23: mol_type = other RNA
tcgccaccgccttaaaggtcccc

SEQ ID NO: 92257 - RNA, 23 nt, synthetic construct
  source 1..23: mol_type = other RNA
ttagggtgggtccccacccggcc

SEQ ID NO: 92258 - RNA, 23 nt, synthetic construct
  source 1..23: mol_type = other RNA
ttgggtctcgatgaccaggaaga

SEQ ID NO: 92259 - RNA, 23 nt, synthetic construct
  source 1..23: mol_type = other RNA
tcggccatcccgtgggtctcgat

SEQ ID NO: 92260 - RNA, 23 nt, synthetic construct
  source 1..23: mol_type = other RNA
ttgcagtcggatgaacacgctgg

SEQ ID NO: 92261 - RNA, 23 nt, synthetic construct
  source 1..23: mol_type = other RNA
tggtgccagggcgtccgggcagg

SEQ ID NO: 92262 - RNA, 23 nt, synthetic construct
  source 1..23: mol_type = other RNA
tgccacccgagtcgcaggcacac

SEQ ID NO: 92263 - RNA, 23 nt, synthetic construct
  source 1..23: mol_type = other RNA
tcagtcgccacccgagtcgcagg

SEQ ID NO: 92264 - RNA, 23 nt, synthetic construct
  source 1..23: mol_type = other RNA
taacaaggggcaggtgtccggag

SEQ ID NO: 92265 - RNA, 23 nt, synthetic construct
  source 1..23: mol_type = other RNA
tgcccccatgtgggttgtagaag

SEQ ID NO: 92266 - RNA, 23 nt, synthetic construct
  source 1..23: mol_type = other RNA
tagcccccatgtgggttgtagaa

SEQ ID NO: 92267 - RNA, 23 nt, synthetic construct
  source 1..23: mol_type = other RNA
tagtagtttccgtccttgtcgta

SEQ ID NO: 92268 - RNA, 23 nt, synthetic construct
  source 1..23: mol_type = other RNA
ttgtggggacccttgcaccgacg

SEQ ID NO: 92269 - RNA, 23 nt, synthetic construct
  source 1..23: mol_type = other RNA
tgggtgtgcagttacagctctgg

SEQ ID NO: 92270 - RNA, 23 nt, synthetic construct
  source 1..23: mol_type = other RNA
tgtagctgtaggtcctgtcctca

SEQ ID NO: 92271 - RNA, 23 nt, synthetic construct
  source 1..23: mol_type = other RNA
tgcaggcgccaagcccatcggtg

SEQ ID NO: 92272 - RNA, 23 nt, synthetic construct
  source 1..23: mol_type = other RNA
tggtgccgttgcttccgcagatg

SEQ ID NO: 92273 - RNA, 23 nt, synthetic construct
  source 1..23: mol_type = other RNA
ttgatggtgccgttgcttccgca

SEQ ID NO: 92274 - RNA, 23 nt, synthetic construct
  source 1..23: mol_type = other RNA
tatgatggtgccgttgcttccgc

SEQ ID NO: 92275 - RNA, 23 nt, synthetic construct
  source 1..23: mol_type = other RNA
taggtgaatggcgttgtggctgg

SEQ ID NO: 92276 - RNA, 23 nt, synthetic construct
  source 1..23: mol_type = other RNA
ttctcaaagtctccgcctcccag

SEQ ID NO: 92277 - RNA, 23 nt, synthetic construct
  source 1..23: mol_type = other RNA
tgtctcaaagtctccgcctccca

SEQ ID NO: 92278 - RNA, 23 nt, synthetic construct
  source 1..23: mol_type = other RNA
tcccccgcatgcggtcacagtcc

SEQ ID NO: 92279 - RNA, 23 nt, synthetic construct
  source 1..23: mol_type = other RNA
tatcagcccccgcatgcggtcac

SEQ ID NO: 92280 - RNA, 23 nt, synthetic construct
  source 1..23: mol_type = other RNA
tgcgcacatcagcccccgcatgc

SEQ ID NO: 92281 - RNA, 23 nt, synthetic construct
  source 1..23: mol_type = other RNA
tggcgcacatcagcccccgcatg

SEQ ID NO: 92282 - RNA, 23 nt, synthetic construct
  source 1..23: mol_type = other RNA
tttggcgcacatcagcccccgca

SEQ ID NO: 92283 - RNA, 23 nt, synthetic construct
  source 1..23: mol_type = other RNA
ttgacagagcgggggactctgtt

SEQ ID NO: 92284 - RNA, 23 nt, synthetic construct
  source 1..23: mol_type = other RNA
tgtcgtgacagagcgggggactc

SEQ ID NO: 92285 - RNA, 23 nt, synthetic construct
  source 1..23: mol_type = other RNA
tgcacgtattcgcagcagagaac

SEQ ID NO: 92286 - RNA, 23 nt, synthetic construct
  source 1..23: mol_type = other RNA
tggggtaggcacagcaggctccg

SEQ ID NO: 92287 - RNA, 23 nt, synthetic construct
  source 1..23: mol_type = other RNA
tgctggacccagtctgcgaggtg

SEQ ID NO: 92288 - RNA, 23 nt, synthetic construct
  source 1..23: mol_type = other RNA
ttggtacctggggccgagggggt

SEQ ID NO: 92289 - RNA, 23 nt, synthetic construct
  source 1..23: mol_type = other RNA
tctggcataagtgccctccagcg

SEQ ID NO: 92290 - RNA, 23 nt, synthetic construct
  source 1..23: mol_type = other RNA
ttgctggcataagtgccctccag

SEQ ID NO: 92291 - RNA, 23 nt, synthetic construct
  source 1..23: mol_type = other RNA
tgaagtggacgtcacagtgcacc

SEQ ID NO: 92292 - RNA, 23 nt, synthetic construct
  source 1..23: mol_type = other RNA
tcgaagtggacgtcacagtgcac

SEQ ID NO: 92293 - RNA, 23 nt, synthetic construct
  source 1..23: mol_type = other RNA
tgcggcgttgagaacagggcctg

SEQ ID NO: 92294 - RNA, 23 nt, synthetic construct
  source 1..23: mol_type = other RNA
ttgtcagtccttctgagagggtg

SEQ ID NO: 92295 - RNA, 23 nt, synthetic construct
  source 1..23: mol_type = other RNA
tgtgtatctgggggatgtcagtc

SEQ ID NO: 92296 - RNA, 23 nt, synthetic construct
  source 1..23: mol_type = other RNA
tgtggggcctcccgtggtggctg

SEQ ID NO: 92297 - RNA, 23 nt, synthetic construct
  source 1..23: mol_type = other RNA
tggcgtcgtggggcctcccgtgg

SEQ ID NO: 92298 - RNA, 23 nt, synthetic construct
  source 1..23: mol_type = other RNA
tccccgtcgtccctggaagggct

SEQ ID NO: 92299 - RNA, 23 nt, synthetic construct
  source 1..23: mol_type = other RNA
ttgtgaggggcgccatgtgccca

SEQ ID NO: 92300 - RNA, 23 nt, synthetic construct
  source 1..23: mol_type = other RNA
tgctgtgaggggcgccatgtgcc

SEQ ID NO: 92301 - RNA, 23 nt, synthetic construct
  source 1..23: mol_type = other RNA
tttgttggggccagcgtgggtgg

SEQ ID NO: 92302 - RNA, 23 nt, synthetic construct
  source 1..23: mol_type = other RNA
tcattgttgttggggccagcgtg

SEQ ID NO: 92303 - RNA, 23 nt, synthetic construct
  source 1..23: mol_type = other RNA
tggcgagctctggaggttgccat

SEQ ID NO: 92304 - RNA, 23 nt, synthetic construct
  source 1..23: mol_type = other RNA
ttcgggcgagctctggaggttgc

SEQ ID NO: 92305 - RNA, 23 nt, synthetic construct
  source 1..23: mol_type = other RNA
tggtcagcggctctttggaagcg

SEQ ID NO: 92306 - RNA, 23 nt, synthetic construct
  source 1..23: mol_type = other RNA
ttggtcagcggctctttggaagc

SEQ ID NO: 92307 - RNA, 23 nt, synthetic construct
  source 1..23: mol_type = other RNA
tcgtggtcagcggctctttggaa

SEQ ID NO: 92308 - RNA, 23 nt, synthetic construct
  source 1..23: mol_type = other RNA
tggcgccaggctcgtggtcagcg

SEQ ID NO: 92309 - RNA, 23 nt, synthetic construct
  source 1..23: mol_type = other RNA
tttggcgccaggctcgtggtcag

SEQ ID NO: 92310 - RNA, 23 nt, synthetic construct
  source 1..23: mol_type = other RNA
tgacagctcgctcgtgagtgttg

SEQ ID NO: 92311 - RNA, 23 nt, synthetic construct
  source 1..23: mol_type = other RNA
tggtctcggcctgagaggtggac

SEQ ID NO: 92312 - RNA, 23 nt, synthetic construct
  source 1..23: mol_type = other RNA
tgtgctggtctcggcctgagagg

SEQ ID NO: 92313 - RNA, 23 nt, synthetic construct
  source 1..23: mol_type = other RNA
tggcgtgctggtctcggcctgag

SEQ ID NO: 92314 - RNA, 23 nt, synthetic construct
  source 1..23: mol_type = other RNA
taggggctcattgtcgtctctgt

SEQ ID NO: 92315 - RNA, 23 nt, synthetic construct
  source 1..23: mol_type = other RNA
taacgctggtagctgtgggtgtg

SEQ ID NO: 92316 - RNA, 23 nt, synthetic construct
  source 1..23: mol_type = other RNA
tgtctgtgataggcgggtccagg

SEQ ID NO: 92317 - RNA, 23 nt, synthetic construct
  source 1..23: mol_type = other RNA
ttggccgtgggtgtggtggtctg

SEQ ID NO: 92318 - RNA, 23 nt, synthetic construct
  source 1..23: mol_type = other RNA
ttaagcactgtggaggtgtgggc

SEQ ID NO: 92319 - RNA, 23 nt, synthetic construct
  source 1..23: mol_type = other RNA
tccgtggttgtggtagttggcac

SEQ ID NO: 92320 - RNA, 23 nt, synthetic construct
  source 1..23: mol_type = other RNA
taagcccgtggttgtggtagttg

SEQ ID NO: 92321 - RNA, 23 nt, synthetic construct
  source 1..23: mol_type = other RNA
ttgtgaagcccgtggttgtggta

SEQ ID NO: 92322 - RNA, 23 nt, synthetic construct
  source 1..23: mol_type = other RNA
tggcgtgagtgccgtccctgggc

SEQ ID NO: 92323 - RNA, 23 nt, synthetic construct
  source 1..23: mol_type = other RNA
tgatccacactggaggcgtgagt

SEQ ID NO: 92324 - RNA, 23 nt, synthetic construct
  source 1..23: mol_type = other RNA
tcgtggagcctctggttgtgggt

SEQ ID NO: 92325 - RNA, 23 nt, synthetic construct
  source 1..23: mol_type = other RNA
ttgggtggtccccgggatggagg

SEQ ID NO: 92326 - RNA, 23 nt, synthetic construct
  source 1..23: mol_type = other RNA
tggtcagcactgtggcggtgtgg

SEQ ID NO: 92327 - RNA, 23 nt, synthetic construct
  source 1..23: mol_type = other RNA
tagaaccagtggccacagttgtg

SEQ ID NO: 92328 - RNA, 23 nt, synthetic construct
  source 1..23: mol_type = other RNA
tctggtctgtgtgctagaggagg

SEQ ID NO: 92329 - RNA, 23 nt, synthetic construct
  source 1..23: mol_type = other RNA
tgtggtcagtgatgggggagtac

SEQ ID NO: 92330 - RNA, 23 nt, synthetic construct
  source 1..23: mol_type = other RNA
tggtggccgtgatcgtagtggcc

SEQ ID NO: 92331 - RNA, 23 nt, synthetic construct
  source 1..23: mol_type = other RNA
tgttcggcactgggggtgtgtgg

SEQ ID NO: 92332 - RNA, 23 nt, synthetic construct
  source 1..23: mol_type = other RNA
tgtgttcggcactgggggtgtgt

SEQ ID NO: 92333 - RNA, 23 nt, synthetic construct
  source 1..23: mol_type = other RNA
tcgcccgtgtgtggtggccatgg

SEQ ID NO: 92334 - RNA, 23 nt, synthetic construct
  source 1..23: mol_type = other RNA
tggcagggatcgcccgtgtgtgg

SEQ ID NO: 92335 - RNA, 23 nt, synthetic construct
  source 1..23: mol_type = other RNA
tggggcagggatcgcccgtgtgt

SEQ ID NO: 92336 - RNA, 23 nt, synthetic construct
  source 1..23: mol_type = other RNA
ttgcgcaccgtgtggggactgct

SEQ ID NO: 92337 - RNA, 23 nt, synthetic construct
  source 1..23: mol_type = other RNA
tgtgcgcaccgtgtggggactgc

SEQ ID NO: 92338 - RNA, 23 nt, synthetic construct
  source 1..23: mol_type = other RNA
ttgcccgaggtggccgaagtcca

SEQ ID NO: 92339 - RNA, 23 nt, synthetic construct
  source 1..23: mol_type = other RNA
ttgatgtgggtggtgcccaagat

SEQ ID NO: 92340 - RNA, 23 nt, synthetic construct
  source 1..23: mol_type = other RNA
tctggagtcgagtgctgggtggt

SEQ ID NO: 92341 - RNA, 23 nt, synthetic construct
  source 1..23: mol_type = other RNA
tggttctgctgctagggtgaggg

SEQ ID NO: 92342 - RNA, 23 nt, synthetic construct
  source 1..23: mol_type = other RNA
tgtgactcggtggttctgctgct

SEQ ID NO: 92343 - RNA, 23 nt, synthetic construct
  source 1..23: mol_type = other RNA
tgaagggggtgactcggtggttc

SEQ ID NO: 92344 - RNA, 23 nt, synthetic construct
  source 1..23: mol_type = other RNA
tggcccggggtggtcgtccctgg

SEQ ID NO: 92345 - RNA, 23 nt, synthetic construct
  source 1..23: mol_type = other RNA
tcgtggtgtggcccggggtggtc

SEQ ID NO: 92346 - RNA, 23 nt, synthetic construct
  source 1..23: mol_type = other RNA
tgtcttgctgggtgtggccgtgg

SEQ ID NO: 92347 - RNA, 23 nt, synthetic construct
  source 1..23: mol_type = other RNA
ttgggggccgatgtggggctgct

SEQ ID NO: 92348 - RNA, 23 nt, synthetic construct
  source 1..23: mol_type = other RNA
tgttatgggggccgatgtggggc

SEQ ID NO: 92349 - RNA, 23 nt, synthetic construct
  source 1..23: mol_type = other RNA
tccaccgtggttatgggggccga

SEQ ID NO: 92350 - RNA, 23 nt, synthetic construct
  source 1..23: mol_type = other RNA
tcaccaccgtggttatgggggcc

SEQ ID NO: 92351 - RNA, 23 nt, synthetic construct
  source 1..23: mol_type = other RNA
ttagctgtagtccagccactctg

SEQ ID NO: 92352 - RNA, 23 nt, synthetic construct
  source 1..23: mol_type = other RNA
tcggcatggggtagctgtagtcc

SEQ ID NO: 92353 - RNA, 23 nt, synthetic construct
  source 1..23: mol_type = other RNA
tcacggatgttggagtaggtgtc

SEQ ID NO: 92354 - RNA, 23 nt, synthetic construct
  source 1..23: mol_type = other RNA
tgctcacagacggcccctccggc

SEQ ID NO: 92355 - RNA, 23 nt, synthetic construct
  source 1..23: mol_type = other RNA
tagggcatggccgtagagctggt

SEQ ID NO: 92356 - RNA, 23 nt, synthetic construct
  source 1..23: mol_type = other RNA
tgctgtagtgctcggctctgtga

SEQ ID NO: 92357 - RNA, 23 nt, synthetic construct
  source 1..23: mol_type = other RNA
tgtggctgtagtgctcggctctg

SEQ ID NO: 92358 - RNA, 23 nt, synthetic construct
  source 1..23: mol_type = other RNA
tgcaccgtcacggtggctgtagt

SEQ ID NO: 92359 - RNA, 23 nt, synthetic construct
  source 1..23: mol_type = other RNA
tggcaccgtcacggtggctgtag

SEQ ID NO: 92360 - RNA, 23 nt, synthetic construct
  source 1..23: mol_type = other RNA
ttccggtgggcaccgtcacggtg

SEQ ID NO: 92361 - RNA, 23 nt, synthetic construct
  source 1..23: mol_type = other RNA
tgccgtggatccggtgggcaccg

SEQ ID NO: 92362 - RNA, 23 nt, synthetic construct
  source 1..23: mol_type = other RNA
tggccgtggatccggtgggcacc

SEQ ID NO: 92363 - RNA, 23 nt, synthetic construct
  source 1..23: mol_type = other RNA
tggtggccgtggatccggtgggc

SEQ ID NO: 92364 - RNA, 23 nt, synthetic construct
  source 1..23: mol_type = other RNA
tggggtgccagcagttgcctggg

SEQ ID NO: 92365 - RNA, 23 nt, synthetic construct
  source 1..23: mol_type = other RNA
tgggatggctgtaaagctggtag

SEQ ID NO: 92366 - RNA, 23 nt, synthetic construct
  source 1..23: mol_type = other RNA
tgtctgtgataggcgggtccagg

SEQ ID NO: 92367 - RNA, 23 nt, synthetic construct
  source 1..23: mol_type = other RNA
ttggccgtgggtgtggtggtctg

SEQ ID NO: 92368 - RNA, 23 nt, synthetic construct
  source 1..23: mol_type = other RNA
ttggaggtgtggacagtctctgg

SEQ ID NO: 92369 - RNA, 23 nt, synthetic construct
  source 1..23: mol_type = other RNA
ttaagcactgtggaggtgtggac

SEQ ID NO: 92370 - RNA, 23 nt, synthetic construct
  source 1..23: mol_type = other RNA
tcccgtggttgtggtagtcagca

SEQ ID NO: 92371 - RNA, 23 nt, synthetic construct
  source 1..23: mol_type = other RNA
taagcccgtggttgtggtagtca

SEQ ID NO: 92372 - RNA, 23 nt, synthetic construct
  source 1..23: mol_type = other RNA
ttgtgaagcccgtggttgtggta

SEQ ID NO: 92373 - RNA, 23 nt, synthetic construct
  source 1..23: mol_type = other RNA
tacactggaagcgtgcgtgccgt

SEQ ID NO: 92374 - RNA, 23 nt, synthetic construct
  source 1..23: mol_type = other RNA
tcacactggaagcgtgcgtgccg

SEQ ID NO: 92375 - RNA, 23 nt, synthetic construct
  source 1..23: mol_type = other RNA
tgggtcaccgtggaacctctggt

SEQ ID NO: 92376 - RNA, 23 nt, synthetic construct
  source 1..23: mol_type = other RNA
tggggtcaccgtggaacctctgg

SEQ ID NO: 92377 - RNA, 23 nt, synthetic construct
  source 1..23: mol_type = other RNA
ttgggtggtccccgggatggagg

SEQ ID NO: 92378 - RNA, 23 nt, synthetic construct
  source 1..23: mol_type = other RNA
tagaaccagtggccacagttgtg

SEQ ID NO: 92379 - RNA, 23 nt, synthetic construct
  source 1..23: mol_type = other RNA
tctggtctgtgtgctagaggagg

SEQ ID NO: 92380 - RNA, 23 nt, synthetic construct
  source 1..23: mol_type = other RNA
tgtggtcagtgatgggggagtac

SEQ ID NO: 92381 - RNA, 23 nt, synthetic construct
  source 1..23: mol_type = other RNA
tggtggccgtgatcgtagtggcc

SEQ ID NO: 92382 - RNA, 23 nt, synthetic construct
  source 1..23: mol_type = other RNA
tggggataggtgttgtccctgga

SEQ ID NO: 92383 - RNA, 23 nt, synthetic construct
  source 1..23: mol_type = other RNA
tgcactggggggataggtgttgt

SEQ ID NO: 92384 - RNA, 23 nt, synthetic construct
  source 1..23: mol_type = other RNA
tgttcggcactgggggtgtgtgg

SEQ ID NO: 92385 - RNA, 23 nt, synthetic construct
  source 1..23: mol_type = other RNA
tgtgttcggcactgggggtgtgt

SEQ ID NO: 92386 - RNA, 23 nt, synthetic construct
  source 1..23: mol_type = other RNA
tggccgtggtgttcggcactggg

SEQ ID NO: 92387 - RNA, 23 nt, synthetic construct
  source 1..23: mol_type = other RNA
ttgcgcaccgtgtggggactgct

SEQ ID NO: 92388 - RNA, 23 nt, synthetic construct
  source 1..23: mol_type = other RNA
tgtgcgcaccgtgtggggactgc

SEQ ID NO: 92389 - RNA, 23 nt, synthetic construct
  source 1..23: mol_type = other RNA
ttgatgtgggtggtgcccaaggt

SEQ ID NO: 92390 - RNA, 23 nt, synthetic construct
  source 1..23: mol_type = other RNA
ttaccggtggttgctgctggggt

SEQ ID NO: 92391 - RNA, 23 nt, synthetic construct
  source 1..23: mol_type = other RNA
tctggagtcgagtgctgggtggt

SEQ ID NO: 92392 - RNA, 23 nt, synthetic construct
  source 1..23: mol_type = other RNA
tgaagggggtgactcggtggtcc

SEQ ID NO: 92393 - RNA, 23 nt, synthetic construct
  source 1..23: mol_type = other RNA
tggcccggggtggtcgtccctgg

SEQ ID NO: 92394 - RNA, 23 nt, synthetic construct
  source 1..23: mol_type = other RNA
tgtcttgctgggtgtggccgtgg

SEQ ID NO: 92395 - RNA, 23 nt, synthetic construct
  source 1..23: mol_type = other RNA
tggttattggggccgatgtgggg

SEQ ID NO: 92396 - RNA, 23 nt, synthetic construct
  source 1..23: mol_type = other RNA
tccaccgtggttattggggccga

SEQ ID NO: 92397 - RNA, 23 nt, synthetic construct
  source 1..23: mol_type = other RNA
ttagctgtagtccagccactctg

SEQ ID NO: 92398 - RNA, 23 nt, synthetic construct
  source 1..23: mol_type = other RNA
tcggcatggggtagctgtagtcc

SEQ ID NO: 92399 - RNA, 23 nt, synthetic construct
  source 1..23: mol_type = other RNA
tcacggatgttggagtaggtgtc

SEQ ID NO: 92400 - RNA, 23 nt, synthetic construct
  source 1..23: mol_type = other RNA
tgctcacagacggcccctccggc

SEQ ID NO: 92401 - RNA, 23 nt, synthetic construct
  source 1..23: mol_type = other RNA
tggttgcggtcgtagtggctgct

SEQ ID NO: 92402 - RNA, 23 nt, synthetic construct
  source 1..23: mol_type = other RNA
tgtggttgcggtcgtagtggctg

SEQ ID NO: 92403 - RNA, 23 nt, synthetic construct
  source 1..23: mol_type = other RNA
tactggaagggtggttgcagtcc

SEQ ID NO: 92404 - RNA, 23 nt, synthetic construct
  source 1..23: mol_type = other RNA
tggggatgggtgtaaagctggta

SEQ ID NO: 92405 - RNA, 23 nt, synthetic construct
  source 1..23: mol_type = other RNA
taggggatgggtgtaaagctggt

SEQ ID NO: 92406 - RNA, 23 nt, synthetic construct
  source 1..23: mol_type = other RNA
ttggtctgttctgggagggtccc

SEQ ID NO: 92407 - RNA, 23 nt, synthetic construct
  source 1..23: mol_type = other RNA
tgggtggtctccggagtggagga

SEQ ID NO: 92408 - RNA, 23 nt, synthetic construct
  source 1..23: mol_type = other RNA
tccttcgtggtcagcactgtgga

SEQ ID NO: 92409 - RNA, 23 nt, synthetic construct
  source 1..23: mol_type = other RNA
ttggccttcgtggtcagcactgt

SEQ ID NO: 92410 - RNA, 23 nt, synthetic construct
  source 1..23: mol_type = other RNA
tactggtggcccttgtcgtggtg

SEQ ID NO: 92411 - RNA, 23 nt, synthetic construct
  source 1..23: mol_type = other RNA
tgcaccgtcacggtggctgtagt

SEQ ID NO: 92412 - RNA, 23 nt, synthetic construct
  source 1..23: mol_type = other RNA
tggcaccgtcacggtggctgtag

SEQ ID NO: 92413 - RNA, 23 nt, synthetic construct
  source 1..23: mol_type = other RNA
ttccggtgggcaccgtcacggtg

SEQ ID NO: 92414 - RNA, 23 nt, synthetic construct
  source 1..23: mol_type = other RNA
tgccgtggatccggtgggcaccg

SEQ ID NO: 92415 - RNA, 23 nt, synthetic construct
  source 1..23: mol_type = other RNA
tggccgtggatccggtgggcacc

SEQ ID NO: 92416 - RNA, 23 nt, synthetic construct
  source 1..23: mol_type = other RNA
tggtggccgtggatccggtgggc

SEQ ID NO: 92417 - RNA, 23 nt, synthetic construct
  source 1..23: mol_type = other RNA
tagcagttgcccgggtggaggag

SEQ ID NO: 92418 - RNA, 23 nt, synthetic construct
  source 1..23: mol_type = other RNA
taacgctggtagctgtgggtgtg

SEQ ID NO: 92419 - RNA, 23 nt, synthetic construct
  source 1..23: mol_type = other RNA
tgtctgtgataggcgggtccagg

SEQ ID NO: 92420 - RNA, 23 nt, synthetic construct
  source 1..23: mol_type = other RNA
ttggccgtgggtgtggtggtctg

SEQ ID NO: 92421 - RNA, 23 nt, synthetic construct
  source 1..23: mol_type = other RNA
tggacagtctctggagtagagga

SEQ ID NO: 92422 - RNA, 23 nt, synthetic construct
  source 1..23: mol_type = other RNA
ttggaggtgtggacagtctctgg

SEQ ID NO: 92423 - RNA, 23 nt, synthetic construct
  source 1..23: mol_type = other RNA
ttaagcactgtggaggtgtggac

SEQ ID NO: 92424 - RNA, 23 nt, synthetic construct
  source 1..23: mol_type = other RNA
taagcccgtggttgtggtagtcg

SEQ ID NO: 92425 - RNA, 23 nt, synthetic construct
  source 1..23: mol_type = other RNA
ttgtgaagcccgtggttgtggta

SEQ ID NO: 92426 - RNA, 23 nt, synthetic construct
  source 1..23: mol_type = other RNA
tggcgtgagtgccgtccctgggc

SEQ ID NO: 92427 - RNA, 23 nt, synthetic construct
  source 1..23: mol_type = other RNA
tgatccacactggaggcgtgagt

SEQ ID NO: 92428 - RNA, 23 nt, synthetic construct
  source 1..23: mol_type = other RNA
tcgtggagcctctggttgtgggt

SEQ ID NO: 92429 - RNA, 23 nt, synthetic construct
  source 1..23: mol_type = other RNA
ttgggtggtccccgggatggagg

SEQ ID NO: 92430 - RNA, 23 nt, synthetic construct
  source 1..23: mol_type = other RNA
tggtcagcactgtggcggtgtgg

SEQ ID NO: 92431 - RNA, 23 nt, synthetic construct
  source 1..23: mol_type = other RNA
tagaaccagtggccacagttgtg

SEQ ID NO: 92432 - RNA, 23 nt, synthetic construct
  source 1..23: mol_type = other RNA
tctggtctgtgtgctagaggagg

SEQ ID NO: 92433 - RNA, 23 nt, synthetic construct
  source 1..23: mol_type = other RNA
tgtggtcagtgatgggggagtac

SEQ ID NO: 92434 - RNA, 23 nt, synthetic construct
  source 1..23: mol_type = other RNA
tcggtggctgtgatcgtagtggc

SEQ ID NO: 92435 - RNA, 23 nt, synthetic construct
  source 1..23: mol_type = other RNA
tgttcggcactgggggtgtgtgg

SEQ ID NO: 92436 - RNA, 23 nt, synthetic construct
  source 1..23: mol_type = other RNA
tgtgttcggcactgggggtgtgt

SEQ ID NO: 92437 - RNA, 23 nt, synthetic construct
  source 1..23: mol_type = other RNA
tggccgtggtgttcggcactggg

SEQ ID NO: 92438 - RNA, 23 nt, synthetic construct
  source 1..23: mol_type = other RNA
ttgcgcaccgtgtggggactgct

SEQ ID NO: 92439 - RNA, 23 nt, synthetic construct
  source 1..23: mol_type = other RNA
tgtgcgcaccgtgtggggactgc

SEQ ID NO: 92440 - RNA, 23 nt, synthetic construct
  source 1..23: mol_type = other RNA
ttgcccgaggtggccgaagtcca

SEQ ID NO: 92441 - RNA, 23 nt, synthetic construct
  source 1..23: mol_type = other RNA
ttgatgtgggtggtgcccaagat

SEQ ID NO: 92442 - RNA, 23 nt, synthetic construct
  source 1..23: mol_type = other RNA
tagtgctgggtggtactggtggt

SEQ ID NO: 92443 - RNA, 23 nt, synthetic construct
  source 1..23: mol_type = other RNA
tctggagtcgagtgctgggtggt

SEQ ID NO: 92444 - RNA, 23 nt, synthetic construct
  source 1..23: mol_type = other RNA
tgaagggggtgactcggtggtcc

SEQ ID NO: 92445 - RNA, 23 nt, synthetic construct
  source 1..23: mol_type = other RNA
tggcccggggtggtcgtccctgg

SEQ ID NO: 92446 - RNA, 23 nt, synthetic construct
  source 1..23: mol_type = other RNA
ttgggggccgatgtggggctgct

SEQ ID NO: 92447 - RNA, 23 nt, synthetic construct
  source 1..23: mol_type = other RNA
tgttatgggggccgatgtggggc

SEQ ID NO: 92448 - RNA, 23 nt, synthetic construct
  source 1..23: mol_type = other RNA
tccaccgtggttatgggggccga

SEQ ID NO: 92449 - RNA, 23 nt, synthetic construct
  source 1..23: mol_type = other RNA
tcaccaccgtggttatgggggcc

SEQ ID NO: 92450 - RNA, 23 nt, synthetic construct
  source 1..23: mol_type = other RNA
tgggctcacagcccgtggtcacc

SEQ ID NO: 92451 - RNA, 23 nt, synthetic construct
  source 1..23: mol_type = other RNA
ttagctgtagtccagccactctg

SEQ ID NO: 92452 - RNA, 23 nt, synthetic construct
  source 1..23: mol_type = other RNA
tcggcatggggtagctgtagtcc

SEQ ID NO: 92453 - RNA, 23 nt, synthetic construct
  source 1..23: mol_type = other RNA
tcacggatgttggagtaggtgtc

SEQ ID NO: 92454 - RNA, 23 nt, synthetic construct
  source 1..23: mol_type = other RNA
tgctgtagtgctcggctctgtga

SEQ ID NO: 92455 - RNA, 23 nt, synthetic construct
  source 1..23: mol_type = other RNA
tgtggctgtagtgctcggctctg

SEQ ID NO: 92456 - RNA, 23 nt, synthetic construct
  source 1..23: mol_type = other RNA
tgcaccgtcacggtggctgtagt

SEQ ID NO: 92457 - RNA, 23 nt, synthetic construct
  source 1..23: mol_type = other RNA
tggcaccgtcacggtggctgtag

SEQ ID NO: 92458 - RNA, 23 nt, synthetic construct
  source 1..23: mol_type = other RNA
ttccggtgggcaccgtcacggtg

SEQ ID NO: 92459 - RNA, 23 nt, synthetic construct
  source 1..23: mol_type = other RNA
tgccgtggatccggtgggcaccg

SEQ ID NO: 92460 - RNA, 23 nt, synthetic construct
  source 1..23: mol_type = other RNA
tggccgtggatccggtgggcacc

SEQ ID NO: 92461 - RNA, 23 nt, synthetic construct
  source 1..23: mol_type = other RNA
tggtggccgtggatccggtgggc

SEQ ID NO: 92462 - RNA, 23 nt, synthetic construct
  source 1..23: mol_type = other RNA
tggggtgccagcagttgcctggg

SEQ ID NO: 92463 - RNA, 23 nt, synthetic construct
  source 1..23: mol_type = other RNA
tgggatggctgtaaagctggtag

SEQ ID NO: 92464 - RNA, 23 nt, synthetic construct
  source 1..23: mol_type = other RNA
tgtctgtgataggcgggtccagg

SEQ ID NO: 92465 - RNA, 23 nt, synthetic construct
  source 1..23: mol_type = other RNA
ttggccgtgggtgtggtggtctg

SEQ ID NO: 92466 - RNA, 23 nt, synthetic construct
  source 1..23: mol_type = other RNA
ttaagcactgtggaggtgtgggc

SEQ ID NO: 92467 - RNA, 23 nt, synthetic construct
  source 1..23: mol_type = other RNA
taagcccgtggttgtggtagtcg

SEQ ID NO: 92468 - RNA, 23 nt, synthetic construct
  source 1..23: mol_type = other RNA
ttgtgaagcccgtggttgtggta

SEQ ID NO: 92469 - RNA, 23 nt, synthetic construct
  source 1..23: mol_type = other RNA
tggtgactgtgaagcccgtggtt

SEQ ID NO: 92470 - RNA, 23 nt, synthetic construct
  source 1..23: mol_type = other RNA
tcactggaggcgtgcgtgccgtc

SEQ ID NO: 92471 - RNA, 23 nt, synthetic construct
  source 1..23: mol_type = other RNA
tcacactggaggcgtgcgtgccg

SEQ ID NO: 92472 - RNA, 23 nt, synthetic construct
  source 1..23: mol_type = other RNA
tatccacactggaggcgtgcgtg

SEQ ID NO: 92473 - RNA, 23 nt, synthetic construct
  source 1..23: mol_type = other RNA
tgatccacactggaggcgtgcgt

SEQ ID NO: 92474 - RNA, 23 nt, synthetic construct
  source 1..23: mol_type = other RNA
tagccactggttgtgggtgtggt

SEQ ID NO: 92475 - RNA, 23 nt, synthetic construct
  source 1..23: mol_type = other RNA
ttgggtggtccccgggacggagg

SEQ ID NO: 92476 - RNA, 23 nt, synthetic construct
  source 1..23: mol_type = other RNA
tagaaccagtggccacagttgtg

SEQ ID NO: 92477 - RNA, 23 nt, synthetic construct
  source 1..23: mol_type = other RNA
tctggtctgtgtgctagaggagg

SEQ ID NO: 92478 - RNA, 23 nt, synthetic construct
  source 1..23: mol_type = other RNA
tggtggccgtgatcgtagtggcc

SEQ ID NO: 92479 - RNA, 23 nt, synthetic construct
  source 1..23: mol_type = other RNA
tggggataggtgttgtccctgga

SEQ ID NO: 92480 - RNA, 23 nt, synthetic construct
  source 1..23: mol_type = other RNA
tgcactggggggataggtgttgt

SEQ ID NO: 92481 - RNA, 23 nt, synthetic construct
  source 1..23: mol_type = other RNA
tgttcggcactgggggtgtgtgg

SEQ ID NO: 92482 - RNA, 23 nt, synthetic construct
  source 1..23: mol_type = other RNA
tgtgttcggcactgggggtgtgt

SEQ ID NO: 92483 - RNA, 23 nt, synthetic construct
  source 1..23: mol_type = other RNA
tggccgtggtgttcggcactggg

SEQ ID NO: 92484 - RNA, 23 nt, synthetic construct
  source 1..23: mol_type = other RNA
ttgcgcaccgtgtggggactgct

SEQ ID NO: 92485 - RNA, 23 nt, synthetic construct
  source 1..23: mol_type = other RNA
tgtgcgcaccgtgtggggactgc

SEQ ID NO: 92486 - RNA, 23 nt, synthetic construct
  source 1..23: mol_type = other RNA
ttgatgtgggtggtgcccaaggt

SEQ ID NO: 92487 - RNA, 23 nt, synthetic construct
  source 1..23: mol_type = other RNA
ttaccggtggttgctgctggggt

SEQ ID NO: 92488 - RNA, 23 nt, synthetic construct
  source 1..23: mol_type = other RNA
tctggagtcgagtgctgggtggt

SEQ ID NO: 92489 - RNA, 23 nt, synthetic construct
  source 1..23: mol_type = other RNA
tgaagggggtgactcggtggtcc

SEQ ID NO: 92490 - RNA, 23 nt, synthetic construct
  source 1..23: mol_type = other RNA
tgggaagggggtgactcggtggt

SEQ ID NO: 92491 - RNA, 23 nt, synthetic construct
  source 1..23: mol_type = other RNA
tggcccggggtggtcgtccctgg

SEQ ID NO: 92492 - RNA, 23 nt, synthetic construct
  source 1..23: mol_type = other RNA
tcgtggtgtggcccggggtggtc

SEQ ID NO: 92493 - RNA, 23 nt, synthetic construct
  source 1..23: mol_type = other RNA
tgtcttgctgggtgtggccgtgg

SEQ ID NO: 92494 - RNA, 23 nt, synthetic construct
  source 1..23: mol_type = other RNA
ttgggggccgatgtggggctgct

SEQ ID NO: 92495 - RNA, 23 nt, synthetic construct
  source 1..23: mol_type = other RNA
tgttatgggggccgatgtggggc

SEQ ID NO: 92496 - RNA, 23 nt, synthetic construct
  source 1..23: mol_type = other RNA
tccaccgtggttatgggggccga

SEQ ID NO: 92497 - RNA, 23 nt, synthetic construct
  source 1..23: mol_type = other RNA
tcaccaccgtggttatgggggcc

SEQ ID NO: 92498 - RNA, 23 nt, synthetic construct
  source 1..23: mol_type = other RNA
tgggctcacagcccgtggtcacc

SEQ ID NO: 92499 - RNA, 23 nt, synthetic construct
  source 1..23: mol_type = other RNA
ttagctgtagtccagccactctg

SEQ ID NO: 92500 - RNA, 23 nt, synthetic construct
  source 1..23: mol_type = other RNA
tcggcatggggtagctgtagtcc

SEQ ID NO: 92501 - RNA, 23 nt, synthetic construct
  source 1..23: mol_type = other RNA
tcacggatgttggagtaggtgtc

SEQ ID NO: 92502 - RNA, 23 nt, synthetic construct
  source 1..23: mol_type = other RNA
tgctcacagacggcccctccggc

SEQ ID NO: 92503 - RNA, 23 nt, synthetic construct
  source 1..23: mol_type = other RNA
tagggcatggccgtagagctggt

SEQ ID NO: 92504 - RNA, 23 nt, synthetic construct
  source 1..23: mol_type = other RNA
tactggaagggtggttgcagtcc

SEQ ID NO: 92505 - RNA, 23 nt, synthetic construct
  source 1..23: mol_type = other RNA
ttggtctgttctgggagggtccc

SEQ ID NO: 92506 - RNA, 23 nt, synthetic construct
  source 1..23: mol_type = other RNA
tgggtggtctccggagtggagga

SEQ ID NO: 92507 - RNA, 23 nt, synthetic construct
  source 1..23: mol_type = other RNA
tccttcgtggtcagcactgtgga

SEQ ID NO: 92508 - RNA, 23 nt, synthetic construct
  source 1..23: mol_type = other RNA
ttggccttcgtggtcagcactgt

SEQ ID NO: 92509 - RNA, 23 nt, synthetic construct
  source 1..23: mol_type = other RNA
tactggtggcccttgtcgtggtg

SEQ ID NO: 92510 - RNA, 23 nt, synthetic construct
  source 1..23: mol_type = other RNA
tagggggtggacgtggaactggt

SEQ ID NO: 92511 - RNA, 23 nt, synthetic construct
  source 1..23: mol_type = other RNA
tgctgtagtgctcggctctgtga

SEQ ID NO: 92512 - RNA, 23 nt, synthetic construct
  source 1..23: mol_type = other RNA
tgtggctgtagtgctcggctctg

SEQ ID NO: 92513 - RNA, 23 nt, synthetic construct
  source 1..23: mol_type = other RNA
tgcaccgtcacggtggctgtagt

SEQ ID NO: 92514 - RNA, 23 nt, synthetic construct
  source 1..23: mol_type = other RNA
tggcaccgtcacggtggctgtag

SEQ ID NO: 92515 - RNA, 23 nt, synthetic construct
  source 1..23: mol_type = other RNA
ttccggtgggcaccgtcacggtg

SEQ ID NO: 92516 - RNA, 23 nt, synthetic construct
  source 1..23: mol_type = other RNA
tgccgtggatccggtgggcaccg

SEQ ID NO: 92517 - RNA, 23 nt, synthetic construct
  source 1..23: mol_type = other RNA
tggccgtggatccggtgggcacc

SEQ ID NO: 92518 - RNA, 23 nt, synthetic construct
  source 1..23: mol_type = other RNA
tggtggccgtggatccggtgggc

SEQ ID NO: 92519 - RNA, 23 nt, synthetic construct
  source 1..23: mol_type = other RNA
tggggtgccagcagttgcctggg

SEQ ID NO: 92520 - RNA, 23 nt, synthetic construct
  source 1..23: mol_type = other RNA
tgggatggctgtaaagctggtag

SEQ ID NO: 92521 - RNA, 23 nt, synthetic construct
  source 1..23: mol_type = other RNA
tgtctgtgataggcgggtccagg

SEQ ID NO: 92522 - RNA, 23 nt, synthetic construct
  source 1..23: mol_type = other RNA
ttggccgtgggtgtggtggtctg

SEQ ID NO: 92523 - RNA, 23 nt, synthetic construct
  source 1..23: mol_type = other RNA
ttggaggtgtggacagtctctgg

SEQ ID NO: 92524 - RNA, 23 nt, synthetic construct
  source 1..23: mol_type = other RNA
ttaagcactgtggaggtgtggac

SEQ ID NO: 92525 - RNA, 23 nt, synthetic construct
  source 1..23: mol_type = other RNA
taagcccgtggttgtggtagtcg

SEQ ID NO: 92526 - RNA, 23 nt, synthetic construct
  source 1..23: mol_type = other RNA
ttgtgaagcccgtggttgtggta

SEQ ID NO: 92527 - RNA, 23 nt, synthetic construct
  source 1..23: mol_type = other RNA
tggcgtgagtgccgtccctgggc

SEQ ID NO: 92528 - RNA, 23 nt, synthetic construct
  source 1..23: mol_type = other RNA
tgatccacactggaggcgtgagt

SEQ ID NO: 92529 - RNA, 23 nt, synthetic construct
  source 1..23: mol_type = other RNA
tagccactggttgtgggtgtggt

SEQ ID NO: 92530 - RNA, 23 nt, synthetic construct
  source 1..23: mol_type = other RNA
ttgggtggtccccgggatggagg

SEQ ID NO: 92531 - RNA, 23 nt, synthetic construct
  source 1..23: mol_type = other RNA
tggtcagcactctggcggtgtgg

SEQ ID NO: 92532 - RNA, 23 nt, synthetic construct
  source 1..23: mol_type = other RNA
tagaaccagtggccacagttgtg

SEQ ID NO: 92533 - RNA, 23 nt, synthetic construct
  source 1..23: mol_type = other RNA
tctggtctgtgtgctagaggagg

SEQ ID NO: 92534 - RNA, 23 nt, synthetic construct
  source 1..23: mol_type = other RNA
tgtggtcagtgatgggggagtac

SEQ ID NO: 92535 - RNA, 23 nt, synthetic construct
  source 1..23: mol_type = other RNA
tggtggccgtgatcgtagtggcc

SEQ ID NO: 92536 - RNA, 23 nt, synthetic construct
  source 1..23: mol_type = other RNA
tactggaagggtggttgcagtcc

SEQ ID NO: 92537 - RNA, 23 nt, synthetic construct
  source 1..23: mol_type = other RNA
tggggatgggtgtaaagctggta

SEQ ID NO: 92538 - RNA, 23 nt, synthetic construct
  source 1..23: mol_type = other RNA
taggggatgggtgtaaagctggt

SEQ ID NO: 92539 - RNA, 23 nt, synthetic construct
  source 1..23: mol_type = other RNA
tgtctgtgctgggacggtccacg

SEQ ID NO: 92540 - RNA, 23 nt, synthetic construct
  source 1..23: mol_type = other RNA
tgaggaggtgtggattgtggaca

SEQ ID NO: 92541 - RNA, 23 nt, synthetic construct
  source 1..23: mol_type = other RNA
ttagaggaggtgtggattgtgga

SEQ ID NO: 92542 - RNA, 23 nt, synthetic construct
  source 1..23: mol_type = other RNA
ttggagtagaggaggtgtggatt

SEQ ID NO: 92543 - RNA, 23 nt, synthetic construct
  source 1..23: mol_type = other RNA
tggtggtctctggagtagaggag

SEQ ID NO: 92544 - RNA, 23 nt, synthetic construct
  source 1..23: mol_type = other RNA
tgtggaattggtggcccttgtca

SEQ ID NO: 92545 - RNA, 23 nt, synthetic construct
  source 1..23: mol_type = other RNA
tggtgtggccgtggaattggtgg

SEQ ID NO: 92546 - RNA, 23 nt, synthetic construct
  source 1..23: mol_type = other RNA
tcgggtcgtccccagagtggagg

SEQ ID NO: 92547 - RNA, 23 nt, synthetic construct
  source 1..23: mol_type = other RNA
tgatccgggtcgtccccagagtg

SEQ ID NO: 92548 - RNA, 23 nt, synthetic construct
  source 1..23: mol_type = other RNA
tggtggctatagtgctcggctct

SEQ ID NO: 92549 - RNA, 23 nt, synthetic construct
  source 1..23: mol_type = other RNA
tgtgggcaccatcacggtggcta

SEQ ID NO: 92550 - RNA, 23 nt, synthetic construct
  source 1..23: mol_type = other RNA
tcggtgggcaccatcacggtggc

SEQ ID NO: 92551 - RNA, 23 nt, synthetic construct
  source 1..23: mol_type = other RNA
tccactttgggggtgtgagctgt

SEQ ID NO: 92552 - RNA, 23 nt, synthetic construct
  source 1..23: mol_type = other RNA
tcacgctgaaggttggcaggctg

SEQ ID NO: 92553 - RNA, 23 nt, synthetic construct
  source 1..23: mol_type = other RNA
tacacgctgaaggttggcaggct

SEQ ID NO: 92554 - RNA, 23 nt, synthetic construct
  source 1..23: mol_type = other RNA
tggcgagaaaaactgtccaaatg

SEQ ID NO: 92555 - RNA, 23 nt, synthetic construct
  source 1..23: mol_type = other RNA
tgggcgagaaaaactgtccaaat

SEQ ID NO: 92556 - RNA, 23 nt, synthetic construct
  source 1..23: mol_type = other RNA
ttattgtagatgacttccccggg

SEQ ID NO: 92557 - RNA, 23 nt, synthetic construct
  source 1..23: mol_type = other RNA
tacactgcgtagaaatggcagcc

SEQ ID NO: 92558 - RNA, 23 nt, synthetic construct
  source 1..23: mol_type = other RNA
tgctgattgcacactgcgtagaa

SEQ ID NO: 92559 - RNA, 23 nt, synthetic construct
  source 1..23: mol_type = other RNA
tacagtgctgattgcacactgcg

SEQ ID NO: 92560 - RNA, 23 nt, synthetic construct
  source 1..23: mol_type = other RNA
taatgtcacagtgctgattgcac

SEQ ID NO: 92561 - RNA, 23 nt, synthetic construct
  source 1..23: mol_type = other RNA
tgcggtcaatgtcacagtgctga

SEQ ID NO: 92562 - RNA, 23 nt, synthetic construct
  source 1..23: mol_type = other RNA
tagcggtcaatgtcacagtgctg

SEQ ID NO: 92563 - RNA, 23 nt, synthetic construct
  source 1..23: mol_type = other RNA
tgtctcattcacctgccggagag

SEQ ID NO: 92564 - RNA, 23 nt, synthetic construct
  source 1..23: mol_type = other RNA
tggaatagtgggagccgccccac

SEQ ID NO: 92565 - RNA, 23 nt, synthetic construct
  source 1..23: mol_type = other RNA
tcccggaaggtgtaagaggtgcc

SEQ ID NO: 92566 - RNA, 23 nt, synthetic construct
  source 1..23: mol_type = other RNA
ttgccccggaaggtgtaagaggt

SEQ ID NO: 92567 - RNA, 23 nt, synthetic construct
  source 1..23: mol_type = other RNA
tcagttgccccggaaggtgtaag

SEQ ID NO: 92568 - RNA, 23 nt, synthetic construct
  source 1..23: mol_type = other RNA
tataggtgcagttgccccggaag

SEQ ID NO: 92569 - RNA, 23 nt, synthetic construct
  source 1..23: mol_type = other RNA
taaagcgtgcatggatctctctc

SEQ ID NO: 92570 - RNA, 23 nt, synthetic construct
  source 1..23: mol_type = other RNA
tgagattcccaaagcgtgcatgg

SEQ ID NO: 92571 - RNA, 23 nt, synthetic construct
  source 1..23: mol_type = other RNA
ttgagattcccaaagcgtgcatg

SEQ ID NO: 92572 - RNA, 23 nt, synthetic construct
  source 1..23: mol_type = other RNA
taggccgtgcagtagtggttgtc

SEQ ID NO: 92573 - RNA, 23 nt, synthetic construct
  source 1..23: mol_type = other RNA
tgaggccgtgcagtagtggttgt

SEQ ID NO: 92574 - RNA, 23 nt, synthetic construct
  source 1..23: mol_type = other RNA
tagaggccgtgcagtagtggttg

SEQ ID NO: 92575 - RNA, 23 nt, synthetic construct
  source 1..23: mol_type = other RNA
tacttgtagtggatgctgagggc

SEQ ID NO: 92576 - RNA, 23 nt, synthetic construct
  source 1..23: mol_type = other RNA
tcatggacttgtagtggatgctg

SEQ ID NO: 92577 - RNA, 23 nt, synthetic construct
  source 1..23: mol_type = other RNA
tccatggacttgtagtggatgct

SEQ ID NO: 92578 - RNA, 23 nt, synthetic construct
  source 1..23: mol_type = other RNA
ttccatggacttgtagtggatgc

SEQ ID NO: 92579 - RNA, 23 nt, synthetic construct
  source 1..23: mol_type = other RNA
tgacagtgaggacgatatccatg

SEQ ID NO: 92580 - RNA, 23 nt, synthetic construct
  source 1..23: mol_type = other RNA
ttcccatgcaccatggtgacagt

SEQ ID NO: 92581 - RNA, 23 nt, synthetic construct
  source 1..23: mol_type = other RNA
tatgtccacacgcatggtggtgg

SEQ ID NO: 92582 - RNA, 23 nt, synthetic construct
  source 1..23: mol_type = other RNA
tgcaggaatgtccacacgcatgg

SEQ ID NO: 92583 - RNA, 23 nt, synthetic construct
  source 1..23: mol_type = other RNA
tgaaggtgacgctcacgcccagg

SEQ ID NO: 92584 - RNA, 23 nt, synthetic construct
  source 1..23: mol_type = other RNA
tactggcggcagtggttccgtcc

SEQ ID NO: 92585 - RNA, 23 nt, synthetic construct
  source 1..23: mol_type = other RNA
taactggcggcagtggttccgtc

SEQ ID NO: 92586 - RNA, 23 nt, synthetic construct
  source 1..23: mol_type = other RNA
tgcaactggcggcagtggttccg

SEQ ID NO: 92587 - RNA, 23 nt, synthetic construct
  source 1..23: mol_type = other RNA
ttgcaactggcggcagtggttcc

SEQ ID NO: 92588 - RNA, 23 nt, synthetic construct
  source 1..23: mol_type = other RNA
ttccttgcaactggcggcagtgg

SEQ ID NO: 92589 - RNA, 23 nt, synthetic construct
  source 1..23: mol_type = other RNA
tgccacgtcttggccatgtcctt

SEQ ID NO: 92590 - RNA, 23 nt, synthetic construct
  source 1..23: mol_type = other RNA
tagccacgtcttggccatgtcct

SEQ ID NO: 92591 - RNA, 23 nt, synthetic construct
  source 1..23: mol_type = other RNA
tgaccagccacgtcttggccatg

SEQ ID NO: 92592 - RNA, 23 nt, synthetic construct
  source 1..23: mol_type = other RNA
tggaccagccacgtcttggccat

SEQ ID NO: 92593 - RNA, 23 nt, synthetic construct
  source 1..23: mol_type = other RNA
ttttctgctgtcggggaccagcc

SEQ ID NO: 92594 - RNA, 23 nt, synthetic construct
  source 1..23: mol_type = other RNA
tcatcctttctgctgtcggggac

SEQ ID NO: 92595 - RNA, 23 nt, synthetic construct
  source 1..23: mol_type = other RNA
tgggggtgtgccagtcggggccc

SEQ ID NO: 92596 - RNA, 23 nt, synthetic construct
  source 1..23: mol_type = other RNA
ttgggtgtgctagacaccggggc

SEQ ID NO: 92597 - RNA, 23 nt, synthetic construct
  source 1..23: mol_type = other RNA
tgcatcagatcacagagcggctg

SEQ ID NO: 92598 - RNA, 23 nt, synthetic construct
  source 1..23: mol_type = other RNA
tggcgttgaagaatgggcccggg

SEQ ID NO: 92599 - RNA, 23 nt, synthetic construct
  source 1..23: mol_type = other RNA
tcaggcgttgaagaatgggcccg

SEQ ID NO: 92600 - RNA, 23 nt, synthetic construct
  source 1..23: mol_type = other RNA
tcagtggtcgctgatgcaggcgt

SEQ ID NO: 92601 - RNA, 23 nt, synthetic construct
  source 1..23: mol_type = other RNA
taggcggcccctgcagtggtcgc

SEQ ID NO: 92602 - RNA, 23 nt, synthetic construct
  source 1..23: mol_type = other RNA
tgctctgcgtaagcctccaggct

SEQ ID NO: 92603 - RNA, 23 nt, synthetic construct
  source 1..23: mol_type = other RNA
tgcgcggcagagctctgcgtaag

SEQ ID NO: 92604 - RNA, 23 nt, synthetic construct
  source 1..23: mol_type = other RNA
tggccgcatggcttgtacacttt

SEQ ID NO: 92605 - RNA, 23 nt, synthetic construct
  source 1..23: mol_type = other RNA
tgctgtatggggccgcatggctt

SEQ ID NO: 92606 - RNA, 23 nt, synthetic construct
  source 1..23: mol_type = other RNA
tggcaggctgtatggggccgcat

SEQ ID NO: 92607 - RNA, 23 nt, synthetic construct
  source 1..23: mol_type = other RNA
ttggcaggctgtatggggccgca

SEQ ID NO: 92608 - RNA, 23 nt, synthetic construct
  source 1..23: mol_type = other RNA
ttctggttcctagagttgcaggt

SEQ ID NO: 92609 - RNA, 23 nt, synthetic construct
  source 1..23: mol_type = other RNA
taggcctgcacgcagatgcccat

SEQ ID NO: 92610 - RNA, 23 nt, synthetic construct
  source 1..23: mol_type = other RNA
tatttaggaaacccatcgggtcc

SEQ ID NO: 92611 - RNA, 23 nt, synthetic construct
  source 1..23: mol_type = other RNA
tgaaatttaggaaacccatcggg

SEQ ID NO: 92612 - RNA, 23 nt, synthetic construct
  source 1..23: mol_type = other RNA
tagttgctgacccaccgctcccc

SEQ ID NO: 92613 - RNA, 23 nt, synthetic construct
  source 1..23: mol_type = other RNA
tgtcacacacgcaggactggcag

SEQ ID NO: 92614 - RNA, 23 nt, synthetic construct
  source 1..23: mol_type = other RNA
ttcgtcacacacgcaggactggc

SEQ ID NO: 92615 - RNA, 23 nt, synthetic construct
  source 1..23: mol_type = other RNA
tctgaaccctcgtcacacacgca

SEQ ID NO: 92616 - RNA, 23 nt, synthetic construct
  source 1..23: mol_type = other RNA
tttgcactgcaccgacactgaac

SEQ ID NO: 92617 - RNA, 23 nt, synthetic construct
  source 1..23: mol_type = other RNA
ttgaccctgggcgtcacagggca

SEQ ID NO: 92618 - RNA, 23 nt, synthetic construct
  source 1..23: mol_type = other RNA
tacggttacgaagccgggacggt

SEQ ID NO: 92619 - RNA, 23 nt, synthetic construct
  source 1..23: mol_type = other RNA
tggcctggtcacggttacgaagc

SEQ ID NO: 92620 - RNA, 23 nt, synthetic construct
  source 1..23: mol_type = other RNA
tcggggcctggtcacggttacga

SEQ ID NO: 92621 - RNA, 23 nt, synthetic construct
  source 1..23: mol_type = other RNA
tgcacaccgtctcggggcagcag

SEQ ID NO: 92622 - RNA, 23 nt, synthetic construct
  source 1..23: mol_type = other RNA
taggtgccattgtacgaacacag

SEQ ID NO: 92623 - RNA, 23 nt, synthetic construct
  source 1..23: mol_type = other RNA
ttgcaccaaccccgtagaaggtg

SEQ ID NO: 92624 - RNA, 23 nt, synthetic construct
  source 1..23: mol_type = other RNA
ttgggaaggttgcaccaaccccg

SEQ ID NO: 92625 - RNA, 23 nt, synthetic construct
  source 1..23: mol_type = other RNA
tctgggaaggttgcaccaacccc

SEQ ID NO: 92626 - RNA, 23 nt, synthetic construct
  source 1..23: mol_type = other RNA
tcctgggaaggttgcaccaaccc

SEQ ID NO: 92627 - RNA, 23 nt, synthetic construct
  source 1..23: mol_type = other RNA
tggtagtattgttgcaggcatcc

SEQ ID NO: 92628 - RNA, 23 nt, synthetic construct
  source 1..23: mol_type = other RNA
tggacaggtagtattgttgcagg

SEQ ID NO: 92629 - RNA, 23 nt, synthetic construct
  source 1..23: mol_type = other RNA
tgccactctcttgtactcaaagc

SEQ ID NO: 92630 - RNA, 23 nt, synthetic construct
  source 1..23: mol_type = other RNA
ttctggacgcactccccacagca

SEQ ID NO: 92631 - RNA, 23 nt, synthetic construct
  source 1..23: mol_type = other RNA
taggcggtctggacgcactcccc

SEQ ID NO: 92632 - RNA, 23 nt, synthetic construct
  source 1..23: mol_type = other RNA
tggccatcgggcgtgaggcaggc

SEQ ID NO: 92633 - RNA, 23 nt, synthetic construct
  source 1..23: mol_type = other RNA
tggctggccatcgggcgtgaggc

SEQ ID NO: 92634 - RNA, 23 nt, synthetic construct
  source 1..23: mol_type = other RNA
tctgttgacccaggtttcattca

SEQ ID NO: 92635 - RNA, 23 nt, synthetic construct
  source 1..23: mol_type = other RNA
taggtacacggtgcagttgtcca

SEQ ID NO: 92636 - RNA, 23 nt, synthetic construct
  source 1..23: mol_type = other RNA
tcagaggtacacggtgcagttgt

SEQ ID NO: 92637 - RNA, 23 nt, synthetic construct
  source 1..23: mol_type = other RNA
tacagaggtacacggtgcagttg

SEQ ID NO: 92638 - RNA, 23 nt, synthetic construct
  source 1..23: mol_type = other RNA
tcaaatggactccaccctcagcc

SEQ ID NO: 92639 - RNA, 23 nt, synthetic construct
  source 1..23: mol_type = other RNA
tgcaaatggactccaccctcagc

SEQ ID NO: 92640 - RNA, 23 nt, synthetic construct
  source 1..23: mol_type = other RNA
tgttgatgcggacttgacaggag

SEQ ID NO: 92641 - RNA, 23 nt, synthetic construct
  source 1..23: mol_type = other RNA
ttgttgatgcggacttgacagga

SEQ ID NO: 92642 - RNA, 23 nt, synthetic construct
  source 1..23: mol_type = other RNA
tctcggtctcgcagccctggtgc

SEQ ID NO: 92643 - RNA, 23 nt, synthetic construct
  source 1..23: mol_type = other RNA
tcctcgcagaaggtgatgttgac

SEQ ID NO: 92644 - RNA, 23 nt, synthetic construct
  source 1..23: mol_type = other RNA
ttggacgctccggggcaggagcc

SEQ ID NO: 92645 - RNA, 23 nt, synthetic construct
  source 1..23: mol_type = other RNA
ttctgctgagtacttggacgctc

SEQ ID NO: 92646 - RNA, 23 nt, synthetic construct
  source 1..23: mol_type = other RNA
tggcctctgctgagtacttggac

SEQ ID NO: 92647 - RNA, 23 nt, synthetic construct
  source 1..23: mol_type = other RNA
tgatggctgagccgttaggacag

SEQ ID NO: 92648 - RNA, 23 nt, synthetic construct
  source 1..23: mol_type = other RNA
tgcaggatggctgagccgttagg

SEQ ID NO: 92649 - RNA, 23 nt, synthetic construct
  source 1..23: mol_type = other RNA
ttcatccacgtgggtgtaggtgt

SEQ ID NO: 92650 - RNA, 23 nt, synthetic construct
  source 1..23: mol_type = other RNA
tctcatccacgtgggtgtaggtg

SEQ ID NO: 92651 - RNA, 23 nt, synthetic construct
  source 1..23: mol_type = other RNA
tcactcatccacgtgggtgtagg

SEQ ID NO: 92652 - RNA, 23 nt, synthetic construct
  source 1..23: mol_type = other RNA
tgcggggtgccacacacaggccg

SEQ ID NO: 92653 - RNA, 23 nt, synthetic construct
  source 1..23: mol_type = other RNA
tcctcccgaaaggggtcctgctg

SEQ ID NO: 92654 - RNA, 23 nt, synthetic construct
  source 1..23: mol_type = other RNA
ttggcgccctcccgaaaggggtc

SEQ ID NO: 92655 - RNA, 23 nt, synthetic construct
  source 1..23: mol_type = other RNA
tagtggcgccctcccgaaagggg

SEQ ID NO: 92656 - RNA, 23 nt, synthetic construct
  source 1..23: mol_type = other RNA
ttgagtggcgccctcccgaaagg

SEQ ID NO: 92657 - RNA, 23 nt, synthetic construct
  source 1..23: mol_type = other RNA
tcccagggtaggactcctgagtg

SEQ ID NO: 92658 - RNA, 23 nt, synthetic construct
  source 1..23: mol_type = other RNA
tggccgtggcagggacacatagg

SEQ ID NO: 92659 - RNA, 23 nt, synthetic construct
  source 1..23: mol_type = other RNA
tacgtggccagctggaatccgtg

SEQ ID NO: 92660 - RNA, 23 nt, synthetic construct
  source 1..23: mol_type = other RNA
tggccggacgtggccagctggaa

SEQ ID NO: 92661 - RNA, 23 nt, synthetic construct
  source 1..23: mol_type = other RNA
tcggccgccttgcctgtcgcagc

SEQ ID NO: 92662 - RNA, 23 nt, synthetic construct
  source 1..23: mol_type = other RNA
taggcggccgccttgcctgtcgc

SEQ ID NO: 92663 - RNA, 23 nt, synthetic construct
  source 1..23: mol_type = other RNA
tcctcagccctgagttaccctgc

SEQ ID NO: 92664 - RNA, 23 nt, synthetic construct
  source 1..23: mol_type = other RNA
tgccgtggtgctcacatgtgggg

SEQ ID NO: 92665 - RNA, 23 nt, synthetic construct
  source 1..23: mol_type = other RNA
tgccgtggtgctcacatgtgggg

SEQ ID NO: 92666 - RNA, 23 nt, synthetic construct
  source 1..23: mol_type = other RNA
tgccgtggtgctcacatgtgggg

SEQ ID NO: 92667 - RNA, 23 nt, synthetic construct
  source 1..23: mol_type = other RNA
tcatgtagcgtatcttgtagggt

SEQ ID NO: 92668 - RNA, 23 nt, synthetic construct
  source 1..23: mol_type = other RNA
tccgcagctcgtagtcgtgacag

SEQ ID NO: 92669 - RNA, 23 nt, synthetic construct
  source 1..23: mol_type = other RNA
ttagggtggtcttttcggttgct

SEQ ID NO: 92670 - RNA, 23 nt, synthetic construct
  source 1..23: mol_type = other RNA
tctgtgatcgtagtggccgtggt

SEQ ID NO: 92671 - RNA, 23 nt, synthetic construct
  source 1..23: mol_type = other RNA
tggcagaacgttctcagacagca

SEQ ID NO: 92672 - RNA, 23 nt, synthetic construct
  source 1..23: mol_type = other RNA
tcagctcgtagtcgtgacagagc

SEQ ID NO: 92673 - RNA, 23 nt, synthetic construct
  source 1..23: mol_type = other RNA
tcgttccacaggaatgtcagcac

SEQ ID NO: 92674 - RNA, 23 nt, synthetic construct
  source 1..23: mol_type = other RNA
tccctcccgaaaggggtcctgct

SEQ ID NO: 92675 - RNA, 23 nt, synthetic construct
  source 1..23: mol_type = other RNA
tggaatccgtgctgcgcgggcgc

SEQ ID NO: 92676 - RNA, 23 nt, synthetic construct
  source 1..23: mol_type = other RNA
tctggaatccgtgctgcgcgggc

SEQ ID NO: 92677 - RNA, 23 nt, synthetic construct
  source 1..23: mol_type = other RNA
tctggccgttgcgacctcagccc

SEQ ID NO: 92678 - RNA, 23 nt, synthetic construct
  source 1..23: mol_type = other RNA
tgaatccgtgctgcgcgggcgct

SEQ ID NO: 92679 - RNA, 23 nt, synthetic construct
  source 1..23: mol_type = other RNA
tcatcgggtcccacgcaggggca

SEQ ID NO: 92680 - RNA, 23 nt, synthetic construct
  source 1..23: mol_type = other RNA
tagggatcgcccgtgtgtggtgg

SEQ ID NO: 92681 - RNA, 23 nt, synthetic construct
  source 1..23: mol_type = other RNA
tagggatcgcccgtgtgtggtgg

SEQ ID NO: 92682 - RNA, 23 nt, synthetic construct
  source 1..23: mol_type = other RNA
tagggatcgcccgtgtgtggtgg

SEQ ID NO: 92683 - RNA, 23 nt, synthetic construct
  source 1..23: mol_type = other RNA
tcctgtcgggcgagctctggagg

SEQ ID NO: 92684 - RNA, 23 nt, synthetic construct
  source 1..23: mol_type = other RNA
tgctggagtcgagtgctgggtgg

SEQ ID NO: 92685 - RNA, 23 nt, synthetic construct
  source 1..23: mol_type = other RNA
tcgtggatccggtgggcaccgtc

SEQ ID NO: 92686 - RNA, 23 nt, synthetic construct
  source 1..23: mol_type = other RNA
tgacagggatcgcccgtgtgtgg

SEQ ID NO: 92687 - RNA, 23 nt, synthetic construct
  source 1..23: mol_type = other RNA
tgctggagtcgagtgctgggtgg

SEQ ID NO: 92688 - RNA, 23 nt, synthetic construct
  source 1..23: mol_type = other RNA
tcgtggatccggtgggcaccgtc

SEQ ID NO: 92689 - RNA, 23 nt, synthetic construct
  source 1..23: mol_type = other RNA
tacagggatcgcccgtgtgtggt

SEQ ID NO: 92690 - RNA, 23 nt, synthetic construct
  source 1..23: mol_type = other RNA
tacagggatcgcccgtgtgtggt

SEQ ID NO: 92691 - RNA, 23 nt, synthetic construct
  source 1..23: mol_type = other RNA
tcactcaggccgcggcaagtggg

SEQ ID NO: 92692 - RNA, 23 nt, synthetic construct
  source 1..23: mol_type = other RNA
tgggctcattgtcgtctctgtcc

SEQ ID NO: 92693 - RNA, 23 nt, synthetic construct
  source 1..23: mol_type = other RNA
tagcccgtggttgtggtagttgg

SEQ ID NO: 92694 - RNA, 23 nt, synthetic construct
  source 1..23: mol_type = other RNA
tagcccgtggttgtggtagtcag

SEQ ID NO: 92695 - RNA, 23 nt, synthetic construct
  source 1..23: mol_type = other RNA
tgttgtggtagtcggcactttgg

SEQ ID NO: 92696 - RNA, 23 nt, synthetic construct
  source 1..23: mol_type = other RNA
tagcccgtggttgtggtagtcgg

SEQ ID NO: 92697 - RNA, 23 nt, synthetic construct
  source 1..23: mol_type = other RNA
tgttgtggtagtcggcactttgg

SEQ ID NO: 92698 - RNA, 23 nt, synthetic construct
  source 1..23: mol_type = other RNA
tagcccgtggttgtggtagtcgg

SEQ ID NO: 92699 - RNA, 23 nt, synthetic construct
  source 1..23: mol_type = other RNA
tgttgtggtagtcggcactttgg

SEQ ID NO: 92700 - RNA, 23 nt, synthetic construct
  source 1..23: mol_type = other RNA
tagcccgtggttgtggtagtcgg

SEQ ID NO: 92701 - RNA, 23 nt, synthetic construct
  source 1..23: mol_type = other RNA
tggggccgcatggcttgtacact

SEQ ID NO: 92702 - RNA, 23 nt, synthetic construct
  source 1..23: mol_type = other RNA
tcctcggtctcgcagccctggtg

SEQ ID NO: 92703 - RNA, 23 nt, synthetic construct
  source 1..23: mol_type = other RNA
tggccagctggaatccgtgctgc

SEQ ID NO: 92704 - RNA, 23 nt, synthetic construct
  source 1..23: mol_type = other RNA
tgttgaaggccgggaggccgttg

SEQ ID NO: 92705 - RNA, 23 nt, synthetic construct
  source 1..23: mol_type = other RNA
tcctggtagctgtaggtcctgtc

SEQ ID NO: 92706 - RNA, 23 nt, synthetic construct
  source 1..23: mol_type = other RNA
tagttgtagcacatcttgaagac

SEQ ID NO: 92707 - RNA, 23 nt, synthetic construct
  source 1..23: mol_type = other RNA
tgtcaaggggctcattgtcgtct

SEQ ID NO: 92708 - RNA, 23 nt, synthetic construct
  source 1..23: mol_type = other RNA
tgcccgtggttgtggtagttggc

SEQ ID NO: 92709 - RNA, 23 nt, synthetic construct
  source 1..23: mol_type = other RNA
ttggtcagcactggggggatggg

SEQ ID NO: 92710 - RNA, 23 nt, synthetic construct
  source 1..23: mol_type = other RNA
tcagggatcgcccgtgtgtggtg

SEQ ID NO: 92711 - RNA, 23 nt, synthetic construct
  source 1..23: mol_type = other RNA
tccaggctgtgcgcaccgtgtgg

SEQ ID NO: 92712 - RNA, 23 nt, synthetic construct
  source 1..23: mol_type = other RNA
ttggtcagcactggggggatagg

SEQ ID NO: 92713 - RNA, 23 nt, synthetic construct
  source 1..23: mol_type = other RNA
tcagggatcgcccgtgtgtggtg

SEQ ID NO: 92714 - RNA, 23 nt, synthetic construct
  source 1..23: mol_type = other RNA
tccaggctgtgcgcaccgtgtgg

SEQ ID NO: 92715 - RNA, 23 nt, synthetic construct
  source 1..23: mol_type = other RNA
ttgtgggaagtccccgtggaagg

SEQ ID NO: 92716 - RNA, 23 nt, synthetic construct
  source 1..23: mol_type = other RNA
ttggttgcagtccttggactgga

SEQ ID NO: 92717 - RNA, 23 nt, synthetic construct
  source 1..23: mol_type = other RNA
taggaggggatgggtgtaaagct

SEQ ID NO: 92718 - RNA, 23 nt, synthetic construct
  source 1..23: mol_type = other RNA
ttcccggtggtcccaagggtgaa

SEQ ID NO: 92719 - RNA, 23 nt, synthetic construct
  source 1..23: mol_type = other RNA
ttggtcagcactggggggatggg

SEQ ID NO: 92720 - RNA, 23 nt, synthetic construct
  source 1..23: mol_type = other RNA
tagggaccgcccgtgtgtggtgg

SEQ ID NO: 92721 - RNA, 23 nt, synthetic construct
  source 1..23: mol_type = other RNA
tccaggctgtgcgcaccgtgtgg

SEQ ID NO: 92722 - RNA, 23 nt, synthetic construct
  source 1..23: mol_type = other RNA
ttggtcagcactggggggatagg

SEQ ID NO: 92723 - RNA, 23 nt, synthetic construct
  source 1..23: mol_type = other RNA
tcagggatcgcccgtgtgtggtg

SEQ ID NO: 92724 - RNA, 23 nt, synthetic construct
  source 1..23: mol_type = other RNA
tccaggctgtgcgcaccgtgtgg

SEQ ID NO: 92725 - RNA, 23 nt, synthetic construct
  source 1..23: mol_type = other RNA
ttgtgggaagtccccgtggaagg

SEQ ID NO: 92726 - RNA, 23 nt, synthetic construct
  source 1..23: mol_type = other RNA
ttggttgcagtccttggactgga

SEQ ID NO: 92727 - RNA, 23 nt, synthetic construct
  source 1..23: mol_type = other RNA
ttcccggtggtcccaagggtgga

SEQ ID NO: 92728 - RNA, 23 nt, synthetic construct
  source 1..23: mol_type = other RNA
ttgggtgttgtccctggagttga

SEQ ID NO: 92729 - RNA, 23 nt, synthetic construct
  source 1..23: mol_type = other RNA
ttggttgcagtccttggactgga

SEQ ID NO: 92730 - RNA, 23 nt, synthetic construct
  source 1..23: mol_type = other RNA
taggaggggatgggtgtaaagct

SEQ ID NO: 92731 - RNA, 23 nt, synthetic construct
  source 1..23: mol_type = other RNA
tcaaacaggatcaggccctcctc

SEQ ID NO: 92732 - RNA, 23 nt, synthetic construct
  source 1..23: mol_type = other RNA
tagtggtcgctgatgcaggcgtt

SEQ ID NO: 92733 - RNA, 23 nt, synthetic construct
  source 1..23: mol_type = other RNA
tcctcaaggcggcccctgcagtg

SEQ ID NO: 92734 - RNA, 23 nt, synthetic construct
  source 1..23: mol_type = other RNA
tggctgtatggggccgcatggct

SEQ ID NO: 92735 - RNA, 23 nt, synthetic construct
  source 1..23: mol_type = other RNA
ttcctagagttgcaggtggcagg

SEQ ID NO: 92736 - RNA, 23 nt, synthetic construct
  source 1..23: mol_type = other RNA
tcacgcagatgcccatgtgtgcg

SEQ ID NO: 92737 - RNA, 23 nt, synthetic construct
  source 1..23: mol_type = other RNA
ttgacccaccgctccccgggaaa

SEQ ID NO: 92738 - RNA, 23 nt, synthetic construct
  source 1..23: mol_type = other RNA
ttggtcacggttacgaagccggg

SEQ ID NO: 92739 - RNA, 23 nt, synthetic construct
  source 1..23: mol_type = other RNA
tcagcaaatggactccaccctca

SEQ ID NO: 92740 - RNA, 23 nt, synthetic construct
  source 1..23: mol_type = other RNA
ttcggtctcgcagccctggtgcc

SEQ ID NO: 92741 - RNA, 23 nt, synthetic construct
  source 1..23: mol_type = other RNA
ttctctgacctggccgttgcgac

SEQ ID NO: 92742 - RNA, 23 nt, synthetic construct
  source 1..23: mol_type = other RNA
tgctggagtcgagtgctgggtgg

SEQ ID NO: 92743 - RNA, 23 nt, synthetic construct
  source 1..23: mol_type = other RNA
tcgtggatccggtgggcaccgtc

SEQ ID NO: 92744 - RNA, 23 nt, synthetic construct
  source 1..23: mol_type = other RNA
tgacagggatcgcccgtgtgtgg

SEQ ID NO: 92745 - RNA, 23 nt, synthetic construct
  source 1..23: mol_type = other RNA
tgctggagtcgagtgctgggtgg

SEQ ID NO: 92746 - RNA, 23 nt, synthetic construct
  source 1..23: mol_type = other RNA
ttagtttgttccagggcgtccca

SEQ ID NO: 92747 - RNA, 23 nt, synthetic construct
  source 1..23: mol_type = other RNA
tcccactaggcctcggcgtagct

SEQ ID NO: 92748 - RNA, 23 nt, synthetic construct
  source 1..23: mol_type = other RNA
tgggcggtgcccattgtaccagc

SEQ ID NO: 92749 - RNA, 23 nt, synthetic construct
  source 1..23: mol_type = other RNA
tcgtggatccggtgggcaccgtc

SEQ ID NO: 92750 - RNA, 23 nt, synthetic construct
  source 1..23: mol_type = other RNA
tgggacggtccacgtggtccaca

SEQ ID NO: 92751 - RNA, 23 nt, synthetic construct
  source 1..23: mol_type = other RNA
ttgttggcgccaggctcgtggtc

SEQ ID NO: 92752 - RNA, 23 nt, synthetic construct
  source 1..23: mol_type = other RNA
tcttctggggccggtttcaccca

SEQ ID NO: 92753 - RNA, 23 nt, synthetic construct
  source 1..23: mol_type = other RNA
ttggtggtctgtgataggcgggt

SEQ ID NO: 92754 - RNA, 23 nt, synthetic construct
  source 1..23: mol_type = other RNA
ttggtggtctgtgataggcgggt

SEQ ID NO: 92755 - RNA, 23 nt, synthetic construct
  source 1..23: mol_type = other RNA
ttggtggtctgtgataggcgggt

SEQ ID NO: 92756 - RNA, 23 nt, synthetic construct
  source 1..23: mol_type = other RNA
ttggtggtctgtgataggcgggt

SEQ ID NO: 92757 - RNA, 23 nt, synthetic construct
  source 1..23: mol_type = other RNA
ttggtggtctgtgataggcgggt

SEQ ID NO: 92758 - RNA, 23 nt, synthetic construct
  source 1..23: mol_type = other RNA
tggtacacatgtggcagggaagg

SEQ ID NO: 92759 - RNA, 23 nt, synthetic construct
  source 1..23: mol_type = other RNA
ttccccgggaaatttaggaaacc

SEQ ID NO: 92760 - RNA, 23 nt, synthetic construct
  source 1..23: mol_type = other RNA
ttaggtgtcaaagtccccgccag

SEQ ID NO: 92761 - RNA, 23 nt, synthetic construct
  source 1..23: mol_type = other RNA
ttaggtgtcaaagtccccgccag

SEQ ID NO: 92762 - RNA, 23 nt, synthetic construct
  source 1..23: mol_type = other RNA
ttaggtgtcaaagtccccgccag

SEQ ID NO: 92763 - RNA, 23 nt, synthetic construct
  source 1..23: mol_type = other RNA
ttaggtgtcaaagtccccgccag

SEQ ID NO: 92764 - RNA, 23 nt, synthetic construct
  source 1..23: mol_type = other RNA
tcacgtcccctgcagtggtcgtc

SEQ ID NO: 92765 - RNA, 23 nt, synthetic construct
  source 1..23: mol_type = other RNA
tcggtaagcactgtggaggtgtg

SEQ ID NO: 92766 - RNA, 23 nt, synthetic construct
  source 1..23: mol_type = other RNA
tcggtaagcactgtggaggtgtg

SEQ ID NO: 92767 - RNA, 23 nt, synthetic construct
  source 1..23: mol_type = other RNA
tgctcgtggtcagcggctctttg

SEQ ID NO: 92768 - RNA, 23 nt, synthetic construct
  source 1..23: mol_type = other RNA
tcggccgtggcagggacacatag

SEQ ID NO: 92769 - RNA, 23 nt, synthetic construct
  source 1..23: mol_type = other RNA
ttgttgacctcggtctcgcagcc

SEQ ID NO: 92770 - RNA, 23 nt, synthetic construct
  source 1..23: mol_type = other RNA
tcatcccgtgggtctcgatgacc

SEQ ID NO: 92771 - RNA, 23 nt, synthetic construct
  source 1..23: mol_type = other RNA
tactcgatgtcagccagcacagg

SEQ ID NO: 92772 - RNA, 23 nt, synthetic construct
  source 1..23: mol_type = other RNA
tctgagcgtgttggaagggtgga

SEQ ID NO: 92773 - RNA, 23 nt, synthetic construct
  source 1..23: mol_type = other RNA
tggtaagcactgtggaggtgtgg

SEQ ID NO: 92774 - RNA, 23 nt, synthetic construct
  source 1..23: mol_type = other RNA
taaagtccccgccagagggcccc

SEQ ID NO: 92775 - RNA, 23 nt, synthetic construct
  source 1..23: mol_type = other RNA
tggtaagcactgtggaggtgtgg

SEQ ID NO: 92776 - RNA, 23 nt, synthetic construct
  source 1..23: mol_type = other RNA
taaagtccccgccagagggcccc

SEQ ID NO: 92777 - RNA, 23 nt, synthetic construct
  source 1..23: mol_type = other RNA
tggtaagcactgtggaggtgtgg

SEQ ID NO: 92778 - RNA, 23 nt, synthetic construct
  source 1..23: mol_type = other RNA
taaagtccccgccagagggcccc

SEQ ID NO: 92779 - RNA, 23 nt, synthetic construct
  source 1..23: mol_type = other RNA
tgtatcttgtagggtgggtcccc

SEQ ID NO: 92780 - RNA, 23 nt, synthetic construct
  source 1..23: mol_type = other RNA
tggaagggcggttgcagtccctg

SEQ ID NO: 92781 - RNA, 23 nt, synthetic construct
  source 1..23: mol_type = other RNA
ttggggggcagggatcgcccgtg

SEQ ID NO: 92782 - RNA, 23 nt, synthetic construct
  source 1..23: mol_type = other RNA
tagaagggggtgactcggtggtt

SEQ ID NO: 92783 - RNA, 23 nt, synthetic construct
  source 1..23: mol_type = other RNA
tggaagggcggttgcagtccctg

SEQ ID NO: 92784 - RNA, 23 nt, synthetic construct
  source 1..23: mol_type = other RNA
tgggggtgactcggtggtcctgc

SEQ ID NO: 92785 - RNA, 23 nt, synthetic construct
  source 1..23: mol_type = other RNA
tagaagggggtgactcggtggtc

SEQ ID NO: 92786 - RNA, 23 nt, synthetic construct
  source 1..23: mol_type = other RNA
tggaagggcggttgcagtccctg

SEQ ID NO: 92787 - RNA, 23 nt, synthetic construct
  source 1..23: mol_type = other RNA
tgggggtgactcggtggtcctgc

SEQ ID NO: 92788 - RNA, 23 nt, synthetic construct
  source 1..23: mol_type = other RNA
tagaagggggtgactcggtggtc

SEQ ID NO: 92789 - RNA, 23 nt, synthetic construct
  source 1..23: mol_type = other RNA
tggaagggcggttgcagtccctg

SEQ ID NO: 92790 - RNA, 23 nt, synthetic construct
  source 1..23: mol_type = other RNA
tgggggtgactcggtggtcctgc

SEQ ID NO: 92791 - RNA, 23 nt, synthetic construct
  source 1..23: mol_type = other RNA
tgtggccgtggaaccggtgggca

SEQ ID NO: 92792 - RNA, 23 nt, synthetic construct
  source 1..23: mol_type = other RNA
tgccttgcctgtcgcagcttcct

SEQ ID NO: 92793 - RNA, 23 nt, synthetic construct
  source 1..23: mol_type = other RNA
tggggcaccgccatccatggtgt

SEQ ID NO: 92794 - RNA, 23 nt, synthetic construct
  source 1..23: mol_type = other RNA
ttggcgcacatcagcccccgcat

SEQ ID NO: 92795 - RNA, 23 nt, synthetic construct
  source 1..23: mol_type = other RNA
tggatgggtgtaacgctggtagc

SEQ ID NO: 92796 - RNA, 23 nt, synthetic construct
  source 1..23: mol_type = other RNA
tggggtgactcggtggtcctgct

SEQ ID NO: 92797 - RNA, 23 nt, synthetic construct
  source 1..23: mol_type = other RNA
tggggtgactcggtggtcctgct

SEQ ID NO: 92798 - RNA, 23 nt, synthetic construct
  source 1..23: mol_type = other RNA
tggggtgactcggtggtcctgct

SEQ ID NO: 92799 - RNA, 23 nt, synthetic construct
  source 1..23: mol_type = other RNA
tggatgggtgtaacgctggtagc

SEQ ID NO: 92800 - RNA, 23 nt, synthetic construct
  source 1..23: mol_type = other RNA
tagtggatgctgagggcgcgggg

SEQ ID NO: 92801 - RNA, 23 nt, synthetic construct
  source 1..23: mol_type = other RNA
tacaggccaccggttgcacctcg

SEQ ID NO: 92802 - RNA, 23 nt, synthetic construct
  source 1..23: mol_type = other RNA
taccagcgtccggcacgcgctcg

SEQ ID NO: 92803 - RNA, 23 nt, synthetic construct
  source 1..23: mol_type = other RNA
ttcctcgtccgtgcagttgccgg

SEQ ID NO: 92804 - RNA, 23 nt, synthetic construct
  source 1..23: mol_type = other RNA
tagtttctcatcataggtggaga

SEQ ID NO: 92805 - RNA, 23 nt, synthetic construct
  source 1..23: mol_type = other RNA
tgagtttctcatcataggtggag

SEQ ID NO: 92806 - RNA, 23 nt, synthetic construct
  source 1..23: mol_type = other RNA
tcagccagcacggtgaagctgct

SEQ ID NO: 92807 - RNA, 23 nt, synthetic construct
  source 1..23: mol_type = other RNA
tacaaacacctgcatgagtggca

SEQ ID NO: 92808 - RNA, 23 nt, synthetic construct
  source 1..23: mol_type = other RNA
tactcctgggcgggcacacaggc

SEQ ID NO: 92809 - RNA, 23 nt, synthetic construct
  source 1..23: mol_type = other RNA
tcctcggcaatgcagcccccact

SEQ ID NO: 92810 - RNA, 23 nt, synthetic construct
  source 1..23: mol_type = other RNA
tgcactcccacctccggttcctg

SEQ ID NO: 92811 - RNA, 23 nt, synthetic construct
  source 1..23: mol_type = other RNA
tgtgggtctcgatgaccaggaag

SEQ ID NO: 92812 - RNA, 23 nt, synthetic construct
  source 1..23: mol_type = other RNA
tactcgcagtcgccacccgagtc

SEQ ID NO: 92813 - RNA, 23 nt, synthetic construct
  source 1..23: mol_type = other RNA
tgcactggatgccactgggtgtg

SEQ ID NO: 92814 - RNA, 23 nt, synthetic construct
  source 1..23: mol_type = other RNA
tagatgacgtcctggtagctgta

SEQ ID NO: 92815 - RNA, 23 nt, synthetic construct
  source 1..23: mol_type = other RNA
taagcaggcgccaagcccatcgg

SEQ ID NO: 92816 - RNA, 23 nt, synthetic construct
  source 1..23: mol_type = other RNA
tggatgtcagtccttctgagagg

SEQ ID NO: 92817 - RNA, 23 nt, synthetic construct
  source 1..23: mol_type = other RNA
tcaagctccccgtcgtccctgga

SEQ ID NO: 92818 - RNA, 23 nt, synthetic construct
  source 1..23: mol_type = other RNA
tgtgggtggtccccgggatggag

SEQ ID NO: 92819 - RNA, 23 nt, synthetic construct
  source 1..23: mol_type = other RNA
tggttgctgctagggtgtgggaa

SEQ ID NO: 92820 - RNA, 23 nt, synthetic construct
  source 1..23: mol_type = other RNA
tccgtggtgtggcccggggtggt

SEQ ID NO: 92821 - RNA, 23 nt, synthetic construct
  source 1..23: mol_type = other RNA
ttggtaagcactgtggaggtgtg

SEQ ID NO: 92822 - RNA, 23 nt, synthetic construct
  source 1..23: mol_type = other RNA
tgtgggtggtccccgggatggag

SEQ ID NO: 92823 - RNA, 23 nt, synthetic construct
  source 1..23: mol_type = other RNA
tcaggtcgtccctggagtggagg

SEQ ID NO: 92824 - RNA, 23 nt, synthetic construct
  source 1..23: mol_type = other RNA
tgggatgggtgtaaagctggtag

SEQ ID NO: 92825 - RNA, 23 nt, synthetic construct
  source 1..23: mol_type = other RNA
ttggtaagcactgtggaggtgtg

SEQ ID NO: 92826 - RNA, 23 nt, synthetic construct
  source 1..23: mol_type = other RNA
tgtgggtggtccccgggatggag

SEQ ID NO: 92827 - RNA, 23 nt, synthetic construct
  source 1..23: mol_type = other RNA
tctgcccctccggccgcacggat

SEQ ID NO: 92828 - RNA, 23 nt, synthetic construct
  source 1..23: mol_type = other RNA
ttggtaagcactgtggaggtgtg

SEQ ID NO: 92829 - RNA, 23 nt, synthetic construct
  source 1..23: mol_type = other RNA
tccgtggtgtggcccggggtggt

SEQ ID NO: 92830 - RNA, 23 nt, synthetic construct
  source 1..23: mol_type = other RNA
tgtgggtggtccccgggatggag

SEQ ID NO: 92831 - RNA, 23 nt, synthetic construct
  source 1..23: mol_type = other RNA
tgggatgggtgtaaagctggtag

SEQ ID NO: 92832 - RNA, 23 nt, synthetic construct
  source 1..23: mol_type = other RNA
tgagtagaggaggtgtggattgt

SEQ ID NO: 92833 - RNA, 23 nt, synthetic construct
  source 1..23: mol_type = other RNA
tggagtagaggaggtgtggattg

SEQ ID NO: 92834 - RNA, 23 nt, synthetic construct
  source 1..23: mol_type = other RNA
tcgtggaattggtggcccttgtc

SEQ ID NO: 92835 - RNA, 23 nt, synthetic construct
  source 1..23: mol_type = other RNA
tccttgcaactggcggcagtggt

SEQ ID NO: 92836 - RNA, 23 nt, synthetic construct
  source 1..23: mol_type = other RNA
tggggtgggtgtgctagacaccg

SEQ ID NO: 92837 - RNA, 23 nt, synthetic construct
  source 1..23: mol_type = other RNA
taggccaccggttgcacctcgcc

SEQ ID NO: 92838 - RNA, 23 nt, synthetic construct
  source 1..23: mol_type = other RNA
tcccaccgctccccgggaaattt

SEQ ID NO: 92839 - RNA, 23 nt, synthetic construct
  source 1..23: mol_type = other RNA
taggactggcagttgctgaccca

SEQ ID NO: 92840 - RNA, 23 nt, synthetic construct
  source 1..23: mol_type = other RNA
tctcgtcacacacgcaggactgg

SEQ ID NO: 92841 - RNA, 23 nt, synthetic construct
  source 1..23: mol_type = other RNA
tctgaggtctgcagcggaaggtg

SEQ ID NO: 92842 - RNA, 23 nt, synthetic construct
  source 1..23: mol_type = other RNA
ttcattcagctggactggctggc

SEQ ID NO: 92843 - RNA, 23 nt, synthetic construct
  source 1..23: mol_type = other RNA
tggcgccctcccgaaaggggtcc

SEQ ID NO: 92844 - RNA, 23 nt, synthetic construct
  source 1..23: mol_type = other RNA
ttccgttccacaggaatgtcagc

SEQ ID NO: 92845 - RNA, 23 nt, synthetic construct
  source 1..23: mol_type = other RNA
tggtcgcacaggccaccggttgc

SEQ ID NO: 92846 - RNA, 23 nt, synthetic construct
  source 1..23: mol_type = other RNA
tggtaagcactgtggaggtgtgg

SEQ ID NO: 92847 - RNA, 23 nt, synthetic construct
  source 1..23: mol_type = other RNA
taaagtccccgccagagggcccc

SEQ ID NO: 92848 - RNA, 23 nt, synthetic construct
  source 1..23: mol_type = other RNA
tggtaagcactgtggaggtgtgg

SEQ ID NO: 92849 - RNA, 23 nt, synthetic construct
  source 1..23: mol_type = other RNA
ttgctgggacggtccacgtggtc

SEQ ID NO: 92850 - RNA, 23 nt, synthetic construct
  source 1..23: mol_type = other RNA
tcccgggaaatttaggaaaccca

SEQ ID NO: 92851 - RNA, 23 nt, synthetic construct
  source 1..23: mol_type = other RNA
tggagtaccactggtctgtgtgc

SEQ ID NO: 92852 - RNA, 23 nt, synthetic construct
  source 1..23: mol_type = other RNA
tggagtaccactggtctgtgtgc

SEQ ID NO: 92853 - RNA, 23 nt, synthetic construct
  source 1..23: mol_type = other RNA
tggagtaccactggtctgtgtgc

SEQ ID NO: 92854 - RNA, 23 nt, synthetic construct
  source 1..23: mol_type = other RNA
tggagtaccactggtctgtgtgc

SEQ ID NO: 92855 - RNA, 23 nt, synthetic construct
  source 1..23: mol_type = other RNA
tggagtaccactggtctgtgtgc

SEQ ID NO: 92856 - RNA, 23 nt, synthetic construct
  source 1..23: mol_type = other RNA
tcccatcgggtcccacgcagggg

SEQ ID NO: 92857 - RNA, 23 nt, synthetic construct
  source 1..23: mol_type = other RNA
tccattgatgaggacggagccgt

SEQ ID NO: 92858 - RNA, 23 nt, synthetic construct
  source 1..23: mol_type = other RNA
taacgttctcagacagcagtggc

SEQ ID NO: 92859 - RNA, 23 nt, synthetic construct
  source 1..23: mol_type = other RNA
tcttggacccggatggccgtgtc

SEQ ID NO: 92860 - RNA, 23 nt, synthetic construct
  source 1..23: mol_type = other RNA
tattgtcgtcgaagttcccgcac

SEQ ID NO: 92861 - RNA, 23 nt, synthetic construct
  source 1..23: mol_type = other RNA
tgtggcacgtcccctgcagtggt

SEQ ID NO: 92862 - RNA, 23 nt, synthetic construct
  source 1..23: mol_type = other RNA
taccgtggttatgggggccgatg

SEQ ID NO: 92863 - RNA, 23 nt, synthetic construct
  source 1..23: mol_type = other RNA
taccgtggttatgggggccgatg

SEQ ID NO: 92864 - RNA, 23 nt, synthetic construct
  source 1..23: mol_type = other RNA
taccgtggttatgggggccgatg

SEQ ID NO: 92865 - RNA, 23 nt, synthetic construct
  source 1..23: mol_type = other RNA
tcgtccgtgcagttgccggccgg

SEQ ID NO: 92866 - RNA, 23 nt, synthetic construct
  source 1..23: mol_type = other RNA
tgcattgtcgtcgaagttcccgc

SEQ ID NO: 92867 - RNA, 23 nt, synthetic construct
  source 1..23: mol_type = other RNA
ttggccgtggatccagtggttgc

SEQ ID NO: 92868 - RNA, 23 nt, synthetic construct
  source 1..23: mol_type = other RNA
ttgggtgtgcagttacagctctg

SEQ ID NO: 92869 - RNA, 23 nt, synthetic construct
  source 1..23: mol_type = other RNA
ttggccgtggatccagtggacgc

SEQ ID NO: 92870 - RNA, 23 nt, synthetic construct
  source 1..23: mol_type = other RNA
tcggcactcgaggcccaggggct

SEQ ID NO: 92871 - RNA, 23 nt, synthetic construct
  source 1..23: mol_type = other RNA
ttggccgtggatccagtggactc

SEQ ID NO: 92872 - RNA, 23 nt, synthetic construct
  source 1..23: mol_type = other RNA
taccgtggaacctctggttgtgg

SEQ ID NO: 92873 - RNA, 23 nt, synthetic construct
  source 1..23: mol_type = other RNA
ttcaccaccgtggttattggggc

SEQ ID NO: 92874 - RNA, 23 nt, synthetic construct
  source 1..23: mol_type = other RNA
tcggcactcgaggcccaggggct

SEQ ID NO: 92875 - RNA, 23 nt, synthetic construct
  source 1..23: mol_type = other RNA
tcggcactcgaggcccaggggct

SEQ ID NO: 92876 - RNA, 23 nt, synthetic construct
  source 1..23: mol_type = other RNA
ttggccgtggatccagtggactc

SEQ ID NO: 92877 - RNA, 23 nt, synthetic construct
  source 1..23: mol_type = other RNA
tcattgtcgtcgaagttcccgca

SEQ ID NO: 92878 - RNA, 23 nt, synthetic construct
  source 1..23: mol_type = other RNA
ttccgtgcagttgccggccggca

SEQ ID NO: 92879 - RNA, 23 nt, synthetic construct
  source 1..23: mol_type = other RNA
tccctctcgccaccgccttaaag

SEQ ID NO: 92880 - RNA, 23 nt, synthetic construct
  source 1..23: mol_type = other RNA
tgggggtgaccgtcacggggcct

SEQ ID NO: 92881 - RNA, 23 nt, synthetic construct
  source 1..23: mol_type = other RNA
tggtgccattgtacgaacacagc

SEQ ID NO: 92882 - RNA, 23 nt, synthetic construct
  source 1..23: mol_type = other RNA
tgtgctgtccaccagtgcgtggc

SEQ ID NO: 92883 - RNA, 23 nt, synthetic construct
  source 1..23: mol_type = other RNA
tgcccatgtgtgcgttgaagagg

SEQ ID NO: 92884 - RNA, 23 nt, synthetic construct
  source 1..23: mol_type = other RNA
tgcagtcctcctcggcaatgcag

SEQ ID NO: 92885 - RNA, 23 nt, synthetic construct
  source 1..23: mol_type = other RNA
tgggggacagggatcgcccgtgt

SEQ ID NO: 92886 - RNA, 23 nt, synthetic construct
  source 1..23: mol_type = other RNA
tgggggacagggatcgcccgtgt

SEQ ID NO: 92887 - RNA, 23 nt, synthetic construct
  source 1..23: mol_type = other RNA
tgctctcccagggtaggactcct

SEQ ID NO: 92888 - RNA, 23 nt, synthetic construct
  source 1..23: mol_type = other RNA
tgggcaccgccatccatggtgtg

SEQ ID NO: 92889 - RNA, 23 nt, synthetic construct
  source 1..23: mol_type = other RNA
tgtgggcgaggacgtcggggcac

SEQ ID NO: 92890 - RNA, 23 nt, synthetic construct
  source 1..23: mol_type = other RNA
tggcggccaggtacgcagtgctg

SEQ ID NO: 92891 - RNA, 23 nt, synthetic construct
  source 1..23: mol_type = other RNA
tcctccagttccgcggctggccc

SEQ ID NO: 92892 - RNA, 23 nt, synthetic construct
  source 1..23: mol_type = other RNA
taacacgccgccgtccgcttgga

SEQ ID NO: 92893 - RNA, 23 nt, synthetic construct
  source 1..23: mol_type = other RNA
tgctgagggccgtgaagtcgtca

SEQ ID NO: 92894 - RNA, 23 nt, synthetic construct
  source 1..23: mol_type = other RNA
tggcactgttgggatcggtcagg

SEQ ID NO: 92895 - RNA, 23 nt, synthetic construct
  source 1..23: mol_type = other RNA
tccaggcagcttagcttcccacc

SEQ ID NO: 92896 - RNA, 23 nt, synthetic construct
  source 1..23: mol_type = other RNA
taggtggcctcgttgtgcacaca

SEQ ID NO: 92897 - RNA, 23 nt, synthetic construct
  source 1..23: mol_type = other RNA
tggtagctgtaggtcctgtcctc

SEQ ID NO: 92898 - RNA, 23 nt, synthetic construct
  source 1..23: mol_type = other RNA
tggtgaatggcgttgtggctgga

SEQ ID NO: 92899 - RNA, 23 nt, synthetic construct
  source 1..23: mol_type = other RNA
ttggttgctgctagggtgtggga

SEQ ID NO: 92900 - RNA, 23 nt, synthetic construct
  source 1..23: mol_type = other RNA
tgatgttggagtaggtgtcaaag

SEQ ID NO: 92901 - RNA, 23 nt, synthetic construct
  source 1..23: mol_type = other RNA
tgatgttggagtaggtgtcaaag

SEQ ID NO: 92902 - RNA, 23 nt, synthetic construct
  source 1..23: mol_type = other RNA
tgatgttggagtaggtgtcaaag

SEQ ID NO: 92903 - RNA, 23 nt, synthetic construct
  source 1..23: mol_type = other RNA
tgatgttggagtaggtgtcaaag

SEQ ID NO: 92904 - RNA, 23 nt, synthetic construct
  source 1..23: mol_type = other RNA
tggggggtgtgccagtcggggcc

SEQ ID NO: 92905 - RNA, 23 nt, synthetic construct
  source 1..23: mol_type = other RNA
tcagagctctgcgtaagcctcca

SEQ ID NO: 92906 - RNA, 23 nt, synthetic construct
  source 1..23: mol_type = other RNA
tcacacgcacaccgtctcggggc

SEQ ID NO: 92907 - RNA, 23 nt, synthetic construct
  source 1..23: mol_type = other RNA
tcacactcatccacgtgggtgta

SEQ ID NO: 92908 - RNA, 23 nt, synthetic construct
  source 1..23: mol_type = other RNA
tgcgtccggcacgcgctcggggc

SEQ ID NO: 92909 - RNA, 23 nt, synthetic construct
  source 1..23: mol_type = other RNA
tggcaccgccatccatggtgtgc

SEQ ID NO: 92910 - RNA, 23 nt, synthetic construct
  source 1..23: mol_type = other RNA
tgtggaagtcaccccaggtgctg

SEQ ID NO: 92911 - RNA, 23 nt, synthetic construct
  source 1..23: mol_type = other RNA
ttgaggacggagccgttggacgc

SEQ ID NO: 92912 - RNA, 23 nt, synthetic construct
  source 1..23: mol_type = other RNA
tatgtcagcaccagccggatgct

SEQ ID NO: 92913 - RNA, 23 nt, synthetic construct
  source 1..23: mol_type = other RNA
tacctccagttccgcggctggcc

SEQ ID NO: 92914 - RNA, 23 nt, synthetic construct
  source 1..23: mol_type = other RNA
tgcacctccagttccgcggctgg

SEQ ID NO: 92915 - RNA, 23 nt, synthetic construct
  source 1..23: mol_type = other RNA
tggaggtgcccgggctgtaggtg

SEQ ID NO: 92916 - RNA, 23 nt, synthetic construct
  source 1..23: mol_type = other RNA
tctgtctgcaccacgatgaagaa

SEQ ID NO: 92917 - RNA, 23 nt, synthetic construct
  source 1..23: mol_type = other RNA
ttcctggcattggcacaggcagc

SEQ ID NO: 92918 - RNA, 23 nt, synthetic construct
  source 1..23: mol_type = other RNA
tttcctggcattggcacaggcag

SEQ ID NO: 92919 - RNA, 23 nt, synthetic construct
  source 1..23: mol_type = other RNA
tttggaggatcagctcgtagctc

SEQ ID NO: 92920 - RNA, 23 nt, synthetic construct
  source 1..23: mol_type = other RNA
tcggatgaacacgctggtcttcc

SEQ ID NO: 92921 - RNA, 23 nt, synthetic construct
  source 1..23: mol_type = other RNA
tcccgagtcgcaggcacacgcgt

SEQ ID NO: 92922 - RNA, 23 nt, synthetic construct
  source 1..23: mol_type = other RNA
tagaaacactcgcagtcgccacc

SEQ ID NO: 92923 - RNA, 23 nt, synthetic construct
  source 1..23: mol_type = other RNA
tgccaagcccatcggtggtgttg

SEQ ID NO: 92924 - RNA, 23 nt, synthetic construct
  source 1..23: mol_type = other RNA
tcaggcgccaagcccatcggtgg

SEQ ID NO: 92925 - RNA, 23 nt, synthetic construct
  source 1..23: mol_type = other RNA
tctcgcggacacacacggtggag

SEQ ID NO: 92926 - RNA, 23 nt, synthetic construct
  source 1..23: mol_type = other RNA
tgtgagggccgccgtcgaccgga

SEQ ID NO: 92927 - RNA, 23 nt, synthetic construct
  source 1..23: mol_type = other RNA
tgaggtgagggccgccgtcgacc

SEQ ID NO: 92928 - RNA, 23 nt, synthetic construct
  source 1..23: mol_type = other RNA
tgctgtgcctgtcgggcgagctc

SEQ ID NO: 92929 - RNA, 23 nt, synthetic construct
  source 1..23: mol_type = other RNA
tgggcgtgctggtctcggcctga

SEQ ID NO: 92930 - RNA, 23 nt, synthetic construct
  source 1..23: mol_type = other RNA
tgtgttagtcaaggggctcattg

SEQ ID NO: 92931 - RNA, 23 nt, synthetic construct
  source 1..23: mol_type = other RNA
tggtggtgttagtcaaggggctc

SEQ ID NO: 92932 - RNA, 23 nt, synthetic construct
  source 1..23: mol_type = other RNA
ttttggtagtgtgagctgttcct

SEQ ID NO: 92933 - RNA, 23 nt, synthetic construct
  source 1..23: mol_type = other RNA
tactttggtagtgtgagctgttc

SEQ ID NO: 92934 - RNA, 23 nt, synthetic construct
  source 1..23: mol_type = other RNA
tagggggtcaccgtggagcctct

SEQ ID NO: 92935 - RNA, 23 nt, synthetic construct
  source 1..23: mol_type = other RNA
tggtcagcactggggggatggga

SEQ ID NO: 92936 - RNA, 23 nt, synthetic construct
  source 1..23: mol_type = other RNA
ttgcgggtcttgctgggtgtggc

SEQ ID NO: 92937 - RNA, 23 nt, synthetic construct
  source 1..23: mol_type = other RNA
tgggcatggccgtagagctggtg

SEQ ID NO: 92938 - RNA, 23 nt, synthetic construct
  source 1..23: mol_type = other RNA
ttggctgtagtgctcggctctgt

SEQ ID NO: 92939 - RNA, 23 nt, synthetic construct
  source 1..23: mol_type = other RNA
tcaccgtcacggtggctgtagtg

SEQ ID NO: 92940 - RNA, 23 nt, synthetic construct
  source 1..23: mol_type = other RNA
tgctcacatgtggggtgccagca

SEQ ID NO: 92941 - RNA, 23 nt, synthetic construct
  source 1..23: mol_type = other RNA
tggtgctcacatgtggggtgcca

SEQ ID NO: 92942 - RNA, 23 nt, synthetic construct
  source 1..23: mol_type = other RNA
tcgtggtgctcacatgtggggtg

SEQ ID NO: 92943 - RNA, 23 nt, synthetic construct
  source 1..23: mol_type = other RNA
ttggccgtggtgctcacatgtgg

SEQ ID NO: 92944 - RNA, 23 nt, synthetic construct
  source 1..23: mol_type = other RNA
ttttggtagtgtgagctgttcct

SEQ ID NO: 92945 - RNA, 23 nt, synthetic construct
  source 1..23: mol_type = other RNA
tactttggtagtgtgagctgttc

SEQ ID NO: 92946 - RNA, 23 nt, synthetic construct
  source 1..23: mol_type = other RNA
tcgtggttgtggtagtcagcact

SEQ ID NO: 92947 - RNA, 23 nt, synthetic construct
  source 1..23: mol_type = other RNA
tgtgttgtccctggagttgagga

SEQ ID NO: 92948 - RNA, 23 nt, synthetic construct
  source 1..23: mol_type = other RNA
tggtcagcactggggggataggt

SEQ ID NO: 92949 - RNA, 23 nt, synthetic construct
  source 1..23: mol_type = other RNA
ttgcgggtcttgctgggtgtggc

SEQ ID NO: 92950 - RNA, 23 nt, synthetic construct
  source 1..23: mol_type = other RNA
tcccggtggtcccaagggtgaag

SEQ ID NO: 92951 - RNA, 23 nt, synthetic construct
  source 1..23: mol_type = other RNA
tctgttctgggagggtcccggtg

SEQ ID NO: 92952 - RNA, 23 nt, synthetic construct
  source 1..23: mol_type = other RNA
tggaggggtggattgtggacatg

SEQ ID NO: 92953 - RNA, 23 nt, synthetic construct
  source 1..23: mol_type = other RNA
tggccttcgtggtcagcactgtg

SEQ ID NO: 92954 - RNA, 23 nt, synthetic construct
  source 1..23: mol_type = other RNA
tcaccgtcacggtggctgtagtg

SEQ ID NO: 92955 - RNA, 23 nt, synthetic construct
  source 1..23: mol_type = other RNA
ttgagggtgccagcagttgcccg

SEQ ID NO: 92956 - RNA, 23 nt, synthetic construct
  source 1..23: mol_type = other RNA
ttttggtagtgtgagctgttcct

SEQ ID NO: 92957 - RNA, 23 nt, synthetic construct
  source 1..23: mol_type = other RNA
tactttggtagtgtgagctgttc

SEQ ID NO: 92958 - RNA, 23 nt, synthetic construct
  source 1..23: mol_type = other RNA
tagggggtcaccgtggagcctct

SEQ ID NO: 92959 - RNA, 23 nt, synthetic construct
  source 1..23: mol_type = other RNA
tggtcagcactggggggatggga

SEQ ID NO: 92960 - RNA, 23 nt, synthetic construct
  source 1..23: mol_type = other RNA
ttgcgggtcttgctgggtgtggc

SEQ ID NO: 92961 - RNA, 23 nt, synthetic construct
  source 1..23: mol_type = other RNA
tgcccgtggtcaccaccgtggtt

SEQ ID NO: 92962 - RNA, 23 nt, synthetic construct
  source 1..23: mol_type = other RNA
ttggctgtagtgctcggctctgt

SEQ ID NO: 92963 - RNA, 23 nt, synthetic construct
  source 1..23: mol_type = other RNA
tcaccgtcacggtggctgtagtg

SEQ ID NO: 92964 - RNA, 23 nt, synthetic construct
  source 1..23: mol_type = other RNA
tgctcacatgtggggtgccagca

SEQ ID NO: 92965 - RNA, 23 nt, synthetic construct
  source 1..23: mol_type = other RNA
tggtgctcacatgtggggtgcca

SEQ ID NO: 92966 - RNA, 23 nt, synthetic construct
  source 1..23: mol_type = other RNA
tcgtggtgctcacatgtggggtg

SEQ ID NO: 92967 - RNA, 23 nt, synthetic construct
  source 1..23: mol_type = other RNA
ttggccgtggtgctcacatgtgg

SEQ ID NO: 92968 - RNA, 23 nt, synthetic construct
  source 1..23: mol_type = other RNA
ttttggtagtgtgagctgttcct

SEQ ID NO: 92969 - RNA, 23 nt, synthetic construct
  source 1..23: mol_type = other RNA
tactttggtagtgtgagctgttc

SEQ ID NO: 92970 - RNA, 23 nt, synthetic construct
  source 1..23: mol_type = other RNA
tgccactggttgtgggtgtggtg

SEQ ID NO: 92971 - RNA, 23 nt, synthetic construct
  source 1..23: mol_type = other RNA
tgggggtcaccgtggagccactg

SEQ ID NO: 92972 - RNA, 23 nt, synthetic construct
  source 1..23: mol_type = other RNA
tagggggtcaccgtggagccact

SEQ ID NO: 92973 - RNA, 23 nt, synthetic construct
  source 1..23: mol_type = other RNA
tgtgatcagtgatgggggagtac

SEQ ID NO: 92974 - RNA, 23 nt, synthetic construct
  source 1..23: mol_type = other RNA
tggtgatcagtgatgggggagta

SEQ ID NO: 92975 - RNA, 23 nt, synthetic construct
  source 1..23: mol_type = other RNA
tgtgttgtccctggagttgagga

SEQ ID NO: 92976 - RNA, 23 nt, synthetic construct
  source 1..23: mol_type = other RNA
tggtcagcactggggggataggt

SEQ ID NO: 92977 - RNA, 23 nt, synthetic construct
  source 1..23: mol_type = other RNA
ttgcgggtcttgctgggtgtggc

SEQ ID NO: 92978 - RNA, 23 nt, synthetic construct
  source 1..23: mol_type = other RNA
tgcccgtggtcaccaccgtggtt

SEQ ID NO: 92979 - RNA, 23 nt, synthetic construct
  source 1..23: mol_type = other RNA
tgggcatggccgtagagctggtg

SEQ ID NO: 92980 - RNA, 23 nt, synthetic construct
  source 1..23: mol_type = other RNA
tcccggtggtcccaagggtggag

SEQ ID NO: 92981 - RNA, 23 nt, synthetic construct
  source 1..23: mol_type = other RNA
tctgttctgggagggtcccggtg

SEQ ID NO: 92982 - RNA, 23 nt, synthetic construct
  source 1..23: mol_type = other RNA
tccacgggtgtggtggtctgttc

SEQ ID NO: 92983 - RNA, 23 nt, synthetic construct
  source 1..23: mol_type = other RNA
tggaggggtggattgtggacatg

SEQ ID NO: 92984 - RNA, 23 nt, synthetic construct
  source 1..23: mol_type = other RNA
tggccttcgtggtcagcactgtg

SEQ ID NO: 92985 - RNA, 23 nt, synthetic construct
  source 1..23: mol_type = other RNA
ttggctgtagtgctcggctctgt

SEQ ID NO: 92986 - RNA, 23 nt, synthetic construct
  source 1..23: mol_type = other RNA
tcaccgtcacggtggctgtagtg

SEQ ID NO: 92987 - RNA, 23 nt, synthetic construct
  source 1..23: mol_type = other RNA
tgctcacatgtggggtgccagca

SEQ ID NO: 92988 - RNA, 23 nt, synthetic construct
  source 1..23: mol_type = other RNA
tggtgctcacatgtggggtgcca

SEQ ID NO: 92989 - RNA, 23 nt, synthetic construct
  source 1..23: mol_type = other RNA
tcgtggtgctcacatgtggggtg

SEQ ID NO: 92990 - RNA, 23 nt, synthetic construct
  source 1..23: mol_type = other RNA
ttggccgtggtgctcacatgtgg

SEQ ID NO: 92991 - RNA, 23 nt, synthetic construct
  source 1..23: mol_type = other RNA
tggaagggcagttgcagtccctg

SEQ ID NO: 92992 - RNA, 23 nt, synthetic construct
  source 1..23: mol_type = other RNA
ttttggtagtgtgagctgttcct

SEQ ID NO: 92993 - RNA, 23 nt, synthetic construct
  source 1..23: mol_type = other RNA
tactttggtagtgtgagctgttc

SEQ ID NO: 92994 - RNA, 23 nt, synthetic construct
  source 1..23: mol_type = other RNA
tgccactggttgtgggtgtggtg

SEQ ID NO: 92995 - RNA, 23 nt, synthetic construct
  source 1..23: mol_type = other RNA
tgggggtcaccgtggagccactg

SEQ ID NO: 92996 - RNA, 23 nt, synthetic construct
  source 1..23: mol_type = other RNA
tagggggtcaccgtggagccact

SEQ ID NO: 92997 - RNA, 23 nt, synthetic construct
  source 1..23: mol_type = other RNA
tgtgttgtccctggagttgagga

SEQ ID NO: 92998 - RNA, 23 nt, synthetic construct
  source 1..23: mol_type = other RNA
tggtgatgggtgttgtccctgga

SEQ ID NO: 92999 - RNA, 23 nt, synthetic construct
  source 1..23: mol_type = other RNA
ttctgtgctgggacggtccacgt

SEQ ID NO: 93000 - RNA, 23 nt, synthetic construct
  source 1..23: mol_type = other RNA
ttggtggcccttgtcatggtggc

SEQ ID NO: 93001 - RNA, 23 nt, synthetic construct
  source 1..23: mol_type = other RNA
tggatccgggtcgtccccagagt

SEQ ID NO: 93002 - RNA, 23 nt, synthetic construct
  source 1..23: mol_type = other RNA
taggcgccctggaagcggtcaat

SEQ ID NO: 93003 - RNA, 23 nt, synthetic construct
  source 1..23: mol_type = other RNA
tgggacaggcgccctggaagcgg

SEQ ID NO: 93004 - RNA, 23 nt, synthetic construct
  source 1..23: mol_type = other RNA
tctgagattcccaaagcgtgcat

SEQ ID NO: 93005 - RNA, 23 nt, synthetic construct
  source 1..23: mol_type = other RNA
tgtgctagacaccggggctgcgg

SEQ ID NO: 93006 - RNA, 23 nt, synthetic construct
  source 1..23: mol_type = other RNA
tgtgtgctagacaccggggctgc

SEQ ID NO: 93007 - RNA, 23 nt, synthetic construct
  source 1..23: mol_type = other RNA
tgcacaaggttgtggcactcagc

SEQ ID NO: 93008 - RNA, 23 nt, synthetic construct
  source 1..23: mol_type = other RNA
tgtggtcgctgatgcaggcgttg

SEQ ID NO: 93009 - RNA, 23 nt, synthetic construct
  source 1..23: mol_type = other RNA
tcaaggcggcccctgcagtggtc

SEQ ID NO: 93010 - RNA, 23 nt, synthetic construct
  source 1..23: mol_type = other RNA
tggcgcggcagagctctgcgtaa

SEQ ID NO: 93011 - RNA, 23 nt, synthetic construct
  source 1..23: mol_type = other RNA
tgcaggtggcaggctgtatgggg

SEQ ID NO: 93012 - RNA, 23 nt, synthetic construct
  source 1..23: mol_type = other RNA
ttgcactgcaccgacactgaacc

SEQ ID NO: 93013 - RNA, 23 nt, synthetic construct
  source 1..23: mol_type = other RNA
tgctgaccctgggcgtcacaggg

SEQ ID NO: 93014 - RNA, 23 nt, synthetic construct
  source 1..23: mol_type = other RNA
ttgcacggcgggggctgaccctg

SEQ ID NO: 93015 - RNA, 23 nt, synthetic construct
  source 1..23: mol_type = other RNA
tatggactcctgccctggcgggc

SEQ ID NO: 93016 - RNA, 23 nt, synthetic construct
  source 1..23: mol_type = other RNA
taggtacacatgtggcagggaag

SEQ ID NO: 93017 - RNA, 23 nt, synthetic construct
  source 1..23: mol_type = other RNA
ttgacccaggtttcattcagctg

SEQ ID NO: 93018 - RNA, 23 nt, synthetic construct
  source 1..23: mol_type = other RNA
tcacggtgcagttgtccacatgg

SEQ ID NO: 93019 - RNA, 23 nt, synthetic construct
  source 1..23: mol_type = other RNA
tcctctgctgagtacttggacgc

SEQ ID NO: 93020 - RNA, 23 nt, synthetic construct
  source 1..23: mol_type = other RNA
tgggccggtttcacccacggggt

SEQ ID NO: 93021 - RNA, 23 nt, synthetic construct
  source 1..23: mol_type = other RNA
tcgctccggccgtggcagggaca

SEQ ID NO: 93022 - RNA, 23 nt, synthetic construct
  source 1..23: mol_type = other RNA
tgctggaatccgtgctgcgcggg

SEQ ID NO: 93023 - RNA, 23 nt, synthetic construct
  source 1..23: mol_type = other RNA
tgcgtagctggacgttgaagtcc

SEQ ID NO: 93024 - RNA, 23 nt, synthetic construct
  source 1..23: mol_type = other RNA
tgcgaggtgagggccgccgtcga

SEQ ID NO: 93025 - RNA, 23 nt, synthetic construct
  source 1..23: mol_type = other RNA
tgctggacgttgaagtcctcgta

SEQ ID NO: 93026 - RNA, 23 nt, synthetic construct
  source 1..23: mol_type = other RNA
tcggcactcgaggcccaggggct

SEQ ID NO: 93027 - RNA, 23 nt, synthetic construct
  source 1..23: mol_type = other RNA
ttggccgtggatccagtggatgc

SEQ ID NO: 93028 - RNA, 23 nt, synthetic construct
  source 1..23: mol_type = other RNA
ttggccgtggatccagtggacgc

SEQ ID NO: 93029 - RNA, 23 nt, synthetic construct
  source 1..23: mol_type = other RNA
tgttgacctcggtctcgcagccc

SEQ ID NO: 93030 - RNA, 23 nt, synthetic construct
  source 1..23: mol_type = other RNA
ttcgccacccgagtcgcaggcac

SEQ ID NO: 93031 - RNA, 23 nt, synthetic construct
  source 1..23: mol_type = other RNA
tcgcggggtgccacacacaggcc

SEQ ID NO: 93032 - RNA, 23 nt, synthetic construct
  source 1..23: mol_type = other RNA
taacgtagctgcagtcaccatgc

SEQ ID NO: 93033 - RNA, 23 nt, synthetic construct
  source 1..23: mol_type = other RNA
tagtcgctgagctgtacgccctt

SEQ ID NO: 93034 - RNA, 23 nt, synthetic construct
  source 1..23: mol_type = other RNA
tttggacgctccggggcaggagc

SEQ ID NO: 93035 - RNA, 23 nt, synthetic construct
  source 1..23: mol_type = other RNA
ttacttggacgctccggggcagg

SEQ ID NO: 93036 - RNA, 23 nt, synthetic construct
  source 1..23: mol_type = other RNA
tcccgtacatgaacacacggcgc

SEQ ID NO: 93037 - RNA, 23 nt, synthetic construct
  source 1..23: mol_type = other RNA
tggcgtatttgggatccagctcc

SEQ ID NO: 93038 - RNA, 23 nt, synthetic construct
  source 1..23: mol_type = other RNA
tacagcgggtcgtgccctggctg

SEQ ID NO: 93039 - RNA, 23 nt, synthetic construct
  source 1..23: mol_type = other RNA
tgtggctatagtgctcggctctg

SEQ ID NO: 93040 - RNA, 23 nt, synthetic construct
  source 1..23: mol_type = other RNA
tgacgtggccagctggaatccgt

SEQ ID NO: 93041 - RNA, 23 nt, synthetic construct
  source 1..23: mol_type = other RNA
tacgcacaccgtctcggggcagc

SEQ ID NO: 93042 - RNA, 23 nt, synthetic construct
  source 1..23: mol_type = other RNA
tgtcccgtgggtggtgttgtccc

SEQ ID NO: 93043 - RNA, 23 nt, synthetic construct
  source 1..23: mol_type = other RNA
tttgatgtagtccccgctctgct

SEQ ID NO: 93044 - RNA, 23 nt, synthetic construct
  source 1..23: mol_type = other RNA
tgctgtcggcacatttcttggac

SEQ ID NO: 93045 - RNA, 23 nt, synthetic construct
  source 1..23: mol_type = other RNA
tggccattgaaggtgacgctcac

SEQ ID NO: 93046 - RNA, 23 nt, synthetic construct
  source 1..23: mol_type = other RNA
tctgctgagtacttggacgctcc

SEQ ID NO: 93047 - RNA, 23 nt, synthetic construct
  source 1..23: mol_type = other RNA
ttggacgcactccccacagcact

SEQ ID NO: 93048 - RNA, 23 nt, synthetic construct
  source 1..23: mol_type = other RNA
tggataggtgttgtccctggagt

SEQ ID NO: 93049 - RNA, 23 nt, synthetic construct
  source 1..23: mol_type = other RNA
tggataggtgttgtccctggagt

SEQ ID NO: 93050 - RNA, 23 nt, synthetic construct
  source 1..23: mol_type = other RNA
tcggcacatttcttggacagaac

SEQ ID NO: 93051 - RNA, 23 nt, synthetic construct
  source 1..23: mol_type = other RNA
tatccggtgggcaccgtcacggt

SEQ ID NO: 93052 - RNA, 23 nt, synthetic construct
  source 1..23: mol_type = other RNA
tatccggtgggcaccgtcacggt

SEQ ID NO: 93053 - RNA, 23 nt, synthetic construct
  source 1..23: mol_type = other RNA
tatccggtgggcaccgtcacggt

SEQ ID NO: 93054 - RNA, 23 nt, synthetic construct
  source 1..23: mol_type = other RNA
tatccggtgggcaccgtcacggt

SEQ ID NO: 93055 - RNA, 23 nt, synthetic construct
  source 1..23: mol_type = other RNA
tgtgcatggatctctctcatgag

SEQ ID NO: 93056 - RNA, 23 nt, synthetic construct
  source 1..23: mol_type = other RNA
tactctggcggtgtgggtggtcc

SEQ ID NO: 93057 - RNA, 23 nt, synthetic construct
  source 1..23: mol_type = other RNA
tatagtgggagccgccccacatg

SEQ ID NO: 93058 - RNA, 23 nt, synthetic construct
  source 1..23: mol_type = other RNA
tatcaagcaggcgccaagcccat

SEQ ID NO: 93059 - RNA, 23 nt, synthetic construct
  source 1..23: mol_type = other RNA
tcgccatgtgcccaagctccccg

SEQ ID NO: 93060 - RNA, 23 nt, synthetic construct
  source 1..23: mol_type = other RNA
tgcgccatgtgcccaagctcccc

SEQ ID NO: 93061 - RNA, 23 nt, synthetic construct
  source 1..23: mol_type = other RNA
tttggaagcggtgctggctgtgc

SEQ ID NO: 93062 - RNA, 23 nt, synthetic construct
  source 1..23: mol_type = other RNA
tataggcgggtccaggtggtgcc

SEQ ID NO: 93063 - RNA, 23 nt, synthetic construct
  source 1..23: mol_type = other RNA
tgtaagcactgtggaggtgtggg

SEQ ID NO: 93064 - RNA, 23 nt, synthetic construct
  source 1..23: mol_type = other RNA
tataggcgggtccaggtggtgcc

SEQ ID NO: 93065 - RNA, 23 nt, synthetic construct
  source 1..23: mol_type = other RNA
tgtaagcactgtggaggtgtgga

SEQ ID NO: 93066 - RNA, 23 nt, synthetic construct
  source 1..23: mol_type = other RNA
tattggggccgatgtggggctgc

SEQ ID NO: 93067 - RNA, 23 nt, synthetic construct
  source 1..23: mol_type = other RNA
tgtaagcactgtggaggtgtgga

SEQ ID NO: 93068 - RNA, 23 nt, synthetic construct
  source 1..23: mol_type = other RNA
tacacggccatcccgtgggtctc

SEQ ID NO: 93069 - RNA, 23 nt, synthetic construct
  source 1..23: mol_type = other RNA
tatgtgggttgtagaagtcacag

SEQ ID NO: 93070 - RNA, 23 nt, synthetic construct
  source 1..23: mol_type = other RNA
tcatgtgggttgtagaagtcaca

SEQ ID NO: 93071 - RNA, 23 nt, synthetic construct
  source 1..23: mol_type = other RNA
tctctttggaagcggtgctggct

SEQ ID NO: 93072 - RNA, 23 nt, synthetic construct
  source 1..23: mol_type = other RNA
tgactgtgggtgtcgtggccgtg

SEQ ID NO: 93073 - RNA, 23 nt, synthetic construct
  source 1..23: mol_type = other RNA
tgactgtgggtgtcgtggccgtg

SEQ ID NO: 93074 - RNA, 23 nt, synthetic construct
  source 1..23: mol_type = other RNA
tgactgtgggtgtcgtggccgtg

SEQ ID NO: 93075 - RNA, 23 nt, synthetic construct
  source 1..23: mol_type = other RNA
ttgatgtagtccccgctctgctc

SEQ ID NO: 93076 - RNA, 23 nt, synthetic construct
  source 1..23: mol_type = other RNA
tccgtgcagttgccggccggcaa

SEQ ID NO: 93077 - RNA, 23 nt, synthetic construct
  source 1..23: mol_type = other RNA
tggcagatgccctcctcgtccgt

SEQ ID NO: 93078 - RNA, 23 nt, synthetic construct
  source 1..23: mol_type = other RNA
ttgccatagccccccggagcagg

SEQ ID NO: 93079 - RNA, 23 nt, synthetic construct
  source 1..23: mol_type = other RNA
tgggcgggcacacaggcgcccgc

SEQ ID NO: 93080 - RNA, 23 nt, synthetic construct
  source 1..23: mol_type = other RNA
tagcacggtgccgtgagcgtagc

SEQ ID NO: 93081 - RNA, 23 nt, synthetic construct
  source 1..23: mol_type = other RNA
ttgggtgccagggcgtccgggca

SEQ ID NO: 93082 - RNA, 23 nt, synthetic construct
  source 1..23: mol_type = other RNA
tatggtgccgttgcttccgcaga

SEQ ID NO: 93083 - RNA, 23 nt, synthetic construct
  source 1..23: mol_type = other RNA
tcacaccaggccgaagtggacgt

SEQ ID NO: 93084 - RNA, 23 nt, synthetic construct
  source 1..23: mol_type = other RNA
tgctgagcgtgttggaagggtgg

SEQ ID NO: 93085 - RNA, 23 nt, synthetic construct
  source 1..23: mol_type = other RNA
tgtgagtgttggcgccaggctcg

SEQ ID NO: 93086 - RNA, 23 nt, synthetic construct
  source 1..23: mol_type = other RNA
tgagaggtggacagctcgctcgt

SEQ ID NO: 93087 - RNA, 23 nt, synthetic construct
  source 1..23: mol_type = other RNA
ttgtggacatggtggccgtgggt

SEQ ID NO: 93088 - RNA, 23 nt, synthetic construct
  source 1..23: mol_type = other RNA
ttagttggcactttggtagtgtg

SEQ ID NO: 93089 - RNA, 23 nt, synthetic construct
  source 1..23: mol_type = other RNA
tggtctgtgtgctagaggagggt

SEQ ID NO: 93090 - RNA, 23 nt, synthetic construct
  source 1..23: mol_type = other RNA
ttggtctgtgtgctagaggaggg

SEQ ID NO: 93091 - RNA, 23 nt, synthetic construct
  source 1..23: mol_type = other RNA
ttggtgtggcccggggtggtcgt

SEQ ID NO: 93092 - RNA, 23 nt, synthetic construct
  source 1..23: mol_type = other RNA
tcccggcatggggtagctgtagt

SEQ ID NO: 93093 - RNA, 23 nt, synthetic construct
  source 1..23: mol_type = other RNA
ttcaaagtccccgccagagggcc

SEQ ID NO: 93094 - RNA, 23 nt, synthetic construct
  source 1..23: mol_type = other RNA
ttgtggacatggtggccgtgggt

SEQ ID NO: 93095 - RNA, 23 nt, synthetic construct
  source 1..23: mol_type = other RNA
tggtctgtgtgctagaggagggt

SEQ ID NO: 93096 - RNA, 23 nt, synthetic construct
  source 1..23: mol_type = other RNA
ttggtctgtgtgctagaggaggg

SEQ ID NO: 93097 - RNA, 23 nt, synthetic construct
  source 1..23: mol_type = other RNA
ttggtgtggcccggggtggtcgt

SEQ ID NO: 93098 - RNA, 23 nt, synthetic construct
  source 1..23: mol_type = other RNA
tcccggcatggggtagctgtagt

SEQ ID NO: 93099 - RNA, 23 nt, synthetic construct
  source 1..23: mol_type = other RNA
ttcaaagtccccgccagagggcc

SEQ ID NO: 93100 - RNA, 23 nt, synthetic construct
  source 1..23: mol_type = other RNA
tgtgtaaagctggtagctgtgga

SEQ ID NO: 93101 - RNA, 23 nt, synthetic construct
  source 1..23: mol_type = other RNA
ttgtggacatggtggccgtgggt

SEQ ID NO: 93102 - RNA, 23 nt, synthetic construct
  source 1..23: mol_type = other RNA
ttcggcactttggtagtgtgagc

SEQ ID NO: 93103 - RNA, 23 nt, synthetic construct
  source 1..23: mol_type = other RNA
tggtctgtgtgctagaggagggt

SEQ ID NO: 93104 - RNA, 23 nt, synthetic construct
  source 1..23: mol_type = other RNA
ttggtctgtgtgctagaggaggg

SEQ ID NO: 93105 - RNA, 23 nt, synthetic construct
  source 1..23: mol_type = other RNA
ttggtgtggcccggggtggtcgt

SEQ ID NO: 93106 - RNA, 23 nt, synthetic construct
  source 1..23: mol_type = other RNA
tcccggcatggggtagctgtagt

SEQ ID NO: 93107 - RNA, 23 nt, synthetic construct
  source 1..23: mol_type = other RNA
ttcaaagtccccgccagagggcc

SEQ ID NO: 93108 - RNA, 23 nt, synthetic construct
  source 1..23: mol_type = other RNA
ttgtggacatggtggccgtgggt

SEQ ID NO: 93109 - RNA, 23 nt, synthetic construct
  source 1..23: mol_type = other RNA
ttcggcactttggtagtgtgagc

SEQ ID NO: 93110 - RNA, 23 nt, synthetic construct
  source 1..23: mol_type = other RNA
tggtctgtgtgctagaggagggt

SEQ ID NO: 93111 - RNA, 23 nt, synthetic construct
  source 1..23: mol_type = other RNA
ttggtctgtgtgctagaggaggg

SEQ ID NO: 93112 - RNA, 23 nt, synthetic construct
  source 1..23: mol_type = other RNA
ttggtgtggcccggggtggtcgt

SEQ ID NO: 93113 - RNA, 23 nt, synthetic construct
  source 1..23: mol_type = other RNA
tcccggcatggggtagctgtagt

SEQ ID NO: 93114 - RNA, 23 nt, synthetic construct
  source 1..23: mol_type = other RNA
ttcaaagtccccgccagagggcc

SEQ ID NO: 93115 - RNA, 23 nt, synthetic construct
  source 1..23: mol_type = other RNA
ttgtggacatggtggccgtgggt

SEQ ID NO: 93116 - RNA, 23 nt, synthetic construct
  source 1..23: mol_type = other RNA
ttcggcactttggtagtgtgagc

SEQ ID NO: 93117 - RNA, 23 nt, synthetic construct
  source 1..23: mol_type = other RNA
tggtctgtgtgctagaggagggt

SEQ ID NO: 93118 - RNA, 23 nt, synthetic construct
  source 1..23: mol_type = other RNA
ttggtctgtgtgctagaggaggg

SEQ ID NO: 93119 - RNA, 23 nt, synthetic construct
  source 1..23: mol_type = other RNA
tgtgtaaagctggtagctgtgga

SEQ ID NO: 93120 - RNA, 23 nt, synthetic construct
  source 1..23: mol_type = other RNA
tacaggcgccctggaagcggtca

SEQ ID NO: 93121 - RNA, 23 nt, synthetic construct
  source 1..23: mol_type = other RNA
tctttctgctgtcggggaccagc

SEQ ID NO: 93122 - RNA, 23 nt, synthetic construct
  source 1..23: mol_type = other RNA
tgcgttgaagaggatctggtcct

SEQ ID NO: 93123 - RNA, 23 nt, synthetic construct
  source 1..23: mol_type = other RNA
tccatgtgtgcgttgaagaggat

SEQ ID NO: 93124 - RNA, 23 nt, synthetic construct
  source 1..23: mol_type = other RNA
ttcagcaaatggactccaccctc

SEQ ID NO: 93125 - RNA, 23 nt, synthetic construct
  source 1..23: mol_type = other RNA
tagcacggagcgcggggtgccac

SEQ ID NO: 93126 - RNA, 23 nt, synthetic construct
  source 1..23: mol_type = other RNA
ttctcccagggtaggactcctga

SEQ ID NO: 93127 - RNA, 23 nt, synthetic construct
  source 1..23: mol_type = other RNA
taggctctcccagggtaggactc

SEQ ID NO: 93128 - RNA, 23 nt, synthetic construct
  source 1..23: mol_type = other RNA
tccagtgacatcagggaggggca

SEQ ID NO: 93129 - RNA, 23 nt, synthetic construct
  source 1..23: mol_type = other RNA
tataggcgggtccaggtggtgcc

SEQ ID NO: 93130 - RNA, 23 nt, synthetic construct
  source 1..23: mol_type = other RNA
tgtaagcactgtggaggtgtggg

SEQ ID NO: 93131 - RNA, 23 nt, synthetic construct
  source 1..23: mol_type = other RNA
tgggttgtggcacgtcccctgca

SEQ ID NO: 93132 - RNA, 23 nt, synthetic construct
  source 1..23: mol_type = other RNA
tataggcgggtccaggtggtgcc

SEQ ID NO: 93133 - RNA, 23 nt, synthetic construct
  source 1..23: mol_type = other RNA
taccgccatccatggtgtgccct

SEQ ID NO: 93134 - RNA, 23 nt, synthetic construct
  source 1..23: mol_type = other RNA
tgatggctgtaacgctggtagct

SEQ ID NO: 93135 - RNA, 23 nt, synthetic construct
  source 1..23: mol_type = other RNA
tggatggctgtaacgctggtagc

SEQ ID NO: 93136 - RNA, 23 nt, synthetic construct
  source 1..23: mol_type = other RNA
tgggtaggactcctgagtggcgc

SEQ ID NO: 93137 - RNA, 23 nt, synthetic construct
  source 1..23: mol_type = other RNA
tgtaagcactgtggaggtgtgga

SEQ ID NO: 93138 - RNA, 23 nt, synthetic construct
  source 1..23: mol_type = other RNA
ttagtggttgtccaggtagaggc

SEQ ID NO: 93139 - RNA, 23 nt, synthetic construct
  source 1..23: mol_type = other RNA
tcagggcacgtattcgcagcaga

SEQ ID NO: 93140 - RNA, 23 nt, synthetic construct
  source 1..23: mol_type = other RNA
tggtcaccgtggaacctctggtt

SEQ ID NO: 93141 - RNA, 23 nt, synthetic construct
  source 1..23: mol_type = other RNA
tggccgttgcgacctcagccctg

SEQ ID NO: 93142 - RNA, 23 nt, synthetic construct
  source 1..23: mol_type = other RNA
ttccgcttggacccggatggccg

SEQ ID NO: 93143 - RNA, 23 nt, synthetic construct
  source 1..23: mol_type = other RNA
tcgtggtgttcggcactgggggt

SEQ ID NO: 93144 - RNA, 23 nt, synthetic construct
  source 1..23: mol_type = other RNA
tcgtggtgttcggcactgggggt

SEQ ID NO: 93145 - RNA, 23 nt, synthetic construct
  source 1..23: mol_type = other RNA
tcgtggtgttcggcactgggggt

SEQ ID NO: 93146 - RNA, 23 nt, synthetic construct
  source 1..23: mol_type = other RNA
ttcaggccgcacttccgcagctc

SEQ ID NO: 93147 - RNA, 23 nt, synthetic construct
  source 1..23: mol_type = other RNA
tacacacggtggagaccgggagg

SEQ ID NO: 93148 - RNA, 23 nt, synthetic construct
  source 1..23: mol_type = other RNA
ttaggctgcggcgttgagaacag

SEQ ID NO: 93149 - RNA, 23 nt, synthetic construct
  source 1..23: mol_type = other RNA
ttgtatggggccgcatggcttgt

SEQ ID NO: 93150 - RNA, 23 nt, synthetic construct
  source 1..23: mol_type = other RNA
tgtccgtgcagggtgagccacac

SEQ ID NO: 93151 - RNA, 23 nt, synthetic construct
  source 1..23: mol_type = other RNA
tactggatgccactgggtgtgca

SEQ ID NO: 93152 - RNA, 23 nt, synthetic construct
  source 1..23: mol_type = other RNA
tcgtcctggtagctgtaggtcct

SEQ ID NO: 93153 - RNA, 23 nt, synthetic construct
  source 1..23: mol_type = other RNA
tccgtcaggccgcacttccgcag

SEQ ID NO: 93154 - RNA, 23 nt, synthetic construct
  source 1..23: mol_type = other RNA
taggcatccaccacgtaggcgta

SEQ ID NO: 93155 - RNA, 23 nt, synthetic construct
  source 1..23: mol_type = other RNA
tgctgtccaccagtgcgtggcac

SEQ ID NO: 93156 - RNA, 23 nt, synthetic construct
  source 1..23: mol_type = other RNA
tgcactgccatagccccccggag

SEQ ID NO: 93157 - RNA, 23 nt, synthetic construct
  source 1..23: mol_type = other RNA
tagcagaggacccggatcctgta

SEQ ID NO: 93158 - RNA, 23 nt, synthetic construct
  source 1..23: mol_type = other RNA
tgttgtggcacgtcccctgcagt

SEQ ID NO: 93159 - RNA, 23 nt, synthetic construct
  source 1..23: mol_type = other RNA
ttcggggtggccgtggatccagt

SEQ ID NO: 93160 - RNA, 23 nt, synthetic construct
  source 1..23: mol_type = other RNA
tacggggtggccgtggatccagt

SEQ ID NO: 93161 - RNA, 23 nt, synthetic construct
  source 1..23: mol_type = other RNA
tacggggtggccgtggatccagt

SEQ ID NO: 93162 - RNA, 23 nt, synthetic construct
  source 1..23: mol_type = other RNA
tacggggtggccgtggatccagt

SEQ ID NO: 93163 - RNA, 23 nt, synthetic construct
  source 1..23: mol_type = other RNA
tacggggtggccgtggatccagt

SEQ ID NO: 93164 - RNA, 23 nt, synthetic construct
  source 1..23: mol_type = other RNA
tgcggcaccacgagcatggccgc

SEQ ID NO: 93165 - RNA, 23 nt, synthetic construct
  source 1..23: mol_type = other RNA
tgggtggaacaaagctcacgcgc

SEQ ID NO: 93166 - RNA, 23 nt, synthetic construct
  source 1..23: mol_type = other RNA
tgcggcagtgctcagagaacacg

SEQ ID NO: 93167 - RNA, 23 nt, synthetic construct
  source 1..23: mol_type = other RNA
tcggccaggtacgcagtgctgtc

SEQ ID NO: 93168 - RNA, 23 nt, synthetic construct
  source 1..23: mol_type = other RNA
tggccgcacttccgcagctcagc

SEQ ID NO: 93169 - RNA, 23 nt, synthetic construct
  source 1..23: mol_type = other RNA
tcgcttggacccggatggccgtg

SEQ ID NO: 93170 - RNA, 23 nt, synthetic construct
  source 1..23: mol_type = other RNA
ttgcatgagtggcaccagctgca

SEQ ID NO: 93171 - RNA, 23 nt, synthetic construct
  source 1..23: mol_type = other RNA
tgcgaaggctgcgcccgtggcct

SEQ ID NO: 93172 - RNA, 23 nt, synthetic construct
  source 1..23: mol_type = other RNA
tgtcggcctcactcaggccgcgg

SEQ ID NO: 93173 - RNA, 23 nt, synthetic construct
  source 1..23: mol_type = other RNA
tattgaggaaggtgcccgcgggg

SEQ ID NO: 93174 - RNA, 23 nt, synthetic construct
  source 1..23: mol_type = other RNA
tcatccgacaccagccccggggg

SEQ ID NO: 93175 - RNA, 23 nt, synthetic construct
  source 1..23: mol_type = other RNA
tggggttgtggcacgtcccctgc

SEQ ID NO: 93176 - RNA, 23 nt, synthetic construct
  source 1..23: mol_type = other RNA
taggtcggggtggccgtggatcc

SEQ ID NO: 93177 - RNA, 23 nt, synthetic construct
  source 1..23: mol_type = other RNA
ttggtgttcggcactgggggtgt

SEQ ID NO: 93178 - RNA, 23 nt, synthetic construct
  source 1..23: mol_type = other RNA
tcgaggtgcgggtcttgctgggt

SEQ ID NO: 93179 - RNA, 23 nt, synthetic construct
  source 1..23: mol_type = other RNA
ttggggctcacagcccatggtca

SEQ ID NO: 93180 - RNA, 23 nt, synthetic construct
  source 1..23: mol_type = other RNA
tcgtagagctggtggccggggtg

SEQ ID NO: 93181 - RNA, 23 nt, synthetic construct
  source 1..23: mol_type = other RNA
tgtcagcactttggtagtgtgag

SEQ ID NO: 93182 - RNA, 23 nt, synthetic construct
  source 1..23: mol_type = other RNA
ttggtgttcggcactgggggtgt

SEQ ID NO: 93183 - RNA, 23 nt, synthetic construct
  source 1..23: mol_type = other RNA
tggtcctgctgctagggtgaggg

SEQ ID NO: 93184 - RNA, 23 nt, synthetic construct
  source 1..23: mol_type = other RNA
tcgaggtgcgggtcttgctgggt

SEQ ID NO: 93185 - RNA, 23 nt, synthetic construct
  source 1..23: mol_type = other RNA
ttggggctcacagcccatggtca

SEQ ID NO: 93186 - RNA, 23 nt, synthetic construct
  source 1..23: mol_type = other RNA
tcgtagagctggtggccggggtg

SEQ ID NO: 93187 - RNA, 23 nt, synthetic construct
  source 1..23: mol_type = other RNA
tggagctgttcccggggtggagg

SEQ ID NO: 93188 - RNA, 23 nt, synthetic construct
  source 1..23: mol_type = other RNA
tgggagctgttcccggggtggag

SEQ ID NO: 93189 - RNA, 23 nt, synthetic construct
  source 1..23: mol_type = other RNA
tcagtccttggactggaggagga

SEQ ID NO: 93190 - RNA, 23 nt, synthetic construct
  source 1..23: mol_type = other RNA
tcactggaagggtggttgcagtc

SEQ ID NO: 93191 - RNA, 23 nt, synthetic construct
  source 1..23: mol_type = other RNA
tcggcactttggtagtgtgagct

SEQ ID NO: 93192 - RNA, 23 nt, synthetic construct
  source 1..23: mol_type = other RNA
ttggtgttcggcactgggggtgt

SEQ ID NO: 93193 - RNA, 23 nt, synthetic construct
  source 1..23: mol_type = other RNA
tggtcctgctgctagggtgaggg

SEQ ID NO: 93194 - RNA, 23 nt, synthetic construct
  source 1..23: mol_type = other RNA
tcgaggtgcgggtcttgctgggt

SEQ ID NO: 93195 - RNA, 23 nt, synthetic construct
  source 1..23: mol_type = other RNA
tcgtagagctggtggccggggtg

SEQ ID NO: 93196 - RNA, 23 nt, synthetic construct
  source 1..23: mol_type = other RNA
tcggcactttggtagtgtgagct

SEQ ID NO: 93197 - RNA, 23 nt, synthetic construct
  source 1..23: mol_type = other RNA
tggagccactggttgtgggtgtg

SEQ ID NO: 93198 - RNA, 23 nt, synthetic construct
  source 1..23: mol_type = other RNA
ttggtgttcggcactgggggtgt

SEQ ID NO: 93199 - RNA, 23 nt, synthetic construct
  source 1..23: mol_type = other RNA
tggtcctgctgctagggtgaggg

SEQ ID NO: 93200 - RNA, 23 nt, synthetic construct
  source 1..23: mol_type = other RNA
tcgaggtgcgggtcttgctgggt

SEQ ID NO: 93201 - RNA, 23 nt, synthetic construct
  source 1..23: mol_type = other RNA
tcgtagagctggtggccggggtg

SEQ ID NO: 93202 - RNA, 23 nt, synthetic construct
  source 1..23: mol_type = other RNA
tggagctgttcccggggtggagg

SEQ ID NO: 93203 - RNA, 23 nt, synthetic construct
  source 1..23: mol_type = other RNA
tgggagctgttcccggggtggag

SEQ ID NO: 93204 - RNA, 23 nt, synthetic construct
  source 1..23: mol_type = other RNA
tcagtccttggactggaggagga

SEQ ID NO: 93205 - RNA, 23 nt, synthetic construct
  source 1..23: mol_type = other RNA
tcactggaagggtggttgcagtc

SEQ ID NO: 93206 - RNA, 23 nt, synthetic construct
  source 1..23: mol_type = other RNA
tcggcactttggtagtgtgagct

SEQ ID NO: 93207 - RNA, 23 nt, synthetic construct
  source 1..23: mol_type = other RNA
tggagccactggttgtgggtgtg

SEQ ID NO: 93208 - RNA, 23 nt, synthetic construct
  source 1..23: mol_type = other RNA
tcagtccttggactggaggagga

SEQ ID NO: 93209 - RNA, 23 nt, synthetic construct
  source 1..23: mol_type = other RNA
tcactggaagggtggttgcagtc

SEQ ID NO: 93210 - RNA, 23 nt, synthetic construct
  source 1..23: mol_type = other RNA
tcatcagatcacagagcggctgt

SEQ ID NO: 93211 - RNA, 23 nt, synthetic construct
  source 1..23: mol_type = other RNA
tcacggcgggggctgaccctggg

SEQ ID NO: 93212 - RNA, 23 nt, synthetic construct
  source 1..23: mol_type = other RNA
tgccacaggatggtcgtgttgat

SEQ ID NO: 93213 - RNA, 23 nt, synthetic construct
  source 1..23: mol_type = other RNA
tcggtctcgcagccctggtgcca

SEQ ID NO: 93214 - RNA, 23 nt, synthetic construct
  source 1..23: mol_type = other RNA
ttttgttccagggcgtcccagtg

SEQ ID NO: 93215 - RNA, 23 nt, synthetic construct
  source 1..23: mol_type = other RNA
tgcgccaagcccatcggtggtgt

SEQ ID NO: 93216 - RNA, 23 nt, synthetic construct
  source 1..23: mol_type = other RNA
tcttaggctgctggcataagtgc

SEQ ID NO: 93217 - RNA, 23 nt, synthetic construct
  source 1..23: mol_type = other RNA
tatgcccgaggtggccgaagtcc

SEQ ID NO: 93218 - RNA, 23 nt, synthetic construct
  source 1..23: mol_type = other RNA
tatgcccgaggtggccgaagtcc

SEQ ID NO: 93219 - RNA, 23 nt, synthetic construct
  source 1..23: mol_type = other RNA
tcgcactggatgccactgggtgt

SEQ ID NO: 93220 - RNA, 23 nt, synthetic construct
  source 1..23: mol_type = other RNA
tccgtggttatgggggccgatgt

SEQ ID NO: 93221 - RNA, 23 nt, synthetic construct
  source 1..23: mol_type = other RNA
tccgtggttatgggggccgatgt

SEQ ID NO: 93222 - RNA, 23 nt, synthetic construct
  source 1..23: mol_type = other RNA
tccgtggttatgggggccgatgt

SEQ ID NO: 93223 - RNA, 23 nt, synthetic construct
  source 1..23: mol_type = other RNA
tcgtctcaaagtctccgcctccc

SEQ ID NO: 93224 - RNA, 23 nt, synthetic construct
  source 1..23: mol_type = other RNA
tcagcggcatgtcgggaagctgc

SEQ ID NO: 93225 - RNA, 23 nt, synthetic construct
  source 1..23: mol_type = other RNA
tgttgtagcacatcttgaagacg

SEQ ID NO: 93226 - RNA, 23 nt, synthetic construct
  source 1..23: mol_type = other RNA
tctagggtgtgggaagtcaccgt

SEQ ID NO: 93227 - RNA, 23 nt, synthetic construct
  source 1..23: mol_type = other RNA
tcgcgagcaccagtgccgggcgt

SEQ ID NO: 93228 - RNA, 23 nt, synthetic construct
  source 1..23: mol_type = other RNA
taacccatcgggtcccacgcagg

SEQ ID NO: 93229 - RNA, 23 nt, synthetic construct
  source 1..23: mol_type = other RNA
taggcacgaaggaaacgctgcag

SEQ ID NO: 93230 - RNA, 23 nt, synthetic construct
  source 1..23: mol_type = other RNA
tagaacgttctcagacagcagtg

SEQ ID NO: 93231 - RNA, 23 nt, synthetic construct
  source 1..23: mol_type = other RNA
ttagtgggagccgccccacatgc

SEQ ID NO: 93232 - RNA, 23 nt, synthetic construct
  source 1..23: mol_type = other RNA
tccggccactctcttgtactcaa

SEQ ID NO: 93233 - RNA, 23 nt, synthetic construct
  source 1..23: mol_type = other RNA
tcatccacgtgggtgtaggtgtg

SEQ ID NO: 93234 - RNA, 23 nt, synthetic construct
  source 1..23: mol_type = other RNA
tcgtggttgtggtagttggcact

SEQ ID NO: 93235 - RNA, 23 nt, synthetic construct
  source 1..23: mol_type = other RNA
tgtcagccccgggctactcgtag

SEQ ID NO: 93236 - RNA, 23 nt, synthetic construct
  source 1..23: mol_type = other RNA
tgtcaccaccgtggttattgggg

SEQ ID NO: 93237 - RNA, 23 nt, synthetic construct
  source 1..23: mol_type = other RNA
tggtcaccaccgtggttattggg

SEQ ID NO: 93238 - RNA, 23 nt, synthetic construct
  source 1..23: mol_type = other RNA
tcactctggcggtgtgggtggtc

SEQ ID NO: 93239 - RNA, 23 nt, synthetic construct
  source 1..23: mol_type = other RNA
tcgcaggtgacgttggccacagg

SEQ ID NO: 93240 - RNA, 23 nt, synthetic construct
  source 1..23: mol_type = other RNA
ttcaagcaggcgccaagcccatc

SEQ ID NO: 93241 - RNA, 23 nt, synthetic construct
  source 1..23: mol_type = other RNA
tgttgcttccgcagatggcgatc

SEQ ID NO: 93242 - RNA, 23 nt, synthetic construct
  source 1..23: mol_type = other RNA
tccagcggcatgtcgggaagctg

SEQ ID NO: 93243 - RNA, 23 nt, synthetic construct
  source 1..23: mol_type = other RNA
tacaccaggccgaagtggacgtc

SEQ ID NO: 93244 - RNA, 23 nt, synthetic construct
  source 1..23: mol_type = other RNA
tggccgtggtgctcacatgtggg

SEQ ID NO: 93245 - RNA, 23 nt, synthetic construct
  source 1..23: mol_type = other RNA
taacctctggttgtgggtgtggt

SEQ ID NO: 93246 - RNA, 23 nt, synthetic construct
  source 1..23: mol_type = other RNA
tcttgtcagcactggaagggtgg

SEQ ID NO: 93247 - RNA, 23 nt, synthetic construct
  source 1..23: mol_type = other RNA
tcacggtggctgtagtgctcggc

SEQ ID NO: 93248 - RNA, 23 nt, synthetic construct
  source 1..23: mol_type = other RNA
tcacggtggctgtagtgctcggc

SEQ ID NO: 93249 - RNA, 23 nt, synthetic construct
  source 1..23: mol_type = other RNA
tcacggtggctgtagtgctcggc

SEQ ID NO: 93250 - RNA, 23 nt, synthetic construct
  source 1..23: mol_type = other RNA
taggaaacccatcgggtcccacg

SEQ ID NO: 93251 - RNA, 23 nt, synthetic construct
  source 1..23: mol_type = other RNA
taagccgggacggttgcacggcg

SEQ ID NO: 93252 - RNA, 23 nt, synthetic construct
  source 1..23: mol_type = other RNA
ttgggtggtctccggagtggagg

SEQ ID NO: 93253 - RNA, 23 nt, synthetic construct
  source 1..23: mol_type = other RNA
tgactgtgaagcccgtggttgtg

SEQ ID NO: 93254 - RNA, 23 nt, synthetic construct
  source 1..23: mol_type = other RNA
ttgggtggtctccggagtggagg

SEQ ID NO: 93255 - RNA, 23 nt, synthetic construct
  source 1..23: mol_type = other RNA
tacactcatccacgtgggtgtag

SEQ ID NO: 93256 - RNA, 23 nt, synthetic construct
  source 1..23: mol_type = other RNA
ttgggcgaggacgtcggggcacc

SEQ ID NO: 93257 - RNA, 23 nt, synthetic construct
  source 1..23: mol_type = other RNA
taagatgtactcgcagctgcctt

SEQ ID NO: 93258 - RNA, 23 nt, synthetic construct
  source 1..23: mol_type = other RNA
tgacacggccatcccgtgggtct

SEQ ID NO: 93259 - RNA, 23 nt, synthetic construct
  source 1..23: mol_type = other RNA
tggacacggccatcccgtgggtc

SEQ ID NO: 93260 - RNA, 23 nt, synthetic construct
  source 1..23: mol_type = other RNA
ttccagcggcatgtcgggaagct

SEQ ID NO: 93261 - RNA, 23 nt, synthetic construct
  source 1..23: mol_type = other RNA
tgacagcgggtcgtgccctggct

SEQ ID NO: 93262 - RNA, 23 nt, synthetic construct
  source 1..23: mol_type = other RNA
ttggccatggtgttcggcactgg

SEQ ID NO: 93263 - RNA, 23 nt, synthetic construct
  source 1..23: mol_type = other RNA
tcagagggccccggcatggggta

SEQ ID NO: 93264 - RNA, 23 nt, synthetic construct
  source 1..23: mol_type = other RNA
tgggcacggcactcgaggcccag

SEQ ID NO: 93265 - RNA, 23 nt, synthetic construct
  source 1..23: mol_type = other RNA
tcagagggccccggcatggggta

SEQ ID NO: 93266 - RNA, 23 nt, synthetic construct
  source 1..23: mol_type = other RNA
tgggcacggcactcgaggcccag

SEQ ID NO: 93267 - RNA, 23 nt, synthetic construct
  source 1..23: mol_type = other RNA
tgtggatccagtggttgcggtcg

SEQ ID NO: 93268 - RNA, 23 nt, synthetic construct
  source 1..23: mol_type = other RNA
tcagagggccccggcatggggta

SEQ ID NO: 93269 - RNA, 23 nt, synthetic construct
  source 1..23: mol_type = other RNA
tgggcacggcactcgaggcccag

SEQ ID NO: 93270 - RNA, 23 nt, synthetic construct
  source 1..23: mol_type = other RNA
tcagagggccccggcatggggta

SEQ ID NO: 93271 - RNA, 23 nt, synthetic construct
  source 1..23: mol_type = other RNA
tgggcacggcactcgaggcccag

SEQ ID NO: 93272 - RNA, 23 nt, synthetic construct
  source 1..23: mol_type = other RNA
tgcactctggcggtgtgggtggt

SEQ ID NO: 93273 - RNA, 23 nt, synthetic construct
  source 1..23: mol_type = other RNA
tcgtcacacacgcaggactggca

SEQ ID NO: 93274 - RNA, 23 nt, synthetic construct
  source 1..23: mol_type = other RNA
tcgtccggcacgcgctcggggca

SEQ ID NO: 93275 - RNA, 23 nt, synthetic construct
  source 1..23: mol_type = other RNA
tcgcgccgggtgggcgaggacgt

SEQ ID NO: 93276 - RNA, 23 nt, synthetic construct
  source 1..23: mol_type = other RNA
tgcgcggcagtgctcagagaaca

SEQ ID NO: 93277 - RNA, 23 nt, synthetic construct
  source 1..23: mol_type = other RNA
tggcgcggcagtgctcagagaac

SEQ ID NO: 93278 - RNA, 23 nt, synthetic construct
  source 1..23: mol_type = other RNA
tcggcgcggcagtgctcagagaa

SEQ ID NO: 93279 - RNA, 23 nt, synthetic construct
  source 1..23: mol_type = other RNA
tctcccgctgcccattgatgagg

SEQ ID NO: 93280 - RNA, 23 nt, synthetic construct
  source 1..23: mol_type = other RNA
tcctcccgctgcccattgatgag

SEQ ID NO: 93281 - RNA, 23 nt, synthetic construct
  source 1..23: mol_type = other RNA
ttgtcagcaccagccggatgctg

SEQ ID NO: 93282 - RNA, 23 nt, synthetic construct
  source 1..23: mol_type = other RNA
ttcgttgaaggccgggaggccgt

SEQ ID NO: 93283 - RNA, 23 nt, synthetic construct
  source 1..23: mol_type = other RNA
tgtattccacaaaggtggcacac

SEQ ID NO: 93284 - RNA, 23 nt, synthetic construct
  source 1..23: mol_type = other RNA
tgcatgttgagggggcaggtccg

SEQ ID NO: 93285 - RNA, 23 nt, synthetic construct
  source 1..23: mol_type = other RNA
ttgcagggtgagccacactcctg

SEQ ID NO: 93286 - RNA, 23 nt, synthetic construct
  source 1..23: mol_type = other RNA
tgccagagtgcgtgatgtcatcc

SEQ ID NO: 93287 - RNA, 23 nt, synthetic construct
  source 1..23: mol_type = other RNA
tcaggccgcacttccgcagctca

SEQ ID NO: 93288 - RNA, 23 nt, synthetic construct
  source 1..23: mol_type = other RNA
tgtccaggctgagcgtcaccgct

SEQ ID NO: 93289 - RNA, 23 nt, synthetic construct
  source 1..23: mol_type = other RNA
tgagggccgtgaagtcgtcagcc

SEQ ID NO: 93290 - RNA, 23 nt, synthetic construct
  source 1..23: mol_type = other RNA
ttgagggccgtgaagtcgtcagc

SEQ ID NO: 93291 - RNA, 23 nt, synthetic construct
  source 1..23: mol_type = other RNA
taccccgctgagggccgtgaagt

SEQ ID NO: 93292 - RNA, 23 nt, synthetic construct
  source 1..23: mol_type = other RNA
tagctgttcctggcattggcaca

SEQ ID NO: 93293 - RNA, 23 nt, synthetic construct
  source 1..23: mol_type = other RNA
tcactgttgggatcggtcaggcg

SEQ ID NO: 93294 - RNA, 23 nt, synthetic construct
  source 1..23: mol_type = other RNA
ttgcagttcgagtggaagggctt

SEQ ID NO: 93295 - RNA, 23 nt, synthetic construct
  source 1..23: mol_type = other RNA
tgtagcgctgggacttggggcag

SEQ ID NO: 93296 - RNA, 23 nt, synthetic construct
  source 1..23: mol_type = other RNA
tggccgcggcaagtgggctggca

SEQ ID NO: 93297 - RNA, 23 nt, synthetic construct
  source 1..23: mol_type = other RNA
taggccgcggcaagtgggctggc

SEQ ID NO: 93298 - RNA, 23 nt, synthetic construct
  source 1..23: mol_type = other RNA
tggcacgaaggaaacgctgcagg

SEQ ID NO: 93299 - RNA, 23 nt, synthetic construct
  source 1..23: mol_type = other RNA
tggtacaccatgggggctgcaca

SEQ ID NO: 93300 - RNA, 23 nt, synthetic construct
  source 1..23: mol_type = other RNA
tcaggacacggccatcccgtggg

SEQ ID NO: 93301 - RNA, 23 nt, synthetic construct
  source 1..23: mol_type = other RNA
tgcgtcccccaccacggaccggc

SEQ ID NO: 93302 - RNA, 23 nt, synthetic construct
  source 1..23: mol_type = other RNA
tcgccacccgagtcgcaggcaca

SEQ ID NO: 93303 - RNA, 23 nt, synthetic construct
  source 1..23: mol_type = other RNA
tgcgtcgtggcaggcctgggcgt

SEQ ID NO: 93304 - RNA, 23 nt, synthetic construct
  source 1..23: mol_type = other RNA
tcgcgtcgtggcaggcctgggcg

SEQ ID NO: 93305 - RNA, 23 nt, synthetic construct
  source 1..23: mol_type = other RNA
tctgtaggtcctgtcctcatagg

SEQ ID NO: 93306 - RNA, 23 nt, synthetic construct
  source 1..23: mol_type = other RNA
taggcgccaagcccatcggtggt

SEQ ID NO: 93307 - RNA, 23 nt, synthetic construct
  source 1..23: mol_type = other RNA
ttggtgccgttgcttccgcagat

SEQ ID NO: 93308 - RNA, 23 nt, synthetic construct
  source 1..23: mol_type = other RNA
tcggacacacacggtggagaccg

SEQ ID NO: 93309 - RNA, 23 nt, synthetic construct
  source 1..23: mol_type = other RNA
tggggtgaccgtcacggggcctg

SEQ ID NO: 93310 - RNA, 23 nt, synthetic construct
  source 1..23: mol_type = other RNA
tgccgggggagccctggtcagcc

SEQ ID NO: 93311 - RNA, 23 nt, synthetic construct
  source 1..23: mol_type = other RNA
tctgggggatgtcagtccttctg

SEQ ID NO: 93312 - RNA, 23 nt, synthetic construct
  source 1..23: mol_type = other RNA
tcgtcgtggggcctcccgtggtg

SEQ ID NO: 93313 - RNA, 23 nt, synthetic construct
  source 1..23: mol_type = other RNA
tattgttgttggggccagcgtgg

SEQ ID NO: 93314 - RNA, 23 nt, synthetic construct
  source 1..23: mol_type = other RNA
tggctcgtggtcagcggctcttt

SEQ ID NO: 93315 - RNA, 23 nt, synthetic construct
  source 1..23: mol_type = other RNA
tgtctcggcctgagaggtggaca

SEQ ID NO: 93316 - RNA, 23 nt, synthetic construct
  source 1..23: mol_type = other RNA
tgtagttggcactttggtagtgt

SEQ ID NO: 93317 - RNA, 23 nt, synthetic construct
  source 1..23: mol_type = other RNA
tcccgtggttgtggtagttggca

SEQ ID NO: 93318 - RNA, 23 nt, synthetic construct
  source 1..23: mol_type = other RNA
tagcctctggttgtgggtgtggt

SEQ ID NO: 93319 - RNA, 23 nt, synthetic construct
  source 1..23: mol_type = other RNA
ttgggggagtaccactggtctgt

SEQ ID NO: 93320 - RNA, 23 nt, synthetic construct
  source 1..23: mol_type = other RNA
tatcgtagtggccgtggtggtca

SEQ ID NO: 93321 - RNA, 23 nt, synthetic construct
  source 1..23: mol_type = other RNA
tgagccggtggccgtgatcgtag

SEQ ID NO: 93322 - RNA, 23 nt, synthetic construct
  source 1..23: mol_type = other RNA
tcggtggtggtcagcactggggg

SEQ ID NO: 93323 - RNA, 23 nt, synthetic construct
  source 1..23: mol_type = other RNA
tgtggccatggtgttcggcactg

SEQ ID NO: 93324 - RNA, 23 nt, synthetic construct
  source 1..23: mol_type = other RNA
ttgctgggtggtaccggtggttg

SEQ ID NO: 93325 - RNA, 23 nt, synthetic construct
  source 1..23: mol_type = other RNA
tagacggcccctccggccgcacg

SEQ ID NO: 93326 - RNA, 23 nt, synthetic construct
  source 1..23: mol_type = other RNA
tagtgctcggctctgtgaggatc

SEQ ID NO: 93327 - RNA, 23 nt, synthetic construct
  source 1..23: mol_type = other RNA
tgtggaggtgtggacagtctctg

SEQ ID NO: 93328 - RNA, 23 nt, synthetic construct
  source 1..23: mol_type = other RNA
tccgtggttgtggtagtcagcac

SEQ ID NO: 93329 - RNA, 23 nt, synthetic construct
  source 1..23: mol_type = other RNA
ttgggggagtaccactggtctgt

SEQ ID NO: 93330 - RNA, 23 nt, synthetic construct
  source 1..23: mol_type = other RNA
tatcgtagtggccgtggtggtca

SEQ ID NO: 93331 - RNA, 23 nt, synthetic construct
  source 1..23: mol_type = other RNA
tgagccggtggccgtgatcgtag

SEQ ID NO: 93332 - RNA, 23 nt, synthetic construct
  source 1..23: mol_type = other RNA
tcggtggtggtcagcactggggg

SEQ ID NO: 93333 - RNA, 23 nt, synthetic construct
  source 1..23: mol_type = other RNA
ttgctgggtggtaccggtggttg

SEQ ID NO: 93334 - RNA, 23 nt, synthetic construct
  source 1..23: mol_type = other RNA
tagacggcccctccggccgcacg

SEQ ID NO: 93335 - RNA, 23 nt, synthetic construct
  source 1..23: mol_type = other RNA
tgcactggaagggtggttgcagt

SEQ ID NO: 93336 - RNA, 23 nt, synthetic construct
  source 1..23: mol_type = other RNA
tttgtcagcactggaagggtggt

SEQ ID NO: 93337 - RNA, 23 nt, synthetic construct
  source 1..23: mol_type = other RNA
tgtcagcactgtggaggtgtggg

SEQ ID NO: 93338 - RNA, 23 nt, synthetic construct
  source 1..23: mol_type = other RNA
tcgtggtggccttcgtggtcagc

SEQ ID NO: 93339 - RNA, 23 nt, synthetic construct
  source 1..23: mol_type = other RNA
tctggtcagcactttgagggtgc

SEQ ID NO: 93340 - RNA, 23 nt, synthetic construct
  source 1..23: mol_type = other RNA
tgtggaggtgtggacagtctctg

SEQ ID NO: 93341 - RNA, 23 nt, synthetic construct
  source 1..23: mol_type = other RNA
tagcctctggttgtgggtgtggt

SEQ ID NO: 93342 - RNA, 23 nt, synthetic construct
  source 1..23: mol_type = other RNA
ttgggggagtaccactggtctgt

SEQ ID NO: 93343 - RNA, 23 nt, synthetic construct
  source 1..23: mol_type = other RNA
tatcgtagtggccgtggtggtca

SEQ ID NO: 93344 - RNA, 23 nt, synthetic construct
  source 1..23: mol_type = other RNA
tgccggtggctgtgatcgtagtg

SEQ ID NO: 93345 - RNA, 23 nt, synthetic construct
  source 1..23: mol_type = other RNA
tcggtggtggtcagcactggggg

SEQ ID NO: 93346 - RNA, 23 nt, synthetic construct
  source 1..23: mol_type = other RNA
tcagcccgtggtcaccaccgtgg

SEQ ID NO: 93347 - RNA, 23 nt, synthetic construct
  source 1..23: mol_type = other RNA
tagtgctcggctctgtgaggatc

SEQ ID NO: 93348 - RNA, 23 nt, synthetic construct
  source 1..23: mol_type = other RNA
ttgactgtgaagcccgtggttgt

SEQ ID NO: 93349 - RNA, 23 nt, synthetic construct
  source 1..23: mol_type = other RNA
ttgggggagtaccactggtctgt

SEQ ID NO: 93350 - RNA, 23 nt, synthetic construct
  source 1..23: mol_type = other RNA
tgagccggtggccgtgatcgtag

SEQ ID NO: 93351 - RNA, 23 nt, synthetic construct
  source 1..23: mol_type = other RNA
tcggtggtggtcagcactggggg

SEQ ID NO: 93352 - RNA, 23 nt, synthetic construct
  source 1..23: mol_type = other RNA
ttgctgggtggtaccggtggttg

SEQ ID NO: 93353 - RNA, 23 nt, synthetic construct
  source 1..23: mol_type = other RNA
tcagcccgtggtcaccaccgtgg

SEQ ID NO: 93354 - RNA, 23 nt, synthetic construct
  source 1..23: mol_type = other RNA
tagacggcccctccggccgcacg

SEQ ID NO: 93355 - RNA, 23 nt, synthetic construct
  source 1..23: mol_type = other RNA
tgcactggaagggtggttgcagt

SEQ ID NO: 93356 - RNA, 23 nt, synthetic construct
  source 1..23: mol_type = other RNA
tttgtcagcactggaagggtggt

SEQ ID NO: 93357 - RNA, 23 nt, synthetic construct
  source 1..23: mol_type = other RNA
tgtcagcactgtggaggtgtggg

SEQ ID NO: 93358 - RNA, 23 nt, synthetic construct
  source 1..23: mol_type = other RNA
tcgtggtggccttcgtggtcagc

SEQ ID NO: 93359 - RNA, 23 nt, synthetic construct
  source 1..23: mol_type = other RNA
tggggtggacgtggaactggtgg

SEQ ID NO: 93360 - RNA, 23 nt, synthetic construct
  source 1..23: mol_type = other RNA
tagtgctcggctctgtgaggatc

SEQ ID NO: 93361 - RNA, 23 nt, synthetic construct
  source 1..23: mol_type = other RNA
tgtggaggtgtggacagtctctg

SEQ ID NO: 93362 - RNA, 23 nt, synthetic construct
  source 1..23: mol_type = other RNA
ttgggggagtaccactggtctgt

SEQ ID NO: 93363 - RNA, 23 nt, synthetic construct
  source 1..23: mol_type = other RNA
tatcgtagtggccgtggtggtca

SEQ ID NO: 93364 - RNA, 23 nt, synthetic construct
  source 1..23: mol_type = other RNA
tgagccggtggccgtgatcgtag

SEQ ID NO: 93365 - RNA, 23 nt, synthetic construct
  source 1..23: mol_type = other RNA
tgcactggaagggtggttgcagt

SEQ ID NO: 93366 - RNA, 23 nt, synthetic construct
  source 1..23: mol_type = other RNA
tttgtcagcactggaagggtggt

SEQ ID NO: 93367 - RNA, 23 nt, synthetic construct
  source 1..23: mol_type = other RNA
tgtcagcactgtggaggtgtggg

SEQ ID NO: 93368 - RNA, 23 nt, synthetic construct
  source 1..23: mol_type = other RNA
ttccgggtcgtccccagagtgga

SEQ ID NO: 93369 - RNA, 23 nt, synthetic construct
  source 1..23: mol_type = other RNA
tagtgctcggctctgtgaggatc

SEQ ID NO: 93370 - RNA, 23 nt, synthetic construct
  source 1..23: mol_type = other RNA
tgggtggtccccacggtggacga

SEQ ID NO: 93371 - RNA, 23 nt, synthetic construct
  source 1..23: mol_type = other RNA
tgacacgctgaaggttggcaggc

SEQ ID NO: 93372 - RNA, 23 nt, synthetic construct
  source 1..23: mol_type = other RNA
tatgcaccatggtgacagtgagg

SEQ ID NO: 93373 - RNA, 23 nt, synthetic construct
  source 1..23: mol_type = other RNA
tcattgaaggtgacgctcacgcc

SEQ ID NO: 93374 - RNA, 23 nt, synthetic construct
  source 1..23: mol_type = other RNA
tgcccagcagccatcctttctgc

SEQ ID NO: 93375 - RNA, 23 nt, synthetic construct
  source 1..23: mol_type = other RNA
tttgaagaatgggcccgggggca

SEQ ID NO: 93376 - RNA, 23 nt, synthetic construct
  source 1..23: mol_type = other RNA
tgaggtcgcacaggccaccggtt

SEQ ID NO: 93377 - RNA, 23 nt, synthetic construct
  source 1..23: mol_type = other RNA
ttcacacacgcaggactggcagt

SEQ ID NO: 93378 - RNA, 23 nt, synthetic construct
  source 1..23: mol_type = other RNA
tggttgtgttgcacacgcacacc

SEQ ID NO: 93379 - RNA, 23 nt, synthetic construct
  source 1..23: mol_type = other RNA
tgaggtctgcagcggaaggtggg

SEQ ID NO: 93380 - RNA, 23 nt, synthetic construct
  source 1..23: mol_type = other RNA
tggggtcagcaaatggactccac

SEQ ID NO: 93381 - RNA, 23 nt, synthetic construct
  source 1..23: mol_type = other RNA
ttgggcctctgctgagtacttgg

SEQ ID NO: 93382 - RNA, 23 nt, synthetic construct
  source 1..23: mol_type = other RNA
tatccacgtgggtgtaggtgtgc

SEQ ID NO: 93383 - RNA, 23 nt, synthetic construct
  source 1..23: mol_type = other RNA
tcatgatcagacaatgcacatcc

SEQ ID NO: 93384 - RNA, 23 nt, synthetic construct
  source 1..23: mol_type = other RNA
ttcatgatcagacaatgcacatc

SEQ ID NO: 93385 - RNA, 23 nt, synthetic construct
  source 1..23: mol_type = other RNA
tagaggaggcccaaggttttcat

SEQ ID NO: 93386 - RNA, 23 nt, synthetic construct
  source 1..23: mol_type = other RNA
tctggggccggtttcacccacgg

SEQ ID NO: 93387 - RNA, 23 nt, synthetic construct
  source 1..23: mol_type = other RNA
ttcacccttctggggccggtttc

SEQ ID NO: 93388 - RNA, 23 nt, synthetic construct
  source 1..23: mol_type = other RNA
tctgagtggcgccctcccgaaag

SEQ ID NO: 93389 - RNA, 23 nt, synthetic construct
  source 1..23: mol_type = other RNA
tctctcccagggtaggactcctg

SEQ ID NO: 93390 - RNA, 23 nt, synthetic construct
  source 1..23: mol_type = other RNA
tatgcttagtttgttccagggcg

SEQ ID NO: 93391 - RNA, 23 nt, synthetic construct
  source 1..23: mol_type = other RNA
tatggacaggcggccgccttgcc

SEQ ID NO: 93392 - RNA, 23 nt, synthetic construct
  source 1..23: mol_type = other RNA
tggtgtgctagacaccggggctg

SEQ ID NO: 93393 - RNA, 23 nt, synthetic construct
  source 1..23: mol_type = other RNA
tttccgcggctggccccccgcgt

SEQ ID NO: 93394 - RNA, 23 nt, synthetic construct
  source 1..23: mol_type = other RNA
tgttgtggtagttggcactttgg

SEQ ID NO: 93395 - RNA, 23 nt, synthetic construct
  source 1..23: mol_type = other RNA
tggtgttgccatagaaccagtgg

SEQ ID NO: 93396 - RNA, 23 nt, synthetic construct
  source 1..23: mol_type = other RNA
tggtgttgccatagaaccagtgg

SEQ ID NO: 93397 - RNA, 23 nt, synthetic construct
  source 1..23: mol_type = other RNA
tggtgttgccatagaaccagtgg

SEQ ID NO: 93398 - RNA, 23 nt, synthetic construct
  source 1..23: mol_type = other RNA
tggtgttgccatagaaccagtgg

SEQ ID NO: 93399 - RNA, 23 nt, synthetic construct
  source 1..23: mol_type = other RNA
tggtgttgccatagaaccagtgg

SEQ ID NO: 93400 - RNA, 23 nt, synthetic construct
  source 1..23: mol_type = other RNA
tacgctcacgcccagggcaggaa

SEQ ID NO: 93401 - RNA, 23 nt, synthetic construct
  source 1..23: mol_type = other RNA
tgttgaagaatgggcccgggggc

SEQ ID NO: 93402 - RNA, 23 nt, synthetic construct
  source 1..23: mol_type = other RNA
tgacaggcgccctggaagcggtc

SEQ ID NO: 93403 - RNA, 23 nt, synthetic construct
  source 1..23: mol_type = other RNA
tgggtgccagggcgtccgggcag

SEQ ID NO: 93404 - RNA, 23 nt, synthetic construct
  source 1..23: mol_type = other RNA
tgccctggttgtggtggtcgtgg

SEQ ID NO: 93405 - RNA, 23 nt, synthetic construct
  source 1..23: mol_type = other RNA
tggccgtggtgctcacatgtggg

SEQ ID NO: 93406 - RNA, 23 nt, synthetic construct
  source 1..23: mol_type = other RNA
tcttgtcagcactggaagggtgg

SEQ ID NO: 93407 - RNA, 23 nt, synthetic construct
  source 1..23: mol_type = other RNA
tggccgtggtgctcacatgtggg

SEQ ID NO: 93408 - RNA, 23 nt, synthetic construct
  source 1..23: mol_type = other RNA
ttggcttgtacactttggtgggt

SEQ ID NO: 93409 - RNA, 23 nt, synthetic construct
  source 1..23: mol_type = other RNA
tcgggaggccgttgaagtcccca

SEQ ID NO: 93410 - RNA, 23 nt, synthetic construct
  source 1..23: mol_type = other RNA
tgttgagggggcaggtccggggg

SEQ ID NO: 93411 - RNA, 23 nt, synthetic construct
  source 1..23: mol_type = other RNA
tggctgcgcccgtggcctccacc

SEQ ID NO: 93412 - RNA, 23 nt, synthetic construct
  source 1..23: mol_type = other RNA
tgggctctgggcggtgcccattg

SEQ ID NO: 93413 - RNA, 23 nt, synthetic construct
  source 1..23: mol_type = other RNA
ttggaagggtggatgtggccacc

SEQ ID NO: 93414 - RNA, 23 nt, synthetic construct
  source 1..23: mol_type = other RNA
ttggtcgtccctggagaaggggg

SEQ ID NO: 93415 - RNA, 23 nt, synthetic construct
  source 1..23: mol_type = other RNA
ttggtcgtccctggagaaggggg

SEQ ID NO: 93416 - RNA, 23 nt, synthetic construct
  source 1..23: mol_type = other RNA
tgtctgttctgggagggtcccgg

SEQ ID NO: 93417 - RNA, 23 nt, synthetic construct
  source 1..23: mol_type = other RNA
ttggtcgtccctggagaaggggg

SEQ ID NO: 93418 - RNA, 23 nt, synthetic construct
  source 1..23: mol_type = other RNA
tagactgcccctccggccgcacg

SEQ ID NO: 93419 - RNA, 23 nt, synthetic construct
  source 1..23: mol_type = other RNA
tgtctgttctgggagggtcccgg

SEQ ID NO: 93420 - RNA, 23 nt, synthetic construct
  source 1..23: mol_type = other RNA
tgtggccacgggtgtggtggtct

SEQ ID NO: 93421 - RNA, 23 nt, synthetic construct
  source 1..23: mol_type = other RNA
tgacagcagtcgccctcctcctg

SEQ ID NO: 93422 - RNA, 23 nt, synthetic construct
  source 1..23: mol_type = other RNA
tcttgtcagcactggaagggtgg

SEQ ID NO: 93423 - RNA, 23 nt, synthetic construct
  source 1..23: mol_type = other RNA
tggacacgctgaaggttggcagg

SEQ ID NO: 93424 - RNA, 23 nt, synthetic construct
  source 1..23: mol_type = other RNA
tccgtccttgtcgtagcagccac

SEQ ID NO: 93425 - RNA, 23 nt, synthetic construct
  source 1..23: mol_type = other RNA
tagctcacgcgccgggtgggcga

SEQ ID NO: 93426 - RNA, 23 nt, synthetic construct
  source 1..23: mol_type = other RNA
tatggtgtgccctgcattctccc

SEQ ID NO: 93427 - RNA, 23 nt, synthetic construct
  source 1..23: mol_type = other RNA
taggggtggattgtggacatggt

SEQ ID NO: 93428 - RNA, 23 nt, synthetic construct
  source 1..23: mol_type = other RNA
taggggtggattgtggacatggt

SEQ ID NO: 93429 - RNA, 23 nt, synthetic construct
  source 1..23: mol_type = other RNA
tacaaaggtggcacacgggcagg

SEQ ID NO: 93430 - RNA, 23 nt, synthetic construct
  source 1..23: mol_type = other RNA
tgaggcgtgagtgccgtccctgg

SEQ ID NO: 93431 - RNA, 23 nt, synthetic construct
  source 1..23: mol_type = other RNA
tgaggcgtgagtgccgtccctgg

SEQ ID NO: 93432 - RNA, 23 nt, synthetic construct
  source 1..23: mol_type = other RNA
tagctggacccagtctgcgaggt

SEQ ID NO: 93433 - RNA, 23 nt, synthetic construct
  source 1..23: mol_type = other RNA
ttggtcaccaccgtggttatggg

SEQ ID NO: 93434 - RNA, 23 nt, synthetic construct
  source 1..23: mol_type = other RNA
ttggtcaccaccgtggttattgg

SEQ ID NO: 93435 - RNA, 23 nt, synthetic construct
  source 1..23: mol_type = other RNA
ttggtcaccaccgtggttatggg

SEQ ID NO: 93436 - RNA, 23 nt, synthetic construct
  source 1..23: mol_type = other RNA
ttggtcaccaccgtggttatggg

SEQ ID NO: 93437 - RNA, 23 nt, synthetic construct
  source 1..23: mol_type = other RNA
tctcctggtgctgcatgttgagg

SEQ ID NO: 93438 - RNA, 23 nt, synthetic construct
  source 1..23: mol_type = other RNA
tctgcgccgcccggcactcgatg

SEQ ID NO: 93439 - RNA, 23 nt, synthetic construct
  source 1..23: mol_type = other RNA
tgtcgtctctgtcctgggcgtgc

SEQ ID NO: 93440 - RNA, 23 nt, synthetic construct
  source 1..23: mol_type = other RNA
tgatgggagttgtcccaggagtt

SEQ ID NO: 93441 - RNA, 23 nt, synthetic construct
  source 1..23: mol_type = other RNA
tgtgtgggaagtccccgtggaag

SEQ ID NO: 93442 - RNA, 23 nt, synthetic construct
  source 1..23: mol_type = other RNA
tgaggaggggtggattgtggaca

SEQ ID NO: 93443 - RNA, 23 nt, synthetic construct
  source 1..23: mol_type = other RNA
tgtgtgggaagtccccgtggaag

SEQ ID NO: 93444 - RNA, 23 nt, synthetic construct
  source 1..23: mol_type = other RNA
tgaggaggggtggattgtggaca

SEQ ID NO: 93445 - RNA, 23 nt, synthetic construct
  source 1..23: mol_type = other RNA
tgatgggtgttgtccctggagtt

SEQ ID NO: 93446 - RNA, 23 nt, synthetic construct
  source 1..23: mol_type = other RNA
tggtagaggctgagattcccaaa

SEQ ID NO: 93447 - RNA, 23 nt, synthetic construct
  source 1..23: mol_type = other RNA
tctcacccttctggggccggttt

SEQ ID NO: 93448 - RNA, 23 nt, synthetic construct
  source 1..23: mol_type = other RNA
tgccagctggaatccgtgctgcg

SEQ ID NO: 93449 - RNA, 23 nt, synthetic construct
  source 1..23: mol_type = other RNA
tgcgagcaccagtgccgggcgta

SEQ ID NO: 93450 - RNA, 23 nt, synthetic construct
  source 1..23: mol_type = other RNA
tgtaggtgtcaaagtccccgcca

SEQ ID NO: 93451 - RNA, 23 nt, synthetic construct
  source 1..23: mol_type = other RNA
tgtaggtgtcaaagtccccgcca

SEQ ID NO: 93452 - RNA, 23 nt, synthetic construct
  source 1..23: mol_type = other RNA
tgtaggtgtcaaagtccccgcca

SEQ ID NO: 93453 - RNA, 23 nt, synthetic construct
  source 1..23: mol_type = other RNA
ttgcccctccggccgcacggatg

SEQ ID NO: 93454 - RNA, 23 nt, synthetic construct
  source 1..23: mol_type = other RNA
tgtaggtgtcaaagtccccgcca

SEQ ID NO: 93455 - RNA, 23 nt, synthetic construct
  source 1..23: mol_type = other RNA
tggactggcagttgctgacccac

SEQ ID NO: 93456 - RNA, 23 nt, synthetic construct
  source 1..23: mol_type = other RNA
tgaggcgtgagtgccgtccctgg

SEQ ID NO: 93457 - RNA, 23 nt, synthetic construct
  source 1..23: mol_type = other RNA
taggatccgggtcgtccccagag

SEQ ID NO: 93458 - RNA, 23 nt, synthetic construct
  source 1..23: mol_type = other RNA
ttggacgtggaactggtggccct

SEQ ID NO: 93459 - RNA, 23 nt, synthetic construct
  source 1..23: mol_type = other RNA
tgagccggtggctgtgatcgtag

SEQ ID NO: 93460 - RNA, 23 nt, synthetic construct
  source 1..23: mol_type = other RNA
tagtgggagccgccccacatgct

SEQ ID NO: 93461 - RNA, 23 nt, synthetic construct
  source 1..23: mol_type = other RNA
tgctcagggcacctccagttccg

SEQ ID NO: 93462 - RNA, 23 nt, synthetic construct
  source 1..23: mol_type = other RNA
tctgatgatggtgccgttgcttc

SEQ ID NO: 93463 - RNA, 23 nt, synthetic construct
  source 1..23: mol_type = other RNA
ttttggaagcggtgctggctgtg

SEQ ID NO: 93464 - RNA, 23 nt, synthetic construct
  source 1..23: mol_type = other RNA
ttggcactttggtagtgtgagct

SEQ ID NO: 93465 - RNA, 23 nt, synthetic construct
  source 1..23: mol_type = other RNA
tcagtggacacgctgaaggttgg

SEQ ID NO: 93466 - RNA, 23 nt, synthetic construct
  source 1..23: mol_type = other RNA
tacatggctgttgacccaggttt

SEQ ID NO: 93467 - RNA, 23 nt, synthetic construct
  source 1..23: mol_type = other RNA
ttggggtcagcaaatggactcca

SEQ ID NO: 93468 - RNA, 23 nt, synthetic construct
  source 1..23: mol_type = other RNA
tggcatggacaggcggccgcctt

SEQ ID NO: 93469 - RNA, 23 nt, synthetic construct
  source 1..23: mol_type = other RNA
tcgtcaggccgcacttccgcagc

SEQ ID NO: 93470 - RNA, 23 nt, synthetic construct
  source 1..23: mol_type = other RNA
tgtgtgtgggtggtccctagggc

SEQ ID NO: 93471 - RNA, 23 nt, synthetic construct
  source 1..23: mol_type = other RNA
tgtgtgtgggtggtccctagggc

SEQ ID NO: 93472 - RNA, 23 nt, synthetic construct
  source 1..23: mol_type = other RNA
tgtgtgtgggtggtccctagggc

SEQ ID NO: 93473 - RNA, 23 nt, synthetic construct
  source 1..23: mol_type = other RNA
tgtgtgtgggtggtccctagggc

SEQ ID NO: 93474 - RNA, 23 nt, synthetic construct
  source 1..23: mol_type = other RNA
ttggccgtggaaccggtgggcac

SEQ ID NO: 93475 - RNA, 23 nt, synthetic construct
  source 1..23: mol_type = other RNA
tccttgcctgtcgcagcttcctg

SEQ ID NO: 93476 - RNA, 23 nt, synthetic construct
  source 1..23: mol_type = other RNA
ttgggcggtgcccattgtaccag

SEQ ID NO: 93477 - RNA, 23 nt, synthetic construct
  source 1..23: mol_type = other RNA
tgggggtgactcggtggttctgc

SEQ ID NO: 93478 - RNA, 23 nt, synthetic construct
  source 1..23: mol_type = other RNA
tggtgcgggtcttgctgggtgtg

SEQ ID NO: 93479 - RNA, 23 nt, synthetic construct
  source 1..23: mol_type = other RNA
tggtgcgggtcttgctgggtgtg

SEQ ID NO: 93480 - RNA, 23 nt, synthetic construct
  source 1..23: mol_type = other RNA
ttggaagggtggttgcagtcctt

SEQ ID NO: 93481 - RNA, 23 nt, synthetic construct
  source 1..23: mol_type = other RNA
tggtgcgggtcttgctgggtgtg

SEQ ID NO: 93482 - RNA, 23 nt, synthetic construct
  source 1..23: mol_type = other RNA
tggtgcgggtcttgctgggtgtg

SEQ ID NO: 93483 - RNA, 23 nt, synthetic construct
  source 1..23: mol_type = other RNA
ttggaagggtggttgcagtcctt

SEQ ID NO: 93484 - RNA, 23 nt, synthetic construct
  source 1..23: mol_type = other RNA
ttggaagggtggttgcagtcctt

SEQ ID NO: 93485 - RNA, 23 nt, synthetic construct
  source 1..23: mol_type = other RNA
tttcattcagctggactggctgg

SEQ ID NO: 93486 - RNA, 23 nt, synthetic construct
  source 1..23: mol_type = other RNA
tgtcccagtgacatcagggaggg

SEQ ID NO: 93487 - RNA, 23 nt, synthetic construct
  source 1..23: mol_type = other RNA
tggtacgcagtgctgtccaccag

SEQ ID NO: 93488 - RNA, 23 nt, synthetic construct
  source 1..23: mol_type = other RNA
tggaggtgtggacagtctctgga

SEQ ID NO: 93489 - RNA, 23 nt, synthetic construct
  source 1..23: mol_type = other RNA
tgcccggggtggtcgtccctgga

SEQ ID NO: 93490 - RNA, 23 nt, synthetic construct
  source 1..23: mol_type = other RNA
tgcccggggtggtcgtccctgga

SEQ ID NO: 93491 - RNA, 23 nt, synthetic construct
  source 1..23: mol_type = other RNA
tgcccggggtggtcgtccctgga

SEQ ID NO: 93492 - RNA, 23 nt, synthetic construct
  source 1..23: mol_type = other RNA
tgcccggggtggtcgtccctggg

SEQ ID NO: 93493 - RNA, 23 nt, synthetic construct
  source 1..23: mol_type = other RNA
tcaaaggtggcacacgggcaggt

SEQ ID NO: 93494 - RNA, 23 nt, synthetic construct
  source 1..23: mol_type = other RNA
tctcagtgaggatccgggtcgtc

SEQ ID NO: 93495 - RNA, 23 nt, synthetic construct
  source 1..23: mol_type = other RNA
tgggtcagcaaatggactccacc

SEQ ID NO: 93496 - RNA, 23 nt, synthetic construct
  source 1..23: mol_type = other RNA
ttctggggccggtttcacccacg

SEQ ID NO: 93497 - RNA, 23 nt, synthetic construct
  source 1..23: mol_type = other RNA
tgtccgtgcagttgccggccggc

SEQ ID NO: 93498 - RNA, 23 nt, synthetic construct
  source 1..23: mol_type = other RNA
tctgagggccgtgaagtcgtcag

SEQ ID NO: 93499 - RNA, 23 nt, synthetic construct
  source 1..23: mol_type = other RNA
ttgggtccccacccggccctctc

SEQ ID NO: 93500 - RNA, 23 nt, synthetic construct
  source 1..23: mol_type = other RNA
ttttccgtccttgtcgtagcagc

SEQ ID NO: 93501 - RNA, 23 nt, synthetic construct
  source 1..23: mol_type = other RNA
tgtggtggccgtctccagctctg

SEQ ID NO: 93502 - RNA, 23 nt, synthetic construct
  source 1..23: mol_type = other RNA
tggggcctcccgtggtggctgta

SEQ ID NO: 93503 - RNA, 23 nt, synthetic construct
  source 1..23: mol_type = other RNA
tgggggtcaccgtggagcctctg

SEQ ID NO: 93504 - RNA, 23 nt, synthetic construct
  source 1..23: mol_type = other RNA
tagcactgtggcggtgtgggtgg

SEQ ID NO: 93505 - RNA, 23 nt, synthetic construct
  source 1..23: mol_type = other RNA
tcagtggccacagttgtggtggt

SEQ ID NO: 93506 - RNA, 23 nt, synthetic construct
  source 1..23: mol_type = other RNA
tggtggttgctgctagggtgtgg

SEQ ID NO: 93507 - RNA, 23 nt, synthetic construct
  source 1..23: mol_type = other RNA
tcggtggttgctgctagggtgtg

SEQ ID NO: 93508 - RNA, 23 nt, synthetic construct
  source 1..23: mol_type = other RNA
tggaggtggccgtggtgtggccc

SEQ ID NO: 93509 - RNA, 23 nt, synthetic construct
  source 1..23: mol_type = other RNA
tacggcccctccggccgcacgga

SEQ ID NO: 93510 - RNA, 23 nt, synthetic construct
  source 1..23: mol_type = other RNA
tcagtggccacagttgtggtggt

SEQ ID NO: 93511 - RNA, 23 nt, synthetic construct
  source 1..23: mol_type = other RNA
ttggtggccgtggtgttcggcac

SEQ ID NO: 93512 - RNA, 23 nt, synthetic construct
  source 1..23: mol_type = other RNA
tacggcccctccggccgcacgga

SEQ ID NO: 93513 - RNA, 23 nt, synthetic construct
  source 1..23: mol_type = other RNA
tgtaaagctggtagctgtggatt

SEQ ID NO: 93514 - RNA, 23 nt, synthetic construct
  source 1..23: mol_type = other RNA
tccggtggccctggttgtggtgg

SEQ ID NO: 93515 - RNA, 23 nt, synthetic construct
  source 1..23: mol_type = other RNA
tgggggtcaccgtggagcctctg

SEQ ID NO: 93516 - RNA, 23 nt, synthetic construct
  source 1..23: mol_type = other RNA
tagcactgtggcggtgtgggtgg

SEQ ID NO: 93517 - RNA, 23 nt, synthetic construct
  source 1..23: mol_type = other RNA
tcagtggccacagttgtggtggt

SEQ ID NO: 93518 - RNA, 23 nt, synthetic construct
  source 1..23: mol_type = other RNA
tgggatgggagttgtccctggag

SEQ ID NO: 93519 - RNA, 23 nt, synthetic construct
  source 1..23: mol_type = other RNA
ttggtggccgtggtgttcggcac

SEQ ID NO: 93520 - RNA, 23 nt, synthetic construct
  source 1..23: mol_type = other RNA
tccggtggccctggttgtggtgg

SEQ ID NO: 93521 - RNA, 23 nt, synthetic construct
  source 1..23: mol_type = other RNA
tcacacgcgtcgttcacgcaggc

SEQ ID NO: 93522 - RNA, 23 nt, synthetic construct
  source 1..23: mol_type = other RNA
tatttcttggacagaacgtagct

SEQ ID NO: 93523 - RNA, 23 nt, synthetic construct
  source 1..23: mol_type = other RNA
taggtctggttggcgtatttggg

SEQ ID NO: 93524 - RNA, 23 nt, synthetic construct
  source 1..23: mol_type = other RNA
ttgaaaccgctgctcaccggaat

SEQ ID NO: 93525 - RNA, 23 nt, synthetic construct
  source 1..23: mol_type = other RNA
tgggcatagaactcgttgaaggc

SEQ ID NO: 93526 - RNA, 23 nt, synthetic construct
  source 1..23: mol_type = other RNA
taccagtgccgggcgtagttctc

SEQ ID NO: 93527 - RNA, 23 nt, synthetic construct
  source 1..23: mol_type = other RNA
tcacaggggatgttctcggtgac

SEQ ID NO: 93528 - RNA, 23 nt, synthetic construct
  source 1..23: mol_type = other RNA
tcatttcttggacagaacgtagc

SEQ ID NO: 93529 - RNA, 23 nt, synthetic construct
  source 1..23: mol_type = other RNA
tcccggatcctgtagttgtagca

SEQ ID NO: 93530 - RNA, 23 nt, synthetic construct
  source 1..23: mol_type = other RNA
ttctcggtgacgatgcggaaggt

SEQ ID NO: 93531 - RNA, 23 nt, synthetic construct
  source 1..23: mol_type = other RNA
tcagttctcgttgtccgtcaggc

SEQ ID NO: 93532 - RNA, 23 nt, synthetic construct
  source 1..23: mol_type = other RNA
taggtgttgcagtcgaccctgat

SEQ ID NO: 93533 - RNA, 23 nt, synthetic construct
  source 1..23: mol_type = other RNA
tggccttccaggtgttggcgaag

SEQ ID NO: 93534 - RNA, 23 nt, synthetic construct
  source 1..23: mol_type = other RNA
tggcttgtaggtggcctcgttgt

SEQ ID NO: 93535 - RNA, 23 nt, synthetic construct
  source 1..23: mol_type = other RNA
tctccacgaagagcttgatggcc

SEQ ID NO: 93536 - RNA, 23 nt, synthetic construct
  source 1..23: mol_type = other RNA
tgaagtccacgtcaaaccactct

SEQ ID NO: 93537 - RNA, 23 nt, synthetic construct
  source 1..23: mol_type = other RNA
tgccgtgcagaaacactcgcagt

SEQ ID NO: 93538 - RNA, 23 nt, synthetic construct
  source 1..23: mol_type = other RNA
tgtcgaagttcccgcacaggccg

SEQ ID NO: 93539 - RNA, 23 nt, synthetic construct
  source 1..23: mol_type = other RNA
tgctacgcgtggcaaagtcattg

SEQ ID NO: 93540 - RNA, 23 nt, synthetic construct
  source 1..23: mol_type = other RNA
tctacgcgtggcaaagtcattga

SEQ ID NO: 93541 - RNA, 23 nt, synthetic construct
  source 1..23: mol_type = other RNA
tcggaatttggtcaaacaggatc

SEQ ID NO: 93542 - RNA, 23 nt, synthetic construct
  source 1..23: mol_type = other RNA
tgaagaagctcgagggtgtgaac

SEQ ID NO: 93543 - RNA, 23 nt, synthetic construct
  source 1..23: mol_type = other RNA
tgccggttttcctgaggctcccc

SEQ ID NO: 93544 - RNA, 23 nt, synthetic construct
  source 1..23: mol_type = other RNA
tggctacgcgtggcaaagtcatt

SEQ ID NO: 93545 - RNA, 23 nt, synthetic construct
  source 1..23: mol_type = other RNA
tagttgttcagacttggggtagt

SEQ ID NO: 93546 - RNA, 23 nt, synthetic construct
  source 1..23: mol_type = other RNA
taggtgtaagaggtgccgtcaaa

SEQ ID NO: 93547 - RNA, 23 nt, synthetic construct
  source 1..23: mol_type = other RNA
tgcaggtgacgtcggcctcactc

SEQ ID NO: 93548 - RNA, 23 nt, synthetic construct
  source 1..23: mol_type = other RNA
tacacaggcgcccgcgtcattga

SEQ ID NO: 93549 - RNA, 23 nt, synthetic construct
  source 1..23: mol_type = other RNA
tggatcagctcgtagctctccac

SEQ ID NO: 93550 - RNA, 23 nt, synthetic construct
  source 1..23: mol_type = other RNA
ttttaggcagggtgccccgcagg

SEQ ID NO: 93551 - RNA, 23 nt, synthetic construct
  source 1..23: mol_type = other RNA
tccacgtcaaaccactctgtcca

SEQ ID NO: 93552 - RNA, 23 nt, synthetic construct
  source 1..23: mol_type = other RNA
tgtgatgttggctgccgacaggg

SEQ ID NO: 93553 - RNA, 23 nt, synthetic construct
  source 1..23: mol_type = other RNA
tcaggtctggttggcgtatttgg

SEQ ID NO: 93554 - RNA, 23 nt, synthetic construct
  source 1..23: mol_type = other RNA
tacacgcgtcgttcacgcaggcc

SEQ ID NO: 93555 - RNA, 23 nt, synthetic construct
  source 1..23: mol_type = other RNA
tgctcgtagctctccacgaagag

SEQ ID NO: 93556 - RNA, 23 nt, synthetic construct
  source 1..23: mol_type = other RNA
tttttaggcagggtgccccgcag

SEQ ID NO: 93557 - RNA, 23 nt, synthetic construct
  source 1..23: mol_type = other RNA
tcagacctcgcggacacacacgg

SEQ ID NO: 93558 - RNA, 23 nt, synthetic construct
  source 1..23: mol_type = other RNA
tactgctccgtgggcccatccaa

SEQ ID NO: 93559 - RNA, 23 nt, synthetic construct
  source 1..23: mol_type = other RNA
tgcactccgcaaaggccggcccc

SEQ ID NO: 93560 - RNA, 23 nt, synthetic construct
  source 1..23: mol_type = other RNA
tgcccgcgtcattgaggaaggtg

SEQ ID NO: 93561 - RNA, 23 nt, synthetic construct
  source 1..23: mol_type = other RNA
tacgatgcggaaggtcccgtggg

SEQ ID NO: 93562 - RNA, 23 nt, synthetic construct
  source 1..23: mol_type = other RNA
taggatcagctcgtagctctcca

SEQ ID NO: 93563 - RNA, 23 nt, synthetic construct
  source 1..23: mol_type = other RNA
tgaggatcagctcgtagctctcc

SEQ ID NO: 93564 - RNA, 23 nt, synthetic construct
  source 1..23: mol_type = other RNA
tccactggggttccggcaggttt

SEQ ID NO: 93565 - RNA, 23 nt, synthetic construct
  source 1..23: mol_type = other RNA
tgcccactggggttccggcaggt

SEQ ID NO: 93566 - RNA, 23 nt, synthetic construct
  source 1..23: mol_type = other RNA
tttcatctggtcctcattgaaga

SEQ ID NO: 93567 - RNA, 23 nt, synthetic construct
  source 1..23: mol_type = other RNA
tgccacgcacttcatctggtcct

SEQ ID NO: 93568 - RNA, 23 nt, synthetic construct
  source 1..23: mol_type = other RNA
tgttgttcagacttggggtagtc

SEQ ID NO: 93569 - RNA, 23 nt, synthetic construct
  source 1..23: mol_type = other RNA
tgatcttatcgtaggactcaacg

SEQ ID NO: 93570 - RNA, 23 nt, synthetic construct
  source 1..23: mol_type = other RNA
tgtggtggtcagcactttgggag

SEQ ID NO: 93571 - RNA, 23 nt, synthetic construct
  source 1..23: mol_type = other RNA
ttggttgttggtgcaggtgccgc

SEQ ID NO: 93572 - RNA, 23 nt, synthetic construct
  source 1..23: mol_type = other RNA
ttctcttgtactcaaagccctgg

SEQ ID NO: 93573 - RNA, 23 nt, synthetic construct
  source 1..23: mol_type = other RNA
tgggccacagggcacgtattcgc

SEQ ID NO: 93574 - RNA, 23 nt, synthetic construct
  source 1..23: mol_type = other RNA
ttgcactcgcactcatagtggaa

SEQ ID NO: 93575 - RNA, 23 nt, synthetic construct
  source 1..23: mol_type = other RNA
ttcttccggtcccaggacacggc

SEQ ID NO: 93576 - RNA, 23 nt, synthetic construct
  source 1..23: mol_type = other RNA
tgggtgtgggaagtcaccgtgga

SEQ ID NO: 93577 - RNA, 23 nt, synthetic construct
  source 1..23: mol_type = other RNA
tgttccggcaggtttttaggcag

SEQ ID NO: 93578 - RNA, 23 nt, synthetic construct
  source 1..23: mol_type = other RNA
taggttcccaaactggagcgggg

SEQ ID NO: 93579 - RNA, 23 nt, synthetic construct
  source 1..23: mol_type = other RNA
tcagacacagccggacacgcagt

SEQ ID NO: 93580 - RNA, 23 nt, synthetic construct
  source 1..23: mol_type = other RNA
taggtgcaggcctcaaggctgtg

SEQ ID NO: 93581 - RNA, 23 nt, synthetic construct
  source 1..23: mol_type = other RNA
tttgcagcagaacacacggattt

SEQ ID NO: 93582 - RNA, 23 nt, synthetic construct
  source 1..23: mol_type = other RNA
tttgcagcagaacacacggattt

SEQ ID NO: 93583 - RNA, 23 nt, synthetic construct
  source 1..23: mol_type = other RNA
tttgcagcagaacacacggattt

SEQ ID NO: 93584 - RNA, 23 nt, synthetic construct
  source 1..23: mol_type = other RNA
tttgcagcagaacacacggattt

SEQ ID NO: 93585 - RNA, 23 nt, synthetic construct
  source 1..23: mol_type = other RNA
tgccgtgtccccgccgtccaggc

SEQ ID NO: 93586 - RNA, 23 nt, synthetic construct
  source 1..23: mol_type = other RNA
tggccatccccgtaggccacgca

SEQ ID NO: 93587 - RNA, 23 nt, synthetic construct
  source 1..23: mol_type = other RNA
tgatgcggaaggtcccgtgggtg

SEQ ID NO: 93588 - RNA, 23 nt, synthetic construct
  source 1..23: mol_type = other RNA
tcttggtggagtcaacctgggag

SEQ ID NO: 93589 - RNA, 23 nt, synthetic construct
  source 1..23: mol_type = other RNA
tgtcccctccaagttgttcagac

SEQ ID NO: 93590 - RNA, 23 nt, synthetic construct
  source 1..23: mol_type = other RNA
tggctgctcacagacggcccctc

SEQ ID NO: 93591 - RNA, 23 nt, synthetic construct
  source 1..23: mol_type = other RNA
tggctgctcacagacggcccctc

SEQ ID NO: 93592 - RNA, 23 nt, synthetic construct
  source 1..23: mol_type = other RNA
tggctgctcacagacggcccctc

SEQ ID NO: 93593 - RNA, 23 nt, synthetic construct
  source 1..23: mol_type = other RNA
tgggtccaggtctcattcacctg

SEQ ID NO: 93594 - RNA, 23 nt, synthetic construct
  source 1..23: mol_type = other RNA
ttcctctccgttccacaggaatg

SEQ ID NO: 93595 - RNA, 23 nt, synthetic construct
  source 1..23: mol_type = other RNA
ttgggcccatccaacttctgcag

SEQ ID NO: 93596 - RNA, 23 nt, synthetic construct
  source 1..23: mol_type = other RNA
tcgtgggcccatccaacttctgc

SEQ ID NO: 93597 - RNA, 23 nt, synthetic construct
  source 1..23: mol_type = other RNA
ttgctccgtgggcccatccaact

SEQ ID NO: 93598 - RNA, 23 nt, synthetic construct
  source 1..23: mol_type = other RNA
ttgatgttggctgccgacagggg

SEQ ID NO: 93599 - RNA, 23 nt, synthetic construct
  source 1..23: mol_type = other RNA
taagctcgagggtgtgaacaggg

SEQ ID NO: 93600 - RNA, 23 nt, synthetic construct
  source 1..23: mol_type = other RNA
ttcagcctggttctggttgaagt

SEQ ID NO: 93601 - RNA, 23 nt, synthetic construct
  source 1..23: mol_type = other RNA
tgacttggggcagttctgcatgt

SEQ ID NO: 93602 - RNA, 23 nt, synthetic construct
  source 1..23: mol_type = other RNA
taggtgcagccgtccacaggcac

SEQ ID NO: 93603 - RNA, 23 nt, synthetic construct
  source 1..23: mol_type = other RNA
tcacacaggcgcccgcgtcattg

SEQ ID NO: 93604 - RNA, 23 nt, synthetic construct
  source 1..23: mol_type = other RNA
tctgtgcttttctgcagagaggc

SEQ ID NO: 93605 - RNA, 23 nt, synthetic construct
  source 1..23: mol_type = other RNA
ttcagctcgtagctctccacgaa

SEQ ID NO: 93606 - RNA, 23 nt, synthetic construct
  source 1..23: mol_type = other RNA
tcggtcccaggacacggccatcc

SEQ ID NO: 93607 - RNA, 23 nt, synthetic construct
  source 1..23: mol_type = other RNA
tgcgtggcaaagtcattgatggc

SEQ ID NO: 93608 - RNA, 23 nt, synthetic construct
  source 1..23: mol_type = other RNA
tgcaggcctcgtagtacttggtg

SEQ ID NO: 93609 - RNA, 23 nt, synthetic construct
  source 1..23: mol_type = other RNA
tcacaggcccgcgtcgtggcagg

SEQ ID NO: 93610 - RNA, 23 nt, synthetic construct
  source 1..23: mol_type = other RNA
ttcctcataggtgcaggtgcagg

SEQ ID NO: 93611 - RNA, 23 nt, synthetic construct
  source 1..23: mol_type = other RNA
ttaggcacagcaggctccgtgct

SEQ ID NO: 93612 - RNA, 23 nt, synthetic construct
  source 1..23: mol_type = other RNA
tttggggtagtcctcatcaaacc

SEQ ID NO: 93613 - RNA, 23 nt, synthetic construct
  source 1..23: mol_type = other RNA
ttggggaagctctcggcctggca

SEQ ID NO: 93614 - RNA, 23 nt, synthetic construct
  source 1..23: mol_type = other RNA
tctgtccactcacacttcggttg

SEQ ID NO: 93615 - RNA, 23 nt, synthetic construct
  source 1..23: mol_type = other RNA
ttccacgtcaaaccactctgtcc

SEQ ID NO: 93616 - RNA, 23 nt, synthetic construct
  source 1..23: mol_type = other RNA
tggggtagctgtagtccagccac

SEQ ID NO: 93617 - RNA, 23 nt, synthetic construct
  source 1..23: mol_type = other RNA
tccaggctgcattccacgacctg

SEQ ID NO: 93618 - RNA, 23 nt, synthetic construct
  source 1..23: mol_type = other RNA
tggggtagctgtagtccagccac

SEQ ID NO: 93619 - RNA, 23 nt, synthetic construct
  source 1..23: mol_type = other RNA
tccaggctgcattccacgacctg

SEQ ID NO: 93620 - RNA, 23 nt, synthetic construct
  source 1..23: mol_type = other RNA
tggggtagctgtagtccagccac

SEQ ID NO: 93621 - RNA, 23 nt, synthetic construct
  source 1..23: mol_type = other RNA
tccaggctgcattccacgacctg

SEQ ID NO: 93622 - RNA, 23 nt, synthetic construct
  source 1..23: mol_type = other RNA
tggggtagctgtagtccagccac

SEQ ID NO: 93623 - RNA, 23 nt, synthetic construct
  source 1..23: mol_type = other RNA
tccaggctgcattccacgacctg

SEQ ID NO: 93624 - RNA, 23 nt, synthetic construct
  source 1..23: mol_type = other RNA
tacctggccaccgtgcagttctc

SEQ ID NO: 93625 - RNA, 23 nt, synthetic construct
  source 1..23: mol_type = other RNA
ttgtcacccacgcacctggccac

SEQ ID NO: 93626 - RNA, 23 nt, synthetic construct
  source 1..23: mol_type = other RNA
tgtgcttgttcacgcaggtgacg

SEQ ID NO: 93627 - RNA, 23 nt, synthetic construct
  source 1..23: mol_type = other RNA
taaaccgctgctcaccggaattt

SEQ ID NO: 93628 - RNA, 23 nt, synthetic construct
  source 1..23: mol_type = other RNA
tctgaaaccgctgctcaccggaa

SEQ ID NO: 93629 - RNA, 23 nt, synthetic construct
  source 1..23: mol_type = other RNA
taggtgacgtcggcctcactcag

SEQ ID NO: 93630 - RNA, 23 nt, synthetic construct
  source 1..23: mol_type = other RNA
ttgaggacataggtgcagttgcc

SEQ ID NO: 93631 - RNA, 23 nt, synthetic construct
  source 1..23: mol_type = other RNA
tcccaaactggagcggggtcagc

SEQ ID NO: 93632 - RNA, 23 nt, synthetic construct
  source 1..23: mol_type = other RNA
tgcctcgtagtacttggtggagt

SEQ ID NO: 93633 - RNA, 23 nt, synthetic construct
  source 1..23: mol_type = other RNA
tggttccggcaggtttttaggca

SEQ ID NO: 93634 - RNA, 23 nt, synthetic construct
  source 1..23: mol_type = other RNA
tcttccaggtgttggcgaaggct

SEQ ID NO: 93635 - RNA, 23 nt, synthetic construct
  source 1..23: mol_type = other RNA
tggcctcgtagtacttggtggag

SEQ ID NO: 93636 - RNA, 23 nt, synthetic construct
  source 1..23: mol_type = other RNA
tccagggtccaggtctcattcac

SEQ ID NO: 93637 - RNA, 23 nt, synthetic construct
  source 1..23: mol_type = other RNA
ttgaacagggtgatgttggctgc

SEQ ID NO: 93638 - RNA, 23 nt, synthetic construct
  source 1..23: mol_type = other RNA
tcgcgtcattgaggaaggtgccc

SEQ ID NO: 93639 - RNA, 23 nt, synthetic construct
  source 1..23: mol_type = other RNA
tccgcgtcattgaggaaggtgcc

SEQ ID NO: 93640 - RNA, 23 nt, synthetic construct
  source 1..23: mol_type = other RNA
tggtgatgttggctgccgacagg

SEQ ID NO: 93641 - RNA, 23 nt, synthetic construct
  source 1..23: mol_type = other RNA
tagccacactgggccacgcactt

SEQ ID NO: 93642 - RNA, 23 nt, synthetic construct
  source 1..23: mol_type = other RNA
tggagtagcagcagccggttttc

SEQ ID NO: 93643 - RNA, 23 nt, synthetic construct
  source 1..23: mol_type = other RNA
tgtctggttggcgtatttgggat

SEQ ID NO: 93644 - RNA, 23 nt, synthetic construct
  source 1..23: mol_type = other RNA
tgtagctctccacgaagagcttg

SEQ ID NO: 93645 - RNA, 23 nt, synthetic construct
  source 1..23: mol_type = other RNA
tcactgctccgtgggcccatcca

SEQ ID NO: 93646 - RNA, 23 nt, synthetic construct
  source 1..23: mol_type = other RNA
tcaggggatgttctcggtgacga

SEQ ID NO: 93647 - RNA, 23 nt, synthetic construct
  source 1..23: mol_type = other RNA
tcaggtgacgtcggcctcactca

SEQ ID NO: 93648 - RNA, 23 nt, synthetic construct
  source 1..23: mol_type = other RNA
tccgtgggcccatccaacttctg

SEQ ID NO: 93649 - RNA, 23 nt, synthetic construct
  source 1..23: mol_type = other RNA
tttggggcagttctgcatgtact

SEQ ID NO: 93650 - RNA, 23 nt, synthetic construct
  source 1..23: mol_type = other RNA
tcagccggacacgcagtgtgtgc

SEQ ID NO: 93651 - RNA, 23 nt, synthetic construct
  source 1..23: mol_type = other RNA
ttgggcatagaactcgttgaagg

SEQ ID NO: 93652 - RNA, 23 nt, synthetic construct
  source 1..23: mol_type = other RNA
ttggtgccggtggtcccacaggg

SEQ ID NO: 93653 - RNA, 23 nt, synthetic construct
  source 1..23: mol_type = other RNA
ttacgcgtggcaaagtcattgat

SEQ ID NO: 93654 - RNA, 23 nt, synthetic construct
  source 1..23: mol_type = other RNA
tgcagccacagccgtgcagaaac

SEQ ID NO: 93655 - RNA, 23 nt, synthetic construct
  source 1..23: mol_type = other RNA
tcactggggttccggcaggtttt

SEQ ID NO: 93656 - RNA, 23 nt, synthetic construct
  source 1..23: mol_type = other RNA
ttgtagatgacgtcctggtagct

SEQ ID NO: 93657 - RNA, 23 nt, synthetic construct
  source 1..23: mol_type = other RNA
tgtaaggcagctcctcccgctgc

SEQ ID NO: 93658 - RNA, 23 nt, synthetic construct
  source 1..23: mol_type = other RNA
ttgtaaggcagctcctcccgctg

SEQ ID NO: 93659 - RNA, 23 nt, synthetic construct
  source 1..23: mol_type = other RNA
tctgtaaggcagctcctcccgct

SEQ ID NO: 93660 - RNA, 23 nt, synthetic construct
  source 1..23: mol_type = other RNA
tctgtcctctccgttccacagga

SEQ ID NO: 93661 - RNA, 23 nt, synthetic construct
  source 1..23: mol_type = other RNA
ttccgggcactgctccgtgggcc

SEQ ID NO: 93662 - RNA, 23 nt, synthetic construct
  source 1..23: mol_type = other RNA
ttgagtattccacaaaggtggca

SEQ ID NO: 93663 - RNA, 23 nt, synthetic construct
  source 1..23: mol_type = other RNA
tgtgagtattccacaaaggtggc

SEQ ID NO: 93664 - RNA, 23 nt, synthetic construct
  source 1..23: mol_type = other RNA
tcgtgggcgcactggcgtgagta

SEQ ID NO: 93665 - RNA, 23 nt, synthetic construct
  source 1..23: mol_type = other RNA
tcgcgtgggcgcactggcgtgag

SEQ ID NO: 93666 - RNA, 23 nt, synthetic construct
  source 1..23: mol_type = other RNA
tccgcgtgggcgcactggcgtga

SEQ ID NO: 93667 - RNA, 23 nt, synthetic construct
  source 1..23: mol_type = other RNA
tgcactgcccgaggggcaggcag

SEQ ID NO: 93668 - RNA, 23 nt, synthetic construct
  source 1..23: mol_type = other RNA
tcgccgtccaggctgagcgtcac

SEQ ID NO: 93669 - RNA, 23 nt, synthetic construct
  source 1..23: mol_type = other RNA
tccggatggccgtgtccccgccg

SEQ ID NO: 93670 - RNA, 23 nt, synthetic construct
  source 1..23: mol_type = other RNA
tcccggatggccgtgtccccgcc

SEQ ID NO: 93671 - RNA, 23 nt, synthetic construct
  source 1..23: mol_type = other RNA
tacataggaggacagcgcggcgc

SEQ ID NO: 93672 - RNA, 23 nt, synthetic construct
  source 1..23: mol_type = other RNA
tacagcccacgtccagcgtgtgg

SEQ ID NO: 93673 - RNA, 23 nt, synthetic construct
  source 1..23: mol_type = other RNA
tcttgtaggtggcctcgttgtgc

SEQ ID NO: 93674 - RNA, 23 nt, synthetic construct
  source 1..23: mol_type = other RNA
tcgccatcaaaggtgatgaagtg

SEQ ID NO: 93675 - RNA, 23 nt, synthetic construct
  source 1..23: mol_type = other RNA
tcgatgaccaggaagatccccat

SEQ ID NO: 93676 - RNA, 23 nt, synthetic construct
  source 1..23: mol_type = other RNA
ttacttggtggagtcaacctggg

SEQ ID NO: 93677 - RNA, 23 nt, synthetic construct
  source 1..23: mol_type = other RNA
tagtccgccaggacacacacagg

SEQ ID NO: 93678 - RNA, 23 nt, synthetic construct
  source 1..23: mol_type = other RNA
tgagtccgccaggacacacacag

SEQ ID NO: 93679 - RNA, 23 nt, synthetic construct
  source 1..23: mol_type = other RNA
tccacgcacttcatctggtcctc

SEQ ID NO: 93680 - RNA, 23 nt, synthetic construct
  source 1..23: mol_type = other RNA
ttgttgtagatgacgtcctggta

SEQ ID NO: 93681 - RNA, 23 nt, synthetic construct
  source 1..23: mol_type = other RNA
tggtaggcacagcaggctccgtg

SEQ ID NO: 93682 - RNA, 23 nt, synthetic construct
  source 1..23: mol_type = other RNA
tacttggggtagtcctcatcaaa

SEQ ID NO: 93683 - RNA, 23 nt, synthetic construct
  source 1..23: mol_type = other RNA
taagttgttcagacttggggtag

SEQ ID NO: 93684 - RNA, 23 nt, synthetic construct
  source 1..23: mol_type = other RNA
tatcttatcgtaggactcaacgt

SEQ ID NO: 93685 - RNA, 23 nt, synthetic construct
  source 1..23: mol_type = other RNA
tctgtagttgtagcacatcttga

SEQ ID NO: 93686 - RNA, 23 nt, synthetic construct
  source 1..23: mol_type = other RNA
tgtcaaaccactctgtccactca

SEQ ID NO: 93687 - RNA, 23 nt, synthetic construct
  source 1..23: mol_type = other RNA
tccaggtctcattcacctgccgg

SEQ ID NO: 93688 - RNA, 23 nt, synthetic construct
  source 1..23: mol_type = other RNA
ttcaccggaatttggtcaaacag

SEQ ID NO: 93689 - RNA, 23 nt, synthetic construct
  source 1..23: mol_type = other RNA
tcctcggtgttgttgtggaagag

SEQ ID NO: 93690 - RNA, 23 nt, synthetic construct
  source 1..23: mol_type = other RNA
tcagcggaaggtgggacagcagt

SEQ ID NO: 93691 - RNA, 23 nt, synthetic construct
  source 1..23: mol_type = other RNA
tgctgtaaggcagctcctcccgc

SEQ ID NO: 93692 - RNA, 23 nt, synthetic construct
  source 1..23: mol_type = other RNA
tggcagcgggtccgggcactgct

SEQ ID NO: 93693 - RNA, 23 nt, synthetic construct
  source 1..23: mol_type = other RNA
ttggggcagttctgcatgtactt

SEQ ID NO: 93694 - RNA, 23 nt, synthetic construct
  source 1..23: mol_type = other RNA
tctgcccttgtagtcctggtgca

SEQ ID NO: 93695 - RNA, 23 nt, synthetic construct
  source 1..23: mol_type = other RNA
tcctcgtagtacttggtggagtc

SEQ ID NO: 93696 - RNA, 23 nt, synthetic construct
  source 1..23: mol_type = other RNA
ttgccccgcagggctggtagtgc

SEQ ID NO: 93697 - RNA, 23 nt, synthetic construct
  source 1..23: mol_type = other RNA
taaaccactctgtccactcacac

SEQ ID NO: 93698 - RNA, 23 nt, synthetic construct
  source 1..23: mol_type = other RNA
tctcatgaggacataggtgcagt

SEQ ID NO: 93699 - RNA, 23 nt, synthetic construct
  source 1..23: mol_type = other RNA
tgatggagttgaggaacacgccg

SEQ ID NO: 93700 - RNA, 23 nt, synthetic construct
  source 1..23: mol_type = other RNA
tgggatgttctcggtgacgatgc

SEQ ID NO: 93701 - RNA, 23 nt, synthetic construct
  source 1..23: mol_type = other RNA
tgcgtgggcgcactggcgtgagt

SEQ ID NO: 93702 - RNA, 23 nt, synthetic construct
  source 1..23: mol_type = other RNA
tcgggcacacaggcgcccgcgtc

SEQ ID NO: 93703 - RNA, 23 nt, synthetic construct
  source 1..23: mol_type = other RNA
tcccacgtccagcgtgtggcagc

SEQ ID NO: 93704 - RNA, 23 nt, synthetic construct
  source 1..23: mol_type = other RNA
tcgtaggcagccacagccgtgca

SEQ ID NO: 93705 - RNA, 23 nt, synthetic construct
  source 1..23: mol_type = other RNA
tctggtctcggcctgagaggtgg

SEQ ID NO: 93706 - RNA, 23 nt, synthetic construct
  source 1..23: mol_type = other RNA
tgcactggtgctgcatggcctgg

SEQ ID NO: 93707 - RNA, 23 nt, synthetic construct
  source 1..23: mol_type = other RNA
tacccggatcctgtagttgtagc

SEQ ID NO: 93708 - RNA, 23 nt, synthetic construct
  source 1..23: mol_type = other RNA
ttgctggtctcggcctgagaggt

SEQ ID NO: 93709 - RNA, 23 nt, synthetic construct
  source 1..23: mol_type = other RNA
tagatggagttgaggaacacgcc

SEQ ID NO: 93710 - RNA, 23 nt, synthetic construct
  source 1..23: mol_type = other RNA
tggcagctgcgtgtagatggagt

SEQ ID NO: 93711 - RNA, 23 nt, synthetic construct
  source 1..23: mol_type = other RNA
tttggctgccgacaggggcagct

SEQ ID NO: 93712 - RNA, 23 nt, synthetic construct
  source 1..23: mol_type = other RNA
tggcaggtgcagccgtccacagg

SEQ ID NO: 93713 - RNA, 23 nt, synthetic construct
  source 1..23: mol_type = other RNA
tgcgggcacacaggcgcccgcgt

SEQ ID NO: 93714 - RNA, 23 nt, synthetic construct
  source 1..23: mol_type = other RNA
tcacgtccagcgtgtggcagctc

SEQ ID NO: 93715 - RNA, 23 nt, synthetic construct
  source 1..23: mol_type = other RNA
tagcccacgtccagcgtgtggca

SEQ ID NO: 93716 - RNA, 23 nt, synthetic construct
  source 1..23: mol_type = other RNA
tacacagccggacacgcagtgtg

SEQ ID NO: 93717 - RNA, 23 nt, synthetic construct
  source 1..23: mol_type = other RNA
tggggatgttctcggtgacgatg

SEQ ID NO: 93718 - RNA, 23 nt, synthetic construct
  source 1..23: mol_type = other RNA
ttgccggtggtcccacaggggat

SEQ ID NO: 93719 - RNA, 23 nt, synthetic construct
  source 1..23: mol_type = other RNA
tcagggtgccccgcagggctggt

SEQ ID NO: 93720 - RNA, 23 nt, synthetic construct
  source 1..23: mol_type = other RNA
tctggggttccggcaggttttta

SEQ ID NO: 93721 - RNA, 23 nt, synthetic construct
  source 1..23: mol_type = other RNA
tgccgggcttgtcgtggagtggg

SEQ ID NO: 93722 - RNA, 23 nt, synthetic construct
  source 1..23: mol_type = other RNA
tggcctgagctggacccagtctg

SEQ ID NO: 93723 - RNA, 23 nt, synthetic construct
  source 1..23: mol_type = other RNA
ttcctgcacaccaggccgaagtg

SEQ ID NO: 93724 - RNA, 23 nt, synthetic construct
  source 1..23: mol_type = other RNA
ttggtggctgtaccaagggtgct

SEQ ID NO: 93725 - RNA, 23 nt, synthetic construct
  source 1..23: mol_type = other RNA
tttgcacctcgccagtcactgca

SEQ ID NO: 93726 - RNA, 23 nt, synthetic construct
  source 1..23: mol_type = other RNA
ttcctcctcacaggagtagcagc

SEQ ID NO: 93727 - RNA, 23 nt, synthetic construct
  source 1..23: mol_type = other RNA
tggggccacagggcacgtattcg

SEQ ID NO: 93728 - RNA, 23 nt, synthetic construct
  source 1..23: mol_type = other RNA
tgggcagctgcgtgtagatggag

SEQ ID NO: 93729 - RNA, 23 nt, synthetic construct
  source 1..23: mol_type = other RNA
tgcactgtcctctccgttccaca

SEQ ID NO: 93730 - RNA, 23 nt, synthetic construct
  source 1..23: mol_type = other RNA
ttgcaggtgttgcagtcgaccct

SEQ ID NO: 93731 - RNA, 23 nt, synthetic construct
  source 1..23: mol_type = other RNA
tccaggaagatccccatgtagcg

SEQ ID NO: 93732 - RNA, 23 nt, synthetic construct
  source 1..23: mol_type = other RNA
tcacaggtctggttggcgtattt

SEQ ID NO: 93733 - RNA, 23 nt, synthetic construct
  source 1..23: mol_type = other RNA
tggggcagctgcgtgtagatgga

SEQ ID NO: 93734 - RNA, 23 nt, synthetic construct
  source 1..23: mol_type = other RNA
tctcgtagctctccacgaagagc

SEQ ID NO: 93735 - RNA, 23 nt, synthetic construct
  source 1..23: mol_type = other RNA
tgctgctcacagacggcccctcc

SEQ ID NO: 93736 - RNA, 23 nt, synthetic construct
  source 1..23: mol_type = other RNA
tgctgctcacagacggcccctcc

SEQ ID NO: 93737 - RNA, 23 nt, synthetic construct
  source 1..23: mol_type = other RNA
tgctgctcacagacggcccctcc

SEQ ID NO: 93738 - RNA, 23 nt, synthetic construct
  source 1..23: mol_type = other RNA
tttccaggtgttggcgaaggctg

SEQ ID NO: 93739 - RNA, 23 nt, synthetic construct
  source 1..23: mol_type = other RNA
tctctccacgaagagcttgatgg

SEQ ID NO: 93740 - RNA, 23 nt, synthetic construct
  source 1..23: mol_type = other RNA
ttcgtagctctccacgaagagct

SEQ ID NO: 93741 - RNA, 23 nt, synthetic construct
  source 1..23: mol_type = other RNA
ttggagtcaacctgggagcggca

SEQ ID NO: 93742 - RNA, 23 nt, synthetic construct
  source 1..23: mol_type = other RNA
tggcaggtgtccggagtccgcca

SEQ ID NO: 93743 - RNA, 23 nt, synthetic construct
  source 1..23: mol_type = other RNA
tgcagtgcccactggggttccgg

SEQ ID NO: 93744 - RNA, 23 nt, synthetic construct
  source 1..23: mol_type = other RNA
tggtggtgttgtagatgacgtcc

SEQ ID NO: 93745 - RNA, 23 nt, synthetic construct
  source 1..23: mol_type = other RNA
tggtggtcttttcggttgctgtg

SEQ ID NO: 93746 - RNA, 23 nt, synthetic construct
  source 1..23: mol_type = other RNA
tggaagtccacgtcaaaccactc

SEQ ID NO: 93747 - RNA, 23 nt, synthetic construct
  source 1..23: mol_type = other RNA
tgggaagtccacgtcaaaccact

SEQ ID NO: 93748 - RNA, 23 nt, synthetic construct
  source 1..23: mol_type = other RNA
tgggtagctgtagtccagccact

SEQ ID NO: 93749 - RNA, 23 nt, synthetic construct
  source 1..23: mol_type = other RNA
tgggtagctgtagtccagccact

SEQ ID NO: 93750 - RNA, 23 nt, synthetic construct
  source 1..23: mol_type = other RNA
tgggtagctgtagtccagccact

SEQ ID NO: 93751 - RNA, 23 nt, synthetic construct
  source 1..23: mol_type = other RNA
tgggtagctgtagtccagccact

SEQ ID NO: 93752 - RNA, 23 nt, synthetic construct
  source 1..23: mol_type = other RNA
tgcaggtgcttgttcacgcaggt

SEQ ID NO: 93753 - RNA, 23 nt, synthetic construct
  source 1..23: mol_type = other RNA
tcaagcacgccgttcttgctgaa

SEQ ID NO: 93754 - RNA, 23 nt, synthetic construct
  source 1..23: mol_type = other RNA
taagacagtgacgggtggaacaa

SEQ ID NO: 93755 - RNA, 23 nt, synthetic construct
  source 1..23: mol_type = other RNA
tgctcaggctggggaagacagtg

SEQ ID NO: 93756 - RNA, 23 nt, synthetic construct
  source 1..23: mol_type = other RNA
taggccacaggtctggttggcgt

SEQ ID NO: 93757 - RNA, 23 nt, synthetic construct
  source 1..23: mol_type = other RNA
tctgctccgtgggcccatccaac

SEQ ID NO: 93758 - RNA, 23 nt, synthetic construct
  source 1..23: mol_type = other RNA
tgggtccgggcactgctccgtgg

SEQ ID NO: 93759 - RNA, 23 nt, synthetic construct
  source 1..23: mol_type = other RNA
tcgggtccgggcactgctccgtg

SEQ ID NO: 93760 - RNA, 23 nt, synthetic construct
  source 1..23: mol_type = other RNA
tagggcagcgggtccgggcactg

SEQ ID NO: 93761 - RNA, 23 nt, synthetic construct
  source 1..23: mol_type = other RNA
tggggcagcggcacaggtcctgg

SEQ ID NO: 93762 - RNA, 23 nt, synthetic construct
  source 1..23: mol_type = other RNA
tgcaggtggggcagcggcacagg

SEQ ID NO: 93763 - RNA, 23 nt, synthetic construct
  source 1..23: mol_type = other RNA
tgcaggcagccagagtgcgtgat

SEQ ID NO: 93764 - RNA, 23 nt, synthetic construct
  source 1..23: mol_type = other RNA
ttgccagggcacggcaggtcctg

SEQ ID NO: 93765 - RNA, 23 nt, synthetic construct
  source 1..23: mol_type = other RNA
tccgtccaggctgagcgtcaccg

SEQ ID NO: 93766 - RNA, 23 nt, synthetic construct
  source 1..23: mol_type = other RNA
tgcagctgcgtgtagatggagtt

SEQ ID NO: 93767 - RNA, 23 nt, synthetic construct
  source 1..23: mol_type = other RNA
tggctgccgacaggggcagctgc

SEQ ID NO: 93768 - RNA, 23 nt, synthetic construct
  source 1..23: mol_type = other RNA
tcctgacaaacacctgcatgagt

SEQ ID NO: 93769 - RNA, 23 nt, synthetic construct
  source 1..23: mol_type = other RNA
ttgaagttcccacacaggccgca

SEQ ID NO: 93770 - RNA, 23 nt, synthetic construct
  source 1..23: mol_type = other RNA
tttgaagttcccacacaggccgc

SEQ ID NO: 93771 - RNA, 23 nt, synthetic construct
  source 1..23: mol_type = other RNA
tgttgaagttcccacacaggccg

SEQ ID NO: 93772 - RNA, 23 nt, synthetic construct
  source 1..23: mol_type = other RNA
tctggttctggttgaagttccca

SEQ ID NO: 93773 - RNA, 23 nt, synthetic construct
  source 1..23: mol_type = other RNA
tcctggttctggttgaagttccc

SEQ ID NO: 93774 - RNA, 23 nt, synthetic construct
  source 1..23: mol_type = other RNA
ttccaggtgttggcgaaggctgc

SEQ ID NO: 93775 - RNA, 23 nt, synthetic construct
  source 1..23: mol_type = other RNA
tctgggccttccaggtgttggcg

SEQ ID NO: 93776 - RNA, 23 nt, synthetic construct
  source 1..23: mol_type = other RNA
tcctgggccttccaggtgttggc

SEQ ID NO: 93777 - RNA, 23 nt, synthetic construct
  source 1..23: mol_type = other RNA
tggcgtgcacataggaggacagc

SEQ ID NO: 93778 - RNA, 23 nt, synthetic construct
  source 1..23: mol_type = other RNA
taggcgtgcacataggaggacag

SEQ ID NO: 93779 - RNA, 23 nt, synthetic construct
  source 1..23: mol_type = other RNA
tcaggcgtgcacataggaggaca

SEQ ID NO: 93780 - RNA, 23 nt, synthetic construct
  source 1..23: mol_type = other RNA
tgcacaggcgtgcacataggagg

SEQ ID NO: 93781 - RNA, 23 nt, synthetic construct
  source 1..23: mol_type = other RNA
tggcacaggcgtgcacataggag

SEQ ID NO: 93782 - RNA, 23 nt, synthetic construct
  source 1..23: mol_type = other RNA
tcggcacaggcgtgcacatagga

SEQ ID NO: 93783 - RNA, 23 nt, synthetic construct
  source 1..23: mol_type = other RNA
tgttctgcatgtacttggtgcag

SEQ ID NO: 93784 - RNA, 23 nt, synthetic construct
  source 1..23: mol_type = other RNA
tcagttctgcatgtacttggtgc

SEQ ID NO: 93785 - RNA, 23 nt, synthetic construct
  source 1..23: mol_type = other RNA
tgggcacacaggcgcccgcgtca

SEQ ID NO: 93786 - RNA, 23 nt, synthetic construct
  source 1..23: mol_type = other RNA
tccacgtccagcgtgtggcagct

SEQ ID NO: 93787 - RNA, 23 nt, synthetic construct
  source 1..23: mol_type = other RNA
tgcccacgtccagcgtgtggcag

SEQ ID NO: 93788 - RNA, 23 nt, synthetic construct
  source 1..23: mol_type = other RNA
tctgaaacagcccacgtccagcg

SEQ ID NO: 93789 - RNA, 23 nt, synthetic construct
  source 1..23: mol_type = other RNA
tcacagccggacacgcagtgtgt

SEQ ID NO: 93790 - RNA, 23 nt, synthetic construct
  source 1..23: mol_type = other RNA
tccaggcttgtaggtggcctcgt

SEQ ID NO: 93791 - RNA, 23 nt, synthetic construct
  source 1..23: mol_type = other RNA
tctccaggcttgtaggtggcctc

SEQ ID NO: 93792 - RNA, 23 nt, synthetic construct
  source 1..23: mol_type = other RNA
tcacgcaggtgcccaggcagagc

SEQ ID NO: 93793 - RNA, 23 nt, synthetic construct
  source 1..23: mol_type = other RNA
tcaaaggtgatgaagtggccatc

SEQ ID NO: 93794 - RNA, 23 nt, synthetic construct
  source 1..23: mol_type = other RNA
tgcggaaggtcccgtgggtggtg

SEQ ID NO: 93795 - RNA, 23 nt, synthetic construct
  source 1..23: mol_type = other RNA
tttctcggtgacgatgcggaagg

SEQ ID NO: 93796 - RNA, 23 nt, synthetic construct
  source 1..23: mol_type = other RNA
ttggtcccacaggggatgttctc

SEQ ID NO: 93797 - RNA, 23 nt, synthetic construct
  source 1..23: mol_type = other RNA
ttccacgaagagcttgatggcct

SEQ ID NO: 93798 - RNA, 23 nt, synthetic construct
  source 1..23: mol_type = other RNA
ttctccacgaagagcttgatggc

SEQ ID NO: 93799 - RNA, 23 nt, synthetic construct
  source 1..23: mol_type = other RNA
tcgtagctctccacgaagagctt

SEQ ID NO: 93800 - RNA, 23 nt, synthetic construct
  source 1..23: mol_type = other RNA
tatcagctcgtagctctccacga

SEQ ID NO: 93801 - RNA, 23 nt, synthetic construct
  source 1..23: mol_type = other RNA
tggtctcgatgaccaggaagatc

SEQ ID NO: 93802 - RNA, 23 nt, synthetic construct
  source 1..23: mol_type = other RNA
ttgtagtcctggtgcagtcggat

SEQ ID NO: 93803 - RNA, 23 nt, synthetic construct
  source 1..23: mol_type = other RNA
tcagaccctgcccttgtagtcct

SEQ ID NO: 93804 - RNA, 23 nt, synthetic construct
  source 1..23: mol_type = other RNA
tggcaaagtcattgatggcattg

SEQ ID NO: 93805 - RNA, 23 nt, synthetic construct
  source 1..23: mol_type = other RNA
tagtacttggtggagtcaacctg

SEQ ID NO: 93806 - RNA, 23 nt, synthetic construct
  source 1..23: mol_type = other RNA
tctgggcgtaggcagccacagcc

SEQ ID NO: 93807 - RNA, 23 nt, synthetic construct
  source 1..23: mol_type = other RNA
tcctgggcgtaggcagccacagc

SEQ ID NO: 93808 - RNA, 23 nt, synthetic construct
  source 1..23: mol_type = other RNA
tcacacaggcccgcgtcgtggca

SEQ ID NO: 93809 - RNA, 23 nt, synthetic construct
  source 1..23: mol_type = other RNA
tttgtagaagtcacagaacaagg

SEQ ID NO: 93810 - RNA, 23 nt, synthetic construct
  source 1..23: mol_type = other RNA
tctggtagtgccactcacagccc

SEQ ID NO: 93811 - RNA, 23 nt, synthetic construct
  source 1..23: mol_type = other RNA
tgggttccggcaggtttttaggc

SEQ ID NO: 93812 - RNA, 23 nt, synthetic construct
  source 1..23: mol_type = other RNA
tggggttccggcaggtttttagg

SEQ ID NO: 93813 - RNA, 23 nt, synthetic construct
  source 1..23: mol_type = other RNA
tctgggccacgcacttcatctgg

SEQ ID NO: 93814 - RNA, 23 nt, synthetic construct
  source 1..23: mol_type = other RNA
ttgtcctcataggtgcaggtgca

SEQ ID NO: 93815 - RNA, 23 nt, synthetic construct
  source 1..23: mol_type = other RNA
tggctggcaggtggtggtacctg

SEQ ID NO: 93816 - RNA, 23 nt, synthetic construct
  source 1..23: mol_type = other RNA
tctgtccactgacaccggggctg

SEQ ID NO: 93817 - RNA, 23 nt, synthetic construct
  source 1..23: mol_type = other RNA
tccactctgtccactgacaccgg

SEQ ID NO: 93818 - RNA, 23 nt, synthetic construct
  source 1..23: mol_type = other RNA
tgacttggggtagtcctcatcaa

SEQ ID NO: 93819 - RNA, 23 nt, synthetic construct
  source 1..23: mol_type = other RNA
ttcccctccaagttgttcagact

SEQ ID NO: 93820 - RNA, 23 nt, synthetic construct
  source 1..23: mol_type = other RNA
ttcttatcgtaggactcaacgtc

SEQ ID NO: 93821 - RNA, 23 nt, synthetic construct
  source 1..23: mol_type = other RNA
tactctatgtccttaggctgctg

SEQ ID NO: 93822 - RNA, 23 nt, synthetic construct
  source 1..23: mol_type = other RNA
tctctgtccactcacacttcggt

SEQ ID NO: 93823 - RNA, 23 nt, synthetic construct
  source 1..23: mol_type = other RNA
tactctgtccactcacacttcgg

SEQ ID NO: 93824 - RNA, 23 nt, synthetic construct
  source 1..23: mol_type = other RNA
tgtgtgggaagtcaccgtggaag

SEQ ID NO: 93825 - RNA, 23 nt, synthetic construct
  source 1..23: mol_type = other RNA
tgcagggggacaccaggctgggc

SEQ ID NO: 93826 - RNA, 23 nt, synthetic construct
  source 1..23: mol_type = other RNA
tccacgacctggcccaactcccg

SEQ ID NO: 93827 - RNA, 23 nt, synthetic construct
  source 1..23: mol_type = other RNA
taagcacatcttgaacttcccca

SEQ ID NO: 93828 - RNA, 23 nt, synthetic construct
  source 1..23: mol_type = other RNA
tgcagggggacaccaggctgggc

SEQ ID NO: 93829 - RNA, 23 nt, synthetic construct
  source 1..23: mol_type = other RNA
tccacgacctggcccaactcccg

SEQ ID NO: 93830 - RNA, 23 nt, synthetic construct
  source 1..23: mol_type = other RNA
taagcacatcttgaacttcccca

SEQ ID NO: 93831 - RNA, 23 nt, synthetic construct
  source 1..23: mol_type = other RNA
tgtgtgggaagtcaccgtggaag

SEQ ID NO: 93832 - RNA, 23 nt, synthetic construct
  source 1..23: mol_type = other RNA
tgcagggggacaccaggctgggc

SEQ ID NO: 93833 - RNA, 23 nt, synthetic construct
  source 1..23: mol_type = other RNA
tccacgacctggcccaactcccg

SEQ ID NO: 93834 - RNA, 23 nt, synthetic construct
  source 1..23: mol_type = other RNA
taagcacatcttgaacttcccca

SEQ ID NO: 93835 - RNA, 23 nt, synthetic construct
  source 1..23: mol_type = other RNA
tccacgacctggcccaactcccc

SEQ ID NO: 93836 - RNA, 23 nt, synthetic construct
  source 1..23: mol_type = other RNA
taagcacatcttgaacttcccca

SEQ ID NO: 93837 - RNA, 23 nt, synthetic construct
  source 1..23: mol_type = other RNA
taggtctcattcacctgccggag

SEQ ID NO: 93838 - RNA, 23 nt, synthetic construct
  source 1..23: mol_type = other RNA
tggtccaggtctcattcacctgc

SEQ ID NO: 93839 - RNA, 23 nt, synthetic construct
  source 1..23: mol_type = other RNA
tagggtccaggtctcattcacct

SEQ ID NO: 93840 - RNA, 23 nt, synthetic construct
  source 1..23: mol_type = other RNA
tcagggtccaggtctcattcacc

SEQ ID NO: 93841 - RNA, 23 nt, synthetic construct
  source 1..23: mol_type = other RNA
tcaggtgcttgttcacgcaggtg

SEQ ID NO: 93842 - RNA, 23 nt, synthetic construct
  source 1..23: mol_type = other RNA
tgatgggcaggtgcttgttcacg

SEQ ID NO: 93843 - RNA, 23 nt, synthetic construct
  source 1..23: mol_type = other RNA
tggacataggtgcagttgccccg

SEQ ID NO: 93844 - RNA, 23 nt, synthetic construct
  source 1..23: mol_type = other RNA
taggacataggtgcagttgcccc

SEQ ID NO: 93845 - RNA, 23 nt, synthetic construct
  source 1..23: mol_type = other RNA
ttctctcatgaggacataggtgc

SEQ ID NO: 93846 - RNA, 23 nt, synthetic construct
  source 1..23: mol_type = other RNA
tggctgtagggcagccgggcctg

SEQ ID NO: 93847 - RNA, 23 nt, synthetic construct
  source 1..23: mol_type = other RNA
taggctgtagggcagccgggcct

SEQ ID NO: 93848 - RNA, 23 nt, synthetic construct
  source 1..23: mol_type = other RNA
tgccctcggtgttgttgtggaag

SEQ ID NO: 93849 - RNA, 23 nt, synthetic construct
  source 1..23: mol_type = other RNA
tgttgttggtgcaggtgccgcac

SEQ ID NO: 93850 - RNA, 23 nt, synthetic construct
  source 1..23: mol_type = other RNA
tcctctggttgttggtgcaggtg

SEQ ID NO: 93851 - RNA, 23 nt, synthetic construct
  source 1..23: mol_type = other RNA
tgtcactgcacactccccgggcg

SEQ ID NO: 93852 - RNA, 23 nt, synthetic construct
  source 1..23: mol_type = other RNA
tcacacgcaggactggcagttgc

SEQ ID NO: 93853 - RNA, 23 nt, synthetic construct
  source 1..23: mol_type = other RNA
tgcagccggttttcctgaggctc

SEQ ID NO: 93854 - RNA, 23 nt, synthetic construct
  source 1..23: mol_type = other RNA
taggtgcactggtgctgcatggc

SEQ ID NO: 93855 - RNA, 23 nt, synthetic construct
  source 1..23: mol_type = other RNA
tgggcaccgtctcctcgtggacc

SEQ ID NO: 93856 - RNA, 23 nt, synthetic construct
  source 1..23: mol_type = other RNA
tcacataggaggacagcgcggcg

SEQ ID NO: 93857 - RNA, 23 nt, synthetic construct
  source 1..23: mol_type = other RNA
tgccgtccaggctgagcgtcacc

SEQ ID NO: 93858 - RNA, 23 nt, synthetic construct
  source 1..23: mol_type = other RNA
tctctcatgaggacataggtgca

SEQ ID NO: 93859 - RNA, 23 nt, synthetic construct
  source 1..23: mol_type = other RNA
tggtgccgcactggccctcggtg

SEQ ID NO: 93860 - RNA, 23 nt, synthetic construct
  source 1..23: mol_type = other RNA
tagttcccgcacaggccgcagac

SEQ ID NO: 93861 - RNA, 23 nt, synthetic construct
  source 1..23: mol_type = other RNA
taggtgccgcactggccctcggt

SEQ ID NO: 93862 - RNA, 23 nt, synthetic construct
  source 1..23: mol_type = other RNA
tgtgcagaaacactcgcagtcgc

SEQ ID NO: 93863 - RNA, 23 nt, synthetic construct
  source 1..23: mol_type = other RNA
tcaggtgccgcactggccctcgg

SEQ ID NO: 93864 - RNA, 23 nt, synthetic construct
  source 1..23: mol_type = other RNA
tcgtcgaagttcccgcacaggcc

SEQ ID NO: 93865 - RNA, 23 nt, synthetic construct
  source 1..23: mol_type = other RNA
tgaagttcccgcacaggccgcag

SEQ ID NO: 93866 - RNA, 23 nt, synthetic construct
  source 1..23: mol_type = other RNA
tccacacaggccgcacatctggc

SEQ ID NO: 93867 - RNA, 23 nt, synthetic construct
  source 1..23: mol_type = other RNA
tcgaagttcccgcacaggccgca

SEQ ID NO: 93868 - RNA, 23 nt, synthetic construct
  source 1..23: mol_type = other RNA
ttcgaagttcccgcacaggccgc

SEQ ID NO: 93869 - RNA, 23 nt, synthetic construct
  source 1..23: mol_type = other RNA
tcagccgtgcagaaacactcgca

SEQ ID NO: 93870 - RNA, 23 nt, synthetic construct
  source 1..23: mol_type = other RNA
tccacagccgtgcagaaacactc

SEQ ID NO: 93871 - RNA, 23 nt, synthetic construct
  source 1..23: mol_type = other RNA
tgcgtaggcagccacagccgtgc

SEQ ID NO: 93872 - RNA, 23 nt, synthetic construct
  source 1..23: mol_type = other RNA
tggacacacacaggcccgcgtcg

SEQ ID NO: 93873 - RNA, 23 nt, synthetic construct
  source 1..23: mol_type = other RNA
tgccccgcagggctggtagtgcc

SEQ ID NO: 93874 - RNA, 23 nt, synthetic construct
  source 1..23: mol_type = other RNA
tgcaggtgccgcactggccctcg

SEQ ID NO: 93875 - RNA, 23 nt, synthetic construct
  source 1..23: mol_type = other RNA
ttgcaggtgccgcactggccctc

SEQ ID NO: 93876 - RNA, 23 nt, synthetic construct
  source 1..23: mol_type = other RNA
tgttggtgcaggtgccgcactgg

SEQ ID NO: 93877 - RNA, 23 nt, synthetic construct
  source 1..23: mol_type = other RNA
tgcacctcgccagtcactgcaca

SEQ ID NO: 93878 - RNA, 23 nt, synthetic construct
  source 1..23: mol_type = other RNA
ttgcacctcgccagtcactgcac

SEQ ID NO: 93879 - RNA, 23 nt, synthetic construct
  source 1..23: mol_type = other RNA
tccggaatttggtcaaacaggat

SEQ ID NO: 93880 - RNA, 23 nt, synthetic construct
  source 1..23: mol_type = other RNA
tactggggctcacagcccgtggt

SEQ ID NO: 93881 - RNA, 23 nt, synthetic construct
  source 1..23: mol_type = other RNA
tactggggctcacagcccgtggt

SEQ ID NO: 93882 - RNA, 23 nt, synthetic construct
  source 1..23: mol_type = other RNA
tcttttcggttgctgtggtctgg

SEQ ID NO: 93883 - RNA, 23 nt, synthetic construct
  source 1..23: mol_type = other RNA
ttatctgggggatgtcagtcctt

SEQ ID NO: 93884 - RNA, 23 nt, synthetic construct
  source 1..23: mol_type = other RNA
tccaggacatgccacagccttcc

SEQ ID NO: 93885 - RNA, 23 nt, synthetic construct
  source 1..23: mol_type = other RNA
tctctatgtccttaggctgctgg

SEQ ID NO: 93886 - RNA, 23 nt, synthetic construct
  source 1..23: mol_type = other RNA
ttccgtgggcccatccaacttct

SEQ ID NO: 93887 - RNA, 23 nt, synthetic construct
  source 1..23: mol_type = other RNA
tctgacaaacacctgcatgagtg

SEQ ID NO: 93888 - RNA, 23 nt, synthetic construct
  source 1..23: mol_type = other RNA
tgtggagtcaacctgggagcggc

SEQ ID NO: 93889 - RNA, 23 nt, synthetic construct
  source 1..23: mol_type = other RNA
tgtcttttcggttgctgtggtct

SEQ ID NO: 93890 - RNA, 23 nt, synthetic construct
  source 1..23: mol_type = other RNA
tcaaaccactctgtccactgaca

SEQ ID NO: 93891 - RNA, 23 nt, synthetic construct
  source 1..23: mol_type = other RNA
tggcacactggggctcacagccc

SEQ ID NO: 93892 - RNA, 23 nt, synthetic construct
  source 1..23: mol_type = other RNA
tggcacactggggctcacagccc

SEQ ID NO: 93893 - RNA, 23 nt, synthetic construct
  source 1..23: mol_type = other RNA
tggcacactggggctcacagccc

SEQ ID NO: 93894 - RNA, 23 nt, synthetic construct
  source 1..23: mol_type = other RNA
tggcacactggggctcacagccc

SEQ ID NO: 93895 - RNA, 23 nt, synthetic construct
  source 1..23: mol_type = other RNA
tgacaccggggctggcaggtggt

SEQ ID NO: 93896 - RNA, 23 nt, synthetic construct
  source 1..23: mol_type = other RNA
tgtcctcattgaagaagggctgg

SEQ ID NO: 93897 - RNA, 23 nt, synthetic construct
  source 1..23: mol_type = other RNA
ttggtgcagacgccgtccctcca

SEQ ID NO: 93898 - RNA, 23 nt, synthetic construct
  source 1..23: mol_type = other RNA
tcgacctggcccaactcccgcag

SEQ ID NO: 93899 - RNA, 23 nt, synthetic construct
  source 1..23: mol_type = other RNA
tcgacctggcccaactcccgcag

SEQ ID NO: 93900 - RNA, 23 nt, synthetic construct
  source 1..23: mol_type = other RNA
tcgacctggcccaactcccgcag

SEQ ID NO: 93901 - RNA, 23 nt, synthetic construct
  source 1..23: mol_type = other RNA
tttggtgcagacgccgtccctcc

SEQ ID NO: 93902 - RNA, 23 nt, synthetic construct
  source 1..23: mol_type = other RNA
tcctgtcctcataggtgcaggtg

SEQ ID NO: 93903 - RNA, 23 nt, synthetic construct
  source 1..23: mol_type = other RNA
tgtcagcactgtgggggtgtggg

SEQ ID NO: 93904 - RNA, 23 nt, synthetic construct
  source 1..23: mol_type = other RNA
tgtcagcactgtgggggtgtggg

SEQ ID NO: 93905 - RNA, 23 nt, synthetic construct
  source 1..23: mol_type = other RNA
tgcaggggcactgcccgaggggc

SEQ ID NO: 93906 - RNA, 23 nt, synthetic construct
  source 1..23: mol_type = other RNA
ttccaagttgttcagacttgggg

SEQ ID NO: 93907 - RNA, 23 nt, synthetic construct
  source 1..23: mol_type = other RNA
taagctctcggcctggcactcta

SEQ ID NO: 93908 - RNA, 23 nt, synthetic construct
  source 1..23: mol_type = other RNA
tgaagctctcggcctggcactct

SEQ ID NO: 93909 - RNA, 23 nt, synthetic construct
  source 1..23: mol_type = other RNA
tatggggtagctgtagtccagcc

SEQ ID NO: 93910 - RNA, 23 nt, synthetic construct
  source 1..23: mol_type = other RNA
tatggggtagctgtagtccagcc

SEQ ID NO: 93911 - RNA, 23 nt, synthetic construct
  source 1..23: mol_type = other RNA
tatggggtagctgtagtccagcc

SEQ ID NO: 93912 - RNA, 23 nt, synthetic construct
  source 1..23: mol_type = other RNA
tatggggtagctgtagtccagcc

SEQ ID NO: 93913 - RNA, 23 nt, synthetic construct
  source 1..23: mol_type = other RNA
ttagatggagttgaggaacacgc

SEQ ID NO: 93914 - RNA, 23 nt, synthetic construct
  source 1..23: mol_type = other RNA
tgaagctcgagggtgtgaacagg

SEQ ID NO: 93915 - RNA, 23 nt, synthetic construct
  source 1..23: mol_type = other RNA
tctggcactctatgtccttaggc

SEQ ID NO: 93916 - RNA, 23 nt, synthetic construct
  source 1..23: mol_type = other RNA
tgcacactggggctcacagccca

SEQ ID NO: 93917 - RNA, 23 nt, synthetic construct
  source 1..23: mol_type = other RNA
tgcacactggggctcacagccca

SEQ ID NO: 93918 - RNA, 23 nt, synthetic construct
  source 1..23: mol_type = other RNA
tgcacactggggctcacagcccg

SEQ ID NO: 93919 - RNA, 23 nt, synthetic construct
  source 1..23: mol_type = other RNA
tgcacactggggctcacagcccg

SEQ ID NO: 93920 - RNA, 23 nt, synthetic construct
  source 1..23: mol_type = other RNA
ttgtcctctccgttccacaggaa

SEQ ID NO: 93921 - RNA, 23 nt, synthetic construct
  source 1..23: mol_type = other RNA
tggctgtaaggcagctcctcccg

SEQ ID NO: 93922 - RNA, 23 nt, synthetic construct
  source 1..23: mol_type = other RNA
tagccccgggggacagacacagc

SEQ ID NO: 93923 - RNA, 23 nt, synthetic construct
  source 1..23: mol_type = other RNA
tcggagtccgccaggacacacac

SEQ ID NO: 93924 - RNA, 23 nt, synthetic construct
  source 1..23: mol_type = other RNA
ttggaagggcttggggttgatga

SEQ ID NO: 93925 - RNA, 23 nt, synthetic construct
  source 1..23: mol_type = other RNA
tagccacagccgtgcagaaacac

SEQ ID NO: 93926 - RNA, 23 nt, synthetic construct
  source 1..23: mol_type = other RNA
tcaggcaggtccaccaggcagtg

SEQ ID NO: 93927 - RNA, 23 nt, synthetic construct
  source 1..23: mol_type = other RNA
tcaggtctcattcacctgccgga

SEQ ID NO: 93928 - RNA, 23 nt, synthetic construct
  source 1..23: mol_type = other RNA
tgcccggggcctggtcacggtta

SEQ ID NO: 93929 - RNA, 23 nt, synthetic construct
  source 1..23: mol_type = other RNA
tcctcctcacaggagtagcagca

SEQ ID NO: 93930 - RNA, 23 nt, synthetic construct
  source 1..23: mol_type = other RNA
tcagggcactgtcctctccgttc

SEQ ID NO: 93931 - RNA, 23 nt, synthetic construct
  source 1..23: mol_type = other RNA
ttgcctggggggcagaagcagcc

SEQ ID NO: 93932 - RNA, 23 nt, synthetic construct
  source 1..23: mol_type = other RNA
tggcactgcccgaggggcaggca

SEQ ID NO: 93933 - RNA, 23 nt, synthetic construct
  source 1..23: mol_type = other RNA
tagcaggtgccagggcacggcag

SEQ ID NO: 93934 - RNA, 23 nt, synthetic construct
  source 1..23: mol_type = other RNA
tacaggcgtgcacataggaggac

SEQ ID NO: 93935 - RNA, 23 nt, synthetic construct
  source 1..23: mol_type = other RNA
tcacaggcgtgcacataggagga

SEQ ID NO: 93936 - RNA, 23 nt, synthetic construct
  source 1..23: mol_type = other RNA
tgttgtagaagtcacagaacaag

SEQ ID NO: 93937 - RNA, 23 nt, synthetic construct
  source 1..23: mol_type = other RNA
ttggtagtgccactcacagcccc

SEQ ID NO: 93938 - RNA, 23 nt, synthetic construct
  source 1..23: mol_type = other RNA
tggaggggccacagggcacgtat

SEQ ID NO: 93939 - RNA, 23 nt, synthetic construct
  source 1..23: mol_type = other RNA
tccaggcacactggggctcacag

SEQ ID NO: 93940 - RNA, 23 nt, synthetic construct
  source 1..23: mol_type = other RNA
tctcccgcagggggacaccaggc

SEQ ID NO: 93941 - RNA, 23 nt, synthetic construct
  source 1..23: mol_type = other RNA
tccaggcacactggggctcacag

SEQ ID NO: 93942 - RNA, 23 nt, synthetic construct
  source 1..23: mol_type = other RNA
tctcccgcagggggacaccaggc

SEQ ID NO: 93943 - RNA, 23 nt, synthetic construct
  source 1..23: mol_type = other RNA
tccaggcacactggggctcacag

SEQ ID NO: 93944 - RNA, 23 nt, synthetic construct
  source 1..23: mol_type = other RNA
tctcccgcagggggacaccaggc

SEQ ID NO: 93945 - RNA, 23 nt, synthetic construct
  source 1..23: mol_type = other RNA
tccaggcacactggggctcacag

SEQ ID NO: 93946 - RNA, 23 nt, synthetic construct
  source 1..23: mol_type = other RNA
tgcagaagcagccctccgccatc

SEQ ID NO: 93947 - RNA, 23 nt, synthetic construct
  source 1..23: mol_type = other RNA
taggagtagcagcagccggtttt

SEQ ID NO: 93948 - RNA, 23 nt, synthetic construct
  source 1..23: mol_type = other RNA
taccgtctcctcgtggacccgcc

SEQ ID NO: 93949 - RNA, 23 nt, synthetic construct
  source 1..23: mol_type = other RNA
tcaccgtctcctcgtggacccgc

SEQ ID NO: 93950 - RNA, 23 nt, synthetic construct
  source 1..23: mol_type = other RNA
tggatggctgtaaagctggtagc

SEQ ID NO: 93951 - RNA, 23 nt, synthetic construct
  source 1..23: mol_type = other RNA
tggatggctgtaaagctggtagc

SEQ ID NO: 93952 - RNA, 23 nt, synthetic construct
  source 1..23: mol_type = other RNA
tggatggctgtaaagctggtagc

SEQ ID NO: 93953 - RNA, 23 nt, synthetic construct
  source 1..23: mol_type = other RNA
tggggtgtgggaagtcaccgtgg

SEQ ID NO: 93954 - RNA, 23 nt, synthetic construct
  source 1..23: mol_type = other RNA
tcacatttcttggacagaacgta

SEQ ID NO: 93955 - RNA, 23 nt, synthetic construct
  source 1..23: mol_type = other RNA
taggggcagctgcgtgtagatgg

SEQ ID NO: 93956 - RNA, 23 nt, synthetic construct
  source 1..23: mol_type = other RNA
ttctgcatgtacttggtgcagac

SEQ ID NO: 93957 - RNA, 23 nt, synthetic construct
  source 1..23: mol_type = other RNA
tgcccaactcccgcagggggaca

SEQ ID NO: 93958 - RNA, 23 nt, synthetic construct
  source 1..23: mol_type = other RNA
tgcccaactcccgcagggggaca

SEQ ID NO: 93959 - RNA, 23 nt, synthetic construct
  source 1..23: mol_type = other RNA
tgcccaactcccgcagggggaca

SEQ ID NO: 93960 - RNA, 23 nt, synthetic construct
  source 1..23: mol_type = other RNA
tgtgcaggggcactgcccgaggg

SEQ ID NO: 93961 - RNA, 23 nt, synthetic construct
  source 1..23: mol_type = other RNA
ttgtagatggagttgaggaacac

SEQ ID NO: 93962 - RNA, 23 nt, synthetic construct
  source 1..23: mol_type = other RNA
tctgtcctcataggtgcaggtgc

SEQ ID NO: 93963 - RNA, 23 nt, synthetic construct
  source 1..23: mol_type = other RNA
tgctggggaagacagtgacgggt

SEQ ID NO: 93964 - RNA, 23 nt, synthetic construct
  source 1..23: mol_type = other RNA
tggagtcaacctgggagcggcag

SEQ ID NO: 93965 - RNA, 23 nt, synthetic construct
  source 1..23: mol_type = other RNA
tccacactgggccacgcacttca

SEQ ID NO: 93966 - RNA, 23 nt, synthetic construct
  source 1..23: mol_type = other RNA
tagggagtagagaagtgggagct

SEQ ID NO: 93967 - RNA, 23 nt, synthetic construct
  source 1..23: mol_type = other RNA
tggtgcagacgccgtccctccag

SEQ ID NO: 93968 - RNA, 23 nt, synthetic construct
  source 1..23: mol_type = other RNA
ttcagcactgtgggggtgtgggt

SEQ ID NO: 93969 - RNA, 23 nt, synthetic construct
  source 1..23: mol_type = other RNA
ttcagcactgtgggggtgtgggt

SEQ ID NO: 93970 - RNA, 23 nt, synthetic construct
  source 1..23: mol_type = other RNA
tcacctggccaccgtgcagttct

SEQ ID NO: 93971 - RNA, 23 nt, synthetic construct
  source 1..23: mol_type = other RNA
tcaccgttgggtcctgggtgtcc

SEQ ID NO: 93972 - RNA, 23 nt, synthetic construct
  source 1..23: mol_type = other RNA
tcgtgagtattccacaaaggtgg

SEQ ID NO: 93973 - RNA, 23 nt, synthetic construct
  source 1..23: mol_type = other RNA
tggggccgatgtggggctgctgg

SEQ ID NO: 93974 - RNA, 23 nt, synthetic construct
  source 1..23: mol_type = other RNA
tggggccgatgtggggctgctgg

SEQ ID NO: 93975 - RNA, 23 nt, synthetic construct
  source 1..23: mol_type = other RNA
tggggccgatgtggggctgctgg

SEQ ID NO: 93976 - RNA, 23 nt, synthetic construct
  source 1..23: mol_type = other RNA
tggccgggcttgtcgtggagtgg

SEQ ID NO: 93977 - RNA, 23 nt, synthetic construct
  source 1..23: mol_type = other RNA
tctctcggcctggcactctatgt

SEQ ID NO: 93978 - RNA, 23 nt, synthetic construct
  source 1..23: mol_type = other RNA
tcaggaagatccccatgtagcgt

SEQ ID NO: 93979 - RNA, 23 nt, synthetic construct
  source 1..23: mol_type = other RNA
ttctgtccactgacaccggggct

SEQ ID NO: 93980 - RNA, 23 nt, synthetic construct
  source 1..23: mol_type = other RNA
tcaggttcccaaactggagcggg

SEQ ID NO: 93981 - RNA, 23 nt, synthetic construct
  source 1..23: mol_type = other RNA
tcaggtgccagggcacggcaggt

SEQ ID NO: 93982 - RNA, 23 nt, synthetic construct
  source 1..23: mol_type = other RNA
tcttggggcagttctgcatgtac

SEQ ID NO: 93983 - RNA, 23 nt, synthetic construct
  source 1..23: mol_type = other RNA
tagccggtggctgcactcccacc

SEQ ID NO: 93984 - RNA, 23 nt, synthetic construct
  source 1..23: mol_type = other RNA
tccctagggcagaggagggagtc

SEQ ID NO: 93985 - RNA, 23 nt, synthetic construct
  source 1..23: mol_type = other RNA
tccctagggcagaggagggagtc

SEQ ID NO: 93986 - RNA, 23 nt, synthetic construct
  source 1..23: mol_type = other RNA
tccctagggcagaggagggagtc

SEQ ID NO: 93987 - RNA, 23 nt, synthetic construct
  source 1..23: mol_type = other RNA
tccctagggcagaggagggagtc

SEQ ID NO: 93988 - RNA, 23 nt, synthetic construct
  source 1..23: mol_type = other RNA
tcagggagtagagaagtgggagc

SEQ ID NO: 93989 - RNA, 23 nt, synthetic construct
  source 1..23: mol_type = other RNA
tacaggagtcctcctcacaggag

SEQ ID NO: 93990 - RNA, 23 nt, synthetic construct
  source 1..23: mol_type = other RNA
ttgcaggggcactgcccgagggg

SEQ ID NO: 93991 - RNA, 23 nt, synthetic construct
  source 1..23: mol_type = other RNA
tggccacaggtctggttggcgta

SEQ ID NO: 93992 - RNA, 23 nt, synthetic construct
  source 1..23: mol_type = other RNA
tgccacccctgggacagtgggtt

SEQ ID NO: 93993 - RNA, 23 nt, synthetic construct
  source 1..23: mol_type = other RNA
tgcagttctgcatgtacttggtg

SEQ ID NO: 93994 - RNA, 23 nt, synthetic construct
  source 1..23: mol_type = other RNA
taacagcccacgtccagcgtgtg

SEQ ID NO: 93995 - RNA, 23 nt, synthetic construct
  source 1..23: mol_type = other RNA
tgggtaggcacagcaggctccgt

SEQ ID NO: 93996 - RNA, 23 nt, synthetic construct
  source 1..23: mol_type = other RNA
tgcactgtgggggtgtgggtggt

SEQ ID NO: 93997 - RNA, 23 nt, synthetic construct
  source 1..23: mol_type = other RNA
tgcactgtgggggtgtgggtggt

SEQ ID NO: 93998 - RNA, 23 nt, synthetic construct
  source 1..23: mol_type = other RNA
tttccacgacctggcccaactcc

SEQ ID NO: 93999 - RNA, 23 nt, synthetic construct
  source 1..23: mol_type = other RNA
tttccacgacctggcccaactcc

SEQ ID NO: 94000 - RNA, 23 nt, synthetic construct
  source 1..23: mol_type = other RNA
tttccacgacctggcccaactcc

SEQ ID NO: 94001 - RNA, 23 nt, synthetic construct
  source 1..23: mol_type = other RNA
tttccacgacctggcccaactcc

SEQ ID NO: 94002 - RNA, 23 nt, synthetic construct
  source 1..23: mol_type = other RNA
ttgcagatgcactcgcactcata

SEQ ID NO: 94003 - RNA, 23 nt, synthetic construct
  source 1..23: mol_type = other RNA
tcacaggcgcccgcgtcattgag

SEQ ID NO: 94004 - RNA, 23 nt, synthetic construct
  source 1..23: mol_type = other RNA
tggccccccgcgtgggcgcactg

SEQ ID NO: 94005 - RNA, 23 nt, synthetic construct
  source 1..23: mol_type = other RNA
tcagttcgagtggaagggcttgg

SEQ ID NO: 94006 - RNA, 23 nt, synthetic construct
  source 1..23: mol_type = other RNA
tcaggtgcagccgtccacaggca

SEQ ID NO: 94007 - RNA, 23 nt, synthetic construct
  source 1..23: mol_type = other RNA
tgtcaaaggtggaatagtgggag

SEQ ID NO: 94008 - RNA, 23 nt, synthetic construct
  source 1..23: mol_type = other RNA
tggttcagggggctcaggctggg

SEQ ID NO: 94009 - RNA, 23 nt, synthetic construct
  source 1..23: mol_type = other RNA
tgcaggtgcagccgtccacaggc

SEQ ID NO: 94010 - RNA, 23 nt, synthetic construct
  source 1..23: mol_type = other RNA
tggtggtcccacaggggatgttc

SEQ ID NO: 94011 - RNA, 23 nt, synthetic construct
  source 1..23: mol_type = other RNA
ttcatgaggacataggtgcagtt

SEQ ID NO: 94012 - RNA, 23 nt, synthetic construct
  source 1..23: mol_type = other RNA
tcttgctgaaaccgctgctcacc

SEQ ID NO: 94013 - RNA, 23 nt, synthetic construct
  source 1..23: mol_type = other RNA
taagaggctgtagggcagccggg

SEQ ID NO: 94014 - RNA, 23 nt, synthetic construct
  source 1..23: mol_type = other RNA
tcatgaggacataggtgcagttg

SEQ ID NO: 94015 - RNA, 23 nt, synthetic construct
  source 1..23: mol_type = other RNA
tgggcagaagcagccgtccacac

SEQ ID NO: 94016 - RNA, 23 nt, synthetic construct
  source 1..23: mol_type = other RNA
tactgcccgaggggcaggcagcc

SEQ ID NO: 94017 - RNA, 23 nt, synthetic construct
  source 1..23: mol_type = other RNA
tgcacatctggccctggtgggcg

SEQ ID NO: 94018 - RNA, 23 nt, synthetic construct
  source 1..23: mol_type = other RNA
taaacagcccacgtccagcgtgt

SEQ ID NO: 94019 - RNA, 23 nt, synthetic construct
  source 1..23: mol_type = other RNA
taaaggtgatgaagtggccatcc

SEQ ID NO: 94020 - RNA, 23 nt, synthetic construct
  source 1..23: mol_type = other RNA
tgcaggtggtgccggtggtccca

SEQ ID NO: 94021 - RNA, 23 nt, synthetic construct
  source 1..23: mol_type = other RNA
tcttccaggccaggcaggtccac

SEQ ID NO: 94022 - RNA, 23 nt, synthetic construct
  source 1..23: mol_type = other RNA
tgcctcaaggctgtgagcgcact

SEQ ID NO: 94023 - RNA, 23 nt, synthetic construct
  source 1..23: mol_type = other RNA
tggtgcaggcctcaaggctgtga

SEQ ID NO: 94024 - RNA, 23 nt, synthetic construct
  source 1..23: mol_type = other RNA
tcagctggaccagcggcagacct

SEQ ID NO: 94025 - RNA, 23 nt, synthetic construct
  source 1..23: mol_type = other RNA
tgcacagcaggctccgtgctggc

SEQ ID NO: 94026 - RNA, 23 nt, synthetic construct
  source 1..23: mol_type = other RNA
tgctctcggcctggcactctatg

SEQ ID NO: 94027 - RNA, 23 nt, synthetic construct
  source 1..23: mol_type = other RNA
tctgctgggcagcagggtcgagg

SEQ ID NO: 94028 - RNA, 23 nt, synthetic construct
  source 1..23: mol_type = other RNA
taccaggcacactggggctcaca

SEQ ID NO: 94029 - RNA, 23 nt, synthetic construct
  source 1..23: mol_type = other RNA
tccggagtggaggagggcatggc

SEQ ID NO: 94030 - RNA, 23 nt, synthetic construct
  source 1..23: mol_type = other RNA
tctgctgggcagcagggtcgagg

SEQ ID NO: 94031 - RNA, 23 nt, synthetic construct
  source 1..23: mol_type = other RNA
taccaggcacactggggctcaca

SEQ ID NO: 94032 - RNA, 23 nt, synthetic construct
  source 1..23: mol_type = other RNA
tctgctgggcagcagggtcgagg

SEQ ID NO: 94033 - RNA, 23 nt, synthetic construct
  source 1..23: mol_type = other RNA
taccaggcacactggggctcaca

SEQ ID NO: 94034 - RNA, 23 nt, synthetic construct
  source 1..23: mol_type = other RNA
tctgctgggcagcagggtcgagg

SEQ ID NO: 94035 - RNA, 23 nt, synthetic construct
  source 1..23: mol_type = other RNA
taccaggcacactggggctcaca

SEQ ID NO: 94036 - RNA, 23 nt, synthetic construct
  source 1..23: mol_type = other RNA
tccggagtggaggagggcatggc

SEQ ID NO: 94037 - RNA, 23 nt, synthetic construct
  source 1..23: mol_type = other RNA
tccaaatgccctgcagaagcagg

SEQ ID NO: 94038 - RNA, 23 nt, synthetic construct
  source 1..23: mol_type = other RNA
tcagtcactgcacactccccggg

SEQ ID NO: 94039 - RNA, 23 nt, synthetic construct
  source 1..23: mol_type = other RNA
taggatgcaggctgtggggtcag

SEQ ID NO: 94040 - RNA, 23 nt, synthetic construct
  source 1..23: mol_type = other RNA
tgcacaggccgcagaccctgccc

SEQ ID NO: 94041 - RNA, 23 nt, synthetic construct
  source 1..23: mol_type = other RNA
taagttcccgcacaggccgcaga

SEQ ID NO: 94042 - RNA, 23 nt, synthetic construct
  source 1..23: mol_type = other RNA
tccaactcccgcagggggacacc

SEQ ID NO: 94043 - RNA, 23 nt, synthetic construct
  source 1..23: mol_type = other RNA
tcccaactcccgcagggggacac

SEQ ID NO: 94044 - RNA, 23 nt, synthetic construct
  source 1..23: mol_type = other RNA
tccaactcccgcagggggacacc

SEQ ID NO: 94045 - RNA, 23 nt, synthetic construct
  source 1..23: mol_type = other RNA
tcccaactcccgcagggggacac

SEQ ID NO: 94046 - RNA, 23 nt, synthetic construct
  source 1..23: mol_type = other RNA
tccaactcccgcagggggacacc

SEQ ID NO: 94047 - RNA, 23 nt, synthetic construct
  source 1..23: mol_type = other RNA
tcccaactcccgcagggggacac

SEQ ID NO: 94048 - RNA, 23 nt, synthetic construct
  source 1..23: mol_type = other RNA
tggtgcaggtgccgcactggccc

SEQ ID NO: 94049 - RNA, 23 nt, synthetic construct
  source 1..23: mol_type = other RNA
tcccacacaggccgcacatctgg

SEQ ID NO: 94050 - RNA, 23 nt, synthetic construct
  source 1..23: mol_type = other RNA
tttggtgcaggtgccgcactggc

SEQ ID NO: 94051 - RNA, 23 nt, synthetic construct
  source 1..23: mol_type = other RNA
tcttttctgcagagaggctccca

SEQ ID NO: 94052 - RNA, 23 nt, synthetic construct
  source 1..23: mol_type = other RNA
tacctggctcagcatcagatcac

SEQ ID NO: 94053 - RNA, 23 nt, synthetic construct
  source 1..23: mol_type = other RNA
tttgaagcacatcttgaacttcc

SEQ ID NO: 94054 - RNA, 23 nt, synthetic construct
  source 1..23: mol_type = other RNA
tttgaagcacatcttgaacttcc

SEQ ID NO: 94055 - RNA, 23 nt, synthetic construct
  source 1..23: mol_type = other RNA
tttgaagcacatcttgaacttcc

SEQ ID NO: 94056 - RNA, 23 nt, synthetic construct
  source 1..23: mol_type = other RNA
tttgaagcacatcttgaacttcc

SEQ ID NO: 94057 - RNA, 23 nt, synthetic construct
  source 1..23: mol_type = other RNA
tgaccggctacgcgtggcaaagt

SEQ ID NO: 94058 - RNA, 23 nt, synthetic construct
  source 1..23: mol_type = other RNA
ttcacgcaggtgacgttggccac

SEQ ID NO: 94059 - RNA, 23 nt, synthetic construct
  source 1..23: mol_type = other RNA
ttgttcacgcaggtgacgttggc

SEQ ID NO: 94060 - RNA, 23 nt, synthetic construct
  source 1..23: mol_type = other RNA
tccccaccacggaccggctacgc

SEQ ID NO: 94061 - RNA, 23 nt, synthetic construct
  source 1..23: mol_type = other RNA
tagaacacacggatttcatagtt

SEQ ID NO: 94062 - RNA, 23 nt, synthetic construct
  source 1..23: mol_type = other RNA
tagaacacacggatttcatagtt

SEQ ID NO: 94063 - RNA, 23 nt, synthetic construct
  source 1..23: mol_type = other RNA
tagaacacacggatttcatagtt

SEQ ID NO: 94064 - RNA, 23 nt, synthetic construct
  source 1..23: mol_type = other RNA
tagaacacacggatttcatagtt

SEQ ID NO: 94065 - RNA, 23 nt, synthetic construct
  source 1..23: mol_type = other RNA
tacacacggatttcatagttgaa

SEQ ID NO: 94066 - RNA, 23 nt, synthetic construct
  source 1..23: mol_type = other RNA
tacacacggatttcatagttgaa

SEQ ID NO: 94067 - RNA, 23 nt, synthetic construct
  source 1..23: mol_type = other RNA
tacacacggatttcatagttgaa

SEQ ID NO: 94068 - RNA, 23 nt, synthetic construct
  source 1..23: mol_type = other RNA
tacacacggatttcatagttgaa

SEQ ID NO: 94069 - RNA, 23 nt, synthetic construct
  source 1..23: mol_type = other RNA
tgggtccgacactttgatgggca

SEQ ID NO: 94070 - RNA, 23 nt, synthetic construct
  source 1..23: mol_type = other RNA
tgcaggctgtatggggccgcatg

SEQ ID NO: 94071 - RNA, 23 nt, synthetic construct
  source 1..23: mol_type = other RNA
tcacgcaggtgacgttggccaca

SEQ ID NO: 94072 - RNA, 23 nt, synthetic construct
  source 1..23: mol_type = other RNA
ttacactttggtgggtgggcagg

SEQ ID NO: 94073 - RNA, 23 nt, synthetic construct
  source 1..23: mol_type = other RNA
tgcacactccccgggcgcggcag

SEQ ID NO: 94074 - RNA, 23 nt, synthetic construct
  source 1..23: mol_type = other RNA
tgggacacagaagggcgtgcagc

SEQ ID NO: 94075 - RNA, 23 nt, synthetic construct
  source 1..23: mol_type = other RNA
tcccccaccacggaccggctacg

SEQ ID NO: 94076 - RNA, 23 nt, synthetic construct
  source 1..23: mol_type = other RNA
ttcccccaccacggaccggctac

SEQ ID NO: 94077 - RNA, 23 nt, synthetic construct
  source 1..23: mol_type = other RNA
taggtgggccacaggctctccca

SEQ ID NO: 94078 - RNA, 23 nt, synthetic construct
  source 1..23: mol_type = other RNA
tcagaacacacggatttcatagt

SEQ ID NO: 94079 - RNA, 23 nt, synthetic construct
  source 1..23: mol_type = other RNA
tcagaacacacggatttcatagt

SEQ ID NO: 94080 - RNA, 23 nt, synthetic construct
  source 1..23: mol_type = other RNA
tcagaacacacggatttcatagt

SEQ ID NO: 94081 - RNA, 23 nt, synthetic construct
  source 1..23: mol_type = other RNA
tcagaacacacggatttcatagt

SEQ ID NO: 94082 - RNA, 23 nt, synthetic construct
  source 1..23: mol_type = other RNA
tctgcacactccccgggcgcggc

SEQ ID NO: 94083 - RNA, 23 nt, synthetic construct
  source 1..23: mol_type = other RNA
tcttgtacactttggtgggtggg

SEQ ID NO: 94084 - RNA, 23 nt, synthetic construct
  source 1..23: mol_type = other RNA
tttgtgggcatagaactcgttga

SEQ ID NO: 94085 - RNA, 23 nt, synthetic construct
  source 1..23: mol_type = other RNA
tggttgtcacccacgcacctggc

SEQ ID NO: 94086 - RNA, 23 nt, synthetic construct
  source 1..23: mol_type = other RNA
tgccagagccaacaccagcgtcc

SEQ ID NO: 94087 - RNA, 23 nt, synthetic construct
  source 1..23: mol_type = other RNA
tacgcaggtgacgttggccacag

SEQ ID NO: 94088 - RNA, 23 nt, synthetic construct
  source 1..23: mol_type = other RNA
tccagcgtgtggcagctccggag

SEQ ID NO: 94089 - RNA, 23 nt, synthetic construct
  source 1..23: mol_type = other RNA
tgcggtcacagtccacctgctgg

SEQ ID NO: 94090 - RNA, 23 nt, synthetic construct
  source 1..23: mol_type = other RNA
tcgtcccgctggagacagtcgtc

SEQ ID NO: 94091 - RNA, 23 nt, synthetic construct
  source 1..23: mol_type = other RNA
taggggcttgcactgcaccgaca

SEQ ID NO: 94092 - RNA, 23 nt, synthetic construct
  source 1..23: mol_type = other RNA
ttgggcgcagggacacagaaggg

SEQ ID NO: 94093 - RNA, 23 nt, synthetic construct
  source 1..23: mol_type = other RNA
tgtcgtccctctggttgttggtg

SEQ ID NO: 94094 - RNA, 23 nt, synthetic construct
  source 1..23: mol_type = other RNA
tgcagctccggaggcactcggcc

SEQ ID NO: 94095 - RNA, 23 nt, synthetic construct
  source 1..23: mol_type = other RNA
tacacagtggacacgctgaaggt

SEQ ID NO: 94096 - RNA, 23 nt, synthetic construct
  source 1..23: mol_type = other RNA
tcacggaccggctacgcgtggca

SEQ ID NO: 94097 - RNA, 23 nt, synthetic construct
  source 1..23: mol_type = other RNA
tcgtcccccaccacggaccggct

SEQ ID NO: 94098 - RNA, 23 nt, synthetic construct
  source 1..23: mol_type = other RNA
tggcagctccggaggcactcggc

SEQ ID NO: 94099 - RNA, 23 nt, synthetic construct
  source 1..23: mol_type = other RNA
tccagagccaacaccagcgtccg

SEQ ID NO: 94100 - RNA, 23 nt, synthetic construct
  source 1..23: mol_type = other RNA
tgcacggatgttggagtaggtgt

SEQ ID NO: 94101 - RNA, 23 nt, synthetic construct
  source 1..23: mol_type = other RNA
tgcacggatgttggagtaggtgt

SEQ ID NO: 94102 - RNA, 23 nt, synthetic construct
  source 1..23: mol_type = other RNA
tgcacggatgttggagtaggtgt

SEQ ID NO: 94103 - RNA, 23 nt, synthetic construct
  source 1..23: mol_type = other RNA
tgcacggatgttggagtaggtgt

SEQ ID NO: 94104 - RNA, 23 nt, synthetic construct
  source 1..23: mol_type = other RNA
tggtccgacactttgatgggcag

SEQ ID NO: 94105 - RNA, 23 nt, synthetic construct
  source 1..23: mol_type = other RNA
tgagacagtcgtccctctggttg

SEQ ID NO: 94106 - RNA, 23 nt, synthetic construct
  source 1..23: mol_type = other RNA
tactgcacactccccgggcgcgg

SEQ ID NO: 94107 - RNA, 23 nt, synthetic construct
  source 1..23: mol_type = other RNA
tttgtacactttggtgggtgggc

SEQ ID NO: 94108 - RNA, 23 nt, synthetic construct
  source 1..23: mol_type = other RNA
tctgctggcccctcacccttctg

SEQ ID NO: 94109 - RNA, 23 nt, synthetic construct
  source 1..23: mol_type = other RNA
ttgggctgggttgagcagagggg

SEQ ID NO: 94110 - RNA, 23 nt, synthetic construct
  source 1..23: mol_type = other RNA
tgtacactttggtgggtgggcag

SEQ ID NO: 94111 - RNA, 23 nt, synthetic construct
  source 1..23: mol_type = other RNA
tcagctccggaggcactcggccc

SEQ ID NO: 94112 - RNA, 23 nt, synthetic construct
  source 1..23: mol_type = other RNA
tgtcccgctggagacagtcgtcc

SEQ ID NO: 94113 - RNA, 23 nt, synthetic construct
  source 1..23: mol_type = other RNA
tccagggcgtcccagtgacatca

SEQ ID NO: 94114 - RNA, 23 nt, synthetic construct
  source 1..23: mol_type = other RNA
tgtcccccaccacggaccggcta

SEQ ID NO: 94115 - RNA, 23 nt, synthetic construct
  source 1..23: mol_type = other RNA
tcagggcgtcccagtgacatcag

SEQ ID NO: 94116 - RNA, 23 nt, synthetic construct
  source 1..23: mol_type = other RNA
taacacacggatttcatagttga

SEQ ID NO: 94117 - RNA, 23 nt, synthetic construct
  source 1..23: mol_type = other RNA
taacacacggatttcatagttga

SEQ ID NO: 94118 - RNA, 23 nt, synthetic construct
  source 1..23: mol_type = other RNA
taacacacggatttcatagttga

SEQ ID NO: 94119 - RNA, 23 nt, synthetic construct
  source 1..23: mol_type = other RNA
taacacacggatttcatagttga

SEQ ID NO: 94120 - RNA, 23 nt, synthetic construct
  source 1..23: mol_type = other RNA
tagggacacagaagggcgtgcag

SEQ ID NO: 94121 - RNA, 23 nt, synthetic construct
  source 1..23: mol_type = other RNA
tccttgcctggaccagcctgtct

SEQ ID NO: 94122 - RNA, 23 nt, synthetic construct
  source 1..23: mol_type = other RNA
tcaggggcttgcactgcaccgac

SEQ ID NO: 94123 - RNA, 23 nt, synthetic construct
  source 1..23: mol_type = other RNA
tgtggcagctccggaggcactcg

SEQ ID NO: 94124 - RNA, 23 nt, synthetic construct
  source 1..23: mol_type = other RNA
taggatccaggtggtccctgggg

SEQ ID NO: 94125 - RNA, 23 nt, synthetic construct
  source 1..23: mol_type = other RNA
tgaggatccaggtggtccctggg

SEQ ID NO: 94126 - RNA, 23 nt, synthetic construct
  source 1..23: mol_type = other RNA
taggatccaggtggtccctgggg

SEQ ID NO: 94127 - RNA, 23 nt, synthetic construct
  source 1..23: mol_type = other RNA
tgaggatccaggtggtccctggg

SEQ ID NO: 94128 - RNA, 23 nt, synthetic construct
  source 1..23: mol_type = other RNA
taggatccaggtggtccctgggg

SEQ ID NO: 94129 - RNA, 23 nt, synthetic construct
  source 1..23: mol_type = other RNA
tgaggatccaggtggtccctggg

SEQ ID NO: 94130 - RNA, 23 nt, synthetic construct
  source 1..23: mol_type = other RNA
taggatccaggtggtccctgggg

SEQ ID NO: 94131 - RNA, 23 nt, synthetic construct
  source 1..23: mol_type = other RNA
tgaggatccaggtggtccctggg

SEQ ID NO: 94132 - RNA, 23 nt, synthetic construct
  source 1..23: mol_type = other RNA
taggatccaggtggtccctgggg

SEQ ID NO: 94133 - RNA, 23 nt, synthetic construct
  source 1..23: mol_type = other RNA
tgaggatccaggtggtccctggg

SEQ ID NO: 94134 - RNA, 23 nt, synthetic construct
  source 1..23: mol_type = other RNA
taggatccaggtggtccctgggg

SEQ ID NO: 94135 - RNA, 23 nt, synthetic construct
  source 1..23: mol_type = other RNA
tgaggatccaggtggtccctggg

SEQ ID NO: 94136 - RNA, 23 nt, synthetic construct
  source 1..23: mol_type = other RNA
tgcaggggcttgcactgcaccga

SEQ ID NO: 94137 - RNA, 23 nt, synthetic construct
  source 1..23: mol_type = other RNA
tgggcgcagggacacagaagggc

SEQ ID NO: 94138 - RNA, 23 nt, synthetic construct
  source 1..23: mol_type = other RNA
ttggcagctccggaggcactcgg

SEQ ID NO: 94139 - RNA, 23 nt, synthetic construct
  source 1..23: mol_type = other RNA
ttccagcgtgtggcagctccgga

SEQ ID NO: 94140 - RNA, 23 nt, synthetic construct
  source 1..23: mol_type = other RNA
tgggcaggggcttgcactgcacc

SEQ ID NO: 94141 - RNA, 23 nt, synthetic construct
  source 1..23: mol_type = other RNA
tgccaaggtgggccacaggctct

SEQ ID NO: 94142 - RNA, 23 nt, synthetic construct
  source 1..23: mol_type = other RNA
tggcaaggccaaggtgggccaca

SEQ ID NO: 94143 - RNA, 23 nt, synthetic construct
  source 1..23: mol_type = other RNA
tatttggtcaaacaggatcaggc

SEQ ID NO: 94144 - RNA, 23 nt, synthetic construct
  source 1..23: mol_type = other RNA
tgggccacaggctctcccagggt

SEQ ID NO: 94145 - RNA, 23 nt, synthetic construct
  source 1..23: mol_type = other RNA
tcttgatgacaacacgggtgacc

SEQ ID NO: 94146 - RNA, 23 nt, synthetic construct
  source 1..23: mol_type = other RNA
tggggcagtggccgtagttgcag

SEQ ID NO: 94147 - RNA, 23 nt, synthetic construct
  source 1..23: mol_type = other RNA
tggggcagtggccgtagttgcag

SEQ ID NO: 94148 - RNA, 23 nt, synthetic construct
  source 1..23: mol_type = other RNA
tggggcagtggccgtagttgcag

SEQ ID NO: 94149 - RNA, 23 nt, synthetic construct
  source 1..23: mol_type = other RNA
tggggcagtggccgtagttgcag

SEQ ID NO: 94150 - RNA, 23 nt, synthetic construct
  source 1..23: mol_type = other RNA
tccccagttgtggtggccgtggc

SEQ ID NO: 94151 - RNA, 23 nt, synthetic construct
  source 1..23: mol_type = other RNA
ttacacggtgcagttgtccacat

SEQ ID NO: 94152 - RNA, 23 nt, synthetic construct
  source 1..23: mol_type = other RNA
taggtccgggggcagagctcagg

SEQ ID NO: 94153 - RNA, 23 nt, synthetic construct
  source 1..23: mol_type = other RNA
taaacgctgcaggtgacgtcggc

SEQ ID NO: 94154 - RNA, 23 nt, synthetic construct
  source 1..23: mol_type = other RNA
ttttctgcagagaggctcccagg

SEQ ID NO: 94155 - RNA, 23 nt, synthetic construct
  source 1..23: mol_type = other RNA
tcccagttgtggtggccgtggcg

SEQ ID NO: 94156 - RNA, 23 nt, synthetic construct
  source 1..23: mol_type = other RNA
ttgtggtagtcagcactttggta

SEQ ID NO: 94157 - RNA, 23 nt, synthetic construct
  source 1..23: mol_type = other RNA
tgtggacgagctgggaaccgtgg

SEQ ID NO: 94158 - RNA, 23 nt, synthetic construct
  source 1..23: mol_type = other RNA
tggaaacgctgcaggtgacgtcg

SEQ ID NO: 94159 - RNA, 23 nt, synthetic construct
  source 1..23: mol_type = other RNA
tccaaactccagtgcgtccccca

SEQ ID NO: 94160 - RNA, 23 nt, synthetic construct
  source 1..23: mol_type = other RNA
ttgatgacaacacgggtgaccac

SEQ ID NO: 94161 - RNA, 23 nt, synthetic construct
  source 1..23: mol_type = other RNA
tggtccgggggcagagctcaggg

SEQ ID NO: 94162 - RNA, 23 nt, synthetic construct
  source 1..23: mol_type = other RNA
tggctgtaggtgcggccgccgtg

SEQ ID NO: 94163 - RNA, 23 nt, synthetic construct
  source 1..23: mol_type = other RNA
ttggccgtggtggtaagcactgt

SEQ ID NO: 94164 - RNA, 23 nt, synthetic construct
  source 1..23: mol_type = other RNA
tggtagtcagcactttggtagtg

SEQ ID NO: 94165 - RNA, 23 nt, synthetic construct
  source 1..23: mol_type = other RNA
ttggccgtggtggtaagcactgt

SEQ ID NO: 94166 - RNA, 23 nt, synthetic construct
  source 1..23: mol_type = other RNA
tagcggaaggtgggacagcagtc

SEQ ID NO: 94167 - RNA, 23 nt, synthetic construct
  source 1..23: mol_type = other RNA
tgtgctggggcagtggccgtagt

SEQ ID NO: 94168 - RNA, 23 nt, synthetic construct
  source 1..23: mol_type = other RNA
tgtgctggggcagtggccgtagt

SEQ ID NO: 94169 - RNA, 23 nt, synthetic construct
  source 1..23: mol_type = other RNA
tgtgctggggcagtggccgtagt

SEQ ID NO: 94170 - RNA, 23 nt, synthetic construct
  source 1..23: mol_type = other RNA
tgtgctggggcagtggccgtagt

SEQ ID NO: 94171 - RNA, 23 nt, synthetic construct
  source 1..23: mol_type = other RNA
tgggctgtaggtgcggccgccgt

SEQ ID NO: 94172 - RNA, 23 nt, synthetic construct
  source 1..23: mol_type = other RNA
tgccccagttgtggtggccgtgg

SEQ ID NO: 94173 - RNA, 23 nt, synthetic construct
  source 1..23: mol_type = other RNA
tttcccaaactccagtgcgtccc

SEQ ID NO: 94174 - RNA, 23 nt, synthetic construct
  source 1..23: mol_type = other RNA
ttggggcagtggccgtagttgca

SEQ ID NO: 94175 - RNA, 23 nt, synthetic construct
  source 1..23: mol_type = other RNA
ttggggcagtggccgtagttgca

SEQ ID NO: 94176 - RNA, 23 nt, synthetic construct
  source 1..23: mol_type = other RNA
ttggggcagtggccgtagttgca

SEQ ID NO: 94177 - RNA, 23 nt, synthetic construct
  source 1..23: mol_type = other RNA
ttggggcagtggccgtagttgca

SEQ ID NO: 94178 - RNA, 23 nt, synthetic construct
  source 1..23: mol_type = other RNA
tgggacagcagtcgccctcctcc

SEQ ID NO: 94179 - RNA, 23 nt, synthetic construct
  source 1..23: mol_type = other RNA
tcacgggtgaccacaggcctgga

SEQ ID NO: 94180 - RNA, 23 nt, synthetic construct
  source 1..23: mol_type = other RNA
ttgcggccgccgtgggtgcaggg

SEQ ID NO: 94181 - RNA, 23 nt, synthetic construct
  source 1..23: mol_type = other RNA
ttgtaggtgcggccgccgtgggt

SEQ ID NO: 94182 - RNA, 23 nt, synthetic construct
  source 1..23: mol_type = other RNA
tctgtaggtgcggccgccgtggg

SEQ ID NO: 94183 - RNA, 23 nt, synthetic construct
  source 1..23: mol_type = other RNA
tagctctggcagttctccgctgt

SEQ ID NO: 94184 - RNA, 23 nt, synthetic construct
  source 1..23: mol_type = other RNA
tcagctctggcagttctccgctg

SEQ ID NO: 94185 - RNA, 23 nt, synthetic construct
  source 1..23: mol_type = other RNA
tgggcagtctctggagtggagga

SEQ ID NO: 94186 - RNA, 23 nt, synthetic construct
  source 1..23: mol_type = other RNA
tgggcagtctctggagtggagga

SEQ ID NO: 94187 - RNA, 23 nt, synthetic construct
  source 1..23: mol_type = other RNA
taagtcacagggctggctcgggt

SEQ ID NO: 94188 - RNA, 23 nt, synthetic construct
  source 1..23: mol_type = other RNA
tcaggtccgggggcagagctcag

SEQ ID NO: 94189 - RNA, 23 nt, synthetic construct
  source 1..23: mol_type = other RNA
ttcattctccacactgagggagc

SEQ ID NO: 94190 - RNA, 23 nt, synthetic construct
  source 1..23: mol_type = other RNA
ttctcattctccacactgaggga

SEQ ID NO: 94191 - RNA, 23 nt, synthetic construct
  source 1..23: mol_type = other RNA
ttgggacagcagtcgccctcctc

SEQ ID NO: 94192 - RNA, 23 nt, synthetic construct
  source 1..23: mol_type = other RNA
tactcatagtggaagtcacaggg

SEQ ID NO: 94193 - RNA, 23 nt, synthetic construct
  source 1..23: mol_type = other RNA
tgcactcgaggcccaggggctgc

SEQ ID NO: 94194 - RNA, 23 nt, synthetic construct
  source 1..23: mol_type = other RNA
tgcactcgaggcccaggggctgc

SEQ ID NO: 94195 - RNA, 23 nt, synthetic construct
  source 1..23: mol_type = other RNA
tgcactcgaggcccaggggctgc

SEQ ID NO: 94196 - RNA, 23 nt, synthetic construct
  source 1..23: mol_type = other RNA
tgcactcgaggcccaggggctgc

SEQ ID NO: 94197 - RNA, 23 nt, synthetic construct
  source 1..23: mol_type = other RNA
taggtgcggccgccgtgggtgca

SEQ ID NO: 94198 - RNA, 23 nt, synthetic construct
  source 1..23: mol_type = other RNA
taacacgggtgaccacaggcctg

SEQ ID NO: 94199 - RNA, 23 nt, synthetic construct
  source 1..23: mol_type = other RNA
tctccagtgcgtcccccaccacg

SEQ ID NO: 94200 - RNA, 23 nt, synthetic construct
  source 1..23: mol_type = other RNA
tgccgtgggtgcaggggcactgc

SEQ ID NO: 94201 - RNA, 23 nt, synthetic construct
  source 1..23: mol_type = other RNA
tgtaggtgcggccgccgtgggtg

SEQ ID NO: 94202 - RNA, 23 nt, synthetic construct
  source 1..23: mol_type = other RNA
tggtggccgtggtggtaagcact

SEQ ID NO: 94203 - RNA, 23 nt, synthetic construct
  source 1..23: mol_type = other RNA
tggtggccgtggtggtaagcact

SEQ ID NO: 94204 - RNA, 23 nt, synthetic construct
  source 1..23: mol_type = other RNA
tagtcacagggctggctcgggtc

SEQ ID NO: 94205 - RNA, 23 nt, synthetic construct
  source 1..23: mol_type = other RNA
tgtgggggtgtgggtggtccccg

SEQ ID NO: 94206 - RNA, 23 nt, synthetic construct
  source 1..23: mol_type = other RNA
tgtgggggtgtgggtggtccccg

SEQ ID NO: 94207 - RNA, 23 nt, synthetic construct
  source 1..23: mol_type = other RNA
tcgcccattgtgcgccgggttca

SEQ ID NO: 94208 - RNA, 23 nt, synthetic construct
  source 1..23: mol_type = other RNA
tgtcggcacatttcttggacaga

SEQ ID NO: 94209 - RNA, 23 nt, synthetic construct
  source 1..23: mol_type = other RNA
ttgtacgcccttggcggcacagg

SEQ ID NO: 94210 - RNA, 23 nt, synthetic construct
  source 1..23: mol_type = other RNA
tcgacgtcatagtagtttccgtc

SEQ ID NO: 94211 - RNA, 23 nt, synthetic construct
  source 1..23: mol_type = other RNA
tccgacgtcatagtagtttccgt

SEQ ID NO: 94212 - RNA, 23 nt, synthetic construct
  source 1..23: mol_type = other RNA
ttggctatagtgctcggctctgt

SEQ ID NO: 94213 - RNA, 23 nt, synthetic construct
  source 1..23: mol_type = other RNA
tacgaagccgggacggttgcacg

SEQ ID NO: 94214 - RNA, 23 nt, synthetic construct
  source 1..23: mol_type = other RNA
tggctatagtgctcggctctgtg

SEQ ID NO: 94215 - RNA, 23 nt, synthetic construct
  source 1..23: mol_type = other RNA
tctgtacgcccttggcggcacag

SEQ ID NO: 94216 - RNA, 23 nt, synthetic construct
  source 1..23: mol_type = other RNA
tcccattgtgcgccgggttcagg

SEQ ID NO: 94217 - RNA, 23 nt, synthetic construct
  source 1..23: mol_type = other RNA
tagggctggctcgggtccgacac

SEQ ID NO: 94218 - RNA, 23 nt, synthetic construct
  source 1..23: mol_type = other RNA
tgggatggaggcagaacgttctc

SEQ ID NO: 94219 - RNA, 23 nt, synthetic construct
  source 1..23: mol_type = other RNA
tggatggtcgtgttgatgcggac

SEQ ID NO: 94220 - RNA, 23 nt, synthetic construct
  source 1..23: mol_type = other RNA
tctcaatgctcagggtttatttg

SEQ ID NO: 94221 - RNA, 23 nt, synthetic construct
  source 1..23: mol_type = other RNA
tcactttggtagtgtgagctgtt

SEQ ID NO: 94222 - RNA, 23 nt, synthetic construct
  source 1..23: mol_type = other RNA
tcactttggtagtgtgagctgtt

SEQ ID NO: 94223 - RNA, 23 nt, synthetic construct
  source 1..23: mol_type = other RNA
tcactttggtagtgtgagctgtt

SEQ ID NO: 94224 - RNA, 23 nt, synthetic construct
  source 1..23: mol_type = other RNA
tcactttggtagtgtgagctgtt

SEQ ID NO: 94225 - RNA, 23 nt, synthetic construct
  source 1..23: mol_type = other RNA
tcactttggtagtgtgagctgtt

SEQ ID NO: 94226 - RNA, 23 nt, synthetic construct
  source 1..23: mol_type = other RNA
tattgatggcattgtcgtcgaag

SEQ ID NO: 94227 - RNA, 23 nt, synthetic construct
  source 1..23: mol_type = other RNA
tggacgtcggggcaccgccatcc

SEQ ID NO: 94228 - RNA, 23 nt, synthetic construct
  source 1..23: mol_type = other RNA
tttcaaagctgtagcgatcgcca

SEQ ID NO: 94229 - RNA, 23 nt, synthetic construct
  source 1..23: mol_type = other RNA
tttgatggcattgtcgtcgaagt

SEQ ID NO: 94230 - RNA, 23 nt, synthetic construct
  source 1..23: mol_type = other RNA
tgggatggctgtaacgctggtag

SEQ ID NO: 94231 - RNA, 23 nt, synthetic construct
  source 1..23: mol_type = other RNA
tgggctggctcgggtccgacact

SEQ ID NO: 94232 - RNA, 23 nt, synthetic construct
  source 1..23: mol_type = other RNA
tccaagggtgcttgtgtatctgg

SEQ ID NO: 94233 - RNA, 23 nt, synthetic construct
  source 1..23: mol_type = other RNA
tggcctgggcacggcactcgagg

SEQ ID NO: 94234 - RNA, 23 nt, synthetic construct
  source 1..23: mol_type = other RNA
tggagggcatggccgtagagctg

SEQ ID NO: 94235 - RNA, 23 nt, synthetic construct
  source 1..23: mol_type = other RNA
tggcctgggcacggcactcgagg

SEQ ID NO: 94236 - RNA, 23 nt, synthetic construct
  source 1..23: mol_type = other RNA
tggcctgggcacggcactcgagg

SEQ ID NO: 94237 - RNA, 23 nt, synthetic construct
  source 1..23: mol_type = other RNA
tggcctgggcacggcactcgagg

SEQ ID NO: 94238 - RNA, 23 nt, synthetic construct
  source 1..23: mol_type = other RNA
tggagggcatggccgtagagctg

SEQ ID NO: 94239 - RNA, 23 nt, synthetic construct
  source 1..23: mol_type = other RNA
tcgtcccctgcagtggtcgtcac

SEQ ID NO: 94240 - RNA, 23 nt, synthetic construct
  source 1..23: mol_type = other RNA
tagccggctcggtcggtcttatt

SEQ ID NO: 94241 - RNA, 23 nt, synthetic construct
  source 1..23: mol_type = other RNA
tccatagggtggtcttttcggtt

SEQ ID NO: 94242 - RNA, 23 nt, synthetic construct
  source 1..23: mol_type = other RNA
tccgccgtcgaccggatgctcgg

SEQ ID NO: 94243 - RNA, 23 nt, synthetic construct
  source 1..23: mol_type = other RNA
tcacgtagttgcaaaggccaggg

SEQ ID NO: 94244 - RNA, 23 nt, synthetic construct
  source 1..23: mol_type = other RNA
tcagggacacataggcccgcaca

SEQ ID NO: 94245 - RNA, 23 nt, synthetic construct
  source 1..23: mol_type = other RNA
taacgtctcaaagtctccgcctc

SEQ ID NO: 94246 - RNA, 23 nt, synthetic construct
  source 1..23: mol_type = other RNA
tggccgttgaagtccccacacag

SEQ ID NO: 94247 - RNA, 23 nt, synthetic construct
  source 1..23: mol_type = other RNA
tgtgagcgtagcaggggcactcc

SEQ ID NO: 94248 - RNA, 23 nt, synthetic construct
  source 1..23: mol_type = other RNA
tggccaagatgtactcgcagctg

SEQ ID NO: 94249 - RNA, 23 nt, synthetic construct
  source 1..23: mol_type = other RNA
tgccgtggaattggtggcccttg

SEQ ID NO: 94250 - RNA, 23 nt, synthetic construct
  source 1..23: mol_type = other RNA
tgcagccggctcggtcggtctta

SEQ ID NO: 94251 - RNA, 23 nt, synthetic construct
  source 1..23: mol_type = other RNA
tagagtttctcatcataggtgga

SEQ ID NO: 94252 - RNA, 23 nt, synthetic construct
  source 1..23: mol_type = other RNA
tctgttgggatcggtcaggcgcg

SEQ ID NO: 94253 - RNA, 23 nt, synthetic construct
  source 1..23: mol_type = other RNA
tgctgtgatcgtagtggccgtgg

SEQ ID NO: 94254 - RNA, 23 nt, synthetic construct
  source 1..23: mol_type = other RNA
tagaaatggcagccggctcggtc

SEQ ID NO: 94255 - RNA, 23 nt, synthetic construct
  source 1..23: mol_type = other RNA
tggtgatgttgacctcggtctcg

SEQ ID NO: 94256 - RNA, 23 nt, synthetic construct
  source 1..23: mol_type = other RNA
tgcagtcaccatgcaggtcgtag

SEQ ID NO: 94257 - RNA, 23 nt, synthetic construct
  source 1..23: mol_type = other RNA
tcagcggctctttggaagcggtg

SEQ ID NO: 94258 - RNA, 23 nt, synthetic construct
  source 1..23: mol_type = other RNA
ttggtccccacggtggacgagct

SEQ ID NO: 94259 - RNA, 23 nt, synthetic construct
  source 1..23: mol_type = other RNA
tggcccctgcagtggtcgctgat

SEQ ID NO: 94260 - RNA, 23 nt, synthetic construct
  source 1..23: mol_type = other RNA
tacctggccgttgcgacctcagc

SEQ ID NO: 94261 - RNA, 23 nt, synthetic construct
  source 1..23: mol_type = other RNA
tagtcgcaggcacacgcgtcgtt

SEQ ID NO: 94262 - RNA, 23 nt, synthetic construct
  source 1..23: mol_type = other RNA
tgctgagattcccaaagcgtgca

SEQ ID NO: 94263 - RNA, 23 nt, synthetic construct
  source 1..23: mol_type = other RNA
ttggggccgcatggcttgtacac

SEQ ID NO: 94264 - RNA, 23 nt, synthetic construct
  source 1..23: mol_type = other RNA
tgaaggtgatgttgacctcggtc

SEQ ID NO: 94265 - RNA, 23 nt, synthetic construct
  source 1..23: mol_type = other RNA
tggatggctgagccgttaggaca

SEQ ID NO: 94266 - RNA, 23 nt, synthetic construct
  source 1..23: mol_type = other RNA
ttgcaggatggctgagccgttag

SEQ ID NO: 94267 - RNA, 23 nt, synthetic construct
  source 1..23: mol_type = other RNA
tgttgaagtcctcgtaggcggcg

SEQ ID NO: 94268 - RNA, 23 nt, synthetic construct
  source 1..23: mol_type = other RNA
ttgaagtcctcgtaggcggcgcg

SEQ ID NO: 94269 - RNA, 23 nt, synthetic construct
  source 1..23: mol_type = other RNA
ttgtcgtcgaagttcccgcacag

SEQ ID NO: 94270 - RNA, 23 nt, synthetic construct
  source 1..23: mol_type = other RNA
tgcagaaacactcgcagtcgcca

SEQ ID NO: 94271 - RNA, 23 nt, synthetic construct
  source 1..23: mol_type = other RNA
taccggttgcacctcgccagtca

SEQ ID NO: 94272 - RNA, 23 nt, synthetic construct
  source 1..23: mol_type = other RNA
ttacgcccttggcggcacaggcg

SEQ ID NO: 94273 - RNA, 23 nt, synthetic construct
  source 1..23: mol_type = other RNA
tgctgtacgcccttggcggcaca

SEQ ID NO: 94274 - RNA, 23 nt, synthetic construct
  source 1..23: mol_type = other RNA
tcttccgcagatggcgatcaagc

SEQ ID NO: 94275 - RNA, 23 nt, synthetic construct
  source 1..23: mol_type = other RNA
tgcgttgtggctggagttccagg

SEQ ID NO: 94276 - RNA, 23 nt, synthetic construct
  source 1..23: mol_type = other RNA
taccggtgggcaccatcacggtg

SEQ ID NO: 94277 - RNA, 23 nt, synthetic construct
  source 1..23: mol_type = other RNA
ttgcgtagaaatggcagccggct

SEQ ID NO: 94278 - RNA, 23 nt, synthetic construct
  source 1..23: mol_type = other RNA
tctgcgtaagcctccaggctctg

SEQ ID NO: 94279 - RNA, 23 nt, synthetic construct
  source 1..23: mol_type = other RNA
tgggcgtcccagtgacatcaggg

SEQ ID NO: 94280 - RNA, 23 nt, synthetic construct
  source 1..23: mol_type = other RNA
tgcgcggggtgccacacacaggc

SEQ ID NO: 94281 - RNA, 23 nt, synthetic construct
  source 1..23: mol_type = other RNA
tggaaccggtgggcaccatcacg

SEQ ID NO: 94282 - RNA, 23 nt, synthetic construct
  source 1..23: mol_type = other RNA
tcggtcaatgtcacagtgctgat

SEQ ID NO: 94283 - RNA, 23 nt, synthetic construct
  source 1..23: mol_type = other RNA
tccgcagatggcgatcaagcagg

SEQ ID NO: 94284 - RNA, 23 nt, synthetic construct
  source 1..23: mol_type = other RNA
tactgcgtagaaatggcagccgg

SEQ ID NO: 94285 - RNA, 23 nt, synthetic construct
  source 1..23: mol_type = other RNA
tcttgcaactggcggcagtggtt

SEQ ID NO: 94286 - RNA, 23 nt, synthetic construct
  source 1..23: mol_type = other RNA
tggcgaggacgtcggggcaccgc

SEQ ID NO: 94287 - RNA, 23 nt, synthetic construct
  source 1..23: mol_type = other RNA
taggtgcccgggctgtaggtgcg

SEQ ID NO: 94288 - RNA, 23 nt, synthetic construct
  source 1..23: mol_type = other RNA
tggcgtcccagtgacatcaggga

SEQ ID NO: 94289 - RNA, 23 nt, synthetic construct
  source 1..23: mol_type = other RNA
tgctgtgaagcccgtggttgtgg

SEQ ID NO: 94290 - RNA, 23 nt, synthetic construct
  source 1..23: mol_type = other RNA
tgctgtgaagcccgtggttgtgg

SEQ ID NO: 94291 - RNA, 23 nt, synthetic construct
  source 1..23: mol_type = other RNA
tgctgtgaagcccgtggttgtgg

SEQ ID NO: 94292 - RNA, 23 nt, synthetic construct
  source 1..23: mol_type = other RNA
tgctgtgaagcccgtggttgtgg

SEQ ID NO: 94293 - RNA, 23 nt, synthetic construct
  source 1..23: mol_type = other RNA
tcagaggacccggatcctgtagt

SEQ ID NO: 94294 - RNA, 23 nt, synthetic construct
  source 1..23: mol_type = other RNA
tgcccattgtgcgccgggttcag

SEQ ID NO: 94295 - RNA, 23 nt, synthetic construct
  source 1..23: mol_type = other RNA
tagtcctgggccaagatgtactc

SEQ ID NO: 94296 - RNA, 23 nt, synthetic construct
  source 1..23: mol_type = other RNA
tgagggcatggccgtagagctgg

SEQ ID NO: 94297 - RNA, 23 nt, synthetic construct
  source 1..23: mol_type = other RNA
tgagggcatggccgtagagctgg

SEQ ID NO: 94298 - RNA, 23 nt, synthetic construct
  source 1..23: mol_type = other RNA
tcttccccgggcgagaaaaactg

SEQ ID NO: 94299 - RNA, 23 nt, synthetic construct
  source 1..23: mol_type = other RNA
taggtggcaggctgtatggggcc

SEQ ID NO: 94300 - RNA, 23 nt, synthetic construct
  source 1..23: mol_type = other RNA
tctaggcctcggcgtagctggac

SEQ ID NO: 94301 - RNA, 23 nt, synthetic construct
  source 1..23: mol_type = other RNA
tattgtgcgccgggttcaggggg

SEQ ID NO: 94302 - RNA, 23 nt, synthetic construct
  source 1..23: mol_type = other RNA
tgcatagtggccatggtggtcac

SEQ ID NO: 94303 - RNA, 23 nt, synthetic construct
  source 1..23: mol_type = other RNA
tcgctttcaggcagttctcgttg

SEQ ID NO: 94304 - RNA, 23 nt, synthetic construct
  source 1..23: mol_type = other RNA
ttctggttggcgtatttgggatc

SEQ ID NO: 94305 - RNA, 23 nt, synthetic construct
  source 1..23: mol_type = other RNA
tcgcagtcgccacccgagtcgca

SEQ ID NO: 94306 - RNA, 23 nt, synthetic construct
  source 1..23: mol_type = other RNA
tggcgttgtggctggagttccag

SEQ ID NO: 94307 - RNA, 23 nt, synthetic construct
  source 1..23: mol_type = other RNA
tctgacattgcaccgttgggtcc

SEQ ID NO: 94308 - RNA, 23 nt, synthetic construct
  source 1..23: mol_type = other RNA
tccatcgggcgtgaggcaggcgg

SEQ ID NO: 94309 - RNA, 23 nt, synthetic construct
  source 1..23: mol_type = other RNA
tcgccaagcccatcggtggtgtt

SEQ ID NO: 94310 - RNA, 23 nt, synthetic construct
  source 1..23: mol_type = other RNA
tactcgtaggctgcggcgttgag

SEQ ID NO: 94311 - RNA, 23 nt, synthetic construct
  source 1..23: mol_type = other RNA
tgcccgtgtgtggtggccatggt

SEQ ID NO: 94312 - RNA, 23 nt, synthetic construct
  source 1..23: mol_type = other RNA
ttcccgtgggtctcgatgaccag

SEQ ID NO: 94313 - RNA, 23 nt, synthetic construct
  source 1..23: mol_type = other RNA
tcgtggcagggacacataggccc

SEQ ID NO: 94314 - RNA, 23 nt, synthetic construct
  source 1..23: mol_type = other RNA
ttcgtaggctgcggcgttgagaa

SEQ ID NO: 94315 - RNA, 23 nt, synthetic construct
  source 1..23: mol_type = other RNA
tcctcctgacattgcaccgttgg

SEQ ID NO: 94316 - RNA, 23 nt, synthetic construct
  source 1..23: mol_type = other RNA
tagctgtacgcccttggcggcac

SEQ ID NO: 94317 - RNA, 23 nt, synthetic construct
  source 1..23: mol_type = other RNA
ttccagcggccctgatcttatcg

SEQ ID NO: 94318 - RNA, 23 nt, synthetic construct
  source 1..23: mol_type = other RNA
tggtcgtggtggtaagcactgtg

SEQ ID NO: 94319 - RNA, 23 nt, synthetic construct
  source 1..23: mol_type = other RNA
tttgcaccaaccccgtagaaggt

SEQ ID NO: 94320 - RNA, 23 nt, synthetic construct
  source 1..23: mol_type = other RNA
tcgagtcgcaggcacacgcgtcg

SEQ ID NO: 94321 - RNA, 23 nt, synthetic construct
  source 1..23: mol_type = other RNA
tccattgtgcgccgggttcaggg

SEQ ID NO: 94322 - RNA, 23 nt, synthetic construct
  source 1..23: mol_type = other RNA
tgcctcggcgtagctggacgttg

SEQ ID NO: 94323 - RNA, 23 nt, synthetic construct
  source 1..23: mol_type = other RNA
ttccgcagatggcgatcaagcag

SEQ ID NO: 94324 - RNA, 23 nt, synthetic construct
  source 1..23: mol_type = other RNA
tttcgcagcagagaacccgcagc

SEQ ID NO: 94325 - RNA, 23 nt, synthetic construct
  source 1..23: mol_type = other RNA
tcaccgctccccgggaaatttag

SEQ ID NO: 94326 - RNA, 23 nt, synthetic construct
  source 1..23: mol_type = other RNA
tggagcgcggggtgccacacaca

SEQ ID NO: 94327 - RNA, 23 nt, synthetic construct
  source 1..23: mol_type = other RNA
tatggccgccagagccaacacca

SEQ ID NO: 94328 - RNA, 23 nt, synthetic construct
  source 1..23: mol_type = other RNA
tccacgagcatggccgccagagc

SEQ ID NO: 94329 - RNA, 23 nt, synthetic construct
  source 1..23: mol_type = other RNA
ttgggtctctgcctgcggcacca

SEQ ID NO: 94330 - RNA, 23 nt, synthetic construct
  source 1..23: mol_type = other RNA
tcgcggcagtgctcagagaacac

SEQ ID NO: 94331 - RNA, 23 nt, synthetic construct
  source 1..23: mol_type = other RNA
tctctccgttccacaggaatgtc

SEQ ID NO: 94332 - RNA, 23 nt, synthetic construct
  source 1..23: mol_type = other RNA
tctggttggcgtatttgggatcc

SEQ ID NO: 94333 - RNA, 23 nt, synthetic construct
  source 1..23: mol_type = other RNA
tcctggcgttgtgggcatagaac

SEQ ID NO: 94334 - RNA, 23 nt, synthetic construct
  source 1..23: mol_type = other RNA
ttgctgcatgttgagggggcagg

SEQ ID NO: 94335 - RNA, 23 nt, synthetic construct
  source 1..23: mol_type = other RNA
tgtgaagctgctgtcggcacatt

SEQ ID NO: 94336 - RNA, 23 nt, synthetic construct
  source 1..23: mol_type = other RNA
tccacgatgaagaagctcgaggg

SEQ ID NO: 94337 - RNA, 23 nt, synthetic construct
  source 1..23: mol_type = other RNA
ttcaaagctgttcctggcattgg

SEQ ID NO: 94338 - RNA, 23 nt, synthetic construct
  source 1..23: mol_type = other RNA
ttgatgatggagtggcagcgcga

SEQ ID NO: 94339 - RNA, 23 nt, synthetic construct
  source 1..23: mol_type = other RNA
tgtacgcccttggcggcacaggc

SEQ ID NO: 94340 - RNA, 23 nt, synthetic construct
  source 1..23: mol_type = other RNA
tgtggtgttgtccccacagtagt

SEQ ID NO: 94341 - RNA, 23 nt, synthetic construct
  source 1..23: mol_type = other RNA
ttgtagggtgggtccccacccgg

SEQ ID NO: 94342 - RNA, 23 nt, synthetic construct
  source 1..23: mol_type = other RNA
tttgtagggtgggtccccacccg

SEQ ID NO: 94343 - RNA, 23 nt, synthetic construct
  source 1..23: mol_type = other RNA
tatggcgttgtggctggagttcc

SEQ ID NO: 94344 - RNA, 23 nt, synthetic construct
  source 1..23: mol_type = other RNA
tgcggcatgtcgggaagctgcgc

SEQ ID NO: 94345 - RNA, 23 nt, synthetic construct
  source 1..23: mol_type = other RNA
tagggggtgaccgtcacggggcc

SEQ ID NO: 94346 - RNA, 23 nt, synthetic construct
  source 1..23: mol_type = other RNA
tggtggtacctggggccgagggg

SEQ ID NO: 94347 - RNA, 23 nt, synthetic construct
  source 1..23: mol_type = other RNA
ttgtagcacatcttgaagacgcc

SEQ ID NO: 94348 - RNA, 23 nt, synthetic construct
  source 1..23: mol_type = other RNA
ttggtcagccccgggctactcgt

SEQ ID NO: 94349 - RNA, 23 nt, synthetic construct
  source 1..23: mol_type = other RNA
tgggggatgtcagtccttctgag

SEQ ID NO: 94350 - RNA, 23 nt, synthetic construct
  source 1..23: mol_type = other RNA
tgtaccaagggtgcttgtgtatc

SEQ ID NO: 94351 - RNA, 23 nt, synthetic construct
  source 1..23: mol_type = other RNA
tgtgttggaagggtggatgtggc

SEQ ID NO: 94352 - RNA, 23 nt, synthetic construct
  source 1..23: mol_type = other RNA
tggcgccatgtgcccaagctccc

SEQ ID NO: 94353 - RNA, 23 nt, synthetic construct
  source 1..23: mol_type = other RNA
tggggcgccatgtgcccaagctc

SEQ ID NO: 94354 - RNA, 23 nt, synthetic construct
  source 1..23: mol_type = other RNA
tttgccattgttgttggggccag

SEQ ID NO: 94355 - RNA, 23 nt, synthetic construct
  source 1..23: mol_type = other RNA
ttctcggcctgagaggtggacag

SEQ ID NO: 94356 - RNA, 23 nt, synthetic construct
  source 1..23: mol_type = other RNA
tctgtgaagcccgtggttgtggt

SEQ ID NO: 94357 - RNA, 23 nt, synthetic construct
  source 1..23: mol_type = other RNA
ttggttgtgctgatccacactgg

SEQ ID NO: 94358 - RNA, 23 nt, synthetic construct
  source 1..23: mol_type = other RNA
ttgccatagaaccagtggccaca

SEQ ID NO: 94359 - RNA, 23 nt, synthetic construct
  source 1..23: mol_type = other RNA
tttgccatagaaccagtggccac

SEQ ID NO: 94360 - RNA, 23 nt, synthetic construct
  source 1..23: mol_type = other RNA
tatgggagttgtcccaggagttg

SEQ ID NO: 94361 - RNA, 23 nt, synthetic construct
  source 1..23: mol_type = other RNA
tggcggtggtggtcagcactggg

SEQ ID NO: 94362 - RNA, 23 nt, synthetic construct
  source 1..23: mol_type = other RNA
tgaagtccaggctgtgcgcaccg

SEQ ID NO: 94363 - RNA, 23 nt, synthetic construct
  source 1..23: mol_type = other RNA
tcggtggttctgctgctagggtg

SEQ ID NO: 94364 - RNA, 23 nt, synthetic construct
  source 1..23: mol_type = other RNA
tcaaagtccccgccagagggccc

SEQ ID NO: 94365 - RNA, 23 nt, synthetic construct
  source 1..23: mol_type = other RNA
tggatgttggagtaggtgtcaaa

SEQ ID NO: 94366 - RNA, 23 nt, synthetic construct
  source 1..23: mol_type = other RNA
tggaggggatggctgtaaagctg

SEQ ID NO: 94367 - RNA, 23 nt, synthetic construct
  source 1..23: mol_type = other RNA
tctgtgaagcccgtggttgtggt

SEQ ID NO: 94368 - RNA, 23 nt, synthetic construct
  source 1..23: mol_type = other RNA
tctgatccacactggaagcgtgc

SEQ ID NO: 94369 - RNA, 23 nt, synthetic construct
  source 1..23: mol_type = other RNA
ttggttgtgctgatccacactgg

SEQ ID NO: 94370 - RNA, 23 nt, synthetic construct
  source 1..23: mol_type = other RNA
ttgccatagaaccagtggccaca

SEQ ID NO: 94371 - RNA, 23 nt, synthetic construct
  source 1..23: mol_type = other RNA
tttgccatagaaccagtggccac

SEQ ID NO: 94372 - RNA, 23 nt, synthetic construct
  source 1..23: mol_type = other RNA
tggcggtggtggtcagcactggg

SEQ ID NO: 94373 - RNA, 23 nt, synthetic construct
  source 1..23: mol_type = other RNA
tgaagtccaggctgtgcgcaccg

SEQ ID NO: 94374 - RNA, 23 nt, synthetic construct
  source 1..23: mol_type = other RNA
tgaagtccccgtggaaggctctg

SEQ ID NO: 94375 - RNA, 23 nt, synthetic construct
  source 1..23: mol_type = other RNA
tctcggtggtcctgctgctaggg

SEQ ID NO: 94376 - RNA, 23 nt, synthetic construct
  source 1..23: mol_type = other RNA
tcaaagtccccgccagagggccc

SEQ ID NO: 94377 - RNA, 23 nt, synthetic construct
  source 1..23: mol_type = other RNA
tggatgttggagtaggtgtcaaa

SEQ ID NO: 94378 - RNA, 23 nt, synthetic construct
  source 1..23: mol_type = other RNA
tgtcccggtggtcccaagggtga

SEQ ID NO: 94379 - RNA, 23 nt, synthetic construct
  source 1..23: mol_type = other RNA
taactggtggcccttgtcgtggt

SEQ ID NO: 94380 - RNA, 23 nt, synthetic construct
  source 1..23: mol_type = other RNA
tggcgggtccaggcggtgcccag

SEQ ID NO: 94381 - RNA, 23 nt, synthetic construct
  source 1..23: mol_type = other RNA
tctgtgaagcccgtggttgtggt

SEQ ID NO: 94382 - RNA, 23 nt, synthetic construct
  source 1..23: mol_type = other RNA
ttggttgtgctgatccacactgg

SEQ ID NO: 94383 - RNA, 23 nt, synthetic construct
  source 1..23: mol_type = other RNA
ttgccatagaaccagtggccaca

SEQ ID NO: 94384 - RNA, 23 nt, synthetic construct
  source 1..23: mol_type = other RNA
tttgccatagaaccagtggccac

SEQ ID NO: 94385 - RNA, 23 nt, synthetic construct
  source 1..23: mol_type = other RNA
tgagttgtccctggagttgagga

SEQ ID NO: 94386 - RNA, 23 nt, synthetic construct
  source 1..23: mol_type = other RNA
tggcggtggtggtcagcactggg

SEQ ID NO: 94387 - RNA, 23 nt, synthetic construct
  source 1..23: mol_type = other RNA
tgaagtccaggctgtgcgcaccg

SEQ ID NO: 94388 - RNA, 23 nt, synthetic construct
  source 1..23: mol_type = other RNA
tctcggtggtcctgctgctaggg

SEQ ID NO: 94389 - RNA, 23 nt, synthetic construct
  source 1..23: mol_type = other RNA
tcaaagtccccgccagagggccc

SEQ ID NO: 94390 - RNA, 23 nt, synthetic construct
  source 1..23: mol_type = other RNA
tggatgttggagtaggtgtcaaa

SEQ ID NO: 94391 - RNA, 23 nt, synthetic construct
  source 1..23: mol_type = other RNA
tggaggggatggctgtaaagctg

SEQ ID NO: 94392 - RNA, 23 nt, synthetic construct
  source 1..23: mol_type = other RNA
tctgtgaagcccgtggttgtggt

SEQ ID NO: 94393 - RNA, 23 nt, synthetic construct
  source 1..23: mol_type = other RNA
ttggttgtgctgatccacactgg

SEQ ID NO: 94394 - RNA, 23 nt, synthetic construct
  source 1..23: mol_type = other RNA
ttgccatagaaccagtggccaca

SEQ ID NO: 94395 - RNA, 23 nt, synthetic construct
  source 1..23: mol_type = other RNA
tttgccatagaaccagtggccac

SEQ ID NO: 94396 - RNA, 23 nt, synthetic construct
  source 1..23: mol_type = other RNA
tggcggtggtggtcagcactggg

SEQ ID NO: 94397 - RNA, 23 nt, synthetic construct
  source 1..23: mol_type = other RNA
tgaagtccaggctgtgcgcaccg

SEQ ID NO: 94398 - RNA, 23 nt, synthetic construct
  source 1..23: mol_type = other RNA
tgaagtccccgtggaaggctctg

SEQ ID NO: 94399 - RNA, 23 nt, synthetic construct
  source 1..23: mol_type = other RNA
tctcggtggtcctgctgctaggg

SEQ ID NO: 94400 - RNA, 23 nt, synthetic construct
  source 1..23: mol_type = other RNA
tcaaagtccccgccagagggccc

SEQ ID NO: 94401 - RNA, 23 nt, synthetic construct
  source 1..23: mol_type = other RNA
tggatgttggagtaggtgtcaaa

SEQ ID NO: 94402 - RNA, 23 nt, synthetic construct
  source 1..23: mol_type = other RNA
tgtcccggtggtcccaagggtgg

SEQ ID NO: 94403 - RNA, 23 nt, synthetic construct
  source 1..23: mol_type = other RNA
taactggtggcccttgtcgtggt

SEQ ID NO: 94404 - RNA, 23 nt, synthetic construct
  source 1..23: mol_type = other RNA
tggaggggatggctgtaaagctg

SEQ ID NO: 94405 - RNA, 23 nt, synthetic construct
  source 1..23: mol_type = other RNA
tctgtgaagcccgtggttgtggt

SEQ ID NO: 94406 - RNA, 23 nt, synthetic construct
  source 1..23: mol_type = other RNA
ttggttgtgctgatccacactgg

SEQ ID NO: 94407 - RNA, 23 nt, synthetic construct
  source 1..23: mol_type = other RNA
ttgccatagaaccagtggccaca

SEQ ID NO: 94408 - RNA, 23 nt, synthetic construct
  source 1..23: mol_type = other RNA
tttgccatagaaccagtggccac

SEQ ID NO: 94409 - RNA, 23 nt, synthetic construct
  source 1..23: mol_type = other RNA
tctggtagctgtggattttgtgg

SEQ ID NO: 94410 - RNA, 23 nt, synthetic construct
  source 1..23: mol_type = other RNA
tggaggtgtggattgtggacatg

SEQ ID NO: 94411 - RNA, 23 nt, synthetic construct
  source 1..23: mol_type = other RNA
taggaggtgtggattgtggacat

SEQ ID NO: 94412 - RNA, 23 nt, synthetic construct
  source 1..23: mol_type = other RNA
tgggtcgtccccagagtggagga

SEQ ID NO: 94413 - RNA, 23 nt, synthetic construct
  source 1..23: mol_type = other RNA
tttgggggtgtgagctgttccca

SEQ ID NO: 94414 - RNA, 23 nt, synthetic construct
  source 1..23: mol_type = other RNA
taactgtccaaatgccctgcaga

SEQ ID NO: 94415 - RNA, 23 nt, synthetic construct
  source 1..23: mol_type = other RNA
tattgtagatgacttccccgggc

SEQ ID NO: 94416 - RNA, 23 nt, synthetic construct
  source 1..23: mol_type = other RNA
tctgcgtagaaatggcagccggc

SEQ ID NO: 94417 - RNA, 23 nt, synthetic construct
  source 1..23: mol_type = other RNA
tttgggtccagcaggacgacacg

SEQ ID NO: 94418 - RNA, 23 nt, synthetic construct
  source 1..23: mol_type = other RNA
ttgacgttggccacaggctttgg

SEQ ID NO: 94419 - RNA, 23 nt, synthetic construct
  source 1..23: mol_type = other RNA
tgcatggatctctctcatgagga

SEQ ID NO: 94420 - RNA, 23 nt, synthetic construct
  source 1..23: mol_type = other RNA
tcgtgcatggatctctctcatga

SEQ ID NO: 94421 - RNA, 23 nt, synthetic construct
  source 1..23: mol_type = other RNA
taacaggatcaggccctcctcct

SEQ ID NO: 94422 - RNA, 23 nt, synthetic construct
  source 1..23: mol_type = other RNA
taaacaggatcaggccctcctcc

SEQ ID NO: 94423 - RNA, 23 nt, synthetic construct
  source 1..23: mol_type = other RNA
tcacgcatggtggtggtccccag

SEQ ID NO: 94424 - RNA, 23 nt, synthetic construct
  source 1..23: mol_type = other RNA
ttgctagacaccggggctgcggg

SEQ ID NO: 94425 - RNA, 23 nt, synthetic construct
  source 1..23: mol_type = other RNA
tgcaggcgttgaagaatgggccc

SEQ ID NO: 94426 - RNA, 23 nt, synthetic construct
  source 1..23: mol_type = other RNA
tgcagatgcccatgtgtgcgttg

SEQ ID NO: 94427 - RNA, 23 nt, synthetic construct
  source 1..23: mol_type = other RNA
tggaaggttgcaccaaccccgta

SEQ ID NO: 94428 - RNA, 23 nt, synthetic construct
  source 1..23: mol_type = other RNA
tgctggccatcgggcgtgaggca

SEQ ID NO: 94429 - RNA, 23 nt, synthetic construct
  source 1..23: mol_type = other RNA
ttggtggcccttgtcgtggtggc

SEQ ID NO: 94430 - RNA, 23 nt, synthetic construct
  source 1..23: mol_type = other RNA
ttggtggcccttgtcgtggtggc

SEQ ID NO: 94431 - RNA, 23 nt, synthetic construct
  source 1..23: mol_type = other RNA
tcaggccgaagtggacgtcacag

SEQ ID NO: 94432 - RNA, 23 nt, synthetic construct
  source 1..23: mol_type = other RNA
tggcaggaatgtccacacgcatg

SEQ ID NO: 94433 - RNA, 23 nt, synthetic construct
  source 1..23: mol_type = other RNA
tgtggggggtgtgccagtcgggg

SEQ ID NO: 94434 - RNA, 23 nt, synthetic construct
  source 1..23: mol_type = other RNA
tcagctcggctccacagggccct

SEQ ID NO: 94435 - RNA, 23 nt, synthetic construct
  source 1..23: mol_type = other RNA
tccgcccattgtgcgccgggttc

SEQ ID NO: 94436 - RNA, 23 nt, synthetic construct
  source 1..23: mol_type = other RNA
tggtcccctcttggaggatcagc

SEQ ID NO: 94437 - RNA, 23 nt, synthetic construct
  source 1..23: mol_type = other RNA
ttcttgtagggtgggtccccacc

SEQ ID NO: 94438 - RNA, 23 nt, synthetic construct
  source 1..23: mol_type = other RNA
tcagagcgggggactctgttggc

SEQ ID NO: 94439 - RNA, 23 nt, synthetic construct
  source 1..23: mol_type = other RNA
tggtggcggggttgtggcacgtc

SEQ ID NO: 94440 - RNA, 23 nt, synthetic construct
  source 1..23: mol_type = other RNA
ttgggggatgtcagtccttctga

SEQ ID NO: 94441 - RNA, 23 nt, synthetic construct
  source 1..23: mol_type = other RNA
ttggccgaagtccaggctgtgcg

SEQ ID NO: 94442 - RNA, 23 nt, synthetic construct
  source 1..23: mol_type = other RNA
tctcacggttcctgcagaccagg

SEQ ID NO: 94443 - RNA, 23 nt, synthetic construct
  source 1..23: mol_type = other RNA
ttggccgaagtccaggctgtgcg

SEQ ID NO: 94444 - RNA, 23 nt, synthetic construct
  source 1..23: mol_type = other RNA
tggaagtccccgtggaaggctct

SEQ ID NO: 94445 - RNA, 23 nt, synthetic construct
  source 1..23: mol_type = other RNA
tctcacggttcctgcagaccagg

SEQ ID NO: 94446 - RNA, 23 nt, synthetic construct
  source 1..23: mol_type = other RNA
ttggccgaagtccaggctgtgcg

SEQ ID NO: 94447 - RNA, 23 nt, synthetic construct
  source 1..23: mol_type = other RNA
tctcacggttcctgcagaccagg

SEQ ID NO: 94448 - RNA, 23 nt, synthetic construct
  source 1..23: mol_type = other RNA
ttggccgaagtccaggctgtgcg

SEQ ID NO: 94449 - RNA, 23 nt, synthetic construct
  source 1..23: mol_type = other RNA
tggaagtccccgtggaaggctct

SEQ ID NO: 94450 - RNA, 23 nt, synthetic construct
  source 1..23: mol_type = other RNA
tctcacggttcctgcagaccagg

SEQ ID NO: 94451 - RNA, 23 nt, synthetic construct
  source 1..23: mol_type = other RNA
tgggaaggttgcaccaaccccgt

SEQ ID NO: 94452 - RNA, 23 nt, synthetic construct
  source 1..23: mol_type = other RNA
ttgttgacccaggtttcattcag

SEQ ID NO: 94453 - RNA, 23 nt, synthetic construct
  source 1..23: mol_type = other RNA
ttgcgacctcagccctgagttac

SEQ ID NO: 94454 - RNA, 23 nt, synthetic construct
  source 1..23: mol_type = other RNA
ttcaatgctcagggtttatttgc

SEQ ID NO: 94455 - RNA, 23 nt, synthetic construct
  source 1..23: mol_type = other RNA
tgggtgtgggaagtcaccgtgga

SEQ ID NO: 94456 - RNA, 23 nt, synthetic construct
  source 1..23: mol_type = other RNA
tgtccgtcaggccgcacttccgc

SEQ ID NO: 94457 - RNA, 23 nt, synthetic construct
  source 1..23: mol_type = other RNA
taaggaaacgctgcaggtgacgt

SEQ ID NO: 94458 - RNA, 23 nt, synthetic construct
  source 1..23: mol_type = other RNA
ttcccatccgacaccagccccgg

SEQ ID NO: 94459 - RNA, 23 nt, synthetic construct
  source 1..23: mol_type = other RNA
ttctccaggcttgtaggtggcct

SEQ ID NO: 94460 - RNA, 23 nt, synthetic construct
  source 1..23: mol_type = other RNA
tgcagagaacccgcagctcgtag

SEQ ID NO: 94461 - RNA, 23 nt, synthetic construct
  source 1..23: mol_type = other RNA
tagggccccggcatggggtagct

SEQ ID NO: 94462 - RNA, 23 nt, synthetic construct
  source 1..23: mol_type = other RNA
tagggccccggcatggggtagct

SEQ ID NO: 94463 - RNA, 23 nt, synthetic construct
  source 1..23: mol_type = other RNA
tagggccccggcatggggtagct

SEQ ID NO: 94464 - RNA, 23 nt, synthetic construct
  source 1..23: mol_type = other RNA
tagggccccggcatggggtagct

SEQ ID NO: 94465 - RNA, 23 nt, synthetic construct
  source 1..23: mol_type = other RNA
tgtggtcagcactctggcggtgt

SEQ ID NO: 94466 - RNA, 23 nt, synthetic construct
  source 1..23: mol_type = other RNA
ttggggggtgtgccagtcggggc

SEQ ID NO: 94467 - RNA, 23 nt, synthetic construct
  source 1..23: mol_type = other RNA
ttgcaggcgttgaagaatgggcc

SEQ ID NO: 94468 - RNA, 23 nt, synthetic construct
  source 1..23: mol_type = other RNA
ttctgcgtaagcctccaggctct

SEQ ID NO: 94469 - RNA, 23 nt, synthetic construct
  source 1..23: mol_type = other RNA
tctggcagttgctgacccaccgc

SEQ ID NO: 94470 - RNA, 23 nt, synthetic construct
  source 1..23: mol_type = other RNA
tgtacacatgtggcagggaaggg

SEQ ID NO: 94471 - RNA, 23 nt, synthetic construct
  source 1..23: mol_type = other RNA
tacctcggtctcgcagccctggt

SEQ ID NO: 94472 - RNA, 23 nt, synthetic construct
  source 1..23: mol_type = other RNA
tcacacggcgccctcgtcgtgca

SEQ ID NO: 94473 - RNA, 23 nt, synthetic construct
  source 1..23: mol_type = other RNA
tctgccatagccccccggagcag

SEQ ID NO: 94474 - RNA, 23 nt, synthetic construct
  source 1..23: mol_type = other RNA
tgccctcgtcgtgcaccacctct

SEQ ID NO: 94475 - RNA, 23 nt, synthetic construct
  source 1..23: mol_type = other RNA
ttcccacccgtacatgaacacac

SEQ ID NO: 94476 - RNA, 23 nt, synthetic construct
  source 1..23: mol_type = other RNA
tcgccgtcgaccggatgctcggg

SEQ ID NO: 94477 - RNA, 23 nt, synthetic construct
  source 1..23: mol_type = other RNA
tgcactttggtagtgtgagctgt

SEQ ID NO: 94478 - RNA, 23 nt, synthetic construct
  source 1..23: mol_type = other RNA
tggcatggggtagctgtagtcca

SEQ ID NO: 94479 - RNA, 23 nt, synthetic construct
  source 1..23: mol_type = other RNA
tgcactttggtagtgtgagctgt

SEQ ID NO: 94480 - RNA, 23 nt, synthetic construct
  source 1..23: mol_type = other RNA
tggcatggggtagctgtagtcca

SEQ ID NO: 94481 - RNA, 23 nt, synthetic construct
  source 1..23: mol_type = other RNA
tgcactttggtagtgtgagctgt

SEQ ID NO: 94482 - RNA, 23 nt, synthetic construct
  source 1..23: mol_type = other RNA
tggcatggggtagctgtagtcca

SEQ ID NO: 94483 - RNA, 23 nt, synthetic construct
  source 1..23: mol_type = other RNA
tgcactttggtagtgtgagctgt

SEQ ID NO: 94484 - RNA, 23 nt, synthetic construct
  source 1..23: mol_type = other RNA
tggcatggggtagctgtagtcca

SEQ ID NO: 94485 - RNA, 23 nt, synthetic construct
  source 1..23: mol_type = other RNA
tgcactttggtagtgtgagctgt

SEQ ID NO: 94486 - RNA, 23 nt, synthetic construct
  source 1..23: mol_type = other RNA
tctgggacggtccacgtggtcca

SEQ ID NO: 94487 - RNA, 23 nt, synthetic construct
  source 1..23: mol_type = other RNA
tcctgcggcaccacgagcatggc

SEQ ID NO: 94488 - RNA, 23 nt, synthetic construct
  source 1..23: mol_type = other RNA
tccgccatccatggtgtgccctg

SEQ ID NO: 94489 - RNA, 23 nt, synthetic construct
  source 1..23: mol_type = other RNA
tctgctgtcggcacatttcttgg

SEQ ID NO: 94490 - RNA, 23 nt, synthetic construct
  source 1..23: mol_type = other RNA
tcgcggcaagtgggctggcaggc

SEQ ID NO: 94491 - RNA, 23 nt, synthetic construct
  source 1..23: mol_type = other RNA
tacaggcacgaaggaaacgctgc

SEQ ID NO: 94492 - RNA, 23 nt, synthetic construct
  source 1..23: mol_type = other RNA
tctcctgggcgggcacacaggcg

SEQ ID NO: 94493 - RNA, 23 nt, synthetic construct
  source 1..23: mol_type = other RNA
tcgtagcaggggcactcctgggc

SEQ ID NO: 94494 - RNA, 23 nt, synthetic construct
  source 1..23: mol_type = other RNA
tgaatggcgttgtggctggagtt

SEQ ID NO: 94495 - RNA, 23 nt, synthetic construct
  source 1..23: mol_type = other RNA
tccgtcacggggcctgagctgga

SEQ ID NO: 94496 - RNA, 23 nt, synthetic construct
  source 1..23: mol_type = other RNA
taccaggccgaagtggacgtcac

SEQ ID NO: 94497 - RNA, 23 nt, synthetic construct
  source 1..23: mol_type = other RNA
tagaggacccggatcctgtagtt

SEQ ID NO: 94498 - RNA, 23 nt, synthetic construct
  source 1..23: mol_type = other RNA
tgctagggtgagggctggacagg

SEQ ID NO: 94499 - RNA, 23 nt, synthetic construct
  source 1..23: mol_type = other RNA
ttcagcactgtggaggtgtgggt

SEQ ID NO: 94500 - RNA, 23 nt, synthetic construct
  source 1..23: mol_type = other RNA
tgtgctggtcagcactttgaggg

SEQ ID NO: 94501 - RNA, 23 nt, synthetic construct
  source 1..23: mol_type = other RNA
tgcagggaccgcccgtgtgtggt

SEQ ID NO: 94502 - RNA, 23 nt, synthetic construct
  source 1..23: mol_type = other RNA
tgctagggtgagggctggacagg

SEQ ID NO: 94503 - RNA, 23 nt, synthetic construct
  source 1..23: mol_type = other RNA
tgctagggtgagggctggacagg

SEQ ID NO: 94504 - RNA, 23 nt, synthetic construct
  source 1..23: mol_type = other RNA
ttcagcactgtggaggtgtgggt

SEQ ID NO: 94505 - RNA, 23 nt, synthetic construct
  source 1..23: mol_type = other RNA
ttcagcactgtggaggtgtgggt

SEQ ID NO: 94506 - RNA, 23 nt, synthetic construct
  source 1..23: mol_type = other RNA
tgcacactgcgtagaaatggcag

SEQ ID NO: 94507 - RNA, 23 nt, synthetic construct
  source 1..23: mol_type = other RNA
tagtgaggacgatatccatggac

SEQ ID NO: 94508 - RNA, 23 nt, synthetic construct
  source 1..23: mol_type = other RNA
tatcacagagcggctgtggtggg

SEQ ID NO: 94509 - RNA, 23 nt, synthetic construct
  source 1..23: mol_type = other RNA
tggcccgggggcacaaggttgtg

SEQ ID NO: 94510 - RNA, 23 nt, synthetic construct
  source 1..23: mol_type = other RNA
tctctgcgtaagcctccaggctc

SEQ ID NO: 94511 - RNA, 23 nt, synthetic construct
  source 1..23: mol_type = other RNA
taggtgaggtcgcacaggccacc

SEQ ID NO: 94512 - RNA, 23 nt, synthetic construct
  source 1..23: mol_type = other RNA
taaatttaggaaacccatcgggt

SEQ ID NO: 94513 - RNA, 23 nt, synthetic construct
  source 1..23: mol_type = other RNA
tcatcgggcgtgaggcaggcggt

SEQ ID NO: 94514 - RNA, 23 nt, synthetic construct
  source 1..23: mol_type = other RNA
tcttggacgctccggggcaggag

SEQ ID NO: 94515 - RNA, 23 nt, synthetic construct
  source 1..23: mol_type = other RNA
tccacactcatccacgtgggtgt

SEQ ID NO: 94516 - RNA, 23 nt, synthetic construct
  source 1..23: mol_type = other RNA
taggaggcccaaggttttcatga

SEQ ID NO: 94517 - RNA, 23 nt, synthetic construct
  source 1..23: mol_type = other RNA
tcggccggacgtggccagctgga

SEQ ID NO: 94518 - RNA, 23 nt, synthetic construct
  source 1..23: mol_type = other RNA
tttctcagggtggaggtcggggt

SEQ ID NO: 94519 - RNA, 23 nt, synthetic construct
  source 1..23: mol_type = other RNA
tccagcgtccggcacgcgctcgg

SEQ ID NO: 94520 - RNA, 23 nt, synthetic construct
  source 1..23: mol_type = other RNA
ttgtccgtcaggccgcacttccg

SEQ ID NO: 94521 - RNA, 23 nt, synthetic construct
  source 1..23: mol_type = other RNA
tatcttgtagggtgggtccccac

SEQ ID NO: 94522 - RNA, 23 nt, synthetic construct
  source 1..23: mol_type = other RNA
tgccgagggggtgaccgtcacgg

SEQ ID NO: 94523 - RNA, 23 nt, synthetic construct
  source 1..23: mol_type = other RNA
tgagcctgcaggcgtcgtggggc

SEQ ID NO: 94524 - RNA, 23 nt, synthetic construct
  source 1..23: mol_type = other RNA
ttggccgtggcggtaagcactgt

SEQ ID NO: 94525 - RNA, 23 nt, synthetic construct
  source 1..23: mol_type = other RNA
ttggccgtggcggtaagcactgt

SEQ ID NO: 94526 - RNA, 23 nt, synthetic construct
  source 1..23: mol_type = other RNA
tagcactggggggataggtgttg

SEQ ID NO: 94527 - RNA, 23 nt, synthetic construct
  source 1..23: mol_type = other RNA
tagcactggggggataggtgttg

SEQ ID NO: 94528 - RNA, 23 nt, synthetic construct
  source 1..23: mol_type = other RNA
tcggcagtggttccgtcccgctg

SEQ ID NO: 94529 - RNA, 23 nt, synthetic construct
  source 1..23: mol_type = other RNA
tattcgcagcagagaacccgcag

SEQ ID NO: 94530 - RNA, 23 nt, synthetic construct
  source 1..23: mol_type = other RNA
tagcctgcaggcgtcgtggggcc

SEQ ID NO: 94531 - RNA, 23 nt, synthetic construct
  source 1..23: mol_type = other RNA
ttggatctctctcatgaggacat

SEQ ID NO: 94532 - RNA, 23 nt, synthetic construct
  source 1..23: mol_type = other RNA
ttggagcccactaggcctcggcg

SEQ ID NO: 94533 - RNA, 23 nt, synthetic construct
  source 1..23: mol_type = other RNA
taggctgagcgtcaccgctttca

SEQ ID NO: 94534 - RNA, 23 nt, synthetic construct
  source 1..23: mol_type = other RNA
tcgctgagctgtacgcccttggc

SEQ ID NO: 94535 - RNA, 23 nt, synthetic construct
  source 1..23: mol_type = other RNA
ttcaggttttcaaacgtctcaaa

SEQ ID NO: 94536 - RNA, 23 nt, synthetic construct
  source 1..23: mol_type = other RNA
tggccgagggggtgaccgtcacg

SEQ ID NO: 94537 - RNA, 23 nt, synthetic construct
  source 1..23: mol_type = other RNA
tcacatcttgaagacgccctcct

SEQ ID NO: 94538 - RNA, 23 nt, synthetic construct
  source 1..23: mol_type = other RNA
tggagcctgcaggcgtcgtgggg

SEQ ID NO: 94539 - RNA, 23 nt, synthetic construct
  source 1..23: mol_type = other RNA
ttgacagcgggtcgtgccctggc

SEQ ID NO: 94540 - RNA, 23 nt, synthetic construct
  source 1..23: mol_type = other RNA
ttggttgtggtagttggcacttt

SEQ ID NO: 94541 - RNA, 23 nt, synthetic construct
  source 1..23: mol_type = other RNA
ttcagcactgtggcggtgtgggt

SEQ ID NO: 94542 - RNA, 23 nt, synthetic construct
  source 1..23: mol_type = other RNA
tctgtgggtgtcgtggccgtggt

SEQ ID NO: 94543 - RNA, 23 nt, synthetic construct
  source 1..23: mol_type = other RNA
tactgtgggtgtcgtggccgtgg

SEQ ID NO: 94544 - RNA, 23 nt, synthetic construct
  source 1..23: mol_type = other RNA
ttcagcactgtggcggtgtgggt

SEQ ID NO: 94545 - RNA, 23 nt, synthetic construct
  source 1..23: mol_type = other RNA
tctgtgggtgtcgtggccgtggt

SEQ ID NO: 94546 - RNA, 23 nt, synthetic construct
  source 1..23: mol_type = other RNA
tactgtgggtgtcgtggccgtgg

SEQ ID NO: 94547 - RNA, 23 nt, synthetic construct
  source 1..23: mol_type = other RNA
tctgtgggtgtcgtggccgtggt

SEQ ID NO: 94548 - RNA, 23 nt, synthetic construct
  source 1..23: mol_type = other RNA
tactgtgggtgtcgtggccgtgg

SEQ ID NO: 94549 - RNA, 23 nt, synthetic construct
  source 1..23: mol_type = other RNA
tcaccatcacggtggctatagtg

SEQ ID NO: 94550 - RNA, 23 nt, synthetic construct
  source 1..23: mol_type = other RNA
tagaggtacacggtgcagttgtc

SEQ ID NO: 94551 - RNA, 23 nt, synthetic construct
  source 1..23: mol_type = other RNA
tgcacatgcttagtttgttccag

SEQ ID NO: 94552 - RNA, 23 nt, synthetic construct
  source 1..23: mol_type = other RNA
tctgcggcaccacgagcatggcc

SEQ ID NO: 94553 - RNA, 23 nt, synthetic construct
  source 1..23: mol_type = other RNA
tgacgtcggggcaccgccatcca

SEQ ID NO: 94554 - RNA, 23 nt, synthetic construct
  source 1..23: mol_type = other RNA
taggacgtcggggcaccgccatc

SEQ ID NO: 94555 - RNA, 23 nt, synthetic construct
  source 1..23: mol_type = other RNA
tggcggcgcggcagtgctcagag

SEQ ID NO: 94556 - RNA, 23 nt, synthetic construct
  source 1..23: mol_type = other RNA
ttcagcaccagccggatgctgac

SEQ ID NO: 94557 - RNA, 23 nt, synthetic construct
  source 1..23: mol_type = other RNA
tgccggcaagggcagcgggtccg

SEQ ID NO: 94558 - RNA, 23 nt, synthetic construct
  source 1..23: mol_type = other RNA
taccagtgcgtggcactccgcaa

SEQ ID NO: 94559 - RNA, 23 nt, synthetic construct
  source 1..23: mol_type = other RNA
tccaccagtgcgtggcactccgc

SEQ ID NO: 94560 - RNA, 23 nt, synthetic construct
  source 1..23: mol_type = other RNA
ttgcgtgatgtcatccagcaccg

SEQ ID NO: 94561 - RNA, 23 nt, synthetic construct
  source 1..23: mol_type = other RNA
tagtggcagcgcgagaaggcact

SEQ ID NO: 94562 - RNA, 23 nt, synthetic construct
  source 1..23: mol_type = other RNA
tgctgagctgtacgcccttggcg

SEQ ID NO: 94563 - RNA, 23 nt, synthetic construct
  source 1..23: mol_type = other RNA
ttcaggccgcggcaagtgggctg

SEQ ID NO: 94564 - RNA, 23 nt, synthetic construct
  source 1..23: mol_type = other RNA
tcgtcggcctcactcaggccgcg

SEQ ID NO: 94565 - RNA, 23 nt, synthetic construct
  source 1..23: mol_type = other RNA
tcacaggcacgaaggaaacgctg

SEQ ID NO: 94566 - RNA, 23 nt, synthetic construct
  source 1..23: mol_type = other RNA
tgcagtccaggtacaccatgggg

SEQ ID NO: 94567 - RNA, 23 nt, synthetic construct
  source 1..23: mol_type = other RNA
ttgcagtcgaccctgatggtctc

SEQ ID NO: 94568 - RNA, 23 nt, synthetic construct
  source 1..23: mol_type = other RNA
tctggtcttccggtcccaggaca

SEQ ID NO: 94569 - RNA, 23 nt, synthetic construct
  source 1..23: mol_type = other RNA
tccacccgagtcgcaggcacacg

SEQ ID NO: 94570 - RNA, 23 nt, synthetic construct
  source 1..23: mol_type = other RNA
ttcgcagtcgccacccgagtcgc

SEQ ID NO: 94571 - RNA, 23 nt, synthetic construct
  source 1..23: mol_type = other RNA
tccgttgcttccgcagatggcga

SEQ ID NO: 94572 - RNA, 23 nt, synthetic construct
  source 1..23: mol_type = other RNA
tgccgttgcttccgcagatggcg

SEQ ID NO: 94573 - RNA, 23 nt, synthetic construct
  source 1..23: mol_type = other RNA
tgtgccgttgcttccgcagatgg

SEQ ID NO: 94574 - RNA, 23 nt, synthetic construct
  source 1..23: mol_type = other RNA
tgacacacacggtggagaccggg

SEQ ID NO: 94575 - RNA, 23 nt, synthetic construct
  source 1..23: mol_type = other RNA
tggacacacacggtggagaccgg

SEQ ID NO: 94576 - RNA, 23 nt, synthetic construct
  source 1..23: mol_type = other RNA
tctcgtaggctgcggcgttgaga

SEQ ID NO: 94577 - RNA, 23 nt, synthetic construct
  source 1..23: mol_type = other RNA
tcgtggggcctcccgtggtggct

SEQ ID NO: 94578 - RNA, 23 nt, synthetic construct
  source 1..23: mol_type = other RNA
tgcctgcaggcgtcgtggggcct

SEQ ID NO: 94579 - RNA, 23 nt, synthetic construct
  source 1..23: mol_type = other RNA
tggctgagcgtgttggaagggtg

SEQ ID NO: 94580 - RNA, 23 nt, synthetic construct
  source 1..23: mol_type = other RNA
tgggcgagctctggaggttgcca

SEQ ID NO: 94581 - RNA, 23 nt, synthetic construct
  source 1..23: mol_type = other RNA
tctgtcgggcgagctctggaggt

SEQ ID NO: 94582 - RNA, 23 nt, synthetic construct
  source 1..23: mol_type = other RNA
tgaagaggggatgggtgtaacgc

SEQ ID NO: 94583 - RNA, 23 nt, synthetic construct
  source 1..23: mol_type = other RNA
tgagccggtggccccagttgtgg

SEQ ID NO: 94584 - RNA, 23 nt, synthetic construct
  source 1..23: mol_type = other RNA
tgaagcccgtggttgtggtagtt

SEQ ID NO: 94585 - RNA, 23 nt, synthetic construct
  source 1..23: mol_type = other RNA
tcaccgtggagcctctggttgtg

SEQ ID NO: 94586 - RNA, 23 nt, synthetic construct
  source 1..23: mol_type = other RNA
ttagaaccagtggccacagttgt

SEQ ID NO: 94587 - RNA, 23 nt, synthetic construct
  source 1..23: mol_type = other RNA
tcatagaaccagtggccacagtt

SEQ ID NO: 94588 - RNA, 23 nt, synthetic construct
  source 1..23: mol_type = other RNA
tccatagaaccagtggccacagt

SEQ ID NO: 94589 - RNA, 23 nt, synthetic construct
  source 1..23: mol_type = other RNA
ttgctagggtgtgggaagtcacc

SEQ ID NO: 94590 - RNA, 23 nt, synthetic construct
  source 1..23: mol_type = other RNA
tggcagcagggtcgaggtgcggg

SEQ ID NO: 94591 - RNA, 23 nt, synthetic construct
  source 1..23: mol_type = other RNA
tccgtagagctggtggccggggt

SEQ ID NO: 94592 - RNA, 23 nt, synthetic construct
  source 1..23: mol_type = other RNA
tgccgtagagctggtggccgggg

SEQ ID NO: 94593 - RNA, 23 nt, synthetic construct
  source 1..23: mol_type = other RNA
tctgtagtgctcggctctgtgag

SEQ ID NO: 94594 - RNA, 23 nt, synthetic construct
  source 1..23: mol_type = other RNA
tccggtgggcaccgtcacggtgg

SEQ ID NO: 94595 - RNA, 23 nt, synthetic construct
  source 1..23: mol_type = other RNA
taggcggtggccgtggatccggt

SEQ ID NO: 94596 - RNA, 23 nt, synthetic construct
  source 1..23: mol_type = other RNA
tgggtgccagcagttgcctgggt

SEQ ID NO: 94597 - RNA, 23 nt, synthetic construct
  source 1..23: mol_type = other RNA
tcatgtggggtgccagcagttgc

SEQ ID NO: 94598 - RNA, 23 nt, synthetic construct
  source 1..23: mol_type = other RNA
tctggtgactgtgggtgtcgtgg

SEQ ID NO: 94599 - RNA, 23 nt, synthetic construct
  source 1..23: mol_type = other RNA
tgaagcccgtggttgtggtagtc

SEQ ID NO: 94600 - RNA, 23 nt, synthetic construct
  source 1..23: mol_type = other RNA
ttagaaccagtggccacagttgt

SEQ ID NO: 94601 - RNA, 23 nt, synthetic construct
  source 1..23: mol_type = other RNA
tcatagaaccagtggccacagtt

SEQ ID NO: 94602 - RNA, 23 nt, synthetic construct
  source 1..23: mol_type = other RNA
tccatagaaccagtggccacagt

SEQ ID NO: 94603 - RNA, 23 nt, synthetic construct
  source 1..23: mol_type = other RNA
ttgcctgaggtggccgaagtcca

SEQ ID NO: 94604 - RNA, 23 nt, synthetic construct
  source 1..23: mol_type = other RNA
tcggtggtcctgctgctagggtg

SEQ ID NO: 94605 - RNA, 23 nt, synthetic construct
  source 1..23: mol_type = other RNA
tggcagcagggtcgaggtgcggg

SEQ ID NO: 94606 - RNA, 23 nt, synthetic construct
  source 1..23: mol_type = other RNA
tccgtagagctggtggccggggt

SEQ ID NO: 94607 - RNA, 23 nt, synthetic construct
  source 1..23: mol_type = other RNA
tgccgtagagctggtggccgggg

SEQ ID NO: 94608 - RNA, 23 nt, synthetic construct
  source 1..23: mol_type = other RNA
tgtggtctgttctgggagggtcc

SEQ ID NO: 94609 - RNA, 23 nt, synthetic construct
  source 1..23: mol_type = other RNA
tggtggattgtggacatggtggc

SEQ ID NO: 94610 - RNA, 23 nt, synthetic construct
  source 1..23: mol_type = other RNA
tcttgtcgtggtggccttcgtgg

SEQ ID NO: 94611 - RNA, 23 nt, synthetic construct
  source 1..23: mol_type = other RNA
tccggtgggcaccgtcacggtgg

SEQ ID NO: 94612 - RNA, 23 nt, synthetic construct
  source 1..23: mol_type = other RNA
taggcggtggccgtggatccggt

SEQ ID NO: 94613 - RNA, 23 nt, synthetic construct
  source 1..23: mol_type = other RNA
tgggtgccagcagttgcccgggt

SEQ ID NO: 94614 - RNA, 23 nt, synthetic construct
  source 1..23: mol_type = other RNA
tggggatggctgtaacgctggta

SEQ ID NO: 94615 - RNA, 23 nt, synthetic construct
  source 1..23: mol_type = other RNA
ttgtggtagtcggcactttggta

SEQ ID NO: 94616 - RNA, 23 nt, synthetic construct
  source 1..23: mol_type = other RNA
tgaagcccgtggttgtggtagtc

SEQ ID NO: 94617 - RNA, 23 nt, synthetic construct
  source 1..23: mol_type = other RNA
tcaccgtggagcctctggttgtg

SEQ ID NO: 94618 - RNA, 23 nt, synthetic construct
  source 1..23: mol_type = other RNA
ttagaaccagtggccacagttgt

SEQ ID NO: 94619 - RNA, 23 nt, synthetic construct
  source 1..23: mol_type = other RNA
tcatagaaccagtggccacagtt

SEQ ID NO: 94620 - RNA, 23 nt, synthetic construct
  source 1..23: mol_type = other RNA
tccatagaaccagtggccacagt

SEQ ID NO: 94621 - RNA, 23 nt, synthetic construct
  source 1..23: mol_type = other RNA
tcggtggtcctgctgctagggtg

SEQ ID NO: 94622 - RNA, 23 nt, synthetic construct
  source 1..23: mol_type = other RNA
tggcagcagggtcgaggtgcggg

SEQ ID NO: 94623 - RNA, 23 nt, synthetic construct
  source 1..23: mol_type = other RNA
tccgtagagctggtggccggggt

SEQ ID NO: 94624 - RNA, 23 nt, synthetic construct
  source 1..23: mol_type = other RNA
tgccgtagagctggtggccgggg

SEQ ID NO: 94625 - RNA, 23 nt, synthetic construct
  source 1..23: mol_type = other RNA
tctgtagtgctcggctctgtgag

SEQ ID NO: 94626 - RNA, 23 nt, synthetic construct
  source 1..23: mol_type = other RNA
tccggtgggcaccgtcacggtgg

SEQ ID NO: 94627 - RNA, 23 nt, synthetic construct
  source 1..23: mol_type = other RNA
taggcggtggccgtggatccggt

SEQ ID NO: 94628 - RNA, 23 nt, synthetic construct
  source 1..23: mol_type = other RNA
tgggtgccagcagttgcctgggt

SEQ ID NO: 94629 - RNA, 23 nt, synthetic construct
  source 1..23: mol_type = other RNA
tcatgtggggtgccagcagttgc

SEQ ID NO: 94630 - RNA, 23 nt, synthetic construct
  source 1..23: mol_type = other RNA
tctggtgactgtgggtgtcgtgg

SEQ ID NO: 94631 - RNA, 23 nt, synthetic construct
  source 1..23: mol_type = other RNA
ttgtggtagtcggcactttggta

SEQ ID NO: 94632 - RNA, 23 nt, synthetic construct
  source 1..23: mol_type = other RNA
tgaagcccgtggttgtggtagtc

SEQ ID NO: 94633 - RNA, 23 nt, synthetic construct
  source 1..23: mol_type = other RNA
tccactggttgtgggtgtggtgg

SEQ ID NO: 94634 - RNA, 23 nt, synthetic construct
  source 1..23: mol_type = other RNA
ttagaaccagtggccacagttgt

SEQ ID NO: 94635 - RNA, 23 nt, synthetic construct
  source 1..23: mol_type = other RNA
tcatagaaccagtggccacagtt

SEQ ID NO: 94636 - RNA, 23 nt, synthetic construct
  source 1..23: mol_type = other RNA
tccatagaaccagtggccacagt

SEQ ID NO: 94637 - RNA, 23 nt, synthetic construct
  source 1..23: mol_type = other RNA
ttgcctgaggtggccgaagtcca

SEQ ID NO: 94638 - RNA, 23 nt, synthetic construct
  source 1..23: mol_type = other RNA
tcggtggtcctgctgctagggtg

SEQ ID NO: 94639 - RNA, 23 nt, synthetic construct
  source 1..23: mol_type = other RNA
tggcagcagggtcgaggtgcggg

SEQ ID NO: 94640 - RNA, 23 nt, synthetic construct
  source 1..23: mol_type = other RNA
tccgtagagctggtggccggggt

SEQ ID NO: 94641 - RNA, 23 nt, synthetic construct
  source 1..23: mol_type = other RNA
tgccgtagagctggtggccgggg

SEQ ID NO: 94642 - RNA, 23 nt, synthetic construct
  source 1..23: mol_type = other RNA
tgtggtctgttctgggagggtcc

SEQ ID NO: 94643 - RNA, 23 nt, synthetic construct
  source 1..23: mol_type = other RNA
tggtggattgtggacatggtggc

SEQ ID NO: 94644 - RNA, 23 nt, synthetic construct
  source 1..23: mol_type = other RNA
tcttgtcgtggtggccttcgtgg

SEQ ID NO: 94645 - RNA, 23 nt, synthetic construct
  source 1..23: mol_type = other RNA
tctgtagtgctcggctctgtgag

SEQ ID NO: 94646 - RNA, 23 nt, synthetic construct
  source 1..23: mol_type = other RNA
tccggtgggcaccgtcacggtgg

SEQ ID NO: 94647 - RNA, 23 nt, synthetic construct
  source 1..23: mol_type = other RNA
taggcggtggccgtggatccggt

SEQ ID NO: 94648 - RNA, 23 nt, synthetic construct
  source 1..23: mol_type = other RNA
tgggtgccagcagttgcctgggt

SEQ ID NO: 94649 - RNA, 23 nt, synthetic construct
  source 1..23: mol_type = other RNA
tcatgtggggtgccagcagttgc

SEQ ID NO: 94650 - RNA, 23 nt, synthetic construct
  source 1..23: mol_type = other RNA
tctggtgactgtgggtgtcgtgg

SEQ ID NO: 94651 - RNA, 23 nt, synthetic construct
  source 1..23: mol_type = other RNA
ttgtggtagtcggcactttggta

SEQ ID NO: 94652 - RNA, 23 nt, synthetic construct
  source 1..23: mol_type = other RNA
tgaagcccgtggttgtggtagtc

SEQ ID NO: 94653 - RNA, 23 nt, synthetic construct
  source 1..23: mol_type = other RNA
tccactggttgtgggtgtggtgg

SEQ ID NO: 94654 - RNA, 23 nt, synthetic construct
  source 1..23: mol_type = other RNA
ttcagcactctggcggtgtgggt

SEQ ID NO: 94655 - RNA, 23 nt, synthetic construct
  source 1..23: mol_type = other RNA
ttagaaccagtggccacagttgt

SEQ ID NO: 94656 - RNA, 23 nt, synthetic construct
  source 1..23: mol_type = other RNA
tcatagaaccagtggccacagtt

SEQ ID NO: 94657 - RNA, 23 nt, synthetic construct
  source 1..23: mol_type = other RNA
tccatagaaccagtggccacagt

SEQ ID NO: 94658 - RNA, 23 nt, synthetic construct
  source 1..23: mol_type = other RNA
tctggggtgatgggtgttgtccc

SEQ ID NO: 94659 - RNA, 23 nt, synthetic construct
  source 1..23: mol_type = other RNA
tgcaccatcacggtggctatagt

SEQ ID NO: 94660 - RNA, 23 nt, synthetic construct
  source 1..23: mol_type = other RNA
tgtggaaccggtgggcaccatca

SEQ ID NO: 94661 - RNA, 23 nt, synthetic construct
  source 1..23: mol_type = other RNA
tcgtggaaccggtgggcaccatc

SEQ ID NO: 94662 - RNA, 23 nt, synthetic construct
  source 1..23: mol_type = other RNA
tccgtggaaccggtgggcaccat

SEQ ID NO: 94663 - RNA, 23 nt, synthetic construct
  source 1..23: mol_type = other RNA
tatggtggtcaccactttggggg

SEQ ID NO: 94664 - RNA, 23 nt, synthetic construct
  source 1..23: mol_type = other RNA
tgatgacttccccgggcgagaaa

SEQ ID NO: 94665 - RNA, 23 nt, synthetic construct
  source 1..23: mol_type = other RNA
tacgttggccacaggctttgggt

SEQ ID NO: 94666 - RNA, 23 nt, synthetic construct
  source 1..23: mol_type = other RNA
tcagggctggctcgggtccgaca

SEQ ID NO: 94667 - RNA, 23 nt, synthetic construct
  source 1..23: mol_type = other RNA
tcatgctgcagatgcactcgcac

SEQ ID NO: 94668 - RNA, 23 nt, synthetic construct
  source 1..23: mol_type = other RNA
tctgtcggggaccagccacgtct

SEQ ID NO: 94669 - RNA, 23 nt, synthetic construct
  source 1..23: mol_type = other RNA
tgggcccgggggcacaaggttgt

SEQ ID NO: 94670 - RNA, 23 nt, synthetic construct
  source 1..23: mol_type = other RNA
ttctggcagggcacctcaaggcg

SEQ ID NO: 94671 - RNA, 23 nt, synthetic construct
  source 1..23: mol_type = other RNA
ttgaggtcgcacaggccaccggt

SEQ ID NO: 94672 - RNA, 23 nt, synthetic construct
  source 1..23: mol_type = other RNA
tgtggcaggctgtatggggccgc

SEQ ID NO: 94673 - RNA, 23 nt, synthetic construct
  source 1..23: mol_type = other RNA
tgcctgggaaggttgcaccaacc

SEQ ID NO: 94674 - RNA, 23 nt, synthetic construct
  source 1..23: mol_type = other RNA
tctcctgacattgcaccgttggg

SEQ ID NO: 94675 - RNA, 23 nt, synthetic construct
  source 1..23: mol_type = other RNA
tcaggcggtctggacgcactccc

SEQ ID NO: 94676 - RNA, 23 nt, synthetic construct
  source 1..23: mol_type = other RNA
tagttgtccacatggctgttgac

SEQ ID NO: 94677 - RNA, 23 nt, synthetic construct
  source 1..23: mol_type = other RNA
tgcagctggacacatctgggcag

SEQ ID NO: 94678 - RNA, 23 nt, synthetic construct
  source 1..23: mol_type = other RNA
tccctcgcagaaggtgatgttga

SEQ ID NO: 94679 - RNA, 23 nt, synthetic construct
  source 1..23: mol_type = other RNA
tcagaggaggcccaaggttttca

SEQ ID NO: 94680 - RNA, 23 nt, synthetic construct
  source 1..23: mol_type = other RNA
tgtttcacccacggggtgggcag

SEQ ID NO: 94681 - RNA, 23 nt, synthetic construct
  source 1..23: mol_type = other RNA
tttctggggccggtttcacccac

SEQ ID NO: 94682 - RNA, 23 nt, synthetic construct
  source 1..23: mol_type = other RNA
tcctgagtggcgccctcccgaaa

SEQ ID NO: 94683 - RNA, 23 nt, synthetic construct
  source 1..23: mol_type = other RNA
ttcctgagtggcgccctcccgaa

SEQ ID NO: 94684 - RNA, 23 nt, synthetic construct
  source 1..23: mol_type = other RNA
tgcaggcatggacaggcggccgc

SEQ ID NO: 94685 - RNA, 23 nt, synthetic construct
  source 1..23: mol_type = other RNA
tgtgggtggtctctggagtagag

SEQ ID NO: 94686 - RNA, 23 nt, synthetic construct
  source 1..23: mol_type = other RNA
ttggcggtgtgggtggtccccgg

SEQ ID NO: 94687 - RNA, 23 nt, synthetic construct
  source 1..23: mol_type = other RNA
ttggcggtgtgggtggtccccgg

SEQ ID NO: 94688 - RNA, 23 nt, synthetic construct
  source 1..23: mol_type = other RNA
ttggcggtgtgggtggtccccgg

SEQ ID NO: 94689 - RNA, 23 nt, synthetic construct
  source 1..23: mol_type = other RNA
tgccgggaggccgttgaagtccc

SEQ ID NO: 94690 - RNA, 23 nt, synthetic construct
  source 1..23: mol_type = other RNA
tggtgcagttgtccacatggctg

SEQ ID NO: 94691 - RNA, 23 nt, synthetic construct
  source 1..23: mol_type = other RNA
tggcagccagagtgcgtgatgtc

SEQ ID NO: 94692 - RNA, 23 nt, synthetic construct
  source 1..23: mol_type = other RNA
tggccgggaggccgttgaagtcc

SEQ ID NO: 94693 - RNA, 23 nt, synthetic construct
  source 1..23: mol_type = other RNA
tctttcaggcagttctcgttgtc

SEQ ID NO: 94694 - RNA, 23 nt, synthetic construct
  source 1..23: mol_type = other RNA
tcctgtctgcaccacgatgaaga

SEQ ID NO: 94695 - RNA, 23 nt, synthetic construct
  source 1..23: mol_type = other RNA
tccttgatgtagtccccgctctg

SEQ ID NO: 94696 - RNA, 23 nt, synthetic construct
  source 1..23: mol_type = other RNA
tgtgtggccgtggaattggtggc

SEQ ID NO: 94697 - RNA, 23 nt, synthetic construct
  source 1..23: mol_type = other RNA
tagttgccccggaaggtgtaaga

SEQ ID NO: 94698 - RNA, 23 nt, synthetic construct
  source 1..23: mol_type = other RNA
tgacctggccgttgcgacctcag

SEQ ID NO: 94699 - RNA, 23 nt, synthetic construct
  source 1..23: mol_type = other RNA
tcctcagcctcacagaggtacac

SEQ ID NO: 94700 - RNA, 23 nt, synthetic construct
  source 1..23: mol_type = other RNA
tgtcgcaggcacacgcgtcgttc

SEQ ID NO: 94701 - RNA, 23 nt, synthetic construct
  source 1..23: mol_type = other RNA
tgtcctgggccaagatgtactcg

SEQ ID NO: 94702 - RNA, 23 nt, synthetic construct
  source 1..23: mol_type = other RNA
ttgctgcacacccgcccattgtg

SEQ ID NO: 94703 - RNA, 23 nt, synthetic construct
  source 1..23: mol_type = other RNA
tcctcgtccgtgcagttgccggc

SEQ ID NO: 94704 - RNA, 23 nt, synthetic construct
  source 1..23: mol_type = other RNA
tgggccgagggggtgaccgtcac

SEQ ID NO: 94705 - RNA, 23 nt, synthetic construct
  source 1..23: mol_type = other RNA
tgcctgtcgggcgagctctggag

SEQ ID NO: 94706 - RNA, 23 nt, synthetic construct
  source 1..23: mol_type = other RNA
tcggcacgcgctcggggcaccca

SEQ ID NO: 94707 - RNA, 23 nt, synthetic construct
  source 1..23: mol_type = other RNA
ttgggctggcaggcatccaccac

SEQ ID NO: 94708 - RNA, 23 nt, synthetic construct
  source 1..23: mol_type = other RNA
tctgttctcagggtggaggtcgg

SEQ ID NO: 94709 - RNA, 23 nt, synthetic construct
  source 1..23: mol_type = other RNA
tgtgggaagtccccgtggaaggc

SEQ ID NO: 94710 - RNA, 23 nt, synthetic construct
  source 1..23: mol_type = other RNA
ttggtcgtggtggtaagcactgt

SEQ ID NO: 94711 - RNA, 23 nt, synthetic construct
  source 1..23: mol_type = other RNA
tcagactgcccctccggccgcac

SEQ ID NO: 94712 - RNA, 23 nt, synthetic construct
  source 1..23: mol_type = other RNA
tgtgggaagtccccgtggaaggc

SEQ ID NO: 94713 - RNA, 23 nt, synthetic construct
  source 1..23: mol_type = other RNA
tggacatgggtgtggtggtctgt

SEQ ID NO: 94714 - RNA, 23 nt, synthetic construct
  source 1..23: mol_type = other RNA
tgccgtggatccagtggctgcag

SEQ ID NO: 94715 - RNA, 23 nt, synthetic construct
  source 1..23: mol_type = other RNA
ttggtgacagtgaggacgatatc

SEQ ID NO: 94716 - RNA, 23 nt, synthetic construct
  source 1..23: mol_type = other RNA
tgctcacgcccagggcaggaatg

SEQ ID NO: 94717 - RNA, 23 nt, synthetic construct
  source 1..23: mol_type = other RNA
tgcactgcaccgacactgaaccc

SEQ ID NO: 94718 - RNA, 23 nt, synthetic construct
  source 1..23: mol_type = other RNA
ttcccgaaaggggtcctgctggc

SEQ ID NO: 94719 - RNA, 23 nt, synthetic construct
  source 1..23: mol_type = other RNA
ttgcagttgccggccggcaaggg

SEQ ID NO: 94720 - RNA, 23 nt, synthetic construct
  source 1..23: mol_type = other RNA
ttggcacgggtggggggacgggg

SEQ ID NO: 94721 - RNA, 23 nt, synthetic construct
  source 1..23: mol_type = other RNA
tctgggcgtgctggtctcggcct

SEQ ID NO: 94722 - RNA, 23 nt, synthetic construct
  source 1..23: mol_type = other RNA
tggctggagtcgagtgctgggtg

SEQ ID NO: 94723 - RNA, 23 nt, synthetic construct
  source 1..23: mol_type = other RNA
tggctggagtcgagtgctgggtg

SEQ ID NO: 94724 - RNA, 23 nt, synthetic construct
  source 1..23: mol_type = other RNA
tggctggagtcgagtgctgggtg

SEQ ID NO: 94725 - RNA, 23 nt, synthetic construct
  source 1..23: mol_type = other RNA
tggctggagtcgagtgctgggtg

SEQ ID NO: 94726 - RNA, 23 nt, synthetic construct
  source 1..23: mol_type = other RNA
tgttcctggcattggcacaggca

SEQ ID NO: 94727 - RNA, 23 nt, synthetic construct
  source 1..23: mol_type = other RNA
tggagtaggtgtcaaagtccccg

SEQ ID NO: 94728 - RNA, 23 nt, synthetic construct
  source 1..23: mol_type = other RNA
tggagtaggtgtcaaagtccccg

SEQ ID NO: 94729 - RNA, 23 nt, synthetic construct
  source 1..23: mol_type = other RNA
tggagtaggtgtcaaagtccccg

SEQ ID NO: 94730 - RNA, 23 nt, synthetic construct
  source 1..23: mol_type = other RNA
tggagtaggtgtcaaagtccccg

SEQ ID NO: 94731 - RNA, 23 nt, synthetic construct
  source 1..23: mol_type = other RNA
tggtggccacgggtgtggtggtc

SEQ ID NO: 94732 - RNA, 23 nt, synthetic construct
  source 1..23: mol_type = other RNA
ttggaaccggtgggcaccatcac

SEQ ID NO: 94733 - RNA, 23 nt, synthetic construct
  source 1..23: mol_type = other RNA
tgtgcagttgtccacatggctgt

SEQ ID NO: 94734 - RNA, 23 nt, synthetic construct
  source 1..23: mol_type = other RNA
tctccggccgtggcagggacaca

SEQ ID NO: 94735 - RNA, 23 nt, synthetic construct
  source 1..23: mol_type = other RNA
tcggcgccctcgtcgtgcaccac

SEQ ID NO: 94736 - RNA, 23 nt, synthetic construct
  source 1..23: mol_type = other RNA
tggaagggggtgactcggtggtc

SEQ ID NO: 94737 - RNA, 23 nt, synthetic construct
  source 1..23: mol_type = other RNA
tccctgcagtggtcgctgatgca

SEQ ID NO: 94738 - RNA, 23 nt, synthetic construct
  source 1..23: mol_type = other RNA
tgttccacaggaatgtcagcacc

SEQ ID NO: 94739 - RNA, 23 nt, synthetic construct
  source 1..23: mol_type = other RNA
tcaggctgagcgtcaccgctttc

SEQ ID NO: 94740 - RNA, 23 nt, synthetic construct
  source 1..23: mol_type = other RNA
tctgttcctggcattggcacagg

SEQ ID NO: 94741 - RNA, 23 nt, synthetic construct
  source 1..23: mol_type = other RNA
tcaccgtggaacctctggttgtg

SEQ ID NO: 94742 - RNA, 23 nt, synthetic construct
  source 1..23: mol_type = other RNA
tccgtggatccagtggttgcggt

SEQ ID NO: 94743 - RNA, 23 nt, synthetic construct
  source 1..23: mol_type = other RNA
tcaggtgaggtcgcacaggccac

SEQ ID NO: 94744 - RNA, 23 nt, synthetic construct
  source 1..23: mol_type = other RNA
tgcacgggtggggggacggggac

SEQ ID NO: 94745 - RNA, 23 nt, synthetic construct
  source 1..23: mol_type = other RNA
tgcagccagagtgcgtgatgtca

SEQ ID NO: 94746 - RNA, 23 nt, synthetic construct
  source 1..23: mol_type = other RNA
taagctgctgtcggcacatttct

SEQ ID NO: 94747 - RNA, 23 nt, synthetic construct
  source 1..23: mol_type = other RNA
tatggagttgaggaacacgccgc

SEQ ID NO: 94748 - RNA, 23 nt, synthetic construct
  source 1..23: mol_type = other RNA
tctgcgcccgtggcctccaccac

SEQ ID NO: 94749 - RNA, 23 nt, synthetic construct
  source 1..23: mol_type = other RNA
tcgcatgcggtcacagtccacct

SEQ ID NO: 94750 - RNA, 23 nt, synthetic construct
  source 1..23: mol_type = other RNA
tggggccgagggggtgaccgtca

SEQ ID NO: 94751 - RNA, 23 nt, synthetic construct
  source 1..23: mol_type = other RNA
ttgctagaggagggtgttgccat

SEQ ID NO: 94752 - RNA, 23 nt, synthetic construct
  source 1..23: mol_type = other RNA
ttgtgtgctagaggagggtgttg

SEQ ID NO: 94753 - RNA, 23 nt, synthetic construct
  source 1..23: mol_type = other RNA
tgggccccggcatggggtagctg

SEQ ID NO: 94754 - RNA, 23 nt, synthetic construct
  source 1..23: mol_type = other RNA
ttcacggttcctgcagaccaggc

SEQ ID NO: 94755 - RNA, 23 nt, synthetic construct
  source 1..23: mol_type = other RNA
ttgctagaggagggtgttgccat

SEQ ID NO: 94756 - RNA, 23 nt, synthetic construct
  source 1..23: mol_type = other RNA
ttgtgtgctagaggagggtgttg

SEQ ID NO: 94757 - RNA, 23 nt, synthetic construct
  source 1..23: mol_type = other RNA
tgggccccggcatggggtagctg

SEQ ID NO: 94758 - RNA, 23 nt, synthetic construct
  source 1..23: mol_type = other RNA
ttcacggttcctgcagaccaggc

SEQ ID NO: 94759 - RNA, 23 nt, synthetic construct
  source 1..23: mol_type = other RNA
tggatttggtggctgtgcttgtc

SEQ ID NO: 94760 - RNA, 23 nt, synthetic construct
  source 1..23: mol_type = other RNA
tggtgtgggtggtctccggagtg

SEQ ID NO: 94761 - RNA, 23 nt, synthetic construct
  source 1..23: mol_type = other RNA
taagaggggatggctgtaacgct

SEQ ID NO: 94762 - RNA, 23 nt, synthetic construct
  source 1..23: mol_type = other RNA
ttgctagaggagggtgttgccat

SEQ ID NO: 94763 - RNA, 23 nt, synthetic construct
  source 1..23: mol_type = other RNA
ttgtgtgctagaggagggtgttg

SEQ ID NO: 94764 - RNA, 23 nt, synthetic construct
  source 1..23: mol_type = other RNA
tgggccccggcatggggtagctg

SEQ ID NO: 94765 - RNA, 23 nt, synthetic construct
  source 1..23: mol_type = other RNA
ttcacggttcctgcagaccaggc

SEQ ID NO: 94766 - RNA, 23 nt, synthetic construct
  source 1..23: mol_type = other RNA
ttgctagaggagggtgttgccat

SEQ ID NO: 94767 - RNA, 23 nt, synthetic construct
  source 1..23: mol_type = other RNA
ttgtgtgctagaggagggtgttg

SEQ ID NO: 94768 - RNA, 23 nt, synthetic construct
  source 1..23: mol_type = other RNA
tgggccccggcatggggtagctg

SEQ ID NO: 94769 - RNA, 23 nt, synthetic construct
  source 1..23: mol_type = other RNA
ttcacggttcctgcagaccaggc

SEQ ID NO: 94770 - RNA, 23 nt, synthetic construct
  source 1..23: mol_type = other RNA
tggatttggtggctgtgcttgtc

SEQ ID NO: 94771 - RNA, 23 nt, synthetic construct
  source 1..23: mol_type = other RNA
tggtgtgggtggtctccggagtg

SEQ ID NO: 94772 - RNA, 23 nt, synthetic construct
  source 1..23: mol_type = other RNA
ttgctagaggagggtgttgccat

SEQ ID NO: 94773 - RNA, 23 nt, synthetic construct
  source 1..23: mol_type = other RNA
ttgtgtgctagaggagggtgttg

SEQ ID NO: 94774 - RNA, 23 nt, synthetic construct
  source 1..23: mol_type = other RNA
ttggggtgatgggtgttgtccct

SEQ ID NO: 94775 - RNA, 23 nt, synthetic construct
  source 1..23: mol_type = other RNA
tccatcctttctgctgtcgggga

SEQ ID NO: 94776 - RNA, 23 nt, synthetic construct
  source 1..23: mol_type = other RNA
tccagagaggcaggtacacatgt

SEQ ID NO: 94777 - RNA, 23 nt, synthetic construct
  source 1..23: mol_type = other RNA
tggctctcccagggtaggactcc

SEQ ID NO: 94778 - RNA, 23 nt, synthetic construct
  source 1..23: mol_type = other RNA
tacacgtagttgcaaaggccagg

SEQ ID NO: 94779 - RNA, 23 nt, synthetic construct
  source 1..23: mol_type = other RNA
tgctgggacggtccacgtggtcc

SEQ ID NO: 94780 - RNA, 23 nt, synthetic construct
  source 1..23: mol_type = other RNA
tgttgggatcggtcaggcgcgag

SEQ ID NO: 94781 - RNA, 23 nt, synthetic construct
  source 1..23: mol_type = other RNA
tgagcgtagcaggggcactcctg

SEQ ID NO: 94782 - RNA, 23 nt, synthetic construct
  source 1..23: mol_type = other RNA
tgtggtcgtggtggtaagcactg

SEQ ID NO: 94783 - RNA, 23 nt, synthetic construct
  source 1..23: mol_type = other RNA
tggtgcgggtggtccccacggtg

SEQ ID NO: 94784 - RNA, 23 nt, synthetic construct
  source 1..23: mol_type = other RNA
ttccttaggctgctggcataagt

SEQ ID NO: 94785 - RNA, 23 nt, synthetic construct
  source 1..23: mol_type = other RNA
tagcgatcgccatcaaaggtgat

SEQ ID NO: 94786 - RNA, 23 nt, synthetic construct
  source 1..23: mol_type = other RNA
tatgttgacctcggtctcgcagc

SEQ ID NO: 94787 - RNA, 23 nt, synthetic construct
  source 1..23: mol_type = other RNA
tcccccactcccatccgacacca

SEQ ID NO: 94788 - RNA, 23 nt, synthetic construct
  source 1..23: mol_type = other RNA
ttgccgttgcttccgcagatggc

SEQ ID NO: 94789 - RNA, 23 nt, synthetic construct
  source 1..23: mol_type = other RNA
tgttgcacacgcacaccgtctcg

SEQ ID NO: 94790 - RNA, 23 nt, synthetic construct
  source 1..23: mol_type = other RNA
tcctgcattctcccagctcggct

SEQ ID NO: 94791 - RNA, 23 nt, synthetic construct
  source 1..23: mol_type = other RNA
tctgcacacccgcccattgtgcg

SEQ ID NO: 94792 - RNA, 23 nt, synthetic construct
  source 1..23: mol_type = other RNA
ttctctccaggcttgtaggtggc

SEQ ID NO: 94793 - RNA, 23 nt, synthetic construct
  source 1..23: mol_type = other RNA
tggtggtctgtgataggcgggtc

SEQ ID NO: 94794 - RNA, 23 nt, synthetic construct
  source 1..23: mol_type = other RNA
tgcctgggcacggcactcgaggc

SEQ ID NO: 94795 - RNA, 23 nt, synthetic construct
  source 1..23: mol_type = other RNA
tggtggtctgtgataggcgggtc

SEQ ID NO: 94796 - RNA, 23 nt, synthetic construct
  source 1..23: mol_type = other RNA
tgcctgggcacggcactcgaggc

SEQ ID NO: 94797 - RNA, 23 nt, synthetic construct
  source 1..23: mol_type = other RNA
tggtggtctgtgataggcgggtc

SEQ ID NO: 94798 - RNA, 23 nt, synthetic construct
  source 1..23: mol_type = other RNA
tgcctgggcacggcactcgaggc

SEQ ID NO: 94799 - RNA, 23 nt, synthetic construct
  source 1..23: mol_type = other RNA
tggtggtctgtgataggcgggtc

SEQ ID NO: 94800 - RNA, 23 nt, synthetic construct
  source 1..23: mol_type = other RNA
tgcctgggcacggcactcgaggc

SEQ ID NO: 94801 - RNA, 23 nt, synthetic construct
  source 1..23: mol_type = other RNA
tggtggtctgtgataggcgggtc

SEQ ID NO: 94802 - RNA, 23 nt, synthetic construct
  source 1..23: mol_type = other RNA
tggtgggcaggtgaggtcgcaca

SEQ ID NO: 94803 - RNA, 23 nt, synthetic construct
  source 1..23: mol_type = other RNA
tcacccgtacatgaacacacggc

SEQ ID NO: 94804 - RNA, 23 nt, synthetic construct
  source 1..23: mol_type = other RNA
tgtacgaacacagctgaggtctg

SEQ ID NO: 94805 - RNA, 23 nt, synthetic construct
  source 1..23: mol_type = other RNA
tggggacccttgcaccgacgtca

SEQ ID NO: 94806 - RNA, 23 nt, synthetic construct
  source 1..23: mol_type = other RNA
tggggggcagggatcgcccgtgt

SEQ ID NO: 94807 - RNA, 23 nt, synthetic construct
  source 1..23: mol_type = other RNA
tccatggtgtgccctgcattctc

SEQ ID NO: 94808 - RNA, 23 nt, synthetic construct
  source 1..23: mol_type = other RNA
ttgcagccgtccacaggcacgaa

SEQ ID NO: 94809 - RNA, 23 nt, synthetic construct
  source 1..23: mol_type = other RNA
ttcggcaatgcagcccccactcc

SEQ ID NO: 94810 - RNA, 23 nt, synthetic construct
  source 1..23: mol_type = other RNA
tcgggcgagctctggaggttgcc

SEQ ID NO: 94811 - RNA, 23 nt, synthetic construct
  source 1..23: mol_type = other RNA
tcacatgtggggtgccagcagtt

SEQ ID NO: 94812 - RNA, 23 nt, synthetic construct
  source 1..23: mol_type = other RNA
ttcagcactggaagggtggttgc

SEQ ID NO: 94813 - RNA, 23 nt, synthetic construct
  source 1..23: mol_type = other RNA
tgcagttgcccgggtggaggagg

SEQ ID NO: 94814 - RNA, 23 nt, synthetic construct
  source 1..23: mol_type = other RNA
tcacatgtggggtgccagcagtt

SEQ ID NO: 94815 - RNA, 23 nt, synthetic construct
  source 1..23: mol_type = other RNA
ttcagcactggaagggtggttgc

SEQ ID NO: 94816 - RNA, 23 nt, synthetic construct
  source 1..23: mol_type = other RNA
tcacatgtggggtgccagcagtt

SEQ ID NO: 94817 - RNA, 23 nt, synthetic construct
  source 1..23: mol_type = other RNA
ttcagcactggaagggtggttgc

SEQ ID NO: 94818 - RNA, 23 nt, synthetic construct
  source 1..23: mol_type = other RNA
tgggtgtgccagtcggggcccag

SEQ ID NO: 94819 - RNA, 23 nt, synthetic construct
  source 1..23: mol_type = other RNA
tggggtgtgccagtcggggccca

SEQ ID NO: 94820 - RNA, 23 nt, synthetic construct
  source 1..23: mol_type = other RNA
tcacccttctggggccggtttca

SEQ ID NO: 94821 - RNA, 23 nt, synthetic construct
  source 1..23: mol_type = other RNA
ttacgaacacagctgaggtctgc

SEQ ID NO: 94822 - RNA, 23 nt, synthetic construct
  source 1..23: mol_type = other RNA
tacggagcgcggggtgccacaca

SEQ ID NO: 94823 - RNA, 23 nt, synthetic construct
  source 1..23: mol_type = other RNA
tgttgccccggaaggtgtaagag

SEQ ID NO: 94824 - RNA, 23 nt, synthetic construct
  source 1..23: mol_type = other RNA
tgtggtgttagtcaaggggctca

SEQ ID NO: 94825 - RNA, 23 nt, synthetic construct
  source 1..23: mol_type = other RNA
ttcaccaccgtggttatgggggc

SEQ ID NO: 94826 - RNA, 23 nt, synthetic construct
  source 1..23: mol_type = other RNA
ttcaccaccgtggttatgggggc

SEQ ID NO: 94827 - RNA, 23 nt, synthetic construct
  source 1..23: mol_type = other RNA
ttcaccaccgtggttatgggggc

SEQ ID NO: 94828 - RNA, 23 nt, synthetic construct
  source 1..23: mol_type = other RNA
ttgtcgggcgagctctggaggtt

SEQ ID NO: 94829 - RNA, 23 nt, synthetic construct
  source 1..23: mol_type = other RNA
tctggggtgtgggaagtcaccgt

SEQ ID NO: 94830 - RNA, 23 nt, synthetic construct
  source 1..23: mol_type = other RNA
tgggaaatttaggaaacccatcg

SEQ ID NO: 94831 - RNA, 23 nt, synthetic construct
  source 1..23: mol_type = other RNA
ttgggccaagatgtactcgcagc

SEQ ID NO: 94832 - RNA, 23 nt, synthetic construct
  source 1..23: mol_type = other RNA
ttgggtccagcaggacgacacgg

SEQ ID NO: 94833 - RNA, 23 nt, synthetic construct
  source 1..23: mol_type = other RNA
tacgtagttgcaaaggccaggga

SEQ ID NO: 94834 - RNA, 23 nt, synthetic construct
  source 1..23: mol_type = other RNA
taacacgtagttgcaaaggccag

SEQ ID NO: 94835 - RNA, 23 nt, synthetic construct
  source 1..23: mol_type = other RNA
tgaacacgtagttgcaaaggcca

SEQ ID NO: 94836 - RNA, 23 nt, synthetic construct
  source 1..23: mol_type = other RNA
tagaacacgtagttgcaaaggcc

SEQ ID NO: 94837 - RNA, 23 nt, synthetic construct
  source 1..23: mol_type = other RNA
ttgcccattgatgaggacggagc

SEQ ID NO: 94838 - RNA, 23 nt, synthetic construct
  source 1..23: mol_type = other RNA
ttcctcccgctgcccattgatga

SEQ ID NO: 94839 - RNA, 23 nt, synthetic construct
  source 1..23: mol_type = other RNA
tgcgcgcgctgggggttggagca

SEQ ID NO: 94840 - RNA, 23 nt, synthetic construct
  source 1..23: mol_type = other RNA
tagttctccgctgtggggaccct

SEQ ID NO: 94841 - RNA, 23 nt, synthetic construct
  source 1..23: mol_type = other RNA
tgagggtgttgccatagaaccag

SEQ ID NO: 94842 - RNA, 23 nt, synthetic construct
  source 1..23: mol_type = other RNA
tctgtagtccagccactctgacc

SEQ ID NO: 94843 - RNA, 23 nt, synthetic construct
  source 1..23: mol_type = other RNA
tatgtggggtgccagcagttgcc

SEQ ID NO: 94844 - RNA, 23 nt, synthetic construct
  source 1..23: mol_type = other RNA
tgagggtgttgccatagaaccag

SEQ ID NO: 94845 - RNA, 23 nt, synthetic construct
  source 1..23: mol_type = other RNA
tctgtagtccagccactctgacc

SEQ ID NO: 94846 - RNA, 23 nt, synthetic construct
  source 1..23: mol_type = other RNA
tggtggttgcagtccttggactg

SEQ ID NO: 94847 - RNA, 23 nt, synthetic construct
  source 1..23: mol_type = other RNA
tggatgggtgtaaagctggtagc

SEQ ID NO: 94848 - RNA, 23 nt, synthetic construct
  source 1..23: mol_type = other RNA
tgagggtgttgccatagaaccag

SEQ ID NO: 94849 - RNA, 23 nt, synthetic construct
  source 1..23: mol_type = other RNA
tctgtagtccagccactctgacc

SEQ ID NO: 94850 - RNA, 23 nt, synthetic construct
  source 1..23: mol_type = other RNA
tatgtggggtgccagcagttgcc

SEQ ID NO: 94851 - RNA, 23 nt, synthetic construct
  source 1..23: mol_type = other RNA
tgagggtgttgccatagaaccag

SEQ ID NO: 94852 - RNA, 23 nt, synthetic construct
  source 1..23: mol_type = other RNA
tctgtagtccagccactctgacc

SEQ ID NO: 94853 - RNA, 23 nt, synthetic construct
  source 1..23: mol_type = other RNA
tggtggttgcagtccttggactg

SEQ ID NO: 94854 - RNA, 23 nt, synthetic construct
  source 1..23: mol_type = other RNA
tatgtggggtgccagcagttgcc

SEQ ID NO: 94855 - RNA, 23 nt, synthetic construct
  source 1..23: mol_type = other RNA
tgagggtgttgccatagaaccag

SEQ ID NO: 94856 - RNA, 23 nt, synthetic construct
  source 1..23: mol_type = other RNA
tggtggttgcagtccttggactg

SEQ ID NO: 94857 - RNA, 23 nt, synthetic construct
  source 1..23: mol_type = other RNA
tggatgggtgtaaagctggtagc

SEQ ID NO: 94858 - RNA, 23 nt, synthetic construct
  source 1..23: mol_type = other RNA
tgaagcggtcaatgtcacagtgc

SEQ ID NO: 94859 - RNA, 23 nt, synthetic construct
  source 1..23: mol_type = other RNA
tcccgggcgcggcagagctctgc

SEQ ID NO: 94860 - RNA, 23 nt, synthetic construct
  source 1..23: mol_type = other RNA
tgggctctggttcctagagttgc

SEQ ID NO: 94861 - RNA, 23 nt, synthetic construct
  source 1..23: mol_type = other RNA
tgtgatgttgacctcggtctcgc

SEQ ID NO: 94862 - RNA, 23 nt, synthetic construct
  source 1..23: mol_type = other RNA
tcaggcacacgcgtcgttcacgc

SEQ ID NO: 94863 - RNA, 23 nt, synthetic construct
  source 1..23: mol_type = other RNA
ttcattgatggcattgtcgtcga

SEQ ID NO: 94864 - RNA, 23 nt, synthetic construct
  source 1..23: mol_type = other RNA
tcagatgccctcctcgtccgtgc

SEQ ID NO: 94865 - RNA, 23 nt, synthetic construct
  source 1..23: mol_type = other RNA
tatgtcatccagcaccgtgcctg

SEQ ID NO: 94866 - RNA, 23 nt, synthetic construct
  source 1..23: mol_type = other RNA
tgagcgtcaccgctttcaggcag

SEQ ID NO: 94867 - RNA, 23 nt, synthetic construct
  source 1..23: mol_type = other RNA
ttgagcgtcaccgctttcaggca

SEQ ID NO: 94868 - RNA, 23 nt, synthetic construct
  source 1..23: mol_type = other RNA
tcgcagatggcgatcaagcaggc

SEQ ID NO: 94869 - RNA, 23 nt, synthetic construct
  source 1..23: mol_type = other RNA
tagccggtggccgtgatcgtagt

SEQ ID NO: 94870 - RNA, 23 nt, synthetic construct
  source 1..23: mol_type = other RNA
tggagaagggggtgactcggtgg

SEQ ID NO: 94871 - RNA, 23 nt, synthetic construct
  source 1..23: mol_type = other RNA
tagccggtggccgtgatcgtagt

SEQ ID NO: 94872 - RNA, 23 nt, synthetic construct
  source 1..23: mol_type = other RNA
tggagaagggggtgactcggtgg

SEQ ID NO: 94873 - RNA, 23 nt, synthetic construct
  source 1..23: mol_type = other RNA
tatgggtgtaaagctggtagctg

SEQ ID NO: 94874 - RNA, 23 nt, synthetic construct
  source 1..23: mol_type = other RNA
tggagaagggggtgactcggtgg

SEQ ID NO: 94875 - RNA, 23 nt, synthetic construct
  source 1..23: mol_type = other RNA
tcgtggtgatcagtgatggggga

SEQ ID NO: 94876 - RNA, 23 nt, synthetic construct
  source 1..23: mol_type = other RNA
tagccggtggccgtgatcgtagt

SEQ ID NO: 94877 - RNA, 23 nt, synthetic construct
  source 1..23: mol_type = other RNA
tcgggctggtcagcactttggga

SEQ ID NO: 94878 - RNA, 23 nt, synthetic construct
  source 1..23: mol_type = other RNA
tagccggtggccgtgatcgtagt

SEQ ID NO: 94879 - RNA, 23 nt, synthetic construct
  source 1..23: mol_type = other RNA
tatgggtgtaaagctggtagctg

SEQ ID NO: 94880 - RNA, 23 nt, synthetic construct
  source 1..23: mol_type = other RNA
tgctcagtgaggatccgggtcgt

SEQ ID NO: 94881 - RNA, 23 nt, synthetic construct
  source 1..23: mol_type = other RNA
tgcacaggccaccggttgcacct

SEQ ID NO: 94882 - RNA, 23 nt, synthetic construct
  source 1..23: mol_type = other RNA
tttgtacgaacacagctgaggtc

SEQ ID NO: 94883 - RNA, 23 nt, synthetic construct
  source 1..23: mol_type = other RNA
tcacataggcccgcacatgctta

SEQ ID NO: 94884 - RNA, 23 nt, synthetic construct
  source 1..23: mol_type = other RNA
tctctgacctggccgttgcgacc

SEQ ID NO: 94885 - RNA, 23 nt, synthetic construct
  source 1..23: mol_type = other RNA
ttggaagtcaccccaggtgctgc

SEQ ID NO: 94886 - RNA, 23 nt, synthetic construct
  source 1..23: mol_type = other RNA
tagggaagcggaagacgtcgccg

SEQ ID NO: 94887 - RNA, 23 nt, synthetic construct
  source 1..23: mol_type = other RNA
tcagggaagcggaagacgtcgcc

SEQ ID NO: 94888 - RNA, 23 nt, synthetic construct
  source 1..23: mol_type = other RNA
ttcgtaggcggcgcggcagtgct

SEQ ID NO: 94889 - RNA, 23 nt, synthetic construct
  source 1..23: mol_type = other RNA
tcccattgatgaggacggagccg

SEQ ID NO: 94890 - RNA, 23 nt, synthetic construct
  source 1..23: mol_type = other RNA
tccgttccacaggaatgtcagca

SEQ ID NO: 94891 - RNA, 23 nt, synthetic construct
  source 1..23: mol_type = other RNA
tgaagtccccacacaggccacag

SEQ ID NO: 94892 - RNA, 23 nt, synthetic construct
  source 1..23: mol_type = other RNA
ttgaagtccccacacaggccaca

SEQ ID NO: 94893 - RNA, 23 nt, synthetic construct
  source 1..23: mol_type = other RNA
tgccgttgaagtccccacacagg

SEQ ID NO: 94894 - RNA, 23 nt, synthetic construct
  source 1..23: mol_type = other RNA
tcgcggctggccccccgcgtggg

SEQ ID NO: 94895 - RNA, 23 nt, synthetic construct
  source 1..23: mol_type = other RNA
tccacactcctggtgctgcatgt

SEQ ID NO: 94896 - RNA, 23 nt, synthetic construct
  source 1..23: mol_type = other RNA
tcgcgcgctgggggttggagcag

SEQ ID NO: 94897 - RNA, 23 nt, synthetic construct
  source 1..23: mol_type = other RNA
ttcggcacatttcttggacagaa

SEQ ID NO: 94898 - RNA, 23 nt, synthetic construct
  source 1..23: mol_type = other RNA
tgcaccacgatgaagaagctcga

SEQ ID NO: 94899 - RNA, 23 nt, synthetic construct
  source 1..23: mol_type = other RNA
tccaccccgctgagggccgtgaa

SEQ ID NO: 94900 - RNA, 23 nt, synthetic construct
  source 1..23: mol_type = other RNA
tcctccagtcgctgagctgtacg

SEQ ID NO: 94901 - RNA, 23 nt, synthetic construct
  source 1..23: mol_type = other RNA
tcgctgggacttggggcagttct

SEQ ID NO: 94902 - RNA, 23 nt, synthetic construct
  source 1..23: mol_type = other RNA
ttgcccgccgagctgttgctgca

SEQ ID NO: 94903 - RNA, 23 nt, synthetic construct
  source 1..23: mol_type = other RNA
tgggtgcccgccgagctgttgct

SEQ ID NO: 94904 - RNA, 23 nt, synthetic construct
  source 1..23: mol_type = other RNA
ttcgccatcaaaggtgatgaagt

SEQ ID NO: 94905 - RNA, 23 nt, synthetic construct
  source 1..23: mol_type = other RNA
ttcccgtgggtggtgttgtcccc

SEQ ID NO: 94906 - RNA, 23 nt, synthetic construct
  source 1..23: mol_type = other RNA
tttgtcgtcgaagttcccgcaca

SEQ ID NO: 94907 - RNA, 23 nt, synthetic construct
  source 1..23: mol_type = other RNA
tgtcattgatggcattgtcgtcg

SEQ ID NO: 94908 - RNA, 23 nt, synthetic construct
  source 1..23: mol_type = other RNA
taaagtcattgatggcattgtcg

SEQ ID NO: 94909 - RNA, 23 nt, synthetic construct
  source 1..23: mol_type = other RNA
tgaaacactcgcagtcgccaccc

SEQ ID NO: 94910 - RNA, 23 nt, synthetic construct
  source 1..23: mol_type = other RNA
tagtgggggacccaggcggtggt

SEQ ID NO: 94911 - RNA, 23 nt, synthetic construct
  source 1..23: mol_type = other RNA
ttggacgtcacagtgcaccttct

SEQ ID NO: 94912 - RNA, 23 nt, synthetic construct
  source 1..23: mol_type = other RNA
tatcttgaagacgccctcctgct

SEQ ID NO: 94913 - RNA, 23 nt, synthetic construct
  source 1..23: mol_type = other RNA
tgtggtcgtcactgcagcagagg

SEQ ID NO: 94914 - RNA, 23 nt, synthetic construct
  source 1..23: mol_type = other RNA
tcagtggtcgtcactgcagcaga

SEQ ID NO: 94915 - RNA, 23 nt, synthetic construct
  source 1..23: mol_type = other RNA
tgtcgtggggcctcccgtggtgg

SEQ ID NO: 94916 - RNA, 23 nt, synthetic construct
  source 1..23: mol_type = other RNA
tcccgtcgtccctggaagggctg

SEQ ID NO: 94917 - RNA, 23 nt, synthetic construct
  source 1..23: mol_type = other RNA
tttgttgttggggccagcgtggg

SEQ ID NO: 94918 - RNA, 23 nt, synthetic construct
  source 1..23: mol_type = other RNA
tgcctgagaggtggacagctcgc

SEQ ID NO: 94919 - RNA, 23 nt, synthetic construct
  source 1..23: mol_type = other RNA
ttgttagtcaaggggctcattgt

SEQ ID NO: 94920 - RNA, 23 nt, synthetic construct
  source 1..23: mol_type = other RNA
tgggtcgtgccctggctggtggt

SEQ ID NO: 94921 - RNA, 23 nt, synthetic construct
  source 1..23: mol_type = other RNA
tcggtggccccagttgtggtggc

SEQ ID NO: 94922 - RNA, 23 nt, synthetic construct
  source 1..23: mol_type = other RNA
ttggtagtgtgagctgttcctgg

SEQ ID NO: 94923 - RNA, 23 nt, synthetic construct
  source 1..23: mol_type = other RNA
tctgatccacactggaggcgtga

SEQ ID NO: 94924 - RNA, 23 nt, synthetic construct
  source 1..23: mol_type = other RNA
tgtgggtgtggtggttgtgctga

SEQ ID NO: 94925 - RNA, 23 nt, synthetic construct
  source 1..23: mol_type = other RNA
tgttgccatagaaccagtggcca

SEQ ID NO: 94926 - RNA, 23 nt, synthetic construct
  source 1..23: mol_type = other RNA
ttgggagttgtcccaggagttga

SEQ ID NO: 94927 - RNA, 23 nt, synthetic construct
  source 1..23: mol_type = other RNA
tccaagatgcccgaggtggccga

SEQ ID NO: 94928 - RNA, 23 nt, synthetic construct
  source 1..23: mol_type = other RNA
tgtggtaccggtggttgctgcta

SEQ ID NO: 94929 - RNA, 23 nt, synthetic construct
  source 1..23: mol_type = other RNA
tggccgcacggatgttggagtag

SEQ ID NO: 94930 - RNA, 23 nt, synthetic construct
  source 1..23: mol_type = other RNA
tggccgtagagctggtggccggg

SEQ ID NO: 94931 - RNA, 23 nt, synthetic construct
  source 1..23: mol_type = other RNA
taggacggggtggccgtggatcc

SEQ ID NO: 94932 - RNA, 23 nt, synthetic construct
  source 1..23: mol_type = other RNA
tgtggtgctcacatgtggggtgc

SEQ ID NO: 94933 - RNA, 23 nt, synthetic construct
  source 1..23: mol_type = other RNA
tgtggacagtctctggagtggag

SEQ ID NO: 94934 - RNA, 23 nt, synthetic construct
  source 1..23: mol_type = other RNA
ttgtggacagtctctggagtgga

SEQ ID NO: 94935 - RNA, 23 nt, synthetic construct
  source 1..23: mol_type = other RNA
ttggtagtgtgagctgttcctgg

SEQ ID NO: 94936 - RNA, 23 nt, synthetic construct
  source 1..23: mol_type = other RNA
tgtgggtgtggtggttgtgctga

SEQ ID NO: 94937 - RNA, 23 nt, synthetic construct
  source 1..23: mol_type = other RNA
tgttgccatagaaccagtggcca

SEQ ID NO: 94938 - RNA, 23 nt, synthetic construct
  source 1..23: mol_type = other RNA
tgtggtaccggtggttgctgctg

SEQ ID NO: 94939 - RNA, 23 nt, synthetic construct
  source 1..23: mol_type = other RNA
tggccgcacggatgttggagtag

SEQ ID NO: 94940 - RNA, 23 nt, synthetic construct
  source 1..23: mol_type = other RNA
tggccgtagagctggtggccggg

SEQ ID NO: 94941 - RNA, 23 nt, synthetic construct
  source 1..23: mol_type = other RNA
tctgctgtggtctgctctgtgag

SEQ ID NO: 94942 - RNA, 23 nt, synthetic construct
  source 1..23: mol_type = other RNA
ttgcagtccttggactggaggag

SEQ ID NO: 94943 - RNA, 23 nt, synthetic construct
  source 1..23: mol_type = other RNA
tcagttgcccgggtggaggaggc

SEQ ID NO: 94944 - RNA, 23 nt, synthetic construct
  source 1..23: mol_type = other RNA
tttgagggtgccagcagttgccc

SEQ ID NO: 94945 - RNA, 23 nt, synthetic construct
  source 1..23: mol_type = other RNA
tctttgagggtgccagcagttgc

SEQ ID NO: 94946 - RNA, 23 nt, synthetic construct
  source 1..23: mol_type = other RNA
tctgtaacgctggtagctgtggg

SEQ ID NO: 94947 - RNA, 23 nt, synthetic construct
  source 1..23: mol_type = other RNA
ttgtggacagtctctggagtaga

SEQ ID NO: 94948 - RNA, 23 nt, synthetic construct
  source 1..23: mol_type = other RNA
ttggtagtgtgagctgttcctgg

SEQ ID NO: 94949 - RNA, 23 nt, synthetic construct
  source 1..23: mol_type = other RNA
tctgatccacactggaggcgtga

SEQ ID NO: 94950 - RNA, 23 nt, synthetic construct
  source 1..23: mol_type = other RNA
tgtgggtgtggtggttgtgctga

SEQ ID NO: 94951 - RNA, 23 nt, synthetic construct
  source 1..23: mol_type = other RNA
tgttgccatagaaccagtggcca

SEQ ID NO: 94952 - RNA, 23 nt, synthetic construct
  source 1..23: mol_type = other RNA
tccaagatgcccgaggtggccga

SEQ ID NO: 94953 - RNA, 23 nt, synthetic construct
  source 1..23: mol_type = other RNA
tggccgcacggatgttggagtag

SEQ ID NO: 94954 - RNA, 23 nt, synthetic construct
  source 1..23: mol_type = other RNA
tggccgtagagctggtggccggg

SEQ ID NO: 94955 - RNA, 23 nt, synthetic construct
  source 1..23: mol_type = other RNA
taggacggggtggccgtggatcc

SEQ ID NO: 94956 - RNA, 23 nt, synthetic construct
  source 1..23: mol_type = other RNA
tgtggtgctcacatgtggggtgc

SEQ ID NO: 94957 - RNA, 23 nt, synthetic construct
  source 1..23: mol_type = other RNA
ttggtagtgtgagctgttcctgg

SEQ ID NO: 94958 - RNA, 23 nt, synthetic construct
  source 1..23: mol_type = other RNA
tctgatccacactggaggcgtgc

SEQ ID NO: 94959 - RNA, 23 nt, synthetic construct
  source 1..23: mol_type = other RNA
tgtgggtgtggtggttgtgctga

SEQ ID NO: 94960 - RNA, 23 nt, synthetic construct
  source 1..23: mol_type = other RNA
tgttgccatagaaccagtggcca

SEQ ID NO: 94961 - RNA, 23 nt, synthetic construct
  source 1..23: mol_type = other RNA
ttagtggccgtggtgatcagtga

SEQ ID NO: 94962 - RNA, 23 nt, synthetic construct
  source 1..23: mol_type = other RNA
tgtggtaccggtggttgctgctg

SEQ ID NO: 94963 - RNA, 23 nt, synthetic construct
  source 1..23: mol_type = other RNA
tggccgcacggatgttggagtag

SEQ ID NO: 94964 - RNA, 23 nt, synthetic construct
  source 1..23: mol_type = other RNA
tggccgtagagctggtggccggg

SEQ ID NO: 94965 - RNA, 23 nt, synthetic construct
  source 1..23: mol_type = other RNA
taggacggggtggccgtggatcc

SEQ ID NO: 94966 - RNA, 23 nt, synthetic construct
  source 1..23: mol_type = other RNA
ttgcagtccttggactggaggag

SEQ ID NO: 94967 - RNA, 23 nt, synthetic construct
  source 1..23: mol_type = other RNA
tggccacgggtgtggtggtctgt

SEQ ID NO: 94968 - RNA, 23 nt, synthetic construct
  source 1..23: mol_type = other RNA
taggacggggtggccgtggatcc

SEQ ID NO: 94969 - RNA, 23 nt, synthetic construct
  source 1..23: mol_type = other RNA
tgtggtgctcacatgtggggtgc

SEQ ID NO: 94970 - RNA, 23 nt, synthetic construct
  source 1..23: mol_type = other RNA
tgtggacagtctctggagtggag

SEQ ID NO: 94971 - RNA, 23 nt, synthetic construct
  source 1..23: mol_type = other RNA
ttgtggacagtctctggagtgga

SEQ ID NO: 94972 - RNA, 23 nt, synthetic construct
  source 1..23: mol_type = other RNA
ttggtagtgtgagctgttcctgg

SEQ ID NO: 94973 - RNA, 23 nt, synthetic construct
  source 1..23: mol_type = other RNA
tctgatccacactggaggcgtga

SEQ ID NO: 94974 - RNA, 23 nt, synthetic construct
  source 1..23: mol_type = other RNA
tgtgggtgtggtggttgtgctga

SEQ ID NO: 94975 - RNA, 23 nt, synthetic construct
  source 1..23: mol_type = other RNA
tgttgccatagaaccagtggcca

SEQ ID NO: 94976 - RNA, 23 nt, synthetic construct
  source 1..23: mol_type = other RNA
ttgcagtccttggactggaggag

SEQ ID NO: 94977 - RNA, 23 nt, synthetic construct
  source 1..23: mol_type = other RNA
ttggccgtggaattggtggccct

SEQ ID NO: 94978 - RNA, 23 nt, synthetic construct
  source 1..23: mol_type = other RNA
tcagtggctgtgggcatagtggc

SEQ ID NO: 94979 - RNA, 23 nt, synthetic construct
  source 1..23: mol_type = other RNA
tggggtgcgggtggtccccacgg

SEQ ID NO: 94980 - RNA, 23 nt, synthetic construct
  source 1..23: mol_type = other RNA
tgggagcactgcaggggtgcggg

SEQ ID NO: 94981 - RNA, 23 nt, synthetic construct
  source 1..23: mol_type = other RNA
tcctggaagcggtcaatgtcaca

SEQ ID NO: 94982 - RNA, 23 nt, synthetic construct
  source 1..23: mol_type = other RNA
tggcgccctggaagcggtcaatg

SEQ ID NO: 94983 - RNA, 23 nt, synthetic construct
  source 1..23: mol_type = other RNA
tgtggaatagtgggagccgcccc

SEQ ID NO: 94984 - RNA, 23 nt, synthetic construct
  source 1..23: mol_type = other RNA
tgtgcagttgccccggaaggtgt

SEQ ID NO: 94985 - RNA, 23 nt, synthetic construct
  source 1..23: mol_type = other RNA
tggtgcagttgccccggaaggtg

SEQ ID NO: 94986 - RNA, 23 nt, synthetic construct
  source 1..23: mol_type = other RNA
tgtgcagtagtggttgtccaggt

SEQ ID NO: 94987 - RNA, 23 nt, synthetic construct
  source 1..23: mol_type = other RNA
tgtggatgctgagggcgcggggg

SEQ ID NO: 94988 - RNA, 23 nt, synthetic construct
  source 1..23: mol_type = other RNA
tcacacgcatggtggtggtcccc

SEQ ID NO: 94989 - RNA, 23 nt, synthetic construct
  source 1..23: mol_type = other RNA
tcagccacgtcttggccatgtcc

SEQ ID NO: 94990 - RNA, 23 nt, synthetic construct
  source 1..23: mol_type = other RNA
tcccgggggcacaaggttgtggc

SEQ ID NO: 94991 - RNA, 23 nt, synthetic construct
  source 1..23: mol_type = other RNA
tcgggcgcggcagagctctgcgt

SEQ ID NO: 94992 - RNA, 23 nt, synthetic construct
  source 1..23: mol_type = other RNA
tggcttgtacactttggtgggtg

SEQ ID NO: 94993 - RNA, 23 nt, synthetic construct
  source 1..23: mol_type = other RNA
tttcctagagttgcaggtggcag

SEQ ID NO: 94994 - RNA, 23 nt, synthetic construct
  source 1..23: mol_type = other RNA
tgttcctagagttgcaggtggca

SEQ ID NO: 94995 - RNA, 23 nt, synthetic construct
  source 1..23: mol_type = other RNA
ttggttcctagagttgcaggtgg

SEQ ID NO: 94996 - RNA, 23 nt, synthetic construct
  source 1..23: mol_type = other RNA
tagaggatctggtcctcagggca

SEQ ID NO: 94997 - RNA, 23 nt, synthetic construct
  source 1..23: mol_type = other RNA
tccccgggaaatttaggaaaccc

SEQ ID NO: 94998 - RNA, 23 nt, synthetic construct
  source 1..23: mol_type = other RNA
tccctcgtcacacacgcaggact

SEQ ID NO: 94999 - RNA, 23 nt, synthetic construct
  source 1..23: mol_type = other RNA
taggcaggtacacatgtggcagg

SEQ ID NO: 95000 - RNA, 23 nt, synthetic construct
  source 1..23: mol_type = other RNA
tacaggtagtattgttgcaggca

SEQ ID NO: 95001 - RNA, 23 nt, synthetic construct
  source 1..23: mol_type = other RNA
tagccctcgcagaaggtgatgtt

SEQ ID NO: 95002 - RNA, 23 nt, synthetic construct
  source 1..23: mol_type = other RNA
tggagccctcgcagaaggtgatg

SEQ ID NO: 95003 - RNA, 23 nt, synthetic construct
  source 1..23: mol_type = other RNA
tgacagtgcaagggcaccgtctc

SEQ ID NO: 95004 - RNA, 23 nt, synthetic construct
  source 1..23: mol_type = other RNA
tggaagccacgggtgtgtggggg

SEQ ID NO: 95005 - RNA, 23 nt, synthetic construct
  source 1..23: mol_type = other RNA
tcaatgcacatcctggctccagg

SEQ ID NO: 95006 - RNA, 23 nt, synthetic construct
  source 1..23: mol_type = other RNA
tacaatgcacatcctggctccag

SEQ ID NO: 95007 - RNA, 23 nt, synthetic construct
  source 1..23: mol_type = other RNA
tcatggacaggcggccgccttgc

SEQ ID NO: 95008 - RNA, 23 nt, synthetic construct
  source 1..23: mol_type = other RNA
tggacagtgcaagggcaccgtct

SEQ ID NO: 95009 - RNA, 23 nt, synthetic construct
  source 1..23: mol_type = other RNA
tctgcgcgcgctgggggttggag

SEQ ID NO: 95010 - RNA, 23 nt, synthetic construct
  source 1..23: mol_type = other RNA
tcctgggcgggcacacaggcgcc

SEQ ID NO: 95011 - RNA, 23 nt, synthetic construct
  source 1..23: mol_type = other RNA
tgcacttcgggtagcagccttcc

SEQ ID NO: 95012 - RNA, 23 nt, synthetic construct
  source 1..23: mol_type = other RNA
ttccttgtcgtagcagccacact

SEQ ID NO: 95013 - RNA, 23 nt, synthetic construct
  source 1..23: mol_type = other RNA
tgctgcgccgcccggcactcgat

SEQ ID NO: 95014 - RNA, 23 nt, synthetic construct
  source 1..23: mol_type = other RNA
tgtctgcgaggtgagggccgccg

SEQ ID NO: 95015 - RNA, 23 nt, synthetic construct
  source 1..23: mol_type = other RNA
ttggtggtacctggggccgaggg

SEQ ID NO: 95016 - RNA, 23 nt, synthetic construct
  source 1..23: mol_type = other RNA
tgtggacgtcacagtgcaccttc

SEQ ID NO: 95017 - RNA, 23 nt, synthetic construct
  source 1..23: mol_type = other RNA
tgctccccgtcgtccctggaagg

SEQ ID NO: 95018 - RNA, 23 nt, synthetic construct
  source 1..23: mol_type = other RNA
tgtggttatgggggccgatgtgg

SEQ ID NO: 95019 - RNA, 23 nt, synthetic construct
  source 1..23: mol_type = other RNA
tggtgtgggaagtccccgtggaa

SEQ ID NO: 95020 - RNA, 23 nt, synthetic construct
  source 1..23: mol_type = other RNA
tttggggccgatgtggggctgct

SEQ ID NO: 95021 - RNA, 23 nt, synthetic construct
  source 1..23: mol_type = other RNA
tgggtcccggtggtcccaagggt

SEQ ID NO: 95022 - RNA, 23 nt, synthetic construct
  source 1..23: mol_type = other RNA
tgtggttatgggggccgatgtgg

SEQ ID NO: 95023 - RNA, 23 nt, synthetic construct
  source 1..23: mol_type = other RNA
tggtgtgggaagtccccgtggaa

SEQ ID NO: 95024 - RNA, 23 nt, synthetic construct
  source 1..23: mol_type = other RNA
tgtggttatgggggccgatgtgg

SEQ ID NO: 95025 - RNA, 23 nt, synthetic construct
  source 1..23: mol_type = other RNA
tgggtcccggtggtcccaagggt

SEQ ID NO: 95026 - RNA, 23 nt, synthetic construct
  source 1..23: mol_type = other RNA
tgggaagccacgggtgtgtgggg

SEQ ID NO: 95027 - RNA, 23 nt, synthetic construct
  source 1..23: mol_type = other RNA
ttagaactcgttgaaggccggga

SEQ ID NO: 95028 - RNA, 23 nt, synthetic construct
  source 1..23: mol_type = other RNA
ttgttgggatcggtcaggcgcga

SEQ ID NO: 95029 - RNA, 23 nt, synthetic construct
  source 1..23: mol_type = other RNA
ttggaggacgggatggccgtgga

SEQ ID NO: 95030 - RNA, 23 nt, synthetic construct
  source 1..23: mol_type = other RNA
taaggaggggatgggtgtaaagc

SEQ ID NO: 95031 - RNA, 23 nt, synthetic construct
  source 1..23: mol_type = other RNA
tgttaggacagtgcaagggcacc

SEQ ID NO: 95032 - RNA, 23 nt, synthetic construct
  source 1..23: mol_type = other RNA
tctcggcaatgcagcccccactc

SEQ ID NO: 95033 - RNA, 23 nt, synthetic construct
  source 1..23: mol_type = other RNA
ttgtgcacacaggggcagtcctc

SEQ ID NO: 95034 - RNA, 23 nt, synthetic construct
  source 1..23: mol_type = other RNA
tggcacttcgggtagcagccttc

SEQ ID NO: 95035 - RNA, 23 nt, synthetic construct
  source 1..23: mol_type = other RNA
tgtccttgtcgtagcagccacac

SEQ ID NO: 95036 - RNA, 23 nt, synthetic construct
  source 1..23: mol_type = other RNA
tcccatagggtggtcttttcggt

SEQ ID NO: 95037 - RNA, 23 nt, synthetic construct
  source 1..23: mol_type = other RNA
tagtctgcgaggtgagggccgcc

SEQ ID NO: 95038 - RNA, 23 nt, synthetic construct
  source 1..23: mol_type = other RNA
tagtggtcgtcactgcagcagag

SEQ ID NO: 95039 - RNA, 23 nt, synthetic construct
  source 1..23: mol_type = other RNA
tgctgatccacactggaggcgtg

SEQ ID NO: 95040 - RNA, 23 nt, synthetic construct
  source 1..23: mol_type = other RNA
tctgtgtgctagaggagggtgtt

SEQ ID NO: 95041 - RNA, 23 nt, synthetic construct
  source 1..23: mol_type = other RNA
ttgggtggtccctagggcagagg

SEQ ID NO: 95042 - RNA, 23 nt, synthetic construct
  source 1..23: mol_type = other RNA
tagatgcccgaggtggccgaagt

SEQ ID NO: 95043 - RNA, 23 nt, synthetic construct
  source 1..23: mol_type = other RNA
tgctgtagtccagccactctgac

SEQ ID NO: 95044 - RNA, 23 nt, synthetic construct
  source 1..23: mol_type = other RNA
tctgtgtgctagaggagggtgtt

SEQ ID NO: 95045 - RNA, 23 nt, synthetic construct
  source 1..23: mol_type = other RNA
ttgggtggtccctagggcagagg

SEQ ID NO: 95046 - RNA, 23 nt, synthetic construct
  source 1..23: mol_type = other RNA
tgctgtagtccagccactctgac

SEQ ID NO: 95047 - RNA, 23 nt, synthetic construct
  source 1..23: mol_type = other RNA
tagcactggaagggtggttgcag

SEQ ID NO: 95048 - RNA, 23 nt, synthetic construct
  source 1..23: mol_type = other RNA
tgataggcgggtccaggcggtgc

SEQ ID NO: 95049 - RNA, 23 nt, synthetic construct
  source 1..23: mol_type = other RNA
tgctgatccacactggaggcgtg

SEQ ID NO: 95050 - RNA, 23 nt, synthetic construct
  source 1..23: mol_type = other RNA
tctgtgtgctagaggagggtgtt

SEQ ID NO: 95051 - RNA, 23 nt, synthetic construct
  source 1..23: mol_type = other RNA
ttggagccggtggctgtgatcgt

SEQ ID NO: 95052 - RNA, 23 nt, synthetic construct
  source 1..23: mol_type = other RNA
ttgggtggtccctagggcagagg

SEQ ID NO: 95053 - RNA, 23 nt, synthetic construct
  source 1..23: mol_type = other RNA
tagatgcccgaggtggccgaagt

SEQ ID NO: 95054 - RNA, 23 nt, synthetic construct
  source 1..23: mol_type = other RNA
tgctgtagtccagccactctgac

SEQ ID NO: 95055 - RNA, 23 nt, synthetic construct
  source 1..23: mol_type = other RNA
tgctgatccacactggaggcgtg

SEQ ID NO: 95056 - RNA, 23 nt, synthetic construct
  source 1..23: mol_type = other RNA
tctgtgtgctagaggagggtgtt

SEQ ID NO: 95057 - RNA, 23 nt, synthetic construct
  source 1..23: mol_type = other RNA
ttgggtggtccctagggcagagg

SEQ ID NO: 95058 - RNA, 23 nt, synthetic construct
  source 1..23: mol_type = other RNA
tgctgtagtccagccactctgac

SEQ ID NO: 95059 - RNA, 23 nt, synthetic construct
  source 1..23: mol_type = other RNA
tagcactggaagggtggttgcag

SEQ ID NO: 95060 - RNA, 23 nt, synthetic construct
  source 1..23: mol_type = other RNA
tgctgatccacactggaggcgtg

SEQ ID NO: 95061 - RNA, 23 nt, synthetic construct
  source 1..23: mol_type = other RNA
tctgtgtgctagaggagggtgtt

SEQ ID NO: 95062 - RNA, 23 nt, synthetic construct
  source 1..23: mol_type = other RNA
tagcactggaagggtggttgcag

SEQ ID NO: 95063 - RNA, 23 nt, synthetic construct
  source 1..23: mol_type = other RNA
tggtgtgggtggtctctggagta

SEQ ID NO: 95064 - RNA, 23 nt, synthetic construct
  source 1..23: mol_type = other RNA
tggaggtgtgggtggtctctgga

SEQ ID NO: 95065 - RNA, 23 nt, synthetic construct
  source 1..23: mol_type = other RNA
tgtgaggtcgcacaggccaccgg

SEQ ID NO: 95066 - RNA, 23 nt, synthetic construct
  source 1..23: mol_type = other RNA
taggttttcatgatcagacaatg

SEQ ID NO: 95067 - RNA, 23 nt, synthetic construct
  source 1..23: mol_type = other RNA
tggtgcccgccgagctgttgctg

SEQ ID NO: 95068 - RNA, 23 nt, synthetic construct
  source 1..23: mol_type = other RNA
ttctcatcataggtggagatgtg

SEQ ID NO: 95069 - RNA, 23 nt, synthetic construct
  source 1..23: mol_type = other RNA
tgatgttgacctcggtctcgcag

SEQ ID NO: 95070 - RNA, 23 nt, synthetic construct
  source 1..23: mol_type = other RNA
ttgctgtccaccagtgcgtggca

SEQ ID NO: 95071 - RNA, 23 nt, synthetic construct
  source 1..23: mol_type = other RNA
ttgggcacttcgggtagcagcct

SEQ ID NO: 95072 - RNA, 23 nt, synthetic construct
  source 1..23: mol_type = other RNA
tgcatgtcgggaagctgcgccgc

SEQ ID NO: 95073 - RNA, 23 nt, synthetic construct
  source 1..23: mol_type = other RNA
tggccgtggtggtcagtgatggg

SEQ ID NO: 95074 - RNA, 23 nt, synthetic construct
  source 1..23: mol_type = other RNA
tggccgtggtgtggcccggggtg

SEQ ID NO: 95075 - RNA, 23 nt, synthetic construct
  source 1..23: mol_type = other RNA
tgggtcgaggtgcgggtcttgct

SEQ ID NO: 95076 - RNA, 23 nt, synthetic construct
  source 1..23: mol_type = other RNA
tggccgtggtggtcagtgatggg

SEQ ID NO: 95077 - RNA, 23 nt, synthetic construct
  source 1..23: mol_type = other RNA
tgggtcgaggtgcgggtcttgct

SEQ ID NO: 95078 - RNA, 23 nt, synthetic construct
  source 1..23: mol_type = other RNA
tgtgggtggtctccggagtggag

SEQ ID NO: 95079 - RNA, 23 nt, synthetic construct
  source 1..23: mol_type = other RNA
tggccgtggtggtcagtgatggg

SEQ ID NO: 95080 - RNA, 23 nt, synthetic construct
  source 1..23: mol_type = other RNA
tgggtcgaggtgcgggtcttgct

SEQ ID NO: 95081 - RNA, 23 nt, synthetic construct
  source 1..23: mol_type = other RNA
tggccgtggtgtggcccggggtg

SEQ ID NO: 95082 - RNA, 23 nt, synthetic construct
  source 1..23: mol_type = other RNA
tgggtcgaggtgcgggtcttgct

SEQ ID NO: 95083 - RNA, 23 nt, synthetic construct
  source 1..23: mol_type = other RNA
tgaggaggggatgggtgtaacgc

SEQ ID NO: 95084 - RNA, 23 nt, synthetic construct
  source 1..23: mol_type = other RNA
tgtgggtggtctccggagtggag

SEQ ID NO: 95085 - RNA, 23 nt, synthetic construct
  source 1..23: mol_type = other RNA
tggccgtggtggtcagtgatggg

SEQ ID NO: 95086 - RNA, 23 nt, synthetic construct
  source 1..23: mol_type = other RNA
tgaggaggggatgggtgtaaagc

SEQ ID NO: 95087 - RNA, 23 nt, synthetic construct
  source 1..23: mol_type = other RNA
taggcagaacgttctcagacagc

SEQ ID NO: 95088 - RNA, 23 nt, synthetic construct
  source 1..23: mol_type = other RNA
tgatgaggacggagccgttggac

SEQ ID NO: 95089 - RNA, 23 nt, synthetic construct
  source 1..23: mol_type = other RNA
tccgctgcccattgatgaggacg

SEQ ID NO: 95090 - RNA, 23 nt, synthetic construct
  source 1..23: mol_type = other RNA
tgaatgtcagcaccagccggatg

SEQ ID NO: 95091 - RNA, 23 nt, synthetic construct
  source 1..23: mol_type = other RNA
tcacactcctggtgctgcatgtt

SEQ ID NO: 95092 - RNA, 23 nt, synthetic construct
  source 1..23: mol_type = other RNA
ttccacacagtggtcctcgcaga

SEQ ID NO: 95093 - RNA, 23 nt, synthetic construct
  source 1..23: mol_type = other RNA
tgtgatgtcatccagcaccgtgc

SEQ ID NO: 95094 - RNA, 23 nt, synthetic construct
  source 1..23: mol_type = other RNA
tttctcatcataggtggagatgt

SEQ ID NO: 95095 - RNA, 23 nt, synthetic construct
  source 1..23: mol_type = other RNA
tagttctcgttgtccgtcaggcc

SEQ ID NO: 95096 - RNA, 23 nt, synthetic construct
  source 1..23: mol_type = other RNA
tgcgtcaccgctttcaggcagtt

SEQ ID NO: 95097 - RNA, 23 nt, synthetic construct
  source 1..23: mol_type = other RNA
tcgccgccgtccgcttggacccg

SEQ ID NO: 95098 - RNA, 23 nt, synthetic construct
  source 1..23: mol_type = other RNA
tggcctgtctgcaccacgatgaa

SEQ ID NO: 95099 - RNA, 23 nt, synthetic construct
  source 1..23: mol_type = other RNA
tctccagtcgctgagctgtacgc

SEQ ID NO: 95100 - RNA, 23 nt, synthetic construct
  source 1..23: mol_type = other RNA
tcctcgtcgtgcaccacctctcc

SEQ ID NO: 95101 - RNA, 23 nt, synthetic construct
  source 1..23: mol_type = other RNA
tgatcgccatcaaaggtgatgaa

SEQ ID NO: 95102 - RNA, 23 nt, synthetic construct
  source 1..23: mol_type = other RNA
tctgggccaagatgtactcgcag

SEQ ID NO: 95103 - RNA, 23 nt, synthetic construct
  source 1..23: mol_type = other RNA
tcccgcgtcgtggcaggcctggg

SEQ ID NO: 95104 - RNA, 23 nt, synthetic construct
  source 1..23: mol_type = other RNA
tagctgtaggtcctgtcctcata

SEQ ID NO: 95105 - RNA, 23 nt, synthetic construct
  source 1..23: mol_type = other RNA
tgcatgcggtcacagtccacctg

SEQ ID NO: 95106 - RNA, 23 nt, synthetic construct
  source 1..23: mol_type = other RNA
tgtggtggtacctggggccgagg

SEQ ID NO: 95107 - RNA, 23 nt, synthetic construct
  source 1..23: mol_type = other RNA
tcaccaggccgaagtggacgtca

SEQ ID NO: 95108 - RNA, 23 nt, synthetic construct
  source 1..23: mol_type = other RNA
tggtcagccccgggctactcgta

SEQ ID NO: 95109 - RNA, 23 nt, synthetic construct
  source 1..23: mol_type = other RNA
ttgtgtatctgggggatgtcagt

SEQ ID NO: 95110 - RNA, 23 nt, synthetic construct
  source 1..23: mol_type = other RNA
ttggaagggctgagcgtgttgga

SEQ ID NO: 95111 - RNA, 23 nt, synthetic construct
  source 1..23: mol_type = other RNA
taagatgcccgaggtggccgaag

SEQ ID NO: 95112 - RNA, 23 nt, synthetic construct
  source 1..23: mol_type = other RNA
tgagaagggggtgactcggtggt

SEQ ID NO: 95113 - RNA, 23 nt, synthetic construct
  source 1..23: mol_type = other RNA
tgagaagggggtgactcggtggt

SEQ ID NO: 95114 - RNA, 23 nt, synthetic construct
  source 1..23: mol_type = other RNA
tgtggaggtgtgggtggtctccg

SEQ ID NO: 95115 - RNA, 23 nt, synthetic construct
  source 1..23: mol_type = other RNA
tgggtccaggcggtgcccaggga

SEQ ID NO: 95116 - RNA, 23 nt, synthetic construct
  source 1..23: mol_type = other RNA
taagatgcccgaggtggccgaag

SEQ ID NO: 95117 - RNA, 23 nt, synthetic construct
  source 1..23: mol_type = other RNA
tgagaagggggtgactcggtggt

SEQ ID NO: 95118 - RNA, 23 nt, synthetic construct
  source 1..23: mol_type = other RNA
tccaactcccccagggggacacc

SEQ ID NO: 95119 - RNA, 23 nt, synthetic construct
  source 1..23: mol_type = other RNA
tgtggaggtgtgggtggtctccg

SEQ ID NO: 95120 - RNA, 23 nt, synthetic construct
  source 1..23: mol_type = other RNA
tgtggaggtgtgggtggtctctg

SEQ ID NO: 95121 - RNA, 23 nt, synthetic construct
  source 1..23: mol_type = other RNA
taggcggtggccgtggaaccggt

SEQ ID NO: 95122 - RNA, 23 nt, synthetic construct
  source 1..23: mol_type = other RNA
tctggaagcggtcaatgtcacag

SEQ ID NO: 95123 - RNA, 23 nt, synthetic construct
  source 1..23: mol_type = other RNA
ttgggacaggcgccctggaagcg

SEQ ID NO: 95124 - RNA, 23 nt, synthetic construct
  source 1..23: mol_type = other RNA
tcagcggggcggaggacactggc

SEQ ID NO: 95125 - RNA, 23 nt, synthetic construct
  source 1..23: mol_type = other RNA
tcaggtgacgttggccacaggct

SEQ ID NO: 95126 - RNA, 23 nt, synthetic construct
  source 1..23: mol_type = other RNA
tcccaaagcgtgcatggatctct

SEQ ID NO: 95127 - RNA, 23 nt, synthetic construct
  source 1..23: mol_type = other RNA
tccagccacgtcttggccatgtc

SEQ ID NO: 95128 - RNA, 23 nt, synthetic construct
  source 1..23: mol_type = other RNA
tggtgaggtcgcacaggccaccg

SEQ ID NO: 95129 - RNA, 23 nt, synthetic construct
  source 1..23: mol_type = other RNA
tctggttcctagagttgcaggtg

SEQ ID NO: 95130 - RNA, 23 nt, synthetic construct
  source 1..23: mol_type = other RNA
tcaccgtctcggggcagcagggg

SEQ ID NO: 95131 - RNA, 23 nt, synthetic construct
  source 1..23: mol_type = other RNA
tggacagcagtcgccctcctcct

SEQ ID NO: 95132 - RNA, 23 nt, synthetic construct
  source 1..23: mol_type = other RNA
tcagcctcacagaggtacacggt

SEQ ID NO: 95133 - RNA, 23 nt, synthetic construct
  source 1..23: mol_type = other RNA
ttgggggagccatgggcgcaggg

SEQ ID NO: 95134 - RNA, 23 nt, synthetic construct
  source 1..23: mol_type = other RNA
tcccttctggggccggtttcacc

SEQ ID NO: 95135 - RNA, 23 nt, synthetic construct
  source 1..23: mol_type = other RNA
tgggcgctccggccgtggcaggg

SEQ ID NO: 95136 - RNA, 23 nt, synthetic construct
  source 1..23: mol_type = other RNA
tcgtgctgcgcgggcgctccggc

SEQ ID NO: 95137 - RNA, 23 nt, synthetic construct
  source 1..23: mol_type = other RNA
tagcctgtctgccccagcggccg

SEQ ID NO: 95138 - RNA, 23 nt, synthetic construct
  source 1..23: mol_type = other RNA
tagcaggcatggacaggcggccg

SEQ ID NO: 95139 - RNA, 23 nt, synthetic construct
  source 1..23: mol_type = other RNA
ttctcgttgtccgtcaggccgca

SEQ ID NO: 95140 - RNA, 23 nt, synthetic construct
  source 1..23: mol_type = other RNA
tcaaagctgtagcgatcgccatc

SEQ ID NO: 95141 - RNA, 23 nt, synthetic construct
  source 1..23: mol_type = other RNA
ttctgggcggtgcccattgtacc

SEQ ID NO: 95142 - RNA, 23 nt, synthetic construct
  source 1..23: mol_type = other RNA
taggtgtcaaagtccccgccaga

SEQ ID NO: 95143 - RNA, 23 nt, synthetic construct
  source 1..23: mol_type = other RNA
taggtgtcaaagtccccgccaga

SEQ ID NO: 95144 - RNA, 23 nt, synthetic construct
  source 1..23: mol_type = other RNA
taggtgtcaaagtccccgccaga

SEQ ID NO: 95145 - RNA, 23 nt, synthetic construct
  source 1..23: mol_type = other RNA
taggtgtcaaagtccccgccaga

SEQ ID NO: 95146 - RNA, 23 nt, synthetic construct
  source 1..23: mol_type = other RNA
tctgaccttgatgtagtccccgc

SEQ ID NO: 95147 - RNA, 23 nt, synthetic construct
  source 1..23: mol_type = other RNA
tgcgcaggcggccaggtacgcag

SEQ ID NO: 95148 - RNA, 23 nt, synthetic construct
  source 1..23: mol_type = other RNA
tttgggatcggtcaggcgcgagc

SEQ ID NO: 95149 - RNA, 23 nt, synthetic construct
  source 1..23: mol_type = other RNA
tccctggggacaggtagtattgt

SEQ ID NO: 95150 - RNA, 23 nt, synthetic construct
  source 1..23: mol_type = other RNA
taggtgatgttgacctcggtctc

SEQ ID NO: 95151 - RNA, 23 nt, synthetic construct
  source 1..23: mol_type = other RNA
tctgacctggccgttgcgacctc

SEQ ID NO: 95152 - RNA, 23 nt, synthetic construct
  source 1..23: mol_type = other RNA
tccactcccatccgacaccagcc

SEQ ID NO: 95153 - RNA, 23 nt, synthetic construct
  source 1..23: mol_type = other RNA
tcaggctgtatggggccgcatgg

SEQ ID NO: 95154 - RNA, 23 nt, synthetic construct
  source 1..23: mol_type = other RNA
taggccgttgaagtccccacaca

SEQ ID NO: 95155 - RNA, 23 nt, synthetic construct
  source 1..23: mol_type = other RNA
tagatgccctcctcgtccgtgca

SEQ ID NO: 95156 - RNA, 23 nt, synthetic construct
  source 1..23: mol_type = other RNA
tacagtggtcctcgcagagctgc

SEQ ID NO: 95157 - RNA, 23 nt, synthetic construct
  source 1..23: mol_type = other RNA
taggtcccgtgggtggtgttgtc

SEQ ID NO: 95158 - RNA, 23 nt, synthetic construct
  source 1..23: mol_type = other RNA
tgtgggcacttcgggtagcagcc

SEQ ID NO: 95159 - RNA, 23 nt, synthetic construct
  source 1..23: mol_type = other RNA
tggtgggcacttcgggtagcagc

SEQ ID NO: 95160 - RNA, 23 nt, synthetic construct
  source 1..23: mol_type = other RNA
ttgcttccgcagatggcgatcaa

SEQ ID NO: 95161 - RNA, 23 nt, synthetic construct
  source 1..23: mol_type = other RNA
tggctgtgcctgtcgggcgagct

SEQ ID NO: 95162 - RNA, 23 nt, synthetic construct
  source 1..23: mol_type = other RNA
ttggagaagggggtgactcggtg

SEQ ID NO: 95163 - RNA, 23 nt, synthetic construct
  source 1..23: mol_type = other RNA
tcccctccggccgcacggatgtt

SEQ ID NO: 95164 - RNA, 23 nt, synthetic construct
  source 1..23: mol_type = other RNA
ttggagaagggggtgactcggtg

SEQ ID NO: 95165 - RNA, 23 nt, synthetic construct
  source 1..23: mol_type = other RNA
tcccctccggccgcacggatgtt

SEQ ID NO: 95166 - RNA, 23 nt, synthetic construct
  source 1..23: mol_type = other RNA
ttggagaagggggtgactcggtg

SEQ ID NO: 95167 - RNA, 23 nt, synthetic construct
  source 1..23: mol_type = other RNA
tcccctccggccgcacggatgtt

SEQ ID NO: 95168 - RNA, 23 nt, synthetic construct
  source 1..23: mol_type = other RNA
tcccctccggccgcacggatgtt

SEQ ID NO: 95169 - RNA, 23 nt, synthetic construct
  source 1..23: mol_type = other RNA
tggaggggatgggtgtaacgctg

SEQ ID NO: 95170 - RNA, 23 nt, synthetic construct
  source 1..23: mol_type = other RNA
tcaggtggttgtgttgcacacgc

SEQ ID NO: 95171 - RNA, 23 nt, synthetic construct
  source 1..23: mol_type = other RNA
tgcacacccgcccattgtgcgcc

SEQ ID NO: 95172 - RNA, 23 nt, synthetic construct
  source 1..23: mol_type = other RNA
tccagggaagcggaagacgtcgc

SEQ ID NO: 95173 - RNA, 23 nt, synthetic construct
  source 1..23: mol_type = other RNA
tggcctcggcgtagctggacgtt

SEQ ID NO: 95174 - RNA, 23 nt, synthetic construct
  source 1..23: mol_type = other RNA
tgaggccagtgcggctgtaaggc

SEQ ID NO: 95175 - RNA, 23 nt, synthetic construct
  source 1..23: mol_type = other RNA
taccttgatgtagtccccgctct

SEQ ID NO: 95176 - RNA, 23 nt, synthetic construct
  source 1..23: mol_type = other RNA
tgcaggcggccaggtacgcagtg

SEQ ID NO: 95177 - RNA, 23 nt, synthetic construct
  source 1..23: mol_type = other RNA
tcgcaggcggccaggtacgcagt

SEQ ID NO: 95178 - RNA, 23 nt, synthetic construct
  source 1..23: mol_type = other RNA
taggaggtgcccgggctgtaggt

SEQ ID NO: 95179 - RNA, 23 nt, synthetic construct
  source 1..23: mol_type = other RNA
ttgaagctgctgtcggcacattt

SEQ ID NO: 95180 - RNA, 23 nt, synthetic construct
  source 1..23: mol_type = other RNA
ttccctccagtcgctgagctgta

SEQ ID NO: 95181 - RNA, 23 nt, synthetic construct
  source 1..23: mol_type = other RNA
tggcaggcatccaccacgtaggc

SEQ ID NO: 95182 - RNA, 23 nt, synthetic construct
  source 1..23: mol_type = other RNA
tctggcaggcatccaccacgtag

SEQ ID NO: 95183 - RNA, 23 nt, synthetic construct
  source 1..23: mol_type = other RNA
ttcccaggcagcttagcttccca

SEQ ID NO: 95184 - RNA, 23 nt, synthetic construct
  source 1..23: mol_type = other RNA
tcccactcccatccgacaccagc

SEQ ID NO: 95185 - RNA, 23 nt, synthetic construct
  source 1..23: mol_type = other RNA
tgccactgggtgtgcagttacag

SEQ ID NO: 95186 - RNA, 23 nt, synthetic construct
  source 1..23: mol_type = other RNA
tgggagggccgggcttgtcgtgg

SEQ ID NO: 95187 - RNA, 23 nt, synthetic construct
  source 1..23: mol_type = other RNA
tcaggttttcaaacgtctcaaag

SEQ ID NO: 95188 - RNA, 23 nt, synthetic construct
  source 1..23: mol_type = other RNA
tgcccccgcatgcggtcacagtc

SEQ ID NO: 95189 - RNA, 23 nt, synthetic construct
  source 1..23: mol_type = other RNA
tgctgtaccaagggtgcttgtgt

SEQ ID NO: 95190 - RNA, 23 nt, synthetic construct
  source 1..23: mol_type = other RNA
ttggtggtgttagtcaaggggct

SEQ ID NO: 95191 - RNA, 23 nt, synthetic construct
  source 1..23: mol_type = other RNA
ttcagggtggaggtcggggtggc

SEQ ID NO: 95192 - RNA, 23 nt, synthetic construct
  source 1..23: mol_type = other RNA
tagggctggagtcgagtgctggg

SEQ ID NO: 95193 - RNA, 23 nt, synthetic construct
  source 1..23: mol_type = other RNA
tccctccggccgcacggatgttg

SEQ ID NO: 95194 - RNA, 23 nt, synthetic construct
  source 1..23: mol_type = other RNA
tagggctggagtcgagtgctggg

SEQ ID NO: 95195 - RNA, 23 nt, synthetic construct
  source 1..23: mol_type = other RNA
tccctccggccgcacggatgttg

SEQ ID NO: 95196 - RNA, 23 nt, synthetic construct
  source 1..23: mol_type = other RNA
tagggctggagtcgagtgctggg

SEQ ID NO: 95197 - RNA, 23 nt, synthetic construct
  source 1..23: mol_type = other RNA
tccctccggccgcacggatgttg

SEQ ID NO: 95198 - RNA, 23 nt, synthetic construct
  source 1..23: mol_type = other RNA
tagtggccgtggtgatcagtgat

SEQ ID NO: 95199 - RNA, 23 nt, synthetic construct
  source 1..23: mol_type = other RNA
tagggctggagtcgagtgctggg

SEQ ID NO: 95200 - RNA, 23 nt, synthetic construct
  source 1..23: mol_type = other RNA
tccctccggccgcacggatgttg

SEQ ID NO: 95201 - RNA, 23 nt, synthetic construct
  source 1..23: mol_type = other RNA
tggtggtcaccactttgggggtg

SEQ ID NO: 95202 - RNA, 23 nt, synthetic construct
  source 1..23: mol_type = other RNA
tgctgggaaccgtggaggcagtg

SEQ ID NO: 95203 - RNA, 23 nt, synthetic construct
  source 1..23: mol_type = other RNA
tgtgacgttggccacaggctttg

SEQ ID NO: 95204 - RNA, 23 nt, synthetic construct
  source 1..23: mol_type = other RNA
ttaggtgcagttgccccggaagg

SEQ ID NO: 95205 - RNA, 23 nt, synthetic construct
  source 1..23: mol_type = other RNA
tcggcccctgcagtggtcgctga

SEQ ID NO: 95206 - RNA, 23 nt, synthetic construct
  source 1..23: mol_type = other RNA
tagctctgcgtaagcctccaggc

SEQ ID NO: 95207 - RNA, 23 nt, synthetic construct
  source 1..23: mol_type = other RNA
tgagctctgcgtaagcctccagg

SEQ ID NO: 95208 - RNA, 23 nt, synthetic construct
  source 1..23: mol_type = other RNA
tttgcacacgcacaccgtctcgg

SEQ ID NO: 95209 - RNA, 23 nt, synthetic construct
  source 1..23: mol_type = other RNA
tcaggatggtcgtgttgatgcgg

SEQ ID NO: 95210 - RNA, 23 nt, synthetic construct
  source 1..23: mol_type = other RNA
tagaaggtgatgttgacctcggt

SEQ ID NO: 95211 - RNA, 23 nt, synthetic construct
  source 1..23: mol_type = other RNA
tggcacgggtggggggacgggga

SEQ ID NO: 95212 - RNA, 23 nt, synthetic construct
  source 1..23: mol_type = other RNA
tccatcctgggggctggcacggg

SEQ ID NO: 95213 - RNA, 23 nt, synthetic construct
  source 1..23: mol_type = other RNA
tgcaccacgagcatggccgccag

SEQ ID NO: 95214 - RNA, 23 nt, synthetic construct
  source 1..23: mol_type = other RNA
tctgcattctcccagctcggctc

SEQ ID NO: 95215 - RNA, 23 nt, synthetic construct
  source 1..23: mol_type = other RNA
tcatggtgtgccctgcattctcc

SEQ ID NO: 95216 - RNA, 23 nt, synthetic construct
  source 1..23: mol_type = other RNA
tgggcgaggacgtcggggcaccg

SEQ ID NO: 95217 - RNA, 23 nt, synthetic construct
  source 1..23: mol_type = other RNA
tgcgccgggttcagggggctcag

SEQ ID NO: 95218 - RNA, 23 nt, synthetic construct
  source 1..23: mol_type = other RNA
tcacacccgcccattgtgcgccg

SEQ ID NO: 95219 - RNA, 23 nt, synthetic construct
  source 1..23: mol_type = other RNA
ttgcacacccgcccattgtgcgc

SEQ ID NO: 95220 - RNA, 23 nt, synthetic construct
  source 1..23: mol_type = other RNA
tgccagggaagcggaagacgtcg

SEQ ID NO: 95221 - RNA, 23 nt, synthetic construct
  source 1..23: mol_type = other RNA
tggccagggaagcggaagacgtc

SEQ ID NO: 95222 - RNA, 23 nt, synthetic construct
  source 1..23: mol_type = other RNA
tgcagtgctcagagaacacgtag

SEQ ID NO: 95223 - RNA, 23 nt, synthetic construct
  source 1..23: mol_type = other RNA
taggcggcgcggcagtgctcaga

SEQ ID NO: 95224 - RNA, 23 nt, synthetic construct
  source 1..23: mol_type = other RNA
tcgtaggcggcgcggcagtgctc

SEQ ID NO: 95225 - RNA, 23 nt, synthetic construct
  source 1..23: mol_type = other RNA
tttgatgaggacggagccgttgg

SEQ ID NO: 95226 - RNA, 23 nt, synthetic construct
  source 1..23: mol_type = other RNA
tgcccattgatgaggacggagcc

SEQ ID NO: 95227 - RNA, 23 nt, synthetic construct
  source 1..23: mol_type = other RNA
ttcccgctgcccattgatgagga

SEQ ID NO: 95228 - RNA, 23 nt, synthetic construct
  source 1..23: mol_type = other RNA
ttccacaggaatgtcagcaccag

SEQ ID NO: 95229 - RNA, 23 nt, synthetic construct
  source 1..23: mol_type = other RNA
tcctctccgttccacaggaatgt

SEQ ID NO: 95230 - RNA, 23 nt, synthetic construct
  source 1..23: mol_type = other RNA
tggcaagggcagcgggtccgggc

SEQ ID NO: 95231 - RNA, 23 nt, synthetic construct
  source 1..23: mol_type = other RNA
tgcagggtgcggtggcagatgcc

SEQ ID NO: 95232 - RNA, 23 nt, synthetic construct
  source 1..23: mol_type = other RNA
tcctgggcgcaggcggccaggta

SEQ ID NO: 95233 - RNA, 23 nt, synthetic construct
  source 1..23: mol_type = other RNA
tcacctccagttccgcggctggc

SEQ ID NO: 95234 - RNA, 23 nt, synthetic construct
  source 1..23: mol_type = other RNA
tggagcaggtgtccgtgcagggt

SEQ ID NO: 95235 - RNA, 23 nt, synthetic construct
  source 1..23: mol_type = other RNA
tgctgcgcgcgctgggggttgga

SEQ ID NO: 95236 - RNA, 23 nt, synthetic construct
  source 1..23: mol_type = other RNA
tcagaagcagccgtccacacagt

SEQ ID NO: 95237 - RNA, 23 nt, synthetic construct
  source 1..23: mol_type = other RNA
ttgatgtcatccagcaccgtgcc

SEQ ID NO: 95238 - RNA, 23 nt, synthetic construct
  source 1..23: mol_type = other RNA
tgcgtgatgtcatccagcaccgt

SEQ ID NO: 95239 - RNA, 23 nt, synthetic construct
  source 1..23: mol_type = other RNA
tgtgttgaaggaggtgcccgggc

SEQ ID NO: 95240 - RNA, 23 nt, synthetic construct
  source 1..23: mol_type = other RNA
tgtgggccccgccctgcacagag

SEQ ID NO: 95241 - RNA, 23 nt, synthetic construct
  source 1..23: mol_type = other RNA
ttcatcataggtggagatgtggg

SEQ ID NO: 95242 - RNA, 23 nt, synthetic construct
  source 1..23: mol_type = other RNA
tgcacggtgaagctgctgtcggc

SEQ ID NO: 95243 - RNA, 23 nt, synthetic construct
  source 1..23: mol_type = other RNA
tttctcgttgtccgtcaggccgc

SEQ ID NO: 95244 - RNA, 23 nt, synthetic construct
  source 1..23: mol_type = other RNA
tttcaggcagttctcgttgtccg

SEQ ID NO: 95245 - RNA, 23 nt, synthetic construct
  source 1..23: mol_type = other RNA
taccacgatgaagaagctcgagg

SEQ ID NO: 95246 - RNA, 23 nt, synthetic construct
  source 1..23: mol_type = other RNA
tacctgcatgagtggcaccagct

SEQ ID NO: 95247 - RNA, 23 nt, synthetic construct
  source 1..23: mol_type = other RNA
tccaccaccccgctgagggccgt

SEQ ID NO: 95248 - RNA, 23 nt, synthetic construct
  source 1..23: mol_type = other RNA
ttggcgaaggctgcgcccgtggc

SEQ ID NO: 95249 - RNA, 23 nt, synthetic construct
  source 1..23: mol_type = other RNA
tggcagcgcgagaaggcactgtt

SEQ ID NO: 95250 - RNA, 23 nt, synthetic construct
  source 1..23: mol_type = other RNA
ttggcagcgcgagaaggcactgt

SEQ ID NO: 95251 - RNA, 23 nt, synthetic construct
  source 1..23: mol_type = other RNA
tggggttgatgatggagtggcag

SEQ ID NO: 95252 - RNA, 23 nt, synthetic construct
  source 1..23: mol_type = other RNA
ttggggttgatgatggagtggca

SEQ ID NO: 95253 - RNA, 23 nt, synthetic construct
  source 1..23: mol_type = other RNA
ttggcaggcatccaccacgtagg

SEQ ID NO: 95254 - RNA, 23 nt, synthetic construct
  source 1..23: mol_type = other RNA
tgctggcaggcatccaccacgta

SEQ ID NO: 95255 - RNA, 23 nt, synthetic construct
  source 1..23: mol_type = other RNA
tggctggcaggcatccaccacgt

SEQ ID NO: 95256 - RNA, 23 nt, synthetic construct
  source 1..23: mol_type = other RNA
tggtgcccgcggggcaggtgcag

SEQ ID NO: 95257 - RNA, 23 nt, synthetic construct
  source 1..23: mol_type = other RNA
taggtgcccgcggggcaggtgca

SEQ ID NO: 95258 - RNA, 23 nt, synthetic construct
  source 1..23: mol_type = other RNA
tcattgaggaaggtgcccgcggg

SEQ ID NO: 95259 - RNA, 23 nt, synthetic construct
  source 1..23: mol_type = other RNA
tcccaggcagcttagcttcccac

SEQ ID NO: 95260 - RNA, 23 nt, synthetic construct
  source 1..23: mol_type = other RNA
tgtccaggtacaccatgggggct

SEQ ID NO: 95261 - RNA, 23 nt, synthetic construct
  source 1..23: mol_type = other RNA
tcagtccaggtacaccatggggg

SEQ ID NO: 95262 - RNA, 23 nt, synthetic construct
  source 1..23: mol_type = other RNA
ttgcagtccaggtacaccatggg

SEQ ID NO: 95263 - RNA, 23 nt, synthetic construct
  source 1..23: mol_type = other RNA
tggggtgcccgccgagctgttgc

SEQ ID NO: 95264 - RNA, 23 nt, synthetic construct
  source 1..23: mol_type = other RNA
tggccccaggggtgcccgccgag

SEQ ID NO: 95265 - RNA, 23 nt, synthetic construct
  source 1..23: mol_type = other RNA
tgggcagtcctcctcggcaatgc

SEQ ID NO: 95266 - RNA, 23 nt, synthetic construct
  source 1..23: mol_type = other RNA
taggggcagtcctcctcggcaat

SEQ ID NO: 95267 - RNA, 23 nt, synthetic construct
  source 1..23: mol_type = other RNA
tgtctctccaggcttgtaggtgg

SEQ ID NO: 95268 - RNA, 23 nt, synthetic construct
  source 1..23: mol_type = other RNA
tatcgccatcaaaggtgatgaag

SEQ ID NO: 95269 - RNA, 23 nt, synthetic construct
  source 1..23: mol_type = other RNA
tgtactcgcagctgccttcaaag

SEQ ID NO: 95270 - RNA, 23 nt, synthetic construct
  source 1..23: mol_type = other RNA
tatgtactcgcagctgccttcaa

SEQ ID NO: 95271 - RNA, 23 nt, synthetic construct
  source 1..23: mol_type = other RNA
tgtccccacagtagtcctgggcc

SEQ ID NO: 95272 - RNA, 23 nt, synthetic construct
  source 1..23: mol_type = other RNA
tgggtggtgttgtccccacagta

SEQ ID NO: 95273 - RNA, 23 nt, synthetic construct
  source 1..23: mol_type = other RNA
ttgggtggtgttgtccccacagt

SEQ ID NO: 95274 - RNA, 23 nt, synthetic construct
  source 1..23: mol_type = other RNA
tcgtgggtggtgttgtccccaca

SEQ ID NO: 95275 - RNA, 23 nt, synthetic construct
  source 1..23: mol_type = other RNA
tgggtgggtccccacccggccct

SEQ ID NO: 95276 - RNA, 23 nt, synthetic construct
  source 1..23: mol_type = other RNA
tcacggccatcccgtgggtctcg

SEQ ID NO: 95277 - RNA, 23 nt, synthetic construct
  source 1..23: mol_type = other RNA
tggatgaacacgctggtcttccg

SEQ ID NO: 95278 - RNA, 23 nt, synthetic construct
  source 1..23: mol_type = other RNA
tccagtgcgtcccccaccacgga

SEQ ID NO: 95279 - RNA, 23 nt, synthetic construct
  source 1..23: mol_type = other RNA
tgggtccttgggtgccagggcgt

SEQ ID NO: 95280 - RNA, 23 nt, synthetic construct
  source 1..23: mol_type = other RNA
ttcgcaggcacacgcgtcgttca

SEQ ID NO: 95281 - RNA, 23 nt, synthetic construct
  source 1..23: mol_type = other RNA
tgcctgggcgtaggcagccacag

SEQ ID NO: 95282 - RNA, 23 nt, synthetic construct
  source 1..23: mol_type = other RNA
tgcccgcgtcgtggcaggcctgg

SEQ ID NO: 95283 - RNA, 23 nt, synthetic construct
  source 1..23: mol_type = other RNA
tggcccgcgtcgtggcaggcctg

SEQ ID NO: 95284 - RNA, 23 nt, synthetic construct
  source 1..23: mol_type = other RNA
tgaagtcacagaacaaggggcag

SEQ ID NO: 95285 - RNA, 23 nt, synthetic construct
  source 1..23: mol_type = other RNA
tatgccactgggtgtgcagttac

SEQ ID NO: 95286 - RNA, 23 nt, synthetic construct
  source 1..23: mol_type = other RNA
tgcagatggcgatcaagcaggcg

SEQ ID NO: 95287 - RNA, 23 nt, synthetic construct
  source 1..23: mol_type = other RNA
tgatgatggtgccgttgcttccg

SEQ ID NO: 95288 - RNA, 23 nt, synthetic construct
  source 1..23: mol_type = other RNA
ttggagttccaggacatgccaca

SEQ ID NO: 95289 - RNA, 23 nt, synthetic construct
  source 1..23: mol_type = other RNA
tcccaggcggtggtgaaggtgaa

SEQ ID NO: 95290 - RNA, 23 nt, synthetic construct
  source 1..23: mol_type = other RNA
tacacacacggtggagaccggga

SEQ ID NO: 95291 - RNA, 23 nt, synthetic construct
  source 1..23: mol_type = other RNA
tgctcctccagcggcatgtcggg

SEQ ID NO: 95292 - RNA, 23 nt, synthetic construct
  source 1..23: mol_type = other RNA
tagctcctccagcggcatgtcgg

SEQ ID NO: 95293 - RNA, 23 nt, synthetic construct
  source 1..23: mol_type = other RNA
tcacatcagcccccgcatgcggt

SEQ ID NO: 95294 - RNA, 23 nt, synthetic construct
  source 1..23: mol_type = other RNA
tcagagaacccgcagctcgtagt

SEQ ID NO: 95295 - RNA, 23 nt, synthetic construct
  source 1..23: mol_type = other RNA
tctgtggtctgggttggggtagg

SEQ ID NO: 95296 - RNA, 23 nt, synthetic construct
  source 1..23: mol_type = other RNA
taggtgagggccgccgtcgaccg

SEQ ID NO: 95297 - RNA, 23 nt, synthetic construct
  source 1..23: mol_type = other RNA
ttggggccgagggggtgaccgtc

SEQ ID NO: 95298 - RNA, 23 nt, synthetic construct
  source 1..23: mol_type = other RNA
tctggggccgagggggtgaccgt

SEQ ID NO: 95299 - RNA, 23 nt, synthetic construct
  source 1..23: mol_type = other RNA
tccagttggggaagctctcggcc

SEQ ID NO: 95300 - RNA, 23 nt, synthetic construct
  source 1..23: mol_type = other RNA
tggtccagttggggaagctctcg

SEQ ID NO: 95301 - RNA, 23 nt, synthetic construct
  source 1..23: mol_type = other RNA
tacctgtgccagggtccagttgg

SEQ ID NO: 95302 - RNA, 23 nt, synthetic construct
  source 1..23: mol_type = other RNA
taccttctgccccacctgtgcca

SEQ ID NO: 95303 - RNA, 23 nt, synthetic construct
  source 1..23: mol_type = other RNA
tcaccttctgccccacctgtgcc

SEQ ID NO: 95304 - RNA, 23 nt, synthetic construct
  source 1..23: mol_type = other RNA
tcctgcacaccaggccgaagtgg

SEQ ID NO: 95305 - RNA, 23 nt, synthetic construct
  source 1..23: mol_type = other RNA
ttgaagacgccctcctgctccca

SEQ ID NO: 95306 - RNA, 23 nt, synthetic construct
  source 1..23: mol_type = other RNA
tctggtcagccccgggctactcg

SEQ ID NO: 95307 - RNA, 23 nt, synthetic construct
  source 1..23: mol_type = other RNA
tctgtaccaagggtgcttgtgta

SEQ ID NO: 95308 - RNA, 23 nt, synthetic construct
  source 1..23: mol_type = other RNA
tggctgtaccaagggtgcttgtg

SEQ ID NO: 95309 - RNA, 23 nt, synthetic construct
  source 1..23: mol_type = other RNA
tgcaggcgtcgtggggcctcccg

SEQ ID NO: 95310 - RNA, 23 nt, synthetic construct
  source 1..23: mol_type = other RNA
ttggctgtgaggggcgccatgtg

SEQ ID NO: 95311 - RNA, 23 nt, synthetic construct
  source 1..23: mol_type = other RNA
tgccagcgtgggtggctgtgagg

SEQ ID NO: 95312 - RNA, 23 nt, synthetic construct
  source 1..23: mol_type = other RNA
ttgccattgttgttggggccagc

SEQ ID NO: 95313 - RNA, 23 nt, synthetic construct
  source 1..23: mol_type = other RNA
tctggaggttgccattgttgttg

SEQ ID NO: 95314 - RNA, 23 nt, synthetic construct
  source 1..23: mol_type = other RNA
ttcagcggctctttggaagcggt

SEQ ID NO: 95315 - RNA, 23 nt, synthetic construct
  source 1..23: mol_type = other RNA
ttggcgccaggctcgtggtcagc

SEQ ID NO: 95316 - RNA, 23 nt, synthetic construct
  source 1..23: mol_type = other RNA
taggtggacagctcgctcgtgag

SEQ ID NO: 95317 - RNA, 23 nt, synthetic construct
  source 1..23: mol_type = other RNA
tcctgagaggtggacagctcgct

SEQ ID NO: 95318 - RNA, 23 nt, synthetic construct
  source 1..23: mol_type = other RNA
tcctgggcgtgctggtctcggcc

SEQ ID NO: 95319 - RNA, 23 nt, synthetic construct
  source 1..23: mol_type = other RNA
ttctctgtcctgggcgtgctggt

SEQ ID NO: 95320 - RNA, 23 nt, synthetic construct
  source 1..23: mol_type = other RNA
tgtctctgtcctgggcgtgctgg

SEQ ID NO: 95321 - RNA, 23 nt, synthetic construct
  source 1..23: mol_type = other RNA
tgccgtggatccagtggacgcag

SEQ ID NO: 95322 - RNA, 23 nt, synthetic construct
  source 1..23: mol_type = other RNA
ttaacgctggtagctgtgggtgt

SEQ ID NO: 95323 - RNA, 23 nt, synthetic construct
  source 1..23: mol_type = other RNA
tgtaacgctggtagctgtgggtg

SEQ ID NO: 95324 - RNA, 23 nt, synthetic construct
  source 1..23: mol_type = other RNA
tggtggccccagttgtggtggcc

SEQ ID NO: 95325 - RNA, 23 nt, synthetic construct
  source 1..23: mol_type = other RNA
tgtggttgtggtagttggcactt

SEQ ID NO: 95326 - RNA, 23 nt, synthetic construct
  source 1..23: mol_type = other RNA
tagggggtggctgtgaagcccgt

SEQ ID NO: 95327 - RNA, 23 nt, synthetic construct
  source 1..23: mol_type = other RNA
tcacactggaggcgtgagtgccg

SEQ ID NO: 95328 - RNA, 23 nt, synthetic construct
  source 1..23: mol_type = other RNA
tccacactggaggcgtgagtgcc

SEQ ID NO: 95329 - RNA, 23 nt, synthetic construct
  source 1..23: mol_type = other RNA
tggtggtggtggtcagcactgtg

SEQ ID NO: 95330 - RNA, 23 nt, synthetic construct
  source 1..23: mol_type = other RNA
tagggtgttgccatagaaccagt

SEQ ID NO: 95331 - RNA, 23 nt, synthetic construct
  source 1..23: mol_type = other RNA
tggagccggtggccgtgatcgta

SEQ ID NO: 95332 - RNA, 23 nt, synthetic construct
  source 1..23: mol_type = other RNA
ttggcggtggtggtcagcactgg

SEQ ID NO: 95333 - RNA, 23 nt, synthetic construct
  source 1..23: mol_type = other RNA
taggagggagtcactgtgttgct

SEQ ID NO: 95334 - RNA, 23 nt, synthetic construct
  source 1..23: mol_type = other RNA
ttgggggtgtgtgggtggtccct

SEQ ID NO: 95335 - RNA, 23 nt, synthetic construct
  source 1..23: mol_type = other RNA
tggccatggtgttcggcactggg

SEQ ID NO: 95336 - RNA, 23 nt, synthetic construct
  source 1..23: mol_type = other RNA
tgcaccgtgtggggactgctggg

SEQ ID NO: 95337 - RNA, 23 nt, synthetic construct
  source 1..23: mol_type = other RNA
ttccaggctgtgcgcaccgtgtg

SEQ ID NO: 95338 - RNA, 23 nt, synthetic construct
  source 1..23: mol_type = other RNA
tggccgaagtccaggctgtgcgc

SEQ ID NO: 95339 - RNA, 23 nt, synthetic construct
  source 1..23: mol_type = other RNA
tcaagatgcccgaggtggccgaa

SEQ ID NO: 95340 - RNA, 23 nt, synthetic construct
  source 1..23: mol_type = other RNA
ttgtgggtggtgcccaagatgcc

SEQ ID NO: 95341 - RNA, 23 nt, synthetic construct
  source 1..23: mol_type = other RNA
tgatgtgggtggtgcccaagatg

SEQ ID NO: 95342 - RNA, 23 nt, synthetic construct
  source 1..23: mol_type = other RNA
tgaagtcaccgtggaaggctctg

SEQ ID NO: 95343 - RNA, 23 nt, synthetic construct
  source 1..23: mol_type = other RNA
ttggttctgctgctagggtgagg

SEQ ID NO: 95344 - RNA, 23 nt, synthetic construct
  source 1..23: mol_type = other RNA
tctggagaagggggtgactcggt

SEQ ID NO: 95345 - RNA, 23 nt, synthetic construct
  source 1..23: mol_type = other RNA
ttggagtaggtgtcaaagtcccc

SEQ ID NO: 95346 - RNA, 23 nt, synthetic construct
  source 1..23: mol_type = other RNA
tttggagtaggtgtcaaagtccc

SEQ ID NO: 95347 - RNA, 23 nt, synthetic construct
  source 1..23: mol_type = other RNA
tgttggagtaggtgtcaaagtcc

SEQ ID NO: 95348 - RNA, 23 nt, synthetic construct
  source 1..23: mol_type = other RNA
tatgttggagtaggtgtcaaagt

SEQ ID NO: 95349 - RNA, 23 nt, synthetic construct
  source 1..23: mol_type = other RNA
tcggcccctccggccgcacggat

SEQ ID NO: 95350 - RNA, 23 nt, synthetic construct
  source 1..23: mol_type = other RNA
tggaggagggcatggccgtagag

SEQ ID NO: 95351 - RNA, 23 nt, synthetic construct
  source 1..23: mol_type = other RNA
tgccgtggatccagtggactcag

SEQ ID NO: 95352 - RNA, 23 nt, synthetic construct
  source 1..23: mol_type = other RNA
tgggcaccgtcacggtggctgta

SEQ ID NO: 95353 - RNA, 23 nt, synthetic construct
  source 1..23: mol_type = other RNA
ttgggcaccgtcacggtggctgt

SEQ ID NO: 95354 - RNA, 23 nt, synthetic construct
  source 1..23: mol_type = other RNA
ttggacagtctctggagtggagg

SEQ ID NO: 95355 - RNA, 23 nt, synthetic construct
  source 1..23: mol_type = other RNA
tagagccggtggccccggttgtg

SEQ ID NO: 95356 - RNA, 23 nt, synthetic construct
  source 1..23: mol_type = other RNA
ttggttgtggtagtcagcacttt

SEQ ID NO: 95357 - RNA, 23 nt, synthetic construct
  source 1..23: mol_type = other RNA
tagggggtggctgtgaagcccgt

SEQ ID NO: 95358 - RNA, 23 nt, synthetic construct
  source 1..23: mol_type = other RNA
tggagggggtcaccgtggaacct

SEQ ID NO: 95359 - RNA, 23 nt, synthetic construct
  source 1..23: mol_type = other RNA
tggtggtggtggtcagcactgtg

SEQ ID NO: 95360 - RNA, 23 nt, synthetic construct
  source 1..23: mol_type = other RNA
tagggtgttgccatagaaccagt

SEQ ID NO: 95361 - RNA, 23 nt, synthetic construct
  source 1..23: mol_type = other RNA
tggagccggtggccgtgatcgta

SEQ ID NO: 95362 - RNA, 23 nt, synthetic construct
  source 1..23: mol_type = other RNA
ttggcggtggtggtcagcactgg

SEQ ID NO: 95363 - RNA, 23 nt, synthetic construct
  source 1..23: mol_type = other RNA
ttgggggtgtgtgggtggtccct

SEQ ID NO: 95364 - RNA, 23 nt, synthetic construct
  source 1..23: mol_type = other RNA
tgcaccgtgtggggactgctggg

SEQ ID NO: 95365 - RNA, 23 nt, synthetic construct
  source 1..23: mol_type = other RNA
ttccaggctgtgcgcaccgtgtg

SEQ ID NO: 95366 - RNA, 23 nt, synthetic construct
  source 1..23: mol_type = other RNA
tggccgaagtccaggctgtgcgc

SEQ ID NO: 95367 - RNA, 23 nt, synthetic construct
  source 1..23: mol_type = other RNA
tggtgcctgaggtggccgaagtc

SEQ ID NO: 95368 - RNA, 23 nt, synthetic construct
  source 1..23: mol_type = other RNA
tgatgtgggtggtgcccaaggtg

SEQ ID NO: 95369 - RNA, 23 nt, synthetic construct
  source 1..23: mol_type = other RNA
tctggagaagggggtgactcggt

SEQ ID NO: 95370 - RNA, 23 nt, synthetic construct
  source 1..23: mol_type = other RNA
tcctggtgtggcccggggtggtc

SEQ ID NO: 95371 - RNA, 23 nt, synthetic construct
  source 1..23: mol_type = other RNA
tccctggtgtggcccggggtggt

SEQ ID NO: 95372 - RNA, 23 nt, synthetic construct
  source 1..23: mol_type = other RNA
ttggagtaggtgtcaaagtcccc

SEQ ID NO: 95373 - RNA, 23 nt, synthetic construct
  source 1..23: mol_type = other RNA
tttggagtaggtgtcaaagtccc

SEQ ID NO: 95374 - RNA, 23 nt, synthetic construct
  source 1..23: mol_type = other RNA
tgttggagtaggtgtcaaagtcc

SEQ ID NO: 95375 - RNA, 23 nt, synthetic construct
  source 1..23: mol_type = other RNA
tatgttggagtaggtgtcaaagt

SEQ ID NO: 95376 - RNA, 23 nt, synthetic construct
  source 1..23: mol_type = other RNA
tcggcccctccggccgcacggat

SEQ ID NO: 95377 - RNA, 23 nt, synthetic construct
  source 1..23: mol_type = other RNA
tccaggtcgtccctggagtggag

SEQ ID NO: 95378 - RNA, 23 nt, synthetic construct
  source 1..23: mol_type = other RNA
tgccgtggatccagtggttgcgg

SEQ ID NO: 95379 - RNA, 23 nt, synthetic construct
  source 1..23: mol_type = other RNA
tggccgtggatccagtggttgcg

SEQ ID NO: 95380 - RNA, 23 nt, synthetic construct
  source 1..23: mol_type = other RNA
tgtcagcactggaagggtggttg

SEQ ID NO: 95381 - RNA, 23 nt, synthetic construct
  source 1..23: mol_type = other RNA
tgaaggaggggatgggtgtaaag

SEQ ID NO: 95382 - RNA, 23 nt, synthetic construct
  source 1..23: mol_type = other RNA
tgggagggtcccggtggtcccaa

SEQ ID NO: 95383 - RNA, 23 nt, synthetic construct
  source 1..23: mol_type = other RNA
taggaggggtggattgtggacat

SEQ ID NO: 95384 - RNA, 23 nt, synthetic construct
  source 1..23: mol_type = other RNA
ttgtgggtggtctccggagtgga

SEQ ID NO: 95385 - RNA, 23 nt, synthetic construct
  source 1..23: mol_type = other RNA
ttggaggtgtgggtggtctccgg

SEQ ID NO: 95386 - RNA, 23 nt, synthetic construct
  source 1..23: mol_type = other RNA
tgaactggtggcccttgtcgtgg

SEQ ID NO: 95387 - RNA, 23 nt, synthetic construct
  source 1..23: mol_type = other RNA
tggaactggtggcccttgtcgtg

SEQ ID NO: 95388 - RNA, 23 nt, synthetic construct
  source 1..23: mol_type = other RNA
tggccgtggggccagtggctgca

SEQ ID NO: 95389 - RNA, 23 nt, synthetic construct
  source 1..23: mol_type = other RNA
tctgggctctgtgaggatccagg

SEQ ID NO: 95390 - RNA, 23 nt, synthetic construct
  source 1..23: mol_type = other RNA
ttggctgtagtgctgggctctgt

SEQ ID NO: 95391 - RNA, 23 nt, synthetic construct
  source 1..23: mol_type = other RNA
tgggcaccgtcacggtggctgta

SEQ ID NO: 95392 - RNA, 23 nt, synthetic construct
  source 1..23: mol_type = other RNA
ttgggcaccgtcacggtggctgt

SEQ ID NO: 95393 - RNA, 23 nt, synthetic construct
  source 1..23: mol_type = other RNA
tccagcagttgcccgggtggagg

SEQ ID NO: 95394 - RNA, 23 nt, synthetic construct
  source 1..23: mol_type = other RNA
tgcactttgagggtgccagcagt

SEQ ID NO: 95395 - RNA, 23 nt, synthetic construct
  source 1..23: mol_type = other RNA
ttaacgctggtagctgtgggtgt

SEQ ID NO: 95396 - RNA, 23 nt, synthetic construct
  source 1..23: mol_type = other RNA
tgtaacgctggtagctgtgggtg

SEQ ID NO: 95397 - RNA, 23 nt, synthetic construct
  source 1..23: mol_type = other RNA
ttggacagtctctggagtagagg

SEQ ID NO: 95398 - RNA, 23 nt, synthetic construct
  source 1..23: mol_type = other RNA
ttggtggtcgtggtggtaagcac

SEQ ID NO: 95399 - RNA, 23 nt, synthetic construct
  source 1..23: mol_type = other RNA
tgtggttgtggtagtcggcactt

SEQ ID NO: 95400 - RNA, 23 nt, synthetic construct
  source 1..23: mol_type = other RNA
tagggggtggctgtgaagcccgt

SEQ ID NO: 95401 - RNA, 23 nt, synthetic construct
  source 1..23: mol_type = other RNA
tcacactggaggcgtgagtgccg

SEQ ID NO: 95402 - RNA, 23 nt, synthetic construct
  source 1..23: mol_type = other RNA
tccacactggaggcgtgagtgcc

SEQ ID NO: 95403 - RNA, 23 nt, synthetic construct
  source 1..23: mol_type = other RNA
tggtggtggtggtcagcactgtg

SEQ ID NO: 95404 - RNA, 23 nt, synthetic construct
  source 1..23: mol_type = other RNA
tagggtgttgccatagaaccagt

SEQ ID NO: 95405 - RNA, 23 nt, synthetic construct
  source 1..23: mol_type = other RNA
ttggcggtggtggtcagcactgg

SEQ ID NO: 95406 - RNA, 23 nt, synthetic construct
  source 1..23: mol_type = other RNA
ttgggggtgtgtgggtggtccct

SEQ ID NO: 95407 - RNA, 23 nt, synthetic construct
  source 1..23: mol_type = other RNA
tgcaccgtgtggggactgctggg

SEQ ID NO: 95408 - RNA, 23 nt, synthetic construct
  source 1..23: mol_type = other RNA
ttccaggctgtgcgcaccgtgtg

SEQ ID NO: 95409 - RNA, 23 nt, synthetic construct
  source 1..23: mol_type = other RNA
tggccgaagtccaggctgtgcgc

SEQ ID NO: 95410 - RNA, 23 nt, synthetic construct
  source 1..23: mol_type = other RNA
tcaagatgcccgaggtggccgaa

SEQ ID NO: 95411 - RNA, 23 nt, synthetic construct
  source 1..23: mol_type = other RNA
ttgtgggtggtgcccaagatgcc

SEQ ID NO: 95412 - RNA, 23 nt, synthetic construct
  source 1..23: mol_type = other RNA
tgatgtgggtggtgcccaagatg

SEQ ID NO: 95413 - RNA, 23 nt, synthetic construct
  source 1..23: mol_type = other RNA
tgaagtcaccgtggaaggctctg

SEQ ID NO: 95414 - RNA, 23 nt, synthetic construct
  source 1..23: mol_type = other RNA
tgggtggtactggtggttgctgc

SEQ ID NO: 95415 - RNA, 23 nt, synthetic construct
  source 1..23: mol_type = other RNA
tctggagaagggggtgactcggt

SEQ ID NO: 95416 - RNA, 23 nt, synthetic construct
  source 1..23: mol_type = other RNA
tcctggtgtggcccggggtggtc

SEQ ID NO: 95417 - RNA, 23 nt, synthetic construct
  source 1..23: mol_type = other RNA
tccctggtgtggcccggggtggt

SEQ ID NO: 95418 - RNA, 23 nt, synthetic construct
  source 1..23: mol_type = other RNA
ttggagtaggtgtcaaagtcccc

SEQ ID NO: 95419 - RNA, 23 nt, synthetic construct
  source 1..23: mol_type = other RNA
tttggagtaggtgtcaaagtccc

SEQ ID NO: 95420 - RNA, 23 nt, synthetic construct
  source 1..23: mol_type = other RNA
tgttggagtaggtgtcaaagtcc

SEQ ID NO: 95421 - RNA, 23 nt, synthetic construct
  source 1..23: mol_type = other RNA
tatgttggagtaggtgtcaaagt

SEQ ID NO: 95422 - RNA, 23 nt, synthetic construct
  source 1..23: mol_type = other RNA
tgctgctcacagactgcccctcc

SEQ ID NO: 95423 - RNA, 23 nt, synthetic construct
  source 1..23: mol_type = other RNA
tggctgctcacagactgcccctc

SEQ ID NO: 95424 - RNA, 23 nt, synthetic construct
  source 1..23: mol_type = other RNA
tgccgtggatccagtggactcag

SEQ ID NO: 95425 - RNA, 23 nt, synthetic construct
  source 1..23: mol_type = other RNA
tgggcaccgtcacggtggctgta

SEQ ID NO: 95426 - RNA, 23 nt, synthetic construct
  source 1..23: mol_type = other RNA
ttgggcaccgtcacggtggctgt

SEQ ID NO: 95427 - RNA, 23 nt, synthetic construct
  source 1..23: mol_type = other RNA
tgtggttgtggtagtcggcactt

SEQ ID NO: 95428 - RNA, 23 nt, synthetic construct
  source 1..23: mol_type = other RNA
tgggtgactgtgaagcccgtggt

SEQ ID NO: 95429 - RNA, 23 nt, synthetic construct
  source 1..23: mol_type = other RNA
tgggggtgactgtgaagcccgtg

SEQ ID NO: 95430 - RNA, 23 nt, synthetic construct
  source 1..23: mol_type = other RNA
tggtccccgggacggaggagggg

SEQ ID NO: 95431 - RNA, 23 nt, synthetic construct
  source 1..23: mol_type = other RNA
ttggtccccgggacggaggaggg

SEQ ID NO: 95432 - RNA, 23 nt, synthetic construct
  source 1..23: mol_type = other RNA
tggtggtccccgggacggaggag

SEQ ID NO: 95433 - RNA, 23 nt, synthetic construct
  source 1..23: mol_type = other RNA
tggtggtggtggtcagcactgtg

SEQ ID NO: 95434 - RNA, 23 nt, synthetic construct
  source 1..23: mol_type = other RNA
tagggtgttgccatagaaccagt

SEQ ID NO: 95435 - RNA, 23 nt, synthetic construct
  source 1..23: mol_type = other RNA
tgtggccgtggtgatcagtgatg

SEQ ID NO: 95436 - RNA, 23 nt, synthetic construct
  source 1..23: mol_type = other RNA
tggagccggtggccgtgatcgta

SEQ ID NO: 95437 - RNA, 23 nt, synthetic construct
  source 1..23: mol_type = other RNA
ttggcggtggtggtcagcactgg

SEQ ID NO: 95438 - RNA, 23 nt, synthetic construct
  source 1..23: mol_type = other RNA
ttgggggtgtgtgggtggtccct

SEQ ID NO: 95439 - RNA, 23 nt, synthetic construct
  source 1..23: mol_type = other RNA
tgcaccgtgtggggactgctggg

SEQ ID NO: 95440 - RNA, 23 nt, synthetic construct
  source 1..23: mol_type = other RNA
ttccaggctgtgcgcaccgtgtg

SEQ ID NO: 95441 - RNA, 23 nt, synthetic construct
  source 1..23: mol_type = other RNA
tggccgaagtccaggctgtgcgc

SEQ ID NO: 95442 - RNA, 23 nt, synthetic construct
  source 1..23: mol_type = other RNA
tggtgcctgaggtggccgaagtc

SEQ ID NO: 95443 - RNA, 23 nt, synthetic construct
  source 1..23: mol_type = other RNA
tgatgtgggtggtgcccaaggtg

SEQ ID NO: 95444 - RNA, 23 nt, synthetic construct
  source 1..23: mol_type = other RNA
tggggaagggggtgactcggtgg

SEQ ID NO: 95445 - RNA, 23 nt, synthetic construct
  source 1..23: mol_type = other RNA
ttggagtaggtgtcaaagtcccc

SEQ ID NO: 95446 - RNA, 23 nt, synthetic construct
  source 1..23: mol_type = other RNA
tttggagtaggtgtcaaagtccc

SEQ ID NO: 95447 - RNA, 23 nt, synthetic construct
  source 1..23: mol_type = other RNA
tgttggagtaggtgtcaaagtcc

SEQ ID NO: 95448 - RNA, 23 nt, synthetic construct
  source 1..23: mol_type = other RNA
tatgttggagtaggtgtcaaagt

SEQ ID NO: 95449 - RNA, 23 nt, synthetic construct
  source 1..23: mol_type = other RNA
tcggcccctccggccgcacggat

SEQ ID NO: 95450 - RNA, 23 nt, synthetic construct
  source 1..23: mol_type = other RNA
tccagggggacaccaggctgggc

SEQ ID NO: 95451 - RNA, 23 nt, synthetic construct
  source 1..23: mol_type = other RNA
tggaggagggcatggccgtagag

SEQ ID NO: 95452 - RNA, 23 nt, synthetic construct
  source 1..23: mol_type = other RNA
tgtcagcactggaagggtggttg

SEQ ID NO: 95453 - RNA, 23 nt, synthetic construct
  source 1..23: mol_type = other RNA
tgtaacgctggtagctgtggatt

SEQ ID NO: 95454 - RNA, 23 nt, synthetic construct
  source 1..23: mol_type = other RNA
tggaggaggggatgggtgtaacg

SEQ ID NO: 95455 - RNA, 23 nt, synthetic construct
  source 1..23: mol_type = other RNA
tgggagggtcccggtggtcccaa

SEQ ID NO: 95456 - RNA, 23 nt, synthetic construct
  source 1..23: mol_type = other RNA
taggaggggtggattgtggacat

SEQ ID NO: 95457 - RNA, 23 nt, synthetic construct
  source 1..23: mol_type = other RNA
ttgtgggtggtctccggagtgga

SEQ ID NO: 95458 - RNA, 23 nt, synthetic construct
  source 1..23: mol_type = other RNA
ttggaggtgtgggtggtctccgg

SEQ ID NO: 95459 - RNA, 23 nt, synthetic construct
  source 1..23: mol_type = other RNA
tgaactggtggcccttgtcgtgg

SEQ ID NO: 95460 - RNA, 23 nt, synthetic construct
  source 1..23: mol_type = other RNA
tggaactggtggcccttgtcgtg

SEQ ID NO: 95461 - RNA, 23 nt, synthetic construct
  source 1..23: mol_type = other RNA
tggccgtggggccagtggctgca

SEQ ID NO: 95462 - RNA, 23 nt, synthetic construct
  source 1..23: mol_type = other RNA
tgccgtggatccagtggacgcag

SEQ ID NO: 95463 - RNA, 23 nt, synthetic construct
  source 1..23: mol_type = other RNA
tgggcaccgtcacggtggctgta

SEQ ID NO: 95464 - RNA, 23 nt, synthetic construct
  source 1..23: mol_type = other RNA
ttgggcaccgtcacggtggctgt

SEQ ID NO: 95465 - RNA, 23 nt, synthetic construct
  source 1..23: mol_type = other RNA
ttggaagggcagttgcagtccct

SEQ ID NO: 95466 - RNA, 23 nt, synthetic construct
  source 1..23: mol_type = other RNA
ttggacagtctctggagtggagg

SEQ ID NO: 95467 - RNA, 23 nt, synthetic construct
  source 1..23: mol_type = other RNA
tagagccggtggccccggttgtg

SEQ ID NO: 95468 - RNA, 23 nt, synthetic construct
  source 1..23: mol_type = other RNA
tgtggttgtggtagtcggcactt

SEQ ID NO: 95469 - RNA, 23 nt, synthetic construct
  source 1..23: mol_type = other RNA
tagggggtggctgtgaagcccgt

SEQ ID NO: 95470 - RNA, 23 nt, synthetic construct
  source 1..23: mol_type = other RNA
tcacactggaggcgtgagtgccg

SEQ ID NO: 95471 - RNA, 23 nt, synthetic construct
  source 1..23: mol_type = other RNA
tccacactggaggcgtgagtgcc

SEQ ID NO: 95472 - RNA, 23 nt, synthetic construct
  source 1..23: mol_type = other RNA
tggtggtggtggtcagcactctg

SEQ ID NO: 95473 - RNA, 23 nt, synthetic construct
  source 1..23: mol_type = other RNA
tagggtgttgccatagaaccagt

SEQ ID NO: 95474 - RNA, 23 nt, synthetic construct
  source 1..23: mol_type = other RNA
tggagccggtggccgtgatcgta

SEQ ID NO: 95475 - RNA, 23 nt, synthetic construct
  source 1..23: mol_type = other RNA
tgtcagcactggaagggtggttg

SEQ ID NO: 95476 - RNA, 23 nt, synthetic construct
  source 1..23: mol_type = other RNA
tggaggaggggatgggtgtaaag

SEQ ID NO: 95477 - RNA, 23 nt, synthetic construct
  source 1..23: mol_type = other RNA
tccacgtggtccacagggtggag

SEQ ID NO: 95478 - RNA, 23 nt, synthetic construct
  source 1..23: mol_type = other RNA
tcggtccacgtggtccacagggt

SEQ ID NO: 95479 - RNA, 23 nt, synthetic construct
  source 1..23: mol_type = other RNA
tacatggtggacatgggtgtggt

SEQ ID NO: 95480 - RNA, 23 nt, synthetic construct
  source 1..23: mol_type = other RNA
ttgtggattgtggacatggtgga

SEQ ID NO: 95481 - RNA, 23 nt, synthetic construct
  source 1..23: mol_type = other RNA
ttggaggtgtgggtggtctctgg

SEQ ID NO: 95482 - RNA, 23 nt, synthetic construct
  source 1..23: mol_type = other RNA
tggtggcccttgtcatggtggct

SEQ ID NO: 95483 - RNA, 23 nt, synthetic construct
  source 1..23: mol_type = other RNA
tggccgtggatccagtggctgca

SEQ ID NO: 95484 - RNA, 23 nt, synthetic construct
  source 1..23: mol_type = other RNA
ttgggcaccatcacggtggctat

SEQ ID NO: 95485 - RNA, 23 nt, synthetic construct
  source 1..23: mol_type = other RNA
tggtcaccactttgggggtgtga

SEQ ID NO: 95486 - RNA, 23 nt, synthetic construct
  source 1..23: mol_type = other RNA
ttggtcaccactttgggggtgtg

SEQ ID NO: 95487 - RNA, 23 nt, synthetic construct
  source 1..23: mol_type = other RNA
ttggtggtcaccactttgggggt

SEQ ID NO: 95488 - RNA, 23 nt, synthetic construct
  source 1..23: mol_type = other RNA
ttggccatggtggtcaccacttt

SEQ ID NO: 95489 - RNA, 23 nt, synthetic construct
  source 1..23: mol_type = other RNA
tgggcatagtggccatggtggtc

SEQ ID NO: 95490 - RNA, 23 nt, synthetic construct
  source 1..23: mol_type = other RNA
ttgggcatagtggccatggtggt

SEQ ID NO: 95491 - RNA, 23 nt, synthetic construct
  source 1..23: mol_type = other RNA
tggtccccacggtggacgagctg

SEQ ID NO: 95492 - RNA, 23 nt, synthetic construct
  source 1..23: mol_type = other RNA
tgggtgcgggtggtccccacggt

SEQ ID NO: 95493 - RNA, 23 nt, synthetic construct
  source 1..23: mol_type = other RNA
taaactgtccaaatgccctgcag

SEQ ID NO: 95494 - RNA, 23 nt, synthetic construct
  source 1..23: mol_type = other RNA
tgtcaatgtcacagtgctgattg

SEQ ID NO: 95495 - RNA, 23 nt, synthetic construct
  source 1..23: mol_type = other RNA
tggaagcggtcaatgtcacagtg

SEQ ID NO: 95496 - RNA, 23 nt, synthetic construct
  source 1..23: mol_type = other RNA
ttgccggagagggatggcattgt

SEQ ID NO: 95497 - RNA, 23 nt, synthetic construct
  source 1..23: mol_type = other RNA
tctcattcacctgccggagaggg

SEQ ID NO: 95498 - RNA, 23 nt, synthetic construct
  source 1..23: mol_type = other RNA
ttccagcaggacgacacggttgt

SEQ ID NO: 95499 - RNA, 23 nt, synthetic construct
  source 1..23: mol_type = other RNA
ttggccacaggctttgggtccag

SEQ ID NO: 95500 - RNA, 23 nt, synthetic construct
  source 1..23: mol_type = other RNA
taggtgacgttggccacaggctt

SEQ ID NO: 95501 - RNA, 23 nt, synthetic construct
  source 1..23: mol_type = other RNA
tgcaggtgacgttggccacaggc

SEQ ID NO: 95502 - RNA, 23 nt, synthetic construct
  source 1..23: mol_type = other RNA
tacatgctgcagatgcactcgca

SEQ ID NO: 95503 - RNA, 23 nt, synthetic construct
  source 1..23: mol_type = other RNA
ttggaatagtgggagccgcccca

SEQ ID NO: 95504 - RNA, 23 nt, synthetic construct
  source 1..23: mol_type = other RNA
tggtggaatagtgggagccgccc

SEQ ID NO: 95505 - RNA, 23 nt, synthetic construct
  source 1..23: mol_type = other RNA
taggtgcagttgccccggaaggt

SEQ ID NO: 95506 - RNA, 23 nt, synthetic construct
  source 1..23: mol_type = other RNA
tcataggtgcagttgccccggaa

SEQ ID NO: 95507 - RNA, 23 nt, synthetic construct
  source 1..23: mol_type = other RNA
tacataggtgcagttgccccgga

SEQ ID NO: 95508 - RNA, 23 nt, synthetic construct
  source 1..23: mol_type = other RNA
tgacataggtgcagttgccccgg

SEQ ID NO: 95509 - RNA, 23 nt, synthetic construct
  source 1..23: mol_type = other RNA
tggctgagattcccaaagcgtgc

SEQ ID NO: 95510 - RNA, 23 nt, synthetic construct
  source 1..23: mol_type = other RNA
tttgtccaggtagaggctgagat

SEQ ID NO: 95511 - RNA, 23 nt, synthetic construct
  source 1..23: mol_type = other RNA
ttggttgtccaggtagaggctga

SEQ ID NO: 95512 - RNA, 23 nt, synthetic construct
  source 1..23: mol_type = other RNA
tggcagaggccgtgcagtagtgg

SEQ ID NO: 95513 - RNA, 23 nt, synthetic construct
  source 1..23: mol_type = other RNA
ttggtcaaacaggatcaggccct

SEQ ID NO: 95514 - RNA, 23 nt, synthetic construct
  source 1..23: mol_type = other RNA
tacacgcatggtggtggtcccca

SEQ ID NO: 95515 - RNA, 23 nt, synthetic construct
  source 1..23: mol_type = other RNA
tagggcaggaatgtccacacgca

SEQ ID NO: 95516 - RNA, 23 nt, synthetic construct
  source 1..23: mol_type = other RNA
tcagggcaggaatgtccacacgc

SEQ ID NO: 95517 - RNA, 23 nt, synthetic construct
  source 1..23: mol_type = other RNA
tccagggcaggaatgtccacacg

SEQ ID NO: 95518 - RNA, 23 nt, synthetic construct
  source 1..23: mol_type = other RNA
ttggccattgaaggtgacgctca

SEQ ID NO: 95519 - RNA, 23 nt, synthetic construct
  source 1..23: mol_type = other RNA
tgtcttggccatgtccttgcaac

SEQ ID NO: 95520 - RNA, 23 nt, synthetic construct
  source 1..23: mol_type = other RNA
ttcctttctgctgtcggggacca

SEQ ID NO: 95521 - RNA, 23 nt, synthetic construct
  source 1..23: mol_type = other RNA
ttgtggcactcagcaaagacctg

SEQ ID NO: 95522 - RNA, 23 nt, synthetic construct
  source 1..23: mol_type = other RNA
tacaaggttgtggcactcagcaa

SEQ ID NO: 95523 - RNA, 23 nt, synthetic construct
  source 1..23: mol_type = other RNA
tgatgcaggcgttgaagaatggg

SEQ ID NO: 95524 - RNA, 23 nt, synthetic construct
  source 1..23: mol_type = other RNA
tgctgatgcaggcgttgaagaat

SEQ ID NO: 95525 - RNA, 23 nt, synthetic construct
  source 1..23: mol_type = other RNA
tggcggcccctgcagtggtcgct

SEQ ID NO: 95526 - RNA, 23 nt, synthetic construct
  source 1..23: mol_type = other RNA
tcaggccaccggttgcacctcgc

SEQ ID NO: 95527 - RNA, 23 nt, synthetic construct
  source 1..23: mol_type = other RNA
ttgggctctggttcctagagttg

SEQ ID NO: 95528 - RNA, 23 nt, synthetic construct
  source 1..23: mol_type = other RNA
tggcaggcctgcacgcagatgcc

SEQ ID NO: 95529 - RNA, 23 nt, synthetic construct
  source 1..23: mol_type = other RNA
tgggcaggcctgcacgcagatgc

SEQ ID NO: 95530 - RNA, 23 nt, synthetic construct
  source 1..23: mol_type = other RNA
tgcaggggcaggcctgcacgcag

SEQ ID NO: 95531 - RNA, 23 nt, synthetic construct
  source 1..23: mol_type = other RNA
tcgcaggggcaggcctgcacgca

SEQ ID NO: 95532 - RNA, 23 nt, synthetic construct
  source 1..23: mol_type = other RNA
tgggtcccacgcaggggcaggcc

SEQ ID NO: 95533 - RNA, 23 nt, synthetic construct
  source 1..23: mol_type = other RNA
tttgcacggcgggggctgaccct

SEQ ID NO: 95534 - RNA, 23 nt, synthetic construct
  source 1..23: mol_type = other RNA
tggcagcaggggttctcggcccg

SEQ ID NO: 95535 - RNA, 23 nt, synthetic construct
  source 1..23: mol_type = other RNA
tacaccgtctcggggcagcaggg

SEQ ID NO: 95536 - RNA, 23 nt, synthetic construct
  source 1..23: mol_type = other RNA
taggtggttgtgttgcacacgca

SEQ ID NO: 95537 - RNA, 23 nt, synthetic construct
  source 1..23: mol_type = other RNA
ttgggtgcagatggactcctgcc

SEQ ID NO: 95538 - RNA, 23 nt, synthetic construct
  source 1..23: mol_type = other RNA
tcctgggtgcagatggactcctg

SEQ ID NO: 95539 - RNA, 23 nt, synthetic construct
  source 1..23: mol_type = other RNA
tcctcctcctgggtgcagatgga

SEQ ID NO: 95540 - RNA, 23 nt, synthetic construct
  source 1..23: mol_type = other RNA
tccccgtagaaggtgccattgta

SEQ ID NO: 95541 - RNA, 23 nt, synthetic construct
  source 1..23: mol_type = other RNA
tgcaggcatcctcctgacattgc

SEQ ID NO: 95542 - RNA, 23 nt, synthetic construct
  source 1..23: mol_type = other RNA
tgggcgtgaggcaggcggtctgg

SEQ ID NO: 95543 - RNA, 23 nt, synthetic construct
  source 1..23: mol_type = other RNA
tactggctggccatcgggcgtga

SEQ ID NO: 95544 - RNA, 23 nt, synthetic construct
  source 1..23: mol_type = other RNA
taggtttcattcagctggactgg

SEQ ID NO: 95545 - RNA, 23 nt, synthetic construct
  source 1..23: mol_type = other RNA
tttgacccaggtttcattcagct

SEQ ID NO: 95546 - RNA, 23 nt, synthetic construct
  source 1..23: mol_type = other RNA
tcatggctgttgacccaggtttc

SEQ ID NO: 95547 - RNA, 23 nt, synthetic construct
  source 1..23: mol_type = other RNA
tctcagcctcacagaggtacacg

SEQ ID NO: 95548 - RNA, 23 nt, synthetic construct
  source 1..23: mol_type = other RNA
taggatggtcgtgttgatgcgga

SEQ ID NO: 95549 - RNA, 23 nt, synthetic construct
  source 1..23: mol_type = other RNA
tctctgctgagtacttggacgct

SEQ ID NO: 95550 - RNA, 23 nt, synthetic construct
  source 1..23: mol_type = other RNA
tgcctctcctggcagcaggtgca

SEQ ID NO: 95551 - RNA, 23 nt, synthetic construct
  source 1..23: mol_type = other RNA
tcctcgtggacccgcctctcctg

SEQ ID NO: 95552 - RNA, 23 nt, synthetic construct
  source 1..23: mol_type = other RNA
ttcctcgtggacccgcctctcct

SEQ ID NO: 95553 - RNA, 23 nt, synthetic construct
  source 1..23: mol_type = other RNA
tagccgttaggacagtgcaaggg

SEQ ID NO: 95554 - RNA, 23 nt, synthetic construct
  source 1..23: mol_type = other RNA
ttgtaggtgtgcaggatggctga

SEQ ID NO: 95555 - RNA, 23 nt, synthetic construct
  source 1..23: mol_type = other RNA
tgtgtaggtgtgcaggatggctg

SEQ ID NO: 95556 - RNA, 23 nt, synthetic construct
  source 1..23: mol_type = other RNA
ttggaggcagaacgttctcagac

SEQ ID NO: 95557 - RNA, 23 nt, synthetic construct
  source 1..23: mol_type = other RNA
tgacaatgcacatcctggctcca

SEQ ID NO: 95558 - RNA, 23 nt, synthetic construct
  source 1..23: mol_type = other RNA
ttttcatgatcagacaatgcaca

SEQ ID NO: 95559 - RNA, 23 nt, synthetic construct
  source 1..23: mol_type = other RNA
tgaggaggcccaaggttttcatg

SEQ ID NO: 95560 - RNA, 23 nt, synthetic construct
  source 1..23: mol_type = other RNA
tggtgccacacacaggccggggg

SEQ ID NO: 95561 - RNA, 23 nt, synthetic construct
  source 1..23: mol_type = other RNA
tgggtgccacacacaggccgggg

SEQ ID NO: 95562 - RNA, 23 nt, synthetic construct
  source 1..23: mol_type = other RNA
tcggagcgcggggtgccacacac

SEQ ID NO: 95563 - RNA, 23 nt, synthetic construct
  source 1..23: mol_type = other RNA
tgcgggcgctccggccgtggcag

SEQ ID NO: 95564 - RNA, 23 nt, synthetic construct
  source 1..23: mol_type = other RNA
tcctggaccagcctgtctgcccc

SEQ ID NO: 95565 - RNA, 23 nt, synthetic construct
  source 1..23: mol_type = other RNA
tcctgcagcaggcatggacaggc

SEQ ID NO: 95566 - RNA, 23 nt, synthetic construct
  source 1..23: mol_type = other RNA
tccctgcagcaggcatggacagg

SEQ ID NO: 95567 - RNA, 23 nt, synthetic construct
  source 1..23: mol_type = other RNA
tagccctgagttaccctgcagca

SEQ ID NO: 95568 - RNA, 23 nt, synthetic construct
  source 1..23: mol_type = other RNA
tctcagagaacacgtagttgcaa

SEQ ID NO: 95569 - RNA, 23 nt, synthetic construct
  source 1..23: mol_type = other RNA
tcggcgtagctggacgttgaagt

SEQ ID NO: 95570 - RNA, 23 nt, synthetic construct
  source 1..23: mol_type = other RNA
taggcagcttagcttcccacccg

SEQ ID NO: 95571 - RNA, 23 nt, synthetic construct
  source 1..23: mol_type = other RNA
tcaggcagcttagcttcccaccc

SEQ ID NO: 95572 - RNA, 23 nt, synthetic construct
  source 1..23: mol_type = other RNA
tagtggctttggaactggtggct

SEQ ID NO: 95573 - RNA, 23 nt, synthetic construct
  source 1..23: mol_type = other RNA
tagtggctttggaactggtggct

SEQ ID NO: 95574 - RNA, 23 nt, synthetic construct
  source 1..23: mol_type = other RNA
tcttggccatgtccttgcaactg

SEQ ID NO: 95575 - RNA, 23 nt, synthetic construct
  source 1..23: mol_type = other RNA
tgctcagagaacacgtagttgca

SEQ ID NO: 95576 - RNA, 23 nt, synthetic construct
  source 1..23: mol_type = other RNA
tgttctccgctgtggggaccctt

SEQ ID NO: 95577 - RNA, 23 nt, synthetic construct
  source 1..23: mol_type = other RNA
taagtcctcgtaggcggcgcggc

SEQ ID NO: 95578 - RNA, 23 nt, synthetic construct
  source 1..23: mol_type = other RNA
tggtggtggtgttagtcaagggg

SEQ ID NO: 95579 - RNA, 23 nt, synthetic construct
  source 1..23: mol_type = other RNA
tgggcgcggcagagctctgcgta

SEQ ID NO: 95580 - RNA, 23 nt, synthetic construct
  source 1..23: mol_type = other RNA
tacggtgcagttgtccacatggc

SEQ ID NO: 95581 - RNA, 23 nt, synthetic construct
  source 1..23: mol_type = other RNA
tgtctccagctctgtggtcggtg

SEQ ID NO: 95582 - RNA, 23 nt, synthetic construct
  source 1..23: mol_type = other RNA
tgtcctcgtaggcggcgcggcag

SEQ ID NO: 95583 - RNA, 23 nt, synthetic construct
  source 1..23: mol_type = other RNA
tacacagtggtcctcgcagagct

SEQ ID NO: 95584 - RNA, 23 nt, synthetic construct
  source 1..23: mol_type = other RNA
tgaagtcctcgtaggcggcgcgg

SEQ ID NO: 95585 - RNA, 23 nt, synthetic construct
  source 1..23: mol_type = other RNA
tccacacagtggtcctcgcagag

SEQ ID NO: 95586 - RNA, 23 nt, synthetic construct
  source 1..23: mol_type = other RNA
tctgggacttggggcagttctgc

SEQ ID NO: 95587 - RNA, 23 nt, synthetic construct
  source 1..23: mol_type = other RNA
tcagaaacactcgcagtcgccac

SEQ ID NO: 95588 - RNA, 23 nt, synthetic construct
  source 1..23: mol_type = other RNA
tccaggccaaagtccaggctgca

SEQ ID NO: 95589 - RNA, 23 nt, synthetic construct
  source 1..23: mol_type = other RNA
tccaggccaaagtccaggctgca

SEQ ID NO: 95590 - RNA, 23 nt, synthetic construct
  source 1..23: mol_type = other RNA
tcagtggctgcagttgtagtggc

SEQ ID NO: 95591 - RNA, 23 nt, synthetic construct
  source 1..23: mol_type = other RNA
tccaggccaaagtccaggctgca

SEQ ID NO: 95592 - RNA, 23 nt, synthetic construct
  source 1..23: mol_type = other RNA
tccaggccaaagtccaggctgca

SEQ ID NO: 95593 - RNA, 23 nt, synthetic construct
  source 1..23: mol_type = other RNA
tcagtggctgcagttgtagtggc

SEQ ID NO: 95594 - RNA, 23 nt, synthetic construct
  source 1..23: mol_type = other RNA
tcagtggctgcagttgtagtggc

SEQ ID NO: 95595 - RNA, 23 nt, synthetic construct
  source 1..23: mol_type = other RNA
ttggactcctgccctggcgggca

SEQ ID NO: 95596 - RNA, 23 nt, synthetic construct
  source 1..23: mol_type = other RNA
tggcgctccggccgtggcaggga

SEQ ID NO: 95597 - RNA, 23 nt, synthetic construct
  source 1..23: mol_type = other RNA
tttgcgacctcagccctgagtta

SEQ ID NO: 95598 - RNA, 23 nt, synthetic construct
  source 1..23: mol_type = other RNA
tgcccgtgtgtggtggccgtggt

SEQ ID NO: 95599 - RNA, 23 nt, synthetic construct
  source 1..23: mol_type = other RNA
tgcccgtgtgtggtggccgtggt

SEQ ID NO: 95600 - RNA, 23 nt, synthetic construct
  source 1..23: mol_type = other RNA
tgcccgtgtgtggtggccgtggt

SEQ ID NO: 95601 - RNA, 23 nt, synthetic construct
  source 1..23: mol_type = other RNA
tagctctgtggtcggtggcgggg

SEQ ID NO: 95602 - RNA, 23 nt, synthetic construct
  source 1..23: mol_type = other RNA
tcacaaaggtggcacacgggcag

SEQ ID NO: 95603 - RNA, 23 nt, synthetic construct
  source 1..23: mol_type = other RNA
ttgaaggccgggaggccgttgaa

SEQ ID NO: 95604 - RNA, 23 nt, synthetic construct
  source 1..23: mol_type = other RNA
tcctggtgctgcatgttgagggg

SEQ ID NO: 95605 - RNA, 23 nt, synthetic construct
  source 1..23: mol_type = other RNA
tctgtgcgcaccgtgtggggact

SEQ ID NO: 95606 - RNA, 23 nt, synthetic construct
  source 1..23: mol_type = other RNA
tctgtgcgcaccgtgtggggact

SEQ ID NO: 95607 - RNA, 23 nt, synthetic construct
  source 1..23: mol_type = other RNA
tctgtgcgcaccgtgtggggact

SEQ ID NO: 95608 - RNA, 23 nt, synthetic construct
  source 1..23: mol_type = other RNA
tagggggtgactgtgaagcccgt

SEQ ID NO: 95609 - RNA, 23 nt, synthetic construct
  source 1..23: mol_type = other RNA
tctgtgcgcaccgtgtggggact

SEQ ID NO: 95610 - RNA, 23 nt, synthetic construct
  source 1..23: mol_type = other RNA
ttgagctgttcccagagtggagg

SEQ ID NO: 95611 - RNA, 23 nt, synthetic construct
  source 1..23: mol_type = other RNA
tggcaggtgaggtcgcacaggcc

SEQ ID NO: 95612 - RNA, 23 nt, synthetic construct
  source 1..23: mol_type = other RNA
tgcacggcgggggctgaccctgg

SEQ ID NO: 95613 - RNA, 23 nt, synthetic construct
  source 1..23: mol_type = other RNA
tgtggatttggtggctgtgcttg

SEQ ID NO: 95614 - RNA, 23 nt, synthetic construct
  source 1..23: mol_type = other RNA
tgtggatttggtggctgtgcttg

SEQ ID NO: 95615 - RNA, 23 nt, synthetic construct
  source 1..23: mol_type = other RNA
tcctgggcgtcacagggcagggg

SEQ ID NO: 95616 - RNA, 23 nt, synthetic construct
  source 1..23: mol_type = other RNA
tcgaagccgggacggttgcacgg

SEQ ID NO: 95617 - RNA, 23 nt, synthetic construct
  source 1..23: mol_type = other RNA
tggagcacggagcgcggggtgcc

SEQ ID NO: 95618 - RNA, 23 nt, synthetic construct
  source 1..23: mol_type = other RNA
tccctcgtcgtgcaccacctctc

SEQ ID NO: 95619 - RNA, 23 nt, synthetic construct
  source 1..23: mol_type = other RNA
ttagttgcaaaggccagggaagc

SEQ ID NO: 95620 - RNA, 23 nt, synthetic construct
  source 1..23: mol_type = other RNA
tttgaaggccgggaggccgttga

SEQ ID NO: 95621 - RNA, 23 nt, synthetic construct
  source 1..23: mol_type = other RNA
taggcctgtctgcaccacgatga

SEQ ID NO: 95622 - RNA, 23 nt, synthetic construct
  source 1..23: mol_type = other RNA
taggcctcggcgtagctggacgt

SEQ ID NO: 95623 - RNA, 23 nt, synthetic construct
  source 1..23: mol_type = other RNA
taatgtccacacgcatggtggtg

SEQ ID NO: 95624 - RNA, 23 nt, synthetic construct
  source 1..23: mol_type = other RNA
tcaggcctgtctgcaccacgatg

SEQ ID NO: 95625 - RNA, 23 nt, synthetic construct
  source 1..23: mol_type = other RNA
tctgttggctgttggcgcacatc

SEQ ID NO: 95626 - RNA, 23 nt, synthetic construct
  source 1..23: mol_type = other RNA
ttgttgccatagaaccagtggcc

SEQ ID NO: 95627 - RNA, 23 nt, synthetic construct
  source 1..23: mol_type = other RNA
tctgctagggtgtgggaagtcac

SEQ ID NO: 95628 - RNA, 23 nt, synthetic construct
  source 1..23: mol_type = other RNA
ttgttgccatagaaccagtggcc

SEQ ID NO: 95629 - RNA, 23 nt, synthetic construct
  source 1..23: mol_type = other RNA
ttgttgccatagaaccagtggcc

SEQ ID NO: 95630 - RNA, 23 nt, synthetic construct
  source 1..23: mol_type = other RNA
ttgttgccatagaaccagtggcc

SEQ ID NO: 95631 - RNA, 23 nt, synthetic construct
  source 1..23: mol_type = other RNA
ttgttgccatagaaccagtggcc

SEQ ID NO: 95632 - RNA, 23 nt, synthetic construct
  source 1..23: mol_type = other RNA
tacactggcggtggggaggtggg

SEQ ID NO: 95633 - RNA, 23 nt, synthetic construct
  source 1..23: mol_type = other RNA
ttgcatggatctctctcatgagg

SEQ ID NO: 95634 - RNA, 23 nt, synthetic construct
  source 1..23: mol_type = other RNA
ttcggggcagcaggggttctcgg

SEQ ID NO: 95635 - RNA, 23 nt, synthetic construct
  source 1..23: mol_type = other RNA
tgacgctccggggcaggagccct

SEQ ID NO: 95636 - RNA, 23 nt, synthetic construct
  source 1..23: mol_type = other RNA
tgcacggagcgcggggtgccaca

SEQ ID NO: 95637 - RNA, 23 nt, synthetic construct
  source 1..23: mol_type = other RNA
ttgctcggctctgtgaggatcca

SEQ ID NO: 95638 - RNA, 23 nt, synthetic construct
  source 1..23: mol_type = other RNA
ttgctcggctctgtgaggatcca

SEQ ID NO: 95639 - RNA, 23 nt, synthetic construct
  source 1..23: mol_type = other RNA
ttgctcggctctgtgaggatcca

SEQ ID NO: 95640 - RNA, 23 nt, synthetic construct
  source 1..23: mol_type = other RNA
ttgctcggctctgtgaggatcca

SEQ ID NO: 95641 - RNA, 23 nt, synthetic construct
  source 1..23: mol_type = other RNA
ttggcactccgcaaaggccggcc

SEQ ID NO: 95642 - RNA, 23 nt, synthetic construct
  source 1..23: mol_type = other RNA
ttcagcactttggtagtgtgagc

SEQ ID NO: 95643 - RNA, 23 nt, synthetic construct
  source 1..23: mol_type = other RNA
ttgtgtgggtggtccctagggca

SEQ ID NO: 95644 - RNA, 23 nt, synthetic construct
  source 1..23: mol_type = other RNA
ttgtgtgggtggtccctagggca

SEQ ID NO: 95645 - RNA, 23 nt, synthetic construct
  source 1..23: mol_type = other RNA
ttgtgtgggtggtccctagggca

SEQ ID NO: 95646 - RNA, 23 nt, synthetic construct
  source 1..23: mol_type = other RNA
ttgtgtgggtggtccctagggca

SEQ ID NO: 95647 - RNA, 23 nt, synthetic construct
  source 1..23: mol_type = other RNA
ttgatgatggtgccgttgcttcc

SEQ ID NO: 95648 - RNA, 23 nt, synthetic construct
  source 1..23: mol_type = other RNA
tccggatgctcggggtcacccat

SEQ ID NO: 95649 - RNA, 23 nt, synthetic construct
  source 1..23: mol_type = other RNA
ttattgttgcaggcatcctcctg

SEQ ID NO: 95650 - RNA, 23 nt, synthetic construct
  source 1..23: mol_type = other RNA
tggacaggcggccgccttgcctg

SEQ ID NO: 95651 - RNA, 23 nt, synthetic construct
  source 1..23: mol_type = other RNA
tacagtgcaccttctgccccacc

SEQ ID NO: 95652 - RNA, 23 nt, synthetic construct
  source 1..23: mol_type = other RNA
ttctggagtagaggaggtgtgga

SEQ ID NO: 95653 - RNA, 23 nt, synthetic construct
  source 1..23: mol_type = other RNA
tgtgccgtccctgggctggagga

SEQ ID NO: 95654 - RNA, 23 nt, synthetic construct
  source 1..23: mol_type = other RNA
tgtgccgtccctgggctggagga

SEQ ID NO: 95655 - RNA, 23 nt, synthetic construct
  source 1..23: mol_type = other RNA
tgtgccgtccctgggctggagga

SEQ ID NO: 95656 - RNA, 23 nt, synthetic construct
  source 1..23: mol_type = other RNA
tagccggtggctgtgatcgtagt

SEQ ID NO: 95657 - RNA, 23 nt, synthetic construct
  source 1..23: mol_type = other RNA
tgtgccgtccctgggctggagga

SEQ ID NO: 95658 - RNA, 23 nt, synthetic construct
  source 1..23: mol_type = other RNA
tgtgccgtccctgggctggagga

SEQ ID NO: 95659 - RNA, 23 nt, synthetic construct
  source 1..23: mol_type = other RNA
tcacacggtggagaccgggaggg

SEQ ID NO: 95660 - RNA, 23 nt, synthetic construct
  source 1..23: mol_type = other RNA
tgtcagcctggcgttgtgggcat

SEQ ID NO: 95661 - RNA, 23 nt, synthetic construct
  source 1..23: mol_type = other RNA
tactgccatagccccccggagca

SEQ ID NO: 95662 - RNA, 23 nt, synthetic construct
  source 1..23: mol_type = other RNA
tcagcactttggtagtgtgagct

SEQ ID NO: 95663 - RNA, 23 nt, synthetic construct
  source 1..23: mol_type = other RNA
tggttgcagtccttggactggag

SEQ ID NO: 95664 - RNA, 23 nt, synthetic construct
  source 1..23: mol_type = other RNA
tccacagagccggtggccctggt

SEQ ID NO: 95665 - RNA, 23 nt, synthetic construct
  source 1..23: mol_type = other RNA
tccacagagccggtggccctggt

SEQ ID NO: 95666 - RNA, 23 nt, synthetic construct
  source 1..23: mol_type = other RNA
tggttgcagtccttggactggag

SEQ ID NO: 95667 - RNA, 23 nt, synthetic construct
  source 1..23: mol_type = other RNA
tggttgcagtccttggactggag

SEQ ID NO: 95668 - RNA, 23 nt, synthetic construct
  source 1..23: mol_type = other RNA
tggtggtctgtgctgggacggtc

SEQ ID NO: 95669 - RNA, 23 nt, synthetic construct
  source 1..23: mol_type = other RNA
tagtggacacgctgaaggttggc

SEQ ID NO: 95670 - RNA, 23 nt, synthetic construct
  source 1..23: mol_type = other RNA
tttgtagtggatgctgagggcgc

SEQ ID NO: 95671 - RNA, 23 nt, synthetic construct
  source 1..23: mol_type = other RNA
tagcatcagatcacagagcggct

SEQ ID NO: 95672 - RNA, 23 nt, synthetic construct
  source 1..23: mol_type = other RNA
tgtgggctctggttcctagagtt

SEQ ID NO: 95673 - RNA, 23 nt, synthetic construct
  source 1..23: mol_type = other RNA
tctccgcagaggaggcccaaggt

SEQ ID NO: 95674 - RNA, 23 nt, synthetic construct
  source 1..23: mol_type = other RNA
tacctcagccctgagttaccctg

SEQ ID NO: 95675 - RNA, 23 nt, synthetic construct
  source 1..23: mol_type = other RNA
tcacggcgccctcgtcgtgcacc

SEQ ID NO: 95676 - RNA, 23 nt, synthetic construct
  source 1..23: mol_type = other RNA
ttcagcactggggggataggtgt

SEQ ID NO: 95677 - RNA, 23 nt, synthetic construct
  source 1..23: mol_type = other RNA
ttcagcactggggggataggtgt

SEQ ID NO: 95678 - RNA, 23 nt, synthetic construct
  source 1..23: mol_type = other RNA
tcgttggacgcctccagcaccag

SEQ ID NO: 95679 - RNA, 23 nt, synthetic construct
  source 1..23: mol_type = other RNA
tcccgtgggtctcgatgaccagg

SEQ ID NO: 95680 - RNA, 23 nt, synthetic construct
  source 1..23: mol_type = other RNA
tagacgccctcctgctcccagtt

SEQ ID NO: 95681 - RNA, 23 nt, synthetic construct
  source 1..23: mol_type = other RNA
tagcacatcttgaagacgccctc

SEQ ID NO: 95682 - RNA, 23 nt, synthetic construct
  source 1..23: mol_type = other RNA
tggtcgtcactgcagcagaggac

SEQ ID NO: 95683 - RNA, 23 nt, synthetic construct
  source 1..23: mol_type = other RNA
ttggggcctcccgtggtggctgt

SEQ ID NO: 95684 - RNA, 23 nt, synthetic construct
  source 1..23: mol_type = other RNA
tagctggtgactgtgggtgtggt

SEQ ID NO: 95685 - RNA, 23 nt, synthetic construct
  source 1..23: mol_type = other RNA
tgaggtgtgggcagtctctggag

SEQ ID NO: 95686 - RNA, 23 nt, synthetic construct
  source 1..23: mol_type = other RNA
tggtggtcagtgatgggggagta

SEQ ID NO: 95687 - RNA, 23 nt, synthetic construct
  source 1..23: mol_type = other RNA
tcccgtgtgtggtggccatggtg

SEQ ID NO: 95688 - RNA, 23 nt, synthetic construct
  source 1..23: mol_type = other RNA
tagctggtgactgtgggtgtcgt

SEQ ID NO: 95689 - RNA, 23 nt, synthetic construct
  source 1..23: mol_type = other RNA
tggtggtcagtgatgggggagta

SEQ ID NO: 95690 - RNA, 23 nt, synthetic construct
  source 1..23: mol_type = other RNA
tggtggtcagtgatgggggagta

SEQ ID NO: 95691 - RNA, 23 nt, synthetic construct
  source 1..23: mol_type = other RNA
tagctggtgactgtgggtgtcgt

SEQ ID NO: 95692 - RNA, 23 nt, synthetic construct
  source 1..23: mol_type = other RNA
tgaggtgtgggcagtctctggag

SEQ ID NO: 95693 - RNA, 23 nt, synthetic construct
  source 1..23: mol_type = other RNA
tagctggtgactgtgggtgtcgt

SEQ ID NO: 95694 - RNA, 23 nt, synthetic construct
  source 1..23: mol_type = other RNA
tgggcagttgcagtccctggact

SEQ ID NO: 95695 - RNA, 23 nt, synthetic construct
  source 1..23: mol_type = other RNA
tggtggtcagtgatgggggagta

SEQ ID NO: 95696 - RNA, 23 nt, synthetic construct
  source 1..23: mol_type = other RNA
tgccctcgcagaaggtgatgttg

SEQ ID NO: 95697 - RNA, 23 nt, synthetic construct
  source 1..23: mol_type = other RNA
ttccggccgtggcagggacacat

SEQ ID NO: 95698 - RNA, 23 nt, synthetic construct
  source 1..23: mol_type = other RNA
tttgcctgtcgcagcttcctggc

SEQ ID NO: 95699 - RNA, 23 nt, synthetic construct
  source 1..23: mol_type = other RNA
tgcggcgcggcagtgctcagaga

SEQ ID NO: 95700 - RNA, 23 nt, synthetic construct
  source 1..23: mol_type = other RNA
tgtacgcagtgctgtccaccagt

SEQ ID NO: 95701 - RNA, 23 nt, synthetic construct
  source 1..23: mol_type = other RNA
taggaggggatggctgtaaagct

SEQ ID NO: 95702 - RNA, 23 nt, synthetic construct
  source 1..23: mol_type = other RNA
taggaggggatggctgtaaagct

SEQ ID NO: 95703 - RNA, 23 nt, synthetic construct
  source 1..23: mol_type = other RNA
taggaggggatggctgtaaagct

SEQ ID NO: 95704 - RNA, 23 nt, synthetic construct
  source 1..23: mol_type = other RNA
tattgtacgaacacagctgaggt

SEQ ID NO: 95705 - RNA, 23 nt, synthetic construct
  source 1..23: mol_type = other RNA
taggctcgtggtcagcggctctt

SEQ ID NO: 95706 - RNA, 23 nt, synthetic construct
  source 1..23: mol_type = other RNA
ttgggaaccgtggaggcagtggc

SEQ ID NO: 95707 - RNA, 23 nt, synthetic construct
  source 1..23: mol_type = other RNA
tgtcgctgatgcaggcgttgaag

SEQ ID NO: 95708 - RNA, 23 nt, synthetic construct
  source 1..23: mol_type = other RNA
tgaacctctggttgtgggtgtgg

SEQ ID NO: 95709 - RNA, 23 nt, synthetic construct
  source 1..23: mol_type = other RNA
tgctgctgtcggcacatttcttg

SEQ ID NO: 95710 - RNA, 23 nt, synthetic construct
  source 1..23: mol_type = other RNA
ttgaacacgctggtcttccggtc

SEQ ID NO: 95711 - RNA, 23 nt, synthetic construct
  source 1..23: mol_type = other RNA
ttggatgccactgggtgtgcagt

SEQ ID NO: 95712 - RNA, 23 nt, synthetic construct
  source 1..23: mol_type = other RNA
taatggcgttgtggctggagttc

SEQ ID NO: 95713 - RNA, 23 nt, synthetic construct
  source 1..23: mol_type = other RNA
tcgggaagctgcgccgcccggca

SEQ ID NO: 95714 - RNA, 23 nt, synthetic construct
  source 1..23: mol_type = other RNA
tgctagggtgagggctggaaagg

SEQ ID NO: 95715 - RNA, 23 nt, synthetic construct
  source 1..23: mol_type = other RNA
ttggatttggtggctgtgcttgt

SEQ ID NO: 95716 - RNA, 23 nt, synthetic construct
  source 1..23: mol_type = other RNA
ttggtcagcactttgagggtgcc

SEQ ID NO: 95717 - RNA, 23 nt, synthetic construct
  source 1..23: mol_type = other RNA
ttggatttggtggctgtgcttgt

SEQ ID NO: 95718 - RNA, 23 nt, synthetic construct
  source 1..23: mol_type = other RNA
taggggcaggcctgcacgcagat

SEQ ID NO: 95719 - RNA, 23 nt, synthetic construct
  source 1..23: mol_type = other RNA
tatcgggcgtgaggcaggcggtc

SEQ ID NO: 95720 - RNA, 23 nt, synthetic construct
  source 1..23: mol_type = other RNA
tcaaaggccagggaagcggaaga

SEQ ID NO: 95721 - RNA, 23 nt, synthetic construct
  source 1..23: mol_type = other RNA
tgtggtggtctgttctgggaggg

SEQ ID NO: 95722 - RNA, 23 nt, synthetic construct
  source 1..23: mol_type = other RNA
tgtggtggtctgttctgggaggg

SEQ ID NO: 95723 - RNA, 23 nt, synthetic construct
  source 1..23: mol_type = other RNA
tggggcctggtcacggttacgaa

SEQ ID NO: 95724 - RNA, 23 nt, synthetic construct
  source 1..23: mol_type = other RNA
tccgtggcagggacacataggcc

SEQ ID NO: 95725 - RNA, 23 nt, synthetic construct
  source 1..23: mol_type = other RNA
tagttgcaaaggccagggaagcg

SEQ ID NO: 95726 - RNA, 23 nt, synthetic construct
  source 1..23: mol_type = other RNA
tattgatgaggacggagccgttg

SEQ ID NO: 95727 - RNA, 23 nt, synthetic construct
  source 1..23: mol_type = other RNA
ttcatccagcaccgtgcctgggg

SEQ ID NO: 95728 - RNA, 23 nt, synthetic construct
  source 1..23: mol_type = other RNA
ttgttcctggcattggcacaggc

SEQ ID NO: 95729 - RNA, 23 nt, synthetic construct
  source 1..23: mol_type = other RNA
tcactcccatccgacaccagccc

SEQ ID NO: 95730 - RNA, 23 nt, synthetic construct
  source 1..23: mol_type = other RNA
tagggtgggtccccacccggccc

SEQ ID NO: 95731 - RNA, 23 nt, synthetic construct
  source 1..23: mol_type = other RNA
tcacggtggagaccgggagggcc

SEQ ID NO: 95732 - RNA, 23 nt, synthetic construct
  source 1..23: mol_type = other RNA
ttcagtccttctgagagggtggg

SEQ ID NO: 95733 - RNA, 23 nt, synthetic construct
  source 1..23: mol_type = other RNA
ttcgtggggcctcccgtggtggc

SEQ ID NO: 95734 - RNA, 23 nt, synthetic construct
  source 1..23: mol_type = other RNA
ttcgtccctggaagggctgagcg

SEQ ID NO: 95735 - RNA, 23 nt, synthetic construct
  source 1..23: mol_type = other RNA
tcagcgggtcgtgccctggctgg

SEQ ID NO: 95736 - RNA, 23 nt, synthetic construct
  source 1..23: mol_type = other RNA
ttggaggtgtgggcagtctctgg

SEQ ID NO: 95737 - RNA, 23 nt, synthetic construct
  source 1..23: mol_type = other RNA
tgagggccccggcatggggtagc

SEQ ID NO: 95738 - RNA, 23 nt, synthetic construct
  source 1..23: mol_type = other RNA
tttccccacctgctcacggttcc

SEQ ID NO: 95739 - RNA, 23 nt, synthetic construct
  source 1..23: mol_type = other RNA
ttggtgctcacatgtggggtgcc

SEQ ID NO: 95740 - RNA, 23 nt, synthetic construct
  source 1..23: mol_type = other RNA
tgagggccccggcatggggtagc

SEQ ID NO: 95741 - RNA, 23 nt, synthetic construct
  source 1..23: mol_type = other RNA
tttccccacctgctcacggttcc

SEQ ID NO: 95742 - RNA, 23 nt, synthetic construct
  source 1..23: mol_type = other RNA
tgagggccccggcatggggtagc

SEQ ID NO: 95743 - RNA, 23 nt, synthetic construct
  source 1..23: mol_type = other RNA
tttccccacctgctcacggttcc

SEQ ID NO: 95744 - RNA, 23 nt, synthetic construct
  source 1..23: mol_type = other RNA
ttggtgctcacatgtggggtgcc

SEQ ID NO: 95745 - RNA, 23 nt, synthetic construct
  source 1..23: mol_type = other RNA
ttggaggtgtgggcagtctctgg

SEQ ID NO: 95746 - RNA, 23 nt, synthetic construct
  source 1..23: mol_type = other RNA
tgagggccccggcatggggtagc

SEQ ID NO: 95747 - RNA, 23 nt, synthetic construct
  source 1..23: mol_type = other RNA
tttccccacctgctcacggttcc

SEQ ID NO: 95748 - RNA, 23 nt, synthetic construct
  source 1..23: mol_type = other RNA
ttggtgctcacatgtggggtgcc

SEQ ID NO: 95749 - RNA, 23 nt, synthetic construct
  source 1..23: mol_type = other RNA
ttggtggtctgtgctgggacggt

SEQ ID NO: 95750 - RNA, 23 nt, synthetic construct
  source 1..23: mol_type = other RNA
tgagctgttcccagagtggagga

SEQ ID NO: 95751 - RNA, 23 nt, synthetic construct
  source 1..23: mol_type = other RNA
tcctgcagtggtcgctgatgcag

SEQ ID NO: 95752 - RNA, 23 nt, synthetic construct
  source 1..23: mol_type = other RNA
tcacctcaaggcggcccctgcag

SEQ ID NO: 95753 - RNA, 23 nt, synthetic construct
  source 1..23: mol_type = other RNA
tgccaccggttgcacctcgccag

SEQ ID NO: 95754 - RNA, 23 nt, synthetic construct
  source 1..23: mol_type = other RNA
tggtggcaggctgtatggggccg

SEQ ID NO: 95755 - RNA, 23 nt, synthetic construct
  source 1..23: mol_type = other RNA
tctgaccctgggcgtcacagggc

SEQ ID NO: 95756 - RNA, 23 nt, synthetic construct
  source 1..23: mol_type = other RNA
tagaaggtgccattgtacgaaca

SEQ ID NO: 95757 - RNA, 23 nt, synthetic construct
  source 1..23: mol_type = other RNA
tggggatggaggcagaacgttct

SEQ ID NO: 95758 - RNA, 23 nt, synthetic construct
  source 1..23: mol_type = other RNA
tcagccctgagttaccctgcagc

SEQ ID NO: 95759 - RNA, 23 nt, synthetic construct
  source 1..23: mol_type = other RNA
tactctgttggctgttggcgcac

SEQ ID NO: 95760 - RNA, 23 nt, synthetic construct
  source 1..23: mol_type = other RNA
tcgggatggccgtggatccagtg

SEQ ID NO: 95761 - RNA, 23 nt, synthetic construct
  source 1..23: mol_type = other RNA
ttgggcgtcacagggcaggggct

SEQ ID NO: 95762 - RNA, 23 nt, synthetic construct
  source 1..23: mol_type = other RNA
tctgggcgtcacagggcaggggc

SEQ ID NO: 95763 - RNA, 23 nt, synthetic construct
  source 1..23: mol_type = other RNA
ttcggcccggggcctggtcacgg

SEQ ID NO: 95764 - RNA, 23 nt, synthetic construct
  source 1..23: mol_type = other RNA
tggtctgtgctgggacggtccac

SEQ ID NO: 95765 - RNA, 23 nt, synthetic construct
  source 1..23: mol_type = other RNA
tcactttgggggtgtgagctgtt

SEQ ID NO: 95766 - RNA, 23 nt, synthetic construct
  source 1..23: mol_type = other RNA
tctggagcccactaggcctcggc

SEQ ID NO: 95767 - RNA, 23 nt, synthetic construct
  source 1..23: mol_type = other RNA
tgggggacccaggcggtggtgaa

SEQ ID NO: 95768 - RNA, 23 nt, synthetic construct
  source 1..23: mol_type = other RNA
taagcagccctccgccatcccct

SEQ ID NO: 95769 - RNA, 23 nt, synthetic construct
  source 1..23: mol_type = other RNA
tagctcggctccacagggccctg

SEQ ID NO: 95770 - RNA, 23 nt, synthetic construct
  source 1..23: mol_type = other RNA
tgttgctgcagtccaggtacacc

SEQ ID NO: 95771 - RNA, 23 nt, synthetic construct
  source 1..23: mol_type = other RNA
tctgtggacatggtggccgtggg

SEQ ID NO: 95772 - RNA, 23 nt, synthetic construct
  source 1..23: mol_type = other RNA
tctgtggacatggtggccgtggg

SEQ ID NO: 95773 - RNA, 23 nt, synthetic construct
  source 1..23: mol_type = other RNA
tctgtggacatggtggccgtggg

SEQ ID NO: 95774 - RNA, 23 nt, synthetic construct
  source 1..23: mol_type = other RNA
tctgtggacatggtggccgtggg

SEQ ID NO: 95775 - RNA, 23 nt, synthetic construct
  source 1..23: mol_type = other RNA
tctgtggacatggtggccgtggg

SEQ ID NO: 95776 - RNA, 23 nt, synthetic construct
  source 1..23: mol_type = other RNA
ttggctgttgacccaggtttcat

SEQ ID NO: 95777 - RNA, 23 nt, synthetic construct
  source 1..23: mol_type = other RNA
tcctcgtaggcggcgcggcagtg

SEQ ID NO: 95778 - RNA, 23 nt, synthetic construct
  source 1..23: mol_type = other RNA
taggcccgcgtcgtggcaggcct

SEQ ID NO: 95779 - RNA, 23 nt, synthetic construct
  source 1..23: mol_type = other RNA
tctcgtaggcggcgcggcagtgc

SEQ ID NO: 95780 - RNA, 23 nt, synthetic construct
  source 1..23: mol_type = other RNA
tgtagagtttctcatcataggtg

SEQ ID NO: 95781 - RNA, 23 nt, synthetic construct
  source 1..23: mol_type = other RNA
ttgggcgggcacacaggcgcccg

SEQ ID NO: 95782 - RNA, 23 nt, synthetic construct
  source 1..23: mol_type = other RNA
tgtgttgccatagaaccagtggc

SEQ ID NO: 95783 - RNA, 23 nt, synthetic construct
  source 1..23: mol_type = other RNA
tgtgttgccatagaaccagtggc

SEQ ID NO: 95784 - RNA, 23 nt, synthetic construct
  source 1..23: mol_type = other RNA
tgtgttgccatagaaccagtggc

SEQ ID NO: 95785 - RNA, 23 nt, synthetic construct
  source 1..23: mol_type = other RNA
tgtgttgccatagaaccagtggc

SEQ ID NO: 95786 - RNA, 23 nt, synthetic construct
  source 1..23: mol_type = other RNA
tgtgttgccatagaaccagtggc

SEQ ID NO: 95787 - RNA, 23 nt, synthetic construct
  source 1..23: mol_type = other RNA
tgagcactgcaggggtgcgggtg

SEQ ID NO: 95788 - RNA, 23 nt, synthetic construct
  source 1..23: mol_type = other RNA
tcttattgtagatgacttccccg

SEQ ID NO: 95789 - RNA, 23 nt, synthetic construct
  source 1..23: mol_type = other RNA
ttcttattgtagatgacttcccc

SEQ ID NO: 95790 - RNA, 23 nt, synthetic construct
  source 1..23: mol_type = other RNA
tgaagaggatctggtcctcaggg

SEQ ID NO: 95791 - RNA, 23 nt, synthetic construct
  source 1..23: mol_type = other RNA
tggggttctcggcccggggcctg

SEQ ID NO: 95792 - RNA, 23 nt, synthetic construct
  source 1..23: mol_type = other RNA
tcagccgtccacacagtggtcct

SEQ ID NO: 95793 - RNA, 23 nt, synthetic construct
  source 1..23: mol_type = other RNA
taagggcttggggttgatgatgg

SEQ ID NO: 95794 - RNA, 23 nt, synthetic construct
  source 1..23: mol_type = other RNA
tgtgcacacaggggcagtcctcc

SEQ ID NO: 95795 - RNA, 23 nt, synthetic construct
  source 1..23: mol_type = other RNA
tgctgtaggtcctgtcctcatag

SEQ ID NO: 95796 - RNA, 23 nt, synthetic construct
  source 1..23: mol_type = other RNA
tgggcccagcagccatcctttct

SEQ ID NO: 95797 - RNA, 23 nt, synthetic construct
  source 1..23: mol_type = other RNA
tggtttcattcagctggactggc

SEQ ID NO: 95798 - RNA, 23 nt, synthetic construct
  source 1..23: mol_type = other RNA
tgtgcaggatggctgagccgtta

SEQ ID NO: 95799 - RNA, 23 nt, synthetic construct
  source 1..23: mol_type = other RNA
ttctccgttccacaggaatgtca

SEQ ID NO: 95800 - RNA, 23 nt, synthetic construct
  source 1..23: mol_type = other RNA
ttagagtttctcatcataggtgg

SEQ ID NO: 95801 - RNA, 23 nt, synthetic construct
  source 1..23: mol_type = other RNA
tgcagcttagcttcccacccgta

SEQ ID NO: 95802 - RNA, 23 nt, synthetic construct
  source 1..23: mol_type = other RNA
ttggccacgggtgtggtggtctg

SEQ ID NO: 95803 - RNA, 23 nt, synthetic construct
  source 1..23: mol_type = other RNA
taagcagccgtccacacagtggt

SEQ ID NO: 95804 - RNA, 23 nt, synthetic construct
  source 1..23: mol_type = other RNA
tcgtagctgcagtcaccatgcag

SEQ ID NO: 95805 - RNA, 23 nt, synthetic construct
  source 1..23: mol_type = other RNA
tgggggtgtgtgggtggtcccta

SEQ ID NO: 95806 - RNA, 23 nt, synthetic construct
  source 1..23: mol_type = other RNA
tgggggtgtgtgggtggtcccta

SEQ ID NO: 95807 - RNA, 23 nt, synthetic construct
  source 1..23: mol_type = other RNA
tctgttcccggggtggaggacgg

SEQ ID NO: 95808 - RNA, 23 nt, synthetic construct
  source 1..23: mol_type = other RNA
tctgggagggtcccggtggtccc

SEQ ID NO: 95809 - RNA, 23 nt, synthetic construct
  source 1..23: mol_type = other RNA
tgggggtgtgtgggtggtcccta

SEQ ID NO: 95810 - RNA, 23 nt, synthetic construct
  source 1..23: mol_type = other RNA
tgggggtgtgtgggtggtcccta

SEQ ID NO: 95811 - RNA, 23 nt, synthetic construct
  source 1..23: mol_type = other RNA
tctgttcccggggtggaggacgg

SEQ ID NO: 95812 - RNA, 23 nt, synthetic construct
  source 1..23: mol_type = other RNA
tctgggagggtcccggtggtccc

SEQ ID NO: 95813 - RNA, 23 nt, synthetic construct
  source 1..23: mol_type = other RNA
tctggcggtgtgggtggtccccg

SEQ ID NO: 95814 - RNA, 23 nt, synthetic construct
  source 1..23: mol_type = other RNA
tcctttctgctgtcggggaccag

SEQ ID NO: 95815 - RNA, 23 nt, synthetic construct
  source 1..23: mol_type = other RNA
tgcagaggaggcccaaggttttc

SEQ ID NO: 95816 - RNA, 23 nt, synthetic construct
  source 1..23: mol_type = other RNA
tagcccccgcatgcggtcacagt

SEQ ID NO: 95817 - RNA, 23 nt, synthetic construct
  source 1..23: mol_type = other RNA
tttgaggaaggtgcccgcggggc

SEQ ID NO: 95818 - RNA, 23 nt, synthetic construct
  source 1..23: mol_type = other RNA
tcgtccttgtcgtagcagccaca

SEQ ID NO: 95819 - RNA, 23 nt, synthetic construct
  source 1..23: mol_type = other RNA
tttcctgatgatggtgccgttgc

SEQ ID NO: 95820 - RNA, 23 nt, synthetic construct
  source 1..23: mol_type = other RNA
tgctctgtggtcggtggcggggt

SEQ ID NO: 95821 - RNA, 23 nt, synthetic construct
  source 1..23: mol_type = other RNA
ttctgctccaccaggaggccagt

SEQ ID NO: 95822 - RNA, 23 nt, synthetic construct
  source 1..23: mol_type = other RNA
tgcagccgtccacacagtggtcc

SEQ ID NO: 95823 - RNA, 23 nt, synthetic construct
  source 1..23: mol_type = other RNA
tagaagcagccgtccacacagtg

SEQ ID NO: 95824 - RNA, 23 nt, synthetic construct
  source 1..23: mol_type = other RNA
ttgaggaaggtgcccgcggggca

SEQ ID NO: 95825 - RNA, 23 nt, synthetic construct
  source 1..23: mol_type = other RNA
tccatgggggctgcacaccctgt

SEQ ID NO: 95826 - RNA, 23 nt, synthetic construct
  source 1..23: mol_type = other RNA
tgcacacaggggcagtcctcctc

SEQ ID NO: 95827 - RNA, 23 nt, synthetic construct
  source 1..23: mol_type = other RNA
tttgtccccacagtagtcctggg

SEQ ID NO: 95828 - RNA, 23 nt, synthetic construct
  source 1..23: mol_type = other RNA
tggggtccttgggtgccagggcg

SEQ ID NO: 95829 - RNA, 23 nt, synthetic construct
  source 1..23: mol_type = other RNA
tggctctgggcggtgcccattgt

SEQ ID NO: 95830 - RNA, 23 nt, synthetic construct
  source 1..23: mol_type = other RNA
tcagggtccagttggggaagctc

SEQ ID NO: 95831 - RNA, 23 nt, synthetic construct
  source 1..23: mol_type = other RNA
tcactgcagcagaggacccggat

SEQ ID NO: 95832 - RNA, 23 nt, synthetic construct
  source 1..23: mol_type = other RNA
tggaggtcggggtggccgtggat

SEQ ID NO: 95833 - RNA, 23 nt, synthetic construct
  source 1..23: mol_type = other RNA
ttggacatggtggccgtgggtgt

SEQ ID NO: 95834 - RNA, 23 nt, synthetic construct
  source 1..23: mol_type = other RNA
tgccggtggccccagttgtggtg

SEQ ID NO: 95835 - RNA, 23 nt, synthetic construct
  source 1..23: mol_type = other RNA
tttggtagtgtgagctgttcctg

SEQ ID NO: 95836 - RNA, 23 nt, synthetic construct
  source 1..23: mol_type = other RNA
tggttgtggtagttggcactttg

SEQ ID NO: 95837 - RNA, 23 nt, synthetic construct
  source 1..23: mol_type = other RNA
tgtggcggtgtgggtggtccccg

SEQ ID NO: 95838 - RNA, 23 nt, synthetic construct
  source 1..23: mol_type = other RNA
tggtggcggtggtggtcagcact

SEQ ID NO: 95839 - RNA, 23 nt, synthetic construct
  source 1..23: mol_type = other RNA
tgtggttctgctgctagggtgag

SEQ ID NO: 95840 - RNA, 23 nt, synthetic construct
  source 1..23: mol_type = other RNA
tggtggttctgctgctagggtga

SEQ ID NO: 95841 - RNA, 23 nt, synthetic construct
  source 1..23: mol_type = other RNA
tctcggtggttctgctgctaggg

SEQ ID NO: 95842 - RNA, 23 nt, synthetic construct
  source 1..23: mol_type = other RNA
tgtagctgtagtccagccactct

SEQ ID NO: 95843 - RNA, 23 nt, synthetic construct
  source 1..23: mol_type = other RNA
tagagggccccggcatggggtag

SEQ ID NO: 95844 - RNA, 23 nt, synthetic construct
  source 1..23: mol_type = other RNA
ttggacatggtggccgtgggtgt

SEQ ID NO: 95845 - RNA, 23 nt, synthetic construct
  source 1..23: mol_type = other RNA
tgacagtctctggagtggaggag

SEQ ID NO: 95846 - RNA, 23 nt, synthetic construct
  source 1..23: mol_type = other RNA
tttggtagtgtgagctgttcctg

SEQ ID NO: 95847 - RNA, 23 nt, synthetic construct
  source 1..23: mol_type = other RNA
tgtgctgatccacactggaagcg

SEQ ID NO: 95848 - RNA, 23 nt, synthetic construct
  source 1..23: mol_type = other RNA
tggtggcggtggtggtcagcact

SEQ ID NO: 95849 - RNA, 23 nt, synthetic construct
  source 1..23: mol_type = other RNA
tggtggttgctgctggggtgtgg

SEQ ID NO: 95850 - RNA, 23 nt, synthetic construct
  source 1..23: mol_type = other RNA
tgtagctgtagtccagccactct

SEQ ID NO: 95851 - RNA, 23 nt, synthetic construct
  source 1..23: mol_type = other RNA
tagagggccccggcatggggtag

SEQ ID NO: 95852 - RNA, 23 nt, synthetic construct
  source 1..23: mol_type = other RNA
ttgttcccggggtggaggacggg

SEQ ID NO: 95853 - RNA, 23 nt, synthetic construct
  source 1..23: mol_type = other RNA
ttggacatggtggccgtgggtgt

SEQ ID NO: 95854 - RNA, 23 nt, synthetic construct
  source 1..23: mol_type = other RNA
tttggtagtgtgagctgttcctg

SEQ ID NO: 95855 - RNA, 23 nt, synthetic construct
  source 1..23: mol_type = other RNA
tgtggcggtgtgggtggtccccg

SEQ ID NO: 95856 - RNA, 23 nt, synthetic construct
  source 1..23: mol_type = other RNA
ttggtggagccggtggctgtgat

SEQ ID NO: 95857 - RNA, 23 nt, synthetic construct
  source 1..23: mol_type = other RNA
tggtggcggtggtggtcagcact

SEQ ID NO: 95858 - RNA, 23 nt, synthetic construct
  source 1..23: mol_type = other RNA
tggtggttgctgctggggtgtgg

SEQ ID NO: 95859 - RNA, 23 nt, synthetic construct
  source 1..23: mol_type = other RNA
tgtagctgtagtccagccactct

SEQ ID NO: 95860 - RNA, 23 nt, synthetic construct
  source 1..23: mol_type = other RNA
tagagggccccggcatggggtag

SEQ ID NO: 95861 - RNA, 23 nt, synthetic construct
  source 1..23: mol_type = other RNA
ttggacatggtggccgtgggtgt

SEQ ID NO: 95862 - RNA, 23 nt, synthetic construct
  source 1..23: mol_type = other RNA
tttggtagtgtgagctgttcctg

SEQ ID NO: 95863 - RNA, 23 nt, synthetic construct
  source 1..23: mol_type = other RNA
tggtggcggtggtggtcagcact

SEQ ID NO: 95864 - RNA, 23 nt, synthetic construct
  source 1..23: mol_type = other RNA
tggtggttgctgctggggtgtgg

SEQ ID NO: 95865 - RNA, 23 nt, synthetic construct
  source 1..23: mol_type = other RNA
tgtagctgtagtccagccactct

SEQ ID NO: 95866 - RNA, 23 nt, synthetic construct
  source 1..23: mol_type = other RNA
tagagggccccggcatggggtag

SEQ ID NO: 95867 - RNA, 23 nt, synthetic construct
  source 1..23: mol_type = other RNA
ttgttcccggggtggaggacggg

SEQ ID NO: 95868 - RNA, 23 nt, synthetic construct
  source 1..23: mol_type = other RNA
ttggacatggtggccgtgggtgt

SEQ ID NO: 95869 - RNA, 23 nt, synthetic construct
  source 1..23: mol_type = other RNA
tgacagtctctggagtggaggag

SEQ ID NO: 95870 - RNA, 23 nt, synthetic construct
  source 1..23: mol_type = other RNA
tttggtagtgtgagctgttcctg

SEQ ID NO: 95871 - RNA, 23 nt, synthetic construct
  source 1..23: mol_type = other RNA
tttattgtagatgacttccccgg

SEQ ID NO: 95872 - RNA, 23 nt, synthetic construct
  source 1..23: mol_type = other RNA
ttggcgggcacacaggcaggctc

SEQ ID NO: 95873 - RNA, 23 nt, synthetic construct
  source 1..23: mol_type = other RNA
ttgcagcggaaggtgggacagca

SEQ ID NO: 95874 - RNA, 23 nt, synthetic construct
  source 1..23: mol_type = other RNA
taggtgtgggtggtctccggagt

SEQ ID NO: 95875 - RNA, 23 nt, synthetic construct
  source 1..23: mol_type = other RNA
taggtgtgggtggtctccggagt

SEQ ID NO: 95876 - RNA, 23 nt, synthetic construct
  source 1..23: mol_type = other RNA
ttcagcctggcgttgtgggcata

SEQ ID NO: 95877 - RNA, 23 nt, synthetic construct
  source 1..23: mol_type = other RNA
ttggaggaggggtggattgtgga

SEQ ID NO: 95878 - RNA, 23 nt, synthetic construct
  source 1..23: mol_type = other RNA
ttggaggaggggtggattgtgga

SEQ ID NO: 95879 - RNA, 23 nt, synthetic construct
  source 1..23: mol_type = other RNA
tgcaggtgaggtcgcacaggcca

SEQ ID NO: 95880 - RNA, 23 nt, synthetic construct
  source 1..23: mol_type = other RNA
tctgccccagcggccggacgtgg

SEQ ID NO: 95881 - RNA, 23 nt, synthetic construct
  source 1..23: mol_type = other RNA
tcgccgggtgggcgaggacgtcg

SEQ ID NO: 95882 - RNA, 23 nt, synthetic construct
  source 1..23: mol_type = other RNA
tgcctgtctgcaccacgatgaag

SEQ ID NO: 95883 - RNA, 23 nt, synthetic construct
  source 1..23: mol_type = other RNA
tgggaaccgtggaggcagtggct

SEQ ID NO: 95884 - RNA, 23 nt, synthetic construct
  source 1..23: mol_type = other RNA
tggtctctgcctgcggcaccacg

SEQ ID NO: 95885 - RNA, 23 nt, synthetic construct
  source 1..23: mol_type = other RNA
tcctcacccttctggggccggtt

SEQ ID NO: 95886 - RNA, 23 nt, synthetic construct
  source 1..23: mol_type = other RNA
tcagccagagtgcgtgatgtcat

SEQ ID NO: 95887 - RNA, 23 nt, synthetic construct
  source 1..23: mol_type = other RNA
ttcgtgcaccacctctccaggag

SEQ ID NO: 95888 - RNA, 23 nt, synthetic construct
  source 1..23: mol_type = other RNA
ttgaagcccgtggttgtggtagt

SEQ ID NO: 95889 - RNA, 23 nt, synthetic construct
  source 1..23: mol_type = other RNA
ttgaagcccgtggttgtggtagt

SEQ ID NO: 95890 - RNA, 23 nt, synthetic construct
  source 1..23: mol_type = other RNA
ttgaagcccgtggttgtggtagt

SEQ ID NO: 95891 - RNA, 23 nt, synthetic construct
  source 1..23: mol_type = other RNA
ttgaagcccgtggttgtggtagt

SEQ ID NO: 95892 - RNA, 23 nt, synthetic construct
  source 1..23: mol_type = other RNA
ttgaagcccgtggttgtggtagt

SEQ ID NO: 95893 - RNA, 23 nt, synthetic construct
  source 1..23: mol_type = other RNA
tggaaccgtggaggcagtggctg

SEQ ID NO: 95894 - RNA, 23 nt, synthetic construct
  source 1..23: mol_type = other RNA
tctgggcggtgcccattgtacca

SEQ ID NO: 95895 - RNA, 23 nt, synthetic construct
  source 1..23: mol_type = other RNA
tcacgctggtcttccggtcccag

SEQ ID NO: 95896 - RNA, 23 nt, synthetic construct
  source 1..23: mol_type = other RNA
tccgggggagccctggtcagccc

SEQ ID NO: 95897 - RNA, 23 nt, synthetic construct
  source 1..23: mol_type = other RNA
tggccacaggctttgggtccagc

SEQ ID NO: 95898 - RNA, 23 nt, synthetic construct
  source 1..23: mol_type = other RNA
tcgatgtcagccagcacagggca

SEQ ID NO: 95899 - RNA, 23 nt, synthetic construct
  source 1..23: mol_type = other RNA
tgctgtggtctgggttggggtag

SEQ ID NO: 95900 - RNA, 23 nt, synthetic construct
  source 1..23: mol_type = other RNA
ttctgcgaggtgagggccgccgt

SEQ ID NO: 95901 - RNA, 23 nt, synthetic construct
  source 1..23: mol_type = other RNA
tactgcagcagaggacccggatc

SEQ ID NO: 95902 - RNA, 23 nt, synthetic construct
  source 1..23: mol_type = other RNA
tgagggtcccggtggtcccaagg

SEQ ID NO: 95903 - RNA, 23 nt, synthetic construct
  source 1..23: mol_type = other RNA
tgagggtcccggtggtcccaagg

SEQ ID NO: 95904 - RNA, 23 nt, synthetic construct
  source 1..23: mol_type = other RNA
tcgtcacagggcaggggcttgca

SEQ ID NO: 95905 - RNA, 23 nt, synthetic construct
  source 1..23: mol_type = other RNA
ttggacaggcggccgccttgcct

SEQ ID NO: 95906 - RNA, 23 nt, synthetic construct
  source 1..23: mol_type = other RNA
tggggccgatgtggggctgctgg

SEQ ID NO: 95907 - RNA, 23 nt, synthetic construct
  source 1..23: mol_type = other RNA
ttgggagggtcccggtggtccca

SEQ ID NO: 95908 - RNA, 23 nt, synthetic construct
  source 1..23: mol_type = other RNA
ttgggagggtcccggtggtccca

SEQ ID NO: 95909 - RNA, 23 nt, synthetic construct
  source 1..23: mol_type = other RNA
tctccagcggcatgtcgggaagc

SEQ ID NO: 95910 - RNA, 23 nt, synthetic construct
  source 1..23: mol_type = other RNA
tagggtgtgggaagtcaccgtgg

SEQ ID NO: 95911 - RNA, 23 nt, synthetic construct
  source 1..23: mol_type = other RNA
tggtcggggtggccgtggatcca

SEQ ID NO: 95912 - RNA, 23 nt, synthetic construct
  source 1..23: mol_type = other RNA
tcatggtgttcggcactgggggt

SEQ ID NO: 95913 - RNA, 23 nt, synthetic construct
  source 1..23: mol_type = other RNA
ttgtgggaagtcaccgtggaagg

SEQ ID NO: 95914 - RNA, 23 nt, synthetic construct
  source 1..23: mol_type = other RNA
ttcttgctgggtgtggccgtggc

SEQ ID NO: 95915 - RNA, 23 nt, synthetic construct
  source 1..23: mol_type = other RNA
ttcttgctgggtgtggccgtggc

SEQ ID NO: 95916 - RNA, 23 nt, synthetic construct
  source 1..23: mol_type = other RNA
ttgtgggaagtcaccgtggaagg

SEQ ID NO: 95917 - RNA, 23 nt, synthetic construct
  source 1..23: mol_type = other RNA
ttcttgctgggtgtggccgtggc

SEQ ID NO: 95918 - RNA, 23 nt, synthetic construct
  source 1..23: mol_type = other RNA
tgtcaccactttgggggtgtgag

SEQ ID NO: 95919 - RNA, 23 nt, synthetic construct
  source 1..23: mol_type = other RNA
tgctccgcagaggaggcccaagg

SEQ ID NO: 95920 - RNA, 23 nt, synthetic construct
  source 1..23: mol_type = other RNA
tgggcagcagggtcgaggtgcgg

SEQ ID NO: 95921 - RNA, 23 nt, synthetic construct
  source 1..23: mol_type = other RNA
tgggcagcagggtcgaggtgcgg

SEQ ID NO: 95922 - RNA, 23 nt, synthetic construct
  source 1..23: mol_type = other RNA
tgggcagcagggtcgaggtgcgg

SEQ ID NO: 95923 - RNA, 23 nt, synthetic construct
  source 1..23: mol_type = other RNA
tgggcagcagggtcgaggtgcgg

SEQ ID NO: 95924 - RNA, 23 nt, synthetic construct
  source 1..23: mol_type = other RNA
tccccactcccatccgacaccag

SEQ ID NO: 95925 - RNA, 23 nt, synthetic construct
  source 1..23: mol_type = other RNA
tggtgctgcatgttgagggggca

SEQ ID NO: 95926 - RNA, 23 nt, synthetic construct
  source 1..23: mol_type = other RNA
tggcactgccatagccccccgga

SEQ ID NO: 95927 - RNA, 23 nt, synthetic construct
  source 1..23: mol_type = other RNA
tgagccactggttgtgggtgtgg

SEQ ID NO: 95928 - RNA, 23 nt, synthetic construct
  source 1..23: mol_type = other RNA
tgagccactggttgtgggtgtgg

SEQ ID NO: 95929 - RNA, 23 nt, synthetic construct
  source 1..23: mol_type = other RNA
tgggtggggggacggggacgggc

SEQ ID NO: 95930 - RNA, 23 nt, synthetic construct
  source 1..23: mol_type = other RNA
tagcaggtgtccgtgcagggtga

SEQ ID NO: 95931 - RNA, 23 nt, synthetic construct
  source 1..23: mol_type = other RNA
tgggttggagcaggtgtccgtgc

SEQ ID NO: 95932 - RNA, 23 nt, synthetic construct
  source 1..23: mol_type = other RNA
ttgcagtcaccatgcaggtcgta

SEQ ID NO: 95933 - RNA, 23 nt, synthetic construct
  source 1..23: mol_type = other RNA
tgctttcaggcagttctcgttgt

SEQ ID NO: 95934 - RNA, 23 nt, synthetic construct
  source 1..23: mol_type = other RNA
tggcctccaccaccccgctgagg

SEQ ID NO: 95935 - RNA, 23 nt, synthetic construct
  source 1..23: mol_type = other RNA
tcagcccccatgtgggttgtaga

SEQ ID NO: 95936 - RNA, 23 nt, synthetic construct
  source 1..23: mol_type = other RNA
tgccttcctgatgatggtgccgt

SEQ ID NO: 95937 - RNA, 23 nt, synthetic construct
  source 1..23: mol_type = other RNA
tggcactgagggagggctgaggg

SEQ ID NO: 95938 - RNA, 23 nt, synthetic construct
  source 1..23: mol_type = other RNA
ttctgggttggggtaggcacagc

SEQ ID NO: 95939 - RNA, 23 nt, synthetic construct
  source 1..23: mol_type = other RNA
tgttgccattgttgttggggcca

SEQ ID NO: 95940 - RNA, 23 nt, synthetic construct
  source 1..23: mol_type = other RNA
tggttgccattgttgttggggcc

SEQ ID NO: 95941 - RNA, 23 nt, synthetic construct
  source 1..23: mol_type = other RNA
ttctggaggttgccattgttgtt

SEQ ID NO: 95942 - RNA, 23 nt, synthetic construct
  source 1..23: mol_type = other RNA
tgaggtcggggtggccgtggatc

SEQ ID NO: 95943 - RNA, 23 nt, synthetic construct
  source 1..23: mol_type = other RNA
ttgggtgtggtggttgtgctgat

SEQ ID NO: 95944 - RNA, 23 nt, synthetic construct
  source 1..23: mol_type = other RNA
tgtggccacagttgtggtggtgg

SEQ ID NO: 95945 - RNA, 23 nt, synthetic construct
  source 1..23: mol_type = other RNA
tggggatgggagttgtcccagga

SEQ ID NO: 95946 - RNA, 23 nt, synthetic construct
  source 1..23: mol_type = other RNA
tgtgggaagtcaccgtggaaggc

SEQ ID NO: 95947 - RNA, 23 nt, synthetic construct
  source 1..23: mol_type = other RNA
tggcccctccggccgcacggatg

SEQ ID NO: 95948 - RNA, 23 nt, synthetic construct
  source 1..23: mol_type = other RNA
ttgggtgtggtggttgtgctgat

SEQ ID NO: 95949 - RNA, 23 nt, synthetic construct
  source 1..23: mol_type = other RNA
tgtggccacagttgtggtggtgg

SEQ ID NO: 95950 - RNA, 23 nt, synthetic construct
  source 1..23: mol_type = other RNA
tggcccctccggccgcacggatg

SEQ ID NO: 95951 - RNA, 23 nt, synthetic construct
  source 1..23: mol_type = other RNA
tggagggggagctgttcccgggg

SEQ ID NO: 95952 - RNA, 23 nt, synthetic construct
  source 1..23: mol_type = other RNA
ttgggtgtggtggttgtgctgat

SEQ ID NO: 95953 - RNA, 23 nt, synthetic construct
  source 1..23: mol_type = other RNA
tgtggccacagttgtggtggtgg

SEQ ID NO: 95954 - RNA, 23 nt, synthetic construct
  source 1..23: mol_type = other RNA
tgtgggaagtcaccgtggaaggc

SEQ ID NO: 95955 - RNA, 23 nt, synthetic construct
  source 1..23: mol_type = other RNA
ttgggtgtggtggttgtgctgat

SEQ ID NO: 95956 - RNA, 23 nt, synthetic construct
  source 1..23: mol_type = other RNA
ttggagccactggttgtgggtgt

SEQ ID NO: 95957 - RNA, 23 nt, synthetic construct
  source 1..23: mol_type = other RNA
tgtggccacagttgtggtggtgg

SEQ ID NO: 95958 - RNA, 23 nt, synthetic construct
  source 1..23: mol_type = other RNA
ttggtgatcagtgatgggggagt

SEQ ID NO: 95959 - RNA, 23 nt, synthetic construct
  source 1..23: mol_type = other RNA
tggcccctccggccgcacggatg

SEQ ID NO: 95960 - RNA, 23 nt, synthetic construct
  source 1..23: mol_type = other RNA
tggagggggagctgttcccgggg

SEQ ID NO: 95961 - RNA, 23 nt, synthetic construct
  source 1..23: mol_type = other RNA
tggacgtggaactggtggccctt

SEQ ID NO: 95962 - RNA, 23 nt, synthetic construct
  source 1..23: mol_type = other RNA
tctggaagggcagttgcagtccc

SEQ ID NO: 95963 - RNA, 23 nt, synthetic construct
  source 1..23: mol_type = other RNA
ttgggtgtggtggttgtgctgat

SEQ ID NO: 95964 - RNA, 23 nt, synthetic construct
  source 1..23: mol_type = other RNA
ttggagccactggttgtgggtgt

SEQ ID NO: 95965 - RNA, 23 nt, synthetic construct
  source 1..23: mol_type = other RNA
tgtggccacagttgtggtggtgg

SEQ ID NO: 95966 - RNA, 23 nt, synthetic construct
  source 1..23: mol_type = other RNA
tcacagggctggctcgggtccga

SEQ ID NO: 95967 - RNA, 23 nt, synthetic construct
  source 1..23: mol_type = other RNA
tggatgctgagggcgcgggggca

SEQ ID NO: 95968 - RNA, 23 nt, synthetic construct
  source 1..23: mol_type = other RNA
ttcggggaccagccacgtcttgg

SEQ ID NO: 95969 - RNA, 23 nt, synthetic construct
  source 1..23: mol_type = other RNA
tccgggcgcggcagagctctgcg

SEQ ID NO: 95970 - RNA, 23 nt, synthetic construct
  source 1..23: mol_type = other RNA
tccatcccctccagctgtgggct

SEQ ID NO: 95971 - RNA, 23 nt, synthetic construct
  source 1..23: mol_type = other RNA
tggtcccacgcaggggcaggcct

SEQ ID NO: 95972 - RNA, 23 nt, synthetic construct
  source 1..23: mol_type = other RNA
tctgggtgcagatggactcctgc

SEQ ID NO: 95973 - RNA, 23 nt, synthetic construct
  source 1..23: mol_type = other RNA
tctcctcgtggacccgcctctcc

SEQ ID NO: 95974 - RNA, 23 nt, synthetic construct
  source 1..23: mol_type = other RNA
tggtgggcagcaggagcacggag

SEQ ID NO: 95975 - RNA, 23 nt, synthetic construct
  source 1..23: mol_type = other RNA
tggcggccgccttgcctgtcgca

SEQ ID NO: 95976 - RNA, 23 nt, synthetic construct
  source 1..23: mol_type = other RNA
tacaggcggccgccttgcctgtc

SEQ ID NO: 95977 - RNA, 23 nt, synthetic construct
  source 1..23: mol_type = other RNA
tgcatggacaggcggccgccttg

SEQ ID NO: 95978 - RNA, 23 nt, synthetic construct
  source 1..23: mol_type = other RNA
tgtggtcaccaccgtggttatgg

SEQ ID NO: 95979 - RNA, 23 nt, synthetic construct
  source 1..23: mol_type = other RNA
tgtggtcaccaccgtggttatgg

SEQ ID NO: 95980 - RNA, 23 nt, synthetic construct
  source 1..23: mol_type = other RNA
ttcctgggcgcaggcggccaggt

SEQ ID NO: 95981 - RNA, 23 nt, synthetic construct
  source 1..23: mol_type = other RNA
tgtgctcggctctgtgaggatcc

SEQ ID NO: 95982 - RNA, 23 nt, synthetic construct
  source 1..23: mol_type = other RNA
tgtgctcggctctgtgaggatcc

SEQ ID NO: 95983 - RNA, 23 nt, synthetic construct
  source 1..23: mol_type = other RNA
tgtgctcggctctgtgaggatcc

SEQ ID NO: 95984 - RNA, 23 nt, synthetic construct
  source 1..23: mol_type = other RNA
tggacatggtggacatgggtgtg

SEQ ID NO: 95985 - RNA, 23 nt, synthetic construct
  source 1..23: mol_type = other RNA
tgtgctcggctctgtgaggatcc

SEQ ID NO: 95986 - RNA, 23 nt, synthetic construct
  source 1..23: mol_type = other RNA
tctgggaaccgtggaggcagtgg

SEQ ID NO: 95987 - RNA, 23 nt, synthetic construct
  source 1..23: mol_type = other RNA
ttggtctccggagtggaggaggg

SEQ ID NO: 95988 - RNA, 23 nt, synthetic construct
  source 1..23: mol_type = other RNA
tcccagggggacaccaggctggg

SEQ ID NO: 95989 - RNA, 23 nt, synthetic construct
  source 1..23: mol_type = other RNA
ttggtctccggagtggaggaggg

SEQ ID NO: 95990 - RNA, 23 nt, synthetic construct
  source 1..23: mol_type = other RNA
tggctgtgaagcccgtggttgtg

SEQ ID NO: 95991 - RNA, 23 nt, synthetic construct
  source 1..23: mol_type = other RNA
tggctgtgaagcccgtggttgtg

SEQ ID NO: 95992 - RNA, 23 nt, synthetic construct
  source 1..23: mol_type = other RNA
tggctgtgaagcccgtggttgtg

SEQ ID NO: 95993 - RNA, 23 nt, synthetic construct
  source 1..23: mol_type = other RNA
tggctgtgaagcccgtggttgtg

SEQ ID NO: 95994 - RNA, 23 nt, synthetic construct
  source 1..23: mol_type = other RNA
taggctgcgcccgtggcctccac

SEQ ID NO: 95995 - RNA, 23 nt, synthetic construct
  source 1..23: mol_type = other RNA
tggctttggagctggtggctgcg

SEQ ID NO: 95996 - RNA, 23 nt, synthetic construct
  source 1..23: mol_type = other RNA
taggacacggccatcccgtgggt

SEQ ID NO: 95997 - RNA, 23 nt, synthetic construct
  source 1..23: mol_type = other RNA
tgtcagcactggggggataggtg

SEQ ID NO: 95998 - RNA, 23 nt, synthetic construct
  source 1..23: mol_type = other RNA
tgtcagcactggggggataggtg

SEQ ID NO: 95999 - RNA, 23 nt, synthetic construct
  source 1..23: mol_type = other RNA
tctcgtggtcagcggctctttgg

SEQ ID NO: 96000 - RNA, 23 nt, synthetic construct
  source 1..23: mol_type = other RNA
ttcaccgtggagcctctggttgt

SEQ ID NO: 96001 - RNA, 23 nt, synthetic construct
  source 1..23: mol_type = other RNA
ttcaccgtggagcctctggttgt

SEQ ID NO: 96002 - RNA, 23 nt, synthetic construct
  source 1..23: mol_type = other RNA
ttccccgggacggaggagggggt

SEQ ID NO: 96003 - RNA, 23 nt, synthetic construct
  source 1..23: mol_type = other RNA
ttgggtggtctctggagtagagg

SEQ ID NO: 96004 - RNA, 23 nt, synthetic construct
  source 1..23: mol_type = other RNA
ttgtgagctgttcccagagtgga

SEQ ID NO: 96005 - RNA, 23 nt, synthetic construct
  source 1..23: mol_type = other RNA
tgaagccagtgggtctcagggtg

SEQ ID NO: 96006 - RNA, 23 nt, synthetic construct
  source 1..23: mol_type = other RNA
tgcaccatggtgacagtgaggac

SEQ ID NO: 96007 - RNA, 23 nt, synthetic construct
  source 1..23: mol_type = other RNA
tggctgttgacccaggtttcatt

SEQ ID NO: 96008 - RNA, 23 nt, synthetic construct
  source 1..23: mol_type = other RNA
tttagtttgttccagggcgtccc

SEQ ID NO: 96009 - RNA, 23 nt, synthetic construct
  source 1..23: mol_type = other RNA
tagcctcacagaggtacacggtg

SEQ ID NO: 96010 - RNA, 23 nt, synthetic construct
  source 1..23: mol_type = other RNA
tgatgggtgtaaagctggtagct

SEQ ID NO: 96011 - RNA, 23 nt, synthetic construct
  source 1..23: mol_type = other RNA
tgatgggtgtaaagctggtagct

SEQ ID NO: 96012 - RNA, 23 nt, synthetic construct
  source 1..23: mol_type = other RNA
tccggcacgcgctcggggcaccc

SEQ ID NO: 96013 - RNA, 23 nt, synthetic construct
  source 1..23: mol_type = other RNA
tggggtcagcctggcgttgtggg

SEQ ID NO: 96014 - RNA, 23 nt, synthetic construct
  source 1..23: mol_type = other RNA
tcggggtcagcctggcgttgtgg

SEQ ID NO: 96015 - RNA, 23 nt, synthetic construct
  source 1..23: mol_type = other RNA
taagctgttcctggcattggcac

SEQ ID NO: 96016 - RNA, 23 nt, synthetic construct
  source 1..23: mol_type = other RNA
tacaccatgggggctgcacaccc

SEQ ID NO: 96017 - RNA, 23 nt, synthetic construct
  source 1..23: mol_type = other RNA
tcacaggggcagtcctcctcggc

SEQ ID NO: 96018 - RNA, 23 nt, synthetic construct
  source 1..23: mol_type = other RNA
tacacaggggcagtcctcctcgg

SEQ ID NO: 96019 - RNA, 23 nt, synthetic construct
  source 1..23: mol_type = other RNA
tggctgggtgggcacttcgggta

SEQ ID NO: 96020 - RNA, 23 nt, synthetic construct
  source 1..23: mol_type = other RNA
tggatgccactgggtgtgcagtt

SEQ ID NO: 96021 - RNA, 23 nt, synthetic construct
  source 1..23: mol_type = other RNA
tcctggtcagccccgggctactc

SEQ ID NO: 96022 - RNA, 23 nt, synthetic construct
  source 1..23: mol_type = other RNA
tcgtccctggaagggctgagcgt

SEQ ID NO: 96023 - RNA, 23 nt, synthetic construct
  source 1..23: mol_type = other RNA
tggtggctgtgcttctcagtgct

SEQ ID NO: 96024 - RNA, 23 nt, synthetic construct
  source 1..23: mol_type = other RNA
tgccgtggtggtcagtgatgggg

SEQ ID NO: 96025 - RNA, 23 nt, synthetic construct
  source 1..23: mol_type = other RNA
ttggccgtggtggtcagtgatgg

SEQ ID NO: 96026 - RNA, 23 nt, synthetic construct
  source 1..23: mol_type = other RNA
tgtggagccggtggccgtgatcg

SEQ ID NO: 96027 - RNA, 23 nt, synthetic construct
  source 1..23: mol_type = other RNA
tgtcgtggccgtggtgctcacat

SEQ ID NO: 96028 - RNA, 23 nt, synthetic construct
  source 1..23: mol_type = other RNA
tggtggctgtgcttctcagtgct

SEQ ID NO: 96029 - RNA, 23 nt, synthetic construct
  source 1..23: mol_type = other RNA
tgccgtggtggtcagtgatgggg

SEQ ID NO: 96030 - RNA, 23 nt, synthetic construct
  source 1..23: mol_type = other RNA
ttggccgtggtggtcagtgatgg

SEQ ID NO: 96031 - RNA, 23 nt, synthetic construct
  source 1..23: mol_type = other RNA
tgtggagccggtggccgtgatcg

SEQ ID NO: 96032 - RNA, 23 nt, synthetic construct
  source 1..23: mol_type = other RNA
tggtggctgtgcttctcagtgct

SEQ ID NO: 96033 - RNA, 23 nt, synthetic construct
  source 1..23: mol_type = other RNA
tgccgtggtggtcagtgatgggg

SEQ ID NO: 96034 - RNA, 23 nt, synthetic construct
  source 1..23: mol_type = other RNA
ttggccgtggtggtcagtgatgg

SEQ ID NO: 96035 - RNA, 23 nt, synthetic construct
  source 1..23: mol_type = other RNA
ttgggtggtactggtggttgctg

SEQ ID NO: 96036 - RNA, 23 nt, synthetic construct
  source 1..23: mol_type = other RNA
tgtcgtggccgtggtgctcacat

SEQ ID NO: 96037 - RNA, 23 nt, synthetic construct
  source 1..23: mol_type = other RNA
tggtggctgtgcttctcagtgct

SEQ ID NO: 96038 - RNA, 23 nt, synthetic construct
  source 1..23: mol_type = other RNA
tgtggagccggtggccgtgatcg

SEQ ID NO: 96039 - RNA, 23 nt, synthetic construct
  source 1..23: mol_type = other RNA
tgtcgtggccgtggtgctcacat

SEQ ID NO: 96040 - RNA, 23 nt, synthetic construct
  source 1..23: mol_type = other RNA
ttcagtgctggaagggcagttgc

SEQ ID NO: 96041 - RNA, 23 nt, synthetic construct
  source 1..23: mol_type = other RNA
tggtggctgtgcttctcagtgct

SEQ ID NO: 96042 - RNA, 23 nt, synthetic construct
  source 1..23: mol_type = other RNA
tgccgtggtggtcagtgatgggg

SEQ ID NO: 96043 - RNA, 23 nt, synthetic construct
  source 1..23: mol_type = other RNA
ttggccgtggtggtcagtgatgg

SEQ ID NO: 96044 - RNA, 23 nt, synthetic construct
  source 1..23: mol_type = other RNA
tgtggagccggtggccgtgatcg

SEQ ID NO: 96045 - RNA, 23 nt, synthetic construct
  source 1..23: mol_type = other RNA
tgtggattttgtggctgtgcttg

SEQ ID NO: 96046 - RNA, 23 nt, synthetic construct
  source 1..23: mol_type = other RNA
tgaggtgggacaggcgccctgga

SEQ ID NO: 96047 - RNA, 23 nt, synthetic construct
  source 1..23: mol_type = other RNA
tgtgggagccgccccacatgctg

SEQ ID NO: 96048 - RNA, 23 nt, synthetic construct
  source 1..23: mol_type = other RNA
tgaagcagccctccgccatcccc

SEQ ID NO: 96049 - RNA, 23 nt, synthetic construct
  source 1..23: mol_type = other RNA
tcctgggccgggaagccacgggt

SEQ ID NO: 96050 - RNA, 23 nt, synthetic construct
  source 1..23: mol_type = other RNA
ttgctgcagtccaggtacaccat

SEQ ID NO: 96051 - RNA, 23 nt, synthetic construct
  source 1..23: mol_type = other RNA
tacactcgcagtcgccacccgag

SEQ ID NO: 96052 - RNA, 23 nt, synthetic construct
  source 1..23: mol_type = other RNA
tttcaaacgtctcaaagtctccg

SEQ ID NO: 96053 - RNA, 23 nt, synthetic construct
  source 1..23: mol_type = other RNA
taagggtgcttgtgtatctgggg

SEQ ID NO: 96054 - RNA, 23 nt, synthetic construct
  source 1..23: mol_type = other RNA
ttccccgtggaaggctctgtgat

SEQ ID NO: 96055 - RNA, 23 nt, synthetic construct
  source 1..23: mol_type = other RNA
ttccccgtggaaggctctgtgat

SEQ ID NO: 96056 - RNA, 23 nt, synthetic construct
  source 1..23: mol_type = other RNA
tctgcacgcagatgcccatgtgt

SEQ ID NO: 96057 - RNA, 23 nt, synthetic construct
  source 1..23: mol_type = other RNA
ttctggcggtgtgggtggtcccc

SEQ ID NO: 96058 - RNA, 23 nt, synthetic construct
  source 1..23: mol_type = other RNA
tatggtcaccaccgtggttatgg

SEQ ID NO: 96059 - RNA, 23 nt, synthetic construct
  source 1..23: mol_type = other RNA
tatggtcaccaccgtggttattg

SEQ ID NO: 96060 - RNA, 23 nt, synthetic construct
  source 1..23: mol_type = other RNA
tccgcggctggccccccgcgtgg

SEQ ID NO: 96061 - RNA, 23 nt, synthetic construct
  source 1..23: mol_type = other RNA
tgggttggggtaggcacagcagg

SEQ ID NO: 96062 - RNA, 23 nt, synthetic construct
  source 1..23: mol_type = other RNA
ttggccgggggagccctggtcag

SEQ ID NO: 96063 - RNA, 23 nt, synthetic construct
  source 1..23: mol_type = other RNA
tgagagggatggcattgtcacag

SEQ ID NO: 96064 - RNA, 23 nt, synthetic construct
  source 1..23: mol_type = other RNA
tgcacctcaaggcggcccctgca

SEQ ID NO: 96065 - RNA, 23 nt, synthetic construct
  source 1..23: mol_type = other RNA
ttccacgtgggtgtaggtgtgca

SEQ ID NO: 96066 - RNA, 23 nt, synthetic construct
  source 1..23: mol_type = other RNA
tagggtgtggccgtggaattggt

SEQ ID NO: 96067 - RNA, 23 nt, synthetic construct
  source 1..23: mol_type = other RNA
ttcttgtagtggaagtcacccca

SEQ ID NO: 96068 - RNA, 23 nt, synthetic construct
  source 1..23: mol_type = other RNA
tgccgttggacgcctccagcacc

SEQ ID NO: 96069 - RNA, 23 nt, synthetic construct
  source 1..23: mol_type = other RNA
tcaggtgtccgtgcagggtgagc

SEQ ID NO: 96070 - RNA, 23 nt, synthetic construct
  source 1..23: mol_type = other RNA
ttggtgttgaaggaggtgcccgg

SEQ ID NO: 96071 - RNA, 23 nt, synthetic construct
  source 1..23: mol_type = other RNA
tgcaggggcactcctgggcgggc

SEQ ID NO: 96072 - RNA, 23 nt, synthetic construct
  source 1..23: mol_type = other RNA
tcacacaggggcagtcctcctcg

SEQ ID NO: 96073 - RNA, 23 nt, synthetic construct
  source 1..23: mol_type = other RNA
tacagcccccatgtgggttgtag

SEQ ID NO: 96074 - RNA, 23 nt, synthetic construct
  source 1..23: mol_type = other RNA
tgggcacttcgggtagcagcctt

SEQ ID NO: 96075 - RNA, 23 nt, synthetic construct
  source 1..23: mol_type = other RNA
tcactggatgccactgggtgtgc

SEQ ID NO: 96076 - RNA, 23 nt, synthetic construct
  source 1..23: mol_type = other RNA
tgagttgaggaggggttggtggt

SEQ ID NO: 96077 - RNA, 23 nt, synthetic construct
  source 1..23: mol_type = other RNA
tggtggccatggtgttcggcact

SEQ ID NO: 96078 - RNA, 23 nt, synthetic construct
  source 1..23: mol_type = other RNA
tgagttgaggaggggttggtggt

SEQ ID NO: 96079 - RNA, 23 nt, synthetic construct
  source 1..23: mol_type = other RNA
tgacggggtggccgtggggccag

SEQ ID NO: 96080 - RNA, 23 nt, synthetic construct
  source 1..23: mol_type = other RNA
tgagttgaggaggggttggtggt

SEQ ID NO: 96081 - RNA, 23 nt, synthetic construct
  source 1..23: mol_type = other RNA
tgagtgctgggtggtactggtgg

SEQ ID NO: 96082 - RNA, 23 nt, synthetic construct
  source 1..23: mol_type = other RNA
tggccctggttgtggtggccgtg

SEQ ID NO: 96083 - RNA, 23 nt, synthetic construct
  source 1..23: mol_type = other RNA
tgtagtggccgtggtgatcagtg

SEQ ID NO: 96084 - RNA, 23 nt, synthetic construct
  source 1..23: mol_type = other RNA
tgagttgaggaggggttggtggt

SEQ ID NO: 96085 - RNA, 23 nt, synthetic construct
  source 1..23: mol_type = other RNA
tgacggggtggccgtggggccag

SEQ ID NO: 96086 - RNA, 23 nt, synthetic construct
  source 1..23: mol_type = other RNA
tgagttgaggaggggttggtggt

SEQ ID NO: 96087 - RNA, 23 nt, synthetic construct
  source 1..23: mol_type = other RNA
tggcgaggacagcggggcggagg

SEQ ID NO: 96088 - RNA, 23 nt, synthetic construct
  source 1..23: mol_type = other RNA
tcaggggttctcggcccggggcc

SEQ ID NO: 96089 - RNA, 23 nt, synthetic construct
  source 1..23: mol_type = other RNA
ttggggccggtttcacccacggg

SEQ ID NO: 96090 - RNA, 23 nt, synthetic construct
  source 1..23: mol_type = other RNA
tcgtccaggctgagcgtcaccgc

SEQ ID NO: 96091 - RNA, 23 nt, synthetic construct
  source 1..23: mol_type = other RNA
ttgtggcggtgtgggtggtcccc

SEQ ID NO: 96092 - RNA, 23 nt, synthetic construct
  source 1..23: mol_type = other RNA
ttgtggcggtgtgggtggtcccc

SEQ ID NO: 96093 - RNA, 23 nt, synthetic construct
  source 1..23: mol_type = other RNA
tgtggtccccgggacggaggagg

SEQ ID NO: 96094 - RNA, 23 nt, synthetic construct
  source 1..23: mol_type = other RNA
tgttgtccccacagtagtcctgg

SEQ ID NO: 96095 - RNA, 23 nt, synthetic construct
  source 1..23: mol_type = other RNA
ttcttggaggatcagctcgtagc

SEQ ID NO: 96096 - RNA, 23 nt, synthetic construct
  source 1..23: mol_type = other RNA
ttgtgggtggtccccgggatgga

SEQ ID NO: 96097 - RNA, 23 nt, synthetic construct
  source 1..23: mol_type = other RNA
tggtggtcagcactgtggcggtg

SEQ ID NO: 96098 - RNA, 23 nt, synthetic construct
  source 1..23: mol_type = other RNA
ttgtgggtggtccccgggatgga

SEQ ID NO: 96099 - RNA, 23 nt, synthetic construct
  source 1..23: mol_type = other RNA
ttgtggaggtgtgggtggtctcc

SEQ ID NO: 96100 - RNA, 23 nt, synthetic construct
  source 1..23: mol_type = other RNA
ttgtgggtggtccccgggatgga

SEQ ID NO: 96101 - RNA, 23 nt, synthetic construct
  source 1..23: mol_type = other RNA
tggtggtcagcactgtggcggtg

SEQ ID NO: 96102 - RNA, 23 nt, synthetic construct
  source 1..23: mol_type = other RNA
ttgtggaggtgtgggtggtctcc

SEQ ID NO: 96103 - RNA, 23 nt, synthetic construct
  source 1..23: mol_type = other RNA
ttgtgggtggtccccgggatgga

SEQ ID NO: 96104 - RNA, 23 nt, synthetic construct
  source 1..23: mol_type = other RNA
ttgtggaggtgtgggtggtctct

SEQ ID NO: 96105 - RNA, 23 nt, synthetic construct
  source 1..23: mol_type = other RNA
tggggctggcacgggtgggggga

SEQ ID NO: 96106 - RNA, 23 nt, synthetic construct
  source 1..23: mol_type = other RNA
tgctcggggcacccatcctgggg

SEQ ID NO: 96107 - RNA, 23 nt, synthetic construct
  source 1..23: mol_type = other RNA
tagcatggccgccagagccaaca

SEQ ID NO: 96108 - RNA, 23 nt, synthetic construct
  source 1..23: mol_type = other RNA
ttgcaaaggccagggaagcggaa

SEQ ID NO: 96109 - RNA, 23 nt, synthetic construct
  source 1..23: mol_type = other RNA
tctgcccattgatgaggacggag

SEQ ID NO: 96110 - RNA, 23 nt, synthetic construct
  source 1..23: mol_type = other RNA
tccacacaggccacaggtctggt

SEQ ID NO: 96111 - RNA, 23 nt, synthetic construct
  source 1..23: mol_type = other RNA
tcccacacaggccacaggtctgg

SEQ ID NO: 96112 - RNA, 23 nt, synthetic construct
  source 1..23: mol_type = other RNA
tcgttgaagtccccacacaggcc

SEQ ID NO: 96113 - RNA, 23 nt, synthetic construct
  source 1..23: mol_type = other RNA
tcggcaagggcagcgggtccggg

SEQ ID NO: 96114 - RNA, 23 nt, synthetic construct
  source 1..23: mol_type = other RNA
ttgcggtggcagatgccctcctc

SEQ ID NO: 96115 - RNA, 23 nt, synthetic construct
  source 1..23: mol_type = other RNA
tggcacacgggcaggtggggcag

SEQ ID NO: 96116 - RNA, 23 nt, synthetic construct
  source 1..23: mol_type = other RNA
tagccacactcctggtgctgcat

SEQ ID NO: 96117 - RNA, 23 nt, synthetic construct
  source 1..23: mol_type = other RNA
tcctcgcagagctgcgcgcgctg

SEQ ID NO: 96118 - RNA, 23 nt, synthetic construct
  source 1..23: mol_type = other RNA
taaggctgcgcccgtggcctcca

SEQ ID NO: 96119 - RNA, 23 nt, synthetic construct
  source 1..23: mol_type = other RNA
tacatgcagttcgagtggaaggg

SEQ ID NO: 96120 - RNA, 23 nt, synthetic construct
  source 1..23: mol_type = other RNA
tgcccgcggggcaggtgcagccg

SEQ ID NO: 96121 - RNA, 23 nt, synthetic construct
  source 1..23: mol_type = other RNA
tcgtccgggcaggagggggagag

SEQ ID NO: 96122 - RNA, 23 nt, synthetic construct
  source 1..23: mol_type = other RNA
tctgggtgggcacttcgggtagc

SEQ ID NO: 96123 - RNA, 23 nt, synthetic construct
  source 1..23: mol_type = other RNA
ttggctgggtgggcacttcgggt

SEQ ID NO: 96124 - RNA, 23 nt, synthetic construct
  source 1..23: mol_type = other RNA
tggagttccaggacatgccacag

SEQ ID NO: 96125 - RNA, 23 nt, synthetic construct
  source 1..23: mol_type = other RNA
tggacccaggcggtggtgaaggt

SEQ ID NO: 96126 - RNA, 23 nt, synthetic construct
  source 1..23: mol_type = other RNA
taggccgggctctgggcggtgcc

SEQ ID NO: 96127 - RNA, 23 nt, synthetic construct
  source 1..23: mol_type = other RNA
tgcacatcagcccccgcatgcgg

SEQ ID NO: 96128 - RNA, 23 nt, synthetic construct
  source 1..23: mol_type = other RNA
tctctgttggctgttggcgcaca

SEQ ID NO: 96129 - RNA, 23 nt, synthetic construct
  source 1..23: mol_type = other RNA
ttggggtaggcacagcaggctcc

SEQ ID NO: 96130 - RNA, 23 nt, synthetic construct
  source 1..23: mol_type = other RNA
ttcttgaagacgccctcctgctc

SEQ ID NO: 96131 - RNA, 23 nt, synthetic construct
  source 1..23: mol_type = other RNA
tctccagctctgtggtcggtggc

SEQ ID NO: 96132 - RNA, 23 nt, synthetic construct
  source 1..23: mol_type = other RNA
tccgtctccagctctgtggtcgg

SEQ ID NO: 96133 - RNA, 23 nt, synthetic construct
  source 1..23: mol_type = other RNA
tgtccttctgagagggtggggac

SEQ ID NO: 96134 - RNA, 23 nt, synthetic construct
  source 1..23: mol_type = other RNA
tggaagggtggatgtggccaccc

SEQ ID NO: 96135 - RNA, 23 nt, synthetic construct
  source 1..23: mol_type = other RNA
tccctggactggaggagggagtg

SEQ ID NO: 96136 - RNA, 23 nt, synthetic construct
  source 1..23: mol_type = other RNA
tgtgtggtggctgtgcttctcag

SEQ ID NO: 96137 - RNA, 23 nt, synthetic construct
  source 1..23: mol_type = other RNA
tgggtgtggtggctgtgcttctc

SEQ ID NO: 96138 - RNA, 23 nt, synthetic construct
  source 1..23: mol_type = other RNA
tagggtgtggctgtggacatggt

SEQ ID NO: 96139 - RNA, 23 nt, synthetic construct
  source 1..23: mol_type = other RNA
ttgggcagtctctggagtggagg

SEQ ID NO: 96140 - RNA, 23 nt, synthetic construct
  source 1..23: mol_type = other RNA
tgtggaggtgtgggcagtctctg

SEQ ID NO: 96141 - RNA, 23 nt, synthetic construct
  source 1..23: mol_type = other RNA
ttggtcagcactgtggcggtgtg

SEQ ID NO: 96142 - RNA, 23 nt, synthetic construct
  source 1..23: mol_type = other RNA
ttggtggtcagcactgtggcggt

SEQ ID NO: 96143 - RNA, 23 nt, synthetic construct
  source 1..23: mol_type = other RNA
ttggtggtggtggtcagcactgt

SEQ ID NO: 96144 - RNA, 23 nt, synthetic construct
  source 1..23: mol_type = other RNA
tgggggatgggagttgtcccagg

SEQ ID NO: 96145 - RNA, 23 nt, synthetic construct
  source 1..23: mol_type = other RNA
tggggggatgggagttgtcccag

SEQ ID NO: 96146 - RNA, 23 nt, synthetic construct
  source 1..23: mol_type = other RNA
tgctggggggcagggatcgcccg

SEQ ID NO: 96147 - RNA, 23 nt, synthetic construct
  source 1..23: mol_type = other RNA
taggctctgtgatgtgggtggtg

SEQ ID NO: 96148 - RNA, 23 nt, synthetic construct
  source 1..23: mol_type = other RNA
tctggaaagggctggagtcgagt

SEQ ID NO: 96149 - RNA, 23 nt, synthetic construct
  source 1..23: mol_type = other RNA
tgtgcgggtcttgctgggtgtgg

SEQ ID NO: 96150 - RNA, 23 nt, synthetic construct
  source 1..23: mol_type = other RNA
tgcccatggtcaccaccgtggtt

SEQ ID NO: 96151 - RNA, 23 nt, synthetic construct
  source 1..23: mol_type = other RNA
tctggggctcacagcccatggtc

SEQ ID NO: 96152 - RNA, 23 nt, synthetic construct
  source 1..23: mol_type = other RNA
tgtgtcaaagtccccgccagagg

SEQ ID NO: 96153 - RNA, 23 nt, synthetic construct
  source 1..23: mol_type = other RNA
tggtgggcaccgtcacggtggct

SEQ ID NO: 96154 - RNA, 23 nt, synthetic construct
  source 1..23: mol_type = other RNA
tgtgtggtggctgtgcttctcag

SEQ ID NO: 96155 - RNA, 23 nt, synthetic construct
  source 1..23: mol_type = other RNA
tgggtgtggtggctgtgcttctc

SEQ ID NO: 96156 - RNA, 23 nt, synthetic construct
  source 1..23: mol_type = other RNA
tgaggaggggatggctgtaaagc

SEQ ID NO: 96157 - RNA, 23 nt, synthetic construct
  source 1..23: mol_type = other RNA
tagggtgtggctgtggacatggt

SEQ ID NO: 96158 - RNA, 23 nt, synthetic construct
  source 1..23: mol_type = other RNA
tcagagccggtggccccggttgt

SEQ ID NO: 96159 - RNA, 23 nt, synthetic construct
  source 1..23: mol_type = other RNA
ttggtggtggtggtcagcactgt

SEQ ID NO: 96160 - RNA, 23 nt, synthetic construct
  source 1..23: mol_type = other RNA
taggctctgtgatgtgggtggtg

SEQ ID NO: 96161 - RNA, 23 nt, synthetic construct
  source 1..23: mol_type = other RNA
tggttgctgctggggtgtgggaa

SEQ ID NO: 96162 - RNA, 23 nt, synthetic construct
  source 1..23: mol_type = other RNA
tgtgcgggtcttgctgggtgtgg

SEQ ID NO: 96163 - RNA, 23 nt, synthetic construct
  source 1..23: mol_type = other RNA
tgcccatggtcaccaccgtggtt

SEQ ID NO: 96164 - RNA, 23 nt, synthetic construct
  source 1..23: mol_type = other RNA
tctggggctcacagcccatggtc

SEQ ID NO: 96165 - RNA, 23 nt, synthetic construct
  source 1..23: mol_type = other RNA
tgtgtcaaagtccccgccagagg

SEQ ID NO: 96166 - RNA, 23 nt, synthetic construct
  source 1..23: mol_type = other RNA
tgttcccggggtggaggacggga

SEQ ID NO: 96167 - RNA, 23 nt, synthetic construct
  source 1..23: mol_type = other RNA
tgggagggggagctgttcccggg

SEQ ID NO: 96168 - RNA, 23 nt, synthetic construct
  source 1..23: mol_type = other RNA
tatgggtgtggtggtctgttctg

SEQ ID NO: 96169 - RNA, 23 nt, synthetic construct
  source 1..23: mol_type = other RNA
tgcactgtggaggtgtgggtggt

SEQ ID NO: 96170 - RNA, 23 nt, synthetic construct
  source 1..23: mol_type = other RNA
tagtggctgcagttgtagtggct

SEQ ID NO: 96171 - RNA, 23 nt, synthetic construct
  source 1..23: mol_type = other RNA
tgtggctgtagtgctgggctctg

SEQ ID NO: 96172 - RNA, 23 nt, synthetic construct
  source 1..23: mol_type = other RNA
tggtgggcaccgtcacggtggct

SEQ ID NO: 96173 - RNA, 23 nt, synthetic construct
  source 1..23: mol_type = other RNA
ttgatgactgtgggtgtggtggc

SEQ ID NO: 96174 - RNA, 23 nt, synthetic construct
  source 1..23: mol_type = other RNA
tccctggactggaggagggagtg

SEQ ID NO: 96175 - RNA, 23 nt, synthetic construct
  source 1..23: mol_type = other RNA
tgtgtggtggctgtgcttctcag

SEQ ID NO: 96176 - RNA, 23 nt, synthetic construct
  source 1..23: mol_type = other RNA
tgggtgtggtggctgtgcttctc

SEQ ID NO: 96177 - RNA, 23 nt, synthetic construct
  source 1..23: mol_type = other RNA
tagggtgtggctgtggacatggt

SEQ ID NO: 96178 - RNA, 23 nt, synthetic construct
  source 1..23: mol_type = other RNA
ttctggagtagaggagggtgtgg

SEQ ID NO: 96179 - RNA, 23 nt, synthetic construct
  source 1..23: mol_type = other RNA
tggtggtcgtggtggtaagcact

SEQ ID NO: 96180 - RNA, 23 nt, synthetic construct
  source 1..23: mol_type = other RNA
ttggtcagcactgtggcggtgtg

SEQ ID NO: 96181 - RNA, 23 nt, synthetic construct
  source 1..23: mol_type = other RNA
ttggtggtcagcactgtggcggt

SEQ ID NO: 96182 - RNA, 23 nt, synthetic construct
  source 1..23: mol_type = other RNA
ttggtggtggtggtcagcactgt

SEQ ID NO: 96183 - RNA, 23 nt, synthetic construct
  source 1..23: mol_type = other RNA
tggggatgggagttgtccctgga

SEQ ID NO: 96184 - RNA, 23 nt, synthetic construct
  source 1..23: mol_type = other RNA
tgggggatgggagttgtccctgg

SEQ ID NO: 96185 - RNA, 23 nt, synthetic construct
  source 1..23: mol_type = other RNA
tggggggatgggagttgtccctg

SEQ ID NO: 96186 - RNA, 23 nt, synthetic construct
  source 1..23: mol_type = other RNA
taggctctgtgatgtgggtggtg

SEQ ID NO: 96187 - RNA, 23 nt, synthetic construct
  source 1..23: mol_type = other RNA
tggttgctgctggggtgtgggaa

SEQ ID NO: 96188 - RNA, 23 nt, synthetic construct
  source 1..23: mol_type = other RNA
tggtggtactggtggttgctgct

SEQ ID NO: 96189 - RNA, 23 nt, synthetic construct
  source 1..23: mol_type = other RNA
tgtgcgggtcttgctgggtgtgg

SEQ ID NO: 96190 - RNA, 23 nt, synthetic construct
  source 1..23: mol_type = other RNA
tgtgtcaaagtccccgccagagg

SEQ ID NO: 96191 - RNA, 23 nt, synthetic construct
  source 1..23: mol_type = other RNA
tggtgggcaccgtcacggtggct

SEQ ID NO: 96192 - RNA, 23 nt, synthetic construct
  source 1..23: mol_type = other RNA
tgtgtggtggctgtgcttctcag

SEQ ID NO: 96193 - RNA, 23 nt, synthetic construct
  source 1..23: mol_type = other RNA
tgggtgtggtggctgtgcttctc

SEQ ID NO: 96194 - RNA, 23 nt, synthetic construct
  source 1..23: mol_type = other RNA
tgaggaggggatggctgtaaagc

SEQ ID NO: 96195 - RNA, 23 nt, synthetic construct
  source 1..23: mol_type = other RNA
tagggtgtggctgtggacatggt

SEQ ID NO: 96196 - RNA, 23 nt, synthetic construct
  source 1..23: mol_type = other RNA
ttgggcagtctctggagtggagg

SEQ ID NO: 96197 - RNA, 23 nt, synthetic construct
  source 1..23: mol_type = other RNA
tgtggaggtgtgggcagtctctg

SEQ ID NO: 96198 - RNA, 23 nt, synthetic construct
  source 1..23: mol_type = other RNA
tgggacggaggagggggtcaccg

SEQ ID NO: 96199 - RNA, 23 nt, synthetic construct
  source 1..23: mol_type = other RNA
tgtccccgggacggaggaggggg

SEQ ID NO: 96200 - RNA, 23 nt, synthetic construct
  source 1..23: mol_type = other RNA
ttggtggtggtggtcagcactgt

SEQ ID NO: 96201 - RNA, 23 nt, synthetic construct
  source 1..23: mol_type = other RNA
taggctctgtgatgtgggtggtg

SEQ ID NO: 96202 - RNA, 23 nt, synthetic construct
  source 1..23: mol_type = other RNA
tggttgctgctggggtgtgggaa

SEQ ID NO: 96203 - RNA, 23 nt, synthetic construct
  source 1..23: mol_type = other RNA
ttggggaagggggtgactcggtg

SEQ ID NO: 96204 - RNA, 23 nt, synthetic construct
  source 1..23: mol_type = other RNA
tgtgcgggtcttgctgggtgtgg

SEQ ID NO: 96205 - RNA, 23 nt, synthetic construct
  source 1..23: mol_type = other RNA
tgtgtcaaagtccccgccagagg

SEQ ID NO: 96206 - RNA, 23 nt, synthetic construct
  source 1..23: mol_type = other RNA
tgccgtggatccagtggatgcag

SEQ ID NO: 96207 - RNA, 23 nt, synthetic construct
  source 1..23: mol_type = other RNA
tggccgtggatccagtggatgca

SEQ ID NO: 96208 - RNA, 23 nt, synthetic construct
  source 1..23: mol_type = other RNA
tgttcccggggtggaggacgggg

SEQ ID NO: 96209 - RNA, 23 nt, synthetic construct
  source 1..23: mol_type = other RNA
tgggagggggagctgttcccggg

SEQ ID NO: 96210 - RNA, 23 nt, synthetic construct
  source 1..23: mol_type = other RNA
tgcactgtggaggtgtgggtggt

SEQ ID NO: 96211 - RNA, 23 nt, synthetic construct
  source 1..23: mol_type = other RNA
tagtggctgcagttgtagtggct

SEQ ID NO: 96212 - RNA, 23 nt, synthetic construct
  source 1..23: mol_type = other RNA
tggtgggcaccgtcacggtggct

SEQ ID NO: 96213 - RNA, 23 nt, synthetic construct
  source 1..23: mol_type = other RNA
tccctggactggaggagggagtg

SEQ ID NO: 96214 - RNA, 23 nt, synthetic construct
  source 1..23: mol_type = other RNA
tgtgtggtggctgtgcttctcag

SEQ ID NO: 96215 - RNA, 23 nt, synthetic construct
  source 1..23: mol_type = other RNA
tgggtgtggtggctgtgcttctc

SEQ ID NO: 96216 - RNA, 23 nt, synthetic construct
  source 1..23: mol_type = other RNA
tgaggaggggatggctgtaaagc

SEQ ID NO: 96217 - RNA, 23 nt, synthetic construct
  source 1..23: mol_type = other RNA
tagggtgtggctgtggacatggt

SEQ ID NO: 96218 - RNA, 23 nt, synthetic construct
  source 1..23: mol_type = other RNA
tcagagccggtggccccggttgt

SEQ ID NO: 96219 - RNA, 23 nt, synthetic construct
  source 1..23: mol_type = other RNA
ttggtggtggtggtcagcactct

SEQ ID NO: 96220 - RNA, 23 nt, synthetic construct
  source 1..23: mol_type = other RNA
tgcactgtggaggtgtgggtggt

SEQ ID NO: 96221 - RNA, 23 nt, synthetic construct
  source 1..23: mol_type = other RNA
tagtggctgcagttgtagtggct

SEQ ID NO: 96222 - RNA, 23 nt, synthetic construct
  source 1..23: mol_type = other RNA
tggtgtgagctgttcccagagtg

SEQ ID NO: 96223 - RNA, 23 nt, synthetic construct
  source 1..23: mol_type = other RNA
taaggttggcaggctgctgggga

SEQ ID NO: 96224 - RNA, 23 nt, synthetic construct
  source 1..23: mol_type = other RNA
tgtccagcaggacgacacggttg

SEQ ID NO: 96225 - RNA, 23 nt, synthetic construct
  source 1..23: mol_type = other RNA
tggtccccagcacagacacaagc

SEQ ID NO: 96226 - RNA, 23 nt, synthetic construct
  source 1..23: mol_type = other RNA
tggggctggcagtggggggtgtg

SEQ ID NO: 96227 - RNA, 23 nt, synthetic construct
  source 1..23: mol_type = other RNA
ttgggggtgggtgtgctagacac

SEQ ID NO: 96228 - RNA, 23 nt, synthetic construct
  source 1..23: mol_type = other RNA
tcaaggttgtggcactcagcaaa

SEQ ID NO: 96229 - RNA, 23 nt, synthetic construct
  source 1..23: mol_type = other RNA
tgcggcccctgcagtggtcgctg

SEQ ID NO: 96230 - RNA, 23 nt, synthetic construct
  source 1..23: mol_type = other RNA
tatggggccgcatggcttgtaca

SEQ ID NO: 96231 - RNA, 23 nt, synthetic construct
  source 1..23: mol_type = other RNA
tgagttgcaggtggcaggctgta

SEQ ID NO: 96232 - RNA, 23 nt, synthetic construct
  source 1..23: mol_type = other RNA
ttgaagaggatctggtcctcagg

SEQ ID NO: 96233 - RNA, 23 nt, synthetic construct
  source 1..23: mol_type = other RNA
tcaggggcaggcctgcacgcaga

SEQ ID NO: 96234 - RNA, 23 nt, synthetic construct
  source 1..23: mol_type = other RNA
ttcgggtcccacgcaggggcagg

SEQ ID NO: 96235 - RNA, 23 nt, synthetic construct
  source 1..23: mol_type = other RNA
tagtcgccctcctcctgggtgca

SEQ ID NO: 96236 - RNA, 23 nt, synthetic construct
  source 1..23: mol_type = other RNA
tagctgaggtctgcagcggaagg

SEQ ID NO: 96237 - RNA, 23 nt, synthetic construct
  source 1..23: mol_type = other RNA
tcaggtacacatgtggcagggaa

SEQ ID NO: 96238 - RNA, 23 nt, synthetic construct
  source 1..23: mol_type = other RNA
tcgggcgtgaggcaggcggtctg

SEQ ID NO: 96239 - RNA, 23 nt, synthetic construct
  source 1..23: mol_type = other RNA
tgggcaggagccctcgcagaagg

SEQ ID NO: 96240 - RNA, 23 nt, synthetic construct
  source 1..23: mol_type = other RNA
tctccggggcaggagccctcgca

SEQ ID NO: 96241 - RNA, 23 nt, synthetic construct
  source 1..23: mol_type = other RNA
tctgggcctctgctgagtacttg

SEQ ID NO: 96242 - RNA, 23 nt, synthetic construct
  source 1..23: mol_type = other RNA
tcctgggcctctgctgagtactt

SEQ ID NO: 96243 - RNA, 23 nt, synthetic construct
  source 1..23: mol_type = other RNA
tcctctcctggcagcaggtgcac

SEQ ID NO: 96244 - RNA, 23 nt, synthetic construct
  source 1..23: mol_type = other RNA
tggggtgccacacacaggccggg

SEQ ID NO: 96245 - RNA, 23 nt, synthetic construct
  source 1..23: mol_type = other RNA
tagcaggagcacggagcgcgggg

SEQ ID NO: 96246 - RNA, 23 nt, synthetic construct
  source 1..23: mol_type = other RNA
ttcagagaacacgtagttgcaaa

SEQ ID NO: 96247 - RNA, 23 nt, synthetic construct
  source 1..23: mol_type = other RNA
tagagaacacgtagttgcaaagg

SEQ ID NO: 96248 - RNA, 23 nt, synthetic construct
  source 1..23: mol_type = other RNA
ttgctcagagaacacgtagttgc

SEQ ID NO: 96249 - RNA, 23 nt, synthetic construct
  source 1..23: mol_type = other RNA
tggcagcttagcttcccacccgt

SEQ ID NO: 96250 - RNA, 23 nt, synthetic construct
  source 1..23: mol_type = other RNA
tcagagaacacgtagttgcaaag

SEQ ID NO: 96251 - RNA, 23 nt, synthetic construct
  source 1..23: mol_type = other RNA
tggtcctcgcagagctgcgcgcg

SEQ ID NO: 96252 - RNA, 23 nt, synthetic construct
  source 1..23: mol_type = other RNA
tcctgtgccagggtccagttggg

SEQ ID NO: 96253 - RNA, 23 nt, synthetic construct
  source 1..23: mol_type = other RNA
taggaggccagtgcggctgtaag

SEQ ID NO: 96254 - RNA, 23 nt, synthetic construct
  source 1..23: mol_type = other RNA
ttggtcagcactggggtgatggg

SEQ ID NO: 96255 - RNA, 23 nt, synthetic construct
  source 1..23: mol_type = other RNA
tgcacacgggcaggtggggcagc

SEQ ID NO: 96256 - RNA, 23 nt, synthetic construct
  source 1..23: mol_type = other RNA
tggcgcctgggaaggttgcacca

SEQ ID NO: 96257 - RNA, 23 nt, synthetic construct
  source 1..23: mol_type = other RNA
ttggaaagggctggagtcgagtg

SEQ ID NO: 96258 - RNA, 23 nt, synthetic construct
  source 1..23: mol_type = other RNA
tggtggagccggtggctgtgatc

SEQ ID NO: 96259 - RNA, 23 nt, synthetic construct
  source 1..23: mol_type = other RNA
ttctccagctctgtggtcggtgg

SEQ ID NO: 96260 - RNA, 23 nt, synthetic construct
  source 1..23: mol_type = other RNA
ttgctggggggcagggatcgccc

SEQ ID NO: 96261 - RNA, 23 nt, synthetic construct
  source 1..23: mol_type = other RNA
tgtggtggccgtggtgttcggca

SEQ ID NO: 96262 - RNA, 23 nt, synthetic construct
  source 1..23: mol_type = other RNA
tggagccggtggctgtgatcgta

SEQ ID NO: 96263 - RNA, 23 nt, synthetic construct
  source 1..23: mol_type = other RNA
tgtggtggccgtggtgttcggca

SEQ ID NO: 96264 - RNA, 23 nt, synthetic construct
  source 1..23: mol_type = other RNA
tgtggtggccgtggtgttcggca

SEQ ID NO: 96265 - RNA, 23 nt, synthetic construct
  source 1..23: mol_type = other RNA
tggacagggtggccgtggatcca

SEQ ID NO: 96266 - RNA, 23 nt, synthetic construct
  source 1..23: mol_type = other RNA
tactggggctcacagcccatggt

SEQ ID NO: 96267 - RNA, 23 nt, synthetic construct
  source 1..23: mol_type = other RNA
tactggggctcacagcccatggt

SEQ ID NO: 96268 - RNA, 23 nt, synthetic construct
  source 1..23: mol_type = other RNA
tatggtgttcggcactgggggtg

SEQ ID NO: 96269 - RNA, 23 nt, synthetic construct
  source 1..23: mol_type = other RNA
taagggcgcctgggaaggttgca

SEQ ID NO: 96270 - RNA, 23 nt, synthetic construct
  source 1..23: mol_type = other RNA
tgatgtagtccccgctctgctcc

SEQ ID NO: 96271 - RNA, 23 nt, synthetic construct
  source 1..23: mol_type = other RNA
tagtcggggcccagcagccatcc

SEQ ID NO: 96272 - RNA, 23 nt, synthetic construct
  source 1..23: mol_type = other RNA
tgggcacacaggcaggctctggg

SEQ ID NO: 96273 - RNA, 23 nt, synthetic construct
  source 1..23: mol_type = other RNA
tggcctcgttgtgcacacagggg

SEQ ID NO: 96274 - RNA, 23 nt, synthetic construct
  source 1..23: mol_type = other RNA
ttggcctcgttgtgcacacaggg

SEQ ID NO: 96275 - RNA, 23 nt, synthetic construct
  source 1..23: mol_type = other RNA
ttgcacgcagatgcccatgtgtg

SEQ ID NO: 96276 - RNA, 23 nt, synthetic construct
  source 1..23: mol_type = other RNA
tgcactgtggcggtgtgggtggt

SEQ ID NO: 96277 - RNA, 23 nt, synthetic construct
  source 1..23: mol_type = other RNA
tgcactgtggcggtgtgggtggt

SEQ ID NO: 96278 - RNA, 23 nt, synthetic construct
  source 1..23: mol_type = other RNA
tcactgtggcggtgtgggtggtc

SEQ ID NO: 96279 - RNA, 23 nt, synthetic construct
  source 1..23: mol_type = other RNA
tttgaggaggggttggtggtgga

SEQ ID NO: 96280 - RNA, 23 nt, synthetic construct
  source 1..23: mol_type = other RNA
tttgaggaggggttggtggtgga

SEQ ID NO: 96281 - RNA, 23 nt, synthetic construct
  source 1..23: mol_type = other RNA
tcactgtggcggtgtgggtggtc

SEQ ID NO: 96282 - RNA, 23 nt, synthetic construct
  source 1..23: mol_type = other RNA
tttgaggaggggttggtggtgga

SEQ ID NO: 96283 - RNA, 23 nt, synthetic construct
  source 1..23: mol_type = other RNA
tttgaggaggggttggtggtgga

SEQ ID NO: 96284 - RNA, 23 nt, synthetic construct
  source 1..23: mol_type = other RNA
tttgaggaggggttggtggtgga

SEQ ID NO: 96285 - RNA, 23 nt, synthetic construct
  source 1..23: mol_type = other RNA
tacgcgtcgttcacgcaggcctc

SEQ ID NO: 96286 - RNA, 23 nt, synthetic construct
  source 1..23: mol_type = other RNA
tgttcacgcaggcctcgtagtac

SEQ ID NO: 96287 - RNA, 23 nt, synthetic construct
  source 1..23: mol_type = other RNA
tggaggtgtggacagtctctgga

SEQ ID NO: 96288 - RNA, 23 nt, synthetic construct
  source 1..23: mol_type = other RNA
tggaggtgtggacagtctctgga

SEQ ID NO: 96289 - RNA, 23 nt, synthetic construct
  source 1..23: mol_type = other RNA
tcacgcgtcgttcacgcaggcct

SEQ ID NO: 96290 - RNA, 23 nt, synthetic construct
  source 1..23: mol_type = other RNA
tcgcgtcgttcacgcaggcctcg

SEQ ID NO: 96291 - RNA, 23 nt, synthetic construct
  source 1..23: mol_type = other RNA
ttggccatccccgtaggccacgc

SEQ ID NO: 96292 - RNA, 23 nt, synthetic construct
  source 1..23: mol_type = other RNA
tctccgtgggcccatccaacttc

SEQ ID NO: 96293 - RNA, 23 nt, synthetic construct
  source 1..23: mol_type = other RNA
ttggttctggttgaagttcccac

SEQ ID NO: 96294 - RNA, 23 nt, synthetic construct
  source 1..23: mol_type = other RNA
tggacagcgcggcgcacaggcag

SEQ ID NO: 96295 - RNA, 23 nt, synthetic construct
  source 1..23: mol_type = other RNA
tcgcaggcctcgtagtacttggt

SEQ ID NO: 96296 - RNA, 23 nt, synthetic construct
  source 1..23: mol_type = other RNA
tttcacgcaggcctcgtagtact

SEQ ID NO: 96297 - RNA, 23 nt, synthetic construct
  source 1..23: mol_type = other RNA
ttccaggctgcattccacgacct

SEQ ID NO: 96298 - RNA, 23 nt, synthetic construct
  source 1..23: mol_type = other RNA
ttccaggctgcattccacgacct

SEQ ID NO: 96299 - RNA, 23 nt, synthetic construct
  source 1..23: mol_type = other RNA
ttccaggctgcattccacgacct

SEQ ID NO: 96300 - RNA, 23 nt, synthetic construct
  source 1..23: mol_type = other RNA
ttccaggctgcattccacgacct

SEQ ID NO: 96301 - RNA, 23 nt, synthetic construct
  source 1..23: mol_type = other RNA
tgctccgtgggcccatccaactt

SEQ ID NO: 96302 - RNA, 23 nt, synthetic construct
  source 1..23: mol_type = other RNA
tcagggtgatgttggctgccgac

SEQ ID NO: 96303 - RNA, 23 nt, synthetic construct
  source 1..23: mol_type = other RNA
taagttcccacacaggccgcaca

SEQ ID NO: 96304 - RNA, 23 nt, synthetic construct
  source 1..23: mol_type = other RNA
tgaagttcccacacaggccgcac

SEQ ID NO: 96305 - RNA, 23 nt, synthetic construct
  source 1..23: mol_type = other RNA
tagcgcggcgcacaggcagtcct

SEQ ID NO: 96306 - RNA, 23 nt, synthetic construct
  source 1..23: mol_type = other RNA
tcagcgcggcgcacaggcagtcc

SEQ ID NO: 96307 - RNA, 23 nt, synthetic construct
  source 1..23: mol_type = other RNA
tacagcgcggcgcacaggcagtc

SEQ ID NO: 96308 - RNA, 23 nt, synthetic construct
  source 1..23: mol_type = other RNA
taggacagcgcggcgcacaggca

SEQ ID NO: 96309 - RNA, 23 nt, synthetic construct
  source 1..23: mol_type = other RNA
tggaggacagcgcggcgcacagg

SEQ ID NO: 96310 - RNA, 23 nt, synthetic construct
  source 1..23: mol_type = other RNA
ttggcggcacaggcgtgcacata

SEQ ID NO: 96311 - RNA, 23 nt, synthetic construct
  source 1..23: mol_type = other RNA
tttggcggcacaggcgtgcacat

SEQ ID NO: 96312 - RNA, 23 nt, synthetic construct
  source 1..23: mol_type = other RNA
tgcccttggcggcacaggcgtgc

SEQ ID NO: 96313 - RNA, 23 nt, synthetic construct
  source 1..23: mol_type = other RNA
ttccaggcttgtaggtggcctcg

SEQ ID NO: 96314 - RNA, 23 nt, synthetic construct
  source 1..23: mol_type = other RNA
tcgttcacgcaggcctcgtagta

SEQ ID NO: 96315 - RNA, 23 nt, synthetic construct
  source 1..23: mol_type = other RNA
ttcgttcacgcaggcctcgtagt

SEQ ID NO: 96316 - RNA, 23 nt, synthetic construct
  source 1..23: mol_type = other RNA
tgcgtcgttcacgcaggcctcgt

SEQ ID NO: 96317 - RNA, 23 nt, synthetic construct
  source 1..23: mol_type = other RNA
tgtccacgtcaaaccactctgtc

SEQ ID NO: 96318 - RNA, 23 nt, synthetic construct
  source 1..23: mol_type = other RNA
tagtccacgtcaaaccactctgt

SEQ ID NO: 96319 - RNA, 23 nt, synthetic construct
  source 1..23: mol_type = other RNA
taagtccacgtcaaaccactctg

SEQ ID NO: 96320 - RNA, 23 nt, synthetic construct
  source 1..23: mol_type = other RNA
tgctgaaaccgctgctcaccgga

SEQ ID NO: 96321 - RNA, 23 nt, synthetic construct
  source 1..23: mol_type = other RNA
tcagtgccgggcgtagttctcat

SEQ ID NO: 96322 - RNA, 23 nt, synthetic construct
  source 1..23: mol_type = other RNA
ttgcggaaggggttggccgtgca

SEQ ID NO: 96323 - RNA, 23 nt, synthetic construct
  source 1..23: mol_type = other RNA
tagcaccagtgccgggcgtagtt

SEQ ID NO: 96324 - RNA, 23 nt, synthetic construct
  source 1..23: mol_type = other RNA
tcagtcctcgctccgctcacagt

SEQ ID NO: 96325 - RNA, 23 nt, synthetic construct
  source 1..23: mol_type = other RNA
tgcggcgcacaggcagtcctcgc

SEQ ID NO: 96326 - RNA, 23 nt, synthetic construct
  source 1..23: mol_type = other RNA
taggatgctgcactgcttctggg

SEQ ID NO: 96327 - RNA, 23 nt, synthetic construct
  source 1..23: mol_type = other RNA
tctcacacttcggttgacagcgg

SEQ ID NO: 96328 - RNA, 23 nt, synthetic construct
  source 1..23: mol_type = other RNA
tacctccggttcctgcaggtgca

SEQ ID NO: 96329 - RNA, 23 nt, synthetic construct
  source 1..23: mol_type = other RNA
tactgttgggatcggtcaggcgc

SEQ ID NO: 96330 - RNA, 23 nt, synthetic construct
  source 1..23: mol_type = other RNA
tcagtgcggctgtaaggcagctc

SEQ ID NO: 96331 - RNA, 23 nt, synthetic construct
  source 1..23: mol_type = other RNA
tcgtgtccccgccgtccaggctg

SEQ ID NO: 96332 - RNA, 23 nt, synthetic construct
  source 1..23: mol_type = other RNA
tcctgtagttgtagcacatcttg

SEQ ID NO: 96333 - RNA, 23 nt, synthetic construct
  source 1..23: mol_type = other RNA
ttgtgctgaaacagcccacgtcc

SEQ ID NO: 96334 - RNA, 23 nt, synthetic construct
  source 1..23: mol_type = other RNA
ttgctgaaaccgctgctcaccgg

SEQ ID NO: 96335 - RNA, 23 nt, synthetic construct
  source 1..23: mol_type = other RNA
tagctgcgtgtagatggagttga

SEQ ID NO: 96336 - RNA, 23 nt, synthetic construct
  source 1..23: mol_type = other RNA
tctctggttgttggtgcaggtgc

SEQ ID NO: 96337 - RNA, 23 nt, synthetic construct
  source 1..23: mol_type = other RNA
ttgcccttgtagtcctggtgcag

SEQ ID NO: 96338 - RNA, 23 nt, synthetic construct
  source 1..23: mol_type = other RNA
tgctggtctcggcctgagaggtg

SEQ ID NO: 96339 - RNA, 23 nt, synthetic construct
  source 1..23: mol_type = other RNA
tcagcagaacacacggatttcat

SEQ ID NO: 96340 - RNA, 23 nt, synthetic construct
  source 1..23: mol_type = other RNA
tcagcagaacacacggatttcat

SEQ ID NO: 96341 - RNA, 23 nt, synthetic construct
  source 1..23: mol_type = other RNA
tcagcagaacacacggatttcat

SEQ ID NO: 96342 - RNA, 23 nt, synthetic construct
  source 1..23: mol_type = other RNA
tcagcagaacacacggatttcat

SEQ ID NO: 96343 - RNA, 23 nt, synthetic construct
  source 1..23: mol_type = other RNA
tccctgatcttatcgtaggactc

SEQ ID NO: 96344 - RNA, 23 nt, synthetic construct
  source 1..23: mol_type = other RNA
tggctcaggctggggaagacagt

SEQ ID NO: 96345 - RNA, 23 nt, synthetic construct
  source 1..23: mol_type = other RNA
tgctggtagtgccactcacagcc

SEQ ID NO: 96346 - RNA, 23 nt, synthetic construct
  source 1..23: mol_type = other RNA
tcagtgcccactggggttccggc

SEQ ID NO: 96347 - RNA, 23 nt, synthetic construct
  source 1..23: mol_type = other RNA
tatggctgtaaagctggtagctg

SEQ ID NO: 96348 - RNA, 23 nt, synthetic construct
  source 1..23: mol_type = other RNA
tatggctgtaaagctggtagctg

SEQ ID NO: 96349 - RNA, 23 nt, synthetic construct
  source 1..23: mol_type = other RNA
tatggctgtaaagctggtagctg

SEQ ID NO: 96350 - RNA, 23 nt, synthetic construct
  source 1..23: mol_type = other RNA
tcccttggcggcacaggcgtgca

SEQ ID NO: 96351 - RNA, 23 nt, synthetic construct
  source 1..23: mol_type = other RNA
tactggccctcggtgttgttgtg

SEQ ID NO: 96352 - RNA, 23 nt, synthetic construct
  source 1..23: mol_type = other RNA
tacgcaggcctcgtagtacttgg

SEQ ID NO: 96353 - RNA, 23 nt, synthetic construct
  source 1..23: mol_type = other RNA
tctggccctcggtgttgttgtgg

SEQ ID NO: 96354 - RNA, 23 nt, synthetic construct
  source 1..23: mol_type = other RNA
tagttcccacacaggccgcacat

SEQ ID NO: 96355 - RNA, 23 nt, synthetic construct
  source 1..23: mol_type = other RNA
ttcctcgctccgctcacagttgc

SEQ ID NO: 96356 - RNA, 23 nt, synthetic construct
  source 1..23: mol_type = other RNA
tccttggcggcacaggcgtgcac

SEQ ID NO: 96357 - RNA, 23 nt, synthetic construct
  source 1..23: mol_type = other RNA
tcacgaagagcttgatggccttg

SEQ ID NO: 96358 - RNA, 23 nt, synthetic construct
  source 1..23: mol_type = other RNA
tagggctggtagtgccactcaca

SEQ ID NO: 96359 - RNA, 23 nt, synthetic construct
  source 1..23: mol_type = other RNA
tcactggccctcggtgttgttgt

SEQ ID NO: 96360 - RNA, 23 nt, synthetic construct
  source 1..23: mol_type = other RNA
tgttcccacacaggccgcacatc

SEQ ID NO: 96361 - RNA, 23 nt, synthetic construct
  source 1..23: mol_type = other RNA
tgccttccaggtgttggcgaagg

SEQ ID NO: 96362 - RNA, 23 nt, synthetic construct
  source 1..23: mol_type = other RNA
tgctccgctcacagttgcaggtg

SEQ ID NO: 96363 - RNA, 23 nt, synthetic construct
  source 1..23: mol_type = other RNA
tcgctccgctcacagttgcaggt

SEQ ID NO: 96364 - RNA, 23 nt, synthetic construct
  source 1..23: mol_type = other RNA
ttcgctccgctcacagttgcagg

SEQ ID NO: 96365 - RNA, 23 nt, synthetic construct
  source 1..23: mol_type = other RNA
tctcgctccgctcacagttgcag

SEQ ID NO: 96366 - RNA, 23 nt, synthetic construct
  source 1..23: mol_type = other RNA
tcctcgctccgctcacagttgca

SEQ ID NO: 96367 - RNA, 23 nt, synthetic construct
  source 1..23: mol_type = other RNA
tagtcctcgctccgctcacagtt

SEQ ID NO: 96368 - RNA, 23 nt, synthetic construct
  source 1..23: mol_type = other RNA
tgcagtcctcgctccgctcacag

SEQ ID NO: 96369 - RNA, 23 nt, synthetic construct
  source 1..23: mol_type = other RNA
tcggcgcacaggcagtcctcgct

SEQ ID NO: 96370 - RNA, 23 nt, synthetic construct
  source 1..23: mol_type = other RNA
tcgcccttggcggcacaggcgtg

SEQ ID NO: 96371 - RNA, 23 nt, synthetic construct
  source 1..23: mol_type = other RNA
tccacgaagagcttgatggcctt

SEQ ID NO: 96372 - RNA, 23 nt, synthetic construct
  source 1..23: mol_type = other RNA
ttggcaaagtcattgatggcatt

SEQ ID NO: 96373 - RNA, 23 nt, synthetic construct
  source 1..23: mol_type = other RNA
tgttggccgtgcaggggtccttg

SEQ ID NO: 96374 - RNA, 23 nt, synthetic construct
  source 1..23: mol_type = other RNA
tgggttggccgtgcaggggtcct

SEQ ID NO: 96375 - RNA, 23 nt, synthetic construct
  source 1..23: mol_type = other RNA
tttgcggaaggggttggccgtgc

SEQ ID NO: 96376 - RNA, 23 nt, synthetic construct
  source 1..23: mol_type = other RNA
tacttgcggaaggggttggccgt

SEQ ID NO: 96377 - RNA, 23 nt, synthetic construct
  source 1..23: mol_type = other RNA
taggacttgcggaaggggttggc

SEQ ID NO: 96378 - RNA, 23 nt, synthetic construct
  source 1..23: mol_type = other RNA
ttctgggcccaggacttgcggaa

SEQ ID NO: 96379 - RNA, 23 nt, synthetic construct
  source 1..23: mol_type = other RNA
tgccacagccgtgcagaaacact

SEQ ID NO: 96380 - RNA, 23 nt, synthetic construct
  source 1..23: mol_type = other RNA
tcagggctggtagtgccactcac

SEQ ID NO: 96381 - RNA, 23 nt, synthetic construct
  source 1..23: mol_type = other RNA
tccccgcagggctggtagtgcca

SEQ ID NO: 96382 - RNA, 23 nt, synthetic construct
  source 1..23: mol_type = other RNA
ttgcagttctccagggtccaggt

SEQ ID NO: 96383 - RNA, 23 nt, synthetic construct
  source 1..23: mol_type = other RNA
tcaccgtgcagttctccagggtc

SEQ ID NO: 96384 - RNA, 23 nt, synthetic construct
  source 1..23: mol_type = other RNA
tggccctcggtgttgttgtggaa

SEQ ID NO: 96385 - RNA, 23 nt, synthetic construct
  source 1..23: mol_type = other RNA
ttggccctcggtgttgttgtgga

SEQ ID NO: 96386 - RNA, 23 nt, synthetic construct
  source 1..23: mol_type = other RNA
tgcactggccctcggtgttgttg

SEQ ID NO: 96387 - RNA, 23 nt, synthetic construct
  source 1..23: mol_type = other RNA
tcgcactggccctcggtgttgtt

SEQ ID NO: 96388 - RNA, 23 nt, synthetic construct
  source 1..23: mol_type = other RNA
tccgcactggccctcggtgttgt

SEQ ID NO: 96389 - RNA, 23 nt, synthetic construct
  source 1..23: mol_type = other RNA
tgtgccgcactggccctcggtgt

SEQ ID NO: 96390 - RNA, 23 nt, synthetic construct
  source 1..23: mol_type = other RNA
tctggctcagcatcagatcacag

SEQ ID NO: 96391 - RNA, 23 nt, synthetic construct
  source 1..23: mol_type = other RNA
tcttgtactcaaagccctgggga

SEQ ID NO: 96392 - RNA, 23 nt, synthetic construct
  source 1..23: mol_type = other RNA
tgtcagcctggttctggttgaag

SEQ ID NO: 96393 - RNA, 23 nt, synthetic construct
  source 1..23: mol_type = other RNA
tgtcctctccgttccacaggaat

SEQ ID NO: 96394 - RNA, 23 nt, synthetic construct
  source 1..23: mol_type = other RNA
tgcgcggcgcacaggcagtcctc

SEQ ID NO: 96395 - RNA, 23 nt, synthetic construct
  source 1..23: mol_type = other RNA
tccagtcactgcacactccccgg

SEQ ID NO: 96396 - RNA, 23 nt, synthetic construct
  source 1..23: mol_type = other RNA
tgtgcagacgccgtccctccagt

SEQ ID NO: 96397 - RNA, 23 nt, synthetic construct
  source 1..23: mol_type = other RNA
ttgggcaggatgcaggctgtggg

SEQ ID NO: 96398 - RNA, 23 nt, synthetic construct
  source 1..23: mol_type = other RNA
ttaggaggacagcgcggcgcaca

SEQ ID NO: 96399 - RNA, 23 nt, synthetic construct
  source 1..23: mol_type = other RNA
taccaggaagatccccatgtagc

SEQ ID NO: 96400 - RNA, 23 nt, synthetic construct
  source 1..23: mol_type = other RNA
tgaccaggaagatccccatgtag

SEQ ID NO: 96401 - RNA, 23 nt, synthetic construct
  source 1..23: mol_type = other RNA
tgcagccacactgggccacgcac

SEQ ID NO: 96402 - RNA, 23 nt, synthetic construct
  source 1..23: mol_type = other RNA
tcagcagccggttttcctgaggc

SEQ ID NO: 96403 - RNA, 23 nt, synthetic construct
  source 1..23: mol_type = other RNA
tggaagaggctgtagggcagccg

SEQ ID NO: 96404 - RNA, 23 nt, synthetic construct
  source 1..23: mol_type = other RNA
tggctcagcatcagatcacagag

SEQ ID NO: 96405 - RNA, 23 nt, synthetic construct
  source 1..23: mol_type = other RNA
tgaccctgcccttgtagtcctgg

SEQ ID NO: 96406 - RNA, 23 nt, synthetic construct
  source 1..23: mol_type = other RNA
tctgcaggttcccaaactggagc

SEQ ID NO: 96407 - RNA, 23 nt, synthetic construct
  source 1..23: mol_type = other RNA
tctccgctcacagttgcaggtgt

SEQ ID NO: 96408 - RNA, 23 nt, synthetic construct
  source 1..23: mol_type = other RNA
ttgggcgtaggcagccacagccg

SEQ ID NO: 96409 - RNA, 23 nt, synthetic construct
  source 1..23: mol_type = other RNA
tactctgtccactgacaccgggg

SEQ ID NO: 96410 - RNA, 23 nt, synthetic construct
  source 1..23: mol_type = other RNA
taggagccagcacggtgccgtga

SEQ ID NO: 96411 - RNA, 23 nt, synthetic construct
  source 1..23: mol_type = other RNA
tctggaccagcggcagacctcgc

SEQ ID NO: 96412 - RNA, 23 nt, synthetic construct
  source 1..23: mol_type = other RNA
ttggcccaactcccgcaggggga

SEQ ID NO: 96413 - RNA, 23 nt, synthetic construct
  source 1..23: mol_type = other RNA
ttggcccaactcccgcaggggga

SEQ ID NO: 96414 - RNA, 23 nt, synthetic construct
  source 1..23: mol_type = other RNA
ttggcccaactcccgcaggggga

SEQ ID NO: 96415 - RNA, 23 nt, synthetic construct
  source 1..23: mol_type = other RNA
taaggtgaatggcgttgtggctg

SEQ ID NO: 96416 - RNA, 23 nt, synthetic construct
  source 1..23: mol_type = other RNA
tagcaccgtgcctggggggcaga

SEQ ID NO: 96417 - RNA, 23 nt, synthetic construct
  source 1..23: mol_type = other RNA
tcacgcaggcctcgtagtacttg

SEQ ID NO: 96418 - RNA, 23 nt, synthetic construct
  source 1..23: mol_type = other RNA
tgggcccaggacttgcggaaggg

SEQ ID NO: 96419 - RNA, 23 nt, synthetic construct
  source 1..23: mol_type = other RNA
tggctggtagtgccactcacagc

SEQ ID NO: 96420 - RNA, 23 nt, synthetic construct
  source 1..23: mol_type = other RNA
tgggctggtagtgccactcacag

SEQ ID NO: 96421 - RNA, 23 nt, synthetic construct
  source 1..23: mol_type = other RNA
tgccgcactggccctcggtgttg

SEQ ID NO: 96422 - RNA, 23 nt, synthetic construct
  source 1..23: mol_type = other RNA
ttgccgcactggccctcggtgtt

SEQ ID NO: 96423 - RNA, 23 nt, synthetic construct
  source 1..23: mol_type = other RNA
tggcagaagcagccctccgccat

SEQ ID NO: 96424 - RNA, 23 nt, synthetic construct
  source 1..23: mol_type = other RNA
tttgtactcaaagccctggggac

SEQ ID NO: 96425 - RNA, 23 nt, synthetic construct
  source 1..23: mol_type = other RNA
tggagtagagaagtgggagctgg

SEQ ID NO: 96426 - RNA, 23 nt, synthetic construct
  source 1..23: mol_type = other RNA
ttttggtcaaacaggatcaggcc

SEQ ID NO: 96427 - RNA, 23 nt, synthetic construct
  source 1..23: mol_type = other RNA
ttcatagttgaagcacatcttga

SEQ ID NO: 96428 - RNA, 23 nt, synthetic construct
  source 1..23: mol_type = other RNA
ttcatagttgaagcacatcttga

SEQ ID NO: 96429 - RNA, 23 nt, synthetic construct
  source 1..23: mol_type = other RNA
ttcatagttgaagcacatcttga

SEQ ID NO: 96430 - RNA, 23 nt, synthetic construct
  source 1..23: mol_type = other RNA
ttcatagttgaagcacatcttga

SEQ ID NO: 96431 - RNA, 23 nt, synthetic construct
  source 1..23: mol_type = other RNA
ttccggaggcactcggccccagg

SEQ ID NO: 96432 - RNA, 23 nt, synthetic construct
  source 1..23: mol_type = other RNA
tgcacgcagatgcccatgtgtgc

SEQ ID NO: 96433 - RNA, 23 nt, synthetic construct
  source 1..23: mol_type = other RNA
tggagacagtcgtccctctggtt

SEQ ID NO: 96434 - RNA, 23 nt, synthetic construct
  source 1..23: mol_type = other RNA
taaggtgggccacaggctctccc

SEQ ID NO: 96435 - RNA, 23 nt, synthetic construct
  source 1..23: mol_type = other RNA
ttccagtgcgtcccccaccacgg

SEQ ID NO: 96436 - RNA, 23 nt, synthetic construct
  source 1..23: mol_type = other RNA
ttcacagggctggctcgggtccg

SEQ ID NO: 96437 - RNA, 23 nt, synthetic construct
  source 1..23: mol_type = other RNA
taaggtgggacagcagtcgccct

SEQ ID NO: 96438 - RNA, 23 nt, synthetic construct
  source 1..23: mol_type = other RNA
tggcagtggccgtagttgcagca

SEQ ID NO: 96439 - RNA, 23 nt, synthetic construct
  source 1..23: mol_type = other RNA
tggcagtggccgtagttgcagca

SEQ ID NO: 96440 - RNA, 23 nt, synthetic construct
  source 1..23: mol_type = other RNA
tggcagtggccgtagttgcagca

SEQ ID NO: 96441 - RNA, 23 nt, synthetic construct
  source 1..23: mol_type = other RNA
tggcagtggccgtagttgcagca

SEQ ID NO: 96442 - RNA, 23 nt, synthetic construct
  source 1..23: mol_type = other RNA
ttcatagtggaagtcacagggct

SEQ ID NO: 96443 - RNA, 23 nt, synthetic construct
  source 1..23: mol_type = other RNA
taaggtcttgtagtggaagtcac

SEQ ID NO: 96444 - RNA, 23 nt, synthetic construct
  source 1..23: mol_type = other RNA
tcgaaggtcttgtagtggaagtc

SEQ ID NO: 96445 - RNA, 23 nt, synthetic construct
  source 1..23: mol_type = other RNA
ttcgaaggtcttgtagtggaagt

SEQ ID NO: 96446 - RNA, 23 nt, synthetic construct
  source 1..23: mol_type = other RNA
tctcattctccacactgagggag

SEQ ID NO: 96447 - RNA, 23 nt, synthetic construct
  source 1..23: mol_type = other RNA
tggcagtctctggagtggaggag

SEQ ID NO: 96448 - RNA, 23 nt, synthetic construct
  source 1..23: mol_type = other RNA
tggcagtctctggagtggaggag

SEQ ID NO: 96449 - RNA, 23 nt, synthetic construct
  source 1..23: mol_type = other RNA
tatgacaacacgggtgaccacag

SEQ ID NO: 96450 - RNA, 23 nt, synthetic construct
  source 1..23: mol_type = other RNA
ttagatgacttccccgggcgaga

SEQ ID NO: 96451 - RNA, 23 nt, synthetic construct
  source 1..23: mol_type = other RNA
taggtagtattgttgcaggcatc

SEQ ID NO: 96452 - RNA, 23 nt, synthetic construct
  source 1..23: mol_type = other RNA
taacaaagctcacgcgccgggtg

SEQ ID NO: 96453 - RNA, 23 nt, synthetic construct
  source 1..23: mol_type = other RNA
tgagaacccgcagctcgtagtcg

SEQ ID NO: 96454 - RNA, 23 nt, synthetic construct
  source 1..23: mol_type = other RNA
tgcatccaccacgtaggcgtagc

SEQ ID NO: 96455 - RNA, 23 nt, synthetic construct
  source 1..23: mol_type = other RNA
tctggctggccatcgggcgtgag

SEQ ID NO: 96456 - RNA, 23 nt, synthetic construct
  source 1..23: mol_type = other RNA
tcgtcgccgtcgaaggtcttgta

SEQ ID NO: 96457 - RNA, 23 nt, synthetic construct
  source 1..23: mol_type = other RNA
tcgccgtcgaaggtcttgtagtg

SEQ ID NO: 96458 - RNA, 23 nt, synthetic construct
  source 1..23: mol_type = other RNA
tgacgtcgccgtcgaaggtcttg

SEQ ID NO: 96459 - RNA, 23 nt, synthetic construct
  source 1..23: mol_type = other RNA
tggaagcggaagacgtcgccgtc

SEQ ID NO: 96460 - RNA, 23 nt, synthetic construct
  source 1..23: mol_type = other RNA
tgacgttggccacaggctttggg

SEQ ID NO: 96461 - RNA, 23 nt, synthetic construct
  source 1..23: mol_type = other RNA
tgccatcctttctgctgtcgggg

SEQ ID NO: 96462 - RNA, 23 nt, synthetic construct
  source 1..23: mol_type = other RNA
tttggccatgtccttgcaactgg

SEQ ID NO: 96463 - RNA, 23 nt, synthetic construct
  source 1..23: mol_type = other RNA
tagatgacttccccgggcgagaa

SEQ ID NO: 96464 - RNA, 23 nt, synthetic construct
  source 1..23: mol_type = other RNA
tgggcagcaggggttctcggccc

SEQ ID NO: 96465 - RNA, 23 nt, synthetic construct
  source 1..23: mol_type = other RNA
tggggcagcaggggttctcggcc

SEQ ID NO: 96466 - RNA, 23 nt, synthetic construct
  source 1..23: mol_type = other RNA
tggcgcaggcggccaggtacgca

SEQ ID NO: 96467 - RNA, 23 nt, synthetic construct
  source 1..23: mol_type = other RNA
tggggcagtcctcctcggcaatg

SEQ ID NO: 96468 - RNA, 23 nt, synthetic construct
  source 1..23: mol_type = other RNA
tccgtgggtggtgttgtccccac

SEQ ID NO: 96469 - RNA, 23 nt, synthetic construct
  source 1..23: mol_type = other RNA
tcggcgaaggtggggccgtggag

SEQ ID NO: 96470 - RNA, 23 nt, synthetic construct
  source 1..23: mol_type = other RNA
tcttccccacctgctcacggttc

SEQ ID NO: 96471 - RNA, 23 nt, synthetic construct
  source 1..23: mol_type = other RNA
tcttccccacctgctcacggttc

SEQ ID NO: 96472 - RNA, 23 nt, synthetic construct
  source 1..23: mol_type = other RNA
tcttccccacctgctcacggttc

SEQ ID NO: 96473 - RNA, 23 nt, synthetic construct
  source 1..23: mol_type = other RNA
tcttccccacctgctcacggttc

SEQ ID NO: 96474 - RNA, 23 nt, synthetic construct
  source 1..23: mol_type = other RNA
tgtccacgtggtccacagggtgg

SEQ ID NO: 96475 - RNA, 23 nt, synthetic construct
  source 1..23: mol_type = other RNA
ttcaccactttgggggtgtgagc

SEQ ID NO: 96476 - RNA, 23 nt, synthetic construct
  source 1..23: mol_type = other RNA
tcatagtggccatggtggtcacc

SEQ ID NO: 96477 - RNA, 23 nt, synthetic construct
  source 1..23: mol_type = other RNA
ttgcaggggtgcgggtggtcccc

SEQ ID NO: 96478 - RNA, 23 nt, synthetic construct
  source 1..23: mol_type = other RNA
tgtagatgacttccccgggcgag

SEQ ID NO: 96479 - RNA, 23 nt, synthetic construct
  source 1..23: mol_type = other RNA
ttgtagatgacttccccgggcga

SEQ ID NO: 96480 - RNA, 23 nt, synthetic construct
  source 1..23: mol_type = other RNA
tttgtagatgacttccccgggcg

SEQ ID NO: 96481 - RNA, 23 nt, synthetic construct
  source 1..23: mol_type = other RNA
tggacacatctgggcaggatgca

SEQ ID NO: 96482 - RNA, 23 nt, synthetic construct
  source 1..23: mol_type = other RNA
tggggcaggagccctcgcagaag

SEQ ID NO: 96483 - RNA, 23 nt, synthetic construct
  source 1..23: mol_type = other RNA
tttgttcagacttggggtagtcc

SEQ ID NO: 96484 - RNA, 23 nt, synthetic construct
  source 1..23: mol_type = other RNA
tggcagttctcgttgtccgtcag

SEQ ID NO: 96485 - RNA, 23 nt, synthetic construct
  source 1..23: mol_type = other RNA
ttgctgagtacttggacgctccg

SEQ ID NO: 96486 - RNA, 23 nt, synthetic construct
  source 1..23: mol_type = other RNA
ttgacctggccgttgcgacctca

SEQ ID NO: 96487 - RNA, 23 nt, synthetic construct
  source 1..23: mol_type = other RNA
tggggcactcctgggcgggcaca

SEQ ID NO: 96488 - RNA, 23 nt, synthetic construct
  source 1..23: mol_type = other RNA
tggcaggcctgggcgtaggcagc

SEQ ID NO: 96489 - RNA, 23 nt, synthetic construct
  source 1..23: mol_type = other RNA
tccttcaaagctgtagcgatcgc

SEQ ID NO: 96490 - RNA, 23 nt, synthetic construct
  source 1..23: mol_type = other RNA
ttgaccttgatgtagtccccgct

SEQ ID NO: 96491 - RNA, 23 nt, synthetic construct
  source 1..23: mol_type = other RNA
tattgcaccgttgggtcctgggt

SEQ ID NO: 96492 - RNA, 23 nt, synthetic construct
  source 1..23: mol_type = other RNA
tagcagccggttttcctgaggct

SEQ ID NO: 96493 - RNA, 23 nt, synthetic construct
  source 1..23: mol_type = other RNA
tctggctcgggtccgacactttg

SEQ ID NO: 96494 - RNA, 23 nt, synthetic construct
  source 1..23: mol_type = other RNA
ttccagtggttgcggtcgtagtg

SEQ ID NO: 96495 - RNA, 23 nt, synthetic construct
  source 1..23: mol_type = other RNA
tggaatgtccacacgcatggtgg

SEQ ID NO: 96496 - RNA, 23 nt, synthetic construct
  source 1..23: mol_type = other RNA
ttgtgctagaggagggtgttgcc

SEQ ID NO: 96497 - RNA, 23 nt, synthetic construct
  source 1..23: mol_type = other RNA
ttgtgctgggacggtccacgtgg

SEQ ID NO: 96498 - RNA, 23 nt, synthetic construct
  source 1..23: mol_type = other RNA
tatggcagccggctcggtcggtc

SEQ ID NO: 96499 - RNA, 23 nt, synthetic construct
  source 1..23: mol_type = other RNA
tcccctgcagtggtcgctgatgc

SEQ ID NO: 96500 - RNA, 23 nt, synthetic construct
  source 1..23: mol_type = other RNA
tcccctgcagtggtcgtcactgc

SEQ ID NO: 96501 - RNA, 23 nt, synthetic construct
  source 1..23: mol_type = other RNA
taaggtgtaagaggtgccgtcaa

SEQ ID NO: 96502 - RNA, 23 nt, synthetic construct
  source 1..23: mol_type = other RNA
tagctgctgtcggcacatttctt

SEQ ID NO: 96503 - RNA, 23 nt, synthetic construct
  source 1..23: mol_type = other RNA
tcgccctcgtcgtgcaccacctc

SEQ ID NO: 96504 - RNA, 23 nt, synthetic construct
  source 1..23: mol_type = other RNA
tgacccttgcaccgacgtcatag

SEQ ID NO: 96505 - RNA, 23 nt, synthetic construct
  source 1..23: mol_type = other RNA
tggctcattgtcgtctctgtcct

SEQ ID NO: 96506 - RNA, 23 nt, synthetic construct
  source 1..23: mol_type = other RNA
tggacggtccacgtggtccacag

SEQ ID NO: 96507 - RNA, 23 nt, synthetic construct
  source 1..23: mol_type = other RNA
tatcctttctgctgtcggggacc

SEQ ID NO: 96508 - RNA, 23 nt, synthetic construct
  source 1..23: mol_type = other RNA
tatggcttgtacactttggtggg

SEQ ID NO: 96509 - RNA, 23 nt, synthetic construct
  source 1..23: mol_type = other RNA
tgaggtacacggtgcagttgtcc

SEQ ID NO: 96510 - RNA, 23 nt, synthetic construct
  source 1..23: mol_type = other RNA
ttgcattctcccagctcggctcc

SEQ ID NO: 96511 - RNA, 23 nt, synthetic construct
  source 1..23: mol_type = other RNA
tggacggagccgttggacgcctc

SEQ ID NO: 96512 - RNA, 23 nt, synthetic construct
  source 1..23: mol_type = other RNA
tagctgcgcgcgctgggggttgg

SEQ ID NO: 96513 - RNA, 23 nt, synthetic construct
  source 1..23: mol_type = other RNA
tgggtctcgatgaccaggaagat

SEQ ID NO: 96514 - RNA, 23 nt, synthetic construct
  source 1..23: mol_type = other RNA
tctcaaagtctccgcctcccagg

SEQ ID NO: 96515 - RNA, 23 nt, synthetic construct
  source 1..23: mol_type = other RNA
tgtgacagagcgggggactctgt

SEQ ID NO: 96516 - RNA, 23 nt, synthetic construct
  source 1..23: mol_type = other RNA
tctggacccagtctgcgaggtga

SEQ ID NO: 96517 - RNA, 23 nt, synthetic construct
  source 1..23: mol_type = other RNA
tgagggggtgaccgtcacggggc

SEQ ID NO: 96518 - RNA, 23 nt, synthetic construct
  source 1..23: mol_type = other RNA
tcagcagaggacccggatcctgt

SEQ ID NO: 96519 - RNA, 23 nt, synthetic construct
  source 1..23: mol_type = other RNA
tgtcagtccttctgagagggtgg

SEQ ID NO: 96520 - RNA, 23 nt, synthetic construct
  source 1..23: mol_type = other RNA
tctcacatgtggggtgccagcag

SEQ ID NO: 96521 - RNA, 23 nt, synthetic construct
  source 1..23: mol_type = other RNA
tgaggggtggattgtggacatgg

SEQ ID NO: 96522 - RNA, 23 nt, synthetic construct
  source 1..23: mol_type = other RNA
ttggcccttgtcgtggtggcctt

SEQ ID NO: 96523 - RNA, 23 nt, synthetic construct
  source 1..23: mol_type = other RNA
tctcacatgtggggtgccagcag

SEQ ID NO: 96524 - RNA, 23 nt, synthetic construct
  source 1..23: mol_type = other RNA
tgaggggtggattgtggacatgg

SEQ ID NO: 96525 - RNA, 23 nt, synthetic construct
  source 1..23: mol_type = other RNA
ttggcccttgtcgtggtggcctt

SEQ ID NO: 96526 - RNA, 23 nt, synthetic construct
  source 1..23: mol_type = other RNA
tctcacatgtggggtgccagcag

SEQ ID NO: 96527 - RNA, 23 nt, synthetic construct
  source 1..23: mol_type = other RNA
tgaattggtggcccttgtcatgg

SEQ ID NO: 96528 - RNA, 23 nt, synthetic construct
  source 1..23: mol_type = other RNA
tcagtgctgattgcacactgcgt

SEQ ID NO: 96529 - RNA, 23 nt, synthetic construct
  source 1..23: mol_type = other RNA
tcacagtgctgattgcacactgc

SEQ ID NO: 96530 - RNA, 23 nt, synthetic construct
  source 1..23: mol_type = other RNA
tgaggggatggctgtaaagctgg

SEQ ID NO: 96531 - RNA, 23 nt, synthetic construct
  source 1..23: mol_type = other RNA
tgaggggatggctgtaaagctgg

SEQ ID NO: 96532 - RNA, 23 nt, synthetic construct
  source 1..23: mol_type = other RNA
tgaggggatggctgtaaagctgg

SEQ ID NO: 96533 - RNA, 23 nt, synthetic construct
  source 1..23: mol_type = other RNA
tcagcaggacgacacggttgtca

SEQ ID NO: 96534 - RNA, 23 nt, synthetic construct
  source 1..23: mol_type = other RNA
ttttcaggcagttctcgttgtcc

SEQ ID NO: 96535 - RNA, 23 nt, synthetic construct
  source 1..23: mol_type = other RNA
tacccgtacatgaacacacggcg

SEQ ID NO: 96536 - RNA, 23 nt, synthetic construct
  source 1..23: mol_type = other RNA
ttgtgcgcaccgtgtggggactg

SEQ ID NO: 96537 - RNA, 23 nt, synthetic construct
  source 1..23: mol_type = other RNA
ttcacatgtggggtgccagcagt

SEQ ID NO: 96538 - RNA, 23 nt, synthetic construct
  source 1..23: mol_type = other RNA
ttgtgcgcaccgtgtggggactg

SEQ ID NO: 96539 - RNA, 23 nt, synthetic construct
  source 1..23: mol_type = other RNA
ttgtgcgcaccgtgtggggactg

SEQ ID NO: 96540 - RNA, 23 nt, synthetic construct
  source 1..23: mol_type = other RNA
ttcacatgtggggtgccagcagt

SEQ ID NO: 96541 - RNA, 23 nt, synthetic construct
  source 1..23: mol_type = other RNA
ttgtgcgcaccgtgtggggactg

SEQ ID NO: 96542 - RNA, 23 nt, synthetic construct
  source 1..23: mol_type = other RNA
ttcacatgtggggtgccagcagt

SEQ ID NO: 96543 - RNA, 23 nt, synthetic construct
  source 1..23: mol_type = other RNA
tggagagggatggcattgtcaca

SEQ ID NO: 96544 - RNA, 23 nt, synthetic construct
  source 1..23: mol_type = other RNA
tctttgggtccagcaggacgaca

SEQ ID NO: 96545 - RNA, 23 nt, synthetic construct
  source 1..23: mol_type = other RNA
tgcatcctcctgacattgcaccg

SEQ ID NO: 96546 - RNA, 23 nt, synthetic construct
  source 1..23: mol_type = other RNA
ttggcccaactcccccaggggga

SEQ ID NO: 96547 - RNA, 23 nt, synthetic construct
  source 1..23: mol_type = other RNA
taaggtggaatagtgggagccgc

SEQ ID NO: 96548 - RNA, 23 nt, synthetic construct
  source 1..23: mol_type = other RNA
taggagcacggagcgcggggtgc

SEQ ID NO: 96549 - RNA, 23 nt, synthetic construct
  source 1..23: mol_type = other RNA
tggcagtgctcagagaacacgta

SEQ ID NO: 96550 - RNA, 23 nt, synthetic construct
  source 1..23: mol_type = other RNA
ttccagtcgctgagctgtacgcc

SEQ ID NO: 96551 - RNA, 23 nt, synthetic construct
  source 1..23: mol_type = other RNA
tctcccatccgacaccagccccg

SEQ ID NO: 96552 - RNA, 23 nt, synthetic construct
  source 1..23: mol_type = other RNA
tcagcagggtcgaggtgcgggtc

SEQ ID NO: 96553 - RNA, 23 nt, synthetic construct
  source 1..23: mol_type = other RNA
tcctgctcacggttcctgcagac

SEQ ID NO: 96554 - RNA, 23 nt, synthetic construct
  source 1..23: mol_type = other RNA
tcagcagggtcgaggtgcgggtc

SEQ ID NO: 96555 - RNA, 23 nt, synthetic construct
  source 1..23: mol_type = other RNA
tcctgctcacggttcctgcagac

SEQ ID NO: 96556 - RNA, 23 nt, synthetic construct
  source 1..23: mol_type = other RNA
tcagcagggtcgaggtgcgggtc

SEQ ID NO: 96557 - RNA, 23 nt, synthetic construct
  source 1..23: mol_type = other RNA
tcctgctcacggttcctgcagac

SEQ ID NO: 96558 - RNA, 23 nt, synthetic construct
  source 1..23: mol_type = other RNA
tcagcagggtcgaggtgcgggtc

SEQ ID NO: 96559 - RNA, 23 nt, synthetic construct
  source 1..23: mol_type = other RNA
tcctgctcacggttcctgcagac

SEQ ID NO: 96560 - RNA, 23 nt, synthetic construct
  source 1..23: mol_type = other RNA
tggacgggatggccgtggatcca

SEQ ID NO: 96561 - RNA, 23 nt, synthetic construct
  source 1..23: mol_type = other RNA
tcagcagttgcccgggtggagga

SEQ ID NO: 96562 - RNA, 23 nt, synthetic construct
  source 1..23: mol_type = other RNA
tggcagtggttccgtcccgctgg

SEQ ID NO: 96563 - RNA, 23 nt, synthetic construct
  source 1..23: mol_type = other RNA
tctcacagaggtacacggtgcag

SEQ ID NO: 96564 - RNA, 23 nt, synthetic construct
  source 1..23: mol_type = other RNA
tcagtgctcagagaacacgtagt

SEQ ID NO: 96565 - RNA, 23 nt, synthetic construct
  source 1..23: mol_type = other RNA
tctcaaagctgttcctggcattg

SEQ ID NO: 96566 - RNA, 23 nt, synthetic construct
  source 1..23: mol_type = other RNA
ttccagttggggaagctctcggc

SEQ ID NO: 96567 - RNA, 23 nt, synthetic construct
  source 1..23: mol_type = other RNA
tctggactggaggagggagtggc

SEQ ID NO: 96568 - RNA, 23 nt, synthetic construct
  source 1..23: mol_type = other RNA
tggaagaggggatgggtgtaacg

SEQ ID NO: 96569 - RNA, 23 nt, synthetic construct
  source 1..23: mol_type = other RNA
tctcacagacggcccctccggcc

SEQ ID NO: 96570 - RNA, 23 nt, synthetic construct
  source 1..23: mol_type = other RNA
ttggccccggttgtggtggccgt

SEQ ID NO: 96571 - RNA, 23 nt, synthetic construct
  source 1..23: mol_type = other RNA
tctcacagacggcccctccggcc

SEQ ID NO: 96572 - RNA, 23 nt, synthetic construct
  source 1..23: mol_type = other RNA
tctggactggaggagggagtggc

SEQ ID NO: 96573 - RNA, 23 nt, synthetic construct
  source 1..23: mol_type = other RNA
tggctcacagcccgtggtcacca

SEQ ID NO: 96574 - RNA, 23 nt, synthetic construct
  source 1..23: mol_type = other RNA
ttcacagactgcccctccggccg

SEQ ID NO: 96575 - RNA, 23 nt, synthetic construct
  source 1..23: mol_type = other RNA
tggctcacagcccgtggtcacca

SEQ ID NO: 96576 - RNA, 23 nt, synthetic construct
  source 1..23: mol_type = other RNA
tctcacagacggcccctccggcc

SEQ ID NO: 96577 - RNA, 23 nt, synthetic construct
  source 1..23: mol_type = other RNA
tctggactggaggagggagtggc

SEQ ID NO: 96578 - RNA, 23 nt, synthetic construct
  source 1..23: mol_type = other RNA
tcagtgctggaagggcagttgca

SEQ ID NO: 96579 - RNA, 23 nt, synthetic construct
  source 1..23: mol_type = other RNA
ttggccccggttgtggtggccgt

SEQ ID NO: 96580 - RNA, 23 nt, synthetic construct
  source 1..23: mol_type = other RNA
tctctggcagggcacctcaaggc

SEQ ID NO: 96581 - RNA, 23 nt, synthetic construct
  source 1..23: mol_type = other RNA
taggagccctcgcagaaggtgat

SEQ ID NO: 96582 - RNA, 23 nt, synthetic construct
  source 1..23: mol_type = other RNA
tcaggtgtcaaacatgcagttcg

SEQ ID NO: 96583 - RNA, 23 nt, synthetic construct
  source 1..23: mol_type = other RNA
tgtcaaacatgcagttcgagtgg

SEQ ID NO: 96584 - RNA, 23 nt, synthetic construct
  source 1..23: mol_type = other RNA
ttgtcaaacatgcagttcgagtg

SEQ ID NO: 96585 - RNA, 23 nt, synthetic construct
  source 1..23: mol_type = other RNA
tgaagcggaagacgtcgccgtcg

SEQ ID NO: 96586 - RNA, 23 nt, synthetic construct
  source 1..23: mol_type = other RNA
tgagaacacgtagttgcaaaggc

SEQ ID NO: 96587 - RNA, 23 nt, synthetic construct
  source 1..23: mol_type = other RNA
ttctgcaccacgatgaagaagct

SEQ ID NO: 96588 - RNA, 23 nt, synthetic construct
  source 1..23: mol_type = other RNA
tctctgggcggtgcccattgtac

SEQ ID NO: 96589 - RNA, 23 nt, synthetic construct
  source 1..23: mol_type = other RNA
taggtcttgtagtggaagtcacc

SEQ ID NO: 96590 - RNA, 23 nt, synthetic construct
  source 1..23: mol_type = other RNA
tgccgtcgaaggtcttgtagtgg

SEQ ID NO: 96591 - RNA, 23 nt, synthetic construct
  source 1..23: mol_type = other RNA
ttcgccgtcgaaggtcttgtagt

SEQ ID NO: 96592 - RNA, 23 nt, synthetic construct
  source 1..23: mol_type = other RNA
tacgtcgccgtcgaaggtcttgt

SEQ ID NO: 96593 - RNA, 23 nt, synthetic construct
  source 1..23: mol_type = other RNA
tgggcgcaggcggccaggtacgc

SEQ ID NO: 96594 - RNA, 23 nt, synthetic construct
  source 1..23: mol_type = other RNA
ttggcactgccatagccccccgg

SEQ ID NO: 96595 - RNA, 23 nt, synthetic construct
  source 1..23: mol_type = other RNA
taaacatgcagttcgagtggaag

SEQ ID NO: 96596 - RNA, 23 nt, synthetic construct
  source 1..23: mol_type = other RNA
tcaaacatgcagttcgagtggaa

SEQ ID NO: 96597 - RNA, 23 nt, synthetic construct
  source 1..23: mol_type = other RNA
taggtgtcaaacatgcagttcga

SEQ ID NO: 96598 - RNA, 23 nt, synthetic construct
  source 1..23: mol_type = other RNA
tgcaggtgtcaaacatgcagttc

SEQ ID NO: 96599 - RNA, 23 nt, synthetic construct
  source 1..23: mol_type = other RNA
ttgcaggtgtcaaacatgcagtt

SEQ ID NO: 96600 - RNA, 23 nt, synthetic construct
  source 1..23: mol_type = other RNA
tgccgtggaggatgctgcactgc

SEQ ID NO: 96601 - RNA, 23 nt, synthetic construct
  source 1..23: mol_type = other RNA
tggcggtggtgaaggtgaatggc

SEQ ID NO: 96602 - RNA, 23 nt, synthetic construct
  source 1..23: mol_type = other RNA
tgctctgggcggtgcccattgta

SEQ ID NO: 96603 - RNA, 23 nt, synthetic construct
  source 1..23: mol_type = other RNA
ttgtggtctgggttggggtaggc

SEQ ID NO: 96604 - RNA, 23 nt, synthetic construct
  source 1..23: mol_type = other RNA
tgggagccctggtcagccccggg

SEQ ID NO: 96605 - RNA, 23 nt, synthetic construct
  source 1..23: mol_type = other RNA
tggtggtcgtccctggagaaggg

SEQ ID NO: 96606 - RNA, 23 nt, synthetic construct
  source 1..23: mol_type = other RNA
tggtggtcgtccctggagaaggg

SEQ ID NO: 96607 - RNA, 23 nt, synthetic construct
  source 1..23: mol_type = other RNA
tggtggtcgtccctggagaaggg

SEQ ID NO: 96608 - RNA, 23 nt, synthetic construct
  source 1..23: mol_type = other RNA
tgtggtggtggtcagcactctgg

SEQ ID NO: 96609 - RNA, 23 nt, synthetic construct
  source 1..23: mol_type = other RNA
tccagtcggggcccagcagccat

SEQ ID NO: 96610 - RNA, 23 nt, synthetic construct
  source 1..23: mol_type = other RNA
taggttgtggcactcagcaaaga

SEQ ID NO: 96611 - RNA, 23 nt, synthetic construct
  source 1..23: mol_type = other RNA
tgcacatcttgaagacgccctcc

SEQ ID NO: 96612 - RNA, 23 nt, synthetic construct
  source 1..23: mol_type = other RNA
tgtcactgcagcagaggacccgg

SEQ ID NO: 96613 - RNA, 23 nt, synthetic construct
  source 1..23: mol_type = other RNA
tggactgctgtggtgctggccgg

SEQ ID NO: 96614 - RNA, 23 nt, synthetic construct
  source 1..23: mol_type = other RNA
ttggtgccacaggatggtcgtgt

SEQ ID NO: 96615 - RNA, 23 nt, synthetic construct
  source 1..23: mol_type = other RNA
tggcggcgaaggtggggccgtgg

SEQ ID NO: 96616 - RNA, 23 nt, synthetic construct
  source 1..23: mol_type = other RNA
ttgtgggctctggttcctagagt

SEQ ID NO: 96617 - RNA, 23 nt, synthetic construct
  source 1..23: mol_type = other RNA
tacgcccttggcggcacaggcgt

SEQ ID NO: 96618 - RNA, 23 nt, synthetic construct
  source 1..23: mol_type = other RNA
tccgttgaagtccccacacaggc

SEQ ID NO: 96619 - RNA, 23 nt, synthetic construct
  source 1..23: mol_type = other RNA
tgcggcgaaggtggggccgtgga

SEQ ID NO: 96620 - RNA, 23 nt, synthetic construct
  source 1..23: mol_type = other RNA
tgcaggcggcgaaggtggggccg

SEQ ID NO: 96621 - RNA, 23 nt, synthetic construct
  source 1..23: mol_type = other RNA
tgtggtggtcgtggtggtaagca

SEQ ID NO: 96622 - RNA, 23 nt, synthetic construct
  source 1..23: mol_type = other RNA
ttgtccacatggctgttgaccca

SEQ ID NO: 96623 - RNA, 23 nt, synthetic construct
  source 1..23: mol_type = other RNA
ttggggatggaggcagaacgttc

SEQ ID NO: 96624 - RNA, 23 nt, synthetic construct
  source 1..23: mol_type = other RNA
ttgtgctagaggagggtgttgcc

SEQ ID NO: 96625 - RNA, 23 nt, synthetic construct
  source 1..23: mol_type = other RNA
tttggcactttggtagtgtgagc

SEQ ID NO: 96626 - RNA, 23 nt, synthetic construct
  source 1..23: mol_type = other RNA
ttgtgctagacaccggggctgcg

SEQ ID NO: 96627 - RNA, 23 nt, synthetic construct
  source 1..23: mol_type = other RNA
ttgccctggcgggcacacaggca

SEQ ID NO: 96628 - RNA, 23 nt, synthetic construct
  source 1..23: mol_type = other RNA
tctcacagactgcccctccggcc

SEQ ID NO: 96629 - RNA, 23 nt, synthetic construct
  source 1..23: mol_type = other RNA
tggcagtcctcctcggcaatgca

SEQ ID NO: 96630 - RNA, 23 nt, synthetic construct
  source 1..23: mol_type = other RNA
tcagcaggcatggacaggcggcc

SEQ ID NO: 96631 - RNA, 23 nt, synthetic construct
  source 1..23: mol_type = other RNA
tcagcaggggttctcggcccggg

SEQ ID NO: 96632 - RNA, 23 nt, synthetic construct
  source 1..23: mol_type = other RNA
tgcagcaggggttctcggcccgg

SEQ ID NO: 96633 - RNA, 23 nt, synthetic construct
  source 1..23: mol_type = other RNA
ttgtcatccagcaccgtgcctgg

SEQ ID NO: 96634 - RNA, 23 nt, synthetic construct
  source 1..23: mol_type = other RNA
tagcagccgtccacacagtggtc

SEQ ID NO: 96635 - RNA, 23 nt, synthetic construct
  source 1..23: mol_type = other RNA
tgggcttggggttgatgatggag

SEQ ID NO: 96636 - RNA, 23 nt, synthetic construct
  source 1..23: mol_type = other RNA
tagggcttggggttgatgatgga

SEQ ID NO: 96637 - RNA, 23 nt, synthetic construct
  source 1..23: mol_type = other RNA
tggtagctgtagtccagccactc

SEQ ID NO: 96638 - RNA, 23 nt, synthetic construct
  source 1..23: mol_type = other RNA
tggtagctgtagtccagccactc

SEQ ID NO: 96639 - RNA, 23 nt, synthetic construct
  source 1..23: mol_type = other RNA
tggtagctgtagtccagccactc

SEQ ID NO: 96640 - RNA, 23 nt, synthetic construct
  source 1..23: mol_type = other RNA
tggtagctgtagtccagccactc

SEQ ID NO: 96641 - RNA, 23 nt, synthetic construct
  source 1..23: mol_type = other RNA
tgccagtcggggcccagcagcca

SEQ ID NO: 96642 - RNA, 23 nt, synthetic construct
  source 1..23: mol_type = other RNA
ttgccagtcggggcccagcagcc

SEQ ID NO: 96643 - RNA, 23 nt, synthetic construct
  source 1..23: mol_type = other RNA
tccgtggatccagtggctgcagt

SEQ ID NO: 96644 - RNA, 23 nt, synthetic construct
  source 1..23: mol_type = other RNA
ttggcaggcctgggcgtaggcag

SEQ ID NO: 96645 - RNA, 23 nt, synthetic construct
  source 1..23: mol_type = other RNA
tgctggtcttccggtcccaggac

SEQ ID NO: 96646 - RNA, 23 nt, synthetic construct
  source 1..23: mol_type = other RNA
tgcagcagagaacccgcagctcg

SEQ ID NO: 96647 - RNA, 23 nt, synthetic construct
  source 1..23: mol_type = other RNA
tcgtccacaggcacgaaggaaac

SEQ ID NO: 96648 - RNA, 23 nt, synthetic construct
  source 1..23: mol_type = other RNA
tcctggagaagggggtgactcgg

SEQ ID NO: 96649 - RNA, 23 nt, synthetic construct
  source 1..23: mol_type = other RNA
tcctggagaagggggtgactcgg

SEQ ID NO: 96650 - RNA, 23 nt, synthetic construct
  source 1..23: mol_type = other RNA
tcctggagaagggggtgactcgg

SEQ ID NO: 96651 - RNA, 23 nt, synthetic construct
  source 1..23: mol_type = other RNA
taggtgggacaggcgccctggaa

SEQ ID NO: 96652 - RNA, 23 nt, synthetic construct
  source 1..23: mol_type = other RNA
tgcaggcctgggcgtaggcagcc

SEQ ID NO: 96653 - RNA, 23 nt, synthetic construct
  source 1..23: mol_type = other RNA
tccggttcctgcaggtgcaggtg

SEQ ID NO: 96654 - RNA, 23 nt, synthetic construct
  source 1..23: mol_type = other RNA
tctgcaggcgtcgtggggcctcc

SEQ ID NO: 96655 - RNA, 23 nt, synthetic construct
  source 1..23: mol_type = other RNA
ttgctgatccacactggaggcgt

SEQ ID NO: 96656 - RNA, 23 nt, synthetic construct
  source 1..23: mol_type = other RNA
ttggcccggggtggtcgtccctg

SEQ ID NO: 96657 - RNA, 23 nt, synthetic construct
  source 1..23: mol_type = other RNA
ttggcccggggtggtcgtccctg

SEQ ID NO: 96658 - RNA, 23 nt, synthetic construct
  source 1..23: mol_type = other RNA
ttgctgatccacactggaggcgt

SEQ ID NO: 96659 - RNA, 23 nt, synthetic construct
  source 1..23: mol_type = other RNA
ttggcccggggtggtcgtccctg

SEQ ID NO: 96660 - RNA, 23 nt, synthetic construct
  source 1..23: mol_type = other RNA
ttgctgatccacactggaggcgt

SEQ ID NO: 96661 - RNA, 23 nt, synthetic construct
  source 1..23: mol_type = other RNA
ttggcccggggtggtcgtccctg

SEQ ID NO: 96662 - RNA, 23 nt, synthetic construct
  source 1..23: mol_type = other RNA
ttgctgatccacactggaggcgt

SEQ ID NO: 96663 - RNA, 23 nt, synthetic construct
  source 1..23: mol_type = other RNA
tctcccagggtaggactcctgag

SEQ ID NO: 96664 - RNA, 23 nt, synthetic construct
  source 1..23: mol_type = other RNA
tggacggggtggccgtggggcca

SEQ ID NO: 96665 - RNA, 23 nt, synthetic construct
  source 1..23: mol_type = other RNA
tggacggggtggccgtggggcca

SEQ ID NO: 96666 - RNA, 23 nt, synthetic construct
  source 1..23: mol_type = other RNA
tgaggggcgccatgtgcccaagc

SEQ ID NO: 96667 - RNA, 23 nt, synthetic construct
  source 1..23: mol_type = other RNA
ttccagttccgcggctggccccc

SEQ ID NO: 96668 - RNA, 23 nt, synthetic construct
  source 1..23: mol_type = other RNA
tgcagcaggcatggacaggcggc

SEQ ID NO: 96669 - RNA, 23 nt, synthetic construct
  source 1..23: mol_type = other RNA
tctggctgggtgggcacttcggg

SEQ ID NO: 96670 - RNA, 23 nt, synthetic construct
  source 1..23: mol_type = other RNA
tggacgggcagggagggagccgg

SEQ ID NO: 96671 - RNA, 23 nt, synthetic construct
  source 1..23: mol_type = other RNA
taaggtggcacacgggcaggtgg

SEQ ID NO: 96672 - RNA, 23 nt, synthetic construct
  source 1..23: mol_type = other RNA
tcacagtgcaccttctgccccac

SEQ ID NO: 96673 - RNA, 23 nt, synthetic construct
  source 1..23: mol_type = other RNA
tgagggggtggacgtggaactgg

SEQ ID NO: 96674 - RNA, 23 nt, synthetic construct
  source 1..23: mol_type = other RNA
tctctggttcctagagttgcagg

SEQ ID NO: 96675 - RNA, 23 nt, synthetic construct
  source 1..23: mol_type = other RNA
tcagcaggagcacggagcgcggg

SEQ ID NO: 96676 - RNA, 23 nt, synthetic construct
  source 1..23: mol_type = other RNA
ttggcccctcacccttctggggc

SEQ ID NO: 96677 - RNA, 23 nt, synthetic construct
  source 1..23: mol_type = other RNA
tgggaagcggaagacgtcgccgt

SEQ ID NO: 96678 - RNA, 23 nt, synthetic construct
  source 1..23: mol_type = other RNA
tggggttggtggtggagccggtg

SEQ ID NO: 96679 - RNA, 23 nt, synthetic construct
  source 1..23: mol_type = other RNA
tggggttggtggtggagccggtg

SEQ ID NO: 96680 - RNA, 23 nt, synthetic construct
  source 1..23: mol_type = other RNA
tggggttggtggtggagccggtg

SEQ ID NO: 96681 - RNA, 23 nt, synthetic construct
  source 1..23: mol_type = other RNA
tggggttggtggtggagccggtg

SEQ ID NO: 96682 - RNA, 23 nt, synthetic construct
  source 1..23: mol_type = other RNA
tggggttggtggtggagccggtg

SEQ ID NO: 96683 - RNA, 23 nt, synthetic construct
  source 1..23: mol_type = other RNA
tcagtggccacagttgtggtggt

SEQ ID NO: 96684 - RNA, 23 nt, synthetic construct
  source 1..23: mol_type = other RNA
ttggtggccgtggtgttcggcac

SEQ ID NO: 96685 - RNA, 23 nt, synthetic construct
  source 1..23: mol_type = other RNA
tggaggtggccgtggtgtggccc

SEQ ID NO: 96686 - RNA, 23 nt, synthetic construct
  source 1..23: mol_type = other RNA
tacggcccctccggccgcacgga

SEQ ID NO: 96687 - RNA, 23 nt, synthetic construct
  source 1..23: mol_type = other RNA
tacgggtgtggtggtctgttctg

SEQ ID NO: 96688 - RNA, 23 nt, synthetic construct
  source 1..23: mol_type = other RNA
tcagtggccacagttgtggtggt

SEQ ID NO: 96689 - RNA, 23 nt, synthetic construct
  source 1..23: mol_type = other RNA
tgtaaagctggtagctgtggatt

SEQ ID NO: 96690 - RNA, 23 nt, synthetic construct
  source 1..23: mol_type = other RNA
tggccgtggaaccggtgggcacc

SEQ ID NO: 96691 - RNA, 23 nt, synthetic construct
  source 1..23: mol_type = other RNA
tcaggtagaggctgagattccca

SEQ ID NO: 96692 - RNA, 23 nt, synthetic construct
  source 1..23: mol_type = other RNA
tgttgtccaggtagaggctgaga

SEQ ID NO: 96693 - RNA, 23 nt, synthetic construct
  source 1..23: mol_type = other RNA
tggcacaaggttgtggcactcag

SEQ ID NO: 96694 - RNA, 23 nt, synthetic construct
  source 1..23: mol_type = other RNA
tcagccctccgccatcccctcca

SEQ ID NO: 96695 - RNA, 23 nt, synthetic construct
  source 1..23: mol_type = other RNA
tgcaggcctgcacgcagatgccc

SEQ ID NO: 96696 - RNA, 23 nt, synthetic construct
  source 1..23: mol_type = other RNA
tccacgcaggggcaggcctgcac

SEQ ID NO: 96697 - RNA, 23 nt, synthetic construct
  source 1..23: mol_type = other RNA
ttgcacacgcacaccgtctcggg

SEQ ID NO: 96698 - RNA, 23 nt, synthetic construct
  source 1..23: mol_type = other RNA
tagagaggcaggtacacatgtgg

SEQ ID NO: 96699 - RNA, 23 nt, synthetic construct
  source 1..23: mol_type = other RNA
tgtcagcaaatggactccaccct

SEQ ID NO: 96700 - RNA, 23 nt, synthetic construct
  source 1..23: mol_type = other RNA
tggtcagcaaatggactccaccc

SEQ ID NO: 96701 - RNA, 23 nt, synthetic construct
  source 1..23: mol_type = other RNA
ttgccacacacaggccggggggc

SEQ ID NO: 96702 - RNA, 23 nt, synthetic construct
  source 1..23: mol_type = other RNA
tggggccggtttcacccacgggg

SEQ ID NO: 96703 - RNA, 23 nt, synthetic construct
  source 1..23: mol_type = other RNA
tacatcagggaggggcaaggcca

SEQ ID NO: 96704 - RNA, 23 nt, synthetic construct
  source 1..23: mol_type = other RNA
tcgggcgctccggccgtggcagg

SEQ ID NO: 96705 - RNA, 23 nt, synthetic construct
  source 1..23: mol_type = other RNA
tctctctgacctggccgttgcga

SEQ ID NO: 96706 - RNA, 23 nt, synthetic construct
  source 1..23: mol_type = other RNA
tagtcctcgtaggcggcgcggca

SEQ ID NO: 96707 - RNA, 23 nt, synthetic construct
  source 1..23: mol_type = other RNA
tggaagggtggttgcagtccttg

SEQ ID NO: 96708 - RNA, 23 nt, synthetic construct
  source 1..23: mol_type = other RNA
tggaagggtggttgcagtccttg

SEQ ID NO: 96709 - RNA, 23 nt, synthetic construct
  source 1..23: mol_type = other RNA
tggaagggtggttgcagtccttg

SEQ ID NO: 96710 - RNA, 23 nt, synthetic construct
  source 1..23: mol_type = other RNA
ttgtagtccccgctctgctccac

SEQ ID NO: 96711 - RNA, 23 nt, synthetic construct
  source 1..23: mol_type = other RNA
tgtggtgatcagtgatgggggag

SEQ ID NO: 96712 - RNA, 23 nt, synthetic construct
  source 1..23: mol_type = other RNA
tggttgtggcacgtcccctgcag

SEQ ID NO: 96713 - RNA, 23 nt, synthetic construct
  source 1..23: mol_type = other RNA
ttgtgctagaggagggtgttgcc

SEQ ID NO: 96714 - RNA, 23 nt, synthetic construct
  source 1..23: mol_type = other RNA
ttgtgctagaggagggtgttgcc

SEQ ID NO: 96715 - RNA, 23 nt, synthetic construct
  source 1..23: mol_type = other RNA
ttgtgctagaggagggtgttgcc

SEQ ID NO: 96716 - RNA, 23 nt, synthetic construct
  source 1..23: mol_type = other RNA
ttgacctcggtctcgcagccctg

SEQ ID NO: 96717 - RNA, 23 nt, synthetic construct
  source 1..23: mol_type = other RNA
tcacacgggcaggtggggcagcg

SEQ ID NO: 96718 - RNA, 23 nt, synthetic construct
  source 1..23: mol_type = other RNA
taccacggaccggctacgcgtgg

SEQ ID NO: 96719 - RNA, 23 nt, synthetic construct
  source 1..23: mol_type = other RNA
tcgcacggatgttggagtaggtg

SEQ ID NO: 96720 - RNA, 23 nt, synthetic construct
  source 1..23: mol_type = other RNA
tcgcacggatgttggagtaggtg

SEQ ID NO: 96721 - RNA, 23 nt, synthetic construct
  source 1..23: mol_type = other RNA
tcgcacggatgttggagtaggtg

SEQ ID NO: 96722 - RNA, 23 nt, synthetic construct
  source 1..23: mol_type = other RNA
tcgcacggatgttggagtaggtg

SEQ ID NO: 96723 - RNA, 23 nt, synthetic construct
  source 1..23: mol_type = other RNA
tccgcacggatgttggagtaggt

SEQ ID NO: 96724 - RNA, 23 nt, synthetic construct
  source 1..23: mol_type = other RNA
tccgcacggatgttggagtaggt

SEQ ID NO: 96725 - RNA, 23 nt, synthetic construct
  source 1..23: mol_type = other RNA
tccgcacggatgttggagtaggt

SEQ ID NO: 96726 - RNA, 23 nt, synthetic construct
  source 1..23: mol_type = other RNA
tccgcacggatgttggagtaggt

SEQ ID NO: 96727 - RNA, 23 nt, synthetic construct
  source 1..23: mol_type = other RNA
tcgagtgctgggtggtaccggtg

SEQ ID NO: 96728 - RNA, 23 nt, synthetic construct
  source 1..23: mol_type = other RNA
tcgagtgctgggtggtaccggtg

SEQ ID NO: 96729 - RNA, 23 nt, synthetic construct
  source 1..23: mol_type = other RNA
tcgagtgctgggtggtaccggtg

SEQ ID NO: 96730 - RNA, 23 nt, synthetic construct
  source 1..23: mol_type = other RNA
ttgcgttgaagaggatctggtcc

SEQ ID NO: 96731 - RNA, 23 nt, synthetic construct
  source 1..23: mol_type = other RNA
tgttattggggccgatgtggggc

SEQ ID NO: 96732 - RNA, 23 nt, synthetic construct
  source 1..23: mol_type = other RNA
tctatagtgctcggctctgtgag

SEQ ID NO: 96733 - RNA, 23 nt, synthetic construct
  source 1..23: mol_type = other RNA
tgcgtatcttgtagggtgggtcc

SEQ ID NO: 96734 - RNA, 23 nt, synthetic construct
  source 1..23: mol_type = other RNA
ttattcgcagcagagaacccgca

SEQ ID NO: 96735 - RNA, 23 nt, synthetic construct
  source 1..23: mol_type = other RNA
tgccgaagtggacgtcacagtgc

SEQ ID NO: 96736 - RNA, 23 nt, synthetic construct
  source 1..23: mol_type = other RNA
tccgttaggacagtgcaagggca

SEQ ID NO: 96737 - RNA, 23 nt, synthetic construct
  source 1..23: mol_type = other RNA
tacgtctcaaagtctccgcctcc

SEQ ID NO: 96738 - RNA, 23 nt, synthetic construct
  source 1..23: mol_type = other RNA
tcggtctggacgcactccccaca

SEQ ID NO: 96739 - RNA, 23 nt, synthetic construct
  source 1..23: mol_type = other RNA
tgtgatcgtagtggccgtggtgg

SEQ ID NO: 96740 - RNA, 23 nt, synthetic construct
  source 1..23: mol_type = other RNA
tgtgatcgtagtggccgtggtgg

SEQ ID NO: 96741 - RNA, 23 nt, synthetic construct
  source 1..23: mol_type = other RNA
tgtgatcgtagtggccgtggtgg

SEQ ID NO: 96742 - RNA, 23 nt, synthetic construct
  source 1..23: mol_type = other RNA
tgtgatcgtagtggccgtggtga

SEQ ID NO: 96743 - RNA, 23 nt, synthetic construct
  source 1..23: mol_type = other RNA
tgtgatcgtagtggccgtggtgg

SEQ ID NO: 96744 - RNA, 23 nt, synthetic construct
  source 1..23: mol_type = other RNA
tccgggacggttgcacggcgggg

SEQ ID NO: 96745 - RNA, 23 nt, synthetic construct
  source 1..23: mol_type = other RNA
tacagctcgctcgtgagtgttgg

SEQ ID NO: 96746 - RNA, 23 nt, synthetic construct
  source 1..23: mol_type = other RNA
ttggttggcgtatttgggatcca

SEQ ID NO: 96747 - RNA, 23 nt, synthetic construct
  source 1..23: mol_type = other RNA
ttgcgtaagcctccaggctctgg

SEQ ID NO: 96748 - RNA, 23 nt, synthetic construct
  source 1..23: mol_type = other RNA
tgtcccctcttggaggatcagct

SEQ ID NO: 96749 - RNA, 23 nt, synthetic construct
  source 1..23: mol_type = other RNA
tgcgttgagaacagggcctgggt

SEQ ID NO: 96750 - RNA, 23 nt, synthetic construct
  source 1..23: mol_type = other RNA
tggcgttgagaacagggcctggg

SEQ ID NO: 96751 - RNA, 23 nt, synthetic construct
  source 1..23: mol_type = other RNA
tcgagtgctgggtggtactggtg

SEQ ID NO: 96752 - RNA, 23 nt, synthetic construct
  source 1..23: mol_type = other RNA
ttcccaaagcgtgcatggatctc

SEQ ID NO: 96753 - RNA, 23 nt, synthetic construct
  source 1..23: mol_type = other RNA
tgtgtgcgttgaagaggatctgg

SEQ ID NO: 96754 - RNA, 23 nt, synthetic construct
  source 1..23: mol_type = other RNA
tgtatggggccgcatggcttgta

SEQ ID NO: 96755 - RNA, 23 nt, synthetic construct
  source 1..23: mol_type = other RNA
tcgtgagcgtagcaggggcactc

SEQ ID NO: 96756 - RNA, 23 nt, synthetic construct
  source 1..23: mol_type = other RNA
tcgttgtgcacacaggggcagtc

SEQ ID NO: 96757 - RNA, 23 nt, synthetic construct
  source 1..23: mol_type = other RNA
tggtcgtccccagagtggaggag

SEQ ID NO: 96758 - RNA, 23 nt, synthetic construct
  source 1..23: mol_type = other RNA
tgagcgtgttggaagggtggatg

SEQ ID NO: 96759 - RNA, 23 nt, synthetic construct
  source 1..23: mol_type = other RNA
ttcgctcgtgagtgttggcgcca

SEQ ID NO: 96760 - RNA, 23 nt, synthetic construct
  source 1..23: mol_type = other RNA
tcgctcgtgagtgttggcgccag

SEQ ID NO: 96761 - RNA, 23 nt, synthetic construct
  source 1..23: mol_type = other RNA
tcgttgtccgtcaggccgcactt

SEQ ID NO: 96762 - RNA, 23 nt, synthetic construct
  source 1..23: mol_type = other RNA
tttatgggggccgatgtggggct

SEQ ID NO: 96763 - RNA, 23 nt, synthetic construct
  source 1..23: mol_type = other RNA
tttatgggggccgatgtggggct

SEQ ID NO: 96764 - RNA, 23 nt, synthetic construct
  source 1..23: mol_type = other RNA
tttatgggggccgatgtggggct

SEQ ID NO: 96765 - RNA, 23 nt, synthetic construct
  source 1..23: mol_type = other RNA
ttgtcgtggtggccttcgtggtc

SEQ ID NO: 96766 - RNA, 23 nt, synthetic construct
  source 1..23: mol_type = other RNA
ttgtcgtggtggccttcgtggtc

SEQ ID NO: 96767 - RNA, 23 nt, synthetic construct
  source 1..23: mol_type = other RNA
tccacccgtacatgaacacacgg

SEQ ID NO: 96768 - RNA, 23 nt, synthetic construct
  source 1..23: mol_type = other RNA
tcgttgagaacagggcctgggtg

SEQ ID NO: 96769 - RNA, 23 nt, synthetic construct
  source 1..23: mol_type = other RNA
tcaccgtggttattggggccgat

SEQ ID NO: 96770 - RNA, 23 nt, synthetic construct
  source 1..23: mol_type = other RNA
tgcgtagaaatggcagccggctc

SEQ ID NO: 96771 - RNA, 23 nt, synthetic construct
  source 1..23: mol_type = other RNA
tacgtcttggccatgtccttgca

SEQ ID NO: 96772 - RNA, 23 nt, synthetic construct
  source 1..23: mol_type = other RNA
tacggcgggggctgaccctgggc

SEQ ID NO: 96773 - RNA, 23 nt, synthetic construct
  source 1..23: mol_type = other RNA
tcaccaccgtggttattggggcc

SEQ ID NO: 96774 - RNA, 23 nt, synthetic construct
  source 1..23: mol_type = other RNA
tgaacgtagctgcagtcaccatg

SEQ ID NO: 96775 - RNA, 23 nt, synthetic construct
  source 1..23: mol_type = other RNA
tgcgtgcatggatctctctcatg

SEQ ID NO: 96776 - RNA, 23 nt, synthetic construct
  source 1..23: mol_type = other RNA
tcgtagcgctgggacttggggca

SEQ ID NO: 96777 - RNA, 23 nt, synthetic construct
  source 1..23: mol_type = other RNA
ttgtcgtagcagccacactgggc

SEQ ID NO: 96778 - RNA, 23 nt, synthetic construct
  source 1..23: mol_type = other RNA
ttagcgctgggacttggggcagt

SEQ ID NO: 96779 - RNA, 23 nt, synthetic construct
  source 1..23: mol_type = other RNA
ttggggtagtcctcatcaaacca

SEQ ID NO: 96780 - RNA, 23 nt, synthetic construct
  source 1..23: mol_type = other RNA
tggcaggtgcttgttcacgcagg

SEQ ID NO: 96781 - RNA, 23 nt, synthetic construct
  source 1..23: mol_type = other RNA
ttcgtccccggagtggaggaggg

SEQ ID NO: 96782 - RNA, 23 nt, synthetic construct
  source 1..23: mol_type = other RNA
tcagacttggggtagtcctcatc

SEQ ID NO: 96783 - RNA, 23 nt, synthetic construct
  source 1..23: mol_type = other RNA
tgtccactcacacttcggttgac

SEQ ID NO: 96784 - RNA, 23 nt, synthetic construct
  source 1..23: mol_type = other RNA
tccggtttcacccacggggtggg

SEQ ID NO: 96785 - RNA, 23 nt, synthetic construct
  source 1..23: mol_type = other RNA
tcctcgttgtgcacacaggggca

SEQ ID NO: 96786 - RNA, 23 nt, synthetic construct
  source 1..23: mol_type = other RNA
tcccatccaacttctgcaggttc

SEQ ID NO: 96787 - RNA, 23 nt, synthetic construct
  source 1..23: mol_type = other RNA
tgtggtgttcggcactgggggtg

SEQ ID NO: 96788 - RNA, 23 nt, synthetic construct
  source 1..23: mol_type = other RNA
tcagcgggtccgggcactgctcc

SEQ ID NO: 96789 - RNA, 23 nt, synthetic construct
  source 1..23: mol_type = other RNA
tgtggtgttcggcactgggggtg

SEQ ID NO: 96790 - RNA, 23 nt, synthetic construct
  source 1..23: mol_type = other RNA
ttggccgtgtccccgccgtccag

SEQ ID NO: 96791 - RNA, 23 nt, synthetic construct
  source 1..23: mol_type = other RNA
tgtggtgttcggcactgggggtg

SEQ ID NO: 96792 - RNA, 23 nt, synthetic construct
  source 1..23: mol_type = other RNA
tgcgcactggatgccactgggtg

SEQ ID NO: 96793 - RNA, 23 nt, synthetic construct
  source 1..23: mol_type = other RNA
tgggcgtagttctcattctccac

SEQ ID NO: 96794 - RNA, 23 nt, synthetic construct
  source 1..23: mol_type = other RNA
taatgggcccgggggcacaaggt

SEQ ID NO: 96795 - RNA, 23 nt, synthetic construct
  source 1..23: mol_type = other RNA
tcttggacagaacgtagctgcag

SEQ ID NO: 96796 - RNA, 23 nt, synthetic construct
  source 1..23: mol_type = other RNA
tgatggctgtaaagctggtagct

SEQ ID NO: 96797 - RNA, 23 nt, synthetic construct
  source 1..23: mol_type = other RNA
tgatggctgtaaagctggtagct

SEQ ID NO: 96798 - RNA, 23 nt, synthetic construct
  source 1..23: mol_type = other RNA
tgatggctgtaaagctggtagct

SEQ ID NO: 96799 - RNA, 23 nt, synthetic construct
  source 1..23: mol_type = other RNA
tggcccatccaacttctgcaggt

SEQ ID NO: 96800 - RNA, 23 nt, synthetic construct
  source 1..23: mol_type = other RNA
tgtgaacagggtgatgttggctg

SEQ ID NO: 96801 - RNA, 23 nt, synthetic construct
  source 1..23: mol_type = other RNA
taggtgccagggcacggcaggtc

SEQ ID NO: 96802 - RNA, 23 nt, synthetic construct
  source 1..23: mol_type = other RNA
tcgaggggcaggcagccagagtg

SEQ ID NO: 96803 - RNA, 23 nt, synthetic construct
  source 1..23: mol_type = other RNA
tgtcgtcagcctggttctggttg

SEQ ID NO: 96804 - RNA, 23 nt, synthetic construct
  source 1..23: mol_type = other RNA
ttctgggggatgtcagtccttct

SEQ ID NO: 96805 - RNA, 23 nt, synthetic construct
  source 1..23: mol_type = other RNA
tggggctgctcacagacggcccc

SEQ ID NO: 96806 - RNA, 23 nt, synthetic construct
  source 1..23: mol_type = other RNA
tggctgcattccacgacctggcc

SEQ ID NO: 96807 - RNA, 23 nt, synthetic construct
  source 1..23: mol_type = other RNA
tgtccactgacaccggggctggc

SEQ ID NO: 96808 - RNA, 23 nt, synthetic construct
  source 1..23: mol_type = other RNA
tggggctgctcacagacggcccc

SEQ ID NO: 96809 - RNA, 23 nt, synthetic construct
  source 1..23: mol_type = other RNA
tggctgcattccacgacctggcc

SEQ ID NO: 96810 - RNA, 23 nt, synthetic construct
  source 1..23: mol_type = other RNA
tgtccctctggttgttggtgcag

SEQ ID NO: 96811 - RNA, 23 nt, synthetic construct
  source 1..23: mol_type = other RNA
tggctgcattccacgacctggcc

SEQ ID NO: 96812 - RNA, 23 nt, synthetic construct
  source 1..23: mol_type = other RNA
tggtgaaggtgaatggcgttgtg

SEQ ID NO: 96813 - RNA, 23 nt, synthetic construct
  source 1..23: mol_type = other RNA
tggggctgctcacagacggcccc

SEQ ID NO: 96814 - RNA, 23 nt, synthetic construct
  source 1..23: mol_type = other RNA
tggctgcattccacgacctggcc

SEQ ID NO: 96815 - RNA, 23 nt, synthetic construct
  source 1..23: mol_type = other RNA
tagttgcagcagaacacacggat

SEQ ID NO: 96816 - RNA, 23 nt, synthetic construct
  source 1..23: mol_type = other RNA
taagacctggctcagcatcagat

SEQ ID NO: 96817 - RNA, 23 nt, synthetic construct
  source 1..23: mol_type = other RNA
ttgggcccgggggcacaaggttg

SEQ ID NO: 96818 - RNA, 23 nt, synthetic construct
  source 1..23: mol_type = other RNA
tagcgggtccgggcactgctccg

SEQ ID NO: 96819 - RNA, 23 nt, synthetic construct
  source 1..23: mol_type = other RNA
tctgcattccacgacctggccca

SEQ ID NO: 96820 - RNA, 23 nt, synthetic construct
  source 1..23: mol_type = other RNA
tctgcattccacgacctggccca

SEQ ID NO: 96821 - RNA, 23 nt, synthetic construct
  source 1..23: mol_type = other RNA
tctgcattccacgacctggccca

SEQ ID NO: 96822 - RNA, 23 nt, synthetic construct
  source 1..23: mol_type = other RNA
tctgcattccacgacctggccca

SEQ ID NO: 96823 - RNA, 23 nt, synthetic construct
  source 1..23: mol_type = other RNA
tagttgcagcagaacacacggat

SEQ ID NO: 96824 - RNA, 23 nt, synthetic construct
  source 1..23: mol_type = other RNA
ttcgccagtcactgcacactccc

SEQ ID NO: 96825 - RNA, 23 nt, synthetic construct
  source 1..23: mol_type = other RNA
tgttcccaaactggagcggggtc

SEQ ID NO: 96826 - RNA, 23 nt, synthetic construct
  source 1..23: mol_type = other RNA
tgggcccatccaacttctgcagg

SEQ ID NO: 96827 - RNA, 23 nt, synthetic construct
  source 1..23: mol_type = other RNA
tggcagcggcacaggtcctgggc

SEQ ID NO: 96828 - RNA, 23 nt, synthetic construct
  source 1..23: mol_type = other RNA
tggatggccgtgtccccgccgtc

SEQ ID NO: 96829 - RNA, 23 nt, synthetic construct
  source 1..23: mol_type = other RNA
tagttgcagcagaacacacggat

SEQ ID NO: 96830 - RNA, 23 nt, synthetic construct
  source 1..23: mol_type = other RNA
tagttgcagcagaacacacggat

SEQ ID NO: 96831 - RNA, 23 nt, synthetic construct
  source 1..23: mol_type = other RNA
ttcgtccccggagtggaggaggg

SEQ ID NO: 96832 - RNA, 23 nt, synthetic construct
  source 1..23: mol_type = other RNA
taggccacgcaggtgcccaggca

SEQ ID NO: 96833 - RNA, 23 nt, synthetic construct
  source 1..23: mol_type = other RNA
ttgaagtggccatccccgtaggc

SEQ ID NO: 96834 - RNA, 23 nt, synthetic construct
  source 1..23: mol_type = other RNA
ttgcggaaggtcccgtgggtggt

SEQ ID NO: 96835 - RNA, 23 nt, synthetic construct
  source 1..23: mol_type = other RNA
tgttccaggacatgccacagcct

SEQ ID NO: 96836 - RNA, 23 nt, synthetic construct
  source 1..23: mol_type = other RNA
ttcctggtgcagtcggatgaaca

SEQ ID NO: 96837 - RNA, 23 nt, synthetic construct
  source 1..23: mol_type = other RNA
tcgcacctggccaccgtgcagtt

SEQ ID NO: 96838 - RNA, 23 nt, synthetic construct
  source 1..23: mol_type = other RNA
tggcaggtttttaggcagggtgc

SEQ ID NO: 96839 - RNA, 23 nt, synthetic construct
  source 1..23: mol_type = other RNA
tgagcgcactggatgccactggg

SEQ ID NO: 96840 - RNA, 23 nt, synthetic construct
  source 1..23: mol_type = other RNA
tgttgtagatgacgtcctggtag

SEQ ID NO: 96841 - RNA, 23 nt, synthetic construct
  source 1..23: mol_type = other RNA
tgtccgggcactgctccgtgggc

SEQ ID NO: 96842 - RNA, 23 nt, synthetic construct
  source 1..23: mol_type = other RNA
tcggcaggtttttaggcagggtg

SEQ ID NO: 96843 - RNA, 23 nt, synthetic construct
  source 1..23: mol_type = other RNA
tctgttggcgcacatcagccccc

SEQ ID NO: 96844 - RNA, 23 nt, synthetic construct
  source 1..23: mol_type = other RNA
tggtgatgaagtggccatccccg

SEQ ID NO: 96845 - RNA, 23 nt, synthetic construct
  source 1..23: mol_type = other RNA
tccactgacaccggggctggcag

SEQ ID NO: 96846 - RNA, 23 nt, synthetic construct
  source 1..23: mol_type = other RNA
tgcacatcttgaacttccccacc

SEQ ID NO: 96847 - RNA, 23 nt, synthetic construct
  source 1..23: mol_type = other RNA
tgcacatcttgaacttccccacc

SEQ ID NO: 96848 - RNA, 23 nt, synthetic construct
  source 1..23: mol_type = other RNA
tgcacatcttgaacttccccacc

SEQ ID NO: 96849 - RNA, 23 nt, synthetic construct
  source 1..23: mol_type = other RNA
tgcacatcttgaacttccccacc

SEQ ID NO: 96850 - RNA, 23 nt, synthetic construct
  source 1..23: mol_type = other RNA
ttgtccaaatgccctgcagaagc

SEQ ID NO: 96851 - RNA, 23 nt, synthetic construct
  source 1..23: mol_type = other RNA
tctgtagggcagccgggcctgga

SEQ ID NO: 96852 - RNA, 23 nt, synthetic construct
  source 1..23: mol_type = other RNA
ttgcccactggggttccggcagg

SEQ ID NO: 96853 - RNA, 23 nt, synthetic construct
  source 1..23: mol_type = other RNA
tgtcctcctcacaggagtagcag

SEQ ID NO: 96854 - RNA, 23 nt, synthetic construct
  source 1..23: mol_type = other RNA
tgacagacacagccggacacgca

SEQ ID NO: 96855 - RNA, 23 nt, synthetic construct
  source 1..23: mol_type = other RNA
tcccacagtagtcctgggccaag

SEQ ID NO: 96856 - RNA, 23 nt, synthetic construct
  source 1..23: mol_type = other RNA
taagggcaccgtctcctcgtgga

SEQ ID NO: 96857 - RNA, 23 nt, synthetic construct
  source 1..23: mol_type = other RNA
tgggaagctctcggcctggcact

SEQ ID NO: 96858 - RNA, 23 nt, synthetic construct
  source 1..23: mol_type = other RNA
tcagcggcagacctcgcggacac

SEQ ID NO: 96859 - RNA, 23 nt, synthetic construct
  source 1..23: mol_type = other RNA
tgatggccgtgtccccgccgtcc

SEQ ID NO: 96860 - RNA, 23 nt, synthetic construct
  source 1..23: mol_type = other RNA
taggcacagcaggctccgtgctg

SEQ ID NO: 96861 - RNA, 23 nt, synthetic construct
  source 1..23: mol_type = other RNA
taaggctgtgagcgcactggatg

SEQ ID NO: 96862 - RNA, 23 nt, synthetic construct
  source 1..23: mol_type = other RNA
tgtgaaggtgaatggcgttgtgg

SEQ ID NO: 96863 - RNA, 23 nt, synthetic construct
  source 1..23: mol_type = other RNA
tgggcactgctccgtgggcccat

SEQ ID NO: 96864 - RNA, 23 nt, synthetic construct
  source 1..23: mol_type = other RNA
tctggggctcacagcccgtggtc

SEQ ID NO: 96865 - RNA, 23 nt, synthetic construct
  source 1..23: mol_type = other RNA
tctggggctcacagcccgtggtc

SEQ ID NO: 96866 - RNA, 23 nt, synthetic construct
  source 1..23: mol_type = other RNA
tctggttgttggtgcaggtgccg

SEQ ID NO: 96867 - RNA, 23 nt, synthetic construct
  source 1..23: mol_type = other RNA
tactcaacgtcccctccaagttg

SEQ ID NO: 96868 - RNA, 23 nt, synthetic construct
  source 1..23: mol_type = other RNA
tcaggtgtccggagtccgccagg

SEQ ID NO: 96869 - RNA, 23 nt, synthetic construct
  source 1..23: mol_type = other RNA
tcgcactcatagtggaagtcaca

SEQ ID NO: 96870 - RNA, 23 nt, synthetic construct
  source 1..23: mol_type = other RNA
tggccaccgtgcagttctccagg

SEQ ID NO: 96871 - RNA, 23 nt, synthetic construct
  source 1..23: mol_type = other RNA
tgccccgggggacagacacagcc

SEQ ID NO: 96872 - RNA, 23 nt, synthetic construct
  source 1..23: mol_type = other RNA
ttggggttccggcaggtttttag

SEQ ID NO: 96873 - RNA, 23 nt, synthetic construct
  source 1..23: mol_type = other RNA
ttgggttctgtggagcctgcagg

SEQ ID NO: 96874 - RNA, 23 nt, synthetic construct
  source 1..23: mol_type = other RNA
ttgatgggcaggtgcttgttcac

SEQ ID NO: 96875 - RNA, 23 nt, synthetic construct
  source 1..23: mol_type = other RNA
ttccctctggttgttggtgcagg

SEQ ID NO: 96876 - RNA, 23 nt, synthetic construct
  source 1..23: mol_type = other RNA
ttccccacagtagtcctgggcca

SEQ ID NO: 96877 - RNA, 23 nt, synthetic construct
  source 1..23: mol_type = other RNA
ttggttgaagttcccacacaggc

SEQ ID NO: 96878 - RNA, 23 nt, synthetic construct
  source 1..23: mol_type = other RNA
tctgcgtgtagatggagttgagg

SEQ ID NO: 96879 - RNA, 23 nt, synthetic construct
  source 1..23: mol_type = other RNA
tggtggtgccggtggtcccacag

SEQ ID NO: 96880 - RNA, 23 nt, synthetic construct
  source 1..23: mol_type = other RNA
tgcggcagacctcgcggacacac

SEQ ID NO: 96881 - RNA, 23 nt, synthetic construct
  source 1..23: mol_type = other RNA
taggggccacagggcacgtattc

SEQ ID NO: 96882 - RNA, 23 nt, synthetic construct
  source 1..23: mol_type = other RNA
tgtgggttctgtggagcctgcag

SEQ ID NO: 96883 - RNA, 23 nt, synthetic construct
  source 1..23: mol_type = other RNA
tgacagtgggttctgtggagcct

SEQ ID NO: 96884 - RNA, 23 nt, synthetic construct
  source 1..23: mol_type = other RNA
ttctggtcctcattgaagaaggg

SEQ ID NO: 96885 - RNA, 23 nt, synthetic construct
  source 1..23: mol_type = other RNA
tacgacctggcccaactcccgca

SEQ ID NO: 96886 - RNA, 23 nt, synthetic construct
  source 1..23: mol_type = other RNA
tcatcaaaccactctgtccactg

SEQ ID NO: 96887 - RNA, 23 nt, synthetic construct
  source 1..23: mol_type = other RNA
tcggatggccgtgtccccgccgt

SEQ ID NO: 96888 - RNA, 23 nt, synthetic construct
  source 1..23: mol_type = other RNA
tacgacctggcccaactcccgca

SEQ ID NO: 96889 - RNA, 23 nt, synthetic construct
  source 1..23: mol_type = other RNA
tacgacctggcccaactcccgca

SEQ ID NO: 96890 - RNA, 23 nt, synthetic construct
  source 1..23: mol_type = other RNA
tgtggtccctagggcagaggagg

SEQ ID NO: 96891 - RNA, 23 nt, synthetic construct
  source 1..23: mol_type = other RNA
tcgtcacagtgcaccttctgccc

SEQ ID NO: 96892 - RNA, 23 nt, synthetic construct
  source 1..23: mol_type = other RNA
tggcactgctccgtgggcccatc

SEQ ID NO: 96893 - RNA, 23 nt, synthetic construct
  source 1..23: mol_type = other RNA
ttgagcgcactggatgccactgg

SEQ ID NO: 96894 - RNA, 23 nt, synthetic construct
  source 1..23: mol_type = other RNA
tcctcgccagtcactgcacactc

SEQ ID NO: 96895 - RNA, 23 nt, synthetic construct
  source 1..23: mol_type = other RNA
tgacagaacgtagctgcagtcac

SEQ ID NO: 96896 - RNA, 23 nt, synthetic construct
  source 1..23: mol_type = other RNA
tgtgcagccgtccacaggcacga

SEQ ID NO: 96897 - RNA, 23 nt, synthetic construct
  source 1..23: mol_type = other RNA
tctggcaggtggtggtacctggg

SEQ ID NO: 96898 - RNA, 23 nt, synthetic construct
  source 1..23: mol_type = other RNA
ttaggcagggtgccccgcagggc

SEQ ID NO: 96899 - RNA, 23 nt, synthetic construct
  source 1..23: mol_type = other RNA
tgtggtccctagggcagaggagg

SEQ ID NO: 96900 - RNA, 23 nt, synthetic construct
  source 1..23: mol_type = other RNA
tgtggtccctagggcagaggagg

SEQ ID NO: 96901 - RNA, 23 nt, synthetic construct
  source 1..23: mol_type = other RNA
tgtggtccctagggcagaggagg

SEQ ID NO: 96902 - RNA, 23 nt, synthetic construct
  source 1..23: mol_type = other RNA
tcgcactggcgtgagtattccac

SEQ ID NO: 96903 - RNA, 23 nt, synthetic construct
  source 1..23: mol_type = other RNA
tccgtcaaaggtggaatagtggg

SEQ ID NO: 96904 - RNA, 23 nt, synthetic construct
  source 1..23: mol_type = other RNA
ttccccgtaggccacgcaggtgc

SEQ ID NO: 96905 - RNA, 23 nt, synthetic construct
  source 1..23: mol_type = other RNA
ttgggttgtagaagtcacagaac

SEQ ID NO: 96906 - RNA, 23 nt, synthetic construct
  source 1..23: mol_type = other RNA
ttggggtgtgggaagtcaccgtg

SEQ ID NO: 96907 - RNA, 23 nt, synthetic construct
  source 1..23: mol_type = other RNA
tgttgtcacccacgcacctggcc

SEQ ID NO: 96908 - RNA, 23 nt, synthetic construct
  source 1..23: mol_type = other RNA
ttgcaggtgacgtcggcctcact

SEQ ID NO: 96909 - RNA, 23 nt, synthetic construct
  source 1..23: mol_type = other RNA
tgtggtcttttcggttgctgtgg

SEQ ID NO: 96910 - RNA, 23 nt, synthetic construct
  source 1..23: mol_type = other RNA
tcctcattgaagaagggctggct

SEQ ID NO: 96911 - RNA, 23 nt, synthetic construct
  source 1..23: mol_type = other RNA
tacgggtgaccacaggcctggag

SEQ ID NO: 96912 - RNA, 23 nt, synthetic construct
  source 1..23: mol_type = other RNA
tggtggctgcactcccacctccg

SEQ ID NO: 96913 - RNA, 23 nt, synthetic construct
  source 1..23: mol_type = other RNA
ttcgtagcagccacactgggcca

SEQ ID NO: 96914 - RNA, 23 nt, synthetic construct
  source 1..23: mol_type = other RNA
ttccggtcccaggacacggccat

SEQ ID NO: 96915 - RNA, 23 nt, synthetic construct
  source 1..23: mol_type = other RNA
tgacgggtggaacaaagctcacg

SEQ ID NO: 96916 - RNA, 23 nt, synthetic construct
  source 1..23: mol_type = other RNA
tcaggagtcctcctcacaggagt

SEQ ID NO: 96917 - RNA, 23 nt, synthetic construct
  source 1..23: mol_type = other RNA
tccgtagttgcagcagaacacac

SEQ ID NO: 96918 - RNA, 23 nt, synthetic construct
  source 1..23: mol_type = other RNA
tccgtagttgcagcagaacacac

SEQ ID NO: 96919 - RNA, 23 nt, synthetic construct
  source 1..23: mol_type = other RNA
tccgtagttgcagcagaacacac

SEQ ID NO: 96920 - RNA, 23 nt, synthetic construct
  source 1..23: mol_type = other RNA
tccgtagttgcagcagaacacac

SEQ ID NO: 96921 - RNA, 23 nt, synthetic construct
  source 1..23: mol_type = other RNA
tatgggcccgggggcacaaggtt

SEQ ID NO: 96922 - RNA, 23 nt, synthetic construct
  source 1..23: mol_type = other RNA
tgccatgggcgcagggacacaga

SEQ ID NO: 96923 - RNA, 23 nt, synthetic construct
  source 1..23: mol_type = other RNA
ttgacgggtggaacaaagctcac

SEQ ID NO: 96924 - RNA, 23 nt, synthetic construct
  source 1..23: mol_type = other RNA
tactcgcactcatagtggaagtc

SEQ ID NO: 96925 - RNA, 23 nt, synthetic construct
  source 1..23: mol_type = other RNA
tacgcacctggccaccgtgcagt

SEQ ID NO: 96926 - RNA, 23 nt, synthetic construct
  source 1..23: mol_type = other RNA
ttgacaccggggctggcaggtgg

SEQ ID NO: 96927 - RNA, 23 nt, synthetic construct
  source 1..23: mol_type = other RNA
tgcattccacgacctggcccaac

SEQ ID NO: 96928 - RNA, 23 nt, synthetic construct
  source 1..23: mol_type = other RNA
tcgccgttcttgctgaaaccgct

SEQ ID NO: 96929 - RNA, 23 nt, synthetic construct
  source 1..23: mol_type = other RNA
tgcattccacgacctggcccaac

SEQ ID NO: 96930 - RNA, 23 nt, synthetic construct
  source 1..23: mol_type = other RNA
tctggccccccgcgtgggcgcac

SEQ ID NO: 96931 - RNA, 23 nt, synthetic construct
  source 1..23: mol_type = other RNA
tggacccggatggccgtgtcccc

SEQ ID NO: 96932 - RNA, 23 nt, synthetic construct
  source 1..23: mol_type = other RNA
tgcattccacgacctggcccaac

SEQ ID NO: 96933 - RNA, 23 nt, synthetic construct
  source 1..23: mol_type = other RNA
tgacacagccggacacgcagtgt

SEQ ID NO: 96934 - RNA, 23 nt, synthetic construct
  source 1..23: mol_type = other RNA
tgcattccacgacctggcccaac

SEQ ID NO: 96935 - RNA, 23 nt, synthetic construct
  source 1..23: mol_type = other RNA
tagttcgagtggaagggcttggg

SEQ ID NO: 96936 - RNA, 23 nt, synthetic construct
  source 1..23: mol_type = other RNA
tccgatgtggggctgctgggcag

SEQ ID NO: 96937 - RNA, 23 nt, synthetic construct
  source 1..23: mol_type = other RNA
tccgatgtggggctgctgggcag

SEQ ID NO: 96938 - RNA, 23 nt, synthetic construct
  source 1..23: mol_type = other RNA
tagggcacggcaggtcctggcac

SEQ ID NO: 96939 - RNA, 23 nt, synthetic construct
  source 1..23: mol_type = other RNA
tccgatgtggggctgctgggcag

SEQ ID NO: 96940 - RNA, 23 nt, synthetic construct
  source 1..23: mol_type = other RNA
tctggttgaagttcccacacagg

SEQ ID NO: 96941 - RNA, 23 nt, synthetic construct
  source 1..23: mol_type = other RNA
tcctgcccttgtagtcctggtgc

SEQ ID NO: 96942 - RNA, 23 nt, synthetic construct
  source 1..23: mol_type = other RNA
tccgatgtggggctgctgggcag

SEQ ID NO: 96943 - RNA, 23 nt, synthetic construct
  source 1..23: mol_type = other RNA
tagctcgtagctctccacgaaga

SEQ ID NO: 96944 - RNA, 23 nt, synthetic construct
  source 1..23: mol_type = other RNA
tggctccgtgctggcactgaggg

SEQ ID NO: 96945 - RNA, 23 nt, synthetic construct
  source 1..23: mol_type = other RNA
ttcaaaccactctgtccactgac

SEQ ID NO: 96946 - RNA, 23 nt, synthetic construct
  source 1..23: mol_type = other RNA
tatctgggggatgtcagtccttc

SEQ ID NO: 96947 - RNA, 23 nt, synthetic construct
  source 1..23: mol_type = other RNA
ttcaaaccactctgtccactcac

SEQ ID NO: 96948 - RNA, 23 nt, synthetic construct
  source 1..23: mol_type = other RNA
tgtagttgcagcagaacacacgg

SEQ ID NO: 96949 - RNA, 23 nt, synthetic construct
  source 1..23: mol_type = other RNA
ttaaagctggtagctgtgggtgt

SEQ ID NO: 96950 - RNA, 23 nt, synthetic construct
  source 1..23: mol_type = other RNA
tgtagttgcagcagaacacacgg

SEQ ID NO: 96951 - RNA, 23 nt, synthetic construct
  source 1..23: mol_type = other RNA
tgtagttgcagcagaacacacgg

SEQ ID NO: 96952 - RNA, 23 nt, synthetic construct
  source 1..23: mol_type = other RNA
ttaaagctggtagctgtgggtgt

SEQ ID NO: 96953 - RNA, 23 nt, synthetic construct
  source 1..23: mol_type = other RNA
tgtagttgcagcagaacacacgg

SEQ ID NO: 96954 - RNA, 23 nt, synthetic construct
  source 1..23: mol_type = other RNA
ttaaagctggtagctgtgggtgt

SEQ ID NO: 96955 - RNA, 23 nt, synthetic construct
  source 1..23: mol_type = other RNA
tgttgggtcctgggtgtccccag

SEQ ID NO: 96956 - RNA, 23 nt, synthetic construct
  source 1..23: mol_type = other RNA
tcaagcccatcggtggtgttgta

SEQ ID NO: 96957 - RNA, 23 nt, synthetic construct
  source 1..23: mol_type = other RNA
tgaacagggtgatgttggctgcc

SEQ ID NO: 96958 - RNA, 23 nt, synthetic construct
  source 1..23: mol_type = other RNA
tctgctcacagacggcccctccg

SEQ ID NO: 96959 - RNA, 23 nt, synthetic construct
  source 1..23: mol_type = other RNA
tacgtcggcctcactcaggccgc

SEQ ID NO: 96960 - RNA, 23 nt, synthetic construct
  source 1..23: mol_type = other RNA
tctgctcacagacggcccctccg

SEQ ID NO: 96961 - RNA, 23 nt, synthetic construct
  source 1..23: mol_type = other RNA
tacacgcagtgtgtgctgaaaca

SEQ ID NO: 96962 - RNA, 23 nt, synthetic construct
  source 1..23: mol_type = other RNA
tggtcttccggtcccaggacacg

SEQ ID NO: 96963 - RNA, 23 nt, synthetic construct
  source 1..23: mol_type = other RNA
tctgctcacagacggcccctccg

SEQ ID NO: 96964 - RNA, 23 nt, synthetic construct
  source 1..23: mol_type = other RNA
tggttgaagttcccacacaggcc

SEQ ID NO: 96965 - RNA, 23 nt, synthetic construct
  source 1..23: mol_type = other RNA
tcctggcactctatgtccttagg

SEQ ID NO: 96966 - RNA, 23 nt, synthetic construct
  source 1..23: mol_type = other RNA
tgtccggagtccgccaggacaca

SEQ ID NO: 96967 - RNA, 23 nt, synthetic construct
  source 1..23: mol_type = other RNA
tcggcagacctcgcggacacaca

SEQ ID NO: 96968 - RNA, 23 nt, synthetic construct
  source 1..23: mol_type = other RNA
tacagtccacctgctggcccagc

SEQ ID NO: 96969 - RNA, 23 nt, synthetic construct
  source 1..23: mol_type = other RNA
tcactgacaccggggctggcagg

SEQ ID NO: 96970 - RNA, 23 nt, synthetic construct
  source 1..23: mol_type = other RNA
tttcttgctgaaaccgctgctca

SEQ ID NO: 96971 - RNA, 23 nt, synthetic construct
  source 1..23: mol_type = other RNA
tgtagcagcagccggttttcctg

SEQ ID NO: 96972 - RNA, 23 nt, synthetic construct
  source 1..23: mol_type = other RNA
tgtgtgaacagggtgatgttggc

SEQ ID NO: 96973 - RNA, 23 nt, synthetic construct
  source 1..23: mol_type = other RNA
tagtcaacctgggagcggcaggc

SEQ ID NO: 96974 - RNA, 23 nt, synthetic construct
  source 1..23: mol_type = other RNA
tgtcctcatcaaaccactctgtc

SEQ ID NO: 96975 - RNA, 23 nt, synthetic construct
  source 1..23: mol_type = other RNA
ttgaggaggacacagtggacacg

SEQ ID NO: 96976 - RNA, 23 nt, synthetic construct
  source 1..23: mol_type = other RNA
tagcagggagtagagaagtggga

SEQ ID NO: 96977 - RNA, 23 nt, synthetic construct
  source 1..23: mol_type = other RNA
tctggccaccgtgcagttctcca

SEQ ID NO: 96978 - RNA, 23 nt, synthetic construct
  source 1..23: mol_type = other RNA
tacactttgatgggcaggtgctt

SEQ ID NO: 96979 - RNA, 23 nt, synthetic construct
  source 1..23: mol_type = other RNA
tggcacaggtcctgggcgcaggc

SEQ ID NO: 96980 - RNA, 23 nt, synthetic construct
  source 1..23: mol_type = other RNA
tacctcgccagtcactgcacact

SEQ ID NO: 96981 - RNA, 23 nt, synthetic construct
  source 1..23: mol_type = other RNA
tggctggccccccgcgtgggcgc

SEQ ID NO: 96982 - RNA, 23 nt, synthetic construct
  source 1..23: mol_type = other RNA
tagtagcagcagccggttttcct

SEQ ID NO: 96983 - RNA, 23 nt, synthetic construct
  source 1..23: mol_type = other RNA
taggtgttggcgaaggctgcgcc

SEQ ID NO: 96984 - RNA, 23 nt, synthetic construct
  source 1..23: mol_type = other RNA
tggtgtgaacagggtgatgttgg

SEQ ID NO: 96985 - RNA, 23 nt, synthetic construct
  source 1..23: mol_type = other RNA
ttccagcctgacaaacacctgca

SEQ ID NO: 96986 - RNA, 23 nt, synthetic construct
  source 1..23: mol_type = other RNA
tagcctggttctggttgaagttc

SEQ ID NO: 96987 - RNA, 23 nt, synthetic construct
  source 1..23: mol_type = other RNA
tggtcttttcggttgctgtggtc

SEQ ID NO: 96988 - RNA, 23 nt, synthetic construct
  source 1..23: mol_type = other RNA
tgccaccgtgcagttctccaggg

SEQ ID NO: 96989 - RNA, 23 nt, synthetic construct
  source 1..23: mol_type = other RNA
tgtcccacaggggatgttctcgg

SEQ ID NO: 96990 - RNA, 23 nt, synthetic construct
  source 1..23: mol_type = other RNA
tctcattgaagaagggctggctg

SEQ ID NO: 96991 - RNA, 23 nt, synthetic construct
  source 1..23: mol_type = other RNA
tgcactggcgtgagtattccaca

SEQ ID NO: 96992 - RNA, 23 nt, synthetic construct
  source 1..23: mol_type = other RNA
tagggccgggcttgtcgtggagt

SEQ ID NO: 96993 - RNA, 23 nt, synthetic construct
  source 1..23: mol_type = other RNA
tctcataggtgcaggtgcaggcc

SEQ ID NO: 96994 - RNA, 23 nt, synthetic construct
  source 1..23: mol_type = other RNA
tctccgtgctggcactgagggag

SEQ ID NO: 96995 - RNA, 23 nt, synthetic construct
  source 1..23: mol_type = other RNA
tcacatcttgaacttccccacct

SEQ ID NO: 96996 - RNA, 23 nt, synthetic construct
  source 1..23: mol_type = other RNA
tgcctggcactctatgtccttag

SEQ ID NO: 96997 - RNA, 23 nt, synthetic construct
  source 1..23: mol_type = other RNA
tggggaagctctcggcctggcac

SEQ ID NO: 96998 - RNA, 23 nt, synthetic construct
  source 1..23: mol_type = other RNA
tcacatcttgaacttccccacct

SEQ ID NO: 96999 - RNA, 23 nt, synthetic construct
  source 1..23: mol_type = other RNA
tcaggctcgtggtcagcggctct

SEQ ID NO: 97000 - RNA, 23 nt, synthetic construct
  source 1..23: mol_type = other RNA
tcacatcttgaacttccccacct

SEQ ID NO: 97001 - RNA, 23 nt, synthetic construct
  source 1..23: mol_type = other RNA
tcacatcttgaacttccccacct

SEQ ID NO: 97002 - RNA, 23 nt, synthetic construct
  source 1..23: mol_type = other RNA
taagctggtagctgtgggtgtgg

SEQ ID NO: 97003 - RNA, 23 nt, synthetic construct
  source 1..23: mol_type = other RNA
tactgtgggggtgtgggtggtcc

SEQ ID NO: 97004 - RNA, 23 nt, synthetic construct
  source 1..23: mol_type = other RNA
tcgtagttgcagcagaacacacg

SEQ ID NO: 97005 - RNA, 23 nt, synthetic construct
  source 1..23: mol_type = other RNA
tcgtagttgcagcagaacacacg

SEQ ID NO: 97006 - RNA, 23 nt, synthetic construct
  source 1..23: mol_type = other RNA
tcgtagttgcagcagaacacacg

SEQ ID NO: 97007 - RNA, 23 nt, synthetic construct
  source 1..23: mol_type = other RNA
tcgtagttgcagcagaacacacg

SEQ ID NO: 97008 - RNA, 23 nt, synthetic construct
  source 1..23: mol_type = other RNA
taagctggtagctgtgggtgtgg

SEQ ID NO: 97009 - RNA, 23 nt, synthetic construct
  source 1..23: mol_type = other RNA
tactgtgggggtgtgggtggtcc

SEQ ID NO: 97010 - RNA, 23 nt, synthetic construct
  source 1..23: mol_type = other RNA
tcaaaggccggccccagcagggt

SEQ ID NO: 97011 - RNA, 23 nt, synthetic construct
  source 1..23: mol_type = other RNA
tccgcaaaggccggccccagcag

SEQ ID NO: 97012 - RNA, 23 nt, synthetic construct
  source 1..23: mol_type = other RNA
taagctggtagctgtgggtgtgg

SEQ ID NO: 97013 - RNA, 23 nt, synthetic construct
  source 1..23: mol_type = other RNA
tgtagagaagtgggagctgggga

SEQ ID NO: 97014 - RNA, 23 nt, synthetic construct
  source 1..23: mol_type = other RNA
tctcgcactcatagtggaagtca

SEQ ID NO: 97015 - RNA, 23 nt, synthetic construct
  source 1..23: mol_type = other RNA
tcacaggtcctgggcgcaggcgg

SEQ ID NO: 97016 - RNA, 23 nt, synthetic construct
  source 1..23: mol_type = other RNA
ttagcagcagccggttttcctga

SEQ ID NO: 97017 - RNA, 23 nt, synthetic construct
  source 1..23: mol_type = other RNA
tcaccgtgcctggggggcagaag

SEQ ID NO: 97018 - RNA, 23 nt, synthetic construct
  source 1..23: mol_type = other RNA
tgccgacaggggcagctgcgtgt

SEQ ID NO: 97019 - RNA, 23 nt, synthetic construct
  source 1..23: mol_type = other RNA
tgtggctgcactcccacctccgg

SEQ ID NO: 97020 - RNA, 23 nt, synthetic construct
  source 1..23: mol_type = other RNA
tggtgttggcgaaggctgcgccc

SEQ ID NO: 97021 - RNA, 23 nt, synthetic construct
  source 1..23: mol_type = other RNA
tggctgtaaagctggtagctgtg

SEQ ID NO: 97022 - RNA, 23 nt, synthetic construct
  source 1..23: mol_type = other RNA
tggctgtaaagctggtagctgtg

SEQ ID NO: 97023 - RNA, 23 nt, synthetic construct
  source 1..23: mol_type = other RNA
tggctgtaaagctggtagctgtg

SEQ ID NO: 97024 - RNA, 23 nt, synthetic construct
  source 1..23: mol_type = other RNA
tatccccgtaggccacgcaggtg

SEQ ID NO: 97025 - RNA, 23 nt, synthetic construct
  source 1..23: mol_type = other RNA
tccctctggttgttggtgcaggt

SEQ ID NO: 97026 - RNA, 23 nt, synthetic construct
  source 1..23: mol_type = other RNA
tcagttacagctctggcagttct

SEQ ID NO: 97027 - RNA, 23 nt, synthetic construct
  source 1..23: mol_type = other RNA
tgcagttacagctctggcagttc

SEQ ID NO: 97028 - RNA, 23 nt, synthetic construct
  source 1..23: mol_type = other RNA
tggtaccctctctgcctcaggtt

SEQ ID NO: 97029 - RNA, 23 nt, synthetic construct
  source 1..23: mol_type = other RNA
ttcctcatcaaaccactctgtcc

SEQ ID NO: 97030 - RNA, 23 nt, synthetic construct
  source 1..23: mol_type = other RNA
tcacccctgggacagtgggttct

SEQ ID NO: 97031 - RNA, 23 nt, synthetic construct
  source 1..23: mol_type = other RNA
tgtcgtagcagccacactgggcc

SEQ ID NO: 97032 - RNA, 23 nt, synthetic construct
  source 1..23: mol_type = other RNA
ttgtgaacagggtgatgttggct

SEQ ID NO: 97033 - RNA, 23 nt, synthetic construct
  source 1..23: mol_type = other RNA
tgaccaggcacactggggctcac

SEQ ID NO: 97034 - RNA, 23 nt, synthetic construct
  source 1..23: mol_type = other RNA
tcaacctgggagcggcaggcggc

SEQ ID NO: 97035 - RNA, 23 nt, synthetic construct
  source 1..23: mol_type = other RNA
tgagggtgtgaacagggtgatgt

SEQ ID NO: 97036 - RNA, 23 nt, synthetic construct
  source 1..23: mol_type = other RNA
tgtcacagtgcaccttctgcccc

SEQ ID NO: 97037 - RNA, 23 nt, synthetic construct
  source 1..23: mol_type = other RNA
tcattccacgacctggcccaact

SEQ ID NO: 97038 - RNA, 23 nt, synthetic construct
  source 1..23: mol_type = other RNA
tgcagtgtgtgctgaaacagccc

SEQ ID NO: 97039 - RNA, 23 nt, synthetic construct
  source 1..23: mol_type = other RNA
tgaccaggcacactggggctcac

SEQ ID NO: 97040 - RNA, 23 nt, synthetic construct
  source 1..23: mol_type = other RNA
tcattccacgacctggcccaact

SEQ ID NO: 97041 - RNA, 23 nt, synthetic construct
  source 1..23: mol_type = other RNA
tgaccaggcacactggggctcac

SEQ ID NO: 97042 - RNA, 23 nt, synthetic construct
  source 1..23: mol_type = other RNA
tcattccacgacctggcccaact

SEQ ID NO: 97043 - RNA, 23 nt, synthetic construct
  source 1..23: mol_type = other RNA
tgaccaggcacactggggctcac

SEQ ID NO: 97044 - RNA, 23 nt, synthetic construct
  source 1..23: mol_type = other RNA
tcattccacgacctggcccaact

SEQ ID NO: 97045 - RNA, 23 nt, synthetic construct
  source 1..23: mol_type = other RNA
tgaagaatgggcccgggggcaca

SEQ ID NO: 97046 - RNA, 23 nt, synthetic construct
  source 1..23: mol_type = other RNA
ttggctgcactcccacctccggt

SEQ ID NO: 97047 - RNA, 23 nt, synthetic construct
  source 1..23: mol_type = other RNA
tcacgcaggactggcagttgctg

SEQ ID NO: 97048 - RNA, 23 nt, synthetic construct
  source 1..23: mol_type = other RNA
tactggtgctgcatggcctgggc

SEQ ID NO: 97049 - RNA, 23 nt, synthetic construct
  source 1..23: mol_type = other RNA
tgcgtgcagccacactcatccac

SEQ ID NO: 97050 - RNA, 23 nt, synthetic construct
  source 1..23: mol_type = other RNA
tgacgtcacagtgcaccttctgc

SEQ ID NO: 97051 - RNA, 23 nt, synthetic construct
  source 1..23: mol_type = other RNA
tgcggctgtaaggcagctcctcc

SEQ ID NO: 97052 - RNA, 23 nt, synthetic construct
  source 1..23: mol_type = other RNA
tgtagcagccacactgggccacg

SEQ ID NO: 97053 - RNA, 23 nt, synthetic construct
  source 1..23: mol_type = other RNA
tcaggcagttctcgttgtccgtc

SEQ ID NO: 97054 - RNA, 23 nt, synthetic construct
  source 1..23: mol_type = other RNA
ttaggccacgcaggtgcccaggc

SEQ ID NO: 97055 - RNA, 23 nt, synthetic construct
  source 1..23: mol_type = other RNA
tgacctggcccaactcccgcagg

SEQ ID NO: 97056 - RNA, 23 nt, synthetic construct
  source 1..23: mol_type = other RNA
tgacctggcccaactcccgcagg

SEQ ID NO: 97057 - RNA, 23 nt, synthetic construct
  source 1..23: mol_type = other RNA
tgacctggcccaactcccgcagg

SEQ ID NO: 97058 - RNA, 23 nt, synthetic construct
  source 1..23: mol_type = other RNA
tgtagtgccactcacagccccca

SEQ ID NO: 97059 - RNA, 23 nt, synthetic construct
  source 1..23: mol_type = other RNA
tcctggcccaactcccgcagggg

SEQ ID NO: 97060 - RNA, 23 nt, synthetic construct
  source 1..23: mol_type = other RNA
tacctggcccaactcccgcaggg

SEQ ID NO: 97061 - RNA, 23 nt, synthetic construct
  source 1..23: mol_type = other RNA
tctcaaggctgtgagcgcactgg

SEQ ID NO: 97062 - RNA, 23 nt, synthetic construct
  source 1..23: mol_type = other RNA
tcctggcccaactcccgcagggg

SEQ ID NO: 97063 - RNA, 23 nt, synthetic construct
  source 1..23: mol_type = other RNA
tacctggcccaactcccgcaggg

SEQ ID NO: 97064 - RNA, 23 nt, synthetic construct
  source 1..23: mol_type = other RNA
ttcccgcagggggacaccaggct

SEQ ID NO: 97065 - RNA, 23 nt, synthetic construct
  source 1..23: mol_type = other RNA
tcctggcccaactcccgcagggg

SEQ ID NO: 97066 - RNA, 23 nt, synthetic construct
  source 1..23: mol_type = other RNA
tacctggcccaactcccgcaggg

SEQ ID NO: 97067 - RNA, 23 nt, synthetic construct
  source 1..23: mol_type = other RNA
ttcccgcagggggacaccaggct

SEQ ID NO: 97068 - RNA, 23 nt, synthetic construct
  source 1..23: mol_type = other RNA
tctggagtggaggagggcgtggc

SEQ ID NO: 97069 - RNA, 23 nt, synthetic construct
  source 1..23: mol_type = other RNA
ttcccgcagggggacaccaggct

SEQ ID NO: 97070 - RNA, 23 nt, synthetic construct
  source 1..23: mol_type = other RNA
taagaatgggcccgggggcacaa

SEQ ID NO: 97071 - RNA, 23 nt, synthetic construct
  source 1..23: mol_type = other RNA
tgccgcacatctggccctggtgg

SEQ ID NO: 97072 - RNA, 23 nt, synthetic construct
  source 1..23: mol_type = other RNA
tggagtcctcctcacaggagtag

SEQ ID NO: 97073 - RNA, 23 nt, synthetic construct
  source 1..23: mol_type = other RNA
taagtggccatccccgtaggcca

SEQ ID NO: 97074 - RNA, 23 nt, synthetic construct
  source 1..23: mol_type = other RNA
ttcgtggagtgggggacccaggc

SEQ ID NO: 97075 - RNA, 23 nt, synthetic construct
  source 1..23: mol_type = other RNA
tgtagatgacgtcctggtagctg

SEQ ID NO: 97076 - RNA, 23 nt, synthetic construct
  source 1..23: mol_type = other RNA
tcgtccctctggttgttggtgca

SEQ ID NO: 97077 - RNA, 23 nt, synthetic construct
  source 1..23: mol_type = other RNA
tcgtccccggagtggaggagggc

SEQ ID NO: 97078 - RNA, 23 nt, synthetic construct
  source 1..23: mol_type = other RNA
tcacactgggccacgcacttcat

SEQ ID NO: 97079 - RNA, 23 nt, synthetic construct
  source 1..23: mol_type = other RNA
tcgtccccggagtggaggagggg

SEQ ID NO: 97080 - RNA, 23 nt, synthetic construct
  source 1..23: mol_type = other RNA
tccctgggacagtgggttctgtg

SEQ ID NO: 97081 - RNA, 23 nt, synthetic construct
  source 1..23: mol_type = other RNA
tcgtccccggagtggaggagggc

SEQ ID NO: 97082 - RNA, 23 nt, synthetic construct
  source 1..23: mol_type = other RNA
tcgtccccggagtggaggagggg

SEQ ID NO: 97083 - RNA, 23 nt, synthetic construct
  source 1..23: mol_type = other RNA
ttccaaatgccctgcagaagcag

SEQ ID NO: 97084 - RNA, 23 nt, synthetic construct
  source 1..23: mol_type = other RNA
taggctctggcagggcacctcaa

SEQ ID NO: 97085 - RNA, 23 nt, synthetic construct
  source 1..23: mol_type = other RNA
taggtggtgccggtggtcccaca

SEQ ID NO: 97086 - RNA, 23 nt, synthetic construct
  source 1..23: mol_type = other RNA
taccagctggaccagcggcagac

SEQ ID NO: 97087 - RNA, 23 nt, synthetic construct
  source 1..23: mol_type = other RNA
tgcagcggcacaggtcctgggcg

SEQ ID NO: 97088 - RNA, 23 nt, synthetic construct
  source 1..23: mol_type = other RNA
tgctggccccccgcgtgggcgca

SEQ ID NO: 97089 - RNA, 23 nt, synthetic construct
  source 1..23: mol_type = other RNA
tggggcactgcccgaggggcagg

SEQ ID NO: 97090 - RNA, 23 nt, synthetic construct
  source 1..23: mol_type = other RNA
tggtgccagggcacggcaggtcc

SEQ ID NO: 97091 - RNA, 23 nt, synthetic construct
  source 1..23: mol_type = other RNA
tggtccagcctgacaaacacctg

SEQ ID NO: 97092 - RNA, 23 nt, synthetic construct
  source 1..23: mol_type = other RNA
tgcggggtccagcctgacaaaca

SEQ ID NO: 97093 - RNA, 23 nt, synthetic construct
  source 1..23: mol_type = other RNA
tccgcacatctggccctggtggg

SEQ ID NO: 97094 - RNA, 23 nt, synthetic construct
  source 1..23: mol_type = other RNA
tgaggcactcggccccaggggtg

SEQ ID NO: 97095 - RNA, 23 nt, synthetic construct
  source 1..23: mol_type = other RNA
tcgggggacagacacagccggac

SEQ ID NO: 97096 - RNA, 23 nt, synthetic construct
  source 1..23: mol_type = other RNA
tgagcaggtggtgccggtggtcc

SEQ ID NO: 97097 - RNA, 23 nt, synthetic construct
  source 1..23: mol_type = other RNA
tgggtgccccgcagggctggtag

SEQ ID NO: 97098 - RNA, 23 nt, synthetic construct
  source 1..23: mol_type = other RNA
tggtttttaggcagggtgccccg

SEQ ID NO: 97099 - RNA, 23 nt, synthetic construct
  source 1..23: mol_type = other RNA
tgacatgccacagccttcctgat

SEQ ID NO: 97100 - RNA, 23 nt, synthetic construct
  source 1..23: mol_type = other RNA
ttaccagctggaccagcggcaga

SEQ ID NO: 97101 - RNA, 23 nt, synthetic construct
  source 1..23: mol_type = other RNA
tgtaccctctctgcctcaggttt

SEQ ID NO: 97102 - RNA, 23 nt, synthetic construct
  source 1..23: mol_type = other RNA
tggacagtgggttctgtggagcc

SEQ ID NO: 97103 - RNA, 23 nt, synthetic construct
  source 1..23: mol_type = other RNA
ttgtaaagctggtagctgtgggt

SEQ ID NO: 97104 - RNA, 23 nt, synthetic construct
  source 1..23: mol_type = other RNA
tcgtggccgtggtcctggaggtg

SEQ ID NO: 97105 - RNA, 23 nt, synthetic construct
  source 1..23: mol_type = other RNA
tccgtggccgtggtcctggaggt

SEQ ID NO: 97106 - RNA, 23 nt, synthetic construct
  source 1..23: mol_type = other RNA
tgccgtggccgtggtcctggagg

SEQ ID NO: 97107 - RNA, 23 nt, synthetic construct
  source 1..23: mol_type = other RNA
tggccgtggccgtggtcctggag

SEQ ID NO: 97108 - RNA, 23 nt, synthetic construct
  source 1..23: mol_type = other RNA
ttgtaaagctggtagctgtgggt

SEQ ID NO: 97109 - RNA, 23 nt, synthetic construct
  source 1..23: mol_type = other RNA
tcgtggccgtggtcctggaggtg

SEQ ID NO: 97110 - RNA, 23 nt, synthetic construct
  source 1..23: mol_type = other RNA
tccgtggccgtggtcctggaggt

SEQ ID NO: 97111 - RNA, 23 nt, synthetic construct
  source 1..23: mol_type = other RNA
tgccgtggccgtggtcctggagg

SEQ ID NO: 97112 - RNA, 23 nt, synthetic construct
  source 1..23: mol_type = other RNA
tggccgtggccgtggtcctggag

SEQ ID NO: 97113 - RNA, 23 nt, synthetic construct
  source 1..23: mol_type = other RNA
ttgtaaagctggtagctgtgggt

SEQ ID NO: 97114 - RNA, 23 nt, synthetic construct
  source 1..23: mol_type = other RNA
tttgatgggcaggtgcttgttca

SEQ ID NO: 97115 - RNA, 23 nt, synthetic construct
  source 1..23: mol_type = other RNA
tcaggctctggcagggcacctca

SEQ ID NO: 97116 - RNA, 23 nt, synthetic construct
  source 1..23: mol_type = other RNA
taggctccccctgcagctggaca

SEQ ID NO: 97117 - RNA, 23 nt, synthetic construct
  source 1..23: mol_type = other RNA
tcaggtggtggtacctggggccg

SEQ ID NO: 97118 - RNA, 23 nt, synthetic construct
  source 1..23: mol_type = other RNA
taggtgcccaggcagagccggtg

SEQ ID NO: 97119 - RNA, 23 nt, synthetic construct
  source 1..23: mol_type = other RNA
ttgtcacagccaggggcagggga

SEQ ID NO: 97120 - RNA, 23 nt, synthetic construct
  source 1..23: mol_type = other RNA
tggggacagacacagccggacac

SEQ ID NO: 97121 - RNA, 23 nt, synthetic construct
  source 1..23: mol_type = other RNA
tcggacacgcagtgtgtgctgaa

SEQ ID NO: 97122 - RNA, 23 nt, synthetic construct
  source 1..23: mol_type = other RNA
tacaccaggctgggcctgggcac

SEQ ID NO: 97123 - RNA, 23 nt, synthetic construct
  source 1..23: mol_type = other RNA
tacaccaggctgggcctgggcac

SEQ ID NO: 97124 - RNA, 23 nt, synthetic construct
  source 1..23: mol_type = other RNA
tacaccaggctgggcctgggcac

SEQ ID NO: 97125 - RNA, 23 nt, synthetic construct
  source 1..23: mol_type = other RNA
tacaccaggctgggcctgggcac

SEQ ID NO: 97126 - RNA, 23 nt, synthetic construct
  source 1..23: mol_type = other RNA
tgacagtcgtccctctggttgtt

SEQ ID NO: 97127 - RNA, 23 nt, synthetic construct
  source 1..23: mol_type = other RNA
tcggaccggctacgcgtggcaaa

SEQ ID NO: 97128 - RNA, 23 nt, synthetic construct
  source 1..23: mol_type = other RNA
tggcgttgtgggcatagaactcg

SEQ ID NO: 97129 - RNA, 23 nt, synthetic construct
  source 1..23: mol_type = other RNA
ttggttccgtcccgctggagaca

SEQ ID NO: 97130 - RNA, 23 nt, synthetic construct
  source 1..23: mol_type = other RNA
tagaagggcgtgcagccacactc

SEQ ID NO: 97131 - RNA, 23 nt, synthetic construct
  source 1..23: mol_type = other RNA
tagccaacaccagcgtccggcac

SEQ ID NO: 97132 - RNA, 23 nt, synthetic construct
  source 1..23: mol_type = other RNA
tcaccacggaccggctacgcgtg

SEQ ID NO: 97133 - RNA, 23 nt, synthetic construct
  source 1..23: mol_type = other RNA
tcagtcgtccctctggttgttgg

SEQ ID NO: 97134 - RNA, 23 nt, synthetic construct
  source 1..23: mol_type = other RNA
taggacacagtggacacgctgaa

SEQ ID NO: 97135 - RNA, 23 nt, synthetic construct
  source 1..23: mol_type = other RNA
tgttgagcagagggggctttggg

SEQ ID NO: 97136 - RNA, 23 nt, synthetic construct
  source 1..23: mol_type = other RNA
tggaccggctacgcgtggcaaag

SEQ ID NO: 97137 - RNA, 23 nt, synthetic construct
  source 1..23: mol_type = other RNA
ttgcggtcacagtccacctgctg

SEQ ID NO: 97138 - RNA, 23 nt, synthetic construct
  source 1..23: mol_type = other RNA
ttccgacactttgatgggcaggt

SEQ ID NO: 97139 - RNA, 23 nt, synthetic construct
  source 1..23: mol_type = other RNA
tgtccgacactttgatgggcagg

SEQ ID NO: 97140 - RNA, 23 nt, synthetic construct
  source 1..23: mol_type = other RNA
taagggcgtgcagccacactcat

SEQ ID NO: 97141 - RNA, 23 nt, synthetic construct
  source 1..23: mol_type = other RNA
ttgttccagggcgtcccagtgac

SEQ ID NO: 97142 - RNA, 23 nt, synthetic construct
  source 1..23: mol_type = other RNA
ttgtgaggatccaggtggtccct

SEQ ID NO: 97143 - RNA, 23 nt, synthetic construct
  source 1..23: mol_type = other RNA
ttgtgaggatccaggtggtccct

SEQ ID NO: 97144 - RNA, 23 nt, synthetic construct
  source 1..23: mol_type = other RNA
ttgtgaggatccaggtggtccct

SEQ ID NO: 97145 - RNA, 23 nt, synthetic construct
  source 1..23: mol_type = other RNA
ttgtgaggatccaggtggtccct

SEQ ID NO: 97146 - RNA, 23 nt, synthetic construct
  source 1..23: mol_type = other RNA
ttgtgaggatccaggtggtccct

SEQ ID NO: 97147 - RNA, 23 nt, synthetic construct
  source 1..23: mol_type = other RNA
ttgtgaggatccaggtggtccct

SEQ ID NO: 97148 - RNA, 23 nt, synthetic construct
  source 1..23: mol_type = other RNA
tccaggtggacagagcatgggga

SEQ ID NO: 97149 - RNA, 23 nt, synthetic construct
  source 1..23: mol_type = other RNA
tgctcgggtccgacactttgatg

SEQ ID NO: 97150 - RNA, 23 nt, synthetic construct
  source 1..23: mol_type = other RNA
ttcgggtccgacactttgatggg

SEQ ID NO: 97151 - RNA, 23 nt, synthetic construct
  source 1..23: mol_type = other RNA
ttccagggcgtcccagtgacatc

SEQ ID NO: 97152 - RNA, 23 nt, synthetic construct
  source 1..23: mol_type = other RNA
tctccaggtggacagagcatggg

SEQ ID NO: 97153 - RNA, 23 nt, synthetic construct
  source 1..23: mol_type = other RNA
tggatttcatagttgaagcacat

SEQ ID NO: 97154 - RNA, 23 nt, synthetic construct
  source 1..23: mol_type = other RNA
tggatttcatagttgaagcacat

SEQ ID NO: 97155 - RNA, 23 nt, synthetic construct
  source 1..23: mol_type = other RNA
tggatttcatagttgaagcacat

SEQ ID NO: 97156 - RNA, 23 nt, synthetic construct
  source 1..23: mol_type = other RNA
tggatttcatagttgaagcacat

SEQ ID NO: 97157 - RNA, 23 nt, synthetic construct
  source 1..23: mol_type = other RNA
ttgcctggaccagcctgtctgcc

SEQ ID NO: 97158 - RNA, 23 nt, synthetic construct
  source 1..23: mol_type = other RNA
tgaagggcgtgcagccacactca

SEQ ID NO: 97159 - RNA, 23 nt, synthetic construct
  source 1..23: mol_type = other RNA
tcaacaccagcgtccggcacgcg

SEQ ID NO: 97160 - RNA, 23 nt, synthetic construct
  source 1..23: mol_type = other RNA
tgtcgtccctggagtggaggagg

SEQ ID NO: 97161 - RNA, 23 nt, synthetic construct
  source 1..23: mol_type = other RNA
tcacactccccgggcgcggcaga

SEQ ID NO: 97162 - RNA, 23 nt, synthetic construct
  source 1..23: mol_type = other RNA
taggtggacagagcatggggatg

SEQ ID NO: 97163 - RNA, 23 nt, synthetic construct
  source 1..23: mol_type = other RNA
taggaggacacagtggacacgct

SEQ ID NO: 97164 - RNA, 23 nt, synthetic construct
  source 1..23: mol_type = other RNA
tgccaacaccagcgtccggcacg

SEQ ID NO: 97165 - RNA, 23 nt, synthetic construct
  source 1..23: mol_type = other RNA
tgagccaacaccagcgtccggca

SEQ ID NO: 97166 - RNA, 23 nt, synthetic construct
  source 1..23: mol_type = other RNA
tagagccaacaccagcgtccggc

SEQ ID NO: 97167 - RNA, 23 nt, synthetic construct
  source 1..23: mol_type = other RNA
tgtgtggcagctccggaggcact

SEQ ID NO: 97168 - RNA, 23 nt, synthetic construct
  source 1..23: mol_type = other RNA
tggtcgtccctggagtggaggag

SEQ ID NO: 97169 - RNA, 23 nt, synthetic construct
  source 1..23: mol_type = other RNA
tactttggtgggtgggcaggtga

SEQ ID NO: 97170 - RNA, 23 nt, synthetic construct
  source 1..23: mol_type = other RNA
tggctccaggtggacagagcatg

SEQ ID NO: 97171 - RNA, 23 nt, synthetic construct
  source 1..23: mol_type = other RNA
tggatccaggtggtccctggggt

SEQ ID NO: 97172 - RNA, 23 nt, synthetic construct
  source 1..23: mol_type = other RNA
tggatccaggtggtccctggggt

SEQ ID NO: 97173 - RNA, 23 nt, synthetic construct
  source 1..23: mol_type = other RNA
tggatccaggtggtccctggggt

SEQ ID NO: 97174 - RNA, 23 nt, synthetic construct
  source 1..23: mol_type = other RNA
tggatccaggtggtccctggggt

SEQ ID NO: 97175 - RNA, 23 nt, synthetic construct
  source 1..23: mol_type = other RNA
tggatccaggtggtccctggggt

SEQ ID NO: 97176 - RNA, 23 nt, synthetic construct
  source 1..23: mol_type = other RNA
tggatccaggtggtccctggggt

SEQ ID NO: 97177 - RNA, 23 nt, synthetic construct
  source 1..23: mol_type = other RNA
tcgtgtggcagctccggaggcac

SEQ ID NO: 97178 - RNA, 23 nt, synthetic construct
  source 1..23: mol_type = other RNA
tgttccagggcgtcccagtgaca

SEQ ID NO: 97179 - RNA, 23 nt, synthetic construct
  source 1..23: mol_type = other RNA
ttgtggcagctccggaggcactc

SEQ ID NO: 97180 - RNA, 23 nt, synthetic construct
  source 1..23: mol_type = other RNA
tcacagaagggcgtgcagccaca

SEQ ID NO: 97181 - RNA, 23 nt, synthetic construct
  source 1..23: mol_type = other RNA
tttcatagttgaagcacatcttg

SEQ ID NO: 97182 - RNA, 23 nt, synthetic construct
  source 1..23: mol_type = other RNA
tttcatagttgaagcacatcttg

SEQ ID NO: 97183 - RNA, 23 nt, synthetic construct
  source 1..23: mol_type = other RNA
tttggaactggtggctgtgggtg

SEQ ID NO: 97184 - RNA, 23 nt, synthetic construct
  source 1..23: mol_type = other RNA
tttcatagttgaagcacatcttg

SEQ ID NO: 97185 - RNA, 23 nt, synthetic construct
  source 1..23: mol_type = other RNA
tttcatagttgaagcacatcttg

SEQ ID NO: 97186 - RNA, 23 nt, synthetic construct
  source 1..23: mol_type = other RNA
tttggaactggtggctgtgggtg

SEQ ID NO: 97187 - RNA, 23 nt, synthetic construct
  source 1..23: mol_type = other RNA
ttcgtccccagagtggaggaggg

SEQ ID NO: 97188 - RNA, 23 nt, synthetic construct
  source 1..23: mol_type = other RNA
tagcatggggatggaggcagaac

SEQ ID NO: 97189 - RNA, 23 nt, synthetic construct
  source 1..23: mol_type = other RNA
taaggggtcctgctggcccctca

SEQ ID NO: 97190 - RNA, 23 nt, synthetic construct
  source 1..23: mol_type = other RNA
tgtggccgtggtggtaagcactg

SEQ ID NO: 97191 - RNA, 23 nt, synthetic construct
  source 1..23: mol_type = other RNA
tgtggccgtggtggtaagcactg

SEQ ID NO: 97192 - RNA, 23 nt, synthetic construct
  source 1..23: mol_type = other RNA
ttgggccttgatgacaacacggg

SEQ ID NO: 97193 - RNA, 23 nt, synthetic construct
  source 1..23: mol_type = other RNA
tcgtagttctcattctccacact

SEQ ID NO: 97194 - RNA, 23 nt, synthetic construct
  source 1..23: mol_type = other RNA
tttgatgacaacacgggtgacca

SEQ ID NO: 97195 - RNA, 23 nt, synthetic construct
  source 1..23: mol_type = other RNA
tgacagggctggagtcgagtgct

SEQ ID NO: 97196 - RNA, 23 nt, synthetic construct
  source 1..23: mol_type = other RNA
tgacagggctggagtcgagtgct

SEQ ID NO: 97197 - RNA, 23 nt, synthetic construct
  source 1..23: mol_type = other RNA
tgacagggctggagtcgagtgct

SEQ ID NO: 97198 - RNA, 23 nt, synthetic construct
  source 1..23: mol_type = other RNA
tggacgagctgggaaccgtggag

SEQ ID NO: 97199 - RNA, 23 nt, synthetic construct
  source 1..23: mol_type = other RNA
tgttctcattctccacactgagg

SEQ ID NO: 97200 - RNA, 23 nt, synthetic construct
  source 1..23: mol_type = other RNA
tccgtggtggtaagcactgtgga

SEQ ID NO: 97201 - RNA, 23 nt, synthetic construct
  source 1..23: mol_type = other RNA
tccgtggtggtaagcactgtgga

SEQ ID NO: 97202 - RNA, 23 nt, synthetic construct
  source 1..23: mol_type = other RNA
tctcatagtggaagtcacagggc

SEQ ID NO: 97203 - RNA, 23 nt, synthetic construct
  source 1..23: mol_type = other RNA
tcgccgtgggtgcaggggcactg

SEQ ID NO: 97204 - RNA, 23 nt, synthetic construct
  source 1..23: mol_type = other RNA
tacgagctgggaaccgtggaggc

SEQ ID NO: 97205 - RNA, 23 nt, synthetic construct
  source 1..23: mol_type = other RNA
tgacgagctgggaaccgtggagg

SEQ ID NO: 97206 - RNA, 23 nt, synthetic construct
  source 1..23: mol_type = other RNA
ttggtagtcagcactttggtagt

SEQ ID NO: 97207 - RNA, 23 nt, synthetic construct
  source 1..23: mol_type = other RNA
ttcggttgctgtggtctgggttg

SEQ ID NO: 97208 - RNA, 23 nt, synthetic construct
  source 1..23: mol_type = other RNA
tcctgggccttgatgacaacacg

SEQ ID NO: 97209 - RNA, 23 nt, synthetic construct
  source 1..23: mol_type = other RNA
tgtgcggccgccgtgggtgcagg

SEQ ID NO: 97210 - RNA, 23 nt, synthetic construct
  source 1..23: mol_type = other RNA
tgtcacagggctggctcgggtcc

SEQ ID NO: 97211 - RNA, 23 nt, synthetic construct
  source 1..23: mol_type = other RNA
ttgtgagctgttcctggggtgga

SEQ ID NO: 97212 - RNA, 23 nt, synthetic construct
  source 1..23: mol_type = other RNA
ttgtgagctgttcctggggtgga

SEQ ID NO: 97213 - RNA, 23 nt, synthetic construct
  source 1..23: mol_type = other RNA
ttgtgagctgttcctggggtgga

SEQ ID NO: 97214 - RNA, 23 nt, synthetic construct
  source 1..23: mol_type = other RNA
ttgtgagctgttcctggggtgga

SEQ ID NO: 97215 - RNA, 23 nt, synthetic construct
  source 1..23: mol_type = other RNA
ttgtgagctgttcctggggtgga

SEQ ID NO: 97216 - RNA, 23 nt, synthetic construct
  source 1..23: mol_type = other RNA
tgtggccgtagttgcagcagaac

SEQ ID NO: 97217 - RNA, 23 nt, synthetic construct
  source 1..23: mol_type = other RNA
tgtggccgtagttgcagcagaac

SEQ ID NO: 97218 - RNA, 23 nt, synthetic construct
  source 1..23: mol_type = other RNA
tgtggccgtagttgcagcagaac

SEQ ID NO: 97219 - RNA, 23 nt, synthetic construct
  source 1..23: mol_type = other RNA
tgtggccgtagttgcagcagaac

SEQ ID NO: 97220 - RNA, 23 nt, synthetic construct
  source 1..23: mol_type = other RNA
tgtcggtcttattgtagatgact

SEQ ID NO: 97221 - RNA, 23 nt, synthetic construct
  source 1..23: mol_type = other RNA
tgttgtccgtcaggccgcacttc

SEQ ID NO: 97222 - RNA, 23 nt, synthetic construct
  source 1..23: mol_type = other RNA
tgtggccgtgatcgtagtggccg

SEQ ID NO: 97223 - RNA, 23 nt, synthetic construct
  source 1..23: mol_type = other RNA
tgtggccgtgatcgtagtggccg

SEQ ID NO: 97224 - RNA, 23 nt, synthetic construct
  source 1..23: mol_type = other RNA
tgtggccgtgatcgtagtggccg

SEQ ID NO: 97225 - RNA, 23 nt, synthetic construct
  source 1..23: mol_type = other RNA
tgtggccgtgatcgtagtggccg

SEQ ID NO: 97226 - RNA, 23 nt, synthetic construct
  source 1..23: mol_type = other RNA
tgcaccgacactgaaccctcgtc

SEQ ID NO: 97227 - RNA, 23 nt, synthetic construct
  source 1..23: mol_type = other RNA
tttgtccgtcaggccgcacttcc

SEQ ID NO: 97228 - RNA, 23 nt, synthetic construct
  source 1..23: mol_type = other RNA
tcaaggggctcattgtcgtctct

SEQ ID NO: 97229 - RNA, 23 nt, synthetic construct
  source 1..23: mol_type = other RNA
tagtgttggcgccaggctcgtgg

SEQ ID NO: 97230 - RNA, 23 nt, synthetic construct
  source 1..23: mol_type = other RNA
tccagtgcgtggcactccgcaaa

SEQ ID NO: 97231 - RNA, 23 nt, synthetic construct
  source 1..23: mol_type = other RNA
tcatcagcccccgcatgcggtca

SEQ ID NO: 97232 - RNA, 23 nt, synthetic construct
  source 1..23: mol_type = other RNA
tgatccagtggactcagtcgtag

SEQ ID NO: 97233 - RNA, 23 nt, synthetic construct
  source 1..23: mol_type = other RNA
tgatccagtggactcagtcgtag

SEQ ID NO: 97234 - RNA, 23 nt, synthetic construct
  source 1..23: mol_type = other RNA
tgctcggggtcacccatagggtg

SEQ ID NO: 97235 - RNA, 23 nt, synthetic construct
  source 1..23: mol_type = other RNA
tgaaagggctggagtcgagtgct

SEQ ID NO: 97236 - RNA, 23 nt, synthetic construct
  source 1..23: mol_type = other RNA
tagccggtggccccggttgtggt

SEQ ID NO: 97237 - RNA, 23 nt, synthetic construct
  source 1..23: mol_type = other RNA
ttgatccacactggaagcgtgcg

SEQ ID NO: 97238 - RNA, 23 nt, synthetic construct
  source 1..23: mol_type = other RNA
tagccggtggccccggttgtggt

SEQ ID NO: 97239 - RNA, 23 nt, synthetic construct
  source 1..23: mol_type = other RNA
taggaatgtccacacgcatggtg

SEQ ID NO: 97240 - RNA, 23 nt, synthetic construct
  source 1..23: mol_type = other RNA
tcccccatgtgggttgtagaagt

SEQ ID NO: 97241 - RNA, 23 nt, synthetic construct
  source 1..23: mol_type = other RNA
tgaggagggcatggccgtagagc

SEQ ID NO: 97242 - RNA, 23 nt, synthetic construct
  source 1..23: mol_type = other RNA
tgaggagggcatggccgtagagc

SEQ ID NO: 97243 - RNA, 23 nt, synthetic construct
  source 1..23: mol_type = other RNA
tcagtggactcagtcgtagtggc

SEQ ID NO: 97244 - RNA, 23 nt, synthetic construct
  source 1..23: mol_type = other RNA
tcagtggactcagtcgtagtggc

SEQ ID NO: 97245 - RNA, 23 nt, synthetic construct
  source 1..23: mol_type = other RNA
tcatggggtagctgtagtccagc

SEQ ID NO: 97246 - RNA, 23 nt, synthetic construct
  source 1..23: mol_type = other RNA
tcatggggtagctgtagtccagc

SEQ ID NO: 97247 - RNA, 23 nt, synthetic construct
  source 1..23: mol_type = other RNA
tcatggggtagctgtagtccagc

SEQ ID NO: 97248 - RNA, 23 nt, synthetic construct
  source 1..23: mol_type = other RNA
tcatggggtagctgtagtccagc

SEQ ID NO: 97249 - RNA, 23 nt, synthetic construct
  source 1..23: mol_type = other RNA
tgaggacggagccgttggacgcc

SEQ ID NO: 97250 - RNA, 23 nt, synthetic construct
  source 1..23: mol_type = other RNA
tacggcactcgaggcccaggggc

SEQ ID NO: 97251 - RNA, 23 nt, synthetic construct
  source 1..23: mol_type = other RNA
tacggcactcgaggcccaggggc

SEQ ID NO: 97252 - RNA, 23 nt, synthetic construct
  source 1..23: mol_type = other RNA
tacggcactcgaggcccaggggc

SEQ ID NO: 97253 - RNA, 23 nt, synthetic construct
  source 1..23: mol_type = other RNA
tacggcactcgaggcccaggggc

SEQ ID NO: 97254 - RNA, 23 nt, synthetic construct
  source 1..23: mol_type = other RNA
tcgtatcttgtagggtgggtccc

SEQ ID NO: 97255 - RNA, 23 nt, synthetic construct
  source 1..23: mol_type = other RNA
tccgaagtggacgtcacagtgca

SEQ ID NO: 97256 - RNA, 23 nt, synthetic construct
  source 1..23: mol_type = other RNA
tcgatcaagcaggcgccaagccc

SEQ ID NO: 97257 - RNA, 23 nt, synthetic construct
  source 1..23: mol_type = other RNA
tgtcggggcaccgccatccatgg

SEQ ID NO: 97258 - RNA, 23 nt, synthetic construct
  source 1..23: mol_type = other RNA
tcgtgcgtgccgtccctgggctg

SEQ ID NO: 97259 - RNA, 23 nt, synthetic construct
  source 1..23: mol_type = other RNA
tcgtgcgtgccgtccctgggctg

SEQ ID NO: 97260 - RNA, 23 nt, synthetic construct
  source 1..23: mol_type = other RNA
tatccgtgctgcgcgggcgctcc

SEQ ID NO: 97261 - RNA, 23 nt, synthetic construct
  source 1..23: mol_type = other RNA
tgatcaagcaggcgccaagccca

SEQ ID NO: 97262 - RNA, 23 nt, synthetic construct
  source 1..23: mol_type = other RNA
tgatgcggacttgacaggagtcc

SEQ ID NO: 97263 - RNA, 23 nt, synthetic construct
  source 1..23: mol_type = other RNA
taccgccttaaaggtcccctctt

SEQ ID NO: 97264 - RNA, 23 nt, synthetic construct
  source 1..23: mol_type = other RNA
tcgtcttggccatgtccttgcaa

SEQ ID NO: 97265 - RNA, 23 nt, synthetic construct
  source 1..23: mol_type = other RNA
tccaagctccccgtcgtccctgg

SEQ ID NO: 97266 - RNA, 23 nt, synthetic construct
  source 1..23: mol_type = other RNA
taaaggtcccctcttggaggatc

SEQ ID NO: 97267 - RNA, 23 nt, synthetic construct
  source 1..23: mol_type = other RNA
taggtcgtccccggagtggagga

SEQ ID NO: 97268 - RNA, 23 nt, synthetic construct
  source 1..23: mol_type = other RNA
taggtcgtccccggagtggagga

SEQ ID NO: 97269 - RNA, 23 nt, synthetic construct
  source 1..23: mol_type = other RNA
taggtcgtccccggagtggagga

SEQ ID NO: 97270 - RNA, 23 nt, synthetic construct
  source 1..23: mol_type = other RNA
taggtcgtccccggagtggagga

SEQ ID NO: 97271 - RNA, 23 nt, synthetic construct
  source 1..23: mol_type = other RNA
tttgcaactggcggcagtggttc

SEQ ID NO: 97272 - RNA, 23 nt, synthetic construct
  source 1..23: mol_type = other RNA
tgacattgcaccgttgggtcctg

SEQ ID NO: 97273 - RNA, 23 nt, synthetic construct
  source 1..23: mol_type = other RNA
tgtaggtcctgtcctcataggtg

SEQ ID NO: 97274 - RNA, 23 nt, synthetic construct
  source 1..23: mol_type = other RNA
tggaacacgccgccgtccgcttg

SEQ ID NO: 97275 - RNA, 23 nt, synthetic construct
  source 1..23: mol_type = other RNA
ttcggggtcacccatagggtggt

SEQ ID NO: 97276 - RNA, 23 nt, synthetic construct
  source 1..23: mol_type = other RNA
tagccgtccacaggcacgaagga

SEQ ID NO: 97277 - RNA, 23 nt, synthetic construct
  source 1..23: mol_type = other RNA
tggctctttggaagcggtgctgg

SEQ ID NO: 97278 - RNA, 23 nt, synthetic construct
  source 1..23: mol_type = other RNA
ttcagtgctggaagggcggttgc

SEQ ID NO: 97279 - RNA, 23 nt, synthetic construct
  source 1..23: mol_type = other RNA
ttcagtgctggaagggcggttgc

SEQ ID NO: 97280 - RNA, 23 nt, synthetic construct
  source 1..23: mol_type = other RNA
tgagggcgtggccgtagagctgg

SEQ ID NO: 97281 - RNA, 23 nt, synthetic construct
  source 1..23: mol_type = other RNA
ttcagtgctggaagggcggttgc

SEQ ID NO: 97282 - RNA, 23 nt, synthetic construct
  source 1..23: mol_type = other RNA
tgagggcgtggccgtagagctgg

SEQ ID NO: 97283 - RNA, 23 nt, synthetic construct
  source 1..23: mol_type = other RNA
ttcagtgctggaagggcggttgc

SEQ ID NO: 97284 - RNA, 23 nt, synthetic construct
  source 1..23: mol_type = other RNA
taccatcacggtggctatagtgc

SEQ ID NO: 97285 - RNA, 23 nt, synthetic construct
  source 1..23: mol_type = other RNA
tagatgcccatgtgtgcgttgaa

SEQ ID NO: 97286 - RNA, 23 nt, synthetic construct
  source 1..23: mol_type = other RNA
tagtagtcctgggccaagatgta

SEQ ID NO: 97287 - RNA, 23 nt, synthetic construct
  source 1..23: mol_type = other RNA
tctcggggtcacccatagggtgg

SEQ ID NO: 97288 - RNA, 23 nt, synthetic construct
  source 1..23: mol_type = other RNA
tatgctcggggtcacccataggg

SEQ ID NO: 97289 - RNA, 23 nt, synthetic construct
  source 1..23: mol_type = other RNA
tcctgggcacggcactcgaggcc

SEQ ID NO: 97290 - RNA, 23 nt, synthetic construct
  source 1..23: mol_type = other RNA
tcctgggcacggcactcgaggcc

SEQ ID NO: 97291 - RNA, 23 nt, synthetic construct
  source 1..23: mol_type = other RNA
tcctgggcacggcactcgaggcc

SEQ ID NO: 97292 - RNA, 23 nt, synthetic construct
  source 1..23: mol_type = other RNA
tcctgggcacggcactcgaggcc

SEQ ID NO: 97293 - RNA, 23 nt, synthetic construct
  source 1..23: mol_type = other RNA
tgagggccgccgtcgaccggatg

SEQ ID NO: 97294 - RNA, 23 nt, synthetic construct
  source 1..23: mol_type = other RNA
ttcggctctgtgaggatccaggt

SEQ ID NO: 97295 - RNA, 23 nt, synthetic construct
  source 1..23: mol_type = other RNA
ttcggctctgtgaggatccaggt

SEQ ID NO: 97296 - RNA, 23 nt, synthetic construct
  source 1..23: mol_type = other RNA
ttcggctctgtgaggatccaggt

SEQ ID NO: 97297 - RNA, 23 nt, synthetic construct
  source 1..23: mol_type = other RNA
ttcggctctgtgaggatccaggt

SEQ ID NO: 97298 - RNA, 23 nt, synthetic construct
  source 1..23: mol_type = other RNA
tagggcacgtattcgcagcagag

SEQ ID NO: 97299 - RNA, 23 nt, synthetic construct
  source 1..23: mol_type = other RNA
tcggtttcacccacggggtgggc

SEQ ID NO: 97300 - RNA, 23 nt, synthetic construct
  source 1..23: mol_type = other RNA
tgtcgtccctggaagggctgagc

SEQ ID NO: 97301 - RNA, 23 nt, synthetic construct
  source 1..23: mol_type = other RNA
tgttgcggtcgtagtggctgctg

SEQ ID NO: 97302 - RNA, 23 nt, synthetic construct
  source 1..23: mol_type = other RNA
tacattgcaccgttgggtcctgg

SEQ ID NO: 97303 - RNA, 23 nt, synthetic construct
  source 1..23: mol_type = other RNA
tcgctggtcttccggtcccagga

SEQ ID NO: 97304 - RNA, 23 nt, synthetic construct
  source 1..23: mol_type = other RNA
tatccacactggaggcgtgagtg

SEQ ID NO: 97305 - RNA, 23 nt, synthetic construct
  source 1..23: mol_type = other RNA
tatccacactggaggcgtgagtg

SEQ ID NO: 97306 - RNA, 23 nt, synthetic construct
  source 1..23: mol_type = other RNA
tatccacactggaggcgtgagtg

SEQ ID NO: 97307 - RNA, 23 nt, synthetic construct
  source 1..23: mol_type = other RNA
tgggtccagcaggacgacacggt

SEQ ID NO: 97308 - RNA, 23 nt, synthetic construct
  source 1..23: mol_type = other RNA
tgtcccctgcagtggtcgtcact

SEQ ID NO: 97309 - RNA, 23 nt, synthetic construct
  source 1..23: mol_type = other RNA
tactgcaccgacactgaaccctc

SEQ ID NO: 97310 - RNA, 23 nt, synthetic construct
  source 1..23: mol_type = other RNA
tgtggactcagtcgtagtggctg

SEQ ID NO: 97311 - RNA, 23 nt, synthetic construct
  source 1..23: mol_type = other RNA
tgtggactcagtcgtagtggctg

SEQ ID NO: 97312 - RNA, 23 nt, synthetic construct
  source 1..23: mol_type = other RNA
tcgaaggaaacgctgcaggtgac

SEQ ID NO: 97313 - RNA, 23 nt, synthetic construct
  source 1..23: mol_type = other RNA
tagcgtgttggaagggtggatgt

SEQ ID NO: 97314 - RNA, 23 nt, synthetic construct
  source 1..23: mol_type = other RNA
tgcgtgcgtgccgtccctgggct

SEQ ID NO: 97315 - RNA, 23 nt, synthetic construct
  source 1..23: mol_type = other RNA
tgcgtgcgtgccgtccctgggct

SEQ ID NO: 97316 - RNA, 23 nt, synthetic construct
  source 1..23: mol_type = other RNA
ttcaccgtggaacctctggttgt

SEQ ID NO: 97317 - RNA, 23 nt, synthetic construct
  source 1..23: mol_type = other RNA
tacctcaaggcggcccctgcagt

SEQ ID NO: 97318 - RNA, 23 nt, synthetic construct
  source 1..23: mol_type = other RNA
taccaagggtgcttgtgtatctg

SEQ ID NO: 97319 - RNA, 23 nt, synthetic construct
  source 1..23: mol_type = other RNA
tattcacctgccggagagggatg

SEQ ID NO: 97320 - RNA, 23 nt, synthetic construct
  source 1..23: mol_type = other RNA
tacatgcttagtttgttccaggg

SEQ ID NO: 97321 - RNA, 23 nt, synthetic construct
  source 1..23: mol_type = other RNA
tcgtatttgggatccagctccag

SEQ ID NO: 97322 - RNA, 23 nt, synthetic construct
  source 1..23: mol_type = other RNA
tggcgtgcgtgccgtccctgggc

SEQ ID NO: 97323 - RNA, 23 nt, synthetic construct
  source 1..23: mol_type = other RNA
ttcgtccgtgcagttgccggccg

SEQ ID NO: 97324 - RNA, 23 nt, synthetic construct
  source 1..23: mol_type = other RNA
tagtttccgtccttgtcgtagca

SEQ ID NO: 97325 - RNA, 23 nt, synthetic construct
  source 1..23: mol_type = other RNA
ttgcgtcccccaccacggaccgg

SEQ ID NO: 97326 - RNA, 23 nt, synthetic construct
  source 1..23: mol_type = other RNA
ttaggcgtagcgctgggacttgg

SEQ ID NO: 97327 - RNA, 23 nt, synthetic construct
  source 1..23: mol_type = other RNA
tggggagtaccactggtctgtgt

SEQ ID NO: 97328 - RNA, 23 nt, synthetic construct
  source 1..23: mol_type = other RNA
tggggagtaccactggtctgtgt

SEQ ID NO: 97329 - RNA, 23 nt, synthetic construct
  source 1..23: mol_type = other RNA
tggggagtaccactggtctgtgt

SEQ ID NO: 97330 - RNA, 23 nt, synthetic construct
  source 1..23: mol_type = other RNA
tggggagtaccactggtctgtgt

SEQ ID NO: 97331 - RNA, 23 nt, synthetic construct
  source 1..23: mol_type = other RNA
tggggagtaccactggtctgtgt

SEQ ID NO: 97332 - RNA, 23 nt, synthetic construct
  source 1..23: mol_type = other RNA
tacctcgcggacacacacggtgg

SEQ ID NO: 97333 - RNA, 23 nt, synthetic construct
  source 1..23: mol_type = other RNA
tgcgggggactctgttggctgtt

SEQ ID NO: 97334 - RNA, 23 nt, synthetic construct
  source 1..23: mol_type = other RNA
ttcgagtgctgggtggtaccggt

SEQ ID NO: 97335 - RNA, 23 nt, synthetic construct
  source 1..23: mol_type = other RNA
ttcgagtgctgggtggtaccggt

SEQ ID NO: 97336 - RNA, 23 nt, synthetic construct
  source 1..23: mol_type = other RNA
ttcgagtgctgggtggtaccggt

SEQ ID NO: 97337 - RNA, 23 nt, synthetic construct
  source 1..23: mol_type = other RNA
tcggtcttattgtagatgacttc

SEQ ID NO: 97338 - RNA, 23 nt, synthetic construct
  source 1..23: mol_type = other RNA
taggcgcgagcaccagtgccggg

SEQ ID NO: 97339 - RNA, 23 nt, synthetic construct
  source 1..23: mol_type = other RNA
tgttgaggaacacgccgccgtcc

SEQ ID NO: 97340 - RNA, 23 nt, synthetic construct
  source 1..23: mol_type = other RNA
tccgcggcaagtgggctggcagg

SEQ ID NO: 97341 - RNA, 23 nt, synthetic construct
  source 1..23: mol_type = other RNA
tcccaagctccccgtcgtccctg

SEQ ID NO: 97342 - RNA, 23 nt, synthetic construct
  source 1..23: mol_type = other RNA
taaccccgtagaaggtgccattg

SEQ ID NO: 97343 - RNA, 23 nt, synthetic construct
  source 1..23: mol_type = other RNA
tagggcggttgcagtccctggac

SEQ ID NO: 97344 - RNA, 23 nt, synthetic construct
  source 1..23: mol_type = other RNA
tactcagtcgtagtggctgttgt

SEQ ID NO: 97345 - RNA, 23 nt, synthetic construct
  source 1..23: mol_type = other RNA
tagggcggttgcagtccctggac

SEQ ID NO: 97346 - RNA, 23 nt, synthetic construct
  source 1..23: mol_type = other RNA
tagggcggttgcagtccctggac

SEQ ID NO: 97347 - RNA, 23 nt, synthetic construct
  source 1..23: mol_type = other RNA
tactcagtcgtagtggctgttgt

SEQ ID NO: 97348 - RNA, 23 nt, synthetic construct
  source 1..23: mol_type = other RNA
tagggcggttgcagtccctggac

SEQ ID NO: 97349 - RNA, 23 nt, synthetic construct
  source 1..23: mol_type = other RNA
tgccctcccgaaaggggtcctgc

SEQ ID NO: 97350 - RNA, 23 nt, synthetic construct
  source 1..23: mol_type = other RNA
tgaaggaaacgctgcaggtgacg

SEQ ID NO: 97351 - RNA, 23 nt, synthetic construct
  source 1..23: mol_type = other RNA
ttgcctgtcgggcgagctctgga

SEQ ID NO: 97352 - RNA, 23 nt, synthetic construct
  source 1..23: mol_type = other RNA
tggtcgtccccggagtggaggag

SEQ ID NO: 97353 - RNA, 23 nt, synthetic construct
  source 1..23: mol_type = other RNA
ttccccatgtagcgtatcttgta

SEQ ID NO: 97354 - RNA, 23 nt, synthetic construct
  source 1..23: mol_type = other RNA
tggtgcagtcggatgaacacgct

SEQ ID NO: 97355 - RNA, 23 nt, synthetic construct
  source 1..23: mol_type = other RNA
ttcgccaccgccttaaaggtccc

SEQ ID NO: 97356 - RNA, 23 nt, synthetic construct
  source 1..23: mol_type = other RNA
tgtggtcggtggcggggttgtgg

SEQ ID NO: 97357 - RNA, 23 nt, synthetic construct
  source 1..23: mol_type = other RNA
tagtgcgtgatgtcatccagcac

SEQ ID NO: 97358 - RNA, 23 nt, synthetic construct
  source 1..23: mol_type = other RNA
tacgctggtcttccggtcccagg

SEQ ID NO: 97359 - RNA, 23 nt, synthetic construct
  source 1..23: mol_type = other RNA
tcggtgtgggtggtccccgggat

SEQ ID NO: 97360 - RNA, 23 nt, synthetic construct
  source 1..23: mol_type = other RNA
tcggtgtgggtggtccccgggat

SEQ ID NO: 97361 - RNA, 23 nt, synthetic construct
  source 1..23: mol_type = other RNA
tcggtgtgggtggtccccgggat

SEQ ID NO: 97362 - RNA, 23 nt, synthetic construct
  source 1..23: mol_type = other RNA
taggtgacgctcacgcccagggc

SEQ ID NO: 97363 - RNA, 23 nt, synthetic construct
  source 1..23: mol_type = other RNA
tcggttgcacggcgggggctgac

SEQ ID NO: 97364 - RNA, 23 nt, synthetic construct
  source 1..23: mol_type = other RNA
ttgcggacttgacaggagtcctc

SEQ ID NO: 97365 - RNA, 23 nt, synthetic construct
  source 1..23: mol_type = other RNA
tgcgtcccagtgacatcagggag

SEQ ID NO: 97366 - RNA, 23 nt, synthetic construct
  source 1..23: mol_type = other RNA
tagccgttggacgcctccagcac

SEQ ID NO: 97367 - RNA, 23 nt, synthetic construct
  source 1..23: mol_type = other RNA
tcgtcaccgctttcaggcagttc

SEQ ID NO: 97368 - RNA, 23 nt, synthetic construct
  source 1..23: mol_type = other RNA
ttgaggaacacgccgccgtccgc

SEQ ID NO: 97369 - RNA, 23 nt, synthetic construct
  source 1..23: mol_type = other RNA
ttgaagtcgtcagcctggttctg

SEQ ID NO: 97370 - RNA, 23 nt, synthetic construct
  source 1..23: mol_type = other RNA
ttcaggcgcgagcaccagtgccg

SEQ ID NO: 97371 - RNA, 23 nt, synthetic construct
  source 1..23: mol_type = other RNA
tccagcacggtgccgtgagcgta

SEQ ID NO: 97372 - RNA, 23 nt, synthetic construct
  source 1..23: mol_type = other RNA
ttaaaggtcccctcttggaggat

SEQ ID NO: 97373 - RNA, 23 nt, synthetic construct
  source 1..23: mol_type = other RNA
tcttgtagggtgggtccccaccc

SEQ ID NO: 97374 - RNA, 23 nt, synthetic construct
  source 1..23: mol_type = other RNA
tcggggtcacccatagggtggtc

SEQ ID NO: 97375 - RNA, 23 nt, synthetic construct
  source 1..23: mol_type = other RNA
tgcttgtgtatctgggggatgtc

SEQ ID NO: 97376 - RNA, 23 nt, synthetic construct
  source 1..23: mol_type = other RNA
ttgcaggcgtcgtggggcctccc

SEQ ID NO: 97377 - RNA, 23 nt, synthetic construct
  source 1..23: mol_type = other RNA
taggggcgccatgtgcccaagct

SEQ ID NO: 97378 - RNA, 23 nt, synthetic construct
  source 1..23: mol_type = other RNA
tgttgtgctgatccacactggag

SEQ ID NO: 97379 - RNA, 23 nt, synthetic construct
  source 1..23: mol_type = other RNA
tggttgtgctgatccacactgga

SEQ ID NO: 97380 - RNA, 23 nt, synthetic construct
  source 1..23: mol_type = other RNA
tccgtggatccggtgggcaccgt

SEQ ID NO: 97381 - RNA, 23 nt, synthetic construct
  source 1..23: mol_type = other RNA
tagcgtgcgtgccgtccctgggc

SEQ ID NO: 97382 - RNA, 23 nt, synthetic construct
  source 1..23: mol_type = other RNA
tgttgtgctgatccacactggaa

SEQ ID NO: 97383 - RNA, 23 nt, synthetic construct
  source 1..23: mol_type = other RNA
tggttgtgctgatccacactgga

SEQ ID NO: 97384 - RNA, 23 nt, synthetic construct
  source 1..23: mol_type = other RNA
tccgtggatccggtgggcaccgt

SEQ ID NO: 97385 - RNA, 23 nt, synthetic construct
  source 1..23: mol_type = other RNA
tgttgtgctgatccacactggag

SEQ ID NO: 97386 - RNA, 23 nt, synthetic construct
  source 1..23: mol_type = other RNA
tggttgtgctgatccacactgga

SEQ ID NO: 97387 - RNA, 23 nt, synthetic construct
  source 1..23: mol_type = other RNA
tccgtggatccggtgggcaccgt

SEQ ID NO: 97388 - RNA, 23 nt, synthetic construct
  source 1..23: mol_type = other RNA
tgttgtgctgatccacactggag

SEQ ID NO: 97389 - RNA, 23 nt, synthetic construct
  source 1..23: mol_type = other RNA
tggttgtgctgatccacactgga

SEQ ID NO: 97390 - RNA, 23 nt, synthetic construct
  source 1..23: mol_type = other RNA
tcggtggtcccaagggtggagga

SEQ ID NO: 97391 - RNA, 23 nt, synthetic construct
  source 1..23: mol_type = other RNA
tccgtggatccggtgggcaccgt

SEQ ID NO: 97392 - RNA, 23 nt, synthetic construct
  source 1..23: mol_type = other RNA
tgttgtgctgatccacactggag

SEQ ID NO: 97393 - RNA, 23 nt, synthetic construct
  source 1..23: mol_type = other RNA
tggttgtgctgatccacactgga

SEQ ID NO: 97394 - RNA, 23 nt, synthetic construct
  source 1..23: mol_type = other RNA
tgaggacgtcggggcaccgccat

SEQ ID NO: 97395 - RNA, 23 nt, synthetic construct
  source 1..23: mol_type = other RNA
tggaggccgttgaagtccccaca

SEQ ID NO: 97396 - RNA, 23 nt, synthetic construct
  source 1..23: mol_type = other RNA
ttggcagatgccctcctcgtccg

SEQ ID NO: 97397 - RNA, 23 nt, synthetic construct
  source 1..23: mol_type = other RNA
ttgttggcgaaggctgcgcccgt

SEQ ID NO: 97398 - RNA, 23 nt, synthetic construct
  source 1..23: mol_type = other RNA
ttgagctgtacgcccttggcggc

SEQ ID NO: 97399 - RNA, 23 nt, synthetic construct
  source 1..23: mol_type = other RNA
tgtcgctgagctgtacgcccttg

SEQ ID NO: 97400 - RNA, 23 nt, synthetic construct
  source 1..23: mol_type = other RNA
tgccgtccacaggcacgaaggaa

SEQ ID NO: 97401 - RNA, 23 nt, synthetic construct
  source 1..23: mol_type = other RNA
tccggccctctcgccaccgcctt

SEQ ID NO: 97402 - RNA, 23 nt, synthetic construct
  source 1..23: mol_type = other RNA
tacccgagtcgcaggcacacgcg

SEQ ID NO: 97403 - RNA, 23 nt, synthetic construct
  source 1..23: mol_type = other RNA
tcgttgtggctggagttccagga

SEQ ID NO: 97404 - RNA, 23 nt, synthetic construct
  source 1..23: mol_type = other RNA
tgcatacctggtaccctctctgc

SEQ ID NO: 97405 - RNA, 23 nt, synthetic construct
  source 1..23: mol_type = other RNA
tggcatacctggtaccctctctg

SEQ ID NO: 97406 - RNA, 23 nt, synthetic construct
  source 1..23: mol_type = other RNA
tccagcacagggcatacctggta

SEQ ID NO: 97407 - RNA, 23 nt, synthetic construct
  source 1..23: mol_type = other RNA
tgccagcacagggcatacctggt

SEQ ID NO: 97408 - RNA, 23 nt, synthetic construct
  source 1..23: mol_type = other RNA
tgtggtacctggggccgaggggg

SEQ ID NO: 97409 - RNA, 23 nt, synthetic construct
  source 1..23: mol_type = other RNA
tctccagcggccctgatcttatc

SEQ ID NO: 97410 - RNA, 23 nt, synthetic construct
  source 1..23: mol_type = other RNA
tctgctggcataagtgccctcca

SEQ ID NO: 97411 - RNA, 23 nt, synthetic construct
  source 1..23: mol_type = other RNA
ttagcacatcttgaagacgccct

SEQ ID NO: 97412 - RNA, 23 nt, synthetic construct
  source 1..23: mol_type = other RNA
tcctcccgtggtggctgtaccaa

SEQ ID NO: 97413 - RNA, 23 nt, synthetic construct
  source 1..23: mol_type = other RNA
tgtggagcctgcaggcgtcgtgg

SEQ ID NO: 97414 - RNA, 23 nt, synthetic construct
  source 1..23: mol_type = other RNA
tgcccaagctccccgtcgtccct

SEQ ID NO: 97415 - RNA, 23 nt, synthetic construct
  source 1..23: mol_type = other RNA
tggtggacagctcgctcgtgagt

SEQ ID NO: 97416 - RNA, 23 nt, synthetic construct
  source 1..23: mol_type = other RNA
tctgagaggtggacagctcgctc

SEQ ID NO: 97417 - RNA, 23 nt, synthetic construct
  source 1..23: mol_type = other RNA
tgtggtctgtgataggcgggtcc

SEQ ID NO: 97418 - RNA, 23 nt, synthetic construct
  source 1..23: mol_type = other RNA
tgtgaagcccgtggttgtggtag

SEQ ID NO: 97419 - RNA, 23 nt, synthetic construct
  source 1..23: mol_type = other RNA
tctggaggcgtgagtgccgtccc

SEQ ID NO: 97420 - RNA, 23 nt, synthetic construct
  source 1..23: mol_type = other RNA
tcactggaggcgtgagtgccgtc

SEQ ID NO: 97421 - RNA, 23 nt, synthetic construct
  source 1..23: mol_type = other RNA
taggagggggtcaccgtggagcc

SEQ ID NO: 97422 - RNA, 23 nt, synthetic construct
  source 1..23: mol_type = other RNA
ttgtcaaagtccccgccagaggg

SEQ ID NO: 97423 - RNA, 23 nt, synthetic construct
  source 1..23: mol_type = other RNA
tcacggcactcgaggcccagggg

SEQ ID NO: 97424 - RNA, 23 nt, synthetic construct
  source 1..23: mol_type = other RNA
tgcacggcactcgaggcccaggg

SEQ ID NO: 97425 - RNA, 23 nt, synthetic construct
  source 1..23: mol_type = other RNA
tggcacggcactcgaggcccagg

SEQ ID NO: 97426 - RNA, 23 nt, synthetic construct
  source 1..23: mol_type = other RNA
tcaggtcgtccccggagtggagg

SEQ ID NO: 97427 - RNA, 23 nt, synthetic construct
  source 1..23: mol_type = other RNA
tggtggctgtagtgctcggctct

SEQ ID NO: 97428 - RNA, 23 nt, synthetic construct
  source 1..23: mol_type = other RNA
tcggtggctgtagtgctcggctc

SEQ ID NO: 97429 - RNA, 23 nt, synthetic construct
  source 1..23: mol_type = other RNA
tgtggtctgtgataggcgggtcc

SEQ ID NO: 97430 - RNA, 23 nt, synthetic construct
  source 1..23: mol_type = other RNA
tcggtggccccggttgtggtggc

SEQ ID NO: 97431 - RNA, 23 nt, synthetic construct
  source 1..23: mol_type = other RNA
tccggtggccccggttgtggtgg

SEQ ID NO: 97432 - RNA, 23 nt, synthetic construct
  source 1..23: mol_type = other RNA
tgtgaagcccgtggttgtggtag

SEQ ID NO: 97433 - RNA, 23 nt, synthetic construct
  source 1..23: mol_type = other RNA
taggagggggtcaccgtggaacc

SEQ ID NO: 97434 - RNA, 23 nt, synthetic construct
  source 1..23: mol_type = other RNA
tcgcccgtgtgtggtggccgtgg

SEQ ID NO: 97435 - RNA, 23 nt, synthetic construct
  source 1..23: mol_type = other RNA
ttgtcaaagtccccgccagaggg

SEQ ID NO: 97436 - RNA, 23 nt, synthetic construct
  source 1..23: mol_type = other RNA
tcacggcactcgaggcccagggg

SEQ ID NO: 97437 - RNA, 23 nt, synthetic construct
  source 1..23: mol_type = other RNA
tgcacggcactcgaggcccaggg

SEQ ID NO: 97438 - RNA, 23 nt, synthetic construct
  source 1..23: mol_type = other RNA
tggcacggcactcgaggcccagg

SEQ ID NO: 97439 - RNA, 23 nt, synthetic construct
  source 1..23: mol_type = other RNA
tagggcgtggccgtagagctggt

SEQ ID NO: 97440 - RNA, 23 nt, synthetic construct
  source 1..23: mol_type = other RNA
taggagggcgtggccgtagagct

SEQ ID NO: 97441 - RNA, 23 nt, synthetic construct
  source 1..23: mol_type = other RNA
tcggtcgtagtggctgctgtggt

SEQ ID NO: 97442 - RNA, 23 nt, synthetic construct
  source 1..23: mol_type = other RNA
tgacgggatggccgtggatccag

SEQ ID NO: 97443 - RNA, 23 nt, synthetic construct
  source 1..23: mol_type = other RNA
tcaggtcgtccccggagtggagg

SEQ ID NO: 97444 - RNA, 23 nt, synthetic construct
  source 1..23: mol_type = other RNA
ttgccagcagttgcccgggtgga

SEQ ID NO: 97445 - RNA, 23 nt, synthetic construct
  source 1..23: mol_type = other RNA
tgtggtctgtgataggcgggtcc

SEQ ID NO: 97446 - RNA, 23 nt, synthetic construct
  source 1..23: mol_type = other RNA
tagccggtggccctggttgtggt

SEQ ID NO: 97447 - RNA, 23 nt, synthetic construct
  source 1..23: mol_type = other RNA
tgtgaagcccgtggttgtggtag

SEQ ID NO: 97448 - RNA, 23 nt, synthetic construct
  source 1..23: mol_type = other RNA
tctggaggcgtgagtgccgtccc

SEQ ID NO: 97449 - RNA, 23 nt, synthetic construct
  source 1..23: mol_type = other RNA
tcactggaggcgtgagtgccgtc

SEQ ID NO: 97450 - RNA, 23 nt, synthetic construct
  source 1..23: mol_type = other RNA
taggagggggtcaccgtggagcc

SEQ ID NO: 97451 - RNA, 23 nt, synthetic construct
  source 1..23: mol_type = other RNA
ttggctgtgatcgtagtggccgt

SEQ ID NO: 97452 - RNA, 23 nt, synthetic construct
  source 1..23: mol_type = other RNA
tcgcccgtgtgtggtggccgtgg

SEQ ID NO: 97453 - RNA, 23 nt, synthetic construct
  source 1..23: mol_type = other RNA
ttgtcaaagtccccgccagaggg

SEQ ID NO: 97454 - RNA, 23 nt, synthetic construct
  source 1..23: mol_type = other RNA
tcacggcactcgaggcccagggg

SEQ ID NO: 97455 - RNA, 23 nt, synthetic construct
  source 1..23: mol_type = other RNA
tgcacggcactcgaggcccaggg

SEQ ID NO: 97456 - RNA, 23 nt, synthetic construct
  source 1..23: mol_type = other RNA
tggcacggcactcgaggcccagg

SEQ ID NO: 97457 - RNA, 23 nt, synthetic construct
  source 1..23: mol_type = other RNA
tagggcgtggccgtagagctggt

SEQ ID NO: 97458 - RNA, 23 nt, synthetic construct
  source 1..23: mol_type = other RNA
taggagggcgtggccgtagagct

SEQ ID NO: 97459 - RNA, 23 nt, synthetic construct
  source 1..23: mol_type = other RNA
tggtggctgtagtgctcggctct

SEQ ID NO: 97460 - RNA, 23 nt, synthetic construct
  source 1..23: mol_type = other RNA
tcggtggctgtagtgctcggctc

SEQ ID NO: 97461 - RNA, 23 nt, synthetic construct
  source 1..23: mol_type = other RNA
tgtggtctgtgataggcgggtcc

SEQ ID NO: 97462 - RNA, 23 nt, synthetic construct
  source 1..23: mol_type = other RNA
tagccggtggccctggttgtggt

SEQ ID NO: 97463 - RNA, 23 nt, synthetic construct
  source 1..23: mol_type = other RNA
tgtgaagcccgtggttgtggtag

SEQ ID NO: 97464 - RNA, 23 nt, synthetic construct
  source 1..23: mol_type = other RNA
taggagggggtcaccgtggagcc

SEQ ID NO: 97465 - RNA, 23 nt, synthetic construct
  source 1..23: mol_type = other RNA
tcgcccgtgtgtggtggccgtgg

SEQ ID NO: 97466 - RNA, 23 nt, synthetic construct
  source 1..23: mol_type = other RNA
ttgtcaaagtccccgccagaggg

SEQ ID NO: 97467 - RNA, 23 nt, synthetic construct
  source 1..23: mol_type = other RNA
tcacggcactcgaggcccagggg

SEQ ID NO: 97468 - RNA, 23 nt, synthetic construct
  source 1..23: mol_type = other RNA
tgcacggcactcgaggcccaggg

SEQ ID NO: 97469 - RNA, 23 nt, synthetic construct
  source 1..23: mol_type = other RNA
tggcacggcactcgaggcccagg

SEQ ID NO: 97470 - RNA, 23 nt, synthetic construct
  source 1..23: mol_type = other RNA
tcaggtcgtccccggagtggagg

SEQ ID NO: 97471 - RNA, 23 nt, synthetic construct
  source 1..23: mol_type = other RNA
tcaggtcgtccccggagtggagg

SEQ ID NO: 97472 - RNA, 23 nt, synthetic construct
  source 1..23: mol_type = other RNA
tggtggctgtagtgctcggctct

SEQ ID NO: 97473 - RNA, 23 nt, synthetic construct
  source 1..23: mol_type = other RNA
tcggtggctgtagtgctcggctc

SEQ ID NO: 97474 - RNA, 23 nt, synthetic construct
  source 1..23: mol_type = other RNA
tgtggtctgtgataggcgggtcc

SEQ ID NO: 97475 - RNA, 23 nt, synthetic construct
  source 1..23: mol_type = other RNA
tcggtggccccggttgtggtggc

SEQ ID NO: 97476 - RNA, 23 nt, synthetic construct
  source 1..23: mol_type = other RNA
tccggtggccccggttgtggtgg

SEQ ID NO: 97477 - RNA, 23 nt, synthetic construct
  source 1..23: mol_type = other RNA
tgtgaagcccgtggttgtggtag

SEQ ID NO: 97478 - RNA, 23 nt, synthetic construct
  source 1..23: mol_type = other RNA
tctggaggcgtgagtgccgtccc

SEQ ID NO: 97479 - RNA, 23 nt, synthetic construct
  source 1..23: mol_type = other RNA
tcactggaggcgtgagtgccgtc

SEQ ID NO: 97480 - RNA, 23 nt, synthetic construct
  source 1..23: mol_type = other RNA
taggagggggtcaccgtggagcc

SEQ ID NO: 97481 - RNA, 23 nt, synthetic construct
  source 1..23: mol_type = other RNA
tagcactctggcggtgtgggtgg

SEQ ID NO: 97482 - RNA, 23 nt, synthetic construct
  source 1..23: mol_type = other RNA
tgtcagcactctggcggtgtggg

SEQ ID NO: 97483 - RNA, 23 nt, synthetic construct
  source 1..23: mol_type = other RNA
tgtggacacgctgaaggttggca

SEQ ID NO: 97484 - RNA, 23 nt, synthetic construct
  source 1..23: mol_type = other RNA
tgggaagccagtgggtctcaggg

SEQ ID NO: 97485 - RNA, 23 nt, synthetic construct
  source 1..23: mol_type = other RNA
tggtcaatgtcacagtgctgatt

SEQ ID NO: 97486 - RNA, 23 nt, synthetic construct
  source 1..23: mol_type = other RNA
tcggagagggatggcattgtcac

SEQ ID NO: 97487 - RNA, 23 nt, synthetic construct
  source 1..23: mol_type = other RNA
tcattcacctgccggagagggat

SEQ ID NO: 97488 - RNA, 23 nt, synthetic construct
  source 1..23: mol_type = other RNA
ttcaaacaggatcaggccctcct

SEQ ID NO: 97489 - RNA, 23 nt, synthetic construct
  source 1..23: mol_type = other RNA
tgaatgtccacacgcatggtggt

SEQ ID NO: 97490 - RNA, 23 nt, synthetic construct
  source 1..23: mol_type = other RNA
ttggcactcagcaaagacctggc

SEQ ID NO: 97491 - RNA, 23 nt, synthetic construct
  source 1..23: mol_type = other RNA
tcgctgatgcaggcgttgaagaa

SEQ ID NO: 97492 - RNA, 23 nt, synthetic construct
  source 1..23: mol_type = other RNA
ttcgctgatgcaggcgttgaaga

SEQ ID NO: 97493 - RNA, 23 nt, synthetic construct
  source 1..23: mol_type = other RNA
tgtgggcaggtgaggtcgcacag

SEQ ID NO: 97494 - RNA, 23 nt, synthetic construct
  source 1..23: mol_type = other RNA
tatgcccatgtgtgcgttgaaga

SEQ ID NO: 97495 - RNA, 23 nt, synthetic construct
  source 1..23: mol_type = other RNA
tggcctgcacgcagatgcccatg

SEQ ID NO: 97496 - RNA, 23 nt, synthetic construct
  source 1..23: mol_type = other RNA
tgcaggggttctcggcccggggc

SEQ ID NO: 97497 - RNA, 23 nt, synthetic construct
  source 1..23: mol_type = other RNA
tggcgtgaggcaggcggtctgga

SEQ ID NO: 97498 - RNA, 23 nt, synthetic construct
  source 1..23: mol_type = other RNA
ttaggacagtgcaagggcaccgt

SEQ ID NO: 97499 - RNA, 23 nt, synthetic construct
  source 1..23: mol_type = other RNA
tggaggcagaacgttctcagaca

SEQ ID NO: 97500 - RNA, 23 nt, synthetic construct
  source 1..23: mol_type = other RNA
tcacatgcttagtttgttccagg

SEQ ID NO: 97501 - RNA, 23 nt, synthetic construct
  source 1..23: mol_type = other RNA
tccggccgtggcagggacacata

SEQ ID NO: 97502 - RNA, 23 nt, synthetic construct
  source 1..23: mol_type = other RNA
ttggccagctggaatccgtgctg

SEQ ID NO: 97503 - RNA, 23 nt, synthetic construct
  source 1..23: mol_type = other RNA
tgtggccagctggaatccgtgct

SEQ ID NO: 97504 - RNA, 23 nt, synthetic construct
  source 1..23: mol_type = other RNA
tcctctctgacctggccgttgcg

SEQ ID NO: 97505 - RNA, 23 nt, synthetic construct
  source 1..23: mol_type = other RNA
tcattgatgaggacggagccgtt

SEQ ID NO: 97506 - RNA, 23 nt, synthetic construct
  source 1..23: mol_type = other RNA
tcagtcaccatgcaggtcgtaga

SEQ ID NO: 97507 - RNA, 23 nt, synthetic construct
  source 1..23: mol_type = other RNA
tcttgggtgccagggcgtccggg

SEQ ID NO: 97508 - RNA, 23 nt, synthetic construct
  source 1..23: mol_type = other RNA
ttgtaggtcctgtcctcataggt

SEQ ID NO: 97509 - RNA, 23 nt, synthetic construct
  source 1..23: mol_type = other RNA
tccaagcccatcggtggtgttgt

SEQ ID NO: 97510 - RNA, 23 nt, synthetic construct
  source 1..23: mol_type = other RNA
tagatggcgatcaagcaggcgcc

SEQ ID NO: 97511 - RNA, 23 nt, synthetic construct
  source 1..23: mol_type = other RNA
tggtcggtggcggggttgtggca

SEQ ID NO: 97512 - RNA, 23 nt, synthetic construct
  source 1..23: mol_type = other RNA
ttggctgtgaagcccgtggttgt

SEQ ID NO: 97513 - RNA, 23 nt, synthetic construct
  source 1..23: mol_type = other RNA
tgaaccagtggccacagttgtgg

SEQ ID NO: 97514 - RNA, 23 nt, synthetic construct
  source 1..23: mol_type = other RNA
tctgggtggtaccggtggttgct

SEQ ID NO: 97515 - RNA, 23 nt, synthetic construct
  source 1..23: mol_type = other RNA
tgctgggtggtaccggtggttgc

SEQ ID NO: 97516 - RNA, 23 nt, synthetic construct
  source 1..23: mol_type = other RNA
ttggctgtgaagcccgtggttgt

SEQ ID NO: 97517 - RNA, 23 nt, synthetic construct
  source 1..23: mol_type = other RNA
tgaaccagtggccacagttgtgg

SEQ ID NO: 97518 - RNA, 23 nt, synthetic construct
  source 1..23: mol_type = other RNA
tgggggataggtgttgtccctgg

SEQ ID NO: 97519 - RNA, 23 nt, synthetic construct
  source 1..23: mol_type = other RNA
tctgggtggtaccggtggttgct

SEQ ID NO: 97520 - RNA, 23 nt, synthetic construct
  source 1..23: mol_type = other RNA
tgctgggtggtaccggtggttgc

SEQ ID NO: 97521 - RNA, 23 nt, synthetic construct
  source 1..23: mol_type = other RNA
ttggctgtgaagcccgtggttgt

SEQ ID NO: 97522 - RNA, 23 nt, synthetic construct
  source 1..23: mol_type = other RNA
tgaaccagtggccacagttgtgg

SEQ ID NO: 97523 - RNA, 23 nt, synthetic construct
  source 1..23: mol_type = other RNA
tgaaccagtggccacagttgtgg

SEQ ID NO: 97524 - RNA, 23 nt, synthetic construct
  source 1..23: mol_type = other RNA
tgggggataggtgttgtccctgg

SEQ ID NO: 97525 - RNA, 23 nt, synthetic construct
  source 1..23: mol_type = other RNA
tctgggtggtaccggtggttgct

SEQ ID NO: 97526 - RNA, 23 nt, synthetic construct
  source 1..23: mol_type = other RNA
tgctgggtggtaccggtggttgc

SEQ ID NO: 97527 - RNA, 23 nt, synthetic construct
  source 1..23: mol_type = other RNA
ttggctgtgaagcccgtggttgt

SEQ ID NO: 97528 - RNA, 23 nt, synthetic construct
  source 1..23: mol_type = other RNA
tgaaccagtggccacagttgtgg

SEQ ID NO: 97529 - RNA, 23 nt, synthetic construct
  source 1..23: mol_type = other RNA
tcagtgaggatccgggtcgtccc

SEQ ID NO: 97530 - RNA, 23 nt, synthetic construct
  source 1..23: mol_type = other RNA
tatgacttccccgggcgagaaaa

SEQ ID NO: 97531 - RNA, 23 nt, synthetic construct
  source 1..23: mol_type = other RNA
ttgtgttgcacacgcacaccgtc

SEQ ID NO: 97532 - RNA, 23 nt, synthetic construct
  source 1..23: mol_type = other RNA
tgtggttgtgttgcacacgcaca

SEQ ID NO: 97533 - RNA, 23 nt, synthetic construct
  source 1..23: mol_type = other RNA
tgctgttgacccaggtttcattc

SEQ ID NO: 97534 - RNA, 23 nt, synthetic construct
  source 1..23: mol_type = other RNA
tcgcagtgctgtccaccagtgcg

SEQ ID NO: 97535 - RNA, 23 nt, synthetic construct
  source 1..23: mol_type = other RNA
tgtgcccgccgagctgttgctgc

SEQ ID NO: 97536 - RNA, 23 nt, synthetic construct
  source 1..23: mol_type = other RNA
ttcctcctcggcaatgcagcccc

SEQ ID NO: 97537 - RNA, 23 nt, synthetic construct
  source 1..23: mol_type = other RNA
tcttgtgtatctgggggatgtca

SEQ ID NO: 97538 - RNA, 23 nt, synthetic construct
  source 1..23: mol_type = other RNA
ttgggtggtaccggtggttgctg

SEQ ID NO: 97539 - RNA, 23 nt, synthetic construct
  source 1..23: mol_type = other RNA
tatccagtggactcagtcgtagt

SEQ ID NO: 97540 - RNA, 23 nt, synthetic construct
  source 1..23: mol_type = other RNA
ttggccgtggatccggtgggcac

SEQ ID NO: 97541 - RNA, 23 nt, synthetic construct
  source 1..23: mol_type = other RNA
ttgggtggtaccggtggttgctg

SEQ ID NO: 97542 - RNA, 23 nt, synthetic construct
  source 1..23: mol_type = other RNA
tgtggcccttgtcgtggtggcct

SEQ ID NO: 97543 - RNA, 23 nt, synthetic construct
  source 1..23: mol_type = other RNA
ttggccgtggatccggtgggcac

SEQ ID NO: 97544 - RNA, 23 nt, synthetic construct
  source 1..23: mol_type = other RNA
ttaggcgggtccaggcggtgccc

SEQ ID NO: 97545 - RNA, 23 nt, synthetic construct
  source 1..23: mol_type = other RNA
tctgttgtggtcagctttgtgag

SEQ ID NO: 97546 - RNA, 23 nt, synthetic construct
  source 1..23: mol_type = other RNA
tatccagtggactcagtcgtagt

SEQ ID NO: 97547 - RNA, 23 nt, synthetic construct
  source 1..23: mol_type = other RNA
ttggccgtggatccggtgggcac

SEQ ID NO: 97548 - RNA, 23 nt, synthetic construct
  source 1..23: mol_type = other RNA
ttgggtggtaccggtggttgctg

SEQ ID NO: 97549 - RNA, 23 nt, synthetic construct
  source 1..23: mol_type = other RNA
tgtggcccttgtcgtggtggcct

SEQ ID NO: 97550 - RNA, 23 nt, synthetic construct
  source 1..23: mol_type = other RNA
ttggccgtggatccggtgggcac

SEQ ID NO: 97551 - RNA, 23 nt, synthetic construct
  source 1..23: mol_type = other RNA
tccggaaggtgtaagaggtgccg

SEQ ID NO: 97552 - RNA, 23 nt, synthetic construct
  source 1..23: mol_type = other RNA
tgtccacacgcatggtggtggtc

SEQ ID NO: 97553 - RNA, 23 nt, synthetic construct
  source 1..23: mol_type = other RNA
tatgcggacttgacaggagtcct

SEQ ID NO: 97554 - RNA, 23 nt, synthetic construct
  source 1..23: mol_type = other RNA
tccgctgagggccgtgaagtcgt

SEQ ID NO: 97555 - RNA, 23 nt, synthetic construct
  source 1..23: mol_type = other RNA
tgtcaggcgcgagcaccagtgcc

SEQ ID NO: 97556 - RNA, 23 nt, synthetic construct
  source 1..23: mol_type = other RNA
ttcgaccctgatggtctctccag

SEQ ID NO: 97557 - RNA, 23 nt, synthetic construct
  source 1..23: mol_type = other RNA
ttcctgggccaagatgtactcgc

SEQ ID NO: 97558 - RNA, 23 nt, synthetic construct
  source 1..23: mol_type = other RNA
tcagtccttctgagagggtgggg

SEQ ID NO: 97559 - RNA, 23 nt, synthetic construct
  source 1..23: mol_type = other RNA
tcctgcaggcgtcgtggggcctc

SEQ ID NO: 97560 - RNA, 23 nt, synthetic construct
  source 1..23: mol_type = other RNA
taagggcggttgcagtccctgga

SEQ ID NO: 97561 - RNA, 23 nt, synthetic construct
  source 1..23: mol_type = other RNA
tgaagggcggttgcagtccctgg

SEQ ID NO: 97562 - RNA, 23 nt, synthetic construct
  source 1..23: mol_type = other RNA
tctggaagggcggttgcagtccc

SEQ ID NO: 97563 - RNA, 23 nt, synthetic construct
  source 1..23: mol_type = other RNA
ttgagtgccgtccctgggctgga

SEQ ID NO: 97564 - RNA, 23 nt, synthetic construct
  source 1..23: mol_type = other RNA
taggctgtgcgcaccgtgtgggg

SEQ ID NO: 97565 - RNA, 23 nt, synthetic construct
  source 1..23: mol_type = other RNA
tcaggctgtgcgcaccgtgtggg

SEQ ID NO: 97566 - RNA, 23 nt, synthetic construct
  source 1..23: mol_type = other RNA
tttctgctgctagggtgagggct

SEQ ID NO: 97567 - RNA, 23 nt, synthetic construct
  source 1..23: mol_type = other RNA
tcggggtggtcgtccctggagaa

SEQ ID NO: 97568 - RNA, 23 nt, synthetic construct
  source 1..23: mol_type = other RNA
tacagacggcccctccggccgca

SEQ ID NO: 97569 - RNA, 23 nt, synthetic construct
  source 1..23: mol_type = other RNA
tcacagacggcccctccggccgc

SEQ ID NO: 97570 - RNA, 23 nt, synthetic construct
  source 1..23: mol_type = other RNA
tccagtggactcagtcgtagtgg

SEQ ID NO: 97571 - RNA, 23 nt, synthetic construct
  source 1..23: mol_type = other RNA
ttgactgtgggtgtcgtggccgt

SEQ ID NO: 97572 - RNA, 23 nt, synthetic construct
  source 1..23: mol_type = other RNA
taagggcggttgcagtccctgga

SEQ ID NO: 97573 - RNA, 23 nt, synthetic construct
  source 1..23: mol_type = other RNA
tgaagggcggttgcagtccctgg

SEQ ID NO: 97574 - RNA, 23 nt, synthetic construct
  source 1..23: mol_type = other RNA
tctggaagggcggttgcagtccc

SEQ ID NO: 97575 - RNA, 23 nt, synthetic construct
  source 1..23: mol_type = other RNA
taggctgtgcgcaccgtgtgggg

SEQ ID NO: 97576 - RNA, 23 nt, synthetic construct
  source 1..23: mol_type = other RNA
tcaggctgtgcgcaccgtgtggg

SEQ ID NO: 97577 - RNA, 23 nt, synthetic construct
  source 1..23: mol_type = other RNA
tgggaagtccccgtggaaggctc

SEQ ID NO: 97578 - RNA, 23 nt, synthetic construct
  source 1..23: mol_type = other RNA
ttcctgctgctagggtgagggct

SEQ ID NO: 97579 - RNA, 23 nt, synthetic construct
  source 1..23: mol_type = other RNA
tgtggtcctgctgctagggtgag

SEQ ID NO: 97580 - RNA, 23 nt, synthetic construct
  source 1..23: mol_type = other RNA
tggtggtcctgctgctagggtga

SEQ ID NO: 97581 - RNA, 23 nt, synthetic construct
  source 1..23: mol_type = other RNA
tcggggtggtcgtccctggagaa

SEQ ID NO: 97582 - RNA, 23 nt, synthetic construct
  source 1..23: mol_type = other RNA
tacagacggcccctccggccgca

SEQ ID NO: 97583 - RNA, 23 nt, synthetic construct
  source 1..23: mol_type = other RNA
tcacagacggcccctccggccgc

SEQ ID NO: 97584 - RNA, 23 nt, synthetic construct
  source 1..23: mol_type = other RNA
tgcgtggccgtagagctggtggc

SEQ ID NO: 97585 - RNA, 23 nt, synthetic construct
  source 1..23: mol_type = other RNA
tggggtggacatggaactggtgg

SEQ ID NO: 97586 - RNA, 23 nt, synthetic construct
  source 1..23: mol_type = other RNA
tagggggtggacatggaactggt

SEQ ID NO: 97587 - RNA, 23 nt, synthetic construct
  source 1..23: mol_type = other RNA
tactttgagggtgccagcagttg

SEQ ID NO: 97588 - RNA, 23 nt, synthetic construct
  source 1..23: mol_type = other RNA
taagggcggttgcagtccctgga

SEQ ID NO: 97589 - RNA, 23 nt, synthetic construct
  source 1..23: mol_type = other RNA
tgaagggcggttgcagtccctgg

SEQ ID NO: 97590 - RNA, 23 nt, synthetic construct
  source 1..23: mol_type = other RNA
tctggaagggcggttgcagtccc

SEQ ID NO: 97591 - RNA, 23 nt, synthetic construct
  source 1..23: mol_type = other RNA
ttgagtgccgtccctgggctgga

SEQ ID NO: 97592 - RNA, 23 nt, synthetic construct
  source 1..23: mol_type = other RNA
taggctgtgcgcaccgtgtgggg

SEQ ID NO: 97593 - RNA, 23 nt, synthetic construct
  source 1..23: mol_type = other RNA
tcaggctgtgcgcaccgtgtggg

SEQ ID NO: 97594 - RNA, 23 nt, synthetic construct
  source 1..23: mol_type = other RNA
ttcctgctgctagggtgagggct

SEQ ID NO: 97595 - RNA, 23 nt, synthetic construct
  source 1..23: mol_type = other RNA
tgtggtcctgctgctagggtgag

SEQ ID NO: 97596 - RNA, 23 nt, synthetic construct
  source 1..23: mol_type = other RNA
tggtggtcctgctgctagggtga

SEQ ID NO: 97597 - RNA, 23 nt, synthetic construct
  source 1..23: mol_type = other RNA
tcggggtggtcgtccctggagaa

SEQ ID NO: 97598 - RNA, 23 nt, synthetic construct
  source 1..23: mol_type = other RNA
tgcgtggccgtagagctggtggc

SEQ ID NO: 97599 - RNA, 23 nt, synthetic construct
  source 1..23: mol_type = other RNA
tccagtggactcagtcgtagtgg

SEQ ID NO: 97600 - RNA, 23 nt, synthetic construct
  source 1..23: mol_type = other RNA
ttgactgtgggtgtcgtggccgt

SEQ ID NO: 97601 - RNA, 23 nt, synthetic construct
  source 1..23: mol_type = other RNA
taagggcggttgcagtccctgga

SEQ ID NO: 97602 - RNA, 23 nt, synthetic construct
  source 1..23: mol_type = other RNA
tgaagggcggttgcagtccctgg

SEQ ID NO: 97603 - RNA, 23 nt, synthetic construct
  source 1..23: mol_type = other RNA
tctggaagggcggttgcagtccc

SEQ ID NO: 97604 - RNA, 23 nt, synthetic construct
  source 1..23: mol_type = other RNA
taggctgtgcgcaccgtgtgggg

SEQ ID NO: 97605 - RNA, 23 nt, synthetic construct
  source 1..23: mol_type = other RNA
tcaggctgtgcgcaccgtgtggg

SEQ ID NO: 97606 - RNA, 23 nt, synthetic construct
  source 1..23: mol_type = other RNA
tgggaagtccccgtggaaggctc

SEQ ID NO: 97607 - RNA, 23 nt, synthetic construct
  source 1..23: mol_type = other RNA
ttcctgctgctagggtgagggct

SEQ ID NO: 97608 - RNA, 23 nt, synthetic construct
  source 1..23: mol_type = other RNA
tgtggtcctgctgctagggtgag

SEQ ID NO: 97609 - RNA, 23 nt, synthetic construct
  source 1..23: mol_type = other RNA
tggtggtcctgctgctagggtga

SEQ ID NO: 97610 - RNA, 23 nt, synthetic construct
  source 1..23: mol_type = other RNA
tacagacggcccctccggccgca

SEQ ID NO: 97611 - RNA, 23 nt, synthetic construct
  source 1..23: mol_type = other RNA
tcacagacggcccctccggccgc

SEQ ID NO: 97612 - RNA, 23 nt, synthetic construct
  source 1..23: mol_type = other RNA
ttgactgtgggtgtcgtggccgt

SEQ ID NO: 97613 - RNA, 23 nt, synthetic construct
  source 1..23: mol_type = other RNA
ttgagtgccgtccctgggctgga

SEQ ID NO: 97614 - RNA, 23 nt, synthetic construct
  source 1..23: mol_type = other RNA
tgtgaggatccgggtcgtcccca

SEQ ID NO: 97615 - RNA, 23 nt, synthetic construct
  source 1..23: mol_type = other RNA
tgggaccagccacgtcttggcca

SEQ ID NO: 97616 - RNA, 23 nt, synthetic construct
  source 1..23: mol_type = other RNA
tactctcttgtactcaaagccct

SEQ ID NO: 97617 - RNA, 23 nt, synthetic construct
  source 1..23: mol_type = other RNA
ttggctggccatcgggcgtgagg

SEQ ID NO: 97618 - RNA, 23 nt, synthetic construct
  source 1..23: mol_type = other RNA
tgagccctcgcagaaggtgatgt

SEQ ID NO: 97619 - RNA, 23 nt, synthetic construct
  source 1..23: mol_type = other RNA
tagccacactcatccacgtgggt

SEQ ID NO: 97620 - RNA, 23 nt, synthetic construct
  source 1..23: mol_type = other RNA
ttgcttagtttgttccagggcgt

SEQ ID NO: 97621 - RNA, 23 nt, synthetic construct
  source 1..23: mol_type = other RNA
ttgccccagcggccggacgtggc

SEQ ID NO: 97622 - RNA, 23 nt, synthetic construct
  source 1..23: mol_type = other RNA
tgcgctcggggcacccatcctgg

SEQ ID NO: 97623 - RNA, 23 nt, synthetic construct
  source 1..23: mol_type = other RNA
ttaggcggcgcggcagtgctcag

SEQ ID NO: 97624 - RNA, 23 nt, synthetic construct
  source 1..23: mol_type = other RNA
ttagtccccgctctgctccacca

SEQ ID NO: 97625 - RNA, 23 nt, synthetic construct
  source 1..23: mol_type = other RNA
taactggagcggggtcagcctgg

SEQ ID NO: 97626 - RNA, 23 nt, synthetic construct
  source 1..23: mol_type = other RNA
ttggcacacgggcaggtggggca

SEQ ID NO: 97627 - RNA, 23 nt, synthetic construct
  source 1..23: mol_type = other RNA
taaggaggtgcccgggctgtagg

SEQ ID NO: 97628 - RNA, 23 nt, synthetic construct
  source 1..23: mol_type = other RNA
ttgcaggtcgtagagtttctcat

SEQ ID NO: 97629 - RNA, 23 nt, synthetic construct
  source 1..23: mol_type = other RNA
tggcacatttcttggacagaacg

SEQ ID NO: 97630 - RNA, 23 nt, synthetic construct
  source 1..23: mol_type = other RNA
ttgacaaacacctgcatgagtgg

SEQ ID NO: 97631 - RNA, 23 nt, synthetic construct
  source 1..23: mol_type = other RNA
tgtgaagtcgtcagcctggttct

SEQ ID NO: 97632 - RNA, 23 nt, synthetic construct
  source 1..23: mol_type = other RNA
tgttggcgaaggctgcgcccgtg

SEQ ID NO: 97633 - RNA, 23 nt, synthetic construct
  source 1..23: mol_type = other RNA
tcaggcgcgagcaccagtgccgg

SEQ ID NO: 97634 - RNA, 23 nt, synthetic construct
  source 1..23: mol_type = other RNA
tctgagctgtacgcccttggcgg

SEQ ID NO: 97635 - RNA, 23 nt, synthetic construct
  source 1..23: mol_type = other RNA
tggcctcactcaggccgcggcaa

SEQ ID NO: 97636 - RNA, 23 nt, synthetic construct
  source 1..23: mol_type = other RNA
tcggcctcactcaggccgcggca

SEQ ID NO: 97637 - RNA, 23 nt, synthetic construct
  source 1..23: mol_type = other RNA
tgccagcacggtgccgtgagcgt

SEQ ID NO: 97638 - RNA, 23 nt, synthetic construct
  source 1..23: mol_type = other RNA
tccgtgggtctcgatgaccagga

SEQ ID NO: 97639 - RNA, 23 nt, synthetic construct
  source 1..23: mol_type = other RNA
tcacccgagtcgcaggcacacgc

SEQ ID NO: 97640 - RNA, 23 nt, synthetic construct
  source 1..23: mol_type = other RNA
tcgctgtggggacccttgcaccg

SEQ ID NO: 97641 - RNA, 23 nt, synthetic construct
  source 1..23: mol_type = other RNA
tctggtagctgtaggtcctgtcc

SEQ ID NO: 97642 - RNA, 23 nt, synthetic construct
  source 1..23: mol_type = other RNA
tgacgtcctggtagctgtaggtc

SEQ ID NO: 97643 - RNA, 23 nt, synthetic construct
  source 1..23: mol_type = other RNA
ttgaatggcgttgtggctggagt

SEQ ID NO: 97644 - RNA, 23 nt, synthetic construct
  source 1..23: mol_type = other RNA
tgcggtgcccattgtaccagctg

SEQ ID NO: 97645 - RNA, 23 nt, synthetic construct
  source 1..23: mol_type = other RNA
tgtattcgcagcagagaacccgc

SEQ ID NO: 97646 - RNA, 23 nt, synthetic construct
  source 1..23: mol_type = other RNA
tggcataagtgccctccagcggc

SEQ ID NO: 97647 - RNA, 23 nt, synthetic construct
  source 1..23: mol_type = other RNA
tgctggcataagtgccctccagc

SEQ ID NO: 97648 - RNA, 23 nt, synthetic construct
  source 1..23: mol_type = other RNA
tgtccagttggggaagctctcgg

SEQ ID NO: 97649 - RNA, 23 nt, synthetic construct
  source 1..23: mol_type = other RNA
ttgccagggtccagttggggaag

SEQ ID NO: 97650 - RNA, 23 nt, synthetic construct
  source 1..23: mol_type = other RNA
tctgagagggtggggactgctgt

SEQ ID NO: 97651 - RNA, 23 nt, synthetic construct
  source 1..23: mol_type = other RNA
tgcgtcgtggggcctcccgtggt

SEQ ID NO: 97652 - RNA, 23 nt, synthetic construct
  source 1..23: mol_type = other RNA
taggcgtcgtggggcctcccgtg

SEQ ID NO: 97653 - RNA, 23 nt, synthetic construct
  source 1..23: mol_type = other RNA
tccatgtgcccaagctccccgtc

SEQ ID NO: 97654 - RNA, 23 nt, synthetic construct
  source 1..23: mol_type = other RNA
tcgtgctggtctcggcctgagag

SEQ ID NO: 97655 - RNA, 23 nt, synthetic construct
  source 1..23: mol_type = other RNA
ttcgtctctgtcctgggcgtgct

SEQ ID NO: 97656 - RNA, 23 nt, synthetic construct
  source 1..23: mol_type = other RNA
tagccggtggccccagttgtggt

SEQ ID NO: 97657 - RNA, 23 nt, synthetic construct
  source 1..23: mol_type = other RNA
tggtagtgtgagctgttcctggg

SEQ ID NO: 97658 - RNA, 23 nt, synthetic construct
  source 1..23: mol_type = other RNA
tactggaggcgtgagtgccgtcc

SEQ ID NO: 97659 - RNA, 23 nt, synthetic construct
  source 1..23: mol_type = other RNA
tcagtgatgggggagtaccactg

SEQ ID NO: 97660 - RNA, 23 nt, synthetic construct
  source 1..23: mol_type = other RNA
ttggtcagtgatgggggagtacc

SEQ ID NO: 97661 - RNA, 23 nt, synthetic construct
  source 1..23: mol_type = other RNA
tttcggcactgggggtgtgtggg

SEQ ID NO: 97662 - RNA, 23 nt, synthetic construct
  source 1..23: mol_type = other RNA
tgctagggtgtgggaagtcaccg

SEQ ID NO: 97663 - RNA, 23 nt, synthetic construct
  source 1..23: mol_type = other RNA
ttcgaggtgcgggtcttgctggg

SEQ ID NO: 97664 - RNA, 23 nt, synthetic construct
  source 1..23: mol_type = other RNA
ttgtagtccagccactctgacca

SEQ ID NO: 97665 - RNA, 23 nt, synthetic construct
  source 1..23: mol_type = other RNA
ttggactcagtcgtagtggctgt

SEQ ID NO: 97666 - RNA, 23 nt, synthetic construct
  source 1..23: mol_type = other RNA
tgctcggctctgtgaggatccag

SEQ ID NO: 97667 - RNA, 23 nt, synthetic construct
  source 1..23: mol_type = other RNA
tcggtggccgtggatccggtggg

SEQ ID NO: 97668 - RNA, 23 nt, synthetic construct
  source 1..23: mol_type = other RNA
tgcggtggccgtggatccggtgg

SEQ ID NO: 97669 - RNA, 23 nt, synthetic construct
  source 1..23: mol_type = other RNA
tgtggggtgccagcagttgcctg

SEQ ID NO: 97670 - RNA, 23 nt, synthetic construct
  source 1..23: mol_type = other RNA
tgtgctcacatgtggggtgccag

SEQ ID NO: 97671 - RNA, 23 nt, synthetic construct
  source 1..23: mol_type = other RNA
tggtagtgtgagctgttcctggg

SEQ ID NO: 97672 - RNA, 23 nt, synthetic construct
  source 1..23: mol_type = other RNA
tcagtgatgggggagtaccactg

SEQ ID NO: 97673 - RNA, 23 nt, synthetic construct
  source 1..23: mol_type = other RNA
ttggtcagtgatgggggagtacc

SEQ ID NO: 97674 - RNA, 23 nt, synthetic construct
  source 1..23: mol_type = other RNA
tttcggcactgggggtgtgtggg

SEQ ID NO: 97675 - RNA, 23 nt, synthetic construct
  source 1..23: mol_type = other RNA
tgtgcctgaggtggccgaagtcc

SEQ ID NO: 97676 - RNA, 23 nt, synthetic construct
  source 1..23: mol_type = other RNA
tagtccccgtggaaggctctgtg

SEQ ID NO: 97677 - RNA, 23 nt, synthetic construct
  source 1..23: mol_type = other RNA
ttcgaggtgcgggtcttgctggg

SEQ ID NO: 97678 - RNA, 23 nt, synthetic construct
  source 1..23: mol_type = other RNA
ttgtagtccagccactctgacca

SEQ ID NO: 97679 - RNA, 23 nt, synthetic construct
  source 1..23: mol_type = other RNA
tggcgtggccgtagagctggtgg

SEQ ID NO: 97680 - RNA, 23 nt, synthetic construct
  source 1..23: mol_type = other RNA
tgatggccgtggatccagtggtt

SEQ ID NO: 97681 - RNA, 23 nt, synthetic construct
  source 1..23: mol_type = other RNA
tggggtggaggacgggatggccg

SEQ ID NO: 97682 - RNA, 23 nt, synthetic construct
  source 1..23: mol_type = other RNA
tcggggtggaggacgggatggcc

SEQ ID NO: 97683 - RNA, 23 nt, synthetic construct
  source 1..23: mol_type = other RNA
tcggtggccgtggatccggtggg

SEQ ID NO: 97684 - RNA, 23 nt, synthetic construct
  source 1..23: mol_type = other RNA
tgcggtggccgtggatccggtgg

SEQ ID NO: 97685 - RNA, 23 nt, synthetic construct
  source 1..23: mol_type = other RNA
tggtagtgtgagctgttcctggg

SEQ ID NO: 97686 - RNA, 23 nt, synthetic construct
  source 1..23: mol_type = other RNA
tactggaggcgtgagtgccgtcc

SEQ ID NO: 97687 - RNA, 23 nt, synthetic construct
  source 1..23: mol_type = other RNA
tcagtgatgggggagtaccactg

SEQ ID NO: 97688 - RNA, 23 nt, synthetic construct
  source 1..23: mol_type = other RNA
ttggtcagtgatgggggagtacc

SEQ ID NO: 97689 - RNA, 23 nt, synthetic construct
  source 1..23: mol_type = other RNA
tttcggcactgggggtgtgtggg

SEQ ID NO: 97690 - RNA, 23 nt, synthetic construct
  source 1..23: mol_type = other RNA
ttcgaggtgcgggtcttgctggg

SEQ ID NO: 97691 - RNA, 23 nt, synthetic construct
  source 1..23: mol_type = other RNA
ttgtagtccagccactctgacca

SEQ ID NO: 97692 - RNA, 23 nt, synthetic construct
  source 1..23: mol_type = other RNA
tgctcacagactgcccctccggc

SEQ ID NO: 97693 - RNA, 23 nt, synthetic construct
  source 1..23: mol_type = other RNA
tggcgtggccgtagagctggtgg

SEQ ID NO: 97694 - RNA, 23 nt, synthetic construct
  source 1..23: mol_type = other RNA
ttggactcagtcgtagtggctgt

SEQ ID NO: 97695 - RNA, 23 nt, synthetic construct
  source 1..23: mol_type = other RNA
tgctcggctctgtgaggatccag

SEQ ID NO: 97696 - RNA, 23 nt, synthetic construct
  source 1..23: mol_type = other RNA
tcggtggccgtggatccggtggg

SEQ ID NO: 97697 - RNA, 23 nt, synthetic construct
  source 1..23: mol_type = other RNA
tgcggtggccgtggatccggtgg

SEQ ID NO: 97698 - RNA, 23 nt, synthetic construct
  source 1..23: mol_type = other RNA
tgtggggtgccagcagttgcctg

SEQ ID NO: 97699 - RNA, 23 nt, synthetic construct
  source 1..23: mol_type = other RNA
tgtgctcacatgtggggtgccag

SEQ ID NO: 97700 - RNA, 23 nt, synthetic construct
  source 1..23: mol_type = other RNA
tggtagtgtgagctgttcctggg

SEQ ID NO: 97701 - RNA, 23 nt, synthetic construct
  source 1..23: mol_type = other RNA
tcagtgatgggggagtaccactg

SEQ ID NO: 97702 - RNA, 23 nt, synthetic construct
  source 1..23: mol_type = other RNA
tatcgtagtggccgtggtgatca

SEQ ID NO: 97703 - RNA, 23 nt, synthetic construct
  source 1..23: mol_type = other RNA
tttcggcactgggggtgtgtggg

SEQ ID NO: 97704 - RNA, 23 nt, synthetic construct
  source 1..23: mol_type = other RNA
tgtgcctgaggtggccgaagtcc

SEQ ID NO: 97705 - RNA, 23 nt, synthetic construct
  source 1..23: mol_type = other RNA
tagtccccgtggaaggctctgtg

SEQ ID NO: 97706 - RNA, 23 nt, synthetic construct
  source 1..23: mol_type = other RNA
ttcgaggtgcgggtcttgctggg

SEQ ID NO: 97707 - RNA, 23 nt, synthetic construct
  source 1..23: mol_type = other RNA
ttgtagtccagccactctgacca

SEQ ID NO: 97708 - RNA, 23 nt, synthetic construct
  source 1..23: mol_type = other RNA
tgacgtggaactggtggcccttg

SEQ ID NO: 97709 - RNA, 23 nt, synthetic construct
  source 1..23: mol_type = other RNA
tgctcggctctgtgaggatccag

SEQ ID NO: 97710 - RNA, 23 nt, synthetic construct
  source 1..23: mol_type = other RNA
tcggtggccgtggatccggtggg

SEQ ID NO: 97711 - RNA, 23 nt, synthetic construct
  source 1..23: mol_type = other RNA
tgcggtggccgtggatccggtgg

SEQ ID NO: 97712 - RNA, 23 nt, synthetic construct
  source 1..23: mol_type = other RNA
tgtggggtgccagcagttgcctg

SEQ ID NO: 97713 - RNA, 23 nt, synthetic construct
  source 1..23: mol_type = other RNA
tgtgctcacatgtggggtgccag

SEQ ID NO: 97714 - RNA, 23 nt, synthetic construct
  source 1..23: mol_type = other RNA
tgaagggcagttgcagtccctgg

SEQ ID NO: 97715 - RNA, 23 nt, synthetic construct
  source 1..23: mol_type = other RNA
tggtagtgtgagctgttcctggg

SEQ ID NO: 97716 - RNA, 23 nt, synthetic construct
  source 1..23: mol_type = other RNA
tactggaggcgtgagtgccgtcc

SEQ ID NO: 97717 - RNA, 23 nt, synthetic construct
  source 1..23: mol_type = other RNA
ttggtcagcactctggcggtgtg

SEQ ID NO: 97718 - RNA, 23 nt, synthetic construct
  source 1..23: mol_type = other RNA
tcagtgatgggggagtaccactg

SEQ ID NO: 97719 - RNA, 23 nt, synthetic construct
  source 1..23: mol_type = other RNA
ttggtcagtgatgggggagtacc

SEQ ID NO: 97720 - RNA, 23 nt, synthetic construct
  source 1..23: mol_type = other RNA
ttggtctgtgctgggacggtcca

SEQ ID NO: 97721 - RNA, 23 nt, synthetic construct
  source 1..23: mol_type = other RNA
tgcagttgtagtggctgttgtgg

SEQ ID NO: 97722 - RNA, 23 nt, synthetic construct
  source 1..23: mol_type = other RNA
tgctcggctctgtgaggatccag

SEQ ID NO: 97723 - RNA, 23 nt, synthetic construct
  source 1..23: mol_type = other RNA
tcacggtggacgagctgggaacc

SEQ ID NO: 97724 - RNA, 23 nt, synthetic construct
  source 1..23: mol_type = other RNA
tagtgctgattgcacactgcgta

SEQ ID NO: 97725 - RNA, 23 nt, synthetic construct
  source 1..23: mol_type = other RNA
tagcggggcggaggacactggcg

SEQ ID NO: 97726 - RNA, 23 nt, synthetic construct
  source 1..23: mol_type = other RNA
taggtggaatagtgggagccgcc

SEQ ID NO: 97727 - RNA, 23 nt, synthetic construct
  source 1..23: mol_type = other RNA
tgcagttgccccggaaggtgtaa

SEQ ID NO: 97728 - RNA, 23 nt, synthetic construct
  source 1..23: mol_type = other RNA
tttcccaaagcgtgcatggatct

SEQ ID NO: 97729 - RNA, 23 nt, synthetic construct
  source 1..23: mol_type = other RNA
tcccatgcaccatggtgacagtg

SEQ ID NO: 97730 - RNA, 23 nt, synthetic construct
  source 1..23: mol_type = other RNA
tacttggccattgaaggtgacgc

SEQ ID NO: 97731 - RNA, 23 nt, synthetic construct
  source 1..23: mol_type = other RNA
tggggcacaaggttgtggcactc

SEQ ID NO: 97732 - RNA, 23 nt, synthetic construct
  source 1..23: mol_type = other RNA
tctgtatggggccgcatggcttg

SEQ ID NO: 97733 - RNA, 23 nt, synthetic construct
  source 1..23: mol_type = other RNA
tatgtgtgcgttgaagaggatct

SEQ ID NO: 97734 - RNA, 23 nt, synthetic construct
  source 1..23: mol_type = other RNA
tggcaggtacacatgtggcaggg

SEQ ID NO: 97735 - RNA, 23 nt, synthetic construct
  source 1..23: mol_type = other RNA
ttgacattgcaccgttgggtcct

SEQ ID NO: 97736 - RNA, 23 nt, synthetic construct
  source 1..23: mol_type = other RNA
tggccactctcttgtactcaaag

SEQ ID NO: 97737 - RNA, 23 nt, synthetic construct
  source 1..23: mol_type = other RNA
tcccggccactctcttgtactca

SEQ ID NO: 97738 - RNA, 23 nt, synthetic construct
  source 1..23: mol_type = other RNA
tacagcactgcccggccactctc

SEQ ID NO: 97739 - RNA, 23 nt, synthetic construct
  source 1..23: mol_type = other RNA
tgtttcattcagctggactggct

SEQ ID NO: 97740 - RNA, 23 nt, synthetic construct
  source 1..23: mol_type = other RNA
tggttttcatgatcagacaatgc

SEQ ID NO: 97741 - RNA, 23 nt, synthetic construct
  source 1..23: mol_type = other RNA
tcatgcttagtttgttccagggc

SEQ ID NO: 97742 - RNA, 23 nt, synthetic construct
  source 1..23: mol_type = other RNA
tggacgtggccagctggaatccg

SEQ ID NO: 97743 - RNA, 23 nt, synthetic construct
  source 1..23: mol_type = other RNA
taggcatggacaggcggccgcct

SEQ ID NO: 97744 - RNA, 23 nt, synthetic construct
  source 1..23: mol_type = other RNA
tcaggaatgtccacacgcatggt

SEQ ID NO: 97745 - RNA, 23 nt, synthetic construct
  source 1..23: mol_type = other RNA
tgggtgtgctagacaccggggct

SEQ ID NO: 97746 - RNA, 23 nt, synthetic construct
  source 1..23: mol_type = other RNA
tggctgtagtgctcggctctgtg

SEQ ID NO: 97747 - RNA, 23 nt, synthetic construct
  source 1..23: mol_type = other RNA
tggctgtagtgctcggctctgtg

SEQ ID NO: 97748 - RNA, 23 nt, synthetic construct
  source 1..23: mol_type = other RNA
tggctgtagtgctcggctctgtg

SEQ ID NO: 97749 - RNA, 23 nt, synthetic construct
  source 1..23: mol_type = other RNA
tgaggatccgggtcgtccccaga

SEQ ID NO: 97750 - RNA, 23 nt, synthetic construct
  source 1..23: mol_type = other RNA
tgtgcagtcggatgaacacgctg

SEQ ID NO: 97751 - RNA, 23 nt, synthetic construct
  source 1..23: mol_type = other RNA
ttcacccacggggtgggcagcag

SEQ ID NO: 97752 - RNA, 23 nt, synthetic construct
  source 1..23: mol_type = other RNA
tctcattgtcgtctctgtcctgg

SEQ ID NO: 97753 - RNA, 23 nt, synthetic construct
  source 1..23: mol_type = other RNA
ttgtggtcggtggcggggttgtg

SEQ ID NO: 97754 - RNA, 23 nt, synthetic construct
  source 1..23: mol_type = other RNA
tgggagtaccactggtctgtgtg

SEQ ID NO: 97755 - RNA, 23 nt, synthetic construct
  source 1..23: mol_type = other RNA
tgggagtaccactggtctgtgtg

SEQ ID NO: 97756 - RNA, 23 nt, synthetic construct
  source 1..23: mol_type = other RNA
tgggagtaccactggtctgtgtg

SEQ ID NO: 97757 - RNA, 23 nt, synthetic construct
  source 1..23: mol_type = other RNA
tgggagtaccactggtctgtgtg

SEQ ID NO: 97758 - RNA, 23 nt, synthetic construct
  source 1..23: mol_type = other RNA
tgggagtaccactggtctgtgtg

SEQ ID NO: 97759 - RNA, 23 nt, synthetic construct
  source 1..23: mol_type = other RNA
tgctgcagtcaccatgcaggtcg

SEQ ID NO: 97760 - RNA, 23 nt, synthetic construct
  source 1..23: mol_type = other RNA
tcctgcatgagtggcaccagctg

SEQ ID NO: 97761 - RNA, 23 nt, synthetic construct
  source 1..23: mol_type = other RNA
tgtgatgggggagtaccactggt

SEQ ID NO: 97762 - RNA, 23 nt, synthetic construct
  source 1..23: mol_type = other RNA
tcacggttcctgcagaccaggcc

SEQ ID NO: 97763 - RNA, 23 nt, synthetic construct
  source 1..23: mol_type = other RNA
tgtgtggacagtctctggagtgg

SEQ ID NO: 97764 - RNA, 23 nt, synthetic construct
  source 1..23: mol_type = other RNA
tgtgatgggggagtaccactggt

SEQ ID NO: 97765 - RNA, 23 nt, synthetic construct
  source 1..23: mol_type = other RNA
tcacggttcctgcagaccaggcc

SEQ ID NO: 97766 - RNA, 23 nt, synthetic construct
  source 1..23: mol_type = other RNA
tgtgtggacagtctctggagtag

SEQ ID NO: 97767 - RNA, 23 nt, synthetic construct
  source 1..23: mol_type = other RNA
tgtgatgggggagtaccactggt

SEQ ID NO: 97768 - RNA, 23 nt, synthetic construct
  source 1..23: mol_type = other RNA
tcacggttcctgcagaccaggcc

SEQ ID NO: 97769 - RNA, 23 nt, synthetic construct
  source 1..23: mol_type = other RNA
tgtgatgggggagtaccactggt

SEQ ID NO: 97770 - RNA, 23 nt, synthetic construct
  source 1..23: mol_type = other RNA
tcacggttcctgcagaccaggcc

SEQ ID NO: 97771 - RNA, 23 nt, synthetic construct
  source 1..23: mol_type = other RNA
tgtgtggacagtctctggagtgg

SEQ ID NO: 97772 - RNA, 23 nt, synthetic construct
  source 1..23: mol_type = other RNA
tgtgatgggggagtaccactggt

SEQ ID NO: 97773 - RNA, 23 nt, synthetic construct
  source 1..23: mol_type = other RNA
ttggcattgtcgtcgaagttccc

SEQ ID NO: 97774 - RNA, 23 nt, synthetic construct
  source 1..23: mol_type = other RNA
ttttctcatcataggtggagatg

SEQ ID NO: 97775 - RNA, 23 nt, synthetic construct
  source 1..23: mol_type = other RNA
taaggtcccctcttggaggatca

SEQ ID NO: 97776 - RNA, 23 nt, synthetic construct
  source 1..23: mol_type = other RNA
taagtccccgtggaaggctctgt

SEQ ID NO: 97777 - RNA, 23 nt, synthetic construct
  source 1..23: mol_type = other RNA
taagtccccgtggaaggctctgt

SEQ ID NO: 97778 - RNA, 23 nt, synthetic construct
  source 1..23: mol_type = other RNA
tagtagaggaggtgtggattgtg

SEQ ID NO: 97779 - RNA, 23 nt, synthetic construct
  source 1..23: mol_type = other RNA
tcccacatgctgcagatgcactc

SEQ ID NO: 97780 - RNA, 23 nt, synthetic construct
  source 1..23: mol_type = other RNA
tgcccggccactctcttgtactc

SEQ ID NO: 97781 - RNA, 23 nt, synthetic construct
  source 1..23: mol_type = other RNA
tgcacgcgctcggggcacccatc

SEQ ID NO: 97782 - RNA, 23 nt, synthetic construct
  source 1..23: mol_type = other RNA
tgtggtgttgaaggaggtgcccg

SEQ ID NO: 97783 - RNA, 23 nt, synthetic construct
  source 1..23: mol_type = other RNA
ttccaggctgagcgtcaccgctt

SEQ ID NO: 97784 - RNA, 23 nt, synthetic construct
  source 1..23: mol_type = other RNA
tgtgtgcagttacagctctggca

SEQ ID NO: 97785 - RNA, 23 nt, synthetic construct
  source 1..23: mol_type = other RNA
ttgagggccgccgtcgaccggat

SEQ ID NO: 97786 - RNA, 23 nt, synthetic construct
  source 1..23: mol_type = other RNA
tggaagggctgagcgtgttggaa

SEQ ID NO: 97787 - RNA, 23 nt, synthetic construct
  source 1..23: mol_type = other RNA
tgagctgttctcagggtggaggt

SEQ ID NO: 97788 - RNA, 23 nt, synthetic construct
  source 1..23: mol_type = other RNA
tggacagtctctggagtggagga

SEQ ID NO: 97789 - RNA, 23 nt, synthetic construct
  source 1..23: mol_type = other RNA
tggccgtgctggtcagcactttg

SEQ ID NO: 97790 - RNA, 23 nt, synthetic construct
  source 1..23: mol_type = other RNA
tctgtagtgctgggctctgtgag

SEQ ID NO: 97791 - RNA, 23 nt, synthetic construct
  source 1..23: mol_type = other RNA
tggccgtgctggtcagcactttg

SEQ ID NO: 97792 - RNA, 23 nt, synthetic construct
  source 1..23: mol_type = other RNA
ttgatcagtgatgggggagtacc

SEQ ID NO: 97793 - RNA, 23 nt, synthetic construct
  source 1..23: mol_type = other RNA
tggacagtctctggagtggagga

SEQ ID NO: 97794 - RNA, 23 nt, synthetic construct
  source 1..23: mol_type = other RNA
tggccgtgctggtcagcactggg

SEQ ID NO: 97795 - RNA, 23 nt, synthetic construct
  source 1..23: mol_type = other RNA
tagctgggaaccgtggaggcagt

SEQ ID NO: 97796 - RNA, 23 nt, synthetic construct
  source 1..23: mol_type = other RNA
tgtagaggctgagattcccaaag

SEQ ID NO: 97797 - RNA, 23 nt, synthetic construct
  source 1..23: mol_type = other RNA
tctcacgcccagggcaggaatgt

SEQ ID NO: 97798 - RNA, 23 nt, synthetic construct
  source 1..23: mol_type = other RNA
tgacaggtagtattgttgcaggc

SEQ ID NO: 97799 - RNA, 23 nt, synthetic construct
  source 1..23: mol_type = other RNA
tctctcttgtactcaaagccctg

SEQ ID NO: 97800 - RNA, 23 nt, synthetic construct
  source 1..23: mol_type = other RNA
tagcaaatggactccaccctcag

SEQ ID NO: 97801 - RNA, 23 nt, synthetic construct
  source 1..23: mol_type = other RNA
tagtggactcagtcgtagtggct

SEQ ID NO: 97802 - RNA, 23 nt, synthetic construct
  source 1..23: mol_type = other RNA
tagtggactcagtcgtagtggct

SEQ ID NO: 97803 - RNA, 23 nt, synthetic construct
  source 1..23: mol_type = other RNA
tagggtgccagcagttgcccggg

SEQ ID NO: 97804 - RNA, 23 nt, synthetic construct
  source 1..23: mol_type = other RNA
tctagacaccggggctgcggggc

SEQ ID NO: 97805 - RNA, 23 nt, synthetic construct
  source 1..23: mol_type = other RNA
tcgtgggtctcgatgaccaggaa

SEQ ID NO: 97806 - RNA, 23 nt, synthetic construct
  source 1..23: mol_type = other RNA
ttgtgtgcgttgaagaggatctg

SEQ ID NO: 97807 - RNA, 23 nt, synthetic construct
  source 1..23: mol_type = other RNA
tcaccagcgtccggcacgcgctc

SEQ ID NO: 97808 - RNA, 23 nt, synthetic construct
  source 1..23: mol_type = other RNA
tcacctgcatgagtggcaccagc

SEQ ID NO: 97809 - RNA, 23 nt, synthetic construct
  source 1..23: mol_type = other RNA
tggccccggttgtggtggccgtg

SEQ ID NO: 97810 - RNA, 23 nt, synthetic construct
  source 1..23: mol_type = other RNA
tggccccggttgtggtggccgtg

SEQ ID NO: 97811 - RNA, 23 nt, synthetic construct
  source 1..23: mol_type = other RNA
tccgccttgcctgtcgcagcttc

SEQ ID NO: 97812 - RNA, 23 nt, synthetic construct
  source 1..23: mol_type = other RNA
tgatgggggagtaccactggtct

SEQ ID NO: 97813 - RNA, 23 nt, synthetic construct
  source 1..23: mol_type = other RNA
tgatgggggagtaccactggtct

SEQ ID NO: 97814 - RNA, 23 nt, synthetic construct
  source 1..23: mol_type = other RNA
tgatgggggagtaccactggtct

SEQ ID NO: 97815 - RNA, 23 nt, synthetic construct
  source 1..23: mol_type = other RNA
tgatgggggagtaccactggtct

SEQ ID NO: 97816 - RNA, 23 nt, synthetic construct
  source 1..23: mol_type = other RNA
tgatgggggagtaccactggtct

SEQ ID NO: 97817 - RNA, 23 nt, synthetic construct
  source 1..23: mol_type = other RNA
tagtgaggatccgggtcgtcccc

SEQ ID NO: 97818 - RNA, 23 nt, synthetic construct
  source 1..23: mol_type = other RNA
taggtctgcagcggaaggtggga

SEQ ID NO: 97819 - RNA, 23 nt, synthetic construct
  source 1..23: mol_type = other RNA
tcatagaactcgttgaaggccgg

SEQ ID NO: 97820 - RNA, 23 nt, synthetic construct
  source 1..23: mol_type = other RNA
tagcctggcgttgtgggcataga

SEQ ID NO: 97821 - RNA, 23 nt, synthetic construct
  source 1..23: mol_type = other RNA
tctggaagggtggttgcagtcct

SEQ ID NO: 97822 - RNA, 23 nt, synthetic construct
  source 1..23: mol_type = other RNA
ttgggagttgtccctggagttga

SEQ ID NO: 97823 - RNA, 23 nt, synthetic construct
  source 1..23: mol_type = other RNA
tctggaagggtggttgcagtcct

SEQ ID NO: 97824 - RNA, 23 nt, synthetic construct
  source 1..23: mol_type = other RNA
tctggaagggtggttgcagtcct

SEQ ID NO: 97825 - RNA, 23 nt, synthetic construct
  source 1..23: mol_type = other RNA
tcagaacgtagctgcagtcacca

SEQ ID NO: 97826 - RNA, 23 nt, synthetic construct
  source 1..23: mol_type = other RNA
tgacaaacacctgcatgagtggc

SEQ ID NO: 97827 - RNA, 23 nt, synthetic construct
  source 1..23: mol_type = other RNA
tgcacaccctgtgcttttctgca

SEQ ID NO: 97828 - RNA, 23 nt, synthetic construct
  source 1..23: mol_type = other RNA
ttgcacaccctgtgcttttctgc

SEQ ID NO: 97829 - RNA, 23 nt, synthetic construct
  source 1..23: mol_type = other RNA
tcccaggggtgcccgccgagctg

SEQ ID NO: 97830 - RNA, 23 nt, synthetic construct
  source 1..23: mol_type = other RNA
tgatgctcggggtcacccatagg

SEQ ID NO: 97831 - RNA, 23 nt, synthetic construct
  source 1..23: mol_type = other RNA
tgccgtgggtgtggtggtctgtg

SEQ ID NO: 97832 - RNA, 23 nt, synthetic construct
  source 1..23: mol_type = other RNA
tctggggggcagggatcgcccgt

SEQ ID NO: 97833 - RNA, 23 nt, synthetic construct
  source 1..23: mol_type = other RNA
tgccgtgggtgtggtggtctgtg

SEQ ID NO: 97834 - RNA, 23 nt, synthetic construct
  source 1..23: mol_type = other RNA
tggtgttgtccctggagttgagg

SEQ ID NO: 97835 - RNA, 23 nt, synthetic construct
  source 1..23: mol_type = other RNA
tagtccttggactggaggaggaa

SEQ ID NO: 97836 - RNA, 23 nt, synthetic construct
  source 1..23: mol_type = other RNA
tgccgtgggtgtggtggtctgtg

SEQ ID NO: 97837 - RNA, 23 nt, synthetic construct
  source 1..23: mol_type = other RNA
tgccgtgggtgtggtggtctgtg

SEQ ID NO: 97838 - RNA, 23 nt, synthetic construct
  source 1..23: mol_type = other RNA
tggtgttgtccctggagttgagg

SEQ ID NO: 97839 - RNA, 23 nt, synthetic construct
  source 1..23: mol_type = other RNA
tagtccttggactggaggaggaa

SEQ ID NO: 97840 - RNA, 23 nt, synthetic construct
  source 1..23: mol_type = other RNA
tgccgtgggtgtggtggtctgtg

SEQ ID NO: 97841 - RNA, 23 nt, synthetic construct
  source 1..23: mol_type = other RNA
tggtgttgtccctggagttgagg

SEQ ID NO: 97842 - RNA, 23 nt, synthetic construct
  source 1..23: mol_type = other RNA
tagtccttggactggaggaggaa

SEQ ID NO: 97843 - RNA, 23 nt, synthetic construct
  source 1..23: mol_type = other RNA
taggggtgcgggtggtccccacg

SEQ ID NO: 97844 - RNA, 23 nt, synthetic construct
  source 1..23: mol_type = other RNA
tacccaccgctccccgggaaatt

SEQ ID NO: 97845 - RNA, 23 nt, synthetic construct
  source 1..23: mol_type = other RNA
tcgtagaaggtgccattgtacga

SEQ ID NO: 97846 - RNA, 23 nt, synthetic construct
  source 1..23: mol_type = other RNA
tccgtagaaggtgccattgtacg

SEQ ID NO: 97847 - RNA, 23 nt, synthetic construct
  source 1..23: mol_type = other RNA
tcagcggccggacgtggccagct

SEQ ID NO: 97848 - RNA, 23 nt, synthetic construct
  source 1..23: mol_type = other RNA
tggcattgtcgtcgaagttcccg

SEQ ID NO: 97849 - RNA, 23 nt, synthetic construct
  source 1..23: mol_type = other RNA
tccccggttgtggtggccgtggt

SEQ ID NO: 97850 - RNA, 23 nt, synthetic construct
  source 1..23: mol_type = other RNA
tccccggttgtggtggccgtggc

SEQ ID NO: 97851 - RNA, 23 nt, synthetic construct
  source 1..23: mol_type = other RNA
tcgtagagtttctcatcataggt

SEQ ID NO: 97852 - RNA, 23 nt, synthetic construct
  source 1..23: mol_type = other RNA
ttgggtgtcgtggccgtggtgct

SEQ ID NO: 97853 - RNA, 23 nt, synthetic construct
  source 1..23: mol_type = other RNA
ttgggtgtcgtggccgtggtgct

SEQ ID NO: 97854 - RNA, 23 nt, synthetic construct
  source 1..23: mol_type = other RNA
ttgggtgtcgtggccgtggtgct

SEQ ID NO: 97855 - RNA, 23 nt, synthetic construct
  source 1..23: mol_type = other RNA
tcgtgcagttgccggccggcaag

SEQ ID NO: 97856 - RNA, 23 nt, synthetic construct
  source 1..23: mol_type = other RNA
tagggtggttgcagtccttggac

SEQ ID NO: 97857 - RNA, 23 nt, synthetic construct
  source 1..23: mol_type = other RNA
tagggtggttgcagtccttggac

SEQ ID NO: 97858 - RNA, 23 nt, synthetic construct
  source 1..23: mol_type = other RNA
tagggtggttgcagtccttggac

SEQ ID NO: 97859 - RNA, 23 nt, synthetic construct
  source 1..23: mol_type = other RNA
ttggccgtggatccagtggctgc

SEQ ID NO: 97860 - RNA, 23 nt, synthetic construct
  source 1..23: mol_type = other RNA
tacctggtaccctctctgcctca

SEQ ID NO: 97861 - RNA, 23 nt, synthetic construct
  source 1..23: mol_type = other RNA
tgtggaggacgggatggccgtgg

SEQ ID NO: 97862 - RNA, 23 nt, synthetic construct
  source 1..23: mol_type = other RNA
ttcggggcaccgccatccatggt

SEQ ID NO: 97863 - RNA, 23 nt, synthetic construct
  source 1..23: mol_type = other RNA
tagtattccacaaaggtggcaca

SEQ ID NO: 97864 - RNA, 23 nt, synthetic construct
  source 1..23: mol_type = other RNA
tacggccatcccgtgggtctcga

SEQ ID NO: 97865 - RNA, 23 nt, synthetic construct
  source 1..23: mol_type = other RNA
tcgagctctggaggttgccattg

SEQ ID NO: 97866 - RNA, 23 nt, synthetic construct
  source 1..23: mol_type = other RNA
tggtggccgtggcggtaagcact

SEQ ID NO: 97867 - RNA, 23 nt, synthetic construct
  source 1..23: mol_type = other RNA
tggagggtgttgccatagaacca

SEQ ID NO: 97868 - RNA, 23 nt, synthetic construct
  source 1..23: mol_type = other RNA
tgagttgtcccaggagttgagga

SEQ ID NO: 97869 - RNA, 23 nt, synthetic construct
  source 1..23: mol_type = other RNA
tgggatgggagttgtcccaggag

SEQ ID NO: 97870 - RNA, 23 nt, synthetic construct
  source 1..23: mol_type = other RNA
tggagggtgttgccatagaacca

SEQ ID NO: 97871 - RNA, 23 nt, synthetic construct
  source 1..23: mol_type = other RNA
tcagggctggagtcgagtgctgg

SEQ ID NO: 97872 - RNA, 23 nt, synthetic construct
  source 1..23: mol_type = other RNA
tggagggcgtggccgtagagctg

SEQ ID NO: 97873 - RNA, 23 nt, synthetic construct
  source 1..23: mol_type = other RNA
ttttgagggtgccagcagttgcc

SEQ ID NO: 97874 - RNA, 23 nt, synthetic construct
  source 1..23: mol_type = other RNA
tggagggtgttgccatagaacca

SEQ ID NO: 97875 - RNA, 23 nt, synthetic construct
  source 1..23: mol_type = other RNA
tcagggctggagtcgagtgctgg

SEQ ID NO: 97876 - RNA, 23 nt, synthetic construct
  source 1..23: mol_type = other RNA
tggagggcgtggccgtagagctg

SEQ ID NO: 97877 - RNA, 23 nt, synthetic construct
  source 1..23: mol_type = other RNA
tggagggtgttgccatagaacca

SEQ ID NO: 97878 - RNA, 23 nt, synthetic construct
  source 1..23: mol_type = other RNA
tcagggctggagtcgagtgctgg

SEQ ID NO: 97879 - RNA, 23 nt, synthetic construct
  source 1..23: mol_type = other RNA
tggtggccgtggcggtaagcact

SEQ ID NO: 97880 - RNA, 23 nt, synthetic construct
  source 1..23: mol_type = other RNA
tggagggtgttgccatagaacca

SEQ ID NO: 97881 - RNA, 23 nt, synthetic construct
  source 1..23: mol_type = other RNA
tagctcagtgaggatccgggtcg

SEQ ID NO: 97882 - RNA, 23 nt, synthetic construct
  source 1..23: mol_type = other RNA
tgctgttcccagagtggaggagg

SEQ ID NO: 97883 - RNA, 23 nt, synthetic construct
  source 1..23: mol_type = other RNA
tggctctggttcctagagttgca

SEQ ID NO: 97884 - RNA, 23 nt, synthetic construct
  source 1..23: mol_type = other RNA
tactgcccggccactctcttgta

SEQ ID NO: 97885 - RNA, 23 nt, synthetic construct
  source 1..23: mol_type = other RNA
tgcactgcccggccactctcttg

SEQ ID NO: 97886 - RNA, 23 nt, synthetic construct
  source 1..23: mol_type = other RNA
tccaggtttcattcagctggact

SEQ ID NO: 97887 - RNA, 23 nt, synthetic construct
  source 1..23: mol_type = other RNA
ttcagcctcacagaggtacacgg

SEQ ID NO: 97888 - RNA, 23 nt, synthetic construct
  source 1..23: mol_type = other RNA
taggacagtgcaagggcaccgtc

SEQ ID NO: 97889 - RNA, 23 nt, synthetic construct
  source 1..23: mol_type = other RNA
tcgggaagccacgggtgtgtggg

SEQ ID NO: 97890 - RNA, 23 nt, synthetic construct
  source 1..23: mol_type = other RNA
tgcgctccggccgtggcagggac

SEQ ID NO: 97891 - RNA, 23 nt, synthetic construct
  source 1..23: mol_type = other RNA
ttgtgccctgcattctcccagct

SEQ ID NO: 97892 - RNA, 23 nt, synthetic construct
  source 1..23: mol_type = other RNA
taggttttcaaacgtctcaaagt

SEQ ID NO: 97893 - RNA, 23 nt, synthetic construct
  source 1..23: mol_type = other RNA
tcatcttgaagacgccctcctgc

SEQ ID NO: 97894 - RNA, 23 nt, synthetic construct
  source 1..23: mol_type = other RNA
tgccgaagtccaggctgtgcgca

SEQ ID NO: 97895 - RNA, 23 nt, synthetic construct
  source 1..23: mol_type = other RNA
tgccgaagtccaggctgtgcgca

SEQ ID NO: 97896 - RNA, 23 nt, synthetic construct
  source 1..23: mol_type = other RNA
tgccgaagtccaggctgtgcgca

SEQ ID NO: 97897 - RNA, 23 nt, synthetic construct
  source 1..23: mol_type = other RNA
tgccgaagtccaggctgtgcgca

SEQ ID NO: 97898 - RNA, 23 nt, synthetic construct
  source 1..23: mol_type = other RNA
tacgtggaactggtggcccttgt

SEQ ID NO: 97899 - RNA, 23 nt, synthetic construct
  source 1..23: mol_type = other RNA
tcgccatccatggtgtgccctgc

SEQ ID NO: 97900 - RNA, 23 nt, synthetic construct
  source 1..23: mol_type = other RNA
tgtggccccggttgtggtggccg

SEQ ID NO: 97901 - RNA, 23 nt, synthetic construct
  source 1..23: mol_type = other RNA
tgtggccccggttgtggtggccg

SEQ ID NO: 97902 - RNA, 23 nt, synthetic construct
  source 1..23: mol_type = other RNA
tgacccaggtttcattcagctgg

SEQ ID NO: 97903 - RNA, 23 nt, synthetic construct
  source 1..23: mol_type = other RNA
tggttttcaaacgtctcaaagtc

SEQ ID NO: 97904 - RNA, 23 nt, synthetic construct
  source 1..23: mol_type = other RNA
tgggggcagggatcgcccgtgtg

SEQ ID NO: 97905 - RNA, 23 nt, synthetic construct
  source 1..23: mol_type = other RNA
tgccgtggtgtggcccggggtgg

SEQ ID NO: 97906 - RNA, 23 nt, synthetic construct
  source 1..23: mol_type = other RNA
tgccgtggtgtggcccggggtgg

SEQ ID NO: 97907 - RNA, 23 nt, synthetic construct
  source 1..23: mol_type = other RNA
tagtggaagtcaccccaggtgct

SEQ ID NO: 97908 - RNA, 23 nt, synthetic construct
  source 1..23: mol_type = other RNA
ttcgtagagtttctcatcatagg

SEQ ID NO: 97909 - RNA, 23 nt, synthetic construct
  source 1..23: mol_type = other RNA
ttcggcctcactcaggccgcggc

SEQ ID NO: 97910 - RNA, 23 nt, synthetic construct
  source 1..23: mol_type = other RNA
tcactcccacctccggttcctgc

SEQ ID NO: 97911 - RNA, 23 nt, synthetic construct
  source 1..23: mol_type = other RNA
tgggcaggtgtccggagtccgcc

SEQ ID NO: 97912 - RNA, 23 nt, synthetic construct
  source 1..23: mol_type = other RNA
ttagctgtaggtcctgtcctcat

SEQ ID NO: 97913 - RNA, 23 nt, synthetic construct
  source 1..23: mol_type = other RNA
tcatacctggtaccctctctgcc

SEQ ID NO: 97914 - RNA, 23 nt, synthetic construct
  source 1..23: mol_type = other RNA
tcactcgatgtcagccagcacag

SEQ ID NO: 97915 - RNA, 23 nt, synthetic construct
  source 1..23: mol_type = other RNA
tcagtctgcgaggtgagggccgc

SEQ ID NO: 97916 - RNA, 23 nt, synthetic construct
  source 1..23: mol_type = other RNA
tcctccagcggccctgatcttat

SEQ ID NO: 97917 - RNA, 23 nt, synthetic construct
  source 1..23: mol_type = other RNA
ttgcagtggtcgtcactgcagca

SEQ ID NO: 97918 - RNA, 23 nt, synthetic construct
  source 1..23: mol_type = other RNA
tgcacgtcccctgcagtggtcgt

SEQ ID NO: 97919 - RNA, 23 nt, synthetic construct
  source 1..23: mol_type = other RNA
tggaagcggtgctggctgtgcct

SEQ ID NO: 97920 - RNA, 23 nt, synthetic construct
  source 1..23: mol_type = other RNA
tccgtggatccagtggacgcagt

SEQ ID NO: 97921 - RNA, 23 nt, synthetic construct
  source 1..23: mol_type = other RNA
tacactggaggcgtgagtgccgt

SEQ ID NO: 97922 - RNA, 23 nt, synthetic construct
  source 1..23: mol_type = other RNA
tgtgggtggtgcccaagatgccc

SEQ ID NO: 97923 - RNA, 23 nt, synthetic construct
  source 1..23: mol_type = other RNA
tccggcatggggtagctgtagtc

SEQ ID NO: 97924 - RNA, 23 nt, synthetic construct
  source 1..23: mol_type = other RNA
ttgctcacatgtggggtgccagc

SEQ ID NO: 97925 - RNA, 23 nt, synthetic construct
  source 1..23: mol_type = other RNA
tgccccggttgtggtggccgtgg

SEQ ID NO: 97926 - RNA, 23 nt, synthetic construct
  source 1..23: mol_type = other RNA
taggtgttgtccctggagttgag

SEQ ID NO: 97927 - RNA, 23 nt, synthetic construct
  source 1..23: mol_type = other RNA
tccggcatggggtagctgtagtc

SEQ ID NO: 97928 - RNA, 23 nt, synthetic construct
  source 1..23: mol_type = other RNA
tgaagggtggttgcagtccttgg

SEQ ID NO: 97929 - RNA, 23 nt, synthetic construct
  source 1..23: mol_type = other RNA
ttgtggatttggtggctgtgctt

SEQ ID NO: 97930 - RNA, 23 nt, synthetic construct
  source 1..23: mol_type = other RNA
tccttgtcgtggtggccttcgtg

SEQ ID NO: 97931 - RNA, 23 nt, synthetic construct
  source 1..23: mol_type = other RNA
tacactggaggcgtgagtgccgt

SEQ ID NO: 97932 - RNA, 23 nt, synthetic construct
  source 1..23: mol_type = other RNA
tgtgggtggtgcccaagatgccc

SEQ ID NO: 97933 - RNA, 23 nt, synthetic construct
  source 1..23: mol_type = other RNA
tccggcatggggtagctgtagtc

SEQ ID NO: 97934 - RNA, 23 nt, synthetic construct
  source 1..23: mol_type = other RNA
ttgctcacatgtggggtgccagc

SEQ ID NO: 97935 - RNA, 23 nt, synthetic construct
  source 1..23: mol_type = other RNA
taggtgttgtccctggagttgag

SEQ ID NO: 97936 - RNA, 23 nt, synthetic construct
  source 1..23: mol_type = other RNA
tccggcatggggtagctgtagtc

SEQ ID NO: 97937 - RNA, 23 nt, synthetic construct
  source 1..23: mol_type = other RNA
tgaagggtggttgcagtccttgg

SEQ ID NO: 97938 - RNA, 23 nt, synthetic construct
  source 1..23: mol_type = other RNA
ttgtggatttggtggctgtgctt

SEQ ID NO: 97939 - RNA, 23 nt, synthetic construct
  source 1..23: mol_type = other RNA
tccttgtcgtggtggccttcgtg

SEQ ID NO: 97940 - RNA, 23 nt, synthetic construct
  source 1..23: mol_type = other RNA
tccgtggatccagtggacgcagt

SEQ ID NO: 97941 - RNA, 23 nt, synthetic construct
  source 1..23: mol_type = other RNA
ttgctcacatgtggggtgccagc

SEQ ID NO: 97942 - RNA, 23 nt, synthetic construct
  source 1..23: mol_type = other RNA
tgccccggttgtggtggccgtgg

SEQ ID NO: 97943 - RNA, 23 nt, synthetic construct
  source 1..23: mol_type = other RNA
tacactggaggcgtgagtgccgt

SEQ ID NO: 97944 - RNA, 23 nt, synthetic construct
  source 1..23: mol_type = other RNA
tgaagggtggttgcagtccttgg

SEQ ID NO: 97945 - RNA, 23 nt, synthetic construct
  source 1..23: mol_type = other RNA
tgaaggtgtaagaggtgccgtca

SEQ ID NO: 97946 - RNA, 23 nt, synthetic construct
  source 1..23: mol_type = other RNA
ttggacttgtagtggatgctgag

SEQ ID NO: 97947 - RNA, 23 nt, synthetic construct
  source 1..23: mol_type = other RNA
tgttgcacggcgggggctgaccc

SEQ ID NO: 97948 - RNA, 23 nt, synthetic construct
  source 1..23: mol_type = other RNA
taggcaggcggtctggacgcact

SEQ ID NO: 97949 - RNA, 23 nt, synthetic construct
  source 1..23: mol_type = other RNA
ttaggtgtgcaggatggctgagc

SEQ ID NO: 97950 - RNA, 23 nt, synthetic construct
  source 1..23: mol_type = other RNA
tacccttctggggccggtttcac

SEQ ID NO: 97951 - RNA, 23 nt, synthetic construct
  source 1..23: mol_type = other RNA
tctgtcgcagcttcctggcagca

SEQ ID NO: 97952 - RNA, 23 nt, synthetic construct
  source 1..23: mol_type = other RNA
tctgttcccagagtggaggaggc

SEQ ID NO: 97953 - RNA, 23 nt, synthetic construct
  source 1..23: mol_type = other RNA
tgttgcaccaaccccgtagaagg

SEQ ID NO: 97954 - RNA, 23 nt, synthetic construct
  source 1..23: mol_type = other RNA
tcgccttaaaggtcccctcttgg

SEQ ID NO: 97955 - RNA, 23 nt, synthetic construct
  source 1..23: mol_type = other RNA
tatgtcgggaagctgcgccgccc

SEQ ID NO: 97956 - RNA, 23 nt, synthetic construct
  source 1..23: mol_type = other RNA
ttcgtggtggtaagcactgtgga

SEQ ID NO: 97957 - RNA, 23 nt, synthetic construct
  source 1..23: mol_type = other RNA
tatggccgtagagctggtggccg

SEQ ID NO: 97958 - RNA, 23 nt, synthetic construct
  source 1..23: mol_type = other RNA
tatggccgtagagctggtggccg

SEQ ID NO: 97959 - RNA, 23 nt, synthetic construct
  source 1..23: mol_type = other RNA
tcaaccccgtagaaggtgccatt

SEQ ID NO: 97960 - RNA, 23 nt, synthetic construct
  source 1..23: mol_type = other RNA
ttcgtcactgcagcagaggaccc

SEQ ID NO: 97961 - RNA, 23 nt, synthetic construct
  source 1..23: mol_type = other RNA
tttgtcgtggtggccttcgtggt

SEQ ID NO: 97962 - RNA, 23 nt, synthetic construct
  source 1..23: mol_type = other RNA
tttgtcgtggtggccttcgtggt

SEQ ID NO: 97963 - RNA, 23 nt, synthetic construct
  source 1..23: mol_type = other RNA
tggttgacagcgggtcgtgccct

SEQ ID NO: 97964 - RNA, 23 nt, synthetic construct
  source 1..23: mol_type = other RNA
tgagtgcgtgatgtcatccagca

SEQ ID NO: 97965 - RNA, 23 nt, synthetic construct
  source 1..23: mol_type = other RNA
ttgtcgtggccgtggtgctcaca

SEQ ID NO: 97966 - RNA, 23 nt, synthetic construct
  source 1..23: mol_type = other RNA
ttgtcgtggccgtggtgctcaca

SEQ ID NO: 97967 - RNA, 23 nt, synthetic construct
  source 1..23: mol_type = other RNA
ttgtcgtggccgtggtgctcaca

SEQ ID NO: 97968 - RNA, 23 nt, synthetic construct
  source 1..23: mol_type = other RNA
ttcgtggtggccttcgtggtcag

SEQ ID NO: 97969 - RNA, 23 nt, synthetic construct
  source 1..23: mol_type = other RNA
ttcgtggtggccttcgtggtcag

SEQ ID NO: 97970 - RNA, 23 nt, synthetic construct
  source 1..23: mol_type = other RNA
tcgagctgggaaccgtggaggca

SEQ ID NO: 97971 - RNA, 23 nt, synthetic construct
  source 1..23: mol_type = other RNA
tacgcatggtggtggtccccagc

SEQ ID NO: 97972 - RNA, 23 nt, synthetic construct
  source 1..23: mol_type = other RNA
ttagtattgttgcaggcatcctc

SEQ ID NO: 97973 - RNA, 23 nt, synthetic construct
  source 1..23: mol_type = other RNA
ttggttgtgttgcacacgcacac

SEQ ID NO: 97974 - RNA, 23 nt, synthetic construct
  source 1..23: mol_type = other RNA
tggcggtgtgggtggtccccggg

SEQ ID NO: 97975 - RNA, 23 nt, synthetic construct
  source 1..23: mol_type = other RNA
tggcggtgtgggtggtccccggg

SEQ ID NO: 97976 - RNA, 23 nt, synthetic construct
  source 1..23: mol_type = other RNA
tggcggtgtgggtggtccccggg

SEQ ID NO: 97977 - RNA, 23 nt, synthetic construct
  source 1..23: mol_type = other RNA
tgcgtaagcctccaggctctggc

SEQ ID NO: 97978 - RNA, 23 nt, synthetic construct
  source 1..23: mol_type = other RNA
tcgctcggggcacccatcctggg

SEQ ID NO: 97979 - RNA, 23 nt, synthetic construct
  source 1..23: mol_type = other RNA
taagggtggttgcagtccttgga

SEQ ID NO: 97980 - RNA, 23 nt, synthetic construct
  source 1..23: mol_type = other RNA
taagggtggttgcagtccttgga

SEQ ID NO: 97981 - RNA, 23 nt, synthetic construct
  source 1..23: mol_type = other RNA
taagggtggttgcagtccttgga

SEQ ID NO: 97982 - RNA, 23 nt, synthetic construct
  source 1..23: mol_type = other RNA
tggggtgactcggtggttctgct

SEQ ID NO: 97983 - RNA, 23 nt, synthetic construct
  source 1..23: mol_type = other RNA
tagtgcgtcccccaccacggacc

SEQ ID NO: 97984 - RNA, 23 nt, synthetic construct
  source 1..23: mol_type = other RNA
tgccatgtgcccaagctccccgt

SEQ ID NO: 97985 - RNA, 23 nt, synthetic construct
  source 1..23: mol_type = other RNA
tttgctgctagggtgtgggaagt

SEQ ID NO: 97986 - RNA, 23 nt, synthetic construct
  source 1..23: mol_type = other RNA
tggtcgtccctggggaagggggt

SEQ ID NO: 97987 - RNA, 23 nt, synthetic construct
  source 1..23: mol_type = other RNA
ttagctgcagtcaccatgcaggt

SEQ ID NO: 97988 - RNA, 23 nt, synthetic construct
  source 1..23: mol_type = other RNA
tccatgtgggttgtagaagtcac

SEQ ID NO: 97989 - RNA, 23 nt, synthetic construct
  source 1..23: mol_type = other RNA
tgggtgttgccatagaaccagtg

SEQ ID NO: 97990 - RNA, 23 nt, synthetic construct
  source 1..23: mol_type = other RNA
taggagggtgttgccatagaacc

SEQ ID NO: 97991 - RNA, 23 nt, synthetic construct
  source 1..23: mol_type = other RNA
tggtgtcgtggccgtggtgctca

SEQ ID NO: 97992 - RNA, 23 nt, synthetic construct
  source 1..23: mol_type = other RNA
tgggtgttgccatagaaccagtg

SEQ ID NO: 97993 - RNA, 23 nt, synthetic construct
  source 1..23: mol_type = other RNA
taggagggtgttgccatagaacc

SEQ ID NO: 97994 - RNA, 23 nt, synthetic construct
  source 1..23: mol_type = other RNA
tgggtgttgccatagaaccagtg

SEQ ID NO: 97995 - RNA, 23 nt, synthetic construct
  source 1..23: mol_type = other RNA
taggagggtgttgccatagaacc

SEQ ID NO: 97996 - RNA, 23 nt, synthetic construct
  source 1..23: mol_type = other RNA
tggtgtcgtggccgtggtgctca

SEQ ID NO: 97997 - RNA, 23 nt, synthetic construct
  source 1..23: mol_type = other RNA
tgggtgttgccatagaaccagtg

SEQ ID NO: 97998 - RNA, 23 nt, synthetic construct
  source 1..23: mol_type = other RNA
taggagggtgttgccatagaacc

SEQ ID NO: 97999 - RNA, 23 nt, synthetic construct
  source 1..23: mol_type = other RNA
tggtgtcgtggccgtggtgctca

SEQ ID NO: 98000 - RNA, 23 nt, synthetic construct
  source 1..23: mol_type = other RNA
tgggtgttgccatagaaccagtg

SEQ ID NO: 98001 - RNA, 23 nt, synthetic construct
  source 1..23: mol_type = other RNA
taggagggtgttgccatagaacc

SEQ ID NO: 98002 - RNA, 23 nt, synthetic construct
  source 1..23: mol_type = other RNA
tgtgcgtcccccaccacggaccg

SEQ ID NO: 98003 - RNA, 23 nt, synthetic construct
  source 1..23: mol_type = other RNA
ttaccaagggtgcttgtgtatct

SEQ ID NO: 98004 - RNA, 23 nt, synthetic construct
  source 1..23: mol_type = other RNA
tagttggcactttggtagtgtga

SEQ ID NO: 98005 - RNA, 23 nt, synthetic construct
  source 1..23: mol_type = other RNA
tgcgggtccaggcggtgcccagg

SEQ ID NO: 98006 - RNA, 23 nt, synthetic construct
  source 1..23: mol_type = other RNA
tttgggtgccagggcgtccgggc

SEQ ID NO: 98007 - RNA, 23 nt, synthetic construct
  source 1..23: mol_type = other RNA
tgggtgatgggtgttgtccctgg

SEQ ID NO: 98008 - RNA, 23 nt, synthetic construct
  source 1..23: mol_type = other RNA
tggtcttattgtagatgacttcc

SEQ ID NO: 98009 - RNA, 23 nt, synthetic construct
  source 1..23: mol_type = other RNA
tccgtggtggctgtaccaagggt

SEQ ID NO: 98010 - RNA, 23 nt, synthetic construct
  source 1..23: mol_type = other RNA
tggttgcacggcgggggctgacc

SEQ ID NO: 98011 - RNA, 23 nt, synthetic construct
  source 1..23: mol_type = other RNA
tctcgtccgtgcagttgccggcc

SEQ ID NO: 98012 - RNA, 23 nt, synthetic construct
  source 1..23: mol_type = other RNA
tatagccccccggagcaggtgca

SEQ ID NO: 98013 - RNA, 23 nt, synthetic construct
  source 1..23: mol_type = other RNA
tgtagctgcagtcaccatgcagg

SEQ ID NO: 98014 - RNA, 23 nt, synthetic construct
  source 1..23: mol_type = other RNA
tcatgagtggcaccagctgcacc

SEQ ID NO: 98015 - RNA, 23 nt, synthetic construct
  source 1..23: mol_type = other RNA
tagaaggcactgttgggatcggt

SEQ ID NO: 98016 - RNA, 23 nt, synthetic construct
  source 1..23: mol_type = other RNA
tgagtggcagcgcgagaaggcac

SEQ ID NO: 98017 - RNA, 23 nt, synthetic construct
  source 1..23: mol_type = other RNA
tcaggggtgcccgccgagctgtt

SEQ ID NO: 98018 - RNA, 23 nt, synthetic construct
  source 1..23: mol_type = other RNA
tctcctcggcaatgcagccccca

SEQ ID NO: 98019 - RNA, 23 nt, synthetic construct
  source 1..23: mol_type = other RNA
ttcctggtagctgtaggtcctgt

SEQ ID NO: 98020 - RNA, 23 nt, synthetic construct
  source 1..23: mol_type = other RNA
tcaaagtctccgcctcccaggcc

SEQ ID NO: 98021 - RNA, 23 nt, synthetic construct
  source 1..23: mol_type = other RNA
tagtaccactggtctgtgtgcta

SEQ ID NO: 98022 - RNA, 23 nt, synthetic construct
  source 1..23: mol_type = other RNA
tggatgggagttgtcccaggagt

SEQ ID NO: 98023 - RNA, 23 nt, synthetic construct
  source 1..23: mol_type = other RNA
tcagggtcgaggtgcgggtcttg

SEQ ID NO: 98024 - RNA, 23 nt, synthetic construct
  source 1..23: mol_type = other RNA
ttgtggggtgccagcagttgcct

SEQ ID NO: 98025 - RNA, 23 nt, synthetic construct
  source 1..23: mol_type = other RNA
tggtgactgtgggtgtcgtggcc

SEQ ID NO: 98026 - RNA, 23 nt, synthetic construct
  source 1..23: mol_type = other RNA
ttggtggtaagcactgtggaggt

SEQ ID NO: 98027 - RNA, 23 nt, synthetic construct
  source 1..23: mol_type = other RNA
tcactggaagcgtgcgtgccgtc

SEQ ID NO: 98028 - RNA, 23 nt, synthetic construct
  source 1..23: mol_type = other RNA
tagtaccactggtctgtgtgcta

SEQ ID NO: 98029 - RNA, 23 nt, synthetic construct
  source 1..23: mol_type = other RNA
tcagggtcgaggtgcgggtcttg

SEQ ID NO: 98030 - RNA, 23 nt, synthetic construct
  source 1..23: mol_type = other RNA
tggtctgctctgtgaggatccag

SEQ ID NO: 98031 - RNA, 23 nt, synthetic construct
  source 1..23: mol_type = other RNA
tgagctgttcccggggtggagga

SEQ ID NO: 98032 - RNA, 23 nt, synthetic construct
  source 1..23: mol_type = other RNA
ttggtggtaagcactgtggaggt

SEQ ID NO: 98033 - RNA, 23 nt, synthetic construct
  source 1..23: mol_type = other RNA
tagtaccactggtctgtgtgcta

SEQ ID NO: 98034 - RNA, 23 nt, synthetic construct
  source 1..23: mol_type = other RNA
tccggtggctgtgatcgtagtgg

SEQ ID NO: 98035 - RNA, 23 nt, synthetic construct
  source 1..23: mol_type = other RNA
tcagggtcgaggtgcgggtcttg

SEQ ID NO: 98036 - RNA, 23 nt, synthetic construct
  source 1..23: mol_type = other RNA
ttgtggggtgccagcagttgcct

SEQ ID NO: 98037 - RNA, 23 nt, synthetic construct
  source 1..23: mol_type = other RNA
tggtgactgtgggtgtcgtggcc

SEQ ID NO: 98038 - RNA, 23 nt, synthetic construct
  source 1..23: mol_type = other RNA
ttggtggtaagcactgtggaggt

SEQ ID NO: 98039 - RNA, 23 nt, synthetic construct
  source 1..23: mol_type = other RNA
tagtaccactggtctgtgtgcta

SEQ ID NO: 98040 - RNA, 23 nt, synthetic construct
  source 1..23: mol_type = other RNA
tcagggtcgaggtgcgggtcttg

SEQ ID NO: 98041 - RNA, 23 nt, synthetic construct
  source 1..23: mol_type = other RNA
tgagctgttcccggggtggagga

SEQ ID NO: 98042 - RNA, 23 nt, synthetic construct
  source 1..23: mol_type = other RNA
tccggtggtcccaagggtggagg

SEQ ID NO: 98043 - RNA, 23 nt, synthetic construct
  source 1..23: mol_type = other RNA
ttgtggggtgccagcagttgcct

SEQ ID NO: 98044 - RNA, 23 nt, synthetic construct
  source 1..23: mol_type = other RNA
tggtgactgtgggtgtcgtggcc

SEQ ID NO: 98045 - RNA, 23 nt, synthetic construct
  source 1..23: mol_type = other RNA
tagtaccactggtctgtgtgcta

SEQ ID NO: 98046 - RNA, 23 nt, synthetic construct
  source 1..23: mol_type = other RNA
tgtggcccttgtcatggtggctg

SEQ ID NO: 98047 - RNA, 23 nt, synthetic construct
  source 1..23: mol_type = other RNA
taggacactggcggtggggaggt

SEQ ID NO: 98048 - RNA, 23 nt, synthetic construct
  source 1..23: mol_type = other RNA
tcgtctcctcgtggacccgcctc

SEQ ID NO: 98049 - RNA, 23 nt, synthetic construct
  source 1..23: mol_type = other RNA
tgtggcagggacacataggcccg

SEQ ID NO: 98050 - RNA, 23 nt, synthetic construct
  source 1..23: mol_type = other RNA
tgactcagtcgtagtggctgttg

SEQ ID NO: 98051 - RNA, 23 nt, synthetic construct
  source 1..23: mol_type = other RNA
tgactcagtcgtagtggctgttg

SEQ ID NO: 98052 - RNA, 23 nt, synthetic construct
  source 1..23: mol_type = other RNA
tctagagttgcaggtggcaggct

SEQ ID NO: 98053 - RNA, 23 nt, synthetic construct
  source 1..23: mol_type = other RNA
tcaggcacgaaggaaacgctgca

SEQ ID NO: 98054 - RNA, 23 nt, synthetic construct
  source 1..23: mol_type = other RNA
tgggggagtaccactggtctgtg

SEQ ID NO: 98055 - RNA, 23 nt, synthetic construct
  source 1..23: mol_type = other RNA
tgggggagtaccactggtctgtg

SEQ ID NO: 98056 - RNA, 23 nt, synthetic construct
  source 1..23: mol_type = other RNA
tgggggagtaccactggtctgtg

SEQ ID NO: 98057 - RNA, 23 nt, synthetic construct
  source 1..23: mol_type = other RNA
tgggggagtaccactggtctgtg

SEQ ID NO: 98058 - RNA, 23 nt, synthetic construct
  source 1..23: mol_type = other RNA
tgggggagtaccactggtctgtg

SEQ ID NO: 98059 - RNA, 23 nt, synthetic construct
  source 1..23: mol_type = other RNA
ttgcgccgggttcagggggctca

SEQ ID NO: 98060 - RNA, 23 nt, synthetic construct
  source 1..23: mol_type = other RNA
tacagggcatacctggtaccctc

SEQ ID NO: 98061 - RNA, 23 nt, synthetic construct
  source 1..23: mol_type = other RNA
tacgtcggggcaccgccatccat

SEQ ID NO: 98062 - RNA, 23 nt, synthetic construct
  source 1..23: mol_type = other RNA
tcccttgtcgtggtggccttcgt

SEQ ID NO: 98063 - RNA, 23 nt, synthetic construct
  source 1..23: mol_type = other RNA
tcccttgtcgtggtggccttcgt

SEQ ID NO: 98064 - RNA, 23 nt, synthetic construct
  source 1..23: mol_type = other RNA
tcaactggcggcagtggttccgt

SEQ ID NO: 98065 - RNA, 23 nt, synthetic construct
  source 1..23: mol_type = other RNA
tcgcagatgcccatgtgtgcgtt

SEQ ID NO: 98066 - RNA, 23 nt, synthetic construct
  source 1..23: mol_type = other RNA
tccgaaaggggtcctgctggccc

SEQ ID NO: 98067 - RNA, 23 nt, synthetic construct
  source 1..23: mol_type = other RNA
ttgcgccgcccggcactcgatgt

SEQ ID NO: 98068 - RNA, 23 nt, synthetic construct
  source 1..23: mol_type = other RNA
tcggcctgagaggtggacagctc

SEQ ID NO: 98069 - RNA, 23 nt, synthetic construct
  source 1..23: mol_type = other RNA
tgtaggctgcggcgttgagaaca

SEQ ID NO: 98070 - RNA, 23 nt, synthetic construct
  source 1..23: mol_type = other RNA
tgaggcgtgcgtgccgtccctgg

SEQ ID NO: 98071 - RNA, 23 nt, synthetic construct
  source 1..23: mol_type = other RNA
tgtctgcagcggaaggtgggaca

SEQ ID NO: 98072 - RNA, 23 nt, synthetic construct
  source 1..23: mol_type = other RNA
tttggggttgatgatggagtggc

SEQ ID NO: 98073 - RNA, 23 nt, synthetic construct
  source 1..23: mol_type = other RNA
ttcccctgcagtggtcgtcactg

SEQ ID NO: 98074 - RNA, 23 nt, synthetic construct
  source 1..23: mol_type = other RNA
tctctgtcctgggcgtgctggtc

SEQ ID NO: 98075 - RNA, 23 nt, synthetic construct
  source 1..23: mol_type = other RNA
taagcactgtggaggtgtgggca

SEQ ID NO: 98076 - RNA, 23 nt, synthetic construct
  source 1..23: mol_type = other RNA
tccagttgtggtggccgtggcgg

SEQ ID NO: 98077 - RNA, 23 nt, synthetic construct
  source 1..23: mol_type = other RNA
taagcactgtggaggtgtggaca

SEQ ID NO: 98078 - RNA, 23 nt, synthetic construct
  source 1..23: mol_type = other RNA
taagcactgtggaggtgtggaca

SEQ ID NO: 98079 - RNA, 23 nt, synthetic construct
  source 1..23: mol_type = other RNA
taagcactgtggaggtgtgggca

SEQ ID NO: 98080 - RNA, 23 nt, synthetic construct
  source 1..23: mol_type = other RNA
taagcactgtggaggtgtggaca

SEQ ID NO: 98081 - RNA, 23 nt, synthetic construct
  source 1..23: mol_type = other RNA
tgctgcagatgcactcgcactca

SEQ ID NO: 98082 - RNA, 23 nt, synthetic construct
  source 1..23: mol_type = other RNA
tcagcatcagatcacagagcggc

SEQ ID NO: 98083 - RNA, 23 nt, synthetic construct
  source 1..23: mol_type = other RNA
tccgggaagccacgggtgtgtgg

SEQ ID NO: 98084 - RNA, 23 nt, synthetic construct
  source 1..23: mol_type = other RNA
tacacggtggagaccgggagggc

SEQ ID NO: 98085 - RNA, 23 nt, synthetic construct
  source 1..23: mol_type = other RNA
tggtctgggttggggtaggcaca

SEQ ID NO: 98086 - RNA, 23 nt, synthetic construct
  source 1..23: mol_type = other RNA
tacccctctctgacctggccgtt

SEQ ID NO: 98087 - RNA, 23 nt, synthetic construct
  source 1..23: mol_type = other RNA
ttccgtcaggccgcacttccgca

SEQ ID NO: 98088 - RNA, 23 nt, synthetic construct
  source 1..23: mol_type = other RNA
tgagcctctggttgtgggtgtgg

SEQ ID NO: 98089 - RNA, 23 nt, synthetic construct
  source 1..23: mol_type = other RNA
tcgtggatccagtggactcagtc

SEQ ID NO: 98090 - RNA, 23 nt, synthetic construct
  source 1..23: mol_type = other RNA
ttctgggagggtcccggtggtcc

SEQ ID NO: 98091 - RNA, 23 nt, synthetic construct
  source 1..23: mol_type = other RNA
tgagcctctggttgtgggtgtgg

SEQ ID NO: 98092 - RNA, 23 nt, synthetic construct
  source 1..23: mol_type = other RNA
tgttgtggtcagctttgtgagga

SEQ ID NO: 98093 - RNA, 23 nt, synthetic construct
  source 1..23: mol_type = other RNA
tcgtggatccagtggactcagtc

SEQ ID NO: 98094 - RNA, 23 nt, synthetic construct
  source 1..23: mol_type = other RNA
ttctgggagggtcccggtggtcc

SEQ ID NO: 98095 - RNA, 23 nt, synthetic construct
  source 1..23: mol_type = other RNA
tagggtaggactcctgagtggcg

SEQ ID NO: 98096 - RNA, 23 nt, synthetic construct
  source 1..23: mol_type = other RNA
tggtcagcctggcgttgtgggca

SEQ ID NO: 98097 - RNA, 23 nt, synthetic construct
  source 1..23: mol_type = other RNA
tgtgcccgcggggcaggtgcagc

SEQ ID NO: 98098 - RNA, 23 nt, synthetic construct
  source 1..23: mol_type = other RNA
ttcctcggcaatgcagcccccac

SEQ ID NO: 98099 - RNA, 23 nt, synthetic construct
  source 1..23: mol_type = other RNA
tactcacagcccccatgtgggtt

SEQ ID NO: 98100 - RNA, 23 nt, synthetic construct
  source 1..23: mol_type = other RNA
tggcggtgcccattgtaccagct

SEQ ID NO: 98101 - RNA, 23 nt, synthetic construct
  source 1..23: mol_type = other RNA
tcaggcgtcgtggggcctcccgt

SEQ ID NO: 98102 - RNA, 23 nt, synthetic construct
  source 1..23: mol_type = other RNA
ttggaagcggtgctggctgtgcc

SEQ ID NO: 98103 - RNA, 23 nt, synthetic construct
  source 1..23: mol_type = other RNA
tggcatggccgtagagctggtgg

SEQ ID NO: 98104 - RNA, 23 nt, synthetic construct
  source 1..23: mol_type = other RNA
tggagggtcccggtggtcccaag

SEQ ID NO: 98105 - RNA, 23 nt, synthetic construct
  source 1..23: mol_type = other RNA
tggcatggccgtagagctggtgg

SEQ ID NO: 98106 - RNA, 23 nt, synthetic construct
  source 1..23: mol_type = other RNA
tggagggtcccggtggtcccaag

SEQ ID NO: 98107 - RNA, 23 nt, synthetic construct
  source 1..23: mol_type = other RNA
ttggaattggtggcccttgtcat

SEQ ID NO: 98108 - RNA, 23 nt, synthetic construct
  source 1..23: mol_type = other RNA
ttcagggtggtgaggactgagga

SEQ ID NO: 98109 - RNA, 23 nt, synthetic construct
  source 1..23: mol_type = other RNA
tgggagccgccccacatgctgca

SEQ ID NO: 98110 - RNA, 23 nt, synthetic construct
  source 1..23: mol_type = other RNA
tgtggggtcagcaaatggactcc

SEQ ID NO: 98111 - RNA, 23 nt, synthetic construct
  source 1..23: mol_type = other RNA
ttccgcagaggaggcccaaggtt

SEQ ID NO: 98112 - RNA, 23 nt, synthetic construct
  source 1..23: mol_type = other RNA
tggcagcaggagcacggagcgcg

SEQ ID NO: 98113 - RNA, 23 nt, synthetic construct
  source 1..23: mol_type = other RNA
tgctggcccctcacccttctggg

SEQ ID NO: 98114 - RNA, 23 nt, synthetic construct
  source 1..23: mol_type = other RNA
tttgggatgctgacccctctctg

SEQ ID NO: 98115 - RNA, 23 nt, synthetic construct
  source 1..23: mol_type = other RNA
tacgtcctggtagctgtaggtcc

SEQ ID NO: 98116 - RNA, 23 nt, synthetic construct
  source 1..23: mol_type = other RNA
tggcgatcaagcaggcgccaagc

SEQ ID NO: 98117 - RNA, 23 nt, synthetic construct
  source 1..23: mol_type = other RNA
tcgcctgggaaggttgcaccaac

SEQ ID NO: 98118 - RNA, 23 nt, synthetic construct
  source 1..23: mol_type = other RNA
tgggcggttgcagtccctggact

SEQ ID NO: 98119 - RNA, 23 nt, synthetic construct
  source 1..23: mol_type = other RNA
tgggcggttgcagtccctggact

SEQ ID NO: 98120 - RNA, 23 nt, synthetic construct
  source 1..23: mol_type = other RNA
tgggcggttgcagtccctggact

SEQ ID NO: 98121 - RNA, 23 nt, synthetic construct
  source 1..23: mol_type = other RNA
tgggcggttgcagtccctggact

SEQ ID NO: 98122 - RNA, 23 nt, synthetic construct
  source 1..23: mol_type = other RNA
tccgtacatgaacacacggcgcc

SEQ ID NO: 98123 - RNA, 23 nt, synthetic construct
  source 1..23: mol_type = other RNA
tgctcgtgagtgttggcgccagg

SEQ ID NO: 98124 - RNA, 23 nt, synthetic construct
  source 1..23: mol_type = other RNA
tccggacgtggccagctggaatc

SEQ ID NO: 98125 - RNA, 23 nt, synthetic construct
  source 1..23: mol_type = other RNA
tgccggacgtggccagctggaat

SEQ ID NO: 98126 - RNA, 23 nt, synthetic construct
  source 1..23: mol_type = other RNA
tgagttaccctgcagcaggcatg

SEQ ID NO: 98127 - RNA, 23 nt, synthetic construct
  source 1..23: mol_type = other RNA
ttgagcgtgttggaagggtggat

SEQ ID NO: 98128 - RNA, 23 nt, synthetic construct
  source 1..23: mol_type = other RNA
tggcggtaagcactgtggaggtg

SEQ ID NO: 98129 - RNA, 23 nt, synthetic construct
  source 1..23: mol_type = other RNA
tggcggtaagcactgtggaggtg

SEQ ID NO: 98130 - RNA, 23 nt, synthetic construct
  source 1..23: mol_type = other RNA
tgtctggacgcactccccacagc

SEQ ID NO: 98131 - RNA, 23 nt, synthetic construct
  source 1..23: mol_type = other RNA
ttggtcgtccctggggaaggggg

SEQ ID NO: 98132 - RNA, 23 nt, synthetic construct
  source 1..23: mol_type = other RNA
tagcgggggactctgttggctgt

SEQ ID NO: 98133 - RNA, 23 nt, synthetic construct
  source 1..23: mol_type = other RNA
tcggtggacgagctgggaaccgt

SEQ ID NO: 98134 - RNA, 23 nt, synthetic construct
  source 1..23: mol_type = other RNA
tctcgcagctgccttcaaagctg

SEQ ID NO: 98135 - RNA, 23 nt, synthetic construct
  source 1..23: mol_type = other RNA
tgataggcgggtccaggtggtgc

SEQ ID NO: 98136 - RNA, 23 nt, synthetic construct
  source 1..23: mol_type = other RNA
tgataggcgggtccaggtggtgc

SEQ ID NO: 98137 - RNA, 23 nt, synthetic construct
  source 1..23: mol_type = other RNA
tgataggcgggtccaggtggtgc

SEQ ID NO: 98138 - RNA, 23 nt, synthetic construct
  source 1..23: mol_type = other RNA
tgataggcgggtccaggtggtgc

SEQ ID NO: 98139 - RNA, 23 nt, synthetic construct
  source 1..23: mol_type = other RNA
tcggggcggaggacactggcggt

SEQ ID NO: 98140 - RNA, 23 nt, synthetic construct
  source 1..23: mol_type = other RNA
tcccatccgacaccagccccggg

SEQ ID NO: 98141 - RNA, 23 nt, synthetic construct
  source 1..23: mol_type = other RNA
tggtgtgcagttacagctctggc

SEQ ID NO: 98142 - RNA, 23 nt, synthetic construct
  source 1..23: mol_type = other RNA
tagggcatacctggtaccctctc

SEQ ID NO: 98143 - RNA, 23 nt, synthetic construct
  source 1..23: mol_type = other RNA
ttaagtgccctccagcggccctg

SEQ ID NO: 98144 - RNA, 23 nt, synthetic construct
  source 1..23: mol_type = other RNA
tgggatggccgtggatccagtgg

SEQ ID NO: 98145 - RNA, 23 nt, synthetic construct
  source 1..23: mol_type = other RNA
tacggtggacgagctgggaaccg

SEQ ID NO: 98146 - RNA, 23 nt, synthetic construct
  source 1..23: mol_type = other RNA
taaggcggcccctgcagtggtcg

SEQ ID NO: 98147 - RNA, 23 nt, synthetic construct
  source 1..23: mol_type = other RNA
tcgcagaaggtgatgttgacctc

SEQ ID NO: 98148 - RNA, 23 nt, synthetic construct
  source 1..23: mol_type = other RNA
ttcggtggcggggttgtggcacg

SEQ ID NO: 98149 - RNA, 23 nt, synthetic construct
  source 1..23: mol_type = other RNA
tcgtgagtgttggcgccaggctc

SEQ ID NO: 98150 - RNA, 23 nt, synthetic construct
  source 1..23: mol_type = other RNA
taagggggtgactcggtggttct

SEQ ID NO: 98151 - RNA, 23 nt, synthetic construct
  source 1..23: mol_type = other RNA
taagggggtgactcggtggtcct

SEQ ID NO: 98152 - RNA, 23 nt, synthetic construct
  source 1..23: mol_type = other RNA
taagggggtgactcggtggtcct

SEQ ID NO: 98153 - RNA, 23 nt, synthetic construct
  source 1..23: mol_type = other RNA
taagggggtgactcggtggtcct

SEQ ID NO: 98154 - RNA, 23 nt, synthetic construct
  source 1..23: mol_type = other RNA
tgtgagtgccgtccctgggctgg

SEQ ID NO: 98155 - RNA, 23 nt, synthetic construct
  source 1..23: mol_type = other RNA
tgtgagtgccgtccctgggctgg

SEQ ID NO: 98156 - RNA, 23 nt, synthetic construct
  source 1..23: mol_type = other RNA
tgtgagtgccgtccctgggctgg

SEQ ID NO: 98157 - RNA, 23 nt, synthetic construct
  source 1..23: mol_type = other RNA
taggaacacgccgccgtccgctt

SEQ ID NO: 98158 - RNA, 23 nt, synthetic construct
  source 1..23: mol_type = other RNA
ttggggacccttgcaccgacgtc

SEQ ID NO: 98159 - RNA, 23 nt, synthetic construct
  source 1..23: mol_type = other RNA
tcggatgctcggggtcacccata

SEQ ID NO: 98160 - RNA, 23 nt, synthetic construct
  source 1..23: mol_type = other RNA
tctcgtgagtgttggcgccaggc

SEQ ID NO: 98161 - RNA, 23 nt, synthetic construct
  source 1..23: mol_type = other RNA
tggtcaccaccgtggttatgggg

SEQ ID NO: 98162 - RNA, 23 nt, synthetic construct
  source 1..23: mol_type = other RNA
tggtcaccaccgtggttatgggg

SEQ ID NO: 98163 - RNA, 23 nt, synthetic construct
  source 1..23: mol_type = other RNA
tggtcaccaccgtggttatgggg

SEQ ID NO: 98164 - RNA, 23 nt, synthetic construct
  source 1..23: mol_type = other RNA
tggtctggacgcactccccacag

SEQ ID NO: 98165 - RNA, 23 nt, synthetic construct
  source 1..23: mol_type = other RNA
ttgcctgcggcaccacgagcatg

SEQ ID NO: 98166 - RNA, 23 nt, synthetic construct
  source 1..23: mol_type = other RNA
ttggacccggatggccgtgtccc

SEQ ID NO: 98167 - RNA, 23 nt, synthetic construct
  source 1..23: mol_type = other RNA
tacgaaggaaacgctgcaggtga

SEQ ID NO: 98168 - RNA, 23 nt, synthetic construct
  source 1..23: mol_type = other RNA
tactcgcagctgccttcaaagct

SEQ ID NO: 98169 - RNA, 23 nt, synthetic construct
  source 1..23: mol_type = other RNA
ttactcgcagctgccttcaaagc

SEQ ID NO: 98170 - RNA, 23 nt, synthetic construct
  source 1..23: mol_type = other RNA
tcttgtcgtagcagccacactgg

SEQ ID NO: 98171 - RNA, 23 nt, synthetic construct
  source 1..23: mol_type = other RNA
tgtgcctgtcgggcgagctctgg

SEQ ID NO: 98172 - RNA, 23 nt, synthetic construct
  source 1..23: mol_type = other RNA
tgcgcaccgtgtggggactgctg

SEQ ID NO: 98173 - RNA, 23 nt, synthetic construct
  source 1..23: mol_type = other RNA
tcatggccgtagagctggtggcc

SEQ ID NO: 98174 - RNA, 23 nt, synthetic construct
  source 1..23: mol_type = other RNA
tgcatggccgtagagctggtggc

SEQ ID NO: 98175 - RNA, 23 nt, synthetic construct
  source 1..23: mol_type = other RNA
tgcgcaccgtgtggggactgctg

SEQ ID NO: 98176 - RNA, 23 nt, synthetic construct
  source 1..23: mol_type = other RNA
tcggtggtcccaagggtgaagga

SEQ ID NO: 98177 - RNA, 23 nt, synthetic construct
  source 1..23: mol_type = other RNA
tgcgcaccgtgtggggactgctg

SEQ ID NO: 98178 - RNA, 23 nt, synthetic construct
  source 1..23: mol_type = other RNA
tgcgcaccgtgtggggactgctg

SEQ ID NO: 98179 - RNA, 23 nt, synthetic construct
  source 1..23: mol_type = other RNA
tcatggccgtagagctggtggcc

SEQ ID NO: 98180 - RNA, 23 nt, synthetic construct
  source 1..23: mol_type = other RNA
tgcatggccgtagagctggtggc

SEQ ID NO: 98181 - RNA, 23 nt, synthetic construct
  source 1..23: mol_type = other RNA
tgtggacgtggaactggtggccc

SEQ ID NO: 98182 - RNA, 23 nt, synthetic construct
  source 1..23: mol_type = other RNA
tcctgccggagagggatggcatt

SEQ ID NO: 98183 - RNA, 23 nt, synthetic construct
  source 1..23: mol_type = other RNA
tcacgtcttggccatgtccttgc

SEQ ID NO: 98184 - RNA, 23 nt, synthetic construct
  source 1..23: mol_type = other RNA
tccgggaaatttaggaaacccat

SEQ ID NO: 98185 - RNA, 23 nt, synthetic construct
  source 1..23: mol_type = other RNA
tacgcactccccacagcactgcc

SEQ ID NO: 98186 - RNA, 23 nt, synthetic construct
  source 1..23: mol_type = other RNA
ttgatcagacaatgcacatcctg

SEQ ID NO: 98187 - RNA, 23 nt, synthetic construct
  source 1..23: mol_type = other RNA
tcggacgtggccagctggaatcc

SEQ ID NO: 98188 - RNA, 23 nt, synthetic construct
  source 1..23: mol_type = other RNA
ttcgcagagctgcgcgcgctggg

SEQ ID NO: 98189 - RNA, 23 nt, synthetic construct
  source 1..23: mol_type = other RNA
ttcaccatgcaggtcgtagagtt

SEQ ID NO: 98190 - RNA, 23 nt, synthetic construct
  source 1..23: mol_type = other RNA
tcgcacttccgcagctcagccag

SEQ ID NO: 98191 - RNA, 23 nt, synthetic construct
  source 1..23: mol_type = other RNA
tgaaggctgcgcccgtggcctcc

SEQ ID NO: 98192 - RNA, 23 nt, synthetic construct
  source 1..23: mol_type = other RNA
ttgatggagtggcagcgcgagaa

SEQ ID NO: 98193 - RNA, 23 nt, synthetic construct
  source 1..23: mol_type = other RNA
ttcgctgagctgtacgcccttgg

SEQ ID NO: 98194 - RNA, 23 nt, synthetic construct
  source 1..23: mol_type = other RNA
tgaggaaggtgcccgcggggcag

SEQ ID NO: 98195 - RNA, 23 nt, synthetic construct
  source 1..23: mol_type = other RNA
ttgcactcccacctccggttcct

SEQ ID NO: 98196 - RNA, 23 nt, synthetic construct
  source 1..23: mol_type = other RNA
tgtgttgtccccacagtagtcct

SEQ ID NO: 98197 - RNA, 23 nt, synthetic construct
  source 1..23: mol_type = other RNA
ttgccagggcgtccgggcaggag

SEQ ID NO: 98198 - RNA, 23 nt, synthetic construct
  source 1..23: mol_type = other RNA
tcagggcatacctggtaccctct

SEQ ID NO: 98199 - RNA, 23 nt, synthetic construct
  source 1..23: mol_type = other RNA
tgatgtcagccagcacagggcat

SEQ ID NO: 98200 - RNA, 23 nt, synthetic construct
  source 1..23: mol_type = other RNA
tggtacctggggccgagggggtg

SEQ ID NO: 98201 - RNA, 23 nt, synthetic construct
  source 1..23: mol_type = other RNA
tgtgccagggtccagttggggaa

SEQ ID NO: 98202 - RNA, 23 nt, synthetic construct
  source 1..23: mol_type = other RNA
tgttgagaacagggcctgggtgg

SEQ ID NO: 98203 - RNA, 23 nt, synthetic construct
  source 1..23: mol_type = other RNA
tctcccgtggtggctgtaccaag

SEQ ID NO: 98204 - RNA, 23 nt, synthetic construct
  source 1..23: mol_type = other RNA
tccattgttgttggggccagcgt

SEQ ID NO: 98205 - RNA, 23 nt, synthetic construct
  source 1..23: mol_type = other RNA
tagtgctggaagggcggttgcag

SEQ ID NO: 98206 - RNA, 23 nt, synthetic construct
  source 1..23: mol_type = other RNA
taagaggggatgggtgtaacgct

SEQ ID NO: 98207 - RNA, 23 nt, synthetic construct
  source 1..23: mol_type = other RNA
tgtggtggtctgtgataggcggg

SEQ ID NO: 98208 - RNA, 23 nt, synthetic construct
  source 1..23: mol_type = other RNA
tgtggccgtgggtgtggtggtct

SEQ ID NO: 98209 - RNA, 23 nt, synthetic construct
  source 1..23: mol_type = other RNA
tggaggtgtgggcagtctctgga

SEQ ID NO: 98210 - RNA, 23 nt, synthetic construct
  source 1..23: mol_type = other RNA
tgtctgtgtgctagaggagggtg

SEQ ID NO: 98211 - RNA, 23 nt, synthetic construct
  source 1..23: mol_type = other RNA
tccggtggccgtgatcgtagtgg

SEQ ID NO: 98212 - RNA, 23 nt, synthetic construct
  source 1..23: mol_type = other RNA
tcactggggggatgggagttgtc

SEQ ID NO: 98213 - RNA, 23 nt, synthetic construct
  source 1..23: mol_type = other RNA
tcccaagatgcccgaggtggccg

SEQ ID NO: 98214 - RNA, 23 nt, synthetic construct
  source 1..23: mol_type = other RNA
tgtggcccggggtggtcgtccct

SEQ ID NO: 98215 - RNA, 23 nt, synthetic construct
  source 1..23: mol_type = other RNA
tccccacctgctcacggttcctg

SEQ ID NO: 98216 - RNA, 23 nt, synthetic construct
  source 1..23: mol_type = other RNA
tccgtcacggtggctgtagtgct

SEQ ID NO: 98217 - RNA, 23 nt, synthetic construct
  source 1..23: mol_type = other RNA
tagtgctggaagggcggttgcag

SEQ ID NO: 98218 - RNA, 23 nt, synthetic construct
  source 1..23: mol_type = other RNA
tgtggtggtctgtgataggcggg

SEQ ID NO: 98219 - RNA, 23 nt, synthetic construct
  source 1..23: mol_type = other RNA
tgtggccgtgggtgtggtggtct

SEQ ID NO: 98220 - RNA, 23 nt, synthetic construct
  source 1..23: mol_type = other RNA
tatccacactggaagcgtgcgtg

SEQ ID NO: 98221 - RNA, 23 nt, synthetic construct
  source 1..23: mol_type = other RNA
tgtctgtgtgctagaggagggtg

SEQ ID NO: 98222 - RNA, 23 nt, synthetic construct
  source 1..23: mol_type = other RNA
tccggtggccgtgatcgtagtgg

SEQ ID NO: 98223 - RNA, 23 nt, synthetic construct
  source 1..23: mol_type = other RNA
tgtggccgtggtgttcggcactg

SEQ ID NO: 98224 - RNA, 23 nt, synthetic construct
  source 1..23: mol_type = other RNA
tctgaggtggccgaagtccaggc

SEQ ID NO: 98225 - RNA, 23 nt, synthetic construct
  source 1..23: mol_type = other RNA
tgtggcccggggtggtcgtccct

SEQ ID NO: 98226 - RNA, 23 nt, synthetic construct
  source 1..23: mol_type = other RNA
tccccacctgctcacggttcctg

SEQ ID NO: 98227 - RNA, 23 nt, synthetic construct
  source 1..23: mol_type = other RNA
ttgctggtcagcactttgggagg

SEQ ID NO: 98228 - RNA, 23 nt, synthetic construct
  source 1..23: mol_type = other RNA
tgtgcttgtcagcactggaaggg

SEQ ID NO: 98229 - RNA, 23 nt, synthetic construct
  source 1..23: mol_type = other RNA
tacggtggctgtagtgctgggct

SEQ ID NO: 98230 - RNA, 23 nt, synthetic construct
  source 1..23: mol_type = other RNA
tccgtcacggtggctgtagtgct

SEQ ID NO: 98231 - RNA, 23 nt, synthetic construct
  source 1..23: mol_type = other RNA
tagtgctggaagggcggttgcag

SEQ ID NO: 98232 - RNA, 23 nt, synthetic construct
  source 1..23: mol_type = other RNA
tgtggtggtctgtgataggcggg

SEQ ID NO: 98233 - RNA, 23 nt, synthetic construct
  source 1..23: mol_type = other RNA
tgtggccgtgggtgtggtggtct

SEQ ID NO: 98234 - RNA, 23 nt, synthetic construct
  source 1..23: mol_type = other RNA
tgtctgtgtgctagaggagggtg

SEQ ID NO: 98235 - RNA, 23 nt, synthetic construct
  source 1..23: mol_type = other RNA
tcactggggggatgggagttgtc

SEQ ID NO: 98236 - RNA, 23 nt, synthetic construct
  source 1..23: mol_type = other RNA
tgtggccgtggtgttcggcactg

SEQ ID NO: 98237 - RNA, 23 nt, synthetic construct
  source 1..23: mol_type = other RNA
tgggcagggaccgcccgtgtgtg

SEQ ID NO: 98238 - RNA, 23 nt, synthetic construct
  source 1..23: mol_type = other RNA
tcccaagatgcccgaggtggccg

SEQ ID NO: 98239 - RNA, 23 nt, synthetic construct
  source 1..23: mol_type = other RNA
tgtggcccggggtggtcgtccct

SEQ ID NO: 98240 - RNA, 23 nt, synthetic construct
  source 1..23: mol_type = other RNA
tccccacctgctcacggttcctg

SEQ ID NO: 98241 - RNA, 23 nt, synthetic construct
  source 1..23: mol_type = other RNA
tccgtcacggtggctgtagtgct

SEQ ID NO: 98242 - RNA, 23 nt, synthetic construct
  source 1..23: mol_type = other RNA
tagtgctggaagggcggttgcag

SEQ ID NO: 98243 - RNA, 23 nt, synthetic construct
  source 1..23: mol_type = other RNA
tgtggtggtctgtgataggcggg

SEQ ID NO: 98244 - RNA, 23 nt, synthetic construct
  source 1..23: mol_type = other RNA
tgtggccgtgggtgtggtggtct

SEQ ID NO: 98245 - RNA, 23 nt, synthetic construct
  source 1..23: mol_type = other RNA
tggaggtgtgggcagtctctgga

SEQ ID NO: 98246 - RNA, 23 nt, synthetic construct
  source 1..23: mol_type = other RNA
tgtcaccgtggagccactggttg

SEQ ID NO: 98247 - RNA, 23 nt, synthetic construct
  source 1..23: mol_type = other RNA
tgtctgtgtgctagaggagggtg

SEQ ID NO: 98248 - RNA, 23 nt, synthetic construct
  source 1..23: mol_type = other RNA
tccggtggccgtgatcgtagtgg

SEQ ID NO: 98249 - RNA, 23 nt, synthetic construct
  source 1..23: mol_type = other RNA
tgtggccgtggtgttcggcactg

SEQ ID NO: 98250 - RNA, 23 nt, synthetic construct
  source 1..23: mol_type = other RNA
tctgaggtggccgaagtccaggc

SEQ ID NO: 98251 - RNA, 23 nt, synthetic construct
  source 1..23: mol_type = other RNA
tgtggcccggggtggtcgtccct

SEQ ID NO: 98252 - RNA, 23 nt, synthetic construct
  source 1..23: mol_type = other RNA
tccccacctgctcacggttcctg

SEQ ID NO: 98253 - RNA, 23 nt, synthetic construct
  source 1..23: mol_type = other RNA
tgtgcttgtcagcactggaaggg

SEQ ID NO: 98254 - RNA, 23 nt, synthetic construct
  source 1..23: mol_type = other RNA
tccgtcacggtggctgtagtgct

SEQ ID NO: 98255 - RNA, 23 nt, synthetic construct
  source 1..23: mol_type = other RNA
tgtggtggtctgtgataggcggg

SEQ ID NO: 98256 - RNA, 23 nt, synthetic construct
  source 1..23: mol_type = other RNA
tgtggccgtgggtgtggtggtct

SEQ ID NO: 98257 - RNA, 23 nt, synthetic construct
  source 1..23: mol_type = other RNA
tgtcaccgtggagccactggttg

SEQ ID NO: 98258 - RNA, 23 nt, synthetic construct
  source 1..23: mol_type = other RNA
tgtctgtgtgctagaggagggtg

SEQ ID NO: 98259 - RNA, 23 nt, synthetic construct
  source 1..23: mol_type = other RNA
tccggtggccgtgatcgtagtgg

SEQ ID NO: 98260 - RNA, 23 nt, synthetic construct
  source 1..23: mol_type = other RNA
tgtgcttgtcagcactggaaggg

SEQ ID NO: 98261 - RNA, 23 nt, synthetic construct
  source 1..23: mol_type = other RNA
tattttgtggctgtgcttgtcag

SEQ ID NO: 98262 - RNA, 23 nt, synthetic construct
  source 1..23: mol_type = other RNA
tctcagggtggtgaggactgagg

SEQ ID NO: 98263 - RNA, 23 nt, synthetic construct
  source 1..23: mol_type = other RNA
ttgtcacagtgctgattgcacac

SEQ ID NO: 98264 - RNA, 23 nt, synthetic construct
  source 1..23: mol_type = other RNA
tgcgccctggaagcggtcaatgt

SEQ ID NO: 98265 - RNA, 23 nt, synthetic construct
  source 1..23: mol_type = other RNA
tccatggtgacagtgaggacgat

SEQ ID NO: 98266 - RNA, 23 nt, synthetic construct
  source 1..23: mol_type = other RNA
tcttcccatgcaccatggtgaca

SEQ ID NO: 98267 - RNA, 23 nt, synthetic construct
  source 1..23: mol_type = other RNA
tgtcaaacaggatcaggccctcc

SEQ ID NO: 98268 - RNA, 23 nt, synthetic construct
  source 1..23: mol_type = other RNA
tgcccagggcaggaatgtccaca

SEQ ID NO: 98269 - RNA, 23 nt, synthetic construct
  source 1..23: mol_type = other RNA
tggccatgtccttgcaactggcg

SEQ ID NO: 98270 - RNA, 23 nt, synthetic construct
  source 1..23: mol_type = other RNA
ttcagatcacagagcggctgtgg

SEQ ID NO: 98271 - RNA, 23 nt, synthetic construct
  source 1..23: mol_type = other RNA
tgctctggcagggcacctcaagg

SEQ ID NO: 98272 - RNA, 23 nt, synthetic construct
  source 1..23: mol_type = other RNA
tgttgctgacccaccgctccccg

SEQ ID NO: 98273 - RNA, 23 nt, synthetic construct
  source 1..23: mol_type = other RNA
ttggcagggaagggcgcctggga

SEQ ID NO: 98274 - RNA, 23 nt, synthetic construct
  source 1..23: mol_type = other RNA
tgaggcaggtacacatgtggcag

SEQ ID NO: 98275 - RNA, 23 nt, synthetic construct
  source 1..23: mol_type = other RNA
tgagaggcaggtacacatgtggc

SEQ ID NO: 98276 - RNA, 23 nt, synthetic construct
  source 1..23: mol_type = other RNA
tgtgaggcaggcggtctggacgc

SEQ ID NO: 98277 - RNA, 23 nt, synthetic construct
  source 1..23: mol_type = other RNA
tgggcctctgctgagtacttgga

SEQ ID NO: 98278 - RNA, 23 nt, synthetic construct
  source 1..23: mol_type = other RNA
tgccgggaagccacgggtgtgtg

SEQ ID NO: 98279 - RNA, 23 nt, synthetic construct
  source 1..23: mol_type = other RNA
tcgttctcagacagcagtggcct

SEQ ID NO: 98280 - RNA, 23 nt, synthetic construct
  source 1..23: mol_type = other RNA
tgatggaggcagaacgttctcag

SEQ ID NO: 98281 - RNA, 23 nt, synthetic construct
  source 1..23: mol_type = other RNA
tagtttgttccagggcgtcccag

SEQ ID NO: 98282 - RNA, 23 nt, synthetic construct
  source 1..23: mol_type = other RNA
ttaggcctcggcgtagctggacg

SEQ ID NO: 98283 - RNA, 23 nt, synthetic construct
  source 1..23: mol_type = other RNA
tcaccatgcaggtcgtagagttt

SEQ ID NO: 98284 - RNA, 23 nt, synthetic construct
  source 1..23: mol_type = other RNA
tctcagccagcacggtgaagctg

SEQ ID NO: 98285 - RNA, 23 nt, synthetic construct
  source 1..23: mol_type = other RNA
tttggcgaaggctgcgcccgtgg

SEQ ID NO: 98286 - RNA, 23 nt, synthetic construct
  source 1..23: mol_type = other RNA
tgtagcacatcttgaagacgccc

SEQ ID NO: 98287 - RNA, 23 nt, synthetic construct
  source 1..23: mol_type = other RNA
tggggctcattgtcgtctctgtc

SEQ ID NO: 98288 - RNA, 23 nt, synthetic construct
  source 1..23: mol_type = other RNA
tgcggtgtgggtggtccccggga

SEQ ID NO: 98289 - RNA, 23 nt, synthetic construct
  source 1..23: mol_type = other RNA
tcgtggtggtcagtgatggggga

SEQ ID NO: 98290 - RNA, 23 nt, synthetic construct
  source 1..23: mol_type = other RNA
tgctgctagggtgtgggaagtca

SEQ ID NO: 98291 - RNA, 23 nt, synthetic construct
  source 1..23: mol_type = other RNA
tcagacggcccctccggccgcac

SEQ ID NO: 98292 - RNA, 23 nt, synthetic construct
  source 1..23: mol_type = other RNA
tcgtggtggtcagtgatggggga

SEQ ID NO: 98293 - RNA, 23 nt, synthetic construct
  source 1..23: mol_type = other RNA
tcagacggcccctccggccgcac

SEQ ID NO: 98294 - RNA, 23 nt, synthetic construct
  source 1..23: mol_type = other RNA
tgggcgtggccgtagagctggtg

SEQ ID NO: 98295 - RNA, 23 nt, synthetic construct
  source 1..23: mol_type = other RNA
tagctgtggatttggtggctgtg

SEQ ID NO: 98296 - RNA, 23 nt, synthetic construct
  source 1..23: mol_type = other RNA
tccggtggtcccaagggtgaagg

SEQ ID NO: 98297 - RNA, 23 nt, synthetic construct
  source 1..23: mol_type = other RNA
tgcggtgtgggtggtccccggga

SEQ ID NO: 98298 - RNA, 23 nt, synthetic construct
  source 1..23: mol_type = other RNA
tcgtggtggtcagtgatggggga

SEQ ID NO: 98299 - RNA, 23 nt, synthetic construct
  source 1..23: mol_type = other RNA
tgggcgtggccgtagagctggtg

SEQ ID NO: 98300 - RNA, 23 nt, synthetic construct
  source 1..23: mol_type = other RNA
tgccgtggtgatcagtgatgggg

SEQ ID NO: 98301 - RNA, 23 nt, synthetic construct
  source 1..23: mol_type = other RNA
tcagacggcccctccggccgcac

SEQ ID NO: 98302 - RNA, 23 nt, synthetic construct
  source 1..23: mol_type = other RNA
tacgacctggcccaactccccca

SEQ ID NO: 98303 - RNA, 23 nt, synthetic construct
  source 1..23: mol_type = other RNA
tagctgtggatttggtggctgtg

SEQ ID NO: 98304 - RNA, 23 nt, synthetic construct
  source 1..23: mol_type = other RNA
tgcggtgtgggtggtccccggga

SEQ ID NO: 98305 - RNA, 23 nt, synthetic construct
  source 1..23: mol_type = other RNA
tcgtggtggtcagtgatggggga

SEQ ID NO: 98306 - RNA, 23 nt, synthetic construct
  source 1..23: mol_type = other RNA
ttgacagtgaggacgatatccat

SEQ ID NO: 98307 - RNA, 23 nt, synthetic construct
  source 1..23: mol_type = other RNA
tgctctggttcctagagttgcag

SEQ ID NO: 98308 - RNA, 23 nt, synthetic construct
  source 1..23: mol_type = other RNA
tgcgtgaggcaggcggtctggac

SEQ ID NO: 98309 - RNA, 23 nt, synthetic construct
  source 1..23: mol_type = other RNA
ttgtggggtcagcaaatggactc

SEQ ID NO: 98310 - RNA, 23 nt, synthetic construct
  source 1..23: mol_type = other RNA
tttcacccacggggtgggcagca

SEQ ID NO: 98311 - RNA, 23 nt, synthetic construct
  source 1..23: mol_type = other RNA
tcgttgaaggccgggaggccgtt

SEQ ID NO: 98312 - RNA, 23 nt, synthetic construct
  source 1..23: mol_type = other RNA
tgcagttcgagtggaagggcttg

SEQ ID NO: 98313 - RNA, 23 nt, synthetic construct
  source 1..23: mol_type = other RNA
tggcatccaccacgtaggcgtag

SEQ ID NO: 98314 - RNA, 23 nt, synthetic construct
  source 1..23: mol_type = other RNA
tactcaggccgcggcaagtgggc

SEQ ID NO: 98315 - RNA, 23 nt, synthetic construct
  source 1..23: mol_type = other RNA
tgtagcaggggcactcctgggcg

SEQ ID NO: 98316 - RNA, 23 nt, synthetic construct
  source 1..23: mol_type = other RNA
tgcgccctcgtcgtgcaccacct

SEQ ID NO: 98317 - RNA, 23 nt, synthetic construct
  source 1..23: mol_type = other RNA
ttctttggaagcggtgctggctg

SEQ ID NO: 98318 - RNA, 23 nt, synthetic construct
  source 1..23: mol_type = other RNA
tggtgccagcagttgcctgggtg

SEQ ID NO: 98319 - RNA, 23 nt, synthetic construct
  source 1..23: mol_type = other RNA
ttggccgtggtgttcggcactgg

SEQ ID NO: 98320 - RNA, 23 nt, synthetic construct
  source 1..23: mol_type = other RNA
tctggtgtggcccggggtggtcg

SEQ ID NO: 98321 - RNA, 23 nt, synthetic construct
  source 1..23: mol_type = other RNA
tcgggtccaggcggtgcccaggg

SEQ ID NO: 98322 - RNA, 23 nt, synthetic construct
  source 1..23: mol_type = other RNA
ttggccgtggtgttcggcactgg

SEQ ID NO: 98323 - RNA, 23 nt, synthetic construct
  source 1..23: mol_type = other RNA
tctggtgtggcccggggtggtcg

SEQ ID NO: 98324 - RNA, 23 nt, synthetic construct
  source 1..23: mol_type = other RNA
tggtgccagcagttgcctgggtg

SEQ ID NO: 98325 - RNA, 23 nt, synthetic construct
  source 1..23: mol_type = other RNA
tggtcaccgtggagccactggtt

SEQ ID NO: 98326 - RNA, 23 nt, synthetic construct
  source 1..23: mol_type = other RNA
ttggccgtggtgttcggcactgg

SEQ ID NO: 98327 - RNA, 23 nt, synthetic construct
  source 1..23: mol_type = other RNA
tggtgccagcagttgcctgggtg

SEQ ID NO: 98328 - RNA, 23 nt, synthetic construct
  source 1..23: mol_type = other RNA
tggtcaccgtggagccactggtt

SEQ ID NO: 98329 - RNA, 23 nt, synthetic construct
  source 1..23: mol_type = other RNA
tggctgtgggcatagtggccatg

SEQ ID NO: 98330 - RNA, 23 nt, synthetic construct
  source 1..23: mol_type = other RNA
tggtaggactcctgagtggcgcc

SEQ ID NO: 98331 - RNA, 23 nt, synthetic construct
  source 1..23: mol_type = other RNA
taacaccagcgtccggcacgcgc

SEQ ID NO: 98332 - RNA, 23 nt, synthetic construct
  source 1..23: mol_type = other RNA
tcggcaccacgagcatggccgcc

SEQ ID NO: 98333 - RNA, 23 nt, synthetic construct
  source 1..23: mol_type = other RNA
tcgggtggaacaaagctcacgcg

SEQ ID NO: 98334 - RNA, 23 nt, synthetic construct
  source 1..23: mol_type = other RNA
tgctgcaggtggtgttgaaggag

SEQ ID NO: 98335 - RNA, 23 nt, synthetic construct
  source 1..23: mol_type = other RNA
tagtgggctggcaggcatccacc

SEQ ID NO: 98336 - RNA, 23 nt, synthetic construct
  source 1..23: mol_type = other RNA
tcaggcccgcgtcgtggcaggcc

SEQ ID NO: 98337 - RNA, 23 nt, synthetic construct
  source 1..23: mol_type = other RNA
tgtggggacccttgcaccgacgt

SEQ ID NO: 98338 - RNA, 23 nt, synthetic construct
  source 1..23: mol_type = other RNA
tggcgccaagcccatcggtggtg

SEQ ID NO: 98339 - RNA, 23 nt, synthetic construct
  source 1..23: mol_type = other RNA
tcatgtcgggaagctgcgccgcc

SEQ ID NO: 98340 - RNA, 23 nt, synthetic construct
  source 1..23: mol_type = other RNA
tgggtgaccgtcacggggcctga

SEQ ID NO: 98341 - RNA, 23 nt, synthetic construct
  source 1..23: mol_type = other RNA
ttctgtggtcggtggcggggttg

SEQ ID NO: 98342 - RNA, 23 nt, synthetic construct
  source 1..23: mol_type = other RNA
ttggtggccgtctccagctctgt

SEQ ID NO: 98343 - RNA, 23 nt, synthetic construct
  source 1..23: mol_type = other RNA
tttgacagcgggtcgtgccctgg

SEQ ID NO: 98344 - RNA, 23 nt, synthetic construct
  source 1..23: mol_type = other RNA
tacatggtggccgtgggtgtggt

SEQ ID NO: 98345 - RNA, 23 nt, synthetic construct
  source 1..23: mol_type = other RNA
tgggtgtgtgggtggtccctagg

SEQ ID NO: 98346 - RNA, 23 nt, synthetic construct
  source 1..23: mol_type = other RNA
tccggggtggtcgtccctggaga

SEQ ID NO: 98347 - RNA, 23 nt, synthetic construct
  source 1..23: mol_type = other RNA
tcccggggtggtcgtccctggag

SEQ ID NO: 98348 - RNA, 23 nt, synthetic construct
  source 1..23: mol_type = other RNA
tacatggtggccgtgggtgtggt

SEQ ID NO: 98349 - RNA, 23 nt, synthetic construct
  source 1..23: mol_type = other RNA
tgggtgtgtgggtggtccctagg

SEQ ID NO: 98350 - RNA, 23 nt, synthetic construct
  source 1..23: mol_type = other RNA
tcgtgtgtggtggccgtggtgtt

SEQ ID NO: 98351 - RNA, 23 nt, synthetic construct
  source 1..23: mol_type = other RNA
tgtcctgctgctagggtgagggc

SEQ ID NO: 98352 - RNA, 23 nt, synthetic construct
  source 1..23: mol_type = other RNA
tccggggtggtcgtccctggaga

SEQ ID NO: 98353 - RNA, 23 nt, synthetic construct
  source 1..23: mol_type = other RNA
tcccggggtggtcgtccctggag

SEQ ID NO: 98354 - RNA, 23 nt, synthetic construct
  source 1..23: mol_type = other RNA
tgcccttgtcgtggtggccttcg

SEQ ID NO: 98355 - RNA, 23 nt, synthetic construct
  source 1..23: mol_type = other RNA
tggcccttgtcgtggtggccttc

SEQ ID NO: 98356 - RNA, 23 nt, synthetic construct
  source 1..23: mol_type = other RNA
tacatggtggccgtgggtgtggt

SEQ ID NO: 98357 - RNA, 23 nt, synthetic construct
  source 1..23: mol_type = other RNA
tgggtgtgtgggtggtccctagg

SEQ ID NO: 98358 - RNA, 23 nt, synthetic construct
  source 1..23: mol_type = other RNA
tcgtgtgtggtggccgtggtgtt

SEQ ID NO: 98359 - RNA, 23 nt, synthetic construct
  source 1..23: mol_type = other RNA
tgtcctgctgctagggtgagggc

SEQ ID NO: 98360 - RNA, 23 nt, synthetic construct
  source 1..23: mol_type = other RNA
tccggggtggtcgtccctggaga

SEQ ID NO: 98361 - RNA, 23 nt, synthetic construct
  source 1..23: mol_type = other RNA
tcccggggtggtcgtccctggag

SEQ ID NO: 98362 - RNA, 23 nt, synthetic construct
  source 1..23: mol_type = other RNA
tcccgtggtcaccaccgtggtta

SEQ ID NO: 98363 - RNA, 23 nt, synthetic construct
  source 1..23: mol_type = other RNA
tacatggtggccgtgggtgtggt

SEQ ID NO: 98364 - RNA, 23 nt, synthetic construct
  source 1..23: mol_type = other RNA
tgggtgtgtgggtggtccctagg

SEQ ID NO: 98365 - RNA, 23 nt, synthetic construct
  source 1..23: mol_type = other RNA
tcgtgtgtggtggccgtggtgtt

SEQ ID NO: 98366 - RNA, 23 nt, synthetic construct
  source 1..23: mol_type = other RNA
tgtcctgctgctagggtgagggc

SEQ ID NO: 98367 - RNA, 23 nt, synthetic construct
  source 1..23: mol_type = other RNA
tccggggtggtcgtccctgggga

SEQ ID NO: 98368 - RNA, 23 nt, synthetic construct
  source 1..23: mol_type = other RNA
tcccggggtggtcgtccctgggg

SEQ ID NO: 98369 - RNA, 23 nt, synthetic construct
  source 1..23: mol_type = other RNA
tcccgtggtcaccaccgtggtta

SEQ ID NO: 98370 - RNA, 23 nt, synthetic construct
  source 1..23: mol_type = other RNA
tgcccttgtcgtggtggccttcg

SEQ ID NO: 98371 - RNA, 23 nt, synthetic construct
  source 1..23: mol_type = other RNA
tggcccttgtcgtggtggccttc

SEQ ID NO: 98372 - RNA, 23 nt, synthetic construct
  source 1..23: mol_type = other RNA
tacatggtggccgtgggtgtggt

SEQ ID NO: 98373 - RNA, 23 nt, synthetic construct
  source 1..23: mol_type = other RNA
tggtggtggtcagcactctggcg

SEQ ID NO: 98374 - RNA, 23 nt, synthetic construct
  source 1..23: mol_type = other RNA
tggtgtggattgtggacatggtg

SEQ ID NO: 98375 - RNA, 23 nt, synthetic construct
  source 1..23: mol_type = other RNA
ttgtggccgtggaattggtggcc

SEQ ID NO: 98376 - RNA, 23 nt, synthetic construct
  source 1..23: mol_type = other RNA
tgggtgtggccgtggaattggtg

SEQ ID NO: 98377 - RNA, 23 nt, synthetic construct
  source 1..23: mol_type = other RNA
ttgaggatccgggtcgtccccag

SEQ ID NO: 98378 - RNA, 23 nt, synthetic construct
  source 1..23: mol_type = other RNA
tccctggaagcggtcaatgtcac

SEQ ID NO: 98379 - RNA, 23 nt, synthetic construct
  source 1..23: mol_type = other RNA
tccggagagggatggcattgtca

SEQ ID NO: 98380 - RNA, 23 nt, synthetic construct
  source 1..23: mol_type = other RNA
tttgaaggtgacgctcacgccca

SEQ ID NO: 98381 - RNA, 23 nt, synthetic construct
  source 1..23: mol_type = other RNA
tctgatgcaggcgttgaagaatg

SEQ ID NO: 98382 - RNA, 23 nt, synthetic construct
  source 1..23: mol_type = other RNA
tgtgccctgcattctcccagctc

SEQ ID NO: 98383 - RNA, 23 nt, synthetic construct
  source 1..23: mol_type = other RNA
tacgcgccgggtgggcgaggacg

SEQ ID NO: 98384 - RNA, 23 nt, synthetic construct
  source 1..23: mol_type = other RNA
tcacgcgccgggtgggcgaggac

SEQ ID NO: 98385 - RNA, 23 nt, synthetic construct
  source 1..23: mol_type = other RNA
tgtgcgccgggttcagggggctc

SEQ ID NO: 98386 - RNA, 23 nt, synthetic construct
  source 1..23: mol_type = other RNA
tcggatgctgaccttgatgtagt

SEQ ID NO: 98387 - RNA, 23 nt, synthetic construct
  source 1..23: mol_type = other RNA
tccggatgctgaccttgatgtag

SEQ ID NO: 98388 - RNA, 23 nt, synthetic construct
  source 1..23: mol_type = other RNA
taccagccggatgctgaccttga

SEQ ID NO: 98389 - RNA, 23 nt, synthetic construct
  source 1..23: mol_type = other RNA
tccccagcagggtgcggtggcag

SEQ ID NO: 98390 - RNA, 23 nt, synthetic construct
  source 1..23: mol_type = other RNA
ttagccccccggagcaggtgcag

SEQ ID NO: 98391 - RNA, 23 nt, synthetic construct
  source 1..23: mol_type = other RNA
tgggccccgccctgcacagagca

SEQ ID NO: 98392 - RNA, 23 nt, synthetic construct
  source 1..23: mol_type = other RNA
tatcataggtggagatgtgggcc

SEQ ID NO: 98393 - RNA, 23 nt, synthetic construct
  source 1..23: mol_type = other RNA
tagccagcacggtgaagctgctg

SEQ ID NO: 98394 - RNA, 23 nt, synthetic construct
  source 1..23: mol_type = other RNA
ttgtctgcaccacgatgaagaag

SEQ ID NO: 98395 - RNA, 23 nt, synthetic construct
  source 1..23: mol_type = other RNA
tgcatgagtggcaccagctgcac

SEQ ID NO: 98396 - RNA, 23 nt, synthetic construct
  source 1..23: mol_type = other RNA
tagggccgtgaagtcgtcagcct

SEQ ID NO: 98397 - RNA, 23 nt, synthetic construct
  source 1..23: mol_type = other RNA
tcgagaaggcactgttgggatcg

SEQ ID NO: 98398 - RNA, 23 nt, synthetic construct
  source 1..23: mol_type = other RNA
tcaggccgcggcaagtgggctgg

SEQ ID NO: 98399 - RNA, 23 nt, synthetic construct
  source 1..23: mol_type = other RNA
ttagcaggggcactcctgggcgg

SEQ ID NO: 98400 - RNA, 23 nt, synthetic construct
  source 1..23: mol_type = other RNA
ttccgacaccagccccgggggac

SEQ ID NO: 98401 - RNA, 23 nt, synthetic construct
  source 1..23: mol_type = other RNA
tatccgacaccagccccggggga

SEQ ID NO: 98402 - RNA, 23 nt, synthetic construct
  source 1..23: mol_type = other RNA
tgcagtcgaccctgatggtctct

SEQ ID NO: 98403 - RNA, 23 nt, synthetic construct
  source 1..23: mol_type = other RNA
ttcgcagctgccttcaaagctgt

SEQ ID NO: 98404 - RNA, 23 nt, synthetic construct
  source 1..23: mol_type = other RNA
tggtgttgtccccacagtagtcc

SEQ ID NO: 98405 - RNA, 23 nt, synthetic construct
  source 1..23: mol_type = other RNA
tcccctcttggaggatcagctcg

SEQ ID NO: 98406 - RNA, 23 nt, synthetic construct
  source 1..23: mol_type = other RNA
taagtcattgatggcattgtcgt

SEQ ID NO: 98407 - RNA, 23 nt, synthetic construct
  source 1..23: mol_type = other RNA
tgcaaagtcattgatggcattgt

SEQ ID NO: 98408 - RNA, 23 nt, synthetic construct
  source 1..23: mol_type = other RNA
tgtcgtggcaggcctgggcgtag

SEQ ID NO: 98409 - RNA, 23 nt, synthetic construct
  source 1..23: mol_type = other RNA
tcgtcgtggcaggcctgggcgta

SEQ ID NO: 98410 - RNA, 23 nt, synthetic construct
  source 1..23: mol_type = other RNA
tcaaggggcaggtgtccggagtc

SEQ ID NO: 98411 - RNA, 23 nt, synthetic construct
  source 1..23: mol_type = other RNA
tccttgtcgtagcagccacactg

SEQ ID NO: 98412 - RNA, 23 nt, synthetic construct
  source 1..23: mol_type = other RNA
tctgtggggacccttgcaccgac

SEQ ID NO: 98413 - RNA, 23 nt, synthetic construct
  source 1..23: mol_type = other RNA
tactgggtgtgcagttacagctc

SEQ ID NO: 98414 - RNA, 23 nt, synthetic construct
  source 1..23: mol_type = other RNA
tgtgcccattgtaccagctggac

SEQ ID NO: 98415 - RNA, 23 nt, synthetic construct
  source 1..23: mol_type = other RNA
ttgtcgggaagctgcgccgcccg

SEQ ID NO: 98416 - RNA, 23 nt, synthetic construct
  source 1..23: mol_type = other RNA
tcgggggactctgttggctgttg

SEQ ID NO: 98417 - RNA, 23 nt, synthetic construct
  source 1..23: mol_type = other RNA
ttgggttggggtaggcacagcag

SEQ ID NO: 98418 - RNA, 23 nt, synthetic construct
  source 1..23: mol_type = other RNA
ttggacccagtctgcgaggtgag

SEQ ID NO: 98419 - RNA, 23 nt, synthetic construct
  source 1..23: mol_type = other RNA
tgctgctggcataagtgccctcc

SEQ ID NO: 98420 - RNA, 23 nt, synthetic construct
  source 1..23: mol_type = other RNA
tttaggctgctggcataagtgcc

SEQ ID NO: 98421 - RNA, 23 nt, synthetic construct
  source 1..23: mol_type = other RNA
ttatgtccttaggctgctggcat

SEQ ID NO: 98422 - RNA, 23 nt, synthetic construct
  source 1..23: mol_type = other RNA
taagacgccctcctgctcccagt

SEQ ID NO: 98423 - RNA, 23 nt, synthetic construct
  source 1..23: mol_type = other RNA
tagtccttctgagagggtgggga

SEQ ID NO: 98424 - RNA, 23 nt, synthetic construct
  source 1..23: mol_type = other RNA
tgatgtcagtccttctgagaggg

SEQ ID NO: 98425 - RNA, 23 nt, synthetic construct
  source 1..23: mol_type = other RNA
tggggatgtcagtccttctgaga

SEQ ID NO: 98426 - RNA, 23 nt, synthetic construct
  source 1..23: mol_type = other RNA
ttgtaccaagggtgcttgtgtat

SEQ ID NO: 98427 - RNA, 23 nt, synthetic construct
  source 1..23: mol_type = other RNA
ttgtggagcctgcaggcgtcgtg

SEQ ID NO: 98428 - RNA, 23 nt, synthetic construct
  source 1..23: mol_type = other RNA
tgaagggtggatgtggccacccc

SEQ ID NO: 98429 - RNA, 23 nt, synthetic construct
  source 1..23: mol_type = other RNA
tgttggaagggtggatgtggcca

SEQ ID NO: 98430 - RNA, 23 nt, synthetic construct
  source 1..23: mol_type = other RNA
ttccccgtcgtccctggaagggc

SEQ ID NO: 98431 - RNA, 23 nt, synthetic construct
  source 1..23: mol_type = other RNA
ttgtgcccaagctccccgtcgtc

SEQ ID NO: 98432 - RNA, 23 nt, synthetic construct
  source 1..23: mol_type = other RNA
tgggcgccatgtgcccaagctcc

SEQ ID NO: 98433 - RNA, 23 nt, synthetic construct
  source 1..23: mol_type = other RNA
ttgtgcctgtcgggcgagctctg

SEQ ID NO: 98434 - RNA, 23 nt, synthetic construct
  source 1..23: mol_type = other RNA
tgagtgttggcgccaggctcgtg

SEQ ID NO: 98435 - RNA, 23 nt, synthetic construct
  source 1..23: mol_type = other RNA
ttgagtgttggcgccaggctcgt

SEQ ID NO: 98436 - RNA, 23 nt, synthetic construct
  source 1..23: mol_type = other RNA
tggtgttagtcaaggggctcatt

SEQ ID NO: 98437 - RNA, 23 nt, synthetic construct
  source 1..23: mol_type = other RNA
tagcgggtcgtgccctggctggt

SEQ ID NO: 98438 - RNA, 23 nt, synthetic construct
  source 1..23: mol_type = other RNA
tggtggtcagcactttgggaggg

SEQ ID NO: 98439 - RNA, 23 nt, synthetic construct
  source 1..23: mol_type = other RNA
tggcggttgcagtccctggactg

SEQ ID NO: 98440 - RNA, 23 nt, synthetic construct
  source 1..23: mol_type = other RNA
tgcggtaagcactgtggaggtgt

SEQ ID NO: 98441 - RNA, 23 nt, synthetic construct
  source 1..23: mol_type = other RNA
tgtagtgtgagctgttcctgggg

SEQ ID NO: 98442 - RNA, 23 nt, synthetic construct
  source 1..23: mol_type = other RNA
tgagtgccgtccctgggctggag

SEQ ID NO: 98443 - RNA, 23 nt, synthetic construct
  source 1..23: mol_type = other RNA
tgaggagggggtcaccgtggagc

SEQ ID NO: 98444 - RNA, 23 nt, synthetic construct
  source 1..23: mol_type = other RNA
tggtgtgggtggtccccgggatg

SEQ ID NO: 98445 - RNA, 23 nt, synthetic construct
  source 1..23: mol_type = other RNA
ttggtggagccggtggccgtgat

SEQ ID NO: 98446 - RNA, 23 nt, synthetic construct
  source 1..23: mol_type = other RNA
ttcccaggagttgaggaggggtt

SEQ ID NO: 98447 - RNA, 23 nt, synthetic construct
  source 1..23: mol_type = other RNA
tgtgtgtggtggccatggtgttc

SEQ ID NO: 98448 - RNA, 23 nt, synthetic construct
  source 1..23: mol_type = other RNA
ttcgcccgtgtgtggtggccatg

SEQ ID NO: 98449 - RNA, 23 nt, synthetic construct
  source 1..23: mol_type = other RNA
taccgtgtggggactgctggggg

SEQ ID NO: 98450 - RNA, 23 nt, synthetic construct
  source 1..23: mol_type = other RNA
tcgcaccgtgtggggactgctgg

SEQ ID NO: 98451 - RNA, 23 nt, synthetic construct
  source 1..23: mol_type = other RNA
tcgaagtccaggctgtgcgcacc

SEQ ID NO: 98452 - RNA, 23 nt, synthetic construct
  source 1..23: mol_type = other RNA
tcccgaggtggccgaagtccagg

SEQ ID NO: 98453 - RNA, 23 nt, synthetic construct
  source 1..23: mol_type = other RNA
tgcccgaggtggccgaagtccag

SEQ ID NO: 98454 - RNA, 23 nt, synthetic construct
  source 1..23: mol_type = other RNA
tgtgcccaagatgcccgaggtgg

SEQ ID NO: 98455 - RNA, 23 nt, synthetic construct
  source 1..23: mol_type = other RNA
tgtggaaggctctgtgatgtggg

SEQ ID NO: 98456 - RNA, 23 nt, synthetic construct
  source 1..23: mol_type = other RNA
tcgtggaaggctctgtgatgtgg

SEQ ID NO: 98457 - RNA, 23 nt, synthetic construct
  source 1..23: mol_type = other RNA
tgtggttgctgctagggtgtggg

SEQ ID NO: 98458 - RNA, 23 nt, synthetic construct
  source 1..23: mol_type = other RNA
tcagccactctgaccaggcacac

SEQ ID NO: 98459 - RNA, 23 nt, synthetic construct
  source 1..23: mol_type = other RNA
tccccggcatggggtagctgtag

SEQ ID NO: 98460 - RNA, 23 nt, synthetic construct
  source 1..23: mol_type = other RNA
ttccccgccagagggccccggca

SEQ ID NO: 98461 - RNA, 23 nt, synthetic construct
  source 1..23: mol_type = other RNA
tacggatgttggagtaggtgtca

SEQ ID NO: 98462 - RNA, 23 nt, synthetic construct
  source 1..23: mol_type = other RNA
tacggttcctgcagaccaggcca

SEQ ID NO: 98463 - RNA, 23 nt, synthetic construct
  source 1..23: mol_type = other RNA
tttgaacttccccacctgctcac

SEQ ID NO: 98464 - RNA, 23 nt, synthetic construct
  source 1..23: mol_type = other RNA
taggagggcatggccgtagagct

SEQ ID NO: 98465 - RNA, 23 nt, synthetic construct
  source 1..23: mol_type = other RNA
tctcggctctgtgaggatccagg

SEQ ID NO: 98466 - RNA, 23 nt, synthetic construct
  source 1..23: mol_type = other RNA
tcggtgggcaccgtcacggtggc

SEQ ID NO: 98467 - RNA, 23 nt, synthetic construct
  source 1..23: mol_type = other RNA
tgtgccagcagttgcctgggtgg

SEQ ID NO: 98468 - RNA, 23 nt, synthetic construct
  source 1..23: mol_type = other RNA
tgtgactgtgggtgtcgtggccg

SEQ ID NO: 98469 - RNA, 23 nt, synthetic construct
  source 1..23: mol_type = other RNA
tggcggttgcagtccctggactg

SEQ ID NO: 98470 - RNA, 23 nt, synthetic construct
  source 1..23: mol_type = other RNA
tgtagtgtgagctgttcctgggg

SEQ ID NO: 98471 - RNA, 23 nt, synthetic construct
  source 1..23: mol_type = other RNA
tgtcaccgtggaacctctggttg

SEQ ID NO: 98472 - RNA, 23 nt, synthetic construct
  source 1..23: mol_type = other RNA
tgaggagggggtcaccgtggaac

SEQ ID NO: 98473 - RNA, 23 nt, synthetic construct
  source 1..23: mol_type = other RNA
tggtgtgggtggtccccgggatg

SEQ ID NO: 98474 - RNA, 23 nt, synthetic construct
  source 1..23: mol_type = other RNA
ttggtggagccggtggccgtgat

SEQ ID NO: 98475 - RNA, 23 nt, synthetic construct
  source 1..23: mol_type = other RNA
tggagtcactgtgctgctggtgg

SEQ ID NO: 98476 - RNA, 23 nt, synthetic construct
  source 1..23: mol_type = other RNA
ttcgcccgtgtgtggtggccgtg

SEQ ID NO: 98477 - RNA, 23 nt, synthetic construct
  source 1..23: mol_type = other RNA
taccgtgtggggactgctggggg

SEQ ID NO: 98478 - RNA, 23 nt, synthetic construct
  source 1..23: mol_type = other RNA
tcgcaccgtgtggggactgctgg

SEQ ID NO: 98479 - RNA, 23 nt, synthetic construct
  source 1..23: mol_type = other RNA
tcgaagtccaggctgtgcgcacc

SEQ ID NO: 98480 - RNA, 23 nt, synthetic construct
  source 1..23: mol_type = other RNA
tcctgaggtggccgaagtccagg

SEQ ID NO: 98481 - RNA, 23 nt, synthetic construct
  source 1..23: mol_type = other RNA
tgcctgaggtggccgaagtccag

SEQ ID NO: 98482 - RNA, 23 nt, synthetic construct
  source 1..23: mol_type = other RNA
tgtgcccaaggtgcctgaggtgg

SEQ ID NO: 98483 - RNA, 23 nt, synthetic construct
  source 1..23: mol_type = other RNA
tggtggtgcccaaggtgcctgag

SEQ ID NO: 98484 - RNA, 23 nt, synthetic construct
  source 1..23: mol_type = other RNA
tgtggaaggctctgtgatgtggg

SEQ ID NO: 98485 - RNA, 23 nt, synthetic construct
  source 1..23: mol_type = other RNA
tcgtggaaggctctgtgatgtgg

SEQ ID NO: 98486 - RNA, 23 nt, synthetic construct
  source 1..23: mol_type = other RNA
tcagccactctgaccaggcacac

SEQ ID NO: 98487 - RNA, 23 nt, synthetic construct
  source 1..23: mol_type = other RNA
tccccggcatggggtagctgtag

SEQ ID NO: 98488 - RNA, 23 nt, synthetic construct
  source 1..23: mol_type = other RNA
ttccccgccagagggccccggca

SEQ ID NO: 98489 - RNA, 23 nt, synthetic construct
  source 1..23: mol_type = other RNA
tacggatgttggagtaggtgtca

SEQ ID NO: 98490 - RNA, 23 nt, synthetic construct
  source 1..23: mol_type = other RNA
tacggttcctgcagaccaggcca

SEQ ID NO: 98491 - RNA, 23 nt, synthetic construct
  source 1..23: mol_type = other RNA
tttgaacttccccacctgctcac

SEQ ID NO: 98492 - RNA, 23 nt, synthetic construct
  source 1..23: mol_type = other RNA
tgtctgctctgtgaggatccagg

SEQ ID NO: 98493 - RNA, 23 nt, synthetic construct
  source 1..23: mol_type = other RNA
ttcgtagtggctgctgtggtctg

SEQ ID NO: 98494 - RNA, 23 nt, synthetic construct
  source 1..23: mol_type = other RNA
ttggctttggaactggtggctgt

SEQ ID NO: 98495 - RNA, 23 nt, synthetic construct
  source 1..23: mol_type = other RNA
ttggtagctgtggatttggtggc

SEQ ID NO: 98496 - RNA, 23 nt, synthetic construct
  source 1..23: mol_type = other RNA
ttaaagctggtagctgtggattt

SEQ ID NO: 98497 - RNA, 23 nt, synthetic construct
  source 1..23: mol_type = other RNA
tggtggtcccaagggtgaaggag

SEQ ID NO: 98498 - RNA, 23 nt, synthetic construct
  source 1..23: mol_type = other RNA
tattgtggacatggtggccatgg

SEQ ID NO: 98499 - RNA, 23 nt, synthetic construct
  source 1..23: mol_type = other RNA
tgattgtggacatggtggccatg

SEQ ID NO: 98500 - RNA, 23 nt, synthetic construct
  source 1..23: mol_type = other RNA
tgggtggattgtggacatggtgg

SEQ ID NO: 98501 - RNA, 23 nt, synthetic construct
  source 1..23: mol_type = other RNA
tgtctccggagtggaggaggggt

SEQ ID NO: 98502 - RNA, 23 nt, synthetic construct
  source 1..23: mol_type = other RNA
ttcgtggtcagcactgtggaggt

SEQ ID NO: 98503 - RNA, 23 nt, synthetic construct
  source 1..23: mol_type = other RNA
tcatggaactggtggcccttgtc

SEQ ID NO: 98504 - RNA, 23 nt, synthetic construct
  source 1..23: mol_type = other RNA
tgctgtagtgctgggctctgtga

SEQ ID NO: 98505 - RNA, 23 nt, synthetic construct
  source 1..23: mol_type = other RNA
tcacggtggctgtagtgctgggc

SEQ ID NO: 98506 - RNA, 23 nt, synthetic construct
  source 1..23: mol_type = other RNA
tcggtgggcaccgtcacggtggc

SEQ ID NO: 98507 - RNA, 23 nt, synthetic construct
  source 1..23: mol_type = other RNA
tggcggttgcagtccctggactg

SEQ ID NO: 98508 - RNA, 23 nt, synthetic construct
  source 1..23: mol_type = other RNA
taggcgggtccaggcggtgccca

SEQ ID NO: 98509 - RNA, 23 nt, synthetic construct
  source 1..23: mol_type = other RNA
tgtagtgtgagctgttcctgggg

SEQ ID NO: 98510 - RNA, 23 nt, synthetic construct
  source 1..23: mol_type = other RNA
tgagtgccgtccctgggctggag

SEQ ID NO: 98511 - RNA, 23 nt, synthetic construct
  source 1..23: mol_type = other RNA
tgaggagggggtcaccgtggagc

SEQ ID NO: 98512 - RNA, 23 nt, synthetic construct
  source 1..23: mol_type = other RNA
tggtgtgggtggtccccgggatg

SEQ ID NO: 98513 - RNA, 23 nt, synthetic construct
  source 1..23: mol_type = other RNA
tggtggctgtgatcgtagtggcc

SEQ ID NO: 98514 - RNA, 23 nt, synthetic construct
  source 1..23: mol_type = other RNA
tggagtcactgtgctgctggtgg

SEQ ID NO: 98515 - RNA, 23 nt, synthetic construct
  source 1..23: mol_type = other RNA
taccgtgtggggactgctggggg

SEQ ID NO: 98516 - RNA, 23 nt, synthetic construct
  source 1..23: mol_type = other RNA
tcgcaccgtgtggggactgctgg

SEQ ID NO: 98517 - RNA, 23 nt, synthetic construct
  source 1..23: mol_type = other RNA
tcgaagtccaggctgtgcgcacc

SEQ ID NO: 98518 - RNA, 23 nt, synthetic construct
  source 1..23: mol_type = other RNA
tcccgaggtggccgaagtccagg

SEQ ID NO: 98519 - RNA, 23 nt, synthetic construct
  source 1..23: mol_type = other RNA
tgcccgaggtggccgaagtccag

SEQ ID NO: 98520 - RNA, 23 nt, synthetic construct
  source 1..23: mol_type = other RNA
tgtgcccaagatgcccgaggtgg

SEQ ID NO: 98521 - RNA, 23 nt, synthetic construct
  source 1..23: mol_type = other RNA
tgtggaaggctctgtgatgtggg

SEQ ID NO: 98522 - RNA, 23 nt, synthetic construct
  source 1..23: mol_type = other RNA
tcgtggaaggctctgtgatgtgg

SEQ ID NO: 98523 - RNA, 23 nt, synthetic construct
  source 1..23: mol_type = other RNA
tgtcttgctgggtgtggctgtgg

SEQ ID NO: 98524 - RNA, 23 nt, synthetic construct
  source 1..23: mol_type = other RNA
tcgtggtcaccaccgtggttatg

SEQ ID NO: 98525 - RNA, 23 nt, synthetic construct
  source 1..23: mol_type = other RNA
tacagcccgtggtcaccaccgtg

SEQ ID NO: 98526 - RNA, 23 nt, synthetic construct
  source 1..23: mol_type = other RNA
ttggggctcacagcccgtggtca

SEQ ID NO: 98527 - RNA, 23 nt, synthetic construct
  source 1..23: mol_type = other RNA
tcagccactctgaccaggcacac

SEQ ID NO: 98528 - RNA, 23 nt, synthetic construct
  source 1..23: mol_type = other RNA
tccccggcatggggtagctgtag

SEQ ID NO: 98529 - RNA, 23 nt, synthetic construct
  source 1..23: mol_type = other RNA
ttccccgccagagggccccggca

SEQ ID NO: 98530 - RNA, 23 nt, synthetic construct
  source 1..23: mol_type = other RNA
tacggatgttggagtaggtgtca

SEQ ID NO: 98531 - RNA, 23 nt, synthetic construct
  source 1..23: mol_type = other RNA
tacagactgcccctccggccgca

SEQ ID NO: 98532 - RNA, 23 nt, synthetic construct
  source 1..23: mol_type = other RNA
tcacagactgcccctccggccgc

SEQ ID NO: 98533 - RNA, 23 nt, synthetic construct
  source 1..23: mol_type = other RNA
tacggttcctgcagaccaggcca

SEQ ID NO: 98534 - RNA, 23 nt, synthetic construct
  source 1..23: mol_type = other RNA
tttgaacttccccacctgctcac

SEQ ID NO: 98535 - RNA, 23 nt, synthetic construct
  source 1..23: mol_type = other RNA
tctcggctctgtgaggatccagg

SEQ ID NO: 98536 - RNA, 23 nt, synthetic construct
  source 1..23: mol_type = other RNA
tcggtgggcaccgtcacggtggc

SEQ ID NO: 98537 - RNA, 23 nt, synthetic construct
  source 1..23: mol_type = other RNA
tgtgccagcagttgcctgggtgg

SEQ ID NO: 98538 - RNA, 23 nt, synthetic construct
  source 1..23: mol_type = other RNA
tgtgactgtgggtgtcgtggccg

SEQ ID NO: 98539 - RNA, 23 nt, synthetic construct
  source 1..23: mol_type = other RNA
tggcggttgcagtccctggactg

SEQ ID NO: 98540 - RNA, 23 nt, synthetic construct
  source 1..23: mol_type = other RNA
tgttcctggggtggaagaggggg

SEQ ID NO: 98541 - RNA, 23 nt, synthetic construct
  source 1..23: mol_type = other RNA
tgtagtgtgagctgttcctgggg

SEQ ID NO: 98542 - RNA, 23 nt, synthetic construct
  source 1..23: mol_type = other RNA
tgtgactgtgaagcccgtggttg

SEQ ID NO: 98543 - RNA, 23 nt, synthetic construct
  source 1..23: mol_type = other RNA
ttcaccgtggagccactggttgt

SEQ ID NO: 98544 - RNA, 23 nt, synthetic construct
  source 1..23: mol_type = other RNA
tgaggagggggtcaccgtggagc

SEQ ID NO: 98545 - RNA, 23 nt, synthetic construct
  source 1..23: mol_type = other RNA
tggtgtgggtggtccccgggacg

SEQ ID NO: 98546 - RNA, 23 nt, synthetic construct
  source 1..23: mol_type = other RNA
ttggtggagccggtggccgtgat

SEQ ID NO: 98547 - RNA, 23 nt, synthetic construct
  source 1..23: mol_type = other RNA
tggagtcactgtgctgctggtgg

SEQ ID NO: 98548 - RNA, 23 nt, synthetic construct
  source 1..23: mol_type = other RNA
ttcgcccgtgtgtggtggccgtg

SEQ ID NO: 98549 - RNA, 23 nt, synthetic construct
  source 1..23: mol_type = other RNA
taccgtgtggggactgctggggg

SEQ ID NO: 98550 - RNA, 23 nt, synthetic construct
  source 1..23: mol_type = other RNA
tcgcaccgtgtggggactgctgg

SEQ ID NO: 98551 - RNA, 23 nt, synthetic construct
  source 1..23: mol_type = other RNA
tcgaagtccaggctgtgcgcacc

SEQ ID NO: 98552 - RNA, 23 nt, synthetic construct
  source 1..23: mol_type = other RNA
tcctgaggtggccgaagtccagg

SEQ ID NO: 98553 - RNA, 23 nt, synthetic construct
  source 1..23: mol_type = other RNA
tgcctgaggtggccgaagtccag

SEQ ID NO: 98554 - RNA, 23 nt, synthetic construct
  source 1..23: mol_type = other RNA
tgtgcccaaggtgcctgaggtgg

SEQ ID NO: 98555 - RNA, 23 nt, synthetic construct
  source 1..23: mol_type = other RNA
tggtggtgcccaaggtgcctgag

SEQ ID NO: 98556 - RNA, 23 nt, synthetic construct
  source 1..23: mol_type = other RNA
tgtggaaggctctgtgatgtggg

SEQ ID NO: 98557 - RNA, 23 nt, synthetic construct
  source 1..23: mol_type = other RNA
tcgtggaaggctctgtgatgtgg

SEQ ID NO: 98558 - RNA, 23 nt, synthetic construct
  source 1..23: mol_type = other RNA
tgtggtcgtccctggggaagggg

SEQ ID NO: 98559 - RNA, 23 nt, synthetic construct
  source 1..23: mol_type = other RNA
tcggggtggtcgtccctggggaa

SEQ ID NO: 98560 - RNA, 23 nt, synthetic construct
  source 1..23: mol_type = other RNA
tcgtggtcaccaccgtggttatg

SEQ ID NO: 98561 - RNA, 23 nt, synthetic construct
  source 1..23: mol_type = other RNA
tacagcccgtggtcaccaccgtg

SEQ ID NO: 98562 - RNA, 23 nt, synthetic construct
  source 1..23: mol_type = other RNA
ttggggctcacagcccgtggtca

SEQ ID NO: 98563 - RNA, 23 nt, synthetic construct
  source 1..23: mol_type = other RNA
tcagccactctgaccaggcacac

SEQ ID NO: 98564 - RNA, 23 nt, synthetic construct
  source 1..23: mol_type = other RNA
tccccggcatggggtagctgtag

SEQ ID NO: 98565 - RNA, 23 nt, synthetic construct
  source 1..23: mol_type = other RNA
ttccccgccagagggccccggca

SEQ ID NO: 98566 - RNA, 23 nt, synthetic construct
  source 1..23: mol_type = other RNA
tacggatgttggagtaggtgtca

SEQ ID NO: 98567 - RNA, 23 nt, synthetic construct
  source 1..23: mol_type = other RNA
tacggttcctgcagaccaggcca

SEQ ID NO: 98568 - RNA, 23 nt, synthetic construct
  source 1..23: mol_type = other RNA
tttgaacttccccacctgctcac

SEQ ID NO: 98569 - RNA, 23 nt, synthetic construct
  source 1..23: mol_type = other RNA
taggagggcatggccgtagagct

SEQ ID NO: 98570 - RNA, 23 nt, synthetic construct
  source 1..23: mol_type = other RNA
ttggctttggaactggtggctgt

SEQ ID NO: 98571 - RNA, 23 nt, synthetic construct
  source 1..23: mol_type = other RNA
ttggtagctgtggatttggtggc

SEQ ID NO: 98572 - RNA, 23 nt, synthetic construct
  source 1..23: mol_type = other RNA
tcgctggtagctgtggatttggt

SEQ ID NO: 98573 - RNA, 23 nt, synthetic construct
  source 1..23: mol_type = other RNA
taacgctggtagctgtggatttg

SEQ ID NO: 98574 - RNA, 23 nt, synthetic construct
  source 1..23: mol_type = other RNA
tattgtggacatggtggccacgg

SEQ ID NO: 98575 - RNA, 23 nt, synthetic construct
  source 1..23: mol_type = other RNA
tgattgtggacatggtggccacg

SEQ ID NO: 98576 - RNA, 23 nt, synthetic construct
  source 1..23: mol_type = other RNA
tgggtggattgtggacatggtgg

SEQ ID NO: 98577 - RNA, 23 nt, synthetic construct
  source 1..23: mol_type = other RNA
tgtctccggagtggaggaggggt

SEQ ID NO: 98578 - RNA, 23 nt, synthetic construct
  source 1..23: mol_type = other RNA
ttcgtggtcagcactgtggaggt

SEQ ID NO: 98579 - RNA, 23 nt, synthetic construct
  source 1..23: mol_type = other RNA
tctcggctctgtgaggatccagg

SEQ ID NO: 98580 - RNA, 23 nt, synthetic construct
  source 1..23: mol_type = other RNA
tcggtgggcaccgtcacggtggc

SEQ ID NO: 98581 - RNA, 23 nt, synthetic construct
  source 1..23: mol_type = other RNA
tgtgccagcagttgcctgggtgg

SEQ ID NO: 98582 - RNA, 23 nt, synthetic construct
  source 1..23: mol_type = other RNA
tgtgactgtgggtgtcgtggccg

SEQ ID NO: 98583 - RNA, 23 nt, synthetic construct
  source 1..23: mol_type = other RNA
taagggcagttgcagtccctgga

SEQ ID NO: 98584 - RNA, 23 nt, synthetic construct
  source 1..23: mol_type = other RNA
tgcggtaagcactgtggaggtgt

SEQ ID NO: 98585 - RNA, 23 nt, synthetic construct
  source 1..23: mol_type = other RNA
tgtagtgtgagctgttcctgggg

SEQ ID NO: 98586 - RNA, 23 nt, synthetic construct
  source 1..23: mol_type = other RNA
tgagtgccgtccctgggctggag

SEQ ID NO: 98587 - RNA, 23 nt, synthetic construct
  source 1..23: mol_type = other RNA
ttcaccgtggagccactggttgt

SEQ ID NO: 98588 - RNA, 23 nt, synthetic construct
  source 1..23: mol_type = other RNA
tgaggagggggtcaccgtggagc

SEQ ID NO: 98589 - RNA, 23 nt, synthetic construct
  source 1..23: mol_type = other RNA
tggtgtgggtggtccccgggatg

SEQ ID NO: 98590 - RNA, 23 nt, synthetic construct
  source 1..23: mol_type = other RNA
ttggtggagccggtggccgtgat

SEQ ID NO: 98591 - RNA, 23 nt, synthetic construct
  source 1..23: mol_type = other RNA
tgtgatgggtgttgtccctggag

SEQ ID NO: 98592 - RNA, 23 nt, synthetic construct
  source 1..23: mol_type = other RNA
ttttgtggctgtgcttgtcagca

SEQ ID NO: 98593 - RNA, 23 nt, synthetic construct
  source 1..23: mol_type = other RNA
tgtagctgtggattttgtggctg

SEQ ID NO: 98594 - RNA, 23 nt, synthetic construct
  source 1..23: mol_type = other RNA
ttaaagctggtagctgtggattt

SEQ ID NO: 98595 - RNA, 23 nt, synthetic construct
  source 1..23: mol_type = other RNA
tgtggtctgtgctgggacggtcc

SEQ ID NO: 98596 - RNA, 23 nt, synthetic construct
  source 1..23: mol_type = other RNA
tgattgtggacatggtggacatg

SEQ ID NO: 98597 - RNA, 23 nt, synthetic construct
  source 1..23: mol_type = other RNA
tgtgtggattgtggacatggtgg

SEQ ID NO: 98598 - RNA, 23 nt, synthetic construct
  source 1..23: mol_type = other RNA
tgaggtgtggattgtggacatgg

SEQ ID NO: 98599 - RNA, 23 nt, synthetic construct
  source 1..23: mol_type = other RNA
tagaggaggtgtggattgtggac

SEQ ID NO: 98600 - RNA, 23 nt, synthetic construct
  source 1..23: mol_type = other RNA
tcccttgtcatggtggctgtggt

SEQ ID NO: 98601 - RNA, 23 nt, synthetic construct
  source 1..23: mol_type = other RNA
tatccagtggctgcagttgtagt

SEQ ID NO: 98602 - RNA, 23 nt, synthetic construct
  source 1..23: mol_type = other RNA
tgaggacagggtggccgtggatc

SEQ ID NO: 98603 - RNA, 23 nt, synthetic construct
  source 1..23: mol_type = other RNA
tctcggctctgtgaggatccagg

SEQ ID NO: 98604 - RNA, 23 nt, synthetic construct
  source 1..23: mol_type = other RNA
ttatagtgctcggctctgtgagg

SEQ ID NO: 98605 - RNA, 23 nt, synthetic construct
  source 1..23: mol_type = other RNA
tccggtgggcaccatcacggtgg

SEQ ID NO: 98606 - RNA, 23 nt, synthetic construct
  source 1..23: mol_type = other RNA
tggcatagtggccatggtggtca

SEQ ID NO: 98607 - RNA, 23 nt, synthetic construct
  source 1..23: mol_type = other RNA
tctgtgggcatagtggccatggt

SEQ ID NO: 98608 - RNA, 23 nt, synthetic construct
  source 1..23: mol_type = other RNA
tgctgtgggcatagtggccatgg

SEQ ID NO: 98609 - RNA, 23 nt, synthetic construct
  source 1..23: mol_type = other RNA
tggtggacgagctgggaaccgtg

SEQ ID NO: 98610 - RNA, 23 nt, synthetic construct
  source 1..23: mol_type = other RNA
tccacggtggacgagctgggaac

SEQ ID NO: 98611 - RNA, 23 nt, synthetic construct
  source 1..23: mol_type = other RNA
tccccacggtggacgagctggga

SEQ ID NO: 98612 - RNA, 23 nt, synthetic construct
  source 1..23: mol_type = other RNA
tgtccccacggtggacgagctgg

SEQ ID NO: 98613 - RNA, 23 nt, synthetic construct
  source 1..23: mol_type = other RNA
tcgggtggtccccacggtggacg

SEQ ID NO: 98614 - RNA, 23 nt, synthetic construct
  source 1..23: mol_type = other RNA
tagtgggtctcagggtggtgagg

SEQ ID NO: 98615 - RNA, 23 nt, synthetic construct
  source 1..23: mol_type = other RNA
tcgagaaaaactgtccaaatgcc

SEQ ID NO: 98616 - RNA, 23 nt, synthetic construct
  source 1..23: mol_type = other RNA
tgacactggcggtggggaggtgg

SEQ ID NO: 98617 - RNA, 23 nt, synthetic construct
  source 1..23: mol_type = other RNA
tacctgccggagagggatggcat

SEQ ID NO: 98618 - RNA, 23 nt, synthetic construct
  source 1..23: mol_type = other RNA
tcggcagtggcagaggccgtgca

SEQ ID NO: 98619 - RNA, 23 nt, synthetic construct
  source 1..23: mol_type = other RNA
ttgcaccatggtgacagtgagga

SEQ ID NO: 98620 - RNA, 23 nt, synthetic construct
  source 1..23: mol_type = other RNA
tttcccatgcaccatggtgacag

SEQ ID NO: 98621 - RNA, 23 nt, synthetic construct
  source 1..23: mol_type = other RNA
tcgcatggtggtggtccccagca

SEQ ID NO: 98622 - RNA, 23 nt, synthetic construct
  source 1..23: mol_type = other RNA
ttccacacgcatggtggtggtcc

SEQ ID NO: 98623 - RNA, 23 nt, synthetic construct
  source 1..23: mol_type = other RNA
ttggaagacttggccattgaagg

SEQ ID NO: 98624 - RNA, 23 nt, synthetic construct
  source 1..23: mol_type = other RNA
tcgggcctggaagacttggccat

SEQ ID NO: 98625 - RNA, 23 nt, synthetic construct
  source 1..23: mol_type = other RNA
tccacgtcttggccatgtccttg

SEQ ID NO: 98626 - RNA, 23 nt, synthetic construct
  source 1..23: mol_type = other RNA
tatcagatcacagagcggctgtg

SEQ ID NO: 98627 - RNA, 23 nt, synthetic construct
  source 1..23: mol_type = other RNA
tcatggcttgtacactttggtgg

SEQ ID NO: 98628 - RNA, 23 nt, synthetic construct
  source 1..23: mol_type = other RNA
ttagagttgcaggtggcaggctg

SEQ ID NO: 98629 - RNA, 23 nt, synthetic construct
  source 1..23: mol_type = other RNA
ttccgccatcccctccagctgtg

SEQ ID NO: 98630 - RNA, 23 nt, synthetic construct
  source 1..23: mol_type = other RNA
tcagttgctgacccaccgctccc

SEQ ID NO: 98631 - RNA, 23 nt, synthetic construct
  source 1..23: mol_type = other RNA
tgttctcggcccggggcctggtc

SEQ ID NO: 98632 - RNA, 23 nt, synthetic construct
  source 1..23: mol_type = other RNA
taggcatcctcctgacattgcac

SEQ ID NO: 98633 - RNA, 23 nt, synthetic construct
  source 1..23: mol_type = other RNA
tcggccactctcttgtactcaaa

SEQ ID NO: 98634 - RNA, 23 nt, synthetic construct
  source 1..23: mol_type = other RNA
tgactccaccctcagcctcacag

SEQ ID NO: 98635 - RNA, 23 nt, synthetic construct
  source 1..23: mol_type = other RNA
ttgcagctggacacatctgggca

SEQ ID NO: 98636 - RNA, 23 nt, synthetic construct
  source 1..23: mol_type = other RNA
tggacgctccggggcaggagccc

SEQ ID NO: 98637 - RNA, 23 nt, synthetic construct
  source 1..23: mol_type = other RNA
tcgtggacccgcctctcctggca

SEQ ID NO: 98638 - RNA, 23 nt, synthetic construct
  source 1..23: mol_type = other RNA
ttcgtggacccgcctctcctggc

SEQ ID NO: 98639 - RNA, 23 nt, synthetic construct
  source 1..23: mol_type = other RNA
tgtctcctcgtggacccgcctct

SEQ ID NO: 98640 - RNA, 23 nt, synthetic construct
  source 1..23: mol_type = other RNA
taagccacgggtgtgtgggggag

SEQ ID NO: 98641 - RNA, 23 nt, synthetic construct
  source 1..23: mol_type = other RNA
tgaagccacgggtgtgtggggga

SEQ ID NO: 98642 - RNA, 23 nt, synthetic construct
  source 1..23: mol_type = other RNA
ttcagacaatgcacatcctggct

SEQ ID NO: 98643 - RNA, 23 nt, synthetic construct
  source 1..23: mol_type = other RNA
tatcagacaatgcacatcctggc

SEQ ID NO: 98644 - RNA, 23 nt, synthetic construct
  source 1..23: mol_type = other RNA
tcccaaggttttcatgatcagac

SEQ ID NO: 98645 - RNA, 23 nt, synthetic construct
  source 1..23: mol_type = other RNA
taggcccaaggttttcatgatca

SEQ ID NO: 98646 - RNA, 23 nt, synthetic construct
  source 1..23: mol_type = other RNA
ttcccagggtaggactcctgagt

SEQ ID NO: 98647 - RNA, 23 nt, synthetic construct
  source 1..23: mol_type = other RNA
tagctggaatccgtgctgcgcgg

SEQ ID NO: 98648 - RNA, 23 nt, synthetic construct
  source 1..23: mol_type = other RNA
tagcggccggacgtggccagctg

SEQ ID NO: 98649 - RNA, 23 nt, synthetic construct
  source 1..23: mol_type = other RNA
tccccagcggccggacgtggcca

SEQ ID NO: 98650 - RNA, 23 nt, synthetic construct
  source 1..23: mol_type = other RNA
tctcagccctgagttaccctgca

SEQ ID NO: 98651 - RNA, 23 nt, synthetic construct
  source 1..23: mol_type = other RNA
tgacccctctctgacctggccgt

SEQ ID NO: 98652 - RNA, 23 nt, synthetic construct
  source 1..23: mol_type = other RNA
ttgggatgctgacccctctctga

SEQ ID NO: 98653 - RNA, 23 nt, synthetic construct
  source 1..23: mol_type = other RNA
tgctcagggtttatttgcaaaac

SEQ ID NO: 98654 - RNA, 23 nt, synthetic construct
  source 1..23: mol_type = other RNA
tggatgggagttgtccctggagt

SEQ ID NO: 98655 - RNA, 23 nt, synthetic construct
  source 1..23: mol_type = other RNA
tggggtgatgggtgttgtccctg

SEQ ID NO: 98656 - RNA, 23 nt, synthetic construct
  source 1..23: mol_type = other RNA
tgcacccatcctgggggctggca

SEQ ID NO: 98657 - RNA, 23 nt, synthetic construct
  source 1..23: mol_type = other RNA
tgatggcattgtcgtcgaagttc

SEQ ID NO: 98658 - RNA, 23 nt, synthetic construct
  source 1..23: mol_type = other RNA
ttcaaagtctccgcctcccaggc

SEQ ID NO: 98659 - RNA, 23 nt, synthetic construct
  source 1..23: mol_type = other RNA
tagagttgcaggtggcaggctgt

SEQ ID NO: 98660 - RNA, 23 nt, synthetic construct
  source 1..23: mol_type = other RNA
tttcacctgccggagagggatgg

SEQ ID NO: 98661 - RNA, 23 nt, synthetic construct
  source 1..23: mol_type = other RNA
taccaccccgctgagggccgtga

SEQ ID NO: 98662 - RNA, 23 nt, synthetic construct
  source 1..23: mol_type = other RNA
tgtcttattgtagatgacttccc

SEQ ID NO: 98663 - RNA, 23 nt, synthetic construct
  source 1..23: mol_type = other RNA
tcaggtttcattcagctggactg

SEQ ID NO: 98664 - RNA, 23 nt, synthetic construct
  source 1..23: mol_type = other RNA
tcaggctctcccagggtaggact

SEQ ID NO: 98665 - RNA, 23 nt, synthetic construct
  source 1..23: mol_type = other RNA
tagaacgtagctgcagtcaccat

SEQ ID NO: 98666 - RNA, 23 nt, synthetic construct
  source 1..23: mol_type = other RNA
tgctcggctccacagggccctgg

SEQ ID NO: 98667 - RNA, 23 nt, synthetic construct
  source 1..23: mol_type = other RNA
tgggctgagcgtgttggaagggt

SEQ ID NO: 98668 - RNA, 23 nt, synthetic construct
  source 1..23: mol_type = other RNA
tgaagggctgagcgtgttggaag

SEQ ID NO: 98669 - RNA, 23 nt, synthetic construct
  source 1..23: mol_type = other RNA
tctcagggtggaggtcggggtgg

SEQ ID NO: 98670 - RNA, 23 nt, synthetic construct
  source 1..23: mol_type = other RNA
tggccctggtgtggcccggggtg

SEQ ID NO: 98671 - RNA, 23 nt, synthetic construct
  source 1..23: mol_type = other RNA
tgggtggttgcagtccttggact

SEQ ID NO: 98672 - RNA, 23 nt, synthetic construct
  source 1..23: mol_type = other RNA
tgactgcccctccggccgcacgg

SEQ ID NO: 98673 - RNA, 23 nt, synthetic construct
  source 1..23: mol_type = other RNA
tgggtggttgcagtccttggact

SEQ ID NO: 98674 - RNA, 23 nt, synthetic construct
  source 1..23: mol_type = other RNA
tgggtggttgcagtccttggact

SEQ ID NO: 98675 - RNA, 23 nt, synthetic construct
  source 1..23: mol_type = other RNA
tgggttctcggcccggggcctgg

SEQ ID NO: 98676 - RNA, 23 nt, synthetic construct
  source 1..23: mol_type = other RNA
tctggcgggcacacaggcaggct

SEQ ID NO: 98677 - RNA, 23 nt, synthetic construct
  source 1..23: mol_type = other RNA
tgtgtgccctgcattctcccagc

SEQ ID NO: 98678 - RNA, 23 nt, synthetic construct
  source 1..23: mol_type = other RNA
taaggttttcatgatcagacaat

SEQ ID NO: 98679 - RNA, 23 nt, synthetic construct
  source 1..23: mol_type = other RNA
ttcctcgtaggcggcgcggcagt

SEQ ID NO: 98680 - RNA, 23 nt, synthetic construct
  source 1..23: mol_type = other RNA
tatgtagtccccgctctgctcca

SEQ ID NO: 98681 - RNA, 23 nt, synthetic construct
  source 1..23: mol_type = other RNA
tcagggtgagccacactcctggt

SEQ ID NO: 98682 - RNA, 23 nt, synthetic construct
  source 1..23: mol_type = other RNA
tccaggggtgcccgccgagctgt

SEQ ID NO: 98683 - RNA, 23 nt, synthetic construct
  source 1..23: mol_type = other RNA
tgttgtgcacacaggggcagtcc

SEQ ID NO: 98684 - RNA, 23 nt, synthetic construct
  source 1..23: mol_type = other RNA
tgtgccagggcgtccgggcagga

SEQ ID NO: 98685 - RNA, 23 nt, synthetic construct
  source 1..23: mol_type = other RNA
tgaagctgcgccgcccggcactc

SEQ ID NO: 98686 - RNA, 23 nt, synthetic construct
  source 1..23: mol_type = other RNA
tgttggggtaggcacagcaggct

SEQ ID NO: 98687 - RNA, 23 nt, synthetic construct
  source 1..23: mol_type = other RNA
tcggcactgggggtgtgtgggtg

SEQ ID NO: 98688 - RNA, 23 nt, synthetic construct
  source 1..23: mol_type = other RNA
tcggcactgggggtgtgtgggtg

SEQ ID NO: 98689 - RNA, 23 nt, synthetic construct
  source 1..23: mol_type = other RNA
ttctccggagtggaggaggggtg

SEQ ID NO: 98690 - RNA, 23 nt, synthetic construct
  source 1..23: mol_type = other RNA
tcggcactgggggtgtgtgggtg

SEQ ID NO: 98691 - RNA, 23 nt, synthetic construct
  source 1..23: mol_type = other RNA
taggtgcccctggtgtggcccgg

SEQ ID NO: 98692 - RNA, 23 nt, synthetic construct
  source 1..23: mol_type = other RNA
tcggcactgggggtgtgtgggtg

SEQ ID NO: 98693 - RNA, 23 nt, synthetic construct
  source 1..23: mol_type = other RNA
tgcccaactcccccagggggaca

SEQ ID NO: 98694 - RNA, 23 nt, synthetic construct
  source 1..23: mol_type = other RNA
ttctccggagtggaggaggggtg

SEQ ID NO: 98695 - RNA, 23 nt, synthetic construct
  source 1..23: mol_type = other RNA
ttccttcccatgcaccatggtga

SEQ ID NO: 98696 - RNA, 23 nt, synthetic construct
  source 1..23: mol_type = other RNA
tggttctcggcccggggcctggt

SEQ ID NO: 98697 - RNA, 23 nt, synthetic construct
  source 1..23: mol_type = other RNA
tgcgggcacacaggcaggctctg

SEQ ID NO: 98698 - RNA, 23 nt, synthetic construct
  source 1..23: mol_type = other RNA
tcactgcccggccactctcttgt

SEQ ID NO: 98699 - RNA, 23 nt, synthetic construct
  source 1..23: mol_type = other RNA
tccgtgctggtcagcactggggt

SEQ ID NO: 98700 - RNA, 23 nt, synthetic construct
  source 1..23: mol_type = other RNA
tgggtggtccccgggatggagga

SEQ ID NO: 98701 - RNA, 23 nt, synthetic construct
  source 1..23: mol_type = other RNA
tgggtggtccccgggatggagga

SEQ ID NO: 98702 - RNA, 23 nt, synthetic construct
  source 1..23: mol_type = other RNA
tgggtggtccccgggatggagga

SEQ ID NO: 98703 - RNA, 23 nt, synthetic construct
  source 1..23: mol_type = other RNA
tgggtggtccccgggatggagga

SEQ ID NO: 98704 - RNA, 23 nt, synthetic construct
  source 1..23: mol_type = other RNA
ttcccagtgacatcagggagggg

SEQ ID NO: 98705 - RNA, 23 nt, synthetic construct
  source 1..23: mol_type = other RNA
tacccggccctctcgccaccgcc

SEQ ID NO: 98706 - RNA, 23 nt, synthetic construct
  source 1..23: mol_type = other RNA
tcaccccgctgagggccgtgaag

SEQ ID NO: 98707 - RNA, 23 nt, synthetic construct
  source 1..23: mol_type = other RNA
taccagtggccacagttgtggtg

SEQ ID NO: 98708 - RNA, 23 nt, synthetic construct
  source 1..23: mol_type = other RNA
taccagtggccacagttgtggtg

SEQ ID NO: 98709 - RNA, 23 nt, synthetic construct
  source 1..23: mol_type = other RNA
taccagtggccacagttgtggtg

SEQ ID NO: 98710 - RNA, 23 nt, synthetic construct
  source 1..23: mol_type = other RNA
taccagtggccacagttgtggtg

SEQ ID NO: 98711 - RNA, 23 nt, synthetic construct
  source 1..23: mol_type = other RNA
taccagtggccacagttgtggtg

SEQ ID NO: 98712 - RNA, 23 nt, synthetic construct
  source 1..23: mol_type = other RNA
ttgcgaggtgagggccgccgtcg

SEQ ID NO: 98713 - RNA, 23 nt, synthetic construct
  source 1..23: mol_type = other RNA
tagtgatgggggagtaccactgg

SEQ ID NO: 98714 - RNA, 23 nt, synthetic construct
  source 1..23: mol_type = other RNA
tagtgatgggggagtaccactgg

SEQ ID NO: 98715 - RNA, 23 nt, synthetic construct
  source 1..23: mol_type = other RNA
tgggtgtggtggtctgttctggg

SEQ ID NO: 98716 - RNA, 23 nt, synthetic construct
  source 1..23: mol_type = other RNA
tgaggtgtgggtggtctccggag

SEQ ID NO: 98717 - RNA, 23 nt, synthetic construct
  source 1..23: mol_type = other RNA
tagtgatgggggagtaccactgg

SEQ ID NO: 98718 - RNA, 23 nt, synthetic construct
  source 1..23: mol_type = other RNA
tagtgatgggggagtaccactgg

SEQ ID NO: 98719 - RNA, 23 nt, synthetic construct
  source 1..23: mol_type = other RNA
taggaggggatgggtgtaacgct

SEQ ID NO: 98720 - RNA, 23 nt, synthetic construct
  source 1..23: mol_type = other RNA
tgggtgtggtggtctgttctggg

SEQ ID NO: 98721 - RNA, 23 nt, synthetic construct
  source 1..23: mol_type = other RNA
tgaggtgtgggtggtctccggag

SEQ ID NO: 98722 - RNA, 23 nt, synthetic construct
  source 1..23: mol_type = other RNA
tagtgatgggggagtaccactgg

SEQ ID NO: 98723 - RNA, 23 nt, synthetic construct
  source 1..23: mol_type = other RNA
tctgctgtcggggaccagccacg

SEQ ID NO: 98724 - RNA, 23 nt, synthetic construct
  source 1..23: mol_type = other RNA
tcagtggggggtgtgccagtcgg

SEQ ID NO: 98725 - RNA, 23 nt, synthetic construct
  source 1..23: mol_type = other RNA
tgcggacacacacggtggagacc

SEQ ID NO: 98726 - RNA, 23 nt, synthetic construct
  source 1..23: mol_type = other RNA
ttggctgtgcctgtcgggcgagc

SEQ ID NO: 98727 - RNA, 23 nt, synthetic construct
  source 1..23: mol_type = other RNA
ttcacggtggctgtagtgctcgg

SEQ ID NO: 98728 - RNA, 23 nt, synthetic construct
  source 1..23: mol_type = other RNA
ttcacggtggctgtagtgctggg

SEQ ID NO: 98729 - RNA, 23 nt, synthetic construct
  source 1..23: mol_type = other RNA
ttcacggtggctgtagtgctcgg

SEQ ID NO: 98730 - RNA, 23 nt, synthetic construct
  source 1..23: mol_type = other RNA
ttcacggtggctgtagtgctcgg

SEQ ID NO: 98731 - RNA, 23 nt, synthetic construct
  source 1..23: mol_type = other RNA
ttgctgtcggggaccagccacgt

SEQ ID NO: 98732 - RNA, 23 nt, synthetic construct
  source 1..23: mol_type = other RNA
tactcccacctccggttcctgca

SEQ ID NO: 98733 - RNA, 23 nt, synthetic construct
  source 1..23: mol_type = other RNA
tgctgatccacactggaagcgtg

SEQ ID NO: 98734 - RNA, 23 nt, synthetic construct
  source 1..23: mol_type = other RNA
tggtggtccccacggtggacgag

SEQ ID NO: 98735 - RNA, 23 nt, synthetic construct
  source 1..23: mol_type = other RNA
tactgtggcggtgtgggtggtcc

SEQ ID NO: 98736 - RNA, 23 nt, synthetic construct
  source 1..23: mol_type = other RNA
ttgctgctagggtgagggctgga

SEQ ID NO: 98737 - RNA, 23 nt, synthetic construct
  source 1..23: mol_type = other RNA
ttgctgctagggtgagggctgga

SEQ ID NO: 98738 - RNA, 23 nt, synthetic construct
  source 1..23: mol_type = other RNA
tactgtggcggtgtgggtggtcc

SEQ ID NO: 98739 - RNA, 23 nt, synthetic construct
  source 1..23: mol_type = other RNA
ttactggtggttgctgctggggt

SEQ ID NO: 98740 - RNA, 23 nt, synthetic construct
  source 1..23: mol_type = other RNA
ttgctgctagggtgagggctgga

SEQ ID NO: 98741 - RNA, 23 nt, synthetic construct
  source 1..23: mol_type = other RNA
ttgctgctagggtgagggctgga

SEQ ID NO: 98742 - RNA, 23 nt, synthetic construct
  source 1..23: mol_type = other RNA
tcgccccacatgctgcagatgca

SEQ ID NO: 98743 - RNA, 23 nt, synthetic construct
  source 1..23: mol_type = other RNA
ttggatgctgagggcgcgggggc

SEQ ID NO: 98744 - RNA, 23 nt, synthetic construct
  source 1..23: mol_type = other RNA
tttctgctgtcggggaccagcca

SEQ ID NO: 98745 - RNA, 23 nt, synthetic construct
  source 1..23: mol_type = other RNA
tggcacctccagttccgcggctg

SEQ ID NO: 98746 - RNA, 23 nt, synthetic construct
  source 1..23: mol_type = other RNA
tgccccgccctgcacagagcagg

SEQ ID NO: 98747 - RNA, 23 nt, synthetic construct
  source 1..23: mol_type = other RNA
ttgagtggcaccagctgcaccag

SEQ ID NO: 98748 - RNA, 23 nt, synthetic construct
  source 1..23: mol_type = other RNA
tattggcacaggcagcctgggcc

SEQ ID NO: 98749 - RNA, 23 nt, synthetic construct
  source 1..23: mol_type = other RNA
taggggtgcccgccgagctgttg

SEQ ID NO: 98750 - RNA, 23 nt, synthetic construct
  source 1..23: mol_type = other RNA
tgtgcagttacagctctggcagt

SEQ ID NO: 98751 - RNA, 23 nt, synthetic construct
  source 1..23: mol_type = other RNA
tgggtccagttggggaagctctc

SEQ ID NO: 98752 - RNA, 23 nt, synthetic construct
  source 1..23: mol_type = other RNA
ttggatgtggccacccctgggac

SEQ ID NO: 98753 - RNA, 23 nt, synthetic construct
  source 1..23: mol_type = other RNA
tggccagcgtgggtggctgtgag

SEQ ID NO: 98754 - RNA, 23 nt, synthetic construct
  source 1..23: mol_type = other RNA
tgctgttctcagggtggaggtcg

SEQ ID NO: 98755 - RNA, 23 nt, synthetic construct
  source 1..23: mol_type = other RNA
tgggagtggctttggagctggtg

SEQ ID NO: 98756 - RNA, 23 nt, synthetic construct
  source 1..23: mol_type = other RNA
tcatggtggccgtgggtgtggtg

SEQ ID NO: 98757 - RNA, 23 nt, synthetic construct
  source 1..23: mol_type = other RNA
tactgtgttgctggtggctgcag

SEQ ID NO: 98758 - RNA, 23 nt, synthetic construct
  source 1..23: mol_type = other RNA
tctgctgctagggtgagggctgg

SEQ ID NO: 98759 - RNA, 23 nt, synthetic construct
  source 1..23: mol_type = other RNA
tggtcttgctgggtgtggccgtg

SEQ ID NO: 98760 - RNA, 23 nt, synthetic construct
  source 1..23: mol_type = other RNA
tccccgccagagggccccggcat

SEQ ID NO: 98761 - RNA, 23 nt, synthetic construct
  source 1..23: mol_type = other RNA
tcagaccaggccaaagtccaggc

SEQ ID NO: 98762 - RNA, 23 nt, synthetic construct
  source 1..23: mol_type = other RNA
tgggagtggctttggagctggtg

SEQ ID NO: 98763 - RNA, 23 nt, synthetic construct
  source 1..23: mol_type = other RNA
tcatggtggccgtgggtgtggtg

SEQ ID NO: 98764 - RNA, 23 nt, synthetic construct
  source 1..23: mol_type = other RNA
tctgctgctagggtgagggctgg

SEQ ID NO: 98765 - RNA, 23 nt, synthetic construct
  source 1..23: mol_type = other RNA
tggtcttgctgggtgtggccgtg

SEQ ID NO: 98766 - RNA, 23 nt, synthetic construct
  source 1..23: mol_type = other RNA
tccccgccagagggccccggcat

SEQ ID NO: 98767 - RNA, 23 nt, synthetic construct
  source 1..23: mol_type = other RNA
tcagaccaggccaaagtccaggc

SEQ ID NO: 98768 - RNA, 23 nt, synthetic construct
  source 1..23: mol_type = other RNA
ttctgctctgtgaggatccaggt

SEQ ID NO: 98769 - RNA, 23 nt, synthetic construct
  source 1..23: mol_type = other RNA
tgtcgtggtggccttcgtggtca

SEQ ID NO: 98770 - RNA, 23 nt, synthetic construct
  source 1..23: mol_type = other RNA
tcatggtggccgtgggtgtggtg

SEQ ID NO: 98771 - RNA, 23 nt, synthetic construct
  source 1..23: mol_type = other RNA
tctgctgctagggtgagggctgg

SEQ ID NO: 98772 - RNA, 23 nt, synthetic construct
  source 1..23: mol_type = other RNA
tggtcttgctgggtgtggctgtg

SEQ ID NO: 98773 - RNA, 23 nt, synthetic construct
  source 1..23: mol_type = other RNA
tccgtggtcaccaccgtggttat

SEQ ID NO: 98774 - RNA, 23 nt, synthetic construct
  source 1..23: mol_type = other RNA
tccccgccagagggccccggcat

SEQ ID NO: 98775 - RNA, 23 nt, synthetic construct
  source 1..23: mol_type = other RNA
tcagaccaggccaaagtccaggc

SEQ ID NO: 98776 - RNA, 23 nt, synthetic construct
  source 1..23: mol_type = other RNA
tgggagtggctttggagctggtg

SEQ ID NO: 98777 - RNA, 23 nt, synthetic construct
  source 1..23: mol_type = other RNA
tcatggtggccgtgggtgtggtg

SEQ ID NO: 98778 - RNA, 23 nt, synthetic construct
  source 1..23: mol_type = other RNA
tcctggttgtggtggccgtggtg

SEQ ID NO: 98779 - RNA, 23 nt, synthetic construct
  source 1..23: mol_type = other RNA
tctgctgctagggtgagggctgg

SEQ ID NO: 98780 - RNA, 23 nt, synthetic construct
  source 1..23: mol_type = other RNA
tggtcttgctgggtgtggccgtg

SEQ ID NO: 98781 - RNA, 23 nt, synthetic construct
  source 1..23: mol_type = other RNA
tccgtggtcaccaccgtggttat

SEQ ID NO: 98782 - RNA, 23 nt, synthetic construct
  source 1..23: mol_type = other RNA
tccccgccagagggccccggcat

SEQ ID NO: 98783 - RNA, 23 nt, synthetic construct
  source 1..23: mol_type = other RNA
tcagaccaggccaaagtccaggc

SEQ ID NO: 98784 - RNA, 23 nt, synthetic construct
  source 1..23: mol_type = other RNA
tgtcgtggtggccttcgtggtca

SEQ ID NO: 98785 - RNA, 23 nt, synthetic construct
  source 1..23: mol_type = other RNA
tgggagtggctttggagctggtg

SEQ ID NO: 98786 - RNA, 23 nt, synthetic construct
  source 1..23: mol_type = other RNA
tcatggtggccgtgggtgtggtg

SEQ ID NO: 98787 - RNA, 23 nt, synthetic construct
  source 1..23: mol_type = other RNA
tcgtgctggtcagcactggggtg

SEQ ID NO: 98788 - RNA, 23 nt, synthetic construct
  source 1..23: mol_type = other RNA
tgcgggtgtggtggccgtgctgg

SEQ ID NO: 98789 - RNA, 23 nt, synthetic construct
  source 1..23: mol_type = other RNA
tgaggtgtgggtggtctctggag

SEQ ID NO: 98790 - RNA, 23 nt, synthetic construct
  source 1..23: mol_type = other RNA
tagctgttcccagagtggaggag

SEQ ID NO: 98791 - RNA, 23 nt, synthetic construct
  source 1..23: mol_type = other RNA
ttggctgtgggcatagtggccat

SEQ ID NO: 98792 - RNA, 23 nt, synthetic construct
  source 1..23: mol_type = other RNA
tgagctgggaaccgtggaggcag

SEQ ID NO: 98793 - RNA, 23 nt, synthetic construct
  source 1..23: mol_type = other RNA
tcgctgaaggttggcaggctgct

SEQ ID NO: 98794 - RNA, 23 nt, synthetic construct
  source 1..23: mol_type = other RNA
ttgacgctcacgcccagggcagg

SEQ ID NO: 98795 - RNA, 23 nt, synthetic construct
  source 1..23: mol_type = other RNA
tgcagtggggggtgtgccagtcg

SEQ ID NO: 98796 - RNA, 23 nt, synthetic construct
  source 1..23: mol_type = other RNA
tagagcggctgtggtgggcatgg

SEQ ID NO: 98797 - RNA, 23 nt, synthetic construct
  source 1..23: mol_type = other RNA
tacgcagatgcccatgtgtgcgt

SEQ ID NO: 98798 - RNA, 23 nt, synthetic construct
  source 1..23: mol_type = other RNA
tcagggtaggactcctgagtggc

SEQ ID NO: 98799 - RNA, 23 nt, synthetic construct
  source 1..23: mol_type = other RNA
tgcttagtttgttccagggcgtc

SEQ ID NO: 98800 - RNA, 23 nt, synthetic construct
  source 1..23: mol_type = other RNA
tctgtctgccccagcggccggac

SEQ ID NO: 98801 - RNA, 23 nt, synthetic construct
  source 1..23: mol_type = other RNA
tgcctgtctgccccagcggccgg

SEQ ID NO: 98802 - RNA, 23 nt, synthetic construct
  source 1..23: mol_type = other RNA
tgggggctttgggatgctgaccc

SEQ ID NO: 98803 - RNA, 23 nt, synthetic construct
  source 1..23: mol_type = other RNA
taggtggccgaagtccaggctgt

SEQ ID NO: 98804 - RNA, 23 nt, synthetic construct
  source 1..23: mol_type = other RNA
taggtggccgaagtccaggctgt

SEQ ID NO: 98805 - RNA, 23 nt, synthetic construct
  source 1..23: mol_type = other RNA
taggtggccgaagtccaggctgt

SEQ ID NO: 98806 - RNA, 23 nt, synthetic construct
  source 1..23: mol_type = other RNA
taggtggccgaagtccaggctgt

SEQ ID NO: 98807 - RNA, 23 nt, synthetic construct
  source 1..23: mol_type = other RNA
ttggtcctcagggcagaagcagc

SEQ ID NO: 98808 - RNA, 23 nt, synthetic construct
  source 1..23: mol_type = other RNA
tgtaggactcctgagtggcgccc

SEQ ID NO: 98809 - RNA, 23 nt, synthetic construct
  source 1..23: mol_type = other RNA
tgacctggcccaactcccccagg

SEQ ID NO: 98810 - RNA, 23 nt, synthetic construct
  source 1..23: mol_type = other RNA
tcggcgggggctgaccctgggcg

SEQ ID NO: 98811 - RNA, 23 nt, synthetic construct
  source 1..23: mol_type = other RNA
tgcccctcacccttctggggccg

SEQ ID NO: 98812 - RNA, 23 nt, synthetic construct
  source 1..23: mol_type = other RNA
ttcgttgtgcacacaggggcagt

SEQ ID NO: 98813 - RNA, 23 nt, synthetic construct
  source 1..23: mol_type = other RNA
tcgcccagggcaggaatgtccac

SEQ ID NO: 98814 - RNA, 23 nt, synthetic construct
  source 1..23: mol_type = other RNA
tccgtggatccagtggactcagt

SEQ ID NO: 98815 - RNA, 23 nt, synthetic construct
  source 1..23: mol_type = other RNA
tccgtggatccagtggactcagt

SEQ ID NO: 98816 - RNA, 23 nt, synthetic construct
  source 1..23: mol_type = other RNA
tcaaaggtggaatagtgggagcc

SEQ ID NO: 98817 - RNA, 23 nt, synthetic construct
  source 1..23: mol_type = other RNA
tctccgctgtggggacccttgca

SEQ ID NO: 98818 - RNA, 23 nt, synthetic construct
  source 1..23: mol_type = other RNA
ttgctgtggtctgggttggggta

SEQ ID NO: 98819 - RNA, 23 nt, synthetic construct
  source 1..23: mol_type = other RNA
ttgaggggcgccatgtgcccaag

SEQ ID NO: 98820 - RNA, 23 nt, synthetic construct
  source 1..23: mol_type = other RNA
tggcgggggctgaccctgggcgt

SEQ ID NO: 98821 - RNA, 23 nt, synthetic construct
  source 1..23: mol_type = other RNA
ttgcaagggcaccgtctcctcgt

SEQ ID NO: 98822 - RNA, 23 nt, synthetic construct
  source 1..23: mol_type = other RNA
tgatcagacaatgcacatcctgg

SEQ ID NO: 98823 - RNA, 23 nt, synthetic construct
  source 1..23: mol_type = other RNA
taagtccccgccagagggccccg

SEQ ID NO: 98824 - RNA, 23 nt, synthetic construct
  source 1..23: mol_type = other RNA
taagtccccgccagagggccccg

SEQ ID NO: 98825 - RNA, 23 nt, synthetic construct
  source 1..23: mol_type = other RNA
taagtccccgccagagggccccg

SEQ ID NO: 98826 - RNA, 23 nt, synthetic construct
  source 1..23: mol_type = other RNA
taagtccccgccagagggccccg

SEQ ID NO: 98827 - RNA, 23 nt, synthetic construct
  source 1..23: mol_type = other RNA
tggatgctcggggtcacccatag

SEQ ID NO: 98828 - RNA, 23 nt, synthetic construct
  source 1..23: mol_type = other RNA
tacagaacgtagctgcagtcacc

SEQ ID NO: 98829 - RNA, 23 nt, synthetic construct
  source 1..23: mol_type = other RNA
tctccccgtcgtccctggaaggg

SEQ ID NO: 98830 - RNA, 23 nt, synthetic construct
  source 1..23: mol_type = other RNA
tcacgcgctcggggcacccatcc

SEQ ID NO: 98831 - RNA, 23 nt, synthetic construct
  source 1..23: mol_type = other RNA
ttcctgatgatggtgccgttgct

SEQ ID NO: 98832 - RNA, 23 nt, synthetic construct
  source 1..23: mol_type = other RNA
tggctgctggcataagtgccctc

SEQ ID NO: 98833 - RNA, 23 nt, synthetic construct
  source 1..23: mol_type = other RNA
tggtggccgaagtccaggctgtg

SEQ ID NO: 98834 - RNA, 23 nt, synthetic construct
  source 1..23: mol_type = other RNA
tgaggtgcgggtcttgctgggtg

SEQ ID NO: 98835 - RNA, 23 nt, synthetic construct
  source 1..23: mol_type = other RNA
tggtggccgaagtccaggctgtg

SEQ ID NO: 98836 - RNA, 23 nt, synthetic construct
  source 1..23: mol_type = other RNA
tggggtgtgggaagtccccgtgg

SEQ ID NO: 98837 - RNA, 23 nt, synthetic construct
  source 1..23: mol_type = other RNA
tgtgactcggtggtcctgctgct

SEQ ID NO: 98838 - RNA, 23 nt, synthetic construct
  source 1..23: mol_type = other RNA
tgaggtgcgggtcttgctgggtg

SEQ ID NO: 98839 - RNA, 23 nt, synthetic construct
  source 1..23: mol_type = other RNA
tggtggccgaagtccaggctgtg

SEQ ID NO: 98840 - RNA, 23 nt, synthetic construct
  source 1..23: mol_type = other RNA
tgtgactcggtggtcctgctgct

SEQ ID NO: 98841 - RNA, 23 nt, synthetic construct
  source 1..23: mol_type = other RNA
ttgcccctggtgtggcccggggt

SEQ ID NO: 98842 - RNA, 23 nt, synthetic construct
  source 1..23: mol_type = other RNA
tgtgcccctggtgtggcccgggg

SEQ ID NO: 98843 - RNA, 23 nt, synthetic construct
  source 1..23: mol_type = other RNA
tgaggtgcgggtcttgctgggtg

SEQ ID NO: 98844 - RNA, 23 nt, synthetic construct
  source 1..23: mol_type = other RNA
tggtggccgaagtccaggctgtg

SEQ ID NO: 98845 - RNA, 23 nt, synthetic construct
  source 1..23: mol_type = other RNA
tggggtgtgggaagtccccgtgg

SEQ ID NO: 98846 - RNA, 23 nt, synthetic construct
  source 1..23: mol_type = other RNA
tgtgactcggtggtcctgctgct

SEQ ID NO: 98847 - RNA, 23 nt, synthetic construct
  source 1..23: mol_type = other RNA
tgaggtgcgggtcttgctgggtg

SEQ ID NO: 98848 - RNA, 23 nt, synthetic construct
  source 1..23: mol_type = other RNA
tctggcccaactcccccaggggg

SEQ ID NO: 98849 - RNA, 23 nt, synthetic construct
  source 1..23: mol_type = other RNA
ttttcattcagctggactggctg

SEQ ID NO: 98850 - RNA, 23 nt, synthetic construct
  source 1..23: mol_type = other RNA
tgcaggagcacggagcgcggggt

SEQ ID NO: 98851 - RNA, 23 nt, synthetic construct
  source 1..23: mol_type = other RNA
tcaggcggccaggtacgcagtgc

SEQ ID NO: 98852 - RNA, 23 nt, synthetic construct
  source 1..23: mol_type = other RNA
tgtgggtggtccccgggacggag

SEQ ID NO: 98853 - RNA, 23 nt, synthetic construct
  source 1..23: mol_type = other RNA
taggactcctgagtggcgccctc

SEQ ID NO: 98854 - RNA, 23 nt, synthetic construct
  source 1..23: mol_type = other RNA
ttttgggatccagctccagcagg

SEQ ID NO: 98855 - RNA, 23 nt, synthetic construct
  source 1..23: mol_type = other RNA
tataggtggagatgtgggccccg

SEQ ID NO: 98856 - RNA, 23 nt, synthetic construct
  source 1..23: mol_type = other RNA
tgcacttccgcagctcagccagc

SEQ ID NO: 98857 - RNA, 23 nt, synthetic construct
  source 1..23: mol_type = other RNA
tttctccgctgtggggacccttg

SEQ ID NO: 98858 - RNA, 23 nt, synthetic construct
  source 1..23: mol_type = other RNA
tggtcaccgtggagcctctggtt

SEQ ID NO: 98859 - RNA, 23 nt, synthetic construct
  source 1..23: mol_type = other RNA
ttgtggtggccatggtgttcggc

SEQ ID NO: 98860 - RNA, 23 nt, synthetic construct
  source 1..23: mol_type = other RNA
ttgctgtggtctgctctgtgagg

SEQ ID NO: 98861 - RNA, 23 nt, synthetic construct
  source 1..23: mol_type = other RNA
tggtggacatggaactggtggcc

SEQ ID NO: 98862 - RNA, 23 nt, synthetic construct
  source 1..23: mol_type = other RNA
tggtcaccgtggagcctctggtt

SEQ ID NO: 98863 - RNA, 23 nt, synthetic construct
  source 1..23: mol_type = other RNA
tggggctcacagcccgtggtcac

SEQ ID NO: 98864 - RNA, 23 nt, synthetic construct
  source 1..23: mol_type = other RNA
tgggtggtcgtccctggggaagg

SEQ ID NO: 98865 - RNA, 23 nt, synthetic construct
  source 1..23: mol_type = other RNA
tggggctcacagcccgtggtcac

SEQ ID NO: 98866 - RNA, 23 nt, synthetic construct
  source 1..23: mol_type = other RNA
tcgtggaactggtggcccttgtc

SEQ ID NO: 98867 - RNA, 23 nt, synthetic construct
  source 1..23: mol_type = other RNA
ttagacaccggggctgcggggct

SEQ ID NO: 98868 - RNA, 23 nt, synthetic construct
  source 1..23: mol_type = other RNA
ttcgcagccctggtgccacagga

SEQ ID NO: 98869 - RNA, 23 nt, synthetic construct
  source 1..23: mol_type = other RNA
tccagcggccggacgtggccagc

SEQ ID NO: 98870 - RNA, 23 nt, synthetic construct
  source 1..23: mol_type = other RNA
taccagcctgtctgccccagcgg

SEQ ID NO: 98871 - RNA, 23 nt, synthetic construct
  source 1..23: mol_type = other RNA
tgatgctgacccctctctgacct

SEQ ID NO: 98872 - RNA, 23 nt, synthetic construct
  source 1..23: mol_type = other RNA
tcgaggtgagggccgccgtcgac

SEQ ID NO: 98873 - RNA, 23 nt, synthetic construct
  source 1..23: mol_type = other RNA
tggcacgtcccctgcagtggtcg

SEQ ID NO: 98874 - RNA, 23 nt, synthetic construct
  source 1..23: mol_type = other RNA
tggtgtggacagtctctggagtg

SEQ ID NO: 98875 - RNA, 23 nt, synthetic construct
  source 1..23: mol_type = other RNA
tggtgtggacagtctctggagta

SEQ ID NO: 98876 - RNA, 23 nt, synthetic construct
  source 1..23: mol_type = other RNA
tggtgtggacagtctctggagtg

SEQ ID NO: 98877 - RNA, 23 nt, synthetic construct
  source 1..23: mol_type = other RNA
tcggttcctgcaggtgcaggtgt

SEQ ID NO: 98878 - RNA, 23 nt, synthetic construct
  source 1..23: mol_type = other RNA
ttcacccatagggtggtcttttc

SEQ ID NO: 98879 - RNA, 23 nt, synthetic construct
  source 1..23: mol_type = other RNA
tatgtccttaggctgctggcata

SEQ ID NO: 98880 - RNA, 23 nt, synthetic construct
  source 1..23: mol_type = other RNA
tcccggttgtggtggccgtggtg

SEQ ID NO: 98881 - RNA, 23 nt, synthetic construct
  source 1..23: mol_type = other RNA
tcccggttgtggtggccgtggcg

SEQ ID NO: 98882 - RNA, 23 nt, synthetic construct
  source 1..23: mol_type = other RNA
tcgctcacgcccagggcaggaat

SEQ ID NO: 98883 - RNA, 23 nt, synthetic construct
  source 1..23: mol_type = other RNA
tcacaaggttgtggcactcagca

SEQ ID NO: 98884 - RNA, 23 nt, synthetic construct
  source 1..23: mol_type = other RNA
tcctggagcccactaggcctcgg

SEQ ID NO: 98885 - RNA, 23 nt, synthetic construct
  source 1..23: mol_type = other RNA
taagtgggctggcaggcatccac

SEQ ID NO: 98886 - RNA, 23 nt, synthetic construct
  source 1..23: mol_type = other RNA
tccattgtaccagctggaccagc

SEQ ID NO: 98887 - RNA, 23 nt, synthetic construct
  source 1..23: mol_type = other RNA
tagccagcacagggcatacctgg

SEQ ID NO: 98888 - RNA, 23 nt, synthetic construct
  source 1..23: mol_type = other RNA
tgcacaccaggccgaagtggacg

SEQ ID NO: 98889 - RNA, 23 nt, synthetic construct
  source 1..23: mol_type = other RNA
tcgctggtagctgtgggtgtggt

SEQ ID NO: 98890 - RNA, 23 nt, synthetic construct
  source 1..23: mol_type = other RNA
tcagcactgtggcggtgtgggtg

SEQ ID NO: 98891 - RNA, 23 nt, synthetic construct
  source 1..23: mol_type = other RNA
tggtcagtgatgggggagtacca

SEQ ID NO: 98892 - RNA, 23 nt, synthetic construct
  source 1..23: mol_type = other RNA
tcgtggccgtggtgctcacatgt

SEQ ID NO: 98893 - RNA, 23 nt, synthetic construct
  source 1..23: mol_type = other RNA
tggtcagtgatgggggagtacca

SEQ ID NO: 98894 - RNA, 23 nt, synthetic construct
  source 1..23: mol_type = other RNA
tgcttgtcagcactggaagggtg

SEQ ID NO: 98895 - RNA, 23 nt, synthetic construct
  source 1..23: mol_type = other RNA
tcgctggtagctgtgggtgtggt

SEQ ID NO: 98896 - RNA, 23 nt, synthetic construct
  source 1..23: mol_type = other RNA
tgccggtggccctggttgtggtg

SEQ ID NO: 98897 - RNA, 23 nt, synthetic construct
  source 1..23: mol_type = other RNA
tcagcactgtggcggtgtgggtg

SEQ ID NO: 98898 - RNA, 23 nt, synthetic construct
  source 1..23: mol_type = other RNA
tggtcagtgatgggggagtacca

SEQ ID NO: 98899 - RNA, 23 nt, synthetic construct
  source 1..23: mol_type = other RNA
tcgtggccgtggtgctcacatgt

SEQ ID NO: 98900 - RNA, 23 nt, synthetic construct
  source 1..23: mol_type = other RNA
tgccggtggccctggttgtggtg

SEQ ID NO: 98901 - RNA, 23 nt, synthetic construct
  source 1..23: mol_type = other RNA
tggggtgactgtgaagcccgtgg

SEQ ID NO: 98902 - RNA, 23 nt, synthetic construct
  source 1..23: mol_type = other RNA
ttggccgggctggtcagcacttt

SEQ ID NO: 98903 - RNA, 23 nt, synthetic construct
  source 1..23: mol_type = other RNA
tgcttgtcagcactggaagggtg

SEQ ID NO: 98904 - RNA, 23 nt, synthetic construct
  source 1..23: mol_type = other RNA
tcgtggccgtggtgctcacatgt

SEQ ID NO: 98905 - RNA, 23 nt, synthetic construct
  source 1..23: mol_type = other RNA
tggtcagtgatgggggagtacca

SEQ ID NO: 98906 - RNA, 23 nt, synthetic construct
  source 1..23: mol_type = other RNA
tgcttgtcagcactggaagggtg

SEQ ID NO: 98907 - RNA, 23 nt, synthetic construct
  source 1..23: mol_type = other RNA
tggtagctgtggattttgtggct

SEQ ID NO: 98908 - RNA, 23 nt, synthetic construct
  source 1..23: mol_type = other RNA
tacagggtggccgtggatccagt

SEQ ID NO: 98909 - RNA, 23 nt, synthetic construct
  source 1..23: mol_type = other RNA
tggtgggcaccatcacggtggct

SEQ ID NO: 98910 - RNA, 23 nt, synthetic construct
  source 1..23: mol_type = other RNA
tagtggggggtgtgccagtcggg

SEQ ID NO: 98911 - RNA, 23 nt, synthetic construct
  source 1..23: mol_type = other RNA
tggcacctcaaggcggcccctgc

SEQ ID NO: 98912 - RNA, 23 nt, synthetic construct
  source 1..23: mol_type = other RNA
tccccgggcgcggcagagctctg

SEQ ID NO: 98913 - RNA, 23 nt, synthetic construct
  source 1..23: mol_type = other RNA
tttgcaggtggcaggctgtatgg

SEQ ID NO: 98914 - RNA, 23 nt, synthetic construct
  source 1..23: mol_type = other RNA
tggtctgcagcggaaggtgggac

SEQ ID NO: 98915 - RNA, 23 nt, synthetic construct
  source 1..23: mol_type = other RNA
tcatctgggcaggatgcaggctg

SEQ ID NO: 98916 - RNA, 23 nt, synthetic construct
  source 1..23: mol_type = other RNA
tgggagccatgggcgcagggaca

SEQ ID NO: 98917 - RNA, 23 nt, synthetic construct
  source 1..23: mol_type = other RNA
tggggagccatgggcgcagggac

SEQ ID NO: 98918 - RNA, 23 nt, synthetic construct
  source 1..23: mol_type = other RNA
tgggaagctgcgccgcccggcac

SEQ ID NO: 98919 - RNA, 23 nt, synthetic construct
  source 1..23: mol_type = other RNA
tgagggagtggctttggagctgg

SEQ ID NO: 98920 - RNA, 23 nt, synthetic construct
  source 1..23: mol_type = other RNA
tggaaagggctggagtcgagtgc

SEQ ID NO: 98921 - RNA, 23 nt, synthetic construct
  source 1..23: mol_type = other RNA
tgagggagtggctttggagctgg

SEQ ID NO: 98922 - RNA, 23 nt, synthetic construct
  source 1..23: mol_type = other RNA
tactgcaggggtgcgggtggtcc

SEQ ID NO: 98923 - RNA, 23 nt, synthetic construct
  source 1..23: mol_type = other RNA
tttgctgacccaccgctccccgg

SEQ ID NO: 98924 - RNA, 23 nt, synthetic construct
  source 1..23: mol_type = other RNA
tccacgtgggtgtaggtgtgcag

SEQ ID NO: 98925 - RNA, 23 nt, synthetic construct
  source 1..23: mol_type = other RNA
tggatggaggcagaacgttctca

SEQ ID NO: 98926 - RNA, 23 nt, synthetic construct
  source 1..23: mol_type = other RNA
ttgccggccggcaagggcagcgg

SEQ ID NO: 98927 - RNA, 23 nt, synthetic construct
  source 1..23: mol_type = other RNA
tagggggtgactcggtggttctg

SEQ ID NO: 98928 - RNA, 23 nt, synthetic construct
  source 1..23: mol_type = other RNA
tagtctctggagtagaggagggt

SEQ ID NO: 98929 - RNA, 23 nt, synthetic construct
  source 1..23: mol_type = other RNA
tgggcaccatcacggtggctata

SEQ ID NO: 98930 - RNA, 23 nt, synthetic construct
  source 1..23: mol_type = other RNA
ttggtccccagcacagacacaag

SEQ ID NO: 98931 - RNA, 23 nt, synthetic construct
  source 1..23: mol_type = other RNA
tttgaagaggatctggtcctcag

SEQ ID NO: 98932 - RNA, 23 nt, synthetic construct
  source 1..23: mol_type = other RNA
tagcactgcccggccactctctt

SEQ ID NO: 98933 - RNA, 23 nt, synthetic construct
  source 1..23: mol_type = other RNA
tacttgacaggagtcctcctcac

SEQ ID NO: 98934 - RNA, 23 nt, synthetic construct
  source 1..23: mol_type = other RNA
tgtagtggaagtcaccccaggtg

SEQ ID NO: 98935 - RNA, 23 nt, synthetic construct
  source 1..23: mol_type = other RNA
tcctcactcaggccgcggcaagt

SEQ ID NO: 98936 - RNA, 23 nt, synthetic construct
  source 1..23: mol_type = other RNA
tcagtcctcctcggcaatgcagc

SEQ ID NO: 98937 - RNA, 23 nt, synthetic construct
  source 1..23: mol_type = other RNA
ttggtagctgtaggtcctgtcct

SEQ ID NO: 98938 - RNA, 23 nt, synthetic construct
  source 1..23: mol_type = other RNA
tcaagcaggcgccaagcccatcg

SEQ ID NO: 98939 - RNA, 23 nt, synthetic construct
  source 1..23: mol_type = other RNA
tatacctggtaccctctctgcct

SEQ ID NO: 98940 - RNA, 23 nt, synthetic construct
  source 1..23: mol_type = other RNA
tctgcgaggtgagggccgccgtc

SEQ ID NO: 98941 - RNA, 23 nt, synthetic construct
  source 1..23: mol_type = other RNA
tccctccagcggccctgatctta

SEQ ID NO: 98942 - RNA, 23 nt, synthetic construct
  source 1..23: mol_type = other RNA
tgtccttaggctgctggcataag

SEQ ID NO: 98943 - RNA, 23 nt, synthetic construct
  source 1..23: mol_type = other RNA
tccagctctgtggtcggtggcgg

SEQ ID NO: 98944 - RNA, 23 nt, synthetic construct
  source 1..23: mol_type = other RNA
taagggctgagcgtgttggaagg

SEQ ID NO: 98945 - RNA, 23 nt, synthetic construct
  source 1..23: mol_type = other RNA
tgtggctgtgaagcccgtggttg

SEQ ID NO: 98946 - RNA, 23 nt, synthetic construct
  source 1..23: mol_type = other RNA
tgtggtggtcagtgatgggggag

SEQ ID NO: 98947 - RNA, 23 nt, synthetic construct
  source 1..23: mol_type = other RNA
tgtggtggtcagcactgggggga

SEQ ID NO: 98948 - RNA, 23 nt, synthetic construct
  source 1..23: mol_type = other RNA
tgtggtggccatggtgttcggca

SEQ ID NO: 98949 - RNA, 23 nt, synthetic construct
  source 1..23: mol_type = other RNA
tgaccaggccaaagtccaggctg

SEQ ID NO: 98950 - RNA, 23 nt, synthetic construct
  source 1..23: mol_type = other RNA
tgtggctgtgaagcccgtggttg

SEQ ID NO: 98951 - RNA, 23 nt, synthetic construct
  source 1..23: mol_type = other RNA
tgtggtggtcagtgatgggggag

SEQ ID NO: 98952 - RNA, 23 nt, synthetic construct
  source 1..23: mol_type = other RNA
tgtggtggtcagcactgggggga

SEQ ID NO: 98953 - RNA, 23 nt, synthetic construct
  source 1..23: mol_type = other RNA
tgaccaggccaaagtccaggctg

SEQ ID NO: 98954 - RNA, 23 nt, synthetic construct
  source 1..23: mol_type = other RNA
tgtggctgtgaagcccgtggttg

SEQ ID NO: 98955 - RNA, 23 nt, synthetic construct
  source 1..23: mol_type = other RNA
tgtggtggtcagtgatgggggag

SEQ ID NO: 98956 - RNA, 23 nt, synthetic construct
  source 1..23: mol_type = other RNA
tgtggtggtcagcactgggggga

SEQ ID NO: 98957 - RNA, 23 nt, synthetic construct
  source 1..23: mol_type = other RNA
tgaccaggccaaagtccaggctg

SEQ ID NO: 98958 - RNA, 23 nt, synthetic construct
  source 1..23: mol_type = other RNA
tgtggtggtcagcactgggggga

SEQ ID NO: 98959 - RNA, 23 nt, synthetic construct
  source 1..23: mol_type = other RNA
ttcccccagggggacaccaggct

SEQ ID NO: 98960 - RNA, 23 nt, synthetic construct
  source 1..23: mol_type = other RNA
taactcccccagggggacaccag

SEQ ID NO: 98961 - RNA, 23 nt, synthetic construct
  source 1..23: mol_type = other RNA
tgaccaggccaaagtccaggctg

SEQ ID NO: 98962 - RNA, 23 nt, synthetic construct
  source 1..23: mol_type = other RNA
tgtggctgtgaagcccgtggttg

SEQ ID NO: 98963 - RNA, 23 nt, synthetic construct
  source 1..23: mol_type = other RNA
tgtggtggtcagtgatgggggag

SEQ ID NO: 98964 - RNA, 23 nt, synthetic construct
  source 1..23: mol_type = other RNA
tatgggtgttgtccctggagttg

SEQ ID NO: 98965 - RNA, 23 nt, synthetic construct
  source 1..23: mol_type = other RNA
tctgccggagagggatggcattg

SEQ ID NO: 98966 - RNA, 23 nt, synthetic construct
  source 1..23: mol_type = other RNA
ttcacctgccggagagggatggc

SEQ ID NO: 98967 - RNA, 23 nt, synthetic construct
  source 1..23: mol_type = other RNA
tgacatcagggaggggcaaggcc

SEQ ID NO: 98968 - RNA, 23 nt, synthetic construct
  source 1..23: mol_type = other RNA
tcacccatcctgggggctggcac

SEQ ID NO: 98969 - RNA, 23 nt, synthetic construct
  source 1..23: mol_type = other RNA
tcacgagcatggccgccagagcc

SEQ ID NO: 98970 - RNA, 23 nt, synthetic construct
  source 1..23: mol_type = other RNA
ttagtggaagtcaccccaggtgc

SEQ ID NO: 98971 - RNA, 23 nt, synthetic construct
  source 1..23: mol_type = other RNA
ttgtagtggaagtcaccccaggt

SEQ ID NO: 98972 - RNA, 23 nt, synthetic construct
  source 1..23: mol_type = other RNA
tgtaggcggcgcggcagtgctca

SEQ ID NO: 98973 - RNA, 23 nt, synthetic construct
  source 1..23: mol_type = other RNA
tcccgctgcccattgatgaggac

SEQ ID NO: 98974 - RNA, 23 nt, synthetic construct
  source 1..23: mol_type = other RNA
tgtagtccccgctctgctccacc

SEQ ID NO: 98975 - RNA, 23 nt, synthetic construct
  source 1..23: mol_type = other RNA
tacacgggcaggtggggcagcgg

SEQ ID NO: 98976 - RNA, 23 nt, synthetic construct
  source 1..23: mol_type = other RNA
ttgcatgttgagggggcaggtcc

SEQ ID NO: 98977 - RNA, 23 nt, synthetic construct
  source 1..23: mol_type = other RNA
tctgcatgttgagggggcaggtc

SEQ ID NO: 98978 - RNA, 23 nt, synthetic construct
  source 1..23: mol_type = other RNA
tgggtgagccacactcctggtgc

SEQ ID NO: 98979 - RNA, 23 nt, synthetic construct
  source 1..23: mol_type = other RNA
tagggtgagccacactcctggtg

SEQ ID NO: 98980 - RNA, 23 nt, synthetic construct
  source 1..23: mol_type = other RNA
ttaggtggagatgtgggccccgc

SEQ ID NO: 98981 - RNA, 23 nt, synthetic construct
  source 1..23: mol_type = other RNA
tgccagcacggtgaagctgctgt

SEQ ID NO: 98982 - RNA, 23 nt, synthetic construct
  source 1..23: mol_type = other RNA
taatgcagcccccactcccatcc

SEQ ID NO: 98983 - RNA, 23 nt, synthetic construct
  source 1..23: mol_type = other RNA
ttccggttcctgcaggtgcaggt

SEQ ID NO: 98984 - RNA, 23 nt, synthetic construct
  source 1..23: mol_type = other RNA
tgtccccacccggccctctcgcc

SEQ ID NO: 98985 - RNA, 23 nt, synthetic construct
  source 1..23: mol_type = other RNA
taaggggcaggtgtccggagtcc

SEQ ID NO: 98986 - RNA, 23 nt, synthetic construct
  source 1..23: mol_type = other RNA
tagaagtcacagaacaaggggca

SEQ ID NO: 98987 - RNA, 23 nt, synthetic construct
  source 1..23: mol_type = other RNA
ttctccgctgtggggacccttgc

SEQ ID NO: 98988 - RNA, 23 nt, synthetic construct
  source 1..23: mol_type = other RNA
tgacccaggcggtggtgaaggtg

SEQ ID NO: 98989 - RNA, 23 nt, synthetic construct
  source 1..23: mol_type = other RNA
tcccattgtaccagctggaccag

SEQ ID NO: 98990 - RNA, 23 nt, synthetic construct
  source 1..23: mol_type = other RNA
tggaagctgcgccgcccggcact

SEQ ID NO: 98991 - RNA, 23 nt, synthetic construct
  source 1..23: mol_type = other RNA
tttgctgtggtctgggttggggt

SEQ ID NO: 98992 - RNA, 23 nt, synthetic construct
  source 1..23: mol_type = other RNA
tacgccctcctgctcccagttcc

SEQ ID NO: 98993 - RNA, 23 nt, synthetic construct
  source 1..23: mol_type = other RNA
tgaagacgccctcctgctcccag

SEQ ID NO: 98994 - RNA, 23 nt, synthetic construct
  source 1..23: mol_type = other RNA
tgggcctcccgtggtggctgtac

SEQ ID NO: 98995 - RNA, 23 nt, synthetic construct
  source 1..23: mol_type = other RNA
tgtggatgtggccacccctggga

SEQ ID NO: 98996 - RNA, 23 nt, synthetic construct
  source 1..23: mol_type = other RNA
tggtggatgtggccacccctggg

SEQ ID NO: 98997 - RNA, 23 nt, synthetic construct
  source 1..23: mol_type = other RNA
tgtcgggcgagctctggaggttg

SEQ ID NO: 98998 - RNA, 23 nt, synthetic construct
  source 1..23: mol_type = other RNA
tgctcattgtcgtctctgtcctg

SEQ ID NO: 98999 - RNA, 23 nt, synthetic construct
  source 1..23: mol_type = other RNA
tcgtggatccagtggacgcagtc

SEQ ID NO: 99000 - RNA, 23 nt, synthetic construct
  source 1..23: mol_type = other RNA
ttgcagtccctggactggaggag

SEQ ID NO: 99001 - RNA, 23 nt, synthetic construct
  source 1..23: mol_type = other RNA
tgtggacatggtggccgtgggtg

SEQ ID NO: 99002 - RNA, 23 nt, synthetic construct
  source 1..23: mol_type = other RNA
tgggtcaccgtggagcctctggt

SEQ ID NO: 99003 - RNA, 23 nt, synthetic construct
  source 1..23: mol_type = other RNA
tggtgcccaagatgcccgaggtg

SEQ ID NO: 99004 - RNA, 23 nt, synthetic construct
  source 1..23: mol_type = other RNA
ttcgtccctggagaagggggtga

SEQ ID NO: 99005 - RNA, 23 nt, synthetic construct
  source 1..23: mol_type = other RNA
tgaggtggccgtggtgtggcccg

SEQ ID NO: 99006 - RNA, 23 nt, synthetic construct
  source 1..23: mol_type = other RNA
tgttcctgcagaccaggccaaag

SEQ ID NO: 99007 - RNA, 23 nt, synthetic construct
  source 1..23: mol_type = other RNA
taacttccccacctgctcacggt

SEQ ID NO: 99008 - RNA, 23 nt, synthetic construct
  source 1..23: mol_type = other RNA
tgtggccgtggatccggtgggca

SEQ ID NO: 99009 - RNA, 23 nt, synthetic construct
  source 1..23: mol_type = other RNA
ttgcagtccctggactggagaag

SEQ ID NO: 99010 - RNA, 23 nt, synthetic construct
  source 1..23: mol_type = other RNA
tgtggacatggtggccgtgggtg

SEQ ID NO: 99011 - RNA, 23 nt, synthetic construct
  source 1..23: mol_type = other RNA
taggtgtggacagtctctggagt

SEQ ID NO: 99012 - RNA, 23 nt, synthetic construct
  source 1..23: mol_type = other RNA
tgaggtgtggacagtctctggag

SEQ ID NO: 99013 - RNA, 23 nt, synthetic construct
  source 1..23: mol_type = other RNA
ttgtggtggccgtggtgttcggc

SEQ ID NO: 99014 - RNA, 23 nt, synthetic construct
  source 1..23: mol_type = other RNA
ttgtgtggtggccgtggtgttcg

SEQ ID NO: 99015 - RNA, 23 nt, synthetic construct
  source 1..23: mol_type = other RNA
tgtgtgtggtggccgtggtgttc

SEQ ID NO: 99016 - RNA, 23 nt, synthetic construct
  source 1..23: mol_type = other RNA
ttcgtccctggagaagggggtga

SEQ ID NO: 99017 - RNA, 23 nt, synthetic construct
  source 1..23: mol_type = other RNA
tgttcctgcagaccaggccaaag

SEQ ID NO: 99018 - RNA, 23 nt, synthetic construct
  source 1..23: mol_type = other RNA
taacttccccacctgctcacggt

SEQ ID NO: 99019 - RNA, 23 nt, synthetic construct
  source 1..23: mol_type = other RNA
tgcagtccttggactggaggagg

SEQ ID NO: 99020 - RNA, 23 nt, synthetic construct
  source 1..23: mol_type = other RNA
tagctggtagctgtggatttggt

SEQ ID NO: 99021 - RNA, 23 nt, synthetic construct
  source 1..23: mol_type = other RNA
ttgtaaagctggtagctgtggat

SEQ ID NO: 99022 - RNA, 23 nt, synthetic construct
  source 1..23: mol_type = other RNA
tgtggtctccggagtggaggagg

SEQ ID NO: 99023 - RNA, 23 nt, synthetic construct
  source 1..23: mol_type = other RNA
tggtggtctccggagtggaggag

SEQ ID NO: 99024 - RNA, 23 nt, synthetic construct
  source 1..23: mol_type = other RNA
tagttgtagtggctgctgtggtc

SEQ ID NO: 99025 - RNA, 23 nt, synthetic construct
  source 1..23: mol_type = other RNA
tgtggccgtggatccggtgggca

SEQ ID NO: 99026 - RNA, 23 nt, synthetic construct
  source 1..23: mol_type = other RNA
tgatgactgtgggtgtggtggcc

SEQ ID NO: 99027 - RNA, 23 nt, synthetic construct
  source 1..23: mol_type = other RNA
taggagggagtggctctggagct

SEQ ID NO: 99028 - RNA, 23 nt, synthetic construct
  source 1..23: mol_type = other RNA
ttgcagtccctggactggaggag

SEQ ID NO: 99029 - RNA, 23 nt, synthetic construct
  source 1..23: mol_type = other RNA
tgtggacatggtggccgtgggtg

SEQ ID NO: 99030 - RNA, 23 nt, synthetic construct
  source 1..23: mol_type = other RNA
taggtgtggacagtctctggagt

SEQ ID NO: 99031 - RNA, 23 nt, synthetic construct
  source 1..23: mol_type = other RNA
tgaggtgtggacagtctctggag

SEQ ID NO: 99032 - RNA, 23 nt, synthetic construct
  source 1..23: mol_type = other RNA
tgggtcaccgtggagcctctggt

SEQ ID NO: 99033 - RNA, 23 nt, synthetic construct
  source 1..23: mol_type = other RNA
ttgtggtggccgtggtgttcggc

SEQ ID NO: 99034 - RNA, 23 nt, synthetic construct
  source 1..23: mol_type = other RNA
ttgtgtggtggccgtggtgttcg

SEQ ID NO: 99035 - RNA, 23 nt, synthetic construct
  source 1..23: mol_type = other RNA
tgtgtgtggtggccgtggtgttc

SEQ ID NO: 99036 - RNA, 23 nt, synthetic construct
  source 1..23: mol_type = other RNA
tggtgcccaagatgcccgaggtg

SEQ ID NO: 99037 - RNA, 23 nt, synthetic construct
  source 1..23: mol_type = other RNA
ttcgtccctggagaagggggtga

SEQ ID NO: 99038 - RNA, 23 nt, synthetic construct
  source 1..23: mol_type = other RNA
tggtgcccctggtgtggcccggg

SEQ ID NO: 99039 - RNA, 23 nt, synthetic construct
  source 1..23: mol_type = other RNA
tggggctgctcacagactgcccc

SEQ ID NO: 99040 - RNA, 23 nt, synthetic construct
  source 1..23: mol_type = other RNA
tgttcctgcagaccaggccaaag

SEQ ID NO: 99041 - RNA, 23 nt, synthetic construct
  source 1..23: mol_type = other RNA
taacttccccacctgctcacggt

SEQ ID NO: 99042 - RNA, 23 nt, synthetic construct
  source 1..23: mol_type = other RNA
tgtggccgtggatccggtgggca

SEQ ID NO: 99043 - RNA, 23 nt, synthetic construct
  source 1..23: mol_type = other RNA
ttgcagtccctggactggagaag

SEQ ID NO: 99044 - RNA, 23 nt, synthetic construct
  source 1..23: mol_type = other RNA
tgtggacatggtggccgtgggtg

SEQ ID NO: 99045 - RNA, 23 nt, synthetic construct
  source 1..23: mol_type = other RNA
taagagggggtggccacagagcc

SEQ ID NO: 99046 - RNA, 23 nt, synthetic construct
  source 1..23: mol_type = other RNA
ttgtggtggccgtggtgttcggc

SEQ ID NO: 99047 - RNA, 23 nt, synthetic construct
  source 1..23: mol_type = other RNA
ttgtgtggtggccgtggtgttcg

SEQ ID NO: 99048 - RNA, 23 nt, synthetic construct
  source 1..23: mol_type = other RNA
tgtgtgtggtggccgtggtgttc

SEQ ID NO: 99049 - RNA, 23 nt, synthetic construct
  source 1..23: mol_type = other RNA
tgaggtggccgtggtgtggcccg

SEQ ID NO: 99050 - RNA, 23 nt, synthetic construct
  source 1..23: mol_type = other RNA
tgttcctgcagaccaggccaaag

SEQ ID NO: 99051 - RNA, 23 nt, synthetic construct
  source 1..23: mol_type = other RNA
taacttccccacctgctcacggt

SEQ ID NO: 99052 - RNA, 23 nt, synthetic construct
  source 1..23: mol_type = other RNA
tgcagtccttggactggaggagg

SEQ ID NO: 99053 - RNA, 23 nt, synthetic construct
  source 1..23: mol_type = other RNA
tgccacgggtgtggtggtctgtt

SEQ ID NO: 99054 - RNA, 23 nt, synthetic construct
  source 1..23: mol_type = other RNA
tgtggtctccggagtggaggagg

SEQ ID NO: 99055 - RNA, 23 nt, synthetic construct
  source 1..23: mol_type = other RNA
tggtggtctccggagtggaggag

SEQ ID NO: 99056 - RNA, 23 nt, synthetic construct
  source 1..23: mol_type = other RNA
tagttgtagtggctgctgtggtc

SEQ ID NO: 99057 - RNA, 23 nt, synthetic construct
  source 1..23: mol_type = other RNA
tcgtggatccagtggacgcagtc

SEQ ID NO: 99058 - RNA, 23 nt, synthetic construct
  source 1..23: mol_type = other RNA
tgtggccgtggatccggtgggca

SEQ ID NO: 99059 - RNA, 23 nt, synthetic construct
  source 1..23: mol_type = other RNA
ttgcagtccctggactggaggag

SEQ ID NO: 99060 - RNA, 23 nt, synthetic construct
  source 1..23: mol_type = other RNA
tgtggacatggtggccgtgggtg

SEQ ID NO: 99061 - RNA, 23 nt, synthetic construct
  source 1..23: mol_type = other RNA
taggtgtggacagtctctggagt

SEQ ID NO: 99062 - RNA, 23 nt, synthetic construct
  source 1..23: mol_type = other RNA
tgaggtgtggacagtctctggag

SEQ ID NO: 99063 - RNA, 23 nt, synthetic construct
  source 1..23: mol_type = other RNA
tgcagtccttggactggaggagg

SEQ ID NO: 99064 - RNA, 23 nt, synthetic construct
  source 1..23: mol_type = other RNA
tagctggtagctgtggattttgt

SEQ ID NO: 99065 - RNA, 23 nt, synthetic construct
  source 1..23: mol_type = other RNA
ttgtaaagctggtagctgtggat

SEQ ID NO: 99066 - RNA, 23 nt, synthetic construct
  source 1..23: mol_type = other RNA
tacatgggtgtggtggtctgtgc

SEQ ID NO: 99067 - RNA, 23 nt, synthetic construct
  source 1..23: mol_type = other RNA
tgtggtctctggagtagaggagg

SEQ ID NO: 99068 - RNA, 23 nt, synthetic construct
  source 1..23: mol_type = other RNA
taggtgtgggtggtctctggagt

SEQ ID NO: 99069 - RNA, 23 nt, synthetic construct
  source 1..23: mol_type = other RNA
tgcccttgtcatggtggctgtgg

SEQ ID NO: 99070 - RNA, 23 nt, synthetic construct
  source 1..23: mol_type = other RNA
tccgggtcgtccccagagtggag

SEQ ID NO: 99071 - RNA, 23 nt, synthetic construct
  source 1..23: mol_type = other RNA
ttgttgtggtcagctcagtgagg

SEQ ID NO: 99072 - RNA, 23 nt, synthetic construct
  source 1..23: mol_type = other RNA
tgtggccatggtggtcaccactt

SEQ ID NO: 99073 - RNA, 23 nt, synthetic construct
  source 1..23: mol_type = other RNA
tcaggcgccctggaagcggtcaa

SEQ ID NO: 99074 - RNA, 23 nt, synthetic construct
  source 1..23: mol_type = other RNA
tgtgggacaggcgccctggaagc

SEQ ID NO: 99075 - RNA, 23 nt, synthetic construct
  source 1..23: mol_type = other RNA
tgcgaggacagcggggcggagga

SEQ ID NO: 99076 - RNA, 23 nt, synthetic construct
  source 1..23: mol_type = other RNA
tggagccgccccacatgctgcag

SEQ ID NO: 99077 - RNA, 23 nt, synthetic construct
  source 1..23: mol_type = other RNA
tcatggtggtggtccccagcaca

SEQ ID NO: 99078 - RNA, 23 nt, synthetic construct
  source 1..23: mol_type = other RNA
tgacccaccgctccccgggaaat

SEQ ID NO: 99079 - RNA, 23 nt, synthetic construct
  source 1..23: mol_type = other RNA
tgcgggggctgaccctgggcgtc

SEQ ID NO: 99080 - RNA, 23 nt, synthetic construct
  source 1..23: mol_type = other RNA
tccgtctcggggcagcaggggtt

SEQ ID NO: 99081 - RNA, 23 nt, synthetic construct
  source 1..23: mol_type = other RNA
tggcgggcacacaggcaggctct

SEQ ID NO: 99082 - RNA, 23 nt, synthetic construct
  source 1..23: mol_type = other RNA
tccctggcgggcacacaggcagg

SEQ ID NO: 99083 - RNA, 23 nt, synthetic construct
  source 1..23: mol_type = other RNA
tcttgacaggagtcctcctcaca

SEQ ID NO: 99084 - RNA, 23 nt, synthetic construct
  source 1..23: mol_type = other RNA
tgcagccctggtgccacaggatg

SEQ ID NO: 99085 - RNA, 23 nt, synthetic construct
  source 1..23: mol_type = other RNA
tacgggtgtgtgggggagccatg

SEQ ID NO: 99086 - RNA, 23 nt, synthetic construct
  source 1..23: mol_type = other RNA
tgggggctccgcagaggaggccc

SEQ ID NO: 99087 - RNA, 23 nt, synthetic construct
  source 1..23: mol_type = other RNA
tcccctctctgacctggccgttg

SEQ ID NO: 99088 - RNA, 23 nt, synthetic construct
  source 1..23: mol_type = other RNA
tatgctgacccctctctgacctg

SEQ ID NO: 99089 - RNA, 23 nt, synthetic construct
  source 1..23: mol_type = other RNA
tgtctctgcctgcggcaccacga

SEQ ID NO: 99090 - RNA, 23 nt, synthetic construct
  source 1..23: mol_type = other RNA
tggctttgggtccagcaggacga

SEQ ID NO: 99091 - RNA, 23 nt, synthetic construct
  source 1..23: mol_type = other RNA
taggctgctggcataagtgccct

SEQ ID NO: 99092 - RNA, 23 nt, synthetic construct
  source 1..23: mol_type = other RNA
tgggcgcctgggaaggttgcacc

SEQ ID NO: 99093 - RNA, 23 nt, synthetic construct
  source 1..23: mol_type = other RNA
ttgatgggtgttgtccctggagt

SEQ ID NO: 99094 - RNA, 23 nt, synthetic construct
  source 1..23: mol_type = other RNA
tcagagctgcgcgcgctgggggt

SEQ ID NO: 99095 - RNA, 23 nt, synthetic construct
  source 1..23: mol_type = other RNA
tagctgttcccggggtggaggac

SEQ ID NO: 99096 - RNA, 23 nt, synthetic construct
  source 1..23: mol_type = other RNA
tagctgttcccggggtggaggac

SEQ ID NO: 99097 - RNA, 23 nt, synthetic construct
  source 1..23: mol_type = other RNA
tccatccatggtgtgccctgcat

SEQ ID NO: 99098 - RNA, 23 nt, synthetic construct
  source 1..23: mol_type = other RNA
tgtgtgcaggatggctgagccgt

SEQ ID NO: 99099 - RNA, 23 nt, synthetic construct
  source 1..23: mol_type = other RNA
tatgcagttcgagtggaagggct

SEQ ID NO: 99100 - RNA, 23 nt, synthetic construct
  source 1..23: mol_type = other RNA
tcatgcagttcgagtggaagggc

SEQ ID NO: 99101 - RNA, 23 nt, synthetic construct
  source 1..23: mol_type = other RNA
tagatgtactcgcagctgccttc

SEQ ID NO: 99102 - RNA, 23 nt, synthetic construct
  source 1..23: mol_type = other RNA
tccgtggttattggggccgatgt

SEQ ID NO: 99103 - RNA, 23 nt, synthetic construct
  source 1..23: mol_type = other RNA
tttcgtggtcagcactgtggagg

SEQ ID NO: 99104 - RNA, 23 nt, synthetic construct
  source 1..23: mol_type = other RNA
tttcgtggtcagcactgtggagg

SEQ ID NO: 99105 - RNA, 23 nt, synthetic construct
  source 1..23: mol_type = other RNA
tgcagttgctgacccaccgctcc

SEQ ID NO: 99106 - RNA, 23 nt, synthetic construct
  source 1..23: mol_type = other RNA
ttgcttctcagtgctggaagggc

SEQ ID NO: 99107 - RNA, 23 nt, synthetic construct
  source 1..23: mol_type = other RNA
ttgcttctcagtgctggaagggc

SEQ ID NO: 99108 - RNA, 23 nt, synthetic construct
  source 1..23: mol_type = other RNA
ttgcttctcagtgctggaagggc

SEQ ID NO: 99109 - RNA, 23 nt, synthetic construct
  source 1..23: mol_type = other RNA
ttgcttctcagtgctggaagggc

SEQ ID NO: 99110 - RNA, 23 nt, synthetic construct
  source 1..23: mol_type = other RNA
ttgcttctcagtgctggaagggc

SEQ ID NO: 99111 - RNA, 23 nt, synthetic construct
  source 1..23: mol_type = other RNA
tatgggggctgcacaccctgtgc

SEQ ID NO: 99112 - RNA, 23 nt, synthetic construct
  source 1..23: mol_type = other RNA
tcacccggccctctcgccaccgc

SEQ ID NO: 99113 - RNA, 23 nt, synthetic construct
  source 1..23: mol_type = other RNA
tcacttccgcagctcagccagca

SEQ ID NO: 99114 - RNA, 23 nt, synthetic construct
  source 1..23: mol_type = other RNA
tcatgggtgtggtggtctgttct

SEQ ID NO: 99115 - RNA, 23 nt, synthetic construct
  source 1..23: mol_type = other RNA
tcatgggtgtggtggtctgtgct

SEQ ID NO: 99116 - RNA, 23 nt, synthetic construct
  source 1..23: mol_type = other RNA
ttacttggtgcagacgccgtccc

SEQ ID NO: 99117 - RNA, 23 nt, synthetic construct
  source 1..23: mol_type = other RNA
taggtcctgtcctcataggtgca

SEQ ID NO: 99118 - RNA, 23 nt, synthetic construct
  source 1..23: mol_type = other RNA
tccacaggtctggttggcgtatt

SEQ ID NO: 99119 - RNA, 23 nt, synthetic construct
  source 1..23: mol_type = other RNA
tgcacataggaggacagcgcggc

SEQ ID NO: 99120 - RNA, 23 nt, synthetic construct
  source 1..23: mol_type = other RNA
tatctctctcatgaggacatagg

SEQ ID NO: 99121 - RNA, 23 nt, synthetic construct
  source 1..23: mol_type = other RNA
tcactttgatgggcaggtgcttg

SEQ ID NO: 99122 - RNA, 23 nt, synthetic construct
  source 1..23: mol_type = other RNA
tgttcagacttggggtagtcctc

SEQ ID NO: 99123 - RNA, 23 nt, synthetic construct
  source 1..23: mol_type = other RNA
tgtgtgctgaaacagcccacgtc

SEQ ID NO: 99124 - RNA, 23 nt, synthetic construct
  source 1..23: mol_type = other RNA
tagaccctgcccttgtagtcctg

SEQ ID NO: 99125 - RNA, 23 nt, synthetic construct
  source 1..23: mol_type = other RNA
ttcttttcggttgctgtggtctg

SEQ ID NO: 99126 - RNA, 23 nt, synthetic construct
  source 1..23: mol_type = other RNA
tgccgtggtggtcagcactttgg

SEQ ID NO: 99127 - RNA, 23 nt, synthetic construct
  source 1..23: mol_type = other RNA
tgccggtggctgcactcccacct

SEQ ID NO: 99128 - RNA, 23 nt, synthetic construct
  source 1..23: mol_type = other RNA
tcggttttcctgaggctccccct

SEQ ID NO: 99129 - RNA, 23 nt, synthetic construct
  source 1..23: mol_type = other RNA
tgcaccgtgcctggggggcagaa

SEQ ID NO: 99130 - RNA, 23 nt, synthetic construct
  source 1..23: mol_type = other RNA
tggagcaggggtcctcaaagctg

SEQ ID NO: 99131 - RNA, 23 nt, synthetic construct
  source 1..23: mol_type = other RNA
tcgtaggccacgcaggtgcccag

SEQ ID NO: 99132 - RNA, 23 nt, synthetic construct
  source 1..23: mol_type = other RNA
tcttgtagtcctggtgcagtcgg

SEQ ID NO: 99133 - RNA, 23 nt, synthetic construct
  source 1..23: mol_type = other RNA
tggcttgtcgtggagtgggggac

SEQ ID NO: 99134 - RNA, 23 nt, synthetic construct
  source 1..23: mol_type = other RNA
tgggcttgtcgtggagtggggga

SEQ ID NO: 99135 - RNA, 23 nt, synthetic construct
  source 1..23: mol_type = other RNA
tgccgatgtggggctgctgggca

SEQ ID NO: 99136 - RNA, 23 nt, synthetic construct
  source 1..23: mol_type = other RNA
tgccgatgtggggctgctgggca

SEQ ID NO: 99137 - RNA, 23 nt, synthetic construct
  source 1..23: mol_type = other RNA
tgccgatgtggggctgctgggca

SEQ ID NO: 99138 - RNA, 23 nt, synthetic construct
  source 1..23: mol_type = other RNA
tgccgatgtggggctgctgggca

SEQ ID NO: 99139 - RNA, 23 nt, synthetic construct
  source 1..23: mol_type = other RNA
tgatctctctcatgaggacatag

SEQ ID NO: 99140 - RNA, 23 nt, synthetic construct
  source 1..23: mol_type = other RNA
tccccagagaggcaggtacacat

SEQ ID NO: 99141 - RNA, 23 nt, synthetic construct
  source 1..23: mol_type = other RNA
tcgttgggtcctgggtgtcccca

SEQ ID NO: 99142 - RNA, 23 nt, synthetic construct
  source 1..23: mol_type = other RNA
tcgcaaaggccggccccagcagg

SEQ ID NO: 99143 - RNA, 23 nt, synthetic construct
  source 1..23: mol_type = other RNA
tcgggcttgtcgtggagtggggg

SEQ ID NO: 99144 - RNA, 23 nt, synthetic construct
  source 1..23: mol_type = other RNA
tcatgggcgcagggacacagaag

SEQ ID NO: 99145 - RNA, 23 nt, synthetic construct
  source 1..23: mol_type = other RNA
tgtgcaggcctcaaggctgtgag

SEQ ID NO: 99146 - RNA, 23 nt, synthetic construct
  source 1..23: mol_type = other RNA
ttggtcttccggtcccaggacac

SEQ ID NO: 99147 - RNA, 23 nt, synthetic construct
  source 1..23: mol_type = other RNA
ttggggaagacagtgacgggtgg

SEQ ID NO: 99148 - RNA, 23 nt, synthetic construct
  source 1..23: mol_type = other RNA
tccatccaacttctgcaggttcc

SEQ ID NO: 99149 - RNA, 23 nt, synthetic construct
  source 1..23: mol_type = other RNA
tcaggcagccagagtgcgtgatg

SEQ ID NO: 99150 - RNA, 23 nt, synthetic construct
  source 1..23: mol_type = other RNA
tgcctggttctggttgaagttcc

SEQ ID NO: 99151 - RNA, 23 nt, synthetic construct
  source 1..23: mol_type = other RNA
tacacaggcccgcgtcgtggcag

SEQ ID NO: 99152 - RNA, 23 nt, synthetic construct
  source 1..23: mol_type = other RNA
ttggtgaaggtgaatggcgttgt

SEQ ID NO: 99153 - RNA, 23 nt, synthetic construct
  source 1..23: mol_type = other RNA
tgttggggaagctctcggcctgg

SEQ ID NO: 99154 - RNA, 23 nt, synthetic construct
  source 1..23: mol_type = other RNA
tgctctgtgatgtgggtggtgcc

SEQ ID NO: 99155 - RNA, 23 nt, synthetic construct
  source 1..23: mol_type = other RNA
tgctctgtgatgtgggtggtgcc

SEQ ID NO: 99156 - RNA, 23 nt, synthetic construct
  source 1..23: mol_type = other RNA
tgctctgtgatgtgggtggtgcc

SEQ ID NO: 99157 - RNA, 23 nt, synthetic construct
  source 1..23: mol_type = other RNA
tgctctgtgatgtgggtggtgcc

SEQ ID NO: 99158 - RNA, 23 nt, synthetic construct
  source 1..23: mol_type = other RNA
tcggtgttgttgtggaagaggct

SEQ ID NO: 99159 - RNA, 23 nt, synthetic construct
  source 1..23: mol_type = other RNA
tgaagcacatcttgaacttcccc

SEQ ID NO: 99160 - RNA, 23 nt, synthetic construct
  source 1..23: mol_type = other RNA
tgaagcacatcttgaacttcccc

SEQ ID NO: 99161 - RNA, 23 nt, synthetic construct
  source 1..23: mol_type = other RNA
tgaagcacatcttgaacttcccc

SEQ ID NO: 99162 - RNA, 23 nt, synthetic construct
  source 1..23: mol_type = other RNA
tgaagcacatcttgaacttcccc

SEQ ID NO: 99163 - RNA, 23 nt, synthetic construct
  source 1..23: mol_type = other RNA
tcgtcagcctggttctggttgaa

SEQ ID NO: 99164 - RNA, 23 nt, synthetic construct
  source 1..23: mol_type = other RNA
tgtttttaggcagggtgccccgc

SEQ ID NO: 99165 - RNA, 23 nt, synthetic construct
  source 1..23: mol_type = other RNA
ttggcactctatgtccttaggct

SEQ ID NO: 99166 - RNA, 23 nt, synthetic construct
  source 1..23: mol_type = other RNA
tgtccctagggcagaggagggag

SEQ ID NO: 99167 - RNA, 23 nt, synthetic construct
  source 1..23: mol_type = other RNA
tgggctgctcacagacggcccct

SEQ ID NO: 99168 - RNA, 23 nt, synthetic construct
  source 1..23: mol_type = other RNA
tccccggagtggaggagggcatg

SEQ ID NO: 99169 - RNA, 23 nt, synthetic construct
  source 1..23: mol_type = other RNA
tgtccctagggcagaggagggag

SEQ ID NO: 99170 - RNA, 23 nt, synthetic construct
  source 1..23: mol_type = other RNA
ttggccgtggccgtggtcctgga

SEQ ID NO: 99171 - RNA, 23 nt, synthetic construct
  source 1..23: mol_type = other RNA
tgggctgctcacagacggcccct

SEQ ID NO: 99172 - RNA, 23 nt, synthetic construct
  source 1..23: mol_type = other RNA
tgtccctagggcagaggagggag

SEQ ID NO: 99173 - RNA, 23 nt, synthetic construct
  source 1..23: mol_type = other RNA
tgtccctagggcagaggagggag

SEQ ID NO: 99174 - RNA, 23 nt, synthetic construct
  source 1..23: mol_type = other RNA
ttggccgtggccgtggtcctgga

SEQ ID NO: 99175 - RNA, 23 nt, synthetic construct
  source 1..23: mol_type = other RNA
tgggctgctcacagacggcccct

SEQ ID NO: 99176 - RNA, 23 nt, synthetic construct
  source 1..23: mol_type = other RNA
tccccggagtggaggagggcatg

SEQ ID NO: 99177 - RNA, 23 nt, synthetic construct
  source 1..23: mol_type = other RNA
tctttgatgggcaggtgcttgtt

SEQ ID NO: 99178 - RNA, 23 nt, synthetic construct
  source 1..23: mol_type = other RNA
tggttttcctgaggctccccctg

SEQ ID NO: 99179 - RNA, 23 nt, synthetic construct
  source 1..23: mol_type = other RNA
tttgtagtcctggtgcagtcgga

SEQ ID NO: 99180 - RNA, 23 nt, synthetic construct
  source 1..23: mol_type = other RNA
tgcaagggcagcgggtccgggca

SEQ ID NO: 99181 - RNA, 23 nt, synthetic construct
  source 1..23: mol_type = other RNA
tgggacagtgggttctgtggagc

SEQ ID NO: 99182 - RNA, 23 nt, synthetic construct
  source 1..23: mol_type = other RNA
tcttgtcgtggagtgggggaccc

SEQ ID NO: 99183 - RNA, 23 nt, synthetic construct
  source 1..23: mol_type = other RNA
tggcagacctcgcggacacacac

SEQ ID NO: 99184 - RNA, 23 nt, synthetic construct
  source 1..23: mol_type = other RNA
taggtggtggtacctggggccga

SEQ ID NO: 99185 - RNA, 23 nt, synthetic construct
  source 1..23: mol_type = other RNA
tacatttcttggacagaacgtag

SEQ ID NO: 99186 - RNA, 23 nt, synthetic construct
  source 1..23: mol_type = other RNA
tgccacactgggccacgcacttc

SEQ ID NO: 99187 - RNA, 23 nt, synthetic construct
  source 1..23: mol_type = other RNA
ttcatcaaaccactctgtccact

SEQ ID NO: 99188 - RNA, 23 nt, synthetic construct
  source 1..23: mol_type = other RNA
tctcatcaaaccactctgtccac

SEQ ID NO: 99189 - RNA, 23 nt, synthetic construct
  source 1..23: mol_type = other RNA
ttggctcagcatcagatcacaga

SEQ ID NO: 99190 - RNA, 23 nt, synthetic construct
  source 1..23: mol_type = other RNA
ttcaggctggggaagacagtgac

SEQ ID NO: 99191 - RNA, 23 nt, synthetic construct
  source 1..23: mol_type = other RNA
tcccactggggttccggcaggtt

SEQ ID NO: 99192 - RNA, 23 nt, synthetic construct
  source 1..23: mol_type = other RNA
ttgcagcagaacacacggatttc

SEQ ID NO: 99193 - RNA, 23 nt, synthetic construct
  source 1..23: mol_type = other RNA
ttgcagcagaacacacggatttc

SEQ ID NO: 99194 - RNA, 23 nt, synthetic construct
  source 1..23: mol_type = other RNA
ttgcagcagaacacacggatttc

SEQ ID NO: 99195 - RNA, 23 nt, synthetic construct
  source 1..23: mol_type = other RNA
ttgcagcagaacacacggatttc

SEQ ID NO: 99196 - RNA, 23 nt, synthetic construct
  source 1..23: mol_type = other RNA
ttgccgacaggggcagctgcgtg

SEQ ID NO: 99197 - RNA, 23 nt, synthetic construct
  source 1..23: mol_type = other RNA
tctgccgacaggggcagctgcgt

SEQ ID NO: 99198 - RNA, 23 nt, synthetic construct
  source 1..23: mol_type = other RNA
tggtggtccctagggcagaggag

SEQ ID NO: 99199 - RNA, 23 nt, synthetic construct
  source 1..23: mol_type = other RNA
tggtggtccctagggcagaggag

SEQ ID NO: 99200 - RNA, 23 nt, synthetic construct
  source 1..23: mol_type = other RNA
tggtggtccctagggcagaggag

SEQ ID NO: 99201 - RNA, 23 nt, synthetic construct
  source 1..23: mol_type = other RNA
tggtggtccctagggcagaggag

SEQ ID NO: 99202 - RNA, 23 nt, synthetic construct
  source 1..23: mol_type = other RNA
tcaggcttgtaggtggcctcgtt

SEQ ID NO: 99203 - RNA, 23 nt, synthetic construct
  source 1..23: mol_type = other RNA
tatcaaaggtgatgaagtggcca

SEQ ID NO: 99204 - RNA, 23 nt, synthetic construct
  source 1..23: mol_type = other RNA
tccggtcccaggacacggccatc

SEQ ID NO: 99205 - RNA, 23 nt, synthetic construct
  source 1..23: mol_type = other RNA
ttcatctggtcctcattgaagaa

SEQ ID NO: 99206 - RNA, 23 nt, synthetic construct
  source 1..23: mol_type = other RNA
ttgcaggtgcaggcctcaaggct

SEQ ID NO: 99207 - RNA, 23 nt, synthetic construct
  source 1..23: mol_type = other RNA
tgggtggtccctagggcagagga

SEQ ID NO: 99208 - RNA, 23 nt, synthetic construct
  source 1..23: mol_type = other RNA
tgggtggtccctagggcagagga

SEQ ID NO: 99209 - RNA, 23 nt, synthetic construct
  source 1..23: mol_type = other RNA
tgggtggtccctagggcagagga

SEQ ID NO: 99210 - RNA, 23 nt, synthetic construct
  source 1..23: mol_type = other RNA
tgggtggtccctagggcagagga

SEQ ID NO: 99211 - RNA, 23 nt, synthetic construct
  source 1..23: mol_type = other RNA
ttggtgaggactgaggaggacac

SEQ ID NO: 99212 - RNA, 23 nt, synthetic construct
  source 1..23: mol_type = other RNA
tgcagggagtagagaagtgggag

SEQ ID NO: 99213 - RNA, 23 nt, synthetic construct
  source 1..23: mol_type = other RNA
tagtcactgcacactccccgggc

SEQ ID NO: 99214 - RNA, 23 nt, synthetic construct
  source 1..23: mol_type = other RNA
tgggccttccaggtgttggcgaa

SEQ ID NO: 99215 - RNA, 23 nt, synthetic construct
  source 1..23: mol_type = other RNA
ttaggcagccacagccgtgcaga

SEQ ID NO: 99216 - RNA, 23 nt, synthetic construct
  source 1..23: mol_type = other RNA
tgtgttgtagatgacgtcctggt

SEQ ID NO: 99217 - RNA, 23 nt, synthetic construct
  source 1..23: mol_type = other RNA
tcactctatgtccttaggctgct

SEQ ID NO: 99218 - RNA, 23 nt, synthetic construct
  source 1..23: mol_type = other RNA
tctcttgtactcaaagccctggg

SEQ ID NO: 99219 - RNA, 23 nt, synthetic construct
  source 1..23: mol_type = other RNA
tagggcaccgtctcctcgtggac

SEQ ID NO: 99220 - RNA, 23 nt, synthetic construct
  source 1..23: mol_type = other RNA
tagccatgggcgcagggacacag

SEQ ID NO: 99221 - RNA, 23 nt, synthetic construct
  source 1..23: mol_type = other RNA
tctctctcatgaggacataggtg

SEQ ID NO: 99222 - RNA, 23 nt, synthetic construct
  source 1..23: mol_type = other RNA
ttagctctccacgaagagcttga

SEQ ID NO: 99223 - RNA, 23 nt, synthetic construct
  source 1..23: mol_type = other RNA
tgagttccaggacatgccacagc

SEQ ID NO: 99224 - RNA, 23 nt, synthetic construct
  source 1..23: mol_type = other RNA
tagacttggggtagtcctcatca

SEQ ID NO: 99225 - RNA, 23 nt, synthetic construct
  source 1..23: mol_type = other RNA
tcccttgtagtcctggtgcagtc

SEQ ID NO: 99226 - RNA, 23 nt, synthetic construct
  source 1..23: mol_type = other RNA
ttggtcctcattgaagaagggct

SEQ ID NO: 99227 - RNA, 23 nt, synthetic construct
  source 1..23: mol_type = other RNA
tcgtgctggcactgagggagggc

SEQ ID NO: 99228 - RNA, 23 nt, synthetic construct
  source 1..23: mol_type = other RNA
taatttggtcaaacaggatcagg

SEQ ID NO: 99229 - RNA, 23 nt, synthetic construct
  source 1..23: mol_type = other RNA
tcataggaggacagcgcggcgca

SEQ ID NO: 99230 - RNA, 23 nt, synthetic construct
  source 1..23: mol_type = other RNA
tgtggtgccggtggtcccacagg

SEQ ID NO: 99231 - RNA, 23 nt, synthetic construct
  source 1..23: mol_type = other RNA
tagagcttgatggccttggagca

SEQ ID NO: 99232 - RNA, 23 nt, synthetic construct
  source 1..23: mol_type = other RNA
tgtggcaaagtcattgatggcat

SEQ ID NO: 99233 - RNA, 23 nt, synthetic construct
  source 1..23: mol_type = other RNA
tgtcaacctgggagcggcaggcg

SEQ ID NO: 99234 - RNA, 23 nt, synthetic construct
  source 1..23: mol_type = other RNA
tggtgccccgcagggctggtagt

SEQ ID NO: 99235 - RNA, 23 nt, synthetic construct
  source 1..23: mol_type = other RNA
tcagttcctgcacaccaggccga

SEQ ID NO: 99236 - RNA, 23 nt, synthetic construct
  source 1..23: mol_type = other RNA
tagtccaggctgcattccacgac

SEQ ID NO: 99237 - RNA, 23 nt, synthetic construct
  source 1..23: mol_type = other RNA
tagtccaggctgcattccacgac

SEQ ID NO: 99238 - RNA, 23 nt, synthetic construct
  source 1..23: mol_type = other RNA
tagtccaggctgcattccacgac

SEQ ID NO: 99239 - RNA, 23 nt, synthetic construct
  source 1..23: mol_type = other RNA
tagtccaggctgcattccacgac

SEQ ID NO: 99240 - RNA, 23 nt, synthetic construct
  source 1..23: mol_type = other RNA
tactgtccaaatgccctgcagaa

SEQ ID NO: 99241 - RNA, 23 nt, synthetic construct
  source 1..23: mol_type = other RNA
tccaccgtgcagttctccagggt

SEQ ID NO: 99242 - RNA, 23 nt, synthetic construct
  source 1..23: mol_type = other RNA
tgggcaggtgcttgttcacgcag

SEQ ID NO: 99243 - RNA, 23 nt, synthetic construct
  source 1..23: mol_type = other RNA
ttgggcaggtgcttgttcacgca

SEQ ID NO: 99244 - RNA, 23 nt, synthetic construct
  source 1..23: mol_type = other RNA
tgaggtgccgtcaaaggtggaat

SEQ ID NO: 99245 - RNA, 23 nt, synthetic construct
  source 1..23: mol_type = other RNA
tccgcagggggacaccaggctgg

SEQ ID NO: 99246 - RNA, 23 nt, synthetic construct
  source 1..23: mol_type = other RNA
tccgcagggggacaccaggctgg

SEQ ID NO: 99247 - RNA, 23 nt, synthetic construct
  source 1..23: mol_type = other RNA
tccgcagggggacaccaggctgg

SEQ ID NO: 99248 - RNA, 23 nt, synthetic construct
  source 1..23: mol_type = other RNA
tatccaacttctgcaggttccca

SEQ ID NO: 99249 - RNA, 23 nt, synthetic construct
  source 1..23: mol_type = other RNA
tgtcctcaaagctgttcctggca

SEQ ID NO: 99250 - RNA, 23 nt, synthetic construct
  source 1..23: mol_type = other RNA
tcaagttgttcagacttggggta

SEQ ID NO: 99251 - RNA, 23 nt, synthetic construct
  source 1..23: mol_type = other RNA
tgggggttggagcaggtgtccgt

SEQ ID NO: 99252 - RNA, 23 nt, synthetic construct
  source 1..23: mol_type = other RNA
ttccaacttctgcaggttcccaa

SEQ ID NO: 99253 - RNA, 23 nt, synthetic construct
  source 1..23: mol_type = other RNA
tacagggtgatgttggctgccga

SEQ ID NO: 99254 - RNA, 23 nt, synthetic construct
  source 1..23: mol_type = other RNA
tcaggtgttggcgaaggctgcgc

SEQ ID NO: 99255 - RNA, 23 nt, synthetic construct
  source 1..23: mol_type = other RNA
tgtccaggtctcattcacctgcc

SEQ ID NO: 99256 - RNA, 23 nt, synthetic construct
  source 1..23: mol_type = other RNA
tcgtgcacataggaggacagcgc

SEQ ID NO: 99257 - RNA, 23 nt, synthetic construct
  source 1..23: mol_type = other RNA
tgcttgtcgtggagtgggggacc

SEQ ID NO: 99258 - RNA, 23 nt, synthetic construct
  source 1..23: mol_type = other RNA
tccgggcttgtcgtggagtgggg

SEQ ID NO: 99259 - RNA, 23 nt, synthetic construct
  source 1..23: mol_type = other RNA
tgtcacagtccacctgctggccc

SEQ ID NO: 99260 - RNA, 23 nt, synthetic construct
  source 1..23: mol_type = other RNA
tcccgcagggggacaccaggctg

SEQ ID NO: 99261 - RNA, 23 nt, synthetic construct
  source 1..23: mol_type = other RNA
tcccgcagggggacaccaggctg

SEQ ID NO: 99262 - RNA, 23 nt, synthetic construct
  source 1..23: mol_type = other RNA
tcccgcagggggacaccaggctg

SEQ ID NO: 99263 - RNA, 23 nt, synthetic construct
  source 1..23: mol_type = other RNA
tgtgaggactgaggaggacacag

SEQ ID NO: 99264 - RNA, 23 nt, synthetic construct
  source 1..23: mol_type = other RNA
tggggtccagcctgacaaacacc

SEQ ID NO: 99265 - RNA, 23 nt, synthetic construct
  source 1..23: mol_type = other RNA
tgcgtgcacataggaggacagcg

SEQ ID NO: 99266 - RNA, 23 nt, synthetic construct
  source 1..23: mol_type = other RNA
tggtcccaggacacggccatccc

SEQ ID NO: 99267 - RNA, 23 nt, synthetic construct
  source 1..23: mol_type = other RNA
tgtgcagttctccagggtccagg

SEQ ID NO: 99268 - RNA, 23 nt, synthetic construct
  source 1..23: mol_type = other RNA
taaagacctggctcagcatcaga

SEQ ID NO: 99269 - RNA, 23 nt, synthetic construct
  source 1..23: mol_type = other RNA
ttggccgtggtggtcagcacttt

SEQ ID NO: 99270 - RNA, 23 nt, synthetic construct
  source 1..23: mol_type = other RNA
tccagggcacggcaggtcctggc

SEQ ID NO: 99271 - RNA, 23 nt, synthetic construct
  source 1..23: mol_type = other RNA
tagtggaagggcttggggttgat

SEQ ID NO: 99272 - RNA, 23 nt, synthetic construct
  source 1..23: mol_type = other RNA
tctagaggagggtgttgccatag

SEQ ID NO: 99273 - RNA, 23 nt, synthetic construct
  source 1..23: mol_type = other RNA
tctagaggagggtgttgccatag

SEQ ID NO: 99274 - RNA, 23 nt, synthetic construct
  source 1..23: mol_type = other RNA
tctagaggagggtgttgccatag

SEQ ID NO: 99275 - RNA, 23 nt, synthetic construct
  source 1..23: mol_type = other RNA
tctagaggagggtgttgccatag

SEQ ID NO: 99276 - RNA, 23 nt, synthetic construct
  source 1..23: mol_type = other RNA
tctagaggagggtgttgccatag

SEQ ID NO: 99277 - RNA, 23 nt, synthetic construct
  source 1..23: mol_type = other RNA
tcacacacgcaggactggcagtt

SEQ ID NO: 99278 - RNA, 23 nt, synthetic construct
  source 1..23: mol_type = other RNA
ttccagcagggcactgtcctctc

SEQ ID NO: 99279 - RNA, 23 nt, synthetic construct
  source 1..23: mol_type = other RNA
tgcacggcaggtcctggcactgc

SEQ ID NO: 99280 - RNA, 23 nt, synthetic construct
  source 1..23: mol_type = other RNA
tcacaggccgcacatctggccct

SEQ ID NO: 99281 - RNA, 23 nt, synthetic construct
  source 1..23: mol_type = other RNA
tggcgggcacacaggcgcccgcg

SEQ ID NO: 99282 - RNA, 23 nt, synthetic construct
  source 1..23: mol_type = other RNA
tccccacagtagtcctgggccaa

SEQ ID NO: 99283 - RNA, 23 nt, synthetic construct
  source 1..23: mol_type = other RNA
taggggatgttctcggtgacgat

SEQ ID NO: 99284 - RNA, 23 nt, synthetic construct
  source 1..23: mol_type = other RNA
tccaggcaggtccaccaggcagt

SEQ ID NO: 99285 - RNA, 23 nt, synthetic construct
  source 1..23: mol_type = other RNA
tgtgagcgcactggatgccactg

SEQ ID NO: 99286 - RNA, 23 nt, synthetic construct
  source 1..23: mol_type = other RNA
tctccaagttgttcagacttggg

SEQ ID NO: 99287 - RNA, 23 nt, synthetic construct
  source 1..23: mol_type = other RNA
tcttgaacttccccacctgctca

SEQ ID NO: 99288 - RNA, 23 nt, synthetic construct
  source 1..23: mol_type = other RNA
ttggctgtaaagctggtagctgt

SEQ ID NO: 99289 - RNA, 23 nt, synthetic construct
  source 1..23: mol_type = other RNA
tcttgaacttccccacctgctca

SEQ ID NO: 99290 - RNA, 23 nt, synthetic construct
  source 1..23: mol_type = other RNA
tcttgaacttccccacctgctca

SEQ ID NO: 99291 - RNA, 23 nt, synthetic construct
  source 1..23: mol_type = other RNA
ttggctgtaaagctggtagctgt

SEQ ID NO: 99292 - RNA, 23 nt, synthetic construct
  source 1..23: mol_type = other RNA
tcttgaacttccccacctgctca

SEQ ID NO: 99293 - RNA, 23 nt, synthetic construct
  source 1..23: mol_type = other RNA
ttggctgtaaagctggtagctgt

SEQ ID NO: 99294 - RNA, 23 nt, synthetic construct
  source 1..23: mol_type = other RNA
tccaacttctgcaggttcccaaa

SEQ ID NO: 99295 - RNA, 23 nt, synthetic construct
  source 1..23: mol_type = other RNA
tcaggtggggcagcggcacaggt

SEQ ID NO: 99296 - RNA, 23 nt, synthetic construct
  source 1..23: mol_type = other RNA
tggcaggcagccagagtgcgtga

SEQ ID NO: 99297 - RNA, 23 nt, synthetic construct
  source 1..23: mol_type = other RNA
tcaggggcactgcccgaggggca

SEQ ID NO: 99298 - RNA, 23 nt, synthetic construct
  source 1..23: mol_type = other RNA
tccgccgtccaggctgagcgtca

SEQ ID NO: 99299 - RNA, 23 nt, synthetic construct
  source 1..23: mol_type = other RNA
tttctggttgaagttcccacaca

SEQ ID NO: 99300 - RNA, 23 nt, synthetic construct
  source 1..23: mol_type = other RNA
tgttctggttgaagttcccacac

SEQ ID NO: 99301 - RNA, 23 nt, synthetic construct
  source 1..23: mol_type = other RNA
taggggtcctcaaagctgttcct

SEQ ID NO: 99302 - RNA, 23 nt, synthetic construct
  source 1..23: mol_type = other RNA
tagttctgcatgtacttggtgca

SEQ ID NO: 99303 - RNA, 23 nt, synthetic construct
  source 1..23: mol_type = other RNA
tcagcccacgtccagcgtgtggc

SEQ ID NO: 99304 - RNA, 23 nt, synthetic construct
  source 1..23: mol_type = other RNA
tgcagagccggtggctgcactcc

SEQ ID NO: 99305 - RNA, 23 nt, synthetic construct
  source 1..23: mol_type = other RNA
ttcaaaggtgatgaagtggccat

SEQ ID NO: 99306 - RNA, 23 nt, synthetic construct
  source 1..23: mol_type = other RNA
tagcttgatggccttggagcagg

SEQ ID NO: 99307 - RNA, 23 nt, synthetic construct
  source 1..23: mol_type = other RNA
taggcagtgcccactggggttcc

SEQ ID NO: 99308 - RNA, 23 nt, synthetic construct
  source 1..23: mol_type = other RNA
tcttcatctggtcctcattgaag

SEQ ID NO: 99309 - RNA, 23 nt, synthetic construct
  source 1..23: mol_type = other RNA
tcagccacactgggccacgcact

SEQ ID NO: 99310 - RNA, 23 nt, synthetic construct
  source 1..23: mol_type = other RNA
tggcctcaaggctgtgagcgcac

SEQ ID NO: 99311 - RNA, 23 nt, synthetic construct
  source 1..23: mol_type = other RNA
tctctgcctcaggttttcaaacg

SEQ ID NO: 99312 - RNA, 23 nt, synthetic construct
  source 1..23: mol_type = other RNA
ttctctgcctcaggttttcaaac

SEQ ID NO: 99313 - RNA, 23 nt, synthetic construct
  source 1..23: mol_type = other RNA
ttgctggcactgagggagggctg

SEQ ID NO: 99314 - RNA, 23 nt, synthetic construct
  source 1..23: mol_type = other RNA
tgcaggctccgtgctggcactga

SEQ ID NO: 99315 - RNA, 23 nt, synthetic construct
  source 1..23: mol_type = other RNA
tcactctgtccactcacacttcg

SEQ ID NO: 99316 - RNA, 23 nt, synthetic construct
  source 1..23: mol_type = other RNA
tgtccaggctgcattccacgacc

SEQ ID NO: 99317 - RNA, 23 nt, synthetic construct
  source 1..23: mol_type = other RNA
tgtggccgtggccgtggtcctgg

SEQ ID NO: 99318 - RNA, 23 nt, synthetic construct
  source 1..23: mol_type = other RNA
tgtccaggctgcattccacgacc

SEQ ID NO: 99319 - RNA, 23 nt, synthetic construct
  source 1..23: mol_type = other RNA
tgtccaggctgcattccacgacc

SEQ ID NO: 99320 - RNA, 23 nt, synthetic construct
  source 1..23: mol_type = other RNA
tgtggccgtggccgtggtcctgg

SEQ ID NO: 99321 - RNA, 23 nt, synthetic construct
  source 1..23: mol_type = other RNA
tgtccaggctgcattccacgacc

SEQ ID NO: 99322 - RNA, 23 nt, synthetic construct
  source 1..23: mol_type = other RNA
tttgttggtgcaggtgccgcact

SEQ ID NO: 99323 - RNA, 23 nt, synthetic construct
  source 1..23: mol_type = other RNA
tgctgcatggcctgggcctctgc

SEQ ID NO: 99324 - RNA, 23 nt, synthetic construct
  source 1..23: mol_type = other RNA
tgagccatgggcgcagggacaca

SEQ ID NO: 99325 - RNA, 23 nt, synthetic construct
  source 1..23: mol_type = other RNA
tcaggcctcgtagtacttggtgg

SEQ ID NO: 99326 - RNA, 23 nt, synthetic construct
  source 1..23: mol_type = other RNA
tagcggcacaggtcctgggcgca

SEQ ID NO: 99327 - RNA, 23 nt, synthetic construct
  source 1..23: mol_type = other RNA
tgccagggcacggcaggtcctgg

SEQ ID NO: 99328 - RNA, 23 nt, synthetic construct
  source 1..23: mol_type = other RNA
tccaggtgttggcgaaggctgcg

SEQ ID NO: 99329 - RNA, 23 nt, synthetic construct
  source 1..23: mol_type = other RNA
tggggtcctcaaagctgttcctg

SEQ ID NO: 99330 - RNA, 23 nt, synthetic construct
  source 1..23: mol_type = other RNA
taggcctcgtagtacttggtgga

SEQ ID NO: 99331 - RNA, 23 nt, synthetic construct
  source 1..23: mol_type = other RNA
tgctggaccagcggcagacctcg

SEQ ID NO: 99332 - RNA, 23 nt, synthetic construct
  source 1..23: mol_type = other RNA
tccagttcctgcacaccaggccg

SEQ ID NO: 99333 - RNA, 23 nt, synthetic construct
  source 1..23: mol_type = other RNA
tgtccagcctgacaaacacctgc

SEQ ID NO: 99334 - RNA, 23 nt, synthetic construct
  source 1..23: mol_type = other RNA
tgggacttggggcagttctgcat

SEQ ID NO: 99335 - RNA, 23 nt, synthetic construct
  source 1..23: mol_type = other RNA
ttgggacttggggcagttctgca

SEQ ID NO: 99336 - RNA, 23 nt, synthetic construct
  source 1..23: mol_type = other RNA
tagctctccacgaagagcttgat

SEQ ID NO: 99337 - RNA, 23 nt, synthetic construct
  source 1..23: mol_type = other RNA
tcccctccaagttgttcagactt

SEQ ID NO: 99338 - RNA, 23 nt, synthetic construct
  source 1..23: mol_type = other RNA
ttctggttgttggtgcaggtgcc

SEQ ID NO: 99339 - RNA, 23 nt, synthetic construct
  source 1..23: mol_type = other RNA
tggttcccaaactggagcggggt

SEQ ID NO: 99340 - RNA, 23 nt, synthetic construct
  source 1..23: mol_type = other RNA
tgggcagcgggtccgggcactgc

SEQ ID NO: 99341 - RNA, 23 nt, synthetic construct
  source 1..23: mol_type = other RNA
tctccgcaaaggccggccccagc

SEQ ID NO: 99342 - RNA, 23 nt, synthetic construct
  source 1..23: mol_type = other RNA
tccagcaccgtgcctggggggca

SEQ ID NO: 99343 - RNA, 23 nt, synthetic construct
  source 1..23: mol_type = other RNA
tggcacggcaggtcctggcactg

SEQ ID NO: 99344 - RNA, 23 nt, synthetic construct
  source 1..23: mol_type = other RNA
tagggtgatgttggctgccgaca

SEQ ID NO: 99345 - RNA, 23 nt, synthetic construct
  source 1..23: mol_type = other RNA
tgcctgacaaacacctgcatgag

SEQ ID NO: 99346 - RNA, 23 nt, synthetic construct
  source 1..23: mol_type = other RNA
tggtgggcggggtccagcctgac

SEQ ID NO: 99347 - RNA, 23 nt, synthetic construct
  source 1..23: mol_type = other RNA
tgagggagcaggggtcctcaaag

SEQ ID NO: 99348 - RNA, 23 nt, synthetic construct
  source 1..23: mol_type = other RNA
tggcgtagttctcattctccaca

SEQ ID NO: 99349 - RNA, 23 nt, synthetic construct
  source 1..23: mol_type = other RNA
tgggcagttctgcatgtacttgg

SEQ ID NO: 99350 - RNA, 23 nt, synthetic construct
  source 1..23: mol_type = other RNA
tggggcagttctgcatgtacttg

SEQ ID NO: 99351 - RNA, 23 nt, synthetic construct
  source 1..23: mol_type = other RNA
tcagccccgggggacagacacag

SEQ ID NO: 99352 - RNA, 23 nt, synthetic construct
  source 1..23: mol_type = other RNA
tcatcaaaggtgatgaagtggcc

SEQ ID NO: 99353 - RNA, 23 nt, synthetic construct
  source 1..23: mol_type = other RNA
tccacaggggatgttctcggtga

SEQ ID NO: 99354 - RNA, 23 nt, synthetic construct
  source 1..23: mol_type = other RNA
tgctctccacgaagagcttgatg

SEQ ID NO: 99355 - RNA, 23 nt, synthetic construct
  source 1..23: mol_type = other RNA
tcagctcgtagctctccacgaag

SEQ ID NO: 99356 - RNA, 23 nt, synthetic construct
  source 1..23: mol_type = other RNA
tccttgtagtcctggtgcagtcg

SEQ ID NO: 99357 - RNA, 23 nt, synthetic construct
  source 1..23: mol_type = other RNA
tcgtggcaaagtcattgatggca

SEQ ID NO: 99358 - RNA, 23 nt, synthetic construct
  source 1..23: mol_type = other RNA
tgcaggtgcaggcctcaaggctg

SEQ ID NO: 99359 - RNA, 23 nt, synthetic construct
  source 1..23: mol_type = other RNA
tcataggtgcaggtgcaggcctc

SEQ ID NO: 99360 - RNA, 23 nt, synthetic construct
  source 1..23: mol_type = other RNA
tcctcataggtgcaggtgcaggc

SEQ ID NO: 99361 - RNA, 23 nt, synthetic construct
  source 1..23: mol_type = other RNA
tggggactgctgtggtgctggcc

SEQ ID NO: 99362 - RNA, 23 nt, synthetic construct
  source 1..23: mol_type = other RNA
tagtgggttctgtggagcctgca

SEQ ID NO: 99363 - RNA, 23 nt, synthetic construct
  source 1..23: mol_type = other RNA
tccactctgtccactcacacttc

SEQ ID NO: 99364 - RNA, 23 nt, synthetic construct
  source 1..23: mol_type = other RNA
tggtagctgtgggtgtggtggct

SEQ ID NO: 99365 - RNA, 23 nt, synthetic construct
  source 1..23: mol_type = other RNA
ttggtagctgtgggtgtggtggc

SEQ ID NO: 99366 - RNA, 23 nt, synthetic construct
  source 1..23: mol_type = other RNA
tctgaccaggcacactggggctc

SEQ ID NO: 99367 - RNA, 23 nt, synthetic construct
  source 1..23: mol_type = other RNA
ttcttgaacttccccacctgctc

SEQ ID NO: 99368 - RNA, 23 nt, synthetic construct
  source 1..23: mol_type = other RNA
tggtagctgtgggtgtggtggct

SEQ ID NO: 99369 - RNA, 23 nt, synthetic construct
  source 1..23: mol_type = other RNA
ttggtagctgtgggtgtggtggc

SEQ ID NO: 99370 - RNA, 23 nt, synthetic construct
  source 1..23: mol_type = other RNA
tctgaccaggcacactggggctc

SEQ ID NO: 99371 - RNA, 23 nt, synthetic construct
  source 1..23: mol_type = other RNA
ttcttgaacttccccacctgctc

SEQ ID NO: 99372 - RNA, 23 nt, synthetic construct
  source 1..23: mol_type = other RNA
tggtagctgtgggtgtggtggct

SEQ ID NO: 99373 - RNA, 23 nt, synthetic construct
  source 1..23: mol_type = other RNA
ttggtagctgtgggtgtggtggc

SEQ ID NO: 99374 - RNA, 23 nt, synthetic construct
  source 1..23: mol_type = other RNA
tctgaccaggcacactggggctc

SEQ ID NO: 99375 - RNA, 23 nt, synthetic construct
  source 1..23: mol_type = other RNA
ttcttgaacttccccacctgctc

SEQ ID NO: 99376 - RNA, 23 nt, synthetic construct
  source 1..23: mol_type = other RNA
tggtagctgtgggtgtggtggct

SEQ ID NO: 99377 - RNA, 23 nt, synthetic construct
  source 1..23: mol_type = other RNA
ttggtagctgtgggtgtggtggc

SEQ ID NO: 99378 - RNA, 23 nt, synthetic construct
  source 1..23: mol_type = other RNA
tctgaccaggcacactggggctc

SEQ ID NO: 99379 - RNA, 23 nt, synthetic construct
  source 1..23: mol_type = other RNA
ttcttgaacttccccacctgctc

SEQ ID NO: 99380 - RNA, 23 nt, synthetic construct
  source 1..23: mol_type = other RNA
tggtagctgtgggtgtggtggct

SEQ ID NO: 99381 - RNA, 23 nt, synthetic construct
  source 1..23: mol_type = other RNA
ttggtagctgtgggtgtggtggc

SEQ ID NO: 99382 - RNA, 23 nt, synthetic construct
  source 1..23: mol_type = other RNA
ttccaggtctcattcacctgccg

SEQ ID NO: 99383 - RNA, 23 nt, synthetic construct
  source 1..23: mol_type = other RNA
tcagttctccagggtccaggtct

SEQ ID NO: 99384 - RNA, 23 nt, synthetic construct
  source 1..23: mol_type = other RNA
taggtgcttgttcacgcaggtga

SEQ ID NO: 99385 - RNA, 23 nt, synthetic construct
  source 1..23: mol_type = other RNA
ttctctctcatgaggacataggt

SEQ ID NO: 99386 - RNA, 23 nt, synthetic construct
  source 1..23: mol_type = other RNA
tgaatttggtcaaacaggatcag

SEQ ID NO: 99387 - RNA, 23 nt, synthetic construct
  source 1..23: mol_type = other RNA
tgaggctgtagggcagccgggcc

SEQ ID NO: 99388 - RNA, 23 nt, synthetic construct
  source 1..23: mol_type = other RNA
tagaggctgtagggcagccgggc

SEQ ID NO: 99389 - RNA, 23 nt, synthetic construct
  source 1..23: mol_type = other RNA
tccaggctctggcagggcacctc

SEQ ID NO: 99390 - RNA, 23 nt, synthetic construct
  source 1..23: mol_type = other RNA
tacacacgcaggactggcagttg

SEQ ID NO: 99391 - RNA, 23 nt, synthetic construct
  source 1..23: mol_type = other RNA
tggtgcactggtgctgcatggcc

SEQ ID NO: 99392 - RNA, 23 nt, synthetic construct
  source 1..23: mol_type = other RNA
ttgcaggctgtggggtcagcaaa

SEQ ID NO: 99393 - RNA, 23 nt, synthetic construct
  source 1..23: mol_type = other RNA
ttccagggtccaggtctcattca

SEQ ID NO: 99394 - RNA, 23 nt, synthetic construct
  source 1..23: mol_type = other RNA
ttgcacataggaggacagcgcgg

SEQ ID NO: 99395 - RNA, 23 nt, synthetic construct
  source 1..23: mol_type = other RNA
tcgtgcagaaacactcgcagtcg

SEQ ID NO: 99396 - RNA, 23 nt, synthetic construct
  source 1..23: mol_type = other RNA
tgttcccgcacaggccgcagacc

SEQ ID NO: 99397 - RNA, 23 nt, synthetic construct
  source 1..23: mol_type = other RNA
tcaggtttttaggcagggtgccc

SEQ ID NO: 99398 - RNA, 23 nt, synthetic construct
  source 1..23: mol_type = other RNA
tcccgggggacagacacagccgg

SEQ ID NO: 99399 - RNA, 23 nt, synthetic construct
  source 1..23: mol_type = other RNA
tccgtgcagaaacactcgcagtc

SEQ ID NO: 99400 - RNA, 23 nt, synthetic construct
  source 1..23: mol_type = other RNA
tacagccgtgcagaaacactcgc

SEQ ID NO: 99401 - RNA, 23 nt, synthetic construct
  source 1..23: mol_type = other RNA
taggacacacacaggcccgcgtc

SEQ ID NO: 99402 - RNA, 23 nt, synthetic construct
  source 1..23: mol_type = other RNA
tgggcggggtccagcctgacaaa

SEQ ID NO: 99403 - RNA, 23 nt, synthetic construct
  source 1..23: mol_type = other RNA
tcacacaggccgcacatctggcc

SEQ ID NO: 99404 - RNA, 23 nt, synthetic construct
  source 1..23: mol_type = other RNA
tcacagccgtgcagaaacactcg

SEQ ID NO: 99405 - RNA, 23 nt, synthetic construct
  source 1..23: mol_type = other RNA
tggcgtaggcagccacagccgtg

SEQ ID NO: 99406 - RNA, 23 nt, synthetic construct
  source 1..23: mol_type = other RNA
ttaccctctctgcctcaggtttt

SEQ ID NO: 99407 - RNA, 23 nt, synthetic construct
  source 1..23: mol_type = other RNA
taggtgccgtcaaaggtggaata

SEQ ID NO: 99408 - RNA, 23 nt, synthetic construct
  source 1..23: mol_type = other RNA
tcctggtaccctctctgcctcag

SEQ ID NO: 99409 - RNA, 23 nt, synthetic construct
  source 1..23: mol_type = other RNA
tatgggcgcagggacacagaagg

SEQ ID NO: 99410 - RNA, 23 nt, synthetic construct
  source 1..23: mol_type = other RNA
taggtgatgaagtggccatcccc

SEQ ID NO: 99411 - RNA, 23 nt, synthetic construct
  source 1..23: mol_type = other RNA
tgggaagacagtgacgggtggaa

SEQ ID NO: 99412 - RNA, 23 nt, synthetic construct
  source 1..23: mol_type = other RNA
tgtgcactggtgctgcatggcct

SEQ ID NO: 99413 - RNA, 23 nt, synthetic construct
  source 1..23: mol_type = other RNA
tagggagcaggggtcctcaaagc

SEQ ID NO: 99414 - RNA, 23 nt, synthetic construct
  source 1..23: mol_type = other RNA
tacgcagtgtgtgctgaaacagc

SEQ ID NO: 99415 - RNA, 23 nt, synthetic construct
  source 1..23: mol_type = other RNA
ttggtcttttcggttgctgtggt

SEQ ID NO: 99416 - RNA, 23 nt, synthetic construct
  source 1..23: mol_type = other RNA
tccgtgggtgcaggggcactgcc

SEQ ID NO: 99417 - RNA, 23 nt, synthetic construct
  source 1..23: mol_type = other RNA
ttttttaggcagggtgccccgca

SEQ ID NO: 99418 - RNA, 23 nt, synthetic construct
  source 1..23: mol_type = other RNA
tgttgggaagtccacgtcaaacc

SEQ ID NO: 99419 - RNA, 23 nt, synthetic construct
  source 1..23: mol_type = other RNA
tacgcgtggcaaagtcattgatg

SEQ ID NO: 99420 - RNA, 23 nt, synthetic construct
  source 1..23: mol_type = other RNA
tatccagcaccgtgcctgggggg

SEQ ID NO: 99421 - RNA, 23 nt, synthetic construct
  source 1..23: mol_type = other RNA
taccgttgggtcctgggtgtccc

SEQ ID NO: 99422 - RNA, 23 nt, synthetic construct
  source 1..23: mol_type = other RNA
tgacaggagtcctcctcacagga

SEQ ID NO: 99423 - RNA, 23 nt, synthetic construct
  source 1..23: mol_type = other RNA
ttggtaccctctctgcctcaggt

SEQ ID NO: 99424 - RNA, 23 nt, synthetic construct
  source 1..23: mol_type = other RNA
taaggcagctcctcccgctgccc

SEQ ID NO: 99425 - RNA, 23 nt, synthetic construct
  source 1..23: mol_type = other RNA
tcgtgcctggggggcagaagcag

SEQ ID NO: 99426 - RNA, 23 nt, synthetic construct
  source 1..23: mol_type = other RNA
tccgtgcctggggggcagaagca

SEQ ID NO: 99427 - RNA, 23 nt, synthetic construct
  source 1..23: mol_type = other RNA
tatggccgtgtccccgccgtcca

SEQ ID NO: 99428 - RNA, 23 nt, synthetic construct
  source 1..23: mol_type = other RNA
tctctgtgatgtgggtggtgccc

SEQ ID NO: 99429 - RNA, 23 nt, synthetic construct
  source 1..23: mol_type = other RNA
tctctgtgatgtgggtggtgccc

SEQ ID NO: 99430 - RNA, 23 nt, synthetic construct
  source 1..23: mol_type = other RNA
tctctgtgatgtgggtggtgccc

SEQ ID NO: 99431 - RNA, 23 nt, synthetic construct
  source 1..23: mol_type = other RNA
tctctgtgatgtgggtggtgccc

SEQ ID NO: 99432 - RNA, 23 nt, synthetic construct
  source 1..23: mol_type = other RNA
tgtgatgaagtggccatccccgt

SEQ ID NO: 99433 - RNA, 23 nt, synthetic construct
  source 1..23: mol_type = other RNA
tacgtcccctccaagttgttcag

SEQ ID NO: 99434 - RNA, 23 nt, synthetic construct
  source 1..23: mol_type = other RNA
tggtctggttggcgtatttggga

SEQ ID NO: 99435 - RNA, 23 nt, synthetic construct
  source 1..23: mol_type = other RNA
ttcgtcagcctggttctggttga

SEQ ID NO: 99436 - RNA, 23 nt, synthetic construct
  source 1..23: mol_type = other RNA
tcggtggctgcactcccacctcc

SEQ ID NO: 99437 - RNA, 23 nt, synthetic construct
  source 1..23: mol_type = other RNA
ttgaccacaggcctggagcccac

SEQ ID NO: 99438 - RNA, 23 nt, synthetic construct
  source 1..23: mol_type = other RNA
tcgggtgaccacaggcctggagc

SEQ ID NO: 99439 - RNA, 23 nt, synthetic construct
  source 1..23: mol_type = other RNA
taagggcagcgggtccgggcact

SEQ ID NO: 99440 - RNA, 23 nt, synthetic construct
  source 1..23: mol_type = other RNA
taaggccggccccagcagggtgc

SEQ ID NO: 99441 - RNA, 23 nt, synthetic construct
  source 1..23: mol_type = other RNA
tcactccgcaaaggccggcccca

SEQ ID NO: 99442 - RNA, 23 nt, synthetic construct
  source 1..23: mol_type = other RNA
tggtgcaggggcactgcccgagg

SEQ ID NO: 99443 - RNA, 23 nt, synthetic construct
  source 1..23: mol_type = other RNA
taggcagagccggtggctgcact

SEQ ID NO: 99444 - RNA, 23 nt, synthetic construct
  source 1..23: mol_type = other RNA
tgcagacctcgcggacacacacg

SEQ ID NO: 99445 - RNA, 23 nt, synthetic construct
  source 1..23: mol_type = other RNA
tcctcatcaaaccactctgtcca

SEQ ID NO: 99446 - RNA, 23 nt, synthetic construct
  source 1..23: mol_type = other RNA
tgtccccgccagagggccccggc

SEQ ID NO: 99447 - RNA, 23 nt, synthetic construct
  source 1..23: mol_type = other RNA
taaagctggtagctgtgggtgtg

SEQ ID NO: 99448 - RNA, 23 nt, synthetic construct
  source 1..23: mol_type = other RNA
tgtccccgccagagggccccggc

SEQ ID NO: 99449 - RNA, 23 nt, synthetic construct
  source 1..23: mol_type = other RNA
tgtccccgccagagggccccggc

SEQ ID NO: 99450 - RNA, 23 nt, synthetic construct
  source 1..23: mol_type = other RNA
taaagctggtagctgtgggtgtg

SEQ ID NO: 99451 - RNA, 23 nt, synthetic construct
  source 1..23: mol_type = other RNA
tgtccccgccagagggccccggc

SEQ ID NO: 99452 - RNA, 23 nt, synthetic construct
  source 1..23: mol_type = other RNA
taaagctggtagctgtgggtgtg

SEQ ID NO: 99453 - RNA, 23 nt, synthetic construct
  source 1..23: mol_type = other RNA
tactccccacagcactgcccggc

SEQ ID NO: 99454 - RNA, 23 nt, synthetic construct
  source 1..23: mol_type = other RNA
tagctctcggcctggcactctat

SEQ ID NO: 99455 - RNA, 23 nt, synthetic construct
  source 1..23: mol_type = other RNA
tgttgcagcagaacacacggatt

SEQ ID NO: 99456 - RNA, 23 nt, synthetic construct
  source 1..23: mol_type = other RNA
tgttgcagcagaacacacggatt

SEQ ID NO: 99457 - RNA, 23 nt, synthetic construct
  source 1..23: mol_type = other RNA
tgttgcagcagaacacacggatt

SEQ ID NO: 99458 - RNA, 23 nt, synthetic construct
  source 1..23: mol_type = other RNA
tgttgcagcagaacacacggatt

SEQ ID NO: 99459 - RNA, 23 nt, synthetic construct
  source 1..23: mol_type = other RNA
ttagtcctggtgcagtcggatga

SEQ ID NO: 99460 - RNA, 23 nt, synthetic construct
  source 1..23: mol_type = other RNA
tagtccccgccagagggccccgg

SEQ ID NO: 99461 - RNA, 23 nt, synthetic construct
  source 1..23: mol_type = other RNA
tagtccccgccagagggccccgg

SEQ ID NO: 99462 - RNA, 23 nt, synthetic construct
  source 1..23: mol_type = other RNA
tagtccccgccagagggccccgg

SEQ ID NO: 99463 - RNA, 23 nt, synthetic construct
  source 1..23: mol_type = other RNA
tagtccccgccagagggccccgg

SEQ ID NO: 99464 - RNA, 23 nt, synthetic construct
  source 1..23: mol_type = other RNA
tcactggtgctgcatggcctggg

SEQ ID NO: 99465 - RNA, 23 nt, synthetic construct
  source 1..23: mol_type = other RNA
tgctgtgagcgcactggatgcca

SEQ ID NO: 99466 - RNA, 23 nt, synthetic construct
  source 1..23: mol_type = other RNA
tgtaggccacgcaggtgcccagg

SEQ ID NO: 99467 - RNA, 23 nt, synthetic construct
  source 1..23: mol_type = other RNA
tggtgtccccagagaggcaggta

SEQ ID NO: 99468 - RNA, 23 nt, synthetic construct
  source 1..23: mol_type = other RNA
tcgtgcagccacactcatccacg

SEQ ID NO: 99469 - RNA, 23 nt, synthetic construct
  source 1..23: mol_type = other RNA
tagggcactgtcctctccgttcc

SEQ ID NO: 99470 - RNA, 23 nt, synthetic construct
  source 1..23: mol_type = other RNA
tggacatgccacagccttcctga

SEQ ID NO: 99471 - RNA, 23 nt, synthetic construct
  source 1..23: mol_type = other RNA
tgtgttgttgtggaagaggctgt

SEQ ID NO: 99472 - RNA, 23 nt, synthetic construct
  source 1..23: mol_type = other RNA
ttccaggacatgccacagccttc

SEQ ID NO: 99473 - RNA, 23 nt, synthetic construct
  source 1..23: mol_type = other RNA
tggtggctgtaccaagggtgctt

SEQ ID NO: 99474 - RNA, 23 nt, synthetic construct
  source 1..23: mol_type = other RNA
tcgtggtggtcagcactttggga

SEQ ID NO: 99475 - RNA, 23 nt, synthetic construct
  source 1..23: mol_type = other RNA
tgggtcctcaaagctgttcctgg

SEQ ID NO: 99476 - RNA, 23 nt, synthetic construct
  source 1..23: mol_type = other RNA
ttgctcccagttcctgcacacca

SEQ ID NO: 99477 - RNA, 23 nt, synthetic construct
  source 1..23: mol_type = other RNA
ttagttgcagcagaacacacgga

SEQ ID NO: 99478 - RNA, 23 nt, synthetic construct
  source 1..23: mol_type = other RNA
ttagttgcagcagaacacacgga

SEQ ID NO: 99479 - RNA, 23 nt, synthetic construct
  source 1..23: mol_type = other RNA
ttagttgcagcagaacacacgga

SEQ ID NO: 99480 - RNA, 23 nt, synthetic construct
  source 1..23: mol_type = other RNA
ttagttgcagcagaacacacgga

SEQ ID NO: 99481 - RNA, 23 nt, synthetic construct
  source 1..23: mol_type = other RNA
tggagcaggtggtgccggtggtc

SEQ ID NO: 99482 - RNA, 23 nt, synthetic construct
  source 1..23: mol_type = other RNA
ttttgatgggcaggtgcttgttc

SEQ ID NO: 99483 - RNA, 23 nt, synthetic construct
  source 1..23: mol_type = other RNA
tttggtggagtcaacctgggagc

SEQ ID NO: 99484 - RNA, 23 nt, synthetic construct
  source 1..23: mol_type = other RNA
tagagtggaggagggtgtggccg

SEQ ID NO: 99485 - RNA, 23 nt, synthetic construct
  source 1..23: mol_type = other RNA
tacttcatctggtcctcattgaa

SEQ ID NO: 99486 - RNA, 23 nt, synthetic construct
  source 1..23: mol_type = other RNA
tccccacagcactgcccggccac

SEQ ID NO: 99487 - RNA, 23 nt, synthetic construct
  source 1..23: mol_type = other RNA
tggcactgtcctctccgttccac

SEQ ID NO: 99488 - RNA, 23 nt, synthetic construct
  source 1..23: mol_type = other RNA
tcatctggtcctcattgaagaag

SEQ ID NO: 99489 - RNA, 23 nt, synthetic construct
  source 1..23: mol_type = other RNA
taccactctgtccactgacaccg

SEQ ID NO: 99490 - RNA, 23 nt, synthetic construct
  source 1..23: mol_type = other RNA
ttggccacccctgggacagtggg

SEQ ID NO: 99491 - RNA, 23 nt, synthetic construct
  source 1..23: mol_type = other RNA
tgtcacccacgcacctggccacc

SEQ ID NO: 99492 - RNA, 23 nt, synthetic construct
  source 1..23: mol_type = other RNA
tgtgcctggggggcagaagcagc

SEQ ID NO: 99493 - RNA, 23 nt, synthetic construct
  source 1..23: mol_type = other RNA
tcatccagcaccgtgcctggggg

SEQ ID NO: 99494 - RNA, 23 nt, synthetic construct
  source 1..23: mol_type = other RNA
tttctgcatgtacttggtgcaga

SEQ ID NO: 99495 - RNA, 23 nt, synthetic construct
  source 1..23: mol_type = other RNA
tcattgaagaagggctggctggg

SEQ ID NO: 99496 - RNA, 23 nt, synthetic construct
  source 1..23: mol_type = other RNA
ttcattgaagaagggctggctgg

SEQ ID NO: 99497 - RNA, 23 nt, synthetic construct
  source 1..23: mol_type = other RNA
ttgtgagcgcactggatgccact

SEQ ID NO: 99498 - RNA, 23 nt, synthetic construct
  source 1..23: mol_type = other RNA
tttgtcgtggagtgggggaccca

SEQ ID NO: 99499 - RNA, 23 nt, synthetic construct
  source 1..23: mol_type = other RNA
tacccctgggacagtgggttctg

SEQ ID NO: 99500 - RNA, 23 nt, synthetic construct
  source 1..23: mol_type = other RNA
ttgtggccacccctgggacagtg

SEQ ID NO: 99501 - RNA, 23 nt, synthetic construct
  source 1..23: mol_type = other RNA
tcaaaccactctgtccactcaca

SEQ ID NO: 99502 - RNA, 23 nt, synthetic construct
  source 1..23: mol_type = other RNA
tctggtagctgtgggtgtggtgg

SEQ ID NO: 99503 - RNA, 23 nt, synthetic construct
  source 1..23: mol_type = other RNA
tctgtgatgtgggtggtgcccaa

SEQ ID NO: 99504 - RNA, 23 nt, synthetic construct
  source 1..23: mol_type = other RNA
ttgaagcacatcttgaacttccc

SEQ ID NO: 99505 - RNA, 23 nt, synthetic construct
  source 1..23: mol_type = other RNA
tctggtagctgtgggtgtggtgg

SEQ ID NO: 99506 - RNA, 23 nt, synthetic construct
  source 1..23: mol_type = other RNA
tcactgtgggggtgtgggtggtc

SEQ ID NO: 99507 - RNA, 23 nt, synthetic construct
  source 1..23: mol_type = other RNA
tctgtgatgtgggtggtgcccaa

SEQ ID NO: 99508 - RNA, 23 nt, synthetic construct
  source 1..23: mol_type = other RNA
ttgaagcacatcttgaacttccc

SEQ ID NO: 99509 - RNA, 23 nt, synthetic construct
  source 1..23: mol_type = other RNA
tggtggctgtgcttgtcagcact

SEQ ID NO: 99510 - RNA, 23 nt, synthetic construct
  source 1..23: mol_type = other RNA
tctggtagctgtgggtgtggtgg

SEQ ID NO: 99511 - RNA, 23 nt, synthetic construct
  source 1..23: mol_type = other RNA
tctgtgatgtgggtggtgcccaa

SEQ ID NO: 99512 - RNA, 23 nt, synthetic construct
  source 1..23: mol_type = other RNA
ttgaagcacatcttgaacttccc

SEQ ID NO: 99513 - RNA, 23 nt, synthetic construct
  source 1..23: mol_type = other RNA
tctggtagctgtgggtgtggtgg

SEQ ID NO: 99514 - RNA, 23 nt, synthetic construct
  source 1..23: mol_type = other RNA
tcactgtgggggtgtgggtggtc

SEQ ID NO: 99515 - RNA, 23 nt, synthetic construct
  source 1..23: mol_type = other RNA
tctgtgatgtgggtggtgcccaa

SEQ ID NO: 99516 - RNA, 23 nt, synthetic construct
  source 1..23: mol_type = other RNA
ttgaagcacatcttgaacttccc

SEQ ID NO: 99517 - RNA, 23 nt, synthetic construct
  source 1..23: mol_type = other RNA
tggtggctgtgcttgtcagcact

SEQ ID NO: 99518 - RNA, 23 nt, synthetic construct
  source 1..23: mol_type = other RNA
tctggtagctgtgggtgtggtgg

SEQ ID NO: 99519 - RNA, 23 nt, synthetic construct
  source 1..23: mol_type = other RNA
ttggcattgtcacagccaggggc

SEQ ID NO: 99520 - RNA, 23 nt, synthetic construct
  source 1..23: mol_type = other RNA
tgatggcattgtcacagccaggg

SEQ ID NO: 99521 - RNA, 23 nt, synthetic construct
  source 1..23: mol_type = other RNA
tggatggcattgtcacagccagg

SEQ ID NO: 99522 - RNA, 23 nt, synthetic construct
  source 1..23: mol_type = other RNA
tagggatggcattgtcacagcca

SEQ ID NO: 99523 - RNA, 23 nt, synthetic construct
  source 1..23: mol_type = other RNA
ttgtaagaggtgccgtcaaaggt

SEQ ID NO: 99524 - RNA, 23 nt, synthetic construct
  source 1..23: mol_type = other RNA
tgacctggctcagcatcagatca

SEQ ID NO: 99525 - RNA, 23 nt, synthetic construct
  source 1..23: mol_type = other RNA
tagacctggctcagcatcagatc

SEQ ID NO: 99526 - RNA, 23 nt, synthetic construct
  source 1..23: mol_type = other RNA
tcaaagacctggctcagcatcag

SEQ ID NO: 99527 - RNA, 23 nt, synthetic construct
  source 1..23: mol_type = other RNA
tttgggtcctgggtgtccccaga

SEQ ID NO: 99528 - RNA, 23 nt, synthetic construct
  source 1..23: mol_type = other RNA
ttttcctgaggctccccctgcag

SEQ ID NO: 99529 - RNA, 23 nt, synthetic construct
  source 1..23: mol_type = other RNA
tgagtcaacctgggagcggcagg

SEQ ID NO: 99530 - RNA, 23 nt, synthetic construct
  source 1..23: mol_type = other RNA
tgctggcaggtggtggtacctgg

SEQ ID NO: 99531 - RNA, 23 nt, synthetic construct
  source 1..23: mol_type = other RNA
tggtgaggactgaggaggacaca

SEQ ID NO: 99532 - RNA, 23 nt, synthetic construct
  source 1..23: mol_type = other RNA
tggaagggcttggggttgatgat

SEQ ID NO: 99533 - RNA, 23 nt, synthetic construct
  source 1..23: mol_type = other RNA
tggtcagcactgtgggggtgtgg

SEQ ID NO: 99534 - RNA, 23 nt, synthetic construct
  source 1..23: mol_type = other RNA
tggtcagcactgtgggggtgtgg

SEQ ID NO: 99535 - RNA, 23 nt, synthetic construct
  source 1..23: mol_type = other RNA
tgtggaagggcttggggttgatg

SEQ ID NO: 99536 - RNA, 23 nt, synthetic construct
  source 1..23: mol_type = other RNA
tggagtccgccaggacacacaca

SEQ ID NO: 99537 - RNA, 23 nt, synthetic construct
  source 1..23: mol_type = other RNA
tcaacttctgcaggttcccaaac

SEQ ID NO: 99538 - RNA, 23 nt, synthetic construct
  source 1..23: mol_type = other RNA
taggccgcacatctggccctggt

SEQ ID NO: 99539 - RNA, 23 nt, synthetic construct
  source 1..23: mol_type = other RNA
tcattgtcacagccaggggcagg

SEQ ID NO: 99540 - RNA, 23 nt, synthetic construct
  source 1..23: mol_type = other RNA
ttggggcagcggcacaggtcctg

SEQ ID NO: 99541 - RNA, 23 nt, synthetic construct
  source 1..23: mol_type = other RNA
tcgggttcagggggctcaggctg

SEQ ID NO: 99542 - RNA, 23 nt, synthetic construct
  source 1..23: mol_type = other RNA
tgcaggtgccagggcacggcagg

SEQ ID NO: 99543 - RNA, 23 nt, synthetic construct
  source 1..23: mol_type = other RNA
tgaagggcttggggttgatgatg

SEQ ID NO: 99544 - RNA, 23 nt, synthetic construct
  source 1..23: mol_type = other RNA
tacaccagccccgggggacagac

SEQ ID NO: 99545 - RNA, 23 nt, synthetic construct
  source 1..23: mol_type = other RNA
tcagccacagccgtgcagaaaca

SEQ ID NO: 99546 - RNA, 23 nt, synthetic construct
  source 1..23: mol_type = other RNA
tggcagccacagccgtgcagaaa

SEQ ID NO: 99547 - RNA, 23 nt, synthetic construct
  source 1..23: mol_type = other RNA
tcacgcacttcatctggtcctca

SEQ ID NO: 99548 - RNA, 23 nt, synthetic construct
  source 1..23: mol_type = other RNA
tagttccaggacatgccacagcc

SEQ ID NO: 99549 - RNA, 23 nt, synthetic construct
  source 1..23: mol_type = other RNA
tcgttcttgctgaaaccgctgct

SEQ ID NO: 99550 - RNA, 23 nt, synthetic construct
  source 1..23: mol_type = other RNA
tcccagttcctgcacaccaggcc

SEQ ID NO: 99551 - RNA, 23 nt, synthetic construct
  source 1..23: mol_type = other RNA
ttgtccccagagaggcaggtaca

SEQ ID NO: 99552 - RNA, 23 nt, synthetic construct
  source 1..23: mol_type = other RNA
tgaagaggctgtagggcagccgg

SEQ ID NO: 99553 - RNA, 23 nt, synthetic construct
  source 1..23: mol_type = other RNA
ttcccagttcctgcacaccaggc

SEQ ID NO: 99554 - RNA, 23 nt, synthetic construct
  source 1..23: mol_type = other RNA
tgtggtgaggactgaggaggaca

SEQ ID NO: 99555 - RNA, 23 nt, synthetic construct
  source 1..23: mol_type = other RNA
ttggcagcaggtgcactggtgct

SEQ ID NO: 99556 - RNA, 23 nt, synthetic construct
  source 1..23: mol_type = other RNA
tgcaccagcccctgggccttgat

SEQ ID NO: 99557 - RNA, 23 nt, synthetic construct
  source 1..23: mol_type = other RNA
tccagcctgacaaacacctgcat

SEQ ID NO: 99558 - RNA, 23 nt, synthetic construct
  source 1..23: mol_type = other RNA
tccacgcaggtgcccaggcagag

SEQ ID NO: 99559 - RNA, 23 nt, synthetic construct
  source 1..23: mol_type = other RNA
tgagcttgatggccttggagcag

SEQ ID NO: 99560 - RNA, 23 nt, synthetic construct
  source 1..23: mol_type = other RNA
taggcagccacagccgtgcagaa

SEQ ID NO: 99561 - RNA, 23 nt, synthetic construct
  source 1..23: mol_type = other RNA
taccggggctggcaggtggtggt

SEQ ID NO: 99562 - RNA, 23 nt, synthetic construct
  source 1..23: mol_type = other RNA
tgggttctgtggagcctgcaggc

SEQ ID NO: 99563 - RNA, 23 nt, synthetic construct
  source 1..23: mol_type = other RNA
ttccccagagaggcaggtacaca

SEQ ID NO: 99564 - RNA, 23 nt, synthetic construct
  source 1..23: mol_type = other RNA
tctcctcacaggagtagcagcag

SEQ ID NO: 99565 - RNA, 23 nt, synthetic construct
  source 1..23: mol_type = other RNA
tggcaccgtctcctcgtggaccc

SEQ ID NO: 99566 - RNA, 23 nt, synthetic construct
  source 1..23: mol_type = other RNA
ttgaccaggcacactggggctca

SEQ ID NO: 99567 - RNA, 23 nt, synthetic construct
  source 1..23: mol_type = other RNA
tacatcttgaacttccccacctg

SEQ ID NO: 99568 - RNA, 23 nt, synthetic construct
  source 1..23: mol_type = other RNA
ttgaccaggcacactggggctca

SEQ ID NO: 99569 - RNA, 23 nt, synthetic construct
  source 1..23: mol_type = other RNA
tacatcttgaacttccccacctg

SEQ ID NO: 99570 - RNA, 23 nt, synthetic construct
  source 1..23: mol_type = other RNA
ttgaccaggcacactggggctca

SEQ ID NO: 99571 - RNA, 23 nt, synthetic construct
  source 1..23: mol_type = other RNA
tacatcttgaacttccccacctg

SEQ ID NO: 99572 - RNA, 23 nt, synthetic construct
  source 1..23: mol_type = other RNA
ttgaccaggcacactggggctca

SEQ ID NO: 99573 - RNA, 23 nt, synthetic construct
  source 1..23: mol_type = other RNA
tacatcttgaacttccccacctg

SEQ ID NO: 99574 - RNA, 23 nt, synthetic construct
  source 1..23: mol_type = other RNA
tgtcattgaggaaggtgcccgcg

SEQ ID NO: 99575 - RNA, 23 nt, synthetic construct
  source 1..23: mol_type = other RNA
tgtagatggagttgaggaacacg

SEQ ID NO: 99576 - RNA, 23 nt, synthetic construct
  source 1..23: mol_type = other RNA
tacaggccacaggtctggttggc

SEQ ID NO: 99577 - RNA, 23 nt, synthetic construct
  source 1..23: mol_type = other RNA
tctggtaccctctctgcctcagg

SEQ ID NO: 99578 - RNA, 23 nt, synthetic construct
  source 1..23: mol_type = other RNA
tgatgtggccacccctgggacag

SEQ ID NO: 99579 - RNA, 23 nt, synthetic construct
  source 1..23: mol_type = other RNA
tagggtgtgaacagggtgatgtt

SEQ ID NO: 99580 - RNA, 23 nt, synthetic construct
  source 1..23: mol_type = other RNA
tgggtgtgaacagggtgatgttg

SEQ ID NO: 99581 - RNA, 23 nt, synthetic construct
  source 1..23: mol_type = other RNA
tttcgagtggaagggcttggggt

SEQ ID NO: 99582 - RNA, 23 nt, synthetic construct
  source 1..23: mol_type = other RNA
tgttcgagtggaagggcttgggg

SEQ ID NO: 99583 - RNA, 23 nt, synthetic construct
  source 1..23: mol_type = other RNA
tacatgccacagccttcctgatg

SEQ ID NO: 99584 - RNA, 23 nt, synthetic construct
  source 1..23: mol_type = other RNA
tacaccggggctggcaggtggtg

SEQ ID NO: 99585 - RNA, 23 nt, synthetic construct
  source 1..23: mol_type = other RNA
ttgcagttacagctctggcagtt

SEQ ID NO: 99586 - RNA, 23 nt, synthetic construct
  source 1..23: mol_type = other RNA
ttgttgttgtggaagaggctgta

SEQ ID NO: 99587 - RNA, 23 nt, synthetic construct
  source 1..23: mol_type = other RNA
taggcctcaaggctgtgagcgca

SEQ ID NO: 99588 - RNA, 23 nt, synthetic construct
  source 1..23: mol_type = other RNA
tagctggtagctgtgggtgtggt

SEQ ID NO: 99589 - RNA, 23 nt, synthetic construct
  source 1..23: mol_type = other RNA
tagctggtagctgtgggtgtggt

SEQ ID NO: 99590 - RNA, 23 nt, synthetic construct
  source 1..23: mol_type = other RNA
tagctggtagctgtgggtgtggt

SEQ ID NO: 99591 - RNA, 23 nt, synthetic construct
  source 1..23: mol_type = other RNA
taccaggcagtgcccactggggt

SEQ ID NO: 99592 - RNA, 23 nt, synthetic construct
  source 1..23: mol_type = other RNA
tggtggggcagcggcacaggtcc

SEQ ID NO: 99593 - RNA, 23 nt, synthetic construct
  source 1..23: mol_type = other RNA
tcaggctccgtgctggcactgag

SEQ ID NO: 99594 - RNA, 23 nt, synthetic construct
  source 1..23: mol_type = other RNA
tctcaggctggggaagacagtga

SEQ ID NO: 99595 - RNA, 23 nt, synthetic construct
  source 1..23: mol_type = other RNA
tccgggttcagggggctcaggct

SEQ ID NO: 99596 - RNA, 23 nt, synthetic construct
  source 1..23: mol_type = other RNA
tggtgaccacaggcctggagccc

SEQ ID NO: 99597 - RNA, 23 nt, synthetic construct
  source 1..23: mol_type = other RNA
tgggtgaccacaggcctggagcc

SEQ ID NO: 99598 - RNA, 23 nt, synthetic construct
  source 1..23: mol_type = other RNA
tcagcaccgtgcctggggggcag

SEQ ID NO: 99599 - RNA, 23 nt, synthetic construct
  source 1..23: mol_type = other RNA
tcagggcacggcaggtcctggca

SEQ ID NO: 99600 - RNA, 23 nt, synthetic construct
  source 1..23: mol_type = other RNA
tcagtgtgtgctgaaacagccca

SEQ ID NO: 99601 - RNA, 23 nt, synthetic construct
  source 1..23: mol_type = other RNA
tggtcccacaggggatgttctcg

SEQ ID NO: 99602 - RNA, 23 nt, synthetic construct
  source 1..23: mol_type = other RNA
tacctgggagcggcaggcggcga

SEQ ID NO: 99603 - RNA, 23 nt, synthetic construct
  source 1..23: mol_type = other RNA
tgtccaccaggcagtgcccactg

SEQ ID NO: 99604 - RNA, 23 nt, synthetic construct
  source 1..23: mol_type = other RNA
tggtccaccaggcagtgcccact

SEQ ID NO: 99605 - RNA, 23 nt, synthetic construct
  source 1..23: mol_type = other RNA
tttccaggacatgccacagcctt

SEQ ID NO: 99606 - RNA, 23 nt, synthetic construct
  source 1..23: mol_type = other RNA
ttcctgctcccagttcctgcaca

SEQ ID NO: 99607 - RNA, 23 nt, synthetic construct
  source 1..23: mol_type = other RNA
tagggtggggactgctgtggtgc

SEQ ID NO: 99608 - RNA, 23 nt, synthetic construct
  source 1..23: mol_type = other RNA
tatgtggccacccctgggacagt

SEQ ID NO: 99609 - RNA, 23 nt, synthetic construct
  source 1..23: mol_type = other RNA
ttccctagggcagaggagggagt

SEQ ID NO: 99610 - RNA, 23 nt, synthetic construct
  source 1..23: mol_type = other RNA
ttccctagggcagaggagggagt

SEQ ID NO: 99611 - RNA, 23 nt, synthetic construct
  source 1..23: mol_type = other RNA
ttccctagggcagaggagggagt

SEQ ID NO: 99612 - RNA, 23 nt, synthetic construct
  source 1..23: mol_type = other RNA
ttccctagggcagaggagggagt

SEQ ID NO: 99613 - RNA, 23 nt, synthetic construct
  source 1..23: mol_type = other RNA
tactgaggaggacacagtggaca

SEQ ID NO: 99614 - RNA, 23 nt, synthetic construct
  source 1..23: mol_type = other RNA
tcactcatagtggaagtcacagg

SEQ ID NO: 99615 - RNA, 23 nt, synthetic construct
  source 1..23: mol_type = other RNA
tgctcagcatcagatcacagagc

SEQ ID NO: 99616 - RNA, 23 nt, synthetic construct
  source 1..23: mol_type = other RNA
tgtaggcagccacagccgtgcag

SEQ ID NO: 99617 - RNA, 23 nt, synthetic construct
  source 1..23: mol_type = other RNA
taggagtcctcctcacaggagta

SEQ ID NO: 99618 - RNA, 23 nt, synthetic construct
  source 1..23: mol_type = other RNA
tccatcaaaggtgatgaagtggc

SEQ ID NO: 99619 - RNA, 23 nt, synthetic construct
  source 1..23: mol_type = other RNA
tgagtcctcctcacaggagtagc

SEQ ID NO: 99620 - RNA, 23 nt, synthetic construct
  source 1..23: mol_type = other RNA
tcactcggccccaggggtgcccg

SEQ ID NO: 99621 - RNA, 23 nt, synthetic construct
  source 1..23: mol_type = other RNA
tgtcgtccccggagtggaggagg

SEQ ID NO: 99622 - RNA, 23 nt, synthetic construct
  source 1..23: mol_type = other RNA
tgtcgtccccggagtggaggagg

SEQ ID NO: 99623 - RNA, 23 nt, synthetic construct
  source 1..23: mol_type = other RNA
tgtcgtccccggagtggaggagg

SEQ ID NO: 99624 - RNA, 23 nt, synthetic construct
  source 1..23: mol_type = other RNA
tgtcgtccccggagtggaggagg

SEQ ID NO: 99625 - RNA, 23 nt, synthetic construct
  source 1..23: mol_type = other RNA
tggtgccggtggtcccacagggg

SEQ ID NO: 99626 - RNA, 23 nt, synthetic construct
  source 1..23: mol_type = other RNA
tctggtgggcggggtccagcctg

SEQ ID NO: 99627 - RNA, 23 nt, synthetic construct
  source 1..23: mol_type = other RNA
tataggaggacagcgcggcgcac

SEQ ID NO: 99628 - RNA, 23 nt, synthetic construct
  source 1..23: mol_type = other RNA
tccggtggctgcactcccacctc

SEQ ID NO: 99629 - RNA, 23 nt, synthetic construct
  source 1..23: mol_type = other RNA
tggttgtagaagtcacagaacaa

SEQ ID NO: 99630 - RNA, 23 nt, synthetic construct
  source 1..23: mol_type = other RNA
tgggttgtagaagtcacagaaca

SEQ ID NO: 99631 - RNA, 23 nt, synthetic construct
  source 1..23: mol_type = other RNA
tgtgtgtgctgaaacagcccacg

SEQ ID NO: 99632 - RNA, 23 nt, synthetic construct
  source 1..23: mol_type = other RNA
tccatgggcgcagggacacagaa

SEQ ID NO: 99633 - RNA, 23 nt, synthetic construct
  source 1..23: mol_type = other RNA
tgcggcacaggtcctgggcgcag

SEQ ID NO: 99634 - RNA, 23 nt, synthetic construct
  source 1..23: mol_type = other RNA
tgtgggcggggtccagcctgaca

SEQ ID NO: 99635 - RNA, 23 nt, synthetic construct
  source 1..23: mol_type = other RNA
tatcttgaacttccccacctgct

SEQ ID NO: 99636 - RNA, 23 nt, synthetic construct
  source 1..23: mol_type = other RNA
tatcttgaacttccccacctgct

SEQ ID NO: 99637 - RNA, 23 nt, synthetic construct
  source 1..23: mol_type = other RNA
tatcttgaacttccccacctgct

SEQ ID NO: 99638 - RNA, 23 nt, synthetic construct
  source 1..23: mol_type = other RNA
tatcttgaacttccccacctgct

SEQ ID NO: 99639 - RNA, 23 nt, synthetic construct
  source 1..23: mol_type = other RNA
tccagcagggcactgtcctctcc

SEQ ID NO: 99640 - RNA, 23 nt, synthetic construct
  source 1..23: mol_type = other RNA
tcaagggcagcgggtccgggcac

SEQ ID NO: 99641 - RNA, 23 nt, synthetic construct
  source 1..23: mol_type = other RNA
ttggtgggcggggtccagcctga

SEQ ID NO: 99642 - RNA, 23 nt, synthetic construct
  source 1..23: mol_type = other RNA
ttgcttttctgcagagaggctcc

SEQ ID NO: 99643 - RNA, 23 nt, synthetic construct
  source 1..23: mol_type = other RNA
tactcggccccaggggtgcccgc

SEQ ID NO: 99644 - RNA, 23 nt, synthetic construct
  source 1..23: mol_type = other RNA
tcagtgggttctgtggagcctgc

SEQ ID NO: 99645 - RNA, 23 nt, synthetic construct
  source 1..23: mol_type = other RNA
tcagaagcagggagtagagaagt

SEQ ID NO: 99646 - RNA, 23 nt, synthetic construct
  source 1..23: mol_type = other RNA
ttgtagggcagccgggcctggaa

SEQ ID NO: 99647 - RNA, 23 nt, synthetic construct
  source 1..23: mol_type = other RNA
tagtcctcctcacaggagtagca

SEQ ID NO: 99648 - RNA, 23 nt, synthetic construct
  source 1..23: mol_type = other RNA
ttgtcgtggagtgggggacccag

SEQ ID NO: 99649 - RNA, 23 nt, synthetic construct
  source 1..23: mol_type = other RNA
taaccgctgctcaccggaatttg

SEQ ID NO: 99650 - RNA, 23 nt, synthetic construct
  source 1..23: mol_type = other RNA
ttcctggaggtggccgtggtgtg

SEQ ID NO: 99651 - RNA, 23 nt, synthetic construct
  source 1..23: mol_type = other RNA
ttcctggaggtggccgtggtgtg

SEQ ID NO: 99652 - RNA, 23 nt, synthetic construct
  source 1..23: mol_type = other RNA
tccctgcccttgtagtcctggtg

SEQ ID NO: 99653 - RNA, 23 nt, synthetic construct
  source 1..23: mol_type = other RNA
tgaccacaggcctggagcccact

SEQ ID NO: 99654 - RNA, 23 nt, synthetic construct
  source 1..23: mol_type = other RNA
tccggcaggtttttaggcagggt

SEQ ID NO: 99655 - RNA, 23 nt, synthetic construct
  source 1..23: mol_type = other RNA
tagccttccaggccaggcaggtc

SEQ ID NO: 99656 - RNA, 23 nt, synthetic construct
  source 1..23: mol_type = other RNA
tccaagttgttcagacttggggt

SEQ ID NO: 99657 - RNA, 23 nt, synthetic construct
  source 1..23: mol_type = other RNA
tacagtgggttctgtggagcctg

SEQ ID NO: 99658 - RNA, 23 nt, synthetic construct
  source 1..23: mol_type = other RNA
tctggcccaactcccgcaggggg

SEQ ID NO: 99659 - RNA, 23 nt, synthetic construct
  source 1..23: mol_type = other RNA
tctggcccaactcccgcaggggg

SEQ ID NO: 99660 - RNA, 23 nt, synthetic construct
  source 1..23: mol_type = other RNA
tctggcccaactcccgcaggggg

SEQ ID NO: 99661 - RNA, 23 nt, synthetic construct
  source 1..23: mol_type = other RNA
tattgtcacagccaggggcaggg

SEQ ID NO: 99662 - RNA, 23 nt, synthetic construct
  source 1..23: mol_type = other RNA
ttcctcacaggagtagcagcagc

SEQ ID NO: 99663 - RNA, 23 nt, synthetic construct
  source 1..23: mol_type = other RNA
tttgtcacagccaggggcagggg

SEQ ID NO: 99664 - RNA, 23 nt, synthetic construct
  source 1..23: mol_type = other RNA
tacaggggatgttctcggtgacg

SEQ ID NO: 99665 - RNA, 23 nt, synthetic construct
  source 1..23: mol_type = other RNA
tggacaccaggctgggcctgggc

SEQ ID NO: 99666 - RNA, 23 nt, synthetic construct
  source 1..23: mol_type = other RNA
tggacaccaggctgggcctgggc

SEQ ID NO: 99667 - RNA, 23 nt, synthetic construct
  source 1..23: mol_type = other RNA
tggacaccaggctgggcctgggc

SEQ ID NO: 99668 - RNA, 23 nt, synthetic construct
  source 1..23: mol_type = other RNA
tggacaccaggctgggcctgggc

SEQ ID NO: 99669 - RNA, 23 nt, synthetic construct
  source 1..23: mol_type = other RNA
tccaggagccagcacggtgccgt

SEQ ID NO: 99670 - RNA, 23 nt, synthetic construct
  source 1..23: mol_type = other RNA
tggccacgcaggtgcccaggcag

SEQ ID NO: 99671 - RNA, 23 nt, synthetic construct
  source 1..23: mol_type = other RNA
ttagtgccactcacagcccccat

SEQ ID NO: 99672 - RNA, 23 nt, synthetic construct
  source 1..23: mol_type = other RNA
tgcagccttccaggccaggcagg

SEQ ID NO: 99673 - RNA, 23 nt, synthetic construct
  source 1..23: mol_type = other RNA
tacactggggctcacagcccgtg

SEQ ID NO: 99674 - RNA, 23 nt, synthetic construct
  source 1..23: mol_type = other RNA
tacactggggctcacagcccgtg

SEQ ID NO: 99675 - RNA, 23 nt, synthetic construct
  source 1..23: mol_type = other RNA
tgggatggcattgtcacagccag

SEQ ID NO: 99676 - RNA, 23 nt, synthetic construct
  source 1..23: mol_type = other RNA
tttgttgtggaagaggctgtagg

SEQ ID NO: 99677 - RNA, 23 nt, synthetic construct
  source 1..23: mol_type = other RNA
tgggtgtccccagagaggcaggt

SEQ ID NO: 99678 - RNA, 23 nt, synthetic construct
  source 1..23: mol_type = other RNA
tggcaggatgcaggctgtggggt

SEQ ID NO: 99679 - RNA, 23 nt, synthetic construct
  source 1..23: mol_type = other RNA
tgttttcctgaggctccccctgc

SEQ ID NO: 99680 - RNA, 23 nt, synthetic construct
  source 1..23: mol_type = other RNA
tcaggccgcacatctggccctgg

SEQ ID NO: 99681 - RNA, 23 nt, synthetic construct
  source 1..23: mol_type = other RNA
tagtggccatccccgtaggccac

SEQ ID NO: 99682 - RNA, 23 nt, synthetic construct
  source 1..23: mol_type = other RNA
tctcgatgaccaggaagatcccc

SEQ ID NO: 99683 - RNA, 23 nt, synthetic construct
  source 1..23: mol_type = other RNA
tggccgtggtggtcagcactttg

SEQ ID NO: 99684 - RNA, 23 nt, synthetic construct
  source 1..23: mol_type = other RNA
tgcaaaggccggccccagcaggg

SEQ ID NO: 99685 - RNA, 23 nt, synthetic construct
  source 1..23: mol_type = other RNA
tggacagacacagccggacacgc

SEQ ID NO: 99686 - RNA, 23 nt, synthetic construct
  source 1..23: mol_type = other RNA
ttgaccaggaagatccccatgta

SEQ ID NO: 99687 - RNA, 23 nt, synthetic construct
  source 1..23: mol_type = other RNA
tgcaggtggtggtacctggggcc

SEQ ID NO: 99688 - RNA, 23 nt, synthetic construct
  source 1..23: mol_type = other RNA
tgttcagggggctcaggctgggg

SEQ ID NO: 99689 - RNA, 23 nt, synthetic construct
  source 1..23: mol_type = other RNA
tacttggtggagtcaacctggga

SEQ ID NO: 99690 - RNA, 23 nt, synthetic construct
  source 1..23: mol_type = other RNA
tcggagtggaggagggcatggcc

SEQ ID NO: 99691 - RNA, 23 nt, synthetic construct
  source 1..23: mol_type = other RNA
tagcactgtgggggtgtgggtgg

SEQ ID NO: 99692 - RNA, 23 nt, synthetic construct
  source 1..23: mol_type = other RNA
tagcactgtgggggtgtgggtgg

SEQ ID NO: 99693 - RNA, 23 nt, synthetic construct
  source 1..23: mol_type = other RNA
tcggagtggaggagggcatggcc

SEQ ID NO: 99694 - RNA, 23 nt, synthetic construct
  source 1..23: mol_type = other RNA
tttccggtcccaggacacggcca

SEQ ID NO: 99695 - RNA, 23 nt, synthetic construct
  source 1..23: mol_type = other RNA
tatgggcaggtgcttgttcacgc

SEQ ID NO: 99696 - RNA, 23 nt, synthetic construct
  source 1..23: mol_type = other RNA
taggctggggaagacagtgacgg

SEQ ID NO: 99697 - RNA, 23 nt, synthetic construct
  source 1..23: mol_type = other RNA
tgggttcagggggctcaggctgg

SEQ ID NO: 99698 - RNA, 23 nt, synthetic construct
  source 1..23: mol_type = other RNA
tcagccggatgctgaccttgatg

SEQ ID NO: 99699 - RNA, 23 nt, synthetic construct
  source 1..23: mol_type = other RNA
tccagccggatgctgaccttgat

SEQ ID NO: 99700 - RNA, 23 nt, synthetic construct
  source 1..23: mol_type = other RNA
tgggtgcaggggcactgcccgag

SEQ ID NO: 99701 - RNA, 23 nt, synthetic construct
  source 1..23: mol_type = other RNA
ttgtccccgccgtccaggctgag

SEQ ID NO: 99702 - RNA, 23 nt, synthetic construct
  source 1..23: mol_type = other RNA
tcggggtccagcctgacaaacac

SEQ ID NO: 99703 - RNA, 23 nt, synthetic construct
  source 1..23: mol_type = other RNA
tcctcaaagctgttcctggcatt

SEQ ID NO: 99704 - RNA, 23 nt, synthetic construct
  source 1..23: mol_type = other RNA
ttcctcaaagctgttcctggcat

SEQ ID NO: 99705 - RNA, 23 nt, synthetic construct
  source 1..23: mol_type = other RNA
tcgtcattgaggaaggtgcccgc

SEQ ID NO: 99706 - RNA, 23 nt, synthetic construct
  source 1..23: mol_type = other RNA
tgcgtcattgaggaaggtgcccg

SEQ ID NO: 99707 - RNA, 23 nt, synthetic construct
  source 1..23: mol_type = other RNA
tgcttgatggccttggagcaggt

SEQ ID NO: 99708 - RNA, 23 nt, synthetic construct
  source 1..23: mol_type = other RNA
taagagcttgatggccttggagc

SEQ ID NO: 99709 - RNA, 23 nt, synthetic construct
  source 1..23: mol_type = other RNA
tcgggtagcagccttccaggcca

SEQ ID NO: 99710 - RNA, 23 nt, synthetic construct
  source 1..23: mol_type = other RNA
tagttacagctctggcagttctc

SEQ ID NO: 99711 - RNA, 23 nt, synthetic construct
  source 1..23: mol_type = other RNA
tggcacagcaggctccgtgctgg

SEQ ID NO: 99712 - RNA, 23 nt, synthetic construct
  source 1..23: mol_type = other RNA
tgggcctgagctggacccagtct

SEQ ID NO: 99713 - RNA, 23 nt, synthetic construct
  source 1..23: mol_type = other RNA
ttccactgacaccggggctggca

SEQ ID NO: 99714 - RNA, 23 nt, synthetic construct
  source 1..23: mol_type = other RNA
tccctccaagttgttcagacttg

SEQ ID NO: 99715 - RNA, 23 nt, synthetic construct
  source 1..23: mol_type = other RNA
tagttcctgcacaccaggccgaa

SEQ ID NO: 99716 - RNA, 23 nt, synthetic construct
  source 1..23: mol_type = other RNA
tccacccctgggacagtgggttc

SEQ ID NO: 99717 - RNA, 23 nt, synthetic construct
  source 1..23: mol_type = other RNA
tggatgtggccacccctgggaca

SEQ ID NO: 99718 - RNA, 23 nt, synthetic construct
  source 1..23: mol_type = other RNA
tgctctggaggttgccattgttg

SEQ ID NO: 99719 - RNA, 23 nt, synthetic construct
  source 1..23: mol_type = other RNA
ttggtcctggaggtggccgtggt

SEQ ID NO: 99720 - RNA, 23 nt, synthetic construct
  source 1..23: mol_type = other RNA
taggcacactggggctcacagcc

SEQ ID NO: 99721 - RNA, 23 nt, synthetic construct
  source 1..23: mol_type = other RNA
ttccccggagtggaggagggcat

SEQ ID NO: 99722 - RNA, 23 nt, synthetic construct
  source 1..23: mol_type = other RNA
taggcacactggggctcacagcc

SEQ ID NO: 99723 - RNA, 23 nt, synthetic construct
  source 1..23: mol_type = other RNA
taggcacactggggctcacagcc

SEQ ID NO: 99724 - RNA, 23 nt, synthetic construct
  source 1..23: mol_type = other RNA
ttggtcctggaggtggccgtggt

SEQ ID NO: 99725 - RNA, 23 nt, synthetic construct
  source 1..23: mol_type = other RNA
taggcacactggggctcacagcc

SEQ ID NO: 99726 - RNA, 23 nt, synthetic construct
  source 1..23: mol_type = other RNA
ttccccggagtggaggagggcat

SEQ ID NO: 99727 - RNA, 23 nt, synthetic construct
  source 1..23: mol_type = other RNA
tagaagtgggagctggggaagcc

SEQ ID NO: 99728 - RNA, 23 nt, synthetic construct
  source 1..23: mol_type = other RNA
ttagagaagtgggagctggggaa

SEQ ID NO: 99729 - RNA, 23 nt, synthetic construct
  source 1..23: mol_type = other RNA
taaatgccctgcagaagcaggga

SEQ ID NO: 99730 - RNA, 23 nt, synthetic construct
  source 1..23: mol_type = other RNA
tttgtggaagaggctgtagggca

SEQ ID NO: 99731 - RNA, 23 nt, synthetic construct
  source 1..23: mol_type = other RNA
tcgccagtcactgcacactcccc

SEQ ID NO: 99732 - RNA, 23 nt, synthetic construct
  source 1..23: mol_type = other RNA
ttgggtcctgggtgtccccagag

SEQ ID NO: 99733 - RNA, 23 nt, synthetic construct
  source 1..23: mol_type = other RNA
tcctcacaggagtagcagcagcc

SEQ ID NO: 99734 - RNA, 23 nt, synthetic construct
  source 1..23: mol_type = other RNA
ttgcatggcctgggcctctgctg

SEQ ID NO: 99735 - RNA, 23 nt, synthetic construct
  source 1..23: mol_type = other RNA
ttccccgccgtccaggctgagcg

SEQ ID NO: 99736 - RNA, 23 nt, synthetic construct
  source 1..23: mol_type = other RNA
tgtgccccgcagggctggtagtg

SEQ ID NO: 99737 - RNA, 23 nt, synthetic construct
  source 1..23: mol_type = other RNA
tgtgtccccgccgtccaggctga

SEQ ID NO: 99738 - RNA, 23 nt, synthetic construct
  source 1..23: mol_type = other RNA
tggcaggtccaccaggcagtgcc

SEQ ID NO: 99739 - RNA, 23 nt, synthetic construct
  source 1..23: mol_type = other RNA
taaaccactctgtccactgacac

SEQ ID NO: 99740 - RNA, 23 nt, synthetic construct
  source 1..23: mol_type = other RNA
tagttgaagcacatcttgaactt

SEQ ID NO: 99741 - RNA, 23 nt, synthetic construct
  source 1..23: mol_type = other RNA
tagttgaagcacatcttgaactt

SEQ ID NO: 99742 - RNA, 23 nt, synthetic construct
  source 1..23: mol_type = other RNA
tagttgaagcacatcttgaactt

SEQ ID NO: 99743 - RNA, 23 nt, synthetic construct
  source 1..23: mol_type = other RNA
tagttgaagcacatcttgaactt

SEQ ID NO: 99744 - RNA, 23 nt, synthetic construct
  source 1..23: mol_type = other RNA
tagctccagcagggcactgtcct

SEQ ID NO: 99745 - RNA, 23 nt, synthetic construct
  source 1..23: mol_type = other RNA
tgcaggttcccaaactggagcgg

SEQ ID NO: 99746 - RNA, 23 nt, synthetic construct
  source 1..23: mol_type = other RNA
tcagcggcacaggtcctgggcgc

SEQ ID NO: 99747 - RNA, 23 nt, synthetic construct
  source 1..23: mol_type = other RNA
tgtgcacataggaggacagcgcg

SEQ ID NO: 99748 - RNA, 23 nt, synthetic construct
  source 1..23: mol_type = other RNA
tggacacgcagtgtgtgctgaaa

SEQ ID NO: 99749 - RNA, 23 nt, synthetic construct
  source 1..23: mol_type = other RNA
ttgcaggcctcaaggctgtgagc

SEQ ID NO: 99750 - RNA, 23 nt, synthetic construct
  source 1..23: mol_type = other RNA
tcagggggacaccaggctgggcc

SEQ ID NO: 99751 - RNA, 23 nt, synthetic construct
  source 1..23: mol_type = other RNA
tcagggggacaccaggctgggcc

SEQ ID NO: 99752 - RNA, 23 nt, synthetic construct
  source 1..23: mol_type = other RNA
tcagggggacaccaggctgggcc

SEQ ID NO: 99753 - RNA, 23 nt, synthetic construct
  source 1..23: mol_type = other RNA
tgtggtcctggaggtggccgtgg

SEQ ID NO: 99754 - RNA, 23 nt, synthetic construct
  source 1..23: mol_type = other RNA
tcaggccacaggtctggttggcg

SEQ ID NO: 99755 - RNA, 23 nt, synthetic construct
  source 1..23: mol_type = other RNA
tcgggcaggtggggcagcggcac

SEQ ID NO: 99756 - RNA, 23 nt, synthetic construct
  source 1..23: mol_type = other RNA
tggtggccgtggtggtcagcact

SEQ ID NO: 99757 - RNA, 23 nt, synthetic construct
  source 1..23: mol_type = other RNA
tcccgccgtccaggctgagcgtc

SEQ ID NO: 99758 - RNA, 23 nt, synthetic construct
  source 1..23: mol_type = other RNA
taagcagggagtagagaagtggg

SEQ ID NO: 99759 - RNA, 23 nt, synthetic construct
  source 1..23: mol_type = other RNA
tacttctgcaggttcccaaactg

SEQ ID NO: 99760 - RNA, 23 nt, synthetic construct
  source 1..23: mol_type = other RNA
tgcacaggtcctgggcgcaggcg

SEQ ID NO: 99761 - RNA, 23 nt, synthetic construct
  source 1..23: mol_type = other RNA
tgtccccgccgtccaggctgagc

SEQ ID NO: 99762 - RNA, 23 nt, synthetic construct
  source 1..23: mol_type = other RNA
tggtcctcaaagctgttcctggc

SEQ ID NO: 99763 - RNA, 23 nt, synthetic construct
  source 1..23: mol_type = other RNA
tgtgcttttctgcagagaggctc

SEQ ID NO: 99764 - RNA, 23 nt, synthetic construct
  source 1..23: mol_type = other RNA
tggctgcactcccacctccggtt

SEQ ID NO: 99765 - RNA, 23 nt, synthetic construct
  source 1..23: mol_type = other RNA
tcaggacatgccacagccttcct

SEQ ID NO: 99766 - RNA, 23 nt, synthetic construct
  source 1..23: mol_type = other RNA
tcttggggtagtcctcatcaaac

SEQ ID NO: 99767 - RNA, 23 nt, synthetic construct
  source 1..23: mol_type = other RNA
tagctctggaggttgccattgtt

SEQ ID NO: 99768 - RNA, 23 nt, synthetic construct
  source 1..23: mol_type = other RNA
tagaggagggtgttgccatagaa

SEQ ID NO: 99769 - RNA, 23 nt, synthetic construct
  source 1..23: mol_type = other RNA
tggtcctggaggtggccgtggtg

SEQ ID NO: 99770 - RNA, 23 nt, synthetic construct
  source 1..23: mol_type = other RNA
tagaggagggtgttgccatagaa

SEQ ID NO: 99771 - RNA, 23 nt, synthetic construct
  source 1..23: mol_type = other RNA
tagaggagggtgttgccatagaa

SEQ ID NO: 99772 - RNA, 23 nt, synthetic construct
  source 1..23: mol_type = other RNA
tagaggagggtgttgccatagaa

SEQ ID NO: 99773 - RNA, 23 nt, synthetic construct
  source 1..23: mol_type = other RNA
tggtcctggaggtggccgtggtg

SEQ ID NO: 99774 - RNA, 23 nt, synthetic construct
  source 1..23: mol_type = other RNA
tagaggagggtgttgccatagaa

SEQ ID NO: 99775 - RNA, 23 nt, synthetic construct
  source 1..23: mol_type = other RNA
tttcctgcacaccaggccgaagt

SEQ ID NO: 99776 - RNA, 23 nt, synthetic construct
  source 1..23: mol_type = other RNA
taaccactctgtccactcacact

SEQ ID NO: 99777 - RNA, 23 nt, synthetic construct
  source 1..23: mol_type = other RNA
tctggtcctcattgaagaagggc

SEQ ID NO: 99778 - RNA, 23 nt, synthetic construct
  source 1..23: mol_type = other RNA
tgttggctgccgacaggggcagc

SEQ ID NO: 99779 - RNA, 23 nt, synthetic construct
  source 1..23: mol_type = other RNA
tacacaggccgcacatctggccc

SEQ ID NO: 99780 - RNA, 23 nt, synthetic construct
  source 1..23: mol_type = other RNA
tttgctgaaaccgctgctcaccg

SEQ ID NO: 99781 - RNA, 23 nt, synthetic construct
  source 1..23: mol_type = other RNA
tacgcaggactggcagttgctga

SEQ ID NO: 99782 - RNA, 23 nt, synthetic construct
  source 1..23: mol_type = other RNA
tgggctcaggctggggaagacag

SEQ ID NO: 99783 - RNA, 23 nt, synthetic construct
  source 1..23: mol_type = other RNA
tcaggtgcaggagctgcaggtgg

SEQ ID NO: 99784 - RNA, 23 nt, synthetic construct
  source 1..23: mol_type = other RNA
tccccgccgtccaggctgagcgt

SEQ ID NO: 99785 - RNA, 23 nt, synthetic construct
  source 1..23: mol_type = other RNA
tccgacaggggcagctgcgtgta

SEQ ID NO: 99786 - RNA, 23 nt, synthetic construct
  source 1..23: mol_type = other RNA
ttgggccttccaggtgttggcga

SEQ ID NO: 99787 - RNA, 23 nt, synthetic construct
  source 1..23: mol_type = other RNA
tgcgtagttctcattctccacac

SEQ ID NO: 99788 - RNA, 23 nt, synthetic construct
  source 1..23: mol_type = other RNA
tacaccctgtgcttttctgcaga

SEQ ID NO: 99789 - RNA, 23 nt, synthetic construct
  source 1..23: mol_type = other RNA
tggcagagccggtggctgcactc

SEQ ID NO: 99790 - RNA, 23 nt, synthetic construct
  source 1..23: mol_type = other RNA
tcctgggagcggcaggcggcgaa

SEQ ID NO: 99791 - RNA, 23 nt, synthetic construct
  source 1..23: mol_type = other RNA
tgctcccagttcctgcacaccag

SEQ ID NO: 99792 - RNA, 23 nt, synthetic construct
  source 1..23: mol_type = other RNA
ttggaggagggggtggctgtgaa

SEQ ID NO: 99793 - RNA, 23 nt, synthetic construct
  source 1..23: mol_type = other RNA
ttggaggagggggtggctgtgaa

SEQ ID NO: 99794 - RNA, 23 nt, synthetic construct
  source 1..23: mol_type = other RNA
ttggagtggaggagggcgtggcc

SEQ ID NO: 99795 - RNA, 23 nt, synthetic construct
  source 1..23: mol_type = other RNA
tccctggagtggaggagggcgtg

SEQ ID NO: 99796 - RNA, 23 nt, synthetic construct
  source 1..23: mol_type = other RNA
ttggaggagggggtggctgtgaa

SEQ ID NO: 99797 - RNA, 23 nt, synthetic construct
  source 1..23: mol_type = other RNA
tatgggagttgtccctggagttg

SEQ ID NO: 99798 - RNA, 23 nt, synthetic construct
  source 1..23: mol_type = other RNA
ttggaggagggggtggctgtgaa

SEQ ID NO: 99799 - RNA, 23 nt, synthetic construct
  source 1..23: mol_type = other RNA
tccagagtggaggagggtgtggc

SEQ ID NO: 99800 - RNA, 23 nt, synthetic construct
  source 1..23: mol_type = other RNA
ttgcagaagcagggagtagagaa

SEQ ID NO: 99801 - RNA, 23 nt, synthetic construct
  source 1..23: mol_type = other RNA
ttgttgtggaagaggctgtaggg

SEQ ID NO: 99802 - RNA, 23 nt, synthetic construct
  source 1..23: mol_type = other RNA
tgggggcagaagcagccgtccac

SEQ ID NO: 99803 - RNA, 23 nt, synthetic construct
  source 1..23: mol_type = other RNA
taggggcaggcagccagagtgcg

SEQ ID NO: 99804 - RNA, 23 nt, synthetic construct
  source 1..23: mol_type = other RNA
ttcaggcagttctcgttgtccgt

SEQ ID NO: 99805 - RNA, 23 nt, synthetic construct
  source 1..23: mol_type = other RNA
tgtgtagatggagttgaggaaca

SEQ ID NO: 99806 - RNA, 23 nt, synthetic construct
  source 1..23: mol_type = other RNA
tcgacaggggcagctgcgtgtag

SEQ ID NO: 99807 - RNA, 23 nt, synthetic construct
  source 1..23: mol_type = other RNA
ttggctgccgacaggggcagctg

SEQ ID NO: 99808 - RNA, 23 nt, synthetic construct
  source 1..23: mol_type = other RNA
tgggtgatgttggctgccgacag

SEQ ID NO: 99809 - RNA, 23 nt, synthetic construct
  source 1..23: mol_type = other RNA
tccttccaggtgttggcgaaggc

SEQ ID NO: 99810 - RNA, 23 nt, synthetic construct
  source 1..23: mol_type = other RNA
tgggcaggtgcagccgtccacag

SEQ ID NO: 99811 - RNA, 23 nt, synthetic construct
  source 1..23: mol_type = other RNA
tcaggagccagcacggtgccgtg

SEQ ID NO: 99812 - RNA, 23 nt, synthetic construct
  source 1..23: mol_type = other RNA
ttcggccccaggggtgcccgccg

SEQ ID NO: 99813 - RNA, 23 nt, synthetic construct
  source 1..23: mol_type = other RNA
tgggacagacacagccggacacg

SEQ ID NO: 99814 - RNA, 23 nt, synthetic construct
  source 1..23: mol_type = other RNA
tagcaggtggtgccggtggtccc

SEQ ID NO: 99815 - RNA, 23 nt, synthetic construct
  source 1..23: mol_type = other RNA
tatgaccaggaagatccccatgt

SEQ ID NO: 99816 - RNA, 23 nt, synthetic construct
  source 1..23: mol_type = other RNA
tgcagggtgccccgcagggctgg

SEQ ID NO: 99817 - RNA, 23 nt, synthetic construct
  source 1..23: mol_type = other RNA
tcaccaggcagtgcccactgggg

SEQ ID NO: 99818 - RNA, 23 nt, synthetic construct
  source 1..23: mol_type = other RNA
tcaggccaggcaggtccaccagg

SEQ ID NO: 99819 - RNA, 23 nt, synthetic construct
  source 1..23: mol_type = other RNA
tccttccaggccaggcaggtcca

SEQ ID NO: 99820 - RNA, 23 nt, synthetic construct
  source 1..23: mol_type = other RNA
tcgcacttcatctggtcctcatt

SEQ ID NO: 99821 - RNA, 23 nt, synthetic construct
  source 1..23: mol_type = other RNA
tttggggaagctctcggcctggc

SEQ ID NO: 99822 - RNA, 23 nt, synthetic construct
  source 1..23: mol_type = other RNA
tgtggggactgctgtggtgctgg

SEQ ID NO: 99823 - RNA, 23 nt, synthetic construct
  source 1..23: mol_type = other RNA
tcctgggacagtgggttctgtgg

SEQ ID NO: 99824 - RNA, 23 nt, synthetic construct
  source 1..23: mol_type = other RNA
ttggtggccgtggtggtcagcac

SEQ ID NO: 99825 - RNA, 23 nt, synthetic construct
  source 1..23: mol_type = other RNA
ttgggtgtggtggctgtgcttct

SEQ ID NO: 99826 - RNA, 23 nt, synthetic construct
  source 1..23: mol_type = other RNA
taggggctgctcacagacggccc

SEQ ID NO: 99827 - RNA, 23 nt, synthetic construct
  source 1..23: mol_type = other RNA
tggcccaggggctgctcacagac

SEQ ID NO: 99828 - RNA, 23 nt, synthetic construct
  source 1..23: mol_type = other RNA
tcatcttgaacttccccacctgc

SEQ ID NO: 99829 - RNA, 23 nt, synthetic construct
  source 1..23: mol_type = other RNA
ttgggtgtggtggctgtgcttct

SEQ ID NO: 99830 - RNA, 23 nt, synthetic construct
  source 1..23: mol_type = other RNA
ttggccgtggtcctggaggtggc

SEQ ID NO: 99831 - RNA, 23 nt, synthetic construct
  source 1..23: mol_type = other RNA
taggggctgctcacagacggccc

SEQ ID NO: 99832 - RNA, 23 nt, synthetic construct
  source 1..23: mol_type = other RNA
tggcccaggggctgctcacagac

SEQ ID NO: 99833 - RNA, 23 nt, synthetic construct
  source 1..23: mol_type = other RNA
tcatcttgaacttccccacctgc

SEQ ID NO: 99834 - RNA, 23 nt, synthetic construct
  source 1..23: mol_type = other RNA
ttgggtgtggtggctgtgcttct

SEQ ID NO: 99835 - RNA, 23 nt, synthetic construct
  source 1..23: mol_type = other RNA
tggcccaggggctgctcacagac

SEQ ID NO: 99836 - RNA, 23 nt, synthetic construct
  source 1..23: mol_type = other RNA
tcatcttgaacttccccacctgc

SEQ ID NO: 99837 - RNA, 23 nt, synthetic construct
  source 1..23: mol_type = other RNA
ttgggtgtggtggctgtgcttct

SEQ ID NO: 99838 - RNA, 23 nt, synthetic construct
  source 1..23: mol_type = other RNA
ttggccgtggtcctggaggtggc

SEQ ID NO: 99839 - RNA, 23 nt, synthetic construct
  source 1..23: mol_type = other RNA
taggggctgctcacagacggccc

SEQ ID NO: 99840 - RNA, 23 nt, synthetic construct
  source 1..23: mol_type = other RNA
tggcccaggggctgctcacagac

SEQ ID NO: 99841 - RNA, 23 nt, synthetic construct
  source 1..23: mol_type = other RNA
tcatcttgaacttccccacctgc

SEQ ID NO: 99842 - RNA, 23 nt, synthetic construct
  source 1..23: mol_type = other RNA
ttgggtgtggtggctgtgcttct

SEQ ID NO: 99843 - RNA, 23 nt, synthetic construct
  source 1..23: mol_type = other RNA
tcccagagtggaggagggtgtgg

SEQ ID NO: 99844 - RNA, 23 nt, synthetic construct
  source 1..23: mol_type = other RNA
tcctgcagaagcagggagtagag

SEQ ID NO: 99845 - RNA, 23 nt, synthetic construct
  source 1..23: mol_type = other RNA
ttgtggaagaggctgtagggcag

SEQ ID NO: 99846 - RNA, 23 nt, synthetic construct
  source 1..23: mol_type = other RNA
tcaggtgcactggtgctgcatgg

SEQ ID NO: 99847 - RNA, 23 nt, synthetic construct
  source 1..23: mol_type = other RNA
tggagccatgggcgcagggacac

SEQ ID NO: 99848 - RNA, 23 nt, synthetic construct
  source 1..23: mol_type = other RNA
tcgggcactgctccgtgggccca

SEQ ID NO: 99849 - RNA, 23 nt, synthetic construct
  source 1..23: mol_type = other RNA
tgtgccagggcacggcaggtcct

SEQ ID NO: 99850 - RNA, 23 nt, synthetic construct
  source 1..23: mol_type = other RNA
ttctggttgaagttcccacacag

SEQ ID NO: 99851 - RNA, 23 nt, synthetic construct
  source 1..23: mol_type = other RNA
tcggccccaggggtgcccgccga

SEQ ID NO: 99852 - RNA, 23 nt, synthetic construct
  source 1..23: mol_type = other RNA
tggtgcaggtgttgcagtcgacc

SEQ ID NO: 99853 - RNA, 23 nt, synthetic construct
  source 1..23: mol_type = other RNA
ttggagcaggtggtgccggtggt

SEQ ID NO: 99854 - RNA, 23 nt, synthetic construct
  source 1..23: mol_type = other RNA
tcccaggacacggccatcccgtg

SEQ ID NO: 99855 - RNA, 23 nt, synthetic construct
  source 1..23: mol_type = other RNA
tcaggcagtgcccactggggttc

SEQ ID NO: 99856 - RNA, 23 nt, synthetic construct
  source 1..23: mol_type = other RNA
tgttgaagcacatcttgaacttc

SEQ ID NO: 99857 - RNA, 23 nt, synthetic construct
  source 1..23: mol_type = other RNA
tcagcactgtgggggtgtgggtg

SEQ ID NO: 99858 - RNA, 23 nt, synthetic construct
  source 1..23: mol_type = other RNA
tgttgaagcacatcttgaacttc

SEQ ID NO: 99859 - RNA, 23 nt, synthetic construct
  source 1..23: mol_type = other RNA
tgttgaagcacatcttgaacttc

SEQ ID NO: 99860 - RNA, 23 nt, synthetic construct
  source 1..23: mol_type = other RNA
tcagcactgtgggggtgtgggtg

SEQ ID NO: 99861 - RNA, 23 nt, synthetic construct
  source 1..23: mol_type = other RNA
tgttgaagcacatcttgaacttc

SEQ ID NO: 99862 - RNA, 23 nt, synthetic construct
  source 1..23: mol_type = other RNA
tggtgttgttgtggaagaggctg

SEQ ID NO: 99863 - RNA, 23 nt, synthetic construct
  source 1..23: mol_type = other RNA
ttcagggggctcaggctggggaa

SEQ ID NO: 99864 - RNA, 23 nt, synthetic construct
  source 1..23: mol_type = other RNA
tcactgtcctctccgttccacag

SEQ ID NO: 99865 - RNA, 23 nt, synthetic construct
  source 1..23: mol_type = other RNA
tgtgcaggtgttgcagtcgaccc

SEQ ID NO: 99866 - RNA, 23 nt, synthetic construct
  source 1..23: mol_type = other RNA
tcaggtggtgccggtggtcccac

SEQ ID NO: 99867 - RNA, 23 nt, synthetic construct
  source 1..23: mol_type = other RNA
tccgtgctggcactgagggaggg

SEQ ID NO: 99868 - RNA, 23 nt, synthetic construct
  source 1..23: mol_type = other RNA
ttgggaagtccacgtcaaaccac

SEQ ID NO: 99869 - RNA, 23 nt, synthetic construct
  source 1..23: mol_type = other RNA
tgtggaagaggctgtagggcagc

SEQ ID NO: 99870 - RNA, 23 nt, synthetic construct
  source 1..23: mol_type = other RNA
tgtccccagagaggcaggtacac

SEQ ID NO: 99871 - RNA, 23 nt, synthetic construct
  source 1..23: mol_type = other RNA
tcggcacaggtcctgggcgcagg

SEQ ID NO: 99872 - RNA, 23 nt, synthetic construct
  source 1..23: mol_type = other RNA
tgtggggcagcggcacaggtcct

SEQ ID NO: 99873 - RNA, 23 nt, synthetic construct
  source 1..23: mol_type = other RNA
tggccctggtgggcggggtccag

SEQ ID NO: 99874 - RNA, 23 nt, synthetic construct
  source 1..23: mol_type = other RNA
tgaaacagcccacgtccagcgtg

SEQ ID NO: 99875 - RNA, 23 nt, synthetic construct
  source 1..23: mol_type = other RNA
tgccatcaaaggtgatgaagtgg

SEQ ID NO: 99876 - RNA, 23 nt, synthetic construct
  source 1..23: mol_type = other RNA
tcgaagagcttgatggccttgga

SEQ ID NO: 99877 - RNA, 23 nt, synthetic construct
  source 1..23: mol_type = other RNA
tgcccttgtagtcctggtgcagt

SEQ ID NO: 99878 - RNA, 23 nt, synthetic construct
  source 1..23: mol_type = other RNA
tcaggtccaccaggcagtgccca

SEQ ID NO: 99879 - RNA, 23 nt, synthetic construct
  source 1..23: mol_type = other RNA
tgccaggcaggtccaccaggcag

SEQ ID NO: 99880 - RNA, 23 nt, synthetic construct
  source 1..23: mol_type = other RNA
taggccaggcaggtccaccaggc

SEQ ID NO: 99881 - RNA, 23 nt, synthetic construct
  source 1..23: mol_type = other RNA
tagctggaccagcggcagacctc

SEQ ID NO: 99882 - RNA, 23 nt, synthetic construct
  source 1..23: mol_type = other RNA
tccagctggaccagcggcagacc

SEQ ID NO: 99883 - RNA, 23 nt, synthetic construct
  source 1..23: mol_type = other RNA
tgggctggaggagggggtggctg

SEQ ID NO: 99884 - RNA, 23 nt, synthetic construct
  source 1..23: mol_type = other RNA
ttggtccctagggcagaggaggg

SEQ ID NO: 99885 - RNA, 23 nt, synthetic construct
  source 1..23: mol_type = other RNA
tgggctggaggagggggtggctg

SEQ ID NO: 99886 - RNA, 23 nt, synthetic construct
  source 1..23: mol_type = other RNA
ttggtccctagggcagaggaggg

SEQ ID NO: 99887 - RNA, 23 nt, synthetic construct
  source 1..23: mol_type = other RNA
tgggctggaggagggggtggctg

SEQ ID NO: 99888 - RNA, 23 nt, synthetic construct
  source 1..23: mol_type = other RNA
ttggtccctagggcagaggaggg

SEQ ID NO: 99889 - RNA, 23 nt, synthetic construct
  source 1..23: mol_type = other RNA
ttggtccctagggcagaggaggg

SEQ ID NO: 99890 - RNA, 23 nt, synthetic construct
  source 1..23: mol_type = other RNA
tgggctggaggagggggtggctg

SEQ ID NO: 99891 - RNA, 23 nt, synthetic construct
  source 1..23: mol_type = other RNA
tagaagcagggagtagagaagtg

SEQ ID NO: 99892 - RNA, 23 nt, synthetic construct
  source 1..23: mol_type = other RNA
tgcagaagcagggagtagagaag

SEQ ID NO: 99893 - RNA, 23 nt, synthetic construct
  source 1..23: mol_type = other RNA
tttctccagggtccaggtctcat

SEQ ID NO: 99894 - RNA, 23 nt, synthetic construct
  source 1..23: mol_type = other RNA
tggtgctgcatggcctgggcctc

SEQ ID NO: 99895 - RNA, 23 nt, synthetic construct
  source 1..23: mol_type = other RNA
ttggtgctgcatggcctgggcct

SEQ ID NO: 99896 - RNA, 23 nt, synthetic construct
  source 1..23: mol_type = other RNA
tagcaggtgcactggtgctgcat

SEQ ID NO: 99897 - RNA, 23 nt, synthetic construct
  source 1..23: mol_type = other RNA
tctggggaagacagtgacgggtg

SEQ ID NO: 99898 - RNA, 23 nt, synthetic construct
  source 1..23: mol_type = other RNA
tggctggggaagacagtgacggg

SEQ ID NO: 99899 - RNA, 23 nt, synthetic construct
  source 1..23: mol_type = other RNA
tcaggctggggaagacagtgacg

SEQ ID NO: 99900 - RNA, 23 nt, synthetic construct
  source 1..23: mol_type = other RNA
tggggctcaggctggggaagaca

SEQ ID NO: 99901 - RNA, 23 nt, synthetic construct
  source 1..23: mol_type = other RNA
tttcagggggctcaggctgggga

SEQ ID NO: 99902 - RNA, 23 nt, synthetic construct
  source 1..23: mol_type = other RNA
taccacaggcctggagcccacta

SEQ ID NO: 99903 - RNA, 23 nt, synthetic construct
  source 1..23: mol_type = other RNA
tgtgaccacaggcctggagccca

SEQ ID NO: 99904 - RNA, 23 nt, synthetic construct
  source 1..23: mol_type = other RNA
tgcccctgggccttgatgacaac

SEQ ID NO: 99905 - RNA, 23 nt, synthetic construct
  source 1..23: mol_type = other RNA
tagcccctgggccttgatgacaa

SEQ ID NO: 99906 - RNA, 23 nt, synthetic construct
  source 1..23: mol_type = other RNA
tcagcccctgggccttgatgaca

SEQ ID NO: 99907 - RNA, 23 nt, synthetic construct
  source 1..23: mol_type = other RNA
tggcagctcctcccgctgcccat

SEQ ID NO: 99908 - RNA, 23 nt, synthetic construct
  source 1..23: mol_type = other RNA
taggcagctcctcccgctgccca

SEQ ID NO: 99909 - RNA, 23 nt, synthetic construct
  source 1..23: mol_type = other RNA
tctccagcagggcactgtcctct

SEQ ID NO: 99910 - RNA, 23 nt, synthetic construct
  source 1..23: mol_type = other RNA
tgggcaggtggggcagcggcaca

SEQ ID NO: 99911 - RNA, 23 nt, synthetic construct
  source 1..23: mol_type = other RNA
tacgggcaggtggggcagcggca

SEQ ID NO: 99912 - RNA, 23 nt, synthetic construct
  source 1..23: mol_type = other RNA
ttgggggttggagcaggtgtccg

SEQ ID NO: 99913 - RNA, 23 nt, synthetic construct
  source 1..23: mol_type = other RNA
tctgggggttggagcaggtgtcc

SEQ ID NO: 99914 - RNA, 23 nt, synthetic construct
  source 1..23: mol_type = other RNA
tgctgggggttggagcaggtgtc

SEQ ID NO: 99915 - RNA, 23 nt, synthetic construct
  source 1..23: mol_type = other RNA
tgcgctgggggttggagcaggtg

SEQ ID NO: 99916 - RNA, 23 nt, synthetic construct
  source 1..23: mol_type = other RNA
tgcctggggggcagaagcagccg

SEQ ID NO: 99917 - RNA, 23 nt, synthetic construct
  source 1..23: mol_type = other RNA
tgggcaggcagccagagtgcgtg

SEQ ID NO: 99918 - RNA, 23 nt, synthetic construct
  source 1..23: mol_type = other RNA
tggggcaggcagccagagtgcgt

SEQ ID NO: 99919 - RNA, 23 nt, synthetic construct
  source 1..23: mol_type = other RNA
tctgcccgaggggcaggcagcca

SEQ ID NO: 99920 - RNA, 23 nt, synthetic construct
  source 1..23: mol_type = other RNA
tcactgcccgaggggcaggcagc

SEQ ID NO: 99921 - RNA, 23 nt, synthetic construct
  source 1..23: mol_type = other RNA
tgggcactgcccgaggggcaggc

SEQ ID NO: 99922 - RNA, 23 nt, synthetic construct
  source 1..23: mol_type = other RNA
taggggcactgcccgaggggcag

SEQ ID NO: 99923 - RNA, 23 nt, synthetic construct
  source 1..23: mol_type = other RNA
tggagctgcaggtggtgttgaag

SEQ ID NO: 99924 - RNA, 23 nt, synthetic construct
  source 1..23: mol_type = other RNA
tggtgcaggagctgcaggtggtg

SEQ ID NO: 99925 - RNA, 23 nt, synthetic construct
  source 1..23: mol_type = other RNA
taggtgcaggagctgcaggtggt

SEQ ID NO: 99926 - RNA, 23 nt, synthetic construct
  source 1..23: mol_type = other RNA
tcggcaggtcctggcactgccat

SEQ ID NO: 99927 - RNA, 23 nt, synthetic construct
  source 1..23: mol_type = other RNA
tatgtgggccccgccctgcacag

SEQ ID NO: 99928 - RNA, 23 nt, synthetic construct
  source 1..23: mol_type = other RNA
tgacaggggcagctgcgtgtaga

SEQ ID NO: 99929 - RNA, 23 nt, synthetic construct
  source 1..23: mol_type = other RNA
ttgcaccagcagctgcagcccca

SEQ ID NO: 99930 - RNA, 23 nt, synthetic construct
  source 1..23: mol_type = other RNA
tcaccagctgcaccagcagctgc

SEQ ID NO: 99931 - RNA, 23 nt, synthetic construct
  source 1..23: mol_type = other RNA
tgggtccagcctgacaaacacct

SEQ ID NO: 99932 - RNA, 23 nt, synthetic construct
  source 1..23: mol_type = other RNA
ttgggcggggtccagcctgacaa

SEQ ID NO: 99933 - RNA, 23 nt, synthetic construct
  source 1..23: mol_type = other RNA
tgccctggtgggcggggtccagc

SEQ ID NO: 99934 - RNA, 23 nt, synthetic construct
  source 1..23: mol_type = other RNA
ttctggccctggtgggcggggtc

SEQ ID NO: 99935 - RNA, 23 nt, synthetic construct
  source 1..23: mol_type = other RNA
tcacatctggccctggtgggcgg

SEQ ID NO: 99936 - RNA, 23 nt, synthetic construct
  source 1..23: mol_type = other RNA
tacaggccgcacatctggccctg

SEQ ID NO: 99937 - RNA, 23 nt, synthetic construct
  source 1..23: mol_type = other RNA
tgggagcaggggtcctcaaagct

SEQ ID NO: 99938 - RNA, 23 nt, synthetic construct
  source 1..23: mol_type = other RNA
ttgagggagcaggggtcctcaaa

SEQ ID NO: 99939 - RNA, 23 nt, synthetic construct
  source 1..23: mol_type = other RNA
tgagtggaagggcttggggttga

SEQ ID NO: 99940 - RNA, 23 nt, synthetic construct
  source 1..23: mol_type = other RNA
tcgagtggaagggcttggggttg

SEQ ID NO: 99941 - RNA, 23 nt, synthetic construct
  source 1..23: mol_type = other RNA
tctgcatgtacttggtgcagacg

SEQ ID NO: 99942 - RNA, 23 nt, synthetic construct
  source 1..23: mol_type = other RNA
tggacttggggcagttctgcatg

SEQ ID NO: 99943 - RNA, 23 nt, synthetic construct
  source 1..23: mol_type = other RNA
ttctccaggagccagcacggtgc

SEQ ID NO: 99944 - RNA, 23 nt, synthetic construct
  source 1..23: mol_type = other RNA
tctctccaggagccagcacggtg

SEQ ID NO: 99945 - RNA, 23 nt, synthetic construct
  source 1..23: mol_type = other RNA
tcctctccaggagccagcacggt

SEQ ID NO: 99946 - RNA, 23 nt, synthetic construct
  source 1..23: mol_type = other RNA
tcaccctgtgcttttctgcagag

SEQ ID NO: 99947 - RNA, 23 nt, synthetic construct
  source 1..23: mol_type = other RNA
tggaggcactcggccccaggggt

SEQ ID NO: 99948 - RNA, 23 nt, synthetic construct
  source 1..23: mol_type = other RNA
tgggggacagacacagccggaca

SEQ ID NO: 99949 - RNA, 23 nt, synthetic construct
  source 1..23: mol_type = other RNA
tccgggggacagacacagccgga

SEQ ID NO: 99950 - RNA, 23 nt, synthetic construct
  source 1..23: mol_type = other RNA
tgctgcactcccacctccggttc

SEQ ID NO: 99951 - RNA, 23 nt, synthetic construct
  source 1..23: mol_type = other RNA
tccaggcagagccggtggctgca

SEQ ID NO: 99952 - RNA, 23 nt, synthetic construct
  source 1..23: mol_type = other RNA
tcccaggcagagccggtggctgc

SEQ ID NO: 99953 - RNA, 23 nt, synthetic construct
  source 1..23: mol_type = other RNA
tgcccaggcagagccggtggctg

SEQ ID NO: 99954 - RNA, 23 nt, synthetic construct
  source 1..23: mol_type = other RNA
tcaggtgcccaggcagagccggt

SEQ ID NO: 99955 - RNA, 23 nt, synthetic construct
  source 1..23: mol_type = other RNA
tgcaggtgcccaggcagagccgg

SEQ ID NO: 99956 - RNA, 23 nt, synthetic construct
  source 1..23: mol_type = other RNA
tacgcaggtgcccaggcagagcc

SEQ ID NO: 99957 - RNA, 23 nt, synthetic construct
  source 1..23: mol_type = other RNA
tgccacgcaggtgcccaggcaga

SEQ ID NO: 99958 - RNA, 23 nt, synthetic construct
  source 1..23: mol_type = other RNA
tgaagagcttgatggccttggag

SEQ ID NO: 99959 - RNA, 23 nt, synthetic construct
  source 1..23: mol_type = other RNA
ttctcgatgaccaggaagatccc

SEQ ID NO: 99960 - RNA, 23 nt, synthetic construct
  source 1..23: mol_type = other RNA
tgtctcgatgaccaggaagatcc

SEQ ID NO: 99961 - RNA, 23 nt, synthetic construct
  source 1..23: mol_type = other RNA
ttcccaggacacggccatcccgt

SEQ ID NO: 99962 - RNA, 23 nt, synthetic construct
  source 1..23: mol_type = other RNA
tgtcccaggacacggccatcccg

SEQ ID NO: 99963 - RNA, 23 nt, synthetic construct
  source 1..23: mol_type = other RNA
tgtagtcctggtgcagtcggatg

SEQ ID NO: 99964 - RNA, 23 nt, synthetic construct
  source 1..23: mol_type = other RNA
tgagcggcaggcggcgaaggtgg

SEQ ID NO: 99965 - RNA, 23 nt, synthetic construct
  source 1..23: mol_type = other RNA
tctgggagcggcaggcggcgaag

SEQ ID NO: 99966 - RNA, 23 nt, synthetic construct
  source 1..23: mol_type = other RNA
tagggtgccccgcagggctggta

SEQ ID NO: 99967 - RNA, 23 nt, synthetic construct
  source 1..23: mol_type = other RNA
tccaggcagtgcccactggggtt

SEQ ID NO: 99968 - RNA, 23 nt, synthetic construct
  source 1..23: mol_type = other RNA
taggtccaccaggcagtgcccac

SEQ ID NO: 99969 - RNA, 23 nt, synthetic construct
  source 1..23: mol_type = other RNA
taggcaggtccaccaggcagtgc

SEQ ID NO: 99970 - RNA, 23 nt, synthetic construct
  source 1..23: mol_type = other RNA
tggccaggcaggtccaccaggca

SEQ ID NO: 99971 - RNA, 23 nt, synthetic construct
  source 1..23: mol_type = other RNA
ttccaggccaggcaggtccacca

SEQ ID NO: 99972 - RNA, 23 nt, synthetic construct
  source 1..23: mol_type = other RNA
tttccaggccaggcaggtccacc

SEQ ID NO: 99973 - RNA, 23 nt, synthetic construct
  source 1..23: mol_type = other RNA
tgccttccaggccaggcaggtcc

SEQ ID NO: 99974 - RNA, 23 nt, synthetic construct
  source 1..23: mol_type = other RNA
tcagccttccaggccaggcaggt

SEQ ID NO: 99975 - RNA, 23 nt, synthetic construct
  source 1..23: mol_type = other RNA
tgaagaagggctggctgggtggg

SEQ ID NO: 99976 - RNA, 23 nt, synthetic construct
  source 1..23: mol_type = other RNA
tattgaagaagggctggctgggt

SEQ ID NO: 99977 - RNA, 23 nt, synthetic construct
  source 1..23: mol_type = other RNA
tgcacttcatctggtcctcattg

SEQ ID NO: 99978 - RNA, 23 nt, synthetic construct
  source 1..23: mol_type = other RNA
tcaggtgcaggcctcaaggctgt

SEQ ID NO: 99979 - RNA, 23 nt, synthetic construct
  source 1..23: mol_type = other RNA
tgtgcaggtgcaggcctcaaggc

SEQ ID NO: 99980 - RNA, 23 nt, synthetic construct
  source 1..23: mol_type = other RNA
taggacatgccacagccttcctg

SEQ ID NO: 99981 - RNA, 23 nt, synthetic construct
  source 1..23: mol_type = other RNA
tgagggccgggcttgtcgtggag

SEQ ID NO: 99982 - RNA, 23 nt, synthetic construct
  source 1..23: mol_type = other RNA
tggagggccgggcttgtcgtgga

SEQ ID NO: 99983 - RNA, 23 nt, synthetic construct
  source 1..23: mol_type = other RNA
ttccacctgctggcccagctcct

SEQ ID NO: 99984 - RNA, 23 nt, synthetic construct
  source 1..23: mol_type = other RNA
tgtccacctgctggcccagctcc

SEQ ID NO: 99985 - RNA, 23 nt, synthetic construct
  source 1..23: mol_type = other RNA
tagtccacctgctggcccagctc

SEQ ID NO: 99986 - RNA, 23 nt, synthetic construct
  source 1..23: mol_type = other RNA
tcagtccacctgctggcccagct

SEQ ID NO: 99987 - RNA, 23 nt, synthetic construct
  source 1..23: mol_type = other RNA
tctggcactgagggagggctgag

SEQ ID NO: 99988 - RNA, 23 nt, synthetic construct
  source 1..23: mol_type = other RNA
tgtgctggcactgagggagggct

SEQ ID NO: 99989 - RNA, 23 nt, synthetic construct
  source 1..23: mol_type = other RNA
ttggcaggtggtggtacctgggg

SEQ ID NO: 99990 - RNA, 23 nt, synthetic construct
  source 1..23: mol_type = other RNA
tcggggctggcaggtggtggtac

SEQ ID NO: 99991 - RNA, 23 nt, synthetic construct
  source 1..23: mol_type = other RNA
tcaccggggctggcaggtggtgg

SEQ ID NO: 99992 - RNA, 23 nt, synthetic construct
  source 1..23: mol_type = other RNA
tcctccaagttgttcagacttgg

SEQ ID NO: 99993 - RNA, 23 nt, synthetic construct
  source 1..23: mol_type = other RNA
tgttcctgcacaccaggccgaag

SEQ ID NO: 99994 - RNA, 23 nt, synthetic construct
  source 1..23: mol_type = other RNA
tctgctcccagttcctgcacacc

SEQ ID NO: 99995 - RNA, 23 nt, synthetic construct
  source 1..23: mol_type = other RNA
tgtggtggtggtggccgtctcca

SEQ ID NO: 99996 - RNA, 23 nt, synthetic construct
  source 1..23: mol_type = other RNA
tgagggtggggactgctgtggtg

SEQ ID NO: 99997 - RNA, 23 nt, synthetic construct
  source 1..23: mol_type = other RNA
tagagggtggggactgctgtggt

SEQ ID NO: 99998 - RNA, 23 nt, synthetic construct
  source 1..23: mol_type = other RNA
tctgggacagtgggttctgtgga

SEQ ID NO: 99999 - RNA, 23 nt, synthetic construct
  source 1..23: mol_type = other RNA
tggccacccctgggacagtgggt

SEQ ID NO: 100000 - RNA, 23 nt, synthetic construct
  source 1..23: mol_type = other RNA
tgtgggtgtggtggctgtgcttc

SEQ ID NO: 100001 - RNA, 23 nt, synthetic construct
  source 1..23: mol_type = other RNA
tgtagctgtgggtgtggtggctg

SEQ ID NO: 100002 - RNA, 23 nt, synthetic construct
  source 1..23: mol_type = other RNA
tctggaggagggggtggctgtga

SEQ ID NO: 100003 - RNA, 23 nt, synthetic construct
  source 1..23: mol_type = other RNA
tgctggaggagggggtggctgtg

SEQ ID NO: 100004 - RNA, 23 nt, synthetic construct
  source 1..23: mol_type = other RNA
tggctggaggagggggtggctgt

SEQ ID NO: 100005 - RNA, 23 nt, synthetic construct
  source 1..23: mol_type = other RNA
ttgggctggaggagggggtggct

SEQ ID NO: 100006 - RNA, 23 nt, synthetic construct
  source 1..23: mol_type = other RNA
tgtggctgcaggtgtggtggcgg

SEQ ID NO: 100007 - RNA, 23 nt, synthetic construct
  source 1..23: mol_type = other RNA
tggtggctgcaggtgtggtggcg

SEQ ID NO: 100008 - RNA, 23 nt, synthetic construct
  source 1..23: mol_type = other RNA
ttggtggctgcaggtgtggtggc

SEQ ID NO: 100009 - RNA, 23 nt, synthetic construct
  source 1..23: mol_type = other RNA
tctggtggctgcaggtgtggtgg

SEQ ID NO: 100010 - RNA, 23 nt, synthetic construct
  source 1..23: mol_type = other RNA
ttgggcagcagggtcgaggtgcg

SEQ ID NO: 100011 - RNA, 23 nt, synthetic construct
  source 1..23: mol_type = other RNA
tctgggcagcagggtcgaggtgc

SEQ ID NO: 100012 - RNA, 23 nt, synthetic construct
  source 1..23: mol_type = other RNA
tgctgggcagcagggtcgaggtg

SEQ ID NO: 100013 - RNA, 23 nt, synthetic construct
  source 1..23: mol_type = other RNA
ttgctgggcagcagggtcgaggt

SEQ ID NO: 100014 - RNA, 23 nt, synthetic construct
  source 1..23: mol_type = other RNA
tgtggggctgctgggcagcaggg

SEQ ID NO: 100015 - RNA, 23 nt, synthetic construct
  source 1..23: mol_type = other RNA
tatgtggggctgctgggcagcag

SEQ ID NO: 100016 - RNA, 23 nt, synthetic construct
  source 1..23: mol_type = other RNA
tgatgtggggctgctgggcagca

SEQ ID NO: 100017 - RNA, 23 nt, synthetic construct
  source 1..23: mol_type = other RNA
tgggggccgatgtggggctgctg

SEQ ID NO: 100018 - RNA, 23 nt, synthetic construct
  source 1..23: mol_type = other RNA
tcacactggggctcacagcccat

SEQ ID NO: 100019 - RNA, 23 nt, synthetic construct
  source 1..23: mol_type = other RNA
tcaggcacactggggctcacagc

SEQ ID NO: 100020 - RNA, 23 nt, synthetic construct
  source 1..23: mol_type = other RNA
tgcccaggggctgctcacagacg

SEQ ID NO: 100021 - RNA, 23 nt, synthetic construct
  source 1..23: mol_type = other RNA
tgacaccaggctgggcctgggca

SEQ ID NO: 100022 - RNA, 23 nt, synthetic construct
  source 1..23: mol_type = other RNA
tgggacaccaggctgggcctggg

SEQ ID NO: 100023 - RNA, 23 nt, synthetic construct
  source 1..23: mol_type = other RNA
tagcacatcttgaacttccccac

SEQ ID NO: 100024 - RNA, 23 nt, synthetic construct
  source 1..23: mol_type = other RNA
ttggccggggtgctggggcagtg

SEQ ID NO: 100025 - RNA, 23 nt, synthetic construct
  source 1..23: mol_type = other RNA
tggtggccggggtgctggggcag

SEQ ID NO: 100026 - RNA, 23 nt, synthetic construct
  source 1..23: mol_type = other RNA
ttggtggccggggtgctggggca

SEQ ID NO: 100027 - RNA, 23 nt, synthetic construct
  source 1..23: mol_type = other RNA
tgtccccggagtggaggagggca

SEQ ID NO: 100028 - RNA, 23 nt, synthetic construct
  source 1..23: mol_type = other RNA
tgtgggtgtggtggctgtgcttc

SEQ ID NO: 100029 - RNA, 23 nt, synthetic construct
  source 1..23: mol_type = other RNA
tgtagctgtgggtgtggtggctg

SEQ ID NO: 100030 - RNA, 23 nt, synthetic construct
  source 1..23: mol_type = other RNA
tctggaggagggggtggctgtga

SEQ ID NO: 100031 - RNA, 23 nt, synthetic construct
  source 1..23: mol_type = other RNA
tgctggaggagggggtggctgtg

SEQ ID NO: 100032 - RNA, 23 nt, synthetic construct
  source 1..23: mol_type = other RNA
tggctggaggagggggtggctgt

SEQ ID NO: 100033 - RNA, 23 nt, synthetic construct
  source 1..23: mol_type = other RNA
ttgggctggaggagggggtggct

SEQ ID NO: 100034 - RNA, 23 nt, synthetic construct
  source 1..23: mol_type = other RNA
tgtggctgcaggtgtggtggcgg

SEQ ID NO: 100035 - RNA, 23 nt, synthetic construct
  source 1..23: mol_type = other RNA
tggtggctgcaggtgtggtggcg

SEQ ID NO: 100036 - RNA, 23 nt, synthetic construct
  source 1..23: mol_type = other RNA
ttggtggctgcaggtgtggtggc

SEQ ID NO: 100037 - RNA, 23 nt, synthetic construct
  source 1..23: mol_type = other RNA
tctggtggctgcaggtgtggtgg

SEQ ID NO: 100038 - RNA, 23 nt, synthetic construct
  source 1..23: mol_type = other RNA
tgccgtggtcctggaggtggccc

SEQ ID NO: 100039 - RNA, 23 nt, synthetic construct
  source 1..23: mol_type = other RNA
tggccgtggtcctggaggtggcc

SEQ ID NO: 100040 - RNA, 23 nt, synthetic construct
  source 1..23: mol_type = other RNA
ttgggcagcagggtcgaggtgcg

SEQ ID NO: 100041 - RNA, 23 nt, synthetic construct
  source 1..23: mol_type = other RNA
tctgggcagcagggtcgaggtgc

SEQ ID NO: 100042 - RNA, 23 nt, synthetic construct
  source 1..23: mol_type = other RNA
tgctgggcagcagggtcgaggtg

SEQ ID NO: 100043 - RNA, 23 nt, synthetic construct
  source 1..23: mol_type = other RNA
ttgctgggcagcagggtcgaggt

SEQ ID NO: 100044 - RNA, 23 nt, synthetic construct
  source 1..23: mol_type = other RNA
tgtggggctgctgggcagcaggg

SEQ ID NO: 100045 - RNA, 23 nt, synthetic construct
  source 1..23: mol_type = other RNA
tatgtggggctgctgggcagcag

SEQ ID NO: 100046 - RNA, 23 nt, synthetic construct
  source 1..23: mol_type = other RNA
tgatgtggggctgctgggcagca

SEQ ID NO: 100047 - RNA, 23 nt, synthetic construct
  source 1..23: mol_type = other RNA
tcacactggggctcacagcccat

SEQ ID NO: 100048 - RNA, 23 nt, synthetic construct
  source 1..23: mol_type = other RNA
tcaggcacactggggctcacagc

SEQ ID NO: 100049 - RNA, 23 nt, synthetic construct
  source 1..23: mol_type = other RNA
tgcccaggggctgctcacagacg

SEQ ID NO: 100050 - RNA, 23 nt, synthetic construct
  source 1..23: mol_type = other RNA
tgacaccaggctgggcctgggca

SEQ ID NO: 100051 - RNA, 23 nt, synthetic construct
  source 1..23: mol_type = other RNA
tgggacaccaggctgggcctggg

SEQ ID NO: 100052 - RNA, 23 nt, synthetic construct
  source 1..23: mol_type = other RNA
tagcacatcttgaacttccccac

SEQ ID NO: 100053 - RNA, 23 nt, synthetic construct
  source 1..23: mol_type = other RNA
ttggccggggtgctggggcagtg

SEQ ID NO: 100054 - RNA, 23 nt, synthetic construct
  source 1..23: mol_type = other RNA
tggtggccggggtgctggggcag

SEQ ID NO: 100055 - RNA, 23 nt, synthetic construct
  source 1..23: mol_type = other RNA
ttggtggccggggtgctggggca

SEQ ID NO: 100056 - RNA, 23 nt, synthetic construct
  source 1..23: mol_type = other RNA
tagtggaggagggcgtggccgta

SEQ ID NO: 100057 - RNA, 23 nt, synthetic construct
  source 1..23: mol_type = other RNA
tgagtggaggagggcgtggccgt

SEQ ID NO: 100058 - RNA, 23 nt, synthetic construct
  source 1..23: mol_type = other RNA
tgtccccggagtggaggaggggg

SEQ ID NO: 100059 - RNA, 23 nt, synthetic construct
  source 1..23: mol_type = other RNA
tgtgggtgtggtggctgtgcttc

SEQ ID NO: 100060 - RNA, 23 nt, synthetic construct
  source 1..23: mol_type = other RNA
tgtagctgtgggtgtggtggctg

SEQ ID NO: 100061 - RNA, 23 nt, synthetic construct
  source 1..23: mol_type = other RNA
tctggaggagggggtggctgtga

SEQ ID NO: 100062 - RNA, 23 nt, synthetic construct
  source 1..23: mol_type = other RNA
tgctggaggagggggtggctgtg

SEQ ID NO: 100063 - RNA, 23 nt, synthetic construct
  source 1..23: mol_type = other RNA
tggctggaggagggggtggctgt

SEQ ID NO: 100064 - RNA, 23 nt, synthetic construct
  source 1..23: mol_type = other RNA
ttgggctggaggagggggtggct

SEQ ID NO: 100065 - RNA, 23 nt, synthetic construct
  source 1..23: mol_type = other RNA
tgtggctgcaggtgtggtggcgg

SEQ ID NO: 100066 - RNA, 23 nt, synthetic construct
  source 1..23: mol_type = other RNA
tggtggctgcaggtgtggtggcg

SEQ ID NO: 100067 - RNA, 23 nt, synthetic construct
  source 1..23: mol_type = other RNA
ttggtggctgcaggtgtggtggc

SEQ ID NO: 100068 - RNA, 23 nt, synthetic construct
  source 1..23: mol_type = other RNA
tctggtggctgcaggtgtggtgg

SEQ ID NO: 100069 - RNA, 23 nt, synthetic construct
  source 1..23: mol_type = other RNA
ttgggcagcagggtcgaggtgcg

SEQ ID NO: 100070 - RNA, 23 nt, synthetic construct
  source 1..23: mol_type = other RNA
tctgggcagcagggtcgaggtgc

SEQ ID NO: 100071 - RNA, 23 nt, synthetic construct
  source 1..23: mol_type = other RNA
tgctgggcagcagggtcgaggtg

SEQ ID NO: 100072 - RNA, 23 nt, synthetic construct
  source 1..23: mol_type = other RNA
ttgctgggcagcagggtcgaggt

SEQ ID NO: 100073 - RNA, 23 nt, synthetic construct
  source 1..23: mol_type = other RNA
tgtggggctgctgggcagcaggg

SEQ ID NO: 100074 - RNA, 23 nt, synthetic construct
  source 1..23: mol_type = other RNA
tatgtggggctgctgggcagcag

SEQ ID NO: 100075 - RNA, 23 nt, synthetic construct
  source 1..23: mol_type = other RNA
tgatgtggggctgctgggcagca

SEQ ID NO: 100076 - RNA, 23 nt, synthetic construct
  source 1..23: mol_type = other RNA
tgggggccgatgtggggctgctg

SEQ ID NO: 100077 - RNA, 23 nt, synthetic construct
  source 1..23: mol_type = other RNA
tcacactggggctcacagcccgt

SEQ ID NO: 100078 - RNA, 23 nt, synthetic construct
  source 1..23: mol_type = other RNA
tcaggcacactggggctcacagc

SEQ ID NO: 100079 - RNA, 23 nt, synthetic construct
  source 1..23: mol_type = other RNA
tgcccaggggctgctcacagact

SEQ ID NO: 100080 - RNA, 23 nt, synthetic construct
  source 1..23: mol_type = other RNA
tgacaccaggctgggcctgggca

SEQ ID NO: 100081 - RNA, 23 nt, synthetic construct
  source 1..23: mol_type = other RNA
tgggacaccaggctgggcctggg

SEQ ID NO: 100082 - RNA, 23 nt, synthetic construct
  source 1..23: mol_type = other RNA
tagcacatcttgaacttccccac

SEQ ID NO: 100083 - RNA, 23 nt, synthetic construct
  source 1..23: mol_type = other RNA
ttggccggggtgctggggcagtg

SEQ ID NO: 100084 - RNA, 23 nt, synthetic construct
  source 1..23: mol_type = other RNA
tggtggccggggtgctggggcag

SEQ ID NO: 100085 - RNA, 23 nt, synthetic construct
  source 1..23: mol_type = other RNA
ttggtggccggggtgctggggca

SEQ ID NO: 100086 - RNA, 23 nt, synthetic construct
  source 1..23: mol_type = other RNA
tgtgggtgtggtggctgtgcttc

SEQ ID NO: 100087 - RNA, 23 nt, synthetic construct
  source 1..23: mol_type = other RNA
tgtagctgtgggtgtggtggctg

SEQ ID NO: 100088 - RNA, 23 nt, synthetic construct
  source 1..23: mol_type = other RNA
tgtggctgcaggtgtggtggcgg

SEQ ID NO: 100089 - RNA, 23 nt, synthetic construct
  source 1..23: mol_type = other RNA
tggtggctgcaggtgtggtggcg

SEQ ID NO: 100090 - RNA, 23 nt, synthetic construct
  source 1..23: mol_type = other RNA
ttggtggctgcaggtgtggtggc

SEQ ID NO: 100091 - RNA, 23 nt, synthetic construct
  source 1..23: mol_type = other RNA
tctggtggctgcaggtgtggtgg

SEQ ID NO: 100092 - RNA, 23 nt, synthetic construct
  source 1..23: mol_type = other RNA
tcgtggtcctggaggtggccgtg

SEQ ID NO: 100093 - RNA, 23 nt, synthetic construct
  source 1..23: mol_type = other RNA
tgccgtggtcctggaggtggccg

SEQ ID NO: 100094 - RNA, 23 nt, synthetic construct
  source 1..23: mol_type = other RNA
tggccgtggtcctggaggtggcc

SEQ ID NO: 100095 - RNA, 23 nt, synthetic construct
  source 1..23: mol_type = other RNA
ttgggcagcagggtcgaggtgcg

SEQ ID NO: 100096 - RNA, 23 nt, synthetic construct
  source 1..23: mol_type = other RNA
tctgggcagcagggtcgaggtgc

SEQ ID NO: 100097 - RNA, 23 nt, synthetic construct
  source 1..23: mol_type = other RNA
tgctgggcagcagggtcgaggtg

SEQ ID NO: 100098 - RNA, 23 nt, synthetic construct
  source 1..23: mol_type = other RNA
ttgctgggcagcagggtcgaggt

SEQ ID NO: 100099 - RNA, 23 nt, synthetic construct
  source 1..23: mol_type = other RNA
tgtggggctgctgggcagcaggg

SEQ ID NO: 100100 - RNA, 23 nt, synthetic construct
  source 1..23: mol_type = other RNA
tatgtggggctgctgggcagcag

SEQ ID NO: 100101 - RNA, 23 nt, synthetic construct
  source 1..23: mol_type = other RNA
tgatgtggggctgctgggcagca

SEQ ID NO: 100102 - RNA, 23 nt, synthetic construct
  source 1..23: mol_type = other RNA
tgggggccgatgtggggctgctg

SEQ ID NO: 100103 - RNA, 23 nt, synthetic construct
  source 1..23: mol_type = other RNA
tcacactggggctcacagcccgt

SEQ ID NO: 100104 - RNA, 23 nt, synthetic construct
  source 1..23: mol_type = other RNA
tcaggcacactggggctcacagc

SEQ ID NO: 100105 - RNA, 23 nt, synthetic construct
  source 1..23: mol_type = other RNA
tgcccaggggctgctcacagacg

SEQ ID NO: 100106 - RNA, 23 nt, synthetic construct
  source 1..23: mol_type = other RNA
tgacaccaggctgggcctgggca

SEQ ID NO: 100107 - RNA, 23 nt, synthetic construct
  source 1..23: mol_type = other RNA
tgggacaccaggctgggcctggg

SEQ ID NO: 100108 - RNA, 23 nt, synthetic construct
  source 1..23: mol_type = other RNA
tagcacatcttgaacttccccac

SEQ ID NO: 100109 - RNA, 23 nt, synthetic construct
  source 1..23: mol_type = other RNA
ttggccggggtgctggggcagtg

SEQ ID NO: 100110 - RNA, 23 nt, synthetic construct
  source 1..23: mol_type = other RNA
tggtggccggggtgctggggcag

SEQ ID NO: 100111 - RNA, 23 nt, synthetic construct
  source 1..23: mol_type = other RNA
ttggtggccggggtgctggggca

SEQ ID NO: 100112 - RNA, 23 nt, synthetic construct
  source 1..23: mol_type = other RNA
tgtccccggagtggaggagggca

SEQ ID NO: 100113 - RNA, 23 nt, synthetic construct
  source 1..23: mol_type = other RNA
tgtccccggagtggaggaggggg

SEQ ID NO: 100114 - RNA, 23 nt, synthetic construct
  source 1..23: mol_type = other RNA
tgtgggtgtggtggctgtgcttc

SEQ ID NO: 100115 - RNA, 23 nt, synthetic construct
  source 1..23: mol_type = other RNA
tgtagctgtgggtgtggtggctg

SEQ ID NO: 100116 - RNA, 23 nt, synthetic construct
  source 1..23: mol_type = other RNA
tctggaggagggggtggctgtga

SEQ ID NO: 100117 - RNA, 23 nt, synthetic construct
  source 1..23: mol_type = other RNA
tgctggaggagggggtggctgtg

SEQ ID NO: 100118 - RNA, 23 nt, synthetic construct
  source 1..23: mol_type = other RNA
tggctggaggagggggtggctgt

SEQ ID NO: 100119 - RNA, 23 nt, synthetic construct
  source 1..23: mol_type = other RNA
ttgggctggaggagggggtggct

SEQ ID NO: 100120 - RNA, 23 nt, synthetic construct
  source 1..23: mol_type = other RNA
tgagtggaggagggtgtggccgt

SEQ ID NO: 100121 - RNA, 23 nt, synthetic construct
  source 1..23: mol_type = other RNA
tcagagtggaggagggtgtggcc

SEQ ID NO: 100122 - RNA, 23 nt, synthetic construct
  source 1..23: mol_type = other RNA
tcaggctgctggggagcactgca

SEQ ID NO: 100123 - RNA, 23 nt, synthetic construct
  source 1..23: mol_type = other RNA
tggcaggctgctggggagcactg

SEQ ID NO: 100124 - RNA, 23 nt, synthetic construct
  source 1..23: mol_type = other RNA
tctgaggaggacacagtggacac

SEQ ID NO: 100125 - RNA, 23 nt, synthetic construct
  source 1..23: mol_type = other RNA
tgaggactgaggaggacacagtg

SEQ ID NO: 100126 - RNA, 23 nt, synthetic construct
  source 1..23: mol_type = other RNA
tagagaagtgggagctggggaag

SEQ ID NO: 100127 - RNA, 23 nt, synthetic construct
  source 1..23: mol_type = other RNA
tgaagcagggagtagagaagtgg

SEQ ID NO: 100128 - RNA, 23 nt, synthetic construct
  source 1..23: mol_type = other RNA
tccctgcagaagcagggagtaga

SEQ ID NO: 100129 - RNA, 23 nt, synthetic construct
  source 1..23: mol_type = other RNA
tgccctgcagaagcagggagtag

SEQ ID NO: 100130 - RNA, 23 nt, synthetic construct
  source 1..23: mol_type = other RNA
tatgccctgcagaagcagggagt

SEQ ID NO: 100131 - RNA, 23 nt, synthetic construct
  source 1..23: mol_type = other RNA
tcaaatgccctgcagaagcaggg

SEQ ID NO: 100132 - RNA, 23 nt, synthetic construct
  source 1..23: mol_type = other RNA
tcagccaggggcaggggagggcg

SEQ ID NO: 100133 - RNA, 23 nt, synthetic construct
  source 1..23: mol_type = other RNA
tacagccaggggcaggggagggc

SEQ ID NO: 100134 - RNA, 23 nt, synthetic construct
  source 1..23: mol_type = other RNA
tcacagccaggggcaggggaggg

SEQ ID NO: 100135 - RNA, 23 nt, synthetic construct
  source 1..23: mol_type = other RNA
tggcattgtcacagccaggggca

SEQ ID NO: 100136 - RNA, 23 nt, synthetic construct
  source 1..23: mol_type = other RNA
tagttctccagggtccaggtctc

SEQ ID NO: 100137 - RNA, 23 nt, synthetic construct
  source 1..23: mol_type = other RNA
tgcacctggccaccgtgcagttc

SEQ ID NO: 100138 - RNA, 23 nt, synthetic construct
  source 1..23: mol_type = other RNA
tggaatttggtcaaacaggatca

SEQ ID NO: 100139 - RNA, 23 nt, synthetic construct
  source 1..23: mol_type = other RNA
tgtagggcagccgggcctggaag

SEQ ID NO: 100140 - RNA, 23 nt, synthetic construct
  source 1..23: mol_type = other RNA
tctcagcatcagatcacagagcg

SEQ ID NO: 100141 - RNA, 23 nt, synthetic construct
  source 1..23: mol_type = other RNA
tcctggctcagcatcagatcaca

SEQ ID NO: 100142 - RNA, 23 nt, synthetic construct
  source 1..23: mol_type = other RNA
tctccaggctctggcagggcacc

SEQ ID NO: 100143 - RNA, 23 nt, synthetic construct
  source 1..23: mol_type = other RNA
tcctccaggctctggcagggcac

SEQ ID NO: 100144 - RNA, 23 nt, synthetic construct
  source 1..23: mol_type = other RNA
tacacgcaggactggcagttgct

SEQ ID NO: 100145 - RNA, 23 nt, synthetic construct
  source 1..23: mol_type = other RNA
tcctgggtgtccccagagaggca

SEQ ID NO: 100146 - RNA, 23 nt, synthetic construct
  source 1..23: mol_type = other RNA
ttcctgggtgtccccagagaggc

SEQ ID NO: 100147 - RNA, 23 nt, synthetic construct
  source 1..23: mol_type = other RNA
ttcttgtactcaaagccctgggg

SEQ ID NO: 100148 - RNA, 23 nt, synthetic construct
  source 1..23: mol_type = other RNA
tctccccacagcactgcccggcc

SEQ ID NO: 100149 - RNA, 23 nt, synthetic construct
  source 1..23: mol_type = other RNA
taggctgtggggtcagcaaatgg

SEQ ID NO: 100150 - RNA, 23 nt, synthetic construct
  source 1..23: mol_type = other RNA
tatgcaggctgtggggtcagcaa

SEQ ID NO: 100151 - RNA, 23 nt, synthetic construct
  source 1..23: mol_type = other RNA
tggatgcaggctgtggggtcagc

SEQ ID NO: 100152 - RNA, 23 nt, synthetic construct
  source 1..23: mol_type = other RNA
tcaggatgcaggctgtggggtca

SEQ ID NO: 100153 - RNA, 23 nt, synthetic construct
  source 1..23: mol_type = other RNA
tgcaggatgcaggctgtggggtc

SEQ ID NO: 100154 - RNA, 23 nt, synthetic construct
  source 1..23: mol_type = other RNA
tgctccccctgcagctggacaca

SEQ ID NO: 100155 - RNA, 23 nt, synthetic construct
  source 1..23: mol_type = other RNA
tgaggctccccctgcagctggac

SEQ ID NO: 100156 - RNA, 23 nt, synthetic construct
  source 1..23: mol_type = other RNA
tttttcctgaggctccccctgca

SEQ ID NO: 100157 - RNA, 23 nt, synthetic construct
  source 1..23: mol_type = other RNA
tctgcatggcctgggcctctgct

SEQ ID NO: 100158 - RNA, 23 nt, synthetic construct
  source 1..23: mol_type = other RNA
ttgctgcatggcctgggcctctg

SEQ ID NO: 100159 - RNA, 23 nt, synthetic construct
  source 1..23: mol_type = other RNA
tgtgctgcatggcctgggcctct

SEQ ID NO: 100160 - RNA, 23 nt, synthetic construct
  source 1..23: mol_type = other RNA
ttgcactggtgctgcatggcctg

SEQ ID NO: 100161 - RNA, 23 nt, synthetic construct
  source 1..23: mol_type = other RNA
tggcagcaggtgcactggtgctg

SEQ ID NO: 100162 - RNA, 23 nt, synthetic construct
  source 1..23: mol_type = other RNA
tctggcagcaggtgcactggtgc

SEQ ID NO: 100163 - RNA, 23 nt, synthetic construct
  source 1..23: mol_type = other RNA
ttctcctggcagcaggtgcactg

SEQ ID NO: 100164 - RNA, 23 nt, synthetic construct
  source 1..23: mol_type = other RNA
taccagccccgggggacagacac

SEQ ID NO: 100165 - RNA, 23 nt, synthetic construct
  source 1..23: mol_type = other RNA
ttctgcaggttcccaaactggag

SEQ ID NO: 100166 - RNA, 23 nt, synthetic construct
  source 1..23: mol_type = other RNA
tcaactcccgcagggggacacca

SEQ ID NO: 100167 - RNA, 23 nt, synthetic construct
  source 1..23: mol_type = other RNA
tcaactcccgcagggggacacca

SEQ ID NO: 100168 - RNA, 23 nt, synthetic construct
  source 1..23: mol_type = other RNA
tcaactcccgcagggggacacca

SEQ ID NO: 100169 - RNA, 23 nt, synthetic construct
  source 1..23: mol_type = other RNA
tctgggcaggatgcaggctgtgg

SEQ ID NO: 100170 - RNA, 23 nt, synthetic construct
  source 1..23: mol_type = other RNA
ttccaccaggcagtgcccactgg

SEQ ID NO: 100171 - RNA, 23 nt, synthetic construct
  source 1..23: mol_type = other RNA
ttccctgggctggaggagggggt

SEQ ID NO: 100172 - RNA, 23 nt, synthetic construct
  source 1..23: mol_type = other RNA
ttccctgggctggaggagggggt

SEQ ID NO: 100173 - RNA, 23 nt, synthetic construct
  source 1..23: mol_type = other RNA
ttccctgggctggaggagggggt

SEQ ID NO: 100174 - RNA, 23 nt, synthetic construct
  source 1..23: mol_type = other RNA
ttccctgggctggaggagggggt

SEQ ID NO: 100175 - RNA, 23 nt, synthetic construct
  source 1..23: mol_type = other RNA
ttccctgggctggaggagggggt

SEQ ID NO: 100176 - RNA, 23 nt, synthetic construct
  source 1..23: mol_type = other RNA
tggctccccctgcagctggacac

SEQ ID NO: 100177 - RNA, 23 nt, synthetic construct
  source 1..23: mol_type = other RNA
ttctccagggtccaggtctcatt

SEQ ID NO: 100178 - RNA, 23 nt, synthetic construct
  source 1..23: mol_type = other RNA
tgggcgtaggcagccacagccgt

SEQ ID NO: 100179 - RNA, 23 nt, synthetic construct
  source 1..23: mol_type = other RNA
tctccagggtccaggtctcattc

SEQ ID NO: 100180 - RNA, 23 nt, synthetic construct
  source 1..23: mol_type = other RNA
tgtgcccaggcagagccggtggc

SEQ ID NO: 100181 - RNA, 23 nt, synthetic construct
  source 1..23: mol_type = other RNA
tggtgcccaggcagagccggtgg

SEQ ID NO: 100182 - RNA, 23 nt, synthetic construct
  source 1..23: mol_type = other RNA
tggtcctgggtgtccccagagag

SEQ ID NO: 100183 - RNA, 23 nt, synthetic construct
  source 1..23: mol_type = other RNA
ttgcaggagctgcaggtggtgtt

SEQ ID NO: 100184 - RNA, 23 nt, synthetic construct
  source 1..23: mol_type = other RNA
tgtgcaggagctgcaggtggtgt

SEQ ID NO: 100185 - RNA, 23 nt, synthetic construct
  source 1..23: mol_type = other RNA
tgggtcctgggtgtccccagaga

SEQ ID NO: 100186 - RNA, 23 nt, synthetic construct
  source 1..23: mol_type = other RNA
tctgaggctccccctgcagctgg

SEQ ID NO: 100187 - RNA, 23 nt, synthetic construct
  source 1..23: mol_type = other RNA
ttcgatgaccaggaagatcccca

SEQ ID NO: 100188 - RNA, 23 nt, synthetic construct
  source 1..23: mol_type = other RNA
taggtttttaggcagggtgcccc

SEQ ID NO: 100189 - RNA, 23 nt, synthetic construct
  source 1..23: mol_type = other RNA
tccagccccgggggacagacaca

SEQ ID NO: 100190 - RNA, 23 nt, synthetic construct
  source 1..23: mol_type = other RNA
tgtaccagctggaccagcggcag

SEQ ID NO: 100191 - RNA, 23 nt, synthetic construct
  source 1..23: mol_type = other RNA
ttgttggtgcaggtgccgcactg

SEQ ID NO: 100192 - RNA, 23 nt, synthetic construct
  source 1..23: mol_type = other RNA
ttgtaccagctggaccagcggca

SEQ ID NO: 100193 - RNA, 23 nt, synthetic construct
  source 1..23: mol_type = other RNA
tgtgcaggtgccgcactggccct

SEQ ID NO: 100194 - RNA, 23 nt, synthetic construct
  source 1..23: mol_type = other RNA
tccccgggggacagacacagccg

SEQ ID NO: 100195 - RNA, 23 nt, synthetic construct
  source 1..23: mol_type = other RNA
tcaccagccccgggggacagaca

SEQ ID NO: 100196 - RNA, 23 nt, synthetic construct
  source 1..23: mol_type = other RNA
tttcccgcacaggccgcagaccc

SEQ ID NO: 100197 - RNA, 23 nt, synthetic construct
  source 1..23: mol_type = other RNA
tagggggctcaggctggggaaga

SEQ ID NO: 100198 - RNA, 23 nt, synthetic construct
  source 1..23: mol_type = other RNA
tccagctccagcagggcactgtc

SEQ ID NO: 100199 - RNA, 23 nt, synthetic construct
  source 1..23: mol_type = other RNA
tttctgcaggttcccaaactgga

SEQ ID NO: 100200 - RNA, 23 nt, synthetic construct
  source 1..23: mol_type = other RNA
tcttctgcaggttcccaaactgg

SEQ ID NO: 100201 - RNA, 23 nt, synthetic construct
  source 1..23: mol_type = other RNA
tcaggagctgcaggtggtgttga

SEQ ID NO: 100202 - RNA, 23 nt, synthetic construct
  source 1..23: mol_type = other RNA
tggccgcacatctggccctggtg

SEQ ID NO: 100203 - RNA, 23 nt, synthetic construct
  source 1..23: mol_type = other RNA
tcgcaggtgcccaggcagagccg

SEQ ID NO: 100204 - RNA, 23 nt, synthetic construct
  source 1..23: mol_type = other RNA
tcgcacaggccgcagaccctgcc

SEQ ID NO: 100205 - RNA, 23 nt, synthetic construct
  source 1..23: mol_type = other RNA
tcccgcacaggccgcagaccctg

SEQ ID NO: 100206 - RNA, 23 nt, synthetic construct
  source 1..23: mol_type = other RNA
tggcagggtgccccgcagggctg

SEQ ID NO: 100207 - RNA, 23 nt, synthetic construct
  source 1..23: mol_type = other RNA
taggggcaggggagggcgaggac

SEQ ID NO: 100208 - RNA, 23 nt, synthetic construct
  source 1..23: mol_type = other RNA
tcaggagtagcagcagccggttt

SEQ ID NO: 100209 - RNA, 23 nt, synthetic construct
  source 1..23: mol_type = other RNA
tacaggggcagctgcgtgtagat

SEQ ID NO: 100210 - RNA, 23 nt, synthetic construct
  source 1..23: mol_type = other RNA
tctgggtgtccccagagaggcag

SEQ ID NO: 100211 - RNA, 23 nt, synthetic construct
  source 1..23: mol_type = other RNA
tgtggaggagggcgtggccgtag

SEQ ID NO: 100212 - RNA, 23 nt, synthetic construct
  source 1..23: mol_type = other RNA
tcaggcagagccggtggctgcac

SEQ ID NO: 100213 - RNA, 23 nt, synthetic construct
  source 1..23: mol_type = other RNA
ttgaagaagggctggctgggtgg

SEQ ID NO: 100214 - RNA, 23 nt, synthetic construct
  source 1..23: mol_type = other RNA
tccgtggtcctggaggtggccct

SEQ ID NO: 100215 - RNA, 23 nt, synthetic construct
  source 1..23: mol_type = other RNA
tccgtggtcctggaggtggccgt

SEQ ID NO: 100216 - RNA, 23 nt, synthetic construct
  source 1..23: mol_type = other RNA
tgttgtggaagaggctgtagggc

SEQ ID NO: 100217 - RNA, 23 nt, synthetic construct
  source 1..23: mol_type = other RNA
tttgaagaagggctggctgggtg

SEQ ID NO: 100218 - RNA, 23 nt, synthetic construct
  source 1..23: mol_type = other RNA
tacgcacttcatctggtcctcat

SEQ ID NO: 100219 - RNA, 23 nt, synthetic construct
  source 1..23: mol_type = other RNA
tcactggggctcacagcccgtgg

SEQ ID NO: 100220 - RNA, 23 nt, synthetic construct
  source 1..23: mol_type = other RNA
tcactggggctcacagcccgtgg

SEQ ID NO: 100221 - RNA, 23 nt, synthetic construct
  source 1..23: mol_type = other RNA
tagccaggggcaggggagggcga

SEQ ID NO: 100222 - RNA, 23 nt, synthetic construct
  source 1..23: mol_type = other RNA
tcaggggcagctgcgtgtagatg

SEQ ID NO: 100223 - RNA, 23 nt, synthetic construct
  source 1..23: mol_type = other RNA
tgcttttctgcagagaggctccc

SEQ ID NO: 100224 - RNA, 23 nt, synthetic construct
  source 1..23: mol_type = other RNA
tagaagggctggctgggtgggca

SEQ ID NO: 100225 - RNA, 23 nt, synthetic construct
  source 1..23: mol_type = other RNA
taagaagggctggctgggtgggc

SEQ ID NO: 100226 - RNA, 23 nt, synthetic construct
  source 1..23: mol_type = other RNA
tagtagagaagtgggagctgggg

SEQ ID NO: 100227 - RNA, 23 nt, synthetic construct
  source 1..23: mol_type = other RNA
tgttgttgtggaagaggctgtag

SEQ ID NO: 100228 - RNA, 23 nt, synthetic construct
  source 1..23: mol_type = other RNA
ttgggtgtccccagagaggcagg

SEQ ID NO: 100229 - RNA, 23 nt, synthetic construct
  source 1..23: mol_type = other RNA
tggagcggcaggcggcgaaggtg

SEQ ID NO: 100230 - RNA, 23 nt, synthetic construct
  source 1..23: mol_type = other RNA
tgtgcagccacactcatccacgt

SEQ ID NO: 100231 - RNA, 23 nt, synthetic construct
  source 1..23: mol_type = other RNA
tcgatgtggggctgctgggcagc

SEQ ID NO: 100232 - RNA, 23 nt, synthetic construct
  source 1..23: mol_type = other RNA
tcgatgtggggctgctgggcagc

SEQ ID NO: 100233 - RNA, 23 nt, synthetic construct
  source 1..23: mol_type = other RNA
tcgatgtggggctgctgggcagc

SEQ ID NO: 100234 - RNA, 23 nt, synthetic construct
  source 1..23: mol_type = other RNA
tcgatgtggggctgctgggcagc

SEQ ID NO: 100235 - RNA, 23 nt, synthetic construct
  source 1..23: mol_type = other RNA
tgggagcggcaggcggcgaaggt

SEQ ID NO: 100236 - RNA, 23 nt, synthetic construct
  source 1..23: mol_type = other RNA
tctcctgctcccagttcctgcac

SEQ ID NO: 100237 - RNA, 23 nt, synthetic construct
  source 1..23: mol_type = other RNA
tccctcctgctcccagttcctgc

SEQ ID NO: 100238 - RNA, 23 nt, synthetic construct
  source 1..23: mol_type = other RNA
tgcaggagctgcaggtggtgttg

SEQ ID NO: 100239 - RNA, 23 nt, synthetic construct
  source 1..23: mol_type = other RNA
ttgggagcggcaggcggcgaagg

SEQ ID NO: 100240 - RNA, 23 nt, synthetic construct
  source 1..23: mol_type = other RNA
tctggtggccggggtgctggggc

SEQ ID NO: 100241 - RNA, 23 nt, synthetic construct
  source 1..23: mol_type = other RNA
tctggtggccggggtgctggggc

SEQ ID NO: 100242 - RNA, 23 nt, synthetic construct
  source 1..23: mol_type = other RNA
tctggtggccggggtgctggggc

SEQ ID NO: 100243 - RNA, 23 nt, synthetic construct
  source 1..23: mol_type = other RNA
tctggtggccggggtgctggggc

SEQ ID NO: 100244 - RNA, 23 nt, synthetic construct
  source 1..23: mol_type = other RNA
tgccaggggcaggggagggcgag

SEQ ID NO: 100245 - RNA, 23 nt, synthetic construct
  source 1..23: mol_type = other RNA
tctggtgctgcatggcctgggcc

SEQ ID NO: 100246 - RNA, 23 nt, synthetic construct
  source 1..23: mol_type = other RNA
tggtgcaggtgcaggcctcaagg

SEQ ID NO: 100247 - RNA, 23 nt, synthetic construct
  source 1..23: mol_type = other RNA
tccacggaccggctacgcgtggc

SEQ ID NO: 100248 - RNA, 23 nt, synthetic construct
  source 1..23: mol_type = other RNA
ttctgtgaggatccaggtggtcc

SEQ ID NO: 100249 - RNA, 23 nt, synthetic construct
  source 1..23: mol_type = other RNA
ttctgtgaggatccaggtggtcc

SEQ ID NO: 100250 - RNA, 23 nt, synthetic construct
  source 1..23: mol_type = other RNA
ttctgtgaggatccaggtggtcc

SEQ ID NO: 100251 - RNA, 23 nt, synthetic construct
  source 1..23: mol_type = other RNA
ttctgtgaggatccaggtggtcc

SEQ ID NO: 100252 - RNA, 23 nt, synthetic construct
  source 1..23: mol_type = other RNA
ttctgtgaggatccaggtggtcc

SEQ ID NO: 100253 - RNA, 23 nt, synthetic construct
  source 1..23: mol_type = other RNA
ttctgtgaggatccaggtggtcc

SEQ ID NO: 100254 - RNA, 23 nt, synthetic construct
  source 1..23: mol_type = other RNA
ttatttgcaaaactgggctgggt

SEQ ID NO: 100255 - RNA, 23 nt, synthetic construct
  source 1..23: mol_type = other RNA
tggttgagcagagggggctttgg

SEQ ID NO: 100256 - RNA, 23 nt, synthetic construct
  source 1..23: mol_type = other RNA
tggctctgtgaggatccaggtgg

SEQ ID NO: 100257 - RNA, 23 nt, synthetic construct
  source 1..23: mol_type = other RNA
tggctctgtgaggatccaggtgg

SEQ ID NO: 100258 - RNA, 23 nt, synthetic construct
  source 1..23: mol_type = other RNA
tggctctgtgaggatccaggtgg

SEQ ID NO: 100259 - RNA, 23 nt, synthetic construct
  source 1..23: mol_type = other RNA
tggctctgtgaggatccaggtgg

SEQ ID NO: 100260 - RNA, 23 nt, synthetic construct
  source 1..23: mol_type = other RNA
tggctctgtgaggatccaggtgg

SEQ ID NO: 100261 - RNA, 23 nt, synthetic construct
  source 1..23: mol_type = other RNA
tcaaggtgggccacaggctctcc

SEQ ID NO: 100262 - RNA, 23 nt, synthetic construct
  source 1..23: mol_type = other RNA
tacagaagggcgtgcagccacac

SEQ ID NO: 100263 - RNA, 23 nt, synthetic construct
  source 1..23: mol_type = other RNA
tgggctgggttgagcagaggggg

SEQ ID NO: 100264 - RNA, 23 nt, synthetic construct
  source 1..23: mol_type = other RNA
tctctgtgaggatccaggtggtc

SEQ ID NO: 100265 - RNA, 23 nt, synthetic construct
  source 1..23: mol_type = other RNA
tctctgtgaggatccaggtggtc

SEQ ID NO: 100266 - RNA, 23 nt, synthetic construct
  source 1..23: mol_type = other RNA
tctctgtgaggatccaggtggtc

SEQ ID NO: 100267 - RNA, 23 nt, synthetic construct
  source 1..23: mol_type = other RNA
tctctgtgaggatccaggtggtc

SEQ ID NO: 100268 - RNA, 23 nt, synthetic construct
  source 1..23: mol_type = other RNA
tctctgtgaggatccaggtggtc

SEQ ID NO: 100269 - RNA, 23 nt, synthetic construct
  source 1..23: mol_type = other RNA
tctctgtgaggatccaggtggtc

SEQ ID NO: 100270 - RNA, 23 nt, synthetic construct
  source 1..23: mol_type = other RNA
tctgggttgagcagagggggctt

SEQ ID NO: 100271 - RNA, 23 nt, synthetic construct
  source 1..23: mol_type = other RNA
tttgcaaaactgggctgggttga

SEQ ID NO: 100272 - RNA, 23 nt, synthetic construct
  source 1..23: mol_type = other RNA
tctgtgaggatccaggtggtccc

SEQ ID NO: 100273 - RNA, 23 nt, synthetic construct
  source 1..23: mol_type = other RNA
tctgtgaggatccaggtggtccc

SEQ ID NO: 100274 - RNA, 23 nt, synthetic construct
  source 1..23: mol_type = other RNA
tctgtgaggatccaggtggtccc

SEQ ID NO: 100275 - RNA, 23 nt, synthetic construct
  source 1..23: mol_type = other RNA
tctgtgaggatccaggtggtccc

SEQ ID NO: 100276 - RNA, 23 nt, synthetic construct
  source 1..23: mol_type = other RNA
tctgtgaggatccaggtggtccc

SEQ ID NO: 100277 - RNA, 23 nt, synthetic construct
  source 1..23: mol_type = other RNA
tctgtgaggatccaggtggtccc

SEQ ID NO: 100278 - RNA, 23 nt, synthetic construct
  source 1..23: mol_type = other RNA
ttagttgaagcacatcttgaact

SEQ ID NO: 100279 - RNA, 23 nt, synthetic construct
  source 1..23: mol_type = other RNA
ttagttgaagcacatcttgaact

SEQ ID NO: 100280 - RNA, 23 nt, synthetic construct
  source 1..23: mol_type = other RNA
ttagttgaagcacatcttgaact

SEQ ID NO: 100281 - RNA, 23 nt, synthetic construct
  source 1..23: mol_type = other RNA
ttagttgaagcacatcttgaact

SEQ ID NO: 100282 - RNA, 23 nt, synthetic construct
  source 1..23: mol_type = other RNA
tgacacagtggacacgctgaagg

SEQ ID NO: 100283 - RNA, 23 nt, synthetic construct
  source 1..23: mol_type = other RNA
tcatagttgaagcacatcttgaa

SEQ ID NO: 100284 - RNA, 23 nt, synthetic construct
  source 1..23: mol_type = other RNA
tcatagttgaagcacatcttgaa

SEQ ID NO: 100285 - RNA, 23 nt, synthetic construct
  source 1..23: mol_type = other RNA
tcatagttgaagcacatcttgaa

SEQ ID NO: 100286 - RNA, 23 nt, synthetic construct
  source 1..23: mol_type = other RNA
tcatagttgaagcacatcttgaa

SEQ ID NO: 100287 - RNA, 23 nt, synthetic construct
  source 1..23: mol_type = other RNA
tcagaagggcgtgcagccacact

SEQ ID NO: 100288 - RNA, 23 nt, synthetic construct
  source 1..23: mol_type = other RNA
tcgacactttgatgggcaggtgc

SEQ ID NO: 100289 - RNA, 23 nt, synthetic construct
  source 1..23: mol_type = other RNA
ttgggttgagcagagggggcttt

SEQ ID NO: 100290 - RNA, 23 nt, synthetic construct
  source 1..23: mol_type = other RNA
ttttgcaaaactgggctgggttg

SEQ ID NO: 100291 - RNA, 23 nt, synthetic construct
  source 1..23: mol_type = other RNA
tcgggtccgacactttgatgggc

SEQ ID NO: 100292 - RNA, 23 nt, synthetic construct
  source 1..23: mol_type = other RNA
tgacactttgatgggcaggtgct

SEQ ID NO: 100293 - RNA, 23 nt, synthetic construct
  source 1..23: mol_type = other RNA
tctccccgggcgcggcagagctc

SEQ ID NO: 100294 - RNA, 23 nt, synthetic construct
  source 1..23: mol_type = other RNA
tgggttgagcagagggggctttg

SEQ ID NO: 100295 - RNA, 23 nt, synthetic construct
  source 1..23: mol_type = other RNA
tctcgggtccgacactttgatgg

SEQ ID NO: 100296 - RNA, 23 nt, synthetic construct
  source 1..23: mol_type = other RNA
ttccaggtggacagagcatgggg

SEQ ID NO: 100297 - RNA, 23 nt, synthetic construct
  source 1..23: mol_type = other RNA
tgggcgtgcagccacactcatcc

SEQ ID NO: 100298 - RNA, 23 nt, synthetic construct
  source 1..23: mol_type = other RNA
tcagagcatggggatggaggcag

SEQ ID NO: 100299 - RNA, 23 nt, synthetic construct
  source 1..23: mol_type = other RNA
tggctgggttgagcagagggggc

SEQ ID NO: 100300 - RNA, 23 nt, synthetic construct
  source 1..23: mol_type = other RNA
tagggcgtgcagccacactcatc

SEQ ID NO: 100301 - RNA, 23 nt, synthetic construct
  source 1..23: mol_type = other RNA
tcagagggggctttgggatgctg

SEQ ID NO: 100302 - RNA, 23 nt, synthetic construct
  source 1..23: mol_type = other RNA
tgtgaggatccaggtggtccctg

SEQ ID NO: 100303 - RNA, 23 nt, synthetic construct
  source 1..23: mol_type = other RNA
tgtgaggatccaggtggtccctg

SEQ ID NO: 100304 - RNA, 23 nt, synthetic construct
  source 1..23: mol_type = other RNA
tgtgaggatccaggtggtccctg

SEQ ID NO: 100305 - RNA, 23 nt, synthetic construct
  source 1..23: mol_type = other RNA
tgtgaggatccaggtggtccctg

SEQ ID NO: 100306 - RNA, 23 nt, synthetic construct
  source 1..23: mol_type = other RNA
tgtgaggatccaggtggtccctg

SEQ ID NO: 100307 - RNA, 23 nt, synthetic construct
  source 1..23: mol_type = other RNA
tgtgaggatccaggtggtccctg

SEQ ID NO: 100308 - RNA, 23 nt, synthetic construct
  source 1..23: mol_type = other RNA
tactgggctgggttgagcagagg

SEQ ID NO: 100309 - RNA, 23 nt, synthetic construct
  source 1..23: mol_type = other RNA
tttgcctggaccagcctgtctgc

SEQ ID NO: 100310 - RNA, 23 nt, synthetic construct
  source 1..23: mol_type = other RNA
tctctgtgaggatccaggtcgtc

SEQ ID NO: 100311 - RNA, 23 nt, synthetic construct
  source 1..23: mol_type = other RNA
ttgaggatccaggtggtccctgg

SEQ ID NO: 100312 - RNA, 23 nt, synthetic construct
  source 1..23: mol_type = other RNA
tctctgtgaggatccaggtcgtc

SEQ ID NO: 100313 - RNA, 23 nt, synthetic construct
  source 1..23: mol_type = other RNA
tctctgtgaggatccaggtcgtc

SEQ ID NO: 100314 - RNA, 23 nt, synthetic construct
  source 1..23: mol_type = other RNA
ttgaggatccaggtggtccctgg

SEQ ID NO: 100315 - RNA, 23 nt, synthetic construct
  source 1..23: mol_type = other RNA
ttgaggatccaggtggtccctgg

SEQ ID NO: 100316 - RNA, 23 nt, synthetic construct
  source 1..23: mol_type = other RNA
tctctgtgaggatccaggtcgtc

SEQ ID NO: 100317 - RNA, 23 nt, synthetic construct
  source 1..23: mol_type = other RNA
tctctgtgaggatccaggtcgtc

SEQ ID NO: 100318 - RNA, 23 nt, synthetic construct
  source 1..23: mol_type = other RNA
ttgaggatccaggtggtccctgg

SEQ ID NO: 100319 - RNA, 23 nt, synthetic construct
  source 1..23: mol_type = other RNA
ttgaggatccaggtggtccctgg

SEQ ID NO: 100320 - RNA, 23 nt, synthetic construct
  source 1..23: mol_type = other RNA
ttgaggatccaggtggtccctgg

SEQ ID NO: 100321 - RNA, 23 nt, synthetic construct
  source 1..23: mol_type = other RNA
tacactttggtgggtgggcaggt

SEQ ID NO: 100322 - RNA, 23 nt, synthetic construct
  source 1..23: mol_type = other RNA
tgggcttgcactgcaccgacact

SEQ ID NO: 100323 - RNA, 23 nt, synthetic construct
  source 1..23: mol_type = other RNA
tcaggtggacagagcatggggat

SEQ ID NO: 100324 - RNA, 23 nt, synthetic construct
  source 1..23: mol_type = other RNA
ttggctccaggtggacagagcat

SEQ ID NO: 100325 - RNA, 23 nt, synthetic construct
  source 1..23: mol_type = other RNA
tggcccaaggttttcatgatcag

SEQ ID NO: 100326 - RNA, 23 nt, synthetic construct
  source 1..23: mol_type = other RNA
tcttgcctggaccagcctgtctg

SEQ ID NO: 100327 - RNA, 23 nt, synthetic construct
  source 1..23: mol_type = other RNA
tgccttgcctggaccagcctgtc

SEQ ID NO: 100328 - RNA, 23 nt, synthetic construct
  source 1..23: mol_type = other RNA
tcaaaactgggctgggttgagca

SEQ ID NO: 100329 - RNA, 23 nt, synthetic construct
  source 1..23: mol_type = other RNA
tgaggacacagtggacacgctga

SEQ ID NO: 100330 - RNA, 23 nt, synthetic construct
  source 1..23: mol_type = other RNA
tgctccaggtggacagagcatgg

SEQ ID NO: 100331 - RNA, 23 nt, synthetic construct
  source 1..23: mol_type = other RNA
tgggcaaggccaaggtgggccac

SEQ ID NO: 100332 - RNA, 23 nt, synthetic construct
  source 1..23: mol_type = other RNA
tttgagcagagggggctttggga

SEQ ID NO: 100333 - RNA, 23 nt, synthetic construct
  source 1..23: mol_type = other RNA
tccgccagagccaacaccagcgt

SEQ ID NO: 100334 - RNA, 23 nt, synthetic construct
  source 1..23: mol_type = other RNA
ttcgtccctggagtggaggaggg

SEQ ID NO: 100335 - RNA, 23 nt, synthetic construct
  source 1..23: mol_type = other RNA
tgacagagcatggggatggaggc

SEQ ID NO: 100336 - RNA, 23 nt, synthetic construct
  source 1..23: mol_type = other RNA
tcactccccgggcgcggcagagc

SEQ ID NO: 100337 - RNA, 23 nt, synthetic construct
  source 1..23: mol_type = other RNA
tctggtggctgtgggtgtggtgg

SEQ ID NO: 100338 - RNA, 23 nt, synthetic construct
  source 1..23: mol_type = other RNA
taactggtggctgtgggtgtggt

SEQ ID NO: 100339 - RNA, 23 nt, synthetic construct
  source 1..23: mol_type = other RNA
tctggtggctgtgggtgtggtgg

SEQ ID NO: 100340 - RNA, 23 nt, synthetic construct
  source 1..23: mol_type = other RNA
taactggtggctgtgggtgtggt

SEQ ID NO: 100341 - RNA, 23 nt, synthetic construct
  source 1..23: mol_type = other RNA
ttgagcagagggggctttgggat

SEQ ID NO: 100342 - RNA, 23 nt, synthetic construct
  source 1..23: mol_type = other RNA
tcaaggccaaggtgggccacagg

SEQ ID NO: 100343 - RNA, 23 nt, synthetic construct
  source 1..23: mol_type = other RNA
tctccggaggcactcggccccag

SEQ ID NO: 100344 - RNA, 23 nt, synthetic construct
  source 1..23: mol_type = other RNA
tggtggacagagcatggggatgg

SEQ ID NO: 100345 - RNA, 23 nt, synthetic construct
  source 1..23: mol_type = other RNA
tcctggctccaggtggacagagc

SEQ ID NO: 100346 - RNA, 23 nt, synthetic construct
  source 1..23: mol_type = other RNA
ttcctgccctggcgggcacacag

SEQ ID NO: 100347 - RNA, 23 nt, synthetic construct
  source 1..23: mol_type = other RNA
tggcgcagggacacagaagggcg

SEQ ID NO: 100348 - RNA, 23 nt, synthetic construct
  source 1..23: mol_type = other RNA
tggacagagcatggggatggagg

SEQ ID NO: 100349 - RNA, 23 nt, synthetic construct
  source 1..23: mol_type = other RNA
tggggcaaggccaaggtgggcca

SEQ ID NO: 100350 - RNA, 23 nt, synthetic construct
  source 1..23: mol_type = other RNA
tcatggggatggaggcagaacgt

SEQ ID NO: 100351 - RNA, 23 nt, synthetic construct
  source 1..23: mol_type = other RNA
tgcatggggatggaggcagaacg

SEQ ID NO: 100352 - RNA, 23 nt, synthetic construct
  source 1..23: mol_type = other RNA
tgagcatggggatggaggcagaa

SEQ ID NO: 100353 - RNA, 23 nt, synthetic construct
  source 1..23: mol_type = other RNA
tggacacagtggacacgctgaag

SEQ ID NO: 100354 - RNA, 23 nt, synthetic construct
  source 1..23: mol_type = other RNA
tatagttgaagcacatcttgaac

SEQ ID NO: 100355 - RNA, 23 nt, synthetic construct
  source 1..23: mol_type = other RNA
tatagttgaagcacatcttgaac

SEQ ID NO: 100356 - RNA, 23 nt, synthetic construct
  source 1..23: mol_type = other RNA
tatagttgaagcacatcttgaac

SEQ ID NO: 100357 - RNA, 23 nt, synthetic construct
  source 1..23: mol_type = other RNA
tatagttgaagcacatcttgaac

SEQ ID NO: 100358 - RNA, 23 nt, synthetic construct
  source 1..23: mol_type = other RNA
taggggtcctgctggcccctcac

SEQ ID NO: 100359 - RNA, 23 nt, synthetic construct
  source 1..23: mol_type = other RNA
tgtccagcgtgtggcagctccgg

SEQ ID NO: 100360 - RNA, 23 nt, synthetic construct
  source 1..23: mol_type = other RNA
tgtggaggagggtgtggccgtgg

SEQ ID NO: 100361 - RNA, 23 nt, synthetic construct
  source 1..23: mol_type = other RNA
tgctggagacagtcgtccctctg

SEQ ID NO: 100362 - RNA, 23 nt, synthetic construct
  source 1..23: mol_type = other RNA
tcagggacacagaagggcgtgca

SEQ ID NO: 100363 - RNA, 23 nt, synthetic construct
  source 1..23: mol_type = other RNA
tgtggacagagcatggggatgga

SEQ ID NO: 100364 - RNA, 23 nt, synthetic construct
  source 1..23: mol_type = other RNA
tgggtcctgctggcccctcaccc

SEQ ID NO: 100365 - RNA, 23 nt, synthetic construct
  source 1..23: mol_type = other RNA
tggccaaggtgggccacaggctc

SEQ ID NO: 100366 - RNA, 23 nt, synthetic construct
  source 1..23: mol_type = other RNA
ttgcaaaactgggctgggttgag

SEQ ID NO: 100367 - RNA, 23 nt, synthetic construct
  source 1..23: mol_type = other RNA
tccaaggtgggccacaggctctc

SEQ ID NO: 100368 - RNA, 23 nt, synthetic construct
  source 1..23: mol_type = other RNA
ttggaggagggtgtggctgtgga

SEQ ID NO: 100369 - RNA, 23 nt, synthetic construct
  source 1..23: mol_type = other RNA
tgtggaggagggcatggccgtag

SEQ ID NO: 100370 - RNA, 23 nt, synthetic construct
  source 1..23: mol_type = other RNA
ttggaggagggtgtggctgtgga

SEQ ID NO: 100371 - RNA, 23 nt, synthetic construct
  source 1..23: mol_type = other RNA
ttggaggagggtgtggctgtgga

SEQ ID NO: 100372 - RNA, 23 nt, synthetic construct
  source 1..23: mol_type = other RNA
tgtggaggagggcatggccgtag

SEQ ID NO: 100373 - RNA, 23 nt, synthetic construct
  source 1..23: mol_type = other RNA
ttggaggagggtgtggctgtgga

SEQ ID NO: 100374 - RNA, 23 nt, synthetic construct
  source 1..23: mol_type = other RNA
tactccccgggcgcggcagagct

SEQ ID NO: 100375 - RNA, 23 nt, synthetic construct
  source 1..23: mol_type = other RNA
tcactgcacactccccgggcgcg

SEQ ID NO: 100376 - RNA, 23 nt, synthetic construct
  source 1..23: mol_type = other RNA
tggcccggggcctggtcacggtt

SEQ ID NO: 100377 - RNA, 23 nt, synthetic construct
  source 1..23: mol_type = other RNA
tcagagccaacaccagcgtccgg

SEQ ID NO: 100378 - RNA, 23 nt, synthetic construct
  source 1..23: mol_type = other RNA
tgggccctgggtctctgcctgcg

SEQ ID NO: 100379 - RNA, 23 nt, synthetic construct
  source 1..23: mol_type = other RNA
tgtggaggagggtgtggctgtgg

SEQ ID NO: 100380 - RNA, 23 nt, synthetic construct
  source 1..23: mol_type = other RNA
tagtggaggagggtgtggctgtg

SEQ ID NO: 100381 - RNA, 23 nt, synthetic construct
  source 1..23: mol_type = other RNA
tgagtggaggagggtgtggctgt

SEQ ID NO: 100382 - RNA, 23 nt, synthetic construct
  source 1..23: mol_type = other RNA
ttggagtggaggagggtgtggct

SEQ ID NO: 100383 - RNA, 23 nt, synthetic construct
  source 1..23: mol_type = other RNA
tgtggtccctggggtggaggacg

SEQ ID NO: 100384 - RNA, 23 nt, synthetic construct
  source 1..23: mol_type = other RNA
tatccaggtggtccctggggtgg

SEQ ID NO: 100385 - RNA, 23 nt, synthetic construct
  source 1..23: mol_type = other RNA
tgatccaggtggtccctggggtg

SEQ ID NO: 100386 - RNA, 23 nt, synthetic construct
  source 1..23: mol_type = other RNA
tgtggaggagggtgtggctgtgg

SEQ ID NO: 100387 - RNA, 23 nt, synthetic construct
  source 1..23: mol_type = other RNA
tagtggaggagggtgtggctgtg

SEQ ID NO: 100388 - RNA, 23 nt, synthetic construct
  source 1..23: mol_type = other RNA
tgagtggaggagggtgtggctgt

SEQ ID NO: 100389 - RNA, 23 nt, synthetic construct
  source 1..23: mol_type = other RNA
ttggagtggaggagggtgtggct

SEQ ID NO: 100390 - RNA, 23 nt, synthetic construct
  source 1..23: mol_type = other RNA
tgtccctggagtggaggagggcg

SEQ ID NO: 100391 - RNA, 23 nt, synthetic construct
  source 1..23: mol_type = other RNA
tcgtccctggagtggaggagggc

SEQ ID NO: 100392 - RNA, 23 nt, synthetic construct
  source 1..23: mol_type = other RNA
tactggtggctgtgggtgtggtg

SEQ ID NO: 100393 - RNA, 23 nt, synthetic construct
  source 1..23: mol_type = other RNA
tgtggtccctggggtggaggacg

SEQ ID NO: 100394 - RNA, 23 nt, synthetic construct
  source 1..23: mol_type = other RNA
tatccaggtggtccctggggtgg

SEQ ID NO: 100395 - RNA, 23 nt, synthetic construct
  source 1..23: mol_type = other RNA
tgatccaggtggtccctggggtg

SEQ ID NO: 100396 - RNA, 23 nt, synthetic construct
  source 1..23: mol_type = other RNA
tgtggtccctggggtggaggacg

SEQ ID NO: 100397 - RNA, 23 nt, synthetic construct
  source 1..23: mol_type = other RNA
tatccaggtggtccctggggtgg

SEQ ID NO: 100398 - RNA, 23 nt, synthetic construct
  source 1..23: mol_type = other RNA
tgatccaggtggtccctggggtg

SEQ ID NO: 100399 - RNA, 23 nt, synthetic construct
  source 1..23: mol_type = other RNA
tgtggaggagggtgtggctgtgg

SEQ ID NO: 100400 - RNA, 23 nt, synthetic construct
  source 1..23: mol_type = other RNA
tagtggaggagggtgtggctgtg

SEQ ID NO: 100401 - RNA, 23 nt, synthetic construct
  source 1..23: mol_type = other RNA
tgagtggaggagggtgtggctgt

SEQ ID NO: 100402 - RNA, 23 nt, synthetic construct
  source 1..23: mol_type = other RNA
ttggagtggaggagggtgtggct

SEQ ID NO: 100403 - RNA, 23 nt, synthetic construct
  source 1..23: mol_type = other RNA
tactggtggctgtgggtgtggtg

SEQ ID NO: 100404 - RNA, 23 nt, synthetic construct
  source 1..23: mol_type = other RNA
tgtggtccctggggtggaggacg

SEQ ID NO: 100405 - RNA, 23 nt, synthetic construct
  source 1..23: mol_type = other RNA
tatccaggtggtccctggggtgg

SEQ ID NO: 100406 - RNA, 23 nt, synthetic construct
  source 1..23: mol_type = other RNA
tgatccaggtggtccctggggtg

SEQ ID NO: 100407 - RNA, 23 nt, synthetic construct
  source 1..23: mol_type = other RNA
tgtggtccctggggtggaggacg

SEQ ID NO: 100408 - RNA, 23 nt, synthetic construct
  source 1..23: mol_type = other RNA
tatccaggtggtccctggggtgg

SEQ ID NO: 100409 - RNA, 23 nt, synthetic construct
  source 1..23: mol_type = other RNA
tgatccaggtggtccctggggtg

SEQ ID NO: 100410 - RNA, 23 nt, synthetic construct
  source 1..23: mol_type = other RNA
tgtggaggagggtgtggctgtgg

SEQ ID NO: 100411 - RNA, 23 nt, synthetic construct
  source 1..23: mol_type = other RNA
tagtggaggagggtgtggctgtg

SEQ ID NO: 100412 - RNA, 23 nt, synthetic construct
  source 1..23: mol_type = other RNA
tgagtggaggagggtgtggctgt

SEQ ID NO: 100413 - RNA, 23 nt, synthetic construct
  source 1..23: mol_type = other RNA
ttggagtggaggagggtgtggct

SEQ ID NO: 100414 - RNA, 23 nt, synthetic construct
  source 1..23: mol_type = other RNA
tggaggagggtgtggccgtggaa

SEQ ID NO: 100415 - RNA, 23 nt, synthetic construct
  source 1..23: mol_type = other RNA
ttggaggagggtgtggccgtgga

SEQ ID NO: 100416 - RNA, 23 nt, synthetic construct
  source 1..23: mol_type = other RNA
tagtggaggagggtgtggccgtg

SEQ ID NO: 100417 - RNA, 23 nt, synthetic construct
  source 1..23: mol_type = other RNA
tccccagagtggaggagggtgtg

SEQ ID NO: 100418 - RNA, 23 nt, synthetic construct
  source 1..23: mol_type = other RNA
tgtcgtccccagagtggaggagg

SEQ ID NO: 100419 - RNA, 23 nt, synthetic construct
  source 1..23: mol_type = other RNA
tgtggtccctggggtggaggaca

SEQ ID NO: 100420 - RNA, 23 nt, synthetic construct
  source 1..23: mol_type = other RNA
tatccaggtggtccctggggtgg

SEQ ID NO: 100421 - RNA, 23 nt, synthetic construct
  source 1..23: mol_type = other RNA
tgatccaggtggtccctggggtg

SEQ ID NO: 100422 - RNA, 23 nt, synthetic construct
  source 1..23: mol_type = other RNA
tgaggaggacacagtggacacgc

SEQ ID NO: 100423 - RNA, 23 nt, synthetic construct
  source 1..23: mol_type = other RNA
tttggtgggtgggcaggtgaggt

SEQ ID NO: 100424 - RNA, 23 nt, synthetic construct
  source 1..23: mol_type = other RNA
tggcaggggcttgcactgcaccg

SEQ ID NO: 100425 - RNA, 23 nt, synthetic construct
  source 1..23: mol_type = other RNA
tcacagggcaggggcttgcactg

SEQ ID NO: 100426 - RNA, 23 nt, synthetic construct
  source 1..23: mol_type = other RNA
tctcctgccctggcgggcacaca

SEQ ID NO: 100427 - RNA, 23 nt, synthetic construct
  source 1..23: mol_type = other RNA
tcgcagggacacagaagggcgtg

SEQ ID NO: 100428 - RNA, 23 nt, synthetic construct
  source 1..23: mol_type = other RNA
tgcgcagggacacagaagggcgt

SEQ ID NO: 100429 - RNA, 23 nt, synthetic construct
  source 1..23: mol_type = other RNA
tagagcatggggatggaggcaga

SEQ ID NO: 100430 - RNA, 23 nt, synthetic construct
  source 1..23: mol_type = other RNA
ttggacagagcatggggatggag

SEQ ID NO: 100431 - RNA, 23 nt, synthetic construct
  source 1..23: mol_type = other RNA
ttcctgctggcccctcacccttc

SEQ ID NO: 100432 - RNA, 23 nt, synthetic construct
  source 1..23: mol_type = other RNA
tggtcctgctggcccctcaccct

SEQ ID NO: 100433 - RNA, 23 nt, synthetic construct
  source 1..23: mol_type = other RNA
taaaggggtcctgctggcccctc

SEQ ID NO: 100434 - RNA, 23 nt, synthetic construct
  source 1..23: mol_type = other RNA
tgtgggccacaggctctcccagg

SEQ ID NO: 100435 - RNA, 23 nt, synthetic construct
  source 1..23: mol_type = other RNA
taggccaaggtgggccacaggct

SEQ ID NO: 100436 - RNA, 23 nt, synthetic construct
  source 1..23: mol_type = other RNA
taaggccaaggtgggccacaggc

SEQ ID NO: 100437 - RNA, 23 nt, synthetic construct
  source 1..23: mol_type = other RNA
tagcagagggggctttgggatgc

SEQ ID NO: 100438 - RNA, 23 nt, synthetic construct
  source 1..23: mol_type = other RNA
tgctgggttgagcagagggggct

SEQ ID NO: 100439 - RNA, 23 nt, synthetic construct
  source 1..23: mol_type = other RNA
tgagcagagggggctttgggatg

SEQ ID NO: 100440 - RNA, 23 nt, synthetic construct
  source 1..23: mol_type = other RNA
tggaactggtggctgtgggtgtg

SEQ ID NO: 100441 - RNA, 23 nt, synthetic construct
  source 1..23: mol_type = other RNA
ttggaactggtggctgtgggtgt

SEQ ID NO: 100442 - RNA, 23 nt, synthetic construct
  source 1..23: mol_type = other RNA
tggaactggtggctgtgggtgtg

SEQ ID NO: 100443 - RNA, 23 nt, synthetic construct
  source 1..23: mol_type = other RNA
ttggaactggtggctgtgggtgt

SEQ ID NO: 100444 - RNA, 23 nt, synthetic construct
  source 1..23: mol_type = other RNA
tggaggagggtgtggctgtggac

SEQ ID NO: 100445 - RNA, 23 nt, synthetic construct
  source 1..23: mol_type = other RNA
tttcctggggtggaggagggggt

SEQ ID NO: 100446 - RNA, 23 nt, synthetic construct
  source 1..23: mol_type = other RNA
tggaggagggtgtggctgtggac

SEQ ID NO: 100447 - RNA, 23 nt, synthetic construct
  source 1..23: mol_type = other RNA
tttcctggggtggaggagggggt

SEQ ID NO: 100448 - RNA, 23 nt, synthetic construct
  source 1..23: mol_type = other RNA
tttcctggggtggaggagggggt

SEQ ID NO: 100449 - RNA, 23 nt, synthetic construct
  source 1..23: mol_type = other RNA
tggaggagggtgtggctgtggac

SEQ ID NO: 100450 - RNA, 23 nt, synthetic construct
  source 1..23: mol_type = other RNA
tggaggagggtgtggctgtggac

SEQ ID NO: 100451 - RNA, 23 nt, synthetic construct
  source 1..23: mol_type = other RNA
tttcctggggtggaggagggggt

SEQ ID NO: 100452 - RNA, 23 nt, synthetic construct
  source 1..23: mol_type = other RNA
ttgggccacaggctctcccaggg

SEQ ID NO: 100453 - RNA, 23 nt, synthetic construct
  source 1..23: mol_type = other RNA
tgaggagggtgtggctgtggaca

SEQ ID NO: 100454 - RNA, 23 nt, synthetic construct
  source 1..23: mol_type = other RNA
tgaggagggtgtggctgtggaca

SEQ ID NO: 100455 - RNA, 23 nt, synthetic construct
  source 1..23: mol_type = other RNA
tgtggctgtgggtgtggtggccg

SEQ ID NO: 100456 - RNA, 23 nt, synthetic construct
  source 1..23: mol_type = other RNA
tgaggagggtgtggctgtggaca

SEQ ID NO: 100457 - RNA, 23 nt, synthetic construct
  source 1..23: mol_type = other RNA
tgtggctgtgggtgtggtggccg

SEQ ID NO: 100458 - RNA, 23 nt, synthetic construct
  source 1..23: mol_type = other RNA
tgaggagggtgtggctgtggaca

SEQ ID NO: 100459 - RNA, 23 nt, synthetic construct
  source 1..23: mol_type = other RNA
ttccccagagtggaggagggtgt

SEQ ID NO: 100460 - RNA, 23 nt, synthetic construct
  source 1..23: mol_type = other RNA
tagtcagcactttggtagtgtga

SEQ ID NO: 100461 - RNA, 23 nt, synthetic construct
  source 1..23: mol_type = other RNA
tccgccgtgggtgcaggggcact

SEQ ID NO: 100462 - RNA, 23 nt, synthetic construct
  source 1..23: mol_type = other RNA
tgcagttctccgctgtggggacc

SEQ ID NO: 100463 - RNA, 23 nt, synthetic construct
  source 1..23: mol_type = other RNA
tgccttgatgacaacacgggtga

SEQ ID NO: 100464 - RNA, 23 nt, synthetic construct
  source 1..23: mol_type = other RNA
tgggccttgatgacaacacgggt

SEQ ID NO: 100465 - RNA, 23 nt, synthetic construct
  source 1..23: mol_type = other RNA
ttgttcccaaactccagtgcgtc

SEQ ID NO: 100466 - RNA, 23 nt, synthetic construct
  source 1..23: mol_type = other RNA
tcgctgcaggtgacgtcggcctc

SEQ ID NO: 100467 - RNA, 23 nt, synthetic construct
  source 1..23: mol_type = other RNA
tggacagggctggagtcgagtgc

SEQ ID NO: 100468 - RNA, 23 nt, synthetic construct
  source 1..23: mol_type = other RNA
tggacagggctggagtcgagtgc

SEQ ID NO: 100469 - RNA, 23 nt, synthetic construct
  source 1..23: mol_type = other RNA
tggacagggctggagtcgagtgc

SEQ ID NO: 100470 - RNA, 23 nt, synthetic construct
  source 1..23: mol_type = other RNA
ttagttctcattctccacactga

SEQ ID NO: 100471 - RNA, 23 nt, synthetic construct
  source 1..23: mol_type = other RNA
tcagttctccgctgtggggaccc

SEQ ID NO: 100472 - RNA, 23 nt, synthetic construct
  source 1..23: mol_type = other RNA
tcatagtggaagtcacagggctg

SEQ ID NO: 100473 - RNA, 23 nt, synthetic construct
  source 1..23: mol_type = other RNA
tgtgtgagctgttcctggggtgg

SEQ ID NO: 100474 - RNA, 23 nt, synthetic construct
  source 1..23: mol_type = other RNA
tgtgtgagctgttcctggggtgg

SEQ ID NO: 100475 - RNA, 23 nt, synthetic construct
  source 1..23: mol_type = other RNA
tgtgtgagctgttcctggggtgg

SEQ ID NO: 100476 - RNA, 23 nt, synthetic construct
  source 1..23: mol_type = other RNA
tgtgtgagctgttcctggggtgg

SEQ ID NO: 100477 - RNA, 23 nt, synthetic construct
  source 1..23: mol_type = other RNA
tgtgtgagctgttcctggggtgg

SEQ ID NO: 100478 - RNA, 23 nt, synthetic construct
  source 1..23: mol_type = other RNA
tgctggggcagtggccgtagttg

SEQ ID NO: 100479 - RNA, 23 nt, synthetic construct
  source 1..23: mol_type = other RNA
tgctggggcagtggccgtagttg

SEQ ID NO: 100480 - RNA, 23 nt, synthetic construct
  source 1..23: mol_type = other RNA
tgctggggcagtggccgtagttg

SEQ ID NO: 100481 - RNA, 23 nt, synthetic construct
  source 1..23: mol_type = other RNA
tgctggggcagtggccgtagttg

SEQ ID NO: 100482 - RNA, 23 nt, synthetic construct
  source 1..23: mol_type = other RNA
tactgagggagcaggggtcctca

SEQ ID NO: 100483 - RNA, 23 nt, synthetic construct
  source 1..23: mol_type = other RNA
tgttcccaaactccagtgcgtcc

SEQ ID NO: 100484 - RNA, 23 nt, synthetic construct
  source 1..23: mol_type = other RNA
tctggggcagtggccgtagttgc

SEQ ID NO: 100485 - RNA, 23 nt, synthetic construct
  source 1..23: mol_type = other RNA
ttgctggggcagtggccgtagtt

SEQ ID NO: 100486 - RNA, 23 nt, synthetic construct
  source 1..23: mol_type = other RNA
tctggggcagtggccgtagttgc

SEQ ID NO: 100487 - RNA, 23 nt, synthetic construct
  source 1..23: mol_type = other RNA
ttgctggggcagtggccgtagtt

SEQ ID NO: 100488 - RNA, 23 nt, synthetic construct
  source 1..23: mol_type = other RNA
tctggggcagtggccgtagttgc

SEQ ID NO: 100489 - RNA, 23 nt, synthetic construct
  source 1..23: mol_type = other RNA
ttgctggggcagtggccgtagtt

SEQ ID NO: 100490 - RNA, 23 nt, synthetic construct
  source 1..23: mol_type = other RNA
tctggggcagtggccgtagttgc

SEQ ID NO: 100491 - RNA, 23 nt, synthetic construct
  source 1..23: mol_type = other RNA
ttgctggggcagtggccgtagtt

SEQ ID NO: 100492 - RNA, 23 nt, synthetic construct
  source 1..23: mol_type = other RNA
tgaaggtgggacagcagtcgccc

SEQ ID NO: 100493 - RNA, 23 nt, synthetic construct
  source 1..23: mol_type = other RNA
tgctgcaggtgacgtcggcctca

SEQ ID NO: 100494 - RNA, 23 nt, synthetic construct
  source 1..23: mol_type = other RNA
tcggccgccgtgggtgcaggggc

SEQ ID NO: 100495 - RNA, 23 nt, synthetic construct
  source 1..23: mol_type = other RNA
tattctccacactgagggagcag

SEQ ID NO: 100496 - RNA, 23 nt, synthetic construct
  source 1..23: mol_type = other RNA
tggccgccgtgggtgcaggggca

SEQ ID NO: 100497 - RNA, 23 nt, synthetic construct
  source 1..23: mol_type = other RNA
tgctgtaggtgcggccgccgtgg

SEQ ID NO: 100498 - RNA, 23 nt, synthetic construct
  source 1..23: mol_type = other RNA
tttctgcagagaggctcccaggc

SEQ ID NO: 100499 - RNA, 23 nt, synthetic construct
  source 1..23: mol_type = other RNA
tgcagtctctggagtggaggagg

SEQ ID NO: 100500 - RNA, 23 nt, synthetic construct
  source 1..23: mol_type = other RNA
tgcagtctctggagtggaggagg

SEQ ID NO: 100501 - RNA, 23 nt, synthetic construct
  source 1..23: mol_type = other RNA
ttgtgggtgtggtggttgtgggt

SEQ ID NO: 100502 - RNA, 23 nt, synthetic construct
  source 1..23: mol_type = other RNA
ttggaagtcacagggctggctcg

SEQ ID NO: 100503 - RNA, 23 nt, synthetic construct
  source 1..23: mol_type = other RNA
tggaagtcacagggctggctcgg

SEQ ID NO: 100504 - RNA, 23 nt, synthetic construct
  source 1..23: mol_type = other RNA
tatagtggaagtcacagggctgg

SEQ ID NO: 100505 - RNA, 23 nt, synthetic construct
  source 1..23: mol_type = other RNA
ttgacaacacgggtgaccacagg

SEQ ID NO: 100506 - RNA, 23 nt, synthetic construct
  source 1..23: mol_type = other RNA
taggtgggacagcagtcgccctc

SEQ ID NO: 100507 - RNA, 23 nt, synthetic construct
  source 1..23: mol_type = other RNA
tttttctgcagagaggctcccag

SEQ ID NO: 100508 - RNA, 23 nt, synthetic construct
  source 1..23: mol_type = other RNA
ttagtggaagtcacagggctggc

SEQ ID NO: 100509 - RNA, 23 nt, synthetic construct
  source 1..23: mol_type = other RNA
tgacaacacgggtgaccacaggc

SEQ ID NO: 100510 - RNA, 23 nt, synthetic construct
  source 1..23: mol_type = other RNA
tactcgaggcccaggggctgctc

SEQ ID NO: 100511 - RNA, 23 nt, synthetic construct
  source 1..23: mol_type = other RNA
tcggggtgctggggcagtggccg

SEQ ID NO: 100512 - RNA, 23 nt, synthetic construct
  source 1..23: mol_type = other RNA
tactcgaggcccaggggctgctc

SEQ ID NO: 100513 - RNA, 23 nt, synthetic construct
  source 1..23: mol_type = other RNA
tcggggtgctggggcagtggccg

SEQ ID NO: 100514 - RNA, 23 nt, synthetic construct
  source 1..23: mol_type = other RNA
tactcgaggcccaggggctgctc

SEQ ID NO: 100515 - RNA, 23 nt, synthetic construct
  source 1..23: mol_type = other RNA
tcggggtgctggggcagtggccg

SEQ ID NO: 100516 - RNA, 23 nt, synthetic construct
  source 1..23: mol_type = other RNA
tactcgaggcccaggggctgctc

SEQ ID NO: 100517 - RNA, 23 nt, synthetic construct
  source 1..23: mol_type = other RNA
tcggggtgctggggcagtggccg

SEQ ID NO: 100518 - RNA, 23 nt, synthetic construct
  source 1..23: mol_type = other RNA
tccctgggccttgatgacaacac

SEQ ID NO: 100519 - RNA, 23 nt, synthetic construct
  source 1..23: mol_type = other RNA
tggccttgatgacaacacgggtg

SEQ ID NO: 100520 - RNA, 23 nt, synthetic construct
  source 1..23: mol_type = other RNA
tgcagtggccgtagttgcagcag

SEQ ID NO: 100521 - RNA, 23 nt, synthetic construct
  source 1..23: mol_type = other RNA
tgcagtggccgtagttgcagcag

SEQ ID NO: 100522 - RNA, 23 nt, synthetic construct
  source 1..23: mol_type = other RNA
tgcagtggccgtagttgcagcag

SEQ ID NO: 100523 - RNA, 23 nt, synthetic construct
  source 1..23: mol_type = other RNA
tgcagtggccgtagttgcagcag

SEQ ID NO: 100524 - RNA, 23 nt, synthetic construct
  source 1..23: mol_type = other RNA
tagtccctggactggaggaggga

SEQ ID NO: 100525 - RNA, 23 nt, synthetic construct
  source 1..23: mol_type = other RNA
tcagtccctggactggaggaggg

SEQ ID NO: 100526 - RNA, 23 nt, synthetic construct
  source 1..23: mol_type = other RNA
ttgagctgttcctggggtggagg

SEQ ID NO: 100527 - RNA, 23 nt, synthetic construct
  source 1..23: mol_type = other RNA
ttgagctgttcctggggtggagg

SEQ ID NO: 100528 - RNA, 23 nt, synthetic construct
  source 1..23: mol_type = other RNA
tagtccctggactggaggaggga

SEQ ID NO: 100529 - RNA, 23 nt, synthetic construct
  source 1..23: mol_type = other RNA
tcagtccctggactggaggaggg

SEQ ID NO: 100530 - RNA, 23 nt, synthetic construct
  source 1..23: mol_type = other RNA
ttgagctgttcctggggtggagg

SEQ ID NO: 100531 - RNA, 23 nt, synthetic construct
  source 1..23: mol_type = other RNA
ttgagctgttcctggggtggaag

SEQ ID NO: 100532 - RNA, 23 nt, synthetic construct
  source 1..23: mol_type = other RNA
tagtccctggactggaggaggga

SEQ ID NO: 100533 - RNA, 23 nt, synthetic construct
  source 1..23: mol_type = other RNA
tcagtccctggactggaggaggg

SEQ ID NO: 100534 - RNA, 23 nt, synthetic construct
  source 1..23: mol_type = other RNA
ttgagctgttcctggggtggagg

SEQ ID NO: 100535 - RNA, 23 nt, synthetic construct
  source 1..23: mol_type = other RNA
tagtggaagtcacagggctggct

SEQ ID NO: 100536 - RNA, 23 nt, synthetic construct
  source 1..23: mol_type = other RNA
ttggggagcactgcaggggtgcg

SEQ ID NO: 100537 - RNA, 23 nt, synthetic construct
  source 1..23: mol_type = other RNA
tctgttcctggggtggaggaggg

SEQ ID NO: 100538 - RNA, 23 nt, synthetic construct
  source 1..23: mol_type = other RNA
tctgttcctggggtggaggaggg

SEQ ID NO: 100539 - RNA, 23 nt, synthetic construct
  source 1..23: mol_type = other RNA
tctgttcctggggtggaggaggg

SEQ ID NO: 100540 - RNA, 23 nt, synthetic construct
  source 1..23: mol_type = other RNA
tctgttcctggggtggaggaggg

SEQ ID NO: 100541 - RNA, 23 nt, synthetic construct
  source 1..23: mol_type = other RNA
tgggcaggtccgggggcagagct

SEQ ID NO: 100542 - RNA, 23 nt, synthetic construct
  source 1..23: mol_type = other RNA
ttctgcagagaggctcccaggca

SEQ ID NO: 100543 - RNA, 23 nt, synthetic construct
  source 1..23: mol_type = other RNA
tggtgctggggcagtggccgtag

SEQ ID NO: 100544 - RNA, 23 nt, synthetic construct
  source 1..23: mol_type = other RNA
tggtgctggggcagtggccgtag

SEQ ID NO: 100545 - RNA, 23 nt, synthetic construct
  source 1..23: mol_type = other RNA
tggtgctggggcagtggccgtag

SEQ ID NO: 100546 - RNA, 23 nt, synthetic construct
  source 1..23: mol_type = other RNA
tggtgctggggcagtggccgtag

SEQ ID NO: 100547 - RNA, 23 nt, synthetic construct
  source 1..23: mol_type = other RNA
tgagctgttcctggggtggagga

SEQ ID NO: 100548 - RNA, 23 nt, synthetic construct
  source 1..23: mol_type = other RNA
tgagctgttcctggggtggagga

SEQ ID NO: 100549 - RNA, 23 nt, synthetic construct
  source 1..23: mol_type = other RNA
tgagctgttcctggggtggagga

SEQ ID NO: 100550 - RNA, 23 nt, synthetic construct
  source 1..23: mol_type = other RNA
tgagctgttcctggggtggagga

SEQ ID NO: 100551 - RNA, 23 nt, synthetic construct
  source 1..23: mol_type = other RNA
tgctggggagcactgcaggggtg

SEQ ID NO: 100552 - RNA, 23 nt, synthetic construct
  source 1..23: mol_type = other RNA
ttgctggggagcactgcaggggt

SEQ ID NO: 100553 - RNA, 23 nt, synthetic construct
  source 1..23: mol_type = other RNA
ttccctggactggaggagggagt

SEQ ID NO: 100554 - RNA, 23 nt, synthetic construct
  source 1..23: mol_type = other RNA
ttctctggagtggaggagggtgt

SEQ ID NO: 100555 - RNA, 23 nt, synthetic construct
  source 1..23: mol_type = other RNA
ttctctggagtggaggagggtgt

SEQ ID NO: 100556 - RNA, 23 nt, synthetic construct
  source 1..23: mol_type = other RNA
ttccctggactggaggagggagt

SEQ ID NO: 100557 - RNA, 23 nt, synthetic construct
  source 1..23: mol_type = other RNA
ttctctggagtggaggagggtgt

SEQ ID NO: 100558 - RNA, 23 nt, synthetic construct
  source 1..23: mol_type = other RNA
ttccctggactggaggagggagt

SEQ ID NO: 100559 - RNA, 23 nt, synthetic construct
  source 1..23: mol_type = other RNA
ttctctggagtggaggagggtgt

SEQ ID NO: 100560 - RNA, 23 nt, synthetic construct
  source 1..23: mol_type = other RNA
tgcactccccacagcactgcccg

SEQ ID NO: 100561 - RNA, 23 nt, synthetic construct
  source 1..23: mol_type = other RNA
tggatggaggagggggtcaccgt

SEQ ID NO: 100562 - RNA, 23 nt, synthetic construct
  source 1..23: mol_type = other RNA
tggatggaggagggggtcaccgt

SEQ ID NO: 100563 - RNA, 23 nt, synthetic construct
  source 1..23: mol_type = other RNA
tggatggaggagggggtcaccgt

SEQ ID NO: 100564 - RNA, 23 nt, synthetic construct
  source 1..23: mol_type = other RNA
tggatggaggagggggtcaccgt

SEQ ID NO: 100565 - RNA, 23 nt, synthetic construct
  source 1..23: mol_type = other RNA
tggtgcggccgccgtgggtgcag

SEQ ID NO: 100566 - RNA, 23 nt, synthetic construct
  source 1..23: mol_type = other RNA
ttggacagggctggagtcgagtg

SEQ ID NO: 100567 - RNA, 23 nt, synthetic construct
  source 1..23: mol_type = other RNA
ttggacagggctggagtcgagtg

SEQ ID NO: 100568 - RNA, 23 nt, synthetic construct
  source 1..23: mol_type = other RNA
ttggacagggctggagtcgagtg

SEQ ID NO: 100569 - RNA, 23 nt, synthetic construct
  source 1..23: mol_type = other RNA
tccgggctgtaggtgcggccgcc

SEQ ID NO: 100570 - RNA, 23 nt, synthetic construct
  source 1..23: mol_type = other RNA
tcggaaggtgggacagcagtcgc

SEQ ID NO: 100571 - RNA, 23 nt, synthetic construct
  source 1..23: mol_type = other RNA
ttccgggggcagagctcagggca

SEQ ID NO: 100572 - RNA, 23 nt, synthetic construct
  source 1..23: mol_type = other RNA
tgtccgggggcagagctcagggc

SEQ ID NO: 100573 - RNA, 23 nt, synthetic construct
  source 1..23: mol_type = other RNA
tcccgggctgtaggtgcggccgc

SEQ ID NO: 100574 - RNA, 23 nt, synthetic construct
  source 1..23: mol_type = other RNA
tagagaggctcccaggcagctta

SEQ ID NO: 100575 - RNA, 23 nt, synthetic construct
  source 1..23: mol_type = other RNA
tcagagaggctcccaggcagctt

SEQ ID NO: 100576 - RNA, 23 nt, synthetic construct
  source 1..23: mol_type = other RNA
tcactcgaggcccaggggctgct

SEQ ID NO: 100577 - RNA, 23 nt, synthetic construct
  source 1..23: mol_type = other RNA
tcactcgaggcccaggggctgct

SEQ ID NO: 100578 - RNA, 23 nt, synthetic construct
  source 1..23: mol_type = other RNA
tcactcgaggcccaggggctgct

SEQ ID NO: 100579 - RNA, 23 nt, synthetic construct
  source 1..23: mol_type = other RNA
tcactcgaggcccaggggctgct

SEQ ID NO: 100580 - RNA, 23 nt, synthetic construct
  source 1..23: mol_type = other RNA
tgcggaaggtgggacagcagtcg

SEQ ID NO: 100581 - RNA, 23 nt, synthetic construct
  source 1..23: mol_type = other RNA
tctccacactgagggagcagggg

SEQ ID NO: 100582 - RNA, 23 nt, synthetic construct
  source 1..23: mol_type = other RNA
tggccccagttgtggtggccgtg

SEQ ID NO: 100583 - RNA, 23 nt, synthetic construct
  source 1..23: mol_type = other RNA
tgttgtgggtgtggtggttgtgc

SEQ ID NO: 100584 - RNA, 23 nt, synthetic construct
  source 1..23: mol_type = other RNA
tgttgtgggtgtggtggttgtgc

SEQ ID NO: 100585 - RNA, 23 nt, synthetic construct
  source 1..23: mol_type = other RNA
tgttgtgggtgtggtggttgtgc

SEQ ID NO: 100586 - RNA, 23 nt, synthetic construct
  source 1..23: mol_type = other RNA
tgttgtgggtgtggtggttgtgc

SEQ ID NO: 100587 - RNA, 23 nt, synthetic construct
  source 1..23: mol_type = other RNA
tgttgtgggtgtggtggttgtgc

SEQ ID NO: 100588 - RNA, 23 nt, synthetic construct
  source 1..23: mol_type = other RNA
tgttgtgggtgtggtggttgtgg

SEQ ID NO: 100589 - RNA, 23 nt, synthetic construct
  source 1..23: mol_type = other RNA
tgcggccgccgtgggtgcagggg

SEQ ID NO: 100590 - RNA, 23 nt, synthetic construct
  source 1..23: mol_type = other RNA
tttctcattctccacactgaggg

SEQ ID NO: 100591 - RNA, 23 nt, synthetic construct
  source 1..23: mol_type = other RNA
tgtagttctcattctccacactg

SEQ ID NO: 100592 - RNA, 23 nt, synthetic construct
  source 1..23: mol_type = other RNA
tgtgagctgttcctggggtggag

SEQ ID NO: 100593 - RNA, 23 nt, synthetic construct
  source 1..23: mol_type = other RNA
tggttgtgggtgtggtggttgtg

SEQ ID NO: 100594 - RNA, 23 nt, synthetic construct
  source 1..23: mol_type = other RNA
tgtgagctgttcctggggtggag

SEQ ID NO: 100595 - RNA, 23 nt, synthetic construct
  source 1..23: mol_type = other RNA
tggttgtgggtgtggtggttgtg

SEQ ID NO: 100596 - RNA, 23 nt, synthetic construct
  source 1..23: mol_type = other RNA
tgtgagctgttcctggggtggag

SEQ ID NO: 100597 - RNA, 23 nt, synthetic construct
  source 1..23: mol_type = other RNA
tggttgtgggtgtggtggttgtg

SEQ ID NO: 100598 - RNA, 23 nt, synthetic construct
  source 1..23: mol_type = other RNA
tgtgagctgttcctggggtggaa

SEQ ID NO: 100599 - RNA, 23 nt, synthetic construct
  source 1..23: mol_type = other RNA
tggttgtgggtgtggtggttgtg

SEQ ID NO: 100600 - RNA, 23 nt, synthetic construct
  source 1..23: mol_type = other RNA
tgtgagctgttcctggggtggag

SEQ ID NO: 100601 - RNA, 23 nt, synthetic construct
  source 1..23: mol_type = other RNA
tggttgtgggtgtggtggttgtg

SEQ ID NO: 100602 - RNA, 23 nt, synthetic construct
  source 1..23: mol_type = other RNA
tggttgtgggtgtggtggttgtg

SEQ ID NO: 100603 - RNA, 23 nt, synthetic construct
  source 1..23: mol_type = other RNA
tggctgctggggagcactgcagg

SEQ ID NO: 100604 - RNA, 23 nt, synthetic construct
  source 1..23: mol_type = other RNA
tgaagtcacagggctggctcggg

SEQ ID NO: 100605 - RNA, 23 nt, synthetic construct
  source 1..23: mol_type = other RNA
tgctgctggggagcactgcaggg

SEQ ID NO: 100606 - RNA, 23 nt, synthetic construct
  source 1..23: mol_type = other RNA
tgctgttcctggggtggaggagg

SEQ ID NO: 100607 - RNA, 23 nt, synthetic construct
  source 1..23: mol_type = other RNA
tgctgttcctggggtggaggagg

SEQ ID NO: 100608 - RNA, 23 nt, synthetic construct
  source 1..23: mol_type = other RNA
tgctgttcctggggtggaggagg

SEQ ID NO: 100609 - RNA, 23 nt, synthetic construct
  source 1..23: mol_type = other RNA
tgctgttcctggggtggaggagg

SEQ ID NO: 100610 - RNA, 23 nt, synthetic construct
  source 1..23: mol_type = other RNA
tctgagggagcaggggtcctcaa

SEQ ID NO: 100611 - RNA, 23 nt, synthetic construct
  source 1..23: mol_type = other RNA
tgaggcccaggggctgctcacag

SEQ ID NO: 100612 - RNA, 23 nt, synthetic construct
  source 1..23: mol_type = other RNA
tgaggcccaggggctgctcacag

SEQ ID NO: 100613 - RNA, 23 nt, synthetic construct
  source 1..23: mol_type = other RNA
tgaggcccaggggctgctcacag

SEQ ID NO: 100614 - RNA, 23 nt, synthetic construct
  source 1..23: mol_type = other RNA
tgaggcccaggggctgctcacag

SEQ ID NO: 100615 - RNA, 23 nt, synthetic construct
  source 1..23: mol_type = other RNA
tacacgggtgaccacaggcctgg

SEQ ID NO: 100616 - RNA, 23 nt, synthetic construct
  source 1..23: mol_type = other RNA
tctgggccttgatgacaacacgg

SEQ ID NO: 100617 - RNA, 23 nt, synthetic construct
  source 1..23: mol_type = other RNA
tgcaggtccgggggcagagctca

SEQ ID NO: 100618 - RNA, 23 nt, synthetic construct
  source 1..23: mol_type = other RNA
ttaggtgcggccgccgtgggtgc

SEQ ID NO: 100619 - RNA, 23 nt, synthetic construct
  source 1..23: mol_type = other RNA
tcactgagggagcaggggtcctc

SEQ ID NO: 100620 - RNA, 23 nt, synthetic construct
  source 1..23: mol_type = other RNA
tacactgagggagcaggggtcct

SEQ ID NO: 100621 - RNA, 23 nt, synthetic construct
  source 1..23: mol_type = other RNA
tttctccacactgagggagcagg

SEQ ID NO: 100622 - RNA, 23 nt, synthetic construct
  source 1..23: mol_type = other RNA
tcattctccacactgagggagca

SEQ ID NO: 100623 - RNA, 23 nt, synthetic construct
  source 1..23: mol_type = other RNA
tagttctcattctccacactgag

SEQ ID NO: 100624 - RNA, 23 nt, synthetic construct
  source 1..23: mol_type = other RNA
tgcagagaggctcccaggcagct

SEQ ID NO: 100625 - RNA, 23 nt, synthetic construct
  source 1..23: mol_type = other RNA
ttgcagagaggctcccaggcagc

SEQ ID NO: 100626 - RNA, 23 nt, synthetic construct
  source 1..23: mol_type = other RNA
tagctgttcctggggtggaggag

SEQ ID NO: 100627 - RNA, 23 nt, synthetic construct
  source 1..23: mol_type = other RNA
tttgtgggtgtggtggttgtgct

SEQ ID NO: 100628 - RNA, 23 nt, synthetic construct
  source 1..23: mol_type = other RNA
ttggttgtgggtgtggtggttgt

SEQ ID NO: 100629 - RNA, 23 nt, synthetic construct
  source 1..23: mol_type = other RNA
taggcccaggggctgctcacaga

SEQ ID NO: 100630 - RNA, 23 nt, synthetic construct
  source 1..23: mol_type = other RNA
tcgaggcccaggggctgctcaca

SEQ ID NO: 100631 - RNA, 23 nt, synthetic construct
  source 1..23: mol_type = other RNA
tctcgaggcccaggggctgctca

SEQ ID NO: 100632 - RNA, 23 nt, synthetic construct
  source 1..23: mol_type = other RNA
tgggtgctggggcagtggccgta

SEQ ID NO: 100633 - RNA, 23 nt, synthetic construct
  source 1..23: mol_type = other RNA
tggggtgctggggcagtggccgt

SEQ ID NO: 100634 - RNA, 23 nt, synthetic construct
  source 1..23: mol_type = other RNA
tccggggtgctggggcagtggcc

SEQ ID NO: 100635 - RNA, 23 nt, synthetic construct
  source 1..23: mol_type = other RNA
tagctgttcctggggtggaggag

SEQ ID NO: 100636 - RNA, 23 nt, synthetic construct
  source 1..23: mol_type = other RNA
tttgtgggtgtggtggttgtgct

SEQ ID NO: 100637 - RNA, 23 nt, synthetic construct
  source 1..23: mol_type = other RNA
ttggttgtgggtgtggtggttgt

SEQ ID NO: 100638 - RNA, 23 nt, synthetic construct
  source 1..23: mol_type = other RNA
tctgtgggggtgtgggtggtccc

SEQ ID NO: 100639 - RNA, 23 nt, synthetic construct
  source 1..23: mol_type = other RNA
tgagggctggacagggctggagt

SEQ ID NO: 100640 - RNA, 23 nt, synthetic construct
  source 1..23: mol_type = other RNA
ttgagggctggacagggctggag

SEQ ID NO: 100641 - RNA, 23 nt, synthetic construct
  source 1..23: mol_type = other RNA
taggcccaggggctgctcacaga

SEQ ID NO: 100642 - RNA, 23 nt, synthetic construct
  source 1..23: mol_type = other RNA
tcgaggcccaggggctgctcaca

SEQ ID NO: 100643 - RNA, 23 nt, synthetic construct
  source 1..23: mol_type = other RNA
tctcgaggcccaggggctgctca

SEQ ID NO: 100644 - RNA, 23 nt, synthetic construct
  source 1..23: mol_type = other RNA
tgggtgctggggcagtggccgta

SEQ ID NO: 100645 - RNA, 23 nt, synthetic construct
  source 1..23: mol_type = other RNA
tggggtgctggggcagtggccgt

SEQ ID NO: 100646 - RNA, 23 nt, synthetic construct
  source 1..23: mol_type = other RNA
tccggggtgctggggcagtggcc

SEQ ID NO: 100647 - RNA, 23 nt, synthetic construct
  source 1..23: mol_type = other RNA
tagctgttcctggggtggaggag

SEQ ID NO: 100648 - RNA, 23 nt, synthetic construct
  source 1..23: mol_type = other RNA
tttgtgggtgtggtggttgtgct

SEQ ID NO: 100649 - RNA, 23 nt, synthetic construct
  source 1..23: mol_type = other RNA
ttggttgtgggtgtggtggttgt

SEQ ID NO: 100650 - RNA, 23 nt, synthetic construct
  source 1..23: mol_type = other RNA
tgagggctggacagggctggagt

SEQ ID NO: 100651 - RNA, 23 nt, synthetic construct
  source 1..23: mol_type = other RNA
ttgagggctggacagggctggag

SEQ ID NO: 100652 - RNA, 23 nt, synthetic construct
  source 1..23: mol_type = other RNA
taggcccaggggctgctcacaga

SEQ ID NO: 100653 - RNA, 23 nt, synthetic construct
  source 1..23: mol_type = other RNA
tcgaggcccaggggctgctcaca

SEQ ID NO: 100654 - RNA, 23 nt, synthetic construct
  source 1..23: mol_type = other RNA
tctcgaggcccaggggctgctca

SEQ ID NO: 100655 - RNA, 23 nt, synthetic construct
  source 1..23: mol_type = other RNA
tgggtgctggggcagtggccgta

SEQ ID NO: 100656 - RNA, 23 nt, synthetic construct
  source 1..23: mol_type = other RNA
tggggtgctggggcagtggccgt

SEQ ID NO: 100657 - RNA, 23 nt, synthetic construct
  source 1..23: mol_type = other RNA
tccggggtgctggggcagtggcc

SEQ ID NO: 100658 - RNA, 23 nt, synthetic construct
  source 1..23: mol_type = other RNA
tttgtgggtgtggtggttgtgct

SEQ ID NO: 100659 - RNA, 23 nt, synthetic construct
  source 1..23: mol_type = other RNA
ttggttgtgggtgtggtggttgt

SEQ ID NO: 100660 - RNA, 23 nt, synthetic construct
  source 1..23: mol_type = other RNA
tctgtgggggtgtgggtggtccc

SEQ ID NO: 100661 - RNA, 23 nt, synthetic construct
  source 1..23: mol_type = other RNA
tgagggctggacagggctggagt

SEQ ID NO: 100662 - RNA, 23 nt, synthetic construct
  source 1..23: mol_type = other RNA
ttgagggctggacagggctggag

SEQ ID NO: 100663 - RNA, 23 nt, synthetic construct
  source 1..23: mol_type = other RNA
taggcccaggggctgctcacaga

SEQ ID NO: 100664 - RNA, 23 nt, synthetic construct
  source 1..23: mol_type = other RNA
tcgaggcccaggggctgctcaca

SEQ ID NO: 100665 - RNA, 23 nt, synthetic construct
  source 1..23: mol_type = other RNA
tctcgaggcccaggggctgctca

SEQ ID NO: 100666 - RNA, 23 nt, synthetic construct
  source 1..23: mol_type = other RNA
tgggtgctggggcagtggccgta

SEQ ID NO: 100667 - RNA, 23 nt, synthetic construct
  source 1..23: mol_type = other RNA
tggggtgctggggcagtggccgt

SEQ ID NO: 100668 - RNA, 23 nt, synthetic construct
  source 1..23: mol_type = other RNA
tccggggtgctggggcagtggcc

SEQ ID NO: 100669 - RNA, 23 nt, synthetic construct
  source 1..23: mol_type = other RNA
tagctgttcctggggtggaggag

SEQ ID NO: 100670 - RNA, 23 nt, synthetic construct
  source 1..23: mol_type = other RNA
tttgtgggtgtggtggttgtgct

SEQ ID NO: 100671 - RNA, 23 nt, synthetic construct
  source 1..23: mol_type = other RNA
tttgtgggtgtggtggttgtggg

SEQ ID NO: 100672 - RNA, 23 nt, synthetic construct
  source 1..23: mol_type = other RNA
ttggttgtgggtgtggtggttgt

SEQ ID NO: 100673 - RNA, 23 nt, synthetic construct
  source 1..23: mol_type = other RNA
tgtggaagtcacagggctggctc

SEQ ID NO: 100674 - RNA, 23 nt, synthetic construct
  source 1..23: mol_type = other RNA
tcagtctctggagtggaggaggg

SEQ ID NO: 100675 - RNA, 23 nt, synthetic construct
  source 1..23: mol_type = other RNA
tcagtctctggagtggaggaggg

SEQ ID NO: 100676 - RNA, 23 nt, synthetic construct
  source 1..23: mol_type = other RNA
ttgtgggggtgtgggtggtcccc

SEQ ID NO: 100677 - RNA, 23 nt, synthetic construct
  source 1..23: mol_type = other RNA
ttgtgggggtgtgggtggtcccc

SEQ ID NO: 100678 - RNA, 23 nt, synthetic construct
  source 1..23: mol_type = other RNA
tgtccctggactggaggagggag

SEQ ID NO: 100679 - RNA, 23 nt, synthetic construct
  source 1..23: mol_type = other RNA
tgtccctggactggaggagggag

SEQ ID NO: 100680 - RNA, 23 nt, synthetic construct
  source 1..23: mol_type = other RNA
tgtccctggactggaggagggag

SEQ ID NO: 100681 - RNA, 23 nt, synthetic construct
  source 1..23: mol_type = other RNA
tagtctctggagtggaggagggt

SEQ ID NO: 100682 - RNA, 23 nt, synthetic construct
  source 1..23: mol_type = other RNA
tagtctctggagtggaggagggt

SEQ ID NO: 100683 - RNA, 23 nt, synthetic construct
  source 1..23: mol_type = other RNA
tagtctctggagtggaggagggt

SEQ ID NO: 100684 - RNA, 23 nt, synthetic construct
  source 1..23: mol_type = other RNA
tagtctctggagtggaggagggt

SEQ ID NO: 100685 - RNA, 23 nt, synthetic construct
  source 1..23: mol_type = other RNA
tatcagtgatgggggagtaccac

SEQ ID NO: 100686 - RNA, 23 nt, synthetic construct
  source 1..23: mol_type = other RNA
tgcccggcactcgatgtcagcca

SEQ ID NO: 100687 - RNA, 23 nt, synthetic construct
  source 1..23: mol_type = other RNA
tgggacaggtagtattgttgcag

SEQ ID NO: 100688 - RNA, 23 nt, synthetic construct
  source 1..23: mol_type = other RNA
tgacgccgtccctccagtcgctg

SEQ ID NO: 100689 - RNA, 23 nt, synthetic construct
  source 1..23: mol_type = other RNA
tcacacacggtggagaccgggag

SEQ ID NO: 100690 - RNA, 23 nt, synthetic construct
  source 1..23: mol_type = other RNA
tgatgcccatgtgtgcgttgaag

SEQ ID NO: 100691 - RNA, 23 nt, synthetic construct
  source 1..23: mol_type = other RNA
tgcaggcatccaccacgtaggcg

SEQ ID NO: 100692 - RNA, 23 nt, synthetic construct
  source 1..23: mol_type = other RNA
tgagggtgccagcagttgcccgg

SEQ ID NO: 100693 - RNA, 23 nt, synthetic construct
  source 1..23: mol_type = other RNA
ttcagccagcacagggcatacct

SEQ ID NO: 100694 - RNA, 23 nt, synthetic construct
  source 1..23: mol_type = other RNA
ttggggtgccagcagttgcctgg

SEQ ID NO: 100695 - RNA, 23 nt, synthetic construct
  source 1..23: mol_type = other RNA
ttggggtgccagcagttgcctgg

SEQ ID NO: 100696 - RNA, 23 nt, synthetic construct
  source 1..23: mol_type = other RNA
ttggggtgccagcagttgcctgg

SEQ ID NO: 100697 - RNA, 23 nt, synthetic construct
  source 1..23: mol_type = other RNA
ttagaaggtgccattgtacgaac

SEQ ID NO: 100698 - RNA, 23 nt, synthetic construct
  source 1..23: mol_type = other RNA
ttggctgtaacgctggtagctgt

SEQ ID NO: 100699 - RNA, 23 nt, synthetic construct
  source 1..23: mol_type = other RNA
ttgcacaccaggccgaagtggac

SEQ ID NO: 100700 - RNA, 23 nt, synthetic construct
  source 1..23: mol_type = other RNA
tccgtcgtccctggaagggctga

SEQ ID NO: 100701 - RNA, 23 nt, synthetic construct
  source 1..23: mol_type = other RNA
tggactcagtcgtagtggctgtt

SEQ ID NO: 100702 - RNA, 23 nt, synthetic construct
  source 1..23: mol_type = other RNA
tggattgtggacatggtggccat

SEQ ID NO: 100703 - RNA, 23 nt, synthetic construct
  source 1..23: mol_type = other RNA
tggactcagtcgtagtggctgtt

SEQ ID NO: 100704 - RNA, 23 nt, synthetic construct
  source 1..23: mol_type = other RNA
tggattgtggacatggtggccac

SEQ ID NO: 100705 - RNA, 23 nt, synthetic construct
  source 1..23: mol_type = other RNA
tcaccgacactgaaccctcgtca

SEQ ID NO: 100706 - RNA, 23 nt, synthetic construct
  source 1..23: mol_type = other RNA
tgaaccggtgggcaccatcacgg

SEQ ID NO: 100707 - RNA, 23 nt, synthetic construct
  source 1..23: mol_type = other RNA
tcaggtagtattgttgcaggcat

SEQ ID NO: 100708 - RNA, 23 nt, synthetic construct
  source 1..23: mol_type = other RNA
tcccgcccattgtgcgccgggtt

SEQ ID NO: 100709 - RNA, 23 nt, synthetic construct
  source 1..23: mol_type = other RNA
tcaggcatccaccacgtaggcgt

SEQ ID NO: 100710 - RNA, 23 nt, synthetic construct
  source 1..23: mol_type = other RNA
tgggtcacccatagggtggtctt

SEQ ID NO: 100711 - RNA, 23 nt, synthetic construct
  source 1..23: mol_type = other RNA
tgcagggtcgaggtgcgggtctt

SEQ ID NO: 100712 - RNA, 23 nt, synthetic construct
  source 1..23: mol_type = other RNA
tgcagggtcgaggtgcgggtctt

SEQ ID NO: 100713 - RNA, 23 nt, synthetic construct
  source 1..23: mol_type = other RNA
tgcagggtcgaggtgcgggtctt

SEQ ID NO: 100714 - RNA, 23 nt, synthetic construct
  source 1..23: mol_type = other RNA
tgcagggtcgaggtgcgggtctt

SEQ ID NO: 100715 - RNA, 23 nt, synthetic construct
  source 1..23: mol_type = other RNA
tgcggctctttggaagcggtgct

SEQ ID NO: 100716 - RNA, 23 nt, synthetic construct
  source 1..23: mol_type = other RNA
tggggatggctgtaaagctggta

SEQ ID NO: 100717 - RNA, 23 nt, synthetic construct
  source 1..23: mol_type = other RNA
tggggatggctgtaaagctggta

SEQ ID NO: 100718 - RNA, 23 nt, synthetic construct
  source 1..23: mol_type = other RNA
tggggatggctgtaaagctggta

SEQ ID NO: 100719 - RNA, 23 nt, synthetic construct
  source 1..23: mol_type = other RNA
ttgcccaagctccccgtcgtccc

SEQ ID NO: 100720 - RNA, 23 nt, synthetic construct
  source 1..23: mol_type = other RNA
tgagccggtggccccggttgtgg

SEQ ID NO: 100721 - RNA, 23 nt, synthetic construct
  source 1..23: mol_type = other RNA
ttggtcctgctgctagggtgagg

SEQ ID NO: 100722 - RNA, 23 nt, synthetic construct
  source 1..23: mol_type = other RNA
ttggtcctgctgctagggtgagg

SEQ ID NO: 100723 - RNA, 23 nt, synthetic construct
  source 1..23: mol_type = other RNA
ttggtcctgctgctagggtgagg

SEQ ID NO: 100724 - RNA, 23 nt, synthetic construct
  source 1..23: mol_type = other RNA
tgagccggtggccccggttgtgg

SEQ ID NO: 100725 - RNA, 23 nt, synthetic construct
  source 1..23: mol_type = other RNA
tctggccatcgggcgtgaggcag

SEQ ID NO: 100726 - RNA, 23 nt, synthetic construct
  source 1..23: mol_type = other RNA
tgcactcgatgtcagccagcaca

SEQ ID NO: 100727 - RNA, 23 nt, synthetic construct
  source 1..23: mol_type = other RNA
tcaaagtccaggctgcattccac

SEQ ID NO: 100728 - RNA, 23 nt, synthetic construct
  source 1..23: mol_type = other RNA
tccgtggtgctcacatgtggggt

SEQ ID NO: 100729 - RNA, 23 nt, synthetic construct
  source 1..23: mol_type = other RNA
tcaaagtccaggctgcattccac

SEQ ID NO: 100730 - RNA, 23 nt, synthetic construct
  source 1..23: mol_type = other RNA
tcaaagtccaggctgcattccac

SEQ ID NO: 100731 - RNA, 23 nt, synthetic construct
  source 1..23: mol_type = other RNA
tccgtggtgctcacatgtggggt

SEQ ID NO: 100732 - RNA, 23 nt, synthetic construct
  source 1..23: mol_type = other RNA
tcaaagtccaggctgcattccac

SEQ ID NO: 100733 - RNA, 23 nt, synthetic construct
  source 1..23: mol_type = other RNA
tccgtggtgctcacatgtggggt

SEQ ID NO: 100734 - RNA, 23 nt, synthetic construct
  source 1..23: mol_type = other RNA
ttcctcctgacattgcaccgttg

SEQ ID NO: 100735 - RNA, 23 nt, synthetic construct
  source 1..23: mol_type = other RNA
tatcctcctgacattgcaccgtt

SEQ ID NO: 100736 - RNA, 23 nt, synthetic construct
  source 1..23: mol_type = other RNA
tactcctgagtggcgccctcccg

SEQ ID NO: 100737 - RNA, 23 nt, synthetic construct
  source 1..23: mol_type = other RNA
tcagcacagggcatacctggtac

SEQ ID NO: 100738 - RNA, 23 nt, synthetic construct
  source 1..23: mol_type = other RNA
tggtggcccttgtcgtggtggcc

SEQ ID NO: 100739 - RNA, 23 nt, synthetic construct
  source 1..23: mol_type = other RNA
tggtggcccttgtcgtggtggcc

SEQ ID NO: 100740 - RNA, 23 nt, synthetic construct
  source 1..23: mol_type = other RNA
tcgagcatggccgccagagccaa

SEQ ID NO: 100741 - RNA, 23 nt, synthetic construct
  source 1..23: mol_type = other RNA
ttgttgaaggaggtgcccgggct

SEQ ID NO: 100742 - RNA, 23 nt, synthetic construct
  source 1..23: mol_type = other RNA
taccgtggagcctctggttgtgg

SEQ ID NO: 100743 - RNA, 23 nt, synthetic construct
  source 1..23: mol_type = other RNA
ttcagtgatgggggagtaccact

SEQ ID NO: 100744 - RNA, 23 nt, synthetic construct
  source 1..23: mol_type = other RNA
ttcagtgatgggggagtaccact

SEQ ID NO: 100745 - RNA, 23 nt, synthetic construct
  source 1..23: mol_type = other RNA
taccgtggagcctctggttgtgg

SEQ ID NO: 100746 - RNA, 23 nt, synthetic construct
  source 1..23: mol_type = other RNA
ttcagtgatgggggagtaccact

SEQ ID NO: 100747 - RNA, 23 nt, synthetic construct
  source 1..23: mol_type = other RNA
ttcagtgatgggggagtaccact

SEQ ID NO: 100748 - RNA, 23 nt, synthetic construct
  source 1..23: mol_type = other RNA
ttcagtgatgggggagtaccact

SEQ ID NO: 100749 - RNA, 23 nt, synthetic construct
  source 1..23: mol_type = other RNA
tccgtgcagggtgagccacactc

SEQ ID NO: 100750 - RNA, 23 nt, synthetic construct
  source 1..23: mol_type = other RNA
tgggggcacaaggttgtggcact

SEQ ID NO: 100751 - RNA, 23 nt, synthetic construct
  source 1..23: mol_type = other RNA
ttggtcgctgatgcaggcgttga

SEQ ID NO: 100752 - RNA, 23 nt, synthetic construct
  source 1..23: mol_type = other RNA
tagttccgcggctggccccccgc

SEQ ID NO: 100753 - RNA, 23 nt, synthetic construct
  source 1..23: mol_type = other RNA
tgcacatttcttggacagaacgt

SEQ ID NO: 100754 - RNA, 23 nt, synthetic construct
  source 1..23: mol_type = other RNA
ttgcgcccgtggcctccaccacc

SEQ ID NO: 100755 - RNA, 23 nt, synthetic construct
  source 1..23: mol_type = other RNA
tggcattggcacaggcagcctgg

SEQ ID NO: 100756 - RNA, 23 nt, synthetic construct
  source 1..23: mol_type = other RNA
tgctgcagtccaggtacaccatg

SEQ ID NO: 100757 - RNA, 23 nt, synthetic construct
  source 1..23: mol_type = other RNA
ttttcaaacgtctcaaagtctcc

SEQ ID NO: 100758 - RNA, 23 nt, synthetic construct
  source 1..23: mol_type = other RNA
tggtggccgtctccagctctgtg

SEQ ID NO: 100759 - RNA, 23 nt, synthetic construct
  source 1..23: mol_type = other RNA
tgtcagcggctctttggaagcgg

SEQ ID NO: 100760 - RNA, 23 nt, synthetic construct
  source 1..23: mol_type = other RNA
ttgctctgtgaggatccaggtcg

SEQ ID NO: 100761 - RNA, 23 nt, synthetic construct
  source 1..23: mol_type = other RNA
tgtcgtagtggctgctgtggtct

SEQ ID NO: 100762 - RNA, 23 nt, synthetic construct
  source 1..23: mol_type = other RNA
tatggccgtggatccagtggttg

SEQ ID NO: 100763 - RNA, 23 nt, synthetic construct
  source 1..23: mol_type = other RNA
tgccgtgctggtcagcactttgg

SEQ ID NO: 100764 - RNA, 23 nt, synthetic construct
  source 1..23: mol_type = other RNA
tgccgtgctggtcagcactttga

SEQ ID NO: 100765 - RNA, 23 nt, synthetic construct
  source 1..23: mol_type = other RNA
tggagttgtccctggagttgagg

SEQ ID NO: 100766 - RNA, 23 nt, synthetic construct
  source 1..23: mol_type = other RNA
tggggtcaccgtggagccactgg

SEQ ID NO: 100767 - RNA, 23 nt, synthetic construct
  source 1..23: mol_type = other RNA
tggggtcaccgtggagccactgg

SEQ ID NO: 100768 - RNA, 23 nt, synthetic construct
  source 1..23: mol_type = other RNA
ttgtgggtggtctctggagtaga

SEQ ID NO: 100769 - RNA, 23 nt, synthetic construct
  source 1..23: mol_type = other RNA
tcgttggccacaggctttgggtc

SEQ ID NO: 100770 - RNA, 23 nt, synthetic construct
  source 1..23: mol_type = other RNA
tggcccagcagccatcctttctg

SEQ ID NO: 100771 - RNA, 23 nt, synthetic construct
  source 1..23: mol_type = other RNA
ttcagcaaagacctggctcagca

SEQ ID NO: 100772 - RNA, 23 nt, synthetic construct
  source 1..23: mol_type = other RNA
tcacatgtggcagggaagggcgc

SEQ ID NO: 100773 - RNA, 23 nt, synthetic construct
  source 1..23: mol_type = other RNA
tgacgcactccccacagcactgc

SEQ ID NO: 100774 - RNA, 23 nt, synthetic construct
  source 1..23: mol_type = other RNA
tgttgacccaggtttcattcagc

SEQ ID NO: 100775 - RNA, 23 nt, synthetic construct
  source 1..23: mol_type = other RNA
tgactcctgagtggcgccctccc

SEQ ID NO: 100776 - RNA, 23 nt, synthetic construct
  source 1..23: mol_type = other RNA
tgaagtcgtcagcctggttctgg

SEQ ID NO: 100777 - RNA, 23 nt, synthetic construct
  source 1..23: mol_type = other RNA
tgagctgtacgcccttggcggca

SEQ ID NO: 100778 - RNA, 23 nt, synthetic construct
  source 1..23: mol_type = other RNA
tactgaaccctcgtcacacacgc

SEQ ID NO: 100779 - RNA, 23 nt, synthetic construct
  source 1..23: mol_type = other RNA
tggtgaccgtcacggggcctgag

SEQ ID NO: 100780 - RNA, 23 nt, synthetic construct
  source 1..23: mol_type = other RNA
tccgtggagcctctggttgtggg

SEQ ID NO: 100781 - RNA, 23 nt, synthetic construct
  source 1..23: mol_type = other RNA
tccgtggagcctctggttgtggg

SEQ ID NO: 100782 - RNA, 23 nt, synthetic construct
  source 1..23: mol_type = other RNA
ttggagtcgagtgctgggtggta

SEQ ID NO: 100783 - RNA, 23 nt, synthetic construct
  source 1..23: mol_type = other RNA
ttggagtcgagtgctgggtggta

SEQ ID NO: 100784 - RNA, 23 nt, synthetic construct
  source 1..23: mol_type = other RNA
ttggagtcgagtgctgggtggta

SEQ ID NO: 100785 - RNA, 23 nt, synthetic construct
  source 1..23: mol_type = other RNA
tgtggtcagctttgtgaggatcc

SEQ ID NO: 100786 - RNA, 23 nt, synthetic construct
  source 1..23: mol_type = other RNA
ttggagtcgagtgctgggtggta

SEQ ID NO: 100787 - RNA, 23 nt, synthetic construct
  source 1..23: mol_type = other RNA
ttacacatgtggcagggaagggc

SEQ ID NO: 100788 - RNA, 23 nt, synthetic construct
  source 1..23: mol_type = other RNA
tcactgaaccctcgtcacacacg

SEQ ID NO: 100789 - RNA, 23 nt, synthetic construct
  source 1..23: mol_type = other RNA
ttaggactcctgagtggcgccct

SEQ ID NO: 100790 - RNA, 23 nt, synthetic construct
  source 1..23: mol_type = other RNA
tgttgcagtccttggactggagg

SEQ ID NO: 100791 - RNA, 23 nt, synthetic construct
  source 1..23: mol_type = other RNA
tgttgcagtccttggactggagg

SEQ ID NO: 100792 - RNA, 23 nt, synthetic construct
  source 1..23: mol_type = other RNA
tgttgcagtccttggactggagg

SEQ ID NO: 100793 - RNA, 23 nt, synthetic construct
  source 1..23: mol_type = other RNA
ttgctgtcggcacatttcttgga

SEQ ID NO: 100794 - RNA, 23 nt, synthetic construct
  source 1..23: mol_type = other RNA
ttggaactggtggcccttgtcgt

SEQ ID NO: 100795 - RNA, 23 nt, synthetic construct
  source 1..23: mol_type = other RNA
ttgtggtcagctttgtgaggatc

SEQ ID NO: 100796 - RNA, 23 nt, synthetic construct
  source 1..23: mol_type = other RNA
ttggaactggtggcccttgtcgt

SEQ ID NO: 100797 - RNA, 23 nt, synthetic construct
  source 1..23: mol_type = other RNA
tgcctcccgtggtggctgtacca

SEQ ID NO: 100798 - RNA, 23 nt, synthetic construct
  source 1..23: mol_type = other RNA
tgaggtgcccctggtgtggcccg

SEQ ID NO: 100799 - RNA, 23 nt, synthetic construct
  source 1..23: mol_type = other RNA
taagtggacgtcacagtgcacct

SEQ ID NO: 100800 - RNA, 23 nt, synthetic construct
  source 1..23: mol_type = other RNA
tggtcctgggcgcaggcggccag

SEQ ID NO: 100801 - RNA, 23 nt, synthetic construct
  source 1..23: mol_type = other RNA
tagtggacgtcacagtgcacctt

SEQ ID NO: 100802 - RNA, 23 nt, synthetic construct
  source 1..23: mol_type = other RNA
tagcactttgagggtgccagcag

SEQ ID NO: 100803 - RNA, 23 nt, synthetic construct
  source 1..23: mol_type = other RNA
tcacccgcccattgtgcgccggg

SEQ ID NO: 100804 - RNA, 23 nt, synthetic construct
  source 1..23: mol_type = other RNA
tccagtctgcgaggtgagggccg

SEQ ID NO: 100805 - RNA, 23 nt, synthetic construct
  source 1..23: mol_type = other RNA
tccaggccgaagtggacgtcaca

SEQ ID NO: 100806 - RNA, 23 nt, synthetic construct
  source 1..23: mol_type = other RNA
ttgcttgtgtatctgggggatgt

SEQ ID NO: 100807 - RNA, 23 nt, synthetic construct
  source 1..23: mol_type = other RNA
tgtgtggtggtctgtgataggcg

SEQ ID NO: 100808 - RNA, 23 nt, synthetic construct
  source 1..23: mol_type = other RNA
tagccactctgaccaggcacact

SEQ ID NO: 100809 - RNA, 23 nt, synthetic construct
  source 1..23: mol_type = other RNA
tgtgtggtggtctgtgataggcg

SEQ ID NO: 100810 - RNA, 23 nt, synthetic construct
  source 1..23: mol_type = other RNA
tagccactctgaccaggcacact

SEQ ID NO: 100811 - RNA, 23 nt, synthetic construct
  source 1..23: mol_type = other RNA
ttgggctctgtgaggatccaggt

SEQ ID NO: 100812 - RNA, 23 nt, synthetic construct
  source 1..23: mol_type = other RNA
tgtgtggtggtctgtgataggcg

SEQ ID NO: 100813 - RNA, 23 nt, synthetic construct
  source 1..23: mol_type = other RNA
tagccactctgaccaggcacact

SEQ ID NO: 100814 - RNA, 23 nt, synthetic construct
  source 1..23: mol_type = other RNA
tgtgtggtggtctgtgataggcg

SEQ ID NO: 100815 - RNA, 23 nt, synthetic construct
  source 1..23: mol_type = other RNA
tagccactctgaccaggcacact

SEQ ID NO: 100816 - RNA, 23 nt, synthetic construct
  source 1..23: mol_type = other RNA
tgtgtggtggtctgtgataggcg

SEQ ID NO: 100817 - RNA, 23 nt, synthetic construct
  source 1..23: mol_type = other RNA
ttctctggagtagaggaggtgtg

SEQ ID NO: 100818 - RNA, 23 nt, synthetic construct
  source 1..23: mol_type = other RNA
tagggggctttgggatgctgacc

SEQ ID NO: 100819 - RNA, 23 nt, synthetic construct
  source 1..23: mol_type = other RNA
tcattctcccagctcggctccac

SEQ ID NO: 100820 - RNA, 23 nt, synthetic construct
  source 1..23: mol_type = other RNA
tactggagcggggtcagcctggc

SEQ ID NO: 100821 - RNA, 23 nt, synthetic construct
  source 1..23: mol_type = other RNA
ttcgcagcagagaacccgcagct

SEQ ID NO: 100822 - RNA, 23 nt, synthetic construct
  source 1..23: mol_type = other RNA
tgtgctggctgtgcctgtcgggc

SEQ ID NO: 100823 - RNA, 23 nt, synthetic construct
  source 1..23: mol_type = other RNA
tgctagaggagggtgttgccata

SEQ ID NO: 100824 - RNA, 23 nt, synthetic construct
  source 1..23: mol_type = other RNA
taagggctggagtcgagtgctgg

SEQ ID NO: 100825 - RNA, 23 nt, synthetic construct
  source 1..23: mol_type = other RNA
tgggctcacagcccatggtcacc

SEQ ID NO: 100826 - RNA, 23 nt, synthetic construct
  source 1..23: mol_type = other RNA
tactctgaccaggcacactgggg

SEQ ID NO: 100827 - RNA, 23 nt, synthetic construct
  source 1..23: mol_type = other RNA
tgggcctgggcacggcactcgag

SEQ ID NO: 100828 - RNA, 23 nt, synthetic construct
  source 1..23: mol_type = other RNA
tgctagaggagggtgttgccata

SEQ ID NO: 100829 - RNA, 23 nt, synthetic construct
  source 1..23: mol_type = other RNA
tgggctcacagcccatggtcacc

SEQ ID NO: 100830 - RNA, 23 nt, synthetic construct
  source 1..23: mol_type = other RNA
tactctgaccaggcacactgggg

SEQ ID NO: 100831 - RNA, 23 nt, synthetic construct
  source 1..23: mol_type = other RNA
tgggcctgggcacggcactcgag

SEQ ID NO: 100832 - RNA, 23 nt, synthetic construct
  source 1..23: mol_type = other RNA
tggatccaggtcgtccctggagt

SEQ ID NO: 100833 - RNA, 23 nt, synthetic construct
  source 1..23: mol_type = other RNA
tgggggagctgttcccggggtgg

SEQ ID NO: 100834 - RNA, 23 nt, synthetic construct
  source 1..23: mol_type = other RNA
tggtggtctgttctgggagggtc

SEQ ID NO: 100835 - RNA, 23 nt, synthetic construct
  source 1..23: mol_type = other RNA
tcagcactttgagggtgccagca

SEQ ID NO: 100836 - RNA, 23 nt, synthetic construct
  source 1..23: mol_type = other RNA
tgctagaggagggtgttgccata

SEQ ID NO: 100837 - RNA, 23 nt, synthetic construct
  source 1..23: mol_type = other RNA
tactctgaccaggcacactgggg

SEQ ID NO: 100838 - RNA, 23 nt, synthetic construct
  source 1..23: mol_type = other RNA
tgggcctgggcacggcactcgag

SEQ ID NO: 100839 - RNA, 23 nt, synthetic construct
  source 1..23: mol_type = other RNA
tctggaggcgtgcgtgccgtccc

SEQ ID NO: 100840 - RNA, 23 nt, synthetic construct
  source 1..23: mol_type = other RNA
tgctagaggagggtgttgccata

SEQ ID NO: 100841 - RNA, 23 nt, synthetic construct
  source 1..23: mol_type = other RNA
tactctgaccaggcacactgggg

SEQ ID NO: 100842 - RNA, 23 nt, synthetic construct
  source 1..23: mol_type = other RNA
tgggcctgggcacggcactcgag

SEQ ID NO: 100843 - RNA, 23 nt, synthetic construct
  source 1..23: mol_type = other RNA
tgggggagctgttcccggggtgg

SEQ ID NO: 100844 - RNA, 23 nt, synthetic construct
  source 1..23: mol_type = other RNA
tggtggtctgttctgggagggtc

SEQ ID NO: 100845 - RNA, 23 nt, synthetic construct
  source 1..23: mol_type = other RNA
ttgtggacatggtggccacgggt

SEQ ID NO: 100846 - RNA, 23 nt, synthetic construct
  source 1..23: mol_type = other RNA
tggtggtcagcactctggcggtg

SEQ ID NO: 100847 - RNA, 23 nt, synthetic construct
  source 1..23: mol_type = other RNA
tgctagaggagggtgttgccata

SEQ ID NO: 100848 - RNA, 23 nt, synthetic construct
  source 1..23: mol_type = other RNA
tgctgacccaccgctccccggga

SEQ ID NO: 100849 - RNA, 23 nt, synthetic construct
  source 1..23: mol_type = other RNA
tgccctggcgggcacacaggcag

SEQ ID NO: 100850 - RNA, 23 nt, synthetic construct
  source 1..23: mol_type = other RNA
tccactctcttgtactcaaagcc

SEQ ID NO: 100851 - RNA, 23 nt, synthetic construct
  source 1..23: mol_type = other RNA
tctggtgctgcatgttgaggggg

SEQ ID NO: 100852 - RNA, 23 nt, synthetic construct
  source 1..23: mol_type = other RNA
tgtgcttgtgtatctgggggatg

SEQ ID NO: 100853 - RNA, 23 nt, synthetic construct
  source 1..23: mol_type = other RNA
ttcattcacctgccggagaggga

SEQ ID NO: 100854 - RNA, 23 nt, synthetic construct
  source 1..23: mol_type = other RNA
ttggagtggcagcgcgagaaggc

SEQ ID NO: 100855 - RNA, 23 nt, synthetic construct
  source 1..23: mol_type = other RNA
tgctcacagcccgtggtcaccac

SEQ ID NO: 100856 - RNA, 23 nt, synthetic construct
  source 1..23: mol_type = other RNA
tgctcacagcccgtggtcaccac

SEQ ID NO: 100857 - RNA, 23 nt, synthetic construct
  source 1..23: mol_type = other RNA
taaatggactccaccctcagcct

SEQ ID NO: 100858 - RNA, 23 nt, synthetic construct
  source 1..23: mol_type = other RNA
ttttcacccacggggtgggcagc

SEQ ID NO: 100859 - RNA, 23 nt, synthetic construct
  source 1..23: mol_type = other RNA
taggtcctgggcgcaggcggcca

SEQ ID NO: 100860 - RNA, 23 nt, synthetic construct
  source 1..23: mol_type = other RNA
tgcagctgccttcaaagctgtag

SEQ ID NO: 100861 - RNA, 23 nt, synthetic construct
  source 1..23: mol_type = other RNA
tttgtgtatctgggggatgtcag

SEQ ID NO: 100862 - RNA, 23 nt, synthetic construct
  source 1..23: mol_type = other RNA
tggtgtgtgggtggtccctaggg

SEQ ID NO: 100863 - RNA, 23 nt, synthetic construct
  source 1..23: mol_type = other RNA
tatgggggccgatgtggggctgc

SEQ ID NO: 100864 - RNA, 23 nt, synthetic construct
  source 1..23: mol_type = other RNA
tggggctcacagcccatggtcac

SEQ ID NO: 100865 - RNA, 23 nt, synthetic construct
  source 1..23: mol_type = other RNA
tggtgtgtgggtggtccctaggg

SEQ ID NO: 100866 - RNA, 23 nt, synthetic construct
  source 1..23: mol_type = other RNA
tggggctcacagcccatggtcac

SEQ ID NO: 100867 - RNA, 23 nt, synthetic construct
  source 1..23: mol_type = other RNA
tggtgtgtgggtggtccctaggg

SEQ ID NO: 100868 - RNA, 23 nt, synthetic construct
  source 1..23: mol_type = other RNA
tatgggggccgatgtggggctgc

SEQ ID NO: 100869 - RNA, 23 nt, synthetic construct
  source 1..23: mol_type = other RNA
tggtgtgtgggtggtccctaggg

SEQ ID NO: 100870 - RNA, 23 nt, synthetic construct
  source 1..23: mol_type = other RNA
tatgggggccgatgtggggctgc

SEQ ID NO: 100871 - RNA, 23 nt, synthetic construct
  source 1..23: mol_type = other RNA
tggtgtgccagtcggggcccagc

SEQ ID NO: 100872 - RNA, 23 nt, synthetic construct
  source 1..23: mol_type = other RNA
tgggtgggtgtgctagacaccgg

SEQ ID NO: 100873 - RNA, 23 nt, synthetic construct
  source 1..23: mol_type = other RNA
tgcctgcggcaccacgagcatgg

SEQ ID NO: 100874 - RNA, 23 nt, synthetic construct
  source 1..23: mol_type = other RNA
tacacccgcccattgtgcgccgg

SEQ ID NO: 100875 - RNA, 23 nt, synthetic construct
  source 1..23: mol_type = other RNA
tcacaggaatgtcagcaccagcc

SEQ ID NO: 100876 - RNA, 23 nt, synthetic construct
  source 1..23: mol_type = other RNA
tccacaggaatgtcagcaccagc

SEQ ID NO: 100877 - RNA, 23 nt, synthetic construct
  source 1..23: mol_type = other RNA
tgtgcgtgatgtcatccagcacc

SEQ ID NO: 100878 - RNA, 23 nt, synthetic construct
  source 1..23: mol_type = other RNA
tgtgcccgggctgtaggtgcggc

SEQ ID NO: 100879 - RNA, 23 nt, synthetic construct
  source 1..23: mol_type = other RNA
tgggccgtgaagtcgtcagcctg

SEQ ID NO: 100880 - RNA, 23 nt, synthetic construct
  source 1..23: mol_type = other RNA
tacgccgtccctccagtcgctga

SEQ ID NO: 100881 - RNA, 23 nt, synthetic construct
  source 1..23: mol_type = other RNA
tggaaggtcccgtgggtggtgtt

SEQ ID NO: 100882 - RNA, 23 nt, synthetic construct
  source 1..23: mol_type = other RNA
tccctcttggaggatcagctcgt

SEQ ID NO: 100883 - RNA, 23 nt, synthetic construct
  source 1..23: mol_type = other RNA
tacaaggggcaggtgtccggagt

SEQ ID NO: 100884 - RNA, 23 nt, synthetic construct
  source 1..23: mol_type = other RNA
tagcagagaacccgcagctcgta

SEQ ID NO: 100885 - RNA, 23 nt, synthetic construct
  source 1..23: mol_type = other RNA
ttgctcggggtcacccatagggt

SEQ ID NO: 100886 - RNA, 23 nt, synthetic construct
  source 1..23: mol_type = other RNA
tatgtcagtccttctgagagggt

SEQ ID NO: 100887 - RNA, 23 nt, synthetic construct
  source 1..23: mol_type = other RNA
tggtgcttgtgtatctgggggat

SEQ ID NO: 100888 - RNA, 23 nt, synthetic construct
  source 1..23: mol_type = other RNA
tttggggccagcgtgggtggctg

SEQ ID NO: 100889 - RNA, 23 nt, synthetic construct
  source 1..23: mol_type = other RNA
ttgttggggccagcgtgggtggc

SEQ ID NO: 100890 - RNA, 23 nt, synthetic construct
  source 1..23: mol_type = other RNA
tgtggtcagcggctctttggaag

SEQ ID NO: 100891 - RNA, 23 nt, synthetic construct
  source 1..23: mol_type = other RNA
tagaggtggacagctcgctcgtg

SEQ ID NO: 100892 - RNA, 23 nt, synthetic construct
  source 1..23: mol_type = other RNA
tggagggggagctgttctcaggg

SEQ ID NO: 100893 - RNA, 23 nt, synthetic construct
  source 1..23: mol_type = other RNA
tccatggtgttcggcactggggg

SEQ ID NO: 100894 - RNA, 23 nt, synthetic construct
  source 1..23: mol_type = other RNA
taaggctctgtgatgtgggtggt

SEQ ID NO: 100895 - RNA, 23 nt, synthetic construct
  source 1..23: mol_type = other RNA
tgaaggctctgtgatgtgggtgg

SEQ ID NO: 100896 - RNA, 23 nt, synthetic construct
  source 1..23: mol_type = other RNA
tccgtggaaggctctgtgatgtg

SEQ ID NO: 100897 - RNA, 23 nt, synthetic construct
  source 1..23: mol_type = other RNA
taagtcaccgtggaaggctctgt

SEQ ID NO: 100898 - RNA, 23 nt, synthetic construct
  source 1..23: mol_type = other RNA
ttctgctgctagggtgagggctg

SEQ ID NO: 100899 - RNA, 23 nt, synthetic construct
  source 1..23: mol_type = other RNA
ttatgggggccgatgtggggctg

SEQ ID NO: 100900 - RNA, 23 nt, synthetic construct
  source 1..23: mol_type = other RNA
ttgctcacggttcctgcagacca

SEQ ID NO: 100901 - RNA, 23 nt, synthetic construct
  source 1..23: mol_type = other RNA
ttggccgtagagctggtggccgg

SEQ ID NO: 100902 - RNA, 23 nt, synthetic construct
  source 1..23: mol_type = other RNA
tggactggagaagggagtggctt

SEQ ID NO: 100903 - RNA, 23 nt, synthetic construct
  source 1..23: mol_type = other RNA
taaggctctgtgatgtgggtggt

SEQ ID NO: 100904 - RNA, 23 nt, synthetic construct
  source 1..23: mol_type = other RNA
tgaaggctctgtgatgtgggtgg

SEQ ID NO: 100905 - RNA, 23 nt, synthetic construct
  source 1..23: mol_type = other RNA
tccgtggaaggctctgtgatgtg

SEQ ID NO: 100906 - RNA, 23 nt, synthetic construct
  source 1..23: mol_type = other RNA
ttgctcacggttcctgcagacca

SEQ ID NO: 100907 - RNA, 23 nt, synthetic construct
  source 1..23: mol_type = other RNA
ttggccgtagagctggtggccgg

SEQ ID NO: 100908 - RNA, 23 nt, synthetic construct
  source 1..23: mol_type = other RNA
tgtggtctgctctgtgaggatcc

SEQ ID NO: 100909 - RNA, 23 nt, synthetic construct
  source 1..23: mol_type = other RNA
tgggtggaggacgggatggccgt

SEQ ID NO: 100910 - RNA, 23 nt, synthetic construct
  source 1..23: mol_type = other RNA
ttgtggtggtctgttctgggagg

SEQ ID NO: 100911 - RNA, 23 nt, synthetic construct
  source 1..23: mol_type = other RNA
tggacatggtggccatgggtgtg

SEQ ID NO: 100912 - RNA, 23 nt, synthetic construct
  source 1..23: mol_type = other RNA
taaggctctgtgatgtgggtggt

SEQ ID NO: 100913 - RNA, 23 nt, synthetic construct
  source 1..23: mol_type = other RNA
tgaaggctctgtgatgtgggtgg

SEQ ID NO: 100914 - RNA, 23 nt, synthetic construct
  source 1..23: mol_type = other RNA
tccgtggaaggctctgtgatgtg

SEQ ID NO: 100915 - RNA, 23 nt, synthetic construct
  source 1..23: mol_type = other RNA
taagtcaccgtggaaggctctgt

SEQ ID NO: 100916 - RNA, 23 nt, synthetic construct
  source 1..23: mol_type = other RNA
ttatgggggccgatgtggggctg

SEQ ID NO: 100917 - RNA, 23 nt, synthetic construct
  source 1..23: mol_type = other RNA
ttgctcacggttcctgcagacca

SEQ ID NO: 100918 - RNA, 23 nt, synthetic construct
  source 1..23: mol_type = other RNA
ttggccgtagagctggtggccgg

SEQ ID NO: 100919 - RNA, 23 nt, synthetic construct
  source 1..23: mol_type = other RNA
tggactggagaagggagtggctt

SEQ ID NO: 100920 - RNA, 23 nt, synthetic construct
  source 1..23: mol_type = other RNA
tggccgtggtgatcagtgatggg

SEQ ID NO: 100921 - RNA, 23 nt, synthetic construct
  source 1..23: mol_type = other RNA
taaggctctgtgatgtgggtggt

SEQ ID NO: 100922 - RNA, 23 nt, synthetic construct
  source 1..23: mol_type = other RNA
tgaaggctctgtgatgtgggtgg

SEQ ID NO: 100923 - RNA, 23 nt, synthetic construct
  source 1..23: mol_type = other RNA
tccgtggaaggctctgtgatgtg

SEQ ID NO: 100924 - RNA, 23 nt, synthetic construct
  source 1..23: mol_type = other RNA
ttatgggggccgatgtggggctg

SEQ ID NO: 100925 - RNA, 23 nt, synthetic construct
  source 1..23: mol_type = other RNA
ttgctcacggttcctgcagacca

SEQ ID NO: 100926 - RNA, 23 nt, synthetic construct
  source 1..23: mol_type = other RNA
ttggccgtagagctggtggccgg

SEQ ID NO: 100927 - RNA, 23 nt, synthetic construct
  source 1..23: mol_type = other RNA
ttgtggtggtctgttctgggagg

SEQ ID NO: 100928 - RNA, 23 nt, synthetic construct
  source 1..23: mol_type = other RNA
tcacgtggtccacagggtggagg

SEQ ID NO: 100929 - RNA, 23 nt, synthetic construct
  source 1..23: mol_type = other RNA
tctgtggtggtcagcactgtgga

SEQ ID NO: 100930 - RNA, 23 nt, synthetic construct
  source 1..23: mol_type = other RNA
tagggtggccgtggatccagtgg

SEQ ID NO: 100931 - RNA, 23 nt, synthetic construct
  source 1..23: mol_type = other RNA
tggtctcagggtggtgaggactg

SEQ ID NO: 100932 - RNA, 23 nt, synthetic construct
  source 1..23: mol_type = other RNA
taggctgagattcccaaagcgtg

SEQ ID NO: 100933 - RNA, 23 nt, synthetic construct
  source 1..23: mol_type = other RNA
tgcatggcttgtacactttggtg

SEQ ID NO: 100934 - RNA, 23 nt, synthetic construct
  source 1..23: mol_type = other RNA
ttgaggtctgcagcggaaggtgg

SEQ ID NO: 100935 - RNA, 23 nt, synthetic construct
  source 1..23: mol_type = other RNA
tcccagagaggcaggtacacatg

SEQ ID NO: 100936 - RNA, 23 nt, synthetic construct
  source 1..23: mol_type = other RNA
tcactctcttgtactcaaagccc

SEQ ID NO: 100937 - RNA, 23 nt, synthetic construct
  source 1..23: mol_type = other RNA
tgacttgacaggagtcctcctca

SEQ ID NO: 100938 - RNA, 23 nt, synthetic construct
  source 1..23: mol_type = other RNA
tcctggtgccacaggatggtcgt

SEQ ID NO: 100939 - RNA, 23 nt, synthetic construct
  source 1..23: mol_type = other RNA
tgcaagggcaccgtctcctcgtg

SEQ ID NO: 100940 - RNA, 23 nt, synthetic construct
  source 1..23: mol_type = other RNA
tgtgggggagccatgggcgcagg

SEQ ID NO: 100941 - RNA, 23 nt, synthetic construct
  source 1..23: mol_type = other RNA
tccgtgctgcgcgggcgctccgg

SEQ ID NO: 100942 - RNA, 23 nt, synthetic construct
  source 1..23: mol_type = other RNA
tgcctgtcgcagcttcctggcag

SEQ ID NO: 100943 - RNA, 23 nt, synthetic construct
  source 1..23: mol_type = other RNA
tcaagggtgcttgtgtatctggg

SEQ ID NO: 100944 - RNA, 23 nt, synthetic construct
  source 1..23: mol_type = other RNA
tcagtcgctgagctgtacgccct

SEQ ID NO: 100945 - RNA, 23 nt, synthetic construct
  source 1..23: mol_type = other RNA
tcgggtgggcgaggacgtcgggg

SEQ ID NO: 100946 - RNA, 23 nt, synthetic construct
  source 1..23: mol_type = other RNA
tcgtggaacctctggttgtgggt

SEQ ID NO: 100947 - RNA, 23 nt, synthetic construct
  source 1..23: mol_type = other RNA
tactggggggataggtgttgtcc

SEQ ID NO: 100948 - RNA, 23 nt, synthetic construct
  source 1..23: mol_type = other RNA
tactggggggataggtgttgtcc

SEQ ID NO: 100949 - RNA, 23 nt, synthetic construct
  source 1..23: mol_type = other RNA
tgggtgggcaggtgaggtcgcac

SEQ ID NO: 100950 - RNA, 23 nt, synthetic construct
  source 1..23: mol_type = other RNA
tgctgaggtctgcagcggaaggt

SEQ ID NO: 100951 - RNA, 23 nt, synthetic construct
  source 1..23: mol_type = other RNA
tcccatgtgggttgtagaagtca

SEQ ID NO: 100952 - RNA, 23 nt, synthetic construct
  source 1..23: mol_type = other RNA
tgctcacggttcctgcagaccag

SEQ ID NO: 100953 - RNA, 23 nt, synthetic construct
  source 1..23: mol_type = other RNA
tgctcacggttcctgcagaccag

SEQ ID NO: 100954 - RNA, 23 nt, synthetic construct
  source 1..23: mol_type = other RNA
tgctcacggttcctgcagaccag

SEQ ID NO: 100955 - RNA, 23 nt, synthetic construct
  source 1..23: mol_type = other RNA
tgctcacggttcctgcagaccag

SEQ ID NO: 100956 - RNA, 23 nt, synthetic construct
  source 1..23: mol_type = other RNA
taaaactgtccaaatgccctgca

SEQ ID NO: 100957 - RNA, 23 nt, synthetic construct
  source 1..23: mol_type = other RNA
ttggtgtgccctgcattctccca

SEQ ID NO: 100958 - RNA, 23 nt, synthetic construct
  source 1..23: mol_type = other RNA
tagcacagggcatacctggtacc

SEQ ID NO: 100959 - RNA, 23 nt, synthetic construct
  source 1..23: mol_type = other RNA
tggtgtgggcagtctctggagtg

SEQ ID NO: 100960 - RNA, 23 nt, synthetic construct
  source 1..23: mol_type = other RNA
ttgctagggtgagggctggaaag

SEQ ID NO: 100961 - RNA, 23 nt, synthetic construct
  source 1..23: mol_type = other RNA
ttgctagggtgagggctggacag

SEQ ID NO: 100962 - RNA, 23 nt, synthetic construct
  source 1..23: mol_type = other RNA
ttgtagtgctgggctctgtgagg

SEQ ID NO: 100963 - RNA, 23 nt, synthetic construct
  source 1..23: mol_type = other RNA
tagttgcccgggtggaggaggcg

SEQ ID NO: 100964 - RNA, 23 nt, synthetic construct
  source 1..23: mol_type = other RNA
ttgctagggtgagggctggacag

SEQ ID NO: 100965 - RNA, 23 nt, synthetic construct
  source 1..23: mol_type = other RNA
tggtgtgggcagtctctggagtg

SEQ ID NO: 100966 - RNA, 23 nt, synthetic construct
  source 1..23: mol_type = other RNA
ttgctagggtgagggctggacag

SEQ ID NO: 100967 - RNA, 23 nt, synthetic construct
  source 1..23: mol_type = other RNA
tgggtgttgtccctggagttgag

SEQ ID NO: 100968 - RNA, 23 nt, synthetic construct
  source 1..23: mol_type = other RNA
tcatggccgccagagccaacacc

SEQ ID NO: 100969 - RNA, 23 nt, synthetic construct
  source 1..23: mol_type = other RNA
tccccatgtgggttgtagaagtc

SEQ ID NO: 100970 - RNA, 23 nt, synthetic construct
  source 1..23: mol_type = other RNA
tgcagggacacataggcccgcac

SEQ ID NO: 100971 - RNA, 23 nt, synthetic construct
  source 1..23: mol_type = other RNA
taagggtgaaggaggggatgggt

SEQ ID NO: 100972 - RNA, 23 nt, synthetic construct
  source 1..23: mol_type = other RNA
tgaggttgccattgttgttgggg

SEQ ID NO: 100973 - RNA, 23 nt, synthetic construct
  source 1..23: mol_type = other RNA
tcaccgctttcaggcagttctcg

SEQ ID NO: 100974 - RNA, 23 nt, synthetic construct
  source 1..23: mol_type = other RNA
tggaggttgccattgttgttggg

SEQ ID NO: 100975 - RNA, 23 nt, synthetic construct
  source 1..23: mol_type = other RNA
tggggtggattgtggacatggtg

SEQ ID NO: 100976 - RNA, 23 nt, synthetic construct
  source 1..23: mol_type = other RNA
tggggtggattgtggacatggtg

SEQ ID NO: 100977 - RNA, 23 nt, synthetic construct
  source 1..23: mol_type = other RNA
tgccccagcggccggacgtggcc

SEQ ID NO: 100978 - RNA, 23 nt, synthetic construct
  source 1..23: mol_type = other RNA
ttggaggttgccattgttgttgg

SEQ ID NO: 100979 - RNA, 23 nt, synthetic construct
  source 1..23: mol_type = other RNA
tccgagtcgcaggcacacgcgtc

SEQ ID NO: 100980 - RNA, 23 nt, synthetic construct
  source 1..23: mol_type = other RNA
ttggtgggtgggcaggtgaggtc

SEQ ID NO: 100981 - RNA, 23 nt, synthetic construct
  source 1..23: mol_type = other RNA
tcctagagttgcaggtggcaggc

SEQ ID NO: 100982 - RNA, 23 nt, synthetic construct
  source 1..23: mol_type = other RNA
tgtggtcaccactttgggggtgt

SEQ ID NO: 100983 - RNA, 23 nt, synthetic construct
  source 1..23: mol_type = other RNA
tcgaacacagctgaggtctgcag

SEQ ID NO: 100984 - RNA, 23 nt, synthetic construct
  source 1..23: mol_type = other RNA
tccgtccctccagtcgctgagct

SEQ ID NO: 100985 - RNA, 23 nt, synthetic construct
  source 1..23: mol_type = other RNA
tgctgttgtggtcagctttgtga

SEQ ID NO: 100986 - RNA, 23 nt, synthetic construct
  source 1..23: mol_type = other RNA
ttgaaggaggtgcccgggctgta

SEQ ID NO: 100987 - RNA, 23 nt, synthetic construct
  source 1..23: mol_type = other RNA
tctgtggtcggtggcggggttgt

SEQ ID NO: 100988 - RNA, 23 nt, synthetic construct
  source 1..23: mol_type = other RNA
ttggtggtcagcactttgggagg

SEQ ID NO: 100989 - RNA, 23 nt, synthetic construct
  source 1..23: mol_type = other RNA
ttggtggctgtgcttctcagtgc

SEQ ID NO: 100990 - RNA, 23 nt, synthetic construct
  source 1..23: mol_type = other RNA
tgccagagggccccggcatgggg

SEQ ID NO: 100991 - RNA, 23 nt, synthetic construct
  source 1..23: mol_type = other RNA
ttggtggctgtgcttctcagtgc

SEQ ID NO: 100992 - RNA, 23 nt, synthetic construct
  source 1..23: mol_type = other RNA
ttgctggggtgtgggaagtcccc

SEQ ID NO: 100993 - RNA, 23 nt, synthetic construct
  source 1..23: mol_type = other RNA
tgccagagggccccggcatgggg

SEQ ID NO: 100994 - RNA, 23 nt, synthetic construct
  source 1..23: mol_type = other RNA
ttggtggctgtgcttctcagtgc

SEQ ID NO: 100995 - RNA, 23 nt, synthetic construct
  source 1..23: mol_type = other RNA
tctggagtagaggagggtgtggc

SEQ ID NO: 100996 - RNA, 23 nt, synthetic construct
  source 1..23: mol_type = other RNA
ttgctggggtgtgggaagtcacc

SEQ ID NO: 100997 - RNA, 23 nt, synthetic construct
  source 1..23: mol_type = other RNA
tgccagagggccccggcatgggg

SEQ ID NO: 100998 - RNA, 23 nt, synthetic construct
  source 1..23: mol_type = other RNA
ttggtggctgtgcttctcagtgc

SEQ ID NO: 100999 - RNA, 23 nt, synthetic construct
  source 1..23: mol_type = other RNA
ttgctggggtgtgggaagtcccc

SEQ ID NO: 101000 - RNA, 23 nt, synthetic construct
  source 1..23: mol_type = other RNA
tgccagagggccccggcatgggg

SEQ ID NO: 101001 - RNA, 23 nt, synthetic construct
  source 1..23: mol_type = other RNA
ttggtggctgtgcttctcagtgc

SEQ ID NO: 101002 - RNA, 23 nt, synthetic construct
  source 1..23: mol_type = other RNA
ttcctccttcccatgcaccatgg

SEQ ID NO: 101003 - RNA, 23 nt, synthetic construct
  source 1..23: mol_type = other RNA
tggtggtccccagcacagacaca

SEQ ID NO: 101004 - RNA, 23 nt, synthetic construct
  source 1..23: mol_type = other RNA
tcctgccctggcgggcacacagg

SEQ ID NO: 101005 - RNA, 23 nt, synthetic construct
  source 1..23: mol_type = other RNA
tggtctcgcagccctggtgccac

SEQ ID NO: 101006 - RNA, 23 nt, synthetic construct
  source 1..23: mol_type = other RNA
tgggtttatttgcaaaactgggc

SEQ ID NO: 101007 - RNA, 23 nt, synthetic construct
  source 1..23: mol_type = other RNA
tcatgcggtcacagtccacctgc

SEQ ID NO: 101008 - RNA, 23 nt, synthetic construct
  source 1..23: mol_type = other RNA
tactgcccctccggccgcacgga

SEQ ID NO: 101009 - RNA, 23 nt, synthetic construct
  source 1..23: mol_type = other RNA
ttttgggtccagcaggacgacac

SEQ ID NO: 101010 - RNA, 23 nt, synthetic construct
  source 1..23: mol_type = other RNA
tgcagtggctgtgggcatagtgg

SEQ ID NO: 101011 - RNA, 23 nt, synthetic construct
  source 1..23: mol_type = other RNA
tcagccacactcatccacgtggg

SEQ ID NO: 101012 - RNA, 23 nt, synthetic construct
  source 1..23: mol_type = other RNA
tgtggtcagctcagtgaggatcc

SEQ ID NO: 101013 - RNA, 23 nt, synthetic construct
  source 1..23: mol_type = other RNA
ttggtcagctcagtgaggatccg

SEQ ID NO: 101014 - RNA, 23 nt, synthetic construct
  source 1..23: mol_type = other RNA
tccccaggggtgcccgccgagct

SEQ ID NO: 101015 - RNA, 23 nt, synthetic construct
  source 1..23: mol_type = other RNA
tgggagttgtccctggagttgag

SEQ ID NO: 101016 - RNA, 23 nt, synthetic construct
  source 1..23: mol_type = other RNA
tttgtggacatggtggccacggg

SEQ ID NO: 101017 - RNA, 23 nt, synthetic construct
  source 1..23: mol_type = other RNA
tcatcagggaggggcaaggccaa

SEQ ID NO: 101018 - RNA, 23 nt, synthetic construct
  source 1..23: mol_type = other RNA
tgagcggggtcagcctggcgttg

SEQ ID NO: 101019 - RNA, 23 nt, synthetic construct
  source 1..23: mol_type = other RNA
tcactgggtgtgcagttacagct

SEQ ID NO: 101020 - RNA, 23 nt, synthetic construct
  source 1..23: mol_type = other RNA
ttctgcctcaggttttcaaacgt

SEQ ID NO: 101021 - RNA, 23 nt, synthetic construct
  source 1..23: mol_type = other RNA
ttgtgtggtggccatggtgttcg

SEQ ID NO: 101022 - RNA, 23 nt, synthetic construct
  source 1..23: mol_type = other RNA
tcagcaaagacctggctcagcat

SEQ ID NO: 101023 - RNA, 23 nt, synthetic construct
  source 1..23: mol_type = other RNA
tgccccaggggtgcccgccgagc

SEQ ID NO: 101024 - RNA, 23 nt, synthetic construct
  source 1..23: mol_type = other RNA
ttggactggctggccatcgggcg

SEQ ID NO: 101025 - RNA, 23 nt, synthetic construct
  source 1..23: mol_type = other RNA
tcccacctgctcacggttcctgc

SEQ ID NO: 101026 - RNA, 23 nt, synthetic construct
  source 1..23: mol_type = other RNA
tggtggccccggttgtggtggcc

SEQ ID NO: 101027 - RNA, 23 nt, synthetic construct
  source 1..23: mol_type = other RNA
tcccacctgctcacggttcctgc

SEQ ID NO: 101028 - RNA, 23 nt, synthetic construct
  source 1..23: mol_type = other RNA
tcccacctgctcacggttcctgc

SEQ ID NO: 101029 - RNA, 23 nt, synthetic construct
  source 1..23: mol_type = other RNA
tcccacctgctcacggttcctgc

SEQ ID NO: 101030 - RNA, 23 nt, synthetic construct
  source 1..23: mol_type = other RNA
tggtggccccggttgtggtggcc

SEQ ID NO: 101031 - RNA, 23 nt, synthetic construct
  source 1..23: mol_type = other RNA
tcagtggtcctcgcagagctgcg

SEQ ID NO: 101032 - RNA, 23 nt, synthetic construct
  source 1..23: mol_type = other RNA
ttgtgggtggtccctagggcaga

SEQ ID NO: 101033 - RNA, 23 nt, synthetic construct
  source 1..23: mol_type = other RNA
ttgtgggtggtccctagggcaga

SEQ ID NO: 101034 - RNA, 23 nt, synthetic construct
  source 1..23: mol_type = other RNA
ttgtgggtggtccctagggcaga

SEQ ID NO: 101035 - RNA, 23 nt, synthetic construct
  source 1..23: mol_type = other RNA
ttgtgggtggtccctagggcaga

SEQ ID NO: 101036 - RNA, 23 nt, synthetic construct
  source 1..23: mol_type = other RNA
tcaggcatggacaggcggccgcc

SEQ ID NO: 101037 - RNA, 23 nt, synthetic construct
  source 1..23: mol_type = other RNA
tctgggtctctgcctgcggcacc

SEQ ID NO: 101038 - RNA, 23 nt, synthetic construct
  source 1..23: mol_type = other RNA
tcgggggagccctggtcagcccc

SEQ ID NO: 101039 - RNA, 23 nt, synthetic construct
  source 1..23: mol_type = other RNA
tagagccggtggccccagttgtg

SEQ ID NO: 101040 - RNA, 23 nt, synthetic construct
  source 1..23: mol_type = other RNA
tggagggagtcactgtgttgctg

SEQ ID NO: 101041 - RNA, 23 nt, synthetic construct
  source 1..23: mol_type = other RNA
tggtgactcggtggttctgctgc

SEQ ID NO: 101042 - RNA, 23 nt, synthetic construct
  source 1..23: mol_type = other RNA
tacagtctctggagtagaggagg

SEQ ID NO: 101043 - RNA, 23 nt, synthetic construct
  source 1..23: mol_type = other RNA
tgggtggtctctggagtagagga

SEQ ID NO: 101044 - RNA, 23 nt, synthetic construct
  source 1..23: mol_type = other RNA
ttctcagggtggtgaggactgag

SEQ ID NO: 101045 - RNA, 23 nt, synthetic construct
  source 1..23: mol_type = other RNA
taagtccccacacaggccacagg

SEQ ID NO: 101046 - RNA, 23 nt, synthetic construct
  source 1..23: mol_type = other RNA
tgcggtggcagatgccctcctcg

SEQ ID NO: 101047 - RNA, 23 nt, synthetic construct
  source 1..23: mol_type = other RNA
tagccgtccacacagtggtcctc

SEQ ID NO: 101048 - RNA, 23 nt, synthetic construct
  source 1..23: mol_type = other RNA
tatgagtggcaccagctgcacca

SEQ ID NO: 101049 - RNA, 23 nt, synthetic construct
  source 1..23: mol_type = other RNA
tccgtgaagtcgtcagcctggtt

SEQ ID NO: 101050 - RNA, 23 nt, synthetic construct
  source 1..23: mol_type = other RNA
tccttaggctgctggcataagtg

SEQ ID NO: 101051 - RNA, 23 nt, synthetic construct
  source 1..23: mol_type = other RNA
tgggtgcttgtgtatctggggga

SEQ ID NO: 101052 - RNA, 23 nt, synthetic construct
  source 1..23: mol_type = other RNA
tgggtggatgtggccacccctgg

SEQ ID NO: 101053 - RNA, 23 nt, synthetic construct
  source 1..23: mol_type = other RNA
tgcgtgttggaagggtggatgtg

SEQ ID NO: 101054 - RNA, 23 nt, synthetic construct
  source 1..23: mol_type = other RNA
ttgtggtggccgtggcggtaagc

SEQ ID NO: 101055 - RNA, 23 nt, synthetic construct
  source 1..23: mol_type = other RNA
tagttgtcccaggagttgaggag

SEQ ID NO: 101056 - RNA, 23 nt, synthetic construct
  source 1..23: mol_type = other RNA
taccgtcacggtggctgtagtgc

SEQ ID NO: 101057 - RNA, 23 nt, synthetic construct
  source 1..23: mol_type = other RNA
tgtggttgcagtccttggactgg

SEQ ID NO: 101058 - RNA, 23 nt, synthetic construct
  source 1..23: mol_type = other RNA
tcaagggtgaaggaggggatggg

SEQ ID NO: 101059 - RNA, 23 nt, synthetic construct
  source 1..23: mol_type = other RNA
tgtgtggtggtctgttctgggag

SEQ ID NO: 101060 - RNA, 23 nt, synthetic construct
  source 1..23: mol_type = other RNA
taccgtcacggtggctgtagtgc

SEQ ID NO: 101061 - RNA, 23 nt, synthetic construct
  source 1..23: mol_type = other RNA
taccgtcacggtggctgtagtgc

SEQ ID NO: 101062 - RNA, 23 nt, synthetic construct
  source 1..23: mol_type = other RNA
tgtggttgcagtccttggactgg

SEQ ID NO: 101063 - RNA, 23 nt, synthetic construct
  source 1..23: mol_type = other RNA
tgtgtggtggtctgttctgggag

SEQ ID NO: 101064 - RNA, 23 nt, synthetic construct
  source 1..23: mol_type = other RNA
taccgtcacggtggctgtagtgc

SEQ ID NO: 101065 - RNA, 23 nt, synthetic construct
  source 1..23: mol_type = other RNA
ttgtggtggccgtggcggtaagc

SEQ ID NO: 101066 - RNA, 23 nt, synthetic construct
  source 1..23: mol_type = other RNA
tgtggttgcagtccttggactgg

SEQ ID NO: 101067 - RNA, 23 nt, synthetic construct
  source 1..23: mol_type = other RNA
tcagatcacagagcggctgtggt

SEQ ID NO: 101068 - RNA, 23 nt, synthetic construct
  source 1..23: mol_type = other RNA
tagcaggggttctcggcccgggg

SEQ ID NO: 101069 - RNA, 23 nt, synthetic construct
  source 1..23: mol_type = other RNA
tgggtgtgggaagtccccgtgga

SEQ ID NO: 101070 - RNA, 23 nt, synthetic construct
  source 1..23: mol_type = other RNA
tcgtggttgtggtagtcggcact

SEQ ID NO: 101071 - RNA, 23 nt, synthetic construct
  source 1..23: mol_type = other RNA
tcgtggttgtggtagtcggcact

SEQ ID NO: 101072 - RNA, 23 nt, synthetic construct
  source 1..23: mol_type = other RNA
tgggtcaccgtggagccactggt

SEQ ID NO: 101073 - RNA, 23 nt, synthetic construct
  source 1..23: mol_type = other RNA
tgggtgtgggaagtccccgtgga

SEQ ID NO: 101074 - RNA, 23 nt, synthetic construct
  source 1..23: mol_type = other RNA
tcgtggttgtggtagtcggcact

SEQ ID NO: 101075 - RNA, 23 nt, synthetic construct
  source 1..23: mol_type = other RNA
tgggtcaccgtggagccactggt

SEQ ID NO: 101076 - RNA, 23 nt, synthetic construct
  source 1..23: mol_type = other RNA
tctcgcagaaggtgatgttgacc

SEQ ID NO: 101077 - RNA, 23 nt, synthetic construct
  source 1..23: mol_type = other RNA
ttcagcccccgcatgcggtcaca

SEQ ID NO: 101078 - RNA, 23 nt, synthetic construct
  source 1..23: mol_type = other RNA
tccgggtgggcgaggacgtcggg

SEQ ID NO: 101079 - RNA, 23 nt, synthetic construct
  source 1..23: mol_type = other RNA
tcatgcaggtcgtagagtttctc

SEQ ID NO: 101080 - RNA, 23 nt, synthetic construct
  source 1..23: mol_type = other RNA
tttttcaaacgtctcaaagtctc

SEQ ID NO: 101081 - RNA, 23 nt, synthetic construct
  source 1..23: mol_type = other RNA
tggtgtggtggtctgttctggga

SEQ ID NO: 101082 - RNA, 23 nt, synthetic construct
  source 1..23: mol_type = other RNA
tcaactcccccagggggacacca

SEQ ID NO: 101083 - RNA, 23 nt, synthetic construct
  source 1..23: mol_type = other RNA
tggtgtggtggtctgttctggga

SEQ ID NO: 101084 - RNA, 23 nt, synthetic construct
  source 1..23: mol_type = other RNA
tggcaccatcacggtggctatag

SEQ ID NO: 101085 - RNA, 23 nt, synthetic construct
  source 1..23: mol_type = other RNA
tgtggtccccacggtggacgagc

SEQ ID NO: 101086 - RNA, 23 nt, synthetic construct
  source 1..23: mol_type = other RNA
tggttcctagagttgcaggtggc

SEQ ID NO: 101087 - RNA, 23 nt, synthetic construct
  source 1..23: mol_type = other RNA
tacagtgcaagggcaccgtctcc

SEQ ID NO: 101088 - RNA, 23 nt, synthetic construct
  source 1..23: mol_type = other RNA
ttccggcacgcgctcggggcacc

SEQ ID NO: 101089 - RNA, 23 nt, synthetic construct
  source 1..23: mol_type = other RNA
tcgccgggttcagggggctcagg

SEQ ID NO: 101090 - RNA, 23 nt, synthetic construct
  source 1..23: mol_type = other RNA
tgccgtccacacagtggtcctcg

SEQ ID NO: 101091 - RNA, 23 nt, synthetic construct
  source 1..23: mol_type = other RNA
tgcccgggctgtaggtgcggccg

SEQ ID NO: 101092 - RNA, 23 nt, synthetic construct
  source 1..23: mol_type = other RNA
tccccgccctgcacagagcaggt

SEQ ID NO: 101093 - RNA, 23 nt, synthetic construct
  source 1..23: mol_type = other RNA
tatgcaggtcgtagagtttctca

SEQ ID NO: 101094 - RNA, 23 nt, synthetic construct
  source 1..23: mol_type = other RNA
tgccaagatgtactcgcagctgc

SEQ ID NO: 101095 - RNA, 23 nt, synthetic construct
  source 1..23: mol_type = other RNA
tcacttcgggtagcagccttcca

SEQ ID NO: 101096 - RNA, 23 nt, synthetic construct
  source 1..23: mol_type = other RNA
tgatgacgtcctggtagctgtag

SEQ ID NO: 101097 - RNA, 23 nt, synthetic construct
  source 1..23: mol_type = other RNA
tgcgtgctggtctcggcctgaga

SEQ ID NO: 101098 - RNA, 23 nt, synthetic construct
  source 1..23: mol_type = other RNA
tcgggtcgtgccctggctggtgg

SEQ ID NO: 101099 - RNA, 23 nt, synthetic construct
  source 1..23: mol_type = other RNA
tgtggccgtggatccagtggacg

SEQ ID NO: 101100 - RNA, 23 nt, synthetic construct
  source 1..23: mol_type = other RNA
tgagtaccactggtctgtgtgct

SEQ ID NO: 101101 - RNA, 23 nt, synthetic construct
  source 1..23: mol_type = other RNA
tggagttgtcccaggagttgagg

SEQ ID NO: 101102 - RNA, 23 nt, synthetic construct
  source 1..23: mol_type = other RNA
tgtggccgtggatccagtggact

SEQ ID NO: 101103 - RNA, 23 nt, synthetic construct
  source 1..23: mol_type = other RNA
tgagtaccactggtctgtgtgct

SEQ ID NO: 101104 - RNA, 23 nt, synthetic construct
  source 1..23: mol_type = other RNA
tcactggggggataggtgttgtc

SEQ ID NO: 101105 - RNA, 23 nt, synthetic construct
  source 1..23: mol_type = other RNA
tgagtaccactggtctgtgtgct

SEQ ID NO: 101106 - RNA, 23 nt, synthetic construct
  source 1..23: mol_type = other RNA
tgtggccgtggatccagtggact

SEQ ID NO: 101107 - RNA, 23 nt, synthetic construct
  source 1..23: mol_type = other RNA
tgagtaccactggtctgtgtgct

SEQ ID NO: 101108 - RNA, 23 nt, synthetic construct
  source 1..23: mol_type = other RNA
tcactggggggataggtgttgtc

SEQ ID NO: 101109 - RNA, 23 nt, synthetic construct
  source 1..23: mol_type = other RNA
tgtggccgtggatccagtggatg

SEQ ID NO: 101110 - RNA, 23 nt, synthetic construct
  source 1..23: mol_type = other RNA
tgtggccgtggatccagtggacg

SEQ ID NO: 101111 - RNA, 23 nt, synthetic construct
  source 1..23: mol_type = other RNA
tagttgcagtccctggactggag

SEQ ID NO: 101112 - RNA, 23 nt, synthetic construct
  source 1..23: mol_type = other RNA
tgagtaccactggtctgtgtgct

SEQ ID NO: 101113 - RNA, 23 nt, synthetic construct
  source 1..23: mol_type = other RNA
tgctgcgggtgtggtggccgtgc

SEQ ID NO: 101114 - RNA, 23 nt, synthetic construct
  source 1..23: mol_type = other RNA
ttgcagttgtagtggctgttgtg

SEQ ID NO: 101115 - RNA, 23 nt, synthetic construct
  source 1..23: mol_type = other RNA
tgtggccgtggatccagtggctg

SEQ ID NO: 101116 - RNA, 23 nt, synthetic construct
  source 1..23: mol_type = other RNA
tcagggtggtgaggactgaggag

SEQ ID NO: 101117 - RNA, 23 nt, synthetic construct
  source 1..23: mol_type = other RNA
tgctttgggtccagcaggacgac

SEQ ID NO: 101118 - RNA, 23 nt, synthetic construct
  source 1..23: mol_type = other RNA
ttcacgcccagggcaggaatgtc

SEQ ID NO: 101119 - RNA, 23 nt, synthetic construct
  source 1..23: mol_type = other RNA
tagacttggccattgaaggtgac

SEQ ID NO: 101120 - RNA, 23 nt, synthetic construct
  source 1..23: mol_type = other RNA
tctcagcaaagacctggctcagc

SEQ ID NO: 101121 - RNA, 23 nt, synthetic construct
  source 1..23: mol_type = other RNA
tcagatgcccatgtgtgcgttga

SEQ ID NO: 101122 - RNA, 23 nt, synthetic construct
  source 1..23: mol_type = other RNA
tgaggcaggcggtctggacgcac

SEQ ID NO: 101123 - RNA, 23 nt, synthetic construct
  source 1..23: mol_type = other RNA
ttgaggcaggcggtctggacgca

SEQ ID NO: 101124 - RNA, 23 nt, synthetic construct
  source 1..23: mol_type = other RNA
tctggtgccacaggatggtcgtg

SEQ ID NO: 101125 - RNA, 23 nt, synthetic construct
  source 1..23: mol_type = other RNA
ttctcctcgtggacccgcctctc

SEQ ID NO: 101126 - RNA, 23 nt, synthetic construct
  source 1..23: mol_type = other RNA
tgccacactcatccacgtgggtg

SEQ ID NO: 101127 - RNA, 23 nt, synthetic construct
  source 1..23: mol_type = other RNA
taatgcacatcctggctccaggt

SEQ ID NO: 101128 - RNA, 23 nt, synthetic construct
  source 1..23: mol_type = other RNA
tgtgccacacacaggccgggggg

SEQ ID NO: 101129 - RNA, 23 nt, synthetic construct
  source 1..23: mol_type = other RNA
tcgcacatcagcccccgcatgcg

SEQ ID NO: 101130 - RNA, 23 nt, synthetic construct
  source 1..23: mol_type = other RNA
ttgtggaggtgtggacagtctct

SEQ ID NO: 101131 - RNA, 23 nt, synthetic construct
  source 1..23: mol_type = other RNA
tcggtggctgtagtgctgggctc

SEQ ID NO: 101132 - RNA, 23 nt, synthetic construct
  source 1..23: mol_type = other RNA
ttgtggaggtgtggacagtctct

SEQ ID NO: 101133 - RNA, 23 nt, synthetic construct
  source 1..23: mol_type = other RNA
ttggtggttgctgctggggtgtg

SEQ ID NO: 101134 - RNA, 23 nt, synthetic construct
  source 1..23: mol_type = other RNA
ttgtggaggtgtggacagtctct

SEQ ID NO: 101135 - RNA, 23 nt, synthetic construct
  source 1..23: mol_type = other RNA
tgtgtgggtggtctctggagtag

SEQ ID NO: 101136 - RNA, 23 nt, synthetic construct
  source 1..23: mol_type = other RNA
taccctcgtcacacacgcaggac

SEQ ID NO: 101137 - RNA, 23 nt, synthetic construct
  source 1..23: mol_type = other RNA
tggttggggtaggcacagcaggc

SEQ ID NO: 101138 - RNA, 23 nt, synthetic construct
  source 1..23: mol_type = other RNA
tcagcactgcccggccactctct

SEQ ID NO: 101139 - RNA, 23 nt, synthetic construct
  source 1..23: mol_type = other RNA
tctgagttaccctgcagcaggca

SEQ ID NO: 101140 - RNA, 23 nt, synthetic construct
  source 1..23: mol_type = other RNA
ttcagggcacctccagttccgcg

SEQ ID NO: 101141 - RNA, 23 nt, synthetic construct
  source 1..23: mol_type = other RNA
taacactcgcagtcgccacccga

SEQ ID NO: 101142 - RNA, 23 nt, synthetic construct
  source 1..23: mol_type = other RNA
ttgggtggctgtgaggggcgcca

SEQ ID NO: 101143 - RNA, 23 nt, synthetic construct
  source 1..23: mol_type = other RNA
tggggagctgttcccggggtgga

SEQ ID NO: 101144 - RNA, 23 nt, synthetic construct
  source 1..23: mol_type = other RNA
tggggagctgttcccggggtgga

SEQ ID NO: 101145 - RNA, 23 nt, synthetic construct
  source 1..23: mol_type = other RNA
ttgcaggcatcctcctgacattg

SEQ ID NO: 101146 - RNA, 23 nt, synthetic construct
  source 1..23: mol_type = other RNA
tgctgtggacatggtggccgtgg

SEQ ID NO: 101147 - RNA, 23 nt, synthetic construct
  source 1..23: mol_type = other RNA
tgctgtggacatggtggccgtgg

SEQ ID NO: 101148 - RNA, 23 nt, synthetic construct
  source 1..23: mol_type = other RNA
tgctgtggacatggtggccgtgg

SEQ ID NO: 101149 - RNA, 23 nt, synthetic construct
  source 1..23: mol_type = other RNA
tgctgtggacatggtggccgtgg

SEQ ID NO: 101150 - RNA, 23 nt, synthetic construct
  source 1..23: mol_type = other RNA
tgctgtggacatggtggccgtgg

SEQ ID NO: 101151 - RNA, 23 nt, synthetic construct
  source 1..23: mol_type = other RNA
tgtgctgattgcacactgcgtag

SEQ ID NO: 101152 - RNA, 23 nt, synthetic construct
  source 1..23: mol_type = other RNA
tcctgagttaccctgcagcaggc

SEQ ID NO: 101153 - RNA, 23 nt, synthetic construct
  source 1..23: mol_type = other RNA
tagtgctcagagaacacgtagtt

SEQ ID NO: 101154 - RNA, 23 nt, synthetic construct
  source 1..23: mol_type = other RNA
taaccctcgtcacacacgcagga

SEQ ID NO: 101155 - RNA, 23 nt, synthetic construct
  source 1..23: mol_type = other RNA
taggcagcctgggccttccaggt

SEQ ID NO: 101156 - RNA, 23 nt, synthetic construct
  source 1..23: mol_type = other RNA
ttggcataagtgccctccagcgg

SEQ ID NO: 101157 - RNA, 23 nt, synthetic construct
  source 1..23: mol_type = other RNA
tcctggagttgaggaggggttgg

SEQ ID NO: 101158 - RNA, 23 nt, synthetic construct
  source 1..23: mol_type = other RNA
tgtccccgtggaaggctctgtga

SEQ ID NO: 101159 - RNA, 23 nt, synthetic construct
  source 1..23: mol_type = other RNA
tcctggagttgaggaggggttgg

SEQ ID NO: 101160 - RNA, 23 nt, synthetic construct
  source 1..23: mol_type = other RNA
tcctggagttgaggaggggttgg

SEQ ID NO: 101161 - RNA, 23 nt, synthetic construct
  source 1..23: mol_type = other RNA
tgtccccgtggaaggctctgtga

SEQ ID NO: 101162 - RNA, 23 nt, synthetic construct
  source 1..23: mol_type = other RNA
tcctggagttgaggaggggttgg

SEQ ID NO: 101163 - RNA, 23 nt, synthetic construct
  source 1..23: mol_type = other RNA
tccaaagcgtgcatggatctctc

SEQ ID NO: 101164 - RNA, 23 nt, synthetic construct
  source 1..23: mol_type = other RNA
tgcagtcgccctcctcctgggtg

SEQ ID NO: 101165 - RNA, 23 nt, synthetic construct
  source 1..23: mol_type = other RNA
tggcaccacgagcatggccgcca

SEQ ID NO: 101166 - RNA, 23 nt, synthetic construct
  source 1..23: mol_type = other RNA
tgctgccttcaaagctgtagcga

SEQ ID NO: 101167 - RNA, 23 nt, synthetic construct
  source 1..23: mol_type = other RNA
tgggtggtcgtccctggagaagg

SEQ ID NO: 101168 - RNA, 23 nt, synthetic construct
  source 1..23: mol_type = other RNA
tgggtggtcgtccctggagaagg

SEQ ID NO: 101169 - RNA, 23 nt, synthetic construct
  source 1..23: mol_type = other RNA
tctgggtggtactggtggttgct

SEQ ID NO: 101170 - RNA, 23 nt, synthetic construct
  source 1..23: mol_type = other RNA
tgggtggtcgtccctggagaagg

SEQ ID NO: 101171 - RNA, 23 nt, synthetic construct
  source 1..23: mol_type = other RNA
tgcctgcacgcagatgcccatgt

SEQ ID NO: 101172 - RNA, 23 nt, synthetic construct
  source 1..23: mol_type = other RNA
taagctccccgtcgtccctggaa

SEQ ID NO: 101173 - RNA, 23 nt, synthetic construct
  source 1..23: mol_type = other RNA
tagcagggtgcggtggcagatgc

SEQ ID NO: 101174 - RNA, 23 nt, synthetic construct
  source 1..23: mol_type = other RNA
tttgtgcacacaggggcagtcct

SEQ ID NO: 101175 - RNA, 23 nt, synthetic construct
  source 1..23: mol_type = other RNA
tgtggttgtgctgatccacactg

SEQ ID NO: 101176 - RNA, 23 nt, synthetic construct
  source 1..23: mol_type = other RNA
tggggtggtcgtccctggagaag

SEQ ID NO: 101177 - RNA, 23 nt, synthetic construct
  source 1..23: mol_type = other RNA
tgtggttgtgctgatccacactg

SEQ ID NO: 101178 - RNA, 23 nt, synthetic construct
  source 1..23: mol_type = other RNA
tggggtggtcgtccctggagaag

SEQ ID NO: 101179 - RNA, 23 nt, synthetic construct
  source 1..23: mol_type = other RNA
tgtggttgtgctgatccacactg

SEQ ID NO: 101180 - RNA, 23 nt, synthetic construct
  source 1..23: mol_type = other RNA
tggggtggtcgtccctggagaag

SEQ ID NO: 101181 - RNA, 23 nt, synthetic construct
  source 1..23: mol_type = other RNA
tgtggttgtgctgatccacactg

SEQ ID NO: 101182 - RNA, 23 nt, synthetic construct
  source 1..23: mol_type = other RNA
tgtggttgtgctgatccacactg

SEQ ID NO: 101183 - RNA, 23 nt, synthetic construct
  source 1..23: mol_type = other RNA
tctgacccaccgctccccgggaa

SEQ ID NO: 101184 - RNA, 23 nt, synthetic construct
  source 1..23: mol_type = other RNA
tccgtctcctcgtggacccgcct

SEQ ID NO: 101185 - RNA, 23 nt, synthetic construct
  source 1..23: mol_type = other RNA
tctcggggcacccatcctggggg

SEQ ID NO: 101186 - RNA, 23 nt, synthetic construct
  source 1..23: mol_type = other RNA
tccgctctgctccaccaggaggc

SEQ ID NO: 101187 - RNA, 23 nt, synthetic construct
  source 1..23: mol_type = other RNA
tctcagggcacctccagttccgc

SEQ ID NO: 101188 - RNA, 23 nt, synthetic construct
  source 1..23: mol_type = other RNA
tccgtccacacagtggtcctcgc

SEQ ID NO: 101189 - RNA, 23 nt, synthetic construct
  source 1..23: mol_type = other RNA
ttcctgggcgggcacacaggcgc

SEQ ID NO: 101190 - RNA, 23 nt, synthetic construct
  source 1..23: mol_type = other RNA
tcttaaaggtcccctcttggagg

SEQ ID NO: 101191 - RNA, 23 nt, synthetic construct
  source 1..23: mol_type = other RNA
tttgtagcacatcttgaagacgc

SEQ ID NO: 101192 - RNA, 23 nt, synthetic construct
  source 1..23: mol_type = other RNA
tgtcggtggcggggttgtggcac

SEQ ID NO: 101193 - RNA, 23 nt, synthetic construct
  source 1..23: mol_type = other RNA
ttggctttggagctggtgactgt

SEQ ID NO: 101194 - RNA, 23 nt, synthetic construct
  source 1..23: mol_type = other RNA
tgtggctttggagctggtgactg

SEQ ID NO: 101195 - RNA, 23 nt, synthetic construct
  source 1..23: mol_type = other RNA
tggccgtgggtgtggtggtctgt

SEQ ID NO: 101196 - RNA, 23 nt, synthetic construct
  source 1..23: mol_type = other RNA
tcgggatggaggagggggtcacc

SEQ ID NO: 101197 - RNA, 23 nt, synthetic construct
  source 1..23: mol_type = other RNA
tgggagttgtcccaggagttgag

SEQ ID NO: 101198 - RNA, 23 nt, synthetic construct
  source 1..23: mol_type = other RNA
ttggctttggagctggtgactgt

SEQ ID NO: 101199 - RNA, 23 nt, synthetic construct
  source 1..23: mol_type = other RNA
tgtggctttggagctggtgactg

SEQ ID NO: 101200 - RNA, 23 nt, synthetic construct
  source 1..23: mol_type = other RNA
tggccgtgggtgtggtggtctgt

SEQ ID NO: 101201 - RNA, 23 nt, synthetic construct
  source 1..23: mol_type = other RNA
tcgggatggaggagggggtcacc

SEQ ID NO: 101202 - RNA, 23 nt, synthetic construct
  source 1..23: mol_type = other RNA
tagtggaggaggggtggattgtg

SEQ ID NO: 101203 - RNA, 23 nt, synthetic construct
  source 1..23: mol_type = other RNA
tggtcagcactttgagggtgcca

SEQ ID NO: 101204 - RNA, 23 nt, synthetic construct
  source 1..23: mol_type = other RNA
tggccgtgggtgtggtggtctgt

SEQ ID NO: 101205 - RNA, 23 nt, synthetic construct
  source 1..23: mol_type = other RNA
tcgggatggaggagggggtcacc

SEQ ID NO: 101206 - RNA, 23 nt, synthetic construct
  source 1..23: mol_type = other RNA
ttggctttggagctggtgactgt

SEQ ID NO: 101207 - RNA, 23 nt, synthetic construct
  source 1..23: mol_type = other RNA
tgtggctttggagctggtgactg

SEQ ID NO: 101208 - RNA, 23 nt, synthetic construct
  source 1..23: mol_type = other RNA
tggccgtgggtgtggtggtctgt

SEQ ID NO: 101209 - RNA, 23 nt, synthetic construct
  source 1..23: mol_type = other RNA
tcccaactcccccagggggacac

SEQ ID NO: 101210 - RNA, 23 nt, synthetic construct
  source 1..23: mol_type = other RNA
tagtggaggaggggtggattgtg

SEQ ID NO: 101211 - RNA, 23 nt, synthetic construct
  source 1..23: mol_type = other RNA
ttggctttggagctggtgactgt

SEQ ID NO: 101212 - RNA, 23 nt, synthetic construct
  source 1..23: mol_type = other RNA
tgtggctttggagctggtgactg

SEQ ID NO: 101213 - RNA, 23 nt, synthetic construct
  source 1..23: mol_type = other RNA
tagtgctggaagggcagttgcag

SEQ ID NO: 101214 - RNA, 23 nt, synthetic construct
  source 1..23: mol_type = other RNA
tggccgtgggtgtggtggtctgt

SEQ ID NO: 101215 - RNA, 23 nt, synthetic construct
  source 1..23: mol_type = other RNA
tcgggatggaggagggggtcacc

SEQ ID NO: 101216 - RNA, 23 nt, synthetic construct
  source 1..23: mol_type = other RNA
tgtgggcatagtggccatggtgg

SEQ ID NO: 101217 - RNA, 23 nt, synthetic construct
  source 1..23: mol_type = other RNA
tctgaaggttggcaggctgctgg

SEQ ID NO: 101218 - RNA, 23 nt, synthetic construct
  source 1..23: mol_type = other RNA
tgtagaaggtgccattgtacgaa

SEQ ID NO: 101219 - RNA, 23 nt, synthetic construct
  source 1..23: mol_type = other RNA
ttccgtgctgcgcgggcgctccg

SEQ ID NO: 101220 - RNA, 23 nt, synthetic construct
  source 1..23: mol_type = other RNA
tctggcacgggtggggggacggg

SEQ ID NO: 101221 - RNA, 23 nt, synthetic construct
  source 1..23: mol_type = other RNA
tgctccacagggccctgggtctc

SEQ ID NO: 101222 - RNA, 23 nt, synthetic construct
  source 1..23: mol_type = other RNA
tgctgcccattgatgaggacgga

SEQ ID NO: 101223 - RNA, 23 nt, synthetic construct
  source 1..23: mol_type = other RNA
tcagcaccagccggatgctgacc

SEQ ID NO: 101224 - RNA, 23 nt, synthetic construct
  source 1..23: mol_type = other RNA
tgtatttgggatccagctccagc

SEQ ID NO: 101225 - RNA, 23 nt, synthetic construct
  source 1..23: mol_type = other RNA
tcagggcacctccagttccgcgg

SEQ ID NO: 101226 - RNA, 23 nt, synthetic construct
  source 1..23: mol_type = other RNA
tgtgtccgtgcagggtgagccac

SEQ ID NO: 101227 - RNA, 23 nt, synthetic construct
  source 1..23: mol_type = other RNA
tggtgtccgtgcagggtgagcca

SEQ ID NO: 101228 - RNA, 23 nt, synthetic construct
  source 1..23: mol_type = other RNA
ttggagcaggtgtccgtgcaggg

SEQ ID NO: 101229 - RNA, 23 nt, synthetic construct
  source 1..23: mol_type = other RNA
ttggtcctcgcagagctgcgcgc

SEQ ID NO: 101230 - RNA, 23 nt, synthetic construct
  source 1..23: mol_type = other RNA
tagctcagccagcacggtgaagc

SEQ ID NO: 101231 - RNA, 23 nt, synthetic construct
  source 1..23: mol_type = other RNA
tgctgttcctggcattggcacag

SEQ ID NO: 101232 - RNA, 23 nt, synthetic construct
  source 1..23: mol_type = other RNA
tcgtccctccagtcgctgagctg

SEQ ID NO: 101233 - RNA, 23 nt, synthetic construct
  source 1..23: mol_type = other RNA
tgctgggacttggggcagttctg

SEQ ID NO: 101234 - RNA, 23 nt, synthetic construct
  source 1..23: mol_type = other RNA
tgggctggcaggcatccaccacg

SEQ ID NO: 101235 - RNA, 23 nt, synthetic construct
  source 1..23: mol_type = other RNA
taccatgggggctgcacaccctg

SEQ ID NO: 101236 - RNA, 23 nt, synthetic construct
  source 1..23: mol_type = other RNA
tcccgtgggtggtgttgtcccca

SEQ ID NO: 101237 - RNA, 23 nt, synthetic construct
  source 1..23: mol_type = other RNA
tagcggcaggcggcgaaggtggg

SEQ ID NO: 101238 - RNA, 23 nt, synthetic construct
  source 1..23: mol_type = other RNA
tctggagttccaggacatgccac

SEQ ID NO: 101239 - RNA, 23 nt, synthetic construct
  source 1..23: mol_type = other RNA
tcagccagcacagggcatacctg

SEQ ID NO: 101240 - RNA, 23 nt, synthetic construct
  source 1..23: mol_type = other RNA
tcgccgcccggcactcgatgtca

SEQ ID NO: 101241 - RNA, 23 nt, synthetic construct
  source 1..23: mol_type = other RNA
tctgtgccagggtccagttgggg

SEQ ID NO: 101242 - RNA, 23 nt, synthetic construct
  source 1..23: mol_type = other RNA
tccacctgtgccagggtccagtt

SEQ ID NO: 101243 - RNA, 23 nt, synthetic construct
  source 1..23: mol_type = other RNA
tttgaagacgccctcctgctccc

SEQ ID NO: 101244 - RNA, 23 nt, synthetic construct
  source 1..23: mol_type = other RNA
tccctgcagtggtcgtcactgca

SEQ ID NO: 101245 - RNA, 23 nt, synthetic construct
  source 1..23: mol_type = other RNA
tggtggtggccgtctccagctct

SEQ ID NO: 101246 - RNA, 23 nt, synthetic construct
  source 1..23: mol_type = other RNA
tgcgagctctggaggttgccatt

SEQ ID NO: 101247 - RNA, 23 nt, synthetic construct
  source 1..23: mol_type = other RNA
tgtggaggtcggggtggccgtgg

SEQ ID NO: 101248 - RNA, 23 nt, synthetic construct
  source 1..23: mol_type = other RNA
tggtgtggtggtctgtgataggc

SEQ ID NO: 101249 - RNA, 23 nt, synthetic construct
  source 1..23: mol_type = other RNA
tgcactgtggaggtgtgggcagt

SEQ ID NO: 101250 - RNA, 23 nt, synthetic construct
  source 1..23: mol_type = other RNA
ttggtggccgtggcggtaagcac

SEQ ID NO: 101251 - RNA, 23 nt, synthetic construct
  source 1..23: mol_type = other RNA
tgggggtggctgtgaagcccgtg

SEQ ID NO: 101252 - RNA, 23 nt, synthetic construct
  source 1..23: mol_type = other RNA
ttccacactggaggcgtgagtgc

SEQ ID NO: 101253 - RNA, 23 nt, synthetic construct
  source 1..23: mol_type = other RNA
taccactggtctgtgtgctagag

SEQ ID NO: 101254 - RNA, 23 nt, synthetic construct
  source 1..23: mol_type = other RNA
ttcactgtgttgctggtggctgc

SEQ ID NO: 101255 - RNA, 23 nt, synthetic construct
  source 1..23: mol_type = other RNA
tgtccaggctgtgcgcaccgtgt

SEQ ID NO: 101256 - RNA, 23 nt, synthetic construct
  source 1..23: mol_type = other RNA
ttggccgtggtgtggcccggggt

SEQ ID NO: 101257 - RNA, 23 nt, synthetic construct
  source 1..23: mol_type = other RNA
tgtggccgtggtgtggcccgggg

SEQ ID NO: 101258 - RNA, 23 nt, synthetic construct
  source 1..23: mol_type = other RNA
ttgggcctgggcacggcactcga

SEQ ID NO: 101259 - RNA, 23 nt, synthetic construct
  source 1..23: mol_type = other RNA
tctgggcctgggcacggcactcg

SEQ ID NO: 101260 - RNA, 23 nt, synthetic construct
  source 1..23: mol_type = other RNA
tccaggtcgtccccggagtggag

SEQ ID NO: 101261 - RNA, 23 nt, synthetic construct
  source 1..23: mol_type = other RNA
tggaggacggggtggccgtggat

SEQ ID NO: 101262 - RNA, 23 nt, synthetic construct
  source 1..23: mol_type = other RNA
ttggaggacggggtggccgtgga

SEQ ID NO: 101263 - RNA, 23 nt, synthetic construct
  source 1..23: mol_type = other RNA
tgtgggcaccgtcacggtggctg

SEQ ID NO: 101264 - RNA, 23 nt, synthetic construct
  source 1..23: mol_type = other RNA
tggtgtggtggtctgtgataggc

SEQ ID NO: 101265 - RNA, 23 nt, synthetic construct
  source 1..23: mol_type = other RNA
tgggggtggctgtgaagcccgtg

SEQ ID NO: 101266 - RNA, 23 nt, synthetic construct
  source 1..23: mol_type = other RNA
ttggtcagcactgtgggggtgtg

SEQ ID NO: 101267 - RNA, 23 nt, synthetic construct
  source 1..23: mol_type = other RNA
taccactggtctgtgtgctagag

SEQ ID NO: 101268 - RNA, 23 nt, synthetic construct
  source 1..23: mol_type = other RNA
tctggggggataggtgttgtccc

SEQ ID NO: 101269 - RNA, 23 nt, synthetic construct
  source 1..23: mol_type = other RNA
ttgggggacagggatcgcccgtg

SEQ ID NO: 101270 - RNA, 23 nt, synthetic construct
  source 1..23: mol_type = other RNA
tgtccaggctgtgcgcaccgtgt

SEQ ID NO: 101271 - RNA, 23 nt, synthetic construct
  source 1..23: mol_type = other RNA
tcggtggttgctgctggggtgtg

SEQ ID NO: 101272 - RNA, 23 nt, synthetic construct
  source 1..23: mol_type = other RNA
tggtgactcggtggtcctgctgc

SEQ ID NO: 101273 - RNA, 23 nt, synthetic construct
  source 1..23: mol_type = other RNA
ttgggcctgggcacggcactcga

SEQ ID NO: 101274 - RNA, 23 nt, synthetic construct
  source 1..23: mol_type = other RNA
tctgggcctgggcacggcactcg

SEQ ID NO: 101275 - RNA, 23 nt, synthetic construct
  source 1..23: mol_type = other RNA
ttccaggtcgtccctggagtgga

SEQ ID NO: 101276 - RNA, 23 nt, synthetic construct
  source 1..23: mol_type = other RNA
ttctgttctgggagggtcccggt

SEQ ID NO: 101277 - RNA, 23 nt, synthetic construct
  source 1..23: mol_type = other RNA
tccaggtcgtccccggagtggag

SEQ ID NO: 101278 - RNA, 23 nt, synthetic construct
  source 1..23: mol_type = other RNA
tggaggacggggtggccgtgggg

SEQ ID NO: 101279 - RNA, 23 nt, synthetic construct
  source 1..23: mol_type = other RNA
ttggaggacggggtggccgtggg

SEQ ID NO: 101280 - RNA, 23 nt, synthetic construct
  source 1..23: mol_type = other RNA
tgtgggcaccgtcacggtggctg

SEQ ID NO: 101281 - RNA, 23 nt, synthetic construct
  source 1..23: mol_type = other RNA
ttcagcactttgagggtgccagc

SEQ ID NO: 101282 - RNA, 23 nt, synthetic construct
  source 1..23: mol_type = other RNA
tgagtggctctggagctgatgac

SEQ ID NO: 101283 - RNA, 23 nt, synthetic construct
  source 1..23: mol_type = other RNA
tggtgtggtggtctgtgataggc

SEQ ID NO: 101284 - RNA, 23 nt, synthetic construct
  source 1..23: mol_type = other RNA
tgggggtggctgtgaagcccgtg

SEQ ID NO: 101285 - RNA, 23 nt, synthetic construct
  source 1..23: mol_type = other RNA
ttccacactggaggcgtgagtgc

SEQ ID NO: 101286 - RNA, 23 nt, synthetic construct
  source 1..23: mol_type = other RNA
taccactggtctgtgtgctagag

SEQ ID NO: 101287 - RNA, 23 nt, synthetic construct
  source 1..23: mol_type = other RNA
tgtccaggctgtgcgcaccgtgt

SEQ ID NO: 101288 - RNA, 23 nt, synthetic construct
  source 1..23: mol_type = other RNA
tggtgactcggtggtcctgctgc

SEQ ID NO: 101289 - RNA, 23 nt, synthetic construct
  source 1..23: mol_type = other RNA
ttgggcctgggcacggcactcga

SEQ ID NO: 101290 - RNA, 23 nt, synthetic construct
  source 1..23: mol_type = other RNA
tctgggcctgggcacggcactcg

SEQ ID NO: 101291 - RNA, 23 nt, synthetic construct
  source 1..23: mol_type = other RNA
tggaggacggggtggccgtggat

SEQ ID NO: 101292 - RNA, 23 nt, synthetic construct
  source 1..23: mol_type = other RNA
ttggaggacggggtggccgtgga

SEQ ID NO: 101293 - RNA, 23 nt, synthetic construct
  source 1..23: mol_type = other RNA
tgtgggcaccgtcacggtggctg

SEQ ID NO: 101294 - RNA, 23 nt, synthetic construct
  source 1..23: mol_type = other RNA
tggtgtggtggtctgtgataggc

SEQ ID NO: 101295 - RNA, 23 nt, synthetic construct
  source 1..23: mol_type = other RNA
tgcactgtggaggtgtgggcagt

SEQ ID NO: 101296 - RNA, 23 nt, synthetic construct
  source 1..23: mol_type = other RNA
tgctggaggagggggtgactgtg

SEQ ID NO: 101297 - RNA, 23 nt, synthetic construct
  source 1..23: mol_type = other RNA
tgtggagccactggttgtgggtg

SEQ ID NO: 101298 - RNA, 23 nt, synthetic construct
  source 1..23: mol_type = other RNA
ttggtcagcactgtgggggtgtg

SEQ ID NO: 101299 - RNA, 23 nt, synthetic construct
  source 1..23: mol_type = other RNA
taccactggtctgtgtgctagag

SEQ ID NO: 101300 - RNA, 23 nt, synthetic construct
  source 1..23: mol_type = other RNA
tctggggggataggtgttgtccc

SEQ ID NO: 101301 - RNA, 23 nt, synthetic construct
  source 1..23: mol_type = other RNA
ttgggggacagggatcgcccgtg

SEQ ID NO: 101302 - RNA, 23 nt, synthetic construct
  source 1..23: mol_type = other RNA
tgtccaggctgtgcgcaccgtgt

SEQ ID NO: 101303 - RNA, 23 nt, synthetic construct
  source 1..23: mol_type = other RNA
tcggtggttgctgctggggtgtg

SEQ ID NO: 101304 - RNA, 23 nt, synthetic construct
  source 1..23: mol_type = other RNA
tggtgactcggtggtcctgctgc

SEQ ID NO: 101305 - RNA, 23 nt, synthetic construct
  source 1..23: mol_type = other RNA
ttggccgtggtgtggcccggggt

SEQ ID NO: 101306 - RNA, 23 nt, synthetic construct
  source 1..23: mol_type = other RNA
tgtggccgtggtgtggcccgggg

SEQ ID NO: 101307 - RNA, 23 nt, synthetic construct
  source 1..23: mol_type = other RNA
ttgggcctgggcacggcactcga

SEQ ID NO: 101308 - RNA, 23 nt, synthetic construct
  source 1..23: mol_type = other RNA
tctgggcctgggcacggcactcg

SEQ ID NO: 101309 - RNA, 23 nt, synthetic construct
  source 1..23: mol_type = other RNA
tccaggtcgtccccggagtggag

SEQ ID NO: 101310 - RNA, 23 nt, synthetic construct
  source 1..23: mol_type = other RNA
tggaggacggggtggccgtggat

SEQ ID NO: 101311 - RNA, 23 nt, synthetic construct
  source 1..23: mol_type = other RNA
ttggaggacggggtggccgtgga

SEQ ID NO: 101312 - RNA, 23 nt, synthetic construct
  source 1..23: mol_type = other RNA
ttgggtgtggtggccgggctggt

SEQ ID NO: 101313 - RNA, 23 nt, synthetic construct
  source 1..23: mol_type = other RNA
ttctgttctgggagggtcccggt

SEQ ID NO: 101314 - RNA, 23 nt, synthetic construct
  source 1..23: mol_type = other RNA
tccaggtcgtccccggagtggag

SEQ ID NO: 101315 - RNA, 23 nt, synthetic construct
  source 1..23: mol_type = other RNA
tggaggacggggtggccgtgggg

SEQ ID NO: 101316 - RNA, 23 nt, synthetic construct
  source 1..23: mol_type = other RNA
ttggaggacggggtggccgtggg

SEQ ID NO: 101317 - RNA, 23 nt, synthetic construct
  source 1..23: mol_type = other RNA
tggaggacggggtggccgtggat

SEQ ID NO: 101318 - RNA, 23 nt, synthetic construct
  source 1..23: mol_type = other RNA
ttggaggacggggtggccgtgga

SEQ ID NO: 101319 - RNA, 23 nt, synthetic construct
  source 1..23: mol_type = other RNA
tgtgggcaccgtcacggtggctg

SEQ ID NO: 101320 - RNA, 23 nt, synthetic construct
  source 1..23: mol_type = other RNA
tggtgtggtggtctgtgataggc

SEQ ID NO: 101321 - RNA, 23 nt, synthetic construct
  source 1..23: mol_type = other RNA
ttggtggccgtggcggtaagcac

SEQ ID NO: 101322 - RNA, 23 nt, synthetic construct
  source 1..23: mol_type = other RNA
tgggggtggctgtgaagcccgtg

SEQ ID NO: 101323 - RNA, 23 nt, synthetic construct
  source 1..23: mol_type = other RNA
ttccacactggaggcgtgagtgc

SEQ ID NO: 101324 - RNA, 23 nt, synthetic construct
  source 1..23: mol_type = other RNA
tgtggagccactggttgtgggtg

SEQ ID NO: 101325 - RNA, 23 nt, synthetic construct
  source 1..23: mol_type = other RNA
taccactggtctgtgtgctagag

SEQ ID NO: 101326 - RNA, 23 nt, synthetic construct
  source 1..23: mol_type = other RNA
tattggtggcccttgtcatggtg

SEQ ID NO: 101327 - RNA, 23 nt, synthetic construct
  source 1..23: mol_type = other RNA
tgagggtgtggccgtggaattgg

SEQ ID NO: 101328 - RNA, 23 nt, synthetic construct
  source 1..23: mol_type = other RNA
tcagctcagtgaggatccgggtc

SEQ ID NO: 101329 - RNA, 23 nt, synthetic construct
  source 1..23: mol_type = other RNA
ttggaggacagggtggccgtgga

SEQ ID NO: 101330 - RNA, 23 nt, synthetic construct
  source 1..23: mol_type = other RNA
tcaccactttgggggtgtgagct

SEQ ID NO: 101331 - RNA, 23 nt, synthetic construct
  source 1..23: mol_type = other RNA
tcatggtggtcaccactttgggg

SEQ ID NO: 101332 - RNA, 23 nt, synthetic construct
  source 1..23: mol_type = other RNA
tgccatggtggtcaccactttgg

SEQ ID NO: 101333 - RNA, 23 nt, synthetic construct
  source 1..23: mol_type = other RNA
tgcactgcaggggtgcgggtggt

SEQ ID NO: 101334 - RNA, 23 nt, synthetic construct
  source 1..23: mol_type = other RNA
ttggcagccggctcggtcggtct

SEQ ID NO: 101335 - RNA, 23 nt, synthetic construct
  source 1..23: mol_type = other RNA
tggggaggtgggacaggcgccct

SEQ ID NO: 101336 - RNA, 23 nt, synthetic construct
  source 1..23: mol_type = other RNA
tgacagcggggcggaggacactg

SEQ ID NO: 101337 - RNA, 23 nt, synthetic construct
  source 1..23: mol_type = other RNA
tttggccacaggctttgggtcca

SEQ ID NO: 101338 - RNA, 23 nt, synthetic construct
  source 1..23: mol_type = other RNA
ttgggagccgccccacatgctgc

SEQ ID NO: 101339 - RNA, 23 nt, synthetic construct
  source 1..23: mol_type = other RNA
tgacttgtagtggatgctgaggg

SEQ ID NO: 101340 - RNA, 23 nt, synthetic construct
  source 1..23: mol_type = other RNA
tcggggaccagccacgtcttggc

SEQ ID NO: 101341 - RNA, 23 nt, synthetic construct
  source 1..23: mol_type = other RNA
tgggggtgggtgtgctagacacc

SEQ ID NO: 101342 - RNA, 23 nt, synthetic construct
  source 1..23: mol_type = other RNA
tgtgggggtgggtgtgctagaca

SEQ ID NO: 101343 - RNA, 23 nt, synthetic construct
  source 1..23: mol_type = other RNA
tgtggcactcagcaaagacctgg

SEQ ID NO: 101344 - RNA, 23 nt, synthetic construct
  source 1..23: mol_type = other RNA
tttgtggcactcagcaaagacct

SEQ ID NO: 101345 - RNA, 23 nt, synthetic construct
  source 1..23: mol_type = other RNA
ttgcaggtggcaggctgtatggg

SEQ ID NO: 101346 - RNA, 23 nt, synthetic construct
  source 1..23: mol_type = other RNA
tggtggttgtgttgcacacgcac

SEQ ID NO: 101347 - RNA, 23 nt, synthetic construct
  source 1..23: mol_type = other RNA
tgcagcggaaggtgggacagcag

SEQ ID NO: 101348 - RNA, 23 nt, synthetic construct
  source 1..23: mol_type = other RNA
tgttgcaggcatcctcctgacat

SEQ ID NO: 101349 - RNA, 23 nt, synthetic construct
  source 1..23: mol_type = other RNA
tgccctggggacaggtagtattg

SEQ ID NO: 101350 - RNA, 23 nt, synthetic construct
  source 1..23: mol_type = other RNA
tagccctggggacaggtagtatt

SEQ ID NO: 101351 - RNA, 23 nt, synthetic construct
  source 1..23: mol_type = other RNA
tggactggctggccatcgggcgt

SEQ ID NO: 101352 - RNA, 23 nt, synthetic construct
  source 1..23: mol_type = other RNA
ttccacatggctgttgacccagg

SEQ ID NO: 101353 - RNA, 23 nt, synthetic construct
  source 1..23: mol_type = other RNA
tcccacggggtgggcagcaggag

SEQ ID NO: 101354 - RNA, 23 nt, synthetic construct
  source 1..23: mol_type = other RNA
tacaggctctcccagggtaggac

SEQ ID NO: 101355 - RNA, 23 nt, synthetic construct
  source 1..23: mol_type = other RNA
tccgggagggccgggcttgtcgt

SEQ ID NO: 101356 - RNA, 23 nt, synthetic construct
  source 1..23: mol_type = other RNA
tggtgtggtggttgtgctgatcc

SEQ ID NO: 101357 - RNA, 23 nt, synthetic construct
  source 1..23: mol_type = other RNA
tggagggggtcaccgtggagcct

SEQ ID NO: 101358 - RNA, 23 nt, synthetic construct
  source 1..23: mol_type = other RNA
ttgatgggggagtaccactggtc

SEQ ID NO: 101359 - RNA, 23 nt, synthetic construct
  source 1..23: mol_type = other RNA
tgtgatgtgggtggtgcccaaga

SEQ ID NO: 101360 - RNA, 23 nt, synthetic construct
  source 1..23: mol_type = other RNA
tggtgtggtggttgtgctgatcc

SEQ ID NO: 101361 - RNA, 23 nt, synthetic construct
  source 1..23: mol_type = other RNA
ttgatgggggagtaccactggtc

SEQ ID NO: 101362 - RNA, 23 nt, synthetic construct
  source 1..23: mol_type = other RNA
tgtgatgtgggtggtgcccaagg

SEQ ID NO: 101363 - RNA, 23 nt, synthetic construct
  source 1..23: mol_type = other RNA
tgtcagcactttgagggtgccag

SEQ ID NO: 101364 - RNA, 23 nt, synthetic construct
  source 1..23: mol_type = other RNA
tggtgtggtggttgtgctgatcc

SEQ ID NO: 101365 - RNA, 23 nt, synthetic construct
  source 1..23: mol_type = other RNA
tggagggggtcaccgtggagcct

SEQ ID NO: 101366 - RNA, 23 nt, synthetic construct
  source 1..23: mol_type = other RNA
ttgatgggggagtaccactggtc

SEQ ID NO: 101367 - RNA, 23 nt, synthetic construct
  source 1..23: mol_type = other RNA
tgtgatgtgggtggtgcccaaga

SEQ ID NO: 101368 - RNA, 23 nt, synthetic construct
  source 1..23: mol_type = other RNA
tggtgtggtggttgtgctgatcc

SEQ ID NO: 101369 - RNA, 23 nt, synthetic construct
  source 1..23: mol_type = other RNA
tggagggggtcaccgtggagcca

SEQ ID NO: 101370 - RNA, 23 nt, synthetic construct
  source 1..23: mol_type = other RNA
ttgatgggggagtaccactggtc

SEQ ID NO: 101371 - RNA, 23 nt, synthetic construct
  source 1..23: mol_type = other RNA
tgtgatgtgggtggtgcccaagg

SEQ ID NO: 101372 - RNA, 23 nt, synthetic construct
  source 1..23: mol_type = other RNA
tggagggggtggacgtggaactg

SEQ ID NO: 101373 - RNA, 23 nt, synthetic construct
  source 1..23: mol_type = other RNA
tggtgtggtggttgtgctgatcc

SEQ ID NO: 101374 - RNA, 23 nt, synthetic construct
  source 1..23: mol_type = other RNA
tggagggggtcaccgtggagcca

SEQ ID NO: 101375 - RNA, 23 nt, synthetic construct
  source 1..23: mol_type = other RNA
ttgatgggggagtaccactggtc

SEQ ID NO: 101376 - RNA, 23 nt, synthetic construct
  source 1..23: mol_type = other RNA
ttgtggtcagctcagtgaggatc

SEQ ID NO: 101377 - RNA, 23 nt, synthetic construct
  source 1..23: mol_type = other RNA
ttttgggggtgtgagctgttccc

SEQ ID NO: 101378 - RNA, 23 nt, synthetic construct
  source 1..23: mol_type = other RNA
tggtgggacaggcgccctggaag

SEQ ID NO: 101379 - RNA, 23 nt, synthetic construct
  source 1..23: mol_type = other RNA
tacagggctggctcgggtccgac

SEQ ID NO: 101380 - RNA, 23 nt, synthetic construct
  source 1..23: mol_type = other RNA
tcagaagcagccctccgccatcc

SEQ ID NO: 101381 - RNA, 23 nt, synthetic construct
  source 1..23: mol_type = other RNA
tggtcctcagggcagaagcagcc

SEQ ID NO: 101382 - RNA, 23 nt, synthetic construct
  source 1..23: mol_type = other RNA
taagaggatctggtcctcagggc

SEQ ID NO: 101383 - RNA, 23 nt, synthetic construct
  source 1..23: mol_type = other RNA
tcaggtcctgggcgcaggcggcc

SEQ ID NO: 101384 - RNA, 23 nt, synthetic construct
  source 1..23: mol_type = other RNA
tgggggcaggtccgggggcagag

SEQ ID NO: 101385 - RNA, 23 nt, synthetic construct
  source 1..23: mol_type = other RNA
tctgcaccacgatgaagaagctc

SEQ ID NO: 101386 - RNA, 23 nt, synthetic construct
  source 1..23: mol_type = other RNA
tgctcccaggcagcttagcttcc

SEQ ID NO: 101387 - RNA, 23 nt, synthetic construct
  source 1..23: mol_type = other RNA
ttgtggctggagttccaggacat

SEQ ID NO: 101388 - RNA, 23 nt, synthetic construct
  source 1..23: mol_type = other RNA
tcgggagggccgggcttgtcgtg

SEQ ID NO: 101389 - RNA, 23 nt, synthetic construct
  source 1..23: mol_type = other RNA
ttgttctcagggtggaggtcggg

SEQ ID NO: 101390 - RNA, 23 nt, synthetic construct
  source 1..23: mol_type = other RNA
ttccaggtggtgcccagggagga

SEQ ID NO: 101391 - RNA, 23 nt, synthetic construct
  source 1..23: mol_type = other RNA
tcactgtggaggtgtgggcagtc

SEQ ID NO: 101392 - RNA, 23 nt, synthetic construct
  source 1..23: mol_type = other RNA
tccacctgctcacggttcctgca

SEQ ID NO: 101393 - RNA, 23 nt, synthetic construct
  source 1..23: mol_type = other RNA
ttccaggtggtgcccagggagga

SEQ ID NO: 101394 - RNA, 23 nt, synthetic construct
  source 1..23: mol_type = other RNA
tccacctgctcacggttcctgca

SEQ ID NO: 101395 - RNA, 23 nt, synthetic construct
  source 1..23: mol_type = other RNA
tccacctgctcacggttcctgca

SEQ ID NO: 101396 - RNA, 23 nt, synthetic construct
  source 1..23: mol_type = other RNA
ttccaggtggtgcccagggagga

SEQ ID NO: 101397 - RNA, 23 nt, synthetic construct
  source 1..23: mol_type = other RNA
tcactgtggaggtgtgggcagtc

SEQ ID NO: 101398 - RNA, 23 nt, synthetic construct
  source 1..23: mol_type = other RNA
tccacctgctcacggttcctgca

SEQ ID NO: 101399 - RNA, 23 nt, synthetic construct
  source 1..23: mol_type = other RNA
ttccaggtggtgcccagggagga

SEQ ID NO: 101400 - RNA, 23 nt, synthetic construct
  source 1..23: mol_type = other RNA
tttgtggtcagctcagtgaggat

SEQ ID NO: 101401 - RNA, 23 nt, synthetic construct
  source 1..23: mol_type = other RNA
tgcctcacagaggtacacggtgc

SEQ ID NO: 101402 - RNA, 23 nt, synthetic construct
  source 1..23: mol_type = other RNA
tgcagtgctgtccaccagtgcgt

SEQ ID NO: 101403 - RNA, 23 nt, synthetic construct
  source 1..23: mol_type = other RNA
tgttccgcggctggccccccgcg

SEQ ID NO: 101404 - RNA, 23 nt, synthetic construct
  source 1..23: mol_type = other RNA
tgcaagtgggctggcaggcatcc

SEQ ID NO: 101405 - RNA, 23 nt, synthetic construct
  source 1..23: mol_type = other RNA
tgcactcctgggcgggcacacag

SEQ ID NO: 101406 - RNA, 23 nt, synthetic construct
  source 1..23: mol_type = other RNA
tcctcctcggcaatgcagccccc

SEQ ID NO: 101407 - RNA, 23 nt, synthetic construct
  source 1..23: mol_type = other RNA
ttggtctctccaggcttgtaggt

SEQ ID NO: 101408 - RNA, 23 nt, synthetic construct
  source 1..23: mol_type = other RNA
tgtgggtggtgttgtccccacag

SEQ ID NO: 101409 - RNA, 23 nt, synthetic construct
  source 1..23: mol_type = other RNA
tcggggtggccgtggatccagtg

SEQ ID NO: 101410 - RNA, 23 nt, synthetic construct
  source 1..23: mol_type = other RNA
ttggtggttgtgctgatccacac

SEQ ID NO: 101411 - RNA, 23 nt, synthetic construct
  source 1..23: mol_type = other RNA
tacttccccacctgctcacggtt

SEQ ID NO: 101412 - RNA, 23 nt, synthetic construct
  source 1..23: mol_type = other RNA
tcggggtggccgtggatccagtg

SEQ ID NO: 101413 - RNA, 23 nt, synthetic construct
  source 1..23: mol_type = other RNA
tgtggccgtggtgctcacatgtg

SEQ ID NO: 101414 - RNA, 23 nt, synthetic construct
  source 1..23: mol_type = other RNA
taggggatggctgtaaagctggt

SEQ ID NO: 101415 - RNA, 23 nt, synthetic construct
  source 1..23: mol_type = other RNA
ttggtggttgtgctgatccacac

SEQ ID NO: 101416 - RNA, 23 nt, synthetic construct
  source 1..23: mol_type = other RNA
tgggtgtgggtggtccccgggat

SEQ ID NO: 101417 - RNA, 23 nt, synthetic construct
  source 1..23: mol_type = other RNA
tgtggttgctgctggggtgtggg

SEQ ID NO: 101418 - RNA, 23 nt, synthetic construct
  source 1..23: mol_type = other RNA
tgccctggtgtggcccggggtgg

SEQ ID NO: 101419 - RNA, 23 nt, synthetic construct
  source 1..23: mol_type = other RNA
tacttccccacctgctcacggtt

SEQ ID NO: 101420 - RNA, 23 nt, synthetic construct
  source 1..23: mol_type = other RNA
ttggacatggaactggtggccct

SEQ ID NO: 101421 - RNA, 23 nt, synthetic construct
  source 1..23: mol_type = other RNA
ttggtggttgtgctgatccacac

SEQ ID NO: 101422 - RNA, 23 nt, synthetic construct
  source 1..23: mol_type = other RNA
tgtggttgctgctggggtgtggg

SEQ ID NO: 101423 - RNA, 23 nt, synthetic construct
  source 1..23: mol_type = other RNA
tacttccccacctgctcacggtt

SEQ ID NO: 101424 - RNA, 23 nt, synthetic construct
  source 1..23: mol_type = other RNA
tcggggtggccgtggatccagtg

SEQ ID NO: 101425 - RNA, 23 nt, synthetic construct
  source 1..23: mol_type = other RNA
tgtggccgtggtgctcacatgtg

SEQ ID NO: 101426 - RNA, 23 nt, synthetic construct
  source 1..23: mol_type = other RNA
taggggatggctgtaaagctggt

SEQ ID NO: 101427 - RNA, 23 nt, synthetic construct
  source 1..23: mol_type = other RNA
ttggtggttgtgctgatccacac

SEQ ID NO: 101428 - RNA, 23 nt, synthetic construct
  source 1..23: mol_type = other RNA
tgggtgtgggtggtccccgggac

SEQ ID NO: 101429 - RNA, 23 nt, synthetic construct
  source 1..23: mol_type = other RNA
tgtggttgctgctggggtgtggg

SEQ ID NO: 101430 - RNA, 23 nt, synthetic construct
  source 1..23: mol_type = other RNA
tacttccccacctgctcacggtt

SEQ ID NO: 101431 - RNA, 23 nt, synthetic construct
  source 1..23: mol_type = other RNA
tcggggtggccgtggatccagtg

SEQ ID NO: 101432 - RNA, 23 nt, synthetic construct
  source 1..23: mol_type = other RNA
tcggggtggccgtggatccagtg

SEQ ID NO: 101433 - RNA, 23 nt, synthetic construct
  source 1..23: mol_type = other RNA
tgtggccgtggtgctcacatgtg

SEQ ID NO: 101434 - RNA, 23 nt, synthetic construct
  source 1..23: mol_type = other RNA
taggggatggctgtaaagctggt

SEQ ID NO: 101435 - RNA, 23 nt, synthetic construct
  source 1..23: mol_type = other RNA
ttggtggttgtgctgatccacac

SEQ ID NO: 101436 - RNA, 23 nt, synthetic construct
  source 1..23: mol_type = other RNA
tggtcagctcagtgaggatccgg

SEQ ID NO: 101437 - RNA, 23 nt, synthetic construct
  source 1..23: mol_type = other RNA
tcagggtggccgtggatccagtg

SEQ ID NO: 101438 - RNA, 23 nt, synthetic construct
  source 1..23: mol_type = other RNA
tgcaggggtgcgggtggtcccca

SEQ ID NO: 101439 - RNA, 23 nt, synthetic construct
  source 1..23: mol_type = other RNA
tggaaggtgtaagaggtgccgtc

SEQ ID NO: 101440 - RNA, 23 nt, synthetic construct
  source 1..23: mol_type = other RNA
tcggaaggtgtaagaggtgccgt

SEQ ID NO: 101441 - RNA, 23 nt, synthetic construct
  source 1..23: mol_type = other RNA
ttgatgcaggcgttgaagaatgg

SEQ ID NO: 101442 - RNA, 23 nt, synthetic construct
  source 1..23: mol_type = other RNA
ttgcagatggactcctgccctgg

SEQ ID NO: 101443 - RNA, 23 nt, synthetic construct
  source 1..23: mol_type = other RNA
tggtgcagatggactcctgccct

SEQ ID NO: 101444 - RNA, 23 nt, synthetic construct
  source 1..23: mol_type = other RNA
tcccacagcactgcccggccact

SEQ ID NO: 101445 - RNA, 23 nt, synthetic construct
  source 1..23: mol_type = other RNA
ttggactccaccctcagcctcac

SEQ ID NO: 101446 - RNA, 23 nt, synthetic construct
  source 1..23: mol_type = other RNA
tgtgtgggggagccatgggcgca

SEQ ID NO: 101447 - RNA, 23 nt, synthetic construct
  source 1..23: mol_type = other RNA
tgaggcagaacgttctcagacag

SEQ ID NO: 101448 - RNA, 23 nt, synthetic construct
  source 1..23: mol_type = other RNA
tgctgcgcgggcgctccggccgt

SEQ ID NO: 101449 - RNA, 23 nt, synthetic construct
  source 1..23: mol_type = other RNA
tcccatcctgggggctggcacgg

SEQ ID NO: 101450 - RNA, 23 nt, synthetic construct
  source 1..23: mol_type = other RNA
tgttgcaaaggccagggaagcgg

SEQ ID NO: 101451 - RNA, 23 nt, synthetic construct
  source 1..23: mol_type = other RNA
tgctgaccttgatgtagtccccg

SEQ ID NO: 101452 - RNA, 23 nt, synthetic construct
  source 1..23: mol_type = other RNA
tggtgcggtggcagatgccctcc

SEQ ID NO: 101453 - RNA, 23 nt, synthetic construct
  source 1..23: mol_type = other RNA
tgcggctggccccccgcgtgggc

SEQ ID NO: 101454 - RNA, 23 nt, synthetic construct
  source 1..23: mol_type = other RNA
tactcctggtgctgcatgttgag

SEQ ID NO: 101455 - RNA, 23 nt, synthetic construct
  source 1..23: mol_type = other RNA
tggttggagcaggtgtccgtgca

SEQ ID NO: 101456 - RNA, 23 nt, synthetic construct
  source 1..23: mol_type = other RNA
tggcagaagcagccgtccacaca

SEQ ID NO: 101457 - RNA, 23 nt, synthetic construct
  source 1..23: mol_type = other RNA
ttgcccgggctgtaggtgcggcc

SEQ ID NO: 101458 - RNA, 23 nt, synthetic construct
  source 1..23: mol_type = other RNA
tcacggtgaagctgctgtcggca

SEQ ID NO: 101459 - RNA, 23 nt, synthetic construct
  source 1..23: mol_type = other RNA
tcagcctgggccttccaggtgtt

SEQ ID NO: 101460 - RNA, 23 nt, synthetic construct
  source 1..23: mol_type = other RNA
tccacaggcacgaaggaaacgct

SEQ ID NO: 101461 - RNA, 23 nt, synthetic construct
  source 1..23: mol_type = other RNA
ttgcccgcggggcaggtgcagcc

SEQ ID NO: 101462 - RNA, 23 nt, synthetic construct
  source 1..23: mol_type = other RNA
tgggcactcctgggcgggcacac

SEQ ID NO: 101463 - RNA, 23 nt, synthetic construct
  source 1..23: mol_type = other RNA
tgcccccactcccatccgacacc

SEQ ID NO: 101464 - RNA, 23 nt, synthetic construct
  source 1..23: mol_type = other RNA
tcaggggcagtcctcctcggcaa

SEQ ID NO: 101465 - RNA, 23 nt, synthetic construct
  source 1..23: mol_type = other RNA
tggtggcctcgttgtgcacacag

SEQ ID NO: 101466 - RNA, 23 nt, synthetic construct
  source 1..23: mol_type = other RNA
tgtcgaccctgatggtctctcca

SEQ ID NO: 101467 - RNA, 23 nt, synthetic construct
  source 1..23: mol_type = other RNA
tcagctgccttcaaagctgtagc

SEQ ID NO: 101468 - RNA, 23 nt, synthetic construct
  source 1..23: mol_type = other RNA
tcctcttggaggatcagctcgta

SEQ ID NO: 101469 - RNA, 23 nt, synthetic construct
  source 1..23: mol_type = other RNA
tgcaggggtccttgggtgccagg

SEQ ID NO: 101470 - RNA, 23 nt, synthetic construct
  source 1..23: mol_type = other RNA
tcacagcccccatgtgggttgta

SEQ ID NO: 101471 - RNA, 23 nt, synthetic construct
  source 1..23: mol_type = other RNA
ttgccactgggtgtgcagttaca

SEQ ID NO: 101472 - RNA, 23 nt, synthetic construct
  source 1..23: mol_type = other RNA
ttggctggagttccaggacatgc

SEQ ID NO: 101473 - RNA, 23 nt, synthetic construct
  source 1..23: mol_type = other RNA
tgtggctggagttccaggacatg

SEQ ID NO: 101474 - RNA, 23 nt, synthetic construct
  source 1..23: mol_type = other RNA
taagctgcgccgcccggcactcg

SEQ ID NO: 101475 - RNA, 23 nt, synthetic construct
  source 1..23: mol_type = other RNA
ttggtctgggttggggtaggcac

SEQ ID NO: 101476 - RNA, 23 nt, synthetic construct
  source 1..23: mol_type = other RNA
tgtggtctgggttggggtaggca

SEQ ID NO: 101477 - RNA, 23 nt, synthetic construct
  source 1..23: mol_type = other RNA
tgccagggtccagttggggaagc

SEQ ID NO: 101478 - RNA, 23 nt, synthetic construct
  source 1..23: mol_type = other RNA
tgcaccttctgccccacctgtgc

SEQ ID NO: 101479 - RNA, 23 nt, synthetic construct
  source 1..23: mol_type = other RNA
tgtgcaccttctgccccacctgt

SEQ ID NO: 101480 - RNA, 23 nt, synthetic construct
  source 1..23: mol_type = other RNA
tcctgcagtggtcgtcactgcag

SEQ ID NO: 101481 - RNA, 23 nt, synthetic construct
  source 1..23: mol_type = other RNA
tggtgctggccgggggagccctg

SEQ ID NO: 101482 - RNA, 23 nt, synthetic construct
  source 1..23: mol_type = other RNA
tggtggccgtggatccagtggac

SEQ ID NO: 101483 - RNA, 23 nt, synthetic construct
  source 1..23: mol_type = other RNA
tgggtggccgtggatccagtgga

SEQ ID NO: 101484 - RNA, 23 nt, synthetic construct
  source 1..23: mol_type = other RNA
tggggtggccgtggatccagtgg

SEQ ID NO: 101485 - RNA, 23 nt, synthetic construct
  source 1..23: mol_type = other RNA
ttgtaacgctggtagctgtgggt

SEQ ID NO: 101486 - RNA, 23 nt, synthetic construct
  source 1..23: mol_type = other RNA
tgtgtgggcagtctctggagtgg

SEQ ID NO: 101487 - RNA, 23 nt, synthetic construct
  source 1..23: mol_type = other RNA
tagcactgtggaggtgtgggcag

SEQ ID NO: 101488 - RNA, 23 nt, synthetic construct
  source 1..23: mol_type = other RNA
tcagagccggtggccccagttgt

SEQ ID NO: 101489 - RNA, 23 nt, synthetic construct
  source 1..23: mol_type = other RNA
ttgtgggtgtggtggttgtgctg

SEQ ID NO: 101490 - RNA, 23 nt, synthetic construct
  source 1..23: mol_type = other RNA
tggtccccgggatggaggagggg

SEQ ID NO: 101491 - RNA, 23 nt, synthetic construct
  source 1..23: mol_type = other RNA
ttggtggtggtcagcactgtggc

SEQ ID NO: 101492 - RNA, 23 nt, synthetic construct
  source 1..23: mol_type = other RNA
tggccacagttgtggtggtggtg

SEQ ID NO: 101493 - RNA, 23 nt, synthetic construct
  source 1..23: mol_type = other RNA
tccactggtctgtgtgctagagg

SEQ ID NO: 101494 - RNA, 23 nt, synthetic construct
  source 1..23: mol_type = other RNA
ttggagccggtggccgtgatcgt

SEQ ID NO: 101495 - RNA, 23 nt, synthetic construct
  source 1..23: mol_type = other RNA
tccaggagttgaggaggggttgg

SEQ ID NO: 101496 - RNA, 23 nt, synthetic construct
  source 1..23: mol_type = other RNA
tagggagtcactgtgttgctggt

SEQ ID NO: 101497 - RNA, 23 nt, synthetic construct
  source 1..23: mol_type = other RNA
tgaggagggagtcactgtgttgc

SEQ ID NO: 101498 - RNA, 23 nt, synthetic construct
  source 1..23: mol_type = other RNA
ttggaaggctctgtgatgtgggt

SEQ ID NO: 101499 - RNA, 23 nt, synthetic construct
  source 1..23: mol_type = other RNA
ttgtggccgtggctgtggtcctg

SEQ ID NO: 101500 - RNA, 23 nt, synthetic construct
  source 1..23: mol_type = other RNA
tgcgggtcttgctgggtgtggcc

SEQ ID NO: 101501 - RNA, 23 nt, synthetic construct
  source 1..23: mol_type = other RNA
ttctgaccaggcacactggggct

SEQ ID NO: 101502 - RNA, 23 nt, synthetic construct
  source 1..23: mol_type = other RNA
tcgccagagggccccggcatggg

SEQ ID NO: 101503 - RNA, 23 nt, synthetic construct
  source 1..23: mol_type = other RNA
tccgccagagggccccggcatgg

SEQ ID NO: 101504 - RNA, 23 nt, synthetic construct
  source 1..23: mol_type = other RNA
tcccgccagagggccccggcatg

SEQ ID NO: 101505 - RNA, 23 nt, synthetic construct
  source 1..23: mol_type = other RNA
tccaaagtccaggctgcattcca

SEQ ID NO: 101506 - RNA, 23 nt, synthetic construct
  source 1..23: mol_type = other RNA
tgccaaagtccaggctgcattcc

SEQ ID NO: 101507 - RNA, 23 nt, synthetic construct
  source 1..23: mol_type = other RNA
tggtggccgtggatccagtggac

SEQ ID NO: 101508 - RNA, 23 nt, synthetic construct
  source 1..23: mol_type = other RNA
tgggtggccgtggatccagtgga

SEQ ID NO: 101509 - RNA, 23 nt, synthetic construct
  source 1..23: mol_type = other RNA
tggggtggccgtggatccagtgg

SEQ ID NO: 101510 - RNA, 23 nt, synthetic construct
  source 1..23: mol_type = other RNA
ttggggtggaggacggggtggcc

SEQ ID NO: 101511 - RNA, 23 nt, synthetic construct
  source 1..23: mol_type = other RNA
tagcagttgcctgggtggaggag

SEQ ID NO: 101512 - RNA, 23 nt, synthetic construct
  source 1..23: mol_type = other RNA
tggaggaggggatggctgtaaag

SEQ ID NO: 101513 - RNA, 23 nt, synthetic construct
  source 1..23: mol_type = other RNA
tacagtctctggagtggaggagg

SEQ ID NO: 101514 - RNA, 23 nt, synthetic construct
  source 1..23: mol_type = other RNA
ttgtgggtgtggtggttgtgctg

SEQ ID NO: 101515 - RNA, 23 nt, synthetic construct
  source 1..23: mol_type = other RNA
tggtccccgggatggaggagggg

SEQ ID NO: 101516 - RNA, 23 nt, synthetic construct
  source 1..23: mol_type = other RNA
ttggtggtggtcagcactgtggg

SEQ ID NO: 101517 - RNA, 23 nt, synthetic construct
  source 1..23: mol_type = other RNA
tggccacagttgtggtggtggtg

SEQ ID NO: 101518 - RNA, 23 nt, synthetic construct
  source 1..23: mol_type = other RNA
tccactggtctgtgtgctagagg

SEQ ID NO: 101519 - RNA, 23 nt, synthetic construct
  source 1..23: mol_type = other RNA
ttggagccggtggccgtgatcgt

SEQ ID NO: 101520 - RNA, 23 nt, synthetic construct
  source 1..23: mol_type = other RNA
ttggaaggctctgtgatgtgggt

SEQ ID NO: 101521 - RNA, 23 nt, synthetic construct
  source 1..23: mol_type = other RNA
tggtgagggctggacagggctgg

SEQ ID NO: 101522 - RNA, 23 nt, synthetic construct
  source 1..23: mol_type = other RNA
tgcgggtcttgctgggtgtggcc

SEQ ID NO: 101523 - RNA, 23 nt, synthetic construct
  source 1..23: mol_type = other RNA
ttctgaccaggcacactggggct

SEQ ID NO: 101524 - RNA, 23 nt, synthetic construct
  source 1..23: mol_type = other RNA
tcgccagagggccccggcatggg

SEQ ID NO: 101525 - RNA, 23 nt, synthetic construct
  source 1..23: mol_type = other RNA
tccgccagagggccccggcatgg

SEQ ID NO: 101526 - RNA, 23 nt, synthetic construct
  source 1..23: mol_type = other RNA
tcccgccagagggccccggcatg

SEQ ID NO: 101527 - RNA, 23 nt, synthetic construct
  source 1..23: mol_type = other RNA
tccaaagtccaggctgcattcca

SEQ ID NO: 101528 - RNA, 23 nt, synthetic construct
  source 1..23: mol_type = other RNA
tgccaaagtccaggctgcattcc

SEQ ID NO: 101529 - RNA, 23 nt, synthetic construct
  source 1..23: mol_type = other RNA
tccggggtggaggacgggatggc

SEQ ID NO: 101530 - RNA, 23 nt, synthetic construct
  source 1..23: mol_type = other RNA
tcccggggtggaggacgggatgg

SEQ ID NO: 101531 - RNA, 23 nt, synthetic construct
  source 1..23: mol_type = other RNA
ttggtggccgtgctggtcagcac

SEQ ID NO: 101532 - RNA, 23 nt, synthetic construct
  source 1..23: mol_type = other RNA
tctgtggatttggtggctgtgct

SEQ ID NO: 101533 - RNA, 23 nt, synthetic construct
  source 1..23: mol_type = other RNA
tggaggggatgggtgtaaagctg

SEQ ID NO: 101534 - RNA, 23 nt, synthetic construct
  source 1..23: mol_type = other RNA
tggtgaaggaggggatgggtgta

SEQ ID NO: 101535 - RNA, 23 nt, synthetic construct
  source 1..23: mol_type = other RNA
tagggtcccggtggtcccaaggg

SEQ ID NO: 101536 - RNA, 23 nt, synthetic construct
  source 1..23: mol_type = other RNA
tttctgggagggtcccggtggtc

SEQ ID NO: 101537 - RNA, 23 nt, synthetic construct
  source 1..23: mol_type = other RNA
tggaggaggggtggattgtggac

SEQ ID NO: 101538 - RNA, 23 nt, synthetic construct
  source 1..23: mol_type = other RNA
tgagtggaggaggggtggattgt

SEQ ID NO: 101539 - RNA, 23 nt, synthetic construct
  source 1..23: mol_type = other RNA
tagcactgtggaggtgtgggtgg

SEQ ID NO: 101540 - RNA, 23 nt, synthetic construct
  source 1..23: mol_type = other RNA
tgccgtggggccagtggctgcag

SEQ ID NO: 101541 - RNA, 23 nt, synthetic construct
  source 1..23: mol_type = other RNA
ttggggtggaggacggggtggcc

SEQ ID NO: 101542 - RNA, 23 nt, synthetic construct
  source 1..23: mol_type = other RNA
ttggtggccgtgctggtcagcac

SEQ ID NO: 101543 - RNA, 23 nt, synthetic construct
  source 1..23: mol_type = other RNA
ttggctctggagctgatgactgt

SEQ ID NO: 101544 - RNA, 23 nt, synthetic construct
  source 1..23: mol_type = other RNA
ttgtaacgctggtagctgtgggt

SEQ ID NO: 101545 - RNA, 23 nt, synthetic construct
  source 1..23: mol_type = other RNA
tgtagaggagggtgtggctgtgg

SEQ ID NO: 101546 - RNA, 23 nt, synthetic construct
  source 1..23: mol_type = other RNA
ttgtgggtgtggtggttgtgctg

SEQ ID NO: 101547 - RNA, 23 nt, synthetic construct
  source 1..23: mol_type = other RNA
tggtccccgggatggaggagggg

SEQ ID NO: 101548 - RNA, 23 nt, synthetic construct
  source 1..23: mol_type = other RNA
ttggtggtggtcagcactgtggc

SEQ ID NO: 101549 - RNA, 23 nt, synthetic construct
  source 1..23: mol_type = other RNA
tggccacagttgtggtggtggtg

SEQ ID NO: 101550 - RNA, 23 nt, synthetic construct
  source 1..23: mol_type = other RNA
tccactggtctgtgtgctagagg

SEQ ID NO: 101551 - RNA, 23 nt, synthetic construct
  source 1..23: mol_type = other RNA
ttggaaggctctgtgatgtgggt

SEQ ID NO: 101552 - RNA, 23 nt, synthetic construct
  source 1..23: mol_type = other RNA
tgctggggtgtgggaagtcaccg

SEQ ID NO: 101553 - RNA, 23 nt, synthetic construct
  source 1..23: mol_type = other RNA
ttgctgggtggtactggtggttg

SEQ ID NO: 101554 - RNA, 23 nt, synthetic construct
  source 1..23: mol_type = other RNA
tgtgctgggtggtactggtggtt

SEQ ID NO: 101555 - RNA, 23 nt, synthetic construct
  source 1..23: mol_type = other RNA
tggtgagggctggacagggctgg

SEQ ID NO: 101556 - RNA, 23 nt, synthetic construct
  source 1..23: mol_type = other RNA
tgcgggtcttgctgggtgtggct

SEQ ID NO: 101557 - RNA, 23 nt, synthetic construct
  source 1..23: mol_type = other RNA
ttctgaccaggcacactggggct

SEQ ID NO: 101558 - RNA, 23 nt, synthetic construct
  source 1..23: mol_type = other RNA
tcgccagagggccccggcatggg

SEQ ID NO: 101559 - RNA, 23 nt, synthetic construct
  source 1..23: mol_type = other RNA
tccgccagagggccccggcatgg

SEQ ID NO: 101560 - RNA, 23 nt, synthetic construct
  source 1..23: mol_type = other RNA
tcccgccagagggccccggcatg

SEQ ID NO: 101561 - RNA, 23 nt, synthetic construct
  source 1..23: mol_type = other RNA
tccaaagtccaggctgcattcca

SEQ ID NO: 101562 - RNA, 23 nt, synthetic construct
  source 1..23: mol_type = other RNA
tgccaaagtccaggctgcattcc

SEQ ID NO: 101563 - RNA, 23 nt, synthetic construct
  source 1..23: mol_type = other RNA
ttcagctttgtgaggatccaggt

SEQ ID NO: 101564 - RNA, 23 nt, synthetic construct
  source 1..23: mol_type = other RNA
tgtcagctttgtgaggatccagg

SEQ ID NO: 101565 - RNA, 23 nt, synthetic construct
  source 1..23: mol_type = other RNA
tggtggccgtggatccagtggac

SEQ ID NO: 101566 - RNA, 23 nt, synthetic construct
  source 1..23: mol_type = other RNA
tgggtggccgtggatccagtgga

SEQ ID NO: 101567 - RNA, 23 nt, synthetic construct
  source 1..23: mol_type = other RNA
tggggtggccgtggatccagtgg

SEQ ID NO: 101568 - RNA, 23 nt, synthetic construct
  source 1..23: mol_type = other RNA
ttggggtggaggacggggtggcc

SEQ ID NO: 101569 - RNA, 23 nt, synthetic construct
  source 1..23: mol_type = other RNA
tagcagttgcctgggtggaggag

SEQ ID NO: 101570 - RNA, 23 nt, synthetic construct
  source 1..23: mol_type = other RNA
tggaggaggggatggctgtaaag

SEQ ID NO: 101571 - RNA, 23 nt, synthetic construct
  source 1..23: mol_type = other RNA
tgtgtgggcagtctctggagtgg

SEQ ID NO: 101572 - RNA, 23 nt, synthetic construct
  source 1..23: mol_type = other RNA
tagcactgtggaggtgtgggcag

SEQ ID NO: 101573 - RNA, 23 nt, synthetic construct
  source 1..23: mol_type = other RNA
ttgtgggtgtggtggttgtgctg

SEQ ID NO: 101574 - RNA, 23 nt, synthetic construct
  source 1..23: mol_type = other RNA
tgacggaggagggggtcaccgtg

SEQ ID NO: 101575 - RNA, 23 nt, synthetic construct
  source 1..23: mol_type = other RNA
ttggtggtggtcagcactgtggg

SEQ ID NO: 101576 - RNA, 23 nt, synthetic construct
  source 1..23: mol_type = other RNA
tggccacagttgtggtggtggtg

SEQ ID NO: 101577 - RNA, 23 nt, synthetic construct
  source 1..23: mol_type = other RNA
tccactggtctgtgtgctagagg

SEQ ID NO: 101578 - RNA, 23 nt, synthetic construct
  source 1..23: mol_type = other RNA
ttggagccggtggccgtgatcgt

SEQ ID NO: 101579 - RNA, 23 nt, synthetic construct
  source 1..23: mol_type = other RNA
ttggaaggctctgtgatgtgggt

SEQ ID NO: 101580 - RNA, 23 nt, synthetic construct
  source 1..23: mol_type = other RNA
tggtgagggctggacagggctgg

SEQ ID NO: 101581 - RNA, 23 nt, synthetic construct
  source 1..23: mol_type = other RNA
tggtggtcgtccctggggaaggg

SEQ ID NO: 101582 - RNA, 23 nt, synthetic construct
  source 1..23: mol_type = other RNA
tgcgggtcttgctgggtgtggcc

SEQ ID NO: 101583 - RNA, 23 nt, synthetic construct
  source 1..23: mol_type = other RNA
ttctgaccaggcacactggggct

SEQ ID NO: 101584 - RNA, 23 nt, synthetic construct
  source 1..23: mol_type = other RNA
tcgccagagggccccggcatggg

SEQ ID NO: 101585 - RNA, 23 nt, synthetic construct
  source 1..23: mol_type = other RNA
tccgccagagggccccggcatgg

SEQ ID NO: 101586 - RNA, 23 nt, synthetic construct
  source 1..23: mol_type = other RNA
tcccgccagagggccccggcatg

SEQ ID NO: 101587 - RNA, 23 nt, synthetic construct
  source 1..23: mol_type = other RNA
tccaaagtccaggctgcattcca

SEQ ID NO: 101588 - RNA, 23 nt, synthetic construct
  source 1..23: mol_type = other RNA
tgccaaagtccaggctgcattcc

SEQ ID NO: 101589 - RNA, 23 nt, synthetic construct
  source 1..23: mol_type = other RNA
tcgtggatccagtggatgcagtc

SEQ ID NO: 101590 - RNA, 23 nt, synthetic construct
  source 1..23: mol_type = other RNA
tggtggccgtggatccagtggat

SEQ ID NO: 101591 - RNA, 23 nt, synthetic construct
  source 1..23: mol_type = other RNA
tgggtggccgtggatccagtgga

SEQ ID NO: 101592 - RNA, 23 nt, synthetic construct
  source 1..23: mol_type = other RNA
tggggtggccgtggatccagtgg

SEQ ID NO: 101593 - RNA, 23 nt, synthetic construct
  source 1..23: mol_type = other RNA
tcggggtggaggacggggtggcc

SEQ ID NO: 101594 - RNA, 23 nt, synthetic construct
  source 1..23: mol_type = other RNA
tctgtggatttggtggctgtgct

SEQ ID NO: 101595 - RNA, 23 nt, synthetic construct
  source 1..23: mol_type = other RNA
ttgtaacgctggtagctgtggat

SEQ ID NO: 101596 - RNA, 23 nt, synthetic construct
  source 1..23: mol_type = other RNA
ttggtcccaagggtggaggaggg

SEQ ID NO: 101597 - RNA, 23 nt, synthetic construct
  source 1..23: mol_type = other RNA
tagggtcccggtggtcccaaggg

SEQ ID NO: 101598 - RNA, 23 nt, synthetic construct
  source 1..23: mol_type = other RNA
tttctgggagggtcccggtggtc

SEQ ID NO: 101599 - RNA, 23 nt, synthetic construct
  source 1..23: mol_type = other RNA
tggaggaggggtggattgtggac

SEQ ID NO: 101600 - RNA, 23 nt, synthetic construct
  source 1..23: mol_type = other RNA
tgagtggaggaggggtggattgt

SEQ ID NO: 101601 - RNA, 23 nt, synthetic construct
  source 1..23: mol_type = other RNA
tagcactgtggaggtgtgggtgg

SEQ ID NO: 101602 - RNA, 23 nt, synthetic construct
  source 1..23: mol_type = other RNA
tgccgtggggccagtggctgcag

SEQ ID NO: 101603 - RNA, 23 nt, synthetic construct
  source 1..23: mol_type = other RNA
ttggggtggaggacggggtggcc

SEQ ID NO: 101604 - RNA, 23 nt, synthetic construct
  source 1..23: mol_type = other RNA
tggtggccgtggatccagtggac

SEQ ID NO: 101605 - RNA, 23 nt, synthetic construct
  source 1..23: mol_type = other RNA
tgggtggccgtggatccagtgga

SEQ ID NO: 101606 - RNA, 23 nt, synthetic construct
  source 1..23: mol_type = other RNA
tggggtggccgtggatccagtgg

SEQ ID NO: 101607 - RNA, 23 nt, synthetic construct
  source 1..23: mol_type = other RNA
ttggggtggaggacggggtggcc

SEQ ID NO: 101608 - RNA, 23 nt, synthetic construct
  source 1..23: mol_type = other RNA
tagcagttgcctgggtggaggag

SEQ ID NO: 101609 - RNA, 23 nt, synthetic construct
  source 1..23: mol_type = other RNA
tggaggaggggatggctgtaaag

SEQ ID NO: 101610 - RNA, 23 nt, synthetic construct
  source 1..23: mol_type = other RNA
tacagtctctggagtggaggagg

SEQ ID NO: 101611 - RNA, 23 nt, synthetic construct
  source 1..23: mol_type = other RNA
ttgtgggtgtggtggttgtgctg

SEQ ID NO: 101612 - RNA, 23 nt, synthetic construct
  source 1..23: mol_type = other RNA
tggtccccgggatggaggagggg

SEQ ID NO: 101613 - RNA, 23 nt, synthetic construct
  source 1..23: mol_type = other RNA
tggccacagttgtggtggtggtg

SEQ ID NO: 101614 - RNA, 23 nt, synthetic construct
  source 1..23: mol_type = other RNA
tccactggtctgtgtgctagagg

SEQ ID NO: 101615 - RNA, 23 nt, synthetic construct
  source 1..23: mol_type = other RNA
ttggagccggtggccgtgatcgt

SEQ ID NO: 101616 - RNA, 23 nt, synthetic construct
  source 1..23: mol_type = other RNA
ttggtggccgtgctggtcagcac

SEQ ID NO: 101617 - RNA, 23 nt, synthetic construct
  source 1..23: mol_type = other RNA
tggtggctgcgggtgtggtggcc

SEQ ID NO: 101618 - RNA, 23 nt, synthetic construct
  source 1..23: mol_type = other RNA
tgagctggtggctgcgggtgtgg

SEQ ID NO: 101619 - RNA, 23 nt, synthetic construct
  source 1..23: mol_type = other RNA
ttgtggattttgtggctgtgctt

SEQ ID NO: 101620 - RNA, 23 nt, synthetic construct
  source 1..23: mol_type = other RNA
tggaggggatgggtgtaaagctg

SEQ ID NO: 101621 - RNA, 23 nt, synthetic construct
  source 1..23: mol_type = other RNA
tagcactgtggaggtgtgggtgg

SEQ ID NO: 101622 - RNA, 23 nt, synthetic construct
  source 1..23: mol_type = other RNA
tagttgtagtggctgttgtggtc

SEQ ID NO: 101623 - RNA, 23 nt, synthetic construct
  source 1..23: mol_type = other RNA
tcagttgtagtggctgttgtggt

SEQ ID NO: 101624 - RNA, 23 nt, synthetic construct
  source 1..23: mol_type = other RNA
tggtggccgtggatccagtggct

SEQ ID NO: 101625 - RNA, 23 nt, synthetic construct
  source 1..23: mol_type = other RNA
tgggtggccgtggatccagtggc

SEQ ID NO: 101626 - RNA, 23 nt, synthetic construct
  source 1..23: mol_type = other RNA
tggccatggtggtcaccactttg

SEQ ID NO: 101627 - RNA, 23 nt, synthetic construct
  source 1..23: mol_type = other RNA
tcaggggtgcgggtggtccccac

SEQ ID NO: 101628 - RNA, 23 nt, synthetic construct
  source 1..23: mol_type = other RNA
tggtgacgttggccacaggcttt

SEQ ID NO: 101629 - RNA, 23 nt, synthetic construct
  source 1..23: mol_type = other RNA
tagcggcagtggcagaggccgtg

SEQ ID NO: 101630 - RNA, 23 nt, synthetic construct
  source 1..23: mol_type = other RNA
tccctcctccttcccatgcacca

SEQ ID NO: 101631 - RNA, 23 nt, synthetic construct
  source 1..23: mol_type = other RNA
tgtggtccccagcacagacacaa

SEQ ID NO: 101632 - RNA, 23 nt, synthetic construct
  source 1..23: mol_type = other RNA
tgacttggccattgaaggtgacg

SEQ ID NO: 101633 - RNA, 23 nt, synthetic construct
  source 1..23: mol_type = other RNA
tcctggaagacttggccattgaa

SEQ ID NO: 101634 - RNA, 23 nt, synthetic construct
  source 1..23: mol_type = other RNA
tgctgtcggggaccagccacgtc

SEQ ID NO: 101635 - RNA, 23 nt, synthetic construct
  source 1..23: mol_type = other RNA
tcagccatcctttctgctgtcgg

SEQ ID NO: 101636 - RNA, 23 nt, synthetic construct
  source 1..23: mol_type = other RNA
tcggctgtggtgggcatggggtg

SEQ ID NO: 101637 - RNA, 23 nt, synthetic construct
  source 1..23: mol_type = other RNA
tatgcaggcgttgaagaatgggc

SEQ ID NO: 101638 - RNA, 23 nt, synthetic construct
  source 1..23: mol_type = other RNA
tcacgcaggggcaggcctgcacg

SEQ ID NO: 101639 - RNA, 23 nt, synthetic construct
  source 1..23: mol_type = other RNA
tgggcaggtggttgtgttgcaca

SEQ ID NO: 101640 - RNA, 23 nt, synthetic construct
  source 1..23: mol_type = other RNA
tagatggactcctgccctggcgg

SEQ ID NO: 101641 - RNA, 23 nt, synthetic construct
  source 1..23: mol_type = other RNA
tacgaacacagctgaggtctgca

SEQ ID NO: 101642 - RNA, 23 nt, synthetic construct
  source 1..23: mol_type = other RNA
tcagagaggcaggtacacatgtg

SEQ ID NO: 101643 - RNA, 23 nt, synthetic construct
  source 1..23: mol_type = other RNA
tattgttgcaggcatcctcctga

SEQ ID NO: 101644 - RNA, 23 nt, synthetic construct
  source 1..23: mol_type = other RNA
ttgcccggccactctcttgtact

SEQ ID NO: 101645 - RNA, 23 nt, synthetic construct
  source 1..23: mol_type = other RNA
tccacagcactgcccggccactc

SEQ ID NO: 101646 - RNA, 23 nt, synthetic construct
  source 1..23: mol_type = other RNA
tgctgtggggtcagcaaatggac

SEQ ID NO: 101647 - RNA, 23 nt, synthetic construct
  source 1..23: mol_type = other RNA
ttggcctcctgggccgggaagcc

SEQ ID NO: 101648 - RNA, 23 nt, synthetic construct
  source 1..23: mol_type = other RNA
tacgttctcagacagcagtggcc

SEQ ID NO: 101649 - RNA, 23 nt, synthetic construct
  source 1..23: mol_type = other RNA
tgtgctgcgcgggcgctccggcc

SEQ ID NO: 101650 - RNA, 23 nt, synthetic construct
  source 1..23: mol_type = other RNA
tgcagctggccttgcctggacca

SEQ ID NO: 101651 - RNA, 23 nt, synthetic construct
  source 1..23: mol_type = other RNA
tgtttatttgcaaaactgggctg

SEQ ID NO: 101652 - RNA, 23 nt, synthetic construct
  source 1..23: mol_type = other RNA
ttgctcagggtttatttgcaaaa

SEQ ID NO: 101653 - RNA, 23 nt, synthetic construct
  source 1..23: mol_type = other RNA
tatgctcagggtttatttgcaaa

SEQ ID NO: 101654 - RNA, 23 nt, synthetic construct
  source 1..23: mol_type = other RNA
ttgcagttgtccacatggctgtt

SEQ ID NO: 101655 - RNA, 23 nt, synthetic construct
  source 1..23: mol_type = other RNA
tccagagtggaggaggcggtggc

SEQ ID NO: 101656 - RNA, 23 nt, synthetic construct
  source 1..23: mol_type = other RNA
tgggctttgggatgctgacccct

SEQ ID NO: 101657 - RNA, 23 nt, synthetic construct
  source 1..23: mol_type = other RNA
tgggggtggccacagagccggtg

SEQ ID NO: 101658 - RNA, 23 nt, synthetic construct
  source 1..23: mol_type = other RNA
tgggggtggccacagagccggtg

SEQ ID NO: 101659 - RNA, 23 nt, synthetic construct
  source 1..23: mol_type = other RNA
tgggggtggccacagagccggtg

SEQ ID NO: 101660 - RNA, 23 nt, synthetic construct
  source 1..23: mol_type = other RNA
tgggggtggccacagagccggtg

SEQ ID NO: 101661 - RNA, 23 nt, synthetic construct
  source 1..23: mol_type = other RNA
tgggggtggccacagagccggtg

SEQ ID NO: 101662 - RNA, 23 nt, synthetic construct
  source 1..23: mol_type = other RNA
tggtgggggtgggtgtgctagac

SEQ ID NO: 101663 - RNA, 23 nt, synthetic construct
  source 1..23: mol_type = other RNA
tgcactttgggagggggagctgt

SEQ ID NO: 101664 - RNA, 23 nt, synthetic construct
  source 1..23: mol_type = other RNA
tagggggtggccacagagccggt

SEQ ID NO: 101665 - RNA, 23 nt, synthetic construct
  source 1..23: mol_type = other RNA
tagggggtggccacagagccggt

SEQ ID NO: 101666 - RNA, 23 nt, synthetic construct
  source 1..23: mol_type = other RNA
tgcactttgggagggggagctgt

SEQ ID NO: 101667 - RNA, 23 nt, synthetic construct
  source 1..23: mol_type = other RNA
tagggggtggccacagagccggt

SEQ ID NO: 101668 - RNA, 23 nt, synthetic construct
  source 1..23: mol_type = other RNA
tagggggtggccacagagccggt

SEQ ID NO: 101669 - RNA, 23 nt, synthetic construct
  source 1..23: mol_type = other RNA
tgcactttgggagggggagctgt

SEQ ID NO: 101670 - RNA, 23 nt, synthetic construct
  source 1..23: mol_type = other RNA
tagggggtggccacagagccggt

SEQ ID NO: 101671 - RNA, 23 nt, synthetic construct
  source 1..23: mol_type = other RNA
tttgaagtcctcgtaggcggcgc

SEQ ID NO: 101672 - RNA, 23 nt, synthetic construct
  source 1..23: mol_type = other RNA
ttgcagaaacactcgcagtcgcc

SEQ ID NO: 101673 - RNA, 23 nt, synthetic construct
  source 1..23: mol_type = other RNA
tctgcacaccctgtgcttttctg

SEQ ID NO: 101674 - RNA, 23 nt, synthetic construct
  source 1..23: mol_type = other RNA
tgctgcacaccctgtgcttttct

SEQ ID NO: 101675 - RNA, 23 nt, synthetic construct
  source 1..23: mol_type = other RNA
taagtggctttggaactggtggc

SEQ ID NO: 101676 - RNA, 23 nt, synthetic construct
  source 1..23: mol_type = other RNA
taagtggctttggaactggtggc

SEQ ID NO: 101677 - RNA, 23 nt, synthetic construct
  source 1..23: mol_type = other RNA
tggcactcctgggcgggcacaca

SEQ ID NO: 101678 - RNA, 23 nt, synthetic construct
  source 1..23: mol_type = other RNA
tgtggccctggtgtggcccgggg

SEQ ID NO: 101679 - RNA, 23 nt, synthetic construct
  source 1..23: mol_type = other RNA
tggaccagcctgtctgccccagc

SEQ ID NO: 101680 - RNA, 23 nt, synthetic construct
  source 1..23: mol_type = other RNA
tagacaccggggctgcggggctg

SEQ ID NO: 101681 - RNA, 23 nt, synthetic construct
  source 1..23: mol_type = other RNA
tgtggtggtgttagtcaaggggc

SEQ ID NO: 101682 - RNA, 23 nt, synthetic construct
  source 1..23: mol_type = other RNA
tgtgagggctggaaagggctgga

SEQ ID NO: 101683 - RNA, 23 nt, synthetic construct
  source 1..23: mol_type = other RNA
ttcaaacgtctcaaagtctccgc

SEQ ID NO: 101684 - RNA, 23 nt, synthetic construct
  source 1..23: mol_type = other RNA
ttcctccagcggcatgtcgggaa

SEQ ID NO: 101685 - RNA, 23 nt, synthetic construct
  source 1..23: mol_type = other RNA
ttggtggtggtgttagtcaaggg

SEQ ID NO: 101686 - RNA, 23 nt, synthetic construct
  source 1..23: mol_type = other RNA
tgtcttgtagtggaagtcacccc

SEQ ID NO: 101687 - RNA, 23 nt, synthetic construct
  source 1..23: mol_type = other RNA
tcacacagtggtcctcgcagagc

SEQ ID NO: 101688 - RNA, 23 nt, synthetic construct
  source 1..23: mol_type = other RNA
tagcggtgctggctgtgcctgtc

SEQ ID NO: 101689 - RNA, 23 nt, synthetic construct
  source 1..23: mol_type = other RNA
tcctggctggtggtggtgttagt

SEQ ID NO: 101690 - RNA, 23 nt, synthetic construct
  source 1..23: mol_type = other RNA
tgggtggctgtgaagcccgtggt

SEQ ID NO: 101691 - RNA, 23 nt, synthetic construct
  source 1..23: mol_type = other RNA
tggggtggctgtgaagcccgtgg

SEQ ID NO: 101692 - RNA, 23 nt, synthetic construct
  source 1..23: mol_type = other RNA
tggtgagggctggaaagggctgg

SEQ ID NO: 101693 - RNA, 23 nt, synthetic construct
  source 1..23: mol_type = other RNA
tgggtggctgtgaagcccgtggt

SEQ ID NO: 101694 - RNA, 23 nt, synthetic construct
  source 1..23: mol_type = other RNA
tggggtggctgtgaagcccgtgg

SEQ ID NO: 101695 - RNA, 23 nt, synthetic construct
  source 1..23: mol_type = other RNA
tgggtggctgtgaagcccgtggt

SEQ ID NO: 101696 - RNA, 23 nt, synthetic construct
  source 1..23: mol_type = other RNA
tggggtggctgtgaagcccgtgg

SEQ ID NO: 101697 - RNA, 23 nt, synthetic construct
  source 1..23: mol_type = other RNA
tgggtggctgtgaagcccgtggt

SEQ ID NO: 101698 - RNA, 23 nt, synthetic construct
  source 1..23: mol_type = other RNA
tggggtggctgtgaagcccgtgg

SEQ ID NO: 101699 - RNA, 23 nt, synthetic construct
  source 1..23: mol_type = other RNA
tcacgcccagggcaggaatgtcc

SEQ ID NO: 101700 - RNA, 23 nt, synthetic construct
  source 1..23: mol_type = other RNA
tcacaggctctcccagggtagga

SEQ ID NO: 101701 - RNA, 23 nt, synthetic construct
  source 1..23: mol_type = other RNA
tcgtcactgcagcagaggacccg

SEQ ID NO: 101702 - RNA, 23 nt, synthetic construct
  source 1..23: mol_type = other RNA
tattgtcgtctctgtcctgggcg

SEQ ID NO: 101703 - RNA, 23 nt, synthetic construct
  source 1..23: mol_type = other RNA
tcgtagtggccgtggtggtcagt

SEQ ID NO: 101704 - RNA, 23 nt, synthetic construct
  source 1..23: mol_type = other RNA
tcgtagtggccgtggtggtcagt

SEQ ID NO: 101705 - RNA, 23 nt, synthetic construct
  source 1..23: mol_type = other RNA
tcgtagtggccgtggtggtcagt

SEQ ID NO: 101706 - RNA, 23 nt, synthetic construct
  source 1..23: mol_type = other RNA
tcgtagtggccgtggtggtcagt

SEQ ID NO: 101707 - RNA, 23 nt, synthetic construct
  source 1..23: mol_type = other RNA
tggattgtggacatggtggacat

SEQ ID NO: 101708 - RNA, 23 nt, synthetic construct
  source 1..23: mol_type = other RNA
taaccggtgggcaccatcacggt

SEQ ID NO: 101709 - RNA, 23 nt, synthetic construct
  source 1..23: mol_type = other RNA
tctgattgcacactgcgtagaaa

SEQ ID NO: 101710 - RNA, 23 nt, synthetic construct
  source 1..23: mol_type = other RNA
tgtattgttgcaggcatcctcct

SEQ ID NO: 101711 - RNA, 23 nt, synthetic construct
  source 1..23: mol_type = other RNA
tgctccccgggaaatttaggaaa

SEQ ID NO: 101712 - RNA, 23 nt, synthetic construct
  source 1..23: mol_type = other RNA
tcgtaagcctccaggctctggca

SEQ ID NO: 101713 - RNA, 23 nt, synthetic construct
  source 1..23: mol_type = other RNA
tcccgtgtgtggtggccgtggtg

SEQ ID NO: 101714 - RNA, 23 nt, synthetic construct
  source 1..23: mol_type = other RNA
tcccgtgtgtggtggccgtggtg

SEQ ID NO: 101715 - RNA, 23 nt, synthetic construct
  source 1..23: mol_type = other RNA
tcccgtgtgtggtggccgtggtg

SEQ ID NO: 101716 - RNA, 23 nt, synthetic construct
  source 1..23: mol_type = other RNA
ttggcagggacacataggcccgc

SEQ ID NO: 101717 - RNA, 23 nt, synthetic construct
  source 1..23: mol_type = other RNA
tctgccctggcgggcacacaggc

SEQ ID NO: 101718 - RNA, 23 nt, synthetic construct
  source 1..23: mol_type = other RNA
tgtagtcctgggccaagatgtac

SEQ ID NO: 101719 - RNA, 23 nt, synthetic construct
  source 1..23: mol_type = other RNA
tgtcctggtagctgtaggtcctg

SEQ ID NO: 101720 - RNA, 23 nt, synthetic construct
  source 1..23: mol_type = other RNA
tcccaggagttgaggaggggttg

SEQ ID NO: 101721 - RNA, 23 nt, synthetic construct
  source 1..23: mol_type = other RNA
tgagcacggagcgcggggtgcca

SEQ ID NO: 101722 - RNA, 23 nt, synthetic construct
  source 1..23: mol_type = other RNA
ttggtggtcagtgatgggggagt

SEQ ID NO: 101723 - RNA, 23 nt, synthetic construct
  source 1..23: mol_type = other RNA
ttggtggtcagtgatgggggagt

SEQ ID NO: 101724 - RNA, 23 nt, synthetic construct
  source 1..23: mol_type = other RNA
ttggtggtcagtgatgggggagt

SEQ ID NO: 101725 - RNA, 23 nt, synthetic construct
  source 1..23: mol_type = other RNA
ttggtggtcagtgatgggggagt

SEQ ID NO: 101726 - RNA, 23 nt, synthetic construct
  source 1..23: mol_type = other RNA
tgggtgggcgaggacgtcggggc

SEQ ID NO: 101727 - RNA, 23 nt, synthetic construct
  source 1..23: mol_type = other RNA
tccgcgtcgtggcaggcctgggc

SEQ ID NO: 101728 - RNA, 23 nt, synthetic construct
  source 1..23: mol_type = other RNA
tagaacaaggggcaggtgtccgg

SEQ ID NO: 101729 - RNA, 23 nt, synthetic construct
  source 1..23: mol_type = other RNA
ttcgggaagctgcgccgcccggc

SEQ ID NO: 101730 - RNA, 23 nt, synthetic construct
  source 1..23: mol_type = other RNA
tttgtcccaggagttgaggaggg

SEQ ID NO: 101731 - RNA, 23 nt, synthetic construct
  source 1..23: mol_type = other RNA
ttcagggtttatttgcaaaactg

SEQ ID NO: 101732 - RNA, 23 nt, synthetic construct
  source 1..23: mol_type = other RNA
tggtgggcgaggacgtcggggca

SEQ ID NO: 101733 - RNA, 23 nt, synthetic construct
  source 1..23: mol_type = other RNA
tgtcctggcactgccatagcccc

SEQ ID NO: 101734 - RNA, 23 nt, synthetic construct
  source 1..23: mol_type = other RNA
ttagtcctgggccaagatgtact

SEQ ID NO: 101735 - RNA, 23 nt, synthetic construct
  source 1..23: mol_type = other RNA
tgcccctggtgtggcccggggtg

SEQ ID NO: 101736 - RNA, 23 nt, synthetic construct
  source 1..23: mol_type = other RNA
tggggacaggtagtattgttgca

SEQ ID NO: 101737 - RNA, 23 nt, synthetic construct
  source 1..23: mol_type = other RNA
tgttggcactttggtagtgtgag

SEQ ID NO: 101738 - RNA, 23 nt, synthetic construct
  source 1..23: mol_type = other RNA
tggtggtgttgaaggaggtgccc

SEQ ID NO: 101739 - RNA, 23 nt, synthetic construct
  source 1..23: mol_type = other RNA
tgccactctgaccaggcacactg

SEQ ID NO: 101740 - RNA, 23 nt, synthetic construct
  source 1..23: mol_type = other RNA
tgccactctgaccaggcacactg

SEQ ID NO: 101741 - RNA, 23 nt, synthetic construct
  source 1..23: mol_type = other RNA
tggaggtgcccctggtgtggccc

SEQ ID NO: 101742 - RNA, 23 nt, synthetic construct
  source 1..23: mol_type = other RNA
tgccactctgaccaggcacactg

SEQ ID NO: 101743 - RNA, 23 nt, synthetic construct
  source 1..23: mol_type = other RNA
tgccactctgaccaggcacactg

SEQ ID NO: 101744 - RNA, 23 nt, synthetic construct
  source 1..23: mol_type = other RNA
tatggatctctctcatgaggaca

SEQ ID NO: 101745 - RNA, 23 nt, synthetic construct
  source 1..23: mol_type = other RNA
ttacgcagtgctgtccaccagtg

SEQ ID NO: 101746 - RNA, 23 nt, synthetic construct
  source 1..23: mol_type = other RNA
tttcccacccgtacatgaacaca

SEQ ID NO: 101747 - RNA, 23 nt, synthetic construct
  source 1..23: mol_type = other RNA
taggggatggctgtaacgctggt

SEQ ID NO: 101748 - RNA, 23 nt, synthetic construct
  source 1..23: mol_type = other RNA
tcatgtccttgcaactggcggca

SEQ ID NO: 101749 - RNA, 23 nt, synthetic construct
  source 1..23: mol_type = other RNA
tgtgctgcatgttgagggggcag

SEQ ID NO: 101750 - RNA, 23 nt, synthetic construct
  source 1..23: mol_type = other RNA
taagtccaggctgcattccacga

SEQ ID NO: 101751 - RNA, 23 nt, synthetic construct
  source 1..23: mol_type = other RNA
taagtccaggctgcattccacga

SEQ ID NO: 101752 - RNA, 23 nt, synthetic construct
  source 1..23: mol_type = other RNA
taagtccaggctgcattccacga

SEQ ID NO: 101753 - RNA, 23 nt, synthetic construct
  source 1..23: mol_type = other RNA
taagtccaggctgcattccacga

SEQ ID NO: 101754 - RNA, 23 nt, synthetic construct
  source 1..23: mol_type = other RNA
tgctttggaactggtggctgtgg

SEQ ID NO: 101755 - RNA, 23 nt, synthetic construct
  source 1..23: mol_type = other RNA
tgctttggaactggtggctgtgg

SEQ ID NO: 101756 - RNA, 23 nt, synthetic construct
  source 1..23: mol_type = other RNA
tcagttccgcggctggccccccg

SEQ ID NO: 101757 - RNA, 23 nt, synthetic construct
  source 1..23: mol_type = other RNA
ttccgctgtggggacccttgcac

SEQ ID NO: 101758 - RNA, 23 nt, synthetic construct
  source 1..23: mol_type = other RNA
tttgggagggggagctgttctca

SEQ ID NO: 101759 - RNA, 23 nt, synthetic construct
  source 1..23: mol_type = other RNA
tgaacttccccacctgctcacgg

SEQ ID NO: 101760 - RNA, 23 nt, synthetic construct
  source 1..23: mol_type = other RNA
tgaacttccccacctgctcacgg

SEQ ID NO: 101761 - RNA, 23 nt, synthetic construct
  source 1..23: mol_type = other RNA
tttgggagggggagctgttcccg

SEQ ID NO: 101762 - RNA, 23 nt, synthetic construct
  source 1..23: mol_type = other RNA
tggagtagaggagggtgtggctg

SEQ ID NO: 101763 - RNA, 23 nt, synthetic construct
  source 1..23: mol_type = other RNA
tgaacttccccacctgctcacgg

SEQ ID NO: 101764 - RNA, 23 nt, synthetic construct
  source 1..23: mol_type = other RNA
ttggtcagctttgtgaggatcca

SEQ ID NO: 101765 - RNA, 23 nt, synthetic construct
  source 1..23: mol_type = other RNA
tgaacttccccacctgctcacgg

SEQ ID NO: 101766 - RNA, 23 nt, synthetic construct
  source 1..23: mol_type = other RNA
tttgggagggggagctgttcccg

SEQ ID NO: 101767 - RNA, 23 nt, synthetic construct
  source 1..23: mol_type = other RNA
tatgtccttgcaactggcggcag

SEQ ID NO: 101768 - RNA, 23 nt, synthetic construct
  source 1..23: mol_type = other RNA
taaccagtggccacagttgtggt

SEQ ID NO: 101769 - RNA, 23 nt, synthetic construct
  source 1..23: mol_type = other RNA
taaccagtggccacagttgtggt

SEQ ID NO: 101770 - RNA, 23 nt, synthetic construct
  source 1..23: mol_type = other RNA
taaccagtggccacagttgtggt

SEQ ID NO: 101771 - RNA, 23 nt, synthetic construct
  source 1..23: mol_type = other RNA
taaccagtggccacagttgtggt

SEQ ID NO: 101772 - RNA, 23 nt, synthetic construct
  source 1..23: mol_type = other RNA
taaccagtggccacagttgtggt

SEQ ID NO: 101773 - RNA, 23 nt, synthetic construct
  source 1..23: mol_type = other RNA
ttgttgtccctggagttgaggag

SEQ ID NO: 101774 - RNA, 23 nt, synthetic construct
  source 1..23: mol_type = other RNA
ttgttgtccctggagttgaggag

SEQ ID NO: 101775 - RNA, 23 nt, synthetic construct
  source 1..23: mol_type = other RNA
ttgttgtccctggagttgaggag

SEQ ID NO: 101776 - RNA, 23 nt, synthetic construct
  source 1..23: mol_type = other RNA
tccatgtccttgcaactggcggc

SEQ ID NO: 101777 - RNA, 23 nt, synthetic construct
  source 1..23: mol_type = other RNA
ttagggtgtgggaagtcaccgtg

SEQ ID NO: 101778 - RNA, 23 nt, synthetic construct
  source 1..23: mol_type = other RNA
tgaggagggcgtggccgtagagc

SEQ ID NO: 101779 - RNA, 23 nt, synthetic construct
  source 1..23: mol_type = other RNA
tgaggagggcgtggccgtagagc

SEQ ID NO: 101780 - RNA, 23 nt, synthetic construct
  source 1..23: mol_type = other RNA
tcccacctccggttcctgcaggt

SEQ ID NO: 101781 - RNA, 23 nt, synthetic construct
  source 1..23: mol_type = other RNA
tagggtgcggtggcagatgccct

SEQ ID NO: 101782 - RNA, 23 nt, synthetic construct
  source 1..23: mol_type = other RNA
tagctggacacatctgggcagga

SEQ ID NO: 101783 - RNA, 23 nt, synthetic construct
  source 1..23: mol_type = other RNA
tccgctgtggggacccttgcacc

SEQ ID NO: 101784 - RNA, 23 nt, synthetic construct
  source 1..23: mol_type = other RNA
tgtgtgggtggtctccggagtgg

SEQ ID NO: 101785 - RNA, 23 nt, synthetic construct
  source 1..23: mol_type = other RNA
tgtgtgggtggtctccggagtgg

SEQ ID NO: 101786 - RNA, 23 nt, synthetic construct
  source 1..23: mol_type = other RNA
tacatggtggccacgggtgtggt

SEQ ID NO: 101787 - RNA, 23 nt, synthetic construct
  source 1..23: mol_type = other RNA
ttctgagagggtggggactgctg

SEQ ID NO: 101788 - RNA, 23 nt, synthetic construct
  source 1..23: mol_type = other RNA
tacagagccggtggccctggttg

SEQ ID NO: 101789 - RNA, 23 nt, synthetic construct
  source 1..23: mol_type = other RNA
tacagagccggtggccctggttg

SEQ ID NO: 101790 - RNA, 23 nt, synthetic construct
  source 1..23: mol_type = other RNA
tgtctcagggtggtgaggactga

SEQ ID NO: 101791 - RNA, 23 nt, synthetic construct
  source 1..23: mol_type = other RNA
tgagggatggcattgtcacagcc

SEQ ID NO: 101792 - RNA, 23 nt, synthetic construct
  source 1..23: mol_type = other RNA
tggaagggcgcctgggaaggttg

SEQ ID NO: 101793 - RNA, 23 nt, synthetic construct
  source 1..23: mol_type = other RNA
tgcaccacctctccaggagccag

SEQ ID NO: 101794 - RNA, 23 nt, synthetic construct
  source 1..23: mol_type = other RNA
ttcggcctgagaggtggacagct

SEQ ID NO: 101795 - RNA, 23 nt, synthetic construct
  source 1..23: mol_type = other RNA
tacagagccggtggccccggttg

SEQ ID NO: 101796 - RNA, 23 nt, synthetic construct
  source 1..23: mol_type = other RNA
tgaggacgggatggccgtggatc

SEQ ID NO: 101797 - RNA, 23 nt, synthetic construct
  source 1..23: mol_type = other RNA
tgccagcagttgcccgggtggag

SEQ ID NO: 101798 - RNA, 23 nt, synthetic construct
  source 1..23: mol_type = other RNA
ttccaggcggtgcccagggagga

SEQ ID NO: 101799 - RNA, 23 nt, synthetic construct
  source 1..23: mol_type = other RNA
tacagagccggtggccccggttg

SEQ ID NO: 101800 - RNA, 23 nt, synthetic construct
  source 1..23: mol_type = other RNA
tccgtggaattggtggcccttgt

SEQ ID NO: 101801 - RNA, 23 nt, synthetic construct
  source 1..23: mol_type = other RNA
tcgggggcacaaggttgtggcac

SEQ ID NO: 101802 - RNA, 23 nt, synthetic construct
  source 1..23: mol_type = other RNA
taaggttgcaccaaccccgtaga

SEQ ID NO: 101803 - RNA, 23 nt, synthetic construct
  source 1..23: mol_type = other RNA
tacatgtggcagggaagggcgcc

SEQ ID NO: 101804 - RNA, 23 nt, synthetic construct
  source 1..23: mol_type = other RNA
tgacaggcggccgccttgcctgt

SEQ ID NO: 101805 - RNA, 23 nt, synthetic construct
  source 1..23: mol_type = other RNA
tgcgacctcagccctgagttacc

SEQ ID NO: 101806 - RNA, 23 nt, synthetic construct
  source 1..23: mol_type = other RNA
tacgcagtgctgtccaccagtgc

SEQ ID NO: 101807 - RNA, 23 nt, synthetic construct
  source 1..23: mol_type = other RNA
tggtgttgaaggaggtgcccggg

SEQ ID NO: 101808 - RNA, 23 nt, synthetic construct
  source 1..23: mol_type = other RNA
tgcaggtgtggtggcggtggtgg

SEQ ID NO: 101809 - RNA, 23 nt, synthetic construct
  source 1..23: mol_type = other RNA
tgcaggtgtggtggcggtggtgg

SEQ ID NO: 101810 - RNA, 23 nt, synthetic construct
  source 1..23: mol_type = other RNA
tgcaggtgtggtggcggtggtgg

SEQ ID NO: 101811 - RNA, 23 nt, synthetic construct
  source 1..23: mol_type = other RNA
tgcaggtgtggtggcggtggtgg

SEQ ID NO: 101812 - RNA, 23 nt, synthetic construct
  source 1..23: mol_type = other RNA
tggcatcctcctgacattgcacc

SEQ ID NO: 101813 - RNA, 23 nt, synthetic construct
  source 1..23: mol_type = other RNA
tgccgggttcagggggctcaggc

SEQ ID NO: 101814 - RNA, 23 nt, synthetic construct
  source 1..23: mol_type = other RNA
taccatgcaggtcgtagagtttc

SEQ ID NO: 101815 - RNA, 23 nt, synthetic construct
  source 1..23: mol_type = other RNA
ttacctggggccgagggggtgac

SEQ ID NO: 101816 - RNA, 23 nt, synthetic construct
  source 1..23: mol_type = other RNA
tcgacctggcccaactcccccag

SEQ ID NO: 101817 - RNA, 23 nt, synthetic construct
  source 1..23: mol_type = other RNA
tgcctctgctgagtacttggacg

SEQ ID NO: 101818 - RNA, 23 nt, synthetic construct
  source 1..23: mol_type = other RNA
tccctccagtcgctgagctgtac

SEQ ID NO: 101819 - RNA, 23 nt, synthetic construct
  source 1..23: mol_type = other RNA
ttgggggacccaggcggtggtga

SEQ ID NO: 101820 - RNA, 23 nt, synthetic construct
  source 1..23: mol_type = other RNA
tgaggacggggtggccgtggatc

SEQ ID NO: 101821 - RNA, 23 nt, synthetic construct
  source 1..23: mol_type = other RNA
tgaggacggggtggccgtggggc

SEQ ID NO: 101822 - RNA, 23 nt, synthetic construct
  source 1..23: mol_type = other RNA
tgaggacggggtggccgtggatc

SEQ ID NO: 101823 - RNA, 23 nt, synthetic construct
  source 1..23: mol_type = other RNA
tgaggacggggtggccgtggatc

SEQ ID NO: 101824 - RNA, 23 nt, synthetic construct
  source 1..23: mol_type = other RNA
tgaggacggggtggccgtggggc

SEQ ID NO: 101825 - RNA, 23 nt, synthetic construct
  source 1..23: mol_type = other RNA
tgaggacggggtggccgtggatc

SEQ ID NO: 101826 - RNA, 23 nt, synthetic construct
  source 1..23: mol_type = other RNA
tccgggcctggaagacttggcca

SEQ ID NO: 101827 - RNA, 23 nt, synthetic construct
  source 1..23: mol_type = other RNA
tggtgtgccctgcattctcccag

SEQ ID NO: 101828 - RNA, 23 nt, synthetic construct
  source 1..23: mol_type = other RNA
tcatccatggtgtgccctgcatt

SEQ ID NO: 101829 - RNA, 23 nt, synthetic construct
  source 1..23: mol_type = other RNA
tcgtgcagggtgagccacactcc

SEQ ID NO: 101830 - RNA, 23 nt, synthetic construct
  source 1..23: mol_type = other RNA
tctcgcagagctgcgcgcgctgg

SEQ ID NO: 101831 - RNA, 23 nt, synthetic construct
  source 1..23: mol_type = other RNA
tgttgaaggaggtgcccgggctg

SEQ ID NO: 101832 - RNA, 23 nt, synthetic construct
  source 1..23: mol_type = other RNA
tggagatgtgggccccgccctgc

SEQ ID NO: 101833 - RNA, 23 nt, synthetic construct
  source 1..23: mol_type = other RNA
tttgatgatggagtggcagcgcg

SEQ ID NO: 101834 - RNA, 23 nt, synthetic construct
  source 1..23: mol_type = other RNA
tgccctctcgccaccgccttaaa

SEQ ID NO: 101835 - RNA, 23 nt, synthetic construct
  source 1..23: mol_type = other RNA
tgtgggtccccacccggccctct

SEQ ID NO: 101836 - RNA, 23 nt, synthetic construct
  source 1..23: mol_type = other RNA
tcggggcctgagctggacccagt

SEQ ID NO: 101837 - RNA, 23 nt, synthetic construct
  source 1..23: mol_type = other RNA
tgttctgtggagcctgcaggcgt

SEQ ID NO: 101838 - RNA, 23 nt, synthetic construct
  source 1..23: mol_type = other RNA
ttctgtcctgggcgtgctggtct

SEQ ID NO: 101839 - RNA, 23 nt, synthetic construct
  source 1..23: mol_type = other RNA
tgggagctgttctcagggtggag

SEQ ID NO: 101840 - RNA, 23 nt, synthetic construct
  source 1..23: mol_type = other RNA
tacagagccggtggccccagttg

SEQ ID NO: 101841 - RNA, 23 nt, synthetic construct
  source 1..23: mol_type = other RNA
tggggtcaccgtggagcctctgg

SEQ ID NO: 101842 - RNA, 23 nt, synthetic construct
  source 1..23: mol_type = other RNA
ttcgtagtggccgtggtggtcag

SEQ ID NO: 101843 - RNA, 23 nt, synthetic construct
  source 1..23: mol_type = other RNA
tctggggggatgggagttgtccc

SEQ ID NO: 101844 - RNA, 23 nt, synthetic construct
  source 1..23: mol_type = other RNA
tccgaagtccaggctgtgcgcac

SEQ ID NO: 101845 - RNA, 23 nt, synthetic construct
  source 1..23: mol_type = other RNA
tctgctagggtgagggctggaaa

SEQ ID NO: 101846 - RNA, 23 nt, synthetic construct
  source 1..23: mol_type = other RNA
tacatgtggggtgccagcagttg

SEQ ID NO: 101847 - RNA, 23 nt, synthetic construct
  source 1..23: mol_type = other RNA
ttcgtagtggccgtggtggtcag

SEQ ID NO: 101848 - RNA, 23 nt, synthetic construct
  source 1..23: mol_type = other RNA
tgagtcactgtgctgctggtggc

SEQ ID NO: 101849 - RNA, 23 nt, synthetic construct
  source 1..23: mol_type = other RNA
tccgaagtccaggctgtgcgcac

SEQ ID NO: 101850 - RNA, 23 nt, synthetic construct
  source 1..23: mol_type = other RNA
tcaaggtgcctgaggtggccgaa

SEQ ID NO: 101851 - RNA, 23 nt, synthetic construct
  source 1..23: mol_type = other RNA
tctgctagggtgagggctggaca

SEQ ID NO: 101852 - RNA, 23 nt, synthetic construct
  source 1..23: mol_type = other RNA
tcgtggccgtagagctggtggcc

SEQ ID NO: 101853 - RNA, 23 nt, synthetic construct
  source 1..23: mol_type = other RNA
tcgtagtggctgctgtggtctgc

SEQ ID NO: 101854 - RNA, 23 nt, synthetic construct
  source 1..23: mol_type = other RNA
tctggtagctgtggatttggtgg

SEQ ID NO: 101855 - RNA, 23 nt, synthetic construct
  source 1..23: mol_type = other RNA
tttgcccgggtggaggaggcggt

SEQ ID NO: 101856 - RNA, 23 nt, synthetic construct
  source 1..23: mol_type = other RNA
tgagccggtggccctggttgtgg

SEQ ID NO: 101857 - RNA, 23 nt, synthetic construct
  source 1..23: mol_type = other RNA
tggggtcaccgtggagcctctgg

SEQ ID NO: 101858 - RNA, 23 nt, synthetic construct
  source 1..23: mol_type = other RNA
ttcgtagtggccgtggtggtcag

SEQ ID NO: 101859 - RNA, 23 nt, synthetic construct
  source 1..23: mol_type = other RNA
tctggggggatgggagttgtccc

SEQ ID NO: 101860 - RNA, 23 nt, synthetic construct
  source 1..23: mol_type = other RNA
tgagtcactgtgctgctggtggc

SEQ ID NO: 101861 - RNA, 23 nt, synthetic construct
  source 1..23: mol_type = other RNA
tccgaagtccaggctgtgcgcac

SEQ ID NO: 101862 - RNA, 23 nt, synthetic construct
  source 1..23: mol_type = other RNA
tctgctagggtgagggctggaca

SEQ ID NO: 101863 - RNA, 23 nt, synthetic construct
  source 1..23: mol_type = other RNA
tcgtggccgtagagctggtggcc

SEQ ID NO: 101864 - RNA, 23 nt, synthetic construct
  source 1..23: mol_type = other RNA
tacatgtggggtgccagcagttg

SEQ ID NO: 101865 - RNA, 23 nt, synthetic construct
  source 1..23: mol_type = other RNA
tgagccggtggccctggttgtgg

SEQ ID NO: 101866 - RNA, 23 nt, synthetic construct
  source 1..23: mol_type = other RNA
ttcgtagtggccgtggtgatcag

SEQ ID NO: 101867 - RNA, 23 nt, synthetic construct
  source 1..23: mol_type = other RNA
tgagtcactgtgctgctggtggc

SEQ ID NO: 101868 - RNA, 23 nt, synthetic construct
  source 1..23: mol_type = other RNA
tccgaagtccaggctgtgcgcac

SEQ ID NO: 101869 - RNA, 23 nt, synthetic construct
  source 1..23: mol_type = other RNA
tcaaggtgcctgaggtggccgaa

SEQ ID NO: 101870 - RNA, 23 nt, synthetic construct
  source 1..23: mol_type = other RNA
tctgctagggtgagggctggaca

SEQ ID NO: 101871 - RNA, 23 nt, synthetic construct
  source 1..23: mol_type = other RNA
ttcgtccctggggaagggggtga

SEQ ID NO: 101872 - RNA, 23 nt, synthetic construct
  source 1..23: mol_type = other RNA
tgtcgtccctggggaagggggtg

SEQ ID NO: 101873 - RNA, 23 nt, synthetic construct
  source 1..23: mol_type = other RNA
tctggtagctgtggatttggtgg

SEQ ID NO: 101874 - RNA, 23 nt, synthetic construct
  source 1..23: mol_type = other RNA
tacatgtggggtgccagcagttg

SEQ ID NO: 101875 - RNA, 23 nt, synthetic construct
  source 1..23: mol_type = other RNA
tgtgctggaagggcagttgcagt

SEQ ID NO: 101876 - RNA, 23 nt, synthetic construct
  source 1..23: mol_type = other RNA
ttcgtagtggccgtggtggtcag

SEQ ID NO: 101877 - RNA, 23 nt, synthetic construct
  source 1..23: mol_type = other RNA
tgtccacagggtggaggagggga

SEQ ID NO: 101878 - RNA, 23 nt, synthetic construct
  source 1..23: mol_type = other RNA
tgacatgggtgtggtggtctgtg

SEQ ID NO: 101879 - RNA, 23 nt, synthetic construct
  source 1..23: mol_type = other RNA
tgaggacactggcggtggggagg

SEQ ID NO: 101880 - RNA, 23 nt, synthetic construct
  source 1..23: mol_type = other RNA
tccgccccacatgctgcagatgc

SEQ ID NO: 101881 - RNA, 23 nt, synthetic construct
  source 1..23: mol_type = other RNA
ttagaggctgagattcccaaagc

SEQ ID NO: 101882 - RNA, 23 nt, synthetic construct
  source 1..23: mol_type = other RNA
tagtagtggttgtccaggtagag

SEQ ID NO: 101883 - RNA, 23 nt, synthetic construct
  source 1..23: mol_type = other RNA
tgccgggcctggaagacttggcc

SEQ ID NO: 101884 - RNA, 23 nt, synthetic construct
  source 1..23: mol_type = other RNA
tgccatgtccttgcaactggcgg

SEQ ID NO: 101885 - RNA, 23 nt, synthetic construct
  source 1..23: mol_type = other RNA
ttgtgccagtcggggcccagcag

SEQ ID NO: 101886 - RNA, 23 nt, synthetic construct
  source 1..23: mol_type = other RNA
tcacagagcggctgtggtgggca

SEQ ID NO: 101887 - RNA, 23 nt, synthetic construct
  source 1..23: mol_type = other RNA
tgatcacagagcggctgtggtgg

SEQ ID NO: 101888 - RNA, 23 nt, synthetic construct
  source 1..23: mol_type = other RNA
tctggcagggcacctcaaggcgg

SEQ ID NO: 101889 - RNA, 23 nt, synthetic construct
  source 1..23: mol_type = other RNA
tcagatggactcctgccctggcg

SEQ ID NO: 101890 - RNA, 23 nt, synthetic construct
  source 1..23: mol_type = other RNA
ttcaaagccctggggacaggtag

SEQ ID NO: 101891 - RNA, 23 nt, synthetic construct
  source 1..23: mol_type = other RNA
ttcgggcgtgaggcaggcggtct

SEQ ID NO: 101892 - RNA, 23 nt, synthetic construct
  source 1..23: mol_type = other RNA
tgcccaaggttttcatgatcaga

SEQ ID NO: 101893 - RNA, 23 nt, synthetic construct
  source 1..23: mol_type = other RNA
tccagggtaggactcctgagtgg

SEQ ID NO: 101894 - RNA, 23 nt, synthetic construct
  source 1..23: mol_type = other RNA
tgttgcgacctcagccctgagtt

SEQ ID NO: 101895 - RNA, 23 nt, synthetic construct
  source 1..23: mol_type = other RNA
ttgcgcgcgctgggggttggagc

SEQ ID NO: 101896 - RNA, 23 nt, synthetic construct
  source 1..23: mol_type = other RNA
ttggtggccttcgtggtcagcac

SEQ ID NO: 101897 - RNA, 23 nt, synthetic construct
  source 1..23: mol_type = other RNA
ttggtggccttcgtggtcagcac

SEQ ID NO: 101898 - RNA, 23 nt, synthetic construct
  source 1..23: mol_type = other RNA
ttggtggtcagcactctggcggt

SEQ ID NO: 101899 - RNA, 23 nt, synthetic construct
  source 1..23: mol_type = other RNA
taagggagtggctttggagctgg

SEQ ID NO: 101900 - RNA, 23 nt, synthetic construct
  source 1..23: mol_type = other RNA
taagggagtggctttggagctgg

SEQ ID NO: 101901 - RNA, 23 nt, synthetic construct
  source 1..23: mol_type = other RNA
tggtggtgttgtccccacagtag

SEQ ID NO: 101902 - RNA, 23 nt, synthetic construct
  source 1..23: mol_type = other RNA
ttagagctggtggccggggtgct

SEQ ID NO: 101903 - RNA, 23 nt, synthetic construct
  source 1..23: mol_type = other RNA
ttagagctggtggccggggtgct

SEQ ID NO: 101904 - RNA, 23 nt, synthetic construct
  source 1..23: mol_type = other RNA
ttagagctggtggccggggtgct

SEQ ID NO: 101905 - RNA, 23 nt, synthetic construct
  source 1..23: mol_type = other RNA
tcggaggagggggtcaccgtgga

SEQ ID NO: 101906 - RNA, 23 nt, synthetic construct
  source 1..23: mol_type = other RNA
ttagagctggtggccggggtgct

SEQ ID NO: 101907 - RNA, 23 nt, synthetic construct
  source 1..23: mol_type = other RNA
tgtggtggtcagcactctggcgg

SEQ ID NO: 101908 - RNA, 23 nt, synthetic construct
  source 1..23: mol_type = other RNA
tccgtgggtgtggtggtctgtga

SEQ ID NO: 101909 - RNA, 23 nt, synthetic construct
  source 1..23: mol_type = other RNA
tgctgctagggtgagggctggaa

SEQ ID NO: 101910 - RNA, 23 nt, synthetic construct
  source 1..23: mol_type = other RNA
tccgtgggtgtggtggtctgtga

SEQ ID NO: 101911 - RNA, 23 nt, synthetic construct
  source 1..23: mol_type = other RNA
tgctgctagggtgagggctggac

SEQ ID NO: 101912 - RNA, 23 nt, synthetic construct
  source 1..23: mol_type = other RNA
tggtcgtagtggctgctgtggtc

SEQ ID NO: 101913 - RNA, 23 nt, synthetic construct
  source 1..23: mol_type = other RNA
tggctttggaactggtggctgtg

SEQ ID NO: 101914 - RNA, 23 nt, synthetic construct
  source 1..23: mol_type = other RNA
tccgtgggtgtggtggtctgtga

SEQ ID NO: 101915 - RNA, 23 nt, synthetic construct
  source 1..23: mol_type = other RNA
tgacagtctctggagtagaggag

SEQ ID NO: 101916 - RNA, 23 nt, synthetic construct
  source 1..23: mol_type = other RNA
tgctgctagggtgagggctggac

SEQ ID NO: 101917 - RNA, 23 nt, synthetic construct
  source 1..23: mol_type = other RNA
tccgtgggtgtggtggtctgtga

SEQ ID NO: 101918 - RNA, 23 nt, synthetic construct
  source 1..23: mol_type = other RNA
tgctgctagggtgagggctggac

SEQ ID NO: 101919 - RNA, 23 nt, synthetic construct
  source 1..23: mol_type = other RNA
tggctttggaactggtggctgtg

SEQ ID NO: 101920 - RNA, 23 nt, synthetic construct
  source 1..23: mol_type = other RNA
tccgtgggtgtggtggtctgtga

SEQ ID NO: 101921 - RNA, 23 nt, synthetic construct
  source 1..23: mol_type = other RNA
tccagcagccatcctttctgctg

SEQ ID NO: 101922 - RNA, 23 nt, synthetic construct
  source 1..23: mol_type = other RNA
tgcagatggactcctgccctggc

SEQ ID NO: 101923 - RNA, 23 nt, synthetic construct
  source 1..23: mol_type = other RNA
tcccaggtttcattcagctggac

SEQ ID NO: 101924 - RNA, 23 nt, synthetic construct
  source 1..23: mol_type = other RNA
tagcggggtcagcctggcgttgt

SEQ ID NO: 101925 - RNA, 23 nt, synthetic construct
  source 1..23: mol_type = other RNA
ttccagccactctgaccaggcac

SEQ ID NO: 101926 - RNA, 23 nt, synthetic construct
  source 1..23: mol_type = other RNA
ttccagccactctgaccaggcac

SEQ ID NO: 101927 - RNA, 23 nt, synthetic construct
  source 1..23: mol_type = other RNA
ttccagccactctgaccaggcac

SEQ ID NO: 101928 - RNA, 23 nt, synthetic construct
  source 1..23: mol_type = other RNA
ttccagccactctgaccaggcac

SEQ ID NO: 101929 - RNA, 23 nt, synthetic construct
  source 1..23: mol_type = other RNA
tgccctccgccatcccctccagc

SEQ ID NO: 101930 - RNA, 23 nt, synthetic construct
  source 1..23: mol_type = other RNA
tcacctccggttcctgcaggtgc

SEQ ID NO: 101931 - RNA, 23 nt, synthetic construct
  source 1..23: mol_type = other RNA
tcagaacaaggggcaggtgtccg

SEQ ID NO: 101932 - RNA, 23 nt, synthetic construct
  source 1..23: mol_type = other RNA
taagtctccgcctcccaggccgg

SEQ ID NO: 101933 - RNA, 23 nt, synthetic construct
  source 1..23: mol_type = other RNA
tagaagggagtggctttggagct

SEQ ID NO: 101934 - RNA, 23 nt, synthetic construct
  source 1..23: mol_type = other RNA
tgtggacatggtggccatgggtg

SEQ ID NO: 101935 - RNA, 23 nt, synthetic construct
  source 1..23: mol_type = other RNA
tagaagggagtggctttggagct

SEQ ID NO: 101936 - RNA, 23 nt, synthetic construct
  source 1..23: mol_type = other RNA
tcaccatggtgacagtgaggacg

SEQ ID NO: 101937 - RNA, 23 nt, synthetic construct
  source 1..23: mol_type = other RNA
tttgacaggagtcctcctcacag

SEQ ID NO: 101938 - RNA, 23 nt, synthetic construct
  source 1..23: mol_type = other RNA
tgctggccttgcctggaccagcc

SEQ ID NO: 101939 - RNA, 23 nt, synthetic construct
  source 1..23: mol_type = other RNA
taaaggccagggaagcggaagac

SEQ ID NO: 101940 - RNA, 23 nt, synthetic construct
  source 1..23: mol_type = other RNA
tgactgtgggtgtggtggccgtg

SEQ ID NO: 101941 - RNA, 23 nt, synthetic construct
  source 1..23: mol_type = other RNA
tgtggagcctctggttgtgggtg

SEQ ID NO: 101942 - RNA, 23 nt, synthetic construct
  source 1..23: mol_type = other RNA
tcactctgaccaggcacactggg

SEQ ID NO: 101943 - RNA, 23 nt, synthetic construct
  source 1..23: mol_type = other RNA
ttgcgtgccgtccctgggctgga

SEQ ID NO: 101944 - RNA, 23 nt, synthetic construct
  source 1..23: mol_type = other RNA
tcactctgaccaggcacactggg

SEQ ID NO: 101945 - RNA, 23 nt, synthetic construct
  source 1..23: mol_type = other RNA
tgtgctggtcagcactttgggag

SEQ ID NO: 101946 - RNA, 23 nt, synthetic construct
  source 1..23: mol_type = other RNA
tcgtgctggtcagcactttggga

SEQ ID NO: 101947 - RNA, 23 nt, synthetic construct
  source 1..23: mol_type = other RNA
tcgtgctggtcagcactttgagg

SEQ ID NO: 101948 - RNA, 23 nt, synthetic construct
  source 1..23: mol_type = other RNA
tgactgtgggtgtggtggccgtg

SEQ ID NO: 101949 - RNA, 23 nt, synthetic construct
  source 1..23: mol_type = other RNA
tgtggagcctctggttgtgggtg

SEQ ID NO: 101950 - RNA, 23 nt, synthetic construct
  source 1..23: mol_type = other RNA
tcactctgaccaggcacactggg

SEQ ID NO: 101951 - RNA, 23 nt, synthetic construct
  source 1..23: mol_type = other RNA
ttgcgtgccgtccctgggctgga

SEQ ID NO: 101952 - RNA, 23 nt, synthetic construct
  source 1..23: mol_type = other RNA
tcactctgaccaggcacactggg

SEQ ID NO: 101953 - RNA, 23 nt, synthetic construct
  source 1..23: mol_type = other RNA
tggaggtgggacaggcgccctgg

SEQ ID NO: 101954 - RNA, 23 nt, synthetic construct
  source 1..23: mol_type = other RNA
tcaggcatcctcctgacattgca

SEQ ID NO: 101955 - RNA, 23 nt, synthetic construct
  source 1..23: mol_type = other RNA
tagttaccctgcagcaggcatgg

SEQ ID NO: 101956 - RNA, 23 nt, synthetic construct
  source 1..23: mol_type = other RNA
tgtggtggctgtaccaagggtgc

SEQ ID NO: 101957 - RNA, 23 nt, synthetic construct
  source 1..23: mol_type = other RNA
tcgtgtgtggtggccatggtgtt

SEQ ID NO: 101958 - RNA, 23 nt, synthetic construct
  source 1..23: mol_type = other RNA
ttggatccagtggactcagtcgt

SEQ ID NO: 101959 - RNA, 23 nt, synthetic construct
  source 1..23: mol_type = other RNA
ttggatccagtggactcagtcgt

SEQ ID NO: 101960 - RNA, 23 nt, synthetic construct
  source 1..23: mol_type = other RNA
tcccagcggccggacgtggccag

SEQ ID NO: 101961 - RNA, 23 nt, synthetic construct
  source 1..23: mol_type = other RNA
tcccagctcggctccacagggcc

SEQ ID NO: 101962 - RNA, 23 nt, synthetic construct
  source 1..23: mol_type = other RNA
tgccctgcattctcccagctcgg

SEQ ID NO: 101963 - RNA, 23 nt, synthetic construct
  source 1..23: mol_type = other RNA
tagagctgcgcgcgctgggggtt

SEQ ID NO: 101964 - RNA, 23 nt, synthetic construct
  source 1..23: mol_type = other RNA
tgccgagctgttgctgcagtcca

SEQ ID NO: 101965 - RNA, 23 nt, synthetic construct
  source 1..23: mol_type = other RNA
taaggtcccgtgggtggtgttgt

SEQ ID NO: 101966 - RNA, 23 nt, synthetic construct
  source 1..23: mol_type = other RNA
taaagtctccgcctcccaggccg

SEQ ID NO: 101967 - RNA, 23 nt, synthetic construct
  source 1..23: mol_type = other RNA
tgaggacccggatcctgtagttg

SEQ ID NO: 101968 - RNA, 23 nt, synthetic construct
  source 1..23: mol_type = other RNA
tacgctggtagctgtgggtgtgg

SEQ ID NO: 101969 - RNA, 23 nt, synthetic construct
  source 1..23: mol_type = other RNA
tatggtggccgtgggtgtggtgg

SEQ ID NO: 101970 - RNA, 23 nt, synthetic construct
  source 1..23: mol_type = other RNA
tgtggcggtaagcactgtggagg

SEQ ID NO: 101971 - RNA, 23 nt, synthetic construct
  source 1..23: mol_type = other RNA
tgagtcactgtgttgctggtggc

SEQ ID NO: 101972 - RNA, 23 nt, synthetic construct
  source 1..23: mol_type = other RNA
tggctctgtgatgtgggtggtgc

SEQ ID NO: 101973 - RNA, 23 nt, synthetic construct
  source 1..23: mol_type = other RNA
tccagagggccccggcatggggt

SEQ ID NO: 101974 - RNA, 23 nt, synthetic construct
  source 1..23: mol_type = other RNA
tatggtggccgtgggtgtggtgg

SEQ ID NO: 101975 - RNA, 23 nt, synthetic construct
  source 1..23: mol_type = other RNA
tgcgtgccgtccctgggctggag

SEQ ID NO: 101976 - RNA, 23 nt, synthetic construct
  source 1..23: mol_type = other RNA
tacctctggttgtgggtgtggtg

SEQ ID NO: 101977 - RNA, 23 nt, synthetic construct
  source 1..23: mol_type = other RNA
ttgcccaaggtgcctgaggtggc

SEQ ID NO: 101978 - RNA, 23 nt, synthetic construct
  source 1..23: mol_type = other RNA
tggctctgtgatgtgggtggtgc

SEQ ID NO: 101979 - RNA, 23 nt, synthetic construct
  source 1..23: mol_type = other RNA
tccagagggccccggcatggggt

SEQ ID NO: 101980 - RNA, 23 nt, synthetic construct
  source 1..23: mol_type = other RNA
tagggggagctgttcccggggtg

SEQ ID NO: 101981 - RNA, 23 nt, synthetic construct
  source 1..23: mol_type = other RNA
tacatggtggccatgggtgtggt

SEQ ID NO: 101982 - RNA, 23 nt, synthetic construct
  source 1..23: mol_type = other RNA
tatggaactggtggcccttgtcg

SEQ ID NO: 101983 - RNA, 23 nt, synthetic construct
  source 1..23: mol_type = other RNA
tacgctggtagctgtgggtgtgg

SEQ ID NO: 101984 - RNA, 23 nt, synthetic construct
  source 1..23: mol_type = other RNA
tatggtggccgtgggtgtggtgg

SEQ ID NO: 101985 - RNA, 23 nt, synthetic construct
  source 1..23: mol_type = other RNA
ttctctggagtagaggagggtgt

SEQ ID NO: 101986 - RNA, 23 nt, synthetic construct
  source 1..23: mol_type = other RNA
tggctctgtgatgtgggtggtgc

SEQ ID NO: 101987 - RNA, 23 nt, synthetic construct
  source 1..23: mol_type = other RNA
tccagagggccccggcatggggt

SEQ ID NO: 101988 - RNA, 23 nt, synthetic construct
  source 1..23: mol_type = other RNA
tatggtggccgtgggtgtggtgg

SEQ ID NO: 101989 - RNA, 23 nt, synthetic construct
  source 1..23: mol_type = other RNA
tgcgtgccgtccctgggctggag

SEQ ID NO: 101990 - RNA, 23 nt, synthetic construct
  source 1..23: mol_type = other RNA
ttgcccaaggtgcctgaggtggc

SEQ ID NO: 101991 - RNA, 23 nt, synthetic construct
  source 1..23: mol_type = other RNA
tggctctgtgatgtgggtggtgc

SEQ ID NO: 101992 - RNA, 23 nt, synthetic construct
  source 1..23: mol_type = other RNA
tccagagggccccggcatggggt

SEQ ID NO: 101993 - RNA, 23 nt, synthetic construct
  source 1..23: mol_type = other RNA
tagggggagctgttcccggggtg

SEQ ID NO: 101994 - RNA, 23 nt, synthetic construct
  source 1..23: mol_type = other RNA
tatggtggccgtgggtgtggtgg

SEQ ID NO: 101995 - RNA, 23 nt, synthetic construct
  source 1..23: mol_type = other RNA
tgtggcggtaagcactgtggagg

SEQ ID NO: 101996 - RNA, 23 nt, synthetic construct
  source 1..23: mol_type = other RNA
tgttgtagtggctgttgtggtca

SEQ ID NO: 101997 - RNA, 23 nt, synthetic construct
  source 1..23: mol_type = other RNA
tcagtgggtctcagggtggtgag

SEQ ID NO: 101998 - RNA, 23 nt, synthetic construct
  source 1..23: mol_type = other RNA
tgcggggcggaggacactggcgg

SEQ ID NO: 101999 - RNA, 23 nt, synthetic construct
  source 1..23: mol_type = other RNA
ttgtcggggaccagccacgtctt

SEQ ID NO: 102000 - RNA, 23 nt, synthetic construct
  source 1..23: mol_type = other RNA
tgaagggcgcctgggaaggttgc

SEQ ID NO: 102001 - RNA, 23 nt, synthetic construct
  source 1..23: mol_type = other RNA
tcagctggacacatctgggcagg

SEQ ID NO: 102002 - RNA, 23 nt, synthetic construct
  source 1..23: mol_type = other RNA
ttgacccctctctgacctggccg

SEQ ID NO: 102003 - RNA, 23 nt, synthetic construct
  source 1..23: mol_type = other RNA
tactcaatgctcagggtttattt

SEQ ID NO: 102004 - RNA, 23 nt, synthetic construct
  source 1..23: mol_type = other RNA
taaggccagggaagcggaagacg

SEQ ID NO: 102005 - RNA, 23 nt, synthetic construct
  source 1..23: mol_type = other RNA
tccggccccagcagggtgcggtg

SEQ ID NO: 102006 - RNA, 23 nt, synthetic construct
  source 1..23: mol_type = other RNA
taggcagccagagtgcgtgatgt

SEQ ID NO: 102007 - RNA, 23 nt, synthetic construct
  source 1..23: mol_type = other RNA
tgcctcactcaggccgcggcaag

SEQ ID NO: 102008 - RNA, 23 nt, synthetic construct
  source 1..23: mol_type = other RNA
tcgacaccagccccgggggacag

SEQ ID NO: 102009 - RNA, 23 nt, synthetic construct
  source 1..23: mol_type = other RNA
tcggcaatgcagcccccactccc

SEQ ID NO: 102010 - RNA, 23 nt, synthetic construct
  source 1..23: mol_type = other RNA
tagtcattgatggcattgtcgtc

SEQ ID NO: 102011 - RNA, 23 nt, synthetic construct
  source 1..23: mol_type = other RNA
ttagaagtcacagaacaaggggc

SEQ ID NO: 102012 - RNA, 23 nt, synthetic construct
  source 1..23: mol_type = other RNA
tggggcctgagctggacccagtc

SEQ ID NO: 102013 - RNA, 23 nt, synthetic construct
  source 1..23: mol_type = other RNA
tgtacctggggccgagggggtga

SEQ ID NO: 102014 - RNA, 23 nt, synthetic construct
  source 1..23: mol_type = other RNA
tagtgccctccagcggccctgat

SEQ ID NO: 102015 - RNA, 23 nt, synthetic construct
  source 1..23: mol_type = other RNA
ttcactgcagcagaggacccgga

SEQ ID NO: 102016 - RNA, 23 nt, synthetic construct
  source 1..23: mol_type = other RNA
ttcagccccgggctactcgtagg

SEQ ID NO: 102017 - RNA, 23 nt, synthetic construct
  source 1..23: mol_type = other RNA
tcgtcgtccctggaagggctgag

SEQ ID NO: 102018 - RNA, 23 nt, synthetic construct
  source 1..23: mol_type = other RNA
tgttgttggggccagcgtgggtg

SEQ ID NO: 102019 - RNA, 23 nt, synthetic construct
  source 1..23: mol_type = other RNA
tctggtgactgtgggtgtggtgg

SEQ ID NO: 102020 - RNA, 23 nt, synthetic construct
  source 1..23: mol_type = other RNA
tgctggaagggcggttgcagtcc

SEQ ID NO: 102021 - RNA, 23 nt, synthetic construct
  source 1..23: mol_type = other RNA
tctcagtgctggaagggcggttg

SEQ ID NO: 102022 - RNA, 23 nt, synthetic construct
  source 1..23: mol_type = other RNA
tcctctggttgtgggtgtggtgg

SEQ ID NO: 102023 - RNA, 23 nt, synthetic construct
  source 1..23: mol_type = other RNA
tgctggaagggcggttgcagtcc

SEQ ID NO: 102024 - RNA, 23 nt, synthetic construct
  source 1..23: mol_type = other RNA
tctcagtgctggaagggcggttg

SEQ ID NO: 102025 - RNA, 23 nt, synthetic construct
  source 1..23: mol_type = other RNA
tcctctggttgtgggtgtggtgg

SEQ ID NO: 102026 - RNA, 23 nt, synthetic construct
  source 1..23: mol_type = other RNA
taggacgggatggccgtggatcc

SEQ ID NO: 102027 - RNA, 23 nt, synthetic construct
  source 1..23: mol_type = other RNA
tggaggacgggatggccgtggat

SEQ ID NO: 102028 - RNA, 23 nt, synthetic construct
  source 1..23: mol_type = other RNA
ttttggtggctgtgcttgtcagc

SEQ ID NO: 102029 - RNA, 23 nt, synthetic construct
  source 1..23: mol_type = other RNA
tccaagggtgaaggaggggatgg

SEQ ID NO: 102030 - RNA, 23 nt, synthetic construct
  source 1..23: mol_type = other RNA
tgctggaagggcggttgcagtcc

SEQ ID NO: 102031 - RNA, 23 nt, synthetic construct
  source 1..23: mol_type = other RNA
tctcagtgctggaagggcggttg

SEQ ID NO: 102032 - RNA, 23 nt, synthetic construct
  source 1..23: mol_type = other RNA
tcctctggttgtgggtgtggtgg

SEQ ID NO: 102033 - RNA, 23 nt, synthetic construct
  source 1..23: mol_type = other RNA
tgctggaagggcggttgcagtcc

SEQ ID NO: 102034 - RNA, 23 nt, synthetic construct
  source 1..23: mol_type = other RNA
tctcagtgctggaagggcggttg

SEQ ID NO: 102035 - RNA, 23 nt, synthetic construct
  source 1..23: mol_type = other RNA
ttgtgggtgtggtggccgggctg

SEQ ID NO: 102036 - RNA, 23 nt, synthetic construct
  source 1..23: mol_type = other RNA
ttttggtggctgtgcttgtcagc

SEQ ID NO: 102037 - RNA, 23 nt, synthetic construct
  source 1..23: mol_type = other RNA
tttttgtggctgtgcttgtcagc

SEQ ID NO: 102038 - RNA, 23 nt, synthetic construct
  source 1..23: mol_type = other RNA
tgatccagtggctgcagttgtag

SEQ ID NO: 102039 - RNA, 23 nt, synthetic construct
  source 1..23: mol_type = other RNA
ttagaaatggcagccggctcggt

SEQ ID NO: 102040 - RNA, 23 nt, synthetic construct
  source 1..23: mol_type = other RNA
tcggtggggaggtgggacaggcg

SEQ ID NO: 102041 - RNA, 23 nt, synthetic construct
  source 1..23: mol_type = other RNA
tgatgctgagggcgcgggggcag

SEQ ID NO: 102042 - RNA, 23 nt, synthetic construct
  source 1..23: mol_type = other RNA
ttgtagtggatgctgagggcgcg

SEQ ID NO: 102043 - RNA, 23 nt, synthetic construct
  source 1..23: mol_type = other RNA
taccatggtgacagtgaggacga

SEQ ID NO: 102044 - RNA, 23 nt, synthetic construct
  source 1..23: mol_type = other RNA
tccttcccatgcaccatggtgac

SEQ ID NO: 102045 - RNA, 23 nt, synthetic construct
  source 1..23: mol_type = other RNA
tgcctggaagacttggccattga

SEQ ID NO: 102046 - RNA, 23 nt, synthetic construct
  source 1..23: mol_type = other RNA
tgcggcagtggttccgtcccgct

SEQ ID NO: 102047 - RNA, 23 nt, synthetic construct
  source 1..23: mol_type = other RNA
tggcactcagcaaagacctggct

SEQ ID NO: 102048 - RNA, 23 nt, synthetic construct
  source 1..23: mol_type = other RNA
tggctgaccctgggcgtcacagg

SEQ ID NO: 102049 - RNA, 23 nt, synthetic construct
  source 1..23: mol_type = other RNA
tcccggggcctggtcacggttac

SEQ ID NO: 102050 - RNA, 23 nt, synthetic construct
  source 1..23: mol_type = other RNA
taggttgcaccaaccccgtagaa

SEQ ID NO: 102051 - RNA, 23 nt, synthetic construct
  source 1..23: mol_type = other RNA
tatgtggcagggaagggcgcctg

SEQ ID NO: 102052 - RNA, 23 nt, synthetic construct
  source 1..23: mol_type = other RNA
ttggccatcgggcgtgaggcagg

SEQ ID NO: 102053 - RNA, 23 nt, synthetic construct
  source 1..23: mol_type = other RNA
ttgacaggagtcctcctcacagg

SEQ ID NO: 102054 - RNA, 23 nt, synthetic construct
  source 1..23: mol_type = other RNA
tcagacaatgcacatcctggctc

SEQ ID NO: 102055 - RNA, 23 nt, synthetic construct
  source 1..23: mol_type = other RNA
tcaaggttttcatgatcagacaa

SEQ ID NO: 102056 - RNA, 23 nt, synthetic construct
  source 1..23: mol_type = other RNA
tacacacaggccggggggctccg

SEQ ID NO: 102057 - RNA, 23 nt, synthetic construct
  source 1..23: mol_type = other RNA
tatggagtggcagcgcgagaagg

SEQ ID NO: 102058 - RNA, 23 nt, synthetic construct
  source 1..23: mol_type = other RNA
tgcagaggacccggatcctgtag

SEQ ID NO: 102059 - RNA, 23 nt, synthetic construct
  source 1..23: mol_type = other RNA
tttgagaacagggcctgggtggt

SEQ ID NO: 102060 - RNA, 23 nt, synthetic construct
  source 1..23: mol_type = other RNA
ttgctgctagggtgtgggaagtc

SEQ ID NO: 102061 - RNA, 23 nt, synthetic construct
  source 1..23: mol_type = other RNA
tagcagggtcgaggtgcgggtct

SEQ ID NO: 102062 - RNA, 23 nt, synthetic construct
  source 1..23: mol_type = other RNA
tagcagggtcgaggtgcgggtct

SEQ ID NO: 102063 - RNA, 23 nt, synthetic construct
  source 1..23: mol_type = other RNA
tagcagggtcgaggtgcgggtct

SEQ ID NO: 102064 - RNA, 23 nt, synthetic construct
  source 1..23: mol_type = other RNA
tagcagggtcgaggtgcgggtct

SEQ ID NO: 102065 - RNA, 23 nt, synthetic construct
  source 1..23: mol_type = other RNA
tgcgagaaaaactgtccaaatgc

SEQ ID NO: 102066 - RNA, 23 nt, synthetic construct
  source 1..23: mol_type = other RNA
tcaggcctgcacgcagatgccca

SEQ ID NO: 102067 - RNA, 23 nt, synthetic construct
  source 1..23: mol_type = other RNA
tgtggtgtggcccggggtggtcg

SEQ ID NO: 102068 - RNA, 23 nt, synthetic construct
  source 1..23: mol_type = other RNA
tgtggtgtggcccggggtggtcg

SEQ ID NO: 102069 - RNA, 23 nt, synthetic construct
  source 1..23: mol_type = other RNA
tcgtgaggcaggcggtctggacg

SEQ ID NO: 102070 - RNA, 23 nt, synthetic construct
  source 1..23: mol_type = other RNA
tcacatggctgttgacccaggtt

SEQ ID NO: 102071 - RNA, 23 nt, synthetic construct
  source 1..23: mol_type = other RNA
tggacttgacaggagtcctcctc

SEQ ID NO: 102072 - RNA, 23 nt, synthetic construct
  source 1..23: mol_type = other RNA
tccatgcaggtcgtagagtttct

SEQ ID NO: 102073 - RNA, 23 nt, synthetic construct
  source 1..23: mol_type = other RNA
tcggcaggcggcgaaggtggggc

SEQ ID NO: 102074 - RNA, 23 nt, synthetic construct
  source 1..23: mol_type = other RNA
tacggtggagaccgggagggccg

SEQ ID NO: 102075 - RNA, 23 nt, synthetic construct
  source 1..23: mol_type = other RNA
tcacccatagggtggtcttttcg

SEQ ID NO: 102076 - RNA, 23 nt, synthetic construct
  source 1..23: mol_type = other RNA
ttcgtggtcagcggctctttgga

SEQ ID NO: 102077 - RNA, 23 nt, synthetic construct
  source 1..23: mol_type = other RNA
tgtcaccgtggagcctctggttg

SEQ ID NO: 102078 - RNA, 23 nt, synthetic construct
  source 1..23: mol_type = other RNA
tactggtctgtgtgctagaggag

SEQ ID NO: 102079 - RNA, 23 nt, synthetic construct
  source 1..23: mol_type = other RNA
tacctgctcacggttcctgcaga

SEQ ID NO: 102080 - RNA, 23 nt, synthetic construct
  source 1..23: mol_type = other RNA
tactggtctgtgtgctagaggag

SEQ ID NO: 102081 - RNA, 23 nt, synthetic construct
  source 1..23: mol_type = other RNA
tacctgctcacggttcctgcaga

SEQ ID NO: 102082 - RNA, 23 nt, synthetic construct
  source 1..23: mol_type = other RNA
ttgtggacatggtggccatgggt

SEQ ID NO: 102083 - RNA, 23 nt, synthetic construct
  source 1..23: mol_type = other RNA
tgtcaccgtggagcctctggttg

SEQ ID NO: 102084 - RNA, 23 nt, synthetic construct
  source 1..23: mol_type = other RNA
tactggtctgtgtgctagaggag

SEQ ID NO: 102085 - RNA, 23 nt, synthetic construct
  source 1..23: mol_type = other RNA
tctggaggtgcccctggtgtggc

SEQ ID NO: 102086 - RNA, 23 nt, synthetic construct
  source 1..23: mol_type = other RNA
tacctgctcacggttcctgcaga

SEQ ID NO: 102087 - RNA, 23 nt, synthetic construct
  source 1..23: mol_type = other RNA
tactggtctgtgtgctagaggag

SEQ ID NO: 102088 - RNA, 23 nt, synthetic construct
  source 1..23: mol_type = other RNA
tacctgctcacggttcctgcaga

SEQ ID NO: 102089 - RNA, 23 nt, synthetic construct
  source 1..23: mol_type = other RNA
tggtggtcccaagggtggaggag

SEQ ID NO: 102090 - RNA, 23 nt, synthetic construct
  source 1..23: mol_type = other RNA
tactggtctgtgtgctagaggag

SEQ ID NO: 102091 - RNA, 23 nt, synthetic construct
  source 1..23: mol_type = other RNA
tgccctggaagcggtcaatgtca

SEQ ID NO: 102092 - RNA, 23 nt, synthetic construct
  source 1..23: mol_type = other RNA
ttggccatgtccttgcaactggc

SEQ ID NO: 102093 - RNA, 23 nt, synthetic construct
  source 1..23: mol_type = other RNA
tacagagcggctgtggtgggcat

SEQ ID NO: 102094 - RNA, 23 nt, synthetic construct
  source 1..23: mol_type = other RNA
tgcactcagcaaagacctggctc

SEQ ID NO: 102095 - RNA, 23 nt, synthetic construct
  source 1..23: mol_type = other RNA
tccagctggaatccgtgctgcgc

SEQ ID NO: 102096 - RNA, 23 nt, synthetic construct
  source 1..23: mol_type = other RNA
tgcggccggacgtggccagctgg

SEQ ID NO: 102097 - RNA, 23 nt, synthetic construct
  source 1..23: mol_type = other RNA
tggctccacagggccctgggtct

SEQ ID NO: 102098 - RNA, 23 nt, synthetic construct
  source 1..23: mol_type = other RNA
tttgcaaaggccagggaagcgga

SEQ ID NO: 102099 - RNA, 23 nt, synthetic construct
  source 1..23: mol_type = other RNA
taggaatgtcagcaccagccgga

SEQ ID NO: 102100 - RNA, 23 nt, synthetic construct
  source 1..23: mol_type = other RNA
tttgaaggaggtgcccgggctgt

SEQ ID NO: 102101 - RNA, 23 nt, synthetic construct
  source 1..23: mol_type = other RNA
tcactgccatagccccccggagc

SEQ ID NO: 102102 - RNA, 23 nt, synthetic construct
  source 1..23: mol_type = other RNA
ttcctggcactgccatagccccc

SEQ ID NO: 102103 - RNA, 23 nt, synthetic construct
  source 1..23: mol_type = other RNA
ttccaggtacaccatgggggctg

SEQ ID NO: 102104 - RNA, 23 nt, synthetic construct
  source 1..23: mol_type = other RNA
tgtagggtgggtccccacccggc

SEQ ID NO: 102105 - RNA, 23 nt, synthetic construct
  source 1..23: mol_type = other RNA
tcacagggcatacctggtaccct

SEQ ID NO: 102106 - RNA, 23 nt, synthetic construct
  source 1..23: mol_type = other RNA
tgtcgggaagctgcgccgcccgg

SEQ ID NO: 102107 - RNA, 23 nt, synthetic construct
  source 1..23: mol_type = other RNA
taagtgccctccagcggccctga

SEQ ID NO: 102108 - RNA, 23 nt, synthetic construct
  source 1..23: mol_type = other RNA
tgccctggtcagccccgggctac

SEQ ID NO: 102109 - RNA, 23 nt, synthetic construct
  source 1..23: mol_type = other RNA
tgggggagccctggtcagccccg

SEQ ID NO: 102110 - RNA, 23 nt, synthetic construct
  source 1..23: mol_type = other RNA
taagggtggatgtggccacccct

SEQ ID NO: 102111 - RNA, 23 nt, synthetic construct
  source 1..23: mol_type = other RNA
tttggaagggtggatgtggccac

SEQ ID NO: 102112 - RNA, 23 nt, synthetic construct
  source 1..23: mol_type = other RNA
tcatgtgcccaagctccccgtcg

SEQ ID NO: 102113 - RNA, 23 nt, synthetic construct
  source 1..23: mol_type = other RNA
tctgtcctgggcgtgctggtctc

SEQ ID NO: 102114 - RNA, 23 nt, synthetic construct
  source 1..23: mol_type = other RNA
tttgtcgtctctgtcctgggcgt

SEQ ID NO: 102115 - RNA, 23 nt, synthetic construct
  source 1..23: mol_type = other RNA
ttgtgggtgtggtggccgtggtg

SEQ ID NO: 102116 - RNA, 23 nt, synthetic construct
  source 1..23: mol_type = other RNA
tctgtgggtgtggtggccgtggt

SEQ ID NO: 102117 - RNA, 23 nt, synthetic construct
  source 1..23: mol_type = other RNA
tggagggagtggctttggagctg

SEQ ID NO: 102118 - RNA, 23 nt, synthetic construct
  source 1..23: mol_type = other RNA
tgcttctcagtgctggaagggcg

SEQ ID NO: 102119 - RNA, 23 nt, synthetic construct
  source 1..23: mol_type = other RNA
taggtgtgggcagtctctggagt

SEQ ID NO: 102120 - RNA, 23 nt, synthetic construct
  source 1..23: mol_type = other RNA
tcacagagccggtggccccagtt

SEQ ID NO: 102121 - RNA, 23 nt, synthetic construct
  source 1..23: mol_type = other RNA
tccacagagccggtggccccagt

SEQ ID NO: 102122 - RNA, 23 nt, synthetic construct
  source 1..23: mol_type = other RNA
tgtgtgggtggtccccgggatgg

SEQ ID NO: 102123 - RNA, 23 nt, synthetic construct
  source 1..23: mol_type = other RNA
tatagaaccagtggccacagttg

SEQ ID NO: 102124 - RNA, 23 nt, synthetic construct
  source 1..23: mol_type = other RNA
taggagttgaggaggggttggtg

SEQ ID NO: 102125 - RNA, 23 nt, synthetic construct
  source 1..23: mol_type = other RNA
ttgtcccaggagttgaggagggg

SEQ ID NO: 102126 - RNA, 23 nt, synthetic construct
  source 1..23: mol_type = other RNA
tgcactggggggatgggagttgt

SEQ ID NO: 102127 - RNA, 23 nt, synthetic construct
  source 1..23: mol_type = other RNA
tccgtgtggggactgctgggggg

SEQ ID NO: 102128 - RNA, 23 nt, synthetic construct
  source 1..23: mol_type = other RNA
tgggctggagtcgagtgctgggt

SEQ ID NO: 102129 - RNA, 23 nt, synthetic construct
  source 1..23: mol_type = other RNA
tcccatggtcaccaccgtggtta

SEQ ID NO: 102130 - RNA, 23 nt, synthetic construct
  source 1..23: mol_type = other RNA
tctctgaccaggcacactggggc

SEQ ID NO: 102131 - RNA, 23 nt, synthetic construct
  source 1..23: mol_type = other RNA
ttcctgcagaccaggccaaagtc

SEQ ID NO: 102132 - RNA, 23 nt, synthetic construct
  source 1..23: mol_type = other RNA
ttgtagtgctcggctctgtgagg

SEQ ID NO: 102133 - RNA, 23 nt, synthetic construct
  source 1..23: mol_type = other RNA
tagtccctggactggagaaggga

SEQ ID NO: 102134 - RNA, 23 nt, synthetic construct
  source 1..23: mol_type = other RNA
tcagtccctggactggagaaggg

SEQ ID NO: 102135 - RNA, 23 nt, synthetic construct
  source 1..23: mol_type = other RNA
tgcttctcagtgctggaagggcg

SEQ ID NO: 102136 - RNA, 23 nt, synthetic construct
  source 1..23: mol_type = other RNA
tccacagagccggtggccccggt

SEQ ID NO: 102137 - RNA, 23 nt, synthetic construct
  source 1..23: mol_type = other RNA
tgtgcgtgccgtccctgggctgg

SEQ ID NO: 102138 - RNA, 23 nt, synthetic construct
  source 1..23: mol_type = other RNA
tgtgtgggtggtccccgggatgg

SEQ ID NO: 102139 - RNA, 23 nt, synthetic construct
  source 1..23: mol_type = other RNA
tatagaaccagtggccacagttg

SEQ ID NO: 102140 - RNA, 23 nt, synthetic construct
  source 1..23: mol_type = other RNA
tataggtgttgtccctggagttg

SEQ ID NO: 102141 - RNA, 23 nt, synthetic construct
  source 1..23: mol_type = other RNA
tcactgtgctgctggtggctgca

SEQ ID NO: 102142 - RNA, 23 nt, synthetic construct
  source 1..23: mol_type = other RNA
tagtcactgtgctgctggtggct

SEQ ID NO: 102143 - RNA, 23 nt, synthetic construct
  source 1..23: mol_type = other RNA
tccgtgtggggactgctggggga

SEQ ID NO: 102144 - RNA, 23 nt, synthetic construct
  source 1..23: mol_type = other RNA
ttggtgcccaaggtgcctgaggt

SEQ ID NO: 102145 - RNA, 23 nt, synthetic construct
  source 1..23: mol_type = other RNA
ttgggaagtccccgtggaaggct

SEQ ID NO: 102146 - RNA, 23 nt, synthetic construct
  source 1..23: mol_type = other RNA
tgggctggagtcgagtgctgggt

SEQ ID NO: 102147 - RNA, 23 nt, synthetic construct
  source 1..23: mol_type = other RNA
ttcggtggtcctgctgctagggt

SEQ ID NO: 102148 - RNA, 23 nt, synthetic construct
  source 1..23: mol_type = other RNA
tcccatggtcaccaccgtggtta

SEQ ID NO: 102149 - RNA, 23 nt, synthetic construct
  source 1..23: mol_type = other RNA
tctctgaccaggcacactggggc

SEQ ID NO: 102150 - RNA, 23 nt, synthetic construct
  source 1..23: mol_type = other RNA
ttcctgcagaccaggccaaagtc

SEQ ID NO: 102151 - RNA, 23 nt, synthetic construct
  source 1..23: mol_type = other RNA
ttagtggctgctgtggtctgctc

SEQ ID NO: 102152 - RNA, 23 nt, synthetic construct
  source 1..23: mol_type = other RNA
ttgtgggtgtggtggccgtgctg

SEQ ID NO: 102153 - RNA, 23 nt, synthetic construct
  source 1..23: mol_type = other RNA
tctgtgggtgtggtggccgtgct

SEQ ID NO: 102154 - RNA, 23 nt, synthetic construct
  source 1..23: mol_type = other RNA
tgtagctgtggatttggtggctg

SEQ ID NO: 102155 - RNA, 23 nt, synthetic construct
  source 1..23: mol_type = other RNA
tggtagctgtggatttggtggct

SEQ ID NO: 102156 - RNA, 23 nt, synthetic construct
  source 1..23: mol_type = other RNA
tccccggagtggaggagggggtg

SEQ ID NO: 102157 - RNA, 23 nt, synthetic construct
  source 1..23: mol_type = other RNA
ttgtgggtgtggtggccgtgctg

SEQ ID NO: 102158 - RNA, 23 nt, synthetic construct
  source 1..23: mol_type = other RNA
tctgtgggtgtggtggccgtgct

SEQ ID NO: 102159 - RNA, 23 nt, synthetic construct
  source 1..23: mol_type = other RNA
tggctctggagctgatgactgtg

SEQ ID NO: 102160 - RNA, 23 nt, synthetic construct
  source 1..23: mol_type = other RNA
tgtggctctggagctgatgactg

SEQ ID NO: 102161 - RNA, 23 nt, synthetic construct
  source 1..23: mol_type = other RNA
tagtggctctggagctgatgact

SEQ ID NO: 102162 - RNA, 23 nt, synthetic construct
  source 1..23: mol_type = other RNA
tgcttctcagtgctggaagggcg

SEQ ID NO: 102163 - RNA, 23 nt, synthetic construct
  source 1..23: mol_type = other RNA
tgagtagaggagggtgtggctgt

SEQ ID NO: 102164 - RNA, 23 nt, synthetic construct
  source 1..23: mol_type = other RNA
tcacagagccggtggccctggtt

SEQ ID NO: 102165 - RNA, 23 nt, synthetic construct
  source 1..23: mol_type = other RNA
ttggttgtggtagtcggcacttt

SEQ ID NO: 102166 - RNA, 23 nt, synthetic construct
  source 1..23: mol_type = other RNA
tgtgtgggtggtccccgggatgg

SEQ ID NO: 102167 - RNA, 23 nt, synthetic construct
  source 1..23: mol_type = other RNA
tatagaaccagtggccacagttg

SEQ ID NO: 102168 - RNA, 23 nt, synthetic construct
  source 1..23: mol_type = other RNA
tgcactggggggatgggagttgt

SEQ ID NO: 102169 - RNA, 23 nt, synthetic construct
  source 1..23: mol_type = other RNA
tcactgtgctgctggtggctgca

SEQ ID NO: 102170 - RNA, 23 nt, synthetic construct
  source 1..23: mol_type = other RNA
tagtcactgtgctgctggtggct

SEQ ID NO: 102171 - RNA, 23 nt, synthetic construct
  source 1..23: mol_type = other RNA
tccgtgtggggactgctgggggg

SEQ ID NO: 102172 - RNA, 23 nt, synthetic construct
  source 1..23: mol_type = other RNA
tactggtggttgctgctggggtg

SEQ ID NO: 102173 - RNA, 23 nt, synthetic construct
  source 1..23: mol_type = other RNA
tgggctggagtcgagtgctgggt

SEQ ID NO: 102174 - RNA, 23 nt, synthetic construct
  source 1..23: mol_type = other RNA
ttcggtggtcctgctgctagggt

SEQ ID NO: 102175 - RNA, 23 nt, synthetic construct
  source 1..23: mol_type = other RNA
tctctgaccaggcacactggggc

SEQ ID NO: 102176 - RNA, 23 nt, synthetic construct
  source 1..23: mol_type = other RNA
ttcctgcagaccaggccaaagtc

SEQ ID NO: 102177 - RNA, 23 nt, synthetic construct
  source 1..23: mol_type = other RNA
ttgtagtgctcggctctgtgagg

SEQ ID NO: 102178 - RNA, 23 nt, synthetic construct
  source 1..23: mol_type = other RNA
tagtccctggactggagaaggga

SEQ ID NO: 102179 - RNA, 23 nt, synthetic construct
  source 1..23: mol_type = other RNA
tcagtccctggactggagaaggg

SEQ ID NO: 102180 - RNA, 23 nt, synthetic construct
  source 1..23: mol_type = other RNA
tgcttctcagtgctggaagggcg

SEQ ID NO: 102181 - RNA, 23 nt, synthetic construct
  source 1..23: mol_type = other RNA
taggtgtgggcagtctctggagt

SEQ ID NO: 102182 - RNA, 23 nt, synthetic construct
  source 1..23: mol_type = other RNA
tcacagagccggtggccctggtt

SEQ ID NO: 102183 - RNA, 23 nt, synthetic construct
  source 1..23: mol_type = other RNA
ttggttgtggtagtcggcacttt

SEQ ID NO: 102184 - RNA, 23 nt, synthetic construct
  source 1..23: mol_type = other RNA
tgtgcgtgccgtccctgggctgg

SEQ ID NO: 102185 - RNA, 23 nt, synthetic construct
  source 1..23: mol_type = other RNA
tgtgtgggtggtccccgggacgg

SEQ ID NO: 102186 - RNA, 23 nt, synthetic construct
  source 1..23: mol_type = other RNA
tatagaaccagtggccacagttg

SEQ ID NO: 102187 - RNA, 23 nt, synthetic construct
  source 1..23: mol_type = other RNA
ttggccgtggtgatcagtgatgg

SEQ ID NO: 102188 - RNA, 23 nt, synthetic construct
  source 1..23: mol_type = other RNA
tataggtgttgtccctggagttg

SEQ ID NO: 102189 - RNA, 23 nt, synthetic construct
  source 1..23: mol_type = other RNA
tcactgtgctgctggtggctgca

SEQ ID NO: 102190 - RNA, 23 nt, synthetic construct
  source 1..23: mol_type = other RNA
tagtcactgtgctgctggtggct

SEQ ID NO: 102191 - RNA, 23 nt, synthetic construct
  source 1..23: mol_type = other RNA
tccgtgtggggactgctggggga

SEQ ID NO: 102192 - RNA, 23 nt, synthetic construct
  source 1..23: mol_type = other RNA
ttggtgcccaaggtgcctgaggt

SEQ ID NO: 102193 - RNA, 23 nt, synthetic construct
  source 1..23: mol_type = other RNA
ttgggaagtccccgtggaaggct

SEQ ID NO: 102194 - RNA, 23 nt, synthetic construct
  source 1..23: mol_type = other RNA
tgggctggagtcgagtgctgggt

SEQ ID NO: 102195 - RNA, 23 nt, synthetic construct
  source 1..23: mol_type = other RNA
ttcggtggtcctgctgctagggt

SEQ ID NO: 102196 - RNA, 23 nt, synthetic construct
  source 1..23: mol_type = other RNA
tctctgaccaggcacactggggc

SEQ ID NO: 102197 - RNA, 23 nt, synthetic construct
  source 1..23: mol_type = other RNA
tccccagggggacaccaggctgg

SEQ ID NO: 102198 - RNA, 23 nt, synthetic construct
  source 1..23: mol_type = other RNA
tcctggcccaactcccccagggg

SEQ ID NO: 102199 - RNA, 23 nt, synthetic construct
  source 1..23: mol_type = other RNA
ttcctgcagaccaggccaaagtc

SEQ ID NO: 102200 - RNA, 23 nt, synthetic construct
  source 1..23: mol_type = other RNA
tggtggccgggctggtcagcact

SEQ ID NO: 102201 - RNA, 23 nt, synthetic construct
  source 1..23: mol_type = other RNA
tgtgtggtggccgggctggtcag

SEQ ID NO: 102202 - RNA, 23 nt, synthetic construct
  source 1..23: mol_type = other RNA
tctgtgggtgtggtggccgggct

SEQ ID NO: 102203 - RNA, 23 nt, synthetic construct
  source 1..23: mol_type = other RNA
tgtagctgtggatttggtggctg

SEQ ID NO: 102204 - RNA, 23 nt, synthetic construct
  source 1..23: mol_type = other RNA
tggtagctgtggatttggtggct

SEQ ID NO: 102205 - RNA, 23 nt, synthetic construct
  source 1..23: mol_type = other RNA
tccccggagtggaggagggggtg

SEQ ID NO: 102206 - RNA, 23 nt, synthetic construct
  source 1..23: mol_type = other RNA
ttgtagtgctcggctctgtgagg

SEQ ID NO: 102207 - RNA, 23 nt, synthetic construct
  source 1..23: mol_type = other RNA
tggagggagtggctttggagctg

SEQ ID NO: 102208 - RNA, 23 nt, synthetic construct
  source 1..23: mol_type = other RNA
tctcagtgctggaagggcagttg

SEQ ID NO: 102209 - RNA, 23 nt, synthetic construct
  source 1..23: mol_type = other RNA
tgcttctcagtgctggaagggca

SEQ ID NO: 102210 - RNA, 23 nt, synthetic construct
  source 1..23: mol_type = other RNA
tccacagagccggtggccccggt

SEQ ID NO: 102211 - RNA, 23 nt, synthetic construct
  source 1..23: mol_type = other RNA
ttggttgtggtagtcggcacttt

SEQ ID NO: 102212 - RNA, 23 nt, synthetic construct
  source 1..23: mol_type = other RNA
tgtgtgggtggtccccgggatgg

SEQ ID NO: 102213 - RNA, 23 nt, synthetic construct
  source 1..23: mol_type = other RNA
tatagaaccagtggccacagttg

SEQ ID NO: 102214 - RNA, 23 nt, synthetic construct
  source 1..23: mol_type = other RNA
tgattttgtggctgtgcttgtca

SEQ ID NO: 102215 - RNA, 23 nt, synthetic construct
  source 1..23: mol_type = other RNA
ttccacagggtggaggaggggat

SEQ ID NO: 102216 - RNA, 23 nt, synthetic construct
  source 1..23: mol_type = other RNA
tgaaccgtggaggcagtggctgt

SEQ ID NO: 102217 - RNA, 23 nt, synthetic construct
  source 1..23: mol_type = other RNA
tcacaggctttgggtccagcagg

SEQ ID NO: 102218 - RNA, 23 nt, synthetic construct
  source 1..23: mol_type = other RNA
tgtggcagaggccgtgcagtagt

SEQ ID NO: 102219 - RNA, 23 nt, synthetic construct
  source 1..23: mol_type = other RNA
tagtggcagaggccgtgcagtag

SEQ ID NO: 102220 - RNA, 23 nt, synthetic construct
  source 1..23: mol_type = other RNA
tatgctgagggcgcgggggcagc

SEQ ID NO: 102221 - RNA, 23 nt, synthetic construct
  source 1..23: mol_type = other RNA
tcttgtagtggatgctgagggcg

SEQ ID NO: 102222 - RNA, 23 nt, synthetic construct
  source 1..23: mol_type = other RNA
tcccagggcaggaatgtccacac

SEQ ID NO: 102223 - RNA, 23 nt, synthetic construct
  source 1..23: mol_type = other RNA
tgaagacttggccattgaaggtg

SEQ ID NO: 102224 - RNA, 23 nt, synthetic construct
  source 1..23: mol_type = other RNA
tggcctggaagacttggccattg

SEQ ID NO: 102225 - RNA, 23 nt, synthetic construct
  source 1..23: mol_type = other RNA
tggtgggtgtgctagacaccggg

SEQ ID NO: 102226 - RNA, 23 nt, synthetic construct
  source 1..23: mol_type = other RNA
tcacacaggcaggctctgggggc

SEQ ID NO: 102227 - RNA, 23 nt, synthetic construct
  source 1..23: mol_type = other RNA
ttcctgacattgcaccgttgggt

SEQ ID NO: 102228 - RNA, 23 nt, synthetic construct
  source 1..23: mol_type = other RNA
tagtattgttgcaggcatcctcc

SEQ ID NO: 102229 - RNA, 23 nt, synthetic construct
  source 1..23: mol_type = other RNA
tatggactccaccctcagcctca

SEQ ID NO: 102230 - RNA, 23 nt, synthetic construct
  source 1..23: mol_type = other RNA
taatggactccaccctcagcctc

SEQ ID NO: 102231 - RNA, 23 nt, synthetic construct
  source 1..23: mol_type = other RNA
tgtgtgtgggggagccatgggcg

SEQ ID NO: 102232 - RNA, 23 nt, synthetic construct
  source 1..23: mol_type = other RNA
tcagacagcagtggcctcctggg

SEQ ID NO: 102233 - RNA, 23 nt, synthetic construct
  source 1..23: mol_type = other RNA
tatgcacatcctggctccaggtg

SEQ ID NO: 102234 - RNA, 23 nt, synthetic construct
  source 1..23: mol_type = other RNA
tccaaggttttcatgatcagaca

SEQ ID NO: 102235 - RNA, 23 nt, synthetic construct
  source 1..23: mol_type = other RNA
tcacaggccggggggctccgcag

SEQ ID NO: 102236 - RNA, 23 nt, synthetic construct
  source 1..23: mol_type = other RNA
ttgggcagcaggagcacggagcg

SEQ ID NO: 102237 - RNA, 23 nt, synthetic construct
  source 1..23: mol_type = other RNA
tcccctcacccttctggggccgg

SEQ ID NO: 102238 - RNA, 23 nt, synthetic construct
  source 1..23: mol_type = other RNA
tcgaaaggggtcctgctggcccc

SEQ ID NO: 102239 - RNA, 23 nt, synthetic construct
  source 1..23: mol_type = other RNA
tctcctgagtggcgccctcccga

SEQ ID NO: 102240 - RNA, 23 nt, synthetic construct
  source 1..23: mol_type = other RNA
tggcagggacacataggcccgca

SEQ ID NO: 102241 - RNA, 23 nt, synthetic construct
  source 1..23: mol_type = other RNA
ttgcctgtcgcagcttcctggca

SEQ ID NO: 102242 - RNA, 23 nt, synthetic construct
  source 1..23: mol_type = other RNA
tagggtttatttgcaaaactggg

SEQ ID NO: 102243 - RNA, 23 nt, synthetic construct
  source 1..23: mol_type = other RNA
tggaggagggcgtggccgtagag

SEQ ID NO: 102244 - RNA, 23 nt, synthetic construct
  source 1..23: mol_type = other RNA
ttgaggagggcgtggccgtagag

SEQ ID NO: 102245 - RNA, 23 nt, synthetic construct
  source 1..23: mol_type = other RNA
tccttctggggccggtttcaccc

SEQ ID NO: 102246 - RNA, 23 nt, synthetic construct
  source 1..23: mol_type = other RNA
tgcccctgcagtggtcgctgatg

SEQ ID NO: 102247 - RNA, 23 nt, synthetic construct
  source 1..23: mol_type = other RNA
tattctcccagctcggctccaca

SEQ ID NO: 102248 - RNA, 23 nt, synthetic construct
  source 1..23: mol_type = other RNA
tccagggtccagttggggaagct

SEQ ID NO: 102249 - RNA, 23 nt, synthetic construct
  source 1..23: mol_type = other RNA
tgccagtgggtctcagggtggtg

SEQ ID NO: 102250 - RNA, 23 nt, synthetic construct
  source 1..23: mol_type = other RNA
ttccggagtggaggaggggtgga

SEQ ID NO: 102251 - RNA, 23 nt, synthetic construct
  source 1..23: mol_type = other RNA
ttccggagtggaggaggggtgga

SEQ ID NO: 102252 - RNA, 23 nt, synthetic construct
  source 1..23: mol_type = other RNA
tggcgtcacagggcaggggcttg

SEQ ID NO: 102253 - RNA, 23 nt, synthetic construct
  source 1..23: mol_type = other RNA
tgaaaaactgtccaaatgccctg

SEQ ID NO: 102254 - RNA, 23 nt, synthetic construct
  source 1..23: mol_type = other RNA
tatcctgggggctggcacgggtg

SEQ ID NO: 102255 - RNA, 23 nt, synthetic construct
  source 1..23: mol_type = other RNA
tgacagagcgggggactctgttg

SEQ ID NO: 102256 - RNA, 23 nt, synthetic construct
  source 1..23: mol_type = other RNA
ttaccctgcagcaggcatggaca

SEQ ID NO: 102257 - RNA, 23 nt, synthetic construct
  source 1..23: mol_type = other RNA
tgggtgactcggtggtcctgctg

SEQ ID NO: 102258 - RNA, 23 nt, synthetic construct
  source 1..23: mol_type = other RNA
tgggtgactcggtggtcctgctg

SEQ ID NO: 102259 - RNA, 23 nt, synthetic construct
  source 1..23: mol_type = other RNA
tgggtgactcggtggtcctgctg

SEQ ID NO: 102260 - RNA, 23 nt, synthetic construct
  source 1..23: mol_type = other RNA
ttggcagggcacctcaaggcggc

SEQ ID NO: 102261 - RNA, 23 nt, synthetic construct
  source 1..23: mol_type = other RNA
tccactgggtgtgcagttacagc

SEQ ID NO: 102262 - RNA, 23 nt, synthetic construct
  source 1..23: mol_type = other RNA
tggatgctgaccttgatgtagtc

SEQ ID NO: 102263 - RNA, 23 nt, synthetic construct
  source 1..23: mol_type = other RNA
tgggggctggcacgggtgggggg

SEQ ID NO: 102264 - RNA, 23 nt, synthetic construct
  source 1..23: mol_type = other RNA
tagtcacagaacaaggggcaggt

SEQ ID NO: 102265 - RNA, 23 nt, synthetic construct
  source 1..23: mol_type = other RNA
ttcggtggttctgctgctagggt

SEQ ID NO: 102266 - RNA, 23 nt, synthetic construct
  source 1..23: mol_type = other RNA
tggggcggaggacactggcggtg

SEQ ID NO: 102267 - RNA, 23 nt, synthetic construct
  source 1..23: mol_type = other RNA
tgcagccctccgccatcccctcc

SEQ ID NO: 102268 - RNA, 23 nt, synthetic construct
  source 1..23: mol_type = other RNA
tgttgtcccaggagttgaggagg

SEQ ID NO: 102269 - RNA, 23 nt, synthetic construct
  source 1..23: mol_type = other RNA
tgacggggtggccgtggatccag

SEQ ID NO: 102270 - RNA, 23 nt, synthetic construct
  source 1..23: mol_type = other RNA
tgacggggtggccgtggatccag

SEQ ID NO: 102271 - RNA, 23 nt, synthetic construct
  source 1..23: mol_type = other RNA
tgacggggtggccgtggatccag

SEQ ID NO: 102272 - RNA, 23 nt, synthetic construct
  source 1..23: mol_type = other RNA
tgacggggtggccgtggatccag

SEQ ID NO: 102273 - RNA, 23 nt, synthetic construct
  source 1..23: mol_type = other RNA
tcggggtgccacacacaggccgg

SEQ ID NO: 102274 - RNA, 23 nt, synthetic construct
  source 1..23: mol_type = other RNA
taggccagggaagcggaagacgt

SEQ ID NO: 102275 - RNA, 23 nt, synthetic construct
  source 1..23: mol_type = other RNA
tgaagcggtgctggctgtgcctg

SEQ ID NO: 102276 - RNA, 23 nt, synthetic construct
  source 1..23: mol_type = other RNA
tagtcaaggggctcattgtcgtc

SEQ ID NO: 102277 - RNA, 23 nt, synthetic construct
  source 1..23: mol_type = other RNA
tgtaccactggtctgtgtgctag

SEQ ID NO: 102278 - RNA, 23 nt, synthetic construct
  source 1..23: mol_type = other RNA
tgtaccactggtctgtgtgctag

SEQ ID NO: 102279 - RNA, 23 nt, synthetic construct
  source 1..23: mol_type = other RNA
tggacatggaactggtggccctt

SEQ ID NO: 102280 - RNA, 23 nt, synthetic construct
  source 1..23: mol_type = other RNA
taggacggggtggccgtggggcc

SEQ ID NO: 102281 - RNA, 23 nt, synthetic construct
  source 1..23: mol_type = other RNA
tgtaccactggtctgtgtgctag

SEQ ID NO: 102282 - RNA, 23 nt, synthetic construct
  source 1..23: mol_type = other RNA
tgtaccactggtctgtgtgctag

SEQ ID NO: 102283 - RNA, 23 nt, synthetic construct
  source 1..23: mol_type = other RNA
taggacggggtggccgtggggcc

SEQ ID NO: 102284 - RNA, 23 nt, synthetic construct
  source 1..23: mol_type = other RNA
tgtaccactggtctgtgtgctag

SEQ ID NO: 102285 - RNA, 23 nt, synthetic construct
  source 1..23: mol_type = other RNA
tgctttggagctggtggctgcgg

SEQ ID NO: 102286 - RNA, 23 nt, synthetic construct
  source 1..23: mol_type = other RNA
tgtcagctcagtgaggatccggg

SEQ ID NO: 102287 - RNA, 23 nt, synthetic construct
  source 1..23: mol_type = other RNA
tggagcactgcaggggtgcgggt

SEQ ID NO: 102288 - RNA, 23 nt, synthetic construct
  source 1..23: mol_type = other RNA
tccacacgcatggtggtggtccc

SEQ ID NO: 102289 - RNA, 23 nt, synthetic construct
  source 1..23: mol_type = other RNA
tctggtcctcagggcagaagcag

SEQ ID NO: 102290 - RNA, 23 nt, synthetic construct
  source 1..23: mol_type = other RNA
tggtgcccgggctgtaggtgcgg

SEQ ID NO: 102291 - RNA, 23 nt, synthetic construct
  source 1..23: mol_type = other RNA
tctgggcgggcacacaggcgccc

SEQ ID NO: 102292 - RNA, 23 nt, synthetic construct
  source 1..23: mol_type = other RNA
ttgcaccttctgccccacctgtg

SEQ ID NO: 102293 - RNA, 23 nt, synthetic construct
  source 1..23: mol_type = other RNA
tagttgcctgggtggaggaggcg

SEQ ID NO: 102294 - RNA, 23 nt, synthetic construct
  source 1..23: mol_type = other RNA
tagttgcctgggtggaggaggcg

SEQ ID NO: 102295 - RNA, 23 nt, synthetic construct
  source 1..23: mol_type = other RNA
ttggtggccacgggtgtggtggt

SEQ ID NO: 102296 - RNA, 23 nt, synthetic construct
  source 1..23: mol_type = other RNA
tagttgcctgggtggaggaggcg

SEQ ID NO: 102297 - RNA, 23 nt, synthetic construct
  source 1..23: mol_type = other RNA
tcctgtcgcagcttcctggcagc

SEQ ID NO: 102298 - RNA, 23 nt, synthetic construct
  source 1..23: mol_type = other RNA
tcaccagccggatgctgaccttg

SEQ ID NO: 102299 - RNA, 23 nt, synthetic construct
  source 1..23: mol_type = other RNA
ttgagagggtggggactgctgtg

SEQ ID NO: 102300 - RNA, 23 nt, synthetic construct
  source 1..23: mol_type = other RNA
tggtggagccggtggccgtgatc

SEQ ID NO: 102301 - RNA, 23 nt, synthetic construct
  source 1..23: mol_type = other RNA
tggtggagccggtggccgtgatc

SEQ ID NO: 102302 - RNA, 23 nt, synthetic construct
  source 1..23: mol_type = other RNA
tggtggagccggtggccgtgatc

SEQ ID NO: 102303 - RNA, 23 nt, synthetic construct
  source 1..23: mol_type = other RNA
tggtggagccggtggccgtgatc

SEQ ID NO: 102304 - RNA, 23 nt, synthetic construct
  source 1..23: mol_type = other RNA
tccttgtcatggtggctgtggtg

SEQ ID NO: 102305 - RNA, 23 nt, synthetic construct
  source 1..23: mol_type = other RNA
ttgtgggggagccatgggcgcag

SEQ ID NO: 102306 - RNA, 23 nt, synthetic construct
  source 1..23: mol_type = other RNA
tccctctctgacctggccgttgc

SEQ ID NO: 102307 - RNA, 23 nt, synthetic construct
  source 1..23: mol_type = other RNA
tcaccaccccgctgagggccgtg

SEQ ID NO: 102308 - RNA, 23 nt, synthetic construct
  source 1..23: mol_type = other RNA
ttgttgctgcagtccaggtacac

SEQ ID NO: 102309 - RNA, 23 nt, synthetic construct
  source 1..23: mol_type = other RNA
tggtcctggcactgccatagccc

SEQ ID NO: 102310 - RNA, 23 nt, synthetic construct
  source 1..23: mol_type = other RNA
tcgtgggtggctgtgaggggcgc

SEQ ID NO: 102311 - RNA, 23 nt, synthetic construct
  source 1..23: mol_type = other RNA
tggggacccaggcggtggtgaag

SEQ ID NO: 102312 - RNA, 23 nt, synthetic construct
  source 1..23: mol_type = other RNA
tggtcgtccctggagaagggggt

SEQ ID NO: 102313 - RNA, 23 nt, synthetic construct
  source 1..23: mol_type = other RNA
tggtcgtccctggagaagggggt

SEQ ID NO: 102314 - RNA, 23 nt, synthetic construct
  source 1..23: mol_type = other RNA
tggtcgtccctggagaagggggt

SEQ ID NO: 102315 - RNA, 23 nt, synthetic construct
  source 1..23: mol_type = other RNA
tacctggcccaactcccccaggg

SEQ ID NO: 102316 - RNA, 23 nt, synthetic construct
  source 1..23: mol_type = other RNA
tgtgagctgttcccagagtggag

SEQ ID NO: 102317 - RNA, 23 nt, synthetic construct
  source 1..23: mol_type = other RNA
tggacactggcggtggggaggtg

SEQ ID NO: 102318 - RNA, 23 nt, synthetic construct
  source 1..23: mol_type = other RNA
tgtggttgtccaggtagaggctg

SEQ ID NO: 102319 - RNA, 23 nt, synthetic construct
  source 1..23: mol_type = other RNA
tagtggttgtccaggtagaggct

SEQ ID NO: 102320 - RNA, 23 nt, synthetic construct
  source 1..23: mol_type = other RNA
ttccccgggcgcggcagagctct

SEQ ID NO: 102321 - RNA, 23 nt, synthetic construct
  source 1..23: mol_type = other RNA
ttccacaggcacgaaggaaacgc

SEQ ID NO: 102322 - RNA, 23 nt, synthetic construct
  source 1..23: mol_type = other RNA
taggaagaggggatgggtgtaac

SEQ ID NO: 102323 - RNA, 23 nt, synthetic construct
  source 1..23: mol_type = other RNA
tggtggccgtgggtgtggtggtc

SEQ ID NO: 102324 - RNA, 23 nt, synthetic construct
  source 1..23: mol_type = other RNA
tgggagtcactgtgttgctggtg

SEQ ID NO: 102325 - RNA, 23 nt, synthetic construct
  source 1..23: mol_type = other RNA
tggtggccgtgggtgtggtggtc

SEQ ID NO: 102326 - RNA, 23 nt, synthetic construct
  source 1..23: mol_type = other RNA
tggagctgatgactgtgggtgtg

SEQ ID NO: 102327 - RNA, 23 nt, synthetic construct
  source 1..23: mol_type = other RNA
tggtggccgtgggtgtggtggtc

SEQ ID NO: 102328 - RNA, 23 nt, synthetic construct
  source 1..23: mol_type = other RNA
tggtggccgtgggtgtggtggtc

SEQ ID NO: 102329 - RNA, 23 nt, synthetic construct
  source 1..23: mol_type = other RNA
tggtggccgtgggtgtggtggtc

SEQ ID NO: 102330 - RNA, 23 nt, synthetic construct
  source 1..23: mol_type = other RNA
tgggtgtggtggttgtgggtgtg

SEQ ID NO: 102331 - RNA, 23 nt, synthetic construct
  source 1..23: mol_type = other RNA
tactggggtgatgggtgttgtcc

SEQ ID NO: 102332 - RNA, 23 nt, synthetic construct
  source 1..23: mol_type = other RNA
tctgtgggctctggttcctagag

SEQ ID NO: 102333 - RNA, 23 nt, synthetic construct
  source 1..23: mol_type = other RNA
tgggtgtaggtgtgcaggatggc

SEQ ID NO: 102334 - RNA, 23 nt, synthetic construct
  source 1..23: mol_type = other RNA
tgtcggggtggccgtggatccag

SEQ ID NO: 102335 - RNA, 23 nt, synthetic construct
  source 1..23: mol_type = other RNA
ttggaggagggagtggctttgga

SEQ ID NO: 102336 - RNA, 23 nt, synthetic construct
  source 1..23: mol_type = other RNA
ttggaggagggagtggctttgga

SEQ ID NO: 102337 - RNA, 23 nt, synthetic construct
  source 1..23: mol_type = other RNA
tgttgaagaggatctggtcctca

SEQ ID NO: 102338 - RNA, 23 nt, synthetic construct
  source 1..23: mol_type = other RNA
ttgtccccacagtagtcctgggc

SEQ ID NO: 102339 - RNA, 23 nt, synthetic construct
  source 1..23: mol_type = other RNA
tccgggaggccgttgaagtcccc

SEQ ID NO: 102340 - RNA, 23 nt, synthetic construct
  source 1..23: mol_type = other RNA
taagtcacagaacaaggggcagg

SEQ ID NO: 102341 - RNA, 23 nt, synthetic construct
  source 1..23: mol_type = other RNA
tgtggccccagttgtggtggccg

SEQ ID NO: 102342 - RNA, 23 nt, synthetic construct
  source 1..23: mol_type = other RNA
ttccaggtggtccctggggtgga

SEQ ID NO: 102343 - RNA, 23 nt, synthetic construct
  source 1..23: mol_type = other RNA
tgggggtggacatggaactggtg

SEQ ID NO: 102344 - RNA, 23 nt, synthetic construct
  source 1..23: mol_type = other RNA
ttccaggtggtccctggggtgga

SEQ ID NO: 102345 - RNA, 23 nt, synthetic construct
  source 1..23: mol_type = other RNA
tgtctctggagtagaggagggtg

SEQ ID NO: 102346 - RNA, 23 nt, synthetic construct
  source 1..23: mol_type = other RNA
ttccaggtggtccctggggtgga

SEQ ID NO: 102347 - RNA, 23 nt, synthetic construct
  source 1..23: mol_type = other RNA
ttccaggtggtccctggggtgga

SEQ ID NO: 102348 - RNA, 23 nt, synthetic construct
  source 1..23: mol_type = other RNA
ttccaggtggtccctggggtgga

SEQ ID NO: 102349 - RNA, 23 nt, synthetic construct
  source 1..23: mol_type = other RNA
tgtctctggagtagaggaggtgt

SEQ ID NO: 102350 - RNA, 23 nt, synthetic construct
  source 1..23: mol_type = other RNA
ttccaggtggtccctggggtgga

SEQ ID NO: 102351 - RNA, 23 nt, synthetic construct
  source 1..23: mol_type = other RNA
tgtccaggtagaggctgagattc

SEQ ID NO: 102352 - RNA, 23 nt, synthetic construct
  source 1..23: mol_type = other RNA
ttgtccaggtagaggctgagatt

SEQ ID NO: 102353 - RNA, 23 nt, synthetic construct
  source 1..23: mol_type = other RNA
tcaggcaggctctgggggcaggt

SEQ ID NO: 102354 - RNA, 23 nt, synthetic construct
  source 1..23: mol_type = other RNA
tggctggcacgggtggggggacg

SEQ ID NO: 102355 - RNA, 23 nt, synthetic construct
  source 1..23: mol_type = other RNA
tgctccaccaggaggccagtgcg

SEQ ID NO: 102356 - RNA, 23 nt, synthetic construct
  source 1..23: mol_type = other RNA
tgggaggccgttgaagtccccac

SEQ ID NO: 102357 - RNA, 23 nt, synthetic construct
  source 1..23: mol_type = other RNA
ttccttgggtgccagggcgtccg

SEQ ID NO: 102358 - RNA, 23 nt, synthetic construct
  source 1..23: mol_type = other RNA
tggtccttgggtgccagggcgtc

SEQ ID NO: 102359 - RNA, 23 nt, synthetic construct
  source 1..23: mol_type = other RNA
tgccgggctctgggcggtgccca

SEQ ID NO: 102360 - RNA, 23 nt, synthetic construct
  source 1..23: mol_type = other RNA
tctgcctcaggttttcaaacgtc

SEQ ID NO: 102361 - RNA, 23 nt, synthetic construct
  source 1..23: mol_type = other RNA
ttgttggaagggtggatgtggcc

SEQ ID NO: 102362 - RNA, 23 nt, synthetic construct
  source 1..23: mol_type = other RNA
ttccctggaagggctgagcgtgt

SEQ ID NO: 102363 - RNA, 23 nt, synthetic construct
  source 1..23: mol_type = other RNA
ttgccgtccctgggctggaggag

SEQ ID NO: 102364 - RNA, 23 nt, synthetic construct
  source 1..23: mol_type = other RNA
tctgggggtgtgtgggtggtccc

SEQ ID NO: 102365 - RNA, 23 nt, synthetic construct
  source 1..23: mol_type = other RNA
tatgtgggtggtgcccaagatgc

SEQ ID NO: 102366 - RNA, 23 nt, synthetic construct
  source 1..23: mol_type = other RNA
tggaagtcaccgtggaaggctct

SEQ ID NO: 102367 - RNA, 23 nt, synthetic construct
  source 1..23: mol_type = other RNA
tgggaagtcaccgtggaaggctc

SEQ ID NO: 102368 - RNA, 23 nt, synthetic construct
  source 1..23: mol_type = other RNA
tgtccctggggtggaggacgggg

SEQ ID NO: 102369 - RNA, 23 nt, synthetic construct
  source 1..23: mol_type = other RNA
ttgccgtccctgggctggaggag

SEQ ID NO: 102370 - RNA, 23 nt, synthetic construct
  source 1..23: mol_type = other RNA
ttgggggtgtgggtggtccccgg

SEQ ID NO: 102371 - RNA, 23 nt, synthetic construct
  source 1..23: mol_type = other RNA
tctgggggtgtgtgggtggtccc

SEQ ID NO: 102372 - RNA, 23 nt, synthetic construct
  source 1..23: mol_type = other RNA
ttgaaggaggggatgggtgtaaa

SEQ ID NO: 102373 - RNA, 23 nt, synthetic construct
  source 1..23: mol_type = other RNA
tgtccctggggtggaggacgggg

SEQ ID NO: 102374 - RNA, 23 nt, synthetic construct
  source 1..23: mol_type = other RNA
ttgccgtccctgggctggaggag

SEQ ID NO: 102375 - RNA, 23 nt, synthetic construct
  source 1..23: mol_type = other RNA
tctgggggtgtgtgggtggtccc

SEQ ID NO: 102376 - RNA, 23 nt, synthetic construct
  source 1..23: mol_type = other RNA
tatgtgggtggtgcccaagatgc

SEQ ID NO: 102377 - RNA, 23 nt, synthetic construct
  source 1..23: mol_type = other RNA
tggaagtcaccgtggaaggctct

SEQ ID NO: 102378 - RNA, 23 nt, synthetic construct
  source 1..23: mol_type = other RNA
tgggaagtcaccgtggaaggctc

SEQ ID NO: 102379 - RNA, 23 nt, synthetic construct
  source 1..23: mol_type = other RNA
tggtcagctttgtgaggatccag

SEQ ID NO: 102380 - RNA, 23 nt, synthetic construct
  source 1..23: mol_type = other RNA
tgtccctggggtggaggacgggg

SEQ ID NO: 102381 - RNA, 23 nt, synthetic construct
  source 1..23: mol_type = other RNA
ttgccgtccctgggctggaggag

SEQ ID NO: 102382 - RNA, 23 nt, synthetic construct
  source 1..23: mol_type = other RNA
ttgggggtgtgggtggtccccgg

SEQ ID NO: 102383 - RNA, 23 nt, synthetic construct
  source 1..23: mol_type = other RNA
tctgggggtgtgtgggtggtccc

SEQ ID NO: 102384 - RNA, 23 nt, synthetic construct
  source 1..23: mol_type = other RNA
tgtccctggggtggaggacgggg

SEQ ID NO: 102385 - RNA, 23 nt, synthetic construct
  source 1..23: mol_type = other RNA
tgtccctggggtggaggacgggg

SEQ ID NO: 102386 - RNA, 23 nt, synthetic construct
  source 1..23: mol_type = other RNA
ttgccgtccctgggctggaggag

SEQ ID NO: 102387 - RNA, 23 nt, synthetic construct
  source 1..23: mol_type = other RNA
tcactggggtgatgggtgttgtc

SEQ ID NO: 102388 - RNA, 23 nt, synthetic construct
  source 1..23: mol_type = other RNA
tggtggacatgggtgtggtggtc

SEQ ID NO: 102389 - RNA, 23 nt, synthetic construct
  source 1..23: mol_type = other RNA
ttggtggacatgggtgtggtggt

SEQ ID NO: 102390 - RNA, 23 nt, synthetic construct
  source 1..23: mol_type = other RNA
ttggggaggtgggacaggcgccc

SEQ ID NO: 102391 - RNA, 23 nt, synthetic construct
  source 1..23: mol_type = other RNA
tcctccttcccatgcaccatggt

SEQ ID NO: 102392 - RNA, 23 nt, synthetic construct
  source 1..23: mol_type = other RNA
tggtgggtgggcaggtgaggtcg

SEQ ID NO: 102393 - RNA, 23 nt, synthetic construct
  source 1..23: mol_type = other RNA
tcaggctctgggggcaggtggtt

SEQ ID NO: 102394 - RNA, 23 nt, synthetic construct
  source 1..23: mol_type = other RNA
ttctgcagcggaaggtgggacag

SEQ ID NO: 102395 - RNA, 23 nt, synthetic construct
  source 1..23: mol_type = other RNA
tggcccctcacccttctggggcc

SEQ ID NO: 102396 - RNA, 23 nt, synthetic construct
  source 1..23: mol_type = other RNA
tcgtgcaccacctctccaggagc

SEQ ID NO: 102397 - RNA, 23 nt, synthetic construct
  source 1..23: mol_type = other RNA
tgcgtcacagggcaggggcttgc

SEQ ID NO: 102398 - RNA, 23 nt, synthetic construct
  source 1..23: mol_type = other RNA
tgggcacctccagttccgcggct

SEQ ID NO: 102399 - RNA, 23 nt, synthetic construct
  source 1..23: mol_type = other RNA
taaaaactgtccaaatgccctgc

SEQ ID NO: 102400 - RNA, 23 nt, synthetic construct
  source 1..23: mol_type = other RNA
tcccagtgacatcagggaggggc

SEQ ID NO: 102401 - RNA, 23 nt, synthetic construct
  source 1..23: mol_type = other RNA
taggttgccattgttgttggggc

SEQ ID NO: 102402 - RNA, 23 nt, synthetic construct
  source 1..23: mol_type = other RNA
tgttgtggctggagttccaggac

SEQ ID NO: 102403 - RNA, 23 nt, synthetic construct
  source 1..23: mol_type = other RNA
tttgtggctggagttccaggaca

SEQ ID NO: 102404 - RNA, 23 nt, synthetic construct
  source 1..23: mol_type = other RNA
tagtcactgtgttgctggtggct

SEQ ID NO: 102405 - RNA, 23 nt, synthetic construct
  source 1..23: mol_type = other RNA
tcagaggagggagtcactgtgtt

SEQ ID NO: 102406 - RNA, 23 nt, synthetic construct
  source 1..23: mol_type = other RNA
tcagaggagggagtcactgtgct

SEQ ID NO: 102407 - RNA, 23 nt, synthetic construct
  source 1..23: mol_type = other RNA
tcagaggagggagtcactgtgct

SEQ ID NO: 102408 - RNA, 23 nt, synthetic construct
  source 1..23: mol_type = other RNA
tgagctgttcctggggtggaaga

SEQ ID NO: 102409 - RNA, 23 nt, synthetic construct
  source 1..23: mol_type = other RNA
tcagaggagggagtcactgtgct

SEQ ID NO: 102410 - RNA, 23 nt, synthetic construct
  source 1..23: mol_type = other RNA
tcccacggtggacgagctgggaa

SEQ ID NO: 102411 - RNA, 23 nt, synthetic construct
  source 1..23: mol_type = other RNA
tccagtgggtctcagggtggtga

SEQ ID NO: 102412 - RNA, 23 nt, synthetic construct
  source 1..23: mol_type = other RNA
tgatggactcctgccctggcggg

SEQ ID NO: 102413 - RNA, 23 nt, synthetic construct
  source 1..23: mol_type = other RNA
tggtgaagctgctgtcggcacat

SEQ ID NO: 102414 - RNA, 23 nt, synthetic construct
  source 1..23: mol_type = other RNA
tctgttcctggggtggaagaggg

SEQ ID NO: 102415 - RNA, 23 nt, synthetic construct
  source 1..23: mol_type = other RNA
tgatcagtgatgggggagtacca

SEQ ID NO: 102416 - RNA, 23 nt, synthetic construct
  source 1..23: mol_type = other RNA
tgtagtggttgtccaggtagagg

SEQ ID NO: 102417 - RNA, 23 nt, synthetic construct
  source 1..23: mol_type = other RNA
tcagccctggtgccacaggatgg

SEQ ID NO: 102418 - RNA, 23 nt, synthetic construct
  source 1..23: mol_type = other RNA
tgccggccggcaagggcagcggg

SEQ ID NO: 102419 - RNA, 23 nt, synthetic construct
  source 1..23: mol_type = other RNA
tcattgtcgtctctgtcctgggc

SEQ ID NO: 102420 - RNA, 23 nt, synthetic construct
  source 1..23: mol_type = other RNA
tggctttggagctggtgactgtg

SEQ ID NO: 102421 - RNA, 23 nt, synthetic construct
  source 1..23: mol_type = other RNA
tggctttggagctggtgactgtg

SEQ ID NO: 102422 - RNA, 23 nt, synthetic construct
  source 1..23: mol_type = other RNA
tggctttggagctggtgactgtg

SEQ ID NO: 102423 - RNA, 23 nt, synthetic construct
  source 1..23: mol_type = other RNA
tggctttggagctggtgactgtg

SEQ ID NO: 102424 - RNA, 23 nt, synthetic construct
  source 1..23: mol_type = other RNA
tacactcctggtgctgcatgttg

SEQ ID NO: 102425 - RNA, 23 nt, synthetic construct
  source 1..23: mol_type = other RNA
tcccggccctctcgccaccgcct

SEQ ID NO: 102426 - RNA, 23 nt, synthetic construct
  source 1..23: mol_type = other RNA
tttgtcgtagcagccacactggg

SEQ ID NO: 102427 - RNA, 23 nt, synthetic construct
  source 1..23: mol_type = other RNA
ttgtcgtctctgtcctgggcgtg

SEQ ID NO: 102428 - RNA, 23 nt, synthetic construct
  source 1..23: mol_type = other RNA
ttttgggagggggagctgttctc

SEQ ID NO: 102429 - RNA, 23 nt, synthetic construct
  source 1..23: mol_type = other RNA
tgctttggagctggtgactgtgg

SEQ ID NO: 102430 - RNA, 23 nt, synthetic construct
  source 1..23: mol_type = other RNA
ttgtggtggctgtgcttctcagt

SEQ ID NO: 102431 - RNA, 23 nt, synthetic construct
  source 1..23: mol_type = other RNA
tgggtggtgcccaagatgcccga

SEQ ID NO: 102432 - RNA, 23 nt, synthetic construct
  source 1..23: mol_type = other RNA
tgctttggagctggtgactgtgg

SEQ ID NO: 102433 - RNA, 23 nt, synthetic construct
  source 1..23: mol_type = other RNA
ttgtggtggctgtgcttctcagt

SEQ ID NO: 102434 - RNA, 23 nt, synthetic construct
  source 1..23: mol_type = other RNA
tcgtgccgtccctgggctggagg

SEQ ID NO: 102435 - RNA, 23 nt, synthetic construct
  source 1..23: mol_type = other RNA
ttttgggagggggagctgttccc

SEQ ID NO: 102436 - RNA, 23 nt, synthetic construct
  source 1..23: mol_type = other RNA
tgtggattgtggacatggtggcc

SEQ ID NO: 102437 - RNA, 23 nt, synthetic construct
  source 1..23: mol_type = other RNA
ttgtggtggctgtgcttctcagt

SEQ ID NO: 102438 - RNA, 23 nt, synthetic construct
  source 1..23: mol_type = other RNA
tagaggggatggctgtaacgctg

SEQ ID NO: 102439 - RNA, 23 nt, synthetic construct
  source 1..23: mol_type = other RNA
tgggtggtgcccaagatgcccga

SEQ ID NO: 102440 - RNA, 23 nt, synthetic construct
  source 1..23: mol_type = other RNA
tgctttggagctggtgactgtgg

SEQ ID NO: 102441 - RNA, 23 nt, synthetic construct
  source 1..23: mol_type = other RNA
ttgtggtggctgtgcttctcagt

SEQ ID NO: 102442 - RNA, 23 nt, synthetic construct
  source 1..23: mol_type = other RNA
tcgtgccgtccctgggctggagg

SEQ ID NO: 102443 - RNA, 23 nt, synthetic construct
  source 1..23: mol_type = other RNA
ttttgggagggggagctgttccc

SEQ ID NO: 102444 - RNA, 23 nt, synthetic construct
  source 1..23: mol_type = other RNA
tgtggattgtggacatggtggcc

SEQ ID NO: 102445 - RNA, 23 nt, synthetic construct
  source 1..23: mol_type = other RNA
tggtggacgtggaactggtggcc

SEQ ID NO: 102446 - RNA, 23 nt, synthetic construct
  source 1..23: mol_type = other RNA
tgctttggagctggtgactgtgg

SEQ ID NO: 102447 - RNA, 23 nt, synthetic construct
  source 1..23: mol_type = other RNA
ttgtggtggctgtgcttctcagt

SEQ ID NO: 102448 - RNA, 23 nt, synthetic construct
  source 1..23: mol_type = other RNA
tgtggattgtggacatggtggac

SEQ ID NO: 102449 - RNA, 23 nt, synthetic construct
  source 1..23: mol_type = other RNA
tactttgggggtgtgagctgttc

SEQ ID NO: 102450 - RNA, 23 nt, synthetic construct
  source 1..23: mol_type = other RNA
tcttggccattgaaggtgacgct

SEQ ID NO: 102451 - RNA, 23 nt, synthetic construct
  source 1..23: mol_type = other RNA
tgagcggctgtggtgggcatggg

SEQ ID NO: 102452 - RNA, 23 nt, synthetic construct
  source 1..23: mol_type = other RNA
tacacatgtggcagggaagggcg

SEQ ID NO: 102453 - RNA, 23 nt, synthetic construct
  source 1..23: mol_type = other RNA
tccacccggccctctcgccaccg

SEQ ID NO: 102454 - RNA, 23 nt, synthetic construct
  source 1..23: mol_type = other RNA
ttacctggtaccctctctgcctc

SEQ ID NO: 102455 - RNA, 23 nt, synthetic construct
  source 1..23: mol_type = other RNA
tacggggacgggcagggagggag

SEQ ID NO: 102456 - RNA, 23 nt, synthetic construct
  source 1..23: mol_type = other RNA
tgaacaaggggcaggtgtccgga

SEQ ID NO: 102457 - RNA, 23 nt, synthetic construct
  source 1..23: mol_type = other RNA
tcgggtcttgctgggtgtggccg

SEQ ID NO: 102458 - RNA, 23 nt, synthetic construct
  source 1..23: mol_type = other RNA
tcgggtcttgctgggtgtggccg

SEQ ID NO: 102459 - RNA, 23 nt, synthetic construct
  source 1..23: mol_type = other RNA
tcgggtcttgctgggtgtggctg

SEQ ID NO: 102460 - RNA, 23 nt, synthetic construct
  source 1..23: mol_type = other RNA
tccctggttgtggtggccgtggt

SEQ ID NO: 102461 - RNA, 23 nt, synthetic construct
  source 1..23: mol_type = other RNA
tcgggtcttgctgggtgtggccg

SEQ ID NO: 102462 - RNA, 23 nt, synthetic construct
  source 1..23: mol_type = other RNA
tacagggtggaggaggggatggg

SEQ ID NO: 102463 - RNA, 23 nt, synthetic construct
  source 1..23: mol_type = other RNA
tcttgctgggtgtggccgtggct

SEQ ID NO: 102464 - RNA, 23 nt, synthetic construct
  source 1..23: mol_type = other RNA
tcttgctgggtgtggccgtggcc

SEQ ID NO: 102465 - RNA, 23 nt, synthetic construct
  source 1..23: mol_type = other RNA
tgtagtggctgctgtggtctgct

SEQ ID NO: 102466 - RNA, 23 nt, synthetic construct
  source 1..23: mol_type = other RNA
tcttgctgggtgtggccgtggcc

SEQ ID NO: 102467 - RNA, 23 nt, synthetic construct
  source 1..23: mol_type = other RNA
taggggagggcgaggacagcggg

SEQ ID NO: 102468 - RNA, 23 nt, synthetic construct
  source 1..23: mol_type = other RNA
tgtagtggctgctgtggtcagct

SEQ ID NO: 102469 - RNA, 23 nt, synthetic construct
  source 1..23: mol_type = other RNA
tgaggagggagtggctctggagc

SEQ ID NO: 102470 - RNA, 23 nt, synthetic construct
  source 1..23: mol_type = other RNA
tcagggaccgcccgtgtgtggtg

SEQ ID NO: 102471 - RNA, 23 nt, synthetic construct
  source 1..23: mol_type = other RNA
tgtagtggctgctgtggtcagct

SEQ ID NO: 102472 - RNA, 23 nt, synthetic construct
  source 1..23: mol_type = other RNA
tgagccctggtcagccccgggct

SEQ ID NO: 102473 - RNA, 23 nt, synthetic construct
  source 1..23: mol_type = other RNA
tccagccactctgaccaggcaca

SEQ ID NO: 102474 - RNA, 23 nt, synthetic construct
  source 1..23: mol_type = other RNA
tccagccactctgaccaggcaca

SEQ ID NO: 102475 - RNA, 23 nt, synthetic construct
  source 1..23: mol_type = other RNA
tccagccactctgaccaggcaca

SEQ ID NO: 102476 - RNA, 23 nt, synthetic construct
  source 1..23: mol_type = other RNA
tccagccactctgaccaggcaca

SEQ ID NO: 102477 - RNA, 23 nt, synthetic construct
  source 1..23: mol_type = other RNA
tgagctgcgcgcgctgggggttg

SEQ ID NO: 102478 - RNA, 23 nt, synthetic construct
  source 1..23: mol_type = other RNA
tggtggagatgtgggccccgccc

SEQ ID NO: 102479 - RNA, 23 nt, synthetic construct
  source 1..23: mol_type = other RNA
tcaccacgatgaagaagctcgag

SEQ ID NO: 102480 - RNA, 23 nt, synthetic construct
  source 1..23: mol_type = other RNA
tagccctggtcagccccgggcta

SEQ ID NO: 102481 - RNA, 23 nt, synthetic construct
  source 1..23: mol_type = other RNA
ttctggttgtgggtgtggtggtt

SEQ ID NO: 102482 - RNA, 23 nt, synthetic construct
  source 1..23: mol_type = other RNA
tccagtggccacagttgtggtgg

SEQ ID NO: 102483 - RNA, 23 nt, synthetic construct
  source 1..23: mol_type = other RNA
taggtggccgtggtgtggcccgg

SEQ ID NO: 102484 - RNA, 23 nt, synthetic construct
  source 1..23: mol_type = other RNA
ttctggttgtgggtgtggtggtt

SEQ ID NO: 102485 - RNA, 23 nt, synthetic construct
  source 1..23: mol_type = other RNA
tccagtggccacagttgtggtgg

SEQ ID NO: 102486 - RNA, 23 nt, synthetic construct
  source 1..23: mol_type = other RNA
tggagggagtcactgtgctgctg

SEQ ID NO: 102487 - RNA, 23 nt, synthetic construct
  source 1..23: mol_type = other RNA
ttggtctgctctgtgaggatcca

SEQ ID NO: 102488 - RNA, 23 nt, synthetic construct
  source 1..23: mol_type = other RNA
ttctggttgtgggtgtggtggtt

SEQ ID NO: 102489 - RNA, 23 nt, synthetic construct
  source 1..23: mol_type = other RNA
tccagtggccacagttgtggtgg

SEQ ID NO: 102490 - RNA, 23 nt, synthetic construct
  source 1..23: mol_type = other RNA
tggagggagtcactgtgctgctg

SEQ ID NO: 102491 - RNA, 23 nt, synthetic construct
  source 1..23: mol_type = other RNA
tccagtggccacagttgtggtgg

SEQ ID NO: 102492 - RNA, 23 nt, synthetic construct
  source 1..23: mol_type = other RNA
tggagggagtcactgtgctgctg

SEQ ID NO: 102493 - RNA, 23 nt, synthetic construct
  source 1..23: mol_type = other RNA
taggtggccgtggtgtggcccgg

SEQ ID NO: 102494 - RNA, 23 nt, synthetic construct
  source 1..23: mol_type = other RNA
tccagtggccacagttgtggtgg

SEQ ID NO: 102495 - RNA, 23 nt, synthetic construct
  source 1..23: mol_type = other RNA
tggactccaccctcagcctcaca

SEQ ID NO: 102496 - RNA, 23 nt, synthetic construct
  source 1..23: mol_type = other RNA
tgacccgcctctcctggcagcag

SEQ ID NO: 102497 - RNA, 23 nt, synthetic construct
  source 1..23: mol_type = other RNA
tacagcagtggcctcctgggccg

SEQ ID NO: 102498 - RNA, 23 nt, synthetic construct
  source 1..23: mol_type = other RNA
tacccacggggtgggcagcagga

SEQ ID NO: 102499 - RNA, 23 nt, synthetic construct
  source 1..23: mol_type = other RNA
tgctttgggatgctgacccctct

SEQ ID NO: 102500 - RNA, 23 nt, synthetic construct
  source 1..23: mol_type = other RNA
tctcctcccgctgcccattgatg

SEQ ID NO: 102501 - RNA, 23 nt, synthetic construct
  source 1..23: mol_type = other RNA
taccaggaggccagtgcggctgt

SEQ ID NO: 102502 - RNA, 23 nt, synthetic construct
  source 1..23: mol_type = other RNA
tatgctgaccttgatgtagtccc

SEQ ID NO: 102503 - RNA, 23 nt, synthetic construct
  source 1..23: mol_type = other RNA
tgctgggtgggcacttcgggtag

SEQ ID NO: 102504 - RNA, 23 nt, synthetic construct
  source 1..23: mol_type = other RNA
tgagctggacccagtctgcgagg

SEQ ID NO: 102505 - RNA, 23 nt, synthetic construct
  source 1..23: mol_type = other RNA
tggtgtggctgtggacatggtgg

SEQ ID NO: 102506 - RNA, 23 nt, synthetic construct
  source 1..23: mol_type = other RNA
tgggtgtggtggttgtgctgatc

SEQ ID NO: 102507 - RNA, 23 nt, synthetic construct
  source 1..23: mol_type = other RNA
tccatggtcaccaccgtggttat

SEQ ID NO: 102508 - RNA, 23 nt, synthetic construct
  source 1..23: mol_type = other RNA
tttcctgcagaccaggccaaagt

SEQ ID NO: 102509 - RNA, 23 nt, synthetic construct
  source 1..23: mol_type = other RNA
tcagttgcctgggtggaggaggc

SEQ ID NO: 102510 - RNA, 23 nt, synthetic construct
  source 1..23: mol_type = other RNA
tggtgtggctgtggacatggtgg

SEQ ID NO: 102511 - RNA, 23 nt, synthetic construct
  source 1..23: mol_type = other RNA
tgggtgtggtggttgtgctgatc

SEQ ID NO: 102512 - RNA, 23 nt, synthetic construct
  source 1..23: mol_type = other RNA
tccatggtcaccaccgtggttat

SEQ ID NO: 102513 - RNA, 23 nt, synthetic construct
  source 1..23: mol_type = other RNA
tttcctgcagaccaggccaaagt

SEQ ID NO: 102514 - RNA, 23 nt, synthetic construct
  source 1..23: mol_type = other RNA
tggtgtggctgtggacatggtgg

SEQ ID NO: 102515 - RNA, 23 nt, synthetic construct
  source 1..23: mol_type = other RNA
tgggtgtggtggttgtgctgatc

SEQ ID NO: 102516 - RNA, 23 nt, synthetic construct
  source 1..23: mol_type = other RNA
tttcctgcagaccaggccaaagt

SEQ ID NO: 102517 - RNA, 23 nt, synthetic construct
  source 1..23: mol_type = other RNA
tcagttgcctgggtggaggaggc

SEQ ID NO: 102518 - RNA, 23 nt, synthetic construct
  source 1..23: mol_type = other RNA
tggtgtggctgtggacatggtgg

SEQ ID NO: 102519 - RNA, 23 nt, synthetic construct
  source 1..23: mol_type = other RNA
tgggtgtggtggttgtgctgatc

SEQ ID NO: 102520 - RNA, 23 nt, synthetic construct
  source 1..23: mol_type = other RNA
tttcctgcagaccaggccaaagt

SEQ ID NO: 102521 - RNA, 23 nt, synthetic construct
  source 1..23: mol_type = other RNA
tcagttgcctgggtggaggaggc

SEQ ID NO: 102522 - RNA, 23 nt, synthetic construct
  source 1..23: mol_type = other RNA
tggtgtggctgtggacatggtgg

SEQ ID NO: 102523 - RNA, 23 nt, synthetic construct
  source 1..23: mol_type = other RNA
tgggtgtggtggttgtgctgatc

SEQ ID NO: 102524 - RNA, 23 nt, synthetic construct
  source 1..23: mol_type = other RNA
tgtagaggaggtgtggattgtgg

SEQ ID NO: 102525 - RNA, 23 nt, synthetic construct
  source 1..23: mol_type = other RNA
tcctgcagctggacacatctggg

SEQ ID NO: 102526 - RNA, 23 nt, synthetic construct
  source 1..23: mol_type = other RNA
ttggcagtggggggtgtgccagt

SEQ ID NO: 102527 - RNA, 23 nt, synthetic construct
  source 1..23: mol_type = other RNA
tttaccctgcagcaggcatggac

SEQ ID NO: 102528 - RNA, 23 nt, synthetic construct
  source 1..23: mol_type = other RNA
tgcattctcccagctcggctcca

SEQ ID NO: 102529 - RNA, 23 nt, synthetic construct
  source 1..23: mol_type = other RNA
tgcggcaggcggcgaaggtgggg

SEQ ID NO: 102530 - RNA, 23 nt, synthetic construct
  source 1..23: mol_type = other RNA
taggtgtggtggcggtggtggtc

SEQ ID NO: 102531 - RNA, 23 nt, synthetic construct
  source 1..23: mol_type = other RNA
ttgggaagtcaccgtggaaggct

SEQ ID NO: 102532 - RNA, 23 nt, synthetic construct
  source 1..23: mol_type = other RNA
taggtgtggtggcggtggtggtc

SEQ ID NO: 102533 - RNA, 23 nt, synthetic construct
  source 1..23: mol_type = other RNA
tatttggtggctgtgcttgtcag

SEQ ID NO: 102534 - RNA, 23 nt, synthetic construct
  source 1..23: mol_type = other RNA
taggtgtggtggcggtggtggtc

SEQ ID NO: 102535 - RNA, 23 nt, synthetic construct
  source 1..23: mol_type = other RNA
ttgggaagtcaccgtggaaggct

SEQ ID NO: 102536 - RNA, 23 nt, synthetic construct
  source 1..23: mol_type = other RNA
taggtgtggtggcggtggtggtc

SEQ ID NO: 102537 - RNA, 23 nt, synthetic construct
  source 1..23: mol_type = other RNA
tatttggtggctgtgcttgtcag

SEQ ID NO: 102538 - RNA, 23 nt, synthetic construct
  source 1..23: mol_type = other RNA
tagaagcagccctccgccatccc

SEQ ID NO: 102539 - RNA, 23 nt, synthetic construct
  source 1..23: mol_type = other RNA
ttcccacctccggttcctgcagg

SEQ ID NO: 102540 - RNA, 23 nt, synthetic construct
  source 1..23: mol_type = other RNA
tgtgtggggactgctggggggca

SEQ ID NO: 102541 - RNA, 23 nt, synthetic construct
  source 1..23: mol_type = other RNA
tgtgtggggactgctgggggaca

SEQ ID NO: 102542 - RNA, 23 nt, synthetic construct
  source 1..23: mol_type = other RNA
tgtgtggggactgctggggggca

SEQ ID NO: 102543 - RNA, 23 nt, synthetic construct
  source 1..23: mol_type = other RNA
tgtgtggggactgctgggggaca

SEQ ID NO: 102544 - RNA, 23 nt, synthetic construct
  source 1..23: mol_type = other RNA
tcgggtgtggtggccgtgctggt

SEQ ID NO: 102545 - RNA, 23 nt, synthetic construct
  source 1..23: mol_type = other RNA
tacgtggtccacagggtggagga

SEQ ID NO: 102546 - RNA, 23 nt, synthetic construct
  source 1..23: mol_type = other RNA
tgcacacaggcaggctctggggg

SEQ ID NO: 102547 - RNA, 23 nt, synthetic construct
  source 1..23: mol_type = other RNA
tgaaggccgggaggccgttgaag

SEQ ID NO: 102548 - RNA, 23 nt, synthetic construct
  source 1..23: mol_type = other RNA
tgcagagctgcgcgcgctggggg

SEQ ID NO: 102549 - RNA, 23 nt, synthetic construct
  source 1..23: mol_type = other RNA
tcccgccctgcacagagcaggtg

SEQ ID NO: 102550 - RNA, 23 nt, synthetic construct
  source 1..23: mol_type = other RNA
taggctcccaggcagcttagctt

SEQ ID NO: 102551 - RNA, 23 nt, synthetic construct
  source 1..23: mol_type = other RNA
tgctgttgctgcagtccaggtac

SEQ ID NO: 102552 - RNA, 23 nt, synthetic construct
  source 1..23: mol_type = other RNA
taggtcccctcttggaggatcag

SEQ ID NO: 102553 - RNA, 23 nt, synthetic construct
  source 1..23: mol_type = other RNA
tacagagcgggggactctgttgg

SEQ ID NO: 102554 - RNA, 23 nt, synthetic construct
  source 1..23: mol_type = other RNA
ttgagctggacccagtctgcgag

SEQ ID NO: 102555 - RNA, 23 nt, synthetic construct
  source 1..23: mol_type = other RNA
tctgtggagcctgcaggcgtcgt

SEQ ID NO: 102556 - RNA, 23 nt, synthetic construct
  source 1..23: mol_type = other RNA
tagcgtgggtggctgtgaggggc

SEQ ID NO: 102557 - RNA, 23 nt, synthetic construct
  source 1..23: mol_type = other RNA
tggagctgttctcagggtggagg

SEQ ID NO: 102558 - RNA, 23 nt, synthetic construct
  source 1..23: mol_type = other RNA
tgggtgtggtggccgtggtggtc

SEQ ID NO: 102559 - RNA, 23 nt, synthetic construct
  source 1..23: mol_type = other RNA
tgtggtggctgtgcttctcagtg

SEQ ID NO: 102560 - RNA, 23 nt, synthetic construct
  source 1..23: mol_type = other RNA
tccaggtggtgcccagggaggaa

SEQ ID NO: 102561 - RNA, 23 nt, synthetic construct
  source 1..23: mol_type = other RNA
tgagggtgtggctgtggacatgg

SEQ ID NO: 102562 - RNA, 23 nt, synthetic construct
  source 1..23: mol_type = other RNA
ttctggagtggaggagggtgtgg

SEQ ID NO: 102563 - RNA, 23 nt, synthetic construct
  source 1..23: mol_type = other RNA
tgccacagagccggtggccccag

SEQ ID NO: 102564 - RNA, 23 nt, synthetic construct
  source 1..23: mol_type = other RNA
tttgtgctgatccacactggagg

SEQ ID NO: 102565 - RNA, 23 nt, synthetic construct
  source 1..23: mol_type = other RNA
tctggttgtgggtgtggtggttg

SEQ ID NO: 102566 - RNA, 23 nt, synthetic construct
  source 1..23: mol_type = other RNA
tctgtgttgctggtggctgcagg

SEQ ID NO: 102567 - RNA, 23 nt, synthetic construct
  source 1..23: mol_type = other RNA
tggggtgtgtgggtggtccctag

SEQ ID NO: 102568 - RNA, 23 nt, synthetic construct
  source 1..23: mol_type = other RNA
tagtcaccgtggaaggctctgtg

SEQ ID NO: 102569 - RNA, 23 nt, synthetic construct
  source 1..23: mol_type = other RNA
tgcagaccaggccaaagtccagg

SEQ ID NO: 102570 - RNA, 23 nt, synthetic construct
  source 1..23: mol_type = other RNA
tgtggtggctgtgcttctcagtg

SEQ ID NO: 102571 - RNA, 23 nt, synthetic construct
  source 1..23: mol_type = other RNA
tccaggtggtgcccagggaggag

SEQ ID NO: 102572 - RNA, 23 nt, synthetic construct
  source 1..23: mol_type = other RNA
tgagggtgtggctgtggacatgg

SEQ ID NO: 102573 - RNA, 23 nt, synthetic construct
  source 1..23: mol_type = other RNA
ttctggagtggaggagggtgtgg

SEQ ID NO: 102574 - RNA, 23 nt, synthetic construct
  source 1..23: mol_type = other RNA
tgccacagagccggtggccccgg

SEQ ID NO: 102575 - RNA, 23 nt, synthetic construct
  source 1..23: mol_type = other RNA
tttgtgctgatccacactggaag

SEQ ID NO: 102576 - RNA, 23 nt, synthetic construct
  source 1..23: mol_type = other RNA
tctggttgtgggtgtggtggttg

SEQ ID NO: 102577 - RNA, 23 nt, synthetic construct
  source 1..23: mol_type = other RNA
tggggtgtgtgggtggtccctag

SEQ ID NO: 102578 - RNA, 23 nt, synthetic construct
  source 1..23: mol_type = other RNA
tgcagaccaggccaaagtccagg

SEQ ID NO: 102579 - RNA, 23 nt, synthetic construct
  source 1..23: mol_type = other RNA
tttggactggaggaggaagtggc

SEQ ID NO: 102580 - RNA, 23 nt, synthetic construct
  source 1..23: mol_type = other RNA
ttggtggctgtgcttgtcagcac

SEQ ID NO: 102581 - RNA, 23 nt, synthetic construct
  source 1..23: mol_type = other RNA
tagggtgaaggaggggatgggtg

SEQ ID NO: 102582 - RNA, 23 nt, synthetic construct
  source 1..23: mol_type = other RNA
ttggattgtggacatggtggcca

SEQ ID NO: 102583 - RNA, 23 nt, synthetic construct
  source 1..23: mol_type = other RNA
tggtcagcactgtggaggtgtgg

SEQ ID NO: 102584 - RNA, 23 nt, synthetic construct
  source 1..23: mol_type = other RNA
tggggccagtggctgcagttgta

SEQ ID NO: 102585 - RNA, 23 nt, synthetic construct
  source 1..23: mol_type = other RNA
tgttgcccgggtggaggaggcgg

SEQ ID NO: 102586 - RNA, 23 nt, synthetic construct
  source 1..23: mol_type = other RNA
tgtggtggctgtgcttctcagtg

SEQ ID NO: 102587 - RNA, 23 nt, synthetic construct
  source 1..23: mol_type = other RNA
tgagggtgtggctgtggacatgg

SEQ ID NO: 102588 - RNA, 23 nt, synthetic construct
  source 1..23: mol_type = other RNA
tgccacagagccggtggccctgg

SEQ ID NO: 102589 - RNA, 23 nt, synthetic construct
  source 1..23: mol_type = other RNA
tttgtgctgatccacactggagg

SEQ ID NO: 102590 - RNA, 23 nt, synthetic construct
  source 1..23: mol_type = other RNA
tctggttgtgggtgtggtggttg

SEQ ID NO: 102591 - RNA, 23 nt, synthetic construct
  source 1..23: mol_type = other RNA
tggggtgtgtgggtggtccctag

SEQ ID NO: 102592 - RNA, 23 nt, synthetic construct
  source 1..23: mol_type = other RNA
tagtcaccgtggaaggctctgtg

SEQ ID NO: 102593 - RNA, 23 nt, synthetic construct
  source 1..23: mol_type = other RNA
tgcagaccaggccaaagtccagg

SEQ ID NO: 102594 - RNA, 23 nt, synthetic construct
  source 1..23: mol_type = other RNA
tgtggtggctgtgcttctcagtg

SEQ ID NO: 102595 - RNA, 23 nt, synthetic construct
  source 1..23: mol_type = other RNA
tccaggtggtgcccagggaggag

SEQ ID NO: 102596 - RNA, 23 nt, synthetic construct
  source 1..23: mol_type = other RNA
tgagggtgtggctgtggacatgg

SEQ ID NO: 102597 - RNA, 23 nt, synthetic construct
  source 1..23: mol_type = other RNA
ttctggagtggaggagggtgtgg

SEQ ID NO: 102598 - RNA, 23 nt, synthetic construct
  source 1..23: mol_type = other RNA
tgccacagagccggtggccctgg

SEQ ID NO: 102599 - RNA, 23 nt, synthetic construct
  source 1..23: mol_type = other RNA
tttgtgctgatccacactggagg

SEQ ID NO: 102600 - RNA, 23 nt, synthetic construct
  source 1..23: mol_type = other RNA
tctggttgtgggtgtggtggttg

SEQ ID NO: 102601 - RNA, 23 nt, synthetic construct
  source 1..23: mol_type = other RNA
tggggtgtgtgggtggtccctag

SEQ ID NO: 102602 - RNA, 23 nt, synthetic construct
  source 1..23: mol_type = other RNA
tgcagaccaggccaaagtccagg

SEQ ID NO: 102603 - RNA, 23 nt, synthetic construct
  source 1..23: mol_type = other RNA
tggtgtggtggccgggctggtca

SEQ ID NO: 102604 - RNA, 23 nt, synthetic construct
  source 1..23: mol_type = other RNA
tttggactggaggaggaagtggc

SEQ ID NO: 102605 - RNA, 23 nt, synthetic construct
  source 1..23: mol_type = other RNA
ttggtggctgtgcttgtcagcac

SEQ ID NO: 102606 - RNA, 23 nt, synthetic construct
  source 1..23: mol_type = other RNA
ttcccaagggtggaggaggggat

SEQ ID NO: 102607 - RNA, 23 nt, synthetic construct
  source 1..23: mol_type = other RNA
ttggattgtggacatggtggcca

SEQ ID NO: 102608 - RNA, 23 nt, synthetic construct
  source 1..23: mol_type = other RNA
tggtcagcactgtggaggtgtgg

SEQ ID NO: 102609 - RNA, 23 nt, synthetic construct
  source 1..23: mol_type = other RNA
tggggccagtggctgcagttgta

SEQ ID NO: 102610 - RNA, 23 nt, synthetic construct
  source 1..23: mol_type = other RNA
tgtggtggctgtgcttctcagtg

SEQ ID NO: 102611 - RNA, 23 nt, synthetic construct
  source 1..23: mol_type = other RNA
tccaggtggtgcccagggaggag

SEQ ID NO: 102612 - RNA, 23 nt, synthetic construct
  source 1..23: mol_type = other RNA
tgagggtgtggctgtggacatgg

SEQ ID NO: 102613 - RNA, 23 nt, synthetic construct
  source 1..23: mol_type = other RNA
ttctggagtggaggagggtgtgg

SEQ ID NO: 102614 - RNA, 23 nt, synthetic construct
  source 1..23: mol_type = other RNA
tgccacagagccggtggccccgg

SEQ ID NO: 102615 - RNA, 23 nt, synthetic construct
  source 1..23: mol_type = other RNA
tttgtgctgatccacactggagg

SEQ ID NO: 102616 - RNA, 23 nt, synthetic construct
  source 1..23: mol_type = other RNA
tctggttgtgggtgtggtggttg

SEQ ID NO: 102617 - RNA, 23 nt, synthetic construct
  source 1..23: mol_type = other RNA
tttggactggaggaggaagtggc

SEQ ID NO: 102618 - RNA, 23 nt, synthetic construct
  source 1..23: mol_type = other RNA
tgtggtccacagggtggaggagg

SEQ ID NO: 102619 - RNA, 23 nt, synthetic construct
  source 1..23: mol_type = other RNA
tcgtggtccacagggtggaggag

SEQ ID NO: 102620 - RNA, 23 nt, synthetic construct
  source 1..23: mol_type = other RNA
ttggattgtggacatggtggaca

SEQ ID NO: 102621 - RNA, 23 nt, synthetic construct
  source 1..23: mol_type = other RNA
tggtcagcactgtggaggtgtgg

SEQ ID NO: 102622 - RNA, 23 nt, synthetic construct
  source 1..23: mol_type = other RNA
tagaaaaactgtccaaatgccct

SEQ ID NO: 102623 - RNA, 23 nt, synthetic construct
  source 1..23: mol_type = other RNA
tgccacaggctttgggtccagca

SEQ ID NO: 102624 - RNA, 23 nt, synthetic construct
  source 1..23: mol_type = other RNA
tccccacatgctgcagatgcact

SEQ ID NO: 102625 - RNA, 23 nt, synthetic construct
  source 1..23: mol_type = other RNA
tatggtgacagtgaggacgatat

SEQ ID NO: 102626 - RNA, 23 nt, synthetic construct
  source 1..23: mol_type = other RNA
tagttgcaggtggcaggctgtat

SEQ ID NO: 102627 - RNA, 23 nt, synthetic construct
  source 1..23: mol_type = other RNA
tcacccacggggtgggcagcagg

SEQ ID NO: 102628 - RNA, 23 nt, synthetic construct
  source 1..23: mol_type = other RNA
ttcagggaggggcaaggccaagg

SEQ ID NO: 102629 - RNA, 23 nt, synthetic construct
  source 1..23: mol_type = other RNA
tctgacccctctctgacctggcc

SEQ ID NO: 102630 - RNA, 23 nt, synthetic construct
  source 1..23: mol_type = other RNA
tggctttgggatgctgacccctc

SEQ ID NO: 102631 - RNA, 23 nt, synthetic construct
  source 1..23: mol_type = other RNA
tggtttatttgcaaaactgggct

SEQ ID NO: 102632 - RNA, 23 nt, synthetic construct
  source 1..23: mol_type = other RNA
tatccatggtgtgccctgcattc

SEQ ID NO: 102633 - RNA, 23 nt, synthetic construct
  source 1..23: mol_type = other RNA
tgactggcagttgctgacccacc

SEQ ID NO: 102634 - RNA, 23 nt, synthetic construct
  source 1..23: mol_type = other RNA
tctggggtgtgggaagtccccgt

SEQ ID NO: 102635 - RNA, 23 nt, synthetic construct
  source 1..23: mol_type = other RNA
tctggggtgtgggaagtccccgt

SEQ ID NO: 102636 - RNA, 23 nt, synthetic construct
  source 1..23: mol_type = other RNA
taggagggggtgactgtgaagcc

SEQ ID NO: 102637 - RNA, 23 nt, synthetic construct
  source 1..23: mol_type = other RNA
tgtcagcactggggggatgggag

SEQ ID NO: 102638 - RNA, 23 nt, synthetic construct
  source 1..23: mol_type = other RNA
tgtcagcactggggggatgggag

SEQ ID NO: 102639 - RNA, 23 nt, synthetic construct
  source 1..23: mol_type = other RNA
tcaggggtccttgggtgccaggg

SEQ ID NO: 102640 - RNA, 23 nt, synthetic construct
  source 1..23: mol_type = other RNA
ttggccacagagccggtggcccc

SEQ ID NO: 102641 - RNA, 23 nt, synthetic construct
  source 1..23: mol_type = other RNA
ttggccacagagccggtggcccc

SEQ ID NO: 102642 - RNA, 23 nt, synthetic construct
  source 1..23: mol_type = other RNA
ttggccacagagccggtggccct

SEQ ID NO: 102643 - RNA, 23 nt, synthetic construct
  source 1..23: mol_type = other RNA
ttggccacagagccggtggccct

SEQ ID NO: 102644 - RNA, 23 nt, synthetic construct
  source 1..23: mol_type = other RNA
ttggccacagagccggtggcccc

SEQ ID NO: 102645 - RNA, 23 nt, synthetic construct
  source 1..23: mol_type = other RNA
tcacggagcgcggggtgccacac

SEQ ID NO: 102646 - RNA, 23 nt, synthetic construct
  source 1..23: mol_type = other RNA
ttggtgctgcatgttgagggggc

SEQ ID NO: 102647 - RNA, 23 nt, synthetic construct
  source 1..23: mol_type = other RNA
tgtggatccagtggactcagtcg

SEQ ID NO: 102648 - RNA, 23 nt, synthetic construct
  source 1..23: mol_type = other RNA
ttgttgtggtcagctttgtgagg

SEQ ID NO: 102649 - RNA, 23 nt, synthetic construct
  source 1..23: mol_type = other RNA
tgtggatccagtggactcagtcg

SEQ ID NO: 102650 - RNA, 23 nt, synthetic construct
  source 1..23: mol_type = other RNA
tgccatccatggtgtgccctgca

SEQ ID NO: 102651 - RNA, 23 nt, synthetic construct
  source 1..23: mol_type = other RNA
tgcgcgctgggggttggagcagg

SEQ ID NO: 102652 - RNA, 23 nt, synthetic construct
  source 1..23: mol_type = other RNA
tgagggagtcactgtgttgctgg

SEQ ID NO: 102653 - RNA, 23 nt, synthetic construct
  source 1..23: mol_type = other RNA
tctggtggcccttgtcgtggtgg

SEQ ID NO: 102654 - RNA, 23 nt, synthetic construct
  source 1..23: mol_type = other RNA
tctggtggcccttgtcgtggtgg

SEQ ID NO: 102655 - RNA, 23 nt, synthetic construct
  source 1..23: mol_type = other RNA
tggattttgtggctgtgcttgtc

SEQ ID NO: 102656 - RNA, 23 nt, synthetic construct
  source 1..23: mol_type = other RNA
tccatgcaccatggtgacagtga

SEQ ID NO: 102657 - RNA, 23 nt, synthetic construct
  source 1..23: mol_type = other RNA
tcacgggtgtgtgggggagccat

SEQ ID NO: 102658 - RNA, 23 nt, synthetic construct
  source 1..23: mol_type = other RNA
ttgctgcgcgggcgctccggccg

SEQ ID NO: 102659 - RNA, 23 nt, synthetic construct
  source 1..23: mol_type = other RNA
tgacctcagccctgagttaccct

SEQ ID NO: 102660 - RNA, 23 nt, synthetic construct
  source 1..23: mol_type = other RNA
tctggagtagaggaggtgtggat

SEQ ID NO: 102661 - RNA, 23 nt, synthetic construct
  source 1..23: mol_type = other RNA
tcacaggccacaggtctggttgg

SEQ ID NO: 102662 - RNA, 23 nt, synthetic construct
  source 1..23: mol_type = other RNA
tgtggccgaagtccaggctgtgc

SEQ ID NO: 102663 - RNA, 23 nt, synthetic construct
  source 1..23: mol_type = other RNA
ttgggtggtgcccaagatgcccg

SEQ ID NO: 102664 - RNA, 23 nt, synthetic construct
  source 1..23: mol_type = other RNA
tgtggccgaagtccaggctgtgc

SEQ ID NO: 102665 - RNA, 23 nt, synthetic construct
  source 1..23: mol_type = other RNA
tgtggccgaagtccaggctgtgc

SEQ ID NO: 102666 - RNA, 23 nt, synthetic construct
  source 1..23: mol_type = other RNA
ttgggtggtgcccaagatgcccg

SEQ ID NO: 102667 - RNA, 23 nt, synthetic construct
  source 1..23: mol_type = other RNA
tgtggccgaagtccaggctgtgc

SEQ ID NO: 102668 - RNA, 23 nt, synthetic construct
  source 1..23: mol_type = other RNA
tagtgacatcagggaggggcaag

SEQ ID NO: 102669 - RNA, 23 nt, synthetic construct
  source 1..23: mol_type = other RNA
tcggcagtgctcagagaacacgt

SEQ ID NO: 102670 - RNA, 23 nt, synthetic construct
  source 1..23: mol_type = other RNA
ttcgatgtcagccagcacagggc

SEQ ID NO: 102671 - RNA, 23 nt, synthetic construct
  source 1..23: mol_type = other RNA
tggtggtggtacctggggccgag

SEQ ID NO: 102672 - RNA, 23 nt, synthetic construct
  source 1..23: mol_type = other RNA
tgtggaggaggggtggattgtgg

SEQ ID NO: 102673 - RNA, 23 nt, synthetic construct
  source 1..23: mol_type = other RNA
tgtggaggaggggtggattgtgg

SEQ ID NO: 102674 - RNA, 23 nt, synthetic construct
  source 1..23: mol_type = other RNA
tgtgtggctgtggacatggtggc

SEQ ID NO: 102675 - RNA, 23 nt, synthetic construct
  source 1..23: mol_type = other RNA
tgtgtggctgtggacatggtggc

SEQ ID NO: 102676 - RNA, 23 nt, synthetic construct
  source 1..23: mol_type = other RNA
tgtgtggctgtggacatggtggc

SEQ ID NO: 102677 - RNA, 23 nt, synthetic construct
  source 1..23: mol_type = other RNA
tgtgtggctgtggacatggtggc

SEQ ID NO: 102678 - RNA, 23 nt, synthetic construct
  source 1..23: mol_type = other RNA
tgtgtggctgtggacatggtggc

SEQ ID NO: 102679 - RNA, 23 nt, synthetic construct
  source 1..23: mol_type = other RNA
tgcatggccgccagagccaacac

SEQ ID NO: 102680 - RNA, 23 nt, synthetic construct
  source 1..23: mol_type = other RNA
tgtgggctggcaggcatccacca

SEQ ID NO: 102681 - RNA, 23 nt, synthetic construct
  source 1..23: mol_type = other RNA
tcgtcacggggcctgagctggac

SEQ ID NO: 102682 - RNA, 23 nt, synthetic construct
  source 1..23: mol_type = other RNA
tctcggcctgagaggtggacagc

SEQ ID NO: 102683 - RNA, 23 nt, synthetic construct
  source 1..23: mol_type = other RNA
tggtggccgtgctggtcagcact

SEQ ID NO: 102684 - RNA, 23 nt, synthetic construct
  source 1..23: mol_type = other RNA
tggtggccgtgctggtcagcact

SEQ ID NO: 102685 - RNA, 23 nt, synthetic construct
  source 1..23: mol_type = other RNA
tggtggccgtgctggtcagcact

SEQ ID NO: 102686 - RNA, 23 nt, synthetic construct
  source 1..23: mol_type = other RNA
tcgccatcccctccagctgtggg

SEQ ID NO: 102687 - RNA, 23 nt, synthetic construct
  source 1..23: mol_type = other RNA
tcagtgacatcagggaggggcaa

SEQ ID NO: 102688 - RNA, 23 nt, synthetic construct
  source 1..23: mol_type = other RNA
tccggcaagggcagcgggtccgg

SEQ ID NO: 102689 - RNA, 23 nt, synthetic construct
  source 1..23: mol_type = other RNA
tgcctccaccaccccgctgaggg

SEQ ID NO: 102690 - RNA, 23 nt, synthetic construct
  source 1..23: mol_type = other RNA
tgatgccactgggtgtgcagtta

SEQ ID NO: 102691 - RNA, 23 nt, synthetic construct
  source 1..23: mol_type = other RNA
tccttcctgatgatggtgccgtt

SEQ ID NO: 102692 - RNA, 23 nt, synthetic construct
  source 1..23: mol_type = other RNA
ttctccgcctcccaggccgggct

SEQ ID NO: 102693 - RNA, 23 nt, synthetic construct
  source 1..23: mol_type = other RNA
tcctggggccgagggggtgaccg

SEQ ID NO: 102694 - RNA, 23 nt, synthetic construct
  source 1..23: mol_type = other RNA
tgctgctgtggtctgctctgtga

SEQ ID NO: 102695 - RNA, 23 nt, synthetic construct
  source 1..23: mol_type = other RNA
tcagcactgtggaggtgtgggtg

SEQ ID NO: 102696 - RNA, 23 nt, synthetic construct
  source 1..23: mol_type = other RNA
tagttgtccctggagttgaggag

SEQ ID NO: 102697 - RNA, 23 nt, synthetic construct
  source 1..23: mol_type = other RNA
tcagcactgtggaggtgtgggtg

SEQ ID NO: 102698 - RNA, 23 nt, synthetic construct
  source 1..23: mol_type = other RNA
tcagcactgtggaggtgtgggtg

SEQ ID NO: 102699 - RNA, 23 nt, synthetic construct
  source 1..23: mol_type = other RNA
ttgctgcagatgcactcgcactc

SEQ ID NO: 102700 - RNA, 23 nt, synthetic construct
  source 1..23: mol_type = other RNA
tgcagccgggcctggaagacttg

SEQ ID NO: 102701 - RNA, 23 nt, synthetic construct
  source 1..23: mol_type = other RNA
tactggcagttgctgacccaccg

SEQ ID NO: 102702 - RNA, 23 nt, synthetic construct
  source 1..23: mol_type = other RNA
tgtaggtgtgcaggatggctgag

SEQ ID NO: 102703 - RNA, 23 nt, synthetic construct
  source 1..23: mol_type = other RNA
tcggctctttggaagcggtgctg

SEQ ID NO: 102704 - RNA, 23 nt, synthetic construct
  source 1..23: mol_type = other RNA
tctgctcacagactgcccctccg

SEQ ID NO: 102705 - RNA, 23 nt, synthetic construct
  source 1..23: mol_type = other RNA
ttgacatcagggaggggcaaggc

SEQ ID NO: 102706 - RNA, 23 nt, synthetic construct
  source 1..23: mol_type = other RNA
tgatgccctcctcgtccgtgcag

SEQ ID NO: 102707 - RNA, 23 nt, synthetic construct
  source 1..23: mol_type = other RNA
tggcaagtgggctggcaggcatc

SEQ ID NO: 102708 - RNA, 23 nt, synthetic construct
  source 1..23: mol_type = other RNA
tcccggggtggaggacggggtgg

SEQ ID NO: 102709 - RNA, 23 nt, synthetic construct
  source 1..23: mol_type = other RNA
taggagggggtggacgtggaact

SEQ ID NO: 102710 - RNA, 23 nt, synthetic construct
  source 1..23: mol_type = other RNA
tggttgatgatggagtggcagcg

SEQ ID NO: 102711 - RNA, 23 nt, synthetic construct
  source 1..23: mol_type = other RNA
tctggatgccactgggtgtgcag

SEQ ID NO: 102712 - RNA, 23 nt, synthetic construct
  source 1..23: mol_type = other RNA
tgttgctgctagggtgtgggaag

SEQ ID NO: 102713 - RNA, 23 nt, synthetic construct
  source 1..23: mol_type = other RNA
tgtggtggagccggtggctgtga

SEQ ID NO: 102714 - RNA, 23 nt, synthetic construct
  source 1..23: mol_type = other RNA
tctggtggctgcgggtgtggtgg

SEQ ID NO: 102715 - RNA, 23 nt, synthetic construct
  source 1..23: mol_type = other RNA
tagcactgcaggggtgcgggtgg

SEQ ID NO: 102716 - RNA, 23 nt, synthetic construct
  source 1..23: mol_type = other RNA
tggaggacactggcggtggggag

SEQ ID NO: 102717 - RNA, 23 nt, synthetic construct
  source 1..23: mol_type = other RNA
tacagcagtcgccctcctcctgg

SEQ ID NO: 102718 - RNA, 23 nt, synthetic construct
  source 1..23: mol_type = other RNA
tgggggacggggacgggcaggga

SEQ ID NO: 102719 - RNA, 23 nt, synthetic construct
  source 1..23: mol_type = other RNA
tggtggggggacggggacgggca

SEQ ID NO: 102720 - RNA, 23 nt, synthetic construct
  source 1..23: mol_type = other RNA
tctccaccaggaggccagtgcgg

SEQ ID NO: 102721 - RNA, 23 nt, synthetic construct
  source 1..23: mol_type = other RNA
tcagggtgcggtggcagatgccc

SEQ ID NO: 102722 - RNA, 23 nt, synthetic construct
  source 1..23: mol_type = other RNA
tcccgcggggcaggtgcagccgt

SEQ ID NO: 102723 - RNA, 23 nt, synthetic construct
  source 1..23: mol_type = other RNA
tagtccaggtacaccatgggggc

SEQ ID NO: 102724 - RNA, 23 nt, synthetic construct
  source 1..23: mol_type = other RNA
tgtggcctcgttgtgcacacagg

SEQ ID NO: 102725 - RNA, 23 nt, synthetic construct
  source 1..23: mol_type = other RNA
tttcctgcaggtgcaggtgttgc

SEQ ID NO: 102726 - RNA, 23 nt, synthetic construct
  source 1..23: mol_type = other RNA
tcggaaggtcccgtgggtggtgt

SEQ ID NO: 102727 - RNA, 23 nt, synthetic construct
  source 1..23: mol_type = other RNA
taggggtccttgggtgccagggc

SEQ ID NO: 102728 - RNA, 23 nt, synthetic construct
  source 1..23: mol_type = other RNA
tcttgaagacgccctcctgctcc

SEQ ID NO: 102729 - RNA, 23 nt, synthetic construct
  source 1..23: mol_type = other RNA
tccctggaagggctgagcgtgtt

SEQ ID NO: 102730 - RNA, 23 nt, synthetic construct
  source 1..23: mol_type = other RNA
tgtccctggaagggctgagcgtg

SEQ ID NO: 102731 - RNA, 23 nt, synthetic construct
  source 1..23: mol_type = other RNA
ttggggccagcgtgggtggctgt

SEQ ID NO: 102732 - RNA, 23 nt, synthetic construct
  source 1..23: mol_type = other RNA
tggccgtggatccagtggacgca

SEQ ID NO: 102733 - RNA, 23 nt, synthetic construct
  source 1..23: mol_type = other RNA
tgagtggctttggagctggtgac

SEQ ID NO: 102734 - RNA, 23 nt, synthetic construct
  source 1..23: mol_type = other RNA
taggtggtgcccagggaggaaga

SEQ ID NO: 102735 - RNA, 23 nt, synthetic construct
  source 1..23: mol_type = other RNA
ttccccgggatggaggagggggt

SEQ ID NO: 102736 - RNA, 23 nt, synthetic construct
  source 1..23: mol_type = other RNA
tggcagaggagggagtcactgtg

SEQ ID NO: 102737 - RNA, 23 nt, synthetic construct
  source 1..23: mol_type = other RNA
tggaaggctctgtgatgtgggtg

SEQ ID NO: 102738 - RNA, 23 nt, synthetic construct
  source 1..23: mol_type = other RNA
tggctggaaagggctggagtcga

SEQ ID NO: 102739 - RNA, 23 nt, synthetic construct
  source 1..23: mol_type = other RNA
tgcccctccggccgcacggatgt

SEQ ID NO: 102740 - RNA, 23 nt, synthetic construct
  source 1..23: mol_type = other RNA
tggccgtggatccagtggactca

SEQ ID NO: 102741 - RNA, 23 nt, synthetic construct
  source 1..23: mol_type = other RNA
tgagtggctttggagctggtgac

SEQ ID NO: 102742 - RNA, 23 nt, synthetic construct
  source 1..23: mol_type = other RNA
tggagaagggagtggctttggag

SEQ ID NO: 102743 - RNA, 23 nt, synthetic construct
  source 1..23: mol_type = other RNA
taggtggtgcccagggaggagga

SEQ ID NO: 102744 - RNA, 23 nt, synthetic construct
  source 1..23: mol_type = other RNA
ttccccgggatggaggagggggt

SEQ ID NO: 102745 - RNA, 23 nt, synthetic construct
  source 1..23: mol_type = other RNA
tggcagaggagggagtcactgtg

SEQ ID NO: 102746 - RNA, 23 nt, synthetic construct
  source 1..23: mol_type = other RNA
tggaaggctctgtgatgtgggtg

SEQ ID NO: 102747 - RNA, 23 nt, synthetic construct
  source 1..23: mol_type = other RNA
tctggaggtggccctggtgtggc

SEQ ID NO: 102748 - RNA, 23 nt, synthetic construct
  source 1..23: mol_type = other RNA
tgcccctccggccgcacggatgt

SEQ ID NO: 102749 - RNA, 23 nt, synthetic construct
  source 1..23: mol_type = other RNA
tcctggttgtggtggtcgtggtg

SEQ ID NO: 102750 - RNA, 23 nt, synthetic construct
  source 1..23: mol_type = other RNA
ttccccgggatggaggagggggt

SEQ ID NO: 102751 - RNA, 23 nt, synthetic construct
  source 1..23: mol_type = other RNA
tggcagaggagggagtcactgtg

SEQ ID NO: 102752 - RNA, 23 nt, synthetic construct
  source 1..23: mol_type = other RNA
tggaaggctctgtgatgtgggtg

SEQ ID NO: 102753 - RNA, 23 nt, synthetic construct
  source 1..23: mol_type = other RNA
tgcccctccggccgcacggatgt

SEQ ID NO: 102754 - RNA, 23 nt, synthetic construct
  source 1..23: mol_type = other RNA
tggccgtggatccagtggactca

SEQ ID NO: 102755 - RNA, 23 nt, synthetic construct
  source 1..23: mol_type = other RNA
tgagtggctttggagctggtgac

SEQ ID NO: 102756 - RNA, 23 nt, synthetic construct
  source 1..23: mol_type = other RNA
tggagaagggagtggctttggag

SEQ ID NO: 102757 - RNA, 23 nt, synthetic construct
  source 1..23: mol_type = other RNA
taggtggtgcccagggaggagga

SEQ ID NO: 102758 - RNA, 23 nt, synthetic construct
  source 1..23: mol_type = other RNA
tagctgttcctggggtggaagag

SEQ ID NO: 102759 - RNA, 23 nt, synthetic construct
  source 1..23: mol_type = other RNA
tggcagaggagggagtcactgtg

SEQ ID NO: 102760 - RNA, 23 nt, synthetic construct
  source 1..23: mol_type = other RNA
tggaaggctctgtgatgtgggtg

SEQ ID NO: 102761 - RNA, 23 nt, synthetic construct
  source 1..23: mol_type = other RNA
tgcccctccggccgcacggatgt

SEQ ID NO: 102762 - RNA, 23 nt, synthetic construct
  source 1..23: mol_type = other RNA
tggccgtggatccagtggacgca

SEQ ID NO: 102763 - RNA, 23 nt, synthetic construct
  source 1..23: mol_type = other RNA
tgagtggctttggagctggtgac

SEQ ID NO: 102764 - RNA, 23 nt, synthetic construct
  source 1..23: mol_type = other RNA
taggtggtgcccagggaggagga

SEQ ID NO: 102765 - RNA, 23 nt, synthetic construct
  source 1..23: mol_type = other RNA
ttccccgggatggaggagggggt

SEQ ID NO: 102766 - RNA, 23 nt, synthetic construct
  source 1..23: mol_type = other RNA
taagtggctttggagctggtggc

SEQ ID NO: 102767 - RNA, 23 nt, synthetic construct
  source 1..23: mol_type = other RNA
tgttgtggtcagctcagtgagga

SEQ ID NO: 102768 - RNA, 23 nt, synthetic construct
  source 1..23: mol_type = other RNA
tggctgttgtggtcagctcagtg

SEQ ID NO: 102769 - RNA, 23 nt, synthetic construct
  source 1..23: mol_type = other RNA
tgaggcggtggccgtggaaccgg

SEQ ID NO: 102770 - RNA, 23 nt, synthetic construct
  source 1..23: mol_type = other RNA
tatagtggccatggtggtcacca

SEQ ID NO: 102771 - RNA, 23 nt, synthetic construct
  source 1..23: mol_type = other RNA
tgcgggtggtccccacggtggac

SEQ ID NO: 102772 - RNA, 23 nt, synthetic construct
  source 1..23: mol_type = other RNA
tggtctcattcacctgccggaga

SEQ ID NO: 102773 - RNA, 23 nt, synthetic construct
  source 1..23: mol_type = other RNA
tgctgagggcgcgggggcagcgg

SEQ ID NO: 102774 - RNA, 23 nt, synthetic construct
  source 1..23: mol_type = other RNA
taggatcaggccctcctccttcc

SEQ ID NO: 102775 - RNA, 23 nt, synthetic construct
  source 1..23: mol_type = other RNA
tggcagccgggcctggaagactt

SEQ ID NO: 102776 - RNA, 23 nt, synthetic construct
  source 1..23: mol_type = other RNA
tgggctggcagtggggggtgtgc

SEQ ID NO: 102777 - RNA, 23 nt, synthetic construct
  source 1..23: mol_type = other RNA
tcctccgccatcccctccagctg

SEQ ID NO: 102778 - RNA, 23 nt, synthetic construct
  source 1..23: mol_type = other RNA
tacgcaggggcaggcctgcacgc

SEQ ID NO: 102779 - RNA, 23 nt, synthetic construct
  source 1..23: mol_type = other RNA
ttcccacgcaggggcaggcctgc

SEQ ID NO: 102780 - RNA, 23 nt, synthetic construct
  source 1..23: mol_type = other RNA
ttgttgcaggcatcctcctgaca

SEQ ID NO: 102781 - RNA, 23 nt, synthetic construct
  source 1..23: mol_type = other RNA
tttgttgcaggcatcctcctgac

SEQ ID NO: 102782 - RNA, 23 nt, synthetic construct
  source 1..23: mol_type = other RNA
tgggtgactcggtggttctgctg

SEQ ID NO: 102783 - RNA, 23 nt, synthetic construct
  source 1..23: mol_type = other RNA
tacaccagcgtccggcacgcgct

SEQ ID NO: 102784 - RNA, 23 nt, synthetic construct
  source 1..23: mol_type = other RNA
tgcgtatttgggatccagctcca

SEQ ID NO: 102785 - RNA, 23 nt, synthetic construct
  source 1..23: mol_type = other RNA
ttccatggtgtgccctgcattct

SEQ ID NO: 102786 - RNA, 23 nt, synthetic construct
  source 1..23: mol_type = other RNA
tgtggcaggcctgggcgtaggca

SEQ ID NO: 102787 - RNA, 23 nt, synthetic construct
  source 1..23: mol_type = other RNA
ttcagcatcagatcacagagcgg

SEQ ID NO: 102788 - RNA, 23 nt, synthetic construct
  source 1..23: mol_type = other RNA
tgtgggggacccaggcggtggtg

SEQ ID NO: 102789 - RNA, 23 nt, synthetic construct
  source 1..23: mol_type = other RNA
ttgagaggtggacagctcgctcg

SEQ ID NO: 102790 - RNA, 23 nt, synthetic construct
  source 1..23: mol_type = other RNA
tggactcctgagtggcgccctcc

SEQ ID NO: 102791 - RNA, 23 nt, synthetic construct
  source 1..23: mol_type = other RNA
tgtggggggacggggacgggcag

SEQ ID NO: 102792 - RNA, 23 nt, synthetic construct
  source 1..23: mol_type = other RNA
tcggccggcaagggcagcgggtc

SEQ ID NO: 102793 - RNA, 23 nt, synthetic construct
  source 1..23: mol_type = other RNA
tccggccggcaagggcagcgggt

SEQ ID NO: 102794 - RNA, 23 nt, synthetic construct
  source 1..23: mol_type = other RNA
tgccgcacttccgcagctcagcc

SEQ ID NO: 102795 - RNA, 23 nt, synthetic construct
  source 1..23: mol_type = other RNA
tctcgcagtcgccacccgagtcg

SEQ ID NO: 102796 - RNA, 23 nt, synthetic construct
  source 1..23: mol_type = other RNA
tcactcgcagtcgccacccgagt

SEQ ID NO: 102797 - RNA, 23 nt, synthetic construct
  source 1..23: mol_type = other RNA
ttaggcgggtccaggtggtgccc

SEQ ID NO: 102798 - RNA, 23 nt, synthetic construct
  source 1..23: mol_type = other RNA
tagtgccgtccctgggctggagg

SEQ ID NO: 102799 - RNA, 23 nt, synthetic construct
  source 1..23: mol_type = other RNA
tctagggcagaggagggagtcac

SEQ ID NO: 102800 - RNA, 23 nt, synthetic construct
  source 1..23: mol_type = other RNA
ttgtggcccggggtggtcgtccc

SEQ ID NO: 102801 - RNA, 23 nt, synthetic construct
  source 1..23: mol_type = other RNA
ttaggcgggtccaggtggtgccc

SEQ ID NO: 102802 - RNA, 23 nt, synthetic construct
  source 1..23: mol_type = other RNA
tctagggcagaggagggagtcac

SEQ ID NO: 102803 - RNA, 23 nt, synthetic construct
  source 1..23: mol_type = other RNA
tgggactgctgggggacagggat

SEQ ID NO: 102804 - RNA, 23 nt, synthetic construct
  source 1..23: mol_type = other RNA
ttgtggcccggggtggtcgtccc

SEQ ID NO: 102805 - RNA, 23 nt, synthetic construct
  source 1..23: mol_type = other RNA
tttgtggacatggtggccatggg

SEQ ID NO: 102806 - RNA, 23 nt, synthetic construct
  source 1..23: mol_type = other RNA
tagtgccgtccctgggctggagg

SEQ ID NO: 102807 - RNA, 23 nt, synthetic construct
  source 1..23: mol_type = other RNA
tctagggcagaggagggagtcac

SEQ ID NO: 102808 - RNA, 23 nt, synthetic construct
  source 1..23: mol_type = other RNA
ttgtggcccggggtggtcgtccc

SEQ ID NO: 102809 - RNA, 23 nt, synthetic construct
  source 1..23: mol_type = other RNA
ttaggcgggtccaggtggtgccc

SEQ ID NO: 102810 - RNA, 23 nt, synthetic construct
  source 1..23: mol_type = other RNA
tacggaggagggggtcaccgtgg

SEQ ID NO: 102811 - RNA, 23 nt, synthetic construct
  source 1..23: mol_type = other RNA
tccgtggtgatcagtgatggggg

SEQ ID NO: 102812 - RNA, 23 nt, synthetic construct
  source 1..23: mol_type = other RNA
tctagggcagaggagggagtcac

SEQ ID NO: 102813 - RNA, 23 nt, synthetic construct
  source 1..23: mol_type = other RNA
tgggactgctgggggacagggat

SEQ ID NO: 102814 - RNA, 23 nt, synthetic construct
  source 1..23: mol_type = other RNA
ttgtggcccggggtggtcgtccc

SEQ ID NO: 102815 - RNA, 23 nt, synthetic construct
  source 1..23: mol_type = other RNA
ttaggcgggtccaggtggtgccc

SEQ ID NO: 102816 - RNA, 23 nt, synthetic construct
  source 1..23: mol_type = other RNA
tagtgccgtccctgggctggagg

SEQ ID NO: 102817 - RNA, 23 nt, synthetic construct
  source 1..23: mol_type = other RNA
tacacaggccggggggctccgca

SEQ ID NO: 102818 - RNA, 23 nt, synthetic construct
  source 1..23: mol_type = other RNA
tgaccagcctgtctgccccagcg

SEQ ID NO: 102819 - RNA, 23 nt, synthetic construct
  source 1..23: mol_type = other RNA
tgtggtaagcactgtggaggtgt

SEQ ID NO: 102820 - RNA, 23 nt, synthetic construct
  source 1..23: mol_type = other RNA
tgtggtaagcactgtggaggtgt

SEQ ID NO: 102821 - RNA, 23 nt, synthetic construct
  source 1..23: mol_type = other RNA
tgtggtaagcactgtggaggtgt

SEQ ID NO: 102822 - RNA, 23 nt, synthetic construct
  source 1..23: mol_type = other RNA
ttctcagacagcagtggcctcct

SEQ ID NO: 102823 - RNA, 23 nt, synthetic construct
  source 1..23: mol_type = other RNA
tagcaggcgccaagcccatcggt

SEQ ID NO: 102824 - RNA, 23 nt, synthetic construct
  source 1..23: mol_type = other RNA
tgccatgggtgtggtggtctgtt

SEQ ID NO: 102825 - RNA, 23 nt, synthetic construct
  source 1..23: mol_type = other RNA
tacaccggggctgcggggctggc

SEQ ID NO: 102826 - RNA, 23 nt, synthetic construct
  source 1..23: mol_type = other RNA
tctgtgcttgtcagcactggaag

SEQ ID NO: 102827 - RNA, 23 nt, synthetic construct
  source 1..23: mol_type = other RNA
tctgtgcttgtcagcactggaag

SEQ ID NO: 102828 - RNA, 23 nt, synthetic construct
  source 1..23: mol_type = other RNA
tctgtgcttgtcagcactggaag

SEQ ID NO: 102829 - RNA, 23 nt, synthetic construct
  source 1..23: mol_type = other RNA
tcagcctggcgttgtgggcatag

SEQ ID NO: 102830 - RNA, 23 nt, synthetic construct
  source 1..23: mol_type = other RNA
ttggtggccatggtgttcggcac

SEQ ID NO: 102831 - RNA, 23 nt, synthetic construct
  source 1..23: mol_type = other RNA
tgccagtggctgcagttgtagtg

SEQ ID NO: 102832 - RNA, 23 nt, synthetic construct
  source 1..23: mol_type = other RNA
tgccagtggctgcagttgtagtg

SEQ ID NO: 102833 - RNA, 23 nt, synthetic construct
  source 1..23: mol_type = other RNA
ttgatgttgacctcggtctcgca

SEQ ID NO: 102834 - RNA, 23 nt, synthetic construct
  source 1..23: mol_type = other RNA
tggaggcccaaggttttcatgat

SEQ ID NO: 102835 - RNA, 23 nt, synthetic construct
  source 1..23: mol_type = other RNA
tggcaatgcagcccccactccca

SEQ ID NO: 102836 - RNA, 23 nt, synthetic construct
  source 1..23: mol_type = other RNA
tgtggctgtggacatggtggccg

SEQ ID NO: 102837 - RNA, 23 nt, synthetic construct
  source 1..23: mol_type = other RNA
tgtggctgtggacatggtggccg

SEQ ID NO: 102838 - RNA, 23 nt, synthetic construct
  source 1..23: mol_type = other RNA
tgggggtgtgggtggtccccggg

SEQ ID NO: 102839 - RNA, 23 nt, synthetic construct
  source 1..23: mol_type = other RNA
tcgtggggccagtggctgcagtt

SEQ ID NO: 102840 - RNA, 23 nt, synthetic construct
  source 1..23: mol_type = other RNA
tgtggctgtggacatggtggccg

SEQ ID NO: 102841 - RNA, 23 nt, synthetic construct
  source 1..23: mol_type = other RNA
tggggcagggaccgcccgtgtgt

SEQ ID NO: 102842 - RNA, 23 nt, synthetic construct
  source 1..23: mol_type = other RNA
tgggggcagggaccgcccgtgtg

SEQ ID NO: 102843 - RNA, 23 nt, synthetic construct
  source 1..23: mol_type = other RNA
tgtggctgtggacatggtggccg

SEQ ID NO: 102844 - RNA, 23 nt, synthetic construct
  source 1..23: mol_type = other RNA
tgggggtgtgggtggtccccggg

SEQ ID NO: 102845 - RNA, 23 nt, synthetic construct
  source 1..23: mol_type = other RNA
tcgtggggccagtggctgcagtt

SEQ ID NO: 102846 - RNA, 23 nt, synthetic construct
  source 1..23: mol_type = other RNA
tgtggctgtggacatggtggccg

SEQ ID NO: 102847 - RNA, 23 nt, synthetic construct
  source 1..23: mol_type = other RNA
tgtggctgtgggcatagtggcca

SEQ ID NO: 102848 - RNA, 23 nt, synthetic construct
  source 1..23: mol_type = other RNA
tcactgcaggggtgcgggtggtc

SEQ ID NO: 102849 - RNA, 23 nt, synthetic construct
  source 1..23: mol_type = other RNA
tgctcagccagcacggtgaagct

SEQ ID NO: 102850 - RNA, 23 nt, synthetic construct
  source 1..23: mol_type = other RNA
taggtgcgggtcttgctgggtgt

SEQ ID NO: 102851 - RNA, 23 nt, synthetic construct
  source 1..23: mol_type = other RNA
taggtgcgggtcttgctgggtgt

SEQ ID NO: 102852 - RNA, 23 nt, synthetic construct
  source 1..23: mol_type = other RNA
taggtgcgggtcttgctgggtgt

SEQ ID NO: 102853 - RNA, 23 nt, synthetic construct
  source 1..23: mol_type = other RNA
taggtgcgggtcttgctgggtgt

SEQ ID NO: 102854 - RNA, 23 nt, synthetic construct
  source 1..23: mol_type = other RNA
tcaatgtcacagtgctgattgca

SEQ ID NO: 102855 - RNA, 23 nt, synthetic construct
  source 1..23: mol_type = other RNA
tgcacagacacaagcacgccgtt

SEQ ID NO: 102856 - RNA, 23 nt, synthetic construct
  source 1..23: mol_type = other RNA
tggccggcaagggcagcgggtcc

SEQ ID NO: 102857 - RNA, 23 nt, synthetic construct
  source 1..23: mol_type = other RNA
ttgccactcacagcccccatgtg

SEQ ID NO: 102858 - RNA, 23 nt, synthetic construct
  source 1..23: mol_type = other RNA
tcacctgctcacggttcctgcag

SEQ ID NO: 102859 - RNA, 23 nt, synthetic construct
  source 1..23: mol_type = other RNA
tcacctgctcacggttcctgcag

SEQ ID NO: 102860 - RNA, 23 nt, synthetic construct
  source 1..23: mol_type = other RNA
tcacctgctcacggttcctgcag

SEQ ID NO: 102861 - RNA, 23 nt, synthetic construct
  source 1..23: mol_type = other RNA
tcacctgctcacggttcctgcag

SEQ ID NO: 102862 - RNA, 23 nt, synthetic construct
  source 1..23: mol_type = other RNA
tatggtggccacgggtgtggtgg

SEQ ID NO: 102863 - RNA, 23 nt, synthetic construct
  source 1..23: mol_type = other RNA
tgatgctgaccttgatgtagtcc

SEQ ID NO: 102864 - RNA, 23 nt, synthetic construct
  source 1..23: mol_type = other RNA
tggggttggagcaggtgtccgtg

SEQ ID NO: 102865 - RNA, 23 nt, synthetic construct
  source 1..23: mol_type = other RNA
tgcgctgggacttggggcagttc

SEQ ID NO: 102866 - RNA, 23 nt, synthetic construct
  source 1..23: mol_type = other RNA
tgcagccgtccacaggcacgaag

SEQ ID NO: 102867 - RNA, 23 nt, synthetic construct
  source 1..23: mol_type = other RNA
tcaatgcagcccccactcccatc

SEQ ID NO: 102868 - RNA, 23 nt, synthetic construct
  source 1..23: mol_type = other RNA
tgtccgggcaggagggggagagc

SEQ ID NO: 102869 - RNA, 23 nt, synthetic construct
  source 1..23: mol_type = other RNA
ttccgcctcccaggccgggctct

SEQ ID NO: 102870 - RNA, 23 nt, synthetic construct
  source 1..23: mol_type = other RNA
tgtgaggggcgccatgtgcccaa

SEQ ID NO: 102871 - RNA, 23 nt, synthetic construct
  source 1..23: mol_type = other RNA
taggagggagtggctttggagct

SEQ ID NO: 102872 - RNA, 23 nt, synthetic construct
  source 1..23: mol_type = other RNA
tggccacagagccggtggcccca

SEQ ID NO: 102873 - RNA, 23 nt, synthetic construct
  source 1..23: mol_type = other RNA
tggaggagggggtcaccgtggag

SEQ ID NO: 102874 - RNA, 23 nt, synthetic construct
  source 1..23: mol_type = other RNA
tactgggggtgtgtgggtggtcc

SEQ ID NO: 102875 - RNA, 23 nt, synthetic construct
  source 1..23: mol_type = other RNA
tacactggggctcacagcccatg

SEQ ID NO: 102876 - RNA, 23 nt, synthetic construct
  source 1..23: mol_type = other RNA
tggccacagagccggtggccccg

SEQ ID NO: 102877 - RNA, 23 nt, synthetic construct
  source 1..23: mol_type = other RNA
tggaggagggggtcaccgtggaa

SEQ ID NO: 102878 - RNA, 23 nt, synthetic construct
  source 1..23: mol_type = other RNA
tactgggggtgtgtgggtggtcc

SEQ ID NO: 102879 - RNA, 23 nt, synthetic construct
  source 1..23: mol_type = other RNA
tacactggggctcacagcccatg

SEQ ID NO: 102880 - RNA, 23 nt, synthetic construct
  source 1..23: mol_type = other RNA
tgtggctttggaactggtggctg

SEQ ID NO: 102881 - RNA, 23 nt, synthetic construct
  source 1..23: mol_type = other RNA
tggaggaagtggctttggaactg

SEQ ID NO: 102882 - RNA, 23 nt, synthetic construct
  source 1..23: mol_type = other RNA
ttgtcagcactggaagggtggtt

SEQ ID NO: 102883 - RNA, 23 nt, synthetic construct
  source 1..23: mol_type = other RNA
ttgctgtggtcagctctgtgagg

SEQ ID NO: 102884 - RNA, 23 nt, synthetic construct
  source 1..23: mol_type = other RNA
tctgctgtggtcagctctgtgag

SEQ ID NO: 102885 - RNA, 23 nt, synthetic construct
  source 1..23: mol_type = other RNA
tgctgctgtggtcagctctgtga

SEQ ID NO: 102886 - RNA, 23 nt, synthetic construct
  source 1..23: mol_type = other RNA
ttggggccagtggctgcagttgt

SEQ ID NO: 102887 - RNA, 23 nt, synthetic construct
  source 1..23: mol_type = other RNA
tctgatgactgtgggtgtggtgg

SEQ ID NO: 102888 - RNA, 23 nt, synthetic construct
  source 1..23: mol_type = other RNA
tggccacagagccggtggccctg

SEQ ID NO: 102889 - RNA, 23 nt, synthetic construct
  source 1..23: mol_type = other RNA
tggaggagggggtcaccgtggag

SEQ ID NO: 102890 - RNA, 23 nt, synthetic construct
  source 1..23: mol_type = other RNA
tactgggggtgtgtgggtggtcc

SEQ ID NO: 102891 - RNA, 23 nt, synthetic construct
  source 1..23: mol_type = other RNA
ttcttgctgggtgtggctgtggc

SEQ ID NO: 102892 - RNA, 23 nt, synthetic construct
  source 1..23: mol_type = other RNA
tggccacagagccggtggccctg

SEQ ID NO: 102893 - RNA, 23 nt, synthetic construct
  source 1..23: mol_type = other RNA
tcactggttgtgggtgtggtggt

SEQ ID NO: 102894 - RNA, 23 nt, synthetic construct
  source 1..23: mol_type = other RNA
tggaggagggggtcaccgtggag

SEQ ID NO: 102895 - RNA, 23 nt, synthetic construct
  source 1..23: mol_type = other RNA
tactgggggtgtgtgggtggtcc

SEQ ID NO: 102896 - RNA, 23 nt, synthetic construct
  source 1..23: mol_type = other RNA
tgtggctttggaactggtggctg

SEQ ID NO: 102897 - RNA, 23 nt, synthetic construct
  source 1..23: mol_type = other RNA
tggaggaagtggctttggaactg

SEQ ID NO: 102898 - RNA, 23 nt, synthetic construct
  source 1..23: mol_type = other RNA
ttgtcagcactggaagggtggtt

SEQ ID NO: 102899 - RNA, 23 nt, synthetic construct
  source 1..23: mol_type = other RNA
ttgctgtggtcagctctgtgagg

SEQ ID NO: 102900 - RNA, 23 nt, synthetic construct
  source 1..23: mol_type = other RNA
tctgctgtggtcagctctgtgag

SEQ ID NO: 102901 - RNA, 23 nt, synthetic construct
  source 1..23: mol_type = other RNA
tgctgctgtggtcagctctgtga

SEQ ID NO: 102902 - RNA, 23 nt, synthetic construct
  source 1..23: mol_type = other RNA
ttggggccagtggctgcagttgt

SEQ ID NO: 102903 - RNA, 23 nt, synthetic construct
  source 1..23: mol_type = other RNA
taggagggagtggctttggagct

SEQ ID NO: 102904 - RNA, 23 nt, synthetic construct
  source 1..23: mol_type = other RNA
tggccacagagccggtggccccg

SEQ ID NO: 102905 - RNA, 23 nt, synthetic construct
  source 1..23: mol_type = other RNA
tcactggttgtgggtgtggtggt

SEQ ID NO: 102906 - RNA, 23 nt, synthetic construct
  source 1..23: mol_type = other RNA
tggaggagggggtcaccgtggag

SEQ ID NO: 102907 - RNA, 23 nt, synthetic construct
  source 1..23: mol_type = other RNA
tggaagtggctttggagctggtg

SEQ ID NO: 102908 - RNA, 23 nt, synthetic construct
  source 1..23: mol_type = other RNA
tggaggaagtggctttggagctg

SEQ ID NO: 102909 - RNA, 23 nt, synthetic construct
  source 1..23: mol_type = other RNA
ttgtcagcactggaagggtggtt

SEQ ID NO: 102910 - RNA, 23 nt, synthetic construct
  source 1..23: mol_type = other RNA
tggatccagtggctgcagttgta

SEQ ID NO: 102911 - RNA, 23 nt, synthetic construct
  source 1..23: mol_type = other RNA
ttgggtctcagggtggtgaggac

SEQ ID NO: 102912 - RNA, 23 nt, synthetic construct
  source 1..23: mol_type = other RNA
ttcaatgtcacagtgctgattgc

SEQ ID NO: 102913 - RNA, 23 nt, synthetic construct
  source 1..23: mol_type = other RNA
tctggcagtggggggtgtgccag

SEQ ID NO: 102914 - RNA, 23 nt, synthetic construct
  source 1..23: mol_type = other RNA
tagcaaagacctggctcagcatc

SEQ ID NO: 102915 - RNA, 23 nt, synthetic construct
  source 1..23: mol_type = other RNA
tgtctcggggcagcaggggttct

SEQ ID NO: 102916 - RNA, 23 nt, synthetic construct
  source 1..23: mol_type = other RNA
tcctggcgggcacacaggcaggc

SEQ ID NO: 102917 - RNA, 23 nt, synthetic construct
  source 1..23: mol_type = other RNA
tggctgtggggtcagcaaatgga

SEQ ID NO: 102918 - RNA, 23 nt, synthetic construct
  source 1..23: mol_type = other RNA
tccgcctctcctggcagcaggtg

SEQ ID NO: 102919 - RNA, 23 nt, synthetic construct
  source 1..23: mol_type = other RNA
ttgcagccacactcatccacgtg

SEQ ID NO: 102920 - RNA, 23 nt, synthetic construct
  source 1..23: mol_type = other RNA
ttgtgtgggggagccatgggcgc

SEQ ID NO: 102921 - RNA, 23 nt, synthetic construct
  source 1..23: mol_type = other RNA
ttcagacagcagtggcctcctgg

SEQ ID NO: 102922 - RNA, 23 nt, synthetic construct
  source 1..23: mol_type = other RNA
tctcagacagcagtggcctcctg

SEQ ID NO: 102923 - RNA, 23 nt, synthetic construct
  source 1..23: mol_type = other RNA
ttgcgcgggcgctccggccgtgg

SEQ ID NO: 102924 - RNA, 23 nt, synthetic construct
  source 1..23: mol_type = other RNA
tgaagtcaccccaggtgctgcac

SEQ ID NO: 102925 - RNA, 23 nt, synthetic construct
  source 1..23: mol_type = other RNA
tagccggatgctgaccttgatgt

SEQ ID NO: 102926 - RNA, 23 nt, synthetic construct
  source 1..23: mol_type = other RNA
tcggccccagcagggtgcggtgg

SEQ ID NO: 102927 - RNA, 23 nt, synthetic construct
  source 1..23: mol_type = other RNA
tttgagggggcaggtccgggggc

SEQ ID NO: 102928 - RNA, 23 nt, synthetic construct
  source 1..23: mol_type = other RNA
tgatgtcatccagcaccgtgcct

SEQ ID NO: 102929 - RNA, 23 nt, synthetic construct
  source 1..23: mol_type = other RNA
tgatggagtggcagcgcgagaag

SEQ ID NO: 102930 - RNA, 23 nt, synthetic construct
  source 1..23: mol_type = other RNA
ttgcacacaggggcagtcctcct

SEQ ID NO: 102931 - RNA, 23 nt, synthetic construct
  source 1..23: mol_type = other RNA
tcgtggagtgggggacccaggcg

SEQ ID NO: 102932 - RNA, 23 nt, synthetic construct
  source 1..23: mol_type = other RNA
tgcgggtcgtgccctggctggtg

SEQ ID NO: 102933 - RNA, 23 nt, synthetic construct
  source 1..23: mol_type = other RNA
tgtggctgtgcttctcagtgctg

SEQ ID NO: 102934 - RNA, 23 nt, synthetic construct
  source 1..23: mol_type = other RNA
tggtggccacagagccggtggcc

SEQ ID NO: 102935 - RNA, 23 nt, synthetic construct
  source 1..23: mol_type = other RNA
tagtgtgagctgttcctggggtg

SEQ ID NO: 102936 - RNA, 23 nt, synthetic construct
  source 1..23: mol_type = other RNA
ttcaccgtggaaggctctgtgat

SEQ ID NO: 102937 - RNA, 23 nt, synthetic construct
  source 1..23: mol_type = other RNA
tcagcccatggtcaccaccgtgg

SEQ ID NO: 102938 - RNA, 23 nt, synthetic construct
  source 1..23: mol_type = other RNA
tgtcacggtggctgtagtgctcg

SEQ ID NO: 102939 - RNA, 23 nt, synthetic construct
  source 1..23: mol_type = other RNA
tgtggctgtgcttctcagtgctg

SEQ ID NO: 102940 - RNA, 23 nt, synthetic construct
  source 1..23: mol_type = other RNA
tggtggccacagagccggtggcc

SEQ ID NO: 102941 - RNA, 23 nt, synthetic construct
  source 1..23: mol_type = other RNA
tagtgtgagctgttcctggggtg

SEQ ID NO: 102942 - RNA, 23 nt, synthetic construct
  source 1..23: mol_type = other RNA
tgtgggtggtgcccaaggtgcct

SEQ ID NO: 102943 - RNA, 23 nt, synthetic construct
  source 1..23: mol_type = other RNA
tcagcccatggtcaccaccgtgg

SEQ ID NO: 102944 - RNA, 23 nt, synthetic construct
  source 1..23: mol_type = other RNA
tgttctgggagggtcccggtggt

SEQ ID NO: 102945 - RNA, 23 nt, synthetic construct
  source 1..23: mol_type = other RNA
tgtcacggtggctgtagtgctgg

SEQ ID NO: 102946 - RNA, 23 nt, synthetic construct
  source 1..23: mol_type = other RNA
tgctgatgactgtgggtgtggtg

SEQ ID NO: 102947 - RNA, 23 nt, synthetic construct
  source 1..23: mol_type = other RNA
tagctgatgactgtgggtgtggt

SEQ ID NO: 102948 - RNA, 23 nt, synthetic construct
  source 1..23: mol_type = other RNA
tgtggctgtgcttctcagtgctg

SEQ ID NO: 102949 - RNA, 23 nt, synthetic construct
  source 1..23: mol_type = other RNA
tggtggccacagagccggtggcc

SEQ ID NO: 102950 - RNA, 23 nt, synthetic construct
  source 1..23: mol_type = other RNA
tagtgtgagctgttcctggggtg

SEQ ID NO: 102951 - RNA, 23 nt, synthetic construct
  source 1..23: mol_type = other RNA
ttcaccgtggaaggctctgtgat

SEQ ID NO: 102952 - RNA, 23 nt, synthetic construct
  source 1..23: mol_type = other RNA
tgtcacggtggctgtagtgctcg

SEQ ID NO: 102953 - RNA, 23 nt, synthetic construct
  source 1..23: mol_type = other RNA
tgtggctgtgcttctcagtgctg

SEQ ID NO: 102954 - RNA, 23 nt, synthetic construct
  source 1..23: mol_type = other RNA
tggtggccacagagccggtggcc

SEQ ID NO: 102955 - RNA, 23 nt, synthetic construct
  source 1..23: mol_type = other RNA
ttgttcctggggtggaagagggg

SEQ ID NO: 102956 - RNA, 23 nt, synthetic construct
  source 1..23: mol_type = other RNA
tagtgtgagctgttcctggggtg

SEQ ID NO: 102957 - RNA, 23 nt, synthetic construct
  source 1..23: mol_type = other RNA
tgggtggtccccgggacggagga

SEQ ID NO: 102958 - RNA, 23 nt, synthetic construct
  source 1..23: mol_type = other RNA
tgtgggtggtgcccaaggtgcct

SEQ ID NO: 102959 - RNA, 23 nt, synthetic construct
  source 1..23: mol_type = other RNA
tgggctggtcagcactttgggag

SEQ ID NO: 102960 - RNA, 23 nt, synthetic construct
  source 1..23: mol_type = other RNA
tggccgggctggtcagcactttg

SEQ ID NO: 102961 - RNA, 23 nt, synthetic construct
  source 1..23: mol_type = other RNA
tgttctgggagggtcccggtggt

SEQ ID NO: 102962 - RNA, 23 nt, synthetic construct
  source 1..23: mol_type = other RNA
tgtcacggtggctgtagtgctcg

SEQ ID NO: 102963 - RNA, 23 nt, synthetic construct
  source 1..23: mol_type = other RNA
tgtggctgtgcttctcagtgctg

SEQ ID NO: 102964 - RNA, 23 nt, synthetic construct
  source 1..23: mol_type = other RNA
tggtggccacagagccggtggcc

SEQ ID NO: 102965 - RNA, 23 nt, synthetic construct
  source 1..23: mol_type = other RNA
tagtgtgagctgttcctggggtg

SEQ ID NO: 102966 - RNA, 23 nt, synthetic construct
  source 1..23: mol_type = other RNA
tttggtggcccttgtcatggtgg

SEQ ID NO: 102967 - RNA, 23 nt, synthetic construct
  source 1..23: mol_type = other RNA
tggggtgtgagctgttcccagag

SEQ ID NO: 102968 - RNA, 23 nt, synthetic construct
  source 1..23: mol_type = other RNA
tcatgcaccatggtgacagtgag

SEQ ID NO: 102969 - RNA, 23 nt, synthetic construct
  source 1..23: mol_type = other RNA
tggcttgcactgcaccgacactg

SEQ ID NO: 102970 - RNA, 23 nt, synthetic construct
  source 1..23: mol_type = other RNA
tggggctgaccctgggcgtcaca

SEQ ID NO: 102971 - RNA, 23 nt, synthetic construct
  source 1..23: mol_type = other RNA
tgtggcagggaagggcgcctggg

SEQ ID NO: 102972 - RNA, 23 nt, synthetic construct
  source 1..23: mol_type = other RNA
tcggtgcagttgtccacatggct

SEQ ID NO: 102973 - RNA, 23 nt, synthetic construct
  source 1..23: mol_type = other RNA
tacccgcctctcctggcagcagg

SEQ ID NO: 102974 - RNA, 23 nt, synthetic construct
  source 1..23: mol_type = other RNA
tggtgtaggtgtgcaggatggct

SEQ ID NO: 102975 - RNA, 23 nt, synthetic construct
  source 1..23: mol_type = other RNA
tcgggtgtgtgggggagccatgg

SEQ ID NO: 102976 - RNA, 23 nt, synthetic construct
  source 1..23: mol_type = other RNA
tcatcctgggggctggcacgggt

SEQ ID NO: 102977 - RNA, 23 nt, synthetic construct
  source 1..23: mol_type = other RNA
tagatgtgggccccgccctgcac

SEQ ID NO: 102978 - RNA, 23 nt, synthetic construct
  source 1..23: mol_type = other RNA
tcactcctgggcgggcacacagg

SEQ ID NO: 102979 - RNA, 23 nt, synthetic construct
  source 1..23: mol_type = other RNA
ttggctgtgcttctcagtgctgg

SEQ ID NO: 102980 - RNA, 23 nt, synthetic construct
  source 1..23: mol_type = other RNA
ttggctgtgcttctcagtgctgg

SEQ ID NO: 102981 - RNA, 23 nt, synthetic construct
  source 1..23: mol_type = other RNA
ttggtcctggaggtggccctggt

SEQ ID NO: 102982 - RNA, 23 nt, synthetic construct
  source 1..23: mol_type = other RNA
ttggctgtgcttctcagtgctgg

SEQ ID NO: 102983 - RNA, 23 nt, synthetic construct
  source 1..23: mol_type = other RNA
tcggtggccctggttgtggtggt

SEQ ID NO: 102984 - RNA, 23 nt, synthetic construct
  source 1..23: mol_type = other RNA
ttggctgtgcttctcagtgctgg

SEQ ID NO: 102985 - RNA, 23 nt, synthetic construct
  source 1..23: mol_type = other RNA
tcggtggccctggttgtggtggc

SEQ ID NO: 102986 - RNA, 23 nt, synthetic construct
  source 1..23: mol_type = other RNA
ttggctgtgcttctcagtgctgg

SEQ ID NO: 102987 - RNA, 23 nt, synthetic construct
  source 1..23: mol_type = other RNA
tggaagccagtgggtctcagggt

SEQ ID NO: 102988 - RNA, 23 nt, synthetic construct
  source 1..23: mol_type = other RNA
tggcagggaagggcgcctgggaa

SEQ ID NO: 102989 - RNA, 23 nt, synthetic construct
  source 1..23: mol_type = other RNA
taggtgtgcaggatggctgagcc

SEQ ID NO: 102990 - RNA, 23 nt, synthetic construct
  source 1..23: mol_type = other RNA
tgtggcctcctgggccgggaagc

SEQ ID NO: 102991 - RNA, 23 nt, synthetic construct
  source 1..23: mol_type = other RNA
tagggggagctgttctcagggtg

SEQ ID NO: 102992 - RNA, 23 nt, synthetic construct
  source 1..23: mol_type = other RNA
tggtggttgtgctgatccacact

SEQ ID NO: 102993 - RNA, 23 nt, synthetic construct
  source 1..23: mol_type = other RNA
ttggtggtggagccggtggccgt

SEQ ID NO: 102994 - RNA, 23 nt, synthetic construct
  source 1..23: mol_type = other RNA
tggtggttgtgctgatccacact

SEQ ID NO: 102995 - RNA, 23 nt, synthetic construct
  source 1..23: mol_type = other RNA
tggaacctctggttgtgggtgtg

SEQ ID NO: 102996 - RNA, 23 nt, synthetic construct
  source 1..23: mol_type = other RNA
ttggtggtggagccggtggccgt

SEQ ID NO: 102997 - RNA, 23 nt, synthetic construct
  source 1..23: mol_type = other RNA
tgtggccatgggtgtggtggtct

SEQ ID NO: 102998 - RNA, 23 nt, synthetic construct
  source 1..23: mol_type = other RNA
tggtggccttcgtggtcagcact

SEQ ID NO: 102999 - RNA, 23 nt, synthetic construct
  source 1..23: mol_type = other RNA
tggtggttgtgctgatccacact

SEQ ID NO: 103000 - RNA, 23 nt, synthetic construct
  source 1..23: mol_type = other RNA
ttggtggtggagccggtggctgt

SEQ ID NO: 103001 - RNA, 23 nt, synthetic construct
  source 1..23: mol_type = other RNA
tggtggttgtgctgatccacact

SEQ ID NO: 103002 - RNA, 23 nt, synthetic construct
  source 1..23: mol_type = other RNA
ttggtggtggagccggtggccgt

SEQ ID NO: 103003 - RNA, 23 nt, synthetic construct
  source 1..23: mol_type = other RNA
tggtggccttcgtggtcagcact

SEQ ID NO: 103004 - RNA, 23 nt, synthetic construct
  source 1..23: mol_type = other RNA
tggtggttgtgctgatccacact

SEQ ID NO: 103005 - RNA, 23 nt, synthetic construct
  source 1..23: mol_type = other RNA
ttggtggtggagccggtggccgt

SEQ ID NO: 103006 - RNA, 23 nt, synthetic construct
  source 1..23: mol_type = other RNA
ttggcagaggccgtgcagtagtg

SEQ ID NO: 103007 - RNA, 23 nt, synthetic construct
  source 1..23: mol_type = other RNA
tggtgtgcaggatggctgagccg

SEQ ID NO: 103008 - RNA, 23 nt, synthetic construct
  source 1..23: mol_type = other RNA
tcaatgctcagggtttatttgca

SEQ ID NO: 103009 - RNA, 23 nt, synthetic construct
  source 1..23: mol_type = other RNA
tggcacccatcctgggggctggc

SEQ ID NO: 103010 - RNA, 23 nt, synthetic construct
  source 1..23: mol_type = other RNA
ttgatgaggacggagccgttgga

SEQ ID NO: 103011 - RNA, 23 nt, synthetic construct
  source 1..23: mol_type = other RNA
tcggtggcagatgccctcctcgt

SEQ ID NO: 103012 - RNA, 23 nt, synthetic construct
  source 1..23: mol_type = other RNA
tcttcgggtagcagccttccagg

SEQ ID NO: 103013 - RNA, 23 nt, synthetic construct
  source 1..23: mol_type = other RNA
tacttcgggtagcagccttccag

SEQ ID NO: 103014 - RNA, 23 nt, synthetic construct
  source 1..23: mol_type = other RNA
ttggcacgtcccctgcagtggtc

SEQ ID NO: 103015 - RNA, 23 nt, synthetic construct
  source 1..23: mol_type = other RNA
tagggtgcttgtgtatctggggg

SEQ ID NO: 103016 - RNA, 23 nt, synthetic construct
  source 1..23: mol_type = other RNA
tcgtctctgtcctgggcgtgctg

SEQ ID NO: 103017 - RNA, 23 nt, synthetic construct
  source 1..23: mol_type = other RNA
tccggtggccccagttgtggtgg

SEQ ID NO: 103018 - RNA, 23 nt, synthetic construct
  source 1..23: mol_type = other RNA
ttgcagaccaggccaaagtccag

SEQ ID NO: 103019 - RNA, 23 nt, synthetic construct
  source 1..23: mol_type = other RNA
tactggagaagggagtggctttg

SEQ ID NO: 103020 - RNA, 23 nt, synthetic construct
  source 1..23: mol_type = other RNA
tctggagttgaggaggggttggt

SEQ ID NO: 103021 - RNA, 23 nt, synthetic construct
  source 1..23: mol_type = other RNA
ttgcagaccaggccaaagtccag

SEQ ID NO: 103022 - RNA, 23 nt, synthetic construct
  source 1..23: mol_type = other RNA
taagctggtagctgtggatttgg

SEQ ID NO: 103023 - RNA, 23 nt, synthetic construct
  source 1..23: mol_type = other RNA
tgtccaggcggtgcccagggagg

SEQ ID NO: 103024 - RNA, 23 nt, synthetic construct
  source 1..23: mol_type = other RNA
tctggagttgaggaggggttggt

SEQ ID NO: 103025 - RNA, 23 nt, synthetic construct
  source 1..23: mol_type = other RNA
ttgcagaccaggccaaagtccag

SEQ ID NO: 103026 - RNA, 23 nt, synthetic construct
  source 1..23: mol_type = other RNA
tactggagaagggagtggctttg

SEQ ID NO: 103027 - RNA, 23 nt, synthetic construct
  source 1..23: mol_type = other RNA
tctggagttgaggaggggttggt

SEQ ID NO: 103028 - RNA, 23 nt, synthetic construct
  source 1..23: mol_type = other RNA
ttgcagaccaggccaaagtccag

SEQ ID NO: 103029 - RNA, 23 nt, synthetic construct
  source 1..23: mol_type = other RNA
tcagttgcagtccctggactgga

SEQ ID NO: 103030 - RNA, 23 nt, synthetic construct
  source 1..23: mol_type = other RNA
tctggagttgaggaggggttggt

SEQ ID NO: 103031 - RNA, 23 nt, synthetic construct
  source 1..23: mol_type = other RNA
ttggattttgtggctgtgcttgt

SEQ ID NO: 103032 - RNA, 23 nt, synthetic construct
  source 1..23: mol_type = other RNA
taagctggtagctgtggattttg

SEQ ID NO: 103033 - RNA, 23 nt, synthetic construct
  source 1..23: mol_type = other RNA
tacggtccacgtggtccacaggg

SEQ ID NO: 103034 - RNA, 23 nt, synthetic construct
  source 1..23: mol_type = other RNA
ttgtggacatggtggacatgggt

SEQ ID NO: 103035 - RNA, 23 nt, synthetic construct
  source 1..23: mol_type = other RNA
tgtggccgtggaattggtggccc

SEQ ID NO: 103036 - RNA, 23 nt, synthetic construct
  source 1..23: mol_type = other RNA
tagccgccccacatgctgcagat

SEQ ID NO: 103037 - RNA, 23 nt, synthetic construct
  source 1..23: mol_type = other RNA
ttggggggacggggacgggcagg

SEQ ID NO: 103038 - RNA, 23 nt, synthetic construct
  source 1..23: mol_type = other RNA
tcaccccaggtgctgcacacccg

SEQ ID NO: 103039 - RNA, 23 nt, synthetic construct
  source 1..23: mol_type = other RNA
tacgcctccagcaccagcccctg

SEQ ID NO: 103040 - RNA, 23 nt, synthetic construct
  source 1..23: mol_type = other RNA
tgttggacgcctccagcaccagc

SEQ ID NO: 103041 - RNA, 23 nt, synthetic construct
  source 1..23: mol_type = other RNA
tggatccagctccagcagggcac

SEQ ID NO: 103042 - RNA, 23 nt, synthetic construct
  source 1..23: mol_type = other RNA
ttggagcggggtcagcctggcgt

SEQ ID NO: 103043 - RNA, 23 nt, synthetic construct
  source 1..23: mol_type = other RNA
tatgccctcctcgtccgtgcagt

SEQ ID NO: 103044 - RNA, 23 nt, synthetic construct
  source 1..23: mol_type = other RNA
tgcagatgccctcctcgtccgtg

SEQ ID NO: 103045 - RNA, 23 nt, synthetic construct
  source 1..23: mol_type = other RNA
tagagctcagggcacctccagtt

SEQ ID NO: 103046 - RNA, 23 nt, synthetic construct
  source 1..23: mol_type = other RNA
tttggagcaggtgtccgtgcagg

SEQ ID NO: 103047 - RNA, 23 nt, synthetic construct
  source 1..23: mol_type = other RNA
ttcctcgcagagctgcgcgcgct

SEQ ID NO: 103048 - RNA, 23 nt, synthetic construct
  source 1..23: mol_type = other RNA
tagtggtcctcgcagagctgcgc

SEQ ID NO: 103049 - RNA, 23 nt, synthetic construct
  source 1..23: mol_type = other RNA
taaagctgttcctggcattggca

SEQ ID NO: 103050 - RNA, 23 nt, synthetic construct
  source 1..23: mol_type = other RNA
tgatgatggagtggcagcgcgag

SEQ ID NO: 103051 - RNA, 23 nt, synthetic construct
  source 1..23: mol_type = other RNA
tagcgctgggacttggggcagtt

SEQ ID NO: 103052 - RNA, 23 nt, synthetic construct
  source 1..23: mol_type = other RNA
tcggcaagtgggctggcaggcat

SEQ ID NO: 103053 - RNA, 23 nt, synthetic construct
  source 1..23: mol_type = other RNA
tccgtccacaggcacgaaggaaa

SEQ ID NO: 103054 - RNA, 23 nt, synthetic construct
  source 1..23: mol_type = other RNA
tcgcggggcaggtgcagccgtcc

SEQ ID NO: 103055 - RNA, 23 nt, synthetic construct
  source 1..23: mol_type = other RNA
tccgcggggcaggtgcagccgtc

SEQ ID NO: 103056 - RNA, 23 nt, synthetic construct
  source 1..23: mol_type = other RNA
tacctctccaggagccagcacgg

SEQ ID NO: 103057 - RNA, 23 nt, synthetic construct
  source 1..23: mol_type = other RNA
tcacctctccaggagccagcacg

SEQ ID NO: 103058 - RNA, 23 nt, synthetic construct
  source 1..23: mol_type = other RNA
tgtacaccatgggggctgcacac

SEQ ID NO: 103059 - RNA, 23 nt, synthetic construct
  source 1..23: mol_type = other RNA
tgttcctgcaggtgcaggtgttg

SEQ ID NO: 103060 - RNA, 23 nt, synthetic construct
  source 1..23: mol_type = other RNA
tctccggttcctgcaggtgcagg

SEQ ID NO: 103061 - RNA, 23 nt, synthetic construct
  source 1..23: mol_type = other RNA
tcgcagctgccttcaaagctgta

SEQ ID NO: 103062 - RNA, 23 nt, synthetic construct
  source 1..23: mol_type = other RNA
ttgtactcgcagctgccttcaaa

SEQ ID NO: 103063 - RNA, 23 nt, synthetic construct
  source 1..23: mol_type = other RNA
ttcccctcttggaggatcagctc

SEQ ID NO: 103064 - RNA, 23 nt, synthetic construct
  source 1..23: mol_type = other RNA
tggtgggtccccacccggccctc

SEQ ID NO: 103065 - RNA, 23 nt, synthetic construct
  source 1..23: mol_type = other RNA
tagggcgtccgggcaggaggggg

SEQ ID NO: 103066 - RNA, 23 nt, synthetic construct
  source 1..23: mol_type = other RNA
tgtcacagaacaaggggcaggtg

SEQ ID NO: 103067 - RNA, 23 nt, synthetic construct
  source 1..23: mol_type = other RNA
tagtgccactcacagcccccatg

SEQ ID NO: 103068 - RNA, 23 nt, synthetic construct
  source 1..23: mol_type = other RNA
ttcgggtagcagccttccaggcc

SEQ ID NO: 103069 - RNA, 23 nt, synthetic construct
  source 1..23: mol_type = other RNA
tttcgggtagcagccttccaggc

SEQ ID NO: 103070 - RNA, 23 nt, synthetic construct
  source 1..23: mol_type = other RNA
tagccttcctgatgatggtgccg

SEQ ID NO: 103071 - RNA, 23 nt, synthetic construct
  source 1..23: mol_type = other RNA
tacagccttcctgatgatggtgc

SEQ ID NO: 103072 - RNA, 23 nt, synthetic construct
  source 1..23: mol_type = other RNA
tatgccacagccttcctgatgat

SEQ ID NO: 103073 - RNA, 23 nt, synthetic construct
  source 1..23: mol_type = other RNA
tcggtggtgaaggtgaatggcgt

SEQ ID NO: 103074 - RNA, 23 nt, synthetic construct
  source 1..23: mol_type = other RNA
tgcctcccaggccgggctctggg

SEQ ID NO: 103075 - RNA, 23 nt, synthetic construct
  source 1..23: mol_type = other RNA
tgcacagggcatacctggtaccc

SEQ ID NO: 103076 - RNA, 23 nt, synthetic construct
  source 1..23: mol_type = other RNA
tgtcagccagcacagggcatacc

SEQ ID NO: 103077 - RNA, 23 nt, synthetic construct
  source 1..23: mol_type = other RNA
tcagcccccgcatgcggtcacag

SEQ ID NO: 103078 - RNA, 23 nt, synthetic construct
  source 1..23: mol_type = other RNA
tgactctgttggctgttggcgca

SEQ ID NO: 103079 - RNA, 23 nt, synthetic construct
  source 1..23: mol_type = other RNA
tacggggcctgagctggacccag

SEQ ID NO: 103080 - RNA, 23 nt, synthetic construct
  source 1..23: mol_type = other RNA
tgtgccctccagcggccctgatc

SEQ ID NO: 103081 - RNA, 23 nt, synthetic construct
  source 1..23: mol_type = other RNA
ttgtccttaggctgctggcataa

SEQ ID NO: 103082 - RNA, 23 nt, synthetic construct
  source 1..23: mol_type = other RNA
tttctgccccacctgtgccaggg

SEQ ID NO: 103083 - RNA, 23 nt, synthetic construct
  source 1..23: mol_type = other RNA
tgacgccctcctgctcccagttc

SEQ ID NO: 103084 - RNA, 23 nt, synthetic construct
  source 1..23: mol_type = other RNA
ttgctgtggtgctggccggggga

SEQ ID NO: 103085 - RNA, 23 nt, synthetic construct
  source 1..23: mol_type = other RNA
tagggtggatgtggccacccctg

SEQ ID NO: 103086 - RNA, 23 nt, synthetic construct
  source 1..23: mol_type = other RNA
taagcggtgctggctgtgcctgt

SEQ ID NO: 103087 - RNA, 23 nt, synthetic construct
  source 1..23: mol_type = other RNA
ttcctgggcgtgctggtctcggc

SEQ ID NO: 103088 - RNA, 23 nt, synthetic construct
  source 1..23: mol_type = other RNA
tcgtgccctggctggtggtggtg

SEQ ID NO: 103089 - RNA, 23 nt, synthetic construct
  source 1..23: mol_type = other RNA
tagctgttctcagggtggaggtc

SEQ ID NO: 103090 - RNA, 23 nt, synthetic construct
  source 1..23: mol_type = other RNA
tagggagtggctttggagctggt

SEQ ID NO: 103091 - RNA, 23 nt, synthetic construct
  source 1..23: mol_type = other RNA
tgtgcttctcagtgctggaaggg

SEQ ID NO: 103092 - RNA, 23 nt, synthetic construct
  source 1..23: mol_type = other RNA
tcagttgtggtggccgtggcggt

SEQ ID NO: 103093 - RNA, 23 nt, synthetic construct
  source 1..23: mol_type = other RNA
ttaccactggtctgtgtgctaga

SEQ ID NO: 103094 - RNA, 23 nt, synthetic construct
  source 1..23: mol_type = other RNA
tccgtggtggtcagtgatggggg

SEQ ID NO: 103095 - RNA, 23 nt, synthetic construct
  source 1..23: mol_type = other RNA
ttagggcagaggagggagtcact

SEQ ID NO: 103096 - RNA, 23 nt, synthetic construct
  source 1..23: mol_type = other RNA
tgactgctggggggcagggatcg

SEQ ID NO: 103097 - RNA, 23 nt, synthetic construct
  source 1..23: mol_type = other RNA
ttgtggtcctggaggtggccgtg

SEQ ID NO: 103098 - RNA, 23 nt, synthetic construct
  source 1..23: mol_type = other RNA
tgtggctgtggtcctggaggtgg

SEQ ID NO: 103099 - RNA, 23 nt, synthetic construct
  source 1..23: mol_type = other RNA
tccactctgaccaggcacactgg

SEQ ID NO: 103100 - RNA, 23 nt, synthetic construct
  source 1..23: mol_type = other RNA
tcctggggtggaggacggggtgg

SEQ ID NO: 103101 - RNA, 23 nt, synthetic construct
  source 1..23: mol_type = other RNA
tagggagtggctttggagctggt

SEQ ID NO: 103102 - RNA, 23 nt, synthetic construct
  source 1..23: mol_type = other RNA
ttccctggactggagaagggagt

SEQ ID NO: 103103 - RNA, 23 nt, synthetic construct
  source 1..23: mol_type = other RNA
tgtgcttctcagtgctggaaggg

SEQ ID NO: 103104 - RNA, 23 nt, synthetic construct
  source 1..23: mol_type = other RNA
tctgtggaggtgtggacagtctc

SEQ ID NO: 103105 - RNA, 23 nt, synthetic construct
  source 1..23: mol_type = other RNA
tcggttgtggtggccgtggtggt

SEQ ID NO: 103106 - RNA, 23 nt, synthetic construct
  source 1..23: mol_type = other RNA
ttaccactggtctgtgtgctaga

SEQ ID NO: 103107 - RNA, 23 nt, synthetic construct
  source 1..23: mol_type = other RNA
tccgtggtggtcagtgatggggg

SEQ ID NO: 103108 - RNA, 23 nt, synthetic construct
  source 1..23: mol_type = other RNA
ttgtccctggagttgaggagggg

SEQ ID NO: 103109 - RNA, 23 nt, synthetic construct
  source 1..23: mol_type = other RNA
ttagggcagaggagggagtcact

SEQ ID NO: 103110 - RNA, 23 nt, synthetic construct
  source 1..23: mol_type = other RNA
tgactgctgggggacagggatcg

SEQ ID NO: 103111 - RNA, 23 nt, synthetic construct
  source 1..23: mol_type = other RNA
ttggggactgctgggggacaggg

SEQ ID NO: 103112 - RNA, 23 nt, synthetic construct
  source 1..23: mol_type = other RNA
taccggtggttgctgctggggtg

SEQ ID NO: 103113 - RNA, 23 nt, synthetic construct
  source 1..23: mol_type = other RNA
tccactctgaccaggcacactgg

SEQ ID NO: 103114 - RNA, 23 nt, synthetic construct
  source 1..23: mol_type = other RNA
ttgcttgtcagcactggaagggt

SEQ ID NO: 103115 - RNA, 23 nt, synthetic construct
  source 1..23: mol_type = other RNA
tcgtggtcagcactgtggaggtg

SEQ ID NO: 103116 - RNA, 23 nt, synthetic construct
  source 1..23: mol_type = other RNA
ttccccggagtggaggagggggt

SEQ ID NO: 103117 - RNA, 23 nt, synthetic construct
  source 1..23: mol_type = other RNA
tgttgtagtggctgctgtggtca

SEQ ID NO: 103118 - RNA, 23 nt, synthetic construct
  source 1..23: mol_type = other RNA
tcctggggtggaggacggggtgg

SEQ ID NO: 103119 - RNA, 23 nt, synthetic construct
  source 1..23: mol_type = other RNA
tgtgcttctcagtgctggaaggg

SEQ ID NO: 103120 - RNA, 23 nt, synthetic construct
  source 1..23: mol_type = other RNA
tggtccaggcggtgcccagggag

SEQ ID NO: 103121 - RNA, 23 nt, synthetic construct
  source 1..23: mol_type = other RNA
tctgtggaggtgtggacagtctc

SEQ ID NO: 103122 - RNA, 23 nt, synthetic construct
  source 1..23: mol_type = other RNA
ttaccactggtctgtgtgctaga

SEQ ID NO: 103123 - RNA, 23 nt, synthetic construct
  source 1..23: mol_type = other RNA
tccgtggtggtcagtgatggggg

SEQ ID NO: 103124 - RNA, 23 nt, synthetic construct
  source 1..23: mol_type = other RNA
ttgtccctggagttgaggagggg

SEQ ID NO: 103125 - RNA, 23 nt, synthetic construct
  source 1..23: mol_type = other RNA
ttagggcagaggagggagtcact

SEQ ID NO: 103126 - RNA, 23 nt, synthetic construct
  source 1..23: mol_type = other RNA
tgactgctggggggcagggaccg

SEQ ID NO: 103127 - RNA, 23 nt, synthetic construct
  source 1..23: mol_type = other RNA
tgtggctgtggtcctggaggtgc

SEQ ID NO: 103128 - RNA, 23 nt, synthetic construct
  source 1..23: mol_type = other RNA
tccactctgaccaggcacactgg

SEQ ID NO: 103129 - RNA, 23 nt, synthetic construct
  source 1..23: mol_type = other RNA
tcctggggtggaggacggggtgg

SEQ ID NO: 103130 - RNA, 23 nt, synthetic construct
  source 1..23: mol_type = other RNA
tagggagtggctttggagctggt

SEQ ID NO: 103131 - RNA, 23 nt, synthetic construct
  source 1..23: mol_type = other RNA
ttccctggactggagaagggagt

SEQ ID NO: 103132 - RNA, 23 nt, synthetic construct
  source 1..23: mol_type = other RNA
tgtgcttctcagtgctggaaggg

SEQ ID NO: 103133 - RNA, 23 nt, synthetic construct
  source 1..23: mol_type = other RNA
tctggttgtggtggccgtggtgg

SEQ ID NO: 103134 - RNA, 23 nt, synthetic construct
  source 1..23: mol_type = other RNA
tctggaggagggggtgactgtga

SEQ ID NO: 103135 - RNA, 23 nt, synthetic construct
  source 1..23: mol_type = other RNA
tccccgggacggaggagggggtc

SEQ ID NO: 103136 - RNA, 23 nt, synthetic construct
  source 1..23: mol_type = other RNA
ttaccactggtctgtgtgctaga

SEQ ID NO: 103137 - RNA, 23 nt, synthetic construct
  source 1..23: mol_type = other RNA
ttgtccctggagttgaggagggg

SEQ ID NO: 103138 - RNA, 23 nt, synthetic construct
  source 1..23: mol_type = other RNA
ttagggcagaggagggagtcact

SEQ ID NO: 103139 - RNA, 23 nt, synthetic construct
  source 1..23: mol_type = other RNA
tgactgctgggggacagggatcg

SEQ ID NO: 103140 - RNA, 23 nt, synthetic construct
  source 1..23: mol_type = other RNA
ttggggactgctgggggacaggg

SEQ ID NO: 103141 - RNA, 23 nt, synthetic construct
  source 1..23: mol_type = other RNA
taccggtggttgctgctggggtg

SEQ ID NO: 103142 - RNA, 23 nt, synthetic construct
  source 1..23: mol_type = other RNA
tccactctgaccaggcacactgg

SEQ ID NO: 103143 - RNA, 23 nt, synthetic construct
  source 1..23: mol_type = other RNA
ttgtggtggccgggctggtcagc

SEQ ID NO: 103144 - RNA, 23 nt, synthetic construct
  source 1..23: mol_type = other RNA
ttgcttgtcagcactggaagggt

SEQ ID NO: 103145 - RNA, 23 nt, synthetic construct
  source 1..23: mol_type = other RNA
tcgtggtcagcactgtggaggtg

SEQ ID NO: 103146 - RNA, 23 nt, synthetic construct
  source 1..23: mol_type = other RNA
ttccccggagtggaggagggggt

SEQ ID NO: 103147 - RNA, 23 nt, synthetic construct
  source 1..23: mol_type = other RNA
tgttgtagtggctgctgtggtca

SEQ ID NO: 103148 - RNA, 23 nt, synthetic construct
  source 1..23: mol_type = other RNA
tcctggggtggaggacggggtgg

SEQ ID NO: 103149 - RNA, 23 nt, synthetic construct
  source 1..23: mol_type = other RNA
tcctggggtggaggacggggtgg

SEQ ID NO: 103150 - RNA, 23 nt, synthetic construct
  source 1..23: mol_type = other RNA
tagggagtggctttggagctggt

SEQ ID NO: 103151 - RNA, 23 nt, synthetic construct
  source 1..23: mol_type = other RNA
tgtgcttctcagtgctggaaggg

SEQ ID NO: 103152 - RNA, 23 nt, synthetic construct
  source 1..23: mol_type = other RNA
tctgtggaggtgtggacagtctc

SEQ ID NO: 103153 - RNA, 23 nt, synthetic construct
  source 1..23: mol_type = other RNA
tcggttgtggtggccgtggcggt

SEQ ID NO: 103154 - RNA, 23 nt, synthetic construct
  source 1..23: mol_type = other RNA
tgtgggtgtggtggttgtgggtg

SEQ ID NO: 103155 - RNA, 23 nt, synthetic construct
  source 1..23: mol_type = other RNA
ttaccactggtctgtgtgctaga

SEQ ID NO: 103156 - RNA, 23 nt, synthetic construct
  source 1..23: mol_type = other RNA
tccgtggtggtcagtgatggggg

SEQ ID NO: 103157 - RNA, 23 nt, synthetic construct
  source 1..23: mol_type = other RNA
ttgtccctggagttgaggagggg

SEQ ID NO: 103158 - RNA, 23 nt, synthetic construct
  source 1..23: mol_type = other RNA
tgtgctggtcagcactggggtga

SEQ ID NO: 103159 - RNA, 23 nt, synthetic construct
  source 1..23: mol_type = other RNA
ttgcgggtgtggtggccgtgctg

SEQ ID NO: 103160 - RNA, 23 nt, synthetic construct
  source 1..23: mol_type = other RNA
tctgcgggtgtggtggccgtgct

SEQ ID NO: 103161 - RNA, 23 nt, synthetic construct
  source 1..23: mol_type = other RNA
ttgcttgtcagcactggaagggt

SEQ ID NO: 103162 - RNA, 23 nt, synthetic construct
  source 1..23: mol_type = other RNA
ttggtagctgtggattttgtggc

SEQ ID NO: 103163 - RNA, 23 nt, synthetic construct
  source 1..23: mol_type = other RNA
ttggacatgggtgtggtggtctg

SEQ ID NO: 103164 - RNA, 23 nt, synthetic construct
  source 1..23: mol_type = other RNA
tgacatggtggacatgggtgtgg

SEQ ID NO: 103165 - RNA, 23 nt, synthetic construct
  source 1..23: mol_type = other RNA
tgtggacatggtggacatgggtg

SEQ ID NO: 103166 - RNA, 23 nt, synthetic construct
  source 1..23: mol_type = other RNA
tggcccttgtcatggtggctgtg

SEQ ID NO: 103167 - RNA, 23 nt, synthetic construct
  source 1..23: mol_type = other RNA
tggccgtggaattggtggccctt

SEQ ID NO: 103168 - RNA, 23 nt, synthetic construct
  source 1..23: mol_type = other RNA
tcgtggaggcagtggctgtgggc

SEQ ID NO: 103169 - RNA, 23 nt, synthetic construct
  source 1..23: mol_type = other RNA
tacgctgaaggttggcaggctgc

SEQ ID NO: 103170 - RNA, 23 nt, synthetic construct
  source 1..23: mol_type = other RNA
tccacatgctgcagatgcactcg

SEQ ID NO: 103171 - RNA, 23 nt, synthetic construct
  source 1..23: mol_type = other RNA
ttgcagttgccccggaaggtgta

SEQ ID NO: 103172 - RNA, 23 nt, synthetic construct
  source 1..23: mol_type = other RNA
ttagtggatgctgagggcgcggg

SEQ ID NO: 103173 - RNA, 23 nt, synthetic construct
  source 1..23: mol_type = other RNA
tggggcccagcagccatcctttc

SEQ ID NO: 103174 - RNA, 23 nt, synthetic construct
  source 1..23: mol_type = other RNA
tcagagcggctgtggtgggcatg

SEQ ID NO: 103175 - RNA, 23 nt, synthetic construct
  source 1..23: mol_type = other RNA
tcgttgaagaggatctggtcctc

SEQ ID NO: 103176 - RNA, 23 nt, synthetic construct
  source 1..23: mol_type = other RNA
tgggggctgaccctgggcgtcac

SEQ ID NO: 103177 - RNA, 23 nt, synthetic construct
  source 1..23: mol_type = other RNA
ttctcggcccggggcctggtcac

SEQ ID NO: 103178 - RNA, 23 nt, synthetic construct
  source 1..23: mol_type = other RNA
tttctcggcccggggcctggtca

SEQ ID NO: 103179 - RNA, 23 nt, synthetic construct
  source 1..23: mol_type = other RNA
tgactcctgccctggcgggcaca

SEQ ID NO: 103180 - RNA, 23 nt, synthetic construct
  source 1..23: mol_type = other RNA
tgtcgccctcctcctgggtgcag

SEQ ID NO: 103181 - RNA, 23 nt, synthetic construct
  source 1..23: mol_type = other RNA
tttgcaggcatcctcctgacatt

SEQ ID NO: 103182 - RNA, 23 nt, synthetic construct
  source 1..23: mol_type = other RNA
tcagttgtccacatggctgttga

SEQ ID NO: 103183 - RNA, 23 nt, synthetic construct
  source 1..23: mol_type = other RNA
tatctgggcaggatgcaggctgt

SEQ ID NO: 103184 - RNA, 23 nt, synthetic construct
  source 1..23: mol_type = other RNA
tcgcagccctggtgccacaggat

SEQ ID NO: 103185 - RNA, 23 nt, synthetic construct
  source 1..23: mol_type = other RNA
tcaggagccctcgcagaaggtga

SEQ ID NO: 103186 - RNA, 23 nt, synthetic construct
  source 1..23: mol_type = other RNA
tagccacgggtgtgtgggggagc

SEQ ID NO: 103187 - RNA, 23 nt, synthetic construct
  source 1..23: mol_type = other RNA
tacaggccggggggctccgcaga

SEQ ID NO: 103188 - RNA, 23 nt, synthetic construct
  source 1..23: mol_type = other RNA
tacggggtgggcagcaggagcac

SEQ ID NO: 103189 - RNA, 23 nt, synthetic construct
  source 1..23: mol_type = other RNA
tcacggggtgggcagcaggagca

SEQ ID NO: 103190 - RNA, 23 nt, synthetic construct
  source 1..23: mol_type = other RNA
tcctgtctgccccagcggccgga

SEQ ID NO: 103191 - RNA, 23 nt, synthetic construct
  source 1..23: mol_type = other RNA
tagctggccttgcctggaccagc

SEQ ID NO: 103192 - RNA, 23 nt, synthetic construct
  source 1..23: mol_type = other RNA
tgtcgcagcttcctggcagcagc

SEQ ID NO: 103193 - RNA, 23 nt, synthetic construct
  source 1..23: mol_type = other RNA
ttgtcgcagcttcctggcagcag

SEQ ID NO: 103194 - RNA, 23 nt, synthetic construct
  source 1..23: mol_type = other RNA
tcgacctcagccctgagttaccc

SEQ ID NO: 103195 - RNA, 23 nt, synthetic construct
  source 1..23: mol_type = other RNA
tgaggtggccgaagtccaggctg

SEQ ID NO: 103196 - RNA, 23 nt, synthetic construct
  source 1..23: mol_type = other RNA
tgtggtgcccaagatgcccgagg

SEQ ID NO: 103197 - RNA, 23 nt, synthetic construct
  source 1..23: mol_type = other RNA
tgttgtccctggagttgaggagg

SEQ ID NO: 103198 - RNA, 23 nt, synthetic construct
  source 1..23: mol_type = other RNA
tgaggtggccgaagtccaggctg

SEQ ID NO: 103199 - RNA, 23 nt, synthetic construct
  source 1..23: mol_type = other RNA
tgatccaggtcgtccctggagtg

SEQ ID NO: 103200 - RNA, 23 nt, synthetic construct
  source 1..23: mol_type = other RNA
ttggtggccatgggtgtggtggt

SEQ ID NO: 103201 - RNA, 23 nt, synthetic construct
  source 1..23: mol_type = other RNA
tgttgtccctggagttgaggagg

SEQ ID NO: 103202 - RNA, 23 nt, synthetic construct
  source 1..23: mol_type = other RNA
tgaggtggccgaagtccaggctg

SEQ ID NO: 103203 - RNA, 23 nt, synthetic construct
  source 1..23: mol_type = other RNA
tgtggtgcccaagatgcccgagg

SEQ ID NO: 103204 - RNA, 23 nt, synthetic construct
  source 1..23: mol_type = other RNA
tgttgtccctggagttgaggagg

SEQ ID NO: 103205 - RNA, 23 nt, synthetic construct
  source 1..23: mol_type = other RNA
tgaggtggccgaagtccaggctg

SEQ ID NO: 103206 - RNA, 23 nt, synthetic construct
  source 1..23: mol_type = other RNA
tgttgtccctggagttgaggagg

SEQ ID NO: 103207 - RNA, 23 nt, synthetic construct
  source 1..23: mol_type = other RNA
ttggcagttgctgacccaccgct

SEQ ID NO: 103208 - RNA, 23 nt, synthetic construct
  source 1..23: mol_type = other RNA
ttgctggaagggcggttgcagtc

SEQ ID NO: 103209 - RNA, 23 nt, synthetic construct
  source 1..23: mol_type = other RNA
ttgctggaagggcggttgcagtc

SEQ ID NO: 103210 - RNA, 23 nt, synthetic construct
  source 1..23: mol_type = other RNA
tgtggtcctggaggtggccctgg

SEQ ID NO: 103211 - RNA, 23 nt, synthetic construct
  source 1..23: mol_type = other RNA
ttgctggaagggcggttgcagtc

SEQ ID NO: 103212 - RNA, 23 nt, synthetic construct
  source 1..23: mol_type = other RNA
ttgctggaagggcggttgcagtc

SEQ ID NO: 103213 - RNA, 23 nt, synthetic construct
  source 1..23: mol_type = other RNA
tggcagcctgggccttccaggtg

SEQ ID NO: 103214 - RNA, 23 nt, synthetic construct
  source 1..23: mol_type = other RNA
tgtgagggctggacagggctgga

SEQ ID NO: 103215 - RNA, 23 nt, synthetic construct
  source 1..23: mol_type = other RNA
tgtgagggctggacagggctgga

SEQ ID NO: 103216 - RNA, 23 nt, synthetic construct
  source 1..23: mol_type = other RNA
tgtgagggctggacagggctgga

SEQ ID NO: 103217 - RNA, 23 nt, synthetic construct
  source 1..23: mol_type = other RNA
tccctccgccatcccctccagct

SEQ ID NO: 103218 - RNA, 23 nt, synthetic construct
  source 1..23: mol_type = other RNA
tactccaccctcagcctcacaga

SEQ ID NO: 103219 - RNA, 23 nt, synthetic construct
  source 1..23: mol_type = other RNA
tgtgctcagagaacacgtagttg

SEQ ID NO: 103220 - RNA, 23 nt, synthetic construct
  source 1..23: mol_type = other RNA
tgcggggtcagcctggcgttgtg

SEQ ID NO: 103221 - RNA, 23 nt, synthetic construct
  source 1..23: mol_type = other RNA
tcgggggcagagctcagggcacc

SEQ ID NO: 103222 - RNA, 23 nt, synthetic construct
  source 1..23: mol_type = other RNA
tcagccttcctgatgatggtgcc

SEQ ID NO: 103223 - RNA, 23 nt, synthetic construct
  source 1..23: mol_type = other RNA
tgtggagtgggggacccaggcgg

SEQ ID NO: 103224 - RNA, 23 nt, synthetic construct
  source 1..23: mol_type = other RNA
ttgggcgtgctggtctcggcctg

SEQ ID NO: 103225 - RNA, 23 nt, synthetic construct
  source 1..23: mol_type = other RNA
taggcgggtccaggtggtgccca

SEQ ID NO: 103226 - RNA, 23 nt, synthetic construct
  source 1..23: mol_type = other RNA
tgtggtcctggaggtggccgtgg

SEQ ID NO: 103227 - RNA, 23 nt, synthetic construct
  source 1..23: mol_type = other RNA
ttggccgtggctgtggtcctgga

SEQ ID NO: 103228 - RNA, 23 nt, synthetic construct
  source 1..23: mol_type = other RNA
tacagcccatggtcaccaccgtg

SEQ ID NO: 103229 - RNA, 23 nt, synthetic construct
  source 1..23: mol_type = other RNA
ttgaacttccccacctgctcacg

SEQ ID NO: 103230 - RNA, 23 nt, synthetic construct
  source 1..23: mol_type = other RNA
taggcgggtccaggtggtgccca

SEQ ID NO: 103231 - RNA, 23 nt, synthetic construct
  source 1..23: mol_type = other RNA
tacagcccatggtcaccaccgtg

SEQ ID NO: 103232 - RNA, 23 nt, synthetic construct
  source 1..23: mol_type = other RNA
ttgaacttccccacctgctcacg

SEQ ID NO: 103233 - RNA, 23 nt, synthetic construct
  source 1..23: mol_type = other RNA
ttggccatgggtgtggtggtctg

SEQ ID NO: 103234 - RNA, 23 nt, synthetic construct
  source 1..23: mol_type = other RNA
tcccgggtggaggaggcggtggc

SEQ ID NO: 103235 - RNA, 23 nt, synthetic construct
  source 1..23: mol_type = other RNA
tggagggagtggctctggagctg

SEQ ID NO: 103236 - RNA, 23 nt, synthetic construct
  source 1..23: mol_type = other RNA
ttgaacttccccacctgctcacg

SEQ ID NO: 103237 - RNA, 23 nt, synthetic construct
  source 1..23: mol_type = other RNA
taggcgggtccaggtggtgccca

SEQ ID NO: 103238 - RNA, 23 nt, synthetic construct
  source 1..23: mol_type = other RNA
tcgtggagccactggttgtgggt

SEQ ID NO: 103239 - RNA, 23 nt, synthetic construct
  source 1..23: mol_type = other RNA
tccgggacggaggagggggtcac

SEQ ID NO: 103240 - RNA, 23 nt, synthetic construct
  source 1..23: mol_type = other RNA
tcccgggacggaggagggggtca

SEQ ID NO: 103241 - RNA, 23 nt, synthetic construct
  source 1..23: mol_type = other RNA
tcagggggacaccaggctgggcc

SEQ ID NO: 103242 - RNA, 23 nt, synthetic construct
  source 1..23: mol_type = other RNA
ttgaacttccccacctgctcacg

SEQ ID NO: 103243 - RNA, 23 nt, synthetic construct
  source 1..23: mol_type = other RNA
taggcgggtccaggtggtgccca

SEQ ID NO: 103244 - RNA, 23 nt, synthetic construct
  source 1..23: mol_type = other RNA
tcgtggagccactggttgtgggt

SEQ ID NO: 103245 - RNA, 23 nt, synthetic construct
  source 1..23: mol_type = other RNA
tggctgcgggtgtggtggccgtg

SEQ ID NO: 103246 - RNA, 23 nt, synthetic construct
  source 1..23: mol_type = other RNA
tcacagggtggaggaggggatgg

SEQ ID NO: 103247 - RNA, 23 nt, synthetic construct
  source 1..23: mol_type = other RNA
tcttgtcatggtggctgtggtgg

SEQ ID NO: 103248 - RNA, 23 nt, synthetic construct
  source 1..23: mol_type = other RNA
tgttcccagagtggaggaggcgg

SEQ ID NO: 103249 - RNA, 23 nt, synthetic construct
  source 1..23: mol_type = other RNA
tatcaggccctcctccttcccat

SEQ ID NO: 103250 - RNA, 23 nt, synthetic construct
  source 1..23: mol_type = other RNA
tatggtggtggtccccagcacag

SEQ ID NO: 103251 - RNA, 23 nt, synthetic construct
  source 1..23: mol_type = other RNA
tgccatcccctccagctgtgggc

SEQ ID NO: 103252 - RNA, 23 nt, synthetic construct
  source 1..23: mol_type = other RNA
tctggcactgccatagccccccg

SEQ ID NO: 103253 - RNA, 23 nt, synthetic construct
  source 1..23: mol_type = other RNA
tgtaggcgtagcgctgggacttg

SEQ ID NO: 103254 - RNA, 23 nt, synthetic construct
  source 1..23: mol_type = other RNA
tttgctgcagtccaggtacacca

SEQ ID NO: 103255 - RNA, 23 nt, synthetic construct
  source 1..23: mol_type = other RNA
tgtgctggaagggcggttgcagt

SEQ ID NO: 103256 - RNA, 23 nt, synthetic construct
  source 1..23: mol_type = other RNA
ttagtggccgtggtggtcagtga

SEQ ID NO: 103257 - RNA, 23 nt, synthetic construct
  source 1..23: mol_type = other RNA
tagttgaggaggggttggtggtg

SEQ ID NO: 103258 - RNA, 23 nt, synthetic construct
  source 1..23: mol_type = other RNA
tccggtggttgctgctagggtgt

SEQ ID NO: 103259 - RNA, 23 nt, synthetic construct
  source 1..23: mol_type = other RNA
tgtgctggaagggcggttgcagt

SEQ ID NO: 103260 - RNA, 23 nt, synthetic construct
  source 1..23: mol_type = other RNA
ttagtggccgtggtggtcagtga

SEQ ID NO: 103261 - RNA, 23 nt, synthetic construct
  source 1..23: mol_type = other RNA
tagttgaggaggggttggtggtg

SEQ ID NO: 103262 - RNA, 23 nt, synthetic construct
  source 1..23: mol_type = other RNA
tggtggccgtggtgttcggcact

SEQ ID NO: 103263 - RNA, 23 nt, synthetic construct
  source 1..23: mol_type = other RNA
tggactgctgggggacagggatc

SEQ ID NO: 103264 - RNA, 23 nt, synthetic construct
  source 1..23: mol_type = other RNA
ttggggtgtgggaagtccccgtg

SEQ ID NO: 103265 - RNA, 23 nt, synthetic construct
  source 1..23: mol_type = other RNA
tgctgggctctgtgaggatccag

SEQ ID NO: 103266 - RNA, 23 nt, synthetic construct
  source 1..23: mol_type = other RNA
tgtgctggaagggcggttgcagt

SEQ ID NO: 103267 - RNA, 23 nt, synthetic construct
  source 1..23: mol_type = other RNA
ttagtggccgtggtggtcagtga

SEQ ID NO: 103268 - RNA, 23 nt, synthetic construct
  source 1..23: mol_type = other RNA
tagttgaggaggggttggtggtg

SEQ ID NO: 103269 - RNA, 23 nt, synthetic construct
  source 1..23: mol_type = other RNA
tggtggccgtggtgttcggcact

SEQ ID NO: 103270 - RNA, 23 nt, synthetic construct
  source 1..23: mol_type = other RNA
tgtgctggaagggcggttgcagt

SEQ ID NO: 103271 - RNA, 23 nt, synthetic construct
  source 1..23: mol_type = other RNA
tagttgaggaggggttggtggtg

SEQ ID NO: 103272 - RNA, 23 nt, synthetic construct
  source 1..23: mol_type = other RNA
tggtggccgtggtgttcggcact

SEQ ID NO: 103273 - RNA, 23 nt, synthetic construct
  source 1..23: mol_type = other RNA
tggactgctgggggacagggatc

SEQ ID NO: 103274 - RNA, 23 nt, synthetic construct
  source 1..23: mol_type = other RNA
ttggggtgtgggaagtccccgtg

SEQ ID NO: 103275 - RNA, 23 nt, synthetic construct
  source 1..23: mol_type = other RNA
ttagtggccgtggtggtcagtga

SEQ ID NO: 103276 - RNA, 23 nt, synthetic construct
  source 1..23: mol_type = other RNA
tagttgaggaggggttggtggtg

SEQ ID NO: 103277 - RNA, 23 nt, synthetic construct
  source 1..23: mol_type = other RNA
tgtcggggaccagccacgtcttg

SEQ ID NO: 103278 - RNA, 23 nt, synthetic construct
  source 1..23: mol_type = other RNA
tgccagggcgtccgggcaggagg

SEQ ID NO: 103279 - RNA, 23 nt, synthetic construct
  source 1..23: mol_type = other RNA
tcctgcacgcagatgcccatgtg

SEQ ID NO: 103280 - RNA, 23 nt, synthetic construct
  source 1..23: mol_type = other RNA
ttgggcgcaggcggccaggtacg

SEQ ID NO: 103281 - RNA, 23 nt, synthetic construct
  source 1..23: mol_type = other RNA
tcagggcgtccgggcaggagggg

SEQ ID NO: 103282 - RNA, 23 nt, synthetic construct
  source 1..23: mol_type = other RNA
tggctggagttccaggacatgcc

SEQ ID NO: 103283 - RNA, 23 nt, synthetic construct
  source 1..23: mol_type = other RNA
tagctccccgtcgtccctggaag

SEQ ID NO: 103284 - RNA, 23 nt, synthetic construct
  source 1..23: mol_type = other RNA
tctgtggcggtgtgggtggtccc

SEQ ID NO: 103285 - RNA, 23 nt, synthetic construct
  source 1..23: mol_type = other RNA
tctgtggcggtgtgggtggtccc

SEQ ID NO: 103286 - RNA, 23 nt, synthetic construct
  source 1..23: mol_type = other RNA
tacgctggtagctgtggatttgg

SEQ ID NO: 103287 - RNA, 23 nt, synthetic construct
  source 1..23: mol_type = other RNA
tcaggagcacggagcgcggggtg

SEQ ID NO: 103288 - RNA, 23 nt, synthetic construct
  source 1..23: mol_type = other RNA
tccagctcggctccacagggccc

SEQ ID NO: 103289 - RNA, 23 nt, synthetic construct
  source 1..23: mol_type = other RNA
tggtggcagatgccctcctcgtc

SEQ ID NO: 103290 - RNA, 23 nt, synthetic construct
  source 1..23: mol_type = other RNA
tctgggcgcaggcggccaggtac

SEQ ID NO: 103291 - RNA, 23 nt, synthetic construct
  source 1..23: mol_type = other RNA
tcgtccacacagtggtcctcgca

SEQ ID NO: 103292 - RNA, 23 nt, synthetic construct
  source 1..23: mol_type = other RNA
tagtggcaccagctgcaccagca

SEQ ID NO: 103293 - RNA, 23 nt, synthetic construct
  source 1..23: mol_type = other RNA
ttggaggatcagctcgtagctct

SEQ ID NO: 103294 - RNA, 23 nt, synthetic construct
  source 1..23: mol_type = other RNA
tcattgtaccagctggaccagcg

SEQ ID NO: 103295 - RNA, 23 nt, synthetic construct
  source 1..23: mol_type = other RNA
tcgggctctgggcggtgcccatt

SEQ ID NO: 103296 - RNA, 23 nt, synthetic construct
  source 1..23: mol_type = other RNA
tgtggctgtaccaagggtgcttg

SEQ ID NO: 103297 - RNA, 23 nt, synthetic construct
  source 1..23: mol_type = other RNA
ttcagcactggggggatgggagt

SEQ ID NO: 103298 - RNA, 23 nt, synthetic construct
  source 1..23: mol_type = other RNA
tgtccctggactggagaagggag

SEQ ID NO: 103299 - RNA, 23 nt, synthetic construct
  source 1..23: mol_type = other RNA
ttggggccgatgtggggctgctg

SEQ ID NO: 103300 - RNA, 23 nt, synthetic construct
  source 1..23: mol_type = other RNA
tgtggacatggaactggtggccc

SEQ ID NO: 103301 - RNA, 23 nt, synthetic construct
  source 1..23: mol_type = other RNA
tgtgccagcagttgcccgggtgg

SEQ ID NO: 103302 - RNA, 23 nt, synthetic construct
  source 1..23: mol_type = other RNA
ttcagcactggggggatgggagt

SEQ ID NO: 103303 - RNA, 23 nt, synthetic construct
  source 1..23: mol_type = other RNA
tgtccctggactggagaagggag

SEQ ID NO: 103304 - RNA, 23 nt, synthetic construct
  source 1..23: mol_type = other RNA
tgccctggttgtggtggccgtgg

SEQ ID NO: 103305 - RNA, 23 nt, synthetic construct
  source 1..23: mol_type = other RNA
ttggctgcgggtgtggtggccgt

SEQ ID NO: 103306 - RNA, 23 nt, synthetic construct
  source 1..23: mol_type = other RNA
ttgtggctgtgcttgtcagcact

SEQ ID NO: 103307 - RNA, 23 nt, synthetic construct
  source 1..23: mol_type = other RNA
tttgtggctgtgcttgtcagcac

SEQ ID NO: 103308 - RNA, 23 nt, synthetic construct
  source 1..23: mol_type = other RNA
tggggtggaggacagggtggccg

SEQ ID NO: 103309 - RNA, 23 nt, synthetic construct
  source 1..23: mol_type = other RNA
tcacctgccggagagggatggca

SEQ ID NO: 103310 - RNA, 23 nt, synthetic construct
  source 1..23: mol_type = other RNA
tgtggtggtccccagcacagaca

SEQ ID NO: 103311 - RNA, 23 nt, synthetic construct
  source 1..23: mol_type = other RNA
taggtggagatgtgggccccgcc

SEQ ID NO: 103312 - RNA, 23 nt, synthetic construct
  source 1..23: mol_type = other RNA
tccgcagctcagccagcacggtg

SEQ ID NO: 103313 - RNA, 23 nt, synthetic construct
  source 1..23: mol_type = other RNA
tgctgtggtgctggccgggggag

SEQ ID NO: 103314 - RNA, 23 nt, synthetic construct
  source 1..23: mol_type = other RNA
tgaggtggacagctcgctcgtga

SEQ ID NO: 103315 - RNA, 23 nt, synthetic construct
  source 1..23: mol_type = other RNA
ttgtggtggttgtgctgatccac

SEQ ID NO: 103316 - RNA, 23 nt, synthetic construct
  source 1..23: mol_type = other RNA
taggaggggttggtggtggagcc

SEQ ID NO: 103317 - RNA, 23 nt, synthetic construct
  source 1..23: mol_type = other RNA
ttcgtggccgtggtgctcacatg

SEQ ID NO: 103318 - RNA, 23 nt, synthetic construct
  source 1..23: mol_type = other RNA
tgggtgtcgtggccgtggtgctc

SEQ ID NO: 103319 - RNA, 23 nt, synthetic construct
  source 1..23: mol_type = other RNA
ttgtggtggttgtgctgatccac

SEQ ID NO: 103320 - RNA, 23 nt, synthetic construct
  source 1..23: mol_type = other RNA
taggaggggttggtggtggagcc

SEQ ID NO: 103321 - RNA, 23 nt, synthetic construct
  source 1..23: mol_type = other RNA
tcagcactggaagggtggttgca

SEQ ID NO: 103322 - RNA, 23 nt, synthetic construct
  source 1..23: mol_type = other RNA
tggtggccatgggtgtggtggtc

SEQ ID NO: 103323 - RNA, 23 nt, synthetic construct
  source 1..23: mol_type = other RNA
tggctgtagtgctgggctctgtg

SEQ ID NO: 103324 - RNA, 23 nt, synthetic construct
  source 1..23: mol_type = other RNA
tggccctggttgtggtggtcgtg

SEQ ID NO: 103325 - RNA, 23 nt, synthetic construct
  source 1..23: mol_type = other RNA
ttgtggtggttgtgctgatccac

SEQ ID NO: 103326 - RNA, 23 nt, synthetic construct
  source 1..23: mol_type = other RNA
taggaggggttggtggtggagcc

SEQ ID NO: 103327 - RNA, 23 nt, synthetic construct
  source 1..23: mol_type = other RNA
ttcgtggccgtggtgctcacatg

SEQ ID NO: 103328 - RNA, 23 nt, synthetic construct
  source 1..23: mol_type = other RNA
tgggtgtcgtggccgtggtgctc

SEQ ID NO: 103329 - RNA, 23 nt, synthetic construct
  source 1..23: mol_type = other RNA
ttgtggtggttgtgctgatccac

SEQ ID NO: 103330 - RNA, 23 nt, synthetic construct
  source 1..23: mol_type = other RNA
taggaggggttggtggtggagcc

SEQ ID NO: 103331 - RNA, 23 nt, synthetic construct
  source 1..23: mol_type = other RNA
tcagcactggaagggtggttgca

SEQ ID NO: 103332 - RNA, 23 nt, synthetic construct
  source 1..23: mol_type = other RNA
ttcgtggccgtggtgctcacatg

SEQ ID NO: 103333 - RNA, 23 nt, synthetic construct
  source 1..23: mol_type = other RNA
tgggtgtcgtggccgtggtgctc

SEQ ID NO: 103334 - RNA, 23 nt, synthetic construct
  source 1..23: mol_type = other RNA
tagggcagttgcagtccctggac

SEQ ID NO: 103335 - RNA, 23 nt, synthetic construct
  source 1..23: mol_type = other RNA
ttgtggtggttgtgctgatccac

SEQ ID NO: 103336 - RNA, 23 nt, synthetic construct
  source 1..23: mol_type = other RNA
taggaggggttggtggtggagcc

SEQ ID NO: 103337 - RNA, 23 nt, synthetic construct
  source 1..23: mol_type = other RNA
tcagcactggaagggtggttgca

SEQ ID NO: 103338 - RNA, 23 nt, synthetic construct
  source 1..23: mol_type = other RNA
ttggtggtccccagcacagacac

SEQ ID NO: 103339 - RNA, 23 nt, synthetic construct
  source 1..23: mol_type = other RNA
tggggcaggcctgcacgcagatg

SEQ ID NO: 103340 - RNA, 23 nt, synthetic construct
  source 1..23: mol_type = other RNA
ttgtggcagggaagggcgcctgg

SEQ ID NO: 103341 - RNA, 23 nt, synthetic construct
  source 1..23: mol_type = other RNA
tggctccgcagaggaggcccaag

SEQ ID NO: 103342 - RNA, 23 nt, synthetic construct
  source 1..23: mol_type = other RNA
tggggctccgcagaggaggccca

SEQ ID NO: 103343 - RNA, 23 nt, synthetic construct
  source 1..23: mol_type = other RNA
ttggagcctctggttgtgggtgt

SEQ ID NO: 103344 - RNA, 23 nt, synthetic construct
  source 1..23: mol_type = other RNA
ttggagcctctggttgtgggtgt

SEQ ID NO: 103345 - RNA, 23 nt, synthetic construct
  source 1..23: mol_type = other RNA
tgctggcacgggtggggggacgg

SEQ ID NO: 103346 - RNA, 23 nt, synthetic construct
  source 1..23: mol_type = other RNA
tgttgacagcgggtcgtgccctg

SEQ ID NO: 103347 - RNA, 23 nt, synthetic construct
  source 1..23: mol_type = other RNA
tgtggaggacggggtggccgtgg

SEQ ID NO: 103348 - RNA, 23 nt, synthetic construct
  source 1..23: mol_type = other RNA
tgtggaggacggggtggccgtgg

SEQ ID NO: 103349 - RNA, 23 nt, synthetic construct
  source 1..23: mol_type = other RNA
tgtggaggacggggtggccgtgg

SEQ ID NO: 103350 - RNA, 23 nt, synthetic construct
  source 1..23: mol_type = other RNA
tgtggaggacggggtggccgtgg

SEQ ID NO: 103351 - RNA, 23 nt, synthetic construct
  source 1..23: mol_type = other RNA
tgtggaggacggggtggccgtgg

SEQ ID NO: 103352 - RNA, 23 nt, synthetic construct
  source 1..23: mol_type = other RNA
tgtggaggacggggtggccgtgg

SEQ ID NO: 103353 - RNA, 23 nt, synthetic construct
  source 1..23: mol_type = other RNA
tgggtggaggacagggtggccgt

SEQ ID NO: 103354 - RNA, 23 nt, synthetic construct
  source 1..23: mol_type = other RNA
tgctcctcccgctgcccattgat

SEQ ID NO: 103355 - RNA, 23 nt, synthetic construct
  source 1..23: mol_type = other RNA
tccctgcacagagcaggtgccag

SEQ ID NO: 103356 - RNA, 23 nt, synthetic construct
  source 1..23: mol_type = other RNA
tccagggcgtccgggcaggaggg

SEQ ID NO: 103357 - RNA, 23 nt, synthetic construct
  source 1..23: mol_type = other RNA
tccttctgccccacctgtgccag

SEQ ID NO: 103358 - RNA, 23 nt, synthetic construct
  source 1..23: mol_type = other RNA
tcggttgcagtccctggactgga

SEQ ID NO: 103359 - RNA, 23 nt, synthetic construct
  source 1..23: mol_type = other RNA
tgtgtggtggttgtgctgatcca

SEQ ID NO: 103360 - RNA, 23 nt, synthetic construct
  source 1..23: mol_type = other RNA
tcggttgcagtccctggactgga

SEQ ID NO: 103361 - RNA, 23 nt, synthetic construct
  source 1..23: mol_type = other RNA
tgtgtggtggttgtgctgatcca

SEQ ID NO: 103362 - RNA, 23 nt, synthetic construct
  source 1..23: mol_type = other RNA
ttgggtgtggtggccgtgctggt

SEQ ID NO: 103363 - RNA, 23 nt, synthetic construct
  source 1..23: mol_type = other RNA
tcactttgagggtgccagcagtt

SEQ ID NO: 103364 - RNA, 23 nt, synthetic construct
  source 1..23: mol_type = other RNA
ttgggtgtggtggccgtgctggt

SEQ ID NO: 103365 - RNA, 23 nt, synthetic construct
  source 1..23: mol_type = other RNA
tcggttgcagtccctggactgga

SEQ ID NO: 103366 - RNA, 23 nt, synthetic construct
  source 1..23: mol_type = other RNA
tgtgtggtggttgtgctgatcca

SEQ ID NO: 103367 - RNA, 23 nt, synthetic construct
  source 1..23: mol_type = other RNA
tcggttgcagtccctggactgga

SEQ ID NO: 103368 - RNA, 23 nt, synthetic construct
  source 1..23: mol_type = other RNA
ttggaggagggggtgactgtgaa

SEQ ID NO: 103369 - RNA, 23 nt, synthetic construct
  source 1..23: mol_type = other RNA
tgtgtggtggttgtgctgatcca

SEQ ID NO: 103370 - RNA, 23 nt, synthetic construct
  source 1..23: mol_type = other RNA
tgtgtggtggttgtgctgatcca

SEQ ID NO: 103371 - RNA, 23 nt, synthetic construct
  source 1..23: mol_type = other RNA
tgggtgtgagctgttcccagagt

SEQ ID NO: 103372 - RNA, 23 nt, synthetic construct
  source 1..23: mol_type = other RNA
tcaggggagggcgaggacagcgg

SEQ ID NO: 103373 - RNA, 23 nt, synthetic construct
  source 1..23: mol_type = other RNA
tggggaccagccacgtcttggcc

SEQ ID NO: 103374 - RNA, 23 nt, synthetic construct
  source 1..23: mol_type = other RNA
tcccagcagccatcctttctgct

SEQ ID NO: 103375 - RNA, 23 nt, synthetic construct
  source 1..23: mol_type = other RNA
taggggttctcggcccggggcct

SEQ ID NO: 103376 - RNA, 23 nt, synthetic construct
  source 1..23: mol_type = other RNA
tggcaggtggttgtgttgcacac

SEQ ID NO: 103377 - RNA, 23 nt, synthetic construct
  source 1..23: mol_type = other RNA
tcacacaggccggggggctccgc

SEQ ID NO: 103378 - RNA, 23 nt, synthetic construct
  source 1..23: mol_type = other RNA
tatcagggaggggcaaggccaag

SEQ ID NO: 103379 - RNA, 23 nt, synthetic construct
  source 1..23: mol_type = other RNA
tgctccggccgtggcagggacac

SEQ ID NO: 103380 - RNA, 23 nt, synthetic construct
  source 1..23: mol_type = other RNA
tacccatcctgggggctggcacg

SEQ ID NO: 103381 - RNA, 23 nt, synthetic construct
  source 1..23: mol_type = other RNA
ttcggggcacccatcctgggggc

SEQ ID NO: 103382 - RNA, 23 nt, synthetic construct
  source 1..23: mol_type = other RNA
ttcggctccacagggccctgggt

SEQ ID NO: 103383 - RNA, 23 nt, synthetic construct
  source 1..23: mol_type = other RNA
ttcccagctcggctccacagggc

SEQ ID NO: 103384 - RNA, 23 nt, synthetic construct
  source 1..23: mol_type = other RNA
tttgtagtggaagtcaccccagg

SEQ ID NO: 103385 - RNA, 23 nt, synthetic construct
  source 1..23: mol_type = other RNA
tgacgcctccagcaccagcccct

SEQ ID NO: 103386 - RNA, 23 nt, synthetic construct
  source 1..23: mol_type = other RNA
tcgctgcccattgatgaggacgg

SEQ ID NO: 103387 - RNA, 23 nt, synthetic construct
  source 1..23: mol_type = other RNA
tggagcggggtcagcctggcgtt

SEQ ID NO: 103388 - RNA, 23 nt, synthetic construct
  source 1..23: mol_type = other RNA
tgtcctgggcgcaggcggccagg

SEQ ID NO: 103389 - RNA, 23 nt, synthetic construct
  source 1..23: mol_type = other RNA
tgtggcacacgggcaggtggggc

SEQ ID NO: 103390 - RNA, 23 nt, synthetic construct
  source 1..23: mol_type = other RNA
tcccggagcaggtgcaggagctg

SEQ ID NO: 103391 - RNA, 23 nt, synthetic construct
  source 1..23: mol_type = other RNA
ttgggccccgccctgcacagagc

SEQ ID NO: 103392 - RNA, 23 nt, synthetic construct
  source 1..23: mol_type = other RNA
tccccaggcctgtctgcaccacg

SEQ ID NO: 103393 - RNA, 23 nt, synthetic construct
  source 1..23: mol_type = other RNA
tgcagcctgggccttccaggtgt

SEQ ID NO: 103394 - RNA, 23 nt, synthetic construct
  source 1..23: mol_type = other RNA
tgagcaccagtgccgggcgtagt

SEQ ID NO: 103395 - RNA, 23 nt, synthetic construct
  source 1..23: mol_type = other RNA
tgtggcagcgcgagaaggcactg

SEQ ID NO: 103396 - RNA, 23 nt, synthetic construct
  source 1..23: mol_type = other RNA
tgcggcaagtgggctggcaggca

SEQ ID NO: 103397 - RNA, 23 nt, synthetic construct
  source 1..23: mol_type = other RNA
tccgagctgttgctgcagtccag

SEQ ID NO: 103398 - RNA, 23 nt, synthetic construct
  source 1..23: mol_type = other RNA
tcctccggttcctgcaggtgcag

SEQ ID NO: 103399 - RNA, 23 nt, synthetic construct
  source 1..23: mol_type = other RNA
tccaggacacggccatcccgtgg

SEQ ID NO: 103400 - RNA, 23 nt, synthetic construct
  source 1..23: mol_type = other RNA
taaacactcgcagtcgccacccg

SEQ ID NO: 103401 - RNA, 23 nt, synthetic construct
  source 1..23: mol_type = other RNA
tctgggtgtgcagttacagctct

SEQ ID NO: 103402 - RNA, 23 nt, synthetic construct
  source 1..23: mol_type = other RNA
ttcccaggccgggctctgggcgg

SEQ ID NO: 103403 - RNA, 23 nt, synthetic construct
  source 1..23: mol_type = other RNA
ttgagggagggctgagggctggt

SEQ ID NO: 103404 - RNA, 23 nt, synthetic construct
  source 1..23: mol_type = other RNA
tacccatagggtggtcttttcgg

SEQ ID NO: 103405 - RNA, 23 nt, synthetic construct
  source 1..23: mol_type = other RNA
tgtgctggccgggggagccctgg

SEQ ID NO: 103406 - RNA, 23 nt, synthetic construct
  source 1..23: mol_type = other RNA
ttgggtgtggtggccgtggtggt

SEQ ID NO: 103407 - RNA, 23 nt, synthetic construct
  source 1..23: mol_type = other RNA
tgtggccacagagccggtggccc

SEQ ID NO: 103408 - RNA, 23 nt, synthetic construct
  source 1..23: mol_type = other RNA
ttgttcctggggtggaggagggg

SEQ ID NO: 103409 - RNA, 23 nt, synthetic construct
  source 1..23: mol_type = other RNA
ttagtgtgagctgttcctggggt

SEQ ID NO: 103410 - RNA, 23 nt, synthetic construct
  source 1..23: mol_type = other RNA
tgcctctggttgtgggtgtggtg

SEQ ID NO: 103411 - RNA, 23 nt, synthetic construct
  source 1..23: mol_type = other RNA
ttctgtgtgctagaggagggtgt

SEQ ID NO: 103412 - RNA, 23 nt, synthetic construct
  source 1..23: mol_type = other RNA
tgtagtggccgtggtggtcagtg

SEQ ID NO: 103413 - RNA, 23 nt, synthetic construct
  source 1..23: mol_type = other RNA
tggagtcactgtgttgctggtgg

SEQ ID NO: 103414 - RNA, 23 nt, synthetic construct
  source 1..23: mol_type = other RNA
ttggggactgctggggggcaggg

SEQ ID NO: 103415 - RNA, 23 nt, synthetic construct
  source 1..23: mol_type = other RNA
ttgtgatgtgggtggtgcccaag

SEQ ID NO: 103416 - RNA, 23 nt, synthetic construct
  source 1..23: mol_type = other RNA
tcatggtcaccaccgtggttatg

SEQ ID NO: 103417 - RNA, 23 nt, synthetic construct
  source 1..23: mol_type = other RNA
tcacagcccatggtcaccaccgt

SEQ ID NO: 103418 - RNA, 23 nt, synthetic construct
  source 1..23: mol_type = other RNA
tagctgtagtccagccactctga

SEQ ID NO: 103419 - RNA, 23 nt, synthetic construct
  source 1..23: mol_type = other RNA
tcaggccaaagtccaggctgcat

SEQ ID NO: 103420 - RNA, 23 nt, synthetic construct
  source 1..23: mol_type = other RNA
tgtggccacagagccggtggccc

SEQ ID NO: 103421 - RNA, 23 nt, synthetic construct
  source 1..23: mol_type = other RNA
ttgttcctggggtggaggagggg

SEQ ID NO: 103422 - RNA, 23 nt, synthetic construct
  source 1..23: mol_type = other RNA
ttagtgtgagctgttcctggggt

SEQ ID NO: 103423 - RNA, 23 nt, synthetic construct
  source 1..23: mol_type = other RNA
ttctgtgtgctagaggagggtgt

SEQ ID NO: 103424 - RNA, 23 nt, synthetic construct
  source 1..23: mol_type = other RNA
tgtagtggccgtggtggtcagtg

SEQ ID NO: 103425 - RNA, 23 nt, synthetic construct
  source 1..23: mol_type = other RNA
tgtggtgcccaaggtgcctgagg

SEQ ID NO: 103426 - RNA, 23 nt, synthetic construct
  source 1..23: mol_type = other RNA
ttgtgatgtgggtggtgcccaag

SEQ ID NO: 103427 - RNA, 23 nt, synthetic construct
  source 1..23: mol_type = other RNA
ttggttgctgctggggtgtggga

SEQ ID NO: 103428 - RNA, 23 nt, synthetic construct
  source 1..23: mol_type = other RNA
tcatggtcaccaccgtggttatt

SEQ ID NO: 103429 - RNA, 23 nt, synthetic construct
  source 1..23: mol_type = other RNA
tcacagcccatggtcaccaccgt

SEQ ID NO: 103430 - RNA, 23 nt, synthetic construct
  source 1..23: mol_type = other RNA
tagctgtagtccagccactctga

SEQ ID NO: 103431 - RNA, 23 nt, synthetic construct
  source 1..23: mol_type = other RNA
tcaggccaaagtccaggctgcat

SEQ ID NO: 103432 - RNA, 23 nt, synthetic construct
  source 1..23: mol_type = other RNA
tgctgttcccggggtggaggacg

SEQ ID NO: 103433 - RNA, 23 nt, synthetic construct
  source 1..23: mol_type = other RNA
tggccatgggtgtggtggtctgt

SEQ ID NO: 103434 - RNA, 23 nt, synthetic construct
  source 1..23: mol_type = other RNA
tggtctccggagtggaggagggg

SEQ ID NO: 103435 - RNA, 23 nt, synthetic construct
  source 1..23: mol_type = other RNA
tacatggaactggtggcccttgt

SEQ ID NO: 103436 - RNA, 23 nt, synthetic construct
  source 1..23: mol_type = other RNA
tgggtggacatggaactggtggc

SEQ ID NO: 103437 - RNA, 23 nt, synthetic construct
  source 1..23: mol_type = other RNA
ttgtagtggctgctgtggtcagc

SEQ ID NO: 103438 - RNA, 23 nt, synthetic construct
  source 1..23: mol_type = other RNA
tttgtagtggctgctgtggtcag

SEQ ID NO: 103439 - RNA, 23 nt, synthetic construct
  source 1..23: mol_type = other RNA
tcagttgtagtggctgctgtggt

SEQ ID NO: 103440 - RNA, 23 nt, synthetic construct
  source 1..23: mol_type = other RNA
tggtgccagcagttgcccgggtg

SEQ ID NO: 103441 - RNA, 23 nt, synthetic construct
  source 1..23: mol_type = other RNA
taggcggtgcccagggaggaaga

SEQ ID NO: 103442 - RNA, 23 nt, synthetic construct
  source 1..23: mol_type = other RNA
tcaggcggtgcccagggaggaag

SEQ ID NO: 103443 - RNA, 23 nt, synthetic construct
  source 1..23: mol_type = other RNA
tccctggttgtggtggtcgtggt

SEQ ID NO: 103444 - RNA, 23 nt, synthetic construct
  source 1..23: mol_type = other RNA
tgtggccacagagccggtggccc

SEQ ID NO: 103445 - RNA, 23 nt, synthetic construct
  source 1..23: mol_type = other RNA
ttgttcctggggtggaggagggg

SEQ ID NO: 103446 - RNA, 23 nt, synthetic construct
  source 1..23: mol_type = other RNA
ttagtgtgagctgttcctggggt

SEQ ID NO: 103447 - RNA, 23 nt, synthetic construct
  source 1..23: mol_type = other RNA
tgcctctggttgtgggtgtggtg

SEQ ID NO: 103448 - RNA, 23 nt, synthetic construct
  source 1..23: mol_type = other RNA
ttctgtgtgctagaggagggtgt

SEQ ID NO: 103449 - RNA, 23 nt, synthetic construct
  source 1..23: mol_type = other RNA
tgtagtggccgtggtggtcagtg

SEQ ID NO: 103450 - RNA, 23 nt, synthetic construct
  source 1..23: mol_type = other RNA
ttggggactgctggggggcaggg

SEQ ID NO: 103451 - RNA, 23 nt, synthetic construct
  source 1..23: mol_type = other RNA
ttgtgatgtgggtggtgcccaag

SEQ ID NO: 103452 - RNA, 23 nt, synthetic construct
  source 1..23: mol_type = other RNA
ttggttgctgctggggtgtggga

SEQ ID NO: 103453 - RNA, 23 nt, synthetic construct
  source 1..23: mol_type = other RNA
tagctgtagtccagccactctga

SEQ ID NO: 103454 - RNA, 23 nt, synthetic construct
  source 1..23: mol_type = other RNA
tcaggccaaagtccaggctgcat

SEQ ID NO: 103455 - RNA, 23 nt, synthetic construct
  source 1..23: mol_type = other RNA
tgtggccacagagccggtggccc

SEQ ID NO: 103456 - RNA, 23 nt, synthetic construct
  source 1..23: mol_type = other RNA
ttagtgtgagctgttcctggggt

SEQ ID NO: 103457 - RNA, 23 nt, synthetic construct
  source 1..23: mol_type = other RNA
ttctgtgtgctagaggagggtgt

SEQ ID NO: 103458 - RNA, 23 nt, synthetic construct
  source 1..23: mol_type = other RNA
tgtggtgcccaaggtgcctgagg

SEQ ID NO: 103459 - RNA, 23 nt, synthetic construct
  source 1..23: mol_type = other RNA
ttgtgatgtgggtggtgcccaag

SEQ ID NO: 103460 - RNA, 23 nt, synthetic construct
  source 1..23: mol_type = other RNA
ttggttgctgctggggtgtggga

SEQ ID NO: 103461 - RNA, 23 nt, synthetic construct
  source 1..23: mol_type = other RNA
tggggtggtcgtccctggggaag

SEQ ID NO: 103462 - RNA, 23 nt, synthetic construct
  source 1..23: mol_type = other RNA
tagctgtagtccagccactctga

SEQ ID NO: 103463 - RNA, 23 nt, synthetic construct
  source 1..23: mol_type = other RNA
tcaggccaaagtccaggctgcat

SEQ ID NO: 103464 - RNA, 23 nt, synthetic construct
  source 1..23: mol_type = other RNA
tgctgttcccggggtggaggacg

SEQ ID NO: 103465 - RNA, 23 nt, synthetic construct
  source 1..23: mol_type = other RNA
tgtggtggccgggctggtcagca

SEQ ID NO: 103466 - RNA, 23 nt, synthetic construct
  source 1..23: mol_type = other RNA
tggtctccggagtggaggagggg

SEQ ID NO: 103467 - RNA, 23 nt, synthetic construct
  source 1..23: mol_type = other RNA
tgtggaactggtggcccttgtcg

SEQ ID NO: 103468 - RNA, 23 nt, synthetic construct
  source 1..23: mol_type = other RNA
tgggtggacgtggaactggtggc

SEQ ID NO: 103469 - RNA, 23 nt, synthetic construct
  source 1..23: mol_type = other RNA
ttgtagtggctgctgtggtcagc

SEQ ID NO: 103470 - RNA, 23 nt, synthetic construct
  source 1..23: mol_type = other RNA
tttgtagtggctgctgtggtcag

SEQ ID NO: 103471 - RNA, 23 nt, synthetic construct
  source 1..23: mol_type = other RNA
tcagttgtagtggctgctgtggt

SEQ ID NO: 103472 - RNA, 23 nt, synthetic construct
  source 1..23: mol_type = other RNA
tgcagttgcagtccctggactgg

SEQ ID NO: 103473 - RNA, 23 nt, synthetic construct
  source 1..23: mol_type = other RNA
tgtggccacagagccggtggccc

SEQ ID NO: 103474 - RNA, 23 nt, synthetic construct
  source 1..23: mol_type = other RNA
ttgttcctggggtggaggagggg

SEQ ID NO: 103475 - RNA, 23 nt, synthetic construct
  source 1..23: mol_type = other RNA
ttagtgtgagctgttcctggggt

SEQ ID NO: 103476 - RNA, 23 nt, synthetic construct
  source 1..23: mol_type = other RNA
ttctgtgtgctagaggagggtgt

SEQ ID NO: 103477 - RNA, 23 nt, synthetic construct
  source 1..23: mol_type = other RNA
tgtagtggccgtggtggtcagtg

SEQ ID NO: 103478 - RNA, 23 nt, synthetic construct
  source 1..23: mol_type = other RNA
ttcagcactggggtgatgggtgt

SEQ ID NO: 103479 - RNA, 23 nt, synthetic construct
  source 1..23: mol_type = other RNA
ttggctttggagctggtggctgc

SEQ ID NO: 103480 - RNA, 23 nt, synthetic construct
  source 1..23: mol_type = other RNA
tgtggctttggagctggtggctg

SEQ ID NO: 103481 - RNA, 23 nt, synthetic construct
  source 1..23: mol_type = other RNA
tttgtggacatggtggacatggg

SEQ ID NO: 103482 - RNA, 23 nt, synthetic construct
  source 1..23: mol_type = other RNA
taggtgtggattgtggacatggt

SEQ ID NO: 103483 - RNA, 23 nt, synthetic construct
  source 1..23: mol_type = other RNA
tgctgaaggttggcaggctgctg

SEQ ID NO: 103484 - RNA, 23 nt, synthetic construct
  source 1..23: mol_type = other RNA
tgggagggcgaggacagcggggc

SEQ ID NO: 103485 - RNA, 23 nt, synthetic construct
  source 1..23: mol_type = other RNA
tgccccacatgctgcagatgcac

SEQ ID NO: 103486 - RNA, 23 nt, synthetic construct
  source 1..23: mol_type = other RNA
ttcaggccctcctccttcccatg

SEQ ID NO: 103487 - RNA, 23 nt, synthetic construct
  source 1..23: mol_type = other RNA
tgatcaggccctcctccttccca

SEQ ID NO: 103488 - RNA, 23 nt, synthetic construct
  source 1..23: mol_type = other RNA
tggatcaggccctcctccttccc

SEQ ID NO: 103489 - RNA, 23 nt, synthetic construct
  source 1..23: mol_type = other RNA
tggtgacgctcacgcccagggca

SEQ ID NO: 103490 - RNA, 23 nt, synthetic construct
  source 1..23: mol_type = other RNA
tatctggtcctcagggcagaagc

SEQ ID NO: 103491 - RNA, 23 nt, synthetic construct
  source 1..23: mol_type = other RNA
tgtgcagatggactcctgccctg

SEQ ID NO: 103492 - RNA, 23 nt, synthetic construct
  source 1..23: mol_type = other RNA
ttcctcctgggtgcagatggact

SEQ ID NO: 103493 - RNA, 23 nt, synthetic construct
  source 1..23: mol_type = other RNA
tgctggactggctggccatcggg

SEQ ID NO: 103494 - RNA, 23 nt, synthetic construct
  source 1..23: mol_type = other RNA
ttcagctggactggctggccatc

SEQ ID NO: 103495 - RNA, 23 nt, synthetic construct
  source 1..23: mol_type = other RNA
tccctcagcctcacagaggtaca

SEQ ID NO: 103496 - RNA, 23 nt, synthetic construct
  source 1..23: mol_type = other RNA
tctcgcagccctggtgccacagg

SEQ ID NO: 103497 - RNA, 23 nt, synthetic construct
  source 1..23: mol_type = other RNA
tggacccgcctctcctggcagca

SEQ ID NO: 103498 - RNA, 23 nt, synthetic construct
  source 1..23: mol_type = other RNA
tgaggcccaaggttttcatgatc

SEQ ID NO: 103499 - RNA, 23 nt, synthetic construct
  source 1..23: mol_type = other RNA
tctgcgcgggcgctccggccgtg

SEQ ID NO: 103500 - RNA, 23 nt, synthetic construct
  source 1..23: mol_type = other RNA
tgggacggggacgggcagggagg

SEQ ID NO: 103501 - RNA, 23 nt, synthetic construct
  source 1..23: mol_type = other RNA
tgcctggagcccactaggcctcg

SEQ ID NO: 103502 - RNA, 23 nt, synthetic construct
  source 1..23: mol_type = other RNA
tggcctggagcccactaggcctc

SEQ ID NO: 103503 - RNA, 23 nt, synthetic construct
  source 1..23: mol_type = other RNA
taggcctggagcccactaggcct

SEQ ID NO: 103504 - RNA, 23 nt, synthetic construct
  source 1..23: mol_type = other RNA
tcaggcctggagcccactaggcc

SEQ ID NO: 103505 - RNA, 23 nt, synthetic construct
  source 1..23: mol_type = other RNA
tcaccaggaggccagtgcggctg

SEQ ID NO: 103506 - RNA, 23 nt, synthetic construct
  source 1..23: mol_type = other RNA
tccaccaggaggccagtgcggct

SEQ ID NO: 103507 - RNA, 23 nt, synthetic construct
  source 1..23: mol_type = other RNA
tagtccccgctctgctccaccag

SEQ ID NO: 103508 - RNA, 23 nt, synthetic construct
  source 1..23: mol_type = other RNA
tgccggatgctgaccttgatgta

SEQ ID NO: 103509 - RNA, 23 nt, synthetic construct
  source 1..23: mol_type = other RNA
tttgaagtccccacacaggccac

SEQ ID NO: 103510 - RNA, 23 nt, synthetic construct
  source 1..23: mol_type = other RNA
tgttgaagtccccacacaggcca

SEQ ID NO: 103511 - RNA, 23 nt, synthetic construct
  source 1..23: mol_type = other RNA
tgcagagctcagggcacctccag

SEQ ID NO: 103512 - RNA, 23 nt, synthetic construct
  source 1..23: mol_type = other RNA
tgcagaagcagccgtccacacag

SEQ ID NO: 103513 - RNA, 23 nt, synthetic construct
  source 1..23: mol_type = other RNA
tcctggcattggcacaggcagcc

SEQ ID NO: 103514 - RNA, 23 nt, synthetic construct
  source 1..23: mol_type = other RNA
tatgatggagtggcagcgcgaga

SEQ ID NO: 103515 - RNA, 23 nt, synthetic construct
  source 1..23: mol_type = other RNA
tgggttgatgatggagtggcagc

SEQ ID NO: 103516 - RNA, 23 nt, synthetic construct
  source 1..23: mol_type = other RNA
tgcggggcaggtgcagccgtcca

SEQ ID NO: 103517 - RNA, 23 nt, synthetic construct
  source 1..23: mol_type = other RNA
taggaaggtgcccgcggggcagg

SEQ ID NO: 103518 - RNA, 23 nt, synthetic construct
  source 1..23: mol_type = other RNA
tcaggggcactcctgggcgggca

SEQ ID NO: 103519 - RNA, 23 nt, synthetic construct
  source 1..23: mol_type = other RNA
tggcgccctcgtcgtgcaccacc

SEQ ID NO: 103520 - RNA, 23 nt, synthetic construct
  source 1..23: mol_type = other RNA
tgagctgttgctgcagtccaggt

SEQ ID NO: 103521 - RNA, 23 nt, synthetic construct
  source 1..23: mol_type = other RNA
tgatgtactcgcagctgccttca

SEQ ID NO: 103522 - RNA, 23 nt, synthetic construct
  source 1..23: mol_type = other RNA
ttgttgtccccacagtagtcctg

SEQ ID NO: 103523 - RNA, 23 nt, synthetic construct
  source 1..23: mol_type = other RNA
tggtcccgtgggtggtgttgtcc

SEQ ID NO: 103524 - RNA, 23 nt, synthetic construct
  source 1..23: mol_type = other RNA
tcgggcaggagggggagagcttc

SEQ ID NO: 103525 - RNA, 23 nt, synthetic construct
  source 1..23: mol_type = other RNA
ttccgggcaggagggggagagct

SEQ ID NO: 103526 - RNA, 23 nt, synthetic construct
  source 1..23: mol_type = other RNA
tggcctgggcgtaggcagccaca

SEQ ID NO: 103527 - RNA, 23 nt, synthetic construct
  source 1..23: mol_type = other RNA
taggcctgggcgtaggcagccac

SEQ ID NO: 103528 - RNA, 23 nt, synthetic construct
  source 1..23: mol_type = other RNA
tcgtggcaggcctgggcgtaggc

SEQ ID NO: 103529 - RNA, 23 nt, synthetic construct
  source 1..23: mol_type = other RNA
taggggcaggtgtccggagtccg

SEQ ID NO: 103530 - RNA, 23 nt, synthetic construct
  source 1..23: mol_type = other RNA
tcttcctgatgatggtgccgttg

SEQ ID NO: 103531 - RNA, 23 nt, synthetic construct
  source 1..23: mol_type = other RNA
tgagtgggggacccaggcggtgg

SEQ ID NO: 103532 - RNA, 23 nt, synthetic construct
  source 1..23: mol_type = other RNA
tgcccattgtaccagctggacca

SEQ ID NO: 103533 - RNA, 23 nt, synthetic construct
  source 1..23: mol_type = other RNA
tggccgggctctgggcggtgccc

SEQ ID NO: 103534 - RNA, 23 nt, synthetic construct
  source 1..23: mol_type = other RNA
tatgtcagccagcacagggcata

SEQ ID NO: 103535 - RNA, 23 nt, synthetic construct
  source 1..23: mol_type = other RNA
ttggtgcctggggccggggaggg

SEQ ID NO: 103536 - RNA, 23 nt, synthetic construct
  source 1..23: mol_type = other RNA
tgctgagggctggtgcctggggc

SEQ ID NO: 103537 - RNA, 23 nt, synthetic construct
  source 1..23: mol_type = other RNA
tgtctgggttggggtaggcacag

SEQ ID NO: 103538 - RNA, 23 nt, synthetic construct
  source 1..23: mol_type = other RNA
ttgtgccagggtccagttgggga

SEQ ID NO: 103539 - RNA, 23 nt, synthetic construct
  source 1..23: mol_type = other RNA
tcccacctgtgccagggtccagt

SEQ ID NO: 103540 - RNA, 23 nt, synthetic construct
  source 1..23: mol_type = other RNA
tactgctgtggtgctggccgggg

SEQ ID NO: 103541 - RNA, 23 nt, synthetic construct
  source 1..23: mol_type = other RNA
tgtggctgtgaggggcgccatgt

SEQ ID NO: 103542 - RNA, 23 nt, synthetic construct
  source 1..23: mol_type = other RNA
ttgtcctgggcgtgctggtctcg

SEQ ID NO: 103543 - RNA, 23 nt, synthetic construct
  source 1..23: mol_type = other RNA
tggctggtggtggtgttagtcaa

SEQ ID NO: 103544 - RNA, 23 nt, synthetic construct
  source 1..23: mol_type = other RNA
ttggctggtggtggtgttagtca

SEQ ID NO: 103545 - RNA, 23 nt, synthetic construct
  source 1..23: mol_type = other RNA
ttcgtgccctggctggtggtggt

SEQ ID NO: 103546 - RNA, 23 nt, synthetic construct
  source 1..23: mol_type = other RNA
ttggactggaggagggagtggct

SEQ ID NO: 103547 - RNA, 23 nt, synthetic construct
  source 1..23: mol_type = other RNA
tggtgtggtggctgtgcttctca

SEQ ID NO: 103548 - RNA, 23 nt, synthetic construct
  source 1..23: mol_type = other RNA
tggtccaggtggtgcccagggag

SEQ ID NO: 103549 - RNA, 23 nt, synthetic construct
  source 1..23: mol_type = other RNA
ttggtggccgtgggtgtggtggt

SEQ ID NO: 103550 - RNA, 23 nt, synthetic construct
  source 1..23: mol_type = other RNA
tggacatggtggccgtgggtgtg

SEQ ID NO: 103551 - RNA, 23 nt, synthetic construct
  source 1..23: mol_type = other RNA
tagttgtggtggccgtggcggta

SEQ ID NO: 103552 - RNA, 23 nt, synthetic construct
  source 1..23: mol_type = other RNA
tgggtggccacagagccggtggc

SEQ ID NO: 103553 - RNA, 23 nt, synthetic construct
  source 1..23: mol_type = other RNA
tggggtggccacagagccggtgg

SEQ ID NO: 103554 - RNA, 23 nt, synthetic construct
  source 1..23: mol_type = other RNA
ttggtccccgggatggaggaggg

SEQ ID NO: 103555 - RNA, 23 nt, synthetic construct
  source 1..23: mol_type = other RNA
tgtggtccccgggatggaggagg

SEQ ID NO: 103556 - RNA, 23 nt, synthetic construct
  source 1..23: mol_type = other RNA
tgtggtcagcactgtggcggtgt

SEQ ID NO: 103557 - RNA, 23 nt, synthetic construct
  source 1..23: mol_type = other RNA
ttggccacagttgtggtggtggt

SEQ ID NO: 103558 - RNA, 23 nt, synthetic construct
  source 1..23: mol_type = other RNA
tcactggtctgtgtgctagagga

SEQ ID NO: 103559 - RNA, 23 nt, synthetic construct
  source 1..23: mol_type = other RNA
tgtggccgtggtggtcagtgatg

SEQ ID NO: 103560 - RNA, 23 nt, synthetic construct
  source 1..23: mol_type = other RNA
tggttggtggtggagccggtggc

SEQ ID NO: 103561 - RNA, 23 nt, synthetic construct
  source 1..23: mol_type = other RNA
tgtggtcagcactggggggatgg

SEQ ID NO: 103562 - RNA, 23 nt, synthetic construct
  source 1..23: mol_type = other RNA
tggtggtcagcactggggggatg

SEQ ID NO: 103563 - RNA, 23 nt, synthetic construct
  source 1..23: mol_type = other RNA
tgggcagaggagggagtcactgt

SEQ ID NO: 103564 - RNA, 23 nt, synthetic construct
  source 1..23: mol_type = other RNA
tctgctggggggcagggatcgcc

SEQ ID NO: 103565 - RNA, 23 nt, synthetic construct
  source 1..23: mol_type = other RNA
tccgaggtggccgaagtccaggc

SEQ ID NO: 103566 - RNA, 23 nt, synthetic construct
  source 1..23: mol_type = other RNA
tgctggaaagggctggagtcgag

SEQ ID NO: 103567 - RNA, 23 nt, synthetic construct
  source 1..23: mol_type = other RNA
tctagggtgagggctggaaaggg

SEQ ID NO: 103568 - RNA, 23 nt, synthetic construct
  source 1..23: mol_type = other RNA
ttggctgtggtcctggaggtggc

SEQ ID NO: 103569 - RNA, 23 nt, synthetic construct
  source 1..23: mol_type = other RNA
tagcccatggtcaccaccgtggt

SEQ ID NO: 103570 - RNA, 23 nt, synthetic construct
  source 1..23: mol_type = other RNA
tgctgggcctgggcacggcactc

SEQ ID NO: 103571 - RNA, 23 nt, synthetic construct
  source 1..23: mol_type = other RNA
taggctgggcctgggcacggcac

SEQ ID NO: 103572 - RNA, 23 nt, synthetic construct
  source 1..23: mol_type = other RNA
tcgtcacggtggctgtagtgctc

SEQ ID NO: 103573 - RNA, 23 nt, synthetic construct
  source 1..23: mol_type = other RNA
tggaggcggtggccgtggatccg

SEQ ID NO: 103574 - RNA, 23 nt, synthetic construct
  source 1..23: mol_type = other RNA
ttggtgactgtgggtgtcgtggc

SEQ ID NO: 103575 - RNA, 23 nt, synthetic construct
  source 1..23: mol_type = other RNA
tgcagtccctggactggagaagg

SEQ ID NO: 103576 - RNA, 23 nt, synthetic construct
  source 1..23: mol_type = other RNA
tggtgtggtggctgtgcttctca

SEQ ID NO: 103577 - RNA, 23 nt, synthetic construct
  source 1..23: mol_type = other RNA
tggtccaggtggtgcccagggag

SEQ ID NO: 103578 - RNA, 23 nt, synthetic construct
  source 1..23: mol_type = other RNA
ttggtggccgtgggtgtggtggt

SEQ ID NO: 103579 - RNA, 23 nt, synthetic construct
  source 1..23: mol_type = other RNA
tggacatggtggccgtgggtgtg

SEQ ID NO: 103580 - RNA, 23 nt, synthetic construct
  source 1..23: mol_type = other RNA
tgggtggccacagagccggtggc

SEQ ID NO: 103581 - RNA, 23 nt, synthetic construct
  source 1..23: mol_type = other RNA
tggggtggccacagagccggtgg

SEQ ID NO: 103582 - RNA, 23 nt, synthetic construct
  source 1..23: mol_type = other RNA
tccgtggaacctctggttgtggg

SEQ ID NO: 103583 - RNA, 23 nt, synthetic construct
  source 1..23: mol_type = other RNA
ttggtccccgggatggaggaggg

SEQ ID NO: 103584 - RNA, 23 nt, synthetic construct
  source 1..23: mol_type = other RNA
tgtggtccccgggatggaggagg

SEQ ID NO: 103585 - RNA, 23 nt, synthetic construct
  source 1..23: mol_type = other RNA
ttggccacagttgtggtggtggt

SEQ ID NO: 103586 - RNA, 23 nt, synthetic construct
  source 1..23: mol_type = other RNA
tcactggtctgtgtgctagagga

SEQ ID NO: 103587 - RNA, 23 nt, synthetic construct
  source 1..23: mol_type = other RNA
tgtggccgtggtggtcagtgatg

SEQ ID NO: 103588 - RNA, 23 nt, synthetic construct
  source 1..23: mol_type = other RNA
tggttggtggtggagccggtggc

SEQ ID NO: 103589 - RNA, 23 nt, synthetic construct
  source 1..23: mol_type = other RNA
tgtggtcagcactggggggatag

SEQ ID NO: 103590 - RNA, 23 nt, synthetic construct
  source 1..23: mol_type = other RNA
tggtggtcagcactggggggata

SEQ ID NO: 103591 - RNA, 23 nt, synthetic construct
  source 1..23: mol_type = other RNA
tgggcagaggagggagtcactgt

SEQ ID NO: 103592 - RNA, 23 nt, synthetic construct
  source 1..23: mol_type = other RNA
tctgggggacagggatcgcccgt

SEQ ID NO: 103593 - RNA, 23 nt, synthetic construct
  source 1..23: mol_type = other RNA
tagcccatggtcaccaccgtggt

SEQ ID NO: 103594 - RNA, 23 nt, synthetic construct
  source 1..23: mol_type = other RNA
tgctgggcctgggcacggcactc

SEQ ID NO: 103595 - RNA, 23 nt, synthetic construct
  source 1..23: mol_type = other RNA
taggctgggcctgggcacggcac

SEQ ID NO: 103596 - RNA, 23 nt, synthetic construct
  source 1..23: mol_type = other RNA
taggatccaggtcgtccctggag

SEQ ID NO: 103597 - RNA, 23 nt, synthetic construct
  source 1..23: mol_type = other RNA
tggctgctgtggtctgctctgtg

SEQ ID NO: 103598 - RNA, 23 nt, synthetic construct
  source 1..23: mol_type = other RNA
ttggccgtgctggtcagcacttt

SEQ ID NO: 103599 - RNA, 23 nt, synthetic construct
  source 1..23: mol_type = other RNA
tggctgtgggtgtggtggccgtg

SEQ ID NO: 103600 - RNA, 23 nt, synthetic construct
  source 1..23: mol_type = other RNA
tgatttggtggctgtgcttgtca

SEQ ID NO: 103601 - RNA, 23 nt, synthetic construct
  source 1..23: mol_type = other RNA
tgctgtggatttggtggctgtgc

SEQ ID NO: 103602 - RNA, 23 nt, synthetic construct
  source 1..23: mol_type = other RNA
tctgtggaggtgtgggtggtctc

SEQ ID NO: 103603 - RNA, 23 nt, synthetic construct
  source 1..23: mol_type = other RNA
tcactgtggaggtgtgggtggtc

SEQ ID NO: 103604 - RNA, 23 nt, synthetic construct
  source 1..23: mol_type = other RNA
ttggtcagcactgtggaggtgtg

SEQ ID NO: 103605 - RNA, 23 nt, synthetic construct
  source 1..23: mol_type = other RNA
tggagggggtggacatggaactg

SEQ ID NO: 103606 - RNA, 23 nt, synthetic construct
  source 1..23: mol_type = other RNA
tccagtggctgcagttgtagtgg

SEQ ID NO: 103607 - RNA, 23 nt, synthetic construct
  source 1..23: mol_type = other RNA
tgggtggccgtggggccagtggc

SEQ ID NO: 103608 - RNA, 23 nt, synthetic construct
  source 1..23: mol_type = other RNA
tagtgctgggctctgtgaggatc

SEQ ID NO: 103609 - RNA, 23 nt, synthetic construct
  source 1..23: mol_type = other RNA
tcgtcacggtggctgtagtgctg

SEQ ID NO: 103610 - RNA, 23 nt, synthetic construct
  source 1..23: mol_type = other RNA
tggaggcggtggccgtggatccg

SEQ ID NO: 103611 - RNA, 23 nt, synthetic construct
  source 1..23: mol_type = other RNA
ttggccgtgctggtcagcacttt

SEQ ID NO: 103612 - RNA, 23 nt, synthetic construct
  source 1..23: mol_type = other RNA
ttggactggaggagggagtggct

SEQ ID NO: 103613 - RNA, 23 nt, synthetic construct
  source 1..23: mol_type = other RNA
tggtgtggtggctgtgcttctca

SEQ ID NO: 103614 - RNA, 23 nt, synthetic construct
  source 1..23: mol_type = other RNA
ttggtggccgtgggtgtggtggt

SEQ ID NO: 103615 - RNA, 23 nt, synthetic construct
  source 1..23: mol_type = other RNA
tggacatggtggccgtgggtgtg

SEQ ID NO: 103616 - RNA, 23 nt, synthetic construct
  source 1..23: mol_type = other RNA
tgggtggccacagagccggtggc

SEQ ID NO: 103617 - RNA, 23 nt, synthetic construct
  source 1..23: mol_type = other RNA
tggggtggccacagagccggtgg

SEQ ID NO: 103618 - RNA, 23 nt, synthetic construct
  source 1..23: mol_type = other RNA
ttggtccccgggatggaggaggg

SEQ ID NO: 103619 - RNA, 23 nt, synthetic construct
  source 1..23: mol_type = other RNA
tgtggtccccgggatggaggagg

SEQ ID NO: 103620 - RNA, 23 nt, synthetic construct
  source 1..23: mol_type = other RNA
tgtggtcagcactgtggcggtgt

SEQ ID NO: 103621 - RNA, 23 nt, synthetic construct
  source 1..23: mol_type = other RNA
ttggccacagttgtggtggtggt

SEQ ID NO: 103622 - RNA, 23 nt, synthetic construct
  source 1..23: mol_type = other RNA
tcactggtctgtgtgctagagga

SEQ ID NO: 103623 - RNA, 23 nt, synthetic construct
  source 1..23: mol_type = other RNA
tgtggccgtggtggtcagtgatg

SEQ ID NO: 103624 - RNA, 23 nt, synthetic construct
  source 1..23: mol_type = other RNA
tggttggtggtggagccggtggc

SEQ ID NO: 103625 - RNA, 23 nt, synthetic construct
  source 1..23: mol_type = other RNA
tgtggtcagcactggggggatgg

SEQ ID NO: 103626 - RNA, 23 nt, synthetic construct
  source 1..23: mol_type = other RNA
tggtggtcagcactggggggatg

SEQ ID NO: 103627 - RNA, 23 nt, synthetic construct
  source 1..23: mol_type = other RNA
tgggcagaggagggagtcactgt

SEQ ID NO: 103628 - RNA, 23 nt, synthetic construct
  source 1..23: mol_type = other RNA
tccgaggtggccgaagtccaggc

SEQ ID NO: 103629 - RNA, 23 nt, synthetic construct
  source 1..23: mol_type = other RNA
ttggctgtggtcctggaggtgcc

SEQ ID NO: 103630 - RNA, 23 nt, synthetic construct
  source 1..23: mol_type = other RNA
tgctgggcctgggcacggcactc

SEQ ID NO: 103631 - RNA, 23 nt, synthetic construct
  source 1..23: mol_type = other RNA
taggctgggcctgggcacggcac

SEQ ID NO: 103632 - RNA, 23 nt, synthetic construct
  source 1..23: mol_type = other RNA
tcgtcacggtggctgtagtgctc

SEQ ID NO: 103633 - RNA, 23 nt, synthetic construct
  source 1..23: mol_type = other RNA
tggaggcggtggccgtggatccg

SEQ ID NO: 103634 - RNA, 23 nt, synthetic construct
  source 1..23: mol_type = other RNA
ttggtgactgtgggtgtcgtggc

SEQ ID NO: 103635 - RNA, 23 nt, synthetic construct
  source 1..23: mol_type = other RNA
tgcagtccctggactggagaagg

SEQ ID NO: 103636 - RNA, 23 nt, synthetic construct
  source 1..23: mol_type = other RNA
tggtgtggtggctgtgcttctca

SEQ ID NO: 103637 - RNA, 23 nt, synthetic construct
  source 1..23: mol_type = other RNA
tggtccaggtggtgcccagggag

SEQ ID NO: 103638 - RNA, 23 nt, synthetic construct
  source 1..23: mol_type = other RNA
ttggtggccgtgggtgtggtggt

SEQ ID NO: 103639 - RNA, 23 nt, synthetic construct
  source 1..23: mol_type = other RNA
tggacatggtggccgtgggtgtg

SEQ ID NO: 103640 - RNA, 23 nt, synthetic construct
  source 1..23: mol_type = other RNA
tgggtggccacagagccggtggc

SEQ ID NO: 103641 - RNA, 23 nt, synthetic construct
  source 1..23: mol_type = other RNA
tggggtggccacagagccggtgg

SEQ ID NO: 103642 - RNA, 23 nt, synthetic construct
  source 1..23: mol_type = other RNA
ttggaagagggggtggccacaga

SEQ ID NO: 103643 - RNA, 23 nt, synthetic construct
  source 1..23: mol_type = other RNA
tcctggggtggaagagggggtgg

SEQ ID NO: 103644 - RNA, 23 nt, synthetic construct
  source 1..23: mol_type = other RNA
ttccacactggaggcgtgcgtgc

SEQ ID NO: 103645 - RNA, 23 nt, synthetic construct
  source 1..23: mol_type = other RNA
tcgggacggaggagggggtcacc

SEQ ID NO: 103646 - RNA, 23 nt, synthetic construct
  source 1..23: mol_type = other RNA
ttggccacagttgtggtggtggt

SEQ ID NO: 103647 - RNA, 23 nt, synthetic construct
  source 1..23: mol_type = other RNA
tcactggtctgtgtgctagagga

SEQ ID NO: 103648 - RNA, 23 nt, synthetic construct
  source 1..23: mol_type = other RNA
tggttggtggtggagccggtggc

SEQ ID NO: 103649 - RNA, 23 nt, synthetic construct
  source 1..23: mol_type = other RNA
tgtggtcagcactggggggatag

SEQ ID NO: 103650 - RNA, 23 nt, synthetic construct
  source 1..23: mol_type = other RNA
tggtggtcagcactggggggata

SEQ ID NO: 103651 - RNA, 23 nt, synthetic construct
  source 1..23: mol_type = other RNA
tgggcagaggagggagtcactgt

SEQ ID NO: 103652 - RNA, 23 nt, synthetic construct
  source 1..23: mol_type = other RNA
tctgggggacagggatcgcccgt

SEQ ID NO: 103653 - RNA, 23 nt, synthetic construct
  source 1..23: mol_type = other RNA
tgctgggcctgggcacggcactc

SEQ ID NO: 103654 - RNA, 23 nt, synthetic construct
  source 1..23: mol_type = other RNA
taggctgggcctgggcacggcac

SEQ ID NO: 103655 - RNA, 23 nt, synthetic construct
  source 1..23: mol_type = other RNA
tactcccccagggggacaccagg

SEQ ID NO: 103656 - RNA, 23 nt, synthetic construct
  source 1..23: mol_type = other RNA
tggctggtcagcactttgggagg

SEQ ID NO: 103657 - RNA, 23 nt, synthetic construct
  source 1..23: mol_type = other RNA
tggctgtgggtgtggtggccggg

SEQ ID NO: 103658 - RNA, 23 nt, synthetic construct
  source 1..23: mol_type = other RNA
tgatttggtggctgtgcttgtca

SEQ ID NO: 103659 - RNA, 23 nt, synthetic construct
  source 1..23: mol_type = other RNA
tgctgtggatttggtggctgtgc

SEQ ID NO: 103660 - RNA, 23 nt, synthetic construct
  source 1..23: mol_type = other RNA
tcacgggtgtggtggtctgttct

SEQ ID NO: 103661 - RNA, 23 nt, synthetic construct
  source 1..23: mol_type = other RNA
tctgtggaggtgtgggtggtctc

SEQ ID NO: 103662 - RNA, 23 nt, synthetic construct
  source 1..23: mol_type = other RNA
tcactgtggaggtgtgggtggtc

SEQ ID NO: 103663 - RNA, 23 nt, synthetic construct
  source 1..23: mol_type = other RNA
ttggtcagcactgtggaggtgtg

SEQ ID NO: 103664 - RNA, 23 nt, synthetic construct
  source 1..23: mol_type = other RNA
tccagtggctgcagttgtagtgg

SEQ ID NO: 103665 - RNA, 23 nt, synthetic construct
  source 1..23: mol_type = other RNA
tgggtggccgtggggccagtggc

SEQ ID NO: 103666 - RNA, 23 nt, synthetic construct
  source 1..23: mol_type = other RNA
tcgtcacggtggctgtagtgctc

SEQ ID NO: 103667 - RNA, 23 nt, synthetic construct
  source 1..23: mol_type = other RNA
tggaggcggtggccgtggatccg

SEQ ID NO: 103668 - RNA, 23 nt, synthetic construct
  source 1..23: mol_type = other RNA
ttggtgactgtgggtgtcgtggc

SEQ ID NO: 103669 - RNA, 23 nt, synthetic construct
  source 1..23: mol_type = other RNA
ttggactggaggagggagtggct

SEQ ID NO: 103670 - RNA, 23 nt, synthetic construct
  source 1..23: mol_type = other RNA
tggtgtggtggctgtgcttctca

SEQ ID NO: 103671 - RNA, 23 nt, synthetic construct
  source 1..23: mol_type = other RNA
tggtccaggtggtgcccagggag

SEQ ID NO: 103672 - RNA, 23 nt, synthetic construct
  source 1..23: mol_type = other RNA
ttggtggccgtgggtgtggtggt

SEQ ID NO: 103673 - RNA, 23 nt, synthetic construct
  source 1..23: mol_type = other RNA
tggacatggtggccgtgggtgtg

SEQ ID NO: 103674 - RNA, 23 nt, synthetic construct
  source 1..23: mol_type = other RNA
tggttgtggtggccgtggcggta

SEQ ID NO: 103675 - RNA, 23 nt, synthetic construct
  source 1..23: mol_type = other RNA
tgggtggccacagagccggtggc

SEQ ID NO: 103676 - RNA, 23 nt, synthetic construct
  source 1..23: mol_type = other RNA
tggggtggccacagagccggtgg

SEQ ID NO: 103677 - RNA, 23 nt, synthetic construct
  source 1..23: mol_type = other RNA
ttggtccccgggatggaggaggg

SEQ ID NO: 103678 - RNA, 23 nt, synthetic construct
  source 1..23: mol_type = other RNA
tgtggtccccgggatggaggagg

SEQ ID NO: 103679 - RNA, 23 nt, synthetic construct
  source 1..23: mol_type = other RNA
ttggccacagttgtggtggtggt

SEQ ID NO: 103680 - RNA, 23 nt, synthetic construct
  source 1..23: mol_type = other RNA
tcactggtctgtgtgctagagga

SEQ ID NO: 103681 - RNA, 23 nt, synthetic construct
  source 1..23: mol_type = other RNA
tgtggccgtggtggtcagtgatg

SEQ ID NO: 103682 - RNA, 23 nt, synthetic construct
  source 1..23: mol_type = other RNA
tggttggtggtggagccggtggc

SEQ ID NO: 103683 - RNA, 23 nt, synthetic construct
  source 1..23: mol_type = other RNA
ttggccgtgctggtcagcactgg

SEQ ID NO: 103684 - RNA, 23 nt, synthetic construct
  source 1..23: mol_type = other RNA
ttggtggctgcgggtgtggtggc

SEQ ID NO: 103685 - RNA, 23 nt, synthetic construct
  source 1..23: mol_type = other RNA
tggagctggtggctgcgggtgtg

SEQ ID NO: 103686 - RNA, 23 nt, synthetic construct
  source 1..23: mol_type = other RNA
tgaggaagtggctttggagctgg

SEQ ID NO: 103687 - RNA, 23 nt, synthetic construct
  source 1..23: mol_type = other RNA
tggtgtggtggtctgtgctggga

SEQ ID NO: 103688 - RNA, 23 nt, synthetic construct
  source 1..23: mol_type = other RNA
tgtggacatgggtgtggtggtct

SEQ ID NO: 103689 - RNA, 23 nt, synthetic construct
  source 1..23: mol_type = other RNA
tctgtggaggtgtgggtggtctc

SEQ ID NO: 103690 - RNA, 23 nt, synthetic construct
  source 1..23: mol_type = other RNA
tcactgtggaggtgtgggtggtc

SEQ ID NO: 103691 - RNA, 23 nt, synthetic construct
  source 1..23: mol_type = other RNA
ttggtcagcactgtggaggtgtg

SEQ ID NO: 103692 - RNA, 23 nt, synthetic construct
  source 1..23: mol_type = other RNA
tggagggtgtggccgtggaattg

SEQ ID NO: 103693 - RNA, 23 nt, synthetic construct
  source 1..23: mol_type = other RNA
tccagtggctgcagttgtagtgg

SEQ ID NO: 103694 - RNA, 23 nt, synthetic construct
  source 1..23: mol_type = other RNA
tggaggacagggtggccgtggat

SEQ ID NO: 103695 - RNA, 23 nt, synthetic construct
  source 1..23: mol_type = other RNA
taggcagtggctgtgggcatagt

SEQ ID NO: 103696 - RNA, 23 nt, synthetic construct
  source 1..23: mol_type = other RNA
tggttggcaggctgctggggagc

SEQ ID NO: 103697 - RNA, 23 nt, synthetic construct
  source 1..23: mol_type = other RNA
tgctggggaagccagtgggtctc

SEQ ID NO: 103698 - RNA, 23 nt, synthetic construct
  source 1..23: mol_type = other RNA
tgggaggtgggacaggcgccctg

SEQ ID NO: 103699 - RNA, 23 nt, synthetic construct
  source 1..23: mol_type = other RNA
tgcggtggggaggtgggacaggc

SEQ ID NO: 103700 - RNA, 23 nt, synthetic construct
  source 1..23: mol_type = other RNA
tactggcggtggggaggtgggac

SEQ ID NO: 103701 - RNA, 23 nt, synthetic construct
  source 1..23: mol_type = other RNA
tgggcggaggacactggcggtgg

SEQ ID NO: 103702 - RNA, 23 nt, synthetic construct
  source 1..23: mol_type = other RNA
tgagggcgaggacagcggggcgg

SEQ ID NO: 103703 - RNA, 23 nt, synthetic construct
  source 1..23: mol_type = other RNA
tggagggcgaggacagcggggcg

SEQ ID NO: 103704 - RNA, 23 nt, synthetic construct
  source 1..23: mol_type = other RNA
tggcaggggagggcgaggacagc

SEQ ID NO: 103705 - RNA, 23 nt, synthetic construct
  source 1..23: mol_type = other RNA
tgcagtggcagaggccgtgcagt

SEQ ID NO: 103706 - RNA, 23 nt, synthetic construct
  source 1..23: mol_type = other RNA
tcatggtgacagtgaggacgata

SEQ ID NO: 103707 - RNA, 23 nt, synthetic construct
  source 1..23: mol_type = other RNA
tcagcacagacacaagcacgccg

SEQ ID NO: 103708 - RNA, 23 nt, synthetic construct
  source 1..23: mol_type = other RNA
tcccagcacagacacaagcacgc

SEQ ID NO: 103709 - RNA, 23 nt, synthetic construct
  source 1..23: mol_type = other RNA
tccccagcacagacacaagcacg

SEQ ID NO: 103710 - RNA, 23 nt, synthetic construct
  source 1..23: mol_type = other RNA
ttcggggcccagcagccatcctt

SEQ ID NO: 103711 - RNA, 23 nt, synthetic construct
  source 1..23: mol_type = other RNA
tccgggggcacaaggttgtggca

SEQ ID NO: 103712 - RNA, 23 nt, synthetic construct
  source 1..23: mol_type = other RNA
tcagggcagaagcagccctccgc

SEQ ID NO: 103713 - RNA, 23 nt, synthetic construct
  source 1..23: mol_type = other RNA
tgggctgaccctgggcgtcacag

SEQ ID NO: 103714 - RNA, 23 nt, synthetic construct
  source 1..23: mol_type = other RNA
tctcggggcagcaggggttctcg

SEQ ID NO: 103715 - RNA, 23 nt, synthetic construct
  source 1..23: mol_type = other RNA
tggggcaggtggttgtgttgcac

SEQ ID NO: 103716 - RNA, 23 nt, synthetic construct
  source 1..23: mol_type = other RNA
ttgggggcaggtggttgtgttgc

SEQ ID NO: 103717 - RNA, 23 nt, synthetic construct
  source 1..23: mol_type = other RNA
taacacagctgaggtctgcagcg

SEQ ID NO: 103718 - RNA, 23 nt, synthetic construct
  source 1..23: mol_type = other RNA
tagaggcaggtacacatgtggca

SEQ ID NO: 103719 - RNA, 23 nt, synthetic construct
  source 1..23: mol_type = other RNA
taagccctggggacaggtagtat

SEQ ID NO: 103720 - RNA, 23 nt, synthetic construct
  source 1..23: mol_type = other RNA
tgactggctggccatcgggcgtg

SEQ ID NO: 103721 - RNA, 23 nt, synthetic construct
  source 1..23: mol_type = other RNA
tcattcagctggactggctggcc

SEQ ID NO: 103722 - RNA, 23 nt, synthetic construct
  source 1..23: mol_type = other RNA
tgtccacatggctgttgacccag

SEQ ID NO: 103723 - RNA, 23 nt, synthetic construct
  source 1..23: mol_type = other RNA
ttctgggcaggatgcaggctgtg

SEQ ID NO: 103724 - RNA, 23 nt, synthetic construct
  source 1..23: mol_type = other RNA
tcagaaggtgatgttgacctcgg

SEQ ID NO: 103725 - RNA, 23 nt, synthetic construct
  source 1..23: mol_type = other RNA
tgcagaaggtgatgttgacctcg

SEQ ID NO: 103726 - RNA, 23 nt, synthetic construct
  source 1..23: mol_type = other RNA
tgcaggagccctcgcagaaggtg

SEQ ID NO: 103727 - RNA, 23 nt, synthetic construct
  source 1..23: mol_type = other RNA
tggcaggagccctcgcagaaggt

SEQ ID NO: 103728 - RNA, 23 nt, synthetic construct
  source 1..23: mol_type = other RNA
tgcagccacactcatccacgtgg

SEQ ID NO: 103729 - RNA, 23 nt, synthetic construct
  source 1..23: mol_type = other RNA
tgggggagccatgggcgcaggga

SEQ ID NO: 103730 - RNA, 23 nt, synthetic construct
  source 1..23: mol_type = other RNA
tcagtggcctcctgggccgggaa

SEQ ID NO: 103731 - RNA, 23 nt, synthetic construct
  source 1..23: mol_type = other RNA
tgcagtggcctcctgggccggga

SEQ ID NO: 103732 - RNA, 23 nt, synthetic construct
  source 1..23: mol_type = other RNA
tagacaatgcacatcctggctcc

SEQ ID NO: 103733 - RNA, 23 nt, synthetic construct
  source 1..23: mol_type = other RNA
tgggcagcaggagcacggagcgc

SEQ ID NO: 103734 - RNA, 23 nt, synthetic construct
  source 1..23: mol_type = other RNA
tgggtgggcagcaggagcacgga

SEQ ID NO: 103735 - RNA, 23 nt, synthetic construct
  source 1..23: mol_type = other RNA
tggggtgggcagcaggagcacgg

SEQ ID NO: 103736 - RNA, 23 nt, synthetic construct
  source 1..23: mol_type = other RNA
ttctgccccagcggccggacgtg

SEQ ID NO: 103737 - RNA, 23 nt, synthetic construct
  source 1..23: mol_type = other RNA
tcagcctgtctgccccagcggcc

SEQ ID NO: 103738 - RNA, 23 nt, synthetic construct
  source 1..23: mol_type = other RNA
tggggacggggacgggcagggag

SEQ ID NO: 103739 - RNA, 23 nt, synthetic construct
  source 1..23: mol_type = other RNA
tccctgcattctcccagctcggc

SEQ ID NO: 103740 - RNA, 23 nt, synthetic construct
  source 1..23: mol_type = other RNA
tgtcatccagcaccgtgcctggg

SEQ ID NO: 103741 - RNA, 23 nt, synthetic construct
  source 1..23: mol_type = other RNA
tcgtgatgtcatccagcaccgtg

SEQ ID NO: 103742 - RNA, 23 nt, synthetic construct
  source 1..23: mol_type = other RNA
tggaaggtgcccgcggggcaggt

SEQ ID NO: 103743 - RNA, 23 nt, synthetic construct
  source 1..23: mol_type = other RNA
tgtagaagtcacagaacaagggg

SEQ ID NO: 103744 - RNA, 23 nt, synthetic construct
  source 1..23: mol_type = other RNA
tcttctgccccacctgtgccagg

SEQ ID NO: 103745 - RNA, 23 nt, synthetic construct
  source 1..23: mol_type = other RNA
tgtggtgctggccgggggagccc

SEQ ID NO: 103746 - RNA, 23 nt, synthetic construct
  source 1..23: mol_type = other RNA
tagggctgagcgtgttggaaggg

SEQ ID NO: 103747 - RNA, 23 nt, synthetic construct
  source 1..23: mol_type = other RNA
tgacatggtggccgtgggtgtgg

SEQ ID NO: 103748 - RNA, 23 nt, synthetic construct
  source 1..23: mol_type = other RNA
tcaggtgtggtggcggtggtggt

SEQ ID NO: 103749 - RNA, 23 nt, synthetic construct
  source 1..23: mol_type = other RNA
tcctagggcagaggagggagtca

SEQ ID NO: 103750 - RNA, 23 nt, synthetic construct
  source 1..23: mol_type = other RNA
ttggtgcccaagatgcccgaggt

SEQ ID NO: 103751 - RNA, 23 nt, synthetic construct
  source 1..23: mol_type = other RNA
tggctgggcctgggcacggcact

SEQ ID NO: 103752 - RNA, 23 nt, synthetic construct
  source 1..23: mol_type = other RNA
tagagctggtggccggggtgctg

SEQ ID NO: 103753 - RNA, 23 nt, synthetic construct
  source 1..23: mol_type = other RNA
ttggactggagaagggagtggct

SEQ ID NO: 103754 - RNA, 23 nt, synthetic construct
  source 1..23: mol_type = other RNA
tgacatggtggccgtgggtgtgg

SEQ ID NO: 103755 - RNA, 23 nt, synthetic construct
  source 1..23: mol_type = other RNA
tggggtgtgggtggtccccggga

SEQ ID NO: 103756 - RNA, 23 nt, synthetic construct
  source 1..23: mol_type = other RNA
tcaggtgtggtggcggtggtggt

SEQ ID NO: 103757 - RNA, 23 nt, synthetic construct
  source 1..23: mol_type = other RNA
tcctagggcagaggagggagtca

SEQ ID NO: 103758 - RNA, 23 nt, synthetic construct
  source 1..23: mol_type = other RNA
tggctgggcctgggcacggcact

SEQ ID NO: 103759 - RNA, 23 nt, synthetic construct
  source 1..23: mol_type = other RNA
tagagctggtggccggggtgctg

SEQ ID NO: 103760 - RNA, 23 nt, synthetic construct
  source 1..23: mol_type = other RNA
tttggtggctgtgcttgtcagca

SEQ ID NO: 103761 - RNA, 23 nt, synthetic construct
  source 1..23: mol_type = other RNA
tgacatggtggccatgggtgtgg

SEQ ID NO: 103762 - RNA, 23 nt, synthetic construct
  source 1..23: mol_type = other RNA
tgacatggtggccgtgggtgtgg

SEQ ID NO: 103763 - RNA, 23 nt, synthetic construct
  source 1..23: mol_type = other RNA
tcaggtgtggtggcggtggtggt

SEQ ID NO: 103764 - RNA, 23 nt, synthetic construct
  source 1..23: mol_type = other RNA
tcctagggcagaggagggagtca

SEQ ID NO: 103765 - RNA, 23 nt, synthetic construct
  source 1..23: mol_type = other RNA
ttggtgcccaagatgcccgaggt

SEQ ID NO: 103766 - RNA, 23 nt, synthetic construct
  source 1..23: mol_type = other RNA
tggctgggcctgggcacggcact

SEQ ID NO: 103767 - RNA, 23 nt, synthetic construct
  source 1..23: mol_type = other RNA
tagagctggtggccggggtgctg

SEQ ID NO: 103768 - RNA, 23 nt, synthetic construct
  source 1..23: mol_type = other RNA
ttggactggagaagggagtggct

SEQ ID NO: 103769 - RNA, 23 nt, synthetic construct
  source 1..23: mol_type = other RNA
tgacatggtggccgtgggtgtgg

SEQ ID NO: 103770 - RNA, 23 nt, synthetic construct
  source 1..23: mol_type = other RNA
tgaagagggggtggccacagagc

SEQ ID NO: 103771 - RNA, 23 nt, synthetic construct
  source 1..23: mol_type = other RNA
tccacactggaggcgtgcgtgcc

SEQ ID NO: 103772 - RNA, 23 nt, synthetic construct
  source 1..23: mol_type = other RNA
tggggtgtgggtggtccccggga

SEQ ID NO: 103773 - RNA, 23 nt, synthetic construct
  source 1..23: mol_type = other RNA
tcaggtgtggtggcggtggtggt

SEQ ID NO: 103774 - RNA, 23 nt, synthetic construct
  source 1..23: mol_type = other RNA
tcctagggcagaggagggagtca

SEQ ID NO: 103775 - RNA, 23 nt, synthetic construct
  source 1..23: mol_type = other RNA
tggctgggcctgggcacggcact

SEQ ID NO: 103776 - RNA, 23 nt, synthetic construct
  source 1..23: mol_type = other RNA
tagagctggtggccggggtgctg

SEQ ID NO: 103777 - RNA, 23 nt, synthetic construct
  source 1..23: mol_type = other RNA
tttggtggctgtgcttgtcagca

SEQ ID NO: 103778 - RNA, 23 nt, synthetic construct
  source 1..23: mol_type = other RNA
ttggaggaggggatgggtgtaac

SEQ ID NO: 103779 - RNA, 23 nt, synthetic construct
  source 1..23: mol_type = other RNA
tgacatggtggccgtgggtgtgg

SEQ ID NO: 103780 - RNA, 23 nt, synthetic construct
  source 1..23: mol_type = other RNA
tagctggtggctgcgggtgtggt

SEQ ID NO: 103781 - RNA, 23 nt, synthetic construct
  source 1..23: mol_type = other RNA
ttggaggaggggatgggtgtaaa

SEQ ID NO: 103782 - RNA, 23 nt, synthetic construct
  source 1..23: mol_type = other RNA
ttggatccagtggctgcagttgt

SEQ ID NO: 103783 - RNA, 23 nt, synthetic construct
  source 1..23: mol_type = other RNA
tgtgcgggtggtccccacggtgg

SEQ ID NO: 103784 - RNA, 23 nt, synthetic construct
  source 1..23: mol_type = other RNA
tggtcaaacaggatcaggccctc

SEQ ID NO: 103785 - RNA, 23 nt, synthetic construct
  source 1..23: mol_type = other RNA
tccagcacagacacaagcacgcc

SEQ ID NO: 103786 - RNA, 23 nt, synthetic construct
  source 1..23: mol_type = other RNA
tgtccccagcacagacacaagca

SEQ ID NO: 103787 - RNA, 23 nt, synthetic construct
  source 1..23: mol_type = other RNA
tagatcacagagcggctgtggtg

SEQ ID NO: 103788 - RNA, 23 nt, synthetic construct
  source 1..23: mol_type = other RNA
ttgggtgggcaggtgaggtcgca

SEQ ID NO: 103789 - RNA, 23 nt, synthetic construct
  source 1..23: mol_type = other RNA
tccctcctcctgggtgcagatgg

SEQ ID NO: 103790 - RNA, 23 nt, synthetic construct
  source 1..23: mol_type = other RNA
tccacatggctgttgacccaggt

SEQ ID NO: 103791 - RNA, 23 nt, synthetic construct
  source 1..23: mol_type = other RNA
ttccccctgcagctggacacatc

SEQ ID NO: 103792 - RNA, 23 nt, synthetic construct
  source 1..23: mol_type = other RNA
tcaggcggccgccttgcctgtcg

SEQ ID NO: 103793 - RNA, 23 nt, synthetic construct
  source 1..23: mol_type = other RNA
tgtccccgctctgctccaccagg

SEQ ID NO: 103794 - RNA, 23 nt, synthetic construct
  source 1..23: mol_type = other RNA
tggccccagcagggtgcggtggc

SEQ ID NO: 103795 - RNA, 23 nt, synthetic construct
  source 1..23: mol_type = other RNA
ttgcaggtggtgttgaaggaggt

SEQ ID NO: 103796 - RNA, 23 nt, synthetic construct
  source 1..23: mol_type = other RNA
tggtctctccaggcttgtaggtg

SEQ ID NO: 103797 - RNA, 23 nt, synthetic construct
  source 1..23: mol_type = other RNA
tccaggccgggctctgggcggtg

SEQ ID NO: 103798 - RNA, 23 nt, synthetic construct
  source 1..23: mol_type = other RNA
tctgggttggggtaggcacagca

SEQ ID NO: 103799 - RNA, 23 nt, synthetic construct
  source 1..23: mol_type = other RNA
tggttgctgtggtctgggttggg

SEQ ID NO: 103800 - RNA, 23 nt, synthetic construct
  source 1..23: mol_type = other RNA
tcggtggcggggttgtggcacgt

SEQ ID NO: 103801 - RNA, 23 nt, synthetic construct
  source 1..23: mol_type = other RNA
tggggagccctggtcagccccgg

SEQ ID NO: 103802 - RNA, 23 nt, synthetic construct
  source 1..23: mol_type = other RNA
ttggtgctggccgggggagccct

SEQ ID NO: 103803 - RNA, 23 nt, synthetic construct
  source 1..23: mol_type = other RNA
ttcattgtcgtctctgtcctggg

SEQ ID NO: 103804 - RNA, 23 nt, synthetic construct
  source 1..23: mol_type = other RNA
tgtggtggttgtgctgatccaca

SEQ ID NO: 103805 - RNA, 23 nt, synthetic construct
  source 1..23: mol_type = other RNA
taggggttggtggtggagccggt

SEQ ID NO: 103806 - RNA, 23 nt, synthetic construct
  source 1..23: mol_type = other RNA
tggggactgctggggggcaggga

SEQ ID NO: 103807 - RNA, 23 nt, synthetic construct
  source 1..23: mol_type = other RNA
tgagctggtggccggggtgctgg

SEQ ID NO: 103808 - RNA, 23 nt, synthetic construct
  source 1..23: mol_type = other RNA
tagcactgtggaggtgtggacag

SEQ ID NO: 103809 - RNA, 23 nt, synthetic construct
  source 1..23: mol_type = other RNA
tgtggtggttgtgctgatccaca

SEQ ID NO: 103810 - RNA, 23 nt, synthetic construct
  source 1..23: mol_type = other RNA
taggggttggtggtggagccggt

SEQ ID NO: 103811 - RNA, 23 nt, synthetic construct
  source 1..23: mol_type = other RNA
tgctgggggacagggatcgcccg

SEQ ID NO: 103812 - RNA, 23 nt, synthetic construct
  source 1..23: mol_type = other RNA
tgggtggtgcccaaggtgcctga

SEQ ID NO: 103813 - RNA, 23 nt, synthetic construct
  source 1..23: mol_type = other RNA
tctgctggggtgtgggaagtccc

SEQ ID NO: 103814 - RNA, 23 nt, synthetic construct
  source 1..23: mol_type = other RNA
tgagctggtggccggggtgctgg

SEQ ID NO: 103815 - RNA, 23 nt, synthetic construct
  source 1..23: mol_type = other RNA
tgtccttggactggaggaggaag

SEQ ID NO: 103816 - RNA, 23 nt, synthetic construct
  source 1..23: mol_type = other RNA
tagtggaggagggggtggacatg

SEQ ID NO: 103817 - RNA, 23 nt, synthetic construct
  source 1..23: mol_type = other RNA
tagcactgtggaggtgtggacag

SEQ ID NO: 103818 - RNA, 23 nt, synthetic construct
  source 1..23: mol_type = other RNA
tgtggtggttgtgctgatccaca

SEQ ID NO: 103819 - RNA, 23 nt, synthetic construct
  source 1..23: mol_type = other RNA
taggggttggtggtggagccggt

SEQ ID NO: 103820 - RNA, 23 nt, synthetic construct
  source 1..23: mol_type = other RNA
tggggactgctggggggcaggga

SEQ ID NO: 103821 - RNA, 23 nt, synthetic construct
  source 1..23: mol_type = other RNA
tctgctggggtgtgggaagtcac

SEQ ID NO: 103822 - RNA, 23 nt, synthetic construct
  source 1..23: mol_type = other RNA
tgagctggtggccggggtgctgg

SEQ ID NO: 103823 - RNA, 23 nt, synthetic construct
  source 1..23: mol_type = other RNA
ttggctgttgtggtcagctttgt

SEQ ID NO: 103824 - RNA, 23 nt, synthetic construct
  source 1..23: mol_type = other RNA
tgtggtggttgtgctgatccaca

SEQ ID NO: 103825 - RNA, 23 nt, synthetic construct
  source 1..23: mol_type = other RNA
taggggttggtggtggagccggt

SEQ ID NO: 103826 - RNA, 23 nt, synthetic construct
  source 1..23: mol_type = other RNA
tgctgggggacagggatcgcccg

SEQ ID NO: 103827 - RNA, 23 nt, synthetic construct
  source 1..23: mol_type = other RNA
tgggtggtgcccaaggtgcctga

SEQ ID NO: 103828 - RNA, 23 nt, synthetic construct
  source 1..23: mol_type = other RNA
tctgctggggtgtgggaagtccc

SEQ ID NO: 103829 - RNA, 23 nt, synthetic construct
  source 1..23: mol_type = other RNA
tgagctggtggccggggtgctgg

SEQ ID NO: 103830 - RNA, 23 nt, synthetic construct
  source 1..23: mol_type = other RNA
tgtccttggactggaggaggaag

SEQ ID NO: 103831 - RNA, 23 nt, synthetic construct
  source 1..23: mol_type = other RNA
tggtcccaagggtggaggagggg

SEQ ID NO: 103832 - RNA, 23 nt, synthetic construct
  source 1..23: mol_type = other RNA
tagtggaggagggggtggacgtg

SEQ ID NO: 103833 - RNA, 23 nt, synthetic construct
  source 1..23: mol_type = other RNA
tagcactgtggaggtgtggacag

SEQ ID NO: 103834 - RNA, 23 nt, synthetic construct
  source 1..23: mol_type = other RNA
tgtggtggttgtgctgatccaca

SEQ ID NO: 103835 - RNA, 23 nt, synthetic construct
  source 1..23: mol_type = other RNA
taggggttggtggtggagccggt

SEQ ID NO: 103836 - RNA, 23 nt, synthetic construct
  source 1..23: mol_type = other RNA
tgtccttggactggaggaggaag

SEQ ID NO: 103837 - RNA, 23 nt, synthetic construct
  source 1..23: mol_type = other RNA
tggtctctggagtagaggaggtg

SEQ ID NO: 103838 - RNA, 23 nt, synthetic construct
  source 1..23: mol_type = other RNA
tgggggtgtgagctgttcccaga

SEQ ID NO: 103839 - RNA, 23 nt, synthetic construct
  source 1..23: mol_type = other RNA
tgcggaggacactggcggtgggg

SEQ ID NO: 103840 - RNA, 23 nt, synthetic construct
  source 1..23: mol_type = other RNA
tgcaggggagggcgaggacagcg

SEQ ID NO: 103841 - RNA, 23 nt, synthetic construct
  source 1..23: mol_type = other RNA
ttccccagcacagacacaagcac

SEQ ID NO: 103842 - RNA, 23 nt, synthetic construct
  source 1..23: mol_type = other RNA
tgaacacagctgaggtctgcagc

SEQ ID NO: 103843 - RNA, 23 nt, synthetic construct
  source 1..23: mol_type = other RNA
tgcagggaagggcgcctgggaag

SEQ ID NO: 103844 - RNA, 23 nt, synthetic construct
  source 1..23: mol_type = other RNA
tacccaggtttcattcagctgga

SEQ ID NO: 103845 - RNA, 23 nt, synthetic construct
  source 1..23: mol_type = other RNA
tggaggggcaaggccaaggtggg

SEQ ID NO: 103846 - RNA, 23 nt, synthetic construct
  source 1..23: mol_type = other RNA
tgcctggaccagcctgtctgccc

SEQ ID NO: 103847 - RNA, 23 nt, synthetic construct
  source 1..23: mol_type = other RNA
ttgcagcaggcatggacaggcgg

SEQ ID NO: 103848 - RNA, 23 nt, synthetic construct
  source 1..23: mol_type = other RNA
tgagcatggccgccagagccaac

SEQ ID NO: 103849 - RNA, 23 nt, synthetic construct
  source 1..23: mol_type = other RNA
tgcaaaggccagggaagcggaag

SEQ ID NO: 103850 - RNA, 23 nt, synthetic construct
  source 1..23: mol_type = other RNA
tatttgggatccagctccagcag

SEQ ID NO: 103851 - RNA, 23 nt, synthetic construct
  source 1..23: mol_type = other RNA
tccccacacaggccacaggtctg

SEQ ID NO: 103852 - RNA, 23 nt, synthetic construct
  source 1..23: mol_type = other RNA
tgggtcagcctggcgttgtgggc

SEQ ID NO: 103853 - RNA, 23 nt, synthetic construct
  source 1..23: mol_type = other RNA
tgccctcctcgtccgtgcagttg

SEQ ID NO: 103854 - RNA, 23 nt, synthetic construct
  source 1..23: mol_type = other RNA
taggtggcacacgggcaggtggg

SEQ ID NO: 103855 - RNA, 23 nt, synthetic construct
  source 1..23: mol_type = other RNA
tggggcaggtccgggggcagagc

SEQ ID NO: 103856 - RNA, 23 nt, synthetic construct
  source 1..23: mol_type = other RNA
tcactcctggtgctgcatgttga

SEQ ID NO: 103857 - RNA, 23 nt, synthetic construct
  source 1..23: mol_type = other RNA
tgagcaggtgtccgtgcagggtg

SEQ ID NO: 103858 - RNA, 23 nt, synthetic construct
  source 1..23: mol_type = other RNA
tgaagcagccgtccacacagtgg

SEQ ID NO: 103859 - RNA, 23 nt, synthetic construct
  source 1..23: mol_type = other RNA
taggtcctggcactgccatagcc

SEQ ID NO: 103860 - RNA, 23 nt, synthetic construct
  source 1..23: mol_type = other RNA
tagccccaggcctgtctgcacca

SEQ ID NO: 103861 - RNA, 23 nt, synthetic construct
  source 1..23: mol_type = other RNA
tcctccaccaccccgctgagggc

SEQ ID NO: 103862 - RNA, 23 nt, synthetic construct
  source 1..23: mol_type = other RNA
tggcacaggcagcctgggccttc

SEQ ID NO: 103863 - RNA, 23 nt, synthetic construct
  source 1..23: mol_type = other RNA
tcgagcaccagtgccgggcgtag

SEQ ID NO: 103864 - RNA, 23 nt, synthetic construct
  source 1..23: mol_type = other RNA
tgtccctccagtcgctgagctgt

SEQ ID NO: 103865 - RNA, 23 nt, synthetic construct
  source 1..23: mol_type = other RNA
tcggccctctcgccaccgcctta

SEQ ID NO: 103866 - RNA, 23 nt, synthetic construct
  source 1..23: mol_type = other RNA
tcacagaacaaggggcaggtgtc

SEQ ID NO: 103867 - RNA, 23 nt, synthetic construct
  source 1..23: mol_type = other RNA
tcactcacagcccccatgtgggt

SEQ ID NO: 103868 - RNA, 23 nt, synthetic construct
  source 1..23: mol_type = other RNA
tcacagccttcctgatgatggtg

SEQ ID NO: 103869 - RNA, 23 nt, synthetic construct
  source 1..23: mol_type = other RNA
tgggacccaggcggtggtgaagg

SEQ ID NO: 103870 - RNA, 23 nt, synthetic construct
  source 1..23: mol_type = other RNA
tcctcccaggccgggctctgggc

SEQ ID NO: 103871 - RNA, 23 nt, synthetic construct
  source 1..23: mol_type = other RNA
tgggctgagggctggtgcctggg

SEQ ID NO: 103872 - RNA, 23 nt, synthetic construct
  source 1..23: mol_type = other RNA
tgcactgagggagggctgagggc

SEQ ID NO: 103873 - RNA, 23 nt, synthetic construct
  source 1..23: mol_type = other RNA
tagggtccagttggggaagctct

SEQ ID NO: 103874 - RNA, 23 nt, synthetic construct
  source 1..23: mol_type = other RNA
tctctgtggtcggtggcggggtt

SEQ ID NO: 103875 - RNA, 23 nt, synthetic construct
  source 1..23: mol_type = other RNA
tcagctctgtggtcggtggcggg

SEQ ID NO: 103876 - RNA, 23 nt, synthetic construct
  source 1..23: mol_type = other RNA
tcgtctccagctctgtggtcggt

SEQ ID NO: 103877 - RNA, 23 nt, synthetic construct
  source 1..23: mol_type = other RNA
tgcgtgggtggctgtgaggggcg

SEQ ID NO: 103878 - RNA, 23 nt, synthetic construct
  source 1..23: mol_type = other RNA
tggggccagcgtgggtggctgtg

SEQ ID NO: 103879 - RNA, 23 nt, synthetic construct
  source 1..23: mol_type = other RNA
tgtcctgggcgtgctggtctcgg

SEQ ID NO: 103880 - RNA, 23 nt, synthetic construct
  source 1..23: mol_type = other RNA
tagggtggaggtcggggtggccg

SEQ ID NO: 103881 - RNA, 23 nt, synthetic construct
  source 1..23: mol_type = other RNA
tggagctggtgactgtgggtgtg

SEQ ID NO: 103882 - RNA, 23 nt, synthetic construct
  source 1..23: mol_type = other RNA
tctggaggagggagtggctttgg

SEQ ID NO: 103883 - RNA, 23 nt, synthetic construct
  source 1..23: mol_type = other RNA
tactggaggagggagtggctttg

SEQ ID NO: 103884 - RNA, 23 nt, synthetic construct
  source 1..23: mol_type = other RNA
ttggaggagggggtcaccgtgga

SEQ ID NO: 103885 - RNA, 23 nt, synthetic construct
  source 1..23: mol_type = other RNA
tgaggaggggttggtggtggagc

SEQ ID NO: 103886 - RNA, 23 nt, synthetic construct
  source 1..23: mol_type = other RNA
tcaggagttgaggaggggttggt

SEQ ID NO: 103887 - RNA, 23 nt, synthetic construct
  source 1..23: mol_type = other RNA
ttgctggtggctgcaggtgtggt

SEQ ID NO: 103888 - RNA, 23 nt, synthetic construct
  source 1..23: mol_type = other RNA
tgttctgctgctagggtgagggc

SEQ ID NO: 103889 - RNA, 23 nt, synthetic construct
  source 1..23: mol_type = other RNA
tgtgtggcccggggtggtcgtcc

SEQ ID NO: 103890 - RNA, 23 nt, synthetic construct
  source 1..23: mol_type = other RNA
tgctgtggtcctggaggtggccg

SEQ ID NO: 103891 - RNA, 23 nt, synthetic construct
  source 1..23: mol_type = other RNA
tgaggcggtggccgtggatccgg

SEQ ID NO: 103892 - RNA, 23 nt, synthetic construct
  source 1..23: mol_type = other RNA
tggagctggtgactgtgggtgtc

SEQ ID NO: 103893 - RNA, 23 nt, synthetic construct
  source 1..23: mol_type = other RNA
tcactgtggaggtgtggacagtc

SEQ ID NO: 103894 - RNA, 23 nt, synthetic construct
  source 1..23: mol_type = other RNA
tgcactgtggaggtgtggacagt

SEQ ID NO: 103895 - RNA, 23 nt, synthetic construct
  source 1..23: mol_type = other RNA
ttggaggagggggtcaccgtgga

SEQ ID NO: 103896 - RNA, 23 nt, synthetic construct
  source 1..23: mol_type = other RNA
tgaggaggggttggtggtggagc

SEQ ID NO: 103897 - RNA, 23 nt, synthetic construct
  source 1..23: mol_type = other RNA
ttgctggtggctgcaggtgtggt

SEQ ID NO: 103898 - RNA, 23 nt, synthetic construct
  source 1..23: mol_type = other RNA
ttgtgggtggtgcccaaggtgcc

SEQ ID NO: 103899 - RNA, 23 nt, synthetic construct
  source 1..23: mol_type = other RNA
tgtgtggcccggggtggtcgtcc

SEQ ID NO: 103900 - RNA, 23 nt, synthetic construct
  source 1..23: mol_type = other RNA
ttggctgcagttgtagtggctgc

SEQ ID NO: 103901 - RNA, 23 nt, synthetic construct
  source 1..23: mol_type = other RNA
tgtggctgcagttgtagtggctg

SEQ ID NO: 103902 - RNA, 23 nt, synthetic construct
  source 1..23: mol_type = other RNA
tgaggcggtggccgtggatccgg

SEQ ID NO: 103903 - RNA, 23 nt, synthetic construct
  source 1..23: mol_type = other RNA
tactggaggagggagtggctctg

SEQ ID NO: 103904 - RNA, 23 nt, synthetic construct
  source 1..23: mol_type = other RNA
ttagaggagggtgtggctgtgga

SEQ ID NO: 103905 - RNA, 23 nt, synthetic construct
  source 1..23: mol_type = other RNA
tcactgtggaggtgtggacagtc

SEQ ID NO: 103906 - RNA, 23 nt, synthetic construct
  source 1..23: mol_type = other RNA
tgcactgtggaggtgtggacagt

SEQ ID NO: 103907 - RNA, 23 nt, synthetic construct
  source 1..23: mol_type = other RNA
tggtggccctggttgtggtggtc

SEQ ID NO: 103908 - RNA, 23 nt, synthetic construct
  source 1..23: mol_type = other RNA
ttggaggagggggtcaccgtgga

SEQ ID NO: 103909 - RNA, 23 nt, synthetic construct
  source 1..23: mol_type = other RNA
tgaggaggggttggtggtggagc

SEQ ID NO: 103910 - RNA, 23 nt, synthetic construct
  source 1..23: mol_type = other RNA
ttgctggtggctgcaggtgtggt

SEQ ID NO: 103911 - RNA, 23 nt, synthetic construct
  source 1..23: mol_type = other RNA
tgtgtggcccggggtggtcgtcc

SEQ ID NO: 103912 - RNA, 23 nt, synthetic construct
  source 1..23: mol_type = other RNA
tggctgtggctgtggtcctggag

SEQ ID NO: 103913 - RNA, 23 nt, synthetic construct
  source 1..23: mol_type = other RNA
tgaggcggtggccgtggatccgg

SEQ ID NO: 103914 - RNA, 23 nt, synthetic construct
  source 1..23: mol_type = other RNA
tggagctggtgactgtgggtgtc

SEQ ID NO: 103915 - RNA, 23 nt, synthetic construct
  source 1..23: mol_type = other RNA
tggtggccctggttgtggtggcc

SEQ ID NO: 103916 - RNA, 23 nt, synthetic construct
  source 1..23: mol_type = other RNA
tgctgttcctggggtggaagagg

SEQ ID NO: 103917 - RNA, 23 nt, synthetic construct
  source 1..23: mol_type = other RNA
tgaggaggggttggtggtggagc

SEQ ID NO: 103918 - RNA, 23 nt, synthetic construct
  source 1..23: mol_type = other RNA
ttgctggtggctgcaggtgtggt

SEQ ID NO: 103919 - RNA, 23 nt, synthetic construct
  source 1..23: mol_type = other RNA
ttgtgggtggtgcccaaggtgcc

SEQ ID NO: 103920 - RNA, 23 nt, synthetic construct
  source 1..23: mol_type = other RNA
tgtgtggcccggggtggtcgtcc

SEQ ID NO: 103921 - RNA, 23 nt, synthetic construct
  source 1..23: mol_type = other RNA
tcccccagggggacaccaggctg

SEQ ID NO: 103922 - RNA, 23 nt, synthetic construct
  source 1..23: mol_type = other RNA
ttaacgctggtagctgtggattt

SEQ ID NO: 103923 - RNA, 23 nt, synthetic construct
  source 1..23: mol_type = other RNA
tcatggtggccacgggtgtggtg

SEQ ID NO: 103924 - RNA, 23 nt, synthetic construct
  source 1..23: mol_type = other RNA
ttggctgcagttgtagtggctgc

SEQ ID NO: 103925 - RNA, 23 nt, synthetic construct
  source 1..23: mol_type = other RNA
tgtggctgcagttgtagtggctg

SEQ ID NO: 103926 - RNA, 23 nt, synthetic construct
  source 1..23: mol_type = other RNA
tgaggcggtggccgtggatccgg

SEQ ID NO: 103927 - RNA, 23 nt, synthetic construct
  source 1..23: mol_type = other RNA
tggagctggtgactgtgggtgtc

SEQ ID NO: 103928 - RNA, 23 nt, synthetic construct
  source 1..23: mol_type = other RNA
tctggaggagggagtggctttgg

SEQ ID NO: 103929 - RNA, 23 nt, synthetic construct
  source 1..23: mol_type = other RNA
tactggaggagggagtggctttg

SEQ ID NO: 103930 - RNA, 23 nt, synthetic construct
  source 1..23: mol_type = other RNA
tcactgtggaggtgtggacagtc

SEQ ID NO: 103931 - RNA, 23 nt, synthetic construct
  source 1..23: mol_type = other RNA
tgcactgtggaggtgtggacagt

SEQ ID NO: 103932 - RNA, 23 nt, synthetic construct
  source 1..23: mol_type = other RNA
tggtgtggtggttgtgggtgtgg

SEQ ID NO: 103933 - RNA, 23 nt, synthetic construct
  source 1..23: mol_type = other RNA
ttggaggagggggtcaccgtgga

SEQ ID NO: 103934 - RNA, 23 nt, synthetic construct
  source 1..23: mol_type = other RNA
tgaggaggggttggtggtggagc

SEQ ID NO: 103935 - RNA, 23 nt, synthetic construct
  source 1..23: mol_type = other RNA
tgtggctgcgggtgtggtggccg

SEQ ID NO: 103936 - RNA, 23 nt, synthetic construct
  source 1..23: mol_type = other RNA
ttggagctggtggctgcgggtgt

SEQ ID NO: 103937 - RNA, 23 nt, synthetic construct
  source 1..23: mol_type = other RNA
ttggctgtggtggtcagcactgt

SEQ ID NO: 103938 - RNA, 23 nt, synthetic construct
  source 1..23: mol_type = other RNA
tggtggctgtggtggtcagcact

SEQ ID NO: 103939 - RNA, 23 nt, synthetic construct
  source 1..23: mol_type = other RNA
ttggtggctgtggtggtcagcac

SEQ ID NO: 103940 - RNA, 23 nt, synthetic construct
  source 1..23: mol_type = other RNA
ttggctgcagttgtagtggctgt

SEQ ID NO: 103941 - RNA, 23 nt, synthetic construct
  source 1..23: mol_type = other RNA
tgtggctgcagttgtagtggctg

SEQ ID NO: 103942 - RNA, 23 nt, synthetic construct
  source 1..23: mol_type = other RNA
tggggaagccagtgggtctcagg

SEQ ID NO: 103943 - RNA, 23 nt, synthetic construct
  source 1..23: mol_type = other RNA
tagggcgaggacagcggggcgga

SEQ ID NO: 103944 - RNA, 23 nt, synthetic construct
  source 1..23: mol_type = other RNA
tcaggatcaggccctcctccttc

SEQ ID NO: 103945 - RNA, 23 nt, synthetic construct
  source 1..23: mol_type = other RNA
tcagtcggggcccagcagccatc

SEQ ID NO: 103946 - RNA, 23 nt, synthetic construct
  source 1..23: mol_type = other RNA
tggctggcagtggggggtgtgcc

SEQ ID NO: 103947 - RNA, 23 nt, synthetic construct
  source 1..23: mol_type = other RNA
tatcccctccagctgtgggctct

SEQ ID NO: 103948 - RNA, 23 nt, synthetic construct
  source 1..23: mol_type = other RNA
tgggtgcagatggactcctgccc

SEQ ID NO: 103949 - RNA, 23 nt, synthetic construct
  source 1..23: mol_type = other RNA
ttcctgggtgcagatggactcct

SEQ ID NO: 103950 - RNA, 23 nt, synthetic construct
  source 1..23: mol_type = other RNA
tagcagtcgccctcctcctgggt

SEQ ID NO: 103951 - RNA, 23 nt, synthetic construct
  source 1..23: mol_type = other RNA
tcagggaagggcgcctgggaagg

SEQ ID NO: 103952 - RNA, 23 nt, synthetic construct
  source 1..23: mol_type = other RNA
tctggggacaggtagtattgttg

SEQ ID NO: 103953 - RNA, 23 nt, synthetic construct
  source 1..23: mol_type = other RNA
tttcagctggactggctggccat

SEQ ID NO: 103954 - RNA, 23 nt, synthetic construct
  source 1..23: mol_type = other RNA
tcaccctcagcctcacagaggta

SEQ ID NO: 103955 - RNA, 23 nt, synthetic construct
  source 1..23: mol_type = other RNA
tctcctgggccgggaagccacgg

SEQ ID NO: 103956 - RNA, 23 nt, synthetic construct
  source 1..23: mol_type = other RNA
tcctcctgggccgggaagccacg

SEQ ID NO: 103957 - RNA, 23 nt, synthetic construct
  source 1..23: mol_type = other RNA
tctggcccctcacccttctgggg

SEQ ID NO: 103958 - RNA, 23 nt, synthetic construct
  source 1..23: mol_type = other RNA
tcctggcagcagctggccttgcc

SEQ ID NO: 103959 - RNA, 23 nt, synthetic construct
  source 1..23: mol_type = other RNA
tctcagggtttatttgcaaaact

SEQ ID NO: 103960 - RNA, 23 nt, synthetic construct
  source 1..23: mol_type = other RNA
  misc_difference 23: note = a, c, u, g, unknown or other
tagggagggagccgggccgggtn

SEQ ID NO: 103961 - RNA, 23 nt, synthetic construct
  source 1..23: mol_type = other RNA
tgcagggagggagccgggccggg

SEQ ID NO: 103962 - RNA, 23 nt, synthetic construct
  source 1..23: mol_type = other RNA
tggcagggagggagccgggccgg

SEQ ID NO: 103963 - RNA, 23 nt, synthetic construct
  source 1..23: mol_type = other RNA
tgggcagggagggagccgggccg

SEQ ID NO: 103964 - RNA, 23 nt, synthetic construct
  source 1..23: mol_type = other RNA
tcgggcagggagggagccgggcc

SEQ ID NO: 103965 - RNA, 23 nt, synthetic construct
  source 1..23: mol_type = other RNA
tacgggcagggagggagccgggc

SEQ ID NO: 103966 - RNA, 23 nt, synthetic construct
  source 1..23: mol_type = other RNA
tgggacgggcagggagggagccg

SEQ ID NO: 103967 - RNA, 23 nt, synthetic construct
  source 1..23: mol_type = other RNA
tggggacgggcagggagggagcc

SEQ ID NO: 103968 - RNA, 23 nt, synthetic construct
  source 1..23: mol_type = other RNA
tcggggacgggcagggagggagc

SEQ ID NO: 103969 - RNA, 23 nt, synthetic construct
  source 1..23: mol_type = other RNA
tgacggggacgggcagggaggga

SEQ ID NO: 103970 - RNA, 23 nt, synthetic construct
  source 1..23: mol_type = other RNA
tcgggtggggggacggggacggg

SEQ ID NO: 103971 - RNA, 23 nt, synthetic construct
  source 1..23: mol_type = other RNA
tcacgggtggggggacggggacg

SEQ ID NO: 103972 - RNA, 23 nt, synthetic construct
  source 1..23: mol_type = other RNA
tgggctggcacgggtggggggac

SEQ ID NO: 103973 - RNA, 23 nt, synthetic construct
  source 1..23: mol_type = other RNA
ttgggggctggcacgggtggggg

SEQ ID NO: 103974 - RNA, 23 nt, synthetic construct
  source 1..23: mol_type = other RNA
tctgggggctggcacgggtgggg

SEQ ID NO: 103975 - RNA, 23 nt, synthetic construct
  source 1..23: mol_type = other RNA
ttcctgggggctggcacgggtgg

SEQ ID NO: 103976 - RNA, 23 nt, synthetic construct
  source 1..23: mol_type = other RNA
tggggcacccatcctgggggctg

SEQ ID NO: 103977 - RNA, 23 nt, synthetic construct
  source 1..23: mol_type = other RNA
tctctgcctgcggcaccacgagc

SEQ ID NO: 103978 - RNA, 23 nt, synthetic construct
  source 1..23: mol_type = other RNA
ttctctgcctgcggcaccacgag

SEQ ID NO: 103979 - RNA, 23 nt, synthetic construct
  source 1..23: mol_type = other RNA
tcagggccctgggtctctgcctg

SEQ ID NO: 103980 - RNA, 23 nt, synthetic construct
  source 1..23: mol_type = other RNA
tacagggccctgggtctctgcct

SEQ ID NO: 103981 - RNA, 23 nt, synthetic construct
  source 1..23: mol_type = other RNA
tccacagggccctgggtctctgc

SEQ ID NO: 103982 - RNA, 23 nt, synthetic construct
  source 1..23: mol_type = other RNA
tctccacagggccctgggtctct

SEQ ID NO: 103983 - RNA, 23 nt, synthetic construct
  source 1..23: mol_type = other RNA
tcggctccacagggccctgggtc

SEQ ID NO: 103984 - RNA, 23 nt, synthetic construct
  source 1..23: mol_type = other RNA
tctcggctccacagggccctggg

SEQ ID NO: 103985 - RNA, 23 nt, synthetic construct
  source 1..23: mol_type = other RNA
ttctcccagctcggctccacagg

SEQ ID NO: 103986 - RNA, 23 nt, synthetic construct
  source 1..23: mol_type = other RNA
tgcgccgggtgggcgaggacgtc

SEQ ID NO: 103987 - RNA, 23 nt, synthetic construct
  source 1..23: mol_type = other RNA
taccccaggtgctgcacacccgc

SEQ ID NO: 103988 - RNA, 23 nt, synthetic construct
  source 1..23: mol_type = other RNA
ttcaccccaggtgctgcacaccc

SEQ ID NO: 103989 - RNA, 23 nt, synthetic construct
  source 1..23: mol_type = other RNA
tcacaggcctggagcccactagg

SEQ ID NO: 103990 - RNA, 23 nt, synthetic construct
  source 1..23: mol_type = other RNA
tccacaggcctggagcccactag

SEQ ID NO: 103991 - RNA, 23 nt, synthetic construct
  source 1..23: mol_type = other RNA
tagctcctcccgctgcccattga

SEQ ID NO: 103992 - RNA, 23 nt, synthetic construct
  source 1..23: mol_type = other RNA
ttccaccaggaggccagtgcggc

SEQ ID NO: 103993 - RNA, 23 nt, synthetic construct
  source 1..23: mol_type = other RNA
tctctgctccaccaggaggccag

SEQ ID NO: 103994 - RNA, 23 nt, synthetic construct
  source 1..23: mol_type = other RNA
tgctctgctccaccaggaggcca

SEQ ID NO: 103995 - RNA, 23 nt, synthetic construct
  source 1..23: mol_type = other RNA
tcgctctgctccaccaggaggcc

SEQ ID NO: 103996 - RNA, 23 nt, synthetic construct
  source 1..23: mol_type = other RNA
tcccgctctgctccaccaggagg

SEQ ID NO: 103997 - RNA, 23 nt, synthetic construct
  source 1..23: mol_type = other RNA
tccccgctctgctccaccaggag

SEQ ID NO: 103998 - RNA, 23 nt, synthetic construct
  source 1..23: mol_type = other RNA
ttccccgctctgctccaccagga

SEQ ID NO: 103999 - RNA, 23 nt, synthetic construct
  source 1..23: mol_type = other RNA
tgatccagctccagcagggcact

SEQ ID NO: 104000 - RNA, 23 nt, synthetic construct
  source 1..23: mol_type = other RNA
tttgggatccagctccagcaggg

SEQ ID NO: 104001 - RNA, 23 nt, synthetic construct
  source 1..23: mol_type = other RNA
ttatttgggatccagctccagca

SEQ ID NO: 104002 - RNA, 23 nt, synthetic construct
  source 1..23: mol_type = other RNA
tacacaggccacaggtctggttg

SEQ ID NO: 104003 - RNA, 23 nt, synthetic construct
  source 1..23: mol_type = other RNA
tcacacaggccacaggtctggtt

SEQ ID NO: 104004 - RNA, 23 nt, synthetic construct
  source 1..23: mol_type = other RNA
tagtccccacacaggccacaggt

SEQ ID NO: 104005 - RNA, 23 nt, synthetic construct
  source 1..23: mol_type = other RNA
tctggagcggggtcagcctggcg

SEQ ID NO: 104006 - RNA, 23 nt, synthetic construct
  source 1..23: mol_type = other RNA
tgggtgcggtggcagatgccctc

SEQ ID NO: 104007 - RNA, 23 nt, synthetic construct
  source 1..23: mol_type = other RNA
tccagcagggtgcggtggcagat

SEQ ID NO: 104008 - RNA, 23 nt, synthetic construct
  source 1..23: mol_type = other RNA
tgccccagcagggtgcggtggca

SEQ ID NO: 104009 - RNA, 23 nt, synthetic construct
  source 1..23: mol_type = other RNA
tgccggccccagcagggtgcggt

SEQ ID NO: 104010 - RNA, 23 nt, synthetic construct
  source 1..23: mol_type = other RNA
tggccggccccagcagggtgcgg

SEQ ID NO: 104011 - RNA, 23 nt, synthetic construct
  source 1..23: mol_type = other RNA
tagtgctgtccaccagtgcgtgg

SEQ ID NO: 104012 - RNA, 23 nt, synthetic construct
  source 1..23: mol_type = other RNA
tggtggcacacgggcaggtgggg

SEQ ID NO: 104013 - RNA, 23 nt, synthetic construct
  source 1..23: mol_type = other RNA
ttccgcggctggccccccgcgtg

SEQ ID NO: 104014 - RNA, 23 nt, synthetic construct
  source 1..23: mol_type = other RNA
tagggcacctccagttccgcggc

SEQ ID NO: 104015 - RNA, 23 nt, synthetic construct
  source 1..23: mol_type = other RNA
tagctcagggcacctccagttcc

SEQ ID NO: 104016 - RNA, 23 nt, synthetic construct
  source 1..23: mol_type = other RNA
tcagagctcagggcacctccagt

SEQ ID NO: 104017 - RNA, 23 nt, synthetic construct
  source 1..23: mol_type = other RNA
tggggcagagctcagggcacctc

SEQ ID NO: 104018 - RNA, 23 nt, synthetic construct
  source 1..23: mol_type = other RNA
tagggggcaggtccgggggcaga

SEQ ID NO: 104019 - RNA, 23 nt, synthetic construct
  source 1..23: mol_type = other RNA
ttgagccacactcctggtgctgc

SEQ ID NO: 104020 - RNA, 23 nt, synthetic construct
  source 1..23: mol_type = other RNA
tgtgagccacactcctggtgctg

SEQ ID NO: 104021 - RNA, 23 nt, synthetic construct
  source 1..23: mol_type = other RNA
tggtgagccacactcctggtgct

SEQ ID NO: 104022 - RNA, 23 nt, synthetic construct
  source 1..23: mol_type = other RNA
tgttggagcaggtgtccgtgcag

SEQ ID NO: 104023 - RNA, 23 nt, synthetic construct
  source 1..23: mol_type = other RNA
tcgcagagctgcgcgcgctgggg

SEQ ID NO: 104024 - RNA, 23 nt, synthetic construct
  source 1..23: mol_type = other RNA
tgtggtcctcgcagagctgcgcg

SEQ ID NO: 104025 - RNA, 23 nt, synthetic construct
  source 1..23: mol_type = other RNA
tgaaggaggtgcccgggctgtag

SEQ ID NO: 104026 - RNA, 23 nt, synthetic construct
  source 1..23: mol_type = other RNA
tgcaggtggtgttgaaggaggtg

SEQ ID NO: 104027 - RNA, 23 nt, synthetic construct
  source 1..23: mol_type = other RNA
tccccggagcaggtgcaggagct

SEQ ID NO: 104028 - RNA, 23 nt, synthetic construct
  source 1..23: mol_type = other RNA
tgagcaggtgccagggcacggca

SEQ ID NO: 104029 - RNA, 23 nt, synthetic construct
  source 1..23: mol_type = other RNA
tagagcaggtgccagggcacggc

SEQ ID NO: 104030 - RNA, 23 nt, synthetic construct
  source 1..23: mol_type = other RNA
tacagagcaggtgccagggcacg

SEQ ID NO: 104031 - RNA, 23 nt, synthetic construct
  source 1..23: mol_type = other RNA
tgcacagagcaggtgccagggca

SEQ ID NO: 104032 - RNA, 23 nt, synthetic construct
  source 1..23: mol_type = other RNA
ttgcacagagcaggtgccagggc

SEQ ID NO: 104033 - RNA, 23 nt, synthetic construct
  source 1..23: mol_type = other RNA
tgccctgcacagagcaggtgcca

SEQ ID NO: 104034 - RNA, 23 nt, synthetic construct
  source 1..23: mol_type = other RNA
tggccccgccctgcacagagcag

SEQ ID NO: 104035 - RNA, 23 nt, synthetic construct
  source 1..23: mol_type = other RNA
ttgtgggccccgccctgcacaga

SEQ ID NO: 104036 - RNA, 23 nt, synthetic construct
  source 1..23: mol_type = other RNA
tagcacggtgaagctgctgtcgg

SEQ ID NO: 104037 - RNA, 23 nt, synthetic construct
  source 1..23: mol_type = other RNA
tcgcagctcagccagcacggtga

SEQ ID NO: 104038 - RNA, 23 nt, synthetic construct
  source 1..23: mol_type = other RNA
ttccgcagctcagccagcacggt

SEQ ID NO: 104039 - RNA, 23 nt, synthetic construct
  source 1..23: mol_type = other RNA
tttccgcagctcagccagcacgg

SEQ ID NO: 104040 - RNA, 23 nt, synthetic construct
  source 1..23: mol_type = other RNA
tcttccgcagctcagccagcacg

SEQ ID NO: 104041 - RNA, 23 nt, synthetic construct
  source 1..23: mol_type = other RNA
tgtctgcaccacgatgaagaagc

SEQ ID NO: 104042 - RNA, 23 nt, synthetic construct
  source 1..23: mol_type = other RNA
tccaggcctgtctgcaccacgat

SEQ ID NO: 104043 - RNA, 23 nt, synthetic construct
  source 1..23: mol_type = other RNA
tcccaggcctgtctgcaccacga

SEQ ID NO: 104044 - RNA, 23 nt, synthetic construct
  source 1..23: mol_type = other RNA
tgccccaggcctgtctgcaccac

SEQ ID NO: 104045 - RNA, 23 nt, synthetic construct
  source 1..23: mol_type = other RNA
tcagccccaggcctgtctgcacc

SEQ ID NO: 104046 - RNA, 23 nt, synthetic construct
  source 1..23: mol_type = other RNA
ttgcagccccaggcctgtctgca

SEQ ID NO: 104047 - RNA, 23 nt, synthetic construct
  source 1..23: mol_type = other RNA
tcaccagcagctgcagccccagg

SEQ ID NO: 104048 - RNA, 23 nt, synthetic construct
  source 1..23: mol_type = other RNA
ttccaccaccccgctgagggccg

SEQ ID NO: 104049 - RNA, 23 nt, synthetic construct
  source 1..23: mol_type = other RNA
tctccaccaccccgctgagggcc

SEQ ID NO: 104050 - RNA, 23 nt, synthetic construct
  source 1..23: mol_type = other RNA
ttggcctccaccaccccgctgag

SEQ ID NO: 104051 - RNA, 23 nt, synthetic construct
  source 1..23: mol_type = other RNA
tgcgcccgtggcctccaccaccc

SEQ ID NO: 104052 - RNA, 23 nt, synthetic construct
  source 1..23: mol_type = other RNA
tgcctgggccttccaggtgttgg

SEQ ID NO: 104053 - RNA, 23 nt, synthetic construct
  source 1..23: mol_type = other RNA
tagcctgggccttccaggtgttg

SEQ ID NO: 104054 - RNA, 23 nt, synthetic construct
  source 1..23: mol_type = other RNA
tcaggcagcctgggccttccagg

SEQ ID NO: 104055 - RNA, 23 nt, synthetic construct
  source 1..23: mol_type = other RNA
tacaggcagcctgggccttccag

SEQ ID NO: 104056 - RNA, 23 nt, synthetic construct
  source 1..23: mol_type = other RNA
tgcacaggcagcctgggccttcc

SEQ ID NO: 104057 - RNA, 23 nt, synthetic construct
  source 1..23: mol_type = other RNA
tgcattggcacaggcagcctggg

SEQ ID NO: 104058 - RNA, 23 nt, synthetic construct
  source 1..23: mol_type = other RNA
tgagaaggcactgttgggatcgg

SEQ ID NO: 104059 - RNA, 23 nt, synthetic construct
  source 1..23: mol_type = other RNA
tgttgatgatggagtggcagcgc

SEQ ID NO: 104060 - RNA, 23 nt, synthetic construct
  source 1..23: mol_type = other RNA
tgcttggggttgatgatggagtg

SEQ ID NO: 104061 - RNA, 23 nt, synthetic construct
  source 1..23: mol_type = other RNA
tggcttggggttgatgatggagt

SEQ ID NO: 104062 - RNA, 23 nt, synthetic construct
  source 1..23: mol_type = other RNA
taacatgcagttcgagtggaagg

SEQ ID NO: 104063 - RNA, 23 nt, synthetic construct
  source 1..23: mol_type = other RNA
tcagccgtccacaggcacgaagg

SEQ ID NO: 104064 - RNA, 23 nt, synthetic construct
  source 1..23: mol_type = other RNA
tcggggcaggtgcagccgtccac

SEQ ID NO: 104065 - RNA, 23 nt, synthetic construct
  source 1..23: mol_type = other RNA
tagcaggggcactcctgggcggg

SEQ ID NO: 104066 - RNA, 23 nt, synthetic construct
  source 1..23: mol_type = other RNA
tcaccacctctccaggagccagc

SEQ ID NO: 104067 - RNA, 23 nt, synthetic construct
  source 1..23: mol_type = other RNA
tgaggctcccaggcagcttagct

SEQ ID NO: 104068 - RNA, 23 nt, synthetic construct
  source 1..23: mol_type = other RNA
tcacaccctgtgcttttctgcag

SEQ ID NO: 104069 - RNA, 23 nt, synthetic construct
  source 1..23: mol_type = other RNA
tctgttgctgcagtccaggtaca

SEQ ID NO: 104070 - RNA, 23 nt, synthetic construct
  source 1..23: mol_type = other RNA
tcagcccccactcccatccgaca

SEQ ID NO: 104071 - RNA, 23 nt, synthetic construct
  source 1..23: mol_type = other RNA
tatgcagcccccactcccatccg

SEQ ID NO: 104072 - RNA, 23 nt, synthetic construct
  source 1..23: mol_type = other RNA
tcctgcaggtgcaggtgttgcag

SEQ ID NO: 104073 - RNA, 23 nt, synthetic construct
  source 1..23: mol_type = other RNA
ttcctgcaggtgcaggtgttgca

SEQ ID NO: 104074 - RNA, 23 nt, synthetic construct
  source 1..23: mol_type = other RNA
ttggtgttgtccccacagtagtc

SEQ ID NO: 104075 - RNA, 23 nt, synthetic construct
  source 1..23: mol_type = other RNA
tggccctctcgccaccgccttaa

SEQ ID NO: 104076 - RNA, 23 nt, synthetic construct
  source 1..23: mol_type = other RNA
tggtccccacccggccctctcgc

SEQ ID NO: 104077 - RNA, 23 nt, synthetic construct
  source 1..23: mol_type = other RNA
tccgggcaggagggggagagctt

SEQ ID NO: 104078 - RNA, 23 nt, synthetic construct
  source 1..23: mol_type = other RNA
ttgcaggggtccttgggtgccag

SEQ ID NO: 104079 - RNA, 23 nt, synthetic construct
  source 1..23: mol_type = other RNA
tggggcaggtgtccggagtccgc

SEQ ID NO: 104080 - RNA, 23 nt, synthetic construct
  source 1..23: mol_type = other RNA
tacagaacaaggggcaggtgtcc

SEQ ID NO: 104081 - RNA, 23 nt, synthetic construct
  source 1..23: mol_type = other RNA
tgccactcacagcccccatgtgg

SEQ ID NO: 104082 - RNA, 23 nt, synthetic construct
  source 1..23: mol_type = other RNA
tgtgccactcacagcccccatgt

SEQ ID NO: 104083 - RNA, 23 nt, synthetic construct
  source 1..23: mol_type = other RNA
tggctggctgggtgggcacttcg

SEQ ID NO: 104084 - RNA, 23 nt, synthetic construct
  source 1..23: mol_type = other RNA
tgggctggctgggtgggcacttc

SEQ ID NO: 104085 - RNA, 23 nt, synthetic construct
  source 1..23: mol_type = other RNA
ttgccacagccttcctgatgatg

SEQ ID NO: 104086 - RNA, 23 nt, synthetic construct
  source 1..23: mol_type = other RNA
tcatgccacagccttcctgatga

SEQ ID NO: 104087 - RNA, 23 nt, synthetic construct
  source 1..23: mol_type = other RNA
tgctggagttccaggacatgcca

SEQ ID NO: 104088 - RNA, 23 nt, synthetic construct
  source 1..23: mol_type = other RNA
tgcggtggtgaaggtgaatggcg

SEQ ID NO: 104089 - RNA, 23 nt, synthetic construct
  source 1..23: mol_type = other RNA
tcaggcggtggtgaaggtgaatg

SEQ ID NO: 104090 - RNA, 23 nt, synthetic construct
  source 1..23: mol_type = other RNA
tccaggcggtggtgaaggtgaat

SEQ ID NO: 104091 - RNA, 23 nt, synthetic construct
  source 1..23: mol_type = other RNA
ttggagtgggggacccaggcggt

SEQ ID NO: 104092 - RNA, 23 nt, synthetic construct
  source 1..23: mol_type = other RNA
tggtggagaccgggagggccggg

SEQ ID NO: 104093 - RNA, 23 nt, synthetic construct
  source 1..23: mol_type = other RNA
tcggtggagaccgggagggccgg

SEQ ID NO: 104094 - RNA, 23 nt, synthetic construct
  source 1..23: mol_type = other RNA
ttgcccattgtaccagctggacc

SEQ ID NO: 104095 - RNA, 23 nt, synthetic construct
  source 1..23: mol_type = other RNA
tggtgcccattgtaccagctgga

SEQ ID NO: 104096 - RNA, 23 nt, synthetic construct
  source 1..23: mol_type = other RNA
tcccaggccgggctctgggcggt

SEQ ID NO: 104097 - RNA, 23 nt, synthetic construct
  source 1..23: mol_type = other RNA
tcgcctcccaggccgggctctgg

SEQ ID NO: 104098 - RNA, 23 nt, synthetic construct
  source 1..23: mol_type = other RNA
tccgcctcccaggccgggctctg

SEQ ID NO: 104099 - RNA, 23 nt, synthetic construct
  source 1..23: mol_type = other RNA
tctccgcctcccaggccgggctc

SEQ ID NO: 104100 - RNA, 23 nt, synthetic construct
  source 1..23: mol_type = other RNA
tctggcccagctcctccagcggc

SEQ ID NO: 104101 - RNA, 23 nt, synthetic construct
  source 1..23: mol_type = other RNA
tcacctgctggcccagctcctcc

SEQ ID NO: 104102 - RNA, 23 nt, synthetic construct
  source 1..23: mol_type = other RNA
tgggaggggccacagggcacgta

SEQ ID NO: 104103 - RNA, 23 nt, synthetic construct
  source 1..23: mol_type = other RNA
tcggggaggggccacagggcacg

SEQ ID NO: 104104 - RNA, 23 nt, synthetic construct
  source 1..23: mol_type = other RNA
tccggggaggggccacagggcac

SEQ ID NO: 104105 - RNA, 23 nt, synthetic construct
  source 1..23: mol_type = other RNA
tgccggggaggggccacagggca

SEQ ID NO: 104106 - RNA, 23 nt, synthetic construct
  source 1..23: mol_type = other RNA
tggccggggaggggccacagggc

SEQ ID NO: 104107 - RNA, 23 nt, synthetic construct
  source 1..23: mol_type = other RNA
ttgcctggggccggggaggggcc

SEQ ID NO: 104108 - RNA, 23 nt, synthetic construct
  source 1..23: mol_type = other RNA
tgagggctggtgcctggggccgg

SEQ ID NO: 104109 - RNA, 23 nt, synthetic construct
  source 1..23: mol_type = other RNA
ttgagggctggtgcctggggccg

SEQ ID NO: 104110 - RNA, 23 nt, synthetic construct
  source 1..23: mol_type = other RNA
tctgagggctggtgcctggggcc

SEQ ID NO: 104111 - RNA, 23 nt, synthetic construct
  source 1..23: mol_type = other RNA
tggctgagggctggtgcctgggg

SEQ ID NO: 104112 - RNA, 23 nt, synthetic construct
  source 1..23: mol_type = other RNA
tagggagggctgagggctggtgc

SEQ ID NO: 104113 - RNA, 23 nt, synthetic construct
  source 1..23: mol_type = other RNA
tactgagggagggctgagggctg

SEQ ID NO: 104114 - RNA, 23 nt, synthetic construct
  source 1..23: mol_type = other RNA
ttggcactgagggagggctgagg

SEQ ID NO: 104115 - RNA, 23 nt, synthetic construct
  source 1..23: mol_type = other RNA
tgttgctgtggtctgggttgggg

SEQ ID NO: 104116 - RNA, 23 nt, synthetic construct
  source 1..23: mol_type = other RNA
ttcacggggcctgagctggaccc

SEQ ID NO: 104117 - RNA, 23 nt, synthetic construct
  source 1..23: mol_type = other RNA
tacctggggccgagggggtgacc

SEQ ID NO: 104118 - RNA, 23 nt, synthetic construct
  source 1..23: mol_type = other RNA
tgccctccagcggccctgatctt

SEQ ID NO: 104119 - RNA, 23 nt, synthetic construct
  source 1..23: mol_type = other RNA
ttgcagcagaggacccggatcct

SEQ ID NO: 104120 - RNA, 23 nt, synthetic construct
  source 1..23: mol_type = other RNA
ttccagctctgtggtcggtggcg

SEQ ID NO: 104121 - RNA, 23 nt, synthetic construct
  source 1..23: mol_type = other RNA
tgccgtctccagctctgtggtcg

SEQ ID NO: 104122 - RNA, 23 nt, synthetic construct
  source 1..23: mol_type = other RNA
tggccgtctccagctctgtggtc

SEQ ID NO: 104123 - RNA, 23 nt, synthetic construct
  source 1..23: mol_type = other RNA
tgcctgggtggtggtggtggtgg

SEQ ID NO: 104124 - RNA, 23 nt, synthetic construct
  source 1..23: mol_type = other RNA
tggcctgggtggtggtggtggtg

SEQ ID NO: 104125 - RNA, 23 nt, synthetic construct
  source 1..23: mol_type = other RNA
tagggcctgggtggtggtggtgg

SEQ ID NO: 104126 - RNA, 23 nt, synthetic construct
  source 1..23: mol_type = other RNA
tgaacagggcctgggtggtggtg

SEQ ID NO: 104127 - RNA, 23 nt, synthetic construct
  source 1..23: mol_type = other RNA
tagaacagggcctgggtggtggt

SEQ ID NO: 104128 - RNA, 23 nt, synthetic construct
  source 1..23: mol_type = other RNA
ttgagaacagggcctgggtggtg

SEQ ID NO: 104129 - RNA, 23 nt, synthetic construct
  source 1..23: mol_type = other RNA
tccctggtcagccccgggctact

SEQ ID NO: 104130 - RNA, 23 nt, synthetic construct
  source 1..23: mol_type = other RNA
tggagccctggtcagccccgggc

SEQ ID NO: 104131 - RNA, 23 nt, synthetic construct
  source 1..23: mol_type = other RNA
tggccgggggagccctggtcagc

SEQ ID NO: 104132 - RNA, 23 nt, synthetic construct
  source 1..23: mol_type = other RNA
tctggccgggggagccctggtca

SEQ ID NO: 104133 - RNA, 23 nt, synthetic construct
  source 1..23: mol_type = other RNA
ttgctggccgggggagccctggt

SEQ ID NO: 104134 - RNA, 23 nt, synthetic construct
  source 1..23: mol_type = other RNA
tgggatgtcagtccttctgagag

SEQ ID NO: 104135 - RNA, 23 nt, synthetic construct
  source 1..23: mol_type = other RNA
tttctgtggagcctgcaggcgtc

SEQ ID NO: 104136 - RNA, 23 nt, synthetic construct
  source 1..23: mol_type = other RNA
tctggaagggctgagcgtgttgg

SEQ ID NO: 104137 - RNA, 23 nt, synthetic construct
  source 1..23: mol_type = other RNA
tcctggaagggctgagcgtgttg

SEQ ID NO: 104138 - RNA, 23 nt, synthetic construct
  source 1..23: mol_type = other RNA
tggctgtgaggggcgccatgtgc

SEQ ID NO: 104139 - RNA, 23 nt, synthetic construct
  source 1..23: mol_type = other RNA
tggtggctgtgaggggcgccatg

SEQ ID NO: 104140 - RNA, 23 nt, synthetic construct
  source 1..23: mol_type = other RNA
tgtgggtggctgtgaggggcgcc

SEQ ID NO: 104141 - RNA, 23 nt, synthetic construct
  source 1..23: mol_type = other RNA
tgctggctgtgcctgtcgggcga

SEQ ID NO: 104142 - RNA, 23 nt, synthetic construct
  source 1..23: mol_type = other RNA
ttgctggctgtgcctgtcgggcg

SEQ ID NO: 104143 - RNA, 23 nt, synthetic construct
  source 1..23: mol_type = other RNA
tggtgctggctgtgcctgtcggg

SEQ ID NO: 104144 - RNA, 23 nt, synthetic construct
  source 1..23: mol_type = other RNA
tcggtgctggctgtgcctgtcgg

SEQ ID NO: 104145 - RNA, 23 nt, synthetic construct
  source 1..23: mol_type = other RNA
tggcctgagaggtggacagctcg

SEQ ID NO: 104146 - RNA, 23 nt, synthetic construct
  source 1..23: mol_type = other RNA
tctggtggtggtgttagtcaagg

SEQ ID NO: 104147 - RNA, 23 nt, synthetic construct
  source 1..23: mol_type = other RNA
tgccctggctggtggtggtgtta

SEQ ID NO: 104148 - RNA, 23 nt, synthetic construct
  source 1..23: mol_type = other RNA
tgtgccctggctggtggtggtgt

SEQ ID NO: 104149 - RNA, 23 nt, synthetic construct
  source 1..23: mol_type = other RNA
tggtcgtgccctggctggtggtg

SEQ ID NO: 104150 - RNA, 23 nt, synthetic construct
  source 1..23: mol_type = other RNA
tggtggaggtcggggtggccgtg

SEQ ID NO: 104151 - RNA, 23 nt, synthetic construct
  source 1..23: mol_type = other RNA
tgggtggaggtcggggtggccgt

SEQ ID NO: 104152 - RNA, 23 nt, synthetic construct
  source 1..23: mol_type = other RNA
tcagggtggaggtcggggtggcc

SEQ ID NO: 104153 - RNA, 23 nt, synthetic construct
  source 1..23: mol_type = other RNA
ttgggagggggagctgttctcag

SEQ ID NO: 104154 - RNA, 23 nt, synthetic construct
  source 1..23: mol_type = other RNA
tgtgggtgtggtggccgtggtgg

SEQ ID NO: 104155 - RNA, 23 nt, synthetic construct
  source 1..23: mol_type = other RNA
tactgtgggtgtggtggccgtgg

SEQ ID NO: 104156 - RNA, 23 nt, synthetic construct
  source 1..23: mol_type = other RNA
ttgactgtgggtgtggtggccgt

SEQ ID NO: 104157 - RNA, 23 nt, synthetic construct
  source 1..23: mol_type = other RNA
tggtgactgtgggtgtggtggcc

SEQ ID NO: 104158 - RNA, 23 nt, synthetic construct
  source 1..23: mol_type = other RNA
tgagctggtgactgtgggtgtgg

SEQ ID NO: 104159 - RNA, 23 nt, synthetic construct
  source 1..23: mol_type = other RNA
ttggagctggtgactgtgggtgt

SEQ ID NO: 104160 - RNA, 23 nt, synthetic construct
  source 1..23: mol_type = other RNA
tttggagctggtgactgtgggtg

SEQ ID NO: 104161 - RNA, 23 nt, synthetic construct
  source 1..23: mol_type = other RNA
tagtggctttggagctggtgact

SEQ ID NO: 104162 - RNA, 23 nt, synthetic construct
  source 1..23: mol_type = other RNA
tgaggagggagtggctttggagc

SEQ ID NO: 104163 - RNA, 23 nt, synthetic construct
  source 1..23: mol_type = other RNA
tggaggagggagtggctttggag

SEQ ID NO: 104164 - RNA, 23 nt, synthetic construct
  source 1..23: mol_type = other RNA
tgactggaggagggagtggcttt

SEQ ID NO: 104165 - RNA, 23 nt, synthetic construct
  source 1..23: mol_type = other RNA
tcctggactggaggagggagtgg

SEQ ID NO: 104166 - RNA, 23 nt, synthetic construct
  source 1..23: mol_type = other RNA
tgggaggaagaggggatgggtgt

SEQ ID NO: 104167 - RNA, 23 nt, synthetic construct
  source 1..23: mol_type = other RNA
tgcccagggaggaagaggggatg

SEQ ID NO: 104168 - RNA, 23 nt, synthetic construct
  source 1..23: mol_type = other RNA
tgtgcccagggaggaagagggga

SEQ ID NO: 104169 - RNA, 23 nt, synthetic construct
  source 1..23: mol_type = other RNA
tggtgcccagggaggaagagggg

SEQ ID NO: 104170 - RNA, 23 nt, synthetic construct
  source 1..23: mol_type = other RNA
ttggtgcccagggaggaagaggg

SEQ ID NO: 104171 - RNA, 23 nt, synthetic construct
  source 1..23: mol_type = other RNA
tgtggtgcccagggaggaagagg

SEQ ID NO: 104172 - RNA, 23 nt, synthetic construct
  source 1..23: mol_type = other RNA
tcaggtggtgcccagggaggaag

SEQ ID NO: 104173 - RNA, 23 nt, synthetic construct
  source 1..23: mol_type = other RNA
tgtccaggtggtgcccagggagg

SEQ ID NO: 104174 - RNA, 23 nt, synthetic construct
  source 1..23: mol_type = other RNA
tgggtccaggtggtgcccaggga

SEQ ID NO: 104175 - RNA, 23 nt, synthetic construct
  source 1..23: mol_type = other RNA
tcgggtccaggtggtgcccaggg

SEQ ID NO: 104176 - RNA, 23 nt, synthetic construct
  source 1..23: mol_type = other RNA
tgcgggtccaggtggtgcccagg

SEQ ID NO: 104177 - RNA, 23 nt, synthetic construct
  source 1..23: mol_type = other RNA
tggcgggtccaggtggtgcccag

SEQ ID NO: 104178 - RNA, 23 nt, synthetic construct
  source 1..23: mol_type = other RNA
tgggtgtggtggtctgtgatagg

SEQ ID NO: 104179 - RNA, 23 nt, synthetic construct
  source 1..23: mol_type = other RNA
tggctgtggacatggtggccgtg

SEQ ID NO: 104180 - RNA, 23 nt, synthetic construct
  source 1..23: mol_type = other RNA
ttgtggctgtggacatggtggcc

SEQ ID NO: 104181 - RNA, 23 nt, synthetic construct
  source 1..23: mol_type = other RNA
tgggtgtggctgtggacatggtg

SEQ ID NO: 104182 - RNA, 23 nt, synthetic construct
  source 1..23: mol_type = other RNA
tctggagtggaggagggtgtggc

SEQ ID NO: 104183 - RNA, 23 nt, synthetic construct
  source 1..23: mol_type = other RNA
tactgtggaggtgtgggcagtct

SEQ ID NO: 104184 - RNA, 23 nt, synthetic construct
  source 1..23: mol_type = other RNA
tttgtggtggccgtggcggtaag

SEQ ID NO: 104185 - RNA, 23 nt, synthetic construct
  source 1..23: mol_type = other RNA
tggagggggtggccacagagccg

SEQ ID NO: 104186 - RNA, 23 nt, synthetic construct
  source 1..23: mol_type = other RNA
taggagggggtggccacagagcc

SEQ ID NO: 104187 - RNA, 23 nt, synthetic construct
  source 1..23: mol_type = other RNA
tgaggagggggtggccacagagc

SEQ ID NO: 104188 - RNA, 23 nt, synthetic construct
  source 1..23: mol_type = other RNA
tggaggagggggtggccacagag

SEQ ID NO: 104189 - RNA, 23 nt, synthetic construct
  source 1..23: mol_type = other RNA
ttggaggagggggtggccacaga

SEQ ID NO: 104190 - RNA, 23 nt, synthetic construct
  source 1..23: mol_type = other RNA
tcctggggtggaggagggggtgg

SEQ ID NO: 104191 - RNA, 23 nt, synthetic construct
  source 1..23: mol_type = other RNA
tgttcctggggtggaggaggggg

SEQ ID NO: 104192 - RNA, 23 nt, synthetic construct
  source 1..23: mol_type = other RNA
tggtggctgtgaagcccgtggtt

SEQ ID NO: 104193 - RNA, 23 nt, synthetic construct
  source 1..23: mol_type = other RNA
tggagggggtggctgtgaagccc

SEQ ID NO: 104194 - RNA, 23 nt, synthetic construct
  source 1..23: mol_type = other RNA
tggaggagggggtggctgtgaag

SEQ ID NO: 104195 - RNA, 23 nt, synthetic construct
  source 1..23: mol_type = other RNA
tccgtccctgggctggaggaggg

SEQ ID NO: 104196 - RNA, 23 nt, synthetic construct
  source 1..23: mol_type = other RNA
tgccgtccctgggctggaggagg

SEQ ID NO: 104197 - RNA, 23 nt, synthetic construct
  source 1..23: mol_type = other RNA
tgtgctgatccacactggaggcg

SEQ ID NO: 104198 - RNA, 23 nt, synthetic construct
  source 1..23: mol_type = other RNA
tatggaggagggggtcaccgtgg

SEQ ID NO: 104199 - RNA, 23 nt, synthetic construct
  source 1..23: mol_type = other RNA
tgggatggaggagggggtcaccg

SEQ ID NO: 104200 - RNA, 23 nt, synthetic construct
  source 1..23: mol_type = other RNA
tccgggatggaggagggggtcac

SEQ ID NO: 104201 - RNA, 23 nt, synthetic construct
  source 1..23: mol_type = other RNA
tccccgggatggaggagggggtc

SEQ ID NO: 104202 - RNA, 23 nt, synthetic construct
  source 1..23: mol_type = other RNA
tgtccccgggatggaggaggggg

SEQ ID NO: 104203 - RNA, 23 nt, synthetic construct
  source 1..23: mol_type = other RNA
tgtggtggtcagcactgtggcgg

SEQ ID NO: 104204 - RNA, 23 nt, synthetic construct
  source 1..23: mol_type = other RNA
ttgtggtggtggtggtcagcact

SEQ ID NO: 104205 - RNA, 23 nt, synthetic construct
  source 1..23: mol_type = other RNA
tttgtggtggtggtggtcagcac

SEQ ID NO: 104206 - RNA, 23 nt, synthetic construct
  source 1..23: mol_type = other RNA
tacagttgtggtggtggtggtca

SEQ ID NO: 104207 - RNA, 23 nt, synthetic construct
  source 1..23: mol_type = other RNA
tagtggccacagttgtggtggtg

SEQ ID NO: 104208 - RNA, 23 nt, synthetic construct
  source 1..23: mol_type = other RNA
tgccatagaaccagtggccacag

SEQ ID NO: 104209 - RNA, 23 nt, synthetic construct
  source 1..23: mol_type = other RNA
tagtggccgtggtggtcagtgat

SEQ ID NO: 104210 - RNA, 23 nt, synthetic construct
  source 1..23: mol_type = other RNA
tgtggtggagccggtggccgtga

SEQ ID NO: 104211 - RNA, 23 nt, synthetic construct
  source 1..23: mol_type = other RNA
tgttggtggtggagccggtggcc

SEQ ID NO: 104212 - RNA, 23 nt, synthetic construct
  source 1..23: mol_type = other RNA
ttgaggaggggttggtggtggag

SEQ ID NO: 104213 - RNA, 23 nt, synthetic construct
  source 1..23: mol_type = other RNA
tgttgaggaggggttggtggtgg

SEQ ID NO: 104214 - RNA, 23 nt, synthetic construct
  source 1..23: mol_type = other RNA
tggagttgaggaggggttggtgg

SEQ ID NO: 104215 - RNA, 23 nt, synthetic construct
  source 1..23: mol_type = other RNA
ttggggggatgggagttgtccca

SEQ ID NO: 104216 - RNA, 23 nt, synthetic construct
  source 1..23: mol_type = other RNA
tactggggggatgggagttgtcc

SEQ ID NO: 104217 - RNA, 23 nt, synthetic construct
  source 1..23: mol_type = other RNA
tcagcactggggggatgggagtt

SEQ ID NO: 104218 - RNA, 23 nt, synthetic construct
  source 1..23: mol_type = other RNA
ttggtggtcagcactggggggat

SEQ ID NO: 104219 - RNA, 23 nt, synthetic construct
  source 1..23: mol_type = other RNA
tggtggtggtcagcactgggggg

SEQ ID NO: 104220 - RNA, 23 nt, synthetic construct
  source 1..23: mol_type = other RNA
ttggtggcggtggtggtcagcac

SEQ ID NO: 104221 - RNA, 23 nt, synthetic construct
  source 1..23: mol_type = other RNA
tggtgtggtggcggtggtggtca

SEQ ID NO: 104222 - RNA, 23 nt, synthetic construct
  source 1..23: mol_type = other RNA
ttgcaggtgtggtggcggtggtg

SEQ ID NO: 104223 - RNA, 23 nt, synthetic construct
  source 1..23: mol_type = other RNA
tgctgcaggtgtggtggcggtgg

SEQ ID NO: 104224 - RNA, 23 nt, synthetic construct
  source 1..23: mol_type = other RNA
tggctgcaggtgtggtggcggtg

SEQ ID NO: 104225 - RNA, 23 nt, synthetic construct
  source 1..23: mol_type = other RNA
tttgctggtggctgcaggtgtgg

SEQ ID NO: 104226 - RNA, 23 nt, synthetic construct
  source 1..23: mol_type = other RNA
ttgttgctggtggctgcaggtgt

SEQ ID NO: 104227 - RNA, 23 nt, synthetic construct
  source 1..23: mol_type = other RNA
ttgtgttgctggtggctgcaggt

SEQ ID NO: 104228 - RNA, 23 nt, synthetic construct
  source 1..23: mol_type = other RNA
tcactgtgttgctggtggctgca

SEQ ID NO: 104229 - RNA, 23 nt, synthetic construct
  source 1..23: mol_type = other RNA
tgtcactgtgttgctggtggctg

SEQ ID NO: 104230 - RNA, 23 nt, synthetic construct
  source 1..23: mol_type = other RNA
tagggcagaggagggagtcactg

SEQ ID NO: 104231 - RNA, 23 nt, synthetic construct
  source 1..23: mol_type = other RNA
tggcactgggggtgtgtgggtgg

SEQ ID NO: 104232 - RNA, 23 nt, synthetic construct
  source 1..23: mol_type = other RNA
ttcggcactgggggtgtgtgggt

SEQ ID NO: 104233 - RNA, 23 nt, synthetic construct
  source 1..23: mol_type = other RNA
tgtgtggtggccatggtgttcgg

SEQ ID NO: 104234 - RNA, 23 nt, synthetic construct
  source 1..23: mol_type = other RNA
tactgctggggggcagggatcgc

SEQ ID NO: 104235 - RNA, 23 nt, synthetic construct
  source 1..23: mol_type = other RNA
tggactgctggggggcagggatc

SEQ ID NO: 104236 - RNA, 23 nt, synthetic construct
  source 1..23: mol_type = other RNA
tgggactgctggggggcagggat

SEQ ID NO: 104237 - RNA, 23 nt, synthetic construct
  source 1..23: mol_type = other RNA
tgtggggactgctggggggcagg

SEQ ID NO: 104238 - RNA, 23 nt, synthetic construct
  source 1..23: mol_type = other RNA
tgggctggaaagggctggagtcg

SEQ ID NO: 104239 - RNA, 23 nt, synthetic construct
  source 1..23: mol_type = other RNA
tagggctggaaagggctggagtc

SEQ ID NO: 104240 - RNA, 23 nt, synthetic construct
  source 1..23: mol_type = other RNA
tccctggagaagggggtgactcg

SEQ ID NO: 104241 - RNA, 23 nt, synthetic construct
  source 1..23: mol_type = other RNA
ttccctggagaagggggtgactc

SEQ ID NO: 104242 - RNA, 23 nt, synthetic construct
  source 1..23: mol_type = other RNA
tgtccctggagaagggggtgact

SEQ ID NO: 104243 - RNA, 23 nt, synthetic construct
  source 1..23: mol_type = other RNA
tcgtccctggagaagggggtgac

SEQ ID NO: 104244 - RNA, 23 nt, synthetic construct
  source 1..23: mol_type = other RNA
tgtcgtccctggagaagggggtg

SEQ ID NO: 104245 - RNA, 23 nt, synthetic construct
  source 1..23: mol_type = other RNA
tgtggtcgtccctggagaagggg

SEQ ID NO: 104246 - RNA, 23 nt, synthetic construct
  source 1..23: mol_type = other RNA
tggtgtggcccggggtggtcgtc

SEQ ID NO: 104247 - RNA, 23 nt, synthetic construct
  source 1..23: mol_type = other RNA
tggtggccgtggtgtggcccggg

SEQ ID NO: 104248 - RNA, 23 nt, synthetic construct
  source 1..23: mol_type = other RNA
tctggaggtggccgtggtgtggc

SEQ ID NO: 104249 - RNA, 23 nt, synthetic construct
  source 1..23: mol_type = other RNA
tggctgtggtcctggaggtggcc

SEQ ID NO: 104250 - RNA, 23 nt, synthetic construct
  source 1..23: mol_type = other RNA
tcgtggctgtggtcctggaggtg

SEQ ID NO: 104251 - RNA, 23 nt, synthetic construct
  source 1..23: mol_type = other RNA
tgtggccgtggctgtggtcctgg

SEQ ID NO: 104252 - RNA, 23 nt, synthetic construct
  source 1..23: mol_type = other RNA
tgtgtggccgtggctgtggtcct

SEQ ID NO: 104253 - RNA, 23 nt, synthetic construct
  source 1..23: mol_type = other RNA
tggtgtggccgtggctgtggtcc

SEQ ID NO: 104254 - RNA, 23 nt, synthetic construct
  source 1..23: mol_type = other RNA
ttgggtgtggccgtggctgtggt

SEQ ID NO: 104255 - RNA, 23 nt, synthetic construct
  source 1..23: mol_type = other RNA
tctgggtgtggccgtggctgtgg

SEQ ID NO: 104256 - RNA, 23 nt, synthetic construct
  source 1..23: mol_type = other RNA
tgctgggtgtggccgtggctgtg

SEQ ID NO: 104257 - RNA, 23 nt, synthetic construct
  source 1..23: mol_type = other RNA
ttgctgggtgtggccgtggctgt

SEQ ID NO: 104258 - RNA, 23 nt, synthetic construct
  source 1..23: mol_type = other RNA
tttgctgggtgtggccgtggctg

SEQ ID NO: 104259 - RNA, 23 nt, synthetic construct
  source 1..23: mol_type = other RNA
tcactggggctcacagcccatgg

SEQ ID NO: 104260 - RNA, 23 nt, synthetic construct
  source 1..23: mol_type = other RNA
ttagtccagccactctgaccagg

SEQ ID NO: 104261 - RNA, 23 nt, synthetic construct
  source 1..23: mol_type = other RNA
tgacggcccctccggccgcacgg

SEQ ID NO: 104262 - RNA, 23 nt, synthetic construct
  source 1..23: mol_type = other RNA
tcaggctgggcctgggcacggca

SEQ ID NO: 104263 - RNA, 23 nt, synthetic construct
  source 1..23: mol_type = other RNA
tggccaaagtccaggctgcattc

SEQ ID NO: 104264 - RNA, 23 nt, synthetic construct
  source 1..23: mol_type = other RNA
taggccaaagtccaggctgcatt

SEQ ID NO: 104265 - RNA, 23 nt, synthetic construct
  source 1..23: mol_type = other RNA
taccaggccaaagtccaggctgc

SEQ ID NO: 104266 - RNA, 23 nt, synthetic construct
  source 1..23: mol_type = other RNA
tcggttcctgcagaccaggccaa

SEQ ID NO: 104267 - RNA, 23 nt, synthetic construct
  source 1..23: mol_type = other RNA
ttggaggagggcatggccgtaga

SEQ ID NO: 104268 - RNA, 23 nt, synthetic construct
  source 1..23: mol_type = other RNA
tgagtggaggagggcatggccgt

SEQ ID NO: 104269 - RNA, 23 nt, synthetic construct
  source 1..23: mol_type = other RNA
tggatccagtggactcagtcgta

SEQ ID NO: 104270 - RNA, 23 nt, synthetic construct
  source 1..23: mol_type = other RNA
tccctggggtggaggacggggtg

SEQ ID NO: 104271 - RNA, 23 nt, synthetic construct
  source 1..23: mol_type = other RNA
ttccctggggtggaggacggggt

SEQ ID NO: 104272 - RNA, 23 nt, synthetic construct
  source 1..23: mol_type = other RNA
tggtccctggggtggaggacggg

SEQ ID NO: 104273 - RNA, 23 nt, synthetic construct
  source 1..23: mol_type = other RNA
ttggtccctggggtggaggacgg

SEQ ID NO: 104274 - RNA, 23 nt, synthetic construct
  source 1..23: mol_type = other RNA
tggtggtccctggggtggaggac

SEQ ID NO: 104275 - RNA, 23 nt, synthetic construct
  source 1..23: mol_type = other RNA
taggtggtccctggggtggagga

SEQ ID NO: 104276 - RNA, 23 nt, synthetic construct
  source 1..23: mol_type = other RNA
tcaggtggtccctggggtggagg

SEQ ID NO: 104277 - RNA, 23 nt, synthetic construct
  source 1..23: mol_type = other RNA
tccaggtggtccctggggtggag

SEQ ID NO: 104278 - RNA, 23 nt, synthetic construct
  source 1..23: mol_type = other RNA
tctgggtggaggaggcggtggcc

SEQ ID NO: 104279 - RNA, 23 nt, synthetic construct
  source 1..23: mol_type = other RNA
tgcagttgcctgggtggaggagg

SEQ ID NO: 104280 - RNA, 23 nt, synthetic construct
  source 1..23: mol_type = other RNA
tgagctggtgactgtgggtgtcg

SEQ ID NO: 104281 - RNA, 23 nt, synthetic construct
  source 1..23: mol_type = other RNA
ttggagctggtgactgtgggtgt

SEQ ID NO: 104282 - RNA, 23 nt, synthetic construct
  source 1..23: mol_type = other RNA
tttggagctggtgactgtgggtg

SEQ ID NO: 104283 - RNA, 23 nt, synthetic construct
  source 1..23: mol_type = other RNA
tagtggctttggagctggtgact

SEQ ID NO: 104284 - RNA, 23 nt, synthetic construct
  source 1..23: mol_type = other RNA
tgaagggagtggctttggagctg

SEQ ID NO: 104285 - RNA, 23 nt, synthetic construct
  source 1..23: mol_type = other RNA
tgagaagggagtggctttggagc

SEQ ID NO: 104286 - RNA, 23 nt, synthetic construct
  source 1..23: mol_type = other RNA
taggaggaggggatggctgtaaa

SEQ ID NO: 104287 - RNA, 23 nt, synthetic construct
  source 1..23: mol_type = other RNA
tgaggaggaggggatggctgtaa

SEQ ID NO: 104288 - RNA, 23 nt, synthetic construct
  source 1..23: mol_type = other RNA
tggtgcccagggaggaggagggg

SEQ ID NO: 104289 - RNA, 23 nt, synthetic construct
  source 1..23: mol_type = other RNA
tcaggtggtgcccagggaggagg

SEQ ID NO: 104290 - RNA, 23 nt, synthetic construct
  source 1..23: mol_type = other RNA
tgtccaggtggtgcccagggagg

SEQ ID NO: 104291 - RNA, 23 nt, synthetic construct
  source 1..23: mol_type = other RNA
tgggtccaggtggtgcccaggga

SEQ ID NO: 104292 - RNA, 23 nt, synthetic construct
  source 1..23: mol_type = other RNA
tcgggtccaggtggtgcccaggg

SEQ ID NO: 104293 - RNA, 23 nt, synthetic construct
  source 1..23: mol_type = other RNA
tgcgggtccaggtggtgcccagg

SEQ ID NO: 104294 - RNA, 23 nt, synthetic construct
  source 1..23: mol_type = other RNA
tggcgggtccaggtggtgcccag

SEQ ID NO: 104295 - RNA, 23 nt, synthetic construct
  source 1..23: mol_type = other RNA
tgggtgtggtggtctgtgatagg

SEQ ID NO: 104296 - RNA, 23 nt, synthetic construct
  source 1..23: mol_type = other RNA
tggctgtggacatggtggccgtg

SEQ ID NO: 104297 - RNA, 23 nt, synthetic construct
  source 1..23: mol_type = other RNA
ttgtggctgtggacatggtggcc

SEQ ID NO: 104298 - RNA, 23 nt, synthetic construct
  source 1..23: mol_type = other RNA
tgggtgtggctgtggacatggtg

SEQ ID NO: 104299 - RNA, 23 nt, synthetic construct
  source 1..23: mol_type = other RNA
tctggagtggaggagggtgtggc

SEQ ID NO: 104300 - RNA, 23 nt, synthetic construct
  source 1..23: mol_type = other RNA
tggagggggtggccacagagccg

SEQ ID NO: 104301 - RNA, 23 nt, synthetic construct
  source 1..23: mol_type = other RNA
taggagggggtggccacagagcc

SEQ ID NO: 104302 - RNA, 23 nt, synthetic construct
  source 1..23: mol_type = other RNA
tgaggagggggtggccacagagc

SEQ ID NO: 104303 - RNA, 23 nt, synthetic construct
  source 1..23: mol_type = other RNA
tggaggagggggtggccacagag

SEQ ID NO: 104304 - RNA, 23 nt, synthetic construct
  source 1..23: mol_type = other RNA
ttggaggagggggtggccacaga

SEQ ID NO: 104305 - RNA, 23 nt, synthetic construct
  source 1..23: mol_type = other RNA
tcctggggtggaggagggggtgg

SEQ ID NO: 104306 - RNA, 23 nt, synthetic construct
  source 1..23: mol_type = other RNA
tgttcctggggtggaggaggggg

SEQ ID NO: 104307 - RNA, 23 nt, synthetic construct
  source 1..23: mol_type = other RNA
tggtggctgtgaagcccgtggtt

SEQ ID NO: 104308 - RNA, 23 nt, synthetic construct
  source 1..23: mol_type = other RNA
tggagggggtggctgtgaagccc

SEQ ID NO: 104309 - RNA, 23 nt, synthetic construct
  source 1..23: mol_type = other RNA
tggaggagggggtggctgtgaag

SEQ ID NO: 104310 - RNA, 23 nt, synthetic construct
  source 1..23: mol_type = other RNA
tccgtccctgggctggaggaggg

SEQ ID NO: 104311 - RNA, 23 nt, synthetic construct
  source 1..23: mol_type = other RNA
tgccgtccctgggctggaggagg

SEQ ID NO: 104312 - RNA, 23 nt, synthetic construct
  source 1..23: mol_type = other RNA
ttggaacctctggttgtgggtgt

SEQ ID NO: 104313 - RNA, 23 nt, synthetic construct
  source 1..23: mol_type = other RNA
tgtggaacctctggttgtgggtg

SEQ ID NO: 104314 - RNA, 23 nt, synthetic construct
  source 1..23: mol_type = other RNA
tatggaggagggggtcaccgtgg

SEQ ID NO: 104315 - RNA, 23 nt, synthetic construct
  source 1..23: mol_type = other RNA
tgggatggaggagggggtcaccg

SEQ ID NO: 104316 - RNA, 23 nt, synthetic construct
  source 1..23: mol_type = other RNA
tccgggatggaggagggggtcac

SEQ ID NO: 104317 - RNA, 23 nt, synthetic construct
  source 1..23: mol_type = other RNA
tccccgggatggaggagggggtc

SEQ ID NO: 104318 - RNA, 23 nt, synthetic construct
  source 1..23: mol_type = other RNA
tgtccccgggatggaggaggggg

SEQ ID NO: 104319 - RNA, 23 nt, synthetic construct
  source 1..23: mol_type = other RNA
tggtggtcagcactgtgggggtg

SEQ ID NO: 104320 - RNA, 23 nt, synthetic construct
  source 1..23: mol_type = other RNA
ttggtggtcagcactgtgggggt

SEQ ID NO: 104321 - RNA, 23 nt, synthetic construct
  source 1..23: mol_type = other RNA
tgtggtggtcagcactgtggggg

SEQ ID NO: 104322 - RNA, 23 nt, synthetic construct
  source 1..23: mol_type = other RNA
ttgtggtggtggtggtcagcact

SEQ ID NO: 104323 - RNA, 23 nt, synthetic construct
  source 1..23: mol_type = other RNA
tttgtggtggtggtggtcagcac

SEQ ID NO: 104324 - RNA, 23 nt, synthetic construct
  source 1..23: mol_type = other RNA
tacagttgtggtggtggtggtca

SEQ ID NO: 104325 - RNA, 23 nt, synthetic construct
  source 1..23: mol_type = other RNA
tagtggccacagttgtggtggtg

SEQ ID NO: 104326 - RNA, 23 nt, synthetic construct
  source 1..23: mol_type = other RNA
tgccatagaaccagtggccacag

SEQ ID NO: 104327 - RNA, 23 nt, synthetic construct
  source 1..23: mol_type = other RNA
tagtggccgtggtggtcagtgat

SEQ ID NO: 104328 - RNA, 23 nt, synthetic construct
  source 1..23: mol_type = other RNA
tgtggtggagccggtggccgtga

SEQ ID NO: 104329 - RNA, 23 nt, synthetic construct
  source 1..23: mol_type = other RNA
tgttggtggtggagccggtggcc

SEQ ID NO: 104330 - RNA, 23 nt, synthetic construct
  source 1..23: mol_type = other RNA
ttgaggaggggttggtggtggag

SEQ ID NO: 104331 - RNA, 23 nt, synthetic construct
  source 1..23: mol_type = other RNA
tgttgaggaggggttggtggtgg

SEQ ID NO: 104332 - RNA, 23 nt, synthetic construct
  source 1..23: mol_type = other RNA
tggagttgaggaggggttggtgg

SEQ ID NO: 104333 - RNA, 23 nt, synthetic construct
  source 1..23: mol_type = other RNA
ttggagttgaggaggggttggtg

SEQ ID NO: 104334 - RNA, 23 nt, synthetic construct
  source 1..23: mol_type = other RNA
tccctggagttgaggaggggttg

SEQ ID NO: 104335 - RNA, 23 nt, synthetic construct
  source 1..23: mol_type = other RNA
tgtccctggagttgaggaggggt

SEQ ID NO: 104336 - RNA, 23 nt, synthetic construct
  source 1..23: mol_type = other RNA
tttgtccctggagttgaggaggg

SEQ ID NO: 104337 - RNA, 23 nt, synthetic construct
  source 1..23: mol_type = other RNA
ttggtggtcagcactggggggat

SEQ ID NO: 104338 - RNA, 23 nt, synthetic construct
  source 1..23: mol_type = other RNA
tggtggtggtcagcactgggggg

SEQ ID NO: 104339 - RNA, 23 nt, synthetic construct
  source 1..23: mol_type = other RNA
ttggtggcggtggtggtcagcac

SEQ ID NO: 104340 - RNA, 23 nt, synthetic construct
  source 1..23: mol_type = other RNA
tggtgtggtggcggtggtggtca

SEQ ID NO: 104341 - RNA, 23 nt, synthetic construct
  source 1..23: mol_type = other RNA
ttgcaggtgtggtggcggtggtg

SEQ ID NO: 104342 - RNA, 23 nt, synthetic construct
  source 1..23: mol_type = other RNA
tgctgcaggtgtggtggcggtgg

SEQ ID NO: 104343 - RNA, 23 nt, synthetic construct
  source 1..23: mol_type = other RNA
tggctgcaggtgtggtggcggtg

SEQ ID NO: 104344 - RNA, 23 nt, synthetic construct
  source 1..23: mol_type = other RNA
tctgctggtggctgcaggtgtgg

SEQ ID NO: 104345 - RNA, 23 nt, synthetic construct
  source 1..23: mol_type = other RNA
tctgtgctgctggtggctgcagg

SEQ ID NO: 104346 - RNA, 23 nt, synthetic construct
  source 1..23: mol_type = other RNA
ttcactgtgctgctggtggctgc

SEQ ID NO: 104347 - RNA, 23 nt, synthetic construct
  source 1..23: mol_type = other RNA
taggagggagtcactgtgctgct

SEQ ID NO: 104348 - RNA, 23 nt, synthetic construct
  source 1..23: mol_type = other RNA
tgaggagggagtcactgtgctgc

SEQ ID NO: 104349 - RNA, 23 nt, synthetic construct
  source 1..23: mol_type = other RNA
tagggcagaggagggagtcactg

SEQ ID NO: 104350 - RNA, 23 nt, synthetic construct
  source 1..23: mol_type = other RNA
tggcactgggggtgtgtgggtgg

SEQ ID NO: 104351 - RNA, 23 nt, synthetic construct
  source 1..23: mol_type = other RNA
ttcggcactgggggtgtgtgggt

SEQ ID NO: 104352 - RNA, 23 nt, synthetic construct
  source 1..23: mol_type = other RNA
tgtgtggtggccgtggtgttcgg

SEQ ID NO: 104353 - RNA, 23 nt, synthetic construct
  source 1..23: mol_type = other RNA
tgtggggactgctgggggacagg

SEQ ID NO: 104354 - RNA, 23 nt, synthetic construct
  source 1..23: mol_type = other RNA
taggtgcctgaggtggccgaagt

SEQ ID NO: 104355 - RNA, 23 nt, synthetic construct
  source 1..23: mol_type = other RNA
tccaaggtgcctgaggtggccga

SEQ ID NO: 104356 - RNA, 23 nt, synthetic construct
  source 1..23: mol_type = other RNA
tggtgcccaaggtgcctgaggtg

SEQ ID NO: 104357 - RNA, 23 nt, synthetic construct
  source 1..23: mol_type = other RNA
ttgggtggtgcccaaggtgcctg

SEQ ID NO: 104358 - RNA, 23 nt, synthetic construct
  source 1..23: mol_type = other RNA
tgctggggtgtgggaagtccccg

SEQ ID NO: 104359 - RNA, 23 nt, synthetic construct
  source 1..23: mol_type = other RNA
tttgctgctggggtgtgggaagt

SEQ ID NO: 104360 - RNA, 23 nt, synthetic construct
  source 1..23: mol_type = other RNA
tctagggtgagggctggacaggg

SEQ ID NO: 104361 - RNA, 23 nt, synthetic construct
  source 1..23: mol_type = other RNA
tccctggagaagggggtgactcg

SEQ ID NO: 104362 - RNA, 23 nt, synthetic construct
  source 1..23: mol_type = other RNA
ttccctggagaagggggtgactc

SEQ ID NO: 104363 - RNA, 23 nt, synthetic construct
  source 1..23: mol_type = other RNA
tgtccctggagaagggggtgact

SEQ ID NO: 104364 - RNA, 23 nt, synthetic construct
  source 1..23: mol_type = other RNA
tcgtccctggagaagggggtgac

SEQ ID NO: 104365 - RNA, 23 nt, synthetic construct
  source 1..23: mol_type = other RNA
tgtcgtccctggagaagggggtg

SEQ ID NO: 104366 - RNA, 23 nt, synthetic construct
  source 1..23: mol_type = other RNA
tgtggtcgtccctggagaagggg

SEQ ID NO: 104367 - RNA, 23 nt, synthetic construct
  source 1..23: mol_type = other RNA
tggtgtggcccggggtggtcgtc

SEQ ID NO: 104368 - RNA, 23 nt, synthetic construct
  source 1..23: mol_type = other RNA
tgaggtggccctggtgtggcccg

SEQ ID NO: 104369 - RNA, 23 nt, synthetic construct
  source 1..23: mol_type = other RNA
tggaggtggccctggtgtggccc

SEQ ID NO: 104370 - RNA, 23 nt, synthetic construct
  source 1..23: mol_type = other RNA
ttggaggtggccctggtgtggcc

SEQ ID NO: 104371 - RNA, 23 nt, synthetic construct
  source 1..23: mol_type = other RNA
tcctggaggtggccctggtgtgg

SEQ ID NO: 104372 - RNA, 23 nt, synthetic construct
  source 1..23: mol_type = other RNA
ttcctggaggtggccctggtgtg

SEQ ID NO: 104373 - RNA, 23 nt, synthetic construct
  source 1..23: mol_type = other RNA
tgtcctggaggtggccctggtgt

SEQ ID NO: 104374 - RNA, 23 nt, synthetic construct
  source 1..23: mol_type = other RNA
tggtcctggaggtggccctggtg

SEQ ID NO: 104375 - RNA, 23 nt, synthetic construct
  source 1..23: mol_type = other RNA
tcgtggtcctggaggtggccctg

SEQ ID NO: 104376 - RNA, 23 nt, synthetic construct
  source 1..23: mol_type = other RNA
tgggtgtggccgtggccgtggtc

SEQ ID NO: 104377 - RNA, 23 nt, synthetic construct
  source 1..23: mol_type = other RNA
ttgggtgtggccgtggccgtggt

SEQ ID NO: 104378 - RNA, 23 nt, synthetic construct
  source 1..23: mol_type = other RNA
tctgggtgtggccgtggccgtgg

SEQ ID NO: 104379 - RNA, 23 nt, synthetic construct
  source 1..23: mol_type = other RNA
ttgctgggtgtggccgtggccgt

SEQ ID NO: 104380 - RNA, 23 nt, synthetic construct
  source 1..23: mol_type = other RNA
tttgctgggtgtggccgtggccg

SEQ ID NO: 104381 - RNA, 23 nt, synthetic construct
  source 1..23: mol_type = other RNA
tcactggggctcacagcccatgg

SEQ ID NO: 104382 - RNA, 23 nt, synthetic construct
  source 1..23: mol_type = other RNA
ttagtccagccactctgaccagg

SEQ ID NO: 104383 - RNA, 23 nt, synthetic construct
  source 1..23: mol_type = other RNA
tgacggcccctccggccgcacgg

SEQ ID NO: 104384 - RNA, 23 nt, synthetic construct
  source 1..23: mol_type = other RNA
tcaggctgggcctgggcacggca

SEQ ID NO: 104385 - RNA, 23 nt, synthetic construct
  source 1..23: mol_type = other RNA
tggccaaagtccaggctgcattc

SEQ ID NO: 104386 - RNA, 23 nt, synthetic construct
  source 1..23: mol_type = other RNA
taggccaaagtccaggctgcatt

SEQ ID NO: 104387 - RNA, 23 nt, synthetic construct
  source 1..23: mol_type = other RNA
taccaggccaaagtccaggctgc

SEQ ID NO: 104388 - RNA, 23 nt, synthetic construct
  source 1..23: mol_type = other RNA
tcggttcctgcagaccaggccaa

SEQ ID NO: 104389 - RNA, 23 nt, synthetic construct
  source 1..23: mol_type = other RNA
tgtggccgtagagctggtggccg

SEQ ID NO: 104390 - RNA, 23 nt, synthetic construct
  source 1..23: mol_type = other RNA
tatccaggtcgtccctggagtgg

SEQ ID NO: 104391 - RNA, 23 nt, synthetic construct
  source 1..23: mol_type = other RNA
ttggctgctgtggtctgctctgt

SEQ ID NO: 104392 - RNA, 23 nt, synthetic construct
  source 1..23: mol_type = other RNA
tagtggctgctgtggtctgctct

SEQ ID NO: 104393 - RNA, 23 nt, synthetic construct
  source 1..23: mol_type = other RNA
ttgggagggggagctgttcccgg

SEQ ID NO: 104394 - RNA, 23 nt, synthetic construct
  source 1..23: mol_type = other RNA
tgtggtggccgtgctggtcagca

SEQ ID NO: 104395 - RNA, 23 nt, synthetic construct
  source 1..23: mol_type = other RNA
tgggtgtggtggccgtgctggtc

SEQ ID NO: 104396 - RNA, 23 nt, synthetic construct
  source 1..23: mol_type = other RNA
tgtgggtgtggtggccgtgctgg

SEQ ID NO: 104397 - RNA, 23 nt, synthetic construct
  source 1..23: mol_type = other RNA
taggaggaagtggctttggaact

SEQ ID NO: 104398 - RNA, 23 nt, synthetic construct
  source 1..23: mol_type = other RNA
tctggaggaggaagtggctttgg

SEQ ID NO: 104399 - RNA, 23 nt, synthetic construct
  source 1..23: mol_type = other RNA
tgactggaggaggaagtggcttt

SEQ ID NO: 104400 - RNA, 23 nt, synthetic construct
  source 1..23: mol_type = other RNA
tggactggaggaggaagtggctt

SEQ ID NO: 104401 - RNA, 23 nt, synthetic construct
  source 1..23: mol_type = other RNA
ttggactggaggaggaagtggct

SEQ ID NO: 104402 - RNA, 23 nt, synthetic construct
  source 1..23: mol_type = other RNA
tcttggactggaggaggaagtgg

SEQ ID NO: 104403 - RNA, 23 nt, synthetic construct
  source 1..23: mol_type = other RNA
ttccttggactggaggaggaagt

SEQ ID NO: 104404 - RNA, 23 nt, synthetic construct
  source 1..23: mol_type = other RNA
tgggtgaaggaggggatgggtgt

SEQ ID NO: 104405 - RNA, 23 nt, synthetic construct
  source 1..23: mol_type = other RNA
tgtcccaagggtgaaggagggga

SEQ ID NO: 104406 - RNA, 23 nt, synthetic construct
  source 1..23: mol_type = other RNA
ttggtcccaagggtgaaggaggg

SEQ ID NO: 104407 - RNA, 23 nt, synthetic construct
  source 1..23: mol_type = other RNA
ttgttctgggagggtcccggtgg

SEQ ID NO: 104408 - RNA, 23 nt, synthetic construct
  source 1..23: mol_type = other RNA
tccatgggtgtggtggtctgttc

SEQ ID NO: 104409 - RNA, 23 nt, synthetic construct
  source 1..23: mol_type = other RNA
ttggacatggtggccatgggtgt

SEQ ID NO: 104410 - RNA, 23 nt, synthetic construct
  source 1..23: mol_type = other RNA
tctccggagtggaggaggggtgg

SEQ ID NO: 104411 - RNA, 23 nt, synthetic construct
  source 1..23: mol_type = other RNA
tactgtggaggtgtgggtggtct

SEQ ID NO: 104412 - RNA, 23 nt, synthetic construct
  source 1..23: mol_type = other RNA
tgtggtggccttcgtggtcagca

SEQ ID NO: 104413 - RNA, 23 nt, synthetic construct
  source 1..23: mol_type = other RNA
tgacatggaactggtggcccttg

SEQ ID NO: 104414 - RNA, 23 nt, synthetic construct
  source 1..23: mol_type = other RNA
tgaggagggggtggacatggaac

SEQ ID NO: 104415 - RNA, 23 nt, synthetic construct
  source 1..23: mol_type = other RNA
tggaggagggggtggacatggaa

SEQ ID NO: 104416 - RNA, 23 nt, synthetic construct
  source 1..23: mol_type = other RNA
ttggaggagggggtggacatgga

SEQ ID NO: 104417 - RNA, 23 nt, synthetic construct
  source 1..23: mol_type = other RNA
tcggagtggaggagggggtggac

SEQ ID NO: 104418 - RNA, 23 nt, synthetic construct
  source 1..23: mol_type = other RNA
tgctgcagttgtagtggctgctg

SEQ ID NO: 104419 - RNA, 23 nt, synthetic construct
  source 1..23: mol_type = other RNA
tggctgcagttgtagtggctgct

SEQ ID NO: 104420 - RNA, 23 nt, synthetic construct
  source 1..23: mol_type = other RNA
tggccagtggctgcagttgtagt

SEQ ID NO: 104421 - RNA, 23 nt, synthetic construct
  source 1..23: mol_type = other RNA
tgggccagtggctgcagttgtag

SEQ ID NO: 104422 - RNA, 23 nt, synthetic construct
  source 1..23: mol_type = other RNA
tccgtggggccagtggctgcagt

SEQ ID NO: 104423 - RNA, 23 nt, synthetic construct
  source 1..23: mol_type = other RNA
tgtggccgtggggccagtggctg

SEQ ID NO: 104424 - RNA, 23 nt, synthetic construct
  source 1..23: mol_type = other RNA
tacggggtggccgtggggccagt

SEQ ID NO: 104425 - RNA, 23 nt, synthetic construct
  source 1..23: mol_type = other RNA
tccctggggtggaggacggggtg

SEQ ID NO: 104426 - RNA, 23 nt, synthetic construct
  source 1..23: mol_type = other RNA
ttccctggggtggaggacggggt

SEQ ID NO: 104427 - RNA, 23 nt, synthetic construct
  source 1..23: mol_type = other RNA
tggtccctggggtggaggacggg

SEQ ID NO: 104428 - RNA, 23 nt, synthetic construct
  source 1..23: mol_type = other RNA
ttggtccctggggtggaggacgg

SEQ ID NO: 104429 - RNA, 23 nt, synthetic construct
  source 1..23: mol_type = other RNA
tggtggtccctggggtggaggac

SEQ ID NO: 104430 - RNA, 23 nt, synthetic construct
  source 1..23: mol_type = other RNA
taggtggtccctggggtggagga

SEQ ID NO: 104431 - RNA, 23 nt, synthetic construct
  source 1..23: mol_type = other RNA
tcaggtggtccctggggtggagg

SEQ ID NO: 104432 - RNA, 23 nt, synthetic construct
  source 1..23: mol_type = other RNA
tccaggtggtccctggggtggag

SEQ ID NO: 104433 - RNA, 23 nt, synthetic construct
  source 1..23: mol_type = other RNA
tggtggctgtagtgctgggctct

SEQ ID NO: 104434 - RNA, 23 nt, synthetic construct
  source 1..23: mol_type = other RNA
tccgggtggaggaggcggtggcc

SEQ ID NO: 104435 - RNA, 23 nt, synthetic construct
  source 1..23: mol_type = other RNA
tgcccgggtggaggaggcggtgg

SEQ ID NO: 104436 - RNA, 23 nt, synthetic construct
  source 1..23: mol_type = other RNA
ttgcccgggtggaggaggcggtg

SEQ ID NO: 104437 - RNA, 23 nt, synthetic construct
  source 1..23: mol_type = other RNA
tgtggtggccgtgctggtcagca

SEQ ID NO: 104438 - RNA, 23 nt, synthetic construct
  source 1..23: mol_type = other RNA
tgggtgtggtggccgtgctggtc

SEQ ID NO: 104439 - RNA, 23 nt, synthetic construct
  source 1..23: mol_type = other RNA
tgtgggtgtggtggccgtgctgg

SEQ ID NO: 104440 - RNA, 23 nt, synthetic construct
  source 1..23: mol_type = other RNA
tactgtgggtgtggtggccgtgc

SEQ ID NO: 104441 - RNA, 23 nt, synthetic construct
  source 1..23: mol_type = other RNA
ttgactgtgggtgtggtggccgt

SEQ ID NO: 104442 - RNA, 23 nt, synthetic construct
  source 1..23: mol_type = other RNA
tgagctgatgactgtgggtgtgg

SEQ ID NO: 104443 - RNA, 23 nt, synthetic construct
  source 1..23: mol_type = other RNA
ttggagctgatgactgtgggtgt

SEQ ID NO: 104444 - RNA, 23 nt, synthetic construct
  source 1..23: mol_type = other RNA
tctggagctgatgactgtgggtg

SEQ ID NO: 104445 - RNA, 23 nt, synthetic construct
  source 1..23: mol_type = other RNA
tgctctggagctgatgactgtgg

SEQ ID NO: 104446 - RNA, 23 nt, synthetic construct
  source 1..23: mol_type = other RNA
tagggagtggctctggagctgat

SEQ ID NO: 104447 - RNA, 23 nt, synthetic construct
  source 1..23: mol_type = other RNA
tggaggagggagtggctctggag

SEQ ID NO: 104448 - RNA, 23 nt, synthetic construct
  source 1..23: mol_type = other RNA
ttggaggagggagtggctctgga

SEQ ID NO: 104449 - RNA, 23 nt, synthetic construct
  source 1..23: mol_type = other RNA
tgactggaggagggagtggctct

SEQ ID NO: 104450 - RNA, 23 nt, synthetic construct
  source 1..23: mol_type = other RNA
tcctggactggaggagggagtgg

SEQ ID NO: 104451 - RNA, 23 nt, synthetic construct
  source 1..23: mol_type = other RNA
tgaagaggggatggctgtaacgc

SEQ ID NO: 104452 - RNA, 23 nt, synthetic construct
  source 1..23: mol_type = other RNA
tgcccagggaggaagaggggatg

SEQ ID NO: 104453 - RNA, 23 nt, synthetic construct
  source 1..23: mol_type = other RNA
tgtgcccagggaggaagagggga

SEQ ID NO: 104454 - RNA, 23 nt, synthetic construct
  source 1..23: mol_type = other RNA
tggtgcccagggaggaagagggg

SEQ ID NO: 104455 - RNA, 23 nt, synthetic construct
  source 1..23: mol_type = other RNA
tcggtgcccagggaggaagaggg

SEQ ID NO: 104456 - RNA, 23 nt, synthetic construct
  source 1..23: mol_type = other RNA
tgcggtgcccagggaggaagagg

SEQ ID NO: 104457 - RNA, 23 nt, synthetic construct
  source 1..23: mol_type = other RNA
tggcggtgcccagggaggaagag

SEQ ID NO: 104458 - RNA, 23 nt, synthetic construct
  source 1..23: mol_type = other RNA
tccaggcggtgcccagggaggaa

SEQ ID NO: 104459 - RNA, 23 nt, synthetic construct
  source 1..23: mol_type = other RNA
tgggtgtggtggtctgtgatagg

SEQ ID NO: 104460 - RNA, 23 nt, synthetic construct
  source 1..23: mol_type = other RNA
tggctgtggacatggtggccgtg

SEQ ID NO: 104461 - RNA, 23 nt, synthetic construct
  source 1..23: mol_type = other RNA
ttgtggctgtggacatggtggcc

SEQ ID NO: 104462 - RNA, 23 nt, synthetic construct
  source 1..23: mol_type = other RNA
tgggtgtggctgtggacatggtg

SEQ ID NO: 104463 - RNA, 23 nt, synthetic construct
  source 1..23: mol_type = other RNA
tagaggagggtgtggctgtggac

SEQ ID NO: 104464 - RNA, 23 nt, synthetic construct
  source 1..23: mol_type = other RNA
tagtagaggagggtgtggctgtg

SEQ ID NO: 104465 - RNA, 23 nt, synthetic construct
  source 1..23: mol_type = other RNA
ttggagtagaggagggtgtggct

SEQ ID NO: 104466 - RNA, 23 nt, synthetic construct
  source 1..23: mol_type = other RNA
tttgtggtggtcgtggtggtaag

SEQ ID NO: 104467 - RNA, 23 nt, synthetic construct
  source 1..23: mol_type = other RNA
tgttgtggtggtcgtggtggtaa

SEQ ID NO: 104468 - RNA, 23 nt, synthetic construct
  source 1..23: mol_type = other RNA
tggttgtggtggtcgtggtggta

SEQ ID NO: 104469 - RNA, 23 nt, synthetic construct
  source 1..23: mol_type = other RNA
ttggttgtggtggtcgtggtggt

SEQ ID NO: 104470 - RNA, 23 nt, synthetic construct
  source 1..23: mol_type = other RNA
tctggttgtggtggtcgtggtgg

SEQ ID NO: 104471 - RNA, 23 nt, synthetic construct
  source 1..23: mol_type = other RNA
tgtggccctggttgtggtggtcg

SEQ ID NO: 104472 - RNA, 23 nt, synthetic construct
  source 1..23: mol_type = other RNA
tagagccggtggccctggttgtg

SEQ ID NO: 104473 - RNA, 23 nt, synthetic construct
  source 1..23: mol_type = other RNA
tcagagccggtggccctggttgt

SEQ ID NO: 104474 - RNA, 23 nt, synthetic construct
  source 1..23: mol_type = other RNA
tggagggggtggccacagagccg

SEQ ID NO: 104475 - RNA, 23 nt, synthetic construct
  source 1..23: mol_type = other RNA
taggagggggtggccacagagcc

SEQ ID NO: 104476 - RNA, 23 nt, synthetic construct
  source 1..23: mol_type = other RNA
tgaggagggggtggccacagagc

SEQ ID NO: 104477 - RNA, 23 nt, synthetic construct
  source 1..23: mol_type = other RNA
tggaggagggggtggccacagag

SEQ ID NO: 104478 - RNA, 23 nt, synthetic construct
  source 1..23: mol_type = other RNA
ttggaggagggggtggccacaga

SEQ ID NO: 104479 - RNA, 23 nt, synthetic construct
  source 1..23: mol_type = other RNA
tcctggggtggaggagggggtgg

SEQ ID NO: 104480 - RNA, 23 nt, synthetic construct
  source 1..23: mol_type = other RNA
tgttcctggggtggaggaggggg

SEQ ID NO: 104481 - RNA, 23 nt, synthetic construct
  source 1..23: mol_type = other RNA
tggttgtggtagtcggcactttg

SEQ ID NO: 104482 - RNA, 23 nt, synthetic construct
  source 1..23: mol_type = other RNA
tggtggctgtgaagcccgtggtt

SEQ ID NO: 104483 - RNA, 23 nt, synthetic construct
  source 1..23: mol_type = other RNA
tggagggggtggctgtgaagccc

SEQ ID NO: 104484 - RNA, 23 nt, synthetic construct
  source 1..23: mol_type = other RNA
tggaggagggggtggctgtgaag

SEQ ID NO: 104485 - RNA, 23 nt, synthetic construct
  source 1..23: mol_type = other RNA
tccgtccctgggctggaggaggg

SEQ ID NO: 104486 - RNA, 23 nt, synthetic construct
  source 1..23: mol_type = other RNA
tgccgtccctgggctggaggagg

SEQ ID NO: 104487 - RNA, 23 nt, synthetic construct
  source 1..23: mol_type = other RNA
tgtgctgatccacactggaggcg

SEQ ID NO: 104488 - RNA, 23 nt, synthetic construct
  source 1..23: mol_type = other RNA
tatggaggagggggtcaccgtgg

SEQ ID NO: 104489 - RNA, 23 nt, synthetic construct
  source 1..23: mol_type = other RNA
tgggatggaggagggggtcaccg

SEQ ID NO: 104490 - RNA, 23 nt, synthetic construct
  source 1..23: mol_type = other RNA
tccgggatggaggagggggtcac

SEQ ID NO: 104491 - RNA, 23 nt, synthetic construct
  source 1..23: mol_type = other RNA
tccccgggatggaggagggggtc

SEQ ID NO: 104492 - RNA, 23 nt, synthetic construct
  source 1..23: mol_type = other RNA
tgtccccgggatggaggaggggg

SEQ ID NO: 104493 - RNA, 23 nt, synthetic construct
  source 1..23: mol_type = other RNA
tgtggtggtcagcactgtggcgg

SEQ ID NO: 104494 - RNA, 23 nt, synthetic construct
  source 1..23: mol_type = other RNA
ttgtggtggtggtggtcagcact

SEQ ID NO: 104495 - RNA, 23 nt, synthetic construct
  source 1..23: mol_type = other RNA
tttgtggtggtggtggtcagcac

SEQ ID NO: 104496 - RNA, 23 nt, synthetic construct
  source 1..23: mol_type = other RNA
tacagttgtggtggtggtggtca

SEQ ID NO: 104497 - RNA, 23 nt, synthetic construct
  source 1..23: mol_type = other RNA
tagtggccacagttgtggtggtg

SEQ ID NO: 104498 - RNA, 23 nt, synthetic construct
  source 1..23: mol_type = other RNA
tgccatagaaccagtggccacag

SEQ ID NO: 104499 - RNA, 23 nt, synthetic construct
  source 1..23: mol_type = other RNA
tagtggccgtggtggtcagtgat

SEQ ID NO: 104500 - RNA, 23 nt, synthetic construct
  source 1..23: mol_type = other RNA
tgttggtggtggagccggtggct

SEQ ID NO: 104501 - RNA, 23 nt, synthetic construct
  source 1..23: mol_type = other RNA
ttgaggaggggttggtggtggag

SEQ ID NO: 104502 - RNA, 23 nt, synthetic construct
  source 1..23: mol_type = other RNA
tgttgaggaggggttggtggtgg

SEQ ID NO: 104503 - RNA, 23 nt, synthetic construct
  source 1..23: mol_type = other RNA
tggagttgaggaggggttggtgg

SEQ ID NO: 104504 - RNA, 23 nt, synthetic construct
  source 1..23: mol_type = other RNA
ttggagttgaggaggggttggtg

SEQ ID NO: 104505 - RNA, 23 nt, synthetic construct
  source 1..23: mol_type = other RNA
tccctggagttgaggaggggttg

SEQ ID NO: 104506 - RNA, 23 nt, synthetic construct
  source 1..23: mol_type = other RNA
tgtccctggagttgaggaggggt

SEQ ID NO: 104507 - RNA, 23 nt, synthetic construct
  source 1..23: mol_type = other RNA
tttgtccctggagttgaggaggg

SEQ ID NO: 104508 - RNA, 23 nt, synthetic construct
  source 1..23: mol_type = other RNA
ttggggggatgggagttgtccct

SEQ ID NO: 104509 - RNA, 23 nt, synthetic construct
  source 1..23: mol_type = other RNA
tactggggggatgggagttgtcc

SEQ ID NO: 104510 - RNA, 23 nt, synthetic construct
  source 1..23: mol_type = other RNA
tcagcactggggggatgggagtt

SEQ ID NO: 104511 - RNA, 23 nt, synthetic construct
  source 1..23: mol_type = other RNA
ttggtggtcagcactggggggat

SEQ ID NO: 104512 - RNA, 23 nt, synthetic construct
  source 1..23: mol_type = other RNA
tggtggtggtcagcactgggggg

SEQ ID NO: 104513 - RNA, 23 nt, synthetic construct
  source 1..23: mol_type = other RNA
ttggtggcggtggtggtcagcac

SEQ ID NO: 104514 - RNA, 23 nt, synthetic construct
  source 1..23: mol_type = other RNA
tggtgtggtggcggtggtggtca

SEQ ID NO: 104515 - RNA, 23 nt, synthetic construct
  source 1..23: mol_type = other RNA
ttgcaggtgtggtggcggtggtg

SEQ ID NO: 104516 - RNA, 23 nt, synthetic construct
  source 1..23: mol_type = other RNA
tgctgcaggtgtggtggcggtgg

SEQ ID NO: 104517 - RNA, 23 nt, synthetic construct
  source 1..23: mol_type = other RNA
tggctgcaggtgtggtggcggtg

SEQ ID NO: 104518 - RNA, 23 nt, synthetic construct
  source 1..23: mol_type = other RNA
tctgctggtggctgcaggtgtgg

SEQ ID NO: 104519 - RNA, 23 nt, synthetic construct
  source 1..23: mol_type = other RNA
tctgtgctgctggtggctgcagg

SEQ ID NO: 104520 - RNA, 23 nt, synthetic construct
  source 1..23: mol_type = other RNA
ttcactgtgctgctggtggctgc

SEQ ID NO: 104521 - RNA, 23 nt, synthetic construct
  source 1..23: mol_type = other RNA
taggagggagtcactgtgctgct

SEQ ID NO: 104522 - RNA, 23 nt, synthetic construct
  source 1..23: mol_type = other RNA
tgaggagggagtcactgtgctgc

SEQ ID NO: 104523 - RNA, 23 nt, synthetic construct
  source 1..23: mol_type = other RNA
tagggcagaggagggagtcactg

SEQ ID NO: 104524 - RNA, 23 nt, synthetic construct
  source 1..23: mol_type = other RNA
tggcactgggggtgtgtgggtgg

SEQ ID NO: 104525 - RNA, 23 nt, synthetic construct
  source 1..23: mol_type = other RNA
ttcggcactgggggtgtgtgggt

SEQ ID NO: 104526 - RNA, 23 nt, synthetic construct
  source 1..23: mol_type = other RNA
tgtgtggtggccgtggtgttcgg

SEQ ID NO: 104527 - RNA, 23 nt, synthetic construct
  source 1..23: mol_type = other RNA
tccgcccgtgtgtggtggccgtg

SEQ ID NO: 104528 - RNA, 23 nt, synthetic construct
  source 1..23: mol_type = other RNA
tctgctggggggcagggaccgcc

SEQ ID NO: 104529 - RNA, 23 nt, synthetic construct
  source 1..23: mol_type = other RNA
tactgctggggggcagggaccgc

SEQ ID NO: 104530 - RNA, 23 nt, synthetic construct
  source 1..23: mol_type = other RNA
tggactgctggggggcagggacc

SEQ ID NO: 104531 - RNA, 23 nt, synthetic construct
  source 1..23: mol_type = other RNA
tgggactgctggggggcagggac

SEQ ID NO: 104532 - RNA, 23 nt, synthetic construct
  source 1..23: mol_type = other RNA
tgtggggactgctggggggcagg

SEQ ID NO: 104533 - RNA, 23 nt, synthetic construct
  source 1..23: mol_type = other RNA
tttgctgctggggtgtgggaagt

SEQ ID NO: 104534 - RNA, 23 nt, synthetic construct
  source 1..23: mol_type = other RNA
tctggtggttgctgctggggtgt

SEQ ID NO: 104535 - RNA, 23 nt, synthetic construct
  source 1..23: mol_type = other RNA
tgtggtactggtggttgctgctg

SEQ ID NO: 104536 - RNA, 23 nt, synthetic construct
  source 1..23: mol_type = other RNA
tctagggtgagggctggacaggg

SEQ ID NO: 104537 - RNA, 23 nt, synthetic construct
  source 1..23: mol_type = other RNA
tccctggagaagggggtgactcg

SEQ ID NO: 104538 - RNA, 23 nt, synthetic construct
  source 1..23: mol_type = other RNA
ttccctggagaagggggtgactc

SEQ ID NO: 104539 - RNA, 23 nt, synthetic construct
  source 1..23: mol_type = other RNA
tgtccctggagaagggggtgact

SEQ ID NO: 104540 - RNA, 23 nt, synthetic construct
  source 1..23: mol_type = other RNA
tcgtccctggagaagggggtgac

SEQ ID NO: 104541 - RNA, 23 nt, synthetic construct
  source 1..23: mol_type = other RNA
tgtcgtccctggagaagggggtg

SEQ ID NO: 104542 - RNA, 23 nt, synthetic construct
  source 1..23: mol_type = other RNA
tgtggtcgtccctggagaagggg

SEQ ID NO: 104543 - RNA, 23 nt, synthetic construct
  source 1..23: mol_type = other RNA
tggtgtggcccggggtggtcgtc

SEQ ID NO: 104544 - RNA, 23 nt, synthetic construct
  source 1..23: mol_type = other RNA
tcctggaggtgcccctggtgtgg

SEQ ID NO: 104545 - RNA, 23 nt, synthetic construct
  source 1..23: mol_type = other RNA
ttcctggaggtgcccctggtgtg

SEQ ID NO: 104546 - RNA, 23 nt, synthetic construct
  source 1..23: mol_type = other RNA
tgtggtcctggaggtgcccctgg

SEQ ID NO: 104547 - RNA, 23 nt, synthetic construct
  source 1..23: mol_type = other RNA
tctgtggtcctggaggtgcccct

SEQ ID NO: 104548 - RNA, 23 nt, synthetic construct
  source 1..23: mol_type = other RNA
tgctgtggtcctggaggtgcccc

SEQ ID NO: 104549 - RNA, 23 nt, synthetic construct
  source 1..23: mol_type = other RNA
tggctgtggtcctggaggtgccc

SEQ ID NO: 104550 - RNA, 23 nt, synthetic construct
  source 1..23: mol_type = other RNA
ttgtggctgtggtcctggaggtg

SEQ ID NO: 104551 - RNA, 23 nt, synthetic construct
  source 1..23: mol_type = other RNA
ttggctgtggctgtggtcctgga

SEQ ID NO: 104552 - RNA, 23 nt, synthetic construct
  source 1..23: mol_type = other RNA
tcacagcccgtggtcaccaccgt

SEQ ID NO: 104553 - RNA, 23 nt, synthetic construct
  source 1..23: mol_type = other RNA
ttagtccagccactctgaccagg

SEQ ID NO: 104554 - RNA, 23 nt, synthetic construct
  source 1..23: mol_type = other RNA
taggggctgctcacagactgccc

SEQ ID NO: 104555 - RNA, 23 nt, synthetic construct
  source 1..23: mol_type = other RNA
tcaggctgggcctgggcacggca

SEQ ID NO: 104556 - RNA, 23 nt, synthetic construct
  source 1..23: mol_type = other RNA
tggccaaagtccaggctgcattc

SEQ ID NO: 104557 - RNA, 23 nt, synthetic construct
  source 1..23: mol_type = other RNA
taggccaaagtccaggctgcatt

SEQ ID NO: 104558 - RNA, 23 nt, synthetic construct
  source 1..23: mol_type = other RNA
taccaggccaaagtccaggctgc

SEQ ID NO: 104559 - RNA, 23 nt, synthetic construct
  source 1..23: mol_type = other RNA
tcggttcctgcagaccaggccaa

SEQ ID NO: 104560 - RNA, 23 nt, synthetic construct
  source 1..23: mol_type = other RNA
tgtggccgtagagctggtggccg

SEQ ID NO: 104561 - RNA, 23 nt, synthetic construct
  source 1..23: mol_type = other RNA
tggctgttgtggtcagctttgtg

SEQ ID NO: 104562 - RNA, 23 nt, synthetic construct
  source 1..23: mol_type = other RNA
tggatccagtggactcagtcgta

SEQ ID NO: 104563 - RNA, 23 nt, synthetic construct
  source 1..23: mol_type = other RNA
tccctggggtggaggacggggtg

SEQ ID NO: 104564 - RNA, 23 nt, synthetic construct
  source 1..23: mol_type = other RNA
ttccctggggtggaggacggggt

SEQ ID NO: 104565 - RNA, 23 nt, synthetic construct
  source 1..23: mol_type = other RNA
tggtccctggggtggaggacggg

SEQ ID NO: 104566 - RNA, 23 nt, synthetic construct
  source 1..23: mol_type = other RNA
ttggtccctggggtggaggacgg

SEQ ID NO: 104567 - RNA, 23 nt, synthetic construct
  source 1..23: mol_type = other RNA
tggtggtccctggggtggaggac

SEQ ID NO: 104568 - RNA, 23 nt, synthetic construct
  source 1..23: mol_type = other RNA
taggtggtccctggggtggagga

SEQ ID NO: 104569 - RNA, 23 nt, synthetic construct
  source 1..23: mol_type = other RNA
tcaggtggtccctggggtggagg

SEQ ID NO: 104570 - RNA, 23 nt, synthetic construct
  source 1..23: mol_type = other RNA
tccaggtggtccctggggtggag

SEQ ID NO: 104571 - RNA, 23 nt, synthetic construct
  source 1..23: mol_type = other RNA
tctgggtggaggaggcggtggcc

SEQ ID NO: 104572 - RNA, 23 nt, synthetic construct
  source 1..23: mol_type = other RNA
tgcagttgcctgggtggaggagg

SEQ ID NO: 104573 - RNA, 23 nt, synthetic construct
  source 1..23: mol_type = other RNA
tgagctggtgactgtgggtgtcg

SEQ ID NO: 104574 - RNA, 23 nt, synthetic construct
  source 1..23: mol_type = other RNA
ttggagctggtgactgtgggtgt

SEQ ID NO: 104575 - RNA, 23 nt, synthetic construct
  source 1..23: mol_type = other RNA
tttggagctggtgactgtgggtg

SEQ ID NO: 104576 - RNA, 23 nt, synthetic construct
  source 1..23: mol_type = other RNA
tagtggctttggagctggtgact

SEQ ID NO: 104577 - RNA, 23 nt, synthetic construct
  source 1..23: mol_type = other RNA
tgaagggagtggctttggagctg

SEQ ID NO: 104578 - RNA, 23 nt, synthetic construct
  source 1..23: mol_type = other RNA
tgagaagggagtggctttggagc

SEQ ID NO: 104579 - RNA, 23 nt, synthetic construct
  source 1..23: mol_type = other RNA
taggaggaggggatggctgtaaa

SEQ ID NO: 104580 - RNA, 23 nt, synthetic construct
  source 1..23: mol_type = other RNA
tgaggaggaggggatggctgtaa

SEQ ID NO: 104581 - RNA, 23 nt, synthetic construct
  source 1..23: mol_type = other RNA
tggtgcccagggaggaggagggg

SEQ ID NO: 104582 - RNA, 23 nt, synthetic construct
  source 1..23: mol_type = other RNA
tcaggtggtgcccagggaggagg

SEQ ID NO: 104583 - RNA, 23 nt, synthetic construct
  source 1..23: mol_type = other RNA
tgtccaggtggtgcccagggagg

SEQ ID NO: 104584 - RNA, 23 nt, synthetic construct
  source 1..23: mol_type = other RNA
tgggtccaggtggtgcccaggga

SEQ ID NO: 104585 - RNA, 23 nt, synthetic construct
  source 1..23: mol_type = other RNA
tcgggtccaggtggtgcccaggg

SEQ ID NO: 104586 - RNA, 23 nt, synthetic construct
  source 1..23: mol_type = other RNA
tgcgggtccaggtggtgcccagg

SEQ ID NO: 104587 - RNA, 23 nt, synthetic construct
  source 1..23: mol_type = other RNA
tggcgggtccaggtggtgcccag

SEQ ID NO: 104588 - RNA, 23 nt, synthetic construct
  source 1..23: mol_type = other RNA
tgggtgtggtggtctgtgatagg

SEQ ID NO: 104589 - RNA, 23 nt, synthetic construct
  source 1..23: mol_type = other RNA
tggctgtggacatggtggccgtg

SEQ ID NO: 104590 - RNA, 23 nt, synthetic construct
  source 1..23: mol_type = other RNA
ttgtggctgtggacatggtggcc

SEQ ID NO: 104591 - RNA, 23 nt, synthetic construct
  source 1..23: mol_type = other RNA
tgggtgtggctgtggacatggtg

SEQ ID NO: 104592 - RNA, 23 nt, synthetic construct
  source 1..23: mol_type = other RNA
tctggagtggaggagggtgtggc

SEQ ID NO: 104593 - RNA, 23 nt, synthetic construct
  source 1..23: mol_type = other RNA
tactgtggaggtgtgggcagtct

SEQ ID NO: 104594 - RNA, 23 nt, synthetic construct
  source 1..23: mol_type = other RNA
ttggttgtggtggccgtggtggt

SEQ ID NO: 104595 - RNA, 23 nt, synthetic construct
  source 1..23: mol_type = other RNA
tgtggccctggttgtggtggccg

SEQ ID NO: 104596 - RNA, 23 nt, synthetic construct
  source 1..23: mol_type = other RNA
tagagccggtggccctggttgtg

SEQ ID NO: 104597 - RNA, 23 nt, synthetic construct
  source 1..23: mol_type = other RNA
tcagagccggtggccctggttgt

SEQ ID NO: 104598 - RNA, 23 nt, synthetic construct
  source 1..23: mol_type = other RNA
tgtggaagagggggtggccacag

SEQ ID NO: 104599 - RNA, 23 nt, synthetic construct
  source 1..23: mol_type = other RNA
tggtggaagagggggtggccaca

SEQ ID NO: 104600 - RNA, 23 nt, synthetic construct
  source 1..23: mol_type = other RNA
tgggtggaagagggggtggccac

SEQ ID NO: 104601 - RNA, 23 nt, synthetic construct
  source 1..23: mol_type = other RNA
tggttgtggtagtcggcactttg

SEQ ID NO: 104602 - RNA, 23 nt, synthetic construct
  source 1..23: mol_type = other RNA
tggagggggtgactgtgaagccc

SEQ ID NO: 104603 - RNA, 23 nt, synthetic construct
  source 1..23: mol_type = other RNA
ttgggctggaggagggggtgact

SEQ ID NO: 104604 - RNA, 23 nt, synthetic construct
  source 1..23: mol_type = other RNA
tccgtccctgggctggaggaggg

SEQ ID NO: 104605 - RNA, 23 nt, synthetic construct
  source 1..23: mol_type = other RNA
tgccgtccctgggctggaggagg

SEQ ID NO: 104606 - RNA, 23 nt, synthetic construct
  source 1..23: mol_type = other RNA
tgtgctgatccacactggaggcg

SEQ ID NO: 104607 - RNA, 23 nt, synthetic construct
  source 1..23: mol_type = other RNA
tactggttgtgggtgtggtggtt

SEQ ID NO: 104608 - RNA, 23 nt, synthetic construct
  source 1..23: mol_type = other RNA
tcaccgtggagccactggttgtg

SEQ ID NO: 104609 - RNA, 23 nt, synthetic construct
  source 1..23: mol_type = other RNA
ttgtgggtggtccccgggacgga

SEQ ID NO: 104610 - RNA, 23 nt, synthetic construct
  source 1..23: mol_type = other RNA
tggtggtcagcactgtgggggtg

SEQ ID NO: 104611 - RNA, 23 nt, synthetic construct
  source 1..23: mol_type = other RNA
ttggtggtcagcactgtgggggt

SEQ ID NO: 104612 - RNA, 23 nt, synthetic construct
  source 1..23: mol_type = other RNA
tgtggtggtcagcactgtggggg

SEQ ID NO: 104613 - RNA, 23 nt, synthetic construct
  source 1..23: mol_type = other RNA
ttgtggtggtggtggtcagcact

SEQ ID NO: 104614 - RNA, 23 nt, synthetic construct
  source 1..23: mol_type = other RNA
tttgtggtggtggtggtcagcac

SEQ ID NO: 104615 - RNA, 23 nt, synthetic construct
  source 1..23: mol_type = other RNA
tacagttgtggtggtggtggtca

SEQ ID NO: 104616 - RNA, 23 nt, synthetic construct
  source 1..23: mol_type = other RNA
tagtggccacagttgtggtggtg

SEQ ID NO: 104617 - RNA, 23 nt, synthetic construct
  source 1..23: mol_type = other RNA
tgccatagaaccagtggccacag

SEQ ID NO: 104618 - RNA, 23 nt, synthetic construct
  source 1..23: mol_type = other RNA
tgtggtggagccggtggccgtga

SEQ ID NO: 104619 - RNA, 23 nt, synthetic construct
  source 1..23: mol_type = other RNA
tgttggtggtggagccggtggcc

SEQ ID NO: 104620 - RNA, 23 nt, synthetic construct
  source 1..23: mol_type = other RNA
ttgaggaggggttggtggtggag

SEQ ID NO: 104621 - RNA, 23 nt, synthetic construct
  source 1..23: mol_type = other RNA
tgttgaggaggggttggtggtgg

SEQ ID NO: 104622 - RNA, 23 nt, synthetic construct
  source 1..23: mol_type = other RNA
tggagttgaggaggggttggtgg

SEQ ID NO: 104623 - RNA, 23 nt, synthetic construct
  source 1..23: mol_type = other RNA
ttggagttgaggaggggttggtg

SEQ ID NO: 104624 - RNA, 23 nt, synthetic construct
  source 1..23: mol_type = other RNA
tccctggagttgaggaggggttg

SEQ ID NO: 104625 - RNA, 23 nt, synthetic construct
  source 1..23: mol_type = other RNA
tgtccctggagttgaggaggggt

SEQ ID NO: 104626 - RNA, 23 nt, synthetic construct
  source 1..23: mol_type = other RNA
tttgtccctggagttgaggaggg

SEQ ID NO: 104627 - RNA, 23 nt, synthetic construct
  source 1..23: mol_type = other RNA
ttggtggtcagcactggggggat

SEQ ID NO: 104628 - RNA, 23 nt, synthetic construct
  source 1..23: mol_type = other RNA
tggtggtggtcagcactgggggg

SEQ ID NO: 104629 - RNA, 23 nt, synthetic construct
  source 1..23: mol_type = other RNA
ttggtggcggtggtggtcagcac

SEQ ID NO: 104630 - RNA, 23 nt, synthetic construct
  source 1..23: mol_type = other RNA
tggtgtggtggcggtggtggtca

SEQ ID NO: 104631 - RNA, 23 nt, synthetic construct
  source 1..23: mol_type = other RNA
ttgcaggtgtggtggcggtggtg

SEQ ID NO: 104632 - RNA, 23 nt, synthetic construct
  source 1..23: mol_type = other RNA
tgctgcaggtgtggtggcggtgg

SEQ ID NO: 104633 - RNA, 23 nt, synthetic construct
  source 1..23: mol_type = other RNA
tggctgcaggtgtggtggcggtg

SEQ ID NO: 104634 - RNA, 23 nt, synthetic construct
  source 1..23: mol_type = other RNA
tctgctggtggctgcaggtgtgg

SEQ ID NO: 104635 - RNA, 23 nt, synthetic construct
  source 1..23: mol_type = other RNA
tctgtgctgctggtggctgcagg

SEQ ID NO: 104636 - RNA, 23 nt, synthetic construct
  source 1..23: mol_type = other RNA
ttcactgtgctgctggtggctgc

SEQ ID NO: 104637 - RNA, 23 nt, synthetic construct
  source 1..23: mol_type = other RNA
taggagggagtcactgtgctgct

SEQ ID NO: 104638 - RNA, 23 nt, synthetic construct
  source 1..23: mol_type = other RNA
tgaggagggagtcactgtgctgc

SEQ ID NO: 104639 - RNA, 23 nt, synthetic construct
  source 1..23: mol_type = other RNA
tagggcagaggagggagtcactg

SEQ ID NO: 104640 - RNA, 23 nt, synthetic construct
  source 1..23: mol_type = other RNA
tggcactgggggtgtgtgggtgg

SEQ ID NO: 104641 - RNA, 23 nt, synthetic construct
  source 1..23: mol_type = other RNA
ttcggcactgggggtgtgtgggt

SEQ ID NO: 104642 - RNA, 23 nt, synthetic construct
  source 1..23: mol_type = other RNA
tgtgtggtggccgtggtgttcgg

SEQ ID NO: 104643 - RNA, 23 nt, synthetic construct
  source 1..23: mol_type = other RNA
tgtggggactgctgggggacagg

SEQ ID NO: 104644 - RNA, 23 nt, synthetic construct
  source 1..23: mol_type = other RNA
taggtgcctgaggtggccgaagt

SEQ ID NO: 104645 - RNA, 23 nt, synthetic construct
  source 1..23: mol_type = other RNA
tccaaggtgcctgaggtggccga

SEQ ID NO: 104646 - RNA, 23 nt, synthetic construct
  source 1..23: mol_type = other RNA
tggtgcccaaggtgcctgaggtg

SEQ ID NO: 104647 - RNA, 23 nt, synthetic construct
  source 1..23: mol_type = other RNA
ttgggtggtgcccaaggtgcctg

SEQ ID NO: 104648 - RNA, 23 nt, synthetic construct
  source 1..23: mol_type = other RNA
tgctggggtgtgggaagtccccg

SEQ ID NO: 104649 - RNA, 23 nt, synthetic construct
  source 1..23: mol_type = other RNA
tttgctgctggggtgtgggaagt

SEQ ID NO: 104650 - RNA, 23 nt, synthetic construct
  source 1..23: mol_type = other RNA
tctagggtgagggctggacaggg

SEQ ID NO: 104651 - RNA, 23 nt, synthetic construct
  source 1..23: mol_type = other RNA
tggtgtggcccggggtggtcgtc

SEQ ID NO: 104652 - RNA, 23 nt, synthetic construct
  source 1..23: mol_type = other RNA
tggtggccgtggtgtggcccggg

SEQ ID NO: 104653 - RNA, 23 nt, synthetic construct
  source 1..23: mol_type = other RNA
tctggaggtggccgtggtgtggc

SEQ ID NO: 104654 - RNA, 23 nt, synthetic construct
  source 1..23: mol_type = other RNA
tgggtgtggccgtggccgtggtc

SEQ ID NO: 104655 - RNA, 23 nt, synthetic construct
  source 1..23: mol_type = other RNA
ttgggtgtggccgtggccgtggt

SEQ ID NO: 104656 - RNA, 23 nt, synthetic construct
  source 1..23: mol_type = other RNA
tctgggtgtggccgtggccgtgg

SEQ ID NO: 104657 - RNA, 23 nt, synthetic construct
  source 1..23: mol_type = other RNA
ttgctgggtgtggccgtggccgt

SEQ ID NO: 104658 - RNA, 23 nt, synthetic construct
  source 1..23: mol_type = other RNA
tttgctgggtgtggccgtggccg

SEQ ID NO: 104659 - RNA, 23 nt, synthetic construct
  source 1..23: mol_type = other RNA
tcacagcccgtggtcaccaccgt

SEQ ID NO: 104660 - RNA, 23 nt, synthetic construct
  source 1..23: mol_type = other RNA
ttagtccagccactctgaccagg

SEQ ID NO: 104661 - RNA, 23 nt, synthetic construct
  source 1..23: mol_type = other RNA
tgacggcccctccggccgcacgg

SEQ ID NO: 104662 - RNA, 23 nt, synthetic construct
  source 1..23: mol_type = other RNA
tcaggctgggcctgggcacggca

SEQ ID NO: 104663 - RNA, 23 nt, synthetic construct
  source 1..23: mol_type = other RNA
tctcccccagggggacaccaggc

SEQ ID NO: 104664 - RNA, 23 nt, synthetic construct
  source 1..23: mol_type = other RNA
tggccaaagtccaggctgcattc

SEQ ID NO: 104665 - RNA, 23 nt, synthetic construct
  source 1..23: mol_type = other RNA
taggccaaagtccaggctgcatt

SEQ ID NO: 104666 - RNA, 23 nt, synthetic construct
  source 1..23: mol_type = other RNA
taccaggccaaagtccaggctgc

SEQ ID NO: 104667 - RNA, 23 nt, synthetic construct
  source 1..23: mol_type = other RNA
tcggttcctgcagaccaggccaa

SEQ ID NO: 104668 - RNA, 23 nt, synthetic construct
  source 1..23: mol_type = other RNA
ttggaggagggcatggccgtaga

SEQ ID NO: 104669 - RNA, 23 nt, synthetic construct
  source 1..23: mol_type = other RNA
tgagtggaggagggcatggccgt

SEQ ID NO: 104670 - RNA, 23 nt, synthetic construct
  source 1..23: mol_type = other RNA
tccggggtggaggacggggtggc

SEQ ID NO: 104671 - RNA, 23 nt, synthetic construct
  source 1..23: mol_type = other RNA
ttgggagggggagctgttcccgg

SEQ ID NO: 104672 - RNA, 23 nt, synthetic construct
  source 1..23: mol_type = other RNA
tgtgggtgtggtggccgggctgg

SEQ ID NO: 104673 - RNA, 23 nt, synthetic construct
  source 1..23: mol_type = other RNA
taggaggaagtggctttggaact

SEQ ID NO: 104674 - RNA, 23 nt, synthetic construct
  source 1..23: mol_type = other RNA
tctggaggaggaagtggctttgg

SEQ ID NO: 104675 - RNA, 23 nt, synthetic construct
  source 1..23: mol_type = other RNA
tgactggaggaggaagtggcttt

SEQ ID NO: 104676 - RNA, 23 nt, synthetic construct
  source 1..23: mol_type = other RNA
tggactggaggaggaagtggctt

SEQ ID NO: 104677 - RNA, 23 nt, synthetic construct
  source 1..23: mol_type = other RNA
ttggactggaggaggaagtggct

SEQ ID NO: 104678 - RNA, 23 nt, synthetic construct
  source 1..23: mol_type = other RNA
tcttggactggaggaggaagtgg

SEQ ID NO: 104679 - RNA, 23 nt, synthetic construct
  source 1..23: mol_type = other RNA
ttccttggactggaggaggaagt

SEQ ID NO: 104680 - RNA, 23 nt, synthetic construct
  source 1..23: mol_type = other RNA
tgtggaggaggggatgggtgtaa

SEQ ID NO: 104681 - RNA, 23 nt, synthetic construct
  source 1..23: mol_type = other RNA
tcccaagggtggaggaggggatg

SEQ ID NO: 104682 - RNA, 23 nt, synthetic construct
  source 1..23: mol_type = other RNA
tgtggtcccaagggtggaggagg

SEQ ID NO: 104683 - RNA, 23 nt, synthetic construct
  source 1..23: mol_type = other RNA
ttgttctgggagggtcccggtgg

SEQ ID NO: 104684 - RNA, 23 nt, synthetic construct
  source 1..23: mol_type = other RNA
tgtggacatggtggccacgggtg

SEQ ID NO: 104685 - RNA, 23 nt, synthetic construct
  source 1..23: mol_type = other RNA
tctccggagtggaggaggggtgg

SEQ ID NO: 104686 - RNA, 23 nt, synthetic construct
  source 1..23: mol_type = other RNA
tactgtggaggtgtgggtggtct

SEQ ID NO: 104687 - RNA, 23 nt, synthetic construct
  source 1..23: mol_type = other RNA
tgtggtggccttcgtggtcagca

SEQ ID NO: 104688 - RNA, 23 nt, synthetic construct
  source 1..23: mol_type = other RNA
tgaggagggggtggacgtggaac

SEQ ID NO: 104689 - RNA, 23 nt, synthetic construct
  source 1..23: mol_type = other RNA
tggaggagggggtggacgtggaa

SEQ ID NO: 104690 - RNA, 23 nt, synthetic construct
  source 1..23: mol_type = other RNA
ttggaggagggggtggacgtgga

SEQ ID NO: 104691 - RNA, 23 nt, synthetic construct
  source 1..23: mol_type = other RNA
tcggagtggaggagggggtggac

SEQ ID NO: 104692 - RNA, 23 nt, synthetic construct
  source 1..23: mol_type = other RNA
tgctgcagttgtagtggctgctg

SEQ ID NO: 104693 - RNA, 23 nt, synthetic construct
  source 1..23: mol_type = other RNA
tggctgcagttgtagtggctgct

SEQ ID NO: 104694 - RNA, 23 nt, synthetic construct
  source 1..23: mol_type = other RNA
tggccagtggctgcagttgtagt

SEQ ID NO: 104695 - RNA, 23 nt, synthetic construct
  source 1..23: mol_type = other RNA
tgggccagtggctgcagttgtag

SEQ ID NO: 104696 - RNA, 23 nt, synthetic construct
  source 1..23: mol_type = other RNA
tccgtggggccagtggctgcagt

SEQ ID NO: 104697 - RNA, 23 nt, synthetic construct
  source 1..23: mol_type = other RNA
tgtggccgtggggccagtggctg

SEQ ID NO: 104698 - RNA, 23 nt, synthetic construct
  source 1..23: mol_type = other RNA
tacggggtggccgtggggccagt

SEQ ID NO: 104699 - RNA, 23 nt, synthetic construct
  source 1..23: mol_type = other RNA
tccctggggtggaggacggggtg

SEQ ID NO: 104700 - RNA, 23 nt, synthetic construct
  source 1..23: mol_type = other RNA
ttccctggggtggaggacggggt

SEQ ID NO: 104701 - RNA, 23 nt, synthetic construct
  source 1..23: mol_type = other RNA
tggtccctggggtggaggacggg

SEQ ID NO: 104702 - RNA, 23 nt, synthetic construct
  source 1..23: mol_type = other RNA
ttggtccctggggtggaggacgg

SEQ ID NO: 104703 - RNA, 23 nt, synthetic construct
  source 1..23: mol_type = other RNA
tggtggtccctggggtggaggac

SEQ ID NO: 104704 - RNA, 23 nt, synthetic construct
  source 1..23: mol_type = other RNA
taggtggtccctggggtggagga

SEQ ID NO: 104705 - RNA, 23 nt, synthetic construct
  source 1..23: mol_type = other RNA
tcaggtggtccctggggtggagg

SEQ ID NO: 104706 - RNA, 23 nt, synthetic construct
  source 1..23: mol_type = other RNA
tccaggtggtccctggggtggag

SEQ ID NO: 104707 - RNA, 23 nt, synthetic construct
  source 1..23: mol_type = other RNA
tccctggggtggaggacggggtg

SEQ ID NO: 104708 - RNA, 23 nt, synthetic construct
  source 1..23: mol_type = other RNA
ttccctggggtggaggacggggt

SEQ ID NO: 104709 - RNA, 23 nt, synthetic construct
  source 1..23: mol_type = other RNA
tggtccctggggtggaggacggg

SEQ ID NO: 104710 - RNA, 23 nt, synthetic construct
  source 1..23: mol_type = other RNA
ttggtccctggggtggaggacgg

SEQ ID NO: 104711 - RNA, 23 nt, synthetic construct
  source 1..23: mol_type = other RNA
tggtggtccctggggtggaggac

SEQ ID NO: 104712 - RNA, 23 nt, synthetic construct
  source 1..23: mol_type = other RNA
taggtggtccctggggtggagga

SEQ ID NO: 104713 - RNA, 23 nt, synthetic construct
  source 1..23: mol_type = other RNA
tcaggtggtccctggggtggagg

SEQ ID NO: 104714 - RNA, 23 nt, synthetic construct
  source 1..23: mol_type = other RNA
tccaggtggtccctggggtggag

SEQ ID NO: 104715 - RNA, 23 nt, synthetic construct
  source 1..23: mol_type = other RNA
tctgggtggaggaggcggtggcc

SEQ ID NO: 104716 - RNA, 23 nt, synthetic construct
  source 1..23: mol_type = other RNA
tgcagttgcctgggtggaggagg

SEQ ID NO: 104717 - RNA, 23 nt, synthetic construct
  source 1..23: mol_type = other RNA
tgagctggtgactgtgggtgtcg

SEQ ID NO: 104718 - RNA, 23 nt, synthetic construct
  source 1..23: mol_type = other RNA
ttggagctggtgactgtgggtgt

SEQ ID NO: 104719 - RNA, 23 nt, synthetic construct
  source 1..23: mol_type = other RNA
tttggagctggtgactgtgggtg

SEQ ID NO: 104720 - RNA, 23 nt, synthetic construct
  source 1..23: mol_type = other RNA
tagtggctttggagctggtgact

SEQ ID NO: 104721 - RNA, 23 nt, synthetic construct
  source 1..23: mol_type = other RNA
tgaggagggagtggctttggagc

SEQ ID NO: 104722 - RNA, 23 nt, synthetic construct
  source 1..23: mol_type = other RNA
tggaggagggagtggctttggag

SEQ ID NO: 104723 - RNA, 23 nt, synthetic construct
  source 1..23: mol_type = other RNA
tgactggaggagggagtggcttt

SEQ ID NO: 104724 - RNA, 23 nt, synthetic construct
  source 1..23: mol_type = other RNA
tcctggactggaggagggagtgg

SEQ ID NO: 104725 - RNA, 23 nt, synthetic construct
  source 1..23: mol_type = other RNA
taggaggaggggatggctgtaaa

SEQ ID NO: 104726 - RNA, 23 nt, synthetic construct
  source 1..23: mol_type = other RNA
tgaggaggaggggatggctgtaa

SEQ ID NO: 104727 - RNA, 23 nt, synthetic construct
  source 1..23: mol_type = other RNA
tggtgcccagggaggaggagggg

SEQ ID NO: 104728 - RNA, 23 nt, synthetic construct
  source 1..23: mol_type = other RNA
tcaggtggtgcccagggaggagg

SEQ ID NO: 104729 - RNA, 23 nt, synthetic construct
  source 1..23: mol_type = other RNA
tgtccaggtggtgcccagggagg

SEQ ID NO: 104730 - RNA, 23 nt, synthetic construct
  source 1..23: mol_type = other RNA
tgggtccaggtggtgcccaggga

SEQ ID NO: 104731 - RNA, 23 nt, synthetic construct
  source 1..23: mol_type = other RNA
tcgggtccaggtggtgcccaggg

SEQ ID NO: 104732 - RNA, 23 nt, synthetic construct
  source 1..23: mol_type = other RNA
tgcgggtccaggtggtgcccagg

SEQ ID NO: 104733 - RNA, 23 nt, synthetic construct
  source 1..23: mol_type = other RNA
tggcgggtccaggtggtgcccag

SEQ ID NO: 104734 - RNA, 23 nt, synthetic construct
  source 1..23: mol_type = other RNA
tgggtgtggtggtctgtgatagg

SEQ ID NO: 104735 - RNA, 23 nt, synthetic construct
  source 1..23: mol_type = other RNA
tggctgtggacatggtggccgtg

SEQ ID NO: 104736 - RNA, 23 nt, synthetic construct
  source 1..23: mol_type = other RNA
ttgtggctgtggacatggtggcc

SEQ ID NO: 104737 - RNA, 23 nt, synthetic construct
  source 1..23: mol_type = other RNA
tgggtgtggctgtggacatggtg

SEQ ID NO: 104738 - RNA, 23 nt, synthetic construct
  source 1..23: mol_type = other RNA
tctggagtggaggagggtgtggc

SEQ ID NO: 104739 - RNA, 23 nt, synthetic construct
  source 1..23: mol_type = other RNA
tttgtggtggccgtggcggtaag

SEQ ID NO: 104740 - RNA, 23 nt, synthetic construct
  source 1..23: mol_type = other RNA
tggagggggtggccacagagccg

SEQ ID NO: 104741 - RNA, 23 nt, synthetic construct
  source 1..23: mol_type = other RNA
taggagggggtggccacagagcc

SEQ ID NO: 104742 - RNA, 23 nt, synthetic construct
  source 1..23: mol_type = other RNA
tgaggagggggtggccacagagc

SEQ ID NO: 104743 - RNA, 23 nt, synthetic construct
  source 1..23: mol_type = other RNA
tggaggagggggtggccacagag

SEQ ID NO: 104744 - RNA, 23 nt, synthetic construct
  source 1..23: mol_type = other RNA
ttggaggagggggtggccacaga

SEQ ID NO: 104745 - RNA, 23 nt, synthetic construct
  source 1..23: mol_type = other RNA
tcctggggtggaggagggggtgg

SEQ ID NO: 104746 - RNA, 23 nt, synthetic construct
  source 1..23: mol_type = other RNA
tgttcctggggtggaggaggggg

SEQ ID NO: 104747 - RNA, 23 nt, synthetic construct
  source 1..23: mol_type = other RNA
tggttgtggtagtcggcactttg

SEQ ID NO: 104748 - RNA, 23 nt, synthetic construct
  source 1..23: mol_type = other RNA
tggtggctgtgaagcccgtggtt

SEQ ID NO: 104749 - RNA, 23 nt, synthetic construct
  source 1..23: mol_type = other RNA
tggagggggtggctgtgaagccc

SEQ ID NO: 104750 - RNA, 23 nt, synthetic construct
  source 1..23: mol_type = other RNA
tggaggagggggtggctgtgaag

SEQ ID NO: 104751 - RNA, 23 nt, synthetic construct
  source 1..23: mol_type = other RNA
tccgtccctgggctggaggaggg

SEQ ID NO: 104752 - RNA, 23 nt, synthetic construct
  source 1..23: mol_type = other RNA
tgccgtccctgggctggaggagg

SEQ ID NO: 104753 - RNA, 23 nt, synthetic construct
  source 1..23: mol_type = other RNA
tgtgctgatccacactggaggcg

SEQ ID NO: 104754 - RNA, 23 nt, synthetic construct
  source 1..23: mol_type = other RNA
ttggttgtgggtgtggtggttgt

SEQ ID NO: 104755 - RNA, 23 nt, synthetic construct
  source 1..23: mol_type = other RNA
tgtggttgtgggtgtggtggttg

SEQ ID NO: 104756 - RNA, 23 nt, synthetic construct
  source 1..23: mol_type = other RNA
tggtggttgtgggtgtggtggtt

SEQ ID NO: 104757 - RNA, 23 nt, synthetic construct
  source 1..23: mol_type = other RNA
ttggtggttgtgggtgtggtggt

SEQ ID NO: 104758 - RNA, 23 nt, synthetic construct
  source 1..23: mol_type = other RNA
tgtggtggttgtgggtgtggtgg

SEQ ID NO: 104759 - RNA, 23 nt, synthetic construct
  source 1..23: mol_type = other RNA
ttgtggtggttgtgggtgtggtg

SEQ ID NO: 104760 - RNA, 23 nt, synthetic construct
  source 1..23: mol_type = other RNA
tgtgtggtggttgtgggtgtggt

SEQ ID NO: 104761 - RNA, 23 nt, synthetic construct
  source 1..23: mol_type = other RNA
ttgggtgtggtggttgtgggtgt

SEQ ID NO: 104762 - RNA, 23 nt, synthetic construct
  source 1..23: mol_type = other RNA
tactggttgtgggtgtggtggtt

SEQ ID NO: 104763 - RNA, 23 nt, synthetic construct
  source 1..23: mol_type = other RNA
tcaccgtggagccactggttgtg

SEQ ID NO: 104764 - RNA, 23 nt, synthetic construct
  source 1..23: mol_type = other RNA
tatggaggagggggtcaccgtgg

SEQ ID NO: 104765 - RNA, 23 nt, synthetic construct
  source 1..23: mol_type = other RNA
tgggatggaggagggggtcaccg

SEQ ID NO: 104766 - RNA, 23 nt, synthetic construct
  source 1..23: mol_type = other RNA
tccgggatggaggagggggtcac

SEQ ID NO: 104767 - RNA, 23 nt, synthetic construct
  source 1..23: mol_type = other RNA
tccccgggatggaggagggggtc

SEQ ID NO: 104768 - RNA, 23 nt, synthetic construct
  source 1..23: mol_type = other RNA
tgtccccgggatggaggaggggg

SEQ ID NO: 104769 - RNA, 23 nt, synthetic construct
  source 1..23: mol_type = other RNA
ttggtggtggtcagcactctggc

SEQ ID NO: 104770 - RNA, 23 nt, synthetic construct
  source 1..23: mol_type = other RNA
ttgtggtggtggtggtcagcact

SEQ ID NO: 104771 - RNA, 23 nt, synthetic construct
  source 1..23: mol_type = other RNA
tttgtggtggtggtggtcagcac

SEQ ID NO: 104772 - RNA, 23 nt, synthetic construct
  source 1..23: mol_type = other RNA
tacagttgtggtggtggtggtca

SEQ ID NO: 104773 - RNA, 23 nt, synthetic construct
  source 1..23: mol_type = other RNA
tagtggccacagttgtggtggtg

SEQ ID NO: 104774 - RNA, 23 nt, synthetic construct
  source 1..23: mol_type = other RNA
tgccatagaaccagtggccacag

SEQ ID NO: 104775 - RNA, 23 nt, synthetic construct
  source 1..23: mol_type = other RNA
tagtggccgtggtggtcagtgat

SEQ ID NO: 104776 - RNA, 23 nt, synthetic construct
  source 1..23: mol_type = other RNA
tgtggtggagccggtggccgtga

SEQ ID NO: 104777 - RNA, 23 nt, synthetic construct
  source 1..23: mol_type = other RNA
tgttggtggtggagccggtggcc

SEQ ID NO: 104778 - RNA, 23 nt, synthetic construct
  source 1..23: mol_type = other RNA
ttgaggaggggttggtggtggag

SEQ ID NO: 104779 - RNA, 23 nt, synthetic construct
  source 1..23: mol_type = other RNA
tgttgaggaggggttggtggtgg

SEQ ID NO: 104780 - RNA, 23 nt, synthetic construct
  source 1..23: mol_type = other RNA
tggagttgaggaggggttggtgg

SEQ ID NO: 104781 - RNA, 23 nt, synthetic construct
  source 1..23: mol_type = other RNA
ttggagttgaggaggggttggtg

SEQ ID NO: 104782 - RNA, 23 nt, synthetic construct
  source 1..23: mol_type = other RNA
tccctggagttgaggaggggttg

SEQ ID NO: 104783 - RNA, 23 nt, synthetic construct
  source 1..23: mol_type = other RNA
tgtccctggagttgaggaggggt

SEQ ID NO: 104784 - RNA, 23 nt, synthetic construct
  source 1..23: mol_type = other RNA
tttgtccctggagttgaggaggg

SEQ ID NO: 104785 - RNA, 23 nt, synthetic construct
  source 1..23: mol_type = other RNA
tgcactggggtgatgggtgttgt

SEQ ID NO: 104786 - RNA, 23 nt, synthetic construct
  source 1..23: mol_type = other RNA
tgtcagcactggggtgatgggtg

SEQ ID NO: 104787 - RNA, 23 nt, synthetic construct
  source 1..23: mol_type = other RNA
tggtcagcactggggtgatgggt

SEQ ID NO: 104788 - RNA, 23 nt, synthetic construct
  source 1..23: mol_type = other RNA
tgtggtggccgtgctggtcagca

SEQ ID NO: 104789 - RNA, 23 nt, synthetic construct
  source 1..23: mol_type = other RNA
tgggtgtggtggccgtgctggtc

SEQ ID NO: 104790 - RNA, 23 nt, synthetic construct
  source 1..23: mol_type = other RNA
ttttggagctggtggctgcgggt

SEQ ID NO: 104791 - RNA, 23 nt, synthetic construct
  source 1..23: mol_type = other RNA
tagtggctttggagctggtggct

SEQ ID NO: 104792 - RNA, 23 nt, synthetic construct
  source 1..23: mol_type = other RNA
taggaagtggctttggagctggt

SEQ ID NO: 104793 - RNA, 23 nt, synthetic construct
  source 1..23: mol_type = other RNA
taggaggaagtggctttggagct

SEQ ID NO: 104794 - RNA, 23 nt, synthetic construct
  source 1..23: mol_type = other RNA
tctggaggaggaagtggctttgg

SEQ ID NO: 104795 - RNA, 23 nt, synthetic construct
  source 1..23: mol_type = other RNA
tgactggaggaggaagtggcttt

SEQ ID NO: 104796 - RNA, 23 nt, synthetic construct
  source 1..23: mol_type = other RNA
tggactggaggaggaagtggctt

SEQ ID NO: 104797 - RNA, 23 nt, synthetic construct
  source 1..23: mol_type = other RNA
ttggactggaggaggaagtggct

SEQ ID NO: 104798 - RNA, 23 nt, synthetic construct
  source 1..23: mol_type = other RNA
tcttggactggaggaggaagtgg

SEQ ID NO: 104799 - RNA, 23 nt, synthetic construct
  source 1..23: mol_type = other RNA
ttccttggactggaggaggaagt

SEQ ID NO: 104800 - RNA, 23 nt, synthetic construct
  source 1..23: mol_type = other RNA
tgtggaggaggggatgggtgtaa

SEQ ID NO: 104801 - RNA, 23 nt, synthetic construct
  source 1..23: mol_type = other RNA
tccacagggtggaggaggggatg

SEQ ID NO: 104802 - RNA, 23 nt, synthetic construct
  source 1..23: mol_type = other RNA
ttggtccacagggtggaggaggg

SEQ ID NO: 104803 - RNA, 23 nt, synthetic construct
  source 1..23: mol_type = other RNA
ttgtggtggtctgtgctgggacg

SEQ ID NO: 104804 - RNA, 23 nt, synthetic construct
  source 1..23: mol_type = other RNA
tgtgtggtggtctgtgctgggac

SEQ ID NO: 104805 - RNA, 23 nt, synthetic construct
  source 1..23: mol_type = other RNA
tatggtggacatgggtgtggtgg

SEQ ID NO: 104806 - RNA, 23 nt, synthetic construct
  source 1..23: mol_type = other RNA
tcatggtggacatgggtgtggtg

SEQ ID NO: 104807 - RNA, 23 nt, synthetic construct
  source 1..23: mol_type = other RNA
ttggacatggtggacatgggtgt

SEQ ID NO: 104808 - RNA, 23 nt, synthetic construct
  source 1..23: mol_type = other RNA
tactgtggaggtgtgggtggtct

SEQ ID NO: 104809 - RNA, 23 nt, synthetic construct
  source 1..23: mol_type = other RNA
tggtggtcagcactgtggaggtg

SEQ ID NO: 104810 - RNA, 23 nt, synthetic construct
  source 1..23: mol_type = other RNA
ttggtggtcagcactgtggaggt

SEQ ID NO: 104811 - RNA, 23 nt, synthetic construct
  source 1..23: mol_type = other RNA
tgtggtggtcagcactgtggagg

SEQ ID NO: 104812 - RNA, 23 nt, synthetic construct
  source 1..23: mol_type = other RNA
tggctgtggtggtcagcactgtg

SEQ ID NO: 104813 - RNA, 23 nt, synthetic construct
  source 1..23: mol_type = other RNA
tctgttgtggtcagctcagtgag

SEQ ID NO: 104814 - RNA, 23 nt, synthetic construct
  source 1..23: mol_type = other RNA
tgctgcagttgtagtggctgttg

SEQ ID NO: 104815 - RNA, 23 nt, synthetic construct
  source 1..23: mol_type = other RNA
tggctgcagttgtagtggctgtt

SEQ ID NO: 104816 - RNA, 23 nt, synthetic construct
  source 1..23: mol_type = other RNA
taggacagggtggccgtggatcc

SEQ ID NO: 104817 - RNA, 23 nt, synthetic construct
  source 1..23: mol_type = other RNA
tgtggaggacagggtggccgtgg

SEQ ID NO: 104818 - RNA, 23 nt, synthetic construct
  source 1..23: mol_type = other RNA
tggtggaggacagggtggccgtg

SEQ ID NO: 104819 - RNA, 23 nt, synthetic construct
  source 1..23: mol_type = other RNA
ttggggtggaggacagggtggcc

SEQ ID NO: 104820 - RNA, 23 nt, synthetic construct
  source 1..23: mol_type = other RNA
tcctggggtggaggacagggtgg

SEQ ID NO: 104821 - RNA, 23 nt, synthetic construct
  source 1..23: mol_type = other RNA
tccctggggtggaggacagggtg

SEQ ID NO: 104822 - RNA, 23 nt, synthetic construct
  source 1..23: mol_type = other RNA
tggtccctggggtggaggacagg

SEQ ID NO: 104823 - RNA, 23 nt, synthetic construct
  source 1..23: mol_type = other RNA
ttggtccctggggtggaggacag

SEQ ID NO: 104824 - RNA, 23 nt, synthetic construct
  source 1..23: mol_type = other RNA
tggtggtccctggggtggaggac

SEQ ID NO: 104825 - RNA, 23 nt, synthetic construct
  source 1..23: mol_type = other RNA
taggtggtccctggggtggagga

SEQ ID NO: 104826 - RNA, 23 nt, synthetic construct
  source 1..23: mol_type = other RNA
tcaggtggtccctggggtggagg

SEQ ID NO: 104827 - RNA, 23 nt, synthetic construct
  source 1..23: mol_type = other RNA
tccaggtggtccctggggtggag

SEQ ID NO: 104828 - RNA, 23 nt, synthetic construct
  source 1..23: mol_type = other RNA
tggaggcggtggccgtggaaccg

SEQ ID NO: 104829 - RNA, 23 nt, synthetic construct
  source 1..23: mol_type = other RNA
tagtggaggaggcggtggccgtg

SEQ ID NO: 104830 - RNA, 23 nt, synthetic construct
  source 1..23: mol_type = other RNA
tcagagtggaggaggcggtggcc

SEQ ID NO: 104831 - RNA, 23 nt, synthetic construct
  source 1..23: mol_type = other RNA
tcccagagtggaggaggcggtgg

SEQ ID NO: 104832 - RNA, 23 nt, synthetic construct
  source 1..23: mol_type = other RNA
ttcccagagtggaggaggcggtg

SEQ ID NO: 104833 - RNA, 23 nt, synthetic construct
  source 1..23: mol_type = other RNA
ttagtggccatggtggtcaccac

SEQ ID NO: 104834 - RNA, 23 nt, synthetic construct
  source 1..23: mol_type = other RNA
ttgtgggcatagtggccatggtg

SEQ ID NO: 104835 - RNA, 23 nt, synthetic construct
  source 1..23: mol_type = other RNA
tagtggctgtgggcatagtggcc

SEQ ID NO: 104836 - RNA, 23 nt, synthetic construct
  source 1..23: mol_type = other RNA
tgaggcagtggctgtgggcatag

SEQ ID NO: 104837 - RNA, 23 nt, synthetic construct
  source 1..23: mol_type = other RNA
tggaggcagtggctgtgggcata

SEQ ID NO: 104838 - RNA, 23 nt, synthetic construct
  source 1..23: mol_type = other RNA
ttggaggcagtggctgtgggcat

SEQ ID NO: 104839 - RNA, 23 nt, synthetic construct
  source 1..23: mol_type = other RNA
tccgtggaggcagtggctgtggg

SEQ ID NO: 104840 - RNA, 23 nt, synthetic construct
  source 1..23: mol_type = other RNA
taccgtggaggcagtggctgtgg

SEQ ID NO: 104841 - RNA, 23 nt, synthetic construct
  source 1..23: mol_type = other RNA
tggggagcactgcaggggtgcgg

SEQ ID NO: 104842 - RNA, 23 nt, synthetic construct
  source 1..23: mol_type = other RNA
tgttggcaggctgctggggagca

SEQ ID NO: 104843 - RNA, 23 nt, synthetic construct
  source 1..23: mol_type = other RNA
tgtgggtctcagggtggtgagga

SEQ ID NO: 104844 - RNA, 23 nt, synthetic construct
  source 1..23: mol_type = other RNA
tgggagctggggaagccagtggg

SEQ ID NO: 104845 - RNA, 23 nt, synthetic construct
  source 1..23: mol_type = other RNA
tgtgggagctggggaagccagtg

SEQ ID NO: 104846 - RNA, 23 nt, synthetic construct
  source 1..23: mol_type = other RNA
tagtgggagctggggaagccagt

SEQ ID NO: 104847 - RNA, 23 nt, synthetic construct
  source 1..23: mol_type = other RNA
taagtgggagctggggaagccag

SEQ ID NO: 104848 - RNA, 23 nt, synthetic construct
  source 1..23: mol_type = other RNA
tgaagtgggagctggggaagcca

SEQ ID NO: 104849 - RNA, 23 nt, synthetic construct
  source 1..23: mol_type = other RNA
tatgtcacagtgctgattgcaca

SEQ ID NO: 104850 - RNA, 23 nt, synthetic construct
  source 1..23: mol_type = other RNA
tgtggggaggtgggacaggcgcc

SEQ ID NO: 104851 - RNA, 23 nt, synthetic construct
  source 1..23: mol_type = other RNA
tggtggggaggtgggacaggcgc

SEQ ID NO: 104852 - RNA, 23 nt, synthetic construct
  source 1..23: mol_type = other RNA
tggcggtggggaggtgggacagg

SEQ ID NO: 104853 - RNA, 23 nt, synthetic construct
  source 1..23: mol_type = other RNA
ttggcggtggggaggtgggacag

SEQ ID NO: 104854 - RNA, 23 nt, synthetic construct
  source 1..23: mol_type = other RNA
tctggcggtggggaggtgggaca

SEQ ID NO: 104855 - RNA, 23 nt, synthetic construct
  source 1..23: mol_type = other RNA
tcactggcggtggggaggtggga

SEQ ID NO: 104856 - RNA, 23 nt, synthetic construct
  source 1..23: mol_type = other RNA
tggacagcggggcggaggacact

SEQ ID NO: 104857 - RNA, 23 nt, synthetic construct
  source 1..23: mol_type = other RNA
tgggcgaggacagcggggcggag

SEQ ID NO: 104858 - RNA, 23 nt, synthetic construct
  source 1..23: mol_type = other RNA
tggggagggcgaggacagcgggg

SEQ ID NO: 104859 - RNA, 23 nt, synthetic construct
  source 1..23: mol_type = other RNA
tgggcaggggagggcgaggacag

SEQ ID NO: 104860 - RNA, 23 nt, synthetic construct
  source 1..23: mol_type = other RNA
tggggcaggggagggcgaggaca

SEQ ID NO: 104861 - RNA, 23 nt, synthetic construct
  source 1..23: mol_type = other RNA
ttccaggtagaggctgagattcc

SEQ ID NO: 104862 - RNA, 23 nt, synthetic construct
  source 1..23: mol_type = other RNA
tgcagtagtggttgtccaggtag

SEQ ID NO: 104863 - RNA, 23 nt, synthetic construct
  source 1..23: mol_type = other RNA
tgcggcagtggcagaggccgtgc

SEQ ID NO: 104864 - RNA, 23 nt, synthetic construct
  source 1..23: mol_type = other RNA
tcagcggcagtggcagaggccgt

SEQ ID NO: 104865 - RNA, 23 nt, synthetic construct
  source 1..23: mol_type = other RNA
tgcagcggcagtggcagaggccg

SEQ ID NO: 104866 - RNA, 23 nt, synthetic construct
  source 1..23: mol_type = other RNA
tgcagcgggcggcagcggcagtg

SEQ ID NO: 104867 - RNA, 23 nt, synthetic construct
  source 1..23: mol_type = other RNA
tggggcagcgggcggcagcggca

SEQ ID NO: 104868 - RNA, 23 nt, synthetic construct
  source 1..23: mol_type = other RNA
tagggcgcgggggcagcgggcgg

SEQ ID NO: 104869 - RNA, 23 nt, synthetic construct
  source 1..23: mol_type = other RNA
ttgagggcgcgggggcagcgggc

SEQ ID NO: 104870 - RNA, 23 nt, synthetic construct
  source 1..23: mol_type = other RNA
tgccctcctccttcccatgcacc

SEQ ID NO: 104871 - RNA, 23 nt, synthetic construct
  source 1..23: mol_type = other RNA
tggccctcctccttcccatgcac

SEQ ID NO: 104872 - RNA, 23 nt, synthetic construct
  source 1..23: mol_type = other RNA
taggccctcctccttcccatgca

SEQ ID NO: 104873 - RNA, 23 nt, synthetic construct
  source 1..23: mol_type = other RNA
tcaggccctcctccttcccatgc

SEQ ID NO: 104874 - RNA, 23 nt, synthetic construct
  source 1..23: mol_type = other RNA
tagcacagacacaagcacgccgt

SEQ ID NO: 104875 - RNA, 23 nt, synthetic construct
  source 1..23: mol_type = other RNA
tgcatggtggtggtccccagcac

SEQ ID NO: 104876 - RNA, 23 nt, synthetic construct
  source 1..23: mol_type = other RNA
tgggcaggaatgtccacacgcat

SEQ ID NO: 104877 - RNA, 23 nt, synthetic construct
  source 1..23: mol_type = other RNA
tgggcctggaagacttggccatt

SEQ ID NO: 104878 - RNA, 23 nt, synthetic construct
  source 1..23: mol_type = other RNA
tagccgggcctggaagacttggc

SEQ ID NO: 104879 - RNA, 23 nt, synthetic construct
  source 1..23: mol_type = other RNA
tgtgccagtcggggcccagcagc

SEQ ID NO: 104880 - RNA, 23 nt, synthetic construct
  source 1..23: mol_type = other RNA
tgctggcagtggggggtgtgcca

SEQ ID NO: 104881 - RNA, 23 nt, synthetic construct
  source 1..23: mol_type = other RNA
tcggggctggcagtggggggtgt

SEQ ID NO: 104882 - RNA, 23 nt, synthetic construct
  source 1..23: mol_type = other RNA
ttgcggggctggcagtggggggt

SEQ ID NO: 104883 - RNA, 23 nt, synthetic construct
  source 1..23: mol_type = other RNA
tgcatggggtgggggtgggtgtg

SEQ ID NO: 104884 - RNA, 23 nt, synthetic construct
  source 1..23: mol_type = other RNA
tgggcatggggtgggggtgggtg

SEQ ID NO: 104885 - RNA, 23 nt, synthetic construct
  source 1..23: mol_type = other RNA
tctgtggtgggcatggggtgggg

SEQ ID NO: 104886 - RNA, 23 nt, synthetic construct
  source 1..23: mol_type = other RNA
tgcggctgtggtgggcatggggt

SEQ ID NO: 104887 - RNA, 23 nt, synthetic construct
  source 1..23: mol_type = other RNA
tagcggctgtggtgggcatgggg

SEQ ID NO: 104888 - RNA, 23 nt, synthetic construct
  source 1..23: mol_type = other RNA
tactcagcaaagacctggctcag

SEQ ID NO: 104889 - RNA, 23 nt, synthetic construct
  source 1..23: mol_type = other RNA
tcactcagcaaagacctggctca

SEQ ID NO: 104890 - RNA, 23 nt, synthetic construct
  source 1..23: mol_type = other RNA
tgcctccaggctctggcagggca

SEQ ID NO: 104891 - RNA, 23 nt, synthetic construct
  source 1..23: mol_type = other RNA
tcagctgtgggctctggttccta

SEQ ID NO: 104892 - RNA, 23 nt, synthetic construct
  source 1..23: mol_type = other RNA
tccagctgtgggctctggttcct

SEQ ID NO: 104893 - RNA, 23 nt, synthetic construct
  source 1..23: mol_type = other RNA
ttccagctgtgggctctggttcc

SEQ ID NO: 104894 - RNA, 23 nt, synthetic construct
  source 1..23: mol_type = other RNA
tctccagctgtgggctctggttc

SEQ ID NO: 104895 - RNA, 23 nt, synthetic construct
  source 1..23: mol_type = other RNA
tccgccatcccctccagctgtgg

SEQ ID NO: 104896 - RNA, 23 nt, synthetic construct
  source 1..23: mol_type = other RNA
tctccgccatcccctccagctgt

SEQ ID NO: 104897 - RNA, 23 nt, synthetic construct
  source 1..23: mol_type = other RNA
tgtcctcagggcagaagcagccc

SEQ ID NO: 104898 - RNA, 23 nt, synthetic construct
  source 1..23: mol_type = other RNA
ttctggtcctcagggcagaagca

SEQ ID NO: 104899 - RNA, 23 nt, synthetic construct
  source 1..23: mol_type = other RNA
tgatctggtcctcagggcagaag

SEQ ID NO: 104900 - RNA, 23 nt, synthetic construct
  source 1..23: mol_type = other RNA
tcccacgcaggggcaggcctgca

SEQ ID NO: 104901 - RNA, 23 nt, synthetic construct
  source 1..23: mol_type = other RNA
tgtcccacgcaggggcaggcctg

SEQ ID NO: 104902 - RNA, 23 nt, synthetic construct
  source 1..23: mol_type = other RNA
tcaggactggcagttgctgaccc

SEQ ID NO: 104903 - RNA, 23 nt, synthetic construct
  source 1..23: mol_type = other RNA
tcgggggctgaccctgggcgtca

SEQ ID NO: 104904 - RNA, 23 nt, synthetic construct
  source 1..23: mol_type = other RNA
tctcggcccggggcctggtcacg

SEQ ID NO: 104905 - RNA, 23 nt, synthetic construct
  source 1..23: mol_type = other RNA
tgggggcaggtggttgtgttgca

SEQ ID NO: 104906 - RNA, 23 nt, synthetic construct
  source 1..23: mol_type = other RNA
tgctctgggggcaggtggttgtg

SEQ ID NO: 104907 - RNA, 23 nt, synthetic construct
  source 1..23: mol_type = other RNA
tggctctgggggcaggtggttgt

SEQ ID NO: 104908 - RNA, 23 nt, synthetic construct
  source 1..23: mol_type = other RNA
tgcaggctctgggggcaggtggt

SEQ ID NO: 104909 - RNA, 23 nt, synthetic construct
  source 1..23: mol_type = other RNA
taggcaggctctgggggcaggtg

SEQ ID NO: 104910 - RNA, 23 nt, synthetic construct
  source 1..23: mol_type = other RNA
tacaggcaggctctgggggcagg

SEQ ID NO: 104911 - RNA, 23 nt, synthetic construct
  source 1..23: mol_type = other RNA
tactcctgccctggcgggcacac

SEQ ID NO: 104912 - RNA, 23 nt, synthetic construct
  source 1..23: mol_type = other RNA
tggactcctgccctggcgggcac

SEQ ID NO: 104913 - RNA, 23 nt, synthetic construct
  source 1..23: mol_type = other RNA
tctcctgggtgcagatggactcc

SEQ ID NO: 104914 - RNA, 23 nt, synthetic construct
  source 1..23: mol_type = other RNA
tcctcctgggtgcagatggactc

SEQ ID NO: 104915 - RNA, 23 nt, synthetic construct
  source 1..23: mol_type = other RNA
tctcctcctgggtgcagatggac

SEQ ID NO: 104916 - RNA, 23 nt, synthetic construct
  source 1..23: mol_type = other RNA
tgccctcctcctgggtgcagatg

SEQ ID NO: 104917 - RNA, 23 nt, synthetic construct
  source 1..23: mol_type = other RNA
ttcgccctcctcctgggtgcaga

SEQ ID NO: 104918 - RNA, 23 nt, synthetic construct
  source 1..23: mol_type = other RNA
tacagctgaggtctgcagcggaa

SEQ ID NO: 104919 - RNA, 23 nt, synthetic construct
  source 1..23: mol_type = other RNA
tcacagctgaggtctgcagcgga

SEQ ID NO: 104920 - RNA, 23 nt, synthetic construct
  source 1..23: mol_type = other RNA
tgggaagggcgcctgggaaggtt

SEQ ID NO: 104921 - RNA, 23 nt, synthetic construct
  source 1..23: mol_type = other RNA
taaagccctggggacaggtagta

SEQ ID NO: 104922 - RNA, 23 nt, synthetic construct
  source 1..23: mol_type = other RNA
tactcaaagccctggggacaggt

SEQ ID NO: 104923 - RNA, 23 nt, synthetic construct
  source 1..23: mol_type = other RNA
tcagctggactggctggccatcg

SEQ ID NO: 104924 - RNA, 23 nt, synthetic construct
  source 1..23: mol_type = other RNA
tgttgtccacatggctgttgacc

SEQ ID NO: 104925 - RNA, 23 nt, synthetic construct
  source 1..23: mol_type = other RNA
taccctcagcctcacagaggtac

SEQ ID NO: 104926 - RNA, 23 nt, synthetic construct
  source 1..23: mol_type = other RNA
tccaccctcagcctcacagaggt

SEQ ID NO: 104927 - RNA, 23 nt, synthetic construct
  source 1..23: mol_type = other RNA
ttccaccctcagcctcacagagg

SEQ ID NO: 104928 - RNA, 23 nt, synthetic construct
  source 1..23: mol_type = other RNA
tctccaccctcagcctcacagag

SEQ ID NO: 104929 - RNA, 23 nt, synthetic construct
  source 1..23: mol_type = other RNA
tacatctgggcaggatgcaggct

SEQ ID NO: 104930 - RNA, 23 nt, synthetic construct
  source 1..23: mol_type = other RNA
tccccctgcagctggacacatct

SEQ ID NO: 104931 - RNA, 23 nt, synthetic construct
  source 1..23: mol_type = other RNA
tgacctcggtctcgcagccctgg

SEQ ID NO: 104932 - RNA, 23 nt, synthetic construct
  source 1..23: mol_type = other RNA
tccggggcaggagccctcgcaga

SEQ ID NO: 104933 - RNA, 23 nt, synthetic construct
  source 1..23: mol_type = other RNA
ttccggggcaggagccctcgcag

SEQ ID NO: 104934 - RNA, 23 nt, synthetic construct
  source 1..23: mol_type = other RNA
tgcctgggcctctgctgagtact

SEQ ID NO: 104935 - RNA, 23 nt, synthetic construct
  source 1..23: mol_type = other RNA
tctctcctggcagcaggtgcact

SEQ ID NO: 104936 - RNA, 23 nt, synthetic construct
  source 1..23: mol_type = other RNA
tcccgcctctcctggcagcaggt

SEQ ID NO: 104937 - RNA, 23 nt, synthetic construct
  source 1..23: mol_type = other RNA
tggccgggaagccacgggtgtgt

SEQ ID NO: 104938 - RNA, 23 nt, synthetic construct
  source 1..23: mol_type = other RNA
ttcctgggccgggaagccacggg

SEQ ID NO: 104939 - RNA, 23 nt, synthetic construct
  source 1..23: mol_type = other RNA
tgcctcctgggccgggaagccac

SEQ ID NO: 104940 - RNA, 23 nt, synthetic construct
  source 1..23: mol_type = other RNA
tggcctcctgggccgggaagcca

SEQ ID NO: 104941 - RNA, 23 nt, synthetic construct
  source 1..23: mol_type = other RNA
tagcagtggcctcctgggccggg

SEQ ID NO: 104942 - RNA, 23 nt, synthetic construct
  source 1..23: mol_type = other RNA
tagacagcagtggcctcctgggc

SEQ ID NO: 104943 - RNA, 23 nt, synthetic construct
  source 1..23: mol_type = other RNA
tatggggatggaggcagaacgtt

SEQ ID NO: 104944 - RNA, 23 nt, synthetic construct
  source 1..23: mol_type = other RNA
tcatcctggctccaggtggacag

SEQ ID NO: 104945 - RNA, 23 nt, synthetic construct
  source 1..23: mol_type = other RNA
tttttcatgatcagacaatgcac

SEQ ID NO: 104946 - RNA, 23 nt, synthetic construct
  source 1..23: mol_type = other RNA
tgttttcatgatcagacaatgca

SEQ ID NO: 104947 - RNA, 23 nt, synthetic construct
  source 1..23: mol_type = other RNA
tgggctccgcagaggaggcccaa

SEQ ID NO: 104948 - RNA, 23 nt, synthetic construct
  source 1..23: mol_type = other RNA
tggggggctccgcagaggaggcc

SEQ ID NO: 104949 - RNA, 23 nt, synthetic construct
  source 1..23: mol_type = other RNA
tggccggggggctccgcagagga

SEQ ID NO: 104950 - RNA, 23 nt, synthetic construct
  source 1..23: mol_type = other RNA
taggccggggggctccgcagagg

SEQ ID NO: 104951 - RNA, 23 nt, synthetic construct
  source 1..23: mol_type = other RNA
tgccacacacaggccggggggct

SEQ ID NO: 104952 - RNA, 23 nt, synthetic construct
  source 1..23: mol_type = other RNA
tccctcacccttctggggccggt

SEQ ID NO: 104953 - RNA, 23 nt, synthetic construct
  source 1..23: mol_type = other RNA
ttgctggcccctcacccttctgg

SEQ ID NO: 104954 - RNA, 23 nt, synthetic construct
  source 1..23: mol_type = other RNA
tgaaaggggtcctgctggcccct

SEQ ID NO: 104955 - RNA, 23 nt, synthetic construct
  source 1..23: mol_type = other RNA
tagggaggggcaaggccaaggtg

SEQ ID NO: 104956 - RNA, 23 nt, synthetic construct
  source 1..23: mol_type = other RNA
tcagggaggggcaaggccaaggt

SEQ ID NO: 104957 - RNA, 23 nt, synthetic construct
  source 1..23: mol_type = other RNA
tgcgcgggcgctccggccgtggc

SEQ ID NO: 104958 - RNA, 23 nt, synthetic construct
  source 1..23: mol_type = other RNA
tggccttgcctggaccagcctgt

SEQ ID NO: 104959 - RNA, 23 nt, synthetic construct
  source 1..23: mol_type = other RNA
tcagctggccttgcctggaccag

SEQ ID NO: 104960 - RNA, 23 nt, synthetic construct
  source 1..23: mol_type = other RNA
ttggcagcagctggccttgcctg

SEQ ID NO: 104961 - RNA, 23 nt, synthetic construct
  source 1..23: mol_type = other RNA
tctggcagcagctggccttgcct

SEQ ID NO: 104962 - RNA, 23 nt, synthetic construct
  source 1..23: mol_type = other RNA
ttcctggcagcagctggccttgc

SEQ ID NO: 104963 - RNA, 23 nt, synthetic construct
  source 1..23: mol_type = other RNA
tgcttcctggcagcagctggcct

SEQ ID NO: 104964 - RNA, 23 nt, synthetic construct
  source 1..23: mol_type = other RNA
tgcagcttcctggcagcagctgg

SEQ ID NO: 104965 - RNA, 23 nt, synthetic construct
  source 1..23: mol_type = other RNA
ttcgcagcttcctggcagcagct

SEQ ID NO: 104966 - RNA, 23 nt, synthetic construct
  source 1..23: mol_type = other RNA
tcttgcctgtcgcagcttcctgg

SEQ ID NO: 104967 - RNA, 23 nt, synthetic construct
  source 1..23: mol_type = other RNA
tgctgacccctctctgacctggc

SEQ ID NO: 104968 - RNA, 23 nt, synthetic construct
  source 1..23: mol_type = other RNA
tgggatgctgacccctctctgac

SEQ ID NO: 104969 - RNA, 23 nt, synthetic construct
  source 1..23: mol_type = other RNA
taatgctcagggtttatttgcaa

SEQ ID NO: 104970 - RNA, 23 nt, synthetic construct
  source 1..23: mol_type = other RNA
tgcagttgtccacatggctgttg

SEQ ID NO: 104971 - RNA, 23 nt, synthetic construct
  source 1..23: mol_type = other RNA
tgctgcgcccgtggcctccacca

SEQ ID NO: 104972 - RNA, 23 nt, synthetic construct
  source 1..23: mol_type = other RNA
tcactttgggagggggagctgtt

SEQ ID NO: 104973 - RNA, 23 nt, synthetic construct
  source 1..23: mol_type = other RNA
tcactttgggagggggagctgtt

SEQ ID NO: 104974 - RNA, 23 nt, synthetic construct
  source 1..23: mol_type = other RNA
tcactttgggagggggagctgtt

SEQ ID NO: 104975 - RNA, 23 nt, synthetic construct
  source 1..23: mol_type = other RNA
tgttttcaaacgtctcaaagtct

SEQ ID NO: 104976 - RNA, 23 nt, synthetic construct
  source 1..23: mol_type = other RNA
tctccttcccatgcaccatggtg

SEQ ID NO: 104977 - RNA, 23 nt, synthetic construct
  source 1..23: mol_type = other RNA
tgccgggtgggcgaggacgtcgg

SEQ ID NO: 104978 - RNA, 23 nt, synthetic construct
  source 1..23: mol_type = other RNA
ttgtgcagttacagctctggcag

SEQ ID NO: 104979 - RNA, 23 nt, synthetic construct
  source 1..23: mol_type = other RNA
tgatgggagttgtccctggagtt

SEQ ID NO: 104980 - RNA, 23 nt, synthetic construct
  source 1..23: mol_type = other RNA
tagaggctcccaggcagcttagc

SEQ ID NO: 104981 - RNA, 23 nt, synthetic construct
  source 1..23: mol_type = other RNA
tctggtcagcactggggtgatgg

SEQ ID NO: 104982 - RNA, 23 nt, synthetic construct
  source 1..23: mol_type = other RNA
tcaggaggccagtgcggctgtaa

SEQ ID NO: 104983 - RNA, 23 nt, synthetic construct
  source 1..23: mol_type = other RNA
tggggctttgggatgctgacccc

SEQ ID NO: 104984 - RNA, 23 nt, synthetic construct
  source 1..23: mol_type = other RNA
tctgtggtgctggccgggggagc

SEQ ID NO: 104985 - RNA, 23 nt, synthetic construct
  source 1..23: mol_type = other RNA
tagagggggtggccacagagccg

SEQ ID NO: 104986 - RNA, 23 nt, synthetic construct
  source 1..23: mol_type = other RNA
ttgctggtcagcactggggtgat

SEQ ID NO: 104987 - RNA, 23 nt, synthetic construct
  source 1..23: mol_type = other RNA
tggaggccagtgcggctgtaagg

SEQ ID NO: 104988 - RNA, 23 nt, synthetic construct
  source 1..23: mol_type = other RNA
tgggccagcgtgggtggctgtga

SEQ ID NO: 104989 - RNA, 23 nt, synthetic construct
  source 1..23: mol_type = other RNA
tcaggccggggggctccgcagag

SEQ ID NO: 104990 - RNA, 23 nt, synthetic construct
  source 1..23: mol_type = other RNA
tccaggaggccagtgcggctgta

SEQ ID NO: 104991 - RNA, 23 nt, synthetic construct
  source 1..23: mol_type = other RNA
tcacgggcaggtggggcagcggc

SEQ ID NO: 104992 - RNA, 23 nt, synthetic construct
  source 1..23: mol_type = other RNA
ttggcacaggcagcctgggcctt

SEQ ID NO: 104993 - RNA, 23 nt, synthetic construct
  source 1..23: mol_type = other RNA
tccacctgctggcccagctcctc

SEQ ID NO: 104994 - RNA, 23 nt, synthetic construct
  source 1..23: mol_type = other RNA
tggctggtgcctggggccgggga

SEQ ID NO: 104995 - RNA, 23 nt, synthetic construct
  source 1..23: mol_type = other RNA
tcagggcctgggtggtggtggtg

SEQ ID NO: 104996 - RNA, 23 nt, synthetic construct
  source 1..23: mol_type = other RNA
tgggagtggctctggagctgatg

SEQ ID NO: 104997 - RNA, 23 nt, synthetic construct
  source 1..23: mol_type = other RNA
tgtggctgtggctgtggtcctgg

SEQ ID NO: 104998 - RNA, 23 nt, synthetic construct
  source 1..23: mol_type = other RNA
tagggcagaagcagccctccgcc

SEQ ID NO: 104999 - RNA, 23 nt, synthetic construct
  source 1..23: mol_type = other RNA
tgagggctgagggctggtgcctg

SEQ ID NO: 105000 - RNA, 23 nt, synthetic construct
  source 1..23: mol_type = other RNA
tagggaagggcgcctgggaaggt

SEQ ID NO: 105001 - RNA, 23 nt, synthetic construct
  source 1..23: mol_type = other RNA
tggggggcagggaccgcccgtgt

SEQ ID NO: 105002 - RNA, 23 nt, synthetic construct
  source 1..23: mol_type = other RNA
ttggggggcagggaccgcccgtg

SEQ ID NO: 105003 - RNA, 23 nt, synthetic construct
  source 1..23: mol_type = other RNA
tggatgctgacccctctctgacc

SEQ ID NO: 105004 - RNA, 23 nt, synthetic construct
  source 1..23: mol_type = other RNA
tccacgggtgtgtgggggagcca

SEQ ID NO: 105005 - RNA, 23 nt, synthetic construct
  source 1..23: mol_type = other RNA
tgccacgggtgtgtgggggagcc

SEQ ID NO: 105006 - RNA, 23 nt, synthetic construct
  source 1..23: mol_type = other RNA
tctggggaagccagtgggtctca

SEQ ID NO: 105007 - RNA, 23 nt, synthetic construct
  source 1..23: mol_type = other RNA
ttggaccagcctgtctgccccag

SEQ ID NO: 105008 - RNA, 23 nt, synthetic construct
  source 1..23: mol_type = other RNA
ttgtggtggcggtggtggtcagc

SEQ ID NO: 105009 - RNA, 23 nt, synthetic construct
  source 1..23: mol_type = other RNA
ttgtggtggcggtggtggtcagc

SEQ ID NO: 105010 - RNA, 23 nt, synthetic construct
  source 1..23: mol_type = other RNA
ttgtggtggcggtggtggtcagc

SEQ ID NO: 105011 - RNA, 23 nt, synthetic construct
  source 1..23: mol_type = other RNA
ttgtggtggcggtggtggtcagc

SEQ ID NO: 105012 - RNA, 23 nt, synthetic construct
  source 1..23: mol_type = other RNA
tctggggggcagggaccgcccgt

SEQ ID NO: 105013 - RNA, 23 nt, synthetic construct
  source 1..23: mol_type = other RNA
tcctggggaagggggtgactcgg

SEQ ID NO: 105014 - RNA, 23 nt, synthetic construct
  source 1..23: mol_type = other RNA
ttccctggggaagggggtgactc

SEQ ID NO: 105015 - RNA, 23 nt, synthetic construct
  source 1..23: mol_type = other RNA
tagggctgagggctggtgcctgg

SEQ ID NO: 105016 - RNA, 23 nt, synthetic construct
  source 1..23: mol_type = other RNA
tctggggaagggggtgactcggt

SEQ ID NO: 105017 - RNA, 23 nt, synthetic construct
  source 1..23: mol_type = other RNA
  misc_difference 22: note = a, c, u, g, unknown or other
  misc_difference 23: note = a, c, u, g, unknown or other
tgggagggagccgggccgggtnn

SEQ ID NO: 105018 - RNA, 23 nt, synthetic construct
  source 1..23: mol_type = other RNA
taggagggggtggctgtgaagcc

SEQ ID NO: 105019 - RNA, 23 nt, synthetic construct
  source 1..23: mol_type = other RNA
taggagggggtggctgtgaagcc

SEQ ID NO: 105020 - RNA, 23 nt, synthetic construct
  source 1..23: mol_type = other RNA
taggagggggtggctgtgaagcc

SEQ ID NO: 105021 - RNA, 23 nt, synthetic construct
  source 1..23: mol_type = other RNA
taggagggggtggctgtgaagcc

SEQ ID NO: 105022 - RNA, 23 nt, synthetic construct
  source 1..23: mol_type = other RNA
ttggggaagccagtgggtctcag

SEQ ID NO: 105023 - RNA, 23 nt, synthetic construct
  source 1..23: mol_type = other RNA
tggcagcgggcggcagcggcagt

SEQ ID NO: 105024 - RNA, 23 nt, synthetic construct
  source 1..23: mol_type = other RNA
ttcttggccatgtccttgcaact

SEQ ID NO: 105025 - RNA, 23 nt, synthetic construct
  source 1..23: mol_type = other RNA
tcggggctgcggggctggcagtg

SEQ ID NO: 105026 - RNA, 23 nt, synthetic construct
  source 1..23: mol_type = other RNA
tgacaccggggctgcggggctgg

SEQ ID NO: 105027 - RNA, 23 nt, synthetic construct
  source 1..23: mol_type = other RNA
tgtcacggggcctgagctggacc

SEQ ID NO: 105028 - RNA, 23 nt, synthetic construct
  source 1..23: mol_type = other RNA
tccggtggttgctgctggggtgt

SEQ ID NO: 105029 - RNA, 23 nt, synthetic construct
  source 1..23: mol_type = other RNA
tccggtggttgctgctggggtgt

SEQ ID NO: 105030 - RNA, 23 nt, synthetic construct
  source 1..23: mol_type = other RNA
taggttggcaggctgctggggag

SEQ ID NO: 105031 - RNA, 23 nt, synthetic construct
  source 1..23: mol_type = other RNA
tagggtgagggctggaaagggct

SEQ ID NO: 105032 - RNA, 23 nt, synthetic construct
  source 1..23: mol_type = other RNA
tgctgcggggctggcagtggggg

SEQ ID NO: 105033 - RNA, 23 nt, synthetic construct
  source 1..23: mol_type = other RNA
ttccacagggccctgggtctctg

SEQ ID NO: 105034 - RNA, 23 nt, synthetic construct
  source 1..23: mol_type = other RNA
ttgtggtgctggccgggggagcc

SEQ ID NO: 105035 - RNA, 23 nt, synthetic construct
  source 1..23: mol_type = other RNA
tggaggggttggtggtggagccg

SEQ ID NO: 105036 - RNA, 23 nt, synthetic construct
  source 1..23: mol_type = other RNA
tggaggggttggtggtggagccg

SEQ ID NO: 105037 - RNA, 23 nt, synthetic construct
  source 1..23: mol_type = other RNA
tggaggggttggtggtggagccg

SEQ ID NO: 105038 - RNA, 23 nt, synthetic construct
  source 1..23: mol_type = other RNA
tggaggggttggtggtggagccg

SEQ ID NO: 105039 - RNA, 23 nt, synthetic construct
  source 1..23: mol_type = other RNA
tggaggggttggtggtggagccg

SEQ ID NO: 105040 - RNA, 23 nt, synthetic construct
  source 1..23: mol_type = other RNA
tcggggcaggagccctcgcagaa

SEQ ID NO: 105041 - RNA, 23 nt, synthetic construct
  source 1..23: mol_type = other RNA
tgacagggtggccgtggatccag

SEQ ID NO: 105042 - RNA, 23 nt, synthetic construct
  source 1..23: mol_type = other RNA
tcctccagctgtgggctctggtt

SEQ ID NO: 105043 - RNA, 23 nt, synthetic construct
  source 1..23: mol_type = other RNA
tcggggcccagcagccatccttt

SEQ ID NO: 105044 - RNA, 23 nt, synthetic construct
  source 1..23: mol_type = other RNA
ttccccacacaggccacaggtct

SEQ ID NO: 105045 - RNA, 23 nt, synthetic construct
  source 1..23: mol_type = other RNA
tgtcctcgcagagctgcgcgcgc

SEQ ID NO: 105046 - RNA, 23 nt, synthetic construct
  source 1..23: mol_type = other RNA
tggttcctgcaggtgcaggtgtt

SEQ ID NO: 105047 - RNA, 23 nt, synthetic construct
  source 1..23: mol_type = other RNA
tggagggctgagggctggtgcct

SEQ ID NO: 105048 - RNA, 23 nt, synthetic construct
  source 1..23: mol_type = other RNA
tctgctgtggtgctggccggggg

SEQ ID NO: 105049 - RNA, 23 nt, synthetic construct
  source 1..23: mol_type = other RNA
tccctggctggtggtggtgttag

SEQ ID NO: 105050 - RNA, 23 nt, synthetic construct
  source 1..23: mol_type = other RNA
ttgtggaggtgtgggcagtctct

SEQ ID NO: 105051 - RNA, 23 nt, synthetic construct
  source 1..23: mol_type = other RNA
tctgtggaggtgtgggcagtctc

SEQ ID NO: 105052 - RNA, 23 nt, synthetic construct
  source 1..23: mol_type = other RNA
ttcctggggtggaggagggggtg

SEQ ID NO: 105053 - RNA, 23 nt, synthetic construct
  source 1..23: mol_type = other RNA
ttagggtgagggctggaaagggc

SEQ ID NO: 105054 - RNA, 23 nt, synthetic construct
  source 1..23: mol_type = other RNA
ttggaggtggccgtggtgtggcc

SEQ ID NO: 105055 - RNA, 23 nt, synthetic construct
  source 1..23: mol_type = other RNA
tggccgtggctgtggtcctggag

SEQ ID NO: 105056 - RNA, 23 nt, synthetic construct
  source 1..23: mol_type = other RNA
tgggaggaggaggggatggctgt

SEQ ID NO: 105057 - RNA, 23 nt, synthetic construct
  source 1..23: mol_type = other RNA
tagggaggaggaggggatggctg

SEQ ID NO: 105058 - RNA, 23 nt, synthetic construct
  source 1..23: mol_type = other RNA
tcagtctctggagtggaggaggg

SEQ ID NO: 105059 - RNA, 23 nt, synthetic construct
  source 1..23: mol_type = other RNA
ttcctggggtggaggagggggtg

SEQ ID NO: 105060 - RNA, 23 nt, synthetic construct
  source 1..23: mol_type = other RNA
tactgctgggggacagggatcgc

SEQ ID NO: 105061 - RNA, 23 nt, synthetic construct
  source 1..23: mol_type = other RNA
tggtggccgtggggccagtggct

SEQ ID NO: 105062 - RNA, 23 nt, synthetic construct
  source 1..23: mol_type = other RNA
ttcctggggtggaggagggggtg

SEQ ID NO: 105063 - RNA, 23 nt, synthetic construct
  source 1..23: mol_type = other RNA
tgggaggaggaggggatggctgt

SEQ ID NO: 105064 - RNA, 23 nt, synthetic construct
  source 1..23: mol_type = other RNA
tagggaggaggaggggatggctg

SEQ ID NO: 105065 - RNA, 23 nt, synthetic construct
  source 1..23: mol_type = other RNA
ttgtggaggtgtgggcagtctct

SEQ ID NO: 105066 - RNA, 23 nt, synthetic construct
  source 1..23: mol_type = other RNA
tctgtggaggtgtgggcagtctc

SEQ ID NO: 105067 - RNA, 23 nt, synthetic construct
  source 1..23: mol_type = other RNA
tactgctgggggacagggatcgc

SEQ ID NO: 105068 - RNA, 23 nt, synthetic construct
  source 1..23: mol_type = other RNA
ttggaggtggccgtggtgtggcc

SEQ ID NO: 105069 - RNA, 23 nt, synthetic construct
  source 1..23: mol_type = other RNA
tcaagggtggaggaggggatggg

SEQ ID NO: 105070 - RNA, 23 nt, synthetic construct
  source 1..23: mol_type = other RNA
tggtggccgtggggccagtggct

SEQ ID NO: 105071 - RNA, 23 nt, synthetic construct
  source 1..23: mol_type = other RNA
tgggaggaggaggggatggctgt

SEQ ID NO: 105072 - RNA, 23 nt, synthetic construct
  source 1..23: mol_type = other RNA
tagggaggaggaggggatggctg

SEQ ID NO: 105073 - RNA, 23 nt, synthetic construct
  source 1..23: mol_type = other RNA
tcagtctctggagtggaggaggg

SEQ ID NO: 105074 - RNA, 23 nt, synthetic construct
  source 1..23: mol_type = other RNA
ttcctggggtggaggagggggtg

SEQ ID NO: 105075 - RNA, 23 nt, synthetic construct
  source 1..23: mol_type = other RNA
tgggcagcgggcggcagcggcag

SEQ ID NO: 105076 - RNA, 23 nt, synthetic construct
  source 1..23: mol_type = other RNA
tctgcggggctggcagtgggggg

SEQ ID NO: 105077 - RNA, 23 nt, synthetic construct
  source 1..23: mol_type = other RNA
tggctgcggggctggcagtgggg

SEQ ID NO: 105078 - RNA, 23 nt, synthetic construct
  source 1..23: mol_type = other RNA
tgggctgcggggctggcagtggg

SEQ ID NO: 105079 - RNA, 23 nt, synthetic construct
  source 1..23: mol_type = other RNA
tccctccagctgtgggctctggt

SEQ ID NO: 105080 - RNA, 23 nt, synthetic construct
  source 1..23: mol_type = other RNA
tcccctccagctgtgggctctgg

SEQ ID NO: 105081 - RNA, 23 nt, synthetic construct
  source 1..23: mol_type = other RNA
tggcaggctctgggggcaggtgg

SEQ ID NO: 105082 - RNA, 23 nt, synthetic construct
  source 1..23: mol_type = other RNA
tgtgcagggtgagccacactcct

SEQ ID NO: 105083 - RNA, 23 nt, synthetic construct
  source 1..23: mol_type = other RNA
tgtgactgtgggtgtggtggccg

SEQ ID NO: 105084 - RNA, 23 nt, synthetic construct
  source 1..23: mol_type = other RNA
tgggggactctgttggctgttgg

SEQ ID NO: 105085 - RNA, 23 nt, synthetic construct
  source 1..23: mol_type = other RNA
tttctcagacagcagtggcctcc

SEQ ID NO: 105086 - RNA, 23 nt, synthetic construct
  source 1..23: mol_type = other RNA
tttctgagagggtggggactgct

SEQ ID NO: 105087 - RNA, 23 nt, synthetic construct
  source 1..23: mol_type = other RNA
tccgtgtgtggtggccatggtgt

SEQ ID NO: 105088 - RNA, 23 nt, synthetic construct
  source 1..23: mol_type = other RNA
ttcagccctgagttaccctgcag

SEQ ID NO: 105089 - RNA, 23 nt, synthetic construct
  source 1..23: mol_type = other RNA
tacaggctttgggtccagcagga

SEQ ID NO: 105090 - RNA, 23 nt, synthetic construct
  source 1..23: mol_type = other RNA
ttggtgactgtgggtgtggtggc

SEQ ID NO: 105091 - RNA, 23 nt, synthetic construct
  source 1..23: mol_type = other RNA
tactgtgctgctggtggctgcag

SEQ ID NO: 105092 - RNA, 23 nt, synthetic construct
  source 1..23: mol_type = other RNA
tggggactgctgggggacaggga

SEQ ID NO: 105093 - RNA, 23 nt, synthetic construct
  source 1..23: mol_type = other RNA
tactgtgctgctggtggctgcag

SEQ ID NO: 105094 - RNA, 23 nt, synthetic construct
  source 1..23: mol_type = other RNA
tactgtgctgctggtggctgcag

SEQ ID NO: 105095 - RNA, 23 nt, synthetic construct
  source 1..23: mol_type = other RNA
tggggactgctgggggacaggga

SEQ ID NO: 105096 - RNA, 23 nt, synthetic construct
  source 1..23: mol_type = other RNA
tggcacacaggcaggctctgggg

SEQ ID NO: 105097 - RNA, 23 nt, synthetic construct
  source 1..23: mol_type = other RNA
ttggagatgtgggccccgccctg

SEQ ID NO: 105098 - RNA, 23 nt, synthetic construct
  source 1..23: mol_type = other RNA
tggcggaggacactggcggtggg

SEQ ID NO: 105099 - RNA, 23 nt, synthetic construct
  source 1..23: mol_type = other RNA
tcgctccggggcaggagccctcg

SEQ ID NO: 105100 - RNA, 23 nt, synthetic construct
  source 1..23: mol_type = other RNA
tccgggctctgggcggtgcccat

SEQ ID NO: 105101 - RNA, 23 nt, synthetic construct
  source 1..23: mol_type = other RNA
tgtggagatgtgggccccgccct

SEQ ID NO: 105102 - RNA, 23 nt, synthetic construct
  source 1..23: mol_type = other RNA
tgcgtccgggcaggagggggaga

SEQ ID NO: 105103 - RNA, 23 nt, synthetic construct
  source 1..23: mol_type = other RNA
tggccacaggctctcccagggta

SEQ ID NO: 105104 - RNA, 23 nt, synthetic construct
  source 1..23: mol_type = other RNA
tgtggtggtctgtgctgggacgg

SEQ ID NO: 105105 - RNA, 23 nt, synthetic construct
  source 1..23: mol_type = other RNA
tgtcccaagggtggaggagggga

SEQ ID NO: 105106 - RNA, 23 nt, synthetic construct
  source 1..23: mol_type = other RNA
tatgactgtgggtgtggtggccg

SEQ ID NO: 105107 - RNA, 23 nt, synthetic construct
  source 1..23: mol_type = other RNA
tacgctccggggcaggagccctc

SEQ ID NO: 105108 - RNA, 23 nt, synthetic construct
  source 1..23: mol_type = other RNA
tgtcactgtgctgctggtggctg

SEQ ID NO: 105109 - RNA, 23 nt, synthetic construct
  source 1..23: mol_type = other RNA
tcccggagtggaggagggggtgg

SEQ ID NO: 105110 - RNA, 23 nt, synthetic construct
  source 1..23: mol_type = other RNA
tgtcactgtgctgctggtggctg

SEQ ID NO: 105111 - RNA, 23 nt, synthetic construct
  source 1..23: mol_type = other RNA
tgtcactgtgctgctggtggctg

SEQ ID NO: 105112 - RNA, 23 nt, synthetic construct
  source 1..23: mol_type = other RNA
tcccggagtggaggagggggtgg

SEQ ID NO: 105113 - RNA, 23 nt, synthetic construct
  source 1..23: mol_type = other RNA
ttgggtgtggtggtctgttctgg

SEQ ID NO: 105114 - RNA, 23 nt, synthetic construct
  source 1..23: mol_type = other RNA
tcgggtgtggtggtctgttctgg

SEQ ID NO: 105115 - RNA, 23 nt, synthetic construct
  source 1..23: mol_type = other RNA
tcgggcacacaggcaggctctgg

SEQ ID NO: 105116 - RNA, 23 nt, synthetic construct
  source 1..23: mol_type = other RNA
tcatgggggctgcacaccctgtg

SEQ ID NO: 105117 - RNA, 23 nt, synthetic construct
  source 1..23: mol_type = other RNA
ttcctggctccaggtggacagag

SEQ ID NO: 105118 - RNA, 23 nt, synthetic construct
  source 1..23: mol_type = other RNA
tccggagcaggtgcaggagctgc

SEQ ID NO: 105119 - RNA, 23 nt, synthetic construct
  source 1..23: mol_type = other RNA
tgcagccccaggcctgtctgcac

SEQ ID NO: 105120 - RNA, 23 nt, synthetic construct
  source 1..23: mol_type = other RNA
tcctgggtggtggtggtggtggc

SEQ ID NO: 105121 - RNA, 23 nt, synthetic construct
  source 1..23: mol_type = other RNA
tcccgggatggaggagggggtca

SEQ ID NO: 105122 - RNA, 23 nt, synthetic construct
  source 1..23: mol_type = other RNA
tctgtggtcctggaggtggccgt

SEQ ID NO: 105123 - RNA, 23 nt, synthetic construct
  source 1..23: mol_type = other RNA
tgggtgtggccgtggctgtggtc

SEQ ID NO: 105124 - RNA, 23 nt, synthetic construct
  source 1..23: mol_type = other RNA
tcccgggatggaggagggggtca

SEQ ID NO: 105125 - RNA, 23 nt, synthetic construct
  source 1..23: mol_type = other RNA
tgagtggaggagggggtggacat

SEQ ID NO: 105126 - RNA, 23 nt, synthetic construct
  source 1..23: mol_type = other RNA
tcccgggatggaggagggggtca

SEQ ID NO: 105127 - RNA, 23 nt, synthetic construct
  source 1..23: mol_type = other RNA
tgagtggaggagggggtggacgt

SEQ ID NO: 105128 - RNA, 23 nt, synthetic construct
  source 1..23: mol_type = other RNA
tcccgggatggaggagggggtca

SEQ ID NO: 105129 - RNA, 23 nt, synthetic construct
  source 1..23: mol_type = other RNA
tccagcctgtctgccccagcggc

SEQ ID NO: 105130 - RNA, 23 nt, synthetic construct
  source 1..23: mol_type = other RNA
tgtagagctggtggccggggtgc

SEQ ID NO: 105131 - RNA, 23 nt, synthetic construct
  source 1..23: mol_type = other RNA
tgtagagctggtggccggggtgc

SEQ ID NO: 105132 - RNA, 23 nt, synthetic construct
  source 1..23: mol_type = other RNA
tgtagagctggtggccggggtgc

SEQ ID NO: 105133 - RNA, 23 nt, synthetic construct
  source 1..23: mol_type = other RNA
tgtagagctggtggccggggtgc

SEQ ID NO: 105134 - RNA, 23 nt, synthetic construct
  source 1..23: mol_type = other RNA
tcactgagggagggctgagggct

SEQ ID NO: 105135 - RNA, 23 nt, synthetic construct
  source 1..23: mol_type = other RNA
tcgtgggtgtggtggtctgtgat

SEQ ID NO: 105136 - RNA, 23 nt, synthetic construct
  source 1..23: mol_type = other RNA
tcgtgggtgtggtggtctgtgat

SEQ ID NO: 105137 - RNA, 23 nt, synthetic construct
  source 1..23: mol_type = other RNA
tcgtgggtgtggtggtctgtgat

SEQ ID NO: 105138 - RNA, 23 nt, synthetic construct
  source 1..23: mol_type = other RNA
tcgtgggtgtggtggtctgtgat

SEQ ID NO: 105139 - RNA, 23 nt, synthetic construct
  source 1..23: mol_type = other RNA
tcgtgggtgtggtggtctgtgat

SEQ ID NO: 105140 - RNA, 23 nt, synthetic construct
  source 1..23: mol_type = other RNA
tgcagcccccactcccatccgac

SEQ ID NO: 105141 - RNA, 23 nt, synthetic construct
  source 1..23: mol_type = other RNA
tttgcctgggtggaggaggcggt

SEQ ID NO: 105142 - RNA, 23 nt, synthetic construct
  source 1..23: mol_type = other RNA
tttgcctgggtggaggaggcggt

SEQ ID NO: 105143 - RNA, 23 nt, synthetic construct
  source 1..23: mol_type = other RNA
tttgcctgggtggaggaggcggt

SEQ ID NO: 105144 - RNA, 23 nt, synthetic construct
  source 1..23: mol_type = other RNA
tgttgcaggtggcaggctgtatg

SEQ ID NO: 105145 - RNA, 23 nt, synthetic construct
  source 1..23: mol_type = other RNA
tctggccttgcctggaccagcct

SEQ ID NO: 105146 - RNA, 23 nt, synthetic construct
  source 1..23: mol_type = other RNA
tgcctcgttgtgcacacaggggc

SEQ ID NO: 105147 - RNA, 23 nt, synthetic construct
  source 1..23: mol_type = other RNA
tggagcctctggttgtgggtgtg

SEQ ID NO: 105148 - RNA, 23 nt, synthetic construct
  source 1..23: mol_type = other RNA
tggagcctctggttgtgggtgtg

SEQ ID NO: 105149 - RNA, 23 nt, synthetic construct
  source 1..23: mol_type = other RNA
tcagtggcagaggccgtgcagta

SEQ ID NO: 105150 - RNA, 23 nt, synthetic construct
  source 1..23: mol_type = other RNA
taggagggggtggacatggaact

SEQ ID NO: 105151 - RNA, 23 nt, synthetic construct
  source 1..23: mol_type = other RNA
tggtcccaagggtgaaggagggg

SEQ ID NO: 105152 - RNA, 23 nt, synthetic construct
  source 1..23: mol_type = other RNA
tgtgcccagggaggaggagggga

SEQ ID NO: 105153 - RNA, 23 nt, synthetic construct
  source 1..23: mol_type = other RNA
tgtgcccagggaggaggagggga

SEQ ID NO: 105154 - RNA, 23 nt, synthetic construct
  source 1..23: mol_type = other RNA
tgtgcccagggaggaggagggga

SEQ ID NO: 105155 - RNA, 23 nt, synthetic construct
  source 1..23: mol_type = other RNA
tcatcccctccagctgtgggctc

SEQ ID NO: 105156 - RNA, 23 nt, synthetic construct
  source 1..23: mol_type = other RNA
tactgtggaggtgtggacagtct

SEQ ID NO: 105157 - RNA, 23 nt, synthetic construct
  source 1..23: mol_type = other RNA
tactgtggaggtgtggacagtct

SEQ ID NO: 105158 - RNA, 23 nt, synthetic construct
  source 1..23: mol_type = other RNA
tactgtggaggtgtggacagtct

SEQ ID NO: 105159 - RNA, 23 nt, synthetic construct
  source 1..23: mol_type = other RNA
tgttctcagacagcagtggcctc

SEQ ID NO: 105160 - RNA, 23 nt, synthetic construct
  source 1..23: mol_type = other RNA
tcttctgagagggtggggactgc

SEQ ID NO: 105161 - RNA, 23 nt, synthetic construct
  source 1..23: mol_type = other RNA
tcgcctccagcaccagcccctgg

SEQ ID NO: 105162 - RNA, 23 nt, synthetic construct
  source 1..23: mol_type = other RNA
tctggtgcctggggccggggagg

SEQ ID NO: 105163 - RNA, 23 nt, synthetic construct
  source 1..23: mol_type = other RNA
tccttctgagagggtggggactg

SEQ ID NO: 105164 - RNA, 23 nt, synthetic construct
  source 1..23: mol_type = other RNA
ttccttctgagagggtggggact

SEQ ID NO: 105165 - RNA, 23 nt, synthetic construct
  source 1..23: mol_type = other RNA
tttggtggtggagccggtggccg

SEQ ID NO: 105166 - RNA, 23 nt, synthetic construct
  source 1..23: mol_type = other RNA
tttggtggtggagccggtggccg

SEQ ID NO: 105167 - RNA, 23 nt, synthetic construct
  source 1..23: mol_type = other RNA
ttgctgggctctgtgaggatcca

SEQ ID NO: 105168 - RNA, 23 nt, synthetic construct
  source 1..23: mol_type = other RNA
tctggaggagggagtggctctgg

SEQ ID NO: 105169 - RNA, 23 nt, synthetic construct
  source 1..23: mol_type = other RNA
tgggaggaagaggggatggctgt

SEQ ID NO: 105170 - RNA, 23 nt, synthetic construct
  source 1..23: mol_type = other RNA
tttggtggtggagccggtggctg

SEQ ID NO: 105171 - RNA, 23 nt, synthetic construct
  source 1..23: mol_type = other RNA
tttggtggtggagccggtggccg

SEQ ID NO: 105172 - RNA, 23 nt, synthetic construct
  source 1..23: mol_type = other RNA
tccaagggtggaggaggggatgg

SEQ ID NO: 105173 - RNA, 23 nt, synthetic construct
  source 1..23: mol_type = other RNA
tttggtggtggagccggtggccg

SEQ ID NO: 105174 - RNA, 23 nt, synthetic construct
  source 1..23: mol_type = other RNA
tggcgcgggggcagcgggcggca

SEQ ID NO: 105175 - RNA, 23 nt, synthetic construct
  source 1..23: mol_type = other RNA
tcagccgggcctggaagacttgg

SEQ ID NO: 105176 - RNA, 23 nt, synthetic construct
  source 1..23: mol_type = other RNA
tcacaggcaggctctgggggcag

SEQ ID NO: 105177 - RNA, 23 nt, synthetic construct
  source 1..23: mol_type = other RNA
tcacgtgggtgtaggtgtgcagg

SEQ ID NO: 105178 - RNA, 23 nt, synthetic construct
  source 1..23: mol_type = other RNA
tggctgtgcttgtcagcactgga

SEQ ID NO: 105179 - RNA, 23 nt, synthetic construct
  source 1..23: mol_type = other RNA
tggctgtgcttgtcagcactgga

SEQ ID NO: 105180 - RNA, 23 nt, synthetic construct
  source 1..23: mol_type = other RNA
tggctgtgcttgtcagcactgga

SEQ ID NO: 105181 - RNA, 23 nt, synthetic construct
  source 1..23: mol_type = other RNA
tgtcccaggagttgaggaggggt

SEQ ID NO: 105182 - RNA, 23 nt, synthetic construct
  source 1..23: mol_type = other RNA
tagggcgcctgggaaggttgcac

SEQ ID NO: 105183 - RNA, 23 nt, synthetic construct
  source 1..23: mol_type = other RNA
tcaccgtggaaggctctgtgatg

SEQ ID NO: 105184 - RNA, 23 nt, synthetic construct
  source 1..23: mol_type = other RNA
tcaccgtggaaggctctgtgatg

SEQ ID NO: 105185 - RNA, 23 nt, synthetic construct
  source 1..23: mol_type = other RNA
ttacaccatgggggctgcacacc

SEQ ID NO: 105186 - RNA, 23 nt, synthetic construct
  source 1..23: mol_type = other RNA
tgagggagtggctctggagctga

SEQ ID NO: 105187 - RNA, 23 nt, synthetic construct
  source 1..23: mol_type = other RNA
ttgtctgccccagcggccggacg

SEQ ID NO: 105188 - RNA, 23 nt, synthetic construct
  source 1..23: mol_type = other RNA
tcggttgctgtggtctgggttgg

SEQ ID NO: 105189 - RNA, 23 nt, synthetic construct
  source 1..23: mol_type = other RNA
tgctggctgggtgggcacttcgg

SEQ ID NO: 105190 - RNA, 23 nt, synthetic construct
  source 1..23: mol_type = other RNA
tccgttggacgcctccagcacca

SEQ ID NO: 105191 - RNA, 23 nt, synthetic construct
  source 1..23: mol_type = other RNA
tgccctcctgctcccagttcctg

SEQ ID NO: 105192 - RNA, 23 nt, synthetic construct
  source 1..23: mol_type = other RNA
tagtggcctcctgggccgggaag

SEQ ID NO: 105193 - RNA, 23 nt, synthetic construct
  source 1..23: mol_type = other RNA
tccccgtggaaggctctgtgatg

SEQ ID NO: 105194 - RNA, 23 nt, synthetic construct
  source 1..23: mol_type = other RNA
tccccgtggaaggctctgtgatg

SEQ ID NO: 105195 - RNA, 23 nt, synthetic construct
  source 1..23: mol_type = other RNA
tcttgtagtggaagtcaccccag

SEQ ID NO: 105196 - RNA, 23 nt, synthetic construct
  source 1..23: mol_type = other RNA
tcggagcaggtgcaggagctgca

SEQ ID NO: 105197 - RNA, 23 nt, synthetic construct
  source 1..23: mol_type = other RNA
tggcaccagctgcaccagcagct

SEQ ID NO: 105198 - RNA, 23 nt, synthetic construct
  source 1..23: mol_type = other RNA
tgtgtggtggcggtggtggtcag

SEQ ID NO: 105199 - RNA, 23 nt, synthetic construct
  source 1..23: mol_type = other RNA
ttgcctgggtggaggaggcggtg

SEQ ID NO: 105200 - RNA, 23 nt, synthetic construct
  source 1..23: mol_type = other RNA
tgtgtggtggcggtggtggtcag

SEQ ID NO: 105201 - RNA, 23 nt, synthetic construct
  source 1..23: mol_type = other RNA
tgtgtggtggcggtggtggtcag

SEQ ID NO: 105202 - RNA, 23 nt, synthetic construct
  source 1..23: mol_type = other RNA
ttgcctgggtggaggaggcggtg

SEQ ID NO: 105203 - RNA, 23 nt, synthetic construct
  source 1..23: mol_type = other RNA
tgtgtggtggcggtggtggtcag

SEQ ID NO: 105204 - RNA, 23 nt, synthetic construct
  source 1..23: mol_type = other RNA
ttgcctgggtggaggaggcggtg

SEQ ID NO: 105205 - RNA, 23 nt, synthetic construct
  source 1..23: mol_type = other RNA
tgggtccccacccggccctctcg

SEQ ID NO: 105206 - RNA, 23 nt, synthetic construct
  source 1..23: mol_type = other RNA
tgaggatccaggtcgtccctgga

SEQ ID NO: 105207 - RNA, 23 nt, synthetic construct
  source 1..23: mol_type = other RNA
tgcatggcctgggcctctgctga

SEQ ID NO: 105208 - RNA, 23 nt, synthetic construct
  source 1..23: mol_type = other RNA
tgctgctggggtgtgggaagtcc

SEQ ID NO: 105209 - RNA, 23 nt, synthetic construct
  source 1..23: mol_type = other RNA
tgctgctggggtgtgggaagtca

SEQ ID NO: 105210 - RNA, 23 nt, synthetic construct
  source 1..23: mol_type = other RNA
tgctgctggggtgtgggaagtcc

SEQ ID NO: 105211 - RNA, 23 nt, synthetic construct
  source 1..23: mol_type = other RNA
tgacgggcagggagggagccggg

SEQ ID NO: 105212 - RNA, 23 nt, synthetic construct
  source 1..23: mol_type = other RNA
tgggcacccatcctgggggctgg

SEQ ID NO: 105213 - RNA, 23 nt, synthetic construct
  source 1..23: mol_type = other RNA
ttgggatccagctccagcagggc

SEQ ID NO: 105214 - RNA, 23 nt, synthetic construct
  source 1..23: mol_type = other RNA
taccagcagctgcagccccaggc

SEQ ID NO: 105215 - RNA, 23 nt, synthetic construct
  source 1..23: mol_type = other RNA
ttgcagcccccactcccatccga

SEQ ID NO: 105216 - RNA, 23 nt, synthetic construct
  source 1..23: mol_type = other RNA
tcagggaggaagaggggatgggt

SEQ ID NO: 105217 - RNA, 23 nt, synthetic construct
  source 1..23: mol_type = other RNA
tgtgggtgtggtggtctgtgata

SEQ ID NO: 105218 - RNA, 23 nt, synthetic construct
  source 1..23: mol_type = other RNA
ttggctgtggacatggtggccgt

SEQ ID NO: 105219 - RNA, 23 nt, synthetic construct
  source 1..23: mol_type = other RNA
tggagggtgtggctgtggacatg

SEQ ID NO: 105220 - RNA, 23 nt, synthetic construct
  source 1..23: mol_type = other RNA
taggagggtgtggctgtggacat

SEQ ID NO: 105221 - RNA, 23 nt, synthetic construct
  source 1..23: mol_type = other RNA
tccaggctgggcctgggcacggc

SEQ ID NO: 105222 - RNA, 23 nt, synthetic construct
  source 1..23: mol_type = other RNA
tcctgggtggaggaggcggtggc

SEQ ID NO: 105223 - RNA, 23 nt, synthetic construct
  source 1..23: mol_type = other RNA
tgtgggtgtggtggtctgtgata

SEQ ID NO: 105224 - RNA, 23 nt, synthetic construct
  source 1..23: mol_type = other RNA
ttggctgtggacatggtggccgt

SEQ ID NO: 105225 - RNA, 23 nt, synthetic construct
  source 1..23: mol_type = other RNA
tggagggtgtggctgtggacatg

SEQ ID NO: 105226 - RNA, 23 nt, synthetic construct
  source 1..23: mol_type = other RNA
taggagggtgtggctgtggacat

SEQ ID NO: 105227 - RNA, 23 nt, synthetic construct
  source 1..23: mol_type = other RNA
ttgctgctggggtgtgggaagtc

SEQ ID NO: 105228 - RNA, 23 nt, synthetic construct
  source 1..23: mol_type = other RNA
tccaggctgggcctgggcacggc

SEQ ID NO: 105229 - RNA, 23 nt, synthetic construct
  source 1..23: mol_type = other RNA
tcagggaggaagaggggatggct

SEQ ID NO: 105230 - RNA, 23 nt, synthetic construct
  source 1..23: mol_type = other RNA
tgtgggtgtggtggtctgtgata

SEQ ID NO: 105231 - RNA, 23 nt, synthetic construct
  source 1..23: mol_type = other RNA
ttggctgtggacatggtggccgt

SEQ ID NO: 105232 - RNA, 23 nt, synthetic construct
  source 1..23: mol_type = other RNA
tggagggtgtggctgtggacatg

SEQ ID NO: 105233 - RNA, 23 nt, synthetic construct
  source 1..23: mol_type = other RNA
taggagggtgtggctgtggacat

SEQ ID NO: 105234 - RNA, 23 nt, synthetic construct
  source 1..23: mol_type = other RNA
tgaggagggtgtggctgtggaca

SEQ ID NO: 105235 - RNA, 23 nt, synthetic construct
  source 1..23: mol_type = other RNA
ttgctgctggggtgtgggaagtc

SEQ ID NO: 105236 - RNA, 23 nt, synthetic construct
  source 1..23: mol_type = other RNA
tccaggctgggcctgggcacggc

SEQ ID NO: 105237 - RNA, 23 nt, synthetic construct
  source 1..23: mol_type = other RNA
tcctgggtggaggaggcggtggc

SEQ ID NO: 105238 - RNA, 23 nt, synthetic construct
  source 1..23: mol_type = other RNA
tgtgggtgtggtggtctgtgata

SEQ ID NO: 105239 - RNA, 23 nt, synthetic construct
  source 1..23: mol_type = other RNA
ttggctgtggacatggtggccgt

SEQ ID NO: 105240 - RNA, 23 nt, synthetic construct
  source 1..23: mol_type = other RNA
tggagggtgtggctgtggacatg

SEQ ID NO: 105241 - RNA, 23 nt, synthetic construct
  source 1..23: mol_type = other RNA
taggagggtgtggctgtggacat

SEQ ID NO: 105242 - RNA, 23 nt, synthetic construct
  source 1..23: mol_type = other RNA
tttcctggggtggaagagggggt

SEQ ID NO: 105243 - RNA, 23 nt, synthetic construct
  source 1..23: mol_type = other RNA
ttgctgctggggtgtgggaagtc

SEQ ID NO: 105244 - RNA, 23 nt, synthetic construct
  source 1..23: mol_type = other RNA
tccaggctgggcctgggcacggc

SEQ ID NO: 105245 - RNA, 23 nt, synthetic construct
  source 1..23: mol_type = other RNA
tcctgggtggaggaggcggtggc

SEQ ID NO: 105246 - RNA, 23 nt, synthetic construct
  source 1..23: mol_type = other RNA
tgtgggtgtggtggtctgtgata

SEQ ID NO: 105247 - RNA, 23 nt, synthetic construct
  source 1..23: mol_type = other RNA
ttggctgtggacatggtggccgt

SEQ ID NO: 105248 - RNA, 23 nt, synthetic construct
  source 1..23: mol_type = other RNA
tggagggtgtggctgtggacatg

SEQ ID NO: 105249 - RNA, 23 nt, synthetic construct
  source 1..23: mol_type = other RNA
taggagggtgtggctgtggacat

SEQ ID NO: 105250 - RNA, 23 nt, synthetic construct
  source 1..23: mol_type = other RNA
tatgggtgtggtggtctgtgctg

SEQ ID NO: 105251 - RNA, 23 nt, synthetic construct
  source 1..23: mol_type = other RNA
tggagctggggaagccagtgggt

SEQ ID NO: 105252 - RNA, 23 nt, synthetic construct
  source 1..23: mol_type = other RNA
tcaggctttgggtccagcaggac

SEQ ID NO: 105253 - RNA, 23 nt, synthetic construct
  source 1..23: mol_type = other RNA
ttggtggtggtccccagcacaga

SEQ ID NO: 105254 - RNA, 23 nt, synthetic construct
  source 1..23: mol_type = other RNA
tggggctgcggggctggcagtgg

SEQ ID NO: 105255 - RNA, 23 nt, synthetic construct
  source 1..23: mol_type = other RNA
ttggcctgggcctctgctgagta

SEQ ID NO: 105256 - RNA, 23 nt, synthetic construct
  source 1..23: mol_type = other RNA
tctgagggagggctgagggctgg

SEQ ID NO: 105257 - RNA, 23 nt, synthetic construct
  source 1..23: mol_type = other RNA
tcatggcctgggcctctgctgag

SEQ ID NO: 105258 - RNA, 23 nt, synthetic construct
  source 1..23: mol_type = other RNA
tgcctgggtggaggaggcggtgg

SEQ ID NO: 105259 - RNA, 23 nt, synthetic construct
  source 1..23: mol_type = other RNA
tgcctgggtggaggaggcggtgg

SEQ ID NO: 105260 - RNA, 23 nt, synthetic construct
  source 1..23: mol_type = other RNA
tccctggggaagggggtgactcg

SEQ ID NO: 105261 - RNA, 23 nt, synthetic construct
  source 1..23: mol_type = other RNA
tgcctgggtggaggaggcggtgg

SEQ ID NO: 105262 - RNA, 23 nt, synthetic construct
  source 1..23: mol_type = other RNA
tctgctgggggacagggatcgcc

SEQ ID NO: 105263 - RNA, 23 nt, synthetic construct
  source 1..23: mol_type = other RNA
tctgggtgtggctgtggctgtgg

SEQ ID NO: 105264 - RNA, 23 nt, synthetic construct
  source 1..23: mol_type = other RNA
tgctgggtgtggctgtggctgtg

SEQ ID NO: 105265 - RNA, 23 nt, synthetic construct
  source 1..23: mol_type = other RNA
tctgctgggggacagggatcgcc

SEQ ID NO: 105266 - RNA, 23 nt, synthetic construct
  source 1..23: mol_type = other RNA
tgcagaccctgcccttgtagtcc

SEQ ID NO: 105267 - RNA, 23 nt, synthetic construct
  source 1..23: mol_type = other RNA
taccactctgtccactcacactt

SEQ ID NO: 105268 - RNA, 23 nt, synthetic construct
  source 1..23: mol_type = other RNA
tcgcagaccctgcccttgtagtc

SEQ ID NO: 105269 - RNA, 23 nt, synthetic construct
  source 1..23: mol_type = other RNA
tgggctggcaggtggtggtacct

SEQ ID NO: 105270 - RNA, 23 nt, synthetic construct
  source 1..23: mol_type = other RNA
tcaggggctgctcacagacggcc

SEQ ID NO: 105271 - RNA, 23 nt, synthetic construct
  source 1..23: mol_type = other RNA
tcaggggctgctcacagacggcc

SEQ ID NO: 105272 - RNA, 23 nt, synthetic construct
  source 1..23: mol_type = other RNA
tcaggggctgctcacagacggcc

SEQ ID NO: 105273 - RNA, 23 nt, synthetic construct
  source 1..23: mol_type = other RNA
ttcacgcaggcctcgtagtactt

SEQ ID NO: 105274 - RNA, 23 nt, synthetic construct
  source 1..23: mol_type = other RNA
tcaccagcccctgggccttgatg

SEQ ID NO: 105275 - RNA, 23 nt, synthetic construct
  source 1..23: mol_type = other RNA
ttgcagacgccgtccctccagtc

SEQ ID NO: 105276 - RNA, 23 nt, synthetic construct
  source 1..23: mol_type = other RNA
tcccaggggctgctcacagacgg

SEQ ID NO: 105277 - RNA, 23 nt, synthetic construct
  source 1..23: mol_type = other RNA
tcccaggggctgctcacagacgg

SEQ ID NO: 105278 - RNA, 23 nt, synthetic construct
  source 1..23: mol_type = other RNA
tcccaggggctgctcacagactg

SEQ ID NO: 105279 - RNA, 23 nt, synthetic construct
  source 1..23: mol_type = other RNA
tcccaggggctgctcacagacgg

SEQ ID NO: 105280 - RNA, 23 nt, synthetic construct
  source 1..23: mol_type = other RNA
tggggggcagaagcagccgtcca

SEQ ID NO: 105281 - RNA, 23 nt, synthetic construct
  source 1..23: mol_type = other RNA
tggatgctgcactgcttctgggc

SEQ ID NO: 105282 - RNA, 23 nt, synthetic construct
  source 1..23: mol_type = other RNA
ttgctgaaacagcccacgtccag

SEQ ID NO: 105283 - RNA, 23 nt, synthetic construct
  source 1..23: mol_type = other RNA
tggcagttctgcatgtacttggt

SEQ ID NO: 105284 - RNA, 23 nt, synthetic construct
  source 1..23: mol_type = other RNA
tagcagcagccggttttcctgag

SEQ ID NO: 105285 - RNA, 23 nt, synthetic construct
  source 1..23: mol_type = other RNA
tggaagacagtgacgggtggaac

SEQ ID NO: 105286 - RNA, 23 nt, synthetic construct
  source 1..23: mol_type = other RNA
tccggttttcctgaggctccccc

SEQ ID NO: 105287 - RNA, 23 nt, synthetic construct
  source 1..23: mol_type = other RNA
tcaggacacacacaggcccgcgt

SEQ ID NO: 105288 - RNA, 23 nt, synthetic construct
  source 1..23: mol_type = other RNA
tgccaggacacacacaggcccgc

SEQ ID NO: 105289 - RNA, 23 nt, synthetic construct
  source 1..23: mol_type = other RNA
tccaggggctgctcacagacggc

SEQ ID NO: 105290 - RNA, 23 nt, synthetic construct
  source 1..23: mol_type = other RNA
tccaggggctgctcacagacggc

SEQ ID NO: 105291 - RNA, 23 nt, synthetic construct
  source 1..23: mol_type = other RNA
tccaggggctgctcacagacggc

SEQ ID NO: 105292 - RNA, 23 nt, synthetic construct
  source 1..23: mol_type = other RNA
tacaggcagtcctcgctccgctc

SEQ ID NO: 105293 - RNA, 23 nt, synthetic construct
  source 1..23: mol_type = other RNA
tggttggccgtgcaggggtcctt

SEQ ID NO: 105294 - RNA, 23 nt, synthetic construct
  source 1..23: mol_type = other RNA
tggacttgcggaaggggttggcc

SEQ ID NO: 105295 - RNA, 23 nt, synthetic construct
  source 1..23: mol_type = other RNA
tcacaggcagtcctcgctccgct

SEQ ID NO: 105296 - RNA, 23 nt, synthetic construct
  source 1..23: mol_type = other RNA
tgcaggtgcaggtgttgcagtcg

SEQ ID NO: 105297 - RNA, 23 nt, synthetic construct
  source 1..23: mol_type = other RNA
tacgaagagcttgatggccttgg

SEQ ID NO: 105298 - RNA, 23 nt, synthetic construct
  source 1..23: mol_type = other RNA
tcggaaggggttggccgtgcagg

SEQ ID NO: 105299 - RNA, 23 nt, synthetic construct
  source 1..23: mol_type = other RNA
ttgggcccaggacttgcggaagg

SEQ ID NO: 105300 - RNA, 23 nt, synthetic construct
  source 1..23: mol_type = other RNA
tctgggcccaggacttgcggaag

SEQ ID NO: 105301 - RNA, 23 nt, synthetic construct
  source 1..23: mol_type = other RNA
tccaggacacacacaggcccgcg

SEQ ID NO: 105302 - RNA, 23 nt, synthetic construct
  source 1..23: mol_type = other RNA
tggtggtgaggactgaggaggac

SEQ ID NO: 105303 - RNA, 23 nt, synthetic construct
  source 1..23: mol_type = other RNA
tgggtggtgaggactgaggagga

SEQ ID NO: 105304 - RNA, 23 nt, synthetic construct
  source 1..23: mol_type = other RNA
tctggccctggtgggcggggtcc

SEQ ID NO: 105305 - RNA, 23 nt, synthetic construct
  source 1..23: mol_type = other RNA
ttctgtgatgtgggtggtgccca

SEQ ID NO: 105306 - RNA, 23 nt, synthetic construct
  source 1..23: mol_type = other RNA
ttctgtgatgtgggtggtgccca

SEQ ID NO: 105307 - RNA, 23 nt, synthetic construct
  source 1..23: mol_type = other RNA
ttctgtgatgtgggtggtgccca

SEQ ID NO: 105308 - RNA, 23 nt, synthetic construct
  source 1..23: mol_type = other RNA
ttctgtgatgtgggtggtgccca

SEQ ID NO: 105309 - RNA, 23 nt, synthetic construct
  source 1..23: mol_type = other RNA
tcgcgtggcaaagtcattgatgg

SEQ ID NO: 105310 - RNA, 23 nt, synthetic construct
  source 1..23: mol_type = other RNA
tacagcaggctccgtgctggcac

SEQ ID NO: 105311 - RNA, 23 nt, synthetic construct
  source 1..23: mol_type = other RNA
tgtggccacccctgggacagtgg

SEQ ID NO: 105312 - RNA, 23 nt, synthetic construct
  source 1..23: mol_type = other RNA
tcctgagctggacccagtctgcg

SEQ ID NO: 105313 - RNA, 23 nt, synthetic construct
  source 1..23: mol_type = other RNA
tgcctgagctggacccagtctgc

SEQ ID NO: 105314 - RNA, 23 nt, synthetic construct
  source 1..23: mol_type = other RNA
ttgaggactgaggaggacacagt

SEQ ID NO: 105315 - RNA, 23 nt, synthetic construct
  source 1..23: mol_type = other RNA
ttccccacagcactgcccggcca

SEQ ID NO: 105316 - RNA, 23 nt, synthetic construct
  source 1..23: mol_type = other RNA
tcctgtgcttttctgcagagagg

SEQ ID NO: 105317 - RNA, 23 nt, synthetic construct
  source 1..23: mol_type = other RNA
ttggtggagtcaacctgggagcg

SEQ ID NO: 105318 - RNA, 23 nt, synthetic construct
  source 1..23: mol_type = other RNA
tgcaggactggcagttgctgacc

SEQ ID NO: 105319 - RNA, 23 nt, synthetic construct
  source 1..23: mol_type = other RNA
tgagtagagaagtgggagctggg

SEQ ID NO: 105320 - RNA, 23 nt, synthetic construct
  source 1..23: mol_type = other RNA
tagcagggcactgtcctctccgt

SEQ ID NO: 105321 - RNA, 23 nt, synthetic construct
  source 1..23: mol_type = other RNA
tgccgcagaccctgcccttgtag

SEQ ID NO: 105322 - RNA, 23 nt, synthetic construct
  source 1..23: mol_type = other RNA
tctgtgggtgtggtggctgtgct

SEQ ID NO: 105323 - RNA, 23 nt, synthetic construct
  source 1..23: mol_type = other RNA
tctgtgggtgtggtggctgtgct

SEQ ID NO: 105324 - RNA, 23 nt, synthetic construct
  source 1..23: mol_type = other RNA
tctgtgggtgtggtggctgtgct

SEQ ID NO: 105325 - RNA, 23 nt, synthetic construct
  source 1..23: mol_type = other RNA
tctgtgggtgtggtggctgtgct

SEQ ID NO: 105326 - RNA, 23 nt, synthetic construct
  source 1..23: mol_type = other RNA
tctgtgggtgtggtggctgtgct

SEQ ID NO: 105327 - RNA, 23 nt, synthetic construct
  source 1..23: mol_type = other RNA
tccagcccctgggccttgatgac

SEQ ID NO: 105328 - RNA, 23 nt, synthetic construct
  source 1..23: mol_type = other RNA
tgacagcgcggcgcacaggcagt

SEQ ID NO: 105329 - RNA, 23 nt, synthetic construct
  source 1..23: mol_type = other RNA
tcttggcggcacaggcgtgcaca

SEQ ID NO: 105330 - RNA, 23 nt, synthetic construct
  source 1..23: mol_type = other RNA
taggtgcaggtgttgcagtcgac

SEQ ID NO: 105331 - RNA, 23 nt, synthetic construct
  source 1..23: mol_type = other RNA
tcaggtgcaggtgttgcagtcga

SEQ ID NO: 105332 - RNA, 23 nt, synthetic construct
  source 1..23: mol_type = other RNA
tggtccctagggcagaggaggga

SEQ ID NO: 105333 - RNA, 23 nt, synthetic construct
  source 1..23: mol_type = other RNA
tggtccctagggcagaggaggga

SEQ ID NO: 105334 - RNA, 23 nt, synthetic construct
  source 1..23: mol_type = other RNA
tggtccctagggcagaggaggga

SEQ ID NO: 105335 - RNA, 23 nt, synthetic construct
  source 1..23: mol_type = other RNA
tggtccctagggcagaggaggga

SEQ ID NO: 105336 - RNA, 23 nt, synthetic construct
  source 1..23: mol_type = other RNA
tgtgtccccagagaggcaggtac

SEQ ID NO: 105337 - RNA, 23 nt, synthetic construct
  source 1..23: mol_type = other RNA
tggcggcacaggcgtgcacatag

SEQ ID NO: 105338 - RNA, 23 nt, synthetic construct
  source 1..23: mol_type = other RNA
tgatgaccaggaagatccccatg

SEQ ID NO: 105339 - RNA, 23 nt, synthetic construct
  source 1..23: mol_type = other RNA
tggttctggttgaagttcccaca

SEQ ID NO: 105340 - RNA, 23 nt, synthetic construct
  source 1..23: mol_type = other RNA
tcgcggcgcacaggcagtcctcg

SEQ ID NO: 105341 - RNA, 23 nt, synthetic construct
  source 1..23: mol_type = other RNA
tccctgtgcttttctgcagagag

SEQ ID NO: 105342 - RNA, 23 nt, synthetic construct
  source 1..23: mol_type = other RNA
tggccgcagaccctgcccttgta

SEQ ID NO: 105343 - RNA, 23 nt, synthetic construct
  source 1..23: mol_type = other RNA
taggccgcagaccctgcccttgt

SEQ ID NO: 105344 - RNA, 23 nt, synthetic construct
  source 1..23: mol_type = other RNA
tcgtcgttcacgcaggcctcgta

SEQ ID NO: 105345 - RNA, 23 nt, synthetic construct
  source 1..23: mol_type = other RNA
tccaccaggcagtgcccactggg

SEQ ID NO: 105346 - RNA, 23 nt, synthetic construct
  source 1..23: mol_type = other RNA
tcacagcaggctccgtgctggca

SEQ ID NO: 105347 - RNA, 23 nt, synthetic construct
  source 1..23: mol_type = other RNA
ttgtgggtgtggtggctgtgctt

SEQ ID NO: 105348 - RNA, 23 nt, synthetic construct
  source 1..23: mol_type = other RNA
tgggctgctgggcagcagggtcg

SEQ ID NO: 105349 - RNA, 23 nt, synthetic construct
  source 1..23: mol_type = other RNA
tgtggccggggtgctggggcagt

SEQ ID NO: 105350 - RNA, 23 nt, synthetic construct
  source 1..23: mol_type = other RNA
ttgtgggtgtggtggctgtgctt

SEQ ID NO: 105351 - RNA, 23 nt, synthetic construct
  source 1..23: mol_type = other RNA
tgggctgctgggcagcagggtcg

SEQ ID NO: 105352 - RNA, 23 nt, synthetic construct
  source 1..23: mol_type = other RNA
tgtggccggggtgctggggcagt

SEQ ID NO: 105353 - RNA, 23 nt, synthetic construct
  source 1..23: mol_type = other RNA
tggtggctgtgggtgtggtggcc

SEQ ID NO: 105354 - RNA, 23 nt, synthetic construct
  source 1..23: mol_type = other RNA
ttgtgggtgtggtggctgtgctt

SEQ ID NO: 105355 - RNA, 23 nt, synthetic construct
  source 1..23: mol_type = other RNA
tgggctgctgggcagcagggtcg

SEQ ID NO: 105356 - RNA, 23 nt, synthetic construct
  source 1..23: mol_type = other RNA
tgtggccggggtgctggggcagt

SEQ ID NO: 105357 - RNA, 23 nt, synthetic construct
  source 1..23: mol_type = other RNA
ttgtgggtgtggtggctgtgctt

SEQ ID NO: 105358 - RNA, 23 nt, synthetic construct
  source 1..23: mol_type = other RNA
tgggctgctgggcagcagggtcg

SEQ ID NO: 105359 - RNA, 23 nt, synthetic construct
  source 1..23: mol_type = other RNA
tgtggccggggtgctggggcagt

SEQ ID NO: 105360 - RNA, 23 nt, synthetic construct
  source 1..23: mol_type = other RNA
tggtggctgtgggtgtggtggcc

SEQ ID NO: 105361 - RNA, 23 nt, synthetic construct
  source 1..23: mol_type = other RNA
ttgtgggtgtggtggctgtgctt

SEQ ID NO: 105362 - RNA, 23 nt, synthetic construct
  source 1..23: mol_type = other RNA
ttagggcagccgggcctggaaga

SEQ ID NO: 105363 - RNA, 23 nt, synthetic construct
  source 1..23: mol_type = other RNA
tcgcaggactggcagttgctgac

SEQ ID NO: 105364 - RNA, 23 nt, synthetic construct
  source 1..23: mol_type = other RNA
tgggcaggatgcaggctgtgggg

SEQ ID NO: 105365 - RNA, 23 nt, synthetic construct
  source 1..23: mol_type = other RNA
tctccccctgcagctggacacat

SEQ ID NO: 105366 - RNA, 23 nt, synthetic construct
  source 1..23: mol_type = other RNA
tgcttctgggcccaggacttgcg

SEQ ID NO: 105367 - RNA, 23 nt, synthetic construct
  source 1..23: mol_type = other RNA
taaggtgatgaagtggccatccc

SEQ ID NO: 105368 - RNA, 23 nt, synthetic construct
  source 1..23: mol_type = other RNA
tgcacaggcagtcctcgctccgc

SEQ ID NO: 105369 - RNA, 23 nt, synthetic construct
  source 1..23: mol_type = other RNA
taccgtgcagttctccagggtcc

SEQ ID NO: 105370 - RNA, 23 nt, synthetic construct
  source 1..23: mol_type = other RNA
taggcagtcctcgctccgctcac

SEQ ID NO: 105371 - RNA, 23 nt, synthetic construct
  source 1..23: mol_type = other RNA
tcaggcagtcctcgctccgctca

SEQ ID NO: 105372 - RNA, 23 nt, synthetic construct
  source 1..23: mol_type = other RNA
tgcggaaggggttggccgtgcag

SEQ ID NO: 105373 - RNA, 23 nt, synthetic construct
  source 1..23: mol_type = other RNA
tgacttgcggaaggggttggccg

SEQ ID NO: 105374 - RNA, 23 nt, synthetic construct
  source 1..23: mol_type = other RNA
tcgcacaggcagtcctcgctccg

SEQ ID NO: 105375 - RNA, 23 nt, synthetic construct
  source 1..23: mol_type = other RNA
tgcgcacaggcagtcctcgctcc

SEQ ID NO: 105376 - RNA, 23 nt, synthetic construct
  source 1..23: mol_type = other RNA
tggaaggggttggccgtgcaggg

SEQ ID NO: 105377 - RNA, 23 nt, synthetic construct
  source 1..23: mol_type = other RNA
taccagcccctgggccttgatga

SEQ ID NO: 105378 - RNA, 23 nt, synthetic construct
  source 1..23: mol_type = other RNA
tgctggtagctgtgggtgtggtg

SEQ ID NO: 105379 - RNA, 23 nt, synthetic construct
  source 1..23: mol_type = other RNA
tgctggtagctgtgggtgtggtg

SEQ ID NO: 105380 - RNA, 23 nt, synthetic construct
  source 1..23: mol_type = other RNA
tgctggtagctgtgggtgtggtg

SEQ ID NO: 105381 - RNA, 23 nt, synthetic construct
  source 1..23: mol_type = other RNA
tcagcagggcactgtcctctccg

SEQ ID NO: 105382 - RNA, 23 nt, synthetic construct
  source 1..23: mol_type = other RNA
tacagttgcaggtgtcaaacatg

SEQ ID NO: 105383 - RNA, 23 nt, synthetic construct
  source 1..23: mol_type = other RNA
tccgctcacagttgcaggtgtca

SEQ ID NO: 105384 - RNA, 23 nt, synthetic construct
  source 1..23: mol_type = other RNA
taggaggacagcgcggcgcacag

SEQ ID NO: 105385 - RNA, 23 nt, synthetic construct
  source 1..23: mol_type = other RNA
tctctgtccactgacaccggggc

SEQ ID NO: 105386 - RNA, 23 nt, synthetic construct
  source 1..23: mol_type = other RNA
tcactctgtccactgacaccggg

SEQ ID NO: 105387 - RNA, 23 nt, synthetic construct
  source 1..23: mol_type = other RNA
tcgcagggctggtagtgccactc

SEQ ID NO: 105388 - RNA, 23 nt, synthetic construct
  source 1..23: mol_type = other RNA
tgcagggctggtagtgccactca

SEQ ID NO: 105389 - RNA, 23 nt, synthetic construct
  source 1..23: mol_type = other RNA
tcgctcacagttgcaggtgtcaa

SEQ ID NO: 105390 - RNA, 23 nt, synthetic construct
  source 1..23: mol_type = other RNA
ttccgctcacagttgcaggtgtc

SEQ ID NO: 105391 - RNA, 23 nt, synthetic construct
  source 1..23: mol_type = other RNA
tcttctgggcccaggacttgcgg

SEQ ID NO: 105392 - RNA, 23 nt, synthetic construct
  source 1..23: mol_type = other RNA
tgaggatgctgcactgcttctgg

SEQ ID NO: 105393 - RNA, 23 nt, synthetic construct
  source 1..23: mol_type = other RNA
tttctgggcccaggacttgcgga

SEQ ID NO: 105394 - RNA, 23 nt, synthetic construct
  source 1..23: mol_type = other RNA
ttgcttctgggcccaggacttgc

SEQ ID NO: 105395 - RNA, 23 nt, synthetic construct
  source 1..23: mol_type = other RNA
tctgcttctgggcccaggacttg

SEQ ID NO: 105396 - RNA, 23 nt, synthetic construct
  source 1..23: mol_type = other RNA
ttgcactgcttctgggcccagga

SEQ ID NO: 105397 - RNA, 23 nt, synthetic construct
  source 1..23: mol_type = other RNA
tgctgcactgcttctgggcccag

SEQ ID NO: 105398 - RNA, 23 nt, synthetic construct
  source 1..23: mol_type = other RNA
tgatgctgcactgcttctgggcc

SEQ ID NO: 105399 - RNA, 23 nt, synthetic construct
  source 1..23: mol_type = other RNA
ttggccccccgcgtgggcgcact

SEQ ID NO: 105400 - RNA, 23 nt, synthetic construct
  source 1..23: mol_type = other RNA
tcccctgggacagtgggttctgt

SEQ ID NO: 105401 - RNA, 23 nt, synthetic construct
  source 1..23: mol_type = other RNA
tgcagcagccggttttcctgagg

SEQ ID NO: 105402 - RNA, 23 nt, synthetic construct
  source 1..23: mol_type = other RNA
tgaggggccacagggcacgtatt

SEQ ID NO: 105403 - RNA, 23 nt, synthetic construct
  source 1..23: mol_type = other RNA
ttcacagtccacctgctggccca

SEQ ID NO: 105404 - RNA, 23 nt, synthetic construct
  source 1..23: mol_type = other RNA
tagcagccacactgggccacgca

SEQ ID NO: 105405 - RNA, 23 nt, synthetic construct
  source 1..23: mol_type = other RNA
tctcccagttcctgcacaccagg

SEQ ID NO: 105406 - RNA, 23 nt, synthetic construct
  source 1..23: mol_type = other RNA
ttgcattccacgacctggcccaa

SEQ ID NO: 105407 - RNA, 23 nt, synthetic construct
  source 1..23: mol_type = other RNA
ttgcattccacgacctggcccaa

SEQ ID NO: 105408 - RNA, 23 nt, synthetic construct
  source 1..23: mol_type = other RNA
ttgcattccacgacctggcccaa

SEQ ID NO: 105409 - RNA, 23 nt, synthetic construct
  source 1..23: mol_type = other RNA
ttgcattccacgacctggcccaa

SEQ ID NO: 105410 - RNA, 23 nt, synthetic construct
  source 1..23: mol_type = other RNA
ttcacagtgcaccttctgcccca

SEQ ID NO: 105411 - RNA, 23 nt, synthetic construct
  source 1..23: mol_type = other RNA
ttggccctggtgggcggggtcca

SEQ ID NO: 105412 - RNA, 23 nt, synthetic construct
  source 1..23: mol_type = other RNA
taccctgcccttgtagtcctggt

SEQ ID NO: 105413 - RNA, 23 nt, synthetic construct
  source 1..23: mol_type = other RNA
ttgccctgcagaagcagggagta

SEQ ID NO: 105414 - RNA, 23 nt, synthetic construct
  source 1..23: mol_type = other RNA
ttgtgcttttctgcagagaggct

SEQ ID NO: 105415 - RNA, 23 nt, synthetic construct
  source 1..23: mol_type = other RNA
taacctgggagcggcaggcggcg

SEQ ID NO: 105416 - RNA, 23 nt, synthetic construct
  source 1..23: mol_type = other RNA
tcctgctcccagttcctgcacac

SEQ ID NO: 105417 - RNA, 23 nt, synthetic construct
  source 1..23: mol_type = other RNA
tggagtggaggagggcatggccg

SEQ ID NO: 105418 - RNA, 23 nt, synthetic construct
  source 1..23: mol_type = other RNA
tggagtggaggagggcatggccg

SEQ ID NO: 105419 - RNA, 23 nt, synthetic construct
  source 1..23: mol_type = other RNA
taggagctgcaggtggtgttgaa

SEQ ID NO: 105420 - RNA, 23 nt, synthetic construct
  source 1..23: mol_type = other RNA
tccttggagcaggtggtgccggt

SEQ ID NO: 105421 - RNA, 23 nt, synthetic construct
  source 1..23: mol_type = other RNA
tggcagtgcccactggggttccg

SEQ ID NO: 105422 - RNA, 23 nt, synthetic construct
  source 1..23: mol_type = other RNA
tagcagccttccaggccaggcag

SEQ ID NO: 105423 - RNA, 23 nt, synthetic construct
  source 1..23: mol_type = other RNA
ttcataggtgcaggtgcaggcct

SEQ ID NO: 105424 - RNA, 23 nt, synthetic construct
  source 1..23: mol_type = other RNA
tcacagtccacctgctggcccag

SEQ ID NO: 105425 - RNA, 23 nt, synthetic construct
  source 1..23: mol_type = other RNA
tcagcaggctccgtgctggcact

SEQ ID NO: 105426 - RNA, 23 nt, synthetic construct
  source 1..23: mol_type = other RNA
tgctggtggctgcaggtgtggtg

SEQ ID NO: 105427 - RNA, 23 nt, synthetic construct
  source 1..23: mol_type = other RNA
tgctggtggccggggtgctgggg

SEQ ID NO: 105428 - RNA, 23 nt, synthetic construct
  source 1..23: mol_type = other RNA
tgctggtggctgcaggtgtggtg

SEQ ID NO: 105429 - RNA, 23 nt, synthetic construct
  source 1..23: mol_type = other RNA
tgctggtggccggggtgctgggg

SEQ ID NO: 105430 - RNA, 23 nt, synthetic construct
  source 1..23: mol_type = other RNA
tggagtggaggagggcgtggccg

SEQ ID NO: 105431 - RNA, 23 nt, synthetic construct
  source 1..23: mol_type = other RNA
tgctggtggctgcaggtgtggtg

SEQ ID NO: 105432 - RNA, 23 nt, synthetic construct
  source 1..23: mol_type = other RNA
tgctggtggccggggtgctgggg

SEQ ID NO: 105433 - RNA, 23 nt, synthetic construct
  source 1..23: mol_type = other RNA
tgctggtggctgcaggtgtggtg

SEQ ID NO: 105434 - RNA, 23 nt, synthetic construct
  source 1..23: mol_type = other RNA
tgctggtggccggggtgctgggg

SEQ ID NO: 105435 - RNA, 23 nt, synthetic construct
  source 1..23: mol_type = other RNA
tctgcagaagcagggagtagaga

SEQ ID NO: 105436 - RNA, 23 nt, synthetic construct
  source 1..23: mol_type = other RNA
tgcagcaggtgcactggtgctgc

SEQ ID NO: 105437 - RNA, 23 nt, synthetic construct
  source 1..23: mol_type = other RNA
tcaggacttgcggaaggggttgg

SEQ ID NO: 105438 - RNA, 23 nt, synthetic construct
  source 1..23: mol_type = other RNA
tgctggcactgagggagggctga

SEQ ID NO: 105439 - RNA, 23 nt, synthetic construct
  source 1..23: mol_type = other RNA
tacaggagtagcagcagccggtt

SEQ ID NO: 105440 - RNA, 23 nt, synthetic construct
  source 1..23: mol_type = other RNA
tctcctggcagcaggtgcactgg

SEQ ID NO: 105441 - RNA, 23 nt, synthetic construct
  source 1..23: mol_type = other RNA
tcccaggtgctgcacacccgccc

SEQ ID NO: 105442 - RNA, 23 nt, synthetic construct
  source 1..23: mol_type = other RNA
tggcaggtggggcagcggcacag

SEQ ID NO: 105443 - RNA, 23 nt, synthetic construct
  source 1..23: mol_type = other RNA
tcttgcggaaggggttggccgtg

SEQ ID NO: 105444 - RNA, 23 nt, synthetic construct
  source 1..23: mol_type = other RNA
tccgcagggctggtagtgccact

SEQ ID NO: 105445 - RNA, 23 nt, synthetic construct
  source 1..23: mol_type = other RNA
tacaggccgcagaccctgccctt

SEQ ID NO: 105446 - RNA, 23 nt, synthetic construct
  source 1..23: mol_type = other RNA
taaggggttggccgtgcaggggt

SEQ ID NO: 105447 - RNA, 23 nt, synthetic construct
  source 1..23: mol_type = other RNA
tggaggatgctgcactgcttctg

SEQ ID NO: 105448 - RNA, 23 nt, synthetic construct
  source 1..23: mol_type = other RNA
tcaggtgctgcacacccgcccat

SEQ ID NO: 105449 - RNA, 23 nt, synthetic construct
  source 1..23: mol_type = other RNA
ttggccttggagcaggtggtgcc

SEQ ID NO: 105450 - RNA, 23 nt, synthetic construct
  source 1..23: mol_type = other RNA
taggggttggccgtgcaggggtc

SEQ ID NO: 105451 - RNA, 23 nt, synthetic construct
  source 1..23: mol_type = other RNA
tcgccaggacacacacaggcccg

SEQ ID NO: 105452 - RNA, 23 nt, synthetic construct
  source 1..23: mol_type = other RNA
tggtagcagccttccaggccagg

SEQ ID NO: 105453 - RNA, 23 nt, synthetic construct
  source 1..23: mol_type = other RNA
tcagggggctcaggctggggaag

SEQ ID NO: 105454 - RNA, 23 nt, synthetic construct
  source 1..23: mol_type = other RNA
tccaggtgctgcacacccgccca

SEQ ID NO: 105455 - RNA, 23 nt, synthetic construct
  source 1..23: mol_type = other RNA
tcgtcgaaggtcttgtagtggaa

SEQ ID NO: 105456 - RNA, 23 nt, synthetic construct
  source 1..23: mol_type = other RNA
tgctccagcagggcactgtcctc

SEQ ID NO: 105457 - RNA, 23 nt, synthetic construct
  source 1..23: mol_type = other RNA
ttggggggcagaagcagccgtcc

SEQ ID NO: 105458 - RNA, 23 nt, synthetic construct
  source 1..23: mol_type = other RNA
tctggggggcagaagcagccgtc

SEQ ID NO: 105459 - RNA, 23 nt, synthetic construct
  source 1..23: mol_type = other RNA
tctgcaccagcagctgcagcccc

SEQ ID NO: 105460 - RNA, 23 nt, synthetic construct
  source 1..23: mol_type = other RNA
tgcaccagctgcaccagcagctg

SEQ ID NO: 105461 - RNA, 23 nt, synthetic construct
  source 1..23: mol_type = other RNA
ttcacagttgcaggtgtcaaaca

SEQ ID NO: 105462 - RNA, 23 nt, synthetic construct
  source 1..23: mol_type = other RNA
tctcacagttgcaggtgtcaaac

SEQ ID NO: 105463 - RNA, 23 nt, synthetic construct
  source 1..23: mol_type = other RNA
tgctcacagttgcaggtgtcaaa

SEQ ID NO: 105464 - RNA, 23 nt, synthetic construct
  source 1..23: mol_type = other RNA
tgtcctcgctccgctcacagttg

SEQ ID NO: 105465 - RNA, 23 nt, synthetic construct
  source 1..23: mol_type = other RNA
tggcagtcctcgctccgctcaca

SEQ ID NO: 105466 - RNA, 23 nt, synthetic construct
  source 1..23: mol_type = other RNA
ttgcaggtgcaggtgttgcagtc

SEQ ID NO: 105467 - RNA, 23 nt, synthetic construct
  source 1..23: mol_type = other RNA
ttgcccaggcagagccggtggct

SEQ ID NO: 105468 - RNA, 23 nt, synthetic construct
  source 1..23: mol_type = other RNA
tcttggagcaggtggtgccggtg

SEQ ID NO: 105469 - RNA, 23 nt, synthetic construct
  source 1..23: mol_type = other RNA
tgccttggagcaggtggtgccgg

SEQ ID NO: 105470 - RNA, 23 nt, synthetic construct
  source 1..23: mol_type = other RNA
tggccttggagcaggtggtgccg

SEQ ID NO: 105471 - RNA, 23 nt, synthetic construct
  source 1..23: mol_type = other RNA
tatggccttggagcaggtggtgc

SEQ ID NO: 105472 - RNA, 23 nt, synthetic construct
  source 1..23: mol_type = other RNA
tgatggccttggagcaggtggtg

SEQ ID NO: 105473 - RNA, 23 nt, synthetic construct
  source 1..23: mol_type = other RNA
ttgatggccttggagcaggtggt

SEQ ID NO: 105474 - RNA, 23 nt, synthetic construct
  source 1..23: mol_type = other RNA
tcttgatggccttggagcaggtg

SEQ ID NO: 105475 - RNA, 23 nt, synthetic construct
  source 1..23: mol_type = other RNA
tcaggccgcagaccctgcccttg

SEQ ID NO: 105476 - RNA, 23 nt, synthetic construct
  source 1..23: mol_type = other RNA
tcacaggccgcagaccctgccct

SEQ ID NO: 105477 - RNA, 23 nt, synthetic construct
  source 1..23: mol_type = other RNA
ttcccgcacaggccgcagaccct

SEQ ID NO: 105478 - RNA, 23 nt, synthetic construct
  source 1..23: mol_type = other RNA
tttggccgtgcaggggtccttgg

SEQ ID NO: 105479 - RNA, 23 nt, synthetic construct
  source 1..23: mol_type = other RNA
tgaaggggttggccgtgcagggg

SEQ ID NO: 105480 - RNA, 23 nt, synthetic construct
  source 1..23: mol_type = other RNA
tccaggacttgcggaaggggttg

SEQ ID NO: 105481 - RNA, 23 nt, synthetic construct
  source 1..23: mol_type = other RNA
tcccaggacttgcggaaggggtt

SEQ ID NO: 105482 - RNA, 23 nt, synthetic construct
  source 1..23: mol_type = other RNA
tgcccaggacttgcggaaggggt

SEQ ID NO: 105483 - RNA, 23 nt, synthetic construct
  source 1..23: mol_type = other RNA
tggcccaggacttgcggaagggg

SEQ ID NO: 105484 - RNA, 23 nt, synthetic construct
  source 1..23: mol_type = other RNA
tgcactgcttctgggcccaggac

SEQ ID NO: 105485 - RNA, 23 nt, synthetic construct
  source 1..23: mol_type = other RNA
ttggaggatgctgcactgcttct

SEQ ID NO: 105486 - RNA, 23 nt, synthetic construct
  source 1..23: mol_type = other RNA
tccgccaggacacacacaggccc

SEQ ID NO: 105487 - RNA, 23 nt, synthetic construct
  source 1..23: mol_type = other RNA
ttccgccaggacacacacaggcc

SEQ ID NO: 105488 - RNA, 23 nt, synthetic construct
  source 1..23: mol_type = other RNA
tgtccgccaggacacacacaggc

SEQ ID NO: 105489 - RNA, 23 nt, synthetic construct
  source 1..23: mol_type = other RNA
tgcaggtccaccaggcagtgccc

SEQ ID NO: 105490 - RNA, 23 nt, synthetic construct
  source 1..23: mol_type = other RNA
ttagcagccttccaggccaggca

SEQ ID NO: 105491 - RNA, 23 nt, synthetic construct
  source 1..23: mol_type = other RNA
tgtagcagccttccaggccaggc

SEQ ID NO: 105492 - RNA, 23 nt, synthetic construct
  source 1..23: mol_type = other RNA
tgggtagcagccttccaggccag

SEQ ID NO: 105493 - RNA, 23 nt, synthetic construct
  source 1..23: mol_type = other RNA
taagggctggctgggtgggcact

SEQ ID NO: 105494 - RNA, 23 nt, synthetic construct
  source 1..23: mol_type = other RNA
tccctgggctggaggagggggtg

SEQ ID NO: 105495 - RNA, 23 nt, synthetic construct
  source 1..23: mol_type = other RNA
tccctgggctggaggagggggtg

SEQ ID NO: 105496 - RNA, 23 nt, synthetic construct
  source 1..23: mol_type = other RNA
tccctgggctggaggagggggtg

SEQ ID NO: 105497 - RNA, 23 nt, synthetic construct
  source 1..23: mol_type = other RNA
tccctgggctggaggagggggtg

SEQ ID NO: 105498 - RNA, 23 nt, synthetic construct
  source 1..23: mol_type = other RNA
tccctgggctggaggagggggtg

SEQ ID NO: 105499 - RNA, 23 nt, synthetic construct
  source 1..23: mol_type = other RNA
tcaggggcaggggagggcgagga

SEQ ID NO: 105500 - RNA, 23 nt, synthetic construct
  source 1..23: mol_type = other RNA
tgttctccagggtccaggtctca

SEQ ID NO: 105501 - RNA, 23 nt, synthetic construct
  source 1..23: mol_type = other RNA
tagggcagccgggcctggaagac

SEQ ID NO: 105502 - RNA, 23 nt, synthetic construct
  source 1..23: mol_type = other RNA
tcacaggagtagcagcagccggt

SEQ ID NO: 105503 - RNA, 23 nt, synthetic construct
  source 1..23: mol_type = other RNA
tccagctgcaccagcagctgcag

SEQ ID NO: 105504 - RNA, 23 nt, synthetic construct
  source 1..23: mol_type = other RNA
tagggctggctgggtgggcactt

SEQ ID NO: 105505 - RNA, 23 nt, synthetic construct
  source 1..23: mol_type = other RNA
tcctcctgctcccagttcctgca

SEQ ID NO: 105506 - RNA, 23 nt, synthetic construct
  source 1..23: mol_type = other RNA
tgaagggctggctgggtgggcac

SEQ ID NO: 105507 - RNA, 23 nt, synthetic construct
  source 1..23: mol_type = other RNA
tctgggctgggttgagcagaggg

SEQ ID NO: 105508 - RNA, 23 nt, synthetic construct
  source 1..23: mol_type = other RNA
tgctctgtgaggatccaggtggt

SEQ ID NO: 105509 - RNA, 23 nt, synthetic construct
  source 1..23: mol_type = other RNA
tgctctgtgaggatccaggtggt

SEQ ID NO: 105510 - RNA, 23 nt, synthetic construct
  source 1..23: mol_type = other RNA
tgctctgtgaggatccaggtggt

SEQ ID NO: 105511 - RNA, 23 nt, synthetic construct
  source 1..23: mol_type = other RNA
tgctctgtgaggatccaggtggt

SEQ ID NO: 105512 - RNA, 23 nt, synthetic construct
  source 1..23: mol_type = other RNA
tgctctgtgaggatccaggtggt

SEQ ID NO: 105513 - RNA, 23 nt, synthetic construct
  source 1..23: mol_type = other RNA
tttgttcacgcaggtgacgttgg

SEQ ID NO: 105514 - RNA, 23 nt, synthetic construct
  source 1..23: mol_type = other RNA
tatttgcaaaactgggctgggtt

SEQ ID NO: 105515 - RNA, 23 nt, synthetic construct
  source 1..23: mol_type = other RNA
tgcaaaactgggctgggttgagc

SEQ ID NO: 105516 - RNA, 23 nt, synthetic construct
  source 1..23: mol_type = other RNA
tcggcccggggcctggtcacggt

SEQ ID NO: 105517 - RNA, 23 nt, synthetic construct
  source 1..23: mol_type = other RNA
ttggtggctgtgggtgtggtggc

SEQ ID NO: 105518 - RNA, 23 nt, synthetic construct
  source 1..23: mol_type = other RNA
ttggtggctgtgggtgtggtggc

SEQ ID NO: 105519 - RNA, 23 nt, synthetic construct
  source 1..23: mol_type = other RNA
tggggcttgcactgcaccgacac

SEQ ID NO: 105520 - RNA, 23 nt, synthetic construct
  source 1..23: mol_type = other RNA
tcacagtggacacgctgaaggtt

SEQ ID NO: 105521 - RNA, 23 nt, synthetic construct
  source 1..23: mol_type = other RNA
tgaactggtggctgtgggtgtgg

SEQ ID NO: 105522 - RNA, 23 nt, synthetic construct
  source 1..23: mol_type = other RNA
tgaactggtggctgtgggtgtgg

SEQ ID NO: 105523 - RNA, 23 nt, synthetic construct
  source 1..23: mol_type = other RNA
tctttggaactggtggctgtggg

SEQ ID NO: 105524 - RNA, 23 nt, synthetic construct
  source 1..23: mol_type = other RNA
tctttggaactggtggctgtggg

SEQ ID NO: 105525 - RNA, 23 nt, synthetic construct
  source 1..23: mol_type = other RNA
tcctgctggcccctcacccttct

SEQ ID NO: 105526 - RNA, 23 nt, synthetic construct
  source 1..23: mol_type = other RNA
tggagtggaggagggtgtggctg

SEQ ID NO: 105527 - RNA, 23 nt, synthetic construct
  source 1..23: mol_type = other RNA
tggagtggaggagggtgtggctg

SEQ ID NO: 105528 - RNA, 23 nt, synthetic construct
  source 1..23: mol_type = other RNA
tggagtggaggagggtgtggctg

SEQ ID NO: 105529 - RNA, 23 nt, synthetic construct
  source 1..23: mol_type = other RNA
tggagtggaggagggtgtggctg

SEQ ID NO: 105530 - RNA, 23 nt, synthetic construct
  source 1..23: mol_type = other RNA
tctggctccaggtggacagagca

SEQ ID NO: 105531 - RNA, 23 nt, synthetic construct
  source 1..23: mol_type = other RNA
tctttggtgggtgggcaggtgag

SEQ ID NO: 105532 - RNA, 23 nt, synthetic construct
  source 1..23: mol_type = other RNA
tcggaggcactcggccccagggg

SEQ ID NO: 105533 - RNA, 23 nt, synthetic construct
  source 1..23: mol_type = other RNA
tccggaggcactcggccccaggg

SEQ ID NO: 105534 - RNA, 23 nt, synthetic construct
  source 1..23: mol_type = other RNA
ttggtggtggtggtggccgtctc

SEQ ID NO: 105535 - RNA, 23 nt, synthetic construct
  source 1..23: mol_type = other RNA
tgtggtggtggtggtggccgtct

SEQ ID NO: 105536 - RNA, 23 nt, synthetic construct
  source 1..23: mol_type = other RNA
ttggcagttctccgctgtgggga

SEQ ID NO: 105537 - RNA, 23 nt, synthetic construct
  source 1..23: mol_type = other RNA
tgtcgaaggtcttgtagtggaag

SEQ ID NO: 105538 - RNA, 23 nt, synthetic construct
  source 1..23: mol_type = other RNA
tctgcaggtgacgtcggcctcac

SEQ ID NO: 105539 - RNA, 23 nt, synthetic construct
  source 1..23: mol_type = other RNA
tcccctgggccttgatgacaaca

SEQ ID NO: 105540 - RNA, 23 nt, synthetic construct
  source 1..23: mol_type = other RNA
ttggccccagttgtggtggccgt

SEQ ID NO: 105541 - RNA, 23 nt, synthetic construct
  source 1..23: mol_type = other RNA
tctgcagagaggctcccaggcag

SEQ ID NO: 105542 - RNA, 23 nt, synthetic construct
  source 1..23: mol_type = other RNA
tctctggcagttctccgctgtgg

SEQ ID NO: 105543 - RNA, 23 nt, synthetic construct
  source 1..23: mol_type = other RNA
tggaaggtgggacagcagtcgcc

SEQ ID NO: 105544 - RNA, 23 nt, synthetic construct
  source 1..23: mol_type = other RNA
tgtggtggccgtggtggtaagca

SEQ ID NO: 105545 - RNA, 23 nt, synthetic construct
  source 1..23: mol_type = other RNA
tgtggtggccgtggtggtaagca

SEQ ID NO: 105546 - RNA, 23 nt, synthetic construct
  source 1..23: mol_type = other RNA
tgctggacagggctggagtcgag

SEQ ID NO: 105547 - RNA, 23 nt, synthetic construct
  source 1..23: mol_type = other RNA
tggctggacagggctggagtcga

SEQ ID NO: 105548 - RNA, 23 nt, synthetic construct
  source 1..23: mol_type = other RNA
tgctggacagggctggagtcgag

SEQ ID NO: 105549 - RNA, 23 nt, synthetic construct
  source 1..23: mol_type = other RNA
tggctggacagggctggagtcga

SEQ ID NO: 105550 - RNA, 23 nt, synthetic construct
  source 1..23: mol_type = other RNA
tgctggacagggctggagtcgag

SEQ ID NO: 105551 - RNA, 23 nt, synthetic construct
  source 1..23: mol_type = other RNA
tggctggacagggctggagtcga

SEQ ID NO: 105552 - RNA, 23 nt, synthetic construct
  source 1..23: mol_type = other RNA
tgtggaggatgctgcactgcttc

SEQ ID NO: 105553 - RNA, 23 nt, synthetic construct
  source 1..23: mol_type = other RNA
tagggctggacagggctggagtc

SEQ ID NO: 105554 - RNA, 23 nt, synthetic construct
  source 1..23: mol_type = other RNA
tagggctggacagggctggagtc

SEQ ID NO: 105555 - RNA, 23 nt, synthetic construct
  source 1..23: mol_type = other RNA
tagggctggacagggctggagtc

SEQ ID NO: 105556 - RNA, 23 nt, synthetic construct
  source 1..23: mol_type = other RNA
tgggctggacagggctggagtcg

SEQ ID NO: 105557 - RNA, 23 nt, synthetic construct
  source 1..23: mol_type = other RNA
tgggctggacagggctggagtcg

SEQ ID NO: 105558 - RNA, 23 nt, synthetic construct
  source 1..23: mol_type = other RNA
tgggctggacagggctggagtcg

SEQ ID NO: 105559 - RNA, 23 nt, synthetic construct
  source 1..23: mol_type = other RNA
tctggacagggctggagtcgagt

SEQ ID NO: 105560 - RNA, 23 nt, synthetic construct
  source 1..23: mol_type = other RNA
tggaagaggggatggctgtaacg

SEQ ID NO: 105561 - RNA, 23 nt, synthetic construct
  source 1..23: mol_type = other RNA
tctggacagggctggagtcgagt

SEQ ID NO: 105562 - RNA, 23 nt, synthetic construct
  source 1..23: mol_type = other RNA
tctggacagggctggagtcgagt

SEQ ID NO: 105563 - RNA, 23 nt, synthetic construct
  source 1..23: mol_type = other RNA
tgaaggtcttgtagtggaagtca

SEQ ID NO: 105564 - RNA, 23 nt, synthetic construct
  source 1..23: mol_type = other RNA
tggcagttctccgctgtggggac

SEQ ID NO: 105565 - RNA, 23 nt, synthetic construct
  source 1..23: mol_type = other RNA
tggcaggtccgggggcagagctc

SEQ ID NO: 105566 - RNA, 23 nt, synthetic construct
  source 1..23: mol_type = other RNA
tgtcagtgatgggggagtaccac

SEQ ID NO: 105567 - RNA, 23 nt, synthetic construct
  source 1..23: mol_type = other RNA
tgtcagtgatgggggagtaccac

SEQ ID NO: 105568 - RNA, 23 nt, synthetic construct
  source 1..23: mol_type = other RNA
tgtcagtgatgggggagtaccac

SEQ ID NO: 105569 - RNA, 23 nt, synthetic construct
  source 1..23: mol_type = other RNA
tgtcagtgatgggggagtaccac

SEQ ID NO: 105570 - RNA, 23 nt, synthetic construct
  source 1..23: mol_type = other RNA
ttgctgaccttgatgtagtcccc

SEQ ID NO: 105571 - RNA, 23 nt, synthetic construct
  source 1..23: mol_type = other RNA
tatggctgtaacgctggtagctg

SEQ ID NO: 105572 - RNA, 23 nt, synthetic construct
  source 1..23: mol_type = other RNA
taaggtgatgttgacctcggtct

SEQ ID NO: 105573 - RNA, 23 nt, synthetic construct
  source 1..23: mol_type = other RNA
tggaagacgtcgccgtcgaaggt

SEQ ID NO: 105574 - RNA, 23 nt, synthetic construct
  source 1..23: mol_type = other RNA
tcagggtttatttgcaaaactgg

SEQ ID NO: 105575 - RNA, 23 nt, synthetic construct
  source 1..23: mol_type = other RNA
ttggggacaggtagtattgttgc

SEQ ID NO: 105576 - RNA, 23 nt, synthetic construct
  source 1..23: mol_type = other RNA
tacatcctggctccaggtggaca

SEQ ID NO: 105577 - RNA, 23 nt, synthetic construct
  source 1..23: mol_type = other RNA
tctgagctggacccagtctgcga

SEQ ID NO: 105578 - RNA, 23 nt, synthetic construct
  source 1..23: mol_type = other RNA
tgtgtgggtggtccctagggcag

SEQ ID NO: 105579 - RNA, 23 nt, synthetic construct
  source 1..23: mol_type = other RNA
tgtgtgggtggtccctagggcag

SEQ ID NO: 105580 - RNA, 23 nt, synthetic construct
  source 1..23: mol_type = other RNA
tgtgtgggtggtccctagggcag

SEQ ID NO: 105581 - RNA, 23 nt, synthetic construct
  source 1..23: mol_type = other RNA
tgtgtgggtggtccctagggcag

SEQ ID NO: 105582 - RNA, 23 nt, synthetic construct
  source 1..23: mol_type = other RNA
tgtggtgaaggtgaatggcgttg

SEQ ID NO: 105583 - RNA, 23 nt, synthetic construct
  source 1..23: mol_type = other RNA
tctggagaagggagtggctttgg

SEQ ID NO: 105584 - RNA, 23 nt, synthetic construct
  source 1..23: mol_type = other RNA
tctggagaagggagtggctttgg

SEQ ID NO: 105585 - RNA, 23 nt, synthetic construct
  source 1..23: mol_type = other RNA
tgcagctcagccagcacggtgaa

SEQ ID NO: 105586 - RNA, 23 nt, synthetic construct
  source 1..23: mol_type = other RNA
tttctcagtgctggaagggcggt

SEQ ID NO: 105587 - RNA, 23 nt, synthetic construct
  source 1..23: mol_type = other RNA
tttctcagtgctggaagggcggt

SEQ ID NO: 105588 - RNA, 23 nt, synthetic construct
  source 1..23: mol_type = other RNA
tttctcagtgctggaagggcggt

SEQ ID NO: 105589 - RNA, 23 nt, synthetic construct
  source 1..23: mol_type = other RNA
tttctcagtgctggaagggcggt

SEQ ID NO: 105590 - RNA, 23 nt, synthetic construct
  source 1..23: mol_type = other RNA
tgccgggctggtcagcactttgg

SEQ ID NO: 105591 - RNA, 23 nt, synthetic construct
  source 1..23: mol_type = other RNA
tttctcagtgctggaagggcagt

SEQ ID NO: 105592 - RNA, 23 nt, synthetic construct
  source 1..23: mol_type = other RNA
tgtgcggtggcagatgccctcct

SEQ ID NO: 105593 - RNA, 23 nt, synthetic construct
  source 1..23: mol_type = other RNA
tcctgatggtctctccaggcttg

SEQ ID NO: 105594 - RNA, 23 nt, synthetic construct
  source 1..23: mol_type = other RNA
tggcagggcacctcaaggcggcc

SEQ ID NO: 105595 - RNA, 23 nt, synthetic construct
  source 1..23: mol_type = other RNA
tggcgaaggtggggccgtggagg

SEQ ID NO: 105596 - RNA, 23 nt, synthetic construct
  source 1..23: mol_type = other RNA
taccgggagggccgggcttgtcg

SEQ ID NO: 105597 - RNA, 23 nt, synthetic construct
  source 1..23: mol_type = other RNA
ttcagggcagaagcagccctccg

SEQ ID NO: 105598 - RNA, 23 nt, synthetic construct
  source 1..23: mol_type = other RNA
tccctgggtctctgcctgcggca

SEQ ID NO: 105599 - RNA, 23 nt, synthetic construct
  source 1..23: mol_type = other RNA
tcagctcagccagcacggtgaag

SEQ ID NO: 105600 - RNA, 23 nt, synthetic construct
  source 1..23: mol_type = other RNA
tagacgccgtccctccagtcgct

SEQ ID NO: 105601 - RNA, 23 nt, synthetic construct
  source 1..23: mol_type = other RNA
tgcagacgccgtccctccagtcg

SEQ ID NO: 105602 - RNA, 23 nt, synthetic construct
  source 1..23: mol_type = other RNA
tcaccatgggggctgcacaccct

SEQ ID NO: 105603 - RNA, 23 nt, synthetic construct
  source 1..23: mol_type = other RNA
tgctgttcccaaactccagtgcg

SEQ ID NO: 105604 - RNA, 23 nt, synthetic construct
  source 1..23: mol_type = other RNA
tggttgcagtccctggactggag

SEQ ID NO: 105605 - RNA, 23 nt, synthetic construct
  source 1..23: mol_type = other RNA
tctgtgcttctcagtgctggaag

SEQ ID NO: 105606 - RNA, 23 nt, synthetic construct
  source 1..23: mol_type = other RNA
tggtggtgcccagggaggaagag

SEQ ID NO: 105607 - RNA, 23 nt, synthetic construct
  source 1..23: mol_type = other RNA
taagtccaggctgtgcgcaccgt

SEQ ID NO: 105608 - RNA, 23 nt, synthetic construct
  source 1..23: mol_type = other RNA
tgctctgtgaggatccaggtcgt

SEQ ID NO: 105609 - RNA, 23 nt, synthetic construct
  source 1..23: mol_type = other RNA
tagctctgtgaggatccaggtcg

SEQ ID NO: 105610 - RNA, 23 nt, synthetic construct
  source 1..23: mol_type = other RNA
tggttgcagtccctggactggag

SEQ ID NO: 105611 - RNA, 23 nt, synthetic construct
  source 1..23: mol_type = other RNA
tctgtgcttctcagtgctggaag

SEQ ID NO: 105612 - RNA, 23 nt, synthetic construct
  source 1..23: mol_type = other RNA
taagtccaggctgtgcgcaccgt

SEQ ID NO: 105613 - RNA, 23 nt, synthetic construct
  source 1..23: mol_type = other RNA
tgctctgtgaggatccaggtcgt

SEQ ID NO: 105614 - RNA, 23 nt, synthetic construct
  source 1..23: mol_type = other RNA
tgctctgtgaggatccaggtcgt

SEQ ID NO: 105615 - RNA, 23 nt, synthetic construct
  source 1..23: mol_type = other RNA
tagctctgtgaggatccaggtcg

SEQ ID NO: 105616 - RNA, 23 nt, synthetic construct
  source 1..23: mol_type = other RNA
tggttgcagtccctggactggag

SEQ ID NO: 105617 - RNA, 23 nt, synthetic construct
  source 1..23: mol_type = other RNA
tctgtgcttctcagtgctggaag

SEQ ID NO: 105618 - RNA, 23 nt, synthetic construct
  source 1..23: mol_type = other RNA
taagtccaggctgtgcgcaccgt

SEQ ID NO: 105619 - RNA, 23 nt, synthetic construct
  source 1..23: mol_type = other RNA
tggttgcagtccctggactggag

SEQ ID NO: 105620 - RNA, 23 nt, synthetic construct
  source 1..23: mol_type = other RNA
tctgtgcttctcagtgctggaag

SEQ ID NO: 105621 - RNA, 23 nt, synthetic construct
  source 1..23: mol_type = other RNA
taagtccaggctgtgcgcaccgt

SEQ ID NO: 105622 - RNA, 23 nt, synthetic construct
  source 1..23: mol_type = other RNA
tgctctgtgaggatccaggtcgt

SEQ ID NO: 105623 - RNA, 23 nt, synthetic construct
  source 1..23: mol_type = other RNA
tagctctgtgaggatccaggtcg

SEQ ID NO: 105624 - RNA, 23 nt, synthetic construct
  source 1..23: mol_type = other RNA
tgctctgtgaggatccaggtcgt

SEQ ID NO: 105625 - RNA, 23 nt, synthetic construct
  source 1..23: mol_type = other RNA
tagctctgtgaggatccaggtcg

SEQ ID NO: 105626 - RNA, 23 nt, synthetic construct
  source 1..23: mol_type = other RNA
tgctctgtgaggatccaggtggt

SEQ ID NO: 105627 - RNA, 23 nt, synthetic construct
  source 1..23: mol_type = other RNA
tagctctgtgaggatccaggtgg

SEQ ID NO: 105628 - RNA, 23 nt, synthetic construct
  source 1..23: mol_type = other RNA
tctgtgcttctcagtgctggaag

SEQ ID NO: 105629 - RNA, 23 nt, synthetic construct
  source 1..23: mol_type = other RNA
tcatggatctctctcatgaggac

SEQ ID NO: 105630 - RNA, 23 nt, synthetic construct
  source 1..23: mol_type = other RNA
tcagtgctggaagggcggttgca

SEQ ID NO: 105631 - RNA, 23 nt, synthetic construct
  source 1..23: mol_type = other RNA
tcagtgctggaagggcggttgca

SEQ ID NO: 105632 - RNA, 23 nt, synthetic construct
  source 1..23: mol_type = other RNA
tcagtgctggaagggcggttgca

SEQ ID NO: 105633 - RNA, 23 nt, synthetic construct
  source 1..23: mol_type = other RNA
tcagtgctggaagggcggttgca

SEQ ID NO: 105634 - RNA, 23 nt, synthetic construct
  source 1..23: mol_type = other RNA
tattgcacactgcgtagaaatgg

SEQ ID NO: 105635 - RNA, 23 nt, synthetic construct
  source 1..23: mol_type = other RNA
tgaggggatgggtgtaaagctgg

SEQ ID NO: 105636 - RNA, 23 nt, synthetic construct
  source 1..23: mol_type = other RNA
tgaggggatgggtgtaaagctgg

SEQ ID NO: 105637 - RNA, 23 nt, synthetic construct
  source 1..23: mol_type = other RNA
tggcagtggctgtgggcatagtg

SEQ ID NO: 105638 - RNA, 23 nt, synthetic construct
  source 1..23: mol_type = other RNA
taggggcactcctgggcgggcac

SEQ ID NO: 105639 - RNA, 23 nt, synthetic construct
  source 1..23: mol_type = other RNA
tcgaggacgtcggggcaccgcca

SEQ ID NO: 105640 - RNA, 23 nt, synthetic construct
  source 1..23: mol_type = other RNA
taaggtgacgctcacgcccaggg

SEQ ID NO: 105641 - RNA, 23 nt, synthetic construct
  source 1..23: mol_type = other RNA
tgaccctgatggtctctccaggc

SEQ ID NO: 105642 - RNA, 23 nt, synthetic construct
  source 1..23: mol_type = other RNA
ttgtgcgttgaagaggatctggt

SEQ ID NO: 105643 - RNA, 23 nt, synthetic construct
  source 1..23: mol_type = other RNA
tttgttccagggcgtcccagtga

SEQ ID NO: 105644 - RNA, 23 nt, synthetic construct
  source 1..23: mol_type = other RNA
tcagtgcgtggcactccgcaaag

SEQ ID NO: 105645 - RNA, 23 nt, synthetic construct
  source 1..23: mol_type = other RNA
tctcacagcccccatgtgggttg

SEQ ID NO: 105646 - RNA, 23 nt, synthetic construct
  source 1..23: mol_type = other RNA
ttcacagtgctgattgcacactg

SEQ ID NO: 105647 - RNA, 23 nt, synthetic construct
  source 1..23: mol_type = other RNA
ttgctgatccacactggaagcgt

SEQ ID NO: 105648 - RNA, 23 nt, synthetic construct
  source 1..23: mol_type = other RNA
tgcagcagggtcgaggtgcgggt

SEQ ID NO: 105649 - RNA, 23 nt, synthetic construct
  source 1..23: mol_type = other RNA
ttccagtggactcagtcgtagtg

SEQ ID NO: 105650 - RNA, 23 nt, synthetic construct
  source 1..23: mol_type = other RNA
tgcagcagggtcgaggtgcgggt

SEQ ID NO: 105651 - RNA, 23 nt, synthetic construct
  source 1..23: mol_type = other RNA
tgcagcagggtcgaggtgcgggt

SEQ ID NO: 105652 - RNA, 23 nt, synthetic construct
  source 1..23: mol_type = other RNA
ttccagtggactcagtcgtagtg

SEQ ID NO: 105653 - RNA, 23 nt, synthetic construct
  source 1..23: mol_type = other RNA
tgcagcagggtcgaggtgcgggt

SEQ ID NO: 105654 - RNA, 23 nt, synthetic construct
  source 1..23: mol_type = other RNA
tgaccctgggcgtcacagggcag

SEQ ID NO: 105655 - RNA, 23 nt, synthetic construct
  source 1..23: mol_type = other RNA
tcctgctgctagggtgagggctg

SEQ ID NO: 105656 - RNA, 23 nt, synthetic construct
  source 1..23: mol_type = other RNA
tcctgctgctagggtgagggctg

SEQ ID NO: 105657 - RNA, 23 nt, synthetic construct
  source 1..23: mol_type = other RNA
ttcacagcccgtggtcaccaccg

SEQ ID NO: 105658 - RNA, 23 nt, synthetic construct
  source 1..23: mol_type = other RNA
tcctgctgctagggtgagggctg

SEQ ID NO: 105659 - RNA, 23 nt, synthetic construct
  source 1..23: mol_type = other RNA
ttcacagcccgtggtcaccaccg

SEQ ID NO: 105660 - RNA, 23 nt, synthetic construct
  source 1..23: mol_type = other RNA
tagtgcaagggcaccgtctcctc

SEQ ID NO: 105661 - RNA, 23 nt, synthetic construct
  source 1..23: mol_type = other RNA
tcagtgcaagggcaccgtctcct

SEQ ID NO: 105662 - RNA, 23 nt, synthetic construct
  source 1..23: mol_type = other RNA
ttgccctcctcgtccgtgcagtt

SEQ ID NO: 105663 - RNA, 23 nt, synthetic construct
  source 1..23: mol_type = other RNA
tcagtagtcctgggccaagatgt

SEQ ID NO: 105664 - RNA, 23 nt, synthetic construct
  source 1..23: mol_type = other RNA
tggacggggtggccgtggatcca

SEQ ID NO: 105665 - RNA, 23 nt, synthetic construct
  source 1..23: mol_type = other RNA
tggacggggtggccgtggatcca

SEQ ID NO: 105666 - RNA, 23 nt, synthetic construct
  source 1..23: mol_type = other RNA
tggacggggtggccgtggatcca

SEQ ID NO: 105667 - RNA, 23 nt, synthetic construct
  source 1..23: mol_type = other RNA
tggacggggtggccgtggatcca

SEQ ID NO: 105668 - RNA, 23 nt, synthetic construct
  source 1..23: mol_type = other RNA
taccctgatggtctctccaggct

SEQ ID NO: 105669 - RNA, 23 nt, synthetic construct
  source 1..23: mol_type = other RNA
tcccctggtgtggcccggggtgg

SEQ ID NO: 105670 - RNA, 23 nt, synthetic construct
  source 1..23: mol_type = other RNA
tctttggtagtgtgagctgttcc

SEQ ID NO: 105671 - RNA, 23 nt, synthetic construct
  source 1..23: mol_type = other RNA
tctttggtagtgtgagctgttcc

SEQ ID NO: 105672 - RNA, 23 nt, synthetic construct
  source 1..23: mol_type = other RNA
tctttggtagtgtgagctgttcc

SEQ ID NO: 105673 - RNA, 23 nt, synthetic construct
  source 1..23: mol_type = other RNA
tctttggtagtgtgagctgttcc

SEQ ID NO: 105674 - RNA, 23 nt, synthetic construct
  source 1..23: mol_type = other RNA
tctttggtagtgtgagctgttcc

SEQ ID NO: 105675 - RNA, 23 nt, synthetic construct
  source 1..23: mol_type = other RNA
ttcacagagcggctgtggtgggc

SEQ ID NO: 105676 - RNA, 23 nt, synthetic construct
  source 1..23: mol_type = other RNA
tgggtctcagggtggtgaggact

SEQ ID NO: 105677 - RNA, 23 nt, synthetic construct
  source 1..23: mol_type = other RNA
ttgctgacccaccgctccccggg

SEQ ID NO: 105678 - RNA, 23 nt, synthetic construct
  source 1..23: mol_type = other RNA
ttcacagacggcccctccggccg

SEQ ID NO: 105679 - RNA, 23 nt, synthetic construct
  source 1..23: mol_type = other RNA
ttcacagacggcccctccggccg

SEQ ID NO: 105680 - RNA, 23 nt, synthetic construct
  source 1..23: mol_type = other RNA
ttcacagacggcccctccggccg

SEQ ID NO: 105681 - RNA, 23 nt, synthetic construct
  source 1..23: mol_type = other RNA
tgcagcaggagcacggagcgcgg

SEQ ID NO: 105682 - RNA, 23 nt, synthetic construct
  source 1..23: mol_type = other RNA
tcacagtggtcctcgcagagctg

SEQ ID NO: 105683 - RNA, 23 nt, synthetic construct
  source 1..23: mol_type = other RNA
tagctgcaggtggtgttgaagga

SEQ ID NO: 105684 - RNA, 23 nt, synthetic construct
  source 1..23: mol_type = other RNA
ttcacagcccatggtcaccaccg

SEQ ID NO: 105685 - RNA, 23 nt, synthetic construct
  source 1..23: mol_type = other RNA
ttcacagcccatggtcaccaccg

SEQ ID NO: 105686 - RNA, 23 nt, synthetic construct
  source 1..23: mol_type = other RNA
tgagggggctttgggatgctgac

SEQ ID NO: 105687 - RNA, 23 nt, synthetic construct
  source 1..23: mol_type = other RNA
tcacagtagtcctgggccaagat

SEQ ID NO: 105688 - RNA, 23 nt, synthetic construct
  source 1..23: mol_type = other RNA
tcagtgcgtcccccaccacggac

SEQ ID NO: 105689 - RNA, 23 nt, synthetic construct
  source 1..23: mol_type = other RNA
tgcagcagaggacccggatcctg

SEQ ID NO: 105690 - RNA, 23 nt, synthetic construct
  source 1..23: mol_type = other RNA
tctgcagtggtcgtcactgcagc

SEQ ID NO: 105691 - RNA, 23 nt, synthetic construct
  source 1..23: mol_type = other RNA
taggtagaggctgagattcccaa

SEQ ID NO: 105692 - RNA, 23 nt, synthetic construct
  source 1..23: mol_type = other RNA
ttgctgagggcgcgggggcagcg

SEQ ID NO: 105693 - RNA, 23 nt, synthetic construct
  source 1..23: mol_type = other RNA
tgcggaagacgtcgccgtcgaag

SEQ ID NO: 105694 - RNA, 23 nt, synthetic construct
  source 1..23: mol_type = other RNA
tggagtgggggacccaggcggtg

SEQ ID NO: 105695 - RNA, 23 nt, synthetic construct
  source 1..23: mol_type = other RNA
tcagcagttgcctgggtggagga

SEQ ID NO: 105696 - RNA, 23 nt, synthetic construct
  source 1..23: mol_type = other RNA
tccaggggctgctcacagactgc

SEQ ID NO: 105697 - RNA, 23 nt, synthetic construct
  source 1..23: mol_type = other RNA
tcagcagttgcctgggtggagga

SEQ ID NO: 105698 - RNA, 23 nt, synthetic construct
  source 1..23: mol_type = other RNA
tcagcagttgcctgggtggagga

SEQ ID NO: 105699 - RNA, 23 nt, synthetic construct
  source 1..23: mol_type = other RNA
tctggactggctggccatcgggc

SEQ ID NO: 105700 - RNA, 23 nt, synthetic construct
  source 1..23: mol_type = other RNA
tgtgctgcacacccgcccattgt

SEQ ID NO: 105701 - RNA, 23 nt, synthetic construct
  source 1..23: mol_type = other RNA
tcggaagacgtcgccgtcgaagg

SEQ ID NO: 105702 - RNA, 23 nt, synthetic construct
  source 1..23: mol_type = other RNA
taagacgtcgccgtcgaaggtct

SEQ ID NO: 105703 - RNA, 23 nt, synthetic construct
  source 1..23: mol_type = other RNA
tgaagacgtcgccgtcgaaggtc

SEQ ID NO: 105704 - RNA, 23 nt, synthetic construct
  source 1..23: mol_type = other RNA
ttgcgggtggtccccacggtgga

SEQ ID NO: 105705 - RNA, 23 nt, synthetic construct
  source 1..23: mol_type = other RNA
tttgcaggtgtcaaacatgcagt

SEQ ID NO: 105706 - RNA, 23 nt, synthetic construct
  source 1..23: mol_type = other RNA
tgttgcaggtgtcaaacatgcag

SEQ ID NO: 105707 - RNA, 23 nt, synthetic construct
  source 1..23: mol_type = other RNA
tgtccacaggcacgaaggaaacg

SEQ ID NO: 105708 - RNA, 23 nt, synthetic construct
  source 1..23: mol_type = other RNA
tccctgatggtctctccaggctt

SEQ ID NO: 105709 - RNA, 23 nt, synthetic construct
  source 1..23: mol_type = other RNA
tagcttccagctgttcccaaact

SEQ ID NO: 105710 - RNA, 23 nt, synthetic construct
  source 1..23: mol_type = other RNA
tccgtgcaggggtccttgggtgc

SEQ ID NO: 105711 - RNA, 23 nt, synthetic construct
  source 1..23: mol_type = other RNA
tgccgtgcaggggtccttgggtg

SEQ ID NO: 105712 - RNA, 23 nt, synthetic construct
  source 1..23: mol_type = other RNA
tggctcacagcccatggtcacca

SEQ ID NO: 105713 - RNA, 23 nt, synthetic construct
  source 1..23: mol_type = other RNA
ttgttggagtaggtgtcaaagtc

SEQ ID NO: 105714 - RNA, 23 nt, synthetic construct
  source 1..23: mol_type = other RNA
tccagcagttgcctgggtggagg

SEQ ID NO: 105715 - RNA, 23 nt, synthetic construct
  source 1..23: mol_type = other RNA
tggctcacagcccatggtcacca

SEQ ID NO: 105716 - RNA, 23 nt, synthetic construct
  source 1..23: mol_type = other RNA
ttgttggagtaggtgtcaaagtc

SEQ ID NO: 105717 - RNA, 23 nt, synthetic construct
  source 1..23: mol_type = other RNA
ttgttggagtaggtgtcaaagtc

SEQ ID NO: 105718 - RNA, 23 nt, synthetic construct
  source 1..23: mol_type = other RNA
tccagcagttgcctgggtggagg

SEQ ID NO: 105719 - RNA, 23 nt, synthetic construct
  source 1..23: mol_type = other RNA
ttgttggagtaggtgtcaaagtc

SEQ ID NO: 105720 - RNA, 23 nt, synthetic construct
  source 1..23: mol_type = other RNA
tccagcagttgcctgggtggagg

SEQ ID NO: 105721 - RNA, 23 nt, synthetic construct
  source 1..23: mol_type = other RNA
tagggtggtgaggactgaggagg

SEQ ID NO: 105722 - RNA, 23 nt, synthetic construct
  source 1..23: mol_type = other RNA
tttggtcaaacaggatcaggccc

SEQ ID NO: 105723 - RNA, 23 nt, synthetic construct
  source 1..23: mol_type = other RNA
tggttgtggcactcagcaaagac

SEQ ID NO: 105724 - RNA, 23 nt, synthetic construct
  source 1..23: mol_type = other RNA
tcccctgcagctggacacatctg

SEQ ID NO: 105725 - RNA, 23 nt, synthetic construct
  source 1..23: mol_type = other RNA
tcggggggctccgcagaggaggc

SEQ ID NO: 105726 - RNA, 23 nt, synthetic construct
  source 1..23: mol_type = other RNA
tcgcgggcgctccggccgtggca

SEQ ID NO: 105727 - RNA, 23 nt, synthetic construct
  source 1..23: mol_type = other RNA
tcccaagggtgaaggaggggatg

SEQ ID NO: 105728 - RNA, 23 nt, synthetic construct
  source 1..23: mol_type = other RNA
tagccctggtgccacaggatggt

SEQ ID NO: 105729 - RNA, 23 nt, synthetic construct
  source 1..23: mol_type = other RNA
ttcccaagggtgaaggaggggat

SEQ ID NO: 105730 - RNA, 23 nt, synthetic construct
  source 1..23: mol_type = other RNA
tgggtgtggtggccgggctggtc

SEQ ID NO: 105731 - RNA, 23 nt, synthetic construct
  source 1..23: mol_type = other RNA
ttgggggtgtgagctgttcccag

SEQ ID NO: 105732 - RNA, 23 nt, synthetic construct
  source 1..23: mol_type = other RNA
tccctggtgccacaggatggtcg

SEQ ID NO: 105733 - RNA, 23 nt, synthetic construct
  source 1..23: mol_type = other RNA
tcacatcctggctccaggtggac

SEQ ID NO: 105734 - RNA, 23 nt, synthetic construct
  source 1..23: mol_type = other RNA
tgtgcaggggtccttgggtgcca

SEQ ID NO: 105735 - RNA, 23 nt, synthetic construct
  source 1..23: mol_type = other RNA
tcagacgccgtccctccagtcgc

SEQ ID NO: 105736 - RNA, 23 nt, synthetic construct
  source 1..23: mol_type = other RNA
tactttgggagggggagctgttc

SEQ ID NO: 105737 - RNA, 23 nt, synthetic construct
  source 1..23: mol_type = other RNA
tccacagttgtggtggtggtggt

SEQ ID NO: 105738 - RNA, 23 nt, synthetic construct
  source 1..23: mol_type = other RNA
tccacagttgtggtggtggtggt

SEQ ID NO: 105739 - RNA, 23 nt, synthetic construct
  source 1..23: mol_type = other RNA
tactttgggagggggagctgttc

SEQ ID NO: 105740 - RNA, 23 nt, synthetic construct
  source 1..23: mol_type = other RNA
tccacagttgtggtggtggtggt

SEQ ID NO: 105741 - RNA, 23 nt, synthetic construct
  source 1..23: mol_type = other RNA
ttggaggtgcccctggtgtggcc

SEQ ID NO: 105742 - RNA, 23 nt, synthetic construct
  source 1..23: mol_type = other RNA
tccacagttgtggtggtggtggt

SEQ ID NO: 105743 - RNA, 23 nt, synthetic construct
  source 1..23: mol_type = other RNA
tactttgggagggggagctgttc

SEQ ID NO: 105744 - RNA, 23 nt, synthetic construct
  source 1..23: mol_type = other RNA
tccacagttgtggtggtggtggt

SEQ ID NO: 105745 - RNA, 23 nt, synthetic construct
  source 1..23: mol_type = other RNA
tccggggggctccgcagaggagg

SEQ ID NO: 105746 - RNA, 23 nt, synthetic construct
  source 1..23: mol_type = other RNA
ttctgtggagcctgcaggcgtcg

SEQ ID NO: 105747 - RNA, 23 nt, synthetic construct
  source 1..23: mol_type = other RNA
taggacagcggggcggaggacac

SEQ ID NO: 105748 - RNA, 23 nt, synthetic construct
  source 1..23: mol_type = other RNA
ttgcacatcctggctccaggtgg

SEQ ID NO: 105749 - RNA, 23 nt, synthetic construct
  source 1..23: mol_type = other RNA
tgacacatctgggcaggatgcag

SEQ ID NO: 105750 - RNA, 23 nt, synthetic construct
  source 1..23: mol_type = other RNA
tgtcaccccaggtgctgcacacc

SEQ ID NO: 105751 - RNA, 23 nt, synthetic construct
  source 1..23: mol_type = other RNA
tgcggtgctggctgtgcctgtcg

SEQ ID NO: 105752 - RNA, 23 nt, synthetic construct
  source 1..23: mol_type = other RNA
tgcagaggagggagtcactgtgt

SEQ ID NO: 105753 - RNA, 23 nt, synthetic construct
  source 1..23: mol_type = other RNA
ttggagaagggagtggctttgga

SEQ ID NO: 105754 - RNA, 23 nt, synthetic construct
  source 1..23: mol_type = other RNA
tgcagaggagggagtcactgtgc

SEQ ID NO: 105755 - RNA, 23 nt, synthetic construct
  source 1..23: mol_type = other RNA
ttggctgctgtggtcagctctgt

SEQ ID NO: 105756 - RNA, 23 nt, synthetic construct
  source 1..23: mol_type = other RNA
tgcagaggagggagtcactgtgc

SEQ ID NO: 105757 - RNA, 23 nt, synthetic construct
  source 1..23: mol_type = other RNA
ttggagaagggagtggctttgga

SEQ ID NO: 105758 - RNA, 23 nt, synthetic construct
  source 1..23: mol_type = other RNA
tgcagaggagggagtcactgtgc

SEQ ID NO: 105759 - RNA, 23 nt, synthetic construct
  source 1..23: mol_type = other RNA
ttggctgctgtggtcagctctgt

SEQ ID NO: 105760 - RNA, 23 nt, synthetic construct
  source 1..23: mol_type = other RNA
tcagtcgccctcctcctgggtgc

SEQ ID NO: 105761 - RNA, 23 nt, synthetic construct
  source 1..23: mol_type = other RNA
tcacatctgggcaggatgcaggc

SEQ ID NO: 105762 - RNA, 23 nt, synthetic construct
  source 1..23: mol_type = other RNA
ttgtggtctgctctgtgaggatc

SEQ ID NO: 105763 - RNA, 23 nt, synthetic construct
  source 1..23: mol_type = other RNA
tgaggacagcggggcggaggaca

SEQ ID NO: 105764 - RNA, 23 nt, synthetic construct
  source 1..23: mol_type = other RNA
tgcacatcctggctccaggtgga

SEQ ID NO: 105765 - RNA, 23 nt, synthetic construct
  source 1..23: mol_type = other RNA
tcacaggcagcctgggccttcca

SEQ ID NO: 105766 - RNA, 23 nt, synthetic construct
  source 1..23: mol_type = other RNA
tgaggaagaggggatgggtgtaa

SEQ ID NO: 105767 - RNA, 23 nt, synthetic construct
  source 1..23: mol_type = other RNA
tagggtggaggaggggatgggtg

SEQ ID NO: 105768 - RNA, 23 nt, synthetic construct
  source 1..23: mol_type = other RNA
tagggtggaggaggggatgggtg

SEQ ID NO: 105769 - RNA, 23 nt, synthetic construct
  source 1..23: mol_type = other RNA
tgctgttgtggtcagctcagtga

SEQ ID NO: 105770 - RNA, 23 nt, synthetic construct
  source 1..23: mol_type = other RNA
tcctcagggcagaagcagccctc

SEQ ID NO: 105771 - RNA, 23 nt, synthetic construct
  source 1..23: mol_type = other RNA
tgccggggggctccgcagaggag

SEQ ID NO: 105772 - RNA, 23 nt, synthetic construct
  source 1..23: mol_type = other RNA
tttctcccagctcggctccacag

SEQ ID NO: 105773 - RNA, 23 nt, synthetic construct
  source 1..23: mol_type = other RNA
tggactggaggagggagtggctt

SEQ ID NO: 105774 - RNA, 23 nt, synthetic construct
  source 1..23: mol_type = other RNA
tggactggaggagggagtggctc

SEQ ID NO: 105775 - RNA, 23 nt, synthetic construct
  source 1..23: mol_type = other RNA
tggactggaggagggagtggctt

SEQ ID NO: 105776 - RNA, 23 nt, synthetic construct
  source 1..23: mol_type = other RNA
tagccatcctttctgctgtcggg

SEQ ID NO: 105777 - RNA, 23 nt, synthetic construct
  source 1..23: mol_type = other RNA
tctgcacagagcaggtgccaggg

SEQ ID NO: 105778 - RNA, 23 nt, synthetic construct
  source 1..23: mol_type = other RNA
tgatgtgggccccgccctgcaca

SEQ ID NO: 105779 - RNA, 23 nt, synthetic construct
  source 1..23: mol_type = other RNA
tagcccccactcccatccgacac

SEQ ID NO: 105780 - RNA, 23 nt, synthetic construct
  source 1..23: mol_type = other RNA
tcagctgttcccaaactccagtg

SEQ ID NO: 105781 - RNA, 23 nt, synthetic construct
  source 1..23: mol_type = other RNA
ttccagctgttcccaaactccag

SEQ ID NO: 105782 - RNA, 23 nt, synthetic construct
  source 1..23: mol_type = other RNA
tcttccagctgttcccaaactcc

SEQ ID NO: 105783 - RNA, 23 nt, synthetic construct
  source 1..23: mol_type = other RNA
tgcaggagggggagagcttccag

SEQ ID NO: 105784 - RNA, 23 nt, synthetic construct
  source 1..23: mol_type = other RNA
tgggcaggagggggagagcttcc

SEQ ID NO: 105785 - RNA, 23 nt, synthetic construct
  source 1..23: mol_type = other RNA
tggcaggcggcgaaggtggggcc

SEQ ID NO: 105786 - RNA, 23 nt, synthetic construct
  source 1..23: mol_type = other RNA
tccacagccttcctgatgatggt

SEQ ID NO: 105787 - RNA, 23 nt, synthetic construct
  source 1..23: mol_type = other RNA
tcaggggctgctcacagactgcc

SEQ ID NO: 105788 - RNA, 23 nt, synthetic construct
  source 1..23: mol_type = other RNA
tgacatggtggccacgggtgtgg

SEQ ID NO: 105789 - RNA, 23 nt, synthetic construct
  source 1..23: mol_type = other RNA
tcggggcacccatcctgggggct

SEQ ID NO: 105790 - RNA, 23 nt, synthetic construct
  source 1..23: mol_type = other RNA
tagtcaccccaggtgctgcacac

SEQ ID NO: 105791 - RNA, 23 nt, synthetic construct
  source 1..23: mol_type = other RNA
ttggacgcctccagcaccagccc

SEQ ID NO: 105792 - RNA, 23 nt, synthetic construct
  source 1..23: mol_type = other RNA
tttggacgcctccagcaccagcc

SEQ ID NO: 105793 - RNA, 23 nt, synthetic construct
  source 1..23: mol_type = other RNA
tggagcaggtgcaggagctgcag

SEQ ID NO: 105794 - RNA, 23 nt, synthetic construct
  source 1..23: mol_type = other RNA
tcacagagcaggtgccagggcac

SEQ ID NO: 105795 - RNA, 23 nt, synthetic construct
  source 1..23: mol_type = other RNA
tcctgcacagagcaggtgccagg

SEQ ID NO: 105796 - RNA, 23 nt, synthetic construct
  source 1..23: mol_type = other RNA
tgcaccagcagctgcagccccag

SEQ ID NO: 105797 - RNA, 23 nt, synthetic construct
  source 1..23: mol_type = other RNA
tggctcccaggcagcttagcttc

SEQ ID NO: 105798 - RNA, 23 nt, synthetic construct
  source 1..23: mol_type = other RNA
tgacaccagccccgggggacaga

SEQ ID NO: 105799 - RNA, 23 nt, synthetic construct
  source 1..23: mol_type = other RNA
tctgttcccaaactccagtgcgt

SEQ ID NO: 105800 - RNA, 23 nt, synthetic construct
  source 1..23: mol_type = other RNA
tagctgttcccaaactccagtgc

SEQ ID NO: 105801 - RNA, 23 nt, synthetic construct
  source 1..23: mol_type = other RNA
tccagctgttcccaaactccagt

SEQ ID NO: 105802 - RNA, 23 nt, synthetic construct
  source 1..23: mol_type = other RNA
tttccagctgttcccaaactcca

SEQ ID NO: 105803 - RNA, 23 nt, synthetic construct
  source 1..23: mol_type = other RNA
tgcttccagctgttcccaaactc

SEQ ID NO: 105804 - RNA, 23 nt, synthetic construct
  source 1..23: mol_type = other RNA
tgggggagagcttccagctgttc

SEQ ID NO: 105805 - RNA, 23 nt, synthetic construct
  source 1..23: mol_type = other RNA
tagggggagagcttccagctgtt

SEQ ID NO: 105806 - RNA, 23 nt, synthetic construct
  source 1..23: mol_type = other RNA
tggagggggagagcttccagctg

SEQ ID NO: 105807 - RNA, 23 nt, synthetic construct
  source 1..23: mol_type = other RNA
tggcaggagggggagagcttcca

SEQ ID NO: 105808 - RNA, 23 nt, synthetic construct
  source 1..23: mol_type = other RNA
tcgaaggtggggccgtggaggat

SEQ ID NO: 105809 - RNA, 23 nt, synthetic construct
  source 1..23: mol_type = other RNA
tgcgaaggtggggccgtggagga

SEQ ID NO: 105810 - RNA, 23 nt, synthetic construct
  source 1..23: mol_type = other RNA
taggcggcgaaggtggggccgtg

SEQ ID NO: 105811 - RNA, 23 nt, synthetic construct
  source 1..23: mol_type = other RNA
tcaggcggcgaaggtggggccgt

SEQ ID NO: 105812 - RNA, 23 nt, synthetic construct
  source 1..23: mol_type = other RNA
tccactcacagcccccatgtggg

SEQ ID NO: 105813 - RNA, 23 nt, synthetic construct
  source 1..23: mol_type = other RNA
tggtggtgaaggtgaatggcgtt

SEQ ID NO: 105814 - RNA, 23 nt, synthetic construct
  source 1..23: mol_type = other RNA
taggcggtggtgaaggtgaatgg

SEQ ID NO: 105815 - RNA, 23 nt, synthetic construct
  source 1..23: mol_type = other RNA
tcaggccgggctctgggcggtgc

SEQ ID NO: 105816 - RNA, 23 nt, synthetic construct
  source 1..23: mol_type = other RNA
tagtctccgcctcccaggccggg

SEQ ID NO: 105817 - RNA, 23 nt, synthetic construct
  source 1..23: mol_type = other RNA
tgggagggctgagggctggtgcc

SEQ ID NO: 105818 - RNA, 23 nt, synthetic construct
  source 1..23: mol_type = other RNA
tgagggagggctgagggctggtg

SEQ ID NO: 105819 - RNA, 23 nt, synthetic construct
  source 1..23: mol_type = other RNA
ttctgccccacctgtgccagggt

SEQ ID NO: 105820 - RNA, 23 nt, synthetic construct
  source 1..23: mol_type = other RNA
ttggccgtctccagctctgtggt

SEQ ID NO: 105821 - RNA, 23 nt, synthetic construct
  source 1..23: mol_type = other RNA
tgtggccgtctccagctctgtgg

SEQ ID NO: 105822 - RNA, 23 nt, synthetic construct
  source 1..23: mol_type = other RNA
tgggcctgggtggtggtggtggt

SEQ ID NO: 105823 - RNA, 23 nt, synthetic construct
  source 1..23: mol_type = other RNA
tgggactgctgtggtgctggccg

SEQ ID NO: 105824 - RNA, 23 nt, synthetic construct
  source 1..23: mol_type = other RNA
tgctgtgcttctcagtgctggaa

SEQ ID NO: 105825 - RNA, 23 nt, synthetic construct
  source 1..23: mol_type = other RNA
tggctgtgcttctcagtgctgga

SEQ ID NO: 105826 - RNA, 23 nt, synthetic construct
  source 1..23: mol_type = other RNA
tggaggaagaggggatgggtgta

SEQ ID NO: 105827 - RNA, 23 nt, synthetic construct
  source 1..23: mol_type = other RNA
tcccagggaggaagaggggatgg

SEQ ID NO: 105828 - RNA, 23 nt, synthetic construct
  source 1..23: mol_type = other RNA
ttgcccagggaggaagaggggat

SEQ ID NO: 105829 - RNA, 23 nt, synthetic construct
  source 1..23: mol_type = other RNA
tgccacagttgtggtggtggtgg

SEQ ID NO: 105830 - RNA, 23 nt, synthetic construct
  source 1..23: mol_type = other RNA
ttgtggggactgctggggggcag

SEQ ID NO: 105831 - RNA, 23 nt, synthetic construct
  source 1..23: mol_type = other RNA
tcctggaggtggccgtggtgtgg

SEQ ID NO: 105832 - RNA, 23 nt, synthetic construct
  source 1..23: mol_type = other RNA
tggtggaggaggcggtggccgtg

SEQ ID NO: 105833 - RNA, 23 nt, synthetic construct
  source 1..23: mol_type = other RNA
tgctgtgcttctcagtgctggaa

SEQ ID NO: 105834 - RNA, 23 nt, synthetic construct
  source 1..23: mol_type = other RNA
tggctgtgcttctcagtgctgga

SEQ ID NO: 105835 - RNA, 23 nt, synthetic construct
  source 1..23: mol_type = other RNA
tgcccagggaggaggaggggatg

SEQ ID NO: 105836 - RNA, 23 nt, synthetic construct
  source 1..23: mol_type = other RNA
tggtggtgcccagggaggaggag

SEQ ID NO: 105837 - RNA, 23 nt, synthetic construct
  source 1..23: mol_type = other RNA
tgccacagttgtggtggtggtgg

SEQ ID NO: 105838 - RNA, 23 nt, synthetic construct
  source 1..23: mol_type = other RNA
ttgtggggactgctgggggacag

SEQ ID NO: 105839 - RNA, 23 nt, synthetic construct
  source 1..23: mol_type = other RNA
ttgtggccgtggccgtggtcctg

SEQ ID NO: 105840 - RNA, 23 nt, synthetic construct
  source 1..23: mol_type = other RNA
tgctgtgggtgtggtggccgtgc

SEQ ID NO: 105841 - RNA, 23 nt, synthetic construct
  source 1..23: mol_type = other RNA
ttggaggaggaagtggctttgga

SEQ ID NO: 105842 - RNA, 23 nt, synthetic construct
  source 1..23: mol_type = other RNA
tcggagtggaggaggggtggatt

SEQ ID NO: 105843 - RNA, 23 nt, synthetic construct
  source 1..23: mol_type = other RNA
tggctgctgtggtcagctctgtg

SEQ ID NO: 105844 - RNA, 23 nt, synthetic construct
  source 1..23: mol_type = other RNA
tgtggctgctgtggtcagctctg

SEQ ID NO: 105845 - RNA, 23 nt, synthetic construct
  source 1..23: mol_type = other RNA
ttggccgtggggccagtggctgc

SEQ ID NO: 105846 - RNA, 23 nt, synthetic construct
  source 1..23: mol_type = other RNA
tggtggaggaggcggtggccgtg

SEQ ID NO: 105847 - RNA, 23 nt, synthetic construct
  source 1..23: mol_type = other RNA
tgctgtgcttctcagtgctggaa

SEQ ID NO: 105848 - RNA, 23 nt, synthetic construct
  source 1..23: mol_type = other RNA
tggctgtgcttctcagtgctgga

SEQ ID NO: 105849 - RNA, 23 nt, synthetic construct
  source 1..23: mol_type = other RNA
tcccagggaggaagaggggatgg

SEQ ID NO: 105850 - RNA, 23 nt, synthetic construct
  source 1..23: mol_type = other RNA
ttgcccagggaggaagaggggat

SEQ ID NO: 105851 - RNA, 23 nt, synthetic construct
  source 1..23: mol_type = other RNA
ttgtggtggtcgtggtggtaagc

SEQ ID NO: 105852 - RNA, 23 nt, synthetic construct
  source 1..23: mol_type = other RNA
tgccacagttgtggtggtggtgg

SEQ ID NO: 105853 - RNA, 23 nt, synthetic construct
  source 1..23: mol_type = other RNA
tgctggggggcagggaccgcccg

SEQ ID NO: 105854 - RNA, 23 nt, synthetic construct
  source 1..23: mol_type = other RNA
ttgctggggggcagggaccgccc

SEQ ID NO: 105855 - RNA, 23 nt, synthetic construct
  source 1..23: mol_type = other RNA
ttgtggggactgctggggggcag

SEQ ID NO: 105856 - RNA, 23 nt, synthetic construct
  source 1..23: mol_type = other RNA
tgctgtggctgtggtcctggagg

SEQ ID NO: 105857 - RNA, 23 nt, synthetic construct
  source 1..23: mol_type = other RNA
tggtggaggaggcggtggccgtg

SEQ ID NO: 105858 - RNA, 23 nt, synthetic construct
  source 1..23: mol_type = other RNA
tgctgtgcttctcagtgctggaa

SEQ ID NO: 105859 - RNA, 23 nt, synthetic construct
  source 1..23: mol_type = other RNA
tggctgtgcttctcagtgctgga

SEQ ID NO: 105860 - RNA, 23 nt, synthetic construct
  source 1..23: mol_type = other RNA
tgcccagggaggaggaggggatg

SEQ ID NO: 105861 - RNA, 23 nt, synthetic construct
  source 1..23: mol_type = other RNA
tggtggtgcccagggaggaggag

SEQ ID NO: 105862 - RNA, 23 nt, synthetic construct
  source 1..23: mol_type = other RNA
tctggggtggaagagggggtggc

SEQ ID NO: 105863 - RNA, 23 nt, synthetic construct
  source 1..23: mol_type = other RNA
tgccacagttgtggtggtggtgg

SEQ ID NO: 105864 - RNA, 23 nt, synthetic construct
  source 1..23: mol_type = other RNA
ttgtggggactgctgggggacag

SEQ ID NO: 105865 - RNA, 23 nt, synthetic construct
  source 1..23: mol_type = other RNA
tcctggaggtggccgtggtgtgg

SEQ ID NO: 105866 - RNA, 23 nt, synthetic construct
  source 1..23: mol_type = other RNA
ttgtggccgtggccgtggtcctg

SEQ ID NO: 105867 - RNA, 23 nt, synthetic construct
  source 1..23: mol_type = other RNA
ttggtggccgggctggtcagcac

SEQ ID NO: 105868 - RNA, 23 nt, synthetic construct
  source 1..23: mol_type = other RNA
tgctgtgggtgtggtggccgggc

SEQ ID NO: 105869 - RNA, 23 nt, synthetic construct
  source 1..23: mol_type = other RNA
ttggaggaggaagtggctttgga

SEQ ID NO: 105870 - RNA, 23 nt, synthetic construct
  source 1..23: mol_type = other RNA
tgggtggaggaggggatgggtgt

SEQ ID NO: 105871 - RNA, 23 nt, synthetic construct
  source 1..23: mol_type = other RNA
tcggagtggaggaggggtggatt

SEQ ID NO: 105872 - RNA, 23 nt, synthetic construct
  source 1..23: mol_type = other RNA
tggctgctgtggtcagctctgtg

SEQ ID NO: 105873 - RNA, 23 nt, synthetic construct
  source 1..23: mol_type = other RNA
tgtggctgctgtggtcagctctg

SEQ ID NO: 105874 - RNA, 23 nt, synthetic construct
  source 1..23: mol_type = other RNA
ttggccgtggggccagtggctgc

SEQ ID NO: 105875 - RNA, 23 nt, synthetic construct
  source 1..23: mol_type = other RNA
tggtggaggaggcggtggccgtg

SEQ ID NO: 105876 - RNA, 23 nt, synthetic construct
  source 1..23: mol_type = other RNA
tgctggaagggcagttgcagtcc

SEQ ID NO: 105877 - RNA, 23 nt, synthetic construct
  source 1..23: mol_type = other RNA
tgctgtgcttctcagtgctggaa

SEQ ID NO: 105878 - RNA, 23 nt, synthetic construct
  source 1..23: mol_type = other RNA
tggctgtgcttctcagtgctgga

SEQ ID NO: 105879 - RNA, 23 nt, synthetic construct
  source 1..23: mol_type = other RNA
tgcccagggaggaggaggggatg

SEQ ID NO: 105880 - RNA, 23 nt, synthetic construct
  source 1..23: mol_type = other RNA
tggtggtgcccagggaggaggag

SEQ ID NO: 105881 - RNA, 23 nt, synthetic construct
  source 1..23: mol_type = other RNA
tgccacagttgtggtggtggtgg

SEQ ID NO: 105882 - RNA, 23 nt, synthetic construct
  source 1..23: mol_type = other RNA
tcagcactggggtgatgggtgtt

SEQ ID NO: 105883 - RNA, 23 nt, synthetic construct
  source 1..23: mol_type = other RNA
ttggaggaggaagtggctttgga

SEQ ID NO: 105884 - RNA, 23 nt, synthetic construct
  source 1..23: mol_type = other RNA
tctgtggattttgtggctgtgct

SEQ ID NO: 105885 - RNA, 23 nt, synthetic construct
  source 1..23: mol_type = other RNA
tgctgtggattttgtggctgtgc

SEQ ID NO: 105886 - RNA, 23 nt, synthetic construct
  source 1..23: mol_type = other RNA
tgggtggaggaggggatgggtgt

SEQ ID NO: 105887 - RNA, 23 nt, synthetic construct
  source 1..23: mol_type = other RNA
tggtccacgtggtccacagggtg

SEQ ID NO: 105888 - RNA, 23 nt, synthetic construct
  source 1..23: mol_type = other RNA
tcatggtggctgtggtggtcagc

SEQ ID NO: 105889 - RNA, 23 nt, synthetic construct
  source 1..23: mol_type = other RNA
ttcatggtggctgtggtggtcag

SEQ ID NO: 105890 - RNA, 23 nt, synthetic construct
  source 1..23: mol_type = other RNA
tgtggaggcagtggctgtgggca

SEQ ID NO: 105891 - RNA, 23 nt, synthetic construct
  source 1..23: mol_type = other RNA
tcctcctccttcccatgcaccat

SEQ ID NO: 105892 - RNA, 23 nt, synthetic construct
  source 1..23: mol_type = other RNA
tacaggatcaggccctcctcctt

SEQ ID NO: 105893 - RNA, 23 nt, synthetic construct
  source 1..23: mol_type = other RNA
tgcagggcacctcaaggcggccc

SEQ ID NO: 105894 - RNA, 23 nt, synthetic construct
  source 1..23: mol_type = other RNA
tacacaggcaggctctgggggca

SEQ ID NO: 105895 - RNA, 23 nt, synthetic construct
  source 1..23: mol_type = other RNA
ttggacacatctgggcaggatgc

SEQ ID NO: 105896 - RNA, 23 nt, synthetic construct
  source 1..23: mol_type = other RNA
tgccctggtgccacaggatggtc

SEQ ID NO: 105897 - RNA, 23 nt, synthetic construct
  source 1..23: mol_type = other RNA
tggtgtgtgggggagccatgggc

SEQ ID NO: 105898 - RNA, 23 nt, synthetic construct
  source 1..23: mol_type = other RNA
tgtgggcagcaggagcacggagc

SEQ ID NO: 105899 - RNA, 23 nt, synthetic construct
  source 1..23: mol_type = other RNA
tttcctggcagcagctggccttg

SEQ ID NO: 105900 - RNA, 23 nt, synthetic construct
  source 1..23: mol_type = other RNA
tcttcctggcagcagctggcctt

SEQ ID NO: 105901 - RNA, 23 nt, synthetic construct
  source 1..23: mol_type = other RNA
tcctgggtctctgcctgcggcac

SEQ ID NO: 105902 - RNA, 23 nt, synthetic construct
  source 1..23: mol_type = other RNA
tagtgcaccttctgccccacctg

SEQ ID NO: 105903 - RNA, 23 nt, synthetic construct
  source 1..23: mol_type = other RNA
tgagggggtgactgtgaagcccg

SEQ ID NO: 105904 - RNA, 23 nt, synthetic construct
  source 1..23: mol_type = other RNA
tatggcattgtcgtcgaagttcc

SEQ ID NO: 105905 - RNA, 23 nt, synthetic construct
  source 1..23: mol_type = other RNA
tccctgagttaccctgcagcagg

SEQ ID NO: 105906 - RNA, 23 nt, synthetic construct
  source 1..23: mol_type = other RNA
tctgcagttgtagtggctgttgt

SEQ ID NO: 105907 - RNA, 23 nt, synthetic construct
  source 1..23: mol_type = other RNA
tagctgcagtcaccatgcaggtc

SEQ ID NO: 105908 - RNA, 23 nt, synthetic construct
  source 1..23: mol_type = other RNA
taccctgggcgtcacagggcagg

SEQ ID NO: 105909 - RNA, 23 nt, synthetic construct
  source 1..23: mol_type = other RNA
ttcacagggcaggggcttgcact

SEQ ID NO: 105910 - RNA, 23 nt, synthetic construct
  source 1..23: mol_type = other RNA
tctgcaggggtgcgggtggtccc

SEQ ID NO: 105911 - RNA, 23 nt, synthetic construct
  source 1..23: mol_type = other RNA
tgagggggtggccacagagccgg

SEQ ID NO: 105912 - RNA, 23 nt, synthetic construct
  source 1..23: mol_type = other RNA
tgagggggtggccacagagccgg

SEQ ID NO: 105913 - RNA, 23 nt, synthetic construct
  source 1..23: mol_type = other RNA
ttggccctggtgtggcccggggt

SEQ ID NO: 105914 - RNA, 23 nt, synthetic construct
  source 1..23: mol_type = other RNA
tgagggggtggccacagagccgg

SEQ ID NO: 105915 - RNA, 23 nt, synthetic construct
  source 1..23: mol_type = other RNA
tgagggggtggccacagagccgg

SEQ ID NO: 105916 - RNA, 23 nt, synthetic construct
  source 1..23: mol_type = other RNA
tgagggggtggccacagagccgg

SEQ ID NO: 105917 - RNA, 23 nt, synthetic construct
  source 1..23: mol_type = other RNA
tctgcagcaggcatggacaggcg

SEQ ID NO: 105918 - RNA, 23 nt, synthetic construct
  source 1..23: mol_type = other RNA
tctgatggtctctccaggcttgt

SEQ ID NO: 105919 - RNA, 23 nt, synthetic construct
  source 1..23: mol_type = other RNA
ttgtgggcagtctctggagtgga

SEQ ID NO: 105920 - RNA, 23 nt, synthetic construct
  source 1..23: mol_type = other RNA
ttgtgggcagtctctggagtgga

SEQ ID NO: 105921 - RNA, 23 nt, synthetic construct
  source 1..23: mol_type = other RNA
tcgtgcaggggtccttgggtgcc

SEQ ID NO: 105922 - RNA, 23 nt, synthetic construct
  source 1..23: mol_type = other RNA
tggcgtccgggcaggagggggag

SEQ ID NO: 105923 - RNA, 23 nt, synthetic construct
  source 1..23: mol_type = other RNA
tgtcacagggcaggggcttgcac

SEQ ID NO: 105924 - RNA, 23 nt, synthetic construct
  source 1..23: mol_type = other RNA
tcgtggatccagtggctgcagtt

SEQ ID NO: 105925 - RNA, 23 nt, synthetic construct
  source 1..23: mol_type = other RNA
tcagctcctcccgctgcccattg

SEQ ID NO: 105926 - RNA, 23 nt, synthetic construct
  source 1..23: mol_type = other RNA
tggggtgggggtgggtgtgctag

SEQ ID NO: 105927 - RNA, 23 nt, synthetic construct
  source 1..23: mol_type = other RNA
tcagcaccagcccctgggccttg

SEQ ID NO: 105928 - RNA, 23 nt, synthetic construct
  source 1..23: mol_type = other RNA
tgcagctcctcccgctgcccatt

SEQ ID NO: 105929 - RNA, 23 nt, synthetic construct
  source 1..23: mol_type = other RNA
tggcccagctcctccagcggcat

SEQ ID NO: 105930 - RNA, 23 nt, synthetic construct
  source 1..23: mol_type = other RNA
tgggtgggggtgggtgtgctaga

SEQ ID NO: 105931 - RNA, 23 nt, synthetic construct
  source 1..23: mol_type = other RNA
tcatggggtgggggtgggtgtgc

SEQ ID NO: 105932 - RNA, 23 nt, synthetic construct
  source 1..23: mol_type = other RNA
tccttgggtgccagggcgtccgg

SEQ ID NO: 105933 - RNA, 23 nt, synthetic construct
  source 1..23: mol_type = other RNA
tctctggagctgatgactgtggg

SEQ ID NO: 105934 - RNA, 23 nt, synthetic construct
  source 1..23: mol_type = other RNA
tgggtcttgctgggtgtggccgt

SEQ ID NO: 105935 - RNA, 23 nt, synthetic construct
  source 1..23: mol_type = other RNA
tgggtcttgctgggtgtggccgt

SEQ ID NO: 105936 - RNA, 23 nt, synthetic construct
  source 1..23: mol_type = other RNA
tgggtcttgctgggtgtggctgt

SEQ ID NO: 105937 - RNA, 23 nt, synthetic construct
  source 1..23: mol_type = other RNA
tgggtcttgctgggtgtggccgt

SEQ ID NO: 105938 - RNA, 23 nt, synthetic construct
  source 1..23: mol_type = other RNA
tctctggagtagaggaggtgtgg

SEQ ID NO: 105939 - RNA, 23 nt, synthetic construct
  source 1..23: mol_type = other RNA
tggacggaggagggggtcaccgt

SEQ ID NO: 105940 - RNA, 23 nt, synthetic construct
  source 1..23: mol_type = other RNA
tgctggtggctgcgggtgtggtg

SEQ ID NO: 105941 - RNA, 23 nt, synthetic construct
  source 1..23: mol_type = other RNA
tgctggtagctgtgggtgtggtg

SEQ ID NO: 105942 - RNA, 23 nt, synthetic construct
  source 1..23: mol_type = other RNA
tgctggtagctgtgggtgtggtg

SEQ ID NO: 105943 - RNA, 23 nt, synthetic construct
  source 1..23: mol_type = other RNA
tctttgggagggggagctgttct

SEQ ID NO: 105944 - RNA, 23 nt, synthetic construct
  source 1..23: mol_type = other RNA
tctttgggagggggagctgttcc

SEQ ID NO: 105945 - RNA, 23 nt, synthetic construct
  source 1..23: mol_type = other RNA
tctttgggagggggagctgttcc

SEQ ID NO: 105946 - RNA, 23 nt, synthetic construct
  source 1..23: mol_type = other RNA
tcagttgcaggtgtcaaacatgc

SEQ ID NO: 105947 - RNA, 23 nt, synthetic construct
  source 1..23: mol_type = other RNA
ttggggccgtggaggatgctgca

SEQ ID NO: 105948 - RNA, 23 nt, synthetic construct
  source 1..23: mol_type = other RNA
tctttggagctggtgactgtggg

SEQ ID NO: 105949 - RNA, 23 nt, synthetic construct
  source 1..23: mol_type = other RNA
tctttggagctggtgactgtggg

SEQ ID NO: 105950 - RNA, 23 nt, synthetic construct
  source 1..23: mol_type = other RNA
tctttggagctggtgactgtggg

SEQ ID NO: 105951 - RNA, 23 nt, synthetic construct
  source 1..23: mol_type = other RNA
tctttggagctggtgactgtggg

SEQ ID NO: 105952 - RNA, 23 nt, synthetic construct
  source 1..23: mol_type = other RNA
ttcccctccagctgtgggctctg

SEQ ID NO: 105953 - RNA, 23 nt, synthetic construct
  source 1..23: mol_type = other RNA
tcggaggacactggcggtgggga

SEQ ID NO: 105954 - RNA, 23 nt, synthetic construct
  source 1..23: mol_type = other RNA
tacaggcctggagcccactaggc

SEQ ID NO: 105955 - RNA, 23 nt, synthetic construct
  source 1..23: mol_type = other RNA
tcaggcctgggcgtaggcagcca

SEQ ID NO: 105956 - RNA, 23 nt, synthetic construct
  source 1..23: mol_type = other RNA
tggtggaggaggggatgggtgta

SEQ ID NO: 105957 - RNA, 23 nt, synthetic construct
  source 1..23: mol_type = other RNA
tggtggaggaggggatgggtgta

SEQ ID NO: 105958 - RNA, 23 nt, synthetic construct
  source 1..23: mol_type = other RNA
tgctccggggcaggagccctcgc

SEQ ID NO: 105959 - RNA, 23 nt, synthetic construct
  source 1..23: mol_type = other RNA
tctggggtggaggacggggtggc

SEQ ID NO: 105960 - RNA, 23 nt, synthetic construct
  source 1..23: mol_type = other RNA
tctggggtggaggacggggtggc

SEQ ID NO: 105961 - RNA, 23 nt, synthetic construct
  source 1..23: mol_type = other RNA
tctggggtggaggacggggtggc

SEQ ID NO: 105962 - RNA, 23 nt, synthetic construct
  source 1..23: mol_type = other RNA
tctggggtggaggacggggtggc

SEQ ID NO: 105963 - RNA, 23 nt, synthetic construct
  source 1..23: mol_type = other RNA
tctggggtggaggacggggtggc

SEQ ID NO: 105964 - RNA, 23 nt, synthetic construct
  source 1..23: mol_type = other RNA
tctcagggcagaagcagccctcc

SEQ ID NO: 105965 - RNA, 23 nt, synthetic construct
  source 1..23: mol_type = other RNA
tccggttgcacctcgccagtcac

SEQ ID NO: 105966 - RNA, 23 nt, synthetic construct
  source 1..23: mol_type = other RNA
tgagggggtcaccgtggagcctc

SEQ ID NO: 105967 - RNA, 23 nt, synthetic construct
  source 1..23: mol_type = other RNA
tgagggggtcaccgtggaacctc

SEQ ID NO: 105968 - RNA, 23 nt, synthetic construct
  source 1..23: mol_type = other RNA
tgagggggtcaccgtggagcctc

SEQ ID NO: 105969 - RNA, 23 nt, synthetic construct
  source 1..23: mol_type = other RNA
tgagggggtcaccgtggagccac

SEQ ID NO: 105970 - RNA, 23 nt, synthetic construct
  source 1..23: mol_type = other RNA
tgagggggtcaccgtggagccac

SEQ ID NO: 105971 - RNA, 23 nt, synthetic construct
  source 1..23: mol_type = other RNA
tgtgacagtgaggacgatatcca

SEQ ID NO: 105972 - RNA, 23 nt, synthetic construct
  source 1..23: mol_type = other RNA
tagctgcgccgcccggcactcga

SEQ ID NO: 105973 - RNA, 23 nt, synthetic construct
  source 1..23: mol_type = other RNA
ttgccctgcattctcccagctcg

SEQ ID NO: 105974 - RNA, 23 nt, synthetic construct
  source 1..23: mol_type = other RNA
tagcaccagccggatgctgacct

SEQ ID NO: 105975 - RNA, 23 nt, synthetic construct
  source 1..23: mol_type = other RNA
tctgcagtcaccatgcaggtcgt

SEQ ID NO: 105976 - RNA, 23 nt, synthetic construct
  source 1..23: mol_type = other RNA
tggagtggcagcgcgagaaggca

SEQ ID NO: 105977 - RNA, 23 nt, synthetic construct
  source 1..23: mol_type = other RNA
ttgccctccagcggccctgatct

SEQ ID NO: 105978 - RNA, 23 nt, synthetic construct
  source 1..23: mol_type = other RNA
tcagtgcaccttctgccccacct

SEQ ID NO: 105979 - RNA, 23 nt, synthetic construct
  source 1..23: mol_type = other RNA
tatgtgcccaagctccccgtcgt

SEQ ID NO: 105980 - RNA, 23 nt, synthetic construct
  source 1..23: mol_type = other RNA
tctggctgtgcctgtcgggcgag

SEQ ID NO: 105981 - RNA, 23 nt, synthetic construct
  source 1..23: mol_type = other RNA
tgagggggagctgttctcagggt

SEQ ID NO: 105982 - RNA, 23 nt, synthetic construct
  source 1..23: mol_type = other RNA
tccggttgtggtggccgtggtgg

SEQ ID NO: 105983 - RNA, 23 nt, synthetic construct
  source 1..23: mol_type = other RNA
tgctggtcagcactttgggaggg

SEQ ID NO: 105984 - RNA, 23 nt, synthetic construct
  source 1..23: mol_type = other RNA
tgctggtcagcactttgagggtg

SEQ ID NO: 105985 - RNA, 23 nt, synthetic construct
  source 1..23: mol_type = other RNA
tgctggtcagcactttgggaggg

SEQ ID NO: 105986 - RNA, 23 nt, synthetic construct
  source 1..23: mol_type = other RNA
tccggttgtggtggccgtggcgg

SEQ ID NO: 105987 - RNA, 23 nt, synthetic construct
  source 1..23: mol_type = other RNA
tggaagacttggccattgaaggt

SEQ ID NO: 105988 - RNA, 23 nt, synthetic construct
  source 1..23: mol_type = other RNA
tcagcagccatcctttctgctgt

SEQ ID NO: 105989 - RNA, 23 nt, synthetic construct
  source 1..23: mol_type = other RNA
tagcagccctccgccatcccctc

SEQ ID NO: 105990 - RNA, 23 nt, synthetic construct
  source 1..23: mol_type = other RNA
tctggaccagcctgtctgcccca

SEQ ID NO: 105991 - RNA, 23 nt, synthetic construct
  source 1..23: mol_type = other RNA
ttgctgacccctctctgacctgg

SEQ ID NO: 105992 - RNA, 23 nt, synthetic construct
  source 1..23: mol_type = other RNA
tggaatgtcagcaccagccggat

SEQ ID NO: 105993 - RNA, 23 nt, synthetic construct
  source 1..23: mol_type = other RNA
tgagatgtgggccccgccctgca

SEQ ID NO: 105994 - RNA, 23 nt, synthetic construct
  source 1..23: mol_type = other RNA
ttcataggtggagatgtgggccc

SEQ ID NO: 105995 - RNA, 23 nt, synthetic construct
  source 1..23: mol_type = other RNA
tctgcagtccaggtacaccatgg

SEQ ID NO: 105996 - RNA, 23 nt, synthetic construct
  source 1..23: mol_type = other RNA
tgaggggatggctgtaacgctgg

SEQ ID NO: 105997 - RNA, 23 nt, synthetic construct
  source 1..23: mol_type = other RNA
tcgccctggaagcggtcaatgtc

SEQ ID NO: 105998 - RNA, 23 nt, synthetic construct
  source 1..23: mol_type = other RNA
ttggcccttgtcatggtggctgt

SEQ ID NO: 105999 - RNA, 23 nt, synthetic construct
  source 1..23: mol_type = other RNA
tcgaggacagcggggcggaggac

SEQ ID NO: 106000 - RNA, 23 nt, synthetic construct
  source 1..23: mol_type = other RNA
tcagtagtggttgtccaggtaga

SEQ ID NO: 106001 - RNA, 23 nt, synthetic construct
  source 1..23: mol_type = other RNA
tagcagccatcctttctgctgtc

SEQ ID NO: 106002 - RNA, 23 nt, synthetic construct
  source 1..23: mol_type = other RNA
tgaggggcaaggccaaggtgggc

SEQ ID NO: 106003 - RNA, 23 nt, synthetic construct
  source 1..23: mol_type = other RNA
taccctgcagcaggcatggacag

SEQ ID NO: 106004 - RNA, 23 nt, synthetic construct
  source 1..23: mol_type = other RNA
tgctggtagctgtggatttggtg

SEQ ID NO: 106005 - RNA, 23 nt, synthetic construct
  source 1..23: mol_type = other RNA
tctgcagttgtagtggctgctgt

SEQ ID NO: 106006 - RNA, 23 nt, synthetic construct
  source 1..23: mol_type = other RNA
tgctggtagctgtggatttggtg

SEQ ID NO: 106007 - RNA, 23 nt, synthetic construct
  source 1..23: mol_type = other RNA
tctgcagttgtagtggctgctgt

SEQ ID NO: 106008 - RNA, 23 nt, synthetic construct
  source 1..23: mol_type = other RNA
tgctggtagctgtggattttgtg

SEQ ID NO: 106009 - RNA, 23 nt, synthetic construct
  source 1..23: mol_type = other RNA
tctggacgcactccccacagcac

SEQ ID NO: 106010 - RNA, 23 nt, synthetic construct
  source 1..23: mol_type = other RNA
tctttgggatgctgacccctctc

SEQ ID NO: 106011 - RNA, 23 nt, synthetic construct
  source 1..23: mol_type = other RNA
tggacggggacgggcagggaggg

SEQ ID NO: 106012 - RNA, 23 nt, synthetic construct
  source 1..23: mol_type = other RNA
tgggtctctgcctgcggcaccac

SEQ ID NO: 106013 - RNA, 23 nt, synthetic construct
  source 1..23: mol_type = other RNA
tctgcagatgcactcgcactcat

SEQ ID NO: 106014 - RNA, 23 nt, synthetic construct
  source 1..23: mol_type = other RNA
tctgcagcggaaggtgggacagc

SEQ ID NO: 106015 - RNA, 23 nt, synthetic construct
  source 1..23: mol_type = other RNA
tggcagtggggggtgtgccagtc

SEQ ID NO: 106016 - RNA, 23 nt, synthetic construct
  source 1..23: mol_type = other RNA
tcgccctcctgctcccagttcct

SEQ ID NO: 106017 - RNA, 23 nt, synthetic construct
  source 1..23: mol_type = other RNA
tctttggaagcggtgctggctgt

SEQ ID NO: 106018 - RNA, 23 nt, synthetic construct
  source 1..23: mol_type = other RNA
tctctggttgtgggtgtggtggt

SEQ ID NO: 106019 - RNA, 23 nt, synthetic construct
  source 1..23: mol_type = other RNA
tctctggttgtgggtgtggtggt

SEQ ID NO: 106020 - RNA, 23 nt, synthetic construct
  source 1..23: mol_type = other RNA
tctctggagtagaggagggtgtg

SEQ ID NO: 106021 - RNA, 23 nt, synthetic construct
  source 1..23: mol_type = other RNA
tctctggttgtgggtgtggtggt

SEQ ID NO: 106022 - RNA, 23 nt, synthetic construct
  source 1..23: mol_type = other RNA
tctctggcggtgtgggtggtccc

SEQ ID NO: 106023 - RNA, 23 nt, synthetic construct
  source 1..23: mol_type = other RNA
tcgccctcccgaaaggggtcctg

SEQ ID NO: 106024 - RNA, 23 nt, synthetic construct
  source 1..23: mol_type = other RNA
tgagggggcaggtccgggggcag

SEQ ID NO: 106025 - RNA, 23 nt, synthetic construct
  source 1..23: mol_type = other RNA
ttcacagcccccatgtgggttgt

SEQ ID NO: 106026 - RNA, 23 nt, synthetic construct
  source 1..23: mol_type = other RNA
tctctggaggttgccattgttgt

SEQ ID NO: 106027 - RNA, 23 nt, synthetic construct
  source 1..23: mol_type = other RNA
tgctggtggtggtgttagtcaag

SEQ ID NO: 106028 - RNA, 23 nt, synthetic construct
  source 1..23: mol_type = other RNA
tctggctggtggtggtgttagtc

SEQ ID NO: 106029 - RNA, 23 nt, synthetic construct
  source 1..23: mol_type = other RNA
ttgccctggctggtggtggtgtt

SEQ ID NO: 106030 - RNA, 23 nt, synthetic construct
  source 1..23: mol_type = other RNA
tctgcaggtgtggtggcggtggt

SEQ ID NO: 106031 - RNA, 23 nt, synthetic construct
  source 1..23: mol_type = other RNA
tctggactggagaagggagtggc

SEQ ID NO: 106032 - RNA, 23 nt, synthetic construct
  source 1..23: mol_type = other RNA
tctgcaggtgtggtggcggtggt

SEQ ID NO: 106033 - RNA, 23 nt, synthetic construct
  source 1..23: mol_type = other RNA
tgagggggtggacatggaactgg

SEQ ID NO: 106034 - RNA, 23 nt, synthetic construct
  source 1..23: mol_type = other RNA
tctgcaggtgtggtggcggtggt

SEQ ID NO: 106035 - RNA, 23 nt, synthetic construct
  source 1..23: mol_type = other RNA
tctggactggagaagggagtggc

SEQ ID NO: 106036 - RNA, 23 nt, synthetic construct
  source 1..23: mol_type = other RNA
tctgcaggtgtggtggcggtggt

SEQ ID NO: 106037 - RNA, 23 nt, synthetic construct
  source 1..23: mol_type = other RNA
tgaggggttggtggtggagccgg

SEQ ID NO: 106038 - RNA, 23 nt, synthetic construct
  source 1..23: mol_type = other RNA
tgaggggttggtggtggagccgg

SEQ ID NO: 106039 - RNA, 23 nt, synthetic construct
  source 1..23: mol_type = other RNA
tgaggggttggtggtggagccgg

SEQ ID NO: 106040 - RNA, 23 nt, synthetic construct
  source 1..23: mol_type = other RNA
tgaggggttggtggtggagccgg

SEQ ID NO: 106041 - RNA, 23 nt, synthetic construct
  source 1..23: mol_type = other RNA
tgaggggttggtggtggagccgg

SEQ ID NO: 106042 - RNA, 23 nt, synthetic construct
  source 1..23: mol_type = other RNA
tctcccacctccggttcctgcag

SEQ ID NO: 106043 - RNA, 23 nt, synthetic construct
  source 1..23: mol_type = other RNA
tctgcagctggacacatctgggc

SEQ ID NO: 106044 - RNA, 23 nt, synthetic construct
  source 1..23: mol_type = other RNA
tctcccagctcggctccacaggg

SEQ ID NO: 106045 - RNA, 23 nt, synthetic construct
  source 1..23: mol_type = other RNA
tcagtgctgtccaccagtgcgtg

SEQ ID NO: 106046 - RNA, 23 nt, synthetic construct
  source 1..23: mol_type = other RNA
tgagggggtggctgtgaagcccg

SEQ ID NO: 106047 - RNA, 23 nt, synthetic construct
  source 1..23: mol_type = other RNA
tgagggggtggctgtgaagcccg

SEQ ID NO: 106048 - RNA, 23 nt, synthetic construct
  source 1..23: mol_type = other RNA
ttggccctggttgtggtggtcgt

SEQ ID NO: 106049 - RNA, 23 nt, synthetic construct
  source 1..23: mol_type = other RNA
tgagggggtggctgtgaagcccg

SEQ ID NO: 106050 - RNA, 23 nt, synthetic construct
  source 1..23: mol_type = other RNA
tctcacagcccgtggtcaccacc

SEQ ID NO: 106051 - RNA, 23 nt, synthetic construct
  source 1..23: mol_type = other RNA
tggaagagggggtggccacagag

SEQ ID NO: 106052 - RNA, 23 nt, synthetic construct
  source 1..23: mol_type = other RNA
tctcacagcccgtggtcaccacc

SEQ ID NO: 106053 - RNA, 23 nt, synthetic construct
  source 1..23: mol_type = other RNA
tgagggggtggctgtgaagcccg

SEQ ID NO: 106054 - RNA, 23 nt, synthetic construct
  source 1..23: mol_type = other RNA
ttccagtggctgcagttgtagtg

SEQ ID NO: 106055 - RNA, 23 nt, synthetic construct
  source 1..23: mol_type = other RNA
tctgcagtggtcgctgatgcagg

SEQ ID NO: 106056 - RNA, 23 nt, synthetic construct
  source 1..23: mol_type = other RNA
tagcaccagcccctgggccttga

SEQ ID NO: 106057 - RNA, 23 nt, synthetic construct
  source 1..23: mol_type = other RNA
tcagcagggtgcggtggcagatg

SEQ ID NO: 106058 - RNA, 23 nt, synthetic construct
  source 1..23: mol_type = other RNA
tcgccctgcacagagcaggtgcc

SEQ ID NO: 106059 - RNA, 23 nt, synthetic construct
  source 1..23: mol_type = other RNA
tttggcacaggcagcctgggcct

SEQ ID NO: 106060 - RNA, 23 nt, synthetic construct
  source 1..23: mol_type = other RNA
taaggtgcccgcggggcaggtgc

SEQ ID NO: 106061 - RNA, 23 nt, synthetic construct
  source 1..23: mol_type = other RNA
tctcccaggcagcttagcttccc

SEQ ID NO: 106062 - RNA, 23 nt, synthetic construct
  source 1..23: mol_type = other RNA
tctgcaggtgcaggtgttgcagt

SEQ ID NO: 106063 - RNA, 23 nt, synthetic construct
  source 1..23: mol_type = other RNA
tagctgccttcaaagctgtagcg

SEQ ID NO: 106064 - RNA, 23 nt, synthetic construct
  source 1..23: mol_type = other RNA
tacagtagtcctgggccaagatg

SEQ ID NO: 106065 - RNA, 23 nt, synthetic construct
  source 1..23: mol_type = other RNA
tgctggtgcctggggccggggag

SEQ ID NO: 106066 - RNA, 23 nt, synthetic construct
  source 1..23: mol_type = other RNA
tctgcagcagaggacccggatcc

SEQ ID NO: 106067 - RNA, 23 nt, synthetic construct
  source 1..23: mol_type = other RNA
tgagaacagggcctgggtggtgg

SEQ ID NO: 106068 - RNA, 23 nt, synthetic construct
  source 1..23: mol_type = other RNA
ttgtgcttctcagtgctggaagg

SEQ ID NO: 106069 - RNA, 23 nt, synthetic construct
  source 1..23: mol_type = other RNA
ttgtgcttctcagtgctggaagg

SEQ ID NO: 106070 - RNA, 23 nt, synthetic construct
  source 1..23: mol_type = other RNA
ttgtgctgctggtggctgcaggt

SEQ ID NO: 106071 - RNA, 23 nt, synthetic construct
  source 1..23: mol_type = other RNA
taaggtgcctgaggtggccgaag

SEQ ID NO: 106072 - RNA, 23 nt, synthetic construct
  source 1..23: mol_type = other RNA
tgagggggagctgttcccggggt

SEQ ID NO: 106073 - RNA, 23 nt, synthetic construct
  source 1..23: mol_type = other RNA
tccttggactggaggaggaagtg

SEQ ID NO: 106074 - RNA, 23 nt, synthetic construct
  source 1..23: mol_type = other RNA
tggagtggaggagggggtggaca

SEQ ID NO: 106075 - RNA, 23 nt, synthetic construct
  source 1..23: mol_type = other RNA
tggagtggctctggagctgatga

SEQ ID NO: 106076 - RNA, 23 nt, synthetic construct
  source 1..23: mol_type = other RNA
ttgtgcttctcagtgctggaagg

SEQ ID NO: 106077 - RNA, 23 nt, synthetic construct
  source 1..23: mol_type = other RNA
ttgtgctgctggtggctgcaggt

SEQ ID NO: 106078 - RNA, 23 nt, synthetic construct
  source 1..23: mol_type = other RNA
ttgtgcttctcagtgctggaagg

SEQ ID NO: 106079 - RNA, 23 nt, synthetic construct
  source 1..23: mol_type = other RNA
ttggccctggttgtggtggccgt

SEQ ID NO: 106080 - RNA, 23 nt, synthetic construct
  source 1..23: mol_type = other RNA
ttgtgctgctggtggctgcaggt

SEQ ID NO: 106081 - RNA, 23 nt, synthetic construct
  source 1..23: mol_type = other RNA
taaggtgcctgaggtggccgaag

SEQ ID NO: 106082 - RNA, 23 nt, synthetic construct
  source 1..23: mol_type = other RNA
tgagggggagctgttcccggggt

SEQ ID NO: 106083 - RNA, 23 nt, synthetic construct
  source 1..23: mol_type = other RNA
tccttggactggaggaggaagtg

SEQ ID NO: 106084 - RNA, 23 nt, synthetic construct
  source 1..23: mol_type = other RNA
tggagtggaggagggggtggacg

SEQ ID NO: 106085 - RNA, 23 nt, synthetic construct
  source 1..23: mol_type = other RNA
tggcagttgcagtccctggactg

SEQ ID NO: 106086 - RNA, 23 nt, synthetic construct
  source 1..23: mol_type = other RNA
ttgtgcttctcagtgctggaagg

SEQ ID NO: 106087 - RNA, 23 nt, synthetic construct
  source 1..23: mol_type = other RNA
tgctggtcagcactggggtgatg

SEQ ID NO: 106088 - RNA, 23 nt, synthetic construct
  source 1..23: mol_type = other RNA
tctttggagctggtggctgcggg

SEQ ID NO: 106089 - RNA, 23 nt, synthetic construct
  source 1..23: mol_type = other RNA
tccttggactggaggaggaagtg

SEQ ID NO: 106090 - RNA, 23 nt, synthetic construct
  source 1..23: mol_type = other RNA
tctttgggggtgtgagctgttcc

SEQ ID NO: 106091 - RNA, 23 nt, synthetic construct
  source 1..23: mol_type = other RNA
taaccgtggaggcagtggctgtg

SEQ ID NO: 106092 - RNA, 23 nt, synthetic construct
  source 1..23: mol_type = other RNA
tgagaaaaactgtccaaatgccc

SEQ ID NO: 106093 - RNA, 23 nt, synthetic construct
  source 1..23: mol_type = other RNA
tggcagtggcagaggccgtgcag

SEQ ID NO: 106094 - RNA, 23 nt, synthetic construct
  source 1..23: mol_type = other RNA
tctctgggggcaggtggttgtgt

SEQ ID NO: 106095 - RNA, 23 nt, synthetic construct
  source 1..23: mol_type = other RNA
tcgccctcctcctgggtgcagat

SEQ ID NO: 106096 - RNA, 23 nt, synthetic construct
  source 1..23: mol_type = other RNA
tcagcagtcgccctcctcctggg

SEQ ID NO: 106097 - RNA, 23 nt, synthetic construct
  source 1..23: mol_type = other RNA
tctcaaagccctggggacaggta

SEQ ID NO: 106098 - RNA, 23 nt, synthetic construct
  source 1..23: mol_type = other RNA
tagcagctggccttgcctggacc

SEQ ID NO: 106099 - RNA, 23 nt, synthetic construct
  source 1..23: mol_type = other RNA
tcagcagctggccttgcctggac

SEQ ID NO: 106100 - RNA, 23 nt, synthetic construct
  source 1..23: mol_type = other RNA
tgcagcagctggccttgcctgga

SEQ ID NO: 106101 - RNA, 23 nt, synthetic construct
  source 1..23: mol_type = other RNA
taggtgctgcacacccgcccatt

SEQ ID NO: 106102 - RNA, 23 nt, synthetic construct
  source 1..23: mol_type = other RNA
ttgagggggcaggtccgggggca

SEQ ID NO: 106103 - RNA, 23 nt, synthetic construct
  source 1..23: mol_type = other RNA
tatggtctctccaggcttgtagg

SEQ ID NO: 106104 - RNA, 23 nt, synthetic construct
  source 1..23: mol_type = other RNA
tggggagagcttccagctgttcc

SEQ ID NO: 106105 - RNA, 23 nt, synthetic construct
  source 1..23: mol_type = other RNA
tagaccgggagggccgggcttgt

SEQ ID NO: 106106 - RNA, 23 nt, synthetic construct
  source 1..23: mol_type = other RNA
tcagctcctccagcggcatgtcg

SEQ ID NO: 106107 - RNA, 23 nt, synthetic construct
  source 1..23: mol_type = other RNA
tccagctcctccagcggcatgtc

SEQ ID NO: 106108 - RNA, 23 nt, synthetic construct
  source 1..23: mol_type = other RNA
tggagtggaggaggggtggattg

SEQ ID NO: 106109 - RNA, 23 nt, synthetic construct
  source 1..23: mol_type = other RNA
tggagtggaggaggggtggattg

SEQ ID NO: 106110 - RNA, 23 nt, synthetic construct
  source 1..23: mol_type = other RNA
tgtactcaaagccctggggacag

SEQ ID NO: 106111 - RNA, 23 nt, synthetic construct
  source 1..23: mol_type = other RNA
ttggccgtgcaggggtccttggg

SEQ ID NO: 106112 - RNA, 23 nt, synthetic construct
  source 1..23: mol_type = other RNA
tggtgcctggggccggggagggg

SEQ ID NO: 106113 - RNA, 23 nt, synthetic construct
  source 1..23: mol_type = other RNA
ttgctgggggacagggatcgccc

SEQ ID NO: 106114 - RNA, 23 nt, synthetic construct
  source 1..23: mol_type = other RNA
ttcccggggtggaggacgggatg

SEQ ID NO: 106115 - RNA, 23 nt, synthetic construct
  source 1..23: mol_type = other RNA
ttgctgggggacagggatcgccc

SEQ ID NO: 106116 - RNA, 23 nt, synthetic construct
  source 1..23: mol_type = other RNA
ttcccggggtggaggacggggtg

SEQ ID NO: 106117 - RNA, 23 nt, synthetic construct
  source 1..23: mol_type = other RNA
tagttgcaggtgtcaaacatgca

SEQ ID NO: 106118 - RNA, 23 nt, synthetic construct
  source 1..23: mol_type = other RNA
tggagagcttccagctgttccca

SEQ ID NO: 106119 - RNA, 23 nt, synthetic construct
  source 1..23: mol_type = other RNA
tggtggtggagccggtggctgtg

SEQ ID NO: 106120 - RNA, 23 nt, synthetic construct
  source 1..23: mol_type = other RNA
tgggagagcttccagctgttccc

SEQ ID NO: 106121 - RNA, 23 nt, synthetic construct
  source 1..23: mol_type = other RNA
taggtggggccgtggaggatgct

SEQ ID NO: 106122 - RNA, 23 nt, synthetic construct
  source 1..23: mol_type = other RNA
tgtgggcagtctctggagtggag

SEQ ID NO: 106123 - RNA, 23 nt, synthetic construct
  source 1..23: mol_type = other RNA
tggtggtggagccggtggccgtg

SEQ ID NO: 106124 - RNA, 23 nt, synthetic construct
  source 1..23: mol_type = other RNA
tctcacagcccatggtcaccacc

SEQ ID NO: 106125 - RNA, 23 nt, synthetic construct
  source 1..23: mol_type = other RNA
tggaggaggaggggatggctgta

SEQ ID NO: 106126 - RNA, 23 nt, synthetic construct
  source 1..23: mol_type = other RNA
tggtggtggagccggtggccgtg

SEQ ID NO: 106127 - RNA, 23 nt, synthetic construct
  source 1..23: mol_type = other RNA
tctcacagcccatggtcaccacc

SEQ ID NO: 106128 - RNA, 23 nt, synthetic construct
  source 1..23: mol_type = other RNA
tggaggaggaggggatggctgta

SEQ ID NO: 106129 - RNA, 23 nt, synthetic construct
  source 1..23: mol_type = other RNA
tgtgggcagtctctggagtggag

SEQ ID NO: 106130 - RNA, 23 nt, synthetic construct
  source 1..23: mol_type = other RNA
tggtggtggagccggtggccgtg

SEQ ID NO: 106131 - RNA, 23 nt, synthetic construct
  source 1..23: mol_type = other RNA
tggaggaggaggggatggctgta

SEQ ID NO: 106132 - RNA, 23 nt, synthetic construct
  source 1..23: mol_type = other RNA
tggtggtggagccggtggccgtg

SEQ ID NO: 106133 - RNA, 23 nt, synthetic construct
  source 1..23: mol_type = other RNA
tgttgtggcactcagcaaagacc

SEQ ID NO: 106134 - RNA, 23 nt, synthetic construct
  source 1..23: mol_type = other RNA
tctggacacatctgggcaggatg

SEQ ID NO: 106135 - RNA, 23 nt, synthetic construct
  source 1..23: mol_type = other RNA
ttgggccgggaagccacgggtgt

SEQ ID NO: 106136 - RNA, 23 nt, synthetic construct
  source 1..23: mol_type = other RNA
tggtgctgcacacccgcccattg

SEQ ID NO: 106137 - RNA, 23 nt, synthetic construct
  source 1..23: mol_type = other RNA
tccccaggtgctgcacacccgcc

SEQ ID NO: 106138 - RNA, 23 nt, synthetic construct
  source 1..23: mol_type = other RNA
tggtcttgtagtggaagtcaccc

SEQ ID NO: 106139 - RNA, 23 nt, synthetic construct
  source 1..23: mol_type = other RNA
tccgtcgaaggtcttgtagtgga

SEQ ID NO: 106140 - RNA, 23 nt, synthetic construct
  source 1..23: mol_type = other RNA
tccagcaccagcccctgggcctt

SEQ ID NO: 106141 - RNA, 23 nt, synthetic construct
  source 1..23: mol_type = other RNA
ttgctccaccaggaggccagtgc

SEQ ID NO: 106142 - RNA, 23 nt, synthetic construct
  source 1..23: mol_type = other RNA
tctgctccaccaggaggccagtg

SEQ ID NO: 106143 - RNA, 23 nt, synthetic construct
  source 1..23: mol_type = other RNA
ttccagctccagcagggcactgt

SEQ ID NO: 106144 - RNA, 23 nt, synthetic construct
  source 1..23: mol_type = other RNA
tcccccggagcaggtgcaggagc

SEQ ID NO: 106145 - RNA, 23 nt, synthetic construct
  source 1..23: mol_type = other RNA
tccccccggagcaggtgcaggag

SEQ ID NO: 106146 - RNA, 23 nt, synthetic construct
  source 1..23: mol_type = other RNA
tagcagctgcagccccaggcctg

SEQ ID NO: 106147 - RNA, 23 nt, synthetic construct
  source 1..23: mol_type = other RNA
tcagcagctgcagccccaggcct

SEQ ID NO: 106148 - RNA, 23 nt, synthetic construct
  source 1..23: mol_type = other RNA
tgtggcctccaccaccccgctga

SEQ ID NO: 106149 - RNA, 23 nt, synthetic construct
  source 1..23: mol_type = other RNA
tctggcattggcacaggcagcct

SEQ ID NO: 106150 - RNA, 23 nt, synthetic construct
  source 1..23: mol_type = other RNA
tggtgtcaaacatgcagttcgag

SEQ ID NO: 106151 - RNA, 23 nt, synthetic construct
  source 1..23: mol_type = other RNA
tgaaggtgcccgcggggcaggtg

SEQ ID NO: 106152 - RNA, 23 nt, synthetic construct
  source 1..23: mol_type = other RNA
tgcccgccgagctgttgctgcag

SEQ ID NO: 106153 - RNA, 23 nt, synthetic construct
  source 1..23: mol_type = other RNA
ttgatggtctctccaggcttgta

SEQ ID NO: 106154 - RNA, 23 nt, synthetic construct
  source 1..23: mol_type = other RNA
tgagcttccagctgttcccaaac

SEQ ID NO: 106155 - RNA, 23 nt, synthetic construct
  source 1..23: mol_type = other RNA
tagagcttccagctgttcccaaa

SEQ ID NO: 106156 - RNA, 23 nt, synthetic construct
  source 1..23: mol_type = other RNA
tgagagcttccagctgttcccaa

SEQ ID NO: 106157 - RNA, 23 nt, synthetic construct
  source 1..23: mol_type = other RNA
tgagggggagagcttccagctgt

SEQ ID NO: 106158 - RNA, 23 nt, synthetic construct
  source 1..23: mol_type = other RNA
tgggcgtccgggcaggaggggga

SEQ ID NO: 106159 - RNA, 23 nt, synthetic construct
  source 1..23: mol_type = other RNA
tggccgtgcaggggtccttgggt

SEQ ID NO: 106160 - RNA, 23 nt, synthetic construct
  source 1..23: mol_type = other RNA
tggccgtggaggatgctgcactg

SEQ ID NO: 106161 - RNA, 23 nt, synthetic construct
  source 1..23: mol_type = other RNA
tggggccgtggaggatgctgcac

SEQ ID NO: 106162 - RNA, 23 nt, synthetic construct
  source 1..23: mol_type = other RNA
tggtggggccgtggaggatgctg

SEQ ID NO: 106163 - RNA, 23 nt, synthetic construct
  source 1..23: mol_type = other RNA
taaggtggggccgtggaggatgc

SEQ ID NO: 106164 - RNA, 23 nt, synthetic construct
  source 1..23: mol_type = other RNA
ttcacagaacaaggggcaggtgt

SEQ ID NO: 106165 - RNA, 23 nt, synthetic construct
  source 1..23: mol_type = other RNA
tgaccgggagggccgggcttgtc

SEQ ID NO: 106166 - RNA, 23 nt, synthetic construct
  source 1..23: mol_type = other RNA
ttggcccagctcctccagcggca

SEQ ID NO: 106167 - RNA, 23 nt, synthetic construct
  source 1..23: mol_type = other RNA
ttgctggcccagctcctccagcg

SEQ ID NO: 106168 - RNA, 23 nt, synthetic construct
  source 1..23: mol_type = other RNA
tcctgctggcccagctcctccag

SEQ ID NO: 106169 - RNA, 23 nt, synthetic construct
  source 1..23: mol_type = other RNA
tgtgcctggggccggggaggggc

SEQ ID NO: 106170 - RNA, 23 nt, synthetic construct
  source 1..23: mol_type = other RNA
tgggctggtgcctggggccgggg

SEQ ID NO: 106171 - RNA, 23 nt, synthetic construct
  source 1..23: mol_type = other RNA
tagggctggtgcctggggccggg

SEQ ID NO: 106172 - RNA, 23 nt, synthetic construct
  source 1..23: mol_type = other RNA
tgctggccgggggagccctggtc

SEQ ID NO: 106173 - RNA, 23 nt, synthetic construct
  source 1..23: mol_type = other RNA
tgggtggctgtgaggggcgccat

SEQ ID NO: 106174 - RNA, 23 nt, synthetic construct
  source 1..23: mol_type = other RNA
ttggaggtcggggtggccgtgga

SEQ ID NO: 106175 - RNA, 23 nt, synthetic construct
  source 1..23: mol_type = other RNA
tgctggtgactgtgggtgtggtg

SEQ ID NO: 106176 - RNA, 23 nt, synthetic construct
  source 1..23: mol_type = other RNA
tggtggaggagggggtggccaca

SEQ ID NO: 106177 - RNA, 23 nt, synthetic construct
  source 1..23: mol_type = other RNA
tgggtggaggagggggtggccac

SEQ ID NO: 106178 - RNA, 23 nt, synthetic construct
  source 1..23: mol_type = other RNA
tggggtggaggagggggtggcca

SEQ ID NO: 106179 - RNA, 23 nt, synthetic construct
  source 1..23: mol_type = other RNA
tgttgtggtggtggtggtcagca

SEQ ID NO: 106180 - RNA, 23 nt, synthetic construct
  source 1..23: mol_type = other RNA
tagttgtggtggtggtggtcagc

SEQ ID NO: 106181 - RNA, 23 nt, synthetic construct
  source 1..23: mol_type = other RNA
tcacagttgtggtggtggtggtc

SEQ ID NO: 106182 - RNA, 23 nt, synthetic construct
  source 1..23: mol_type = other RNA
tgtggtggcggtggtggtcagca

SEQ ID NO: 106183 - RNA, 23 nt, synthetic construct
  source 1..23: mol_type = other RNA
tgctggtgactgtgggtgtcgtg

SEQ ID NO: 106184 - RNA, 23 nt, synthetic construct
  source 1..23: mol_type = other RNA
tccagggaggaggaggggatggc

SEQ ID NO: 106185 - RNA, 23 nt, synthetic construct
  source 1..23: mol_type = other RNA
tggtggaggagggggtggccaca

SEQ ID NO: 106186 - RNA, 23 nt, synthetic construct
  source 1..23: mol_type = other RNA
tgggtggaggagggggtggccac

SEQ ID NO: 106187 - RNA, 23 nt, synthetic construct
  source 1..23: mol_type = other RNA
tggggtggaggagggggtggcca

SEQ ID NO: 106188 - RNA, 23 nt, synthetic construct
  source 1..23: mol_type = other RNA
tgttgtggtggtggtggtcagca

SEQ ID NO: 106189 - RNA, 23 nt, synthetic construct
  source 1..23: mol_type = other RNA
tagttgtggtggtggtggtcagc

SEQ ID NO: 106190 - RNA, 23 nt, synthetic construct
  source 1..23: mol_type = other RNA
tcacagttgtggtggtggtggtc

SEQ ID NO: 106191 - RNA, 23 nt, synthetic construct
  source 1..23: mol_type = other RNA
tgtggtggcggtggtggtcagca

SEQ ID NO: 106192 - RNA, 23 nt, synthetic construct
  source 1..23: mol_type = other RNA
tgttgctgctggggtgtgggaag

SEQ ID NO: 106193 - RNA, 23 nt, synthetic construct
  source 1..23: mol_type = other RNA
tttcccggggtggaggacgggat

SEQ ID NO: 106194 - RNA, 23 nt, synthetic construct
  source 1..23: mol_type = other RNA
tgtggaggagggggtggacatgg

SEQ ID NO: 106195 - RNA, 23 nt, synthetic construct
  source 1..23: mol_type = other RNA
tggtggaggagggggtggccaca

SEQ ID NO: 106196 - RNA, 23 nt, synthetic construct
  source 1..23: mol_type = other RNA
tgggtggaggagggggtggccac

SEQ ID NO: 106197 - RNA, 23 nt, synthetic construct
  source 1..23: mol_type = other RNA
tggggtggaggagggggtggcca

SEQ ID NO: 106198 - RNA, 23 nt, synthetic construct
  source 1..23: mol_type = other RNA
tgttgtggtggtggtggtcagca

SEQ ID NO: 106199 - RNA, 23 nt, synthetic construct
  source 1..23: mol_type = other RNA
tagttgtggtggtggtggtcagc

SEQ ID NO: 106200 - RNA, 23 nt, synthetic construct
  source 1..23: mol_type = other RNA
tcacagttgtggtggtggtggtc

SEQ ID NO: 106201 - RNA, 23 nt, synthetic construct
  source 1..23: mol_type = other RNA
tgtggtggcggtggtggtcagca

SEQ ID NO: 106202 - RNA, 23 nt, synthetic construct
  source 1..23: mol_type = other RNA
tgttgctgctggggtgtgggaag

SEQ ID NO: 106203 - RNA, 23 nt, synthetic construct
  source 1..23: mol_type = other RNA
ttgtggctgtggctgtggtcctg

SEQ ID NO: 106204 - RNA, 23 nt, synthetic construct
  source 1..23: mol_type = other RNA
tgtgtggctgtggctgtggtcct

SEQ ID NO: 106205 - RNA, 23 nt, synthetic construct
  source 1..23: mol_type = other RNA
tgctggtgactgtgggtgtcgtg

SEQ ID NO: 106206 - RNA, 23 nt, synthetic construct
  source 1..23: mol_type = other RNA
tccagggaggaggaggggatggc

SEQ ID NO: 106207 - RNA, 23 nt, synthetic construct
  source 1..23: mol_type = other RNA
tgttgtggtggtggtggtcagca

SEQ ID NO: 106208 - RNA, 23 nt, synthetic construct
  source 1..23: mol_type = other RNA
tagttgtggtggtggtggtcagc

SEQ ID NO: 106209 - RNA, 23 nt, synthetic construct
  source 1..23: mol_type = other RNA
tcacagttgtggtggtggtggtc

SEQ ID NO: 106210 - RNA, 23 nt, synthetic construct
  source 1..23: mol_type = other RNA
tgtggtggcggtggtggtcagca

SEQ ID NO: 106211 - RNA, 23 nt, synthetic construct
  source 1..23: mol_type = other RNA
tgttgctgctggggtgtgggaag

SEQ ID NO: 106212 - RNA, 23 nt, synthetic construct
  source 1..23: mol_type = other RNA
tttcccggggtggaggacggggt

SEQ ID NO: 106213 - RNA, 23 nt, synthetic construct
  source 1..23: mol_type = other RNA
ttggacatggtggccacgggtgt

SEQ ID NO: 106214 - RNA, 23 nt, synthetic construct
  source 1..23: mol_type = other RNA
tgtggaggagggggtggacgtgg

SEQ ID NO: 106215 - RNA, 23 nt, synthetic construct
  source 1..23: mol_type = other RNA
tgctggtgactgtgggtgtcgtg

SEQ ID NO: 106216 - RNA, 23 nt, synthetic construct
  source 1..23: mol_type = other RNA
tccagggaggaggaggggatggc

SEQ ID NO: 106217 - RNA, 23 nt, synthetic construct
  source 1..23: mol_type = other RNA
tggtggaggagggggtggccaca

SEQ ID NO: 106218 - RNA, 23 nt, synthetic construct
  source 1..23: mol_type = other RNA
tgggtggaggagggggtggccac

SEQ ID NO: 106219 - RNA, 23 nt, synthetic construct
  source 1..23: mol_type = other RNA
tggggtggaggagggggtggcca

SEQ ID NO: 106220 - RNA, 23 nt, synthetic construct
  source 1..23: mol_type = other RNA
tgttgtggtggtggtggtcagca

SEQ ID NO: 106221 - RNA, 23 nt, synthetic construct
  source 1..23: mol_type = other RNA
tagttgtggtggtggtggtcagc

SEQ ID NO: 106222 - RNA, 23 nt, synthetic construct
  source 1..23: mol_type = other RNA
tcacagttgtggtggtggtggtc

SEQ ID NO: 106223 - RNA, 23 nt, synthetic construct
  source 1..23: mol_type = other RNA
tatggtggctgtggtggtcagca

SEQ ID NO: 106224 - RNA, 23 nt, synthetic construct
  source 1..23: mol_type = other RNA
tggcagcggcagtggcagaggcc

SEQ ID NO: 106225 - RNA, 23 nt, synthetic construct
  source 1..23: mol_type = other RNA
tcggcagcggcagtggcagaggc

SEQ ID NO: 106226 - RNA, 23 nt, synthetic construct
  source 1..23: mol_type = other RNA
tgggcgcgggggcagcgggcggc

SEQ ID NO: 106227 - RNA, 23 nt, synthetic construct
  source 1..23: mol_type = other RNA
tgggcagaagcagccctccgcca

SEQ ID NO: 106228 - RNA, 23 nt, synthetic construct
  source 1..23: mol_type = other RNA
taggatctggtcctcagggcaga

SEQ ID NO: 106229 - RNA, 23 nt, synthetic construct
  source 1..23: mol_type = other RNA
tcagctgaggtctgcagcggaag

SEQ ID NO: 106230 - RNA, 23 nt, synthetic construct
  source 1..23: mol_type = other RNA
ttactcaaagccctggggacagg

SEQ ID NO: 106231 - RNA, 23 nt, synthetic construct
  source 1..23: mol_type = other RNA
ttgtactcaaagccctggggaca

SEQ ID NO: 106232 - RNA, 23 nt, synthetic construct
  source 1..23: mol_type = other RNA
tattcagctggactggctggcca

SEQ ID NO: 106233 - RNA, 23 nt, synthetic construct
  source 1..23: mol_type = other RNA
tctgggccgggaagccacgggtg

SEQ ID NO: 106234 - RNA, 23 nt, synthetic construct
  source 1..23: mol_type = other RNA
tgtgacatcagggaggggcaagg

SEQ ID NO: 106235 - RNA, 23 nt, synthetic construct
  source 1..23: mol_type = other RNA
tgactgctgtggtgctggccggg

SEQ ID NO: 106236 - RNA, 23 nt, synthetic construct
  source 1..23: mol_type = other RNA
tccggagtggaggagggggtgga

SEQ ID NO: 106237 - RNA, 23 nt, synthetic construct
  source 1..23: mol_type = other RNA
tccggagtggaggagggggtgga

SEQ ID NO: 106238 - RNA, 23 nt, synthetic construct
  source 1..23: mol_type = other RNA
tggggggacggggacgggcaggg

SEQ ID NO: 106239 - RNA, 23 nt, synthetic construct
  source 1..23: mol_type = other RNA
taggagggggagagcttccagct

SEQ ID NO: 106240 - RNA, 23 nt, synthetic construct
  source 1..23: mol_type = other RNA
tccagggaggaagaggggatggg

SEQ ID NO: 106241 - RNA, 23 nt, synthetic construct
  source 1..23: mol_type = other RNA
tggaggaagaggggatggctgta

SEQ ID NO: 106242 - RNA, 23 nt, synthetic construct
  source 1..23: mol_type = other RNA
tccagggaggaagaggggatggc

SEQ ID NO: 106243 - RNA, 23 nt, synthetic construct
  source 1..23: mol_type = other RNA
tcaggagggggagagcttccagc

SEQ ID NO: 106244 - RNA, 23 nt, synthetic construct
  source 1..23: mol_type = other RNA
tgctgcagccccaggcctgtctg

SEQ ID NO: 106245 - RNA, 23 nt, synthetic construct
  source 1..23: mol_type = other RNA
taccacctctccaggagccagca

SEQ ID NO: 106246 - RNA, 23 nt, synthetic construct
  source 1..23: mol_type = other RNA
tgaaggtggggccgtggaggatg

SEQ ID NO: 106247 - RNA, 23 nt, synthetic construct
  source 1..23: mol_type = other RNA
tctggggtggaggagggggtggc

SEQ ID NO: 106248 - RNA, 23 nt, synthetic construct
  source 1..23: mol_type = other RNA
tctggggtggaggagggggtggc

SEQ ID NO: 106249 - RNA, 23 nt, synthetic construct
  source 1..23: mol_type = other RNA
tctggggtggaggagggggtggc

SEQ ID NO: 106250 - RNA, 23 nt, synthetic construct
  source 1..23: mol_type = other RNA
tctggggtggaggagggggtggc

SEQ ID NO: 106251 - RNA, 23 nt, synthetic construct
  source 1..23: mol_type = other RNA
ttggggtgggggtgggtgtgcta

SEQ ID NO: 106252 - RNA, 23 nt, synthetic construct
  source 1..23: mol_type = other RNA
tcagcagtggcctcctgggccgg

SEQ ID NO: 106253 - RNA, 23 nt, synthetic construct
  source 1..23: mol_type = other RNA
tgttgtggtggccgtggcggtaa

SEQ ID NO: 106254 - RNA, 23 nt, synthetic construct
  source 1..23: mol_type = other RNA
tgttgtggtggccgtggcggtaa

SEQ ID NO: 106255 - RNA, 23 nt, synthetic construct
  source 1..23: mol_type = other RNA
tgtgctgggctctgtgaggatcc

SEQ ID NO: 106256 - RNA, 23 nt, synthetic construct
  source 1..23: mol_type = other RNA
tgggttggtggtggagccggtgg

SEQ ID NO: 106257 - RNA, 23 nt, synthetic construct
  source 1..23: mol_type = other RNA
tgggttggtggtggagccggtgg

SEQ ID NO: 106258 - RNA, 23 nt, synthetic construct
  source 1..23: mol_type = other RNA
tgggttggtggtggagccggtgg

SEQ ID NO: 106259 - RNA, 23 nt, synthetic construct
  source 1..23: mol_type = other RNA
tgggttggtggtggagccggtgg

SEQ ID NO: 106260 - RNA, 23 nt, synthetic construct
  source 1..23: mol_type = other RNA
tgggttggtggtggagccggtgg

SEQ ID NO: 106261 - RNA, 23 nt, synthetic construct
  source 1..23: mol_type = other RNA
tggcagttgctgacccaccgctc

SEQ ID NO: 106262 - RNA, 23 nt, synthetic construct
  source 1..23: mol_type = other RNA
tctgcagccccaggcctgtctgc

SEQ ID NO: 106263 - RNA, 23 nt, synthetic construct
  source 1..23: mol_type = other RNA
tctcccaggccgggctctgggcg

SEQ ID NO: 106264 - RNA, 23 nt, synthetic construct
  source 1..23: mol_type = other RNA
tccagcagctgcagccccaggcc

SEQ ID NO: 106265 - RNA, 23 nt, synthetic construct
  source 1..23: mol_type = other RNA
tcagggaggaggaggggatggct

SEQ ID NO: 106266 - RNA, 23 nt, synthetic construct
  source 1..23: mol_type = other RNA
tcagggaggaggaggggatggct

SEQ ID NO: 106267 - RNA, 23 nt, synthetic construct
  source 1..23: mol_type = other RNA
tcagggaggaggaggggatggct

SEQ ID NO: 106268 - RNA, 23 nt, synthetic construct
  source 1..23: mol_type = other RNA
tcggcactctatgctctttggtg

SEQ ID NO: 106269 - RNA, 23 nt, synthetic construct
  source 1..23: mol_type = other RNA
tcgcccggcactctatgctcttt

SEQ ID NO: 106270 - RNA, 23 nt, synthetic construct
  source 1..23: mol_type = other RNA
tgcgcactggcgtgagtattcca

SEQ ID NO: 106271 - RNA, 23 nt, synthetic construct
  source 1..23: mol_type = other RNA
tgcttacctcggggtagttctcc

SEQ ID NO: 106272 - RNA, 23 nt, synthetic construct
  source 1..23: mol_type = other RNA
tcttacctcggggtagttctccg

SEQ ID NO: 106273 - RNA, 23 nt, synthetic construct
  source 1..23: mol_type = other RNA
tgtgcgttgaagaggatctggtc

SEQ ID NO: 106274 - RNA, 23 nt, synthetic construct
  source 1..23: mol_type = other RNA
tcggctttgtgaggatccaggtc

SEQ ID NO: 106275 - RNA, 23 nt, synthetic construct
  source 1..23: mol_type = other RNA
tcgtgttgatgcggacttgacag

SEQ ID NO: 106276 - RNA, 23 nt, synthetic construct
  source 1..23: mol_type = other RNA
tatcgggtcccacgcaggggcag

SEQ ID NO: 106277 - RNA, 23 nt, synthetic construct
  source 1..23: mol_type = other RNA
tttacgaagccgggacggttgca

SEQ ID NO: 106278 - RNA, 23 nt, synthetic construct
  source 1..23: mol_type = other RNA
tcgcatggcttgtacactttggt

SEQ ID NO: 106279 - RNA, 23 nt, synthetic construct
  source 1..23: mol_type = other RNA
tgccggctcggtcggtcttattg

SEQ ID NO: 106280 - RNA, 23 nt, synthetic construct
  source 1..23: mol_type = other RNA
tatccgggtcgtccccagagtgg

SEQ ID NO: 106281 - RNA, 23 nt, synthetic construct
  source 1..23: mol_type = other RNA
tccgctttcaggcagttctcgtt

SEQ ID NO: 106282 - RNA, 23 nt, synthetic construct
  source 1..23: mol_type = other RNA
tcctcggggtagttctccgcccg

SEQ ID NO: 106283 - RNA, 23 nt, synthetic construct
  source 1..23: mol_type = other RNA
tgaagtggccatccccgtaggcc

SEQ ID NO: 106284 - RNA, 23 nt, synthetic construct
  source 1..23: mol_type = other RNA
tcggggtagttctccgcccggca

SEQ ID NO: 106285 - RNA, 23 nt, synthetic construct
  source 1..23: mol_type = other RNA
tagttctccgcccggcactctat

SEQ ID NO: 106286 - RNA, 23 nt, synthetic construct
  source 1..23: mol_type = other RNA
tcccggcactctatgctctttgg

SEQ ID NO: 106287 - RNA, 23 nt, synthetic construct
  source 1..23: mol_type = other RNA
tggtagttctccgcccggcactc

SEQ ID NO: 106288 - RNA, 23 nt, synthetic construct
  source 1..23: mol_type = other RNA
tgggtagttctccgcccggcact

SEQ ID NO: 106289 - RNA, 23 nt, synthetic construct
  source 1..23: mol_type = other RNA
tccggcactctatgctctttggt

SEQ ID NO: 106290 - RNA, 23 nt, synthetic construct
  source 1..23: mol_type = other RNA
tggggtagttctccgcccggcac

SEQ ID NO: 106291 - RNA, 23 nt, synthetic construct
  source 1..23: mol_type = other RNA
ttccgcccggcactctatgctct

SEQ ID NO: 106292 - RNA, 23 nt, synthetic construct
  source 1..23: mol_type = other RNA
ttcggggtagttctccgcccggc

SEQ ID NO: 106293 - RNA, 23 nt, synthetic construct
  source 1..23: mol_type = other RNA
tgtagttgaagcacatgttgaac

SEQ ID NO: 106294 - RNA, 23 nt, synthetic construct
  source 1..23: mol_type = other RNA
tagcgcactggatgccactgggt

SEQ ID NO: 106295 - RNA, 23 nt, synthetic construct
  source 1..23: mol_type = other RNA
taagtttccatgtccccgcctgc

SEQ ID NO: 106296 - RNA, 23 nt, synthetic construct
  source 1..23: mol_type = other RNA
tcactctatgctctttggtgccc

SEQ ID NO: 106297 - RNA, 23 nt, synthetic construct
  source 1..23: mol_type = other RNA
tgcccggcactctatgctctttg

SEQ ID NO: 106298 - RNA, 23 nt, synthetic construct
  source 1..23: mol_type = other RNA
tccgcccggcactctatgctctt

SEQ ID NO: 106299 - RNA, 23 nt, synthetic construct
  source 1..23: mol_type = other RNA
ttagttctccgcccggcactcta

SEQ ID NO: 106300 - RNA, 23 nt, synthetic construct
  source 1..23: mol_type = other RNA
tgtagttctccgcccggcactct

SEQ ID NO: 106301 - RNA, 23 nt, synthetic construct
  source 1..23: mol_type = other RNA
tgttgaacctgcctgtctggtct

SEQ ID NO: 106302 - RNA, 23 nt, synthetic construct
  source 1..23: mol_type = other RNA
tagcacatgttgaacctgcctgt

SEQ ID NO: 106303 - RNA, 23 nt, synthetic construct
  source 1..23: mol_type = other RNA
ttgtagttgaagcacatgttgaa

SEQ ID NO: 106304 - RNA, 23 nt, synthetic construct
  source 1..23: mol_type = other RNA
ttggctgtagtcgtcacagcaaa

SEQ ID NO: 106305 - RNA, 23 nt, synthetic construct
  source 1..23: mol_type = other RNA
tagtggctgtagtcgtcacagca

SEQ ID NO: 106306 - RNA, 23 nt, synthetic construct
  source 1..23: mol_type = other RNA
tgggcagtggctgtagtcgtcac

SEQ ID NO: 106307 - RNA, 23 nt, synthetic construct
  source 1..23: mol_type = other RNA
ttctatgctctttggtgcccagc

SEQ ID NO: 106308 - RNA, 23 nt, synthetic construct
  source 1..23: mol_type = other RNA
tggtgcccagcacatcttgcccc

SEQ ID NO: 106309 - RNA, 23 nt, synthetic construct
  source 1..23: mol_type = other RNA
tctctatgctctttggtgcccag

SEQ ID NO: 106310 - RNA, 23 nt, synthetic construct
  source 1..23: mol_type = other RNA
tctgacaccggggctggcaggtg

SEQ ID NO: 106311 - RNA, 23 nt, synthetic construct
  source 1..23: mol_type = other RNA
tttgaacctgcctgtctggtctt

SEQ ID NO: 106312 - RNA, 23 nt, synthetic construct
  source 1..23: mol_type = other RNA
tagcacatcttgcccccagcagc

SEQ ID NO: 106313 - RNA, 23 nt, synthetic construct
  source 1..23: mol_type = other RNA
tgtgcccagcacatcttgccccc

SEQ ID NO: 106314 - RNA, 23 nt, synthetic construct
  source 1..23: mol_type = other RNA
tcacatcttgcccccagcagccc

SEQ ID NO: 106315 - RNA, 23 nt, synthetic construct
  source 1..23: mol_type = other RNA
tgcacatcttgcccccagcagcc

SEQ ID NO: 106316 - RNA, 23 nt, synthetic construct
  source 1..23: mol_type = other RNA
tgtggctgtagtcgtcacagcaa

SEQ ID NO: 106317 - RNA, 23 nt, synthetic construct
  source 1..23: mol_type = other RNA
tcagtggctgtagtcgtcacagc

SEQ ID NO: 106318 - RNA, 23 nt, synthetic construct
  source 1..23: mol_type = other RNA
tcgcagtgtgtgctgaaacagcc

SEQ ID NO: 106319 - RNA, 23 nt, synthetic construct
  source 1..23: mol_type = other RNA
tcgtagcagccacactgggccac

SEQ ID NO: 106320 - RNA, 23 nt, synthetic construct
  source 1..23: mol_type = other RNA
tagtttccatgtccccgcctgca

SEQ ID NO: 106321 - RNA, 23 nt, synthetic construct
  source 1..23: mol_type = other RNA
tatgttgaacctgcctgtctggt

SEQ ID NO: 106322 - RNA, 23 nt, synthetic construct
  source 1..23: mol_type = other RNA
tacatgttgaacctgcctgtctg

SEQ ID NO: 106323 - RNA, 23 nt, synthetic construct
  source 1..23: mol_type = other RNA
tgcacatgttgaacctgcctgtc

SEQ ID NO: 106324 - RNA, 23 nt, synthetic construct
  source 1..23: mol_type = other RNA
tttgaagcacatgttgaacctgc

SEQ ID NO: 106325 - RNA, 23 nt, synthetic construct
  source 1..23: mol_type = other RNA
tagttgaagcacatgttgaacct

SEQ ID NO: 106326 - RNA, 23 nt, synthetic construct
  source 1..23: mol_type = other RNA
tggcactctatgctctttggtgc

SEQ ID NO: 106327 - RNA, 23 nt, synthetic construct
  source 1..23: mol_type = other RNA
tccagcagccctgatgttttcaa

SEQ ID NO: 106328 - RNA, 23 nt, synthetic construct
  source 1..23: mol_type = other RNA
tactgacaccggggctggcaggt

SEQ ID NO: 106329 - RNA, 23 nt, synthetic construct
  source 1..23: mol_type = other RNA
tgctctttggtgcccagcacatc

SEQ ID NO: 106330 - RNA, 23 nt, synthetic construct
  source 1..23: mol_type = other RNA
tcacatgttgaacctgcctgtct

SEQ ID NO: 106331 - RNA, 23 nt, synthetic construct
  source 1..23: mol_type = other RNA
tgttgaagcacatgttgaacctg

SEQ ID NO: 106332 - RNA, 23 nt, synthetic construct
  source 1..23: mol_type = other RNA
tgtgcggctgtaaggcagctcct

SEQ ID NO: 106333 - RNA, 23 nt, synthetic construct
  source 1..23: mol_type = other RNA
tggacagaacgtagctgcagtca

SEQ ID NO: 106334 - RNA, 23 nt, synthetic construct
  source 1..23: mol_type = other RNA
ttaggactcaacgtcccctccaa

SEQ ID NO: 106335 - RNA, 23 nt, synthetic construct
  source 1..23: mol_type = other RNA
tagtgccgggcgtagttctcatt

SEQ ID NO: 106336 - RNA, 23 nt, synthetic construct
  source 1..23: mol_type = other RNA
ttcgagggtgtgaacagggtgat

SEQ ID NO: 106337 - RNA, 23 nt, synthetic construct
  source 1..23: mol_type = other RNA
tcacgccgttcttgctgaaaccg

SEQ ID NO: 106338 - RNA, 23 nt, synthetic construct
  source 1..23: mol_type = other RNA
taggctgtgagcgcactggatgc

SEQ ID NO: 106339 - RNA, 23 nt, synthetic construct
  source 1..23: mol_type = other RNA
tacagtgacgggtggaacaaagc

SEQ ID NO: 106340 - RNA, 23 nt, synthetic construct
  source 1..23: mol_type = other RNA
tcgtgggtgcaggggcactgccc

SEQ ID NO: 106341 - RNA, 23 nt, synthetic construct
  source 1..23: mol_type = other RNA
ttgttggctgccgacaggggcag

SEQ ID NO: 106342 - RNA, 23 nt, synthetic construct
  source 1..23: mol_type = other RNA
ttgctcacagacggcccctccgg

SEQ ID NO: 106343 - RNA, 23 nt, synthetic construct
  source 1..23: mol_type = other RNA
ttgctcacagacggcccctccgg

SEQ ID NO: 106344 - RNA, 23 nt, synthetic construct
  source 1..23: mol_type = other RNA
ttgctcacagacggcccctccgg

SEQ ID NO: 106345 - RNA, 23 nt, synthetic construct
  source 1..23: mol_type = other RNA
tcatccaacttctgcaggttccc

SEQ ID NO: 106346 - RNA, 23 nt, synthetic construct
  source 1..23: mol_type = other RNA
tgcagcgggtccgggcactgctc

SEQ ID NO: 106347 - RNA, 23 nt, synthetic construct
  source 1..23: mol_type = other RNA
ttcctgtagttgtagcacatctt

SEQ ID NO: 106348 - RNA, 23 nt, synthetic construct
  source 1..23: mol_type = other RNA
tcggctgtaaggcagctcctccc

SEQ ID NO: 106349 - RNA, 23 nt, synthetic construct
  source 1..23: mol_type = other RNA
ttacagctctggcagttctccgc

SEQ ID NO: 106350 - RNA, 23 nt, synthetic construct
  source 1..23: mol_type = other RNA
taccgtgcctggggggcagaagc

SEQ ID NO: 106351 - RNA, 23 nt, synthetic construct
  source 1..23: mol_type = other RNA
ttagttgaagcacatgttgaacc

SEQ ID NO: 106352 - RNA, 23 nt, synthetic construct
  source 1..23: mol_type = other RNA
ttcccacaggggatgttctcggt

SEQ ID NO: 106353 - RNA, 23 nt, synthetic construct
  source 1..23: mol_type = other RNA
ttagcagccacactgggccacgc

SEQ ID NO: 106354 - RNA, 23 nt, synthetic construct
  source 1..23: mol_type = other RNA
tcctggtgggcggggtccagcct

SEQ ID NO: 106355 - RNA, 23 nt, synthetic construct
  source 1..23: mol_type = other RNA
taaaggccggccccagcagggtg

SEQ ID NO: 106356 - RNA, 23 nt, synthetic construct
  source 1..23: mol_type = other RNA
tgcatagaactcgttgaaggccg

SEQ ID NO: 106357 - RNA, 23 nt, synthetic construct
  source 1..23: mol_type = other RNA
tcacgcagtgtgtgctgaaacag

SEQ ID NO: 106358 - RNA, 23 nt, synthetic construct
  source 1..23: mol_type = other RNA
tcccccgcgtgggcgcactggcg

SEQ ID NO: 106359 - RNA, 23 nt, synthetic construct
  source 1..23: mol_type = other RNA
tctgtccaaatgccctgcagaag

SEQ ID NO: 106360 - RNA, 23 nt, synthetic construct
  source 1..23: mol_type = other RNA
taaccactctgtccactgacacc

SEQ ID NO: 106361 - RNA, 23 nt, synthetic construct
  source 1..23: mol_type = other RNA
tgtcgtggagtgggggacccagg

SEQ ID NO: 106362 - RNA, 23 nt, synthetic construct
  source 1..23: mol_type = other RNA
tggtcgatgcttacctcggggta

SEQ ID NO: 106363 - RNA, 23 nt, synthetic construct
  source 1..23: mol_type = other RNA
tgatgcttacctcggggtagttc

SEQ ID NO: 106364 - RNA, 23 nt, synthetic construct
  source 1..23: mol_type = other RNA
tcgatgcttacctcggggtagtt

SEQ ID NO: 106365 - RNA, 23 nt, synthetic construct
  source 1..23: mol_type = other RNA
tgtcgatgcttacctcggggtag

SEQ ID NO: 106366 - RNA, 23 nt, synthetic construct
  source 1..23: mol_type = other RNA
tacagtcgtccctctggttgttg

SEQ ID NO: 106367 - RNA, 23 nt, synthetic construct
  source 1..23: mol_type = other RNA
tatgcttacctcggggtagttct

SEQ ID NO: 106368 - RNA, 23 nt, synthetic construct
  source 1..23: mol_type = other RNA
tacctcggggtagttctccgccc

SEQ ID NO: 106369 - RNA, 23 nt, synthetic construct
  source 1..23: mol_type = other RNA
ttacctcggggtagttctccgcc

SEQ ID NO: 106370 - RNA, 23 nt, synthetic construct
  source 1..23: mol_type = other RNA
ttgcttacctcggggtagttctc

SEQ ID NO: 106371 - RNA, 23 nt, synthetic construct
  source 1..23: mol_type = other RNA
tcccgtctccaggctgcaggtca

SEQ ID NO: 106372 - RNA, 23 nt, synthetic construct
  source 1..23: mol_type = other RNA
ttggtcgatgcttacctcggggt

SEQ ID NO: 106373 - RNA, 23 nt, synthetic construct
  source 1..23: mol_type = other RNA
tgtgaggatccaggtcgtccccg

SEQ ID NO: 106374 - RNA, 23 nt, synthetic construct
  source 1..23: mol_type = other RNA
tgtgaggatccaggtcgtccccg

SEQ ID NO: 106375 - RNA, 23 nt, synthetic construct
  source 1..23: mol_type = other RNA
tgtgaggatccaggtcgtccctg

SEQ ID NO: 106376 - RNA, 23 nt, synthetic construct
  source 1..23: mol_type = other RNA
tgtgaggatccaggtcgtccccg

SEQ ID NO: 106377 - RNA, 23 nt, synthetic construct
  source 1..23: mol_type = other RNA
tgtgaggatccaggtcgtccccg

SEQ ID NO: 106378 - RNA, 23 nt, synthetic construct
  source 1..23: mol_type = other RNA
tgtgaggatccaggtcgtccccg

SEQ ID NO: 106379 - RNA, 23 nt, synthetic construct
  source 1..23: mol_type = other RNA
tgtgaggatccaggtcgtccccg

SEQ ID NO: 106380 - RNA, 23 nt, synthetic construct
  source 1..23: mol_type = other RNA
taaactgggctgggttgagcaga

SEQ ID NO: 106381 - RNA, 23 nt, synthetic construct
  source 1..23: mol_type = other RNA
ttcgatgcttacctcggggtagt

SEQ ID NO: 106382 - RNA, 23 nt, synthetic construct
  source 1..23: mol_type = other RNA
ttttggaactggtggctgtgggt

SEQ ID NO: 106383 - RNA, 23 nt, synthetic construct
  source 1..23: mol_type = other RNA
ttttggaactggtggctgtgggt

SEQ ID NO: 106384 - RNA, 23 nt, synthetic construct
  source 1..23: mol_type = other RNA
tttccagggcgtcccagtgacat

SEQ ID NO: 106385 - RNA, 23 nt, synthetic construct
  source 1..23: mol_type = other RNA
tttacctcggggtagttctccgc

SEQ ID NO: 106386 - RNA, 23 nt, synthetic construct
  source 1..23: mol_type = other RNA
tggctcgggtccgacactttgat

SEQ ID NO: 106387 - RNA, 23 nt, synthetic construct
  source 1..23: mol_type = other RNA
ttgaggatccaggtcgtccccgg

SEQ ID NO: 106388 - RNA, 23 nt, synthetic construct
  source 1..23: mol_type = other RNA
ttgaggatccaggtcgtccccgg

SEQ ID NO: 106389 - RNA, 23 nt, synthetic construct
  source 1..23: mol_type = other RNA
ttgaggatccaggtcgtccccgg

SEQ ID NO: 106390 - RNA, 23 nt, synthetic construct
  source 1..23: mol_type = other RNA
ttgaggatccaggtcgtccccgg

SEQ ID NO: 106391 - RNA, 23 nt, synthetic construct
  source 1..23: mol_type = other RNA
ttgaggatccaggtcgtccccgg

SEQ ID NO: 106392 - RNA, 23 nt, synthetic construct
  source 1..23: mol_type = other RNA
ttgaggatccaggtcgtccccgg

SEQ ID NO: 106393 - RNA, 23 nt, synthetic construct
  source 1..23: mol_type = other RNA
ttttcatagttgaagcacatctt

SEQ ID NO: 106394 - RNA, 23 nt, synthetic construct
  source 1..23: mol_type = other RNA
ttttcatagttgaagcacatctt

SEQ ID NO: 106395 - RNA, 23 nt, synthetic construct
  source 1..23: mol_type = other RNA
ttttcatagttgaagcacatctt

SEQ ID NO: 106396 - RNA, 23 nt, synthetic construct
  source 1..23: mol_type = other RNA
ttttcatagttgaagcacatctt

SEQ ID NO: 106397 - RNA, 23 nt, synthetic construct
  source 1..23: mol_type = other RNA
tgtccccagagtggaggagggtg

SEQ ID NO: 106398 - RNA, 23 nt, synthetic construct
  source 1..23: mol_type = other RNA
tcgtccccagagtggaggagggt

SEQ ID NO: 106399 - RNA, 23 nt, synthetic construct
  source 1..23: mol_type = other RNA
tccttgatgacaacacgggtgac

SEQ ID NO: 106400 - RNA, 23 nt, synthetic construct
  source 1..23: mol_type = other RNA
tttgtggtagtcagcactttggt

SEQ ID NO: 106401 - RNA, 23 nt, synthetic construct
  source 1..23: mol_type = other RNA
tcgtggtggtaagcactgtggag

SEQ ID NO: 106402 - RNA, 23 nt, synthetic construct
  source 1..23: mol_type = other RNA
tcgtggtggtaagcactgtggag

SEQ ID NO: 106403 - RNA, 23 nt, synthetic construct
  source 1..23: mol_type = other RNA
ttggatgcagtcgtagtggctgt

SEQ ID NO: 106404 - RNA, 23 nt, synthetic construct
  source 1..23: mol_type = other RNA
tttcgttcttgcaggtcagcccc

SEQ ID NO: 106405 - RNA, 23 nt, synthetic construct
  source 1..23: mol_type = other RNA
tagtggacgcagtcgtagtggct

SEQ ID NO: 106406 - RNA, 23 nt, synthetic construct
  source 1..23: mol_type = other RNA
tagtggacgcagtcgtagtggct

SEQ ID NO: 106407 - RNA, 23 nt, synthetic construct
  source 1..23: mol_type = other RNA
tcctgcccgacctggtcgatgct

SEQ ID NO: 106408 - RNA, 23 nt, synthetic construct
  source 1..23: mol_type = other RNA
tcccgacctggtcgatgcttacc

SEQ ID NO: 106409 - RNA, 23 nt, synthetic construct
  source 1..23: mol_type = other RNA
ttgcctgtctggtcttcgttctt

SEQ ID NO: 106410 - RNA, 23 nt, synthetic construct
  source 1..23: mol_type = other RNA
taaagcacacgcacgttgtagtt

SEQ ID NO: 106411 - RNA, 23 nt, synthetic construct
  source 1..23: mol_type = other RNA
tcttcgttcttgcaggtcagccc

SEQ ID NO: 106412 - RNA, 23 nt, synthetic construct
  source 1..23: mol_type = other RNA
taagcacacgcacgttgtagttg

SEQ ID NO: 106413 - RNA, 23 nt, synthetic construct
  source 1..23: mol_type = other RNA
ttagtcgtcacagcaaagcacac

SEQ ID NO: 106414 - RNA, 23 nt, synthetic construct
  source 1..23: mol_type = other RNA
ttcagtcgtagtggctgttgtgg

SEQ ID NO: 106415 - RNA, 23 nt, synthetic construct
  source 1..23: mol_type = other RNA
ttcagtcgtagtggctgttgtgg

SEQ ID NO: 106416 - RNA, 23 nt, synthetic construct
  source 1..23: mol_type = other RNA
tgcacacgcacgttgtagttgaa

SEQ ID NO: 106417 - RNA, 23 nt, synthetic construct
  source 1..23: mol_type = other RNA
tagcacacgcacgttgtagttga

SEQ ID NO: 106418 - RNA, 23 nt, synthetic construct
  source 1..23: mol_type = other RNA
tggtcgtccccggagttgaggag

SEQ ID NO: 106419 - RNA, 23 nt, synthetic construct
  source 1..23: mol_type = other RNA
tggtcgtccccggagttgaggag

SEQ ID NO: 106420 - RNA, 23 nt, synthetic construct
  source 1..23: mol_type = other RNA
tgacctggtcgatgcttacctcg

SEQ ID NO: 106421 - RNA, 23 nt, synthetic construct
  source 1..23: mol_type = other RNA
tacagggctggagtcgagtgctg

SEQ ID NO: 106422 - RNA, 23 nt, synthetic construct
  source 1..23: mol_type = other RNA
tacagggctggagtcgagtgctg

SEQ ID NO: 106423 - RNA, 23 nt, synthetic construct
  source 1..23: mol_type = other RNA
tacagggctggagtcgagtgctg

SEQ ID NO: 106424 - RNA, 23 nt, synthetic construct
  source 1..23: mol_type = other RNA
ttggacgcagtcgtagtggctgt

SEQ ID NO: 106425 - RNA, 23 nt, synthetic construct
  source 1..23: mol_type = other RNA
ttggacgcagtcgtagtggctgt

SEQ ID NO: 106426 - RNA, 23 nt, synthetic construct
  source 1..23: mol_type = other RNA
tctgttgtggtcggctttgtgag

SEQ ID NO: 106427 - RNA, 23 nt, synthetic construct
  source 1..23: mol_type = other RNA
tatccagtggacgcagtcgtagt

SEQ ID NO: 106428 - RNA, 23 nt, synthetic construct
  source 1..23: mol_type = other RNA
tatccagtggacgcagtcgtagt

SEQ ID NO: 106429 - RNA, 23 nt, synthetic construct
  source 1..23: mol_type = other RNA
tggtcggctttgtgaggatccag

SEQ ID NO: 106430 - RNA, 23 nt, synthetic construct
  source 1..23: mol_type = other RNA
tcctgtctggtcttcgttcttgc

SEQ ID NO: 106431 - RNA, 23 nt, synthetic construct
  source 1..23: mol_type = other RNA
tcaggtcgtccccggagttgagg

SEQ ID NO: 106432 - RNA, 23 nt, synthetic construct
  source 1..23: mol_type = other RNA
tcaggtcgtccccggagttgagg

SEQ ID NO: 106433 - RNA, 23 nt, synthetic construct
  source 1..23: mol_type = other RNA
tacctggtcgatgcttacctcgg

SEQ ID NO: 106434 - RNA, 23 nt, synthetic construct
  source 1..23: mol_type = other RNA
tcagtcgtagtggctgttgtggt

SEQ ID NO: 106435 - RNA, 23 nt, synthetic construct
  source 1..23: mol_type = other RNA
tcagtcgtagtggctgttgtggt

SEQ ID NO: 106436 - RNA, 23 nt, synthetic construct
  source 1..23: mol_type = other RNA
tctcagtcgtagtggctgttgtg

SEQ ID NO: 106437 - RNA, 23 nt, synthetic construct
  source 1..23: mol_type = other RNA
tcagtcgtagtggctgttgtggt

SEQ ID NO: 106438 - RNA, 23 nt, synthetic construct
  source 1..23: mol_type = other RNA
tctcagtcgtagtggctgttgtg

SEQ ID NO: 106439 - RNA, 23 nt, synthetic construct
  source 1..23: mol_type = other RNA
tcagtcgtagtggctgttgtggt

SEQ ID NO: 106440 - RNA, 23 nt, synthetic construct
  source 1..23: mol_type = other RNA
tcagtcgtagtggctgttgtggt

SEQ ID NO: 106441 - RNA, 23 nt, synthetic construct
  source 1..23: mol_type = other RNA
tgtggacgcagtcgtagtggctg

SEQ ID NO: 106442 - RNA, 23 nt, synthetic construct
  source 1..23: mol_type = other RNA
tgtggacgcagtcgtagtggctg

SEQ ID NO: 106443 - RNA, 23 nt, synthetic construct
  source 1..23: mol_type = other RNA
tccgacctggtcgatgcttacct

SEQ ID NO: 106444 - RNA, 23 nt, synthetic construct
  source 1..23: mol_type = other RNA
tacacgcacgttgtagttgaagc

SEQ ID NO: 106445 - RNA, 23 nt, synthetic construct
  source 1..23: mol_type = other RNA
tcacacgcacgttgtagttgaag

SEQ ID NO: 106446 - RNA, 23 nt, synthetic construct
  source 1..23: mol_type = other RNA
tggctgtagtcgtcacagcaaag

SEQ ID NO: 106447 - RNA, 23 nt, synthetic construct
  source 1..23: mol_type = other RNA
ttcgtccccggagttgaggaggg

SEQ ID NO: 106448 - RNA, 23 nt, synthetic construct
  source 1..23: mol_type = other RNA
taggtcgtccccggagttgagga

SEQ ID NO: 106449 - RNA, 23 nt, synthetic construct
  source 1..23: mol_type = other RNA
tacgcagtcgtagtggctgttgt

SEQ ID NO: 106450 - RNA, 23 nt, synthetic construct
  source 1..23: mol_type = other RNA
tccagtggacgcagtcgtagtgg

SEQ ID NO: 106451 - RNA, 23 nt, synthetic construct
  source 1..23: mol_type = other RNA
ttcgtccccggagttgaggaggg

SEQ ID NO: 106452 - RNA, 23 nt, synthetic construct
  source 1..23: mol_type = other RNA
taggtcgtccccggagttgagga

SEQ ID NO: 106453 - RNA, 23 nt, synthetic construct
  source 1..23: mol_type = other RNA
tatgcagtcgtagtggctgttgt

SEQ ID NO: 106454 - RNA, 23 nt, synthetic construct
  source 1..23: mol_type = other RNA
tgatgcagtcgtagtggctgttg

SEQ ID NO: 106455 - RNA, 23 nt, synthetic construct
  source 1..23: mol_type = other RNA
tacgcagtcgtagtggctgttgt

SEQ ID NO: 106456 - RNA, 23 nt, synthetic construct
  source 1..23: mol_type = other RNA
tccagtggacgcagtcgtagtgg

SEQ ID NO: 106457 - RNA, 23 nt, synthetic construct
  source 1..23: mol_type = other RNA
tttaaaggtcccctcttggagga

SEQ ID NO: 106458 - RNA, 23 nt, synthetic construct
  source 1..23: mol_type = other RNA
tgcaacccctgaggttgggaagt

SEQ ID NO: 106459 - RNA, 23 nt, synthetic construct
  source 1..23: mol_type = other RNA
tgcccgacctggtcgatgcttac

SEQ ID NO: 106460 - RNA, 23 nt, synthetic construct
  source 1..23: mol_type = other RNA
ttgcccgacctggtcgatgctta

SEQ ID NO: 106461 - RNA, 23 nt, synthetic construct
  source 1..23: mol_type = other RNA
tttgcaggtcagccccgtctcca

SEQ ID NO: 106462 - RNA, 23 nt, synthetic construct
  source 1..23: mol_type = other RNA
ttcttgcaggtcagccccgtctc

SEQ ID NO: 106463 - RNA, 23 nt, synthetic construct
  source 1..23: mol_type = other RNA
tcgttcttgcaggtcagccccgt

SEQ ID NO: 106464 - RNA, 23 nt, synthetic construct
  source 1..23: mol_type = other RNA
ttcgttcttgcaggtcagccccg

SEQ ID NO: 106465 - RNA, 23 nt, synthetic construct
  source 1..23: mol_type = other RNA
tctgtctggtcttcgttcttgca

SEQ ID NO: 106466 - RNA, 23 nt, synthetic construct
  source 1..23: mol_type = other RNA
tttgtagttgaagcacatgttga

SEQ ID NO: 106467 - RNA, 23 nt, synthetic construct
  source 1..23: mol_type = other RNA
tacgcacgttgtagttgaagcac

SEQ ID NO: 106468 - RNA, 23 nt, synthetic construct
  source 1..23: mol_type = other RNA
tagtcgtcacagcaaagcacacg

SEQ ID NO: 106469 - RNA, 23 nt, synthetic construct
  source 1..23: mol_type = other RNA
tgtcgtccccggagttgaggagg

SEQ ID NO: 106470 - RNA, 23 nt, synthetic construct
  source 1..23: mol_type = other RNA
tctttgtgaggatccaggtcgtc

SEQ ID NO: 106471 - RNA, 23 nt, synthetic construct
  source 1..23: mol_type = other RNA
tgtcggctttgtgaggatccagg

SEQ ID NO: 106472 - RNA, 23 nt, synthetic construct
  source 1..23: mol_type = other RNA
tgttgtggtcggctttgtgagga

SEQ ID NO: 106473 - RNA, 23 nt, synthetic construct
  source 1..23: mol_type = other RNA
ttgttgtggtcggctttgtgagg

SEQ ID NO: 106474 - RNA, 23 nt, synthetic construct
  source 1..23: mol_type = other RNA
tcgcagtcgtagtggctgttgtg

SEQ ID NO: 106475 - RNA, 23 nt, synthetic construct
  source 1..23: mol_type = other RNA
tgacgcagtcgtagtggctgttg

SEQ ID NO: 106476 - RNA, 23 nt, synthetic construct
  source 1..23: mol_type = other RNA
tggacgcagtcgtagtggctgtt

SEQ ID NO: 106477 - RNA, 23 nt, synthetic construct
  source 1..23: mol_type = other RNA
ttggatccagtggacgcagtcgt

SEQ ID NO: 106478 - RNA, 23 nt, synthetic construct
  source 1..23: mol_type = other RNA
tgtcgtccccggagttgaggagg

SEQ ID NO: 106479 - RNA, 23 nt, synthetic construct
  source 1..23: mol_type = other RNA
tctttgtgaggatccaggtcgtc

SEQ ID NO: 106480 - RNA, 23 nt, synthetic construct
  source 1..23: mol_type = other RNA
ttgcagtcgtagtggctgttgtg

SEQ ID NO: 106481 - RNA, 23 nt, synthetic construct
  source 1..23: mol_type = other RNA
tggatgcagtcgtagtggctgtt

SEQ ID NO: 106482 - RNA, 23 nt, synthetic construct
  source 1..23: mol_type = other RNA
tgtggatgcagtcgtagtggctg

SEQ ID NO: 106483 - RNA, 23 nt, synthetic construct
  source 1..23: mol_type = other RNA
tcgcagtcgtagtggctgttgtg

SEQ ID NO: 106484 - RNA, 23 nt, synthetic construct
  source 1..23: mol_type = other RNA
tgacgcagtcgtagtggctgttg

SEQ ID NO: 106485 - RNA, 23 nt, synthetic construct
  source 1..23: mol_type = other RNA
tggacgcagtcgtagtggctgtt

SEQ ID NO: 106486 - RNA, 23 nt, synthetic construct
  source 1..23: mol_type = other RNA
ttggatccagtggacgcagtcgt

SEQ ID NO: 106487 - RNA, 23 nt, synthetic construct
  source 1..23: mol_type = other RNA
ttcggtcttattgtagatgactt

SEQ ID NO: 106488 - RNA, 23 nt, synthetic construct
  source 1..23: mol_type = other RNA
ttgaacctgcctgtctggtcttc

SEQ ID NO: 106489 - RNA, 23 nt, synthetic construct
  source 1..23: mol_type = other RNA
tgctgttgtggtcggctttgtga

SEQ ID NO: 106490 - RNA, 23 nt, synthetic construct
  source 1..23: mol_type = other RNA
tcgcacgttgtagttgaagcaca

SEQ ID NO: 106491 - RNA, 23 nt, synthetic construct
  source 1..23: mol_type = other RNA
tcgtagtggctgttgtggtcggc

SEQ ID NO: 106492 - RNA, 23 nt, synthetic construct
  source 1..23: mol_type = other RNA
tcgtagtggctgttgtggtcagc

SEQ ID NO: 106493 - RNA, 23 nt, synthetic construct
  source 1..23: mol_type = other RNA
tcgtagtggctgttgtggtcagc

SEQ ID NO: 106494 - RNA, 23 nt, synthetic construct
  source 1..23: mol_type = other RNA
tcgtagtggctgttgtggtcagc

SEQ ID NO: 106495 - RNA, 23 nt, synthetic construct
  source 1..23: mol_type = other RNA
tcgtagtggctgttgtggtcagc

SEQ ID NO: 106496 - RNA, 23 nt, synthetic construct
  source 1..23: mol_type = other RNA
ttgcaggtcagccccgtctccag

SEQ ID NO: 106497 - RNA, 23 nt, synthetic construct
  source 1..23: mol_type = other RNA
tcttgcaggtcagccccgtctcc

SEQ ID NO: 106498 - RNA, 23 nt, synthetic construct
  source 1..23: mol_type = other RNA
tgtcttcgttcttgcaggtcagc

SEQ ID NO: 106499 - RNA, 23 nt, synthetic construct
  source 1..23: mol_type = other RNA
ttgtctggtcttcgttcttgcag

SEQ ID NO: 106500 - RNA, 23 nt, synthetic construct
  source 1..23: mol_type = other RNA
tcggagttgaggagggcgtggcc

SEQ ID NO: 106501 - RNA, 23 nt, synthetic construct
  source 1..23: mol_type = other RNA
tggctgttgtggtcggctttgtg

SEQ ID NO: 106502 - RNA, 23 nt, synthetic construct
  source 1..23: mol_type = other RNA
ttggctgttgtggtcggctttgt

SEQ ID NO: 106503 - RNA, 23 nt, synthetic construct
  source 1..23: mol_type = other RNA
tcggagttgaggagggcgtggcc

SEQ ID NO: 106504 - RNA, 23 nt, synthetic construct
  source 1..23: mol_type = other RNA
ttcggctttgtgaggatccaggt

SEQ ID NO: 106505 - RNA, 23 nt, synthetic construct
  source 1..23: mol_type = other RNA
tcaacccctgaggttgggaagtc

SEQ ID NO: 106506 - RNA, 23 nt, synthetic construct
  source 1..23: mol_type = other RNA
ttttccatgtccccgcctgcaac

SEQ ID NO: 106507 - RNA, 23 nt, synthetic construct
  source 1..23: mol_type = other RNA
ttcgtcacagcaaagcacacgca

SEQ ID NO: 106508 - RNA, 23 nt, synthetic construct
  source 1..23: mol_type = other RNA
ttccccggagttgaggagggcgt

SEQ ID NO: 106509 - RNA, 23 nt, synthetic construct
  source 1..23: mol_type = other RNA
ttccccggagttgaggagggcgt

SEQ ID NO: 106510 - RNA, 23 nt, synthetic construct
  source 1..23: mol_type = other RNA
tgcctgtctggtcttcgttcttg

SEQ ID NO: 106511 - RNA, 23 nt, synthetic construct
  source 1..23: mol_type = other RNA
ttcgtagtggctgttgtggtcgg

SEQ ID NO: 106512 - RNA, 23 nt, synthetic construct
  source 1..23: mol_type = other RNA
ttcgtagtggctgttgtggtcag

SEQ ID NO: 106513 - RNA, 23 nt, synthetic construct
  source 1..23: mol_type = other RNA
ttcgtagtggctgttgtggtcag

SEQ ID NO: 106514 - RNA, 23 nt, synthetic construct
  source 1..23: mol_type = other RNA
ttcgtagtggctgttgtggtcag

SEQ ID NO: 106515 - RNA, 23 nt, synthetic construct
  source 1..23: mol_type = other RNA
ttcgtagtggctgttgtggtcag

SEQ ID NO: 106516 - RNA, 23 nt, synthetic construct
  source 1..23: mol_type = other RNA
tcaaagcacacgcacgttgtagt

SEQ ID NO: 106517 - RNA, 23 nt, synthetic construct
  source 1..23: mol_type = other RNA
tggatccagtggatgcagtcgta

SEQ ID NO: 106518 - RNA, 23 nt, synthetic construct
  source 1..23: mol_type = other RNA
tttgtagtggctgttgtggtcag

SEQ ID NO: 106519 - RNA, 23 nt, synthetic construct
  source 1..23: mol_type = other RNA
tcagtggacgcagtcgtagtggc

SEQ ID NO: 106520 - RNA, 23 nt, synthetic construct
  source 1..23: mol_type = other RNA
tcagtggacgcagtcgtagtggc

SEQ ID NO: 106521 - RNA, 23 nt, synthetic construct
  source 1..23: mol_type = other RNA
tacgggtggggggacggggacgg

SEQ ID NO: 106522 - RNA, 23 nt, synthetic construct
  source 1..23: mol_type = other RNA
tacaggtcctgggcgcaggcggc

SEQ ID NO: 106523 - RNA, 23 nt, synthetic construct
  source 1..23: mol_type = other RNA
tacggtgaagctgctgtcggcac

SEQ ID NO: 106524 - RNA, 23 nt, synthetic construct
  source 1..23: mol_type = other RNA
tgaaggtcccgtgggtggtgttg

SEQ ID NO: 106525 - RNA, 23 nt, synthetic construct
  source 1..23: mol_type = other RNA
tgacccagtctgcgaggtgaggg

SEQ ID NO: 106526 - RNA, 23 nt, synthetic construct
  source 1..23: mol_type = other RNA
ttgcaacccctgaggttgggaag

SEQ ID NO: 106527 - RNA, 23 nt, synthetic construct
  source 1..23: mol_type = other RNA
tctgcccgacctggtcgatgctt

SEQ ID NO: 106528 - RNA, 23 nt, synthetic construct
  source 1..23: mol_type = other RNA
tcacctgcccgacctggtcgatg

SEQ ID NO: 106529 - RNA, 23 nt, synthetic construct
  source 1..23: mol_type = other RNA
tgcacctgcccgacctggtcgat

SEQ ID NO: 106530 - RNA, 23 nt, synthetic construct
  source 1..23: mol_type = other RNA
tcagcacctgcccgacctggtcg

SEQ ID NO: 106531 - RNA, 23 nt, synthetic construct
  source 1..23: mol_type = other RNA
tgtcagcacctgcccgacctggt

SEQ ID NO: 106532 - RNA, 23 nt, synthetic construct
  source 1..23: mol_type = other RNA
tcctgcctgtctggtcttcgttc

SEQ ID NO: 106533 - RNA, 23 nt, synthetic construct
  source 1..23: mol_type = other RNA
tggcgtggccgtggagctggtgg

SEQ ID NO: 106534 - RNA, 23 nt, synthetic construct
  source 1..23: mol_type = other RNA
tatccaggtcgtccccggagttg

SEQ ID NO: 106535 - RNA, 23 nt, synthetic construct
  source 1..23: mol_type = other RNA
tgatccaggtcgtccccggagtt

SEQ ID NO: 106536 - RNA, 23 nt, synthetic construct
  source 1..23: mol_type = other RNA
tagtggctgttgtggtcggcttt

SEQ ID NO: 106537 - RNA, 23 nt, synthetic construct
  source 1..23: mol_type = other RNA
tgtcaccgtggaaggctctgtga

SEQ ID NO: 106538 - RNA, 23 nt, synthetic construct
  source 1..23: mol_type = other RNA
tatccaggtcgtccccggagtgg

SEQ ID NO: 106539 - RNA, 23 nt, synthetic construct
  source 1..23: mol_type = other RNA
tgatccaggtcgtccccggagtg

SEQ ID NO: 106540 - RNA, 23 nt, synthetic construct
  source 1..23: mol_type = other RNA
tagtggctgttgtggtcagctct

SEQ ID NO: 106541 - RNA, 23 nt, synthetic construct
  source 1..23: mol_type = other RNA
tccgtgtgtggtggccgtggtgt

SEQ ID NO: 106542 - RNA, 23 nt, synthetic construct
  source 1..23: mol_type = other RNA
tggtgtggtggccgtgctggtca

SEQ ID NO: 106543 - RNA, 23 nt, synthetic construct
  source 1..23: mol_type = other RNA
tatccaggtcgtccccggagtgg

SEQ ID NO: 106544 - RNA, 23 nt, synthetic construct
  source 1..23: mol_type = other RNA
tgatccaggtcgtccccggagtg

SEQ ID NO: 106545 - RNA, 23 nt, synthetic construct
  source 1..23: mol_type = other RNA
tggtgtggtggccgtgctggtca

SEQ ID NO: 106546 - RNA, 23 nt, synthetic construct
  source 1..23: mol_type = other RNA
tccgtgtgtggtggccgtggtgt

SEQ ID NO: 106547 - RNA, 23 nt, synthetic construct
  source 1..23: mol_type = other RNA
tgtcaccgtggaaggctctgtga

SEQ ID NO: 106548 - RNA, 23 nt, synthetic construct
  source 1..23: mol_type = other RNA
tatccaggtcgtccccggagttg

SEQ ID NO: 106549 - RNA, 23 nt, synthetic construct
  source 1..23: mol_type = other RNA
tgatccaggtcgtccccggagtt

SEQ ID NO: 106550 - RNA, 23 nt, synthetic construct
  source 1..23: mol_type = other RNA
tagtggctgttgtggtcagcttt

SEQ ID NO: 106551 - RNA, 23 nt, synthetic construct
  source 1..23: mol_type = other RNA
tccgtgtgtggtggccgtggtgt

SEQ ID NO: 106552 - RNA, 23 nt, synthetic construct
  source 1..23: mol_type = other RNA
tatccaggtcgtccccggagtgg

SEQ ID NO: 106553 - RNA, 23 nt, synthetic construct
  source 1..23: mol_type = other RNA
tgatccaggtcgtccccggagtg

SEQ ID NO: 106554 - RNA, 23 nt, synthetic construct
  source 1..23: mol_type = other RNA
tagtggctgttgtggtcagctct

SEQ ID NO: 106555 - RNA, 23 nt, synthetic construct
  source 1..23: mol_type = other RNA
tgatccagtggatgcagtcgtag

SEQ ID NO: 106556 - RNA, 23 nt, synthetic construct
  source 1..23: mol_type = other RNA
tatccaggtcgtccccggagtgg

SEQ ID NO: 106557 - RNA, 23 nt, synthetic construct
  source 1..23: mol_type = other RNA
tgatccaggtcgtccccggagtg

SEQ ID NO: 106558 - RNA, 23 nt, synthetic construct
  source 1..23: mol_type = other RNA
tagtggctgttgtggtcagctct

SEQ ID NO: 106559 - RNA, 23 nt, synthetic construct
  source 1..23: mol_type = other RNA
tggtgtggtggccgtgctggtca

SEQ ID NO: 106560 - RNA, 23 nt, synthetic construct
  source 1..23: mol_type = other RNA
tagtggctgttgtggtcagctca

SEQ ID NO: 106561 - RNA, 23 nt, synthetic construct
  source 1..23: mol_type = other RNA
tgttggccacaggctttgggtcc

SEQ ID NO: 106562 - RNA, 23 nt, synthetic construct
  source 1..23: mol_type = other RNA
tctgagggcgcgggggcagcggg

SEQ ID NO: 106563 - RNA, 23 nt, synthetic construct
  source 1..23: mol_type = other RNA
tgttgaggagggcgtggccgtgg

SEQ ID NO: 106564 - RNA, 23 nt, synthetic construct
  source 1..23: mol_type = other RNA
tgttgaggagggcgtggccgtag

SEQ ID NO: 106565 - RNA, 23 nt, synthetic construct
  source 1..23: mol_type = other RNA
ttttgtgaggatccaggtcgtcc

SEQ ID NO: 106566 - RNA, 23 nt, synthetic construct
  source 1..23: mol_type = other RNA
ttgttgtggtcagctctgtgagg

SEQ ID NO: 106567 - RNA, 23 nt, synthetic construct
  source 1..23: mol_type = other RNA
ttttgtgaggatccaggtcgtcc

SEQ ID NO: 106568 - RNA, 23 nt, synthetic construct
  source 1..23: mol_type = other RNA
ttgttgtggtcagctctgtgagg

SEQ ID NO: 106569 - RNA, 23 nt, synthetic construct
  source 1..23: mol_type = other RNA
tatccagtggatgcagtcgtagt

SEQ ID NO: 106570 - RNA, 23 nt, synthetic construct
  source 1..23: mol_type = other RNA
ttgttgtggtcagctctgtgagg

SEQ ID NO: 106571 - RNA, 23 nt, synthetic construct
  source 1..23: mol_type = other RNA
tggacccagtctgcgaggtgagg

SEQ ID NO: 106572 - RNA, 23 nt, synthetic construct
  source 1..23: mol_type = other RNA
tcaggtggtgttgaaggaggtgc

SEQ ID NO: 106573 - RNA, 23 nt, synthetic construct
  source 1..23: mol_type = other RNA
tcacggggcctgagctggaccca

SEQ ID NO: 106574 - RNA, 23 nt, synthetic construct
  source 1..23: mol_type = other RNA
taacagggcctgggtggtggtgg

SEQ ID NO: 106575 - RNA, 23 nt, synthetic construct
  source 1..23: mol_type = other RNA
ttccccgcctgcaacccctgagg

SEQ ID NO: 106576 - RNA, 23 nt, synthetic construct
  source 1..23: mol_type = other RNA
tttccatgtccccgcctgcaacc

SEQ ID NO: 106577 - RNA, 23 nt, synthetic construct
  source 1..23: mol_type = other RNA
tgtccccggagttgaggagggcg

SEQ ID NO: 106578 - RNA, 23 nt, synthetic construct
  source 1..23: mol_type = other RNA
tgtgggtgtcgtggccgtggtgc

SEQ ID NO: 106579 - RNA, 23 nt, synthetic construct
  source 1..23: mol_type = other RNA
ttgtgggtgtcgtggccgtggtg

SEQ ID NO: 106580 - RNA, 23 nt, synthetic construct
  source 1..23: mol_type = other RNA
tagggtgagggctggacagggct

SEQ ID NO: 106581 - RNA, 23 nt, synthetic construct
  source 1..23: mol_type = other RNA
tcagtctctggagtagaggaggg

SEQ ID NO: 106582 - RNA, 23 nt, synthetic construct
  source 1..23: mol_type = other RNA
tagggtgagggctggacagggct

SEQ ID NO: 106583 - RNA, 23 nt, synthetic construct
  source 1..23: mol_type = other RNA
tgtccccggagttgaggagggcg

SEQ ID NO: 106584 - RNA, 23 nt, synthetic construct
  source 1..23: mol_type = other RNA
tgtgggtgtcgtggccgtggtgc

SEQ ID NO: 106585 - RNA, 23 nt, synthetic construct
  source 1..23: mol_type = other RNA
ttgtgggtgtcgtggccgtggtg

SEQ ID NO: 106586 - RNA, 23 nt, synthetic construct
  source 1..23: mol_type = other RNA
tagggtgagggctggacagggct

SEQ ID NO: 106587 - RNA, 23 nt, synthetic construct
  source 1..23: mol_type = other RNA
tgtgggtgtcgtggccgtggtgc

SEQ ID NO: 106588 - RNA, 23 nt, synthetic construct
  source 1..23: mol_type = other RNA
ttgtgggtgtcgtggccgtggtg

SEQ ID NO: 106589 - RNA, 23 nt, synthetic construct
  source 1..23: mol_type = other RNA
ttggtctctggagtagaggaggt

SEQ ID NO: 106590 - RNA, 23 nt, synthetic construct
  source 1..23: mol_type = other RNA
ttgtggcacgtcccctgcagtgg

SEQ ID NO: 106591 - RNA, 23 nt, synthetic construct
  source 1..23: mol_type = other RNA
tgccgtggtgttcggcactgggg

SEQ ID NO: 106592 - RNA, 23 nt, synthetic construct
  source 1..23: mol_type = other RNA
tgccgtggtgttcggcactgggg

SEQ ID NO: 106593 - RNA, 23 nt, synthetic construct
  source 1..23: mol_type = other RNA
tgccgtggtgttcggcactgggg

SEQ ID NO: 106594 - RNA, 23 nt, synthetic construct
  source 1..23: mol_type = other RNA
tgccgtggcggtaagcactgtgg

SEQ ID NO: 106595 - RNA, 23 nt, synthetic construct
  source 1..23: mol_type = other RNA
tgccgtggcggtaagcactgtgg

SEQ ID NO: 106596 - RNA, 23 nt, synthetic construct
  source 1..23: mol_type = other RNA
ttctatgtccttaggctgctggc

SEQ ID NO: 106597 - RNA, 23 nt, synthetic construct
  source 1..23: mol_type = other RNA
tgtcgtggtggtaagcactgtgg

SEQ ID NO: 106598 - RNA, 23 nt, synthetic construct
  source 1..23: mol_type = other RNA
tatggaggcagaacgttctcaga

SEQ ID NO: 106599 - RNA, 23 nt, synthetic construct
  source 1..23: mol_type = other RNA
tttgccggccggcaagggcagcg

SEQ ID NO: 106600 - RNA, 23 nt, synthetic construct
  source 1..23: mol_type = other RNA
tcgtggtggctgtaccaagggtg

SEQ ID NO: 106601 - RNA, 23 nt, synthetic construct
  source 1..23: mol_type = other RNA
tttgaggagggcgtggccgtgga

SEQ ID NO: 106602 - RNA, 23 nt, synthetic construct
  source 1..23: mol_type = other RNA
tttgaggagggcgtggccgtaga

SEQ ID NO: 106603 - RNA, 23 nt, synthetic construct
  source 1..23: mol_type = other RNA
taattggtggcccttgtcatggt

SEQ ID NO: 106604 - RNA, 23 nt, synthetic construct
  source 1..23: mol_type = other RNA
taccgtggaaggctctgtgatgt

SEQ ID NO: 106605 - RNA, 23 nt, synthetic construct
  source 1..23: mol_type = other RNA
taccgtggaaggctctgtgatgt

SEQ ID NO: 106606 - RNA, 23 nt, synthetic construct
  source 1..23: mol_type = other RNA
tcacgaaggaaacgctgcaggtg

SEQ ID NO: 106607 - RNA, 23 nt, synthetic construct
  source 1..23: mol_type = other RNA
ttgcggtcgtagtggctgctgtg

SEQ ID NO: 106608 - RNA, 23 nt, synthetic construct
  source 1..23: mol_type = other RNA
tggaggcgtgagtgccgtccctg

SEQ ID NO: 106609 - RNA, 23 nt, synthetic construct
  source 1..23: mol_type = other RNA
tggaggcgtgagtgccgtccctg

SEQ ID NO: 106610 - RNA, 23 nt, synthetic construct
  source 1..23: mol_type = other RNA
tggaggcgtgagtgccgtccctg

SEQ ID NO: 106611 - RNA, 23 nt, synthetic construct
  source 1..23: mol_type = other RNA
tgccttcgtggtcagcactgtgg

SEQ ID NO: 106612 - RNA, 23 nt, synthetic construct
  source 1..23: mol_type = other RNA
tgccttcgtggtcagcactgtgg

SEQ ID NO: 106613 - RNA, 23 nt, synthetic construct
  source 1..23: mol_type = other RNA
tgtcgtcacagcaaagcacacgc

SEQ ID NO: 106614 - RNA, 23 nt, synthetic construct
  source 1..23: mol_type = other RNA
tccgccttaaaggtcccctcttg

SEQ ID NO: 106615 - RNA, 23 nt, synthetic construct
  source 1..23: mol_type = other RNA
tcgtagaaatggcagccggctcg

SEQ ID NO: 106616 - RNA, 23 nt, synthetic construct
  source 1..23: mol_type = other RNA
tgtgccgtgagcgtagcaggggc

SEQ ID NO: 106617 - RNA, 23 nt, synthetic construct
  source 1..23: mol_type = other RNA
tggcactttggtagtgtgagctg

SEQ ID NO: 106618 - RNA, 23 nt, synthetic construct
  source 1..23: mol_type = other RNA
tggcactttggtagtgtgagctg

SEQ ID NO: 106619 - RNA, 23 nt, synthetic construct
  source 1..23: mol_type = other RNA
tggcactttggtagtgtgagctg

SEQ ID NO: 106620 - RNA, 23 nt, synthetic construct
  source 1..23: mol_type = other RNA
tggcactttggtagtgtgagctg

SEQ ID NO: 106621 - RNA, 23 nt, synthetic construct
  source 1..23: mol_type = other RNA
tcccgaaaggggtcctgctggcc

SEQ ID NO: 106622 - RNA, 23 nt, synthetic construct
  source 1..23: mol_type = other RNA
tgtggccttcgtggtcagcactg

SEQ ID NO: 106623 - RNA, 23 nt, synthetic construct
  source 1..23: mol_type = other RNA
tgtggccttcgtggtcagcactg

SEQ ID NO: 106624 - RNA, 23 nt, synthetic construct
  source 1..23: mol_type = other RNA
tcgaccctgatggtctctccagg

SEQ ID NO: 106625 - RNA, 23 nt, synthetic construct
  source 1..23: mol_type = other RNA
tctcaaggcggcccctgcagtgg

SEQ ID NO: 106626 - RNA, 23 nt, synthetic construct
  source 1..23: mol_type = other RNA
tcgttgtagttgaagcacatgtt

SEQ ID NO: 106627 - RNA, 23 nt, synthetic construct
  source 1..23: mol_type = other RNA
tgcccaagatgcccgaggtggcc

SEQ ID NO: 106628 - RNA, 23 nt, synthetic construct
  source 1..23: mol_type = other RNA
tgcccaagatgcccgaggtggcc

SEQ ID NO: 106629 - RNA, 23 nt, synthetic construct
  source 1..23: mol_type = other RNA
tggaagcgtgcgtgccgtccctg

SEQ ID NO: 106630 - RNA, 23 nt, synthetic construct
  source 1..23: mol_type = other RNA
tggcggcagtggttccgtcccgc

SEQ ID NO: 106631 - RNA, 23 nt, synthetic construct
  source 1..23: mol_type = other RNA
tggtccagcaggacgacacggtt

SEQ ID NO: 106632 - RNA, 23 nt, synthetic construct
  source 1..23: mol_type = other RNA
tctgtgataggcgggtccaggtg

SEQ ID NO: 106633 - RNA, 23 nt, synthetic construct
  source 1..23: mol_type = other RNA
tgtcaaagtccccgccagagggc

SEQ ID NO: 106634 - RNA, 23 nt, synthetic construct
  source 1..23: mol_type = other RNA
tctgtgataggcgggtccaggtg

SEQ ID NO: 106635 - RNA, 23 nt, synthetic construct
  source 1..23: mol_type = other RNA
tgtcaaagtccccgccagagggc

SEQ ID NO: 106636 - RNA, 23 nt, synthetic construct
  source 1..23: mol_type = other RNA
tctgtgataggcgggtccaggcg

SEQ ID NO: 106637 - RNA, 23 nt, synthetic construct
  source 1..23: mol_type = other RNA
tgtcaaagtccccgccagagggc

SEQ ID NO: 106638 - RNA, 23 nt, synthetic construct
  source 1..23: mol_type = other RNA
tctgtgataggcgggtccaggtg

SEQ ID NO: 106639 - RNA, 23 nt, synthetic construct
  source 1..23: mol_type = other RNA
tgtcaaagtccccgccagagggc

SEQ ID NO: 106640 - RNA, 23 nt, synthetic construct
  source 1..23: mol_type = other RNA
tctgtgataggcgggtccaggtg

SEQ ID NO: 106641 - RNA, 23 nt, synthetic construct
  source 1..23: mol_type = other RNA
tcacaggccaccggttgcacctc

SEQ ID NO: 106642 - RNA, 23 nt, synthetic construct
  source 1..23: mol_type = other RNA
tggcggtctggacgcactcccca

SEQ ID NO: 106643 - RNA, 23 nt, synthetic construct
  source 1..23: mol_type = other RNA
tgctctttggaagcggtgctggc

SEQ ID NO: 106644 - RNA, 23 nt, synthetic construct
  source 1..23: mol_type = other RNA
taggacgacacggttgtcaccca

SEQ ID NO: 106645 - RNA, 23 nt, synthetic construct
  source 1..23: mol_type = other RNA
tcgccttgcctgtcgcagcttcc

SEQ ID NO: 106646 - RNA, 23 nt, synthetic construct
  source 1..23: mol_type = other RNA
ttgtccgtgcagggtgagccaca

SEQ ID NO: 106647 - RNA, 23 nt, synthetic construct
  source 1..23: mol_type = other RNA
tccagagtgcgtgatgtcatcca

SEQ ID NO: 106648 - RNA, 23 nt, synthetic construct
  source 1..23: mol_type = other RNA
tcatagccccccggagcaggtgc

SEQ ID NO: 106649 - RNA, 23 nt, synthetic construct
  source 1..23: mol_type = other RNA
tgcaggtcgtagagtttctcatc

SEQ ID NO: 106650 - RNA, 23 nt, synthetic construct
  source 1..23: mol_type = other RNA
taggccgcacttccgcagctcag

SEQ ID NO: 106651 - RNA, 23 nt, synthetic construct
  source 1..23: mol_type = other RNA
tcaaagctgttcctggcattggc

SEQ ID NO: 106652 - RNA, 23 nt, synthetic construct
  source 1..23: mol_type = other RNA
tagcgtagcaggggcactcctgg

SEQ ID NO: 106653 - RNA, 23 nt, synthetic construct
  source 1..23: mol_type = other RNA
tcgtcgtgcaccacctctccagg

SEQ ID NO: 106654 - RNA, 23 nt, synthetic construct
  source 1..23: mol_type = other RNA
tgcaatgcagcccccactcccat

SEQ ID NO: 106655 - RNA, 23 nt, synthetic construct
  source 1..23: mol_type = other RNA
tgactcggtggttctgctgctag

SEQ ID NO: 106656 - RNA, 23 nt, synthetic construct
  source 1..23: mol_type = other RNA
tcccgtggaaggctctgtgatgt

SEQ ID NO: 106657 - RNA, 23 nt, synthetic construct
  source 1..23: mol_type = other RNA
tgtaccggtggttgctgctgggg

SEQ ID NO: 106658 - RNA, 23 nt, synthetic construct
  source 1..23: mol_type = other RNA
tggtcccggtggtcccaagggtg

SEQ ID NO: 106659 - RNA, 23 nt, synthetic construct
  source 1..23: mol_type = other RNA
tttgtggtagtcggcactttggt

SEQ ID NO: 106660 - RNA, 23 nt, synthetic construct
  source 1..23: mol_type = other RNA
tttgtggtagtcggcactttggt

SEQ ID NO: 106661 - RNA, 23 nt, synthetic construct
  source 1..23: mol_type = other RNA
tcccgtggaaggctctgtgatgt

SEQ ID NO: 106662 - RNA, 23 nt, synthetic construct
  source 1..23: mol_type = other RNA
tgtaccggtggttgctgctgggg

SEQ ID NO: 106663 - RNA, 23 nt, synthetic construct
  source 1..23: mol_type = other RNA
tggtcccggtggtcccaagggtg

SEQ ID NO: 106664 - RNA, 23 nt, synthetic construct
  source 1..23: mol_type = other RNA
tttgtggtagtcggcactttggt

SEQ ID NO: 106665 - RNA, 23 nt, synthetic construct
  source 1..23: mol_type = other RNA
tgcggtggccgtggaaccggtgg

SEQ ID NO: 106666 - RNA, 23 nt, synthetic construct
  source 1..23: mol_type = other RNA
tccacaggctttgggtccagcag

SEQ ID NO: 106667 - RNA, 23 nt, synthetic construct
  source 1..23: mol_type = other RNA
taccgtctcggggcagcaggggt

SEQ ID NO: 106668 - RNA, 23 nt, synthetic construct
  source 1..23: mol_type = other RNA
taccccgtagaaggtgccattgt

SEQ ID NO: 106669 - RNA, 23 nt, synthetic construct
  source 1..23: mol_type = other RNA
tgtagtattgttgcaggcatcct

SEQ ID NO: 106670 - RNA, 23 nt, synthetic construct
  source 1..23: mol_type = other RNA
tcacaggatggtcgtgttgatgc

SEQ ID NO: 106671 - RNA, 23 nt, synthetic construct
  source 1..23: mol_type = other RNA
tatgatcagacaatgcacatcct

SEQ ID NO: 106672 - RNA, 23 nt, synthetic construct
  source 1..23: mol_type = other RNA
tgttaccctgcagcaggcatgga

SEQ ID NO: 106673 - RNA, 23 nt, synthetic construct
  source 1..23: mol_type = other RNA
ttttgggatgctgacccctctct

SEQ ID NO: 106674 - RNA, 23 nt, synthetic construct
  source 1..23: mol_type = other RNA
tgtggcagatgccctcctcgtcc

SEQ ID NO: 106675 - RNA, 23 nt, synthetic construct
  source 1..23: mol_type = other RNA
tctgcatgagtggcaccagctgc

SEQ ID NO: 106676 - RNA, 23 nt, synthetic construct
  source 1..23: mol_type = other RNA
ttgttggctgttggcgcacatca

SEQ ID NO: 106677 - RNA, 23 nt, synthetic construct
  source 1..23: mol_type = other RNA
tcgaggtggccgaagtccaggct

SEQ ID NO: 106678 - RNA, 23 nt, synthetic construct
  source 1..23: mol_type = other RNA
ttgctggtcagcactttgagggt

SEQ ID NO: 106679 - RNA, 23 nt, synthetic construct
  source 1..23: mol_type = other RNA
tcgaggtggccgaagtccaggct

SEQ ID NO: 106680 - RNA, 23 nt, synthetic construct
  source 1..23: mol_type = other RNA
tgttggctgttggcgcacatcag

SEQ ID NO: 106681 - RNA, 23 nt, synthetic construct
  source 1..23: mol_type = other RNA
tactcggtggtcctgctgctagg

SEQ ID NO: 106682 - RNA, 23 nt, synthetic construct
  source 1..23: mol_type = other RNA
tactcggtggtcctgctgctagg

SEQ ID NO: 106683 - RNA, 23 nt, synthetic construct
  source 1..23: mol_type = other RNA
tactcggtggtcctgctgctagg

SEQ ID NO: 106684 - RNA, 23 nt, synthetic construct
  source 1..23: mol_type = other RNA
tatggacttgtagtggatgctga

SEQ ID NO: 106685 - RNA, 23 nt, synthetic construct
  source 1..23: mol_type = other RNA
taagacttggccattgaaggtga

SEQ ID NO: 106686 - RNA, 23 nt, synthetic construct
  source 1..23: mol_type = other RNA
tgaggaacacgccgccgtccgct

SEQ ID NO: 106687 - RNA, 23 nt, synthetic construct
  source 1..23: mol_type = other RNA
tacccaggcggtggtgaaggtga

SEQ ID NO: 106688 - RNA, 23 nt, synthetic construct
  source 1..23: mol_type = other RNA
tcggtgcccattgtaccagctgg

SEQ ID NO: 106689 - RNA, 23 nt, synthetic construct
  source 1..23: mol_type = other RNA
tagaccaggccaaagtccaggct

SEQ ID NO: 106690 - RNA, 23 nt, synthetic construct
  source 1..23: mol_type = other RNA
tagaccaggccaaagtccaggct

SEQ ID NO: 106691 - RNA, 23 nt, synthetic construct
  source 1..23: mol_type = other RNA
tgcagttgtagtggctgctgtgg

SEQ ID NO: 106692 - RNA, 23 nt, synthetic construct
  source 1..23: mol_type = other RNA
tcgtggtggtaagcactgtggag

SEQ ID NO: 106693 - RNA, 23 nt, synthetic construct
  source 1..23: mol_type = other RNA
tagaccaggccaaagtccaggct

SEQ ID NO: 106694 - RNA, 23 nt, synthetic construct
  source 1..23: mol_type = other RNA
tagaccaggccaaagtccaggct

SEQ ID NO: 106695 - RNA, 23 nt, synthetic construct
  source 1..23: mol_type = other RNA
tgcagttgtagtggctgctgtgg

SEQ ID NO: 106696 - RNA, 23 nt, synthetic construct
  source 1..23: mol_type = other RNA
tagccctccgccatcccctccag

SEQ ID NO: 106697 - RNA, 23 nt, synthetic construct
  source 1..23: mol_type = other RNA
tccctgggcgtcacagggcaggg

SEQ ID NO: 106698 - RNA, 23 nt, synthetic construct
  source 1..23: mol_type = other RNA
tcgtcccagtgacatcagggagg

SEQ ID NO: 106699 - RNA, 23 nt, synthetic construct
  source 1..23: mol_type = other RNA
tggactctgttggctgttggcgc

SEQ ID NO: 106700 - RNA, 23 nt, synthetic construct
  source 1..23: mol_type = other RNA
tggggactctgttggctgttggc

SEQ ID NO: 106701 - RNA, 23 nt, synthetic construct
  source 1..23: mol_type = other RNA
tcctggtcgatgcttacctcggg

SEQ ID NO: 106702 - RNA, 23 nt, synthetic construct
  source 1..23: mol_type = other RNA
tacgttgtagttgaagcacatgt

SEQ ID NO: 106703 - RNA, 23 nt, synthetic construct
  source 1..23: mol_type = other RNA
tcccggagttgaggagggcgtgg

SEQ ID NO: 106704 - RNA, 23 nt, synthetic construct
  source 1..23: mol_type = other RNA
tgtccagccactctgaccaggca

SEQ ID NO: 106705 - RNA, 23 nt, synthetic construct
  source 1..23: mol_type = other RNA
tgttgtggtcagctctgtgagga

SEQ ID NO: 106706 - RNA, 23 nt, synthetic construct
  source 1..23: mol_type = other RNA
tgtccagccactctgaccaggca

SEQ ID NO: 106707 - RNA, 23 nt, synthetic construct
  source 1..23: mol_type = other RNA
ttgaggatccaggtcgtccctgg

SEQ ID NO: 106708 - RNA, 23 nt, synthetic construct
  source 1..23: mol_type = other RNA
tgtggtcagcactgtggaggtgt

SEQ ID NO: 106709 - RNA, 23 nt, synthetic construct
  source 1..23: mol_type = other RNA
tgtccagccactctgaccaggca

SEQ ID NO: 106710 - RNA, 23 nt, synthetic construct
  source 1..23: mol_type = other RNA
tcccggagttgaggagggcgtgg

SEQ ID NO: 106711 - RNA, 23 nt, synthetic construct
  source 1..23: mol_type = other RNA
tgtccagccactctgaccaggca

SEQ ID NO: 106712 - RNA, 23 nt, synthetic construct
  source 1..23: mol_type = other RNA
tgttgtggtcagctctgtgagga

SEQ ID NO: 106713 - RNA, 23 nt, synthetic construct
  source 1..23: mol_type = other RNA
tgtggtcagcactgtggaggtgt

SEQ ID NO: 106714 - RNA, 23 nt, synthetic construct
  source 1..23: mol_type = other RNA
tgttgtggtcagctctgtgagga

SEQ ID NO: 106715 - RNA, 23 nt, synthetic construct
  source 1..23: mol_type = other RNA
tgtggtcagcactgtggaggtgt

SEQ ID NO: 106716 - RNA, 23 nt, synthetic construct
  source 1..23: mol_type = other RNA
ttccccacggtggacgagctggg

SEQ ID NO: 106717 - RNA, 23 nt, synthetic construct
  source 1..23: mol_type = other RNA
tgagccgccccacatgctgcaga

SEQ ID NO: 106718 - RNA, 23 nt, synthetic construct
  source 1..23: mol_type = other RNA
tggctctggcagggcacctcaag

SEQ ID NO: 106719 - RNA, 23 nt, synthetic construct
  source 1..23: mol_type = other RNA
tgtcctggaggtgcccctggtgt

SEQ ID NO: 106720 - RNA, 23 nt, synthetic construct
  source 1..23: mol_type = other RNA
tccgtgctggtcagcactttggg

SEQ ID NO: 106721 - RNA, 23 nt, synthetic construct
  source 1..23: mol_type = other RNA
tccgtgctggtcagcactttgag

SEQ ID NO: 106722 - RNA, 23 nt, synthetic construct
  source 1..23: mol_type = other RNA
tggaggcgtgcgtgccgtccctg

SEQ ID NO: 106723 - RNA, 23 nt, synthetic construct
  source 1..23: mol_type = other RNA
ttctgctgtcggggaccagccac

SEQ ID NO: 106724 - RNA, 23 nt, synthetic construct
  source 1..23: mol_type = other RNA
tctcgtggacccgcctctcctgg

SEQ ID NO: 106725 - RNA, 23 nt, synthetic construct
  source 1..23: mol_type = other RNA
tggtgtggtggccgtggtggtca

SEQ ID NO: 106726 - RNA, 23 nt, synthetic construct
  source 1..23: mol_type = other RNA
tggtggtgcccaagatgcccgag

SEQ ID NO: 106727 - RNA, 23 nt, synthetic construct
  source 1..23: mol_type = other RNA
tggtggtgcccaagatgcccgag

SEQ ID NO: 106728 - RNA, 23 nt, synthetic construct
  source 1..23: mol_type = other RNA
tgcgcctgggaaggttgcaccaa

SEQ ID NO: 106729 - RNA, 23 nt, synthetic construct
  source 1..23: mol_type = other RNA
ttgactcggtggttctgctgcta

SEQ ID NO: 106730 - RNA, 23 nt, synthetic construct
  source 1..23: mol_type = other RNA
tggtctgttctgggagggtcccg

SEQ ID NO: 106731 - RNA, 23 nt, synthetic construct
  source 1..23: mol_type = other RNA
tggtctgttctgggagggtcccg

SEQ ID NO: 106732 - RNA, 23 nt, synthetic construct
  source 1..23: mol_type = other RNA
tgctgtggtctgctctgtgagga

SEQ ID NO: 106733 - RNA, 23 nt, synthetic construct
  source 1..23: mol_type = other RNA
ttaggctgctggcataagtgccc

SEQ ID NO: 106734 - RNA, 23 nt, synthetic construct
  source 1..23: mol_type = other RNA
tacgagcatggccgccagagcca

SEQ ID NO: 106735 - RNA, 23 nt, synthetic construct
  source 1..23: mol_type = other RNA
tttggggtaggcacagcaggctc

SEQ ID NO: 106736 - RNA, 23 nt, synthetic construct
  source 1..23: mol_type = other RNA
tagcgcgagaaggcactgttggg

SEQ ID NO: 106737 - RNA, 23 nt, synthetic construct
  source 1..23: mol_type = other RNA
tagtcctcctcggcaatgcagcc

SEQ ID NO: 106738 - RNA, 23 nt, synthetic construct
  source 1..23: mol_type = other RNA
tgcagtggtcgtcactgcagcag

SEQ ID NO: 106739 - RNA, 23 nt, synthetic construct
  source 1..23: mol_type = other RNA
tgtagtggatgctgagggcgcgg

SEQ ID NO: 106740 - RNA, 23 nt, synthetic construct
  source 1..23: mol_type = other RNA
ttgactcggtggtcctgctgcta

SEQ ID NO: 106741 - RNA, 23 nt, synthetic construct
  source 1..23: mol_type = other RNA
ttgactcggtggtcctgctgcta

SEQ ID NO: 106742 - RNA, 23 nt, synthetic construct
  source 1..23: mol_type = other RNA
ttgactcggtggtcctgctgcta

SEQ ID NO: 106743 - RNA, 23 nt, synthetic construct
  source 1..23: mol_type = other RNA
tgactcggtggtcctgctgctag

SEQ ID NO: 106744 - RNA, 23 nt, synthetic construct
  source 1..23: mol_type = other RNA
tgactcggtggtcctgctgctag

SEQ ID NO: 106745 - RNA, 23 nt, synthetic construct
  source 1..23: mol_type = other RNA
tgactcggtggtcctgctgctag

SEQ ID NO: 106746 - RNA, 23 nt, synthetic construct
  source 1..23: mol_type = other RNA
tgaaggttggcaggctgctgggg

SEQ ID NO: 106747 - RNA, 23 nt, synthetic construct
  source 1..23: mol_type = other RNA
tctggtcagcactttgggagggg

SEQ ID NO: 106748 - RNA, 23 nt, synthetic construct
  source 1..23: mol_type = other RNA
tctggtcagcactttgggagggg

SEQ ID NO: 106749 - RNA, 23 nt, synthetic construct
  source 1..23: mol_type = other RNA
tcgcctctcctggcagcaggtgc

SEQ ID NO: 106750 - RNA, 23 nt, synthetic construct
  source 1..23: mol_type = other RNA
tcattggcacaggcagcctgggc

SEQ ID NO: 106751 - RNA, 23 nt, synthetic construct
  source 1..23: mol_type = other RNA
ttcttcgttcttgcaggtcagcc

SEQ ID NO: 106752 - RNA, 23 nt, synthetic construct
  source 1..23: mol_type = other RNA
tgacgctcacgcccagggcagga

SEQ ID NO: 106753 - RNA, 23 nt, synthetic construct
  source 1..23: mol_type = other RNA
tggacgtcacagtgcaccttctg

SEQ ID NO: 106754 - RNA, 23 nt, synthetic construct
  source 1..23: mol_type = other RNA
tgtggttgtggtagtcagcactt

SEQ ID NO: 106755 - RNA, 23 nt, synthetic construct
  source 1..23: mol_type = other RNA
ttgtgtgctgaaacagcccacgt

SEQ ID NO: 106756 - RNA, 23 nt, synthetic construct
  source 1..23: mol_type = other RNA
tagcaggctccgtgctggcactg

SEQ ID NO: 106757 - RNA, 23 nt, synthetic construct
  source 1..23: mol_type = other RNA
tacatcttgcccccagcagccct

SEQ ID NO: 106758 - RNA, 23 nt, synthetic construct
  source 1..23: mol_type = other RNA
tgcactctatgctctttggtgcc

SEQ ID NO: 106759 - RNA, 23 nt, synthetic construct
  source 1..23: mol_type = other RNA
tctcggggtagttctccgcccgg

SEQ ID NO: 106760 - RNA, 23 nt, synthetic construct
  source 1..23: mol_type = other RNA
tcaggggtcctcaaagctgttcc

SEQ ID NO: 106761 - RNA, 23 nt, synthetic construct
  source 1..23: mol_type = other RNA
tatgctctttggtgcccagcaca

SEQ ID NO: 106762 - RNA, 23 nt, synthetic construct
  source 1..23: mol_type = other RNA
tttctccgcccggcactctatgc

SEQ ID NO: 106763 - RNA, 23 nt, synthetic construct
  source 1..23: mol_type = other RNA
ttctccgcccggcactctatgct

SEQ ID NO: 106764 - RNA, 23 nt, synthetic construct
  source 1..23: mol_type = other RNA
tctatgctctttggtgcccagca

SEQ ID NO: 106765 - RNA, 23 nt, synthetic construct
  source 1..23: mol_type = other RNA
tcccagcagccctgatgttttca

SEQ ID NO: 106766 - RNA, 23 nt, synthetic construct
  source 1..23: mol_type = other RNA
tgagcaggggtcctcaaagctgt

SEQ ID NO: 106767 - RNA, 23 nt, synthetic construct
  source 1..23: mol_type = other RNA
tgcactcggccccaggggtgccc

SEQ ID NO: 106768 - RNA, 23 nt, synthetic construct
  source 1..23: mol_type = other RNA
tgcactctatgtccttaggctgc

SEQ ID NO: 106769 - RNA, 23 nt, synthetic construct
  source 1..23: mol_type = other RNA
tggcactctatgtccttaggctg

SEQ ID NO: 106770 - RNA, 23 nt, synthetic construct
  source 1..23: mol_type = other RNA
tactctatgctctttggtgccca

SEQ ID NO: 106771 - RNA, 23 nt, synthetic construct
  source 1..23: mol_type = other RNA
tctccgcccggcactctatgctc

SEQ ID NO: 106772 - RNA, 23 nt, synthetic construct
  source 1..23: mol_type = other RNA
ttgttgaacctgcctgtctggtc

SEQ ID NO: 106773 - RNA, 23 nt, synthetic construct
  source 1..23: mol_type = other RNA
tgttctccgcccggcactctatg

SEQ ID NO: 106774 - RNA, 23 nt, synthetic construct
  source 1..23: mol_type = other RNA
tcagcctgacaaacacctgcatg

SEQ ID NO: 106775 - RNA, 23 nt, synthetic construct
  source 1..23: mol_type = other RNA
tagcaggggtcctcaaagctgtt

SEQ ID NO: 106776 - RNA, 23 nt, synthetic construct
  source 1..23: mol_type = other RNA
tccctctctgcctcaggttttca

SEQ ID NO: 106777 - RNA, 23 nt, synthetic construct
  source 1..23: mol_type = other RNA
taggttgggaagtccacgtcaaa

SEQ ID NO: 106778 - RNA, 23 nt, synthetic construct
  source 1..23: mol_type = other RNA
tgaggttgggaagtccacgtcaa

SEQ ID NO: 106779 - RNA, 23 nt, synthetic construct
  source 1..23: mol_type = other RNA
tcagccctgatgttttcaaaagt

SEQ ID NO: 106780 - RNA, 23 nt, synthetic construct
  source 1..23: mol_type = other RNA
tgcagccctgatgttttcaaaag

SEQ ID NO: 106781 - RNA, 23 nt, synthetic construct
  source 1..23: mol_type = other RNA
ttggtgcccagcacatcttgccc

SEQ ID NO: 106782 - RNA, 23 nt, synthetic construct
  source 1..23: mol_type = other RNA
tcctctctgcctcaggttttcaa

SEQ ID NO: 106783 - RNA, 23 nt, synthetic construct
  source 1..23: mol_type = other RNA
tgtttccatgtccccgcctgcaa

SEQ ID NO: 106784 - RNA, 23 nt, synthetic construct
  source 1..23: mol_type = other RNA
tcagcacatcttgcccccagcag

SEQ ID NO: 106785 - RNA, 23 nt, synthetic construct
  source 1..23: mol_type = other RNA
tcatcttgcccccagcagccctg

SEQ ID NO: 106786 - RNA, 23 nt, synthetic construct
  source 1..23: mol_type = other RNA
tggttgggaagtccacgtcaaac

SEQ ID NO: 106787 - RNA, 23 nt, synthetic construct
  source 1..23: mol_type = other RNA
ttatgctctttggtgcccagcac

SEQ ID NO: 106788 - RNA, 23 nt, synthetic construct
  source 1..23: mol_type = other RNA
ttgaagcacatgttgaacctgcc

SEQ ID NO: 106789 - RNA, 23 nt, synthetic construct
  source 1..23: mol_type = other RNA
tgcccagcacatcttgcccccag

SEQ ID NO: 106790 - RNA, 23 nt, synthetic construct
  source 1..23: mol_type = other RNA
tacatctggccctggtgggcggg

SEQ ID NO: 106791 - RNA, 23 nt, synthetic construct
  source 1..23: mol_type = other RNA
tgcaggggtcctcaaagctgttc

SEQ ID NO: 106792 - RNA, 23 nt, synthetic construct
  source 1..23: mol_type = other RNA
tgtggtggtggccgtctccagct

SEQ ID NO: 106793 - RNA, 23 nt, synthetic construct
  source 1..23: mol_type = other RNA
tctgaggttgggaagtccacgtc

SEQ ID NO: 106794 - RNA, 23 nt, synthetic construct
  source 1..23: mol_type = other RNA
tccccagcagccctgatgttttc

SEQ ID NO: 106795 - RNA, 23 nt, synthetic construct
  source 1..23: mol_type = other RNA
tttggtgcccagcacatcttgcc

SEQ ID NO: 106796 - RNA, 23 nt, synthetic construct
  source 1..23: mol_type = other RNA
tcatgttgaacctgcctgtctgg

SEQ ID NO: 106797 - RNA, 23 nt, synthetic construct
  source 1..23: mol_type = other RNA
taagcacatgttgaacctgcctg

SEQ ID NO: 106798 - RNA, 23 nt, synthetic construct
  source 1..23: mol_type = other RNA
tctccaggagccagcacggtgcc

SEQ ID NO: 106799 - RNA, 23 nt, synthetic construct
  source 1..23: mol_type = other RNA
taaagtttccatgtccccgcctg

SEQ ID NO: 106800 - RNA, 23 nt, synthetic construct
  source 1..23: mol_type = other RNA
tgggggacaccaggctgggcctg

SEQ ID NO: 106801 - RNA, 23 nt, synthetic construct
  source 1..23: mol_type = other RNA
tgggggacaccaggctgggcctg

SEQ ID NO: 106802 - RNA, 23 nt, synthetic construct
  source 1..23: mol_type = other RNA
tgggggacaccaggctgggcctg

SEQ ID NO: 106803 - RNA, 23 nt, synthetic construct
  source 1..23: mol_type = other RNA
tgggggacaccaggctgggcctg

SEQ ID NO: 106804 - RNA, 23 nt, synthetic construct
  source 1..23: mol_type = other RNA
tctctctgcctcaggttttcaaa

SEQ ID NO: 106805 - RNA, 23 nt, synthetic construct
  source 1..23: mol_type = other RNA
ttgttttcaaaagtttccatgtc

SEQ ID NO: 106806 - RNA, 23 nt, synthetic construct
  source 1..23: mol_type = other RNA
tagccctgatgttttcaaaagtt

SEQ ID NO: 106807 - RNA, 23 nt, synthetic construct
  source 1..23: mol_type = other RNA
tatcttgcccccagcagccctga

SEQ ID NO: 106808 - RNA, 23 nt, synthetic construct
  source 1..23: mol_type = other RNA
tgggtggggactgctgtggtgct

SEQ ID NO: 106809 - RNA, 23 nt, synthetic construct
  source 1..23: mol_type = other RNA
tcccagcacatcttgcccccagc

SEQ ID NO: 106810 - RNA, 23 nt, synthetic construct
  source 1..23: mol_type = other RNA
tgagaagtgggagctggggaagc

SEQ ID NO: 106811 - RNA, 23 nt, synthetic construct
  source 1..23: mol_type = other RNA
taaaagtttccatgtccccgcct

SEQ ID NO: 106812 - RNA, 23 nt, synthetic construct
  source 1..23: mol_type = other RNA
ttgaggttgggaagtccacgtca

SEQ ID NO: 106813 - RNA, 23 nt, synthetic construct
  source 1..23: mol_type = other RNA
tccctggtgggcggggtccagcc

SEQ ID NO: 106814 - RNA, 23 nt, synthetic construct
  source 1..23: mol_type = other RNA
tcctgaggttgggaagtccacgt

SEQ ID NO: 106815 - RNA, 23 nt, synthetic construct
  source 1..23: mol_type = other RNA
ttccaggagccagcacggtgccg

SEQ ID NO: 106816 - RNA, 23 nt, synthetic construct
  source 1..23: mol_type = other RNA
taggagggcgtggccgtggagct

SEQ ID NO: 106817 - RNA, 23 nt, synthetic construct
  source 1..23: mol_type = other RNA
tggcactcggccccaggggtgcc

SEQ ID NO: 106818 - RNA, 23 nt, synthetic construct
  source 1..23: mol_type = other RNA
ttaggtgcaggtgcaggcctcaa

SEQ ID NO: 106819 - RNA, 23 nt, synthetic construct
  source 1..23: mol_type = other RNA
ttgggacagtgggttctgtggag

SEQ ID NO: 106820 - RNA, 23 nt, synthetic construct
  source 1..23: mol_type = other RNA
tgtcacagccaggggcaggggag

SEQ ID NO: 106821 - RNA, 23 nt, synthetic construct
  source 1..23: mol_type = other RNA
tataggtgcaggtgcaggcctca

SEQ ID NO: 106822 - RNA, 23 nt, synthetic construct
  source 1..23: mol_type = other RNA
ttttcaaaagtttccatgtcccc

SEQ ID NO: 106823 - RNA, 23 nt, synthetic construct
  source 1..23: mol_type = other RNA
ttgctctttggtgcccagcacat

SEQ ID NO: 106824 - RNA, 23 nt, synthetic construct
  source 1..23: mol_type = other RNA
tgggggctcaggctggggaagac

SEQ ID NO: 106825 - RNA, 23 nt, synthetic construct
  source 1..23: mol_type = other RNA
taacttctgcaggttcccaaact

SEQ ID NO: 106826 - RNA, 23 nt, synthetic construct
  source 1..23: mol_type = other RNA
tagcctgacaaacacctgcatga

SEQ ID NO: 106827 - RNA, 23 nt, synthetic construct
  source 1..23: mol_type = other RNA
tccaggccaggcaggtccaccag

SEQ ID NO: 106828 - RNA, 23 nt, synthetic construct
  source 1..23: mol_type = other RNA
tggggctggcaggtggtggtacc

SEQ ID NO: 106829 - RNA, 23 nt, synthetic construct
  source 1..23: mol_type = other RNA
tccggggctggcaggtggtggta

SEQ ID NO: 106830 - RNA, 23 nt, synthetic construct
  source 1..23: mol_type = other RNA
ttggtggtggccgtctccagctc

SEQ ID NO: 106831 - RNA, 23 nt, synthetic construct
  source 1..23: mol_type = other RNA
tggtggggactgctgtggtgctg

SEQ ID NO: 106832 - RNA, 23 nt, synthetic construct
  source 1..23: mol_type = other RNA
tcaaaagtttccatgtccccgcc

SEQ ID NO: 106833 - RNA, 23 nt, synthetic construct
  source 1..23: mol_type = other RNA
ttcaaaagtttccatgtccccgc

SEQ ID NO: 106834 - RNA, 23 nt, synthetic construct
  source 1..23: mol_type = other RNA
tttttcaaaagtttccatgtccc

SEQ ID NO: 106835 - RNA, 23 nt, synthetic construct
  source 1..23: mol_type = other RNA
tgttttcaaaagtttccatgtcc

SEQ ID NO: 106836 - RNA, 23 nt, synthetic construct
  source 1..23: mol_type = other RNA
tctgatgttttcaaaagtttcca

SEQ ID NO: 106837 - RNA, 23 nt, synthetic construct
  source 1..23: mol_type = other RNA
tgccctgatgttttcaaaagttt

SEQ ID NO: 106838 - RNA, 23 nt, synthetic construct
  source 1..23: mol_type = other RNA
tcccccagcagccctgatgtttt

SEQ ID NO: 106839 - RNA, 23 nt, synthetic construct
  source 1..23: mol_type = other RNA
tcttgcccccagcagccctgatg

SEQ ID NO: 106840 - RNA, 23 nt, synthetic construct
  source 1..23: mol_type = other RNA
tccagcacatcttgcccccagca

SEQ ID NO: 106841 - RNA, 23 nt, synthetic construct
  source 1..23: mol_type = other RNA
ttgcccagcacatcttgccccca

SEQ ID NO: 106842 - RNA, 23 nt, synthetic construct
  source 1..23: mol_type = other RNA
ttttggtgcccagcacatcttgc

SEQ ID NO: 106843 - RNA, 23 nt, synthetic construct
  source 1..23: mol_type = other RNA
tgaagcacatgttgaacctgcct

SEQ ID NO: 106844 - RNA, 23 nt, synthetic construct
  source 1..23: mol_type = other RNA
tgcagtggctgtagtcgtcacag

SEQ ID NO: 106845 - RNA, 23 nt, synthetic construct
  source 1..23: mol_type = other RNA
tggagggcgtggccgtggagctg

SEQ ID NO: 106846 - RNA, 23 nt, synthetic construct
  source 1..23: mol_type = other RNA
tcctgggctggaggagggggtgg

SEQ ID NO: 106847 - RNA, 23 nt, synthetic construct
  source 1..23: mol_type = other RNA
ttgtggggctgctgggcagcagg

SEQ ID NO: 106848 - RNA, 23 nt, synthetic construct
  source 1..23: mol_type = other RNA
tggggacaccaggctgggcctgg

SEQ ID NO: 106849 - RNA, 23 nt, synthetic construct
  source 1..23: mol_type = other RNA
tagggggacaccaggctgggcct

SEQ ID NO: 106850 - RNA, 23 nt, synthetic construct
  source 1..23: mol_type = other RNA
tcctgggctggaggagggggtgg

SEQ ID NO: 106851 - RNA, 23 nt, synthetic construct
  source 1..23: mol_type = other RNA
ttgtggggctgctgggcagcagg

SEQ ID NO: 106852 - RNA, 23 nt, synthetic construct
  source 1..23: mol_type = other RNA
tggggacaccaggctgggcctgg

SEQ ID NO: 106853 - RNA, 23 nt, synthetic construct
  source 1..23: mol_type = other RNA
tagggggacaccaggctgggcct

SEQ ID NO: 106854 - RNA, 23 nt, synthetic construct
  source 1..23: mol_type = other RNA
ttccctggagtggaggagggcgt

SEQ ID NO: 106855 - RNA, 23 nt, synthetic construct
  source 1..23: mol_type = other RNA
tcctgggctggaggagggggtgg

SEQ ID NO: 106856 - RNA, 23 nt, synthetic construct
  source 1..23: mol_type = other RNA
ttgtggggctgctgggcagcagg

SEQ ID NO: 106857 - RNA, 23 nt, synthetic construct
  source 1..23: mol_type = other RNA
tggggacaccaggctgggcctgg

SEQ ID NO: 106858 - RNA, 23 nt, synthetic construct
  source 1..23: mol_type = other RNA
tagggggacaccaggctgggcct

SEQ ID NO: 106859 - RNA, 23 nt, synthetic construct
  source 1..23: mol_type = other RNA
tcctgggctggaggagggggtga

SEQ ID NO: 106860 - RNA, 23 nt, synthetic construct
  source 1..23: mol_type = other RNA
ttgtggggctgctgggcagcagg

SEQ ID NO: 106861 - RNA, 23 nt, synthetic construct
  source 1..23: mol_type = other RNA
tggggacaccaggctgggcctgg

SEQ ID NO: 106862 - RNA, 23 nt, synthetic construct
  source 1..23: mol_type = other RNA
tagggggacaccaggctgggcct

SEQ ID NO: 106863 - RNA, 23 nt, synthetic construct
  source 1..23: mol_type = other RNA
tcctgggctggaggagggggtgg

SEQ ID NO: 106864 - RNA, 23 nt, synthetic construct
  source 1..23: mol_type = other RNA
tgcaggctgctggggagcactgc

SEQ ID NO: 106865 - RNA, 23 nt, synthetic construct
  source 1..23: mol_type = other RNA
tcctgatgttttcaaaagtttcc

SEQ ID NO: 106866 - RNA, 23 nt, synthetic construct
  source 1..23: mol_type = other RNA
tatcctgtagttgtagcacatct

SEQ ID NO: 106867 - RNA, 23 nt, synthetic construct
  source 1..23: mol_type = other RNA
tggttctgtggagcctgcaggcg

SEQ ID NO: 106868 - RNA, 23 nt, synthetic construct
  source 1..23: mol_type = other RNA
tggccgatgtggggctgctgggc

SEQ ID NO: 106869 - RNA, 23 nt, synthetic construct
  source 1..23: mol_type = other RNA
tggccgatgtggggctgctgggc

SEQ ID NO: 106870 - RNA, 23 nt, synthetic construct
  source 1..23: mol_type = other RNA
tggccgatgtggggctgctgggc

SEQ ID NO: 106871 - RNA, 23 nt, synthetic construct
  source 1..23: mol_type = other RNA
tggccgatgtggggctgctgggc

SEQ ID NO: 106872 - RNA, 23 nt, synthetic construct
  source 1..23: mol_type = other RNA
ttggggtagctgtagtccagcca

SEQ ID NO: 106873 - RNA, 23 nt, synthetic construct
  source 1..23: mol_type = other RNA
ttggggtagctgtagtccagcca

SEQ ID NO: 106874 - RNA, 23 nt, synthetic construct
  source 1..23: mol_type = other RNA
ttggggtagctgtagtccagcca

SEQ ID NO: 106875 - RNA, 23 nt, synthetic construct
  source 1..23: mol_type = other RNA
ttggggtagctgtagtccagcca

SEQ ID NO: 106876 - RNA, 23 nt, synthetic construct
  source 1..23: mol_type = other RNA
tccgtggtggtcagcactttggg

SEQ ID NO: 106877 - RNA, 23 nt, synthetic construct
  source 1..23: mol_type = other RNA
ttggccaccgtgcagttctccag

SEQ ID NO: 106878 - RNA, 23 nt, synthetic construct
  source 1..23: mol_type = other RNA
tgatcagctcgtagctctccacg

SEQ ID NO: 106879 - RNA, 23 nt, synthetic construct
  source 1..23: mol_type = other RNA
taggaagatccccatgtagcgta

SEQ ID NO: 106880 - RNA, 23 nt, synthetic construct
  source 1..23: mol_type = other RNA
tggggaagacagtgacgggtgga

SEQ ID NO: 106881 - RNA, 23 nt, synthetic construct
  source 1..23: mol_type = other RNA
tactttgatgggcaggtgcttgt

SEQ ID NO: 106882 - RNA, 23 nt, synthetic construct
  source 1..23: mol_type = other RNA
tggccgtgtccccgccgtccagg

SEQ ID NO: 106883 - RNA, 23 nt, synthetic construct
  source 1..23: mol_type = other RNA
tctgtgagcgcactggatgccac

SEQ ID NO: 106884 - RNA, 23 nt, synthetic construct
  source 1..23: mol_type = other RNA
tgcccgaggggcaggcagccaga

SEQ ID NO: 106885 - RNA, 23 nt, synthetic construct
  source 1..23: mol_type = other RNA
ttctttggtgcccagcacatctt

SEQ ID NO: 106886 - RNA, 23 nt, synthetic construct
  source 1..23: mol_type = other RNA
taggctccgtgctggcactgagg

SEQ ID NO: 106887 - RNA, 23 nt, synthetic construct
  source 1..23: mol_type = other RNA
tacagacacagccggacacgcag

SEQ ID NO: 106888 - RNA, 23 nt, synthetic construct
  source 1..23: mol_type = other RNA
tacggcaggtcctggcactgcca

SEQ ID NO: 106889 - RNA, 23 nt, synthetic construct
  source 1..23: mol_type = other RNA
tggtggagtcaacctgggagcgg

SEQ ID NO: 106890 - RNA, 23 nt, synthetic construct
  source 1..23: mol_type = other RNA
tcaggcctcaaggctgtgagcgc

SEQ ID NO: 106891 - RNA, 23 nt, synthetic construct
  source 1..23: mol_type = other RNA
tcatctggccctggtgggcgggg

SEQ ID NO: 106892 - RNA, 23 nt, synthetic construct
  source 1..23: mol_type = other RNA
ttgcccgaggggcaggcagccag

SEQ ID NO: 106893 - RNA, 23 nt, synthetic construct
  source 1..23: mol_type = other RNA
tcccgaggggcaggcagccagag

SEQ ID NO: 106894 - RNA, 23 nt, synthetic construct
  source 1..23: mol_type = other RNA
tctcggccccaggggtgcccgcc

SEQ ID NO: 106895 - RNA, 23 nt, synthetic construct
  source 1..23: mol_type = other RNA
tgggagtagagaagtgggagctg

SEQ ID NO: 106896 - RNA, 23 nt, synthetic construct
  source 1..23: mol_type = other RNA
tcaagggcaccgtctcctcgtgg

SEQ ID NO: 106897 - RNA, 23 nt, synthetic construct
  source 1..23: mol_type = other RNA
ttggaagaggctgtagggcagcc

SEQ ID NO: 106898 - RNA, 23 nt, synthetic construct
  source 1..23: mol_type = other RNA
tcaaggctgtgagcgcactggat

SEQ ID NO: 106899 - RNA, 23 nt, synthetic construct
  source 1..23: mol_type = other RNA
taggccggccccagcagggtgcg

SEQ ID NO: 106900 - RNA, 23 nt, synthetic construct
  source 1..23: mol_type = other RNA
tgccggtggtcccacaggggatg

SEQ ID NO: 106901 - RNA, 23 nt, synthetic construct
  source 1..23: mol_type = other RNA
tactggggttccggcaggttttt

SEQ ID NO: 106902 - RNA, 23 nt, synthetic construct
  source 1..23: mol_type = other RNA
tgcattgtcacagccaggggcag

SEQ ID NO: 106903 - RNA, 23 nt, synthetic construct
  source 1..23: mol_type = other RNA
tgcccatccaacttctgcaggtt

SEQ ID NO: 106904 - RNA, 23 nt, synthetic construct
  source 1..23: mol_type = other RNA
tcagctgcgtgtagatggagttg

SEQ ID NO: 106905 - RNA, 23 nt, synthetic construct
  source 1..23: mol_type = other RNA
ttgaaacagcccacgtccagcgt

SEQ ID NO: 106906 - RNA, 23 nt, synthetic construct
  source 1..23: mol_type = other RNA
tctctttggtgcccagcacatct

SEQ ID NO: 106907 - RNA, 23 nt, synthetic construct
  source 1..23: mol_type = other RNA
tgtggccgtggtcctggaggtgg

SEQ ID NO: 106908 - RNA, 23 nt, synthetic construct
  source 1..23: mol_type = other RNA
tgtggccgtggtcctggaggtgg

SEQ ID NO: 106909 - RNA, 23 nt, synthetic construct
  source 1..23: mol_type = other RNA
tgatgcaggctgtggggtcagca

SEQ ID NO: 106910 - RNA, 23 nt, synthetic construct
  source 1..23: mol_type = other RNA
tgggccgatgtggggctgctggg

SEQ ID NO: 106911 - RNA, 23 nt, synthetic construct
  source 1..23: mol_type = other RNA
tggcccaactcccgcagggggac

SEQ ID NO: 106912 - RNA, 23 nt, synthetic construct
  source 1..23: mol_type = other RNA
tgggccgatgtggggctgctggg

SEQ ID NO: 106913 - RNA, 23 nt, synthetic construct
  source 1..23: mol_type = other RNA
tggcccaactcccgcagggggac

SEQ ID NO: 106914 - RNA, 23 nt, synthetic construct
  source 1..23: mol_type = other RNA
tgggccgatgtggggctgctggg

SEQ ID NO: 106915 - RNA, 23 nt, synthetic construct
  source 1..23: mol_type = other RNA
tggcccaactcccgcagggggac

SEQ ID NO: 106916 - RNA, 23 nt, synthetic construct
  source 1..23: mol_type = other RNA
tgggccgatgtggggctgctggg

SEQ ID NO: 106917 - RNA, 23 nt, synthetic construct
  source 1..23: mol_type = other RNA
taggcactcggccccaggggtgc

SEQ ID NO: 106918 - RNA, 23 nt, synthetic construct
  source 1..23: mol_type = other RNA
tgtggctgtgcttgtcagcactg

SEQ ID NO: 106919 - RNA, 23 nt, synthetic construct
  source 1..23: mol_type = other RNA
tgtggctgtgcttgtcagcactg

SEQ ID NO: 106920 - RNA, 23 nt, synthetic construct
  source 1..23: mol_type = other RNA
tgcaggtttttaggcagggtgcc

SEQ ID NO: 106921 - RNA, 23 nt, synthetic construct
  source 1..23: mol_type = other RNA
tgcaggcctcaaggctgtgagcg

SEQ ID NO: 106922 - RNA, 23 nt, synthetic construct
  source 1..23: mol_type = other RNA
tcccggagtggaggagggcatgg

SEQ ID NO: 106923 - RNA, 23 nt, synthetic construct
  source 1..23: mol_type = other RNA
tcccggagtggaggagggcatgg

SEQ ID NO: 106924 - RNA, 23 nt, synthetic construct
  source 1..23: mol_type = other RNA
ttagaggagggtgttgccataga

SEQ ID NO: 106925 - RNA, 23 nt, synthetic construct
  source 1..23: mol_type = other RNA
ttagaggagggtgttgccataga

SEQ ID NO: 106926 - RNA, 23 nt, synthetic construct
  source 1..23: mol_type = other RNA
ttagaggagggtgttgccataga

SEQ ID NO: 106927 - RNA, 23 nt, synthetic construct
  source 1..23: mol_type = other RNA
ttagaggagggtgttgccataga

SEQ ID NO: 106928 - RNA, 23 nt, synthetic construct
  source 1..23: mol_type = other RNA
ttagaggagggtgttgccataga

SEQ ID NO: 106929 - RNA, 23 nt, synthetic construct
  source 1..23: mol_type = other RNA
tggtcacagtccacctgctggcc

SEQ ID NO: 106930 - RNA, 23 nt, synthetic construct
  source 1..23: mol_type = other RNA
ttgcaggttcccaaactggagcg

SEQ ID NO: 106931 - RNA, 23 nt, synthetic construct
  source 1..23: mol_type = other RNA
tccgaggggcaggcagccagagt

SEQ ID NO: 106932 - RNA, 23 nt, synthetic construct
  source 1..23: mol_type = other RNA
tgtcctgggtgtccccagagagg

SEQ ID NO: 106933 - RNA, 23 nt, synthetic construct
  source 1..23: mol_type = other RNA
ttgtggtggccgtggtggtcagc

SEQ ID NO: 106934 - RNA, 23 nt, synthetic construct
  source 1..23: mol_type = other RNA
tccgtgtccccgccgtccaggct

SEQ ID NO: 106935 - RNA, 23 nt, synthetic construct
  source 1..23: mol_type = other RNA
tcttggtgcagacgccgtccctc

SEQ ID NO: 106936 - RNA, 23 nt, synthetic construct
  source 1..23: mol_type = other RNA
ttgggtgcaggggcactgcccga

SEQ ID NO: 106937 - RNA, 23 nt, synthetic construct
  source 1..23: mol_type = other RNA
tgctgccgacaggggcagctgcg

SEQ ID NO: 106938 - RNA, 23 nt, synthetic construct
  source 1..23: mol_type = other RNA
tgagccggtggctgcactcccac

SEQ ID NO: 106939 - RNA, 23 nt, synthetic construct
  source 1..23: mol_type = other RNA
tcttccggtcccaggacacggcc

SEQ ID NO: 106940 - RNA, 23 nt, synthetic construct
  source 1..23: mol_type = other RNA
tgtggccgtggtggtcagcactt

SEQ ID NO: 106941 - RNA, 23 nt, synthetic construct
  source 1..23: mol_type = other RNA
ttcttgctgaaaccgctgctcac

SEQ ID NO: 106942 - RNA, 23 nt, synthetic construct
  source 1..23: mol_type = other RNA
tgggcactgtcctctccgttcca

SEQ ID NO: 106943 - RNA, 23 nt, synthetic construct
  source 1..23: mol_type = other RNA
tagctggtggccggggtgctggg

SEQ ID NO: 106944 - RNA, 23 nt, synthetic construct
  source 1..23: mol_type = other RNA
tagctggtggccggggtgctggg

SEQ ID NO: 106945 - RNA, 23 nt, synthetic construct
  source 1..23: mol_type = other RNA
tagctggtggccggggtgctggg

SEQ ID NO: 106946 - RNA, 23 nt, synthetic construct
  source 1..23: mol_type = other RNA
tagctggtggccggggtgctggg

SEQ ID NO: 106947 - RNA, 23 nt, synthetic construct
  source 1..23: mol_type = other RNA
ttgaggctccccctgcagctgga

SEQ ID NO: 106948 - RNA, 23 nt, synthetic construct
  source 1..23: mol_type = other RNA
tgagagggtggggactgctgtgg

SEQ ID NO: 106949 - RNA, 23 nt, synthetic construct
  source 1..23: mol_type = other RNA
tgcagttctccagggtccaggtc

SEQ ID NO: 106950 - RNA, 23 nt, synthetic construct
  source 1..23: mol_type = other RNA
tgcagggcactgtcctctccgtt

SEQ ID NO: 106951 - RNA, 23 nt, synthetic construct
  source 1..23: mol_type = other RNA
tcgctgggggttggagcaggtgt

SEQ ID NO: 106952 - RNA, 23 nt, synthetic construct
  source 1..23: mol_type = other RNA
tggggcagaagcagccgtccaca

SEQ ID NO: 106953 - RNA, 23 nt, synthetic construct
  source 1..23: mol_type = other RNA
tggcaggtcctggcactgccata

SEQ ID NO: 106954 - RNA, 23 nt, synthetic construct
  source 1..23: mol_type = other RNA
taccagctgcaccagcagctgca

SEQ ID NO: 106955 - RNA, 23 nt, synthetic construct
  source 1..23: mol_type = other RNA
tcagagccggtggctgcactccc

SEQ ID NO: 106956 - RNA, 23 nt, synthetic construct
  source 1..23: mol_type = other RNA
taccctctctgcctcaggttttc

SEQ ID NO: 106957 - RNA, 23 nt, synthetic construct
  source 1..23: mol_type = other RNA
tggtggtggtggccgtctccagc

SEQ ID NO: 106958 - RNA, 23 nt, synthetic construct
  source 1..23: mol_type = other RNA
ttggggactgctgtggtgctggc

SEQ ID NO: 106959 - RNA, 23 nt, synthetic construct
  source 1..23: mol_type = other RNA
tcctggagtggaggagggcgtgg

SEQ ID NO: 106960 - RNA, 23 nt, synthetic construct
  source 1..23: mol_type = other RNA
taggctgctggggagcactgcag

SEQ ID NO: 106961 - RNA, 23 nt, synthetic construct
  source 1..23: mol_type = other RNA
tcgtgcagttctccagggtccag

SEQ ID NO: 106962 - RNA, 23 nt, synthetic construct
  source 1..23: mol_type = other RNA
ttccaggctctggcagggcacct

SEQ ID NO: 106963 - RNA, 23 nt, synthetic construct
  source 1..23: mol_type = other RNA
tgcaggctgtggggtcagcaaat

SEQ ID NO: 106964 - RNA, 23 nt, synthetic construct
  source 1..23: mol_type = other RNA
tcctggcagcaggtgcactggtg

SEQ ID NO: 106965 - RNA, 23 nt, synthetic construct
  source 1..23: mol_type = other RNA
tgcaggtgcaggagctgcaggtg

SEQ ID NO: 106966 - RNA, 23 nt, synthetic construct
  source 1..23: mol_type = other RNA
tcagctgcaccagcagctgcagc

SEQ ID NO: 106967 - RNA, 23 nt, synthetic construct
  source 1..23: mol_type = other RNA
tatctggccctggtgggcggggt

SEQ ID NO: 106968 - RNA, 23 nt, synthetic construct
  source 1..23: mol_type = other RNA
tctgcactcccacctccggttcc

SEQ ID NO: 106969 - RNA, 23 nt, synthetic construct
  source 1..23: mol_type = other RNA
tcacttcatctggtcctcattga

SEQ ID NO: 106970 - RNA, 23 nt, synthetic construct
  source 1..23: mol_type = other RNA
taggtgcaggtgcaggcctcaag

SEQ ID NO: 106971 - RNA, 23 nt, synthetic construct
  source 1..23: mol_type = other RNA
tggcaggtggtggtacctggggc

SEQ ID NO: 106972 - RNA, 23 nt, synthetic construct
  source 1..23: mol_type = other RNA
tgtgtggtggccgtggtggtcag

SEQ ID NO: 106973 - RNA, 23 nt, synthetic construct
  source 1..23: mol_type = other RNA
tgtcctggaggtggccgtggtgt

SEQ ID NO: 106974 - RNA, 23 nt, synthetic construct
  source 1..23: mol_type = other RNA
tgtcctggaggtggccgtggtgt

SEQ ID NO: 106975 - RNA, 23 nt, synthetic construct
  source 1..23: mol_type = other RNA
taggactgaggaggacacagtgg

SEQ ID NO: 106976 - RNA, 23 nt, synthetic construct
  source 1..23: mol_type = other RNA
tcaggctgtggggtcagcaaatg

SEQ ID NO: 106977 - RNA, 23 nt, synthetic construct
  source 1..23: mol_type = other RNA
tcctgaggctccccctgcagctg

SEQ ID NO: 106978 - RNA, 23 nt, synthetic construct
  source 1..23: mol_type = other RNA
ttcctgaggctccccctgcagct

SEQ ID NO: 106979 - RNA, 23 nt, synthetic construct
  source 1..23: mol_type = other RNA
tagcaggtgcaggagctgcaggt

SEQ ID NO: 106980 - RNA, 23 nt, synthetic construct
  source 1..23: mol_type = other RNA
tccgcacaggccgcagaccctgc

SEQ ID NO: 106981 - RNA, 23 nt, synthetic construct
  source 1..23: mol_type = other RNA
ttcccacacaggccgcacatctg

SEQ ID NO: 106982 - RNA, 23 nt, synthetic construct
  source 1..23: mol_type = other RNA
ttggtgcaggtgccgcactggcc

SEQ ID NO: 106983 - RNA, 23 nt, synthetic construct
  source 1..23: mol_type = other RNA
ttcgtcgaagttcccgcacaggc

SEQ ID NO: 106984 - RNA, 23 nt, synthetic construct
  source 1..23: mol_type = other RNA
tcagctccagcagggcactgtcc

SEQ ID NO: 106985 - RNA, 23 nt, synthetic construct
  source 1..23: mol_type = other RNA
tctgtgaggatccaggtcgtccc

SEQ ID NO: 106986 - RNA, 23 nt, synthetic construct
  source 1..23: mol_type = other RNA
tctgtgaggatccaggtcgtccc

SEQ ID NO: 106987 - RNA, 23 nt, synthetic construct
  source 1..23: mol_type = other RNA
tctgtgaggatccaggtcgtccc

SEQ ID NO: 106988 - RNA, 23 nt, synthetic construct
  source 1..23: mol_type = other RNA
tctgtgaggatccaggtcgtccc

SEQ ID NO: 106989 - RNA, 23 nt, synthetic construct
  source 1..23: mol_type = other RNA
tctgtgaggatccaggtcgtccc

SEQ ID NO: 106990 - RNA, 23 nt, synthetic construct
  source 1..23: mol_type = other RNA
ttgtgaggatccaggtcgtcccc

SEQ ID NO: 106991 - RNA, 23 nt, synthetic construct
  source 1..23: mol_type = other RNA
ttgtgaggatccaggtcgtccct

SEQ ID NO: 106992 - RNA, 23 nt, synthetic construct
  source 1..23: mol_type = other RNA
ttgtgaggatccaggtcgtcccc

SEQ ID NO: 106993 - RNA, 23 nt, synthetic construct
  source 1..23: mol_type = other RNA
ttgtgaggatccaggtcgtcccc

SEQ ID NO: 106994 - RNA, 23 nt, synthetic construct
  source 1..23: mol_type = other RNA
ttgtgaggatccaggtcgtcccc

SEQ ID NO: 106995 - RNA, 23 nt, synthetic construct
  source 1..23: mol_type = other RNA
taggctgcaggtcagcacctgcc

SEQ ID NO: 106996 - RNA, 23 nt, synthetic construct
  source 1..23: mol_type = other RNA
ttctgtgaggatccaggtcgtcc

SEQ ID NO: 106997 - RNA, 23 nt, synthetic construct
  source 1..23: mol_type = other RNA
ttctgtgaggatccaggtcgtcc

SEQ ID NO: 106998 - RNA, 23 nt, synthetic construct
  source 1..23: mol_type = other RNA
ttctgtgaggatccaggtcgtcc

SEQ ID NO: 106999 - RNA, 23 nt, synthetic construct
  source 1..23: mol_type = other RNA
ttctgtgaggatccaggtcgtcc

SEQ ID NO: 107000 - RNA, 23 nt, synthetic construct
  source 1..23: mol_type = other RNA
ttctgtgaggatccaggtcgtcc

SEQ ID NO: 107001 - RNA, 23 nt, synthetic construct
  source 1..23: mol_type = other RNA
tcggctctgtgaggatccaggtg

SEQ ID NO: 107002 - RNA, 23 nt, synthetic construct
  source 1..23: mol_type = other RNA
tcggctctgtgaggatccaggtg

SEQ ID NO: 107003 - RNA, 23 nt, synthetic construct
  source 1..23: mol_type = other RNA
tcggctctgtgaggatccaggtg

SEQ ID NO: 107004 - RNA, 23 nt, synthetic construct
  source 1..23: mol_type = other RNA
tcggctctgtgaggatccaggtg

SEQ ID NO: 107005 - RNA, 23 nt, synthetic construct
  source 1..23: mol_type = other RNA
tttatttgcaaaactgggctggg

SEQ ID NO: 107006 - RNA, 23 nt, synthetic construct
  source 1..23: mol_type = other RNA
tcgtctccaggctgcaggtcagc

SEQ ID NO: 107007 - RNA, 23 nt, synthetic construct
  source 1..23: mol_type = other RNA
tgcagagggggctttgggatgct

SEQ ID NO: 107008 - RNA, 23 nt, synthetic construct
  source 1..23: mol_type = other RNA
tagccccgtctccaggctgcagg

SEQ ID NO: 107009 - RNA, 23 nt, synthetic construct
  source 1..23: mol_type = other RNA
tgggctctgtgaggatccaggtg

SEQ ID NO: 107010 - RNA, 23 nt, synthetic construct
  source 1..23: mol_type = other RNA
tagggccctgggtctctgcctgc

SEQ ID NO: 107011 - RNA, 23 nt, synthetic construct
  source 1..23: mol_type = other RNA
tgctgcaggtcagcacctgcccg

SEQ ID NO: 107012 - RNA, 23 nt, synthetic construct
  source 1..23: mol_type = other RNA
tccaggctgcaggtcagcacctg

SEQ ID NO: 107013 - RNA, 23 nt, synthetic construct
  source 1..23: mol_type = other RNA
tctccaggctgcaggtcagcacc

SEQ ID NO: 107014 - RNA, 23 nt, synthetic construct
  source 1..23: mol_type = other RNA
tccgtctccaggctgcaggtcag

SEQ ID NO: 107015 - RNA, 23 nt, synthetic construct
  source 1..23: mol_type = other RNA
tcagccccgtctccaggctgcag

SEQ ID NO: 107016 - RNA, 23 nt, synthetic construct
  source 1..23: mol_type = other RNA
ttggtcagctctgtgaggatcca

SEQ ID NO: 107017 - RNA, 23 nt, synthetic construct
  source 1..23: mol_type = other RNA
ttggtcagctctgtgaggatcca

SEQ ID NO: 107018 - RNA, 23 nt, synthetic construct
  source 1..23: mol_type = other RNA
ttggtcagctctgtgaggatcca

SEQ ID NO: 107019 - RNA, 23 nt, synthetic construct
  source 1..23: mol_type = other RNA
ttggtcagctctgtgaggatcca

SEQ ID NO: 107020 - RNA, 23 nt, synthetic construct
  source 1..23: mol_type = other RNA
ttggtcagctctgtgaggatcca

SEQ ID NO: 107021 - RNA, 23 nt, synthetic construct
  source 1..23: mol_type = other RNA
tgaggagggtgtggccgtggaat

SEQ ID NO: 107022 - RNA, 23 nt, synthetic construct
  source 1..23: mol_type = other RNA
ttttggtgggtgggcaggtgagg

SEQ ID NO: 107023 - RNA, 23 nt, synthetic construct
  source 1..23: mol_type = other RNA
taaaactgggctgggttgagcag

SEQ ID NO: 107024 - RNA, 23 nt, synthetic construct
  source 1..23: mol_type = other RNA
ttttatttgcaaaactgggctgg

SEQ ID NO: 107025 - RNA, 23 nt, synthetic construct
  source 1..23: mol_type = other RNA
tggctgcaggtcagcacctgccc

SEQ ID NO: 107026 - RNA, 23 nt, synthetic construct
  source 1..23: mol_type = other RNA
ttctccaggctgcaggtcagcac

SEQ ID NO: 107027 - RNA, 23 nt, synthetic construct
  source 1..23: mol_type = other RNA
tacagagcatggggatggaggca

SEQ ID NO: 107028 - RNA, 23 nt, synthetic construct
  source 1..23: mol_type = other RNA
tcgccagagccaacaccagcgtc

SEQ ID NO: 107029 - RNA, 23 nt, synthetic construct
  source 1..23: mol_type = other RNA
tggaggacacagtggacacgctg

SEQ ID NO: 107030 - RNA, 23 nt, synthetic construct
  source 1..23: mol_type = other RNA
tccccgtctccaggctgcaggtc

SEQ ID NO: 107031 - RNA, 23 nt, synthetic construct
  source 1..23: mol_type = other RNA
tcgtccagcgtgtggcagctccg

SEQ ID NO: 107032 - RNA, 23 nt, synthetic construct
  source 1..23: mol_type = other RNA
tggtgggccacaggctctcccag

SEQ ID NO: 107033 - RNA, 23 nt, synthetic construct
  source 1..23: mol_type = other RNA
taactgggctgggttgagcagag

SEQ ID NO: 107034 - RNA, 23 nt, synthetic construct
  source 1..23: mol_type = other RNA
tgcaggtcagcacctgcccgacc

SEQ ID NO: 107035 - RNA, 23 nt, synthetic construct
  source 1..23: mol_type = other RNA
tagggcaggggcttgcactgcac

SEQ ID NO: 107036 - RNA, 23 nt, synthetic construct
  source 1..23: mol_type = other RNA
tgtcctgctggcccctcaccctt

SEQ ID NO: 107037 - RNA, 23 nt, synthetic construct
  source 1..23: mol_type = other RNA
tatttcatagttgaagcacatct

SEQ ID NO: 107038 - RNA, 23 nt, synthetic construct
  source 1..23: mol_type = other RNA
tatttcatagttgaagcacatct

SEQ ID NO: 107039 - RNA, 23 nt, synthetic construct
  source 1..23: mol_type = other RNA
tatttcatagttgaagcacatct

SEQ ID NO: 107040 - RNA, 23 nt, synthetic construct
  source 1..23: mol_type = other RNA
tatttcatagttgaagcacatct

SEQ ID NO: 107041 - RNA, 23 nt, synthetic construct
  source 1..23: mol_type = other RNA
tcagggcaggggcttgcactgca

SEQ ID NO: 107042 - RNA, 23 nt, synthetic construct
  source 1..23: mol_type = other RNA
tggggtcctgctggcccctcacc

SEQ ID NO: 107043 - RNA, 23 nt, synthetic construct
  source 1..23: mol_type = other RNA
tgcaaggccaaggtgggccacag

SEQ ID NO: 107044 - RNA, 23 nt, synthetic construct
  source 1..23: mol_type = other RNA
ttgcaggtcagcacctgcccgac

SEQ ID NO: 107045 - RNA, 23 nt, synthetic construct
  source 1..23: mol_type = other RNA
ttccaggctgcaggtcagcacct

SEQ ID NO: 107046 - RNA, 23 nt, synthetic construct
  source 1..23: mol_type = other RNA
tagtggaggagggcatggccgta

SEQ ID NO: 107047 - RNA, 23 nt, synthetic construct
  source 1..23: mol_type = other RNA
tagtggaggagggcatggccgta

SEQ ID NO: 107048 - RNA, 23 nt, synthetic construct
  source 1..23: mol_type = other RNA
tgtctccaggctgcaggtcagca

SEQ ID NO: 107049 - RNA, 23 nt, synthetic construct
  source 1..23: mol_type = other RNA
tctggcagttctccgctgtgggg

SEQ ID NO: 107050 - RNA, 23 nt, synthetic construct
  source 1..23: mol_type = other RNA
ttctggcagttctccgctgtggg

SEQ ID NO: 107051 - RNA, 23 nt, synthetic construct
  source 1..23: mol_type = other RNA
tgccggggtgctggggcagtggc

SEQ ID NO: 107052 - RNA, 23 nt, synthetic construct
  source 1..23: mol_type = other RNA
tgccggggtgctggggcagtggc

SEQ ID NO: 107053 - RNA, 23 nt, synthetic construct
  source 1..23: mol_type = other RNA
tgccggggtgctggggcagtggc

SEQ ID NO: 107054 - RNA, 23 nt, synthetic construct
  source 1..23: mol_type = other RNA
tgccggggtgctggggcagtggc

SEQ ID NO: 107055 - RNA, 23 nt, synthetic construct
  source 1..23: mol_type = other RNA
ttctccacactgagggagcaggg

SEQ ID NO: 107056 - RNA, 23 nt, synthetic construct
  source 1..23: mol_type = other RNA
ttgtggtggccgtggtggtaagc

SEQ ID NO: 107057 - RNA, 23 nt, synthetic construct
  source 1..23: mol_type = other RNA
ttgtggtggccgtggtggtaagc

SEQ ID NO: 107058 - RNA, 23 nt, synthetic construct
  source 1..23: mol_type = other RNA
tgtctctggagtggaggagggtg

SEQ ID NO: 107059 - RNA, 23 nt, synthetic construct
  source 1..23: mol_type = other RNA
tgtctctggagtggaggagggtg

SEQ ID NO: 107060 - RNA, 23 nt, synthetic construct
  source 1..23: mol_type = other RNA
tgtctctggagtggaggagggtg

SEQ ID NO: 107061 - RNA, 23 nt, synthetic construct
  source 1..23: mol_type = other RNA
tgtctctggagtggaggagggtg

SEQ ID NO: 107062 - RNA, 23 nt, synthetic construct
  source 1..23: mol_type = other RNA
taggaagaggggatggctgtaac

SEQ ID NO: 107063 - RNA, 23 nt, synthetic construct
  source 1..23: mol_type = other RNA
tgccgtggtggtaagcactgtgg

SEQ ID NO: 107064 - RNA, 23 nt, synthetic construct
  source 1..23: mol_type = other RNA
tgccgtggtggtaagcactgtgg

SEQ ID NO: 107065 - RNA, 23 nt, synthetic construct
  source 1..23: mol_type = other RNA
tgccgccgtgggtgcaggggcac

SEQ ID NO: 107066 - RNA, 23 nt, synthetic construct
  source 1..23: mol_type = other RNA
tcgcactccccacagcactgccc

SEQ ID NO: 107067 - RNA, 23 nt, synthetic construct
  source 1..23: mol_type = other RNA
tccacactgagggagcaggggtc

SEQ ID NO: 107068 - RNA, 23 nt, synthetic construct
  source 1..23: mol_type = other RNA
tggcactcgaggcccaggggctg

SEQ ID NO: 107069 - RNA, 23 nt, synthetic construct
  source 1..23: mol_type = other RNA
tggcactcgaggcccaggggctg

SEQ ID NO: 107070 - RNA, 23 nt, synthetic construct
  source 1..23: mol_type = other RNA
tggcactcgaggcccaggggctg

SEQ ID NO: 107071 - RNA, 23 nt, synthetic construct
  source 1..23: mol_type = other RNA
tggcactcgaggcccaggggctg

SEQ ID NO: 107072 - RNA, 23 nt, synthetic construct
  source 1..23: mol_type = other RNA
ttccacactgagggagcaggggt

SEQ ID NO: 107073 - RNA, 23 nt, synthetic construct
  source 1..23: mol_type = other RNA
tccgggggcagagctcagggcac

SEQ ID NO: 107074 - RNA, 23 nt, synthetic construct
  source 1..23: mol_type = other RNA
tcacactgagggagcaggggtcc

SEQ ID NO: 107075 - RNA, 23 nt, synthetic construct
  source 1..23: mol_type = other RNA
ttcgaggcccaggggctgctcac

SEQ ID NO: 107076 - RNA, 23 nt, synthetic construct
  source 1..23: mol_type = other RNA
ttcgaggcccaggggctgctcac

SEQ ID NO: 107077 - RNA, 23 nt, synthetic construct
  source 1..23: mol_type = other RNA
ttcgaggcccaggggctgctcac

SEQ ID NO: 107078 - RNA, 23 nt, synthetic construct
  source 1..23: mol_type = other RNA
ttcgaggcccaggggctgctcac

SEQ ID NO: 107079 - RNA, 23 nt, synthetic construct
  source 1..23: mol_type = other RNA
tctggggagcactgcaggggtgc

SEQ ID NO: 107080 - RNA, 23 nt, synthetic construct
  source 1..23: mol_type = other RNA
tctgctggggagcactgcagggg

SEQ ID NO: 107081 - RNA, 23 nt, synthetic construct
  source 1..23: mol_type = other RNA
tcactccccacagcactgcccgg

SEQ ID NO: 107082 - RNA, 23 nt, synthetic construct
  source 1..23: mol_type = other RNA
tgcagtccctggactggaggagg

SEQ ID NO: 107083 - RNA, 23 nt, synthetic construct
  source 1..23: mol_type = other RNA
tttgtggtggccgtggtggtaag

SEQ ID NO: 107084 - RNA, 23 nt, synthetic construct
  source 1..23: mol_type = other RNA
tgcagtccctggactggaggagg

SEQ ID NO: 107085 - RNA, 23 nt, synthetic construct
  source 1..23: mol_type = other RNA
tttgtggtggccgtggtggtaag

SEQ ID NO: 107086 - RNA, 23 nt, synthetic construct
  source 1..23: mol_type = other RNA
tgcagtccctggactggaggagg

SEQ ID NO: 107087 - RNA, 23 nt, synthetic construct
  source 1..23: mol_type = other RNA
tgggtgtggtggtctgtgctggg

SEQ ID NO: 107088 - RNA, 23 nt, synthetic construct
  source 1..23: mol_type = other RNA
tctggtcgatgcttacctcgggg

SEQ ID NO: 107089 - RNA, 23 nt, synthetic construct
  source 1..23: mol_type = other RNA
tacctgcccgacctggtcgatgc

SEQ ID NO: 107090 - RNA, 23 nt, synthetic construct
  source 1..23: mol_type = other RNA
tcagtggatgcagtcgtagtggc

SEQ ID NO: 107091 - RNA, 23 nt, synthetic construct
  source 1..23: mol_type = other RNA
tgcagtcgtagtggctgttgtgg

SEQ ID NO: 107092 - RNA, 23 nt, synthetic construct
  source 1..23: mol_type = other RNA
tgcagtcgtagtggctgttgtgg

SEQ ID NO: 107093 - RNA, 23 nt, synthetic construct
  source 1..23: mol_type = other RNA
tgcagtcgtagtggctgttgtgg

SEQ ID NO: 107094 - RNA, 23 nt, synthetic construct
  source 1..23: mol_type = other RNA
tgtctggtcttcgttcttgcagg

SEQ ID NO: 107095 - RNA, 23 nt, synthetic construct
  source 1..23: mol_type = other RNA
tatgtccccgcctgcaacccctg

SEQ ID NO: 107096 - RNA, 23 nt, synthetic construct
  source 1..23: mol_type = other RNA
tgagttgaggagggcgtggccgt

SEQ ID NO: 107097 - RNA, 23 nt, synthetic construct
  source 1..23: mol_type = other RNA
ttggtcggctttgtgaggatcca

SEQ ID NO: 107098 - RNA, 23 nt, synthetic construct
  source 1..23: mol_type = other RNA
tgagttgaggagggcgtggccgt

SEQ ID NO: 107099 - RNA, 23 nt, synthetic construct
  source 1..23: mol_type = other RNA
tagttgaggagggcgtggccgtg

SEQ ID NO: 107100 - RNA, 23 nt, synthetic construct
  source 1..23: mol_type = other RNA
tgtggtcggctttgtgaggatcc

SEQ ID NO: 107101 - RNA, 23 nt, synthetic construct
  source 1..23: mol_type = other RNA
tagttgaggagggcgtggccgta

SEQ ID NO: 107102 - RNA, 23 nt, synthetic construct
  source 1..23: mol_type = other RNA
tggggtcacccatagggtggtct

SEQ ID NO: 107103 - RNA, 23 nt, synthetic construct
  source 1..23: mol_type = other RNA
tcccagtctgcgaggtgagggcc

SEQ ID NO: 107104 - RNA, 23 nt, synthetic construct
  source 1..23: mol_type = other RNA
tcatgtccccgcctgcaacccct

SEQ ID NO: 107105 - RNA, 23 nt, synthetic construct
  source 1..23: mol_type = other RNA
tcgtcacagcaaagcacacgcac

SEQ ID NO: 107106 - RNA, 23 nt, synthetic construct
  source 1..23: mol_type = other RNA
tacccctgaggttgggaagtcca

SEQ ID NO: 107107 - RNA, 23 nt, synthetic construct
  source 1..23: mol_type = other RNA
tccatgtccccgcctgcaacccc

SEQ ID NO: 107108 - RNA, 23 nt, synthetic construct
  source 1..23: mol_type = other RNA
ttctggtcttcgttcttgcaggt

SEQ ID NO: 107109 - RNA, 23 nt, synthetic construct
  source 1..23: mol_type = other RNA
tgaacctgcctgtctggtcttcg

SEQ ID NO: 107110 - RNA, 23 nt, synthetic construct
  source 1..23: mol_type = other RNA
tgttgtagttgaagcacatgttg

SEQ ID NO: 107111 - RNA, 23 nt, synthetic construct
  source 1..23: mol_type = other RNA
tcacgttgtagttgaagcacatg

SEQ ID NO: 107112 - RNA, 23 nt, synthetic construct
  source 1..23: mol_type = other RNA
ttgtagtcgtcacagcaaagcac

SEQ ID NO: 107113 - RNA, 23 nt, synthetic construct
  source 1..23: mol_type = other RNA
tgctgtagtcgtcacagcaaagc

SEQ ID NO: 107114 - RNA, 23 nt, synthetic construct
  source 1..23: mol_type = other RNA
ttccaggtcgtccccggagttga

SEQ ID NO: 107115 - RNA, 23 nt, synthetic construct
  source 1..23: mol_type = other RNA
tgctttgtgaggatccaggtcgt

SEQ ID NO: 107116 - RNA, 23 nt, synthetic construct
  source 1..23: mol_type = other RNA
tgatccagtggacgcagtcgtag

SEQ ID NO: 107117 - RNA, 23 nt, synthetic construct
  source 1..23: mol_type = other RNA
ttccaggtcgtccccggagtgga

SEQ ID NO: 107118 - RNA, 23 nt, synthetic construct
  source 1..23: mol_type = other RNA
ttccaggtcgtccccggagtgga

SEQ ID NO: 107119 - RNA, 23 nt, synthetic construct
  source 1..23: mol_type = other RNA
tgtggctgtgatcgtagtggccg

SEQ ID NO: 107120 - RNA, 23 nt, synthetic construct
  source 1..23: mol_type = other RNA
ttccaggtcgtccccggagttga

SEQ ID NO: 107121 - RNA, 23 nt, synthetic construct
  source 1..23: mol_type = other RNA
tgctttgtgaggatccaggtcgt

SEQ ID NO: 107122 - RNA, 23 nt, synthetic construct
  source 1..23: mol_type = other RNA
ttccaggtcgtccccggagtgga

SEQ ID NO: 107123 - RNA, 23 nt, synthetic construct
  source 1..23: mol_type = other RNA
tagtggatgcagtcgtagtggct

SEQ ID NO: 107124 - RNA, 23 nt, synthetic construct
  source 1..23: mol_type = other RNA
tccagtggatgcagtcgtagtgg

SEQ ID NO: 107125 - RNA, 23 nt, synthetic construct
  source 1..23: mol_type = other RNA
ttccaggtcgtccccggagtgga

SEQ ID NO: 107126 - RNA, 23 nt, synthetic construct
  source 1..23: mol_type = other RNA
tgatccagtggacgcagtcgtag

SEQ ID NO: 107127 - RNA, 23 nt, synthetic construct
  source 1..23: mol_type = other RNA
taaagggctggagtcgagtgctg

SEQ ID NO: 107128 - RNA, 23 nt, synthetic construct
  source 1..23: mol_type = other RNA
tagctggtggctggggtactggg

SEQ ID NO: 107129 - RNA, 23 nt, synthetic construct
  source 1..23: mol_type = other RNA
tctgcaacccctgaggttgggaa

SEQ ID NO: 107130 - RNA, 23 nt, synthetic construct
  source 1..23: mol_type = other RNA
tctgcctgtctggtcttcgttct

SEQ ID NO: 107131 - RNA, 23 nt, synthetic construct
  source 1..23: mol_type = other RNA
tggatccaggtcgtccccggagt

SEQ ID NO: 107132 - RNA, 23 nt, synthetic construct
  source 1..23: mol_type = other RNA
tggatccaggtcgtccccggagt

SEQ ID NO: 107133 - RNA, 23 nt, synthetic construct
  source 1..23: mol_type = other RNA
ttcagctctgtgaggatccaggt

SEQ ID NO: 107134 - RNA, 23 nt, synthetic construct
  source 1..23: mol_type = other RNA
tctgttgtggtcagctctgtgag

SEQ ID NO: 107135 - RNA, 23 nt, synthetic construct
  source 1..23: mol_type = other RNA
tggatccaggtcgtccccggagt

SEQ ID NO: 107136 - RNA, 23 nt, synthetic construct
  source 1..23: mol_type = other RNA
ttcagctctgtgaggatccaggt

SEQ ID NO: 107137 - RNA, 23 nt, synthetic construct
  source 1..23: mol_type = other RNA
tggatccaggtcgtccccggagt

SEQ ID NO: 107138 - RNA, 23 nt, synthetic construct
  source 1..23: mol_type = other RNA
tggatccaggtcgtccccggagt

SEQ ID NO: 107139 - RNA, 23 nt, synthetic construct
  source 1..23: mol_type = other RNA
ttcagctctgtgaggatccaggt

SEQ ID NO: 107140 - RNA, 23 nt, synthetic construct
  source 1..23: mol_type = other RNA
tctgttgtggtcagctctgtgag

SEQ ID NO: 107141 - RNA, 23 nt, synthetic construct
  source 1..23: mol_type = other RNA
tggatccaggtcgtccccggagt

SEQ ID NO: 107142 - RNA, 23 nt, synthetic construct
  source 1..23: mol_type = other RNA
ttcagctctgtgaggatccaggt

SEQ ID NO: 107143 - RNA, 23 nt, synthetic construct
  source 1..23: mol_type = other RNA
ttcagctctgtgaggatccaggt

SEQ ID NO: 107144 - RNA, 23 nt, synthetic construct
  source 1..23: mol_type = other RNA
tctgttgtggtcagctctgtgag

SEQ ID NO: 107145 - RNA, 23 nt, synthetic construct
  source 1..23: mol_type = other RNA
ttgtagtggctgttgtggtcagc

SEQ ID NO: 107146 - RNA, 23 nt, synthetic construct
  source 1..23: mol_type = other RNA
tgccgtccctccagtcgctgagc

SEQ ID NO: 107147 - RNA, 23 nt, synthetic construct
  source 1..23: mol_type = other RNA
tcgacctggtcgatgcttacctc

SEQ ID NO: 107148 - RNA, 23 nt, synthetic construct
  source 1..23: mol_type = other RNA
tctggtcttcgttcttgcaggtc

SEQ ID NO: 107149 - RNA, 23 nt, synthetic construct
  source 1..23: mol_type = other RNA
tgtcacagcaaagcacacgcacg

SEQ ID NO: 107150 - RNA, 23 nt, synthetic construct
  source 1..23: mol_type = other RNA
tcgtccccggagttgaggagggc

SEQ ID NO: 107151 - RNA, 23 nt, synthetic construct
  source 1..23: mol_type = other RNA
tcgtccccggagttgaggagggc

SEQ ID NO: 107152 - RNA, 23 nt, synthetic construct
  source 1..23: mol_type = other RNA
ttctcggggcagcaggggttctc

SEQ ID NO: 107153 - RNA, 23 nt, synthetic construct
  source 1..23: mol_type = other RNA
tcaggtcagccccgtctccaggc

SEQ ID NO: 107154 - RNA, 23 nt, synthetic construct
  source 1..23: mol_type = other RNA
tgtagtcgtcacagcaaagcaca

SEQ ID NO: 107155 - RNA, 23 nt, synthetic construct
  source 1..23: mol_type = other RNA
tggagttgaggagggcgtggccg

SEQ ID NO: 107156 - RNA, 23 nt, synthetic construct
  source 1..23: mol_type = other RNA
tccggagttgaggagggcgtggc

SEQ ID NO: 107157 - RNA, 23 nt, synthetic construct
  source 1..23: mol_type = other RNA
tggagttgaggagggcgtggccg

SEQ ID NO: 107158 - RNA, 23 nt, synthetic construct
  source 1..23: mol_type = other RNA
tccggagttgaggagggcgtggc

SEQ ID NO: 107159 - RNA, 23 nt, synthetic construct
  source 1..23: mol_type = other RNA
tggacttgtagtggatgctgagg

SEQ ID NO: 107160 - RNA, 23 nt, synthetic construct
  source 1..23: mol_type = other RNA
tacccagtctgcgaggtgagggc

SEQ ID NO: 107161 - RNA, 23 nt, synthetic construct
  source 1..23: mol_type = other RNA
tggtcttcgttcttgcaggtcag

SEQ ID NO: 107162 - RNA, 23 nt, synthetic construct
  source 1..23: mol_type = other RNA
tcacagcaaagcacacgcacgtt

SEQ ID NO: 107163 - RNA, 23 nt, synthetic construct
  source 1..23: mol_type = other RNA
tgtcgtagtggctgttgtggtcg

SEQ ID NO: 107164 - RNA, 23 nt, synthetic construct
  source 1..23: mol_type = other RNA
tgtcgtagtggctgttgtggtca

SEQ ID NO: 107165 - RNA, 23 nt, synthetic construct
  source 1..23: mol_type = other RNA
tgtcgtagtggctgttgtggtca

SEQ ID NO: 107166 - RNA, 23 nt, synthetic construct
  source 1..23: mol_type = other RNA
tgtcgtagtggctgttgtggtca

SEQ ID NO: 107167 - RNA, 23 nt, synthetic construct
  source 1..23: mol_type = other RNA
tgtcgtagtggctgttgtggtca

SEQ ID NO: 107168 - RNA, 23 nt, synthetic construct
  source 1..23: mol_type = other RNA
tcgcctgcaacccctgaggttgg

SEQ ID NO: 107169 - RNA, 23 nt, synthetic construct
  source 1..23: mol_type = other RNA
tgggtactggggcagtggctgta

SEQ ID NO: 107170 - RNA, 23 nt, synthetic construct
  source 1..23: mol_type = other RNA
ttggggtactggggcagtggctg

SEQ ID NO: 107171 - RNA, 23 nt, synthetic construct
  source 1..23: mol_type = other RNA
tagtcgtagtggctgttgtggtc

SEQ ID NO: 107172 - RNA, 23 nt, synthetic construct
  source 1..23: mol_type = other RNA
tagtcgtagtggctgttgtggtc

SEQ ID NO: 107173 - RNA, 23 nt, synthetic construct
  source 1..23: mol_type = other RNA
tggtggaggacgggatggccgtg

SEQ ID NO: 107174 - RNA, 23 nt, synthetic construct
  source 1..23: mol_type = other RNA
tagtcgtagtggctgttgtggtc

SEQ ID NO: 107175 - RNA, 23 nt, synthetic construct
  source 1..23: mol_type = other RNA
tagtcgtagtggctgttgtggtc

SEQ ID NO: 107176 - RNA, 23 nt, synthetic construct
  source 1..23: mol_type = other RNA
tagtcgtagtggctgttgtggtc

SEQ ID NO: 107177 - RNA, 23 nt, synthetic construct
  source 1..23: mol_type = other RNA
ttggcattggcacaggcagcctg

SEQ ID NO: 107178 - RNA, 23 nt, synthetic construct
  source 1..23: mol_type = other RNA
tcgccgtccctccagtcgctgag

SEQ ID NO: 107179 - RNA, 23 nt, synthetic construct
  source 1..23: mol_type = other RNA
tcccgcctgcaacccctgaggtt

SEQ ID NO: 107180 - RNA, 23 nt, synthetic construct
  source 1..23: mol_type = other RNA
tggtcagcacctgcccgacctgg

SEQ ID NO: 107181 - RNA, 23 nt, synthetic construct
  source 1..23: mol_type = other RNA
tggtcagccccgtctccaggctg

SEQ ID NO: 107182 - RNA, 23 nt, synthetic construct
  source 1..23: mol_type = other RNA
taggtcagccccgtctccaggct

SEQ ID NO: 107183 - RNA, 23 nt, synthetic construct
  source 1..23: mol_type = other RNA
ttggtcttcgttcttgcaggtca

SEQ ID NO: 107184 - RNA, 23 nt, synthetic construct
  source 1..23: mol_type = other RNA
tgcacgttgtagttgaagcacat

SEQ ID NO: 107185 - RNA, 23 nt, synthetic construct
  source 1..23: mol_type = other RNA
tcacgcacgttgtagttgaagca

SEQ ID NO: 107186 - RNA, 23 nt, synthetic construct
  source 1..23: mol_type = other RNA
tctgtagtcgtcacagcaaagca

SEQ ID NO: 107187 - RNA, 23 nt, synthetic construct
  source 1..23: mol_type = other RNA
ttactggggcagtggctgtagtc

SEQ ID NO: 107188 - RNA, 23 nt, synthetic construct
  source 1..23: mol_type = other RNA
tggggtactggggcagtggctgt

SEQ ID NO: 107189 - RNA, 23 nt, synthetic construct
  source 1..23: mol_type = other RNA
tgctggggtactggggcagtggc

SEQ ID NO: 107190 - RNA, 23 nt, synthetic construct
  source 1..23: mol_type = other RNA
ttggctggggtactggggcagtg

SEQ ID NO: 107191 - RNA, 23 nt, synthetic construct
  source 1..23: mol_type = other RNA
tctggtggctggggtactggggc

SEQ ID NO: 107192 - RNA, 23 nt, synthetic construct
  source 1..23: mol_type = other RNA
tggagctggtggctggggtactg

SEQ ID NO: 107193 - RNA, 23 nt, synthetic construct
  source 1..23: mol_type = other RNA
tccccggagttgaggagggcgtg

SEQ ID NO: 107194 - RNA, 23 nt, synthetic construct
  source 1..23: mol_type = other RNA
tccaggtcgtccccggagttgag

SEQ ID NO: 107195 - RNA, 23 nt, synthetic construct
  source 1..23: mol_type = other RNA
taggatccaggtcgtccccggag

SEQ ID NO: 107196 - RNA, 23 nt, synthetic construct
  source 1..23: mol_type = other RNA
ttgtgaggatccaggtcgtcccc

SEQ ID NO: 107197 - RNA, 23 nt, synthetic construct
  source 1..23: mol_type = other RNA
ttagtggctgttgtggtcggctt

SEQ ID NO: 107198 - RNA, 23 nt, synthetic construct
  source 1..23: mol_type = other RNA
tgtagtggctgttgtggtcggct

SEQ ID NO: 107199 - RNA, 23 nt, synthetic construct
  source 1..23: mol_type = other RNA
tgtggatccagtggacgcagtcg

SEQ ID NO: 107200 - RNA, 23 nt, synthetic construct
  source 1..23: mol_type = other RNA
tgtagtccagccactctgaccag

SEQ ID NO: 107201 - RNA, 23 nt, synthetic construct
  source 1..23: mol_type = other RNA
taggatccaggtcgtccccggag

SEQ ID NO: 107202 - RNA, 23 nt, synthetic construct
  source 1..23: mol_type = other RNA
tgtagtggctgttgtggtcagct

SEQ ID NO: 107203 - RNA, 23 nt, synthetic construct
  source 1..23: mol_type = other RNA
taggtggccctggtgtggcccgg

SEQ ID NO: 107204 - RNA, 23 nt, synthetic construct
  source 1..23: mol_type = other RNA
tgtagtccagccactctgaccag

SEQ ID NO: 107205 - RNA, 23 nt, synthetic construct
  source 1..23: mol_type = other RNA
taggatccaggtcgtccccggag

SEQ ID NO: 107206 - RNA, 23 nt, synthetic construct
  source 1..23: mol_type = other RNA
tgtagtccagccactctgaccag

SEQ ID NO: 107207 - RNA, 23 nt, synthetic construct
  source 1..23: mol_type = other RNA
tccccggagttgaggagggcgtg

SEQ ID NO: 107208 - RNA, 23 nt, synthetic construct
  source 1..23: mol_type = other RNA
tccaggtcgtccccggagttgag

SEQ ID NO: 107209 - RNA, 23 nt, synthetic construct
  source 1..23: mol_type = other RNA
taggatccaggtcgtccccggag

SEQ ID NO: 107210 - RNA, 23 nt, synthetic construct
  source 1..23: mol_type = other RNA
ttgtgaggatccaggtcgtcccc

SEQ ID NO: 107211 - RNA, 23 nt, synthetic construct
  source 1..23: mol_type = other RNA
tgtagtggctgttgtggtcagct

SEQ ID NO: 107212 - RNA, 23 nt, synthetic construct
  source 1..23: mol_type = other RNA
tgtagtccagccactctgaccag

SEQ ID NO: 107213 - RNA, 23 nt, synthetic construct
  source 1..23: mol_type = other RNA
taggatccaggtcgtccccggag

SEQ ID NO: 107214 - RNA, 23 nt, synthetic construct
  source 1..23: mol_type = other RNA
tgtagtggctgttgtggtcagct

SEQ ID NO: 107215 - RNA, 23 nt, synthetic construct
  source 1..23: mol_type = other RNA
taggatccaggtcgtccccggag

SEQ ID NO: 107216 - RNA, 23 nt, synthetic construct
  source 1..23: mol_type = other RNA
tgtagtggctgttgtggtcagct

SEQ ID NO: 107217 - RNA, 23 nt, synthetic construct
  source 1..23: mol_type = other RNA
tgtggatccagtggacgcagtcg

SEQ ID NO: 107218 - RNA, 23 nt, synthetic construct
  source 1..23: mol_type = other RNA
tgtagtggctgttgtggtcagct

SEQ ID NO: 107219 - RNA, 23 nt, synthetic construct
  source 1..23: mol_type = other RNA
tgctgtggtgggcatggggtggg

SEQ ID NO: 107220 - RNA, 23 nt, synthetic construct
  source 1..23: mol_type = other RNA
tgcctgcaacccctgaggttggg

SEQ ID NO: 107221 - RNA, 23 nt, synthetic construct
  source 1..23: mol_type = other RNA
tcagctttgtgaggatccaggtc

SEQ ID NO: 107222 - RNA, 23 nt, synthetic construct
  source 1..23: mol_type = other RNA
ttgtggtcggctttgtgaggatc

SEQ ID NO: 107223 - RNA, 23 nt, synthetic construct
  source 1..23: mol_type = other RNA
tggcctcccgtggtggctgtacc

SEQ ID NO: 107224 - RNA, 23 nt, synthetic construct
  source 1..23: mol_type = other RNA
tggctttgtgaggatccaggtcg

SEQ ID NO: 107225 - RNA, 23 nt, synthetic construct
  source 1..23: mol_type = other RNA
ttggatccagtggatgcagtcgt

SEQ ID NO: 107226 - RNA, 23 nt, synthetic construct
  source 1..23: mol_type = other RNA
tgtccccgcctgcaacccctgag

SEQ ID NO: 107227 - RNA, 23 nt, synthetic construct
  source 1..23: mol_type = other RNA
tgcaaagcacacgcacgttgtag

SEQ ID NO: 107228 - RNA, 23 nt, synthetic construct
  source 1..23: mol_type = other RNA
tagcaaagcacacgcacgttgta

SEQ ID NO: 107229 - RNA, 23 nt, synthetic construct
  source 1..23: mol_type = other RNA
tgtgcaccacctctccaggagcc

SEQ ID NO: 107230 - RNA, 23 nt, synthetic construct
  source 1..23: mol_type = other RNA
tcgtgtggggactgctggggggc

SEQ ID NO: 107231 - RNA, 23 nt, synthetic construct
  source 1..23: mol_type = other RNA
tcgtgtggggactgctgggggac

SEQ ID NO: 107232 - RNA, 23 nt, synthetic construct
  source 1..23: mol_type = other RNA
tcgtgtggggactgctggggggc

SEQ ID NO: 107233 - RNA, 23 nt, synthetic construct
  source 1..23: mol_type = other RNA
tcgtgtggggactgctgggggac

SEQ ID NO: 107234 - RNA, 23 nt, synthetic construct
  source 1..23: mol_type = other RNA
ttctcgcagccctggtgccacag

SEQ ID NO: 107235 - RNA, 23 nt, synthetic construct
  source 1..23: mol_type = other RNA
tgccgtgaagtcgtcagcctggt

SEQ ID NO: 107236 - RNA, 23 nt, synthetic construct
  source 1..23: mol_type = other RNA
tgactggagaagggagtggcttt

SEQ ID NO: 107237 - RNA, 23 nt, synthetic construct
  source 1..23: mol_type = other RNA
ttagctgtggatttggtggctgt

SEQ ID NO: 107238 - RNA, 23 nt, synthetic construct
  source 1..23: mol_type = other RNA
tgactggagaagggagtggcttt

SEQ ID NO: 107239 - RNA, 23 nt, synthetic construct
  source 1..23: mol_type = other RNA
ttagctgtggatttggtggctgt

SEQ ID NO: 107240 - RNA, 23 nt, synthetic construct
  source 1..23: mol_type = other RNA
ttgtccccgcctgcaacccctga

SEQ ID NO: 107241 - RNA, 23 nt, synthetic construct
  source 1..23: mol_type = other RNA
tagggcgtggccgtggagctggt

SEQ ID NO: 107242 - RNA, 23 nt, synthetic construct
  source 1..23: mol_type = other RNA
tccgtggctgtggtcctggaggt

SEQ ID NO: 107243 - RNA, 23 nt, synthetic construct
  source 1..23: mol_type = other RNA
tgtggctgttgtggtcagctctg

SEQ ID NO: 107244 - RNA, 23 nt, synthetic construct
  source 1..23: mol_type = other RNA
tatggtggccatgggtgtggtgg

SEQ ID NO: 107245 - RNA, 23 nt, synthetic construct
  source 1..23: mol_type = other RNA
tggtcctggaggtgcccctggtg

SEQ ID NO: 107246 - RNA, 23 nt, synthetic construct
  source 1..23: mol_type = other RNA
tgtggctgttgtggtcagctttg

SEQ ID NO: 107247 - RNA, 23 nt, synthetic construct
  source 1..23: mol_type = other RNA
tgtggctgttgtggtcagctctg

SEQ ID NO: 107248 - RNA, 23 nt, synthetic construct
  source 1..23: mol_type = other RNA
tgtggctgttgtggtcagctctg

SEQ ID NO: 107249 - RNA, 23 nt, synthetic construct
  source 1..23: mol_type = other RNA
tttgtcatggtggctgtggtggt

SEQ ID NO: 107250 - RNA, 23 nt, synthetic construct
  source 1..23: mol_type = other RNA
tgtggctgttgtggtcagctcag

SEQ ID NO: 107251 - RNA, 23 nt, synthetic construct
  source 1..23: mol_type = other RNA
tgtctcgcagccctggtgccaca

SEQ ID NO: 107252 - RNA, 23 nt, synthetic construct
  source 1..23: mol_type = other RNA
taacccctgaggttgggaagtcc

SEQ ID NO: 107253 - RNA, 23 nt, synthetic construct
  source 1..23: mol_type = other RNA
tggtggtaagcactgtggaggtg

SEQ ID NO: 107254 - RNA, 23 nt, synthetic construct
  source 1..23: mol_type = other RNA
tggtggtaagcactgtggaggtg

SEQ ID NO: 107255 - RNA, 23 nt, synthetic construct
  source 1..23: mol_type = other RNA
tggtggtaagcactgtggaggtg

SEQ ID NO: 107256 - RNA, 23 nt, synthetic construct
  source 1..23: mol_type = other RNA
tgggtgagggctggacagggctg

SEQ ID NO: 107257 - RNA, 23 nt, synthetic construct
  source 1..23: mol_type = other RNA
tgggtgagggctggacagggctg

SEQ ID NO: 107258 - RNA, 23 nt, synthetic construct
  source 1..23: mol_type = other RNA
tgggtgagggctggacagggctg

SEQ ID NO: 107259 - RNA, 23 nt, synthetic construct
  source 1..23: mol_type = other RNA
tgtgggtgtaggtgtgcaggatg

SEQ ID NO: 107260 - RNA, 23 nt, synthetic construct
  source 1..23: mol_type = other RNA
tgggccggggaggggccacaggg

SEQ ID NO: 107261 - RNA, 23 nt, synthetic construct
  source 1..23: mol_type = other RNA
tacagcaaagcacacgcacgttg

SEQ ID NO: 107262 - RNA, 23 nt, synthetic construct
  source 1..23: mol_type = other RNA
tgcggttgcagtccctggactgg

SEQ ID NO: 107263 - RNA, 23 nt, synthetic construct
  source 1..23: mol_type = other RNA
tcttctcagtgctggaagggcgg

SEQ ID NO: 107264 - RNA, 23 nt, synthetic construct
  source 1..23: mol_type = other RNA
tgtggtcagctctgtgaggatcc

SEQ ID NO: 107265 - RNA, 23 nt, synthetic construct
  source 1..23: mol_type = other RNA
ttggctgttgtggtcagctctgt

SEQ ID NO: 107266 - RNA, 23 nt, synthetic construct
  source 1..23: mol_type = other RNA
tgcggttgcagtccctggactgg

SEQ ID NO: 107267 - RNA, 23 nt, synthetic construct
  source 1..23: mol_type = other RNA
tcttctcagtgctggaagggcgg

SEQ ID NO: 107268 - RNA, 23 nt, synthetic construct
  source 1..23: mol_type = other RNA
tgtggtcagctctgtgaggatcc

SEQ ID NO: 107269 - RNA, 23 nt, synthetic construct
  source 1..23: mol_type = other RNA
tgcggttgcagtccctggactgg

SEQ ID NO: 107270 - RNA, 23 nt, synthetic construct
  source 1..23: mol_type = other RNA
tcttctcagtgctggaagggcgg

SEQ ID NO: 107271 - RNA, 23 nt, synthetic construct
  source 1..23: mol_type = other RNA
tgcggttgcagtccctggactgg

SEQ ID NO: 107272 - RNA, 23 nt, synthetic construct
  source 1..23: mol_type = other RNA
tcttctcagtgctggaagggcgg

SEQ ID NO: 107273 - RNA, 23 nt, synthetic construct
  source 1..23: mol_type = other RNA
tgtggtcagctctgtgaggatcc

SEQ ID NO: 107274 - RNA, 23 nt, synthetic construct
  source 1..23: mol_type = other RNA
ttggctgttgtggtcagctctgt

SEQ ID NO: 107275 - RNA, 23 nt, synthetic construct
  source 1..23: mol_type = other RNA
tgtggtcagctctgtgaggatcc

SEQ ID NO: 107276 - RNA, 23 nt, synthetic construct
  source 1..23: mol_type = other RNA
tgtggtcagctctgtgaggatcc

SEQ ID NO: 107277 - RNA, 23 nt, synthetic construct
  source 1..23: mol_type = other RNA
ttggctgttgtggtcagctctgt

SEQ ID NO: 107278 - RNA, 23 nt, synthetic construct
  source 1..23: mol_type = other RNA
tcttctcagtgctggaagggcag

SEQ ID NO: 107279 - RNA, 23 nt, synthetic construct
  source 1..23: mol_type = other RNA
ttggctgttgtggtcagctcagt

SEQ ID NO: 107280 - RNA, 23 nt, synthetic construct
  source 1..23: mol_type = other RNA
tgccacaggctctcccagggtag

SEQ ID NO: 107281 - RNA, 23 nt, synthetic construct
  source 1..23: mol_type = other RNA
tcacagcactgcccggccactct

SEQ ID NO: 107282 - RNA, 23 nt, synthetic construct
  source 1..23: mol_type = other RNA
ttgccagcagttgcctgggtgga

SEQ ID NO: 107283 - RNA, 23 nt, synthetic construct
  source 1..23: mol_type = other RNA
tctgctctgtgaggatccaggtc

SEQ ID NO: 107284 - RNA, 23 nt, synthetic construct
  source 1..23: mol_type = other RNA
ttgccagcagttgcctgggtgga

SEQ ID NO: 107285 - RNA, 23 nt, synthetic construct
  source 1..23: mol_type = other RNA
ttgccagcagttgcctgggtgga

SEQ ID NO: 107286 - RNA, 23 nt, synthetic construct
  source 1..23: mol_type = other RNA
ttgtggtcagctctgtgaggatc

SEQ ID NO: 107287 - RNA, 23 nt, synthetic construct
  source 1..23: mol_type = other RNA
ttgtggtcagctctgtgaggatc

SEQ ID NO: 107288 - RNA, 23 nt, synthetic construct
  source 1..23: mol_type = other RNA
ttgtggtcagctctgtgaggatc

SEQ ID NO: 107289 - RNA, 23 nt, synthetic construct
  source 1..23: mol_type = other RNA
ttgtggtcagctctgtgaggatc

SEQ ID NO: 107290 - RNA, 23 nt, synthetic construct
  source 1..23: mol_type = other RNA
ttgtggtcagctctgtgaggatc

SEQ ID NO: 107291 - RNA, 23 nt, synthetic construct
  source 1..23: mol_type = other RNA
tttcttgcaggtcagccccgtct

SEQ ID NO: 107292 - RNA, 23 nt, synthetic construct
  source 1..23: mol_type = other RNA
tacaggaatgtcagcaccagccg

SEQ ID NO: 107293 - RNA, 23 nt, synthetic construct
  source 1..23: mol_type = other RNA
tgttcttgcaggtcagccccgtc

SEQ ID NO: 107294 - RNA, 23 nt, synthetic construct
  source 1..23: mol_type = other RNA
tgttgcctgggtggaggaggcgg

SEQ ID NO: 107295 - RNA, 23 nt, synthetic construct
  source 1..23: mol_type = other RNA
tgttgcctgggtggaggaggcgg

SEQ ID NO: 107296 - RNA, 23 nt, synthetic construct
  source 1..23: mol_type = other RNA
tgttgcctgggtggaggaggcgg

SEQ ID NO: 107297 - RNA, 23 nt, synthetic construct
  source 1..23: mol_type = other RNA
tgtggagaccgggagggccgggc

SEQ ID NO: 107298 - RNA, 23 nt, synthetic construct
  source 1..23: mol_type = other RNA
tccccgcctgcaacccctgaggt

SEQ ID NO: 107299 - RNA, 23 nt, synthetic construct
  source 1..23: mol_type = other RNA
tgggggctgcacaccctgtgctt

SEQ ID NO: 107300 - RNA, 23 nt, synthetic construct
  source 1..23: mol_type = other RNA
tggtggctggggtactggggcag

SEQ ID NO: 107301 - RNA, 23 nt, synthetic construct
  source 1..23: mol_type = other RNA
tgccgtggagctggtggctgggg

SEQ ID NO: 107302 - RNA, 23 nt, synthetic construct
  source 1..23: mol_type = other RNA
tggccgtggagctggtggctggg

SEQ ID NO: 107303 - RNA, 23 nt, synthetic construct
  source 1..23: mol_type = other RNA
tggtcagctctgtgaggatccag

SEQ ID NO: 107304 - RNA, 23 nt, synthetic construct
  source 1..23: mol_type = other RNA
tggtcagctctgtgaggatccag

SEQ ID NO: 107305 - RNA, 23 nt, synthetic construct
  source 1..23: mol_type = other RNA
tggtcagctctgtgaggatccag

SEQ ID NO: 107306 - RNA, 23 nt, synthetic construct
  source 1..23: mol_type = other RNA
tggtcagctctgtgaggatccag

SEQ ID NO: 107307 - RNA, 23 nt, synthetic construct
  source 1..23: mol_type = other RNA
tggtcagctctgtgaggatccag

SEQ ID NO: 107308 - RNA, 23 nt, synthetic construct
  source 1..23: mol_type = other RNA
tagctgtgggctctggttcctag

SEQ ID NO: 107309 - RNA, 23 nt, synthetic construct
  source 1..23: mol_type = other RNA
ttgctggaagggcagttgcagtc

SEQ ID NO: 107310 - RNA, 23 nt, synthetic construct
  source 1..23: mol_type = other RNA
ttctgggggcaggtggttgtgtt

SEQ ID NO: 107311 - RNA, 23 nt, synthetic construct
  source 1..23: mol_type = other RNA
ttgcaccacctctccaggagcca

SEQ ID NO: 107312 - RNA, 23 nt, synthetic construct
  source 1..23: mol_type = other RNA
tacagggcctgggtggtggtggt

SEQ ID NO: 107313 - RNA, 23 nt, synthetic construct
  source 1..23: mol_type = other RNA
tacctgcctgtctggtcttcgtt

SEQ ID NO: 107314 - RNA, 23 nt, synthetic construct
  source 1..23: mol_type = other RNA
ttggggcagtggctgtagtcgtc

SEQ ID NO: 107315 - RNA, 23 nt, synthetic construct
  source 1..23: mol_type = other RNA
tgccgtggctgtggtcctggagg

SEQ ID NO: 107316 - RNA, 23 nt, synthetic construct
  source 1..23: mol_type = other RNA
tgtcagctctgtgaggatccagg

SEQ ID NO: 107317 - RNA, 23 nt, synthetic construct
  source 1..23: mol_type = other RNA
tgtcagctctgtgaggatccagg

SEQ ID NO: 107318 - RNA, 23 nt, synthetic construct
  source 1..23: mol_type = other RNA
taccgtggagccactggttgtgg

SEQ ID NO: 107319 - RNA, 23 nt, synthetic construct
  source 1..23: mol_type = other RNA
tcgtccctggggaagggggtgac

SEQ ID NO: 107320 - RNA, 23 nt, synthetic construct
  source 1..23: mol_type = other RNA
tgtcagctctgtgaggatccagg

SEQ ID NO: 107321 - RNA, 23 nt, synthetic construct
  source 1..23: mol_type = other RNA
tgtcagctctgtgaggatccagg

SEQ ID NO: 107322 - RNA, 23 nt, synthetic construct
  source 1..23: mol_type = other RNA
tgtcagctctgtgaggatccagg

SEQ ID NO: 107323 - RNA, 23 nt, synthetic construct
  source 1..23: mol_type = other RNA
taccgtggagccactggttgtgg

SEQ ID NO: 107324 - RNA, 23 nt, synthetic construct
  source 1..23: mol_type = other RNA
tagctggactggctggccatcgg

SEQ ID NO: 107325 - RNA, 23 nt, synthetic construct
  source 1..23: mol_type = other RNA
tcgcagcttcctggcagcagctg

SEQ ID NO: 107326 - RNA, 23 nt, synthetic construct
  source 1..23: mol_type = other RNA
tctggggtactggggcagtggct

SEQ ID NO: 107327 - RNA, 23 nt, synthetic construct
  source 1..23: mol_type = other RNA
tcgtccctgggctggaggagggg

SEQ ID NO: 107328 - RNA, 23 nt, synthetic construct
  source 1..23: mol_type = other RNA
tcactgggggtgtgtgggtggtc

SEQ ID NO: 107329 - RNA, 23 nt, synthetic construct
  source 1..23: mol_type = other RNA
tcgtccctgggctggaggagggg

SEQ ID NO: 107330 - RNA, 23 nt, synthetic construct
  source 1..23: mol_type = other RNA
tcactgggggtgtgtgggtggtc

SEQ ID NO: 107331 - RNA, 23 nt, synthetic construct
  source 1..23: mol_type = other RNA
tcgtccctgggctggaggagggg

SEQ ID NO: 107332 - RNA, 23 nt, synthetic construct
  source 1..23: mol_type = other RNA
tcactgggggtgtgtgggtggtc

SEQ ID NO: 107333 - RNA, 23 nt, synthetic construct
  source 1..23: mol_type = other RNA
tcgtccctgggctggaggagggg

SEQ ID NO: 107334 - RNA, 23 nt, synthetic construct
  source 1..23: mol_type = other RNA
tcactgggggtgtgtgggtggtc

SEQ ID NO: 107335 - RNA, 23 nt, synthetic construct
  source 1..23: mol_type = other RNA
tcgtccctgggctggaggagggg

SEQ ID NO: 107336 - RNA, 23 nt, synthetic construct
  source 1..23: mol_type = other RNA
ttggcaggctgctggggagcact

SEQ ID NO: 107337 - RNA, 23 nt, synthetic construct
  source 1..23: mol_type = other RNA
tggggcagtggctgtagtcgtca

SEQ ID NO: 107338 - RNA, 23 nt, synthetic construct
  source 1..23: mol_type = other RNA
tgtggctgttgtggtcggctttg

SEQ ID NO: 107339 - RNA, 23 nt, synthetic construct
  source 1..23: mol_type = other RNA
tgtggtcagcactgtgggggtgt

SEQ ID NO: 107340 - RNA, 23 nt, synthetic construct
  source 1..23: mol_type = other RNA
tccgtggagccactggttgtggg

SEQ ID NO: 107341 - RNA, 23 nt, synthetic construct
  source 1..23: mol_type = other RNA
tgtggtcagcactgtgggggtgt

SEQ ID NO: 107342 - RNA, 23 nt, synthetic construct
  source 1..23: mol_type = other RNA
tccgtggagccactggttgtggg

SEQ ID NO: 107343 - RNA, 23 nt, synthetic construct
  source 1..23: mol_type = other RNA
ttgggggctgcacaccctgtgct

SEQ ID NO: 107344 - RNA, 23 nt, synthetic construct
  source 1..23: mol_type = other RNA
tccgcctgcaacccctgaggttg

SEQ ID NO: 107345 - RNA, 23 nt, synthetic construct
  source 1..23: mol_type = other RNA
ttcagccccgtctccaggctgca

SEQ ID NO: 107346 - RNA, 23 nt, synthetic construct
  source 1..23: mol_type = other RNA
ttggctgcaggtgtggtggcggt

SEQ ID NO: 107347 - RNA, 23 nt, synthetic construct
  source 1..23: mol_type = other RNA
ttggctgcaggtgtggtggcggt

SEQ ID NO: 107348 - RNA, 23 nt, synthetic construct
  source 1..23: mol_type = other RNA
ttggctgcaggtgtggtggcggt

SEQ ID NO: 107349 - RNA, 23 nt, synthetic construct
  source 1..23: mol_type = other RNA
ttggtcctggaggtgcccctggt

SEQ ID NO: 107350 - RNA, 23 nt, synthetic construct
  source 1..23: mol_type = other RNA
ttggctgcaggtgtggtggcggt

SEQ ID NO: 107351 - RNA, 23 nt, synthetic construct
  source 1..23: mol_type = other RNA
tttggagctggtggctgcgggtg

SEQ ID NO: 107352 - RNA, 23 nt, synthetic construct
  source 1..23: mol_type = other RNA
tattgtggacatggtggacatgg

SEQ ID NO: 107353 - RNA, 23 nt, synthetic construct
  source 1..23: mol_type = other RNA
taggctctgggggcaggtggttg

SEQ ID NO: 107354 - RNA, 23 nt, synthetic construct
  source 1..23: mol_type = other RNA
tcgtgggtgtaggtgtgcaggat

SEQ ID NO: 107355 - RNA, 23 nt, synthetic construct
  source 1..23: mol_type = other RNA
tcagggagggagccgggccgggt

SEQ ID NO: 107356 - RNA, 23 nt, synthetic construct
  source 1..23: mol_type = other RNA
tcacagggccctgggtctctgcc

SEQ ID NO: 107357 - RNA, 23 nt, synthetic construct
  source 1..23: mol_type = other RNA
tgagctcagggcacctccagttc

SEQ ID NO: 107358 - RNA, 23 nt, synthetic construct
  source 1..23: mol_type = other RNA
tggcagagctcagggcacctcca

SEQ ID NO: 107359 - RNA, 23 nt, synthetic construct
  source 1..23: mol_type = other RNA
tgggcagagctcagggcacctcc

SEQ ID NO: 107360 - RNA, 23 nt, synthetic construct
  source 1..23: mol_type = other RNA
taggtggtgttgaaggaggtgcc

SEQ ID NO: 107361 - RNA, 23 nt, synthetic construct
  source 1..23: mol_type = other RNA
tggccgtgaagtcgtcagcctgg

SEQ ID NO: 107362 - RNA, 23 nt, synthetic construct
  source 1..23: mol_type = other RNA
tcccgtggcctccaccaccccgc

SEQ ID NO: 107363 - RNA, 23 nt, synthetic construct
  source 1..23: mol_type = other RNA
tgcccgtggcctccaccaccccg

SEQ ID NO: 107364 - RNA, 23 nt, synthetic construct
  source 1..23: mol_type = other RNA
tcgcccgtggcctccaccacccc

SEQ ID NO: 107365 - RNA, 23 nt, synthetic construct
  source 1..23: mol_type = other RNA
tccgacaccagccccgggggaca

SEQ ID NO: 107366 - RNA, 23 nt, synthetic construct
  source 1..23: mol_type = other RNA
tgtctccgcctcccaggccgggc

SEQ ID NO: 107367 - RNA, 23 nt, synthetic construct
  source 1..23: mol_type = other RNA
tcctggggccggggaggggccac

SEQ ID NO: 107368 - RNA, 23 nt, synthetic construct
  source 1..23: mol_type = other RNA
tgcctggggccggggaggggcca

SEQ ID NO: 107369 - RNA, 23 nt, synthetic construct
  source 1..23: mol_type = other RNA
ttccatgtccccgcctgcaaccc

SEQ ID NO: 107370 - RNA, 23 nt, synthetic construct
  source 1..23: mol_type = other RNA
ttcagcacctgcccgacctggtc

SEQ ID NO: 107371 - RNA, 23 nt, synthetic construct
  source 1..23: mol_type = other RNA
taggtcagcacctgcccgacctg

SEQ ID NO: 107372 - RNA, 23 nt, synthetic construct
  source 1..23: mol_type = other RNA
tcaggtcagcacctgcccgacct

SEQ ID NO: 107373 - RNA, 23 nt, synthetic construct
  source 1..23: mol_type = other RNA
tgtcagccccgtctccaggctgc

SEQ ID NO: 107374 - RNA, 23 nt, synthetic construct
  source 1..23: mol_type = other RNA
tctggggcagtggctgtagtcgt

SEQ ID NO: 107375 - RNA, 23 nt, synthetic construct
  source 1..23: mol_type = other RNA
tactggggcagtggctgtagtcg

SEQ ID NO: 107376 - RNA, 23 nt, synthetic construct
  source 1..23: mol_type = other RNA
tgtactggggcagtggctgtagt

SEQ ID NO: 107377 - RNA, 23 nt, synthetic construct
  source 1..23: mol_type = other RNA
tggtactggggcagtggctgtag

SEQ ID NO: 107378 - RNA, 23 nt, synthetic construct
  source 1..23: mol_type = other RNA
tgtggctggggtactggggcagt

SEQ ID NO: 107379 - RNA, 23 nt, synthetic construct
  source 1..23: mol_type = other RNA
ttggtggctggggtactggggca

SEQ ID NO: 107380 - RNA, 23 nt, synthetic construct
  source 1..23: mol_type = other RNA
tgagctggtggctggggtactgg

SEQ ID NO: 107381 - RNA, 23 nt, synthetic construct
  source 1..23: mol_type = other RNA
ttggagctggtggctggggtact

SEQ ID NO: 107382 - RNA, 23 nt, synthetic construct
  source 1..23: mol_type = other RNA
tccgtggagctggtggctggggt

SEQ ID NO: 107383 - RNA, 23 nt, synthetic construct
  source 1..23: mol_type = other RNA
ttggccgtggagctggtggctgg

SEQ ID NO: 107384 - RNA, 23 nt, synthetic construct
  source 1..23: mol_type = other RNA
tgtggccgtggagctggtggctg

SEQ ID NO: 107385 - RNA, 23 nt, synthetic construct
  source 1..23: mol_type = other RNA
tcgtggccgtggagctggtggct

SEQ ID NO: 107386 - RNA, 23 nt, synthetic construct
  source 1..23: mol_type = other RNA
tgcgtggccgtggagctggtggc

SEQ ID NO: 107387 - RNA, 23 nt, synthetic construct
  source 1..23: mol_type = other RNA
tgggcgtggccgtggagctggtg

SEQ ID NO: 107388 - RNA, 23 nt, synthetic construct
  source 1..23: mol_type = other RNA
tgagggcgtggccgtggagctgg

SEQ ID NO: 107389 - RNA, 23 nt, synthetic construct
  source 1..23: mol_type = other RNA
ttgaggagggcgtggccgtggag

SEQ ID NO: 107390 - RNA, 23 nt, synthetic construct
  source 1..23: mol_type = other RNA
tgaggatccaggtcgtccccgga

SEQ ID NO: 107391 - RNA, 23 nt, synthetic construct
  source 1..23: mol_type = other RNA
tggatccagtggacgcagtcgta

SEQ ID NO: 107392 - RNA, 23 nt, synthetic construct
  source 1..23: mol_type = other RNA
tcagcactttgggagggggagct

SEQ ID NO: 107393 - RNA, 23 nt, synthetic construct
  source 1..23: mol_type = other RNA
tgttgcagtccctggactggagg

SEQ ID NO: 107394 - RNA, 23 nt, synthetic construct
  source 1..23: mol_type = other RNA
tagggaggaagaggggatgggtg

SEQ ID NO: 107395 - RNA, 23 nt, synthetic construct
  source 1..23: mol_type = other RNA
tgtggaggagggggtggccacag

SEQ ID NO: 107396 - RNA, 23 nt, synthetic construct
  source 1..23: mol_type = other RNA
tgatggaggagggggtcaccgtg

SEQ ID NO: 107397 - RNA, 23 nt, synthetic construct
  source 1..23: mol_type = other RNA
tgttgctggtggctgcaggtgtg

SEQ ID NO: 107398 - RNA, 23 nt, synthetic construct
  source 1..23: mol_type = other RNA
tgcactgggggtgtgtgggtggt

SEQ ID NO: 107399 - RNA, 23 nt, synthetic construct
  source 1..23: mol_type = other RNA
tagtccaggctgtgcgcaccgtg

SEQ ID NO: 107400 - RNA, 23 nt, synthetic construct
  source 1..23: mol_type = other RNA
tcaccaggctgggcctgggcacg

SEQ ID NO: 107401 - RNA, 23 nt, synthetic construct
  source 1..23: mol_type = other RNA
tgaggatccaggtcgtccccgga

SEQ ID NO: 107402 - RNA, 23 nt, synthetic construct
  source 1..23: mol_type = other RNA
tggctgttgtggtcagctctgtg

SEQ ID NO: 107403 - RNA, 23 nt, synthetic construct
  source 1..23: mol_type = other RNA
ttagtggctgttgtggtcagctc

SEQ ID NO: 107404 - RNA, 23 nt, synthetic construct
  source 1..23: mol_type = other RNA
tgggtggaggacggggtggccgt

SEQ ID NO: 107405 - RNA, 23 nt, synthetic construct
  source 1..23: mol_type = other RNA
tggggtggaggacggggtggccg

SEQ ID NO: 107406 - RNA, 23 nt, synthetic construct
  source 1..23: mol_type = other RNA
tgaggaggcggtggccgtggatc

SEQ ID NO: 107407 - RNA, 23 nt, synthetic construct
  source 1..23: mol_type = other RNA
tggaggaggcggtggccgtggat

SEQ ID NO: 107408 - RNA, 23 nt, synthetic construct
  source 1..23: mol_type = other RNA
tgccagcagttgcctgggtggag

SEQ ID NO: 107409 - RNA, 23 nt, synthetic construct
  source 1..23: mol_type = other RNA
tgttgcagtccctggactggaga

SEQ ID NO: 107410 - RNA, 23 nt, synthetic construct
  source 1..23: mol_type = other RNA
tgtggaggagggggtggccacag

SEQ ID NO: 107411 - RNA, 23 nt, synthetic construct
  source 1..23: mol_type = other RNA
tgatggaggagggggtcaccgtg

SEQ ID NO: 107412 - RNA, 23 nt, synthetic construct
  source 1..23: mol_type = other RNA
tgctgctggtggctgcaggtgtg

SEQ ID NO: 107413 - RNA, 23 nt, synthetic construct
  source 1..23: mol_type = other RNA
ttgctgctggtggctgcaggtgt

SEQ ID NO: 107414 - RNA, 23 nt, synthetic construct
  source 1..23: mol_type = other RNA
tgcactgggggtgtgtgggtggt

SEQ ID NO: 107415 - RNA, 23 nt, synthetic construct
  source 1..23: mol_type = other RNA
tagtccaggctgtgcgcaccgtg

SEQ ID NO: 107416 - RNA, 23 nt, synthetic construct
  source 1..23: mol_type = other RNA
tggtggccctggtgtggcccggg

SEQ ID NO: 107417 - RNA, 23 nt, synthetic construct
  source 1..23: mol_type = other RNA
tgtgtggccgtggccgtggtcct

SEQ ID NO: 107418 - RNA, 23 nt, synthetic construct
  source 1..23: mol_type = other RNA
tcaccaggctgggcctgggcacg

SEQ ID NO: 107419 - RNA, 23 nt, synthetic construct
  source 1..23: mol_type = other RNA
tgtggctgctgtggtctgctctg

SEQ ID NO: 107420 - RNA, 23 nt, synthetic construct
  source 1..23: mol_type = other RNA
tcagcactttgggagggggagct

SEQ ID NO: 107421 - RNA, 23 nt, synthetic construct
  source 1..23: mol_type = other RNA
ttggctgtgggtgtggtggccgt

SEQ ID NO: 107422 - RNA, 23 nt, synthetic construct
  source 1..23: mol_type = other RNA
tggaggaggaagtggctttggaa

SEQ ID NO: 107423 - RNA, 23 nt, synthetic construct
  source 1..23: mol_type = other RNA
tgtgaaggaggggatgggtgtaa

SEQ ID NO: 107424 - RNA, 23 nt, synthetic construct
  source 1..23: mol_type = other RNA
tgaggatccaggtcgtccccgga

SEQ ID NO: 107425 - RNA, 23 nt, synthetic construct
  source 1..23: mol_type = other RNA
tggggtggccgtggggccagtgg

SEQ ID NO: 107426 - RNA, 23 nt, synthetic construct
  source 1..23: mol_type = other RNA
tgggtggaggacggggtggccgt

SEQ ID NO: 107427 - RNA, 23 nt, synthetic construct
  source 1..23: mol_type = other RNA
tggggtggaggacggggtggccg

SEQ ID NO: 107428 - RNA, 23 nt, synthetic construct
  source 1..23: mol_type = other RNA
tgaggaggcggtggccgtggatc

SEQ ID NO: 107429 - RNA, 23 nt, synthetic construct
  source 1..23: mol_type = other RNA
tggaggaggcggtggccgtggat

SEQ ID NO: 107430 - RNA, 23 nt, synthetic construct
  source 1..23: mol_type = other RNA
tgttgcagtccctggactggagg

SEQ ID NO: 107431 - RNA, 23 nt, synthetic construct
  source 1..23: mol_type = other RNA
tgaggaagaggggatggctgtaa

SEQ ID NO: 107432 - RNA, 23 nt, synthetic construct
  source 1..23: mol_type = other RNA
tagggaggaagaggggatggctg

SEQ ID NO: 107433 - RNA, 23 nt, synthetic construct
  source 1..23: mol_type = other RNA
tgtggaggagggggtggccacag

SEQ ID NO: 107434 - RNA, 23 nt, synthetic construct
  source 1..23: mol_type = other RNA
tgatggaggagggggtcaccgtg

SEQ ID NO: 107435 - RNA, 23 nt, synthetic construct
  source 1..23: mol_type = other RNA
tgctgctggtggctgcaggtgtg

SEQ ID NO: 107436 - RNA, 23 nt, synthetic construct
  source 1..23: mol_type = other RNA
ttgctgctggtggctgcaggtgt

SEQ ID NO: 107437 - RNA, 23 nt, synthetic construct
  source 1..23: mol_type = other RNA
tgcactgggggtgtgtgggtggt

SEQ ID NO: 107438 - RNA, 23 nt, synthetic construct
  source 1..23: mol_type = other RNA
tagtccaggctgtgcgcaccgtg

SEQ ID NO: 107439 - RNA, 23 nt, synthetic construct
  source 1..23: mol_type = other RNA
tgctgggtggtactggtggttgc

SEQ ID NO: 107440 - RNA, 23 nt, synthetic construct
  source 1..23: mol_type = other RNA
tctgtggctgtggtcctggaggt

SEQ ID NO: 107441 - RNA, 23 nt, synthetic construct
  source 1..23: mol_type = other RNA
tcttgctgggtgtggctgtggct

SEQ ID NO: 107442 - RNA, 23 nt, synthetic construct
  source 1..23: mol_type = other RNA
tcaccaggctgggcctgggcacg

SEQ ID NO: 107443 - RNA, 23 nt, synthetic construct
  source 1..23: mol_type = other RNA
tgaggatccaggtcgtccccgga

SEQ ID NO: 107444 - RNA, 23 nt, synthetic construct
  source 1..23: mol_type = other RNA
ttagtggctgttgtggtcagctt

SEQ ID NO: 107445 - RNA, 23 nt, synthetic construct
  source 1..23: mol_type = other RNA
tgggtggaggacggggtggccgt

SEQ ID NO: 107446 - RNA, 23 nt, synthetic construct
  source 1..23: mol_type = other RNA
tggggtggaggacggggtggccg

SEQ ID NO: 107447 - RNA, 23 nt, synthetic construct
  source 1..23: mol_type = other RNA
tgaggaggcggtggccgtggatc

SEQ ID NO: 107448 - RNA, 23 nt, synthetic construct
  source 1..23: mol_type = other RNA
tggaggaggcggtggccgtggat

SEQ ID NO: 107449 - RNA, 23 nt, synthetic construct
  source 1..23: mol_type = other RNA
tgccagcagttgcctgggtggag

SEQ ID NO: 107450 - RNA, 23 nt, synthetic construct
  source 1..23: mol_type = other RNA
tgttgcagtccctggactggaga

SEQ ID NO: 107451 - RNA, 23 nt, synthetic construct
  source 1..23: mol_type = other RNA
tggggtggaagagggggtggcca

SEQ ID NO: 107452 - RNA, 23 nt, synthetic construct
  source 1..23: mol_type = other RNA
ttggggtggaagagggggtggcc

SEQ ID NO: 107453 - RNA, 23 nt, synthetic construct
  source 1..23: mol_type = other RNA
ttcctggggtggaagagggggtg

SEQ ID NO: 107454 - RNA, 23 nt, synthetic construct
  source 1..23: mol_type = other RNA
tggctggaggagggggtgactgt

SEQ ID NO: 107455 - RNA, 23 nt, synthetic construct
  source 1..23: mol_type = other RNA
tgctgctggtggctgcaggtgtg

SEQ ID NO: 107456 - RNA, 23 nt, synthetic construct
  source 1..23: mol_type = other RNA
ttgctgctggtggctgcaggtgt

SEQ ID NO: 107457 - RNA, 23 nt, synthetic construct
  source 1..23: mol_type = other RNA
tgcactgggggtgtgtgggtggt

SEQ ID NO: 107458 - RNA, 23 nt, synthetic construct
  source 1..23: mol_type = other RNA
tagtccaggctgtgcgcaccgtg

SEQ ID NO: 107459 - RNA, 23 nt, synthetic construct
  source 1..23: mol_type = other RNA
tgtgtggccgtggccgtggtcct

SEQ ID NO: 107460 - RNA, 23 nt, synthetic construct
  source 1..23: mol_type = other RNA
tcaccaggctgggcctgggcacg

SEQ ID NO: 107461 - RNA, 23 nt, synthetic construct
  source 1..23: mol_type = other RNA
tgaggatccaggtcgtccccgga

SEQ ID NO: 107462 - RNA, 23 nt, synthetic construct
  source 1..23: mol_type = other RNA
tggctgttgtggtcagctctgtg

SEQ ID NO: 107463 - RNA, 23 nt, synthetic construct
  source 1..23: mol_type = other RNA
ttagtggctgttgtggtcagctc

SEQ ID NO: 107464 - RNA, 23 nt, synthetic construct
  source 1..23: mol_type = other RNA
tgtggatccagtggatgcagtcg

SEQ ID NO: 107465 - RNA, 23 nt, synthetic construct
  source 1..23: mol_type = other RNA
tgggtggaggacggggtggccgt

SEQ ID NO: 107466 - RNA, 23 nt, synthetic construct
  source 1..23: mol_type = other RNA
tggggtggaggacggggtggccg

SEQ ID NO: 107467 - RNA, 23 nt, synthetic construct
  source 1..23: mol_type = other RNA
tcagcactttgggagggggagct

SEQ ID NO: 107468 - RNA, 23 nt, synthetic construct
  source 1..23: mol_type = other RNA
ttggctgtgggtgtggtggccgg

SEQ ID NO: 107469 - RNA, 23 nt, synthetic construct
  source 1..23: mol_type = other RNA
tggaggaggaagtggctttggaa

SEQ ID NO: 107470 - RNA, 23 nt, synthetic construct
  source 1..23: mol_type = other RNA
tgaggatccaggtcgtccccgga

SEQ ID NO: 107471 - RNA, 23 nt, synthetic construct
  source 1..23: mol_type = other RNA
tggggtggccgtggggccagtgg

SEQ ID NO: 107472 - RNA, 23 nt, synthetic construct
  source 1..23: mol_type = other RNA
tgggtggaggacggggtggccgt

SEQ ID NO: 107473 - RNA, 23 nt, synthetic construct
  source 1..23: mol_type = other RNA
tggggtggaggacggggtggccg

SEQ ID NO: 107474 - RNA, 23 nt, synthetic construct
  source 1..23: mol_type = other RNA
tggctgttgtggtcagctctgtg

SEQ ID NO: 107475 - RNA, 23 nt, synthetic construct
  source 1..23: mol_type = other RNA
ttagtggctgttgtggtcagctc

SEQ ID NO: 107476 - RNA, 23 nt, synthetic construct
  source 1..23: mol_type = other RNA
tggatccagtggacgcagtcgta

SEQ ID NO: 107477 - RNA, 23 nt, synthetic construct
  source 1..23: mol_type = other RNA
tgggtggaggacggggtggccgt

SEQ ID NO: 107478 - RNA, 23 nt, synthetic construct
  source 1..23: mol_type = other RNA
tggggtggaggacggggtggccg

SEQ ID NO: 107479 - RNA, 23 nt, synthetic construct
  source 1..23: mol_type = other RNA
tgaggaggcggtggccgtggatc

SEQ ID NO: 107480 - RNA, 23 nt, synthetic construct
  source 1..23: mol_type = other RNA
tggaggaggcggtggccgtggat

SEQ ID NO: 107481 - RNA, 23 nt, synthetic construct
  source 1..23: mol_type = other RNA
tgccagcagttgcctgggtggag

SEQ ID NO: 107482 - RNA, 23 nt, synthetic construct
  source 1..23: mol_type = other RNA
tgttgcagtccctggactggagg

SEQ ID NO: 107483 - RNA, 23 nt, synthetic construct
  source 1..23: mol_type = other RNA
tgtggaggagggggtggccacag

SEQ ID NO: 107484 - RNA, 23 nt, synthetic construct
  source 1..23: mol_type = other RNA
tgatggaggagggggtcaccgtg

SEQ ID NO: 107485 - RNA, 23 nt, synthetic construct
  source 1..23: mol_type = other RNA
tgaagtggctttggagctggtgg

SEQ ID NO: 107486 - RNA, 23 nt, synthetic construct
  source 1..23: mol_type = other RNA
tggaggaggaagtggctttggag

SEQ ID NO: 107487 - RNA, 23 nt, synthetic construct
  source 1..23: mol_type = other RNA
tcagggtggaggaggggatgggt

SEQ ID NO: 107488 - RNA, 23 nt, synthetic construct
  source 1..23: mol_type = other RNA
tgtcatggtggctgtggtggtca

SEQ ID NO: 107489 - RNA, 23 nt, synthetic construct
  source 1..23: mol_type = other RNA
ttgtcatggtggctgtggtggtc

SEQ ID NO: 107490 - RNA, 23 nt, synthetic construct
  source 1..23: mol_type = other RNA
taggagggtgtggccgtggaatt

SEQ ID NO: 107491 - RNA, 23 nt, synthetic construct
  source 1..23: mol_type = other RNA
ttagtggctgttgtggtcagctc

SEQ ID NO: 107492 - RNA, 23 nt, synthetic construct
  source 1..23: mol_type = other RNA
ttccctggggtggaggacagggt

SEQ ID NO: 107493 - RNA, 23 nt, synthetic construct
  source 1..23: mol_type = other RNA
tgtccctggggtggaggacaggg

SEQ ID NO: 107494 - RNA, 23 nt, synthetic construct
  source 1..23: mol_type = other RNA
tgaggaggcggtggccgtggaac

SEQ ID NO: 107495 - RNA, 23 nt, synthetic construct
  source 1..23: mol_type = other RNA
tggaggaggcggtggccgtggaa

SEQ ID NO: 107496 - RNA, 23 nt, synthetic construct
  source 1..23: mol_type = other RNA
tagctggggaagccagtgggtct

SEQ ID NO: 107497 - RNA, 23 nt, synthetic construct
  source 1..23: mol_type = other RNA
tgagctggggaagccagtgggtc

SEQ ID NO: 107498 - RNA, 23 nt, synthetic construct
  source 1..23: mol_type = other RNA
tcgggcggcagcggcagtggcag

SEQ ID NO: 107499 - RNA, 23 nt, synthetic construct
  source 1..23: mol_type = other RNA
tgagggcgcgggggcagcgggcg

SEQ ID NO: 107500 - RNA, 23 nt, synthetic construct
  source 1..23: mol_type = other RNA
tctggaagacttggccattgaag

SEQ ID NO: 107501 - RNA, 23 nt, synthetic construct
  source 1..23: mol_type = other RNA
tggcatggggtgggggtgggtgt

SEQ ID NO: 107502 - RNA, 23 nt, synthetic construct
  source 1..23: mol_type = other RNA
ttgggcatggggtgggggtgggt

SEQ ID NO: 107503 - RNA, 23 nt, synthetic construct
  source 1..23: mol_type = other RNA
tgtgggtgggcaggtgaggtcgc

SEQ ID NO: 107504 - RNA, 23 nt, synthetic construct
  source 1..23: mol_type = other RNA
tgctgtgggctctggttcctaga

SEQ ID NO: 107505 - RNA, 23 nt, synthetic construct
  source 1..23: mol_type = other RNA
tcaaagccctggggacaggtagt

SEQ ID NO: 107506 - RNA, 23 nt, synthetic construct
  source 1..23: mol_type = other RNA
tagcactttgggagggggagctg

SEQ ID NO: 107507 - RNA, 23 nt, synthetic construct
  source 1..23: mol_type = other RNA
tagcactttgggagggggagctg

SEQ ID NO: 107508 - RNA, 23 nt, synthetic construct
  source 1..23: mol_type = other RNA
tagcactttgggagggggagctg

SEQ ID NO: 107509 - RNA, 23 nt, synthetic construct
  source 1..23: mol_type = other RNA
taagggtggaggaggggatgggt

SEQ ID NO: 107510 - RNA, 23 nt, synthetic construct
  source 1..23: mol_type = other RNA
tagagtggaggaggcggtggccg

SEQ ID NO: 107511 - RNA, 23 nt, synthetic construct
  source 1..23: mol_type = other RNA
ttgttcccagagtggaggaggcg

SEQ ID NO: 107512 - RNA, 23 nt, synthetic construct
  source 1..23: mol_type = other RNA
tctcctccttcccatgcaccatg

SEQ ID NO: 107513 - RNA, 23 nt, synthetic construct
  source 1..23: mol_type = other RNA
taccaggctgggcctgggcacgg

SEQ ID NO: 107514 - RNA, 23 nt, synthetic construct
  source 1..23: mol_type = other RNA
taccaggctgggcctgggcacgg

SEQ ID NO: 107515 - RNA, 23 nt, synthetic construct
  source 1..23: mol_type = other RNA
taccaggctgggcctgggcacgg

SEQ ID NO: 107516 - RNA, 23 nt, synthetic construct
  source 1..23: mol_type = other RNA
taccaggctgggcctgggcacgg

SEQ ID NO: 107517 - RNA, 23 nt, synthetic construct
  source 1..23: mol_type = other RNA
tgaagtggctttggaactggtgg

SEQ ID NO: 107518 - RNA, 23 nt, synthetic construct
  source 1..23: mol_type = other RNA
tgaagtggctttggaactggtgg

SEQ ID NO: 107519 - RNA, 23 nt, synthetic construct
  source 1..23: mol_type = other RNA
tgggctgcacaccctgtgctttt

SEQ ID NO: 107520 - RNA, 23 nt, synthetic construct
  source 1..23: mol_type = other RNA
tggggctgcacaccctgtgcttt

SEQ ID NO: 107521 - RNA, 23 nt, synthetic construct
  source 1..23: mol_type = other RNA
ttggaggaggcggtggccgtgga

SEQ ID NO: 107522 - RNA, 23 nt, synthetic construct
  source 1..23: mol_type = other RNA
tggaagtggctttggaactggtg

SEQ ID NO: 107523 - RNA, 23 nt, synthetic construct
  source 1..23: mol_type = other RNA
ttggaggaggcggtggccgtgga

SEQ ID NO: 107524 - RNA, 23 nt, synthetic construct
  source 1..23: mol_type = other RNA
ttggaggaggcggtggccgtgga

SEQ ID NO: 107525 - RNA, 23 nt, synthetic construct
  source 1..23: mol_type = other RNA
tggaagtggctttggaactggtg

SEQ ID NO: 107526 - RNA, 23 nt, synthetic construct
  source 1..23: mol_type = other RNA
ttggaggaggcggtggccgtgga

SEQ ID NO: 107527 - RNA, 23 nt, synthetic construct
  source 1..23: mol_type = other RNA
ttggaggaggcggtggccgtgga

SEQ ID NO: 107528 - RNA, 23 nt, synthetic construct
  source 1..23: mol_type = other RNA
tggctgcacaccctgtgcttttc

SEQ ID NO: 107529 - RNA, 23 nt, synthetic construct
  source 1..23: mol_type = other RNA
tggtggaggacggggtggccgtg

SEQ ID NO: 107530 - RNA, 23 nt, synthetic construct
  source 1..23: mol_type = other RNA
tggtggaggacggggtggccgtg

SEQ ID NO: 107531 - RNA, 23 nt, synthetic construct
  source 1..23: mol_type = other RNA
tggtggaggacggggtggccgtg

SEQ ID NO: 107532 - RNA, 23 nt, synthetic construct
  source 1..23: mol_type = other RNA
tggtggaggacggggtggccgtg

SEQ ID NO: 107533 - RNA, 23 nt, synthetic construct
  source 1..23: mol_type = other RNA
tggtggaggacggggtggccgtg

SEQ ID NO: 107534 - RNA, 23 nt, synthetic construct
  source 1..23: mol_type = other RNA
tggtggaggacggggtggccgtg

SEQ ID NO: 107535 - RNA, 23 nt, synthetic construct
  source 1..23: mol_type = other RNA
tcgtggcctccaccaccccgctg

SEQ ID NO: 107536 - RNA, 23 nt, synthetic construct
  source 1..23: mol_type = other RNA
tgcccagctcctccagcggcatg

SEQ ID NO: 107537 - RNA, 23 nt, synthetic construct
  source 1..23: mol_type = other RNA
tggctggggtactggggcagtgg

SEQ ID NO: 107538 - RNA, 23 nt, synthetic construct
  source 1..23: mol_type = other RNA
tgggtgagggctggaaagggctg

SEQ ID NO: 107539 - RNA, 23 nt, synthetic construct
  source 1..23: mol_type = other RNA
ttgctgggtgtggctgtggctgt

SEQ ID NO: 107540 - RNA, 23 nt, synthetic construct
  source 1..23: mol_type = other RNA
tttgctgggtgtggctgtggctg

SEQ ID NO: 107541 - RNA, 23 nt, synthetic construct
  source 1..23: mol_type = other RNA
tggctgtggtgggcatggggtgg

SEQ ID NO: 107542 - RNA, 23 nt, synthetic construct
  source 1..23: mol_type = other RNA
tatagtgctcggctctgtgagga

SEQ ID NO: 107543 - RNA, 23 nt, synthetic construct
  source 1..23: mol_type = other RNA
tcgcacatgcttagtttgttcca

SEQ ID NO: 107544 - RNA, 23 nt, synthetic construct
  source 1..23: mol_type = other RNA
tcgtggcggtaagcactgtggag

SEQ ID NO: 107545 - RNA, 23 nt, synthetic construct
  source 1..23: mol_type = other RNA
tcgtggcggtaagcactgtggag

SEQ ID NO: 107546 - RNA, 23 nt, synthetic construct
  source 1..23: mol_type = other RNA
tgtaagcctccaggctctggcag

SEQ ID NO: 107547 - RNA, 23 nt, synthetic construct
  source 1..23: mol_type = other RNA
tcatggtggccatgggtgtggtg

SEQ ID NO: 107548 - RNA, 23 nt, synthetic construct
  source 1..23: mol_type = other RNA
ttagtgctcggctctgtgaggat

SEQ ID NO: 107549 - RNA, 23 nt, synthetic construct
  source 1..23: mol_type = other RNA
ttagtgctcggctctgtgaggat

SEQ ID NO: 107550 - RNA, 23 nt, synthetic construct
  source 1..23: mol_type = other RNA
ttagtgctcggctctgtgaggat

SEQ ID NO: 107551 - RNA, 23 nt, synthetic construct
  source 1..23: mol_type = other RNA
ttagtgctcggctctgtgaggat

SEQ ID NO: 107552 - RNA, 23 nt, synthetic construct
  source 1..23: mol_type = other RNA
tgaggagggcgtggccgtggagc

SEQ ID NO: 107553 - RNA, 23 nt, synthetic construct
  source 1..23: mol_type = other RNA
tggcactcgatgtcagccagcac

SEQ ID NO: 107554 - RNA, 23 nt, synthetic construct
  source 1..23: mol_type = other RNA
tctccgttccacaggaatgtcag

SEQ ID NO: 107555 - RNA, 23 nt, synthetic construct
  source 1..23: mol_type = other RNA
ttggtactggtggttgctgctgg

SEQ ID NO: 107556 - RNA, 23 nt, synthetic construct
  source 1..23: mol_type = other RNA
tacagtggacacgctgaaggttg

SEQ ID NO: 107557 - RNA, 23 nt, synthetic construct
  source 1..23: mol_type = other RNA
tcacatgctgcagatgcactcgc

SEQ ID NO: 107558 - RNA, 23 nt, synthetic construct
  source 1..23: mol_type = other RNA
ttgtcagccagcacagggcatac

SEQ ID NO: 107559 - RNA, 23 nt, synthetic construct
  source 1..23: mol_type = other RNA
tagagggggctttgggatgctga

SEQ ID NO: 107560 - RNA, 23 nt, synthetic construct
  source 1..23: mol_type = other RNA
tctgctcacggttcctgcagacc

SEQ ID NO: 107561 - RNA, 23 nt, synthetic construct
  source 1..23: mol_type = other RNA
tctgctcacggttcctgcagacc

SEQ ID NO: 107562 - RNA, 23 nt, synthetic construct
  source 1..23: mol_type = other RNA
tctgtggtctgctctgtgaggat

SEQ ID NO: 107563 - RNA, 23 nt, synthetic construct
  source 1..23: mol_type = other RNA
tgtggccgtgctggtcagcactt

SEQ ID NO: 107564 - RNA, 23 nt, synthetic construct
  source 1..23: mol_type = other RNA
tgtggccgtgctggtcagcactt

SEQ ID NO: 107565 - RNA, 23 nt, synthetic construct
  source 1..23: mol_type = other RNA
tctgctcacggttcctgcagacc

SEQ ID NO: 107566 - RNA, 23 nt, synthetic construct
  source 1..23: mol_type = other RNA
tctgctcacggttcctgcagacc

SEQ ID NO: 107567 - RNA, 23 nt, synthetic construct
  source 1..23: mol_type = other RNA
tgccgtgctggtcagcactgggg

SEQ ID NO: 107568 - RNA, 23 nt, synthetic construct
  source 1..23: mol_type = other RNA
tgtggccgtgctggtcagcactg

SEQ ID NO: 107569 - RNA, 23 nt, synthetic construct
  source 1..23: mol_type = other RNA
tgcagccatcctttctgctgtcg

SEQ ID NO: 107570 - RNA, 23 nt, synthetic construct
  source 1..23: mol_type = other RNA
ttggccttgcctggaccagcctg

SEQ ID NO: 107571 - RNA, 23 nt, synthetic construct
  source 1..23: mol_type = other RNA
taaagctggtagctgtggatttg

SEQ ID NO: 107572 - RNA, 23 nt, synthetic construct
  source 1..23: mol_type = other RNA
ttagctgtggattttgtggctgt

SEQ ID NO: 107573 - RNA, 23 nt, synthetic construct
  source 1..23: mol_type = other RNA
taaagctggtagctgtggatttt

SEQ ID NO: 107574 - RNA, 23 nt, synthetic construct
  source 1..23: mol_type = other RNA
tatcctggctccaggtggacaga

SEQ ID NO: 107575 - RNA, 23 nt, synthetic construct
  source 1..23: mol_type = other RNA
ttgagttaccctgcagcaggcat

SEQ ID NO: 107576 - RNA, 23 nt, synthetic construct
  source 1..23: mol_type = other RNA
tagagggatggcattgtcacagc

SEQ ID NO: 107577 - RNA, 23 nt, synthetic construct
  source 1..23: mol_type = other RNA
ttgcccaagatgcccgaggtggc

SEQ ID NO: 107578 - RNA, 23 nt, synthetic construct
  source 1..23: mol_type = other RNA
tgcccaaggtgcctgaggtggcc

SEQ ID NO: 107579 - RNA, 23 nt, synthetic construct
  source 1..23: mol_type = other RNA
ttgcccaagatgcccgaggtggc

SEQ ID NO: 107580 - RNA, 23 nt, synthetic construct
  source 1..23: mol_type = other RNA
tgcccaaggtgcctgaggtggcc

SEQ ID NO: 107581 - RNA, 23 nt, synthetic construct
  source 1..23: mol_type = other RNA
tgccgccgtcgaccggatgctcg

SEQ ID NO: 107582 - RNA, 23 nt, synthetic construct
  source 1..23: mol_type = other RNA
tgagggagtcactgtgctgctgg

SEQ ID NO: 107583 - RNA, 23 nt, synthetic construct
  source 1..23: mol_type = other RNA
tgagggagtcactgtgctgctgg

SEQ ID NO: 107584 - RNA, 23 nt, synthetic construct
  source 1..23: mol_type = other RNA
tgagggagtcactgtgctgctgg

SEQ ID NO: 107585 - RNA, 23 nt, synthetic construct
  source 1..23: mol_type = other RNA
tatgaacacgctggtcttccggt

SEQ ID NO: 107586 - RNA, 23 nt, synthetic construct
  source 1..23: mol_type = other RNA
tggtgtggccgtggccgtggtcc

SEQ ID NO: 107587 - RNA, 23 nt, synthetic construct
  source 1..23: mol_type = other RNA
tggtgtggccgtggccgtggtcc

SEQ ID NO: 107588 - RNA, 23 nt, synthetic construct
  source 1..23: mol_type = other RNA
tttgtgcgccgggttcagggggc

SEQ ID NO: 107589 - RNA, 23 nt, synthetic construct
  source 1..23: mol_type = other RNA
tctatgtccttaggctgctggca

SEQ ID NO: 107590 - RNA, 23 nt, synthetic construct
  source 1..23: mol_type = other RNA
tttgtggtagttggcactttggt

SEQ ID NO: 107591 - RNA, 23 nt, synthetic construct
  source 1..23: mol_type = other RNA
tgtagtgctcggctctgtgagga

SEQ ID NO: 107592 - RNA, 23 nt, synthetic construct
  source 1..23: mol_type = other RNA
tgtagtgctcggctctgtgagga

SEQ ID NO: 107593 - RNA, 23 nt, synthetic construct
  source 1..23: mol_type = other RNA
tgtagtgctcggctctgtgagga

SEQ ID NO: 107594 - RNA, 23 nt, synthetic construct
  source 1..23: mol_type = other RNA
tcttcgtggtcagcactgtggag

SEQ ID NO: 107595 - RNA, 23 nt, synthetic construct
  source 1..23: mol_type = other RNA
tcttcgtggtcagcactgtggag

SEQ ID NO: 107596 - RNA, 23 nt, synthetic construct
  source 1..23: mol_type = other RNA
tttgtggtcagctttgtgaggat

SEQ ID NO: 107597 - RNA, 23 nt, synthetic construct
  source 1..23: mol_type = other RNA
tgaagccgggacggttgcacggc

SEQ ID NO: 107598 - RNA, 23 nt, synthetic construct
  source 1..23: mol_type = other RNA
tccggggcctggtcacggttacg

SEQ ID NO: 107599 - RNA, 23 nt, synthetic construct
  source 1..23: mol_type = other RNA
tgccgtgagcgtagcaggggcac

SEQ ID NO: 107600 - RNA, 23 nt, synthetic construct
  source 1..23: mol_type = other RNA
tagcactttggtagtgtgagctg

SEQ ID NO: 107601 - RNA, 23 nt, synthetic construct
  source 1..23: mol_type = other RNA
tactcccatccgacaccagcccc

SEQ ID NO: 107602 - RNA, 23 nt, synthetic construct
  source 1..23: mol_type = other RNA
tgccatggtgttcggcactgggg

SEQ ID NO: 107603 - RNA, 23 nt, synthetic construct
  source 1..23: mol_type = other RNA
tactcggtggttctgctgctagg

SEQ ID NO: 107604 - RNA, 23 nt, synthetic construct
  source 1..23: mol_type = other RNA
tgtggccgggctggtcagcactt

SEQ ID NO: 107605 - RNA, 23 nt, synthetic construct
  source 1..23: mol_type = other RNA
ttggtggtctgttctgggagggt

SEQ ID NO: 107606 - RNA, 23 nt, synthetic construct
  source 1..23: mol_type = other RNA
ttggtggtctgttctgggagggt

SEQ ID NO: 107607 - RNA, 23 nt, synthetic construct
  source 1..23: mol_type = other RNA
tgtcagcaccagccggatgctga

SEQ ID NO: 107608 - RNA, 23 nt, synthetic construct
  source 1..23: mol_type = other RNA
tgtggtcagcactttgggagggg

SEQ ID NO: 107609 - RNA, 23 nt, synthetic construct
  source 1..23: mol_type = other RNA
tgtgtcgtggccgtggtgctcac

SEQ ID NO: 107610 - RNA, 23 nt, synthetic construct
  source 1..23: mol_type = other RNA
tgggagtcactgtgctgctggtg

SEQ ID NO: 107611 - RNA, 23 nt, synthetic construct
  source 1..23: mol_type = other RNA
tgggagtcactgtgctgctggtg

SEQ ID NO: 107612 - RNA, 23 nt, synthetic construct
  source 1..23: mol_type = other RNA
tgtgtcgtggccgtggtgctcac

SEQ ID NO: 107613 - RNA, 23 nt, synthetic construct
  source 1..23: mol_type = other RNA
tgggagtcactgtgctgctggtg

SEQ ID NO: 107614 - RNA, 23 nt, synthetic construct
  source 1..23: mol_type = other RNA
tgtgtcgtggccgtggtgctcac

SEQ ID NO: 107615 - RNA, 23 nt, synthetic construct
  source 1..23: mol_type = other RNA
tgctgtggtggtcagcactgtgg

SEQ ID NO: 107616 - RNA, 23 nt, synthetic construct
  source 1..23: mol_type = other RNA
taccactttgggggtgtgagctg

SEQ ID NO: 107617 - RNA, 23 nt, synthetic construct
  source 1..23: mol_type = other RNA
tccatggtggtcaccactttggg

SEQ ID NO: 107618 - RNA, 23 nt, synthetic construct
  source 1..23: mol_type = other RNA
tcgtctcggggcagcaggggttc

SEQ ID NO: 107619 - RNA, 23 nt, synthetic construct
  source 1..23: mol_type = other RNA
tccgcagaggaggcccaaggttt

SEQ ID NO: 107620 - RNA, 23 nt, synthetic construct
  source 1..23: mol_type = other RNA
tcccagcagggtgcggtggcaga

SEQ ID NO: 107621 - RNA, 23 nt, synthetic construct
  source 1..23: mol_type = other RNA
tttgtggtcggctttgtgaggat

SEQ ID NO: 107622 - RNA, 23 nt, synthetic construct
  source 1..23: mol_type = other RNA
tcctgcagaccaggccaaagtcc

SEQ ID NO: 107623 - RNA, 23 nt, synthetic construct
  source 1..23: mol_type = other RNA
tcacagagccggtggccccggtt

SEQ ID NO: 107624 - RNA, 23 nt, synthetic construct
  source 1..23: mol_type = other RNA
tcccaaggtgcctgaggtggccg

SEQ ID NO: 107625 - RNA, 23 nt, synthetic construct
  source 1..23: mol_type = other RNA
tcctgcagaccaggccaaagtcc

SEQ ID NO: 107626 - RNA, 23 nt, synthetic construct
  source 1..23: mol_type = other RNA
tctgtggtcagctctgtgaggat

SEQ ID NO: 107627 - RNA, 23 nt, synthetic construct
  source 1..23: mol_type = other RNA
tgctgtggtcagctctgtgagga

SEQ ID NO: 107628 - RNA, 23 nt, synthetic construct
  source 1..23: mol_type = other RNA
ttagtggctgctgtggtcagctc

SEQ ID NO: 107629 - RNA, 23 nt, synthetic construct
  source 1..23: mol_type = other RNA
tcctgcagaccaggccaaagtcc

SEQ ID NO: 107630 - RNA, 23 nt, synthetic construct
  source 1..23: mol_type = other RNA
tcccaaggtgcctgaggtggccg

SEQ ID NO: 107631 - RNA, 23 nt, synthetic construct
  source 1..23: mol_type = other RNA
tcctgcagaccaggccaaagtcc

SEQ ID NO: 107632 - RNA, 23 nt, synthetic construct
  source 1..23: mol_type = other RNA
tctgtggtcagctctgtgaggat

SEQ ID NO: 107633 - RNA, 23 nt, synthetic construct
  source 1..23: mol_type = other RNA
tgctgtggtcagctctgtgagga

SEQ ID NO: 107634 - RNA, 23 nt, synthetic construct
  source 1..23: mol_type = other RNA
ttagtggctgctgtggtcagctc

SEQ ID NO: 107635 - RNA, 23 nt, synthetic construct
  source 1..23: mol_type = other RNA
tcacagagccggtggccccggtt

SEQ ID NO: 107636 - RNA, 23 nt, synthetic construct
  source 1..23: mol_type = other RNA
tgtagaaatggcagccggctcgg

SEQ ID NO: 107637 - RNA, 23 nt, synthetic construct
  source 1..23: mol_type = other RNA
tagggcacctcaaggcggcccct

SEQ ID NO: 107638 - RNA, 23 nt, synthetic construct
  source 1..23: mol_type = other RNA
tgtggacccgcctctcctggcag

SEQ ID NO: 107639 - RNA, 23 nt, synthetic construct
  source 1..23: mol_type = other RNA
tgtctgccccagcggccggacgt

SEQ ID NO: 107640 - RNA, 23 nt, synthetic construct
  source 1..23: mol_type = other RNA
ttgggtgtaggtgtgcaggatgg

SEQ ID NO: 107641 - RNA, 23 nt, synthetic construct
  source 1..23: mol_type = other RNA
ttggaggagggcgtggccgtaga

SEQ ID NO: 107642 - RNA, 23 nt, synthetic construct
  source 1..23: mol_type = other RNA
tggtcagcactttgggaggggga

SEQ ID NO: 107643 - RNA, 23 nt, synthetic construct
  source 1..23: mol_type = other RNA
tggtcagcactttgggaggggga

SEQ ID NO: 107644 - RNA, 23 nt, synthetic construct
  source 1..23: mol_type = other RNA
tggtcagcactttgggaggggga

SEQ ID NO: 107645 - RNA, 23 nt, synthetic construct
  source 1..23: mol_type = other RNA
ttccctggagttgaggaggggtt

SEQ ID NO: 107646 - RNA, 23 nt, synthetic construct
  source 1..23: mol_type = other RNA
ttccctggagttgaggaggggtt

SEQ ID NO: 107647 - RNA, 23 nt, synthetic construct
  source 1..23: mol_type = other RNA
ttccctggagttgaggaggggtt

SEQ ID NO: 107648 - RNA, 23 nt, synthetic construct
  source 1..23: mol_type = other RNA
ttccctggagttgaggaggggtt

SEQ ID NO: 107649 - RNA, 23 nt, synthetic construct
  source 1..23: mol_type = other RNA
tagtggccatggtggtcaccact

SEQ ID NO: 107650 - RNA, 23 nt, synthetic construct
  source 1..23: mol_type = other RNA
ttggagaccgggagggccgggct

SEQ ID NO: 107651 - RNA, 23 nt, synthetic construct
  source 1..23: mol_type = other RNA
taaagtccaggctgcattccacg

SEQ ID NO: 107652 - RNA, 23 nt, synthetic construct
  source 1..23: mol_type = other RNA
taaagtccaggctgcattccacg

SEQ ID NO: 107653 - RNA, 23 nt, synthetic construct
  source 1..23: mol_type = other RNA
taaagtccaggctgcattccacg

SEQ ID NO: 107654 - RNA, 23 nt, synthetic construct
  source 1..23: mol_type = other RNA
taaagtccaggctgcattccacg

SEQ ID NO: 107655 - RNA, 23 nt, synthetic construct
  source 1..23: mol_type = other RNA
tccacagtagtcctgggccaaga

SEQ ID NO: 107656 - RNA, 23 nt, synthetic construct
  source 1..23: mol_type = other RNA
ttcctggtgctgcatgttgaggg

SEQ ID NO: 107657 - RNA, 23 nt, synthetic construct
  source 1..23: mol_type = other RNA
tgagctgcaggtggtgttgaagg

SEQ ID NO: 107658 - RNA, 23 nt, synthetic construct
  source 1..23: mol_type = other RNA
tccagcgtgggtggctgtgaggg

SEQ ID NO: 107659 - RNA, 23 nt, synthetic construct
  source 1..23: mol_type = other RNA
tgctgtggggacccttgcaccga

SEQ ID NO: 107660 - RNA, 23 nt, synthetic construct
  source 1..23: mol_type = other RNA
tttgtggtcagctctgtgaggat

SEQ ID NO: 107661 - RNA, 23 nt, synthetic construct
  source 1..23: mol_type = other RNA
tttgtggtcagctctgtgaggat

SEQ ID NO: 107662 - RNA, 23 nt, synthetic construct
  source 1..23: mol_type = other RNA
tttgtggtcagctctgtgaggat

SEQ ID NO: 107663 - RNA, 23 nt, synthetic construct
  source 1..23: mol_type = other RNA
tcaggaatgtcagcaccagccgg

SEQ ID NO: 107664 - RNA, 23 nt, synthetic construct
  source 1..23: mol_type = other RNA
tcaagtgggctggcaggcatcca

SEQ ID NO: 107665 - RNA, 23 nt, synthetic construct
  source 1..23: mol_type = other RNA
ttagtgctgggctctgtgaggat

SEQ ID NO: 107666 - RNA, 23 nt, synthetic construct
  source 1..23: mol_type = other RNA
tgtagtgctgggctctgtgagga

SEQ ID NO: 107667 - RNA, 23 nt, synthetic construct
  source 1..23: mol_type = other RNA
tgtggatccagtggctgcagttg

SEQ ID NO: 107668 - RNA, 23 nt, synthetic construct
  source 1..23: mol_type = other RNA
tatggcctgggcctctgctgagt

SEQ ID NO: 107669 - RNA, 23 nt, synthetic construct
  source 1..23: mol_type = other RNA
tattgtaccagctggaccagcgg

SEQ ID NO: 107670 - RNA, 23 nt, synthetic construct
  source 1..23: mol_type = other RNA
tagtccagccactctgaccaggc

SEQ ID NO: 107671 - RNA, 23 nt, synthetic construct
  source 1..23: mol_type = other RNA
tagtccagccactctgaccaggc

SEQ ID NO: 107672 - RNA, 23 nt, synthetic construct
  source 1..23: mol_type = other RNA
tagtccagccactctgaccaggc

SEQ ID NO: 107673 - RNA, 23 nt, synthetic construct
  source 1..23: mol_type = other RNA
tagtccagccactctgaccaggc

SEQ ID NO: 107674 - RNA, 23 nt, synthetic construct
  source 1..23: mol_type = other RNA
ttcctcagggcagaagcagccct

SEQ ID NO: 107675 - RNA, 23 nt, synthetic construct
  source 1..23: mol_type = other RNA
tagcgggcggcagcggcagtggc

SEQ ID NO: 107676 - RNA, 23 nt, synthetic construct
  source 1..23: mol_type = other RNA
ttcgtggcaggcctgggcgtagg

SEQ ID NO: 107677 - RNA, 23 nt, synthetic construct
  source 1..23: mol_type = other RNA
ttgcccagggaggaggaggggat

SEQ ID NO: 107678 - RNA, 23 nt, synthetic construct
  source 1..23: mol_type = other RNA
ttgcccagggaggaggaggggat

SEQ ID NO: 107679 - RNA, 23 nt, synthetic construct
  source 1..23: mol_type = other RNA
ttgcccagggaggaggaggggat

SEQ ID NO: 107680 - RNA, 23 nt, synthetic construct
  source 1..23: mol_type = other RNA
tgcgggcggcagcggcagtggca

SEQ ID NO: 107681 - RNA, 23 nt, synthetic construct
  source 1..23: mol_type = other RNA
taccggggctgcggggctggcag

SEQ ID NO: 107682 - RNA, 23 nt, synthetic construct
  source 1..23: mol_type = other RNA
tcttagtttgttccagggcgtcc

SEQ ID NO: 107683 - RNA, 23 nt, synthetic construct
  source 1..23: mol_type = other RNA
tgtgggtggtccctagggcagag

SEQ ID NO: 107684 - RNA, 23 nt, synthetic construct
  source 1..23: mol_type = other RNA
tgtgggtggtccctagggcagag

SEQ ID NO: 107685 - RNA, 23 nt, synthetic construct
  source 1..23: mol_type = other RNA
tgtgggtggtccctagggcagag

SEQ ID NO: 107686 - RNA, 23 nt, synthetic construct
  source 1..23: mol_type = other RNA
tgtgggtggtccctagggcagag

SEQ ID NO: 107687 - RNA, 23 nt, synthetic construct
  source 1..23: mol_type = other RNA
tcatcctcctgacattgcaccgt

SEQ ID NO: 107688 - RNA, 23 nt, synthetic construct
  source 1..23: mol_type = other RNA
tccgcacttccgcagctcagcca

SEQ ID NO: 107689 - RNA, 23 nt, synthetic construct
  source 1..23: mol_type = other RNA
tgcaaagacctggctcagcatca

SEQ ID NO: 107690 - RNA, 23 nt, synthetic construct
  source 1..23: mol_type = other RNA
ttgctcacagactgcccctccgg

SEQ ID NO: 107691 - RNA, 23 nt, synthetic construct
  source 1..23: mol_type = other RNA
tccgggctggtcagcactttggg

SEQ ID NO: 107692 - RNA, 23 nt, synthetic construct
  source 1..23: mol_type = other RNA
ttgtggtggtcagcactgtggag

SEQ ID NO: 107693 - RNA, 23 nt, synthetic construct
  source 1..23: mol_type = other RNA
tgggtgtgtgggggagccatggg

SEQ ID NO: 107694 - RNA, 23 nt, synthetic construct
  source 1..23: mol_type = other RNA
tcacacacaggccggggggctcc

SEQ ID NO: 107695 - RNA, 23 nt, synthetic construct
  source 1..23: mol_type = other RNA
tccacacacaggccggggggctc

SEQ ID NO: 107696 - RNA, 23 nt, synthetic construct
  source 1..23: mol_type = other RNA
tgtcatagtagtttccgtccttg

SEQ ID NO: 107697 - RNA, 23 nt, synthetic construct
  source 1..23: mol_type = other RNA
tccaagatgtactcgcagctgcc

SEQ ID NO: 107698 - RNA, 23 nt, synthetic construct
  source 1..23: mol_type = other RNA
tgcggtggtggtcagcactgggg

SEQ ID NO: 107699 - RNA, 23 nt, synthetic construct
  source 1..23: mol_type = other RNA
tgtggcggtggtggtcagcactg

SEQ ID NO: 107700 - RNA, 23 nt, synthetic construct
  source 1..23: mol_type = other RNA
tggtaccggtggttgctgctagg

SEQ ID NO: 107701 - RNA, 23 nt, synthetic construct
  source 1..23: mol_type = other RNA
ttggtaccggtggttgctgctag

SEQ ID NO: 107702 - RNA, 23 nt, synthetic construct
  source 1..23: mol_type = other RNA
tgcggtggtggtcagcactgggg

SEQ ID NO: 107703 - RNA, 23 nt, synthetic construct
  source 1..23: mol_type = other RNA
tgtggcggtggtggtcagcactg

SEQ ID NO: 107704 - RNA, 23 nt, synthetic construct
  source 1..23: mol_type = other RNA
tggtaccggtggttgctgctggg

SEQ ID NO: 107705 - RNA, 23 nt, synthetic construct
  source 1..23: mol_type = other RNA
ttggtaccggtggttgctgctgg

SEQ ID NO: 107706 - RNA, 23 nt, synthetic construct
  source 1..23: mol_type = other RNA
tgcggtggtggtcagcactgggg

SEQ ID NO: 107707 - RNA, 23 nt, synthetic construct
  source 1..23: mol_type = other RNA
tgtggcggtggtggtcagcactg

SEQ ID NO: 107708 - RNA, 23 nt, synthetic construct
  source 1..23: mol_type = other RNA
tggtactggtggttgctgctggg

SEQ ID NO: 107709 - RNA, 23 nt, synthetic construct
  source 1..23: mol_type = other RNA
tgcggtggtggtcagcactgggg

SEQ ID NO: 107710 - RNA, 23 nt, synthetic construct
  source 1..23: mol_type = other RNA
tgtggcggtggtggtcagcactg

SEQ ID NO: 107711 - RNA, 23 nt, synthetic construct
  source 1..23: mol_type = other RNA
tggtaccggtggttgctgctggg

SEQ ID NO: 107712 - RNA, 23 nt, synthetic construct
  source 1..23: mol_type = other RNA
ttggtaccggtggttgctgctgg

SEQ ID NO: 107713 - RNA, 23 nt, synthetic construct
  source 1..23: mol_type = other RNA
tggcccaactcccccagggggac

SEQ ID NO: 107714 - RNA, 23 nt, synthetic construct
  source 1..23: mol_type = other RNA
tgttgtgttgcacacgcacaccg

SEQ ID NO: 107715 - RNA, 23 nt, synthetic construct
  source 1..23: mol_type = other RNA
tcctggggacaggtagtattgtt

SEQ ID NO: 107716 - RNA, 23 nt, synthetic construct
  source 1..23: mol_type = other RNA
tgtccacacagtggtcctcgcag

SEQ ID NO: 107717 - RNA, 23 nt, synthetic construct
  source 1..23: mol_type = other RNA
tagggagtcactgtgctgctggt

SEQ ID NO: 107718 - RNA, 23 nt, synthetic construct
  source 1..23: mol_type = other RNA
ttgaggtggccgaagtccaggct

SEQ ID NO: 107719 - RNA, 23 nt, synthetic construct
  source 1..23: mol_type = other RNA
tagggagtcactgtgctgctggt

SEQ ID NO: 107720 - RNA, 23 nt, synthetic construct
  source 1..23: mol_type = other RNA
tagggagtcactgtgctgctggt

SEQ ID NO: 107721 - RNA, 23 nt, synthetic construct
  source 1..23: mol_type = other RNA
ttgaggtggccgaagtccaggct

SEQ ID NO: 107722 - RNA, 23 nt, synthetic construct
  source 1..23: mol_type = other RNA
tgtcggggcccagcagccatcct

SEQ ID NO: 107723 - RNA, 23 nt, synthetic construct
  source 1..23: mol_type = other RNA
ttgtgcaggatggctgagccgtt

SEQ ID NO: 107724 - RNA, 23 nt, synthetic construct
  source 1..23: mol_type = other RNA
tggacacataggcccgcacatgc

SEQ ID NO: 107725 - RNA, 23 nt, synthetic construct
  source 1..23: mol_type = other RNA
tctcgttgtgcacacaggggcag

SEQ ID NO: 107726 - RNA, 23 nt, synthetic construct
  source 1..23: mol_type = other RNA
tgagctctggaggttgccattgt

SEQ ID NO: 107727 - RNA, 23 nt, synthetic construct
  source 1..23: mol_type = other RNA
ttcgcagaaggtgatgttgacct

SEQ ID NO: 107728 - RNA, 23 nt, synthetic construct
  source 1..23: mol_type = other RNA
tgccctgagttaccctgcagcag

SEQ ID NO: 107729 - RNA, 23 nt, synthetic construct
  source 1..23: mol_type = other RNA
tggaagtcaccccaggtgctgca

SEQ ID NO: 107730 - RNA, 23 nt, synthetic construct
  source 1..23: mol_type = other RNA
tgtactggtggttgctgctgggg

SEQ ID NO: 107731 - RNA, 23 nt, synthetic construct
  source 1..23: mol_type = other RNA
tacttccgcagctcagccagcac

SEQ ID NO: 107732 - RNA, 23 nt, synthetic construct
  source 1..23: mol_type = other RNA
tcaaacgtctcaaagtctccgcc

SEQ ID NO: 107733 - RNA, 23 nt, synthetic construct
  source 1..23: mol_type = other RNA
tgggggagctgttctcagggtgg

SEQ ID NO: 107734 - RNA, 23 nt, synthetic construct
  source 1..23: mol_type = other RNA
ttgcagttgtagtggctgctgtg

SEQ ID NO: 107735 - RNA, 23 nt, synthetic construct
  source 1..23: mol_type = other RNA
ttgcagttgtagtggctgctgtg

SEQ ID NO: 107736 - RNA, 23 nt, synthetic construct
  source 1..23: mol_type = other RNA
tccaggtagaggctgagattccc

SEQ ID NO: 107737 - RNA, 23 nt, synthetic construct
  source 1..23: mol_type = other RNA
ttgcagtagtggttgtccaggta

SEQ ID NO: 107738 - RNA, 23 nt, synthetic construct
  source 1..23: mol_type = other RNA
tccacggggtgggcagcaggagc

SEQ ID NO: 107739 - RNA, 23 nt, synthetic construct
  source 1..23: mol_type = other RNA
tcagctggaatccgtgctgcgcg

SEQ ID NO: 107740 - RNA, 23 nt, synthetic construct
  source 1..23: mol_type = other RNA
tcggtgaagctgctgtcggcaca

SEQ ID NO: 107741 - RNA, 23 nt, synthetic construct
  source 1..23: mol_type = other RNA
tgggactctgttggctgttggcg

SEQ ID NO: 107742 - RNA, 23 nt, synthetic construct
  source 1..23: mol_type = other RNA
ttggtcagcactttgggaggggg

SEQ ID NO: 107743 - RNA, 23 nt, synthetic construct
  source 1..23: mol_type = other RNA
ttagggtgagggctggacagggc

SEQ ID NO: 107744 - RNA, 23 nt, synthetic construct
  source 1..23: mol_type = other RNA
ttggtcagcactttgggaggggg

SEQ ID NO: 107745 - RNA, 23 nt, synthetic construct
  source 1..23: mol_type = other RNA
ttagggtgagggctggacagggc

SEQ ID NO: 107746 - RNA, 23 nt, synthetic construct
  source 1..23: mol_type = other RNA
ttagggtgagggctggacagggc

SEQ ID NO: 107747 - RNA, 23 nt, synthetic construct
  source 1..23: mol_type = other RNA
ttggtcagcactttgggaggggg

SEQ ID NO: 107748 - RNA, 23 nt, synthetic construct
  source 1..23: mol_type = other RNA
tagctgtggattttgtggctgtg

SEQ ID NO: 107749 - RNA, 23 nt, synthetic construct
  source 1..23: mol_type = other RNA
tacgtgggtgtaggtgtgcagga

SEQ ID NO: 107750 - RNA, 23 nt, synthetic construct
  source 1..23: mol_type = other RNA
ttggctgtaccaagggtgcttgt

SEQ ID NO: 107751 - RNA, 23 nt, synthetic construct
  source 1..23: mol_type = other RNA
tttaggacagtgcaagggcaccg

SEQ ID NO: 107752 - RNA, 23 nt, synthetic construct
  source 1..23: mol_type = other RNA
tcaaagtcattgatggcattgtc

SEQ ID NO: 107753 - RNA, 23 nt, synthetic construct
  source 1..23: mol_type = other RNA
tgtggctgtgcttgtcagcactg

SEQ ID NO: 107754 - RNA, 23 nt, synthetic construct
  source 1..23: mol_type = other RNA
tgtggcaccagctgcaccagcag

SEQ ID NO: 107755 - RNA, 23 nt, synthetic construct
  source 1..23: mol_type = other RNA
tccagcacggtgaagctgctgtc

SEQ ID NO: 107756 - RNA, 23 nt, synthetic construct
  source 1..23: mol_type = other RNA
tggcggtggccgtggatccggtg

SEQ ID NO: 107757 - RNA, 23 nt, synthetic construct
  source 1..23: mol_type = other RNA
tggcggtggccgtggatccggtg

SEQ ID NO: 107758 - RNA, 23 nt, synthetic construct
  source 1..23: mol_type = other RNA
tggcggtggccgtggatccggtg

SEQ ID NO: 107759 - RNA, 23 nt, synthetic construct
  source 1..23: mol_type = other RNA
tggcggtggccgtggatccggtg

SEQ ID NO: 107760 - RNA, 23 nt, synthetic construct
  source 1..23: mol_type = other RNA
taaaggtggaatagtgggagccg

SEQ ID NO: 107761 - RNA, 23 nt, synthetic construct
  source 1..23: mol_type = other RNA
tttcatgatcagacaatgcacat

SEQ ID NO: 107762 - RNA, 23 nt, synthetic construct
  source 1..23: mol_type = other RNA
tgcagggtgagccacactcctgg

SEQ ID NO: 107763 - RNA, 23 nt, synthetic construct
  source 1..23: mol_type = other RNA
tggaggtgtgggtggtctccgga

SEQ ID NO: 107764 - RNA, 23 nt, synthetic construct
  source 1..23: mol_type = other RNA
ttctggagctgatgactgtgggt

SEQ ID NO: 107765 - RNA, 23 nt, synthetic construct
  source 1..23: mol_type = other RNA
tggaggtgtgggtggtctccgga

SEQ ID NO: 107766 - RNA, 23 nt, synthetic construct
  source 1..23: mol_type = other RNA
ttgaaggttggcaggctgctggg

SEQ ID NO: 107767 - RNA, 23 nt, synthetic construct
  source 1..23: mol_type = other RNA
tcgagctgttgctgcagtccagg

SEQ ID NO: 107768 - RNA, 23 nt, synthetic construct
  source 1..23: mol_type = other RNA
tcccacccggccctctcgccacc

SEQ ID NO: 107769 - RNA, 23 nt, synthetic construct
  source 1..23: mol_type = other RNA
tgtgacgctcacgcccagggcag

SEQ ID NO: 107770 - RNA, 23 nt, synthetic construct
  source 1..23: mol_type = other RNA
taagcctccaggctctggcaggg

SEQ ID NO: 107771 - RNA, 23 nt, synthetic construct
  source 1..23: mol_type = other RNA
tccagcaggacgacacggttgtc

SEQ ID NO: 107772 - RNA, 23 nt, synthetic construct
  source 1..23: mol_type = other RNA
tcagcgtgggtggctgtgagggg

SEQ ID NO: 107773 - RNA, 23 nt, synthetic construct
  source 1..23: mol_type = other RNA
tgtgtgagctgttcccagagtgg

SEQ ID NO: 107774 - RNA, 23 nt, synthetic construct
  source 1..23: mol_type = other RNA
tgtcacagtgctgattgcacact

SEQ ID NO: 107775 - RNA, 23 nt, synthetic construct
  source 1..23: mol_type = other RNA
tgcaggtggttgtgttgcacacg

SEQ ID NO: 107776 - RNA, 23 nt, synthetic construct
  source 1..23: mol_type = other RNA
tctgcccggccactctcttgtac

SEQ ID NO: 107777 - RNA, 23 nt, synthetic construct
  source 1..23: mol_type = other RNA
tgtggagccggtggctgtgatcg

SEQ ID NO: 107778 - RNA, 23 nt, synthetic construct
  source 1..23: mol_type = other RNA
tccacctccggttcctgcaggtg

SEQ ID NO: 107779 - RNA, 23 nt, synthetic construct
  source 1..23: mol_type = other RNA
tctgccttcaaagctgtagcgat

SEQ ID NO: 107780 - RNA, 23 nt, synthetic construct
  source 1..23: mol_type = other RNA
tctcgatgtcagccagcacaggg

SEQ ID NO: 107781 - RNA, 23 nt, synthetic construct
  source 1..23: mol_type = other RNA
tacctgctggcccagctcctcca

SEQ ID NO: 107782 - RNA, 23 nt, synthetic construct
  source 1..23: mol_type = other RNA
tgtggtcccaagggtgaaggagg

SEQ ID NO: 107783 - RNA, 23 nt, synthetic construct
  source 1..23: mol_type = other RNA
tggtggtggtccccagcacagac

SEQ ID NO: 107784 - RNA, 23 nt, synthetic construct
  source 1..23: mol_type = other RNA
tacgcccagggcaggaatgtcca

SEQ ID NO: 107785 - RNA, 23 nt, synthetic construct
  source 1..23: mol_type = other RNA
ttgtggtggccgtgctggtcagc

SEQ ID NO: 107786 - RNA, 23 nt, synthetic construct
  source 1..23: mol_type = other RNA
ttgtggtggccgtgctggtcagc

SEQ ID NO: 107787 - RNA, 23 nt, synthetic construct
  source 1..23: mol_type = other RNA
ttgtggtggccgtgctggtcagc

SEQ ID NO: 107788 - RNA, 23 nt, synthetic construct
  source 1..23: mol_type = other RNA
ttcagctcagtgaggatccgggt

SEQ ID NO: 107789 - RNA, 23 nt, synthetic construct
  source 1..23: mol_type = other RNA
ttggaagcggtcaatgtcacagt

SEQ ID NO: 107790 - RNA, 23 nt, synthetic construct
  source 1..23: mol_type = other RNA
tgcaggtgtccgtgcagggtgag

SEQ ID NO: 107791 - RNA, 23 nt, synthetic construct
  source 1..23: mol_type = other RNA
tgggcaggtgaggtcgcacaggc

SEQ ID NO: 107792 - RNA, 23 nt, synthetic construct
  source 1..23: mol_type = other RNA
tgacacataggcccgcacatgct

SEQ ID NO: 107793 - RNA, 23 nt, synthetic construct
  source 1..23: mol_type = other RNA
tttccacaggaatgtcagcacca

SEQ ID NO: 107794 - RNA, 23 nt, synthetic construct
  source 1..23: mol_type = other RNA
tgaagctgctgtcggcacatttc

SEQ ID NO: 107795 - RNA, 23 nt, synthetic construct
  source 1..23: mol_type = other RNA
tccttaaaggtcccctcttggag

SEQ ID NO: 107796 - RNA, 23 nt, synthetic construct
  source 1..23: mol_type = other RNA
tgtccttgggtgccagggcgtcc

SEQ ID NO: 107797 - RNA, 23 nt, synthetic construct
  source 1..23: mol_type = other RNA
tcagatggcgatcaagcaggcgc

SEQ ID NO: 107798 - RNA, 23 nt, synthetic construct
  source 1..23: mol_type = other RNA
tcacctgtgccagggtccagttg

SEQ ID NO: 107799 - RNA, 23 nt, synthetic construct
  source 1..23: mol_type = other RNA
ttctcagtgctggaagggcggtt

SEQ ID NO: 107800 - RNA, 23 nt, synthetic construct
  source 1..23: mol_type = other RNA
ttccccacctgctcacggttcct

SEQ ID NO: 107801 - RNA, 23 nt, synthetic construct
  source 1..23: mol_type = other RNA
ttctcagtgctggaagggcggtt

SEQ ID NO: 107802 - RNA, 23 nt, synthetic construct
  source 1..23: mol_type = other RNA
ttccccacctgctcacggttcct

SEQ ID NO: 107803 - RNA, 23 nt, synthetic construct
  source 1..23: mol_type = other RNA
ttctcagtgctggaagggcggtt

SEQ ID NO: 107804 - RNA, 23 nt, synthetic construct
  source 1..23: mol_type = other RNA
ttccccacctgctcacggttcct

SEQ ID NO: 107805 - RNA, 23 nt, synthetic construct
  source 1..23: mol_type = other RNA
ttctcagtgctggaagggcggtt

SEQ ID NO: 107806 - RNA, 23 nt, synthetic construct
  source 1..23: mol_type = other RNA
ttccccacctgctcacggttcct

SEQ ID NO: 107807 - RNA, 23 nt, synthetic construct
  source 1..23: mol_type = other RNA
ttctcagtgctggaagggcagtt

SEQ ID NO: 107808 - RNA, 23 nt, synthetic construct
  source 1..23: mol_type = other RNA
ttccacgtggtccacagggtgga

SEQ ID NO: 107809 - RNA, 23 nt, synthetic construct
  source 1..23: mol_type = other RNA
tgccgccccacatgctgcagatg

SEQ ID NO: 107810 - RNA, 23 nt, synthetic construct
  source 1..23: mol_type = other RNA
tcggggcagcaggggttctcggc

SEQ ID NO: 107811 - RNA, 23 nt, synthetic construct
  source 1..23: mol_type = other RNA
tcatgtggcagggaagggcgcct

SEQ ID NO: 107812 - RNA, 23 nt, synthetic construct
  source 1..23: mol_type = other RNA
tttgtccacatggctgttgaccc

SEQ ID NO: 107813 - RNA, 23 nt, synthetic construct
  source 1..23: mol_type = other RNA
tgccacactcctggtgctgcatg

SEQ ID NO: 107814 - RNA, 23 nt, synthetic construct
  source 1..23: mol_type = other RNA
tgagccacactcctggtgctgca

SEQ ID NO: 107815 - RNA, 23 nt, synthetic construct
  source 1..23: mol_type = other RNA
tccccacctgtgccagggtccag

SEQ ID NO: 107816 - RNA, 23 nt, synthetic construct
  source 1..23: mol_type = other RNA
tgggagggggagctgttctcagg

SEQ ID NO: 107817 - RNA, 23 nt, synthetic construct
  source 1..23: mol_type = other RNA
tgctgtgcttgtcagcactggaa

SEQ ID NO: 107818 - RNA, 23 nt, synthetic construct
  source 1..23: mol_type = other RNA
tgctgtgcttgtcagcactggaa

SEQ ID NO: 107819 - RNA, 23 nt, synthetic construct
  source 1..23: mol_type = other RNA
tgctgtgcttgtcagcactggaa

SEQ ID NO: 107820 - RNA, 23 nt, synthetic construct
  source 1..23: mol_type = other RNA
tagccagtgggtctcagggtggt

SEQ ID NO: 107821 - RNA, 23 nt, synthetic construct
  source 1..23: mol_type = other RNA
tccacaggctctcccagggtagg

SEQ ID NO: 107822 - RNA, 23 nt, synthetic construct
  source 1..23: mol_type = other RNA
ttgggtgtggtggtctgtgatag

SEQ ID NO: 107823 - RNA, 23 nt, synthetic construct
  source 1..23: mol_type = other RNA
tagcactggggggatgggagttg

SEQ ID NO: 107824 - RNA, 23 nt, synthetic construct
  source 1..23: mol_type = other RNA
ttgggtgtggtggtctgtgatag

SEQ ID NO: 107825 - RNA, 23 nt, synthetic construct
  source 1..23: mol_type = other RNA
tatgtgggtggtgcccaaggtgc

SEQ ID NO: 107826 - RNA, 23 nt, synthetic construct
  source 1..23: mol_type = other RNA
ttgggtgtggtggtctgtgatag

SEQ ID NO: 107827 - RNA, 23 nt, synthetic construct
  source 1..23: mol_type = other RNA
tagcactggggggatgggagttg

SEQ ID NO: 107828 - RNA, 23 nt, synthetic construct
  source 1..23: mol_type = other RNA
ttgggtgtggtggtctgtgatag

SEQ ID NO: 107829 - RNA, 23 nt, synthetic construct
  source 1..23: mol_type = other RNA
tgaggagggggtgactgtgaagc

SEQ ID NO: 107830 - RNA, 23 nt, synthetic construct
  source 1..23: mol_type = other RNA
tatgtgggtggtgcccaaggtgc

SEQ ID NO: 107831 - RNA, 23 nt, synthetic construct
  source 1..23: mol_type = other RNA
ttgggtgtggtggtctgtgatag

SEQ ID NO: 107832 - RNA, 23 nt, synthetic construct
  source 1..23: mol_type = other RNA
tttgcagtccttggactggagga

SEQ ID NO: 107833 - RNA, 23 nt, synthetic construct
  source 1..23: mol_type = other RNA
tttgcagtccttggactggagga

SEQ ID NO: 107834 - RNA, 23 nt, synthetic construct
  source 1..23: mol_type = other RNA
tttgcagtccttggactggagga

SEQ ID NO: 107835 - RNA, 23 nt, synthetic construct
  source 1..23: mol_type = other RNA
tgggccgggaagccacgggtgtg

SEQ ID NO: 107836 - RNA, 23 nt, synthetic construct
  source 1..23: mol_type = other RNA
tcctgggggctggcacgggtggg

SEQ ID NO: 107837 - RNA, 23 nt, synthetic construct
  source 1..23: mol_type = other RNA
tggacgcctccagcaccagcccc

SEQ ID NO: 107838 - RNA, 23 nt, synthetic construct
  source 1..23: mol_type = other RNA
tgggatccagctccagcagggca

SEQ ID NO: 107839 - RNA, 23 nt, synthetic construct
  source 1..23: mol_type = other RNA
tgggggcagagctcagggcacct

SEQ ID NO: 107840 - RNA, 23 nt, synthetic construct
  source 1..23: mol_type = other RNA
tcagagcaggtgccagggcacgg

SEQ ID NO: 107841 - RNA, 23 nt, synthetic construct
  source 1..23: mol_type = other RNA
tcagcacggtgaagctgctgtcg

SEQ ID NO: 107842 - RNA, 23 nt, synthetic construct
  source 1..23: mol_type = other RNA
tgcagcgcgagaaggcactgttg

SEQ ID NO: 107843 - RNA, 23 nt, synthetic construct
  source 1..23: mol_type = other RNA
tcttggggttgatgatggagtgg

SEQ ID NO: 107844 - RNA, 23 nt, synthetic construct
  source 1..23: mol_type = other RNA
tggggcaggtgcagccgtccaca

SEQ ID NO: 107845 - RNA, 23 nt, synthetic construct
  source 1..23: mol_type = other RNA
tccacctctccaggagccagcac

SEQ ID NO: 107846 - RNA, 23 nt, synthetic construct
  source 1..23: mol_type = other RNA
tagctgttgctgcagtccaggta

SEQ ID NO: 107847 - RNA, 23 nt, synthetic construct
  source 1..23: mol_type = other RNA
tcgccgagctgttgctgcagtcc

SEQ ID NO: 107848 - RNA, 23 nt, synthetic construct
  source 1..23: mol_type = other RNA
tacaggggcagtcctcctcggca

SEQ ID NO: 107849 - RNA, 23 nt, synthetic construct
  source 1..23: mol_type = other RNA
ttgtagaagtcacagaacaaggg

SEQ ID NO: 107850 - RNA, 23 nt, synthetic construct
  source 1..23: mol_type = other RNA
tggggaggggccacagggcacgt

SEQ ID NO: 107851 - RNA, 23 nt, synthetic construct
  source 1..23: mol_type = other RNA
tgccattgttgttggggccagcg

SEQ ID NO: 107852 - RNA, 23 nt, synthetic construct
  source 1..23: mol_type = other RNA
tggggagctgttctcagggtgga

SEQ ID NO: 107853 - RNA, 23 nt, synthetic construct
  source 1..23: mol_type = other RNA
tttgcagtccctggactggagga

SEQ ID NO: 107854 - RNA, 23 nt, synthetic construct
  source 1..23: mol_type = other RNA
tgaggagggggtggctgtgaagc

SEQ ID NO: 107855 - RNA, 23 nt, synthetic construct
  source 1..23: mol_type = other RNA
tggtggtccccgggatggaggag

SEQ ID NO: 107856 - RNA, 23 nt, synthetic construct
  source 1..23: mol_type = other RNA
tggtggtggtcagcactgtggcg

SEQ ID NO: 107857 - RNA, 23 nt, synthetic construct
  source 1..23: mol_type = other RNA
tgtgttgctggtggctgcaggtg

SEQ ID NO: 107858 - RNA, 23 nt, synthetic construct
  source 1..23: mol_type = other RNA
tagaggagggagtcactgtgttg

SEQ ID NO: 107859 - RNA, 23 nt, synthetic construct
  source 1..23: mol_type = other RNA
tcaccgtgtggggactgctgggg

SEQ ID NO: 107860 - RNA, 23 nt, synthetic construct
  source 1..23: mol_type = other RNA
tttgcagtccctggactggagaa

SEQ ID NO: 107861 - RNA, 23 nt, synthetic construct
  source 1..23: mol_type = other RNA
tgaggagggggtggctgtgaagc

SEQ ID NO: 107862 - RNA, 23 nt, synthetic construct
  source 1..23: mol_type = other RNA
tggtggtccccgggatggaggag

SEQ ID NO: 107863 - RNA, 23 nt, synthetic construct
  source 1..23: mol_type = other RNA
tggtggtggtcagcactgtgggg

SEQ ID NO: 107864 - RNA, 23 nt, synthetic construct
  source 1..23: mol_type = other RNA
tagaggagggagtcactgtgctg

SEQ ID NO: 107865 - RNA, 23 nt, synthetic construct
  source 1..23: mol_type = other RNA
tcaccgtgtggggactgctgggg

SEQ ID NO: 107866 - RNA, 23 nt, synthetic construct
  source 1..23: mol_type = other RNA
tgcggtcgtagtggctgctgtgg

SEQ ID NO: 107867 - RNA, 23 nt, synthetic construct
  source 1..23: mol_type = other RNA
tgtggggccagtggctgcagttg

SEQ ID NO: 107868 - RNA, 23 nt, synthetic construct
  source 1..23: mol_type = other RNA
tttgcagtccctggactggagga

SEQ ID NO: 107869 - RNA, 23 nt, synthetic construct
  source 1..23: mol_type = other RNA
tgaggagggggtggctgtgaagc

SEQ ID NO: 107870 - RNA, 23 nt, synthetic construct
  source 1..23: mol_type = other RNA
tggtggtccccgggatggaggag

SEQ ID NO: 107871 - RNA, 23 nt, synthetic construct
  source 1..23: mol_type = other RNA
tggtggtggtcagcactgtggcg

SEQ ID NO: 107872 - RNA, 23 nt, synthetic construct
  source 1..23: mol_type = other RNA
tagaggagggagtcactgtgctg

SEQ ID NO: 107873 - RNA, 23 nt, synthetic construct
  source 1..23: mol_type = other RNA
tcaccgtgtggggactgctgggg

SEQ ID NO: 107874 - RNA, 23 nt, synthetic construct
  source 1..23: mol_type = other RNA
tgggctgctcacagactgcccct

SEQ ID NO: 107875 - RNA, 23 nt, synthetic construct
  source 1..23: mol_type = other RNA
tttgcagtccctggactggagaa

SEQ ID NO: 107876 - RNA, 23 nt, synthetic construct
  source 1..23: mol_type = other RNA
tggaggagggggtgactgtgaag

SEQ ID NO: 107877 - RNA, 23 nt, synthetic construct
  source 1..23: mol_type = other RNA
tggtggtggtcagcactgtgggg

SEQ ID NO: 107878 - RNA, 23 nt, synthetic construct
  source 1..23: mol_type = other RNA
tagaggagggagtcactgtgctg

SEQ ID NO: 107879 - RNA, 23 nt, synthetic construct
  source 1..23: mol_type = other RNA
tcaccgtgtggggactgctgggg

SEQ ID NO: 107880 - RNA, 23 nt, synthetic construct
  source 1..23: mol_type = other RNA
tccgtggatccagtggatgcagt

SEQ ID NO: 107881 - RNA, 23 nt, synthetic construct
  source 1..23: mol_type = other RNA
tgtggggccagtggctgcagttg

SEQ ID NO: 107882 - RNA, 23 nt, synthetic construct
  source 1..23: mol_type = other RNA
tttgcagtccctggactggagga

SEQ ID NO: 107883 - RNA, 23 nt, synthetic construct
  source 1..23: mol_type = other RNA
tgaggagggggtggctgtgaagc

SEQ ID NO: 107884 - RNA, 23 nt, synthetic construct
  source 1..23: mol_type = other RNA
tggtggtccccgggatggaggag

SEQ ID NO: 107885 - RNA, 23 nt, synthetic construct
  source 1..23: mol_type = other RNA
tgtggctgtggtggtcagcactg

SEQ ID NO: 107886 - RNA, 23 nt, synthetic construct
  source 1..23: mol_type = other RNA
taagccagtgggtctcagggtgg

SEQ ID NO: 107887 - RNA, 23 nt, synthetic construct
  source 1..23: mol_type = other RNA
ttgggagctggggaagccagtgg

SEQ ID NO: 107888 - RNA, 23 nt, synthetic construct
  source 1..23: mol_type = other RNA
tgccggagagggatggcattgtc

SEQ ID NO: 107889 - RNA, 23 nt, synthetic construct
  source 1..23: mol_type = other RNA
taggctttgggtccagcaggacg

SEQ ID NO: 107890 - RNA, 23 nt, synthetic construct
  source 1..23: mol_type = other RNA
tgaggatctggtcctcagggcag

SEQ ID NO: 107891 - RNA, 23 nt, synthetic construct
  source 1..23: mol_type = other RNA
tacacagctgaggtctgcagcgg

SEQ ID NO: 107892 - RNA, 23 nt, synthetic construct
  source 1..23: mol_type = other RNA
tgggaggggcaaggccaaggtgg

SEQ ID NO: 107893 - RNA, 23 nt, synthetic construct
  source 1..23: mol_type = other RNA
tcagcttcctggcagcagctggc

SEQ ID NO: 107894 - RNA, 23 nt, synthetic construct
  source 1..23: mol_type = other RNA
ttccagcaccagcccctgggcct

SEQ ID NO: 107895 - RNA, 23 nt, synthetic construct
  source 1..23: mol_type = other RNA
tctccagcaccagcccctgggcc

SEQ ID NO: 107896 - RNA, 23 nt, synthetic construct
  source 1..23: mol_type = other RNA
tcctccagcaccagcccctgggc

SEQ ID NO: 107897 - RNA, 23 nt, synthetic construct
  source 1..23: mol_type = other RNA
tgcctccagcaccagcccctggg

SEQ ID NO: 107898 - RNA, 23 nt, synthetic construct
  source 1..23: mol_type = other RNA
tatccagctccagcagggcactg

SEQ ID NO: 107899 - RNA, 23 nt, synthetic construct
  source 1..23: mol_type = other RNA
tgccccccggagcaggtgcagga

SEQ ID NO: 107900 - RNA, 23 nt, synthetic construct
  source 1..23: mol_type = other RNA
tagccccccggagcaggtgcagg

SEQ ID NO: 107901 - RNA, 23 nt, synthetic construct
  source 1..23: mol_type = other RNA
tccgccctgcacagagcaggtgc

SEQ ID NO: 107902 - RNA, 23 nt, synthetic construct
  source 1..23: mol_type = other RNA
ttggcaccagctgcaccagcagc

SEQ ID NO: 107903 - RNA, 23 nt, synthetic construct
  source 1..23: mol_type = other RNA
tgagtggcaccagctgcaccagc

SEQ ID NO: 107904 - RNA, 23 nt, synthetic construct
  source 1..23: mol_type = other RNA
tgccacagccttcctgatgatgg

SEQ ID NO: 107905 - RNA, 23 nt, synthetic construct
  source 1..23: mol_type = other RNA
tttgtaccagctggaccagcggc

SEQ ID NO: 107906 - RNA, 23 nt, synthetic construct
  source 1..23: mol_type = other RNA
tcccagctcctccagcggcatgt

SEQ ID NO: 107907 - RNA, 23 nt, synthetic construct
  source 1..23: mol_type = other RNA
tgtcgtgccctggctggtggtgg

SEQ ID NO: 107908 - RNA, 23 nt, synthetic construct
  source 1..23: mol_type = other RNA
tgtccctgggctggaggaggggg

SEQ ID NO: 107909 - RNA, 23 nt, synthetic construct
  source 1..23: mol_type = other RNA
tcagttgtggtggtggtggtcag

SEQ ID NO: 107910 - RNA, 23 nt, synthetic construct
  source 1..23: mol_type = other RNA
tggttcctgcagaccaggccaaa

SEQ ID NO: 107911 - RNA, 23 nt, synthetic construct
  source 1..23: mol_type = other RNA
taggaggcggtggccgtggatcc

SEQ ID NO: 107912 - RNA, 23 nt, synthetic construct
  source 1..23: mol_type = other RNA
tgtggaggaggcggtggccgtgg

SEQ ID NO: 107913 - RNA, 23 nt, synthetic construct
  source 1..23: mol_type = other RNA
ttgggtggaggaggcggtggccg

SEQ ID NO: 107914 - RNA, 23 nt, synthetic construct
  source 1..23: mol_type = other RNA
tcctggactggagaagggagtgg

SEQ ID NO: 107915 - RNA, 23 nt, synthetic construct
  source 1..23: mol_type = other RNA
tgtggtgcccagggaggaggagg

SEQ ID NO: 107916 - RNA, 23 nt, synthetic construct
  source 1..23: mol_type = other RNA
tgttgtggtggccgtggtggtaa

SEQ ID NO: 107917 - RNA, 23 nt, synthetic construct
  source 1..23: mol_type = other RNA
tggttgtggtggccgtggtggta

SEQ ID NO: 107918 - RNA, 23 nt, synthetic construct
  source 1..23: mol_type = other RNA
tgtccctgggctggaggaggggg

SEQ ID NO: 107919 - RNA, 23 nt, synthetic construct
  source 1..23: mol_type = other RNA
tcagttgtggtggtggtggtcag

SEQ ID NO: 107920 - RNA, 23 nt, synthetic construct
  source 1..23: mol_type = other RNA
tgtgctgctggtggctgcaggtg

SEQ ID NO: 107921 - RNA, 23 nt, synthetic construct
  source 1..23: mol_type = other RNA
tgctgggtgtggccgtggccgtg

SEQ ID NO: 107922 - RNA, 23 nt, synthetic construct
  source 1..23: mol_type = other RNA
tggttcctgcagaccaggccaaa

SEQ ID NO: 107923 - RNA, 23 nt, synthetic construct
  source 1..23: mol_type = other RNA
tgtgtggtggccgtgctggtcag

SEQ ID NO: 107924 - RNA, 23 nt, synthetic construct
  source 1..23: mol_type = other RNA
tgaggaagtggctttggaactgg

SEQ ID NO: 107925 - RNA, 23 nt, synthetic construct
  source 1..23: mol_type = other RNA
tgaggaggaagtggctttggaac

SEQ ID NO: 107926 - RNA, 23 nt, synthetic construct
  source 1..23: mol_type = other RNA
ttggctgtgcttgtcagcactgg

SEQ ID NO: 107927 - RNA, 23 nt, synthetic construct
  source 1..23: mol_type = other RNA
tagtggctgctgtggtcagctct

SEQ ID NO: 107928 - RNA, 23 nt, synthetic construct
  source 1..23: mol_type = other RNA
taggaggcggtggccgtggatcc

SEQ ID NO: 107929 - RNA, 23 nt, synthetic construct
  source 1..23: mol_type = other RNA
tgtggaggaggcggtggccgtgg

SEQ ID NO: 107930 - RNA, 23 nt, synthetic construct
  source 1..23: mol_type = other RNA
tcgggtggaggaggcggtggccg

SEQ ID NO: 107931 - RNA, 23 nt, synthetic construct
  source 1..23: mol_type = other RNA
tgtgtggtggccgtgctggtcag

SEQ ID NO: 107932 - RNA, 23 nt, synthetic construct
  source 1..23: mol_type = other RNA
tgtccctgggctggaggaggggg

SEQ ID NO: 107933 - RNA, 23 nt, synthetic construct
  source 1..23: mol_type = other RNA
tcagttgtggtggtggtggtcag

SEQ ID NO: 107934 - RNA, 23 nt, synthetic construct
  source 1..23: mol_type = other RNA
tgtgctgctggtggctgcaggtg

SEQ ID NO: 107935 - RNA, 23 nt, synthetic construct
  source 1..23: mol_type = other RNA
ttgtggtcctggaggtgcccctg

SEQ ID NO: 107936 - RNA, 23 nt, synthetic construct
  source 1..23: mol_type = other RNA
tggttcctgcagaccaggccaaa

SEQ ID NO: 107937 - RNA, 23 nt, synthetic construct
  source 1..23: mol_type = other RNA
taggaggcggtggccgtggatcc

SEQ ID NO: 107938 - RNA, 23 nt, synthetic construct
  source 1..23: mol_type = other RNA
tgtggaggaggcggtggccgtgg

SEQ ID NO: 107939 - RNA, 23 nt, synthetic construct
  source 1..23: mol_type = other RNA
ttgggtggaggaggcggtggccg

SEQ ID NO: 107940 - RNA, 23 nt, synthetic construct
  source 1..23: mol_type = other RNA
tcctggactggagaagggagtgg

SEQ ID NO: 107941 - RNA, 23 nt, synthetic construct
  source 1..23: mol_type = other RNA
tgtggtgcccagggaggaggagg

SEQ ID NO: 107942 - RNA, 23 nt, synthetic construct
  source 1..23: mol_type = other RNA
tgttgtggtggccgtggtggtaa

SEQ ID NO: 107943 - RNA, 23 nt, synthetic construct
  source 1..23: mol_type = other RNA
tggttgtggtggccgtggtggta

SEQ ID NO: 107944 - RNA, 23 nt, synthetic construct
  source 1..23: mol_type = other RNA
tgggctggaggagggggtgactg

SEQ ID NO: 107945 - RNA, 23 nt, synthetic construct
  source 1..23: mol_type = other RNA
tgtccctgggctggaggaggggg

SEQ ID NO: 107946 - RNA, 23 nt, synthetic construct
  source 1..23: mol_type = other RNA
tcagttgtggtggtggtggtcag

SEQ ID NO: 107947 - RNA, 23 nt, synthetic construct
  source 1..23: mol_type = other RNA
tgtgctgctggtggctgcaggtg

SEQ ID NO: 107948 - RNA, 23 nt, synthetic construct
  source 1..23: mol_type = other RNA
tgtccctggggaagggggtgact

SEQ ID NO: 107949 - RNA, 23 nt, synthetic construct
  source 1..23: mol_type = other RNA
tgctgggtgtggccgtggccgtg

SEQ ID NO: 107950 - RNA, 23 nt, synthetic construct
  source 1..23: mol_type = other RNA
tggttcctgcagaccaggccaaa

SEQ ID NO: 107951 - RNA, 23 nt, synthetic construct
  source 1..23: mol_type = other RNA
tgaggaagtggctttggaactgg

SEQ ID NO: 107952 - RNA, 23 nt, synthetic construct
  source 1..23: mol_type = other RNA
tgaggaggaagtggctttggaac

SEQ ID NO: 107953 - RNA, 23 nt, synthetic construct
  source 1..23: mol_type = other RNA
ttggctgtgcttgtcagcactgg

SEQ ID NO: 107954 - RNA, 23 nt, synthetic construct
  source 1..23: mol_type = other RNA
tagtggctgctgtggtcagctct

SEQ ID NO: 107955 - RNA, 23 nt, synthetic construct
  source 1..23: mol_type = other RNA
taggaggcggtggccgtggatcc

SEQ ID NO: 107956 - RNA, 23 nt, synthetic construct
  source 1..23: mol_type = other RNA
tgtggaggaggcggtggccgtgg

SEQ ID NO: 107957 - RNA, 23 nt, synthetic construct
  source 1..23: mol_type = other RNA
ttgggtggaggaggcggtggccg

SEQ ID NO: 107958 - RNA, 23 nt, synthetic construct
  source 1..23: mol_type = other RNA
tgtggtgcccagggaggaggagg

SEQ ID NO: 107959 - RNA, 23 nt, synthetic construct
  source 1..23: mol_type = other RNA
tgtccctgggctggaggaggggg

SEQ ID NO: 107960 - RNA, 23 nt, synthetic construct
  source 1..23: mol_type = other RNA
tcagttgtggtggtggtggtcag

SEQ ID NO: 107961 - RNA, 23 nt, synthetic construct
  source 1..23: mol_type = other RNA
tagcactggggtgatgggtgttg

SEQ ID NO: 107962 - RNA, 23 nt, synthetic construct
  source 1..23: mol_type = other RNA
tgtgtggtggccgtgctggtcag

SEQ ID NO: 107963 - RNA, 23 nt, synthetic construct
  source 1..23: mol_type = other RNA
tgaggaggaagtggctttggagc

SEQ ID NO: 107964 - RNA, 23 nt, synthetic construct
  source 1..23: mol_type = other RNA
ttggctgtgcttgtcagcactgg

SEQ ID NO: 107965 - RNA, 23 nt, synthetic construct
  source 1..23: mol_type = other RNA
tggtccacagggtggaggagggg

SEQ ID NO: 107966 - RNA, 23 nt, synthetic construct
  source 1..23: mol_type = other RNA
ttgggtgtggtggtctgtgctgg

SEQ ID NO: 107967 - RNA, 23 nt, synthetic construct
  source 1..23: mol_type = other RNA
tctggggtggaggacagggtggc

SEQ ID NO: 107968 - RNA, 23 nt, synthetic construct
  source 1..23: mol_type = other RNA
taggaggcggtggccgtggaacc

SEQ ID NO: 107969 - RNA, 23 nt, synthetic construct
  source 1..23: mol_type = other RNA
tgtggaggaggcggtggccgtgg

SEQ ID NO: 107970 - RNA, 23 nt, synthetic construct
  source 1..23: mol_type = other RNA
tagaggctgagattcccaaagcg

SEQ ID NO: 107971 - RNA, 23 nt, synthetic construct
  source 1..23: mol_type = other RNA
tgggcggcagcggcagtggcaga

SEQ ID NO: 107972 - RNA, 23 nt, synthetic construct
  source 1..23: mol_type = other RNA
tcagcgggcggcagcggcagtgg

SEQ ID NO: 107973 - RNA, 23 nt, synthetic construct
  source 1..23: mol_type = other RNA
tgcgcgggggcagcgggcggcag

SEQ ID NO: 107974 - RNA, 23 nt, synthetic construct
  source 1..23: mol_type = other RNA
tcaccggggctgcggggctggca

SEQ ID NO: 107975 - RNA, 23 nt, synthetic construct
  source 1..23: mol_type = other RNA
ttggtgggcatggggtgggggtg

SEQ ID NO: 107976 - RNA, 23 nt, synthetic construct
  source 1..23: mol_type = other RNA
ttgtggtgggcatggggtggggg

SEQ ID NO: 107977 - RNA, 23 nt, synthetic construct
  source 1..23: mol_type = other RNA
tgggcacctcaaggcggcccctg

SEQ ID NO: 107978 - RNA, 23 nt, synthetic construct
  source 1..23: mol_type = other RNA
tcagggcacctcaaggcggcccc

SEQ ID NO: 107979 - RNA, 23 nt, synthetic construct
  source 1..23: mol_type = other RNA
tagcctccaggctctggcagggc

SEQ ID NO: 107980 - RNA, 23 nt, synthetic construct
  source 1..23: mol_type = other RNA
ttaagcctccaggctctggcagg

SEQ ID NO: 107981 - RNA, 23 nt, synthetic construct
  source 1..23: mol_type = other RNA
tctgggggcaggtggttgtgttg

SEQ ID NO: 107982 - RNA, 23 nt, synthetic construct
  source 1..23: mol_type = other RNA
tggcctgggcctctgctgagtac

SEQ ID NO: 107983 - RNA, 23 nt, synthetic construct
  source 1..23: mol_type = other RNA
ttggacccgcctctcctggcagc

SEQ ID NO: 107984 - RNA, 23 nt, synthetic construct
  source 1..23: mol_type = other RNA
tgacagcagtggcctcctgggcc

SEQ ID NO: 107985 - RNA, 23 nt, synthetic construct
  source 1..23: mol_type = other RNA
taggggcaaggccaaggtgggcc

SEQ ID NO: 107986 - RNA, 23 nt, synthetic construct
  source 1..23: mol_type = other RNA
tggcagcagctggccttgcctgg

SEQ ID NO: 107987 - RNA, 23 nt, synthetic construct
  source 1..23: mol_type = other RNA
tagcttcctggcagcagctggcc

SEQ ID NO: 107988 - RNA, 23 nt, synthetic construct
  source 1..23: mol_type = other RNA
tgagaggctcccaggcagcttag

SEQ ID NO: 107989 - RNA, 23 nt, synthetic construct
  source 1..23: mol_type = other RNA
tcaggtcctggcactgccatagc

SEQ ID NO: 107990 - RNA, 23 nt, synthetic construct
  source 1..23: mol_type = other RNA
tatggggtgggggtgggtgtgct

SEQ ID NO: 107991 - RNA, 23 nt, synthetic construct
  source 1..23: mol_type = other RNA
taaggttgtggcactcagcaaag

SEQ ID NO: 107992 - RNA, 23 nt, synthetic construct
  source 1..23: mol_type = other RNA
ttgggtgtggctgtggctgtggt

SEQ ID NO: 107993 - RNA, 23 nt, synthetic construct
  source 1..23: mol_type = other RNA
ttccccacccggccctctcgcca

SEQ ID NO: 107994 - RNA, 23 nt, synthetic construct
  source 1..23: mol_type = other RNA
tgtggtggtggtggtcagcactg

SEQ ID NO: 107995 - RNA, 23 nt, synthetic construct
  source 1..23: mol_type = other RNA
tgtggtggtggtggtcagcactg

SEQ ID NO: 107996 - RNA, 23 nt, synthetic construct
  source 1..23: mol_type = other RNA
tgtggtggtggtggtcagcactg

SEQ ID NO: 107997 - RNA, 23 nt, synthetic construct
  source 1..23: mol_type = other RNA
tgtggtggtggtggtcagcactg

SEQ ID NO: 107998 - RNA, 23 nt, synthetic construct
  source 1..23: mol_type = other RNA
tgtggtggtggtggtcagcactc

SEQ ID NO: 107999 - RNA, 23 nt, synthetic construct
  source 1..23: mol_type = other RNA
tcggggtggccgtggggccagtg

SEQ ID NO: 108000 - RNA, 23 nt, synthetic construct
  source 1..23: mol_type = other RNA
tcggggtggccgtggggccagtg

SEQ ID NO: 108001 - RNA, 23 nt, synthetic construct
  source 1..23: mol_type = other RNA
tgtccccacacaggccacaggtc

SEQ ID NO: 108002 - RNA, 23 nt, synthetic construct
  source 1..23: mol_type = other RNA
tccccacccggccctctcgccac

SEQ ID NO: 108003 - RNA, 23 nt, synthetic construct
  source 1..23: mol_type = other RNA
tgcaggtcagccccgtctccagg

SEQ ID NO: 108004 - RNA, 23 nt, synthetic construct
  source 1..23: mol_type = other RNA
tctgcactgcttctgggcccagg

SEQ ID NO: 108005 - RNA, 23 nt, synthetic construct
  source 1..23: mol_type = other RNA
tccctgaggttgggaagtccacg

SEQ ID NO: 108006 - RNA, 23 nt, synthetic construct
  source 1..23: mol_type = other RNA
tcagcagccctgatgttttcaaa

SEQ ID NO: 108007 - RNA, 23 nt, synthetic construct
  source 1..23: mol_type = other RNA
tctttggtgcccagcacatcttg

SEQ ID NO: 108008 - RNA, 23 nt, synthetic construct
  source 1..23: mol_type = other RNA
tttcaaaagtttccatgtccccg

SEQ ID NO: 108009 - RNA, 23 nt, synthetic construct
  source 1..23: mol_type = other RNA
tagctgtgggtgtggtggctgtg

SEQ ID NO: 108010 - RNA, 23 nt, synthetic construct
  source 1..23: mol_type = other RNA
tagctgtgggtgtggtggctgtg

SEQ ID NO: 108011 - RNA, 23 nt, synthetic construct
  source 1..23: mol_type = other RNA
tagctgtgggtgtggtggctgtg

SEQ ID NO: 108012 - RNA, 23 nt, synthetic construct
  source 1..23: mol_type = other RNA
tagctgtgggtgtggtggctgtg

SEQ ID NO: 108013 - RNA, 23 nt, synthetic construct
  source 1..23: mol_type = other RNA
tagctgtgggtgtggtggctgtg

SEQ ID NO: 108014 - RNA, 23 nt, synthetic construct
  source 1..23: mol_type = other RNA
ttccagcaccgtgcctggggggc

SEQ ID NO: 108015 - RNA, 23 nt, synthetic construct
  source 1..23: mol_type = other RNA
tccgcagaccctgcccttgtagt

SEQ ID NO: 108016 - RNA, 23 nt, synthetic construct
  source 1..23: mol_type = other RNA
tgcccccagcagccctgatgttt

SEQ ID NO: 108017 - RNA, 23 nt, synthetic construct
  source 1..23: mol_type = other RNA
tttgcccccagcagccctgatgt

SEQ ID NO: 108018 - RNA, 23 nt, synthetic construct
  source 1..23: mol_type = other RNA
tgtggtggccgtggtggtcagca

SEQ ID NO: 108019 - RNA, 23 nt, synthetic construct
  source 1..23: mol_type = other RNA
tgctgtgggtgtggtggctgtgc

SEQ ID NO: 108020 - RNA, 23 nt, synthetic construct
  source 1..23: mol_type = other RNA
ttagctgtgggtgtggtggctgt

SEQ ID NO: 108021 - RNA, 23 nt, synthetic construct
  source 1..23: mol_type = other RNA
tgctgtgggtgtggtggctgtgc

SEQ ID NO: 108022 - RNA, 23 nt, synthetic construct
  source 1..23: mol_type = other RNA
ttagctgtgggtgtggtggctgt

SEQ ID NO: 108023 - RNA, 23 nt, synthetic construct
  source 1..23: mol_type = other RNA
tgctgtgggtgtggtggctgtgc

SEQ ID NO: 108024 - RNA, 23 nt, synthetic construct
  source 1..23: mol_type = other RNA
ttagctgtgggtgtggtggctgt

SEQ ID NO: 108025 - RNA, 23 nt, synthetic construct
  source 1..23: mol_type = other RNA
tgctgtgggtgtggtggctgtgc

SEQ ID NO: 108026 - RNA, 23 nt, synthetic construct
  source 1..23: mol_type = other RNA
ttagctgtgggtgtggtggctgt

SEQ ID NO: 108027 - RNA, 23 nt, synthetic construct
  source 1..23: mol_type = other RNA
tgctgtgggtgtggtggctgtgc

SEQ ID NO: 108028 - RNA, 23 nt, synthetic construct
  source 1..23: mol_type = other RNA
ttagctgtgggtgtggtggctgt

SEQ ID NO: 108029 - RNA, 23 nt, synthetic construct
  source 1..23: mol_type = other RNA
tccctgatgttttcaaaagtttc

SEQ ID NO: 108030 - RNA, 23 nt, synthetic construct
  source 1..23: mol_type = other RNA
ttcttgcccccagcagccctgat

SEQ ID NO: 108031 - RNA, 23 nt, synthetic construct
  source 1..23: mol_type = other RNA
tcccctgaggttgggaagtccac

SEQ ID NO: 108032 - RNA, 23 nt, synthetic construct
  source 1..23: mol_type = other RNA
tagcagccctgatgttttcaaaa

SEQ ID NO: 108033 - RNA, 23 nt, synthetic construct
  source 1..23: mol_type = other RNA
tggcagtggctgtagtcgtcaca

SEQ ID NO: 108034 - RNA, 23 nt, synthetic construct
  source 1..23: mol_type = other RNA
tcctggggggcagaagcagccgt

SEQ ID NO: 108035 - RNA, 23 nt, synthetic construct
  source 1..23: mol_type = other RNA
tcacagttgcaggtgtcaaacat

SEQ ID NO: 108036 - RNA, 23 nt, synthetic construct
  source 1..23: mol_type = other RNA
tttggagcaggtggtgccggtgg

SEQ ID NO: 108037 - RNA, 23 nt, synthetic construct
  source 1..23: mol_type = other RNA
tatgttttcaaaagtttccatgt

SEQ ID NO: 108038 - RNA, 23 nt, synthetic construct
  source 1..23: mol_type = other RNA
tgatgttttcaaaagtttccatg

SEQ ID NO: 108039 - RNA, 23 nt, synthetic construct
  source 1..23: mol_type = other RNA
ttgatgttttcaaaagtttccat

SEQ ID NO: 108040 - RNA, 23 nt, synthetic construct
  source 1..23: mol_type = other RNA
tctgggctggaggagggggtggc

SEQ ID NO: 108041 - RNA, 23 nt, synthetic construct
  source 1..23: mol_type = other RNA
tctgggctggaggagggggtggc

SEQ ID NO: 108042 - RNA, 23 nt, synthetic construct
  source 1..23: mol_type = other RNA
tctgggctggaggagggggtggc

SEQ ID NO: 108043 - RNA, 23 nt, synthetic construct
  source 1..23: mol_type = other RNA
tctgggctggaggagggggtgac

SEQ ID NO: 108044 - RNA, 23 nt, synthetic construct
  source 1..23: mol_type = other RNA
tctgggctggaggagggggtggc

SEQ ID NO: 108045 - RNA, 23 nt, synthetic construct
  source 1..23: mol_type = other RNA
tgggcagccgggcctggaagact

SEQ ID NO: 108046 - RNA, 23 nt, synthetic construct
  source 1..23: mol_type = other RNA
ttcacaggagtagcagcagccgg

SEQ ID NO: 108047 - RNA, 23 nt, synthetic construct
  source 1..23: mol_type = other RNA
tctcacaggagtagcagcagccg

SEQ ID NO: 108048 - RNA, 23 nt, synthetic construct
  source 1..23: mol_type = other RNA
ttggggctgctgggcagcagggt

SEQ ID NO: 108049 - RNA, 23 nt, synthetic construct
  source 1..23: mol_type = other RNA
ttggggctgctgggcagcagggt

SEQ ID NO: 108050 - RNA, 23 nt, synthetic construct
  source 1..23: mol_type = other RNA
ttggggctgctgggcagcagggt

SEQ ID NO: 108051 - RNA, 23 nt, synthetic construct
  source 1..23: mol_type = other RNA
ttggggctgctgggcagcagggt

SEQ ID NO: 108052 - RNA, 23 nt, synthetic construct
  source 1..23: mol_type = other RNA
tgaggacagcgcggcgcacaggc

SEQ ID NO: 108053 - RNA, 23 nt, synthetic construct
  source 1..23: mol_type = other RNA
tgctgctgggcagcagggtcgag

SEQ ID NO: 108054 - RNA, 23 nt, synthetic construct
  source 1..23: mol_type = other RNA
tgctgctgggcagcagggtcgag

SEQ ID NO: 108055 - RNA, 23 nt, synthetic construct
  source 1..23: mol_type = other RNA
tgctgctgggcagcagggtcgag

SEQ ID NO: 108056 - RNA, 23 nt, synthetic construct
  source 1..23: mol_type = other RNA
tgctgctgggcagcagggtcgag

SEQ ID NO: 108057 - RNA, 23 nt, synthetic construct
  source 1..23: mol_type = other RNA
tgcggcacaggcgtgcacatagg

SEQ ID NO: 108058 - RNA, 23 nt, synthetic construct
  source 1..23: mol_type = other RNA
tgccagtcactgcacactccccg

SEQ ID NO: 108059 - RNA, 23 nt, synthetic construct
  source 1..23: mol_type = other RNA
ttggtggtggtggccgtctccag

SEQ ID NO: 108060 - RNA, 23 nt, synthetic construct
  source 1..23: mol_type = other RNA
tggggctgctgggcagcagggtc

SEQ ID NO: 108061 - RNA, 23 nt, synthetic construct
  source 1..23: mol_type = other RNA
tggggctgctgggcagcagggtc

SEQ ID NO: 108062 - RNA, 23 nt, synthetic construct
  source 1..23: mol_type = other RNA
tggggctgctgggcagcagggtc

SEQ ID NO: 108063 - RNA, 23 nt, synthetic construct
  source 1..23: mol_type = other RNA
tggggctgctgggcagcagggtc

SEQ ID NO: 108064 - RNA, 23 nt, synthetic construct
  source 1..23: mol_type = other RNA
tgactgaggaggacacagtggac

SEQ ID NO: 108065 - RNA, 23 nt, synthetic construct
  source 1..23: mol_type = other RNA
tggactgaggaggacacagtgga

SEQ ID NO: 108066 - RNA, 23 nt, synthetic construct
  source 1..23: mol_type = other RNA
tttcctgaggctccccctgcagc

SEQ ID NO: 108067 - RNA, 23 nt, synthetic construct
  source 1..23: mol_type = other RNA
tactgcttctgggcccaggactt

SEQ ID NO: 108068 - RNA, 23 nt, synthetic construct
  source 1..23: mol_type = other RNA
tcactgcttctgggcccaggact

SEQ ID NO: 108069 - RNA, 23 nt, synthetic construct
  source 1..23: mol_type = other RNA
ttgctgcactgcttctgggccca

SEQ ID NO: 108070 - RNA, 23 nt, synthetic construct
  source 1..23: mol_type = other RNA
tatgctgcactgcttctgggccc

SEQ ID NO: 108071 - RNA, 23 nt, synthetic construct
  source 1..23: mol_type = other RNA
tcggatcctgtagttgtagcaca

SEQ ID NO: 108072 - RNA, 23 nt, synthetic construct
  source 1..23: mol_type = other RNA
taccctgtgcttttctgcagaga

SEQ ID NO: 108073 - RNA, 23 nt, synthetic construct
  source 1..23: mol_type = other RNA
ttcacagccaggggcaggggagg

SEQ ID NO: 108074 - RNA, 23 nt, synthetic construct
  source 1..23: mol_type = other RNA
taatgccctgcagaagcagggag

SEQ ID NO: 108075 - RNA, 23 nt, synthetic construct
  source 1..23: mol_type = other RNA
tcagcaggtgcactggtgctgca

SEQ ID NO: 108076 - RNA, 23 nt, synthetic construct
  source 1..23: mol_type = other RNA
tatggcattgtcacagccagggg

SEQ ID NO: 108077 - RNA, 23 nt, synthetic construct
  source 1..23: mol_type = other RNA
tgaggggcaggcagccagagtgc

SEQ ID NO: 108078 - RNA, 23 nt, synthetic construct
  source 1..23: mol_type = other RNA
tagctgcaccagcagctgcagcc

SEQ ID NO: 108079 - RNA, 23 nt, synthetic construct
  source 1..23: mol_type = other RNA
tttcccacacaggccgcacatct

SEQ ID NO: 108080 - RNA, 23 nt, synthetic construct
  source 1..23: mol_type = other RNA
tggcgcacaggcagtcctcgctc

SEQ ID NO: 108081 - RNA, 23 nt, synthetic construct
  source 1..23: mol_type = other RNA
tttgatggccttggagcaggtgg

SEQ ID NO: 108082 - RNA, 23 nt, synthetic construct
  source 1..23: mol_type = other RNA
tccgtgcagttctccagggtcca

SEQ ID NO: 108083 - RNA, 23 nt, synthetic construct
  source 1..23: mol_type = other RNA
tggggttggccgtgcaggggtcc

SEQ ID NO: 108084 - RNA, 23 nt, synthetic construct
  source 1..23: mol_type = other RNA
tggctgctgggcagcagggtcga

SEQ ID NO: 108085 - RNA, 23 nt, synthetic construct
  source 1..23: mol_type = other RNA
tggctgctgggcagcagggtcga

SEQ ID NO: 108086 - RNA, 23 nt, synthetic construct
  source 1..23: mol_type = other RNA
tggctgctgggcagcagggtcga

SEQ ID NO: 108087 - RNA, 23 nt, synthetic construct
  source 1..23: mol_type = other RNA
tggctgctgggcagcagggtcga

SEQ ID NO: 108088 - RNA, 23 nt, synthetic construct
  source 1..23: mol_type = other RNA
tccaggggcaggggagggcgagg

SEQ ID NO: 108089 - RNA, 23 nt, synthetic construct
  source 1..23: mol_type = other RNA
tgcaggtgcactggtgctgcatg

SEQ ID NO: 108090 - RNA, 23 nt, synthetic construct
  source 1..23: mol_type = other RNA
ttcctggcagcaggtgcactggt

SEQ ID NO: 108091 - RNA, 23 nt, synthetic construct
  source 1..23: mol_type = other RNA
tgctgcaccagcagctgcagccc

SEQ ID NO: 108092 - RNA, 23 nt, synthetic construct
  source 1..23: mol_type = other RNA
ttgcccccagcagccctgatgtt

SEQ ID NO: 108093 - RNA, 23 nt, synthetic construct
  source 1..23: mol_type = other RNA
tggccctgggtctctgcctgcgg

SEQ ID NO: 108094 - RNA, 23 nt, synthetic construct
  source 1..23: mol_type = other RNA
tgccccgtctccaggctgcaggt

SEQ ID NO: 108095 - RNA, 23 nt, synthetic construct
  source 1..23: mol_type = other RNA
tggtggtggtggtggccgtctcc

SEQ ID NO: 108096 - RNA, 23 nt, synthetic construct
  source 1..23: mol_type = other RNA
tcaggctgcaggtcagcacctgc

SEQ ID NO: 108097 - RNA, 23 nt, synthetic construct
  source 1..23: mol_type = other RNA
tgcagggacacagaagggcgtgc

SEQ ID NO: 108098 - RNA, 23 nt, synthetic construct
  source 1..23: mol_type = other RNA
tacagggcaggggcttgcactgc

SEQ ID NO: 108099 - RNA, 23 nt, synthetic construct
  source 1..23: mol_type = other RNA
tctgcaggtcagcacctgcccga

SEQ ID NO: 108100 - RNA, 23 nt, synthetic construct
  source 1..23: mol_type = other RNA
tctgggtggtggtggtggtggcc

SEQ ID NO: 108101 - RNA, 23 nt, synthetic construct
  source 1..23: mol_type = other RNA
tggccggggtgctggggcagtgg

SEQ ID NO: 108102 - RNA, 23 nt, synthetic construct
  source 1..23: mol_type = other RNA
tggccggggtgctggggcagtgg

SEQ ID NO: 108103 - RNA, 23 nt, synthetic construct
  source 1..23: mol_type = other RNA
tggccggggtgctggggcagtgg

SEQ ID NO: 108104 - RNA, 23 nt, synthetic construct
  source 1..23: mol_type = other RNA
tggccggggtgctggggcagtgg

SEQ ID NO: 108105 - RNA, 23 nt, synthetic construct
  source 1..23: mol_type = other RNA
tcgtggaggatgctgcactgctt

SEQ ID NO: 108106 - RNA, 23 nt, synthetic construct
  source 1..23: mol_type = other RNA
ttccagtggacgcagtcgtagtg

SEQ ID NO: 108107 - RNA, 23 nt, synthetic construct
  source 1..23: mol_type = other RNA
ttccagtggacgcagtcgtagtg

SEQ ID NO: 108108 - RNA, 23 nt, synthetic construct
  source 1..23: mol_type = other RNA
tttgtgaggatccaggtcgtccc

SEQ ID NO: 108109 - RNA, 23 nt, synthetic construct
  source 1..23: mol_type = other RNA
tttgtgaggatccaggtcgtccc

SEQ ID NO: 108110 - RNA, 23 nt, synthetic construct
  source 1..23: mol_type = other RNA
tgctcacagcccatggtcaccac

SEQ ID NO: 108111 - RNA, 23 nt, synthetic construct
  source 1..23: mol_type = other RNA
tgctcacagcccatggtcaccac

SEQ ID NO: 108112 - RNA, 23 nt, synthetic construct
  source 1..23: mol_type = other RNA
tgttggggccagcgtgggtggct

SEQ ID NO: 108113 - RNA, 23 nt, synthetic construct
  source 1..23: mol_type = other RNA
ttcacagcaaagcacacgcacgt

SEQ ID NO: 108114 - RNA, 23 nt, synthetic construct
  source 1..23: mol_type = other RNA
tgctggtggctggggtactgggg

SEQ ID NO: 108115 - RNA, 23 nt, synthetic construct
  source 1..23: mol_type = other RNA
ttgagggctggaaagggctggag

SEQ ID NO: 108116 - RNA, 23 nt, synthetic construct
  source 1..23: mol_type = other RNA
tagctttgtgaggatccaggtcg

SEQ ID NO: 108117 - RNA, 23 nt, synthetic construct
  source 1..23: mol_type = other RNA
tcctgcaacccctgaggttggga

SEQ ID NO: 108118 - RNA, 23 nt, synthetic construct
  source 1..23: mol_type = other RNA
tgctgttgtggtcagctctgtga

SEQ ID NO: 108119 - RNA, 23 nt, synthetic construct
  source 1..23: mol_type = other RNA
tgctgttgtggtcagctctgtga

SEQ ID NO: 108120 - RNA, 23 nt, synthetic construct
  source 1..23: mol_type = other RNA
tgctgttgtggtcagctctgtga

SEQ ID NO: 108121 - RNA, 23 nt, synthetic construct
  source 1..23: mol_type = other RNA
tgccctgggtctctgcctgcggc

SEQ ID NO: 108122 - RNA, 23 nt, synthetic construct
  source 1..23: mol_type = other RNA
tggggccggggaggggccacagg

SEQ ID NO: 108123 - RNA, 23 nt, synthetic construct
  source 1..23: mol_type = other RNA
tctggggccggggaggggccaca

SEQ ID NO: 108124 - RNA, 23 nt, synthetic construct
  source 1..23: mol_type = other RNA
ttgccccacctgtgccagggtcc

SEQ ID NO: 108125 - RNA, 23 nt, synthetic construct
  source 1..23: mol_type = other RNA
tctgccccacctgtgccagggtc

SEQ ID NO: 108126 - RNA, 23 nt, synthetic construct
  source 1..23: mol_type = other RNA
tcagcaaagcacacgcacgttgt

SEQ ID NO: 108127 - RNA, 23 nt, synthetic construct
  source 1..23: mol_type = other RNA
tcgtggagctggtggctggggta

SEQ ID NO: 108128 - RNA, 23 nt, synthetic construct
  source 1..23: mol_type = other RNA
tgagggctggaaagggctggagt

SEQ ID NO: 108129 - RNA, 23 nt, synthetic construct
  source 1..23: mol_type = other RNA
tcagctctgtgaggatccaggtc

SEQ ID NO: 108130 - RNA, 23 nt, synthetic construct
  source 1..23: mol_type = other RNA
tgggtggaggaggcggtggccgt

SEQ ID NO: 108131 - RNA, 23 nt, synthetic construct
  source 1..23: mol_type = other RNA
tccggagtggaggaggggtggat

SEQ ID NO: 108132 - RNA, 23 nt, synthetic construct
  source 1..23: mol_type = other RNA
tcagctctgtgaggatccaggtc

SEQ ID NO: 108133 - RNA, 23 nt, synthetic construct
  source 1..23: mol_type = other RNA
tgggtggaggaggcggtggccgt

SEQ ID NO: 108134 - RNA, 23 nt, synthetic construct
  source 1..23: mol_type = other RNA
tgggtggaggaggcggtggccgt

SEQ ID NO: 108135 - RNA, 23 nt, synthetic construct
  source 1..23: mol_type = other RNA
tcagctctgtgaggatccaggtc

SEQ ID NO: 108136 - RNA, 23 nt, synthetic construct
  source 1..23: mol_type = other RNA
tccggagtggaggaggggtggat

SEQ ID NO: 108137 - RNA, 23 nt, synthetic construct
  source 1..23: mol_type = other RNA
tcagctctgtgaggatccaggtc

SEQ ID NO: 108138 - RNA, 23 nt, synthetic construct
  source 1..23: mol_type = other RNA
tcagctctgtgaggatccaggtg

SEQ ID NO: 108139 - RNA, 23 nt, synthetic construct
  source 1..23: mol_type = other RNA
tgggtggaggaggcggtggccgt

SEQ ID NO: 108140 - RNA, 23 nt, synthetic construct
  source 1..23: mol_type = other RNA
tgcggggctggcagtggggggtg

SEQ ID NO: 108141 - RNA, 23 nt, synthetic construct
  source 1..23: mol_type = other RNA
tgtgggcatggggtgggggtggg

SEQ ID NO: 108142 - RNA, 23 nt, synthetic construct
  source 1..23: mol_type = other RNA
tgctggacacatctgggcaggat

SEQ ID NO: 108143 - RNA, 23 nt, synthetic construct
  source 1..23: mol_type = other RNA
tccctgcagctggacacatctgg

SEQ ID NO: 108144 - RNA, 23 nt, synthetic construct
  source 1..23: mol_type = other RNA
tgagtggaggaggcggtggccgt

SEQ ID NO: 108145 - RNA, 23 nt, synthetic construct
  source 1..23: mol_type = other RNA
tgcaggtcctggcactgccatag

SEQ ID NO: 108146 - RNA, 23 nt, synthetic construct
  source 1..23: mol_type = other RNA
tagcacctgcccgacctggtcga

SEQ ID NO: 108147 - RNA, 23 nt, synthetic construct
  source 1..23: mol_type = other RNA
ttccagtggatgcagtcgtagtg

SEQ ID NO: 108148 - RNA, 23 nt, synthetic construct
  source 1..23: mol_type = other RNA
tttggcaggctgctggggagcac

SEQ ID NO: 108149 - RNA, 23 nt, synthetic construct
  source 1..23: mol_type = other RNA
taacctgcctgtctggtcttcgt

SEQ ID NO: 108150 - RNA, 23 nt, synthetic construct
  source 1..23: mol_type = other RNA
tggagtggctttggagctggtga

SEQ ID NO: 108151 - RNA, 23 nt, synthetic construct
  source 1..23: mol_type = other RNA
tctctggagtggaggagggtgtg

SEQ ID NO: 108152 - RNA, 23 nt, synthetic construct
  source 1..23: mol_type = other RNA
tggagtggctttggagctggtga

SEQ ID NO: 108153 - RNA, 23 nt, synthetic construct
  source 1..23: mol_type = other RNA
tctctggagtggaggagggtgtg

SEQ ID NO: 108154 - RNA, 23 nt, synthetic construct
  source 1..23: mol_type = other RNA
tggagtggctttggagctggtga

SEQ ID NO: 108155 - RNA, 23 nt, synthetic construct
  source 1..23: mol_type = other RNA
tctctggagtggaggagggtgtg

SEQ ID NO: 108156 - RNA, 23 nt, synthetic construct
  source 1..23: mol_type = other RNA
tggagtggctttggagctggtga

SEQ ID NO: 108157 - RNA, 23 nt, synthetic construct
  source 1..23: mol_type = other RNA
tctctggagtggaggagggtgtg

SEQ ID NO: 108158 - RNA, 23 nt, synthetic construct
  source 1..23: mol_type = other RNA
tccgtggcctccaccaccccgct

SEQ ID NO: 108159 - RNA, 23 nt, synthetic construct
  source 1..23: mol_type = other RNA
tccgccgagctgttgctgcagtc

SEQ ID NO: 108160 - RNA, 23 nt, synthetic construct
  source 1..23: mol_type = other RNA
tgctggcccagctcctccagcgg

SEQ ID NO: 108161 - RNA, 23 nt, synthetic construct
  source 1..23: mol_type = other RNA
tgtggagctggtggctggggtac

SEQ ID NO: 108162 - RNA, 23 nt, synthetic construct
  source 1..23: mol_type = other RNA
ttggggtggaggagggggtggcc

SEQ ID NO: 108163 - RNA, 23 nt, synthetic construct
  source 1..23: mol_type = other RNA
ttggggtggaggagggggtggcc

SEQ ID NO: 108164 - RNA, 23 nt, synthetic construct
  source 1..23: mol_type = other RNA
ttggggtggaggagggggtggcc

SEQ ID NO: 108165 - RNA, 23 nt, synthetic construct
  source 1..23: mol_type = other RNA
ttggggtggaggagggggtggcc

SEQ ID NO: 108166 - RNA, 23 nt, synthetic construct
  source 1..23: mol_type = other RNA
tcgcgggggcagcgggcggcagc

SEQ ID NO: 108167 - RNA, 23 nt, synthetic construct
  source 1..23: mol_type = other RNA
tcaccagtgcgtggcactccgca

SEQ ID NO: 108168 - RNA, 23 nt, synthetic construct
  source 1..23: mol_type = other RNA
tgaggctgagattcccaaagcgt

SEQ ID NO: 108169 - RNA, 23 nt, synthetic construct
  source 1..23: mol_type = other RNA
tggtgtggctgtggctgtggtcc

SEQ ID NO: 108170 - RNA, 23 nt, synthetic construct
  source 1..23: mol_type = other RNA
tgggggcagcgggcggcagcggc

SEQ ID NO: 108171 - RNA, 23 nt, synthetic construct
  source 1..23: mol_type = other RNA
tgcgggggcagcgggcggcagcg

SEQ ID NO: 108172 - RNA, 23 nt, synthetic construct
  source 1..23: mol_type = other RNA
tggacatggtggccacgggtgtg

SEQ ID NO: 108173 - RNA, 23 nt, synthetic construct
  source 1..23: mol_type = other RNA
tgccccacctgtgccagggtcca

SEQ ID NO: 108174 - RNA, 23 nt, synthetic construct
  source 1..23: mol_type = other RNA
tacacatctgggcaggatgcagg

SEQ ID NO: 108175 - RNA, 23 nt, synthetic construct
  source 1..23: mol_type = other RNA
taagtcaccccaggtgctgcaca

SEQ ID NO: 108176 - RNA, 23 nt, synthetic construct
  source 1..23: mol_type = other RNA
ttggggccggggaggggccacag

SEQ ID NO: 108177 - RNA, 23 nt, synthetic construct
  source 1..23: mol_type = other RNA
ttttggagctggtgactgtgggt

SEQ ID NO: 108178 - RNA, 23 nt, synthetic construct
  source 1..23: mol_type = other RNA
ttttggagctggtgactgtgggt

SEQ ID NO: 108179 - RNA, 23 nt, synthetic construct
  source 1..23: mol_type = other RNA
tccctggactggagaagggagtg

SEQ ID NO: 108180 - RNA, 23 nt, synthetic construct
  source 1..23: mol_type = other RNA
ttttggagctggtgactgtgggt

SEQ ID NO: 108181 - RNA, 23 nt, synthetic construct
  source 1..23: mol_type = other RNA
tccctggactggagaagggagtg

SEQ ID NO: 108182 - RNA, 23 nt, synthetic construct
  source 1..23: mol_type = other RNA
ttttggagctggtgactgtgggt

SEQ ID NO: 108183 - RNA, 23 nt, synthetic construct
  source 1..23: mol_type = other RNA
tgggcgtcacagggcaggggctt

SEQ ID NO: 108184 - RNA, 23 nt, synthetic construct
  source 1..23: mol_type = other RNA
tcccagggaggaggaggggatgg

SEQ ID NO: 108185 - RNA, 23 nt, synthetic construct
  source 1..23: mol_type = other RNA
tactggaggaggaagtggctttg

SEQ ID NO: 108186 - RNA, 23 nt, synthetic construct
  source 1..23: mol_type = other RNA
tcccagggaggaggaggggatgg

SEQ ID NO: 108187 - RNA, 23 nt, synthetic construct
  source 1..23: mol_type = other RNA
tactggaggaggaagtggctttg

SEQ ID NO: 108188 - RNA, 23 nt, synthetic construct
  source 1..23: mol_type = other RNA
tcccagggaggaggaggggatgg

SEQ ID NO: 108189 - RNA, 23 nt, synthetic construct
  source 1..23: mol_type = other RNA
tactggaggaggaagtggctttg

SEQ ID NO: 108190 - RNA, 23 nt, synthetic construct
  source 1..23: mol_type = other RNA
tggcggcagcggcagtggcagag

SEQ ID NO: 108191 - RNA, 23 nt, synthetic construct
  source 1..23: mol_type = other RNA
tggtgggcatggggtgggggtgg

SEQ ID NO: 108192 - RNA, 23 nt, synthetic construct
  source 1..23: mol_type = other RNA
tcggggtgggcagcaggagcacg

SEQ ID NO: 108193 - RNA, 23 nt, synthetic construct
  source 1..23: mol_type = other RNA
ttcagcactttgggagggggagc

SEQ ID NO: 108194 - RNA, 23 nt, synthetic construct
  source 1..23: mol_type = other RNA
tgtcagcactttgggagggggag

SEQ ID NO: 108195 - RNA, 23 nt, synthetic construct
  source 1..23: mol_type = other RNA
ttcagcactttgggagggggagc

SEQ ID NO: 108196 - RNA, 23 nt, synthetic construct
  source 1..23: mol_type = other RNA
tgtcagcactttgggagggggag

SEQ ID NO: 108197 - RNA, 23 nt, synthetic construct
  source 1..23: mol_type = other RNA
ttcagcactttgggagggggagc

SEQ ID NO: 108198 - RNA, 23 nt, synthetic construct
  source 1..23: mol_type = other RNA
tgtcagcactttgggagggggag

SEQ ID NO: 108199 - RNA, 23 nt, synthetic construct
  source 1..23: mol_type = other RNA
tgagcaggtgcaggagctgcagg

SEQ ID NO: 108200 - RNA, 23 nt, synthetic construct
  source 1..23: mol_type = other RNA
tttcccagagtggaggaggcggt

SEQ ID NO: 108201 - RNA, 23 nt, synthetic construct
  source 1..23: mol_type = other RNA
tcgggggcagcgggcggcagcgg

SEQ ID NO: 108202 - RNA, 23 nt, synthetic construct
  source 1..23: mol_type = other RNA
tggagaccgggagggccgggctt

SEQ ID NO: 108203 - RNA, 23 nt, synthetic construct
  source 1..23: mol_type = other RNA
tgagaccgggagggccgggcttg

SEQ ID NO: 108204 - RNA, 23 nt, synthetic construct
  source 1..23: mol_type = other RNA
ttgtgcgccgggttcagggggct

SEQ ID NO: 108205 - RNA, 23 nt, synthetic construct
  source 1..23: mol_type = other RNA
tgtgcaagggcaccgtctcctcg

SEQ ID NO: 108206 - RNA, 23 nt, synthetic construct
  source 1..23: mol_type = other RNA
tcagcagagaacccgcagctcgt

SEQ ID NO: 108207 - RNA, 23 nt, synthetic construct
  source 1..23: mol_type = other RNA
tctggacgttgaagtcctcgtag

SEQ ID NO: 108208 - RNA, 23 nt, synthetic construct
  source 1..23: mol_type = other RNA
tctgcaggtggtgttgaaggagg

SEQ ID NO: 108209 - RNA, 23 nt, synthetic construct
  source 1..23: mol_type = other RNA
ttgtgctgatccacactggaggc

SEQ ID NO: 108210 - RNA, 23 nt, synthetic construct
  source 1..23: mol_type = other RNA
ttgtgctgatccacactggaagc

SEQ ID NO: 108211 - RNA, 23 nt, synthetic construct
  source 1..23: mol_type = other RNA
ttgtgcttgtcagcactggaagg

SEQ ID NO: 108212 - RNA, 23 nt, synthetic construct
  source 1..23: mol_type = other RNA
ttgtgctgatccacactggaggc

SEQ ID NO: 108213 - RNA, 23 nt, synthetic construct
  source 1..23: mol_type = other RNA
ttgtgctgatccacactggaggc

SEQ ID NO: 108214 - RNA, 23 nt, synthetic construct
  source 1..23: mol_type = other RNA
ttgtgcttgtcagcactggaagg

SEQ ID NO: 108215 - RNA, 23 nt, synthetic construct
  source 1..23: mol_type = other RNA
ttgtgctgatccacactggaggc

SEQ ID NO: 108216 - RNA, 23 nt, synthetic construct
  source 1..23: mol_type = other RNA
ttgtgcttgtcagcactggaagg

SEQ ID NO: 108217 - RNA, 23 nt, synthetic construct
  source 1..23: mol_type = other RNA
tatggctgttgacccaggtttca

SEQ ID NO: 108218 - RNA, 23 nt, synthetic construct
  source 1..23: mol_type = other RNA
tctgcagaccaggccaaagtcca

SEQ ID NO: 108219 - RNA, 23 nt, synthetic construct
  source 1..23: mol_type = other RNA
tctgcagaccaggccaaagtcca

SEQ ID NO: 108220 - RNA, 23 nt, synthetic construct
  source 1..23: mol_type = other RNA
tctgcagaccaggccaaagtcca

SEQ ID NO: 108221 - RNA, 23 nt, synthetic construct
  source 1..23: mol_type = other RNA
tctgcagaccaggccaaagtcca

SEQ ID NO: 108222 - RNA, 23 nt, synthetic construct
  source 1..23: mol_type = other RNA
tccgtggaggatgctgcactgct

SEQ ID NO: 108223 - RNA, 23 nt, synthetic construct
  source 1..23: mol_type = other RNA
tgtggtggtggtcagcactgtgg

SEQ ID NO: 108224 - RNA, 23 nt, synthetic construct
  source 1..23: mol_type = other RNA
tgtggtggtggtcagcactgtgg

SEQ ID NO: 108225 - RNA, 23 nt, synthetic construct
  source 1..23: mol_type = other RNA
tgtggtggtggtcagcactgtgg

SEQ ID NO: 108226 - RNA, 23 nt, synthetic construct
  source 1..23: mol_type = other RNA
tgtggtggtggtcagcactgtgg

SEQ ID NO: 108227 - RNA, 23 nt, synthetic construct
  source 1..23: mol_type = other RNA
tcccgccgagctgttgctgcagt

SEQ ID NO: 108228 - RNA, 23 nt, synthetic construct
  source 1..23: mol_type = other RNA
tgggccgtggaggatgctgcact

SEQ ID NO: 108229 - RNA, 23 nt, synthetic construct
  source 1..23: mol_type = other RNA
tgtggggccgtggaggatgctgc

SEQ ID NO: 108230 - RNA, 23 nt, synthetic construct
  source 1..23: mol_type = other RNA
tggatctggtcctcagggcagaa

SEQ ID NO: 108231 - RNA, 23 nt, synthetic construct
  source 1..23: mol_type = other RNA
tagctgcagccccaggcctgtct

SEQ ID NO: 108232 - RNA, 23 nt, synthetic construct
  source 1..23: mol_type = other RNA
tcagctgcagccccaggcctgtc

SEQ ID NO: 108233 - RNA, 23 nt, synthetic construct
  source 1..23: mol_type = other RNA
tgcagctgcagccccaggcctgt

SEQ ID NO: 108234 - RNA, 23 nt, synthetic construct
  source 1..23: mol_type = other RNA
tgatggtctctccaggcttgtag

SEQ ID NO: 108235 - RNA, 23 nt, synthetic construct
  source 1..23: mol_type = other RNA
tctgctggcccagctcctccagc

SEQ ID NO: 108236 - RNA, 23 nt, synthetic construct
  source 1..23: mol_type = other RNA
tggtggtggtggtggtggccgtc

SEQ ID NO: 108237 - RNA, 23 nt, synthetic construct
  source 1..23: mol_type = other RNA
tgggtggtggtggtggtggccgt

SEQ ID NO: 108238 - RNA, 23 nt, synthetic construct
  source 1..23: mol_type = other RNA
ttgggtggtggtggtggtggccg

SEQ ID NO: 108239 - RNA, 23 nt, synthetic construct
  source 1..23: mol_type = other RNA
ttggtgcccagggaggaggaggg

SEQ ID NO: 108240 - RNA, 23 nt, synthetic construct
  source 1..23: mol_type = other RNA
taggaagtggctttggaactggt

SEQ ID NO: 108241 - RNA, 23 nt, synthetic construct
  source 1..23: mol_type = other RNA
tgggtgtggctgtggctgtggtc

SEQ ID NO: 108242 - RNA, 23 nt, synthetic construct
  source 1..23: mol_type = other RNA
ttggtgcccagggaggaggaggg

SEQ ID NO: 108243 - RNA, 23 nt, synthetic construct
  source 1..23: mol_type = other RNA
taggaagtggctttggaactggt

SEQ ID NO: 108244 - RNA, 23 nt, synthetic construct
  source 1..23: mol_type = other RNA
ttggtgcccagggaggaggaggg

SEQ ID NO: 108245 - RNA, 23 nt, synthetic construct
  source 1..23: mol_type = other RNA
tgcggcagcggcagtggcagagg

SEQ ID NO: 108246 - RNA, 23 nt, synthetic construct
  source 1..23: mol_type = other RNA
tccggggctgcggggctggcagt

SEQ ID NO: 108247 - RNA, 23 nt, synthetic construct
  source 1..23: mol_type = other RNA
tgtggtgggcatggggtgggggt

SEQ ID NO: 108248 - DNA, 17 bp, synthetic construct
  source 1..17: mol_type = other DNA
acccggcccggctccct

SEQ ID NO: 108249 - DNA, 17 bp, synthetic construct
  source 1..17: mol_type = other DNA
cccggcccggctccctc

SEQ ID NO: 108250 - DNA, 17 bp, synthetic construct
  source 1..17: mol_type = other DNA
ccggcccggctccctcc

SEQ ID NO: 108251 - DNA, 17 bp, synthetic construct
  source 1..17: mol_type = other DNA
cggcccggctccctccc

SEQ ID NO: 108252 - DNA, 17 bp, synthetic construct
  source 1..17: mol_type = other DNA
ggcccggctccctccct

SEQ ID NO: 108253 - DNA, 17 bp, synthetic construct
  source 1..17: mol_type = other DNA
gcccggctccctccctg

SEQ ID NO: 108254 - DNA, 17 bp, synthetic construct
  source 1..17: mol_type = other DNA
cccggctccctccctgc

SEQ ID NO: 108255 - DNA, 17 bp, synthetic construct
  source 1..17: mol_type = other DNA
ccggctccctccctgcc

SEQ ID NO: 108256 - DNA, 17 bp, synthetic construct
  source 1..17: mol_type = other DNA
cggctccctccctgccc

SEQ ID NO: 108257 - DNA, 17 bp, synthetic construct
  source 1..17: mol_type = other DNA
ggctccctccctgcccg

SEQ ID NO: 108258 - DNA, 17 bp, synthetic construct
  source 1..17: mol_type = other DNA
gctccctccctgcccgt

SEQ ID NO: 108259 - DNA, 17 bp, synthetic construct
  source 1..17: mol_type = other DNA
ctccctccctgcccgtc

SEQ ID NO: 108260 - DNA, 17 bp, synthetic construct
  source 1..17: mol_type = other DNA
tccctccctgcccgtcc

SEQ ID NO: 108261 - DNA, 17 bp, synthetic construct
  source 1..17: mol_type = other DNA
ccctccctgcccgtccc

SEQ ID NO: 108262 - DNA, 17 bp, synthetic construct
  source 1..17: mol_type = other DNA
cctccctgcccgtcccc

SEQ ID NO: 108263 - DNA, 17 bp, synthetic construct
  source 1..17: mol_type = other DNA
ctccctgcccgtccccg

SEQ ID NO: 108264 - DNA, 17 bp, synthetic construct
  source 1..17: mol_type = other DNA
tccctgcccgtccccgt

SEQ ID NO: 108265 - DNA, 17 bp, synthetic construct
  source 1..17: mol_type = other DNA
ccctgcccgtccccgtc

SEQ ID NO: 108266 - DNA, 17 bp, synthetic construct
  source 1..17: mol_type = other DNA
cctgcccgtccccgtcc

SEQ ID NO: 108267 - DNA, 17 bp, synthetic construct
  source 1..17: mol_type = other DNA
ctgcccgtccccgtccc

SEQ ID NO: 108268 - DNA, 17 bp, synthetic construct
  source 1..17: mol_type = other DNA
tgcccgtccccgtcccc

SEQ ID NO: 108269 - DNA, 17 bp, synthetic construct
  source 1..17: mol_type = other DNA
gcccgtccccgtccccc

SEQ ID NO: 108270 - DNA, 17 bp, synthetic construct
  source 1..17: mol_type = other DNA
cccgtccccgtcccccc

SEQ ID NO: 108271 - DNA, 17 bp, synthetic construct
  source 1..17: mol_type = other DNA
ccgtccccgtcccccca

SEQ ID NO: 108272 - DNA, 17 bp, synthetic construct
  source 1..17: mol_type = other DNA
cgtccccgtccccccac

SEQ ID NO: 108273 - DNA, 17 bp, synthetic construct
  source 1..17: mol_type = other DNA
gtccccgtccccccacc

SEQ ID NO: 108274 - DNA, 17 bp, synthetic construct
  source 1..17: mol_type = other DNA
tccccgtccccccaccc

SEQ ID NO: 108275 - DNA, 17 bp, synthetic construct
  source 1..17: mol_type = other DNA
ccccgtccccccacccg

SEQ ID NO: 108276 - DNA, 17 bp, synthetic construct
  source 1..17: mol_type = other DNA
cccgtccccccacccgt

SEQ ID NO: 108277 - DNA, 17 bp, synthetic construct
  source 1..17: mol_type = other DNA
ccgtccccccacccgtg

SEQ ID NO: 108278 - DNA, 17 bp, synthetic construct
  source 1..17: mol_type = other DNA
cgtccccccacccgtgc

SEQ ID NO: 108279 - DNA, 17 bp, synthetic construct
  source 1..17: mol_type = other DNA
gtccccccacccgtgcc

SEQ ID NO: 108280 - DNA, 17 bp, synthetic construct
  source 1..17: mol_type = other DNA
tccccccacccgtgcca

SEQ ID NO: 108281 - DNA, 17 bp, synthetic construct
  source 1..17: mol_type = other DNA
ccccccacccgtgccag

SEQ ID NO: 108282 - DNA, 17 bp, synthetic construct
  source 1..17: mol_type = other DNA
cccccacccgtgccagc

SEQ ID NO: 108283 - DNA, 17 bp, synthetic construct
  source 1..17: mol_type = other DNA
ccccacccgtgccagcc

SEQ ID NO: 108284 - DNA, 17 bp, synthetic construct
  source 1..17: mol_type = other DNA
cccacccgtgccagccc

SEQ ID NO: 108285 - DNA, 17 bp, synthetic construct
  source 1..17: mol_type = other DNA
ccacccgtgccagcccc

SEQ ID NO: 108286 - DNA, 17 bp, synthetic construct
  source 1..17: mol_type = other DNA
cacccgtgccagccccc

SEQ ID NO: 108287 - DNA, 17 bp, synthetic construct
  source 1..17: mol_type = other DNA
acccgtgccagccccca

SEQ ID NO: 108288 - DNA, 17 bp, synthetic construct
  source 1..17: mol_type = other DNA
cccgtgccagcccccag

SEQ ID NO: 108289 - DNA, 17 bp, synthetic construct
  source 1..17: mol_type = other DNA
ccgtgccagcccccagg

SEQ ID NO: 108290 - DNA, 17 bp, synthetic construct
  source 1..17: mol_type = other DNA
cgtgccagcccccagga

SEQ ID NO: 108291 - DNA, 17 bp, synthetic construct
  source 1..17: mol_type = other DNA
gtgccagcccccaggat

SEQ ID NO: 108292 - DNA, 17 bp, synthetic construct
  source 1..17: mol_type = other DNA
tgccagcccccaggatg

SEQ ID NO: 108293 - DNA, 17 bp, synthetic construct
  source 1..17: mol_type = other DNA
gccagcccccaggatgg

SEQ ID NO: 108294 - DNA, 17 bp, synthetic construct
  source 1..17: mol_type = other DNA
ccagcccccaggatggg

SEQ ID NO: 108295 - DNA, 17 bp, synthetic construct
  source 1..17: mol_type = other DNA
cagcccccaggatgggt

SEQ ID NO: 108296 - DNA, 17 bp, synthetic construct
  source 1..17: mol_type = other DNA
agcccccaggatgggtg

SEQ ID NO: 108297 - DNA, 17 bp, synthetic construct
  source 1..17: mol_type = other DNA
gcccccaggatgggtgc

SEQ ID NO: 108298 - DNA, 17 bp, synthetic construct
  source 1..17: mol_type = other DNA
cccccaggatgggtgcc

SEQ ID NO: 108299 - DNA, 17 bp, synthetic construct
  source 1..17: mol_type = other DNA
ccccaggatgggtgccc

SEQ ID NO: 108300 - DNA, 17 bp, synthetic construct
  source 1..17: mol_type = other DNA
cccaggatgggtgcccc

SEQ ID NO: 108301 - DNA, 17 bp, synthetic construct
  source 1..17: mol_type = other DNA
ccaggatgggtgccccg

SEQ ID NO: 108302 - DNA, 17 bp, synthetic construct
  source 1..17: mol_type = other DNA
caggatgggtgccccga

SEQ ID NO: 108303 - DNA, 17 bp, synthetic construct
  source 1..17: mol_type = other DNA
aggatgggtgccccgag

SEQ ID NO: 108304 - DNA, 17 bp, synthetic construct
  source 1..17: mol_type = other DNA
ggatgggtgccccgagc

SEQ ID NO: 108305 - DNA, 17 bp, synthetic construct
  source 1..17: mol_type = other DNA
gatgggtgccccgagcg

SEQ ID NO: 108306 - DNA, 17 bp, synthetic construct
  source 1..17: mol_type = other DNA
atgggtgccccgagcgc

SEQ ID NO: 108307 - DNA, 17 bp, synthetic construct
  source 1..17: mol_type = other DNA
tgggtgccccgagcgcg

SEQ ID NO: 108308 - DNA, 17 bp, synthetic construct
  source 1..17: mol_type = other DNA
gggtgccccgagcgcgt

SEQ ID NO: 108309 - DNA, 17 bp, synthetic construct
  source 1..17: mol_type = other DNA
ggtgccccgagcgcgtg

SEQ ID NO: 108310 - DNA, 17 bp, synthetic construct
  source 1..17: mol_type = other DNA
gtgccccgagcgcgtgc

SEQ ID NO: 108311 - DNA, 17 bp, synthetic construct
  source 1..17: mol_type = other DNA
tgccccgagcgcgtgcc

SEQ ID NO: 108312 - DNA, 17 bp, synthetic construct
  source 1..17: mol_type = other DNA
gccccgagcgcgtgccg

SEQ ID NO: 108313 - DNA, 17 bp, synthetic construct
  source 1..17: mol_type = other DNA
ccccgagcgcgtgccgg

SEQ ID NO: 108314 - DNA, 17 bp, synthetic construct
  source 1..17: mol_type = other DNA
cccgagcgcgtgccgga

SEQ ID NO: 108315 - DNA, 17 bp, synthetic construct
  source 1..17: mol_type = other DNA
ccgagcgcgtgccggac

SEQ ID NO: 108316 - DNA, 17 bp, synthetic construct
  source 1..17: mol_type = other DNA
cgagcgcgtgccggacg

SEQ ID NO: 108317 - DNA, 17 bp, synthetic construct
  source 1..17: mol_type = other DNA
gagcgcgtgccggacgc

SEQ ID NO: 108318 - DNA, 17 bp, synthetic construct
  source 1..17: mol_type = other DNA
agcgcgtgccggacgct

SEQ ID NO: 108319 - DNA, 17 bp, synthetic construct
  source 1..17: mol_type = other DNA
gcgcgtgccggacgctg

SEQ ID NO: 108320 - DNA, 17 bp, synthetic construct
  source 1..17: mol_type = other DNA
cgcgtgccggacgctgg

SEQ ID NO: 108321 - DNA, 17 bp, synthetic construct
  source 1..17: mol_type = other DNA
gcgtgccggacgctggt

SEQ ID NO: 108322 - DNA, 17 bp, synthetic construct
  source 1..17: mol_type = other DNA
cgtgccggacgctggtg

SEQ ID NO: 108323 - DNA, 17 bp, synthetic construct
  source 1..17: mol_type = other DNA
gtgccggacgctggtgt

SEQ ID NO: 108324 - DNA, 17 bp, synthetic construct
  source 1..17: mol_type = other DNA
tgccggacgctggtgtt

SEQ ID NO: 108325 - DNA, 17 bp, synthetic construct
  source 1..17: mol_type = other DNA
gccggacgctggtgttg

SEQ ID NO: 108326 - DNA, 17 bp, synthetic construct
  source 1..17: mol_type = other DNA
ccggacgctggtgttgg

SEQ ID NO: 108327 - DNA, 17 bp, synthetic construct
  source 1..17: mol_type = other DNA
cggacgctggtgttggc

SEQ ID NO: 108328 - DNA, 17 bp, synthetic construct
  source 1..17: mol_type = other DNA
ggacgctggtgttggct

SEQ ID NO: 108329 - DNA, 17 bp, synthetic construct
  source 1..17: mol_type = other DNA
gacgctggtgttggctc

SEQ ID NO: 108330 - DNA, 17 bp, synthetic construct
  source 1..17: mol_type = other DNA
acgctggtgttggctct

SEQ ID NO: 108331 - DNA, 17 bp, synthetic construct
  source 1..17: mol_type = other DNA
cgctggtgttggctctg

SEQ ID NO: 108332 - DNA, 17 bp, synthetic construct
  source 1..17: mol_type = other DNA
gctggtgttggctctgg

SEQ ID NO: 108333 - DNA, 17 bp, synthetic construct
  source 1..17: mol_type = other DNA
ctggtgttggctctggc

SEQ ID NO: 108334 - DNA, 17 bp, synthetic construct
  source 1..17: mol_type = other DNA
tggtgttggctctggcg

SEQ ID NO: 108335 - DNA, 17 bp, synthetic construct
  source 1..17: mol_type = other DNA
ggtgttggctctggcgg

SEQ ID NO: 108336 - DNA, 17 bp, synthetic construct
  source 1..17: mol_type = other DNA
gtgttggctctggcggc

SEQ ID NO: 108337 - DNA, 17 bp, synthetic construct
  source 1..17: mol_type = other DNA
tgttggctctggcggcc

SEQ ID NO: 108338 - DNA, 17 bp, synthetic construct
  source 1..17: mol_type = other DNA
gttggctctggcggcca

SEQ ID NO: 108339 - DNA, 17 bp, synthetic construct
  source 1..17: mol_type = other DNA
ttggctctggcggccat

SEQ ID NO: 108340 - DNA, 17 bp, synthetic construct
  source 1..17: mol_type = other DNA
tggctctggcggccatg

SEQ ID NO: 108341 - DNA, 17 bp, synthetic construct
  source 1..17: mol_type = other DNA
ggctctggcggccatgc

SEQ ID NO: 108342 - DNA, 17 bp, synthetic construct
  source 1..17: mol_type = other DNA
gctctggcggccatgct

SEQ ID NO: 108343 - DNA, 17 bp, synthetic construct
  source 1..17: mol_type = other DNA
ctctggcggccatgctc

SEQ ID NO: 108344 - DNA, 17 bp, synthetic construct
  source 1..17: mol_type = other DNA
tctggcggccatgctcg

SEQ ID NO: 108345 - DNA, 17 bp, synthetic construct
  source 1..17: mol_type = other DNA
ctggcggccatgctcgt

SEQ ID NO: 108346 - DNA, 17 bp, synthetic construct
  source 1..17: mol_type = other DNA
tggcggccatgctcgtg

SEQ ID NO: 108347 - DNA, 17 bp, synthetic construct
  source 1..17: mol_type = other DNA
ggcggccatgctcgtgg

SEQ ID NO: 108348 - DNA, 17 bp, synthetic construct
  source 1..17: mol_type = other DNA
gcggccatgctcgtggt

SEQ ID NO: 108349 - DNA, 17 bp, synthetic construct
  source 1..17: mol_type = other DNA
cggccatgctcgtggtg

SEQ ID NO: 108350 - DNA, 17 bp, synthetic construct
  source 1..17: mol_type = other DNA
ggccatgctcgtggtgc

SEQ ID NO: 108351 - DNA, 17 bp, synthetic construct
  source 1..17: mol_type = other DNA
gccatgctcgtggtgcc

SEQ ID NO: 108352 - DNA, 17 bp, synthetic construct
  source 1..17: mol_type = other DNA
ccatgctcgtggtgccg

SEQ ID NO: 108353 - DNA, 17 bp, synthetic construct
  source 1..17: mol_type = other DNA
catgctcgtggtgccgc

SEQ ID NO: 108354 - DNA, 17 bp, synthetic construct
  source 1..17: mol_type = other DNA
atgctcgtggtgccgca

SEQ ID NO: 108355 - DNA, 17 bp, synthetic construct
  source 1..17: mol_type = other DNA
tgctcgtggtgccgcag

SEQ ID NO: 108356 - DNA, 17 bp, synthetic construct
  source 1..17: mol_type = other DNA
gctcgtggtgccgcagg

SEQ ID NO: 108357 - DNA, 17 bp, synthetic construct
  source 1..17: mol_type = other DNA
ctcgtggtgccgcaggc

SEQ ID NO: 108358 - DNA, 17 bp, synthetic construct
  source 1..17: mol_type = other DNA
tcgtggtgccgcaggca

SEQ ID NO: 108359 - DNA, 17 bp, synthetic construct
  source 1..17: mol_type = other DNA
cgtggtgccgcaggcag

SEQ ID NO: 108360 - DNA, 17 bp, synthetic construct
  source 1..17: mol_type = other DNA
gtggtgccgcaggcagg

SEQ ID NO: 108361 - DNA, 17 bp, synthetic construct
  source 1..17: mol_type = other DNA
tggtgccgcaggcaggt

SEQ ID NO: 108362 - DNA, 17 bp, synthetic construct
  source 1..17: mol_type = other DNA
ggtgccgcaggcaggta

SEQ ID NO: 108363 - DNA, 17 bp, synthetic construct
  source 1..17: mol_type = other DNA
gtgccgcaggcaggtaa

SEQ ID NO: 108364 - DNA, 17 bp, synthetic construct
  source 1..17: mol_type = other DNA
tgccgcaggcaggtaag

SEQ ID NO: 108365 - DNA, 17 bp, synthetic construct
  source 1..17: mol_type = other DNA
gccgcaggcaggtaaga

SEQ ID NO: 108366 - DNA, 17 bp, synthetic construct
  source 1..17: mol_type = other DNA
ccgcaggcaggtaagag

SEQ ID NO: 108367 - DNA, 17 bp, synthetic construct
  source 1..17: mol_type = other DNA
cgcaggcaggtaagagc

SEQ ID NO: 108368 - DNA, 17 bp, synthetic construct
  source 1..17: mol_type = other DNA
gcaggcaggtaagagcc

SEQ ID NO: 108369 - DNA, 17 bp, synthetic construct
  source 1..17: mol_type = other DNA
caggcaggtaagagccc

SEQ ID NO: 108370 - DNA, 17 bp, synthetic construct
  source 1..17: mol_type = other DNA
aggcaggtaagagcccc

SEQ ID NO: 108371 - DNA, 17 bp, synthetic construct
  source 1..17: mol_type = other DNA
ggcaggtaagagccccc

SEQ ID NO: 108372 - DNA, 17 bp, synthetic construct
  source 1..17: mol_type = other DNA
gcaggtaagagcccccc

SEQ ID NO: 108373 - DNA, 17 bp, synthetic construct
  source 1..17: mol_type = other DNA
caggtaagagcccccca

SEQ ID NO: 108374 - DNA, 17 bp, synthetic construct
  source 1..17: mol_type = other DNA
aggtaagagccccccac

SEQ ID NO: 108375 - DNA, 17 bp, synthetic construct
  source 1..17: mol_type = other DNA
ggtaagagccccccact

SEQ ID NO: 108376 - DNA, 17 bp, synthetic construct
  source 1..17: mol_type = other DNA
gtaagagccccccactc

SEQ ID NO: 108377 - DNA, 17 bp, synthetic construct
  source 1..17: mol_type = other DNA
taagagccccccactcc

SEQ ID NO: 108378 - DNA, 17 bp, synthetic construct
  source 1..17: mol_type = other DNA
aagagccccccactccg

SEQ ID NO: 108379 - DNA, 17 bp, synthetic construct
  source 1..17: mol_type = other DNA
agagccccccactccgc

SEQ ID NO: 108380 - DNA, 17 bp, synthetic construct
  source 1..17: mol_type = other DNA
gagccccccactccgcc

SEQ ID NO: 108381 - DNA, 17 bp, synthetic construct
  source 1..17: mol_type = other DNA
agccccccactccgccc

SEQ ID NO: 108382 - DNA, 17 bp, synthetic construct
  source 1..17: mol_type = other DNA
gccccccactccgcccc

SEQ ID NO: 108383 - DNA, 17 bp, synthetic construct
  source 1..17: mol_type = other DNA
ccccccactccgccccc

SEQ ID NO: 108384 - DNA, 17 bp, synthetic construct
  source 1..17: mol_type = other DNA
cccccactccgccccct

SEQ ID NO: 108385 - DNA, 17 bp, synthetic construct
  source 1..17: mol_type = other DNA
ccccactccgccccctc

SEQ ID NO: 108386 - DNA, 17 bp, synthetic construct
  source 1..17: mol_type = other DNA
cccactccgccccctct

SEQ ID NO: 108387 - DNA, 17 bp, synthetic construct
  source 1..17: mol_type = other DNA
ccactccgccccctctc

SEQ ID NO: 108388 - DNA, 17 bp, synthetic construct
  source 1..17: mol_type = other DNA
cactccgccccctctcg

SEQ ID NO: 108389 - DNA, 17 bp, synthetic construct
  source 1..17: mol_type = other DNA
actccgccccctctcga

SEQ ID NO: 108390 - DNA, 17 bp, synthetic construct
  source 1..17: mol_type = other DNA
ctccgccccctctcgat

SEQ ID NO: 108391 - DNA, 17 bp, synthetic construct
  source 1..17: mol_type = other DNA
tccgccccctctcgatg

SEQ ID NO: 108392 - DNA, 17 bp, synthetic construct
  source 1..17: mol_type = other DNA
ccgccccctctcgatgc

SEQ ID NO: 108393 - DNA, 17 bp, synthetic construct
  source 1..17: mol_type = other DNA
cgccccctctcgatgct

SEQ ID NO: 108394 - DNA, 17 bp, synthetic construct
  source 1..17: mol_type = other DNA
gccccctctcgatgctg

SEQ ID NO: 108395 - DNA, 17 bp, synthetic construct
  source 1..17: mol_type = other DNA
ccccctctcgatgctgt

SEQ ID NO: 108396 - DNA, 17 bp, synthetic construct
  source 1..17: mol_type = other DNA
cccctctcgatgctgtc

SEQ ID NO: 108397 - DNA, 17 bp, synthetic construct
  source 1..17: mol_type = other DNA
ccctctcgatgctgtct

SEQ ID NO: 108398 - DNA, 17 bp, synthetic construct
  source 1..17: mol_type = other DNA
cctctcgatgctgtctt

SEQ ID NO: 108399 - DNA, 17 bp, synthetic construct
  source 1..17: mol_type = other DNA
ctctcgatgctgtcttc

SEQ ID NO: 108400 - DNA, 17 bp, synthetic construct
  source 1..17: mol_type = other DNA
tctcgatgctgtcttca

SEQ ID NO: 108401 - DNA, 17 bp, synthetic construct
  source 1..17: mol_type = other DNA
ctcgatgctgtcttcac

SEQ ID NO: 108402 - DNA, 17 bp, synthetic construct
  source 1..17: mol_type = other DNA
tcgatgctgtcttcacg

SEQ ID NO: 108403 - DNA, 17 bp, synthetic construct
  source 1..17: mol_type = other DNA
cgatgctgtcttcacgg

SEQ ID NO: 108404 - DNA, 17 bp, synthetic construct
  source 1..17: mol_type = other DNA
gatgctgtcttcacggc

SEQ ID NO: 108405 - DNA, 17 bp, synthetic construct
  source 1..17: mol_type = other DNA
atgctgtcttcacggcg

SEQ ID NO: 108406 - DNA, 17 bp, synthetic construct
  source 1..17: mol_type = other DNA
tgctgtcttcacggcgg

SEQ ID NO: 108407 - DNA, 17 bp, synthetic construct
  source 1..17: mol_type = other DNA
gctgtcttcacggcggg

SEQ ID NO: 108408 - DNA, 17 bp, synthetic construct
  source 1..17: mol_type = other DNA
ctgtcttcacggcgggg

SEQ ID NO: 108409 - DNA, 17 bp, synthetic construct
  source 1..17: mol_type = other DNA
tgtcttcacggcggggg

SEQ ID NO: 108410 - DNA, 17 bp, synthetic construct
  source 1..17: mol_type = other DNA
gtcttcacggcgggggt

SEQ ID NO: 108411 - DNA, 17 bp, synthetic construct
  source 1..17: mol_type = other DNA
tcttcacggcgggggtc

SEQ ID NO: 108412 - DNA, 17 bp, synthetic construct
  source 1..17: mol_type = other DNA
cttcacggcgggggtct

SEQ ID NO: 108413 - DNA, 17 bp, synthetic construct
  source 1..17: mol_type = other DNA
ttcacggcgggggtctc

SEQ ID NO: 108414 - DNA, 17 bp, synthetic construct
  source 1..17: mol_type = other DNA
tcacggcgggggtctct

SEQ ID NO: 108415 - DNA, 17 bp, synthetic construct
  source 1..17: mol_type = other DNA
cacggcgggggtctctg

SEQ ID NO: 108416 - DNA, 17 bp, synthetic construct
  source 1..17: mol_type = other DNA
acggcgggggtctctgc

SEQ ID NO: 108417 - DNA, 17 bp, synthetic construct
  source 1..17: mol_type = other DNA
cggcgggggtctctgca

SEQ ID NO: 108418 - DNA, 17 bp, synthetic construct
  source 1..17: mol_type = other DNA
ggcgggggtctctgcag

SEQ ID NO: 108419 - DNA, 17 bp, synthetic construct
  source 1..17: mol_type = other DNA
gcgggggtctctgcagg

SEQ ID NO: 108420 - DNA, 17 bp, synthetic construct
  source 1..17: mol_type = other DNA
cgggggtctctgcaggt

SEQ ID NO: 108421 - DNA, 17 bp, synthetic construct
  source 1..17: mol_type = other DNA
gggggtctctgcaggtc

SEQ ID NO: 108422 - DNA, 17 bp, synthetic construct
  source 1..17: mol_type = other DNA
ggggtctctgcaggtcg

SEQ ID NO: 108423 - DNA, 17 bp, synthetic construct
  source 1..17: mol_type = other DNA
gggtctctgcaggtcgc

SEQ ID NO: 108424 - DNA, 17 bp, synthetic construct
  source 1..17: mol_type = other DNA
ggtctctgcaggtcgct

SEQ ID NO: 108425 - DNA, 17 bp, synthetic construct
  source 1..17: mol_type = other DNA
gtctctgcaggtcgctt

SEQ ID NO: 108426 - DNA, 17 bp, synthetic construct
  source 1..17: mol_type = other DNA
tctctgcaggtcgcttg

SEQ ID NO: 108427 - DNA, 17 bp, synthetic construct
  source 1..17: mol_type = other DNA
ctctgcaggtcgcttgc

SEQ ID NO: 108428 - DNA, 17 bp, synthetic construct
  source 1..17: mol_type = other DNA
tctgcaggtcgcttgcc

SEQ ID NO: 108429 - DNA, 17 bp, synthetic construct
  source 1..17: mol_type = other DNA
ctgcaggtcgcttgcct

SEQ ID NO: 108430 - DNA, 17 bp, synthetic construct
  source 1..17: mol_type = other DNA
tgcaggtcgcttgcctg

SEQ ID NO: 108431 - DNA, 17 bp, synthetic construct
  source 1..17: mol_type = other DNA
gcaggtcgcttgcctgg

SEQ ID NO: 108432 - DNA, 17 bp, synthetic construct
  source 1..17: mol_type = other DNA
caggtcgcttgcctggg

SEQ ID NO: 108433 - DNA, 17 bp, synthetic construct
  source 1..17: mol_type = other DNA
aggtcgcttgcctggga

SEQ ID NO: 108434 - DNA, 17 bp, synthetic construct
  source 1..17: mol_type = other DNA
ggtcgcttgcctgggag

SEQ ID NO: 108435 - DNA, 17 bp, synthetic construct
  source 1..17: mol_type = other DNA
gtcgcttgcctgggagc

SEQ ID NO: 108436 - DNA, 17 bp, synthetic construct
  source 1..17: mol_type = other DNA
tcgcttgcctgggagct

SEQ ID NO: 108437 - DNA, 17 bp, synthetic construct
  source 1..17: mol_type = other DNA
cgcttgcctgggagctt

SEQ ID NO: 108438 - DNA, 17 bp, synthetic construct
  source 1..17: mol_type = other DNA
gcttgcctgggagcttc

SEQ ID NO: 108439 - DNA, 17 bp, synthetic construct
  source 1..17: mol_type = other DNA
cttgcctgggagcttct

SEQ ID NO: 108440 - DNA, 17 bp, synthetic construct
  source 1..17: mol_type = other DNA
ttgcctgggagcttctc

SEQ ID NO: 108441 - DNA, 17 bp, synthetic construct
  source 1..17: mol_type = other DNA
tgcctgggagcttctcc

SEQ ID NO: 108442 - DNA, 17 bp, synthetic construct
  source 1..17: mol_type = other DNA
gcctgggagcttctcct

SEQ ID NO: 108443 - DNA, 17 bp, synthetic construct
  source 1..17: mol_type = other DNA
cctgggagcttctcctg

SEQ ID NO: 108444 - DNA, 17 bp, synthetic construct
  source 1..17: mol_type = other DNA
ctgggagcttctcctgc

SEQ ID NO: 108445 - DNA, 17 bp, synthetic construct
  source 1..17: mol_type = other DNA
tgggagcttctcctgca

SEQ ID NO: 108446 - DNA, 17 bp, synthetic construct
  source 1..17: mol_type = other DNA
gggagcttctcctgcag

SEQ ID NO: 108447 - DNA, 17 bp, synthetic construct
  source 1..17: mol_type = other DNA
ggagcttctcctgcaga

SEQ ID NO: 108448 - DNA, 17 bp, synthetic construct
  source 1..17: mol_type = other DNA
gagcttctcctgcagag

SEQ ID NO: 108449 - DNA, 17 bp, synthetic construct
  source 1..17: mol_type = other DNA
agcttctcctgcagagt

SEQ ID NO: 108450 - DNA, 17 bp, synthetic construct
  source 1..17: mol_type = other DNA
gcttctcctgcagagtg

SEQ ID NO: 108451 - DNA, 17 bp, synthetic construct
  source 1..17: mol_type = other DNA
cttctcctgcagagtgc

SEQ ID NO: 108452 - DNA, 17 bp, synthetic construct
  source 1..17: mol_type = other DNA
ttctcctgcagagtgca

SEQ ID NO: 108453 - DNA, 17 bp, synthetic construct
  source 1..17: mol_type = other DNA
tctcctgcagagtgcac

SEQ ID NO: 108454 - DNA, 17 bp, synthetic construct
  source 1..17: mol_type = other DNA
ctcctgcagagtgcacg

SEQ ID NO: 108455 - DNA, 17 bp, synthetic construct
  source 1..17: mol_type = other DNA
tcctgcagagtgcacgg

SEQ ID NO: 108456 - DNA, 17 bp, synthetic construct
  source 1..17: mol_type = other DNA
cctgcagagtgcacggg

SEQ ID NO: 108457 - DNA, 17 bp, synthetic construct
  source 1..17: mol_type = other DNA
ctgcagagtgcacgggc

SEQ ID NO: 108458 - DNA, 17 bp, synthetic construct
  source 1..17: mol_type = other DNA
tgcagagtgcacgggca

SEQ ID NO: 108459 - DNA, 17 bp, synthetic construct
  source 1..17: mol_type = other DNA
gcagagtgcacgggcag

SEQ ID NO: 108460 - DNA, 17 bp, synthetic construct
  source 1..17: mol_type = other DNA
cagagtgcacgggcaga

SEQ ID NO: 108461 - DNA, 17 bp, synthetic construct
  source 1..17: mol_type = other DNA
agagtgcacgggcagat

SEQ ID NO: 108462 - DNA, 17 bp, synthetic construct
  source 1..17: mol_type = other DNA
gagtgcacgggcagatc

SEQ ID NO: 108463 - DNA, 17 bp, synthetic construct
  source 1..17: mol_type = other DNA
agtgcacgggcagatcc

SEQ ID NO: 108464 - DNA, 17 bp, synthetic construct
  source 1..17: mol_type = other DNA
gtgcacgggcagatccc

SEQ ID NO: 108465 - DNA, 17 bp, synthetic construct
  source 1..17: mol_type = other DNA
tgcacgggcagatcccc

SEQ ID NO: 108466 - DNA, 17 bp, synthetic construct
  source 1..17: mol_type = other DNA
gcacgggcagatccccc

SEQ ID NO: 108467 - DNA, 17 bp, synthetic construct
  source 1..17: mol_type = other DNA
cacgggcagatccccct

SEQ ID NO: 108468 - DNA, 17 bp, synthetic construct
  source 1..17: mol_type = other DNA
acgggcagatcccccta

SEQ ID NO: 108469 - DNA, 17 bp, synthetic construct
  source 1..17: mol_type = other DNA
cgggcagatccccctac

SEQ ID NO: 108470 - DNA, 17 bp, synthetic construct
  source 1..17: mol_type = other DNA
gggcagatccccctacg

SEQ ID NO: 108471 - DNA, 17 bp, synthetic construct
  source 1..17: mol_type = other DNA
ggcagatccccctacga

SEQ ID NO: 108472 - DNA, 17 bp, synthetic construct
  source 1..17: mol_type = other DNA
gcagatccccctacgac

SEQ ID NO: 108473 - DNA, 17 bp, synthetic construct
  source 1..17: mol_type = other DNA
cagatccccctacgact

SEQ ID NO: 108474 - DNA, 17 bp, synthetic construct
  source 1..17: mol_type = other DNA
agatccccctacgactc

SEQ ID NO: 108475 - DNA, 17 bp, synthetic construct
  source 1..17: mol_type = other DNA
gatccccctacgactcc

SEQ ID NO: 108476 - DNA, 17 bp, synthetic construct
  source 1..17: mol_type = other DNA
atccccctacgactccc

SEQ ID NO: 108477 - DNA, 17 bp, synthetic construct
  source 1..17: mol_type = other DNA
tccccctacgactccct

SEQ ID NO: 108478 - DNA, 17 bp, synthetic construct
  source 1..17: mol_type = other DNA
ccccctacgactccctg

SEQ ID NO: 108479 - DNA, 17 bp, synthetic construct
  source 1..17: mol_type = other DNA
cccctacgactccctga

SEQ ID NO: 108480 - DNA, 17 bp, synthetic construct
  source 1..17: mol_type = other DNA
ccctacgactccctgag

SEQ ID NO: 108481 - DNA, 17 bp, synthetic construct
  source 1..17: mol_type = other DNA
cctacgactccctgagt

SEQ ID NO: 108482 - DNA, 17 bp, synthetic construct
  source 1..17: mol_type = other DNA
ctacgactccctgagtg

SEQ ID NO: 108483 - DNA, 17 bp, synthetic construct
  source 1..17: mol_type = other DNA
tacgactccctgagtgt

SEQ ID NO: 108484 - DNA, 17 bp, synthetic construct
  source 1..17: mol_type = other DNA
acgactccctgagtgtc

SEQ ID NO: 108485 - DNA, 17 bp, synthetic construct
  source 1..17: mol_type = other DNA
cgactccctgagtgtcc

SEQ ID NO: 108486 - DNA, 17 bp, synthetic construct
  source 1..17: mol_type = other DNA
gactccctgagtgtcct

SEQ ID NO: 108487 - DNA, 17 bp, synthetic construct
  source 1..17: mol_type = other DNA
actccctgagtgtcctg

SEQ ID NO: 108488 - DNA, 17 bp, synthetic construct
  source 1..17: mol_type = other DNA
ctccctgagtgtcctgg

SEQ ID NO: 108489 - DNA, 17 bp, synthetic construct
  source 1..17: mol_type = other DNA
tccctgagtgtcctgga

SEQ ID NO: 108490 - DNA, 17 bp, synthetic construct
  source 1..17: mol_type = other DNA
ccctgagtgtcctggat

SEQ ID NO: 108491 - DNA, 17 bp, synthetic construct
  source 1..17: mol_type = other DNA
cctgagtgtcctggatg

SEQ ID NO: 108492 - DNA, 17 bp, synthetic construct
  source 1..17: mol_type = other DNA
ctgagtgtcctggatgg

SEQ ID NO: 108493 - DNA, 17 bp, synthetic construct
  source 1..17: mol_type = other DNA
tgagtgtcctggatggg

SEQ ID NO: 108494 - DNA, 17 bp, synthetic construct
  source 1..17: mol_type = other DNA
gagtgtcctggatggga

SEQ ID NO: 108495 - DNA, 17 bp, synthetic construct
  source 1..17: mol_type = other DNA
agtgtcctggatgggac

SEQ ID NO: 108496 - DNA, 17 bp, synthetic construct
  source 1..17: mol_type = other DNA
gtgtcctggatgggacc

SEQ ID NO: 108497 - DNA, 17 bp, synthetic construct
  source 1..17: mol_type = other DNA
tgtcctggatgggaccc

SEQ ID NO: 108498 - DNA, 17 bp, synthetic construct
  source 1..17: mol_type = other DNA
gtcctggatgggaccct

SEQ ID NO: 108499 - DNA, 17 bp, synthetic construct
  source 1..17: mol_type = other DNA
tcctggatgggacccta

SEQ ID NO: 108500 - DNA, 17 bp, synthetic construct
  source 1..17: mol_type = other DNA
cctggatgggaccctac

SEQ ID NO: 108501 - DNA, 17 bp, synthetic construct
  source 1..17: mol_type = other DNA
ctggatgggaccctacc

SEQ ID NO: 108502 - DNA, 17 bp, synthetic construct
  source 1..17: mol_type = other DNA
tggatgggaccctaccc

SEQ ID NO: 108503 - DNA, 17 bp, synthetic construct
  source 1..17: mol_type = other DNA
ggatgggaccctacccg

SEQ ID NO: 108504 - DNA, 17 bp, synthetic construct
  source 1..17: mol_type = other DNA
gatgggaccctacccgt

SEQ ID NO: 108505 - DNA, 17 bp, synthetic construct
  source 1..17: mol_type = other DNA
atgggaccctacccgtc

SEQ ID NO: 108506 - DNA, 17 bp, synthetic construct
  source 1..17: mol_type = other DNA
tgggaccctacccgtcc

SEQ ID NO: 108507 - DNA, 17 bp, synthetic construct
  source 1..17: mol_type = other DNA
gggaccctacccgtccc

SEQ ID NO: 108508 - DNA, 17 bp, synthetic construct
  source 1..17: mol_type = other DNA
ggaccctacccgtcccc

SEQ ID NO: 108509 - DNA, 17 bp, synthetic construct
  source 1..17: mol_type = other DNA
gaccctacccgtcccca

SEQ ID NO: 108510 - DNA, 17 bp, synthetic construct
  source 1..17: mol_type = other DNA
accctacccgtccccaa

SEQ ID NO: 108511 - DNA, 17 bp, synthetic construct
  source 1..17: mol_type = other DNA
ccctacccgtccccaac

SEQ ID NO: 108512 - DNA, 17 bp, synthetic construct
  source 1..17: mol_type = other DNA
cctacccgtccccaaca

SEQ ID NO: 108513 - DNA, 17 bp, synthetic construct
  source 1..17: mol_type = other DNA
ctacccgtccccaacac

SEQ ID NO: 108514 - DNA, 17 bp, synthetic construct
  source 1..17: mol_type = other DNA
tacccgtccccaacaca

SEQ ID NO: 108515 - DNA, 17 bp, synthetic construct
  source 1..17: mol_type = other DNA
acccgtccccaacacag

SEQ ID NO: 108516 - DNA, 17 bp, synthetic construct
  source 1..17: mol_type = other DNA
cccgtccccaacacagg

SEQ ID NO: 108517 - DNA, 17 bp, synthetic construct
  source 1..17: mol_type = other DNA
ccgtccccaacacaggg

SEQ ID NO: 108518 - DNA, 17 bp, synthetic construct
  source 1..17: mol_type = other DNA
cgtccccaacacagggc

SEQ ID NO: 108519 - DNA, 17 bp, synthetic construct
  source 1..17: mol_type = other DNA
gtccccaacacagggct

SEQ ID NO: 108520 - DNA, 17 bp, synthetic construct
  source 1..17: mol_type = other DNA
tccccaacacagggctc

SEQ ID NO: 108521 - DNA, 17 bp, synthetic construct
  source 1..17: mol_type = other DNA
ccccaacacagggctct

SEQ ID NO: 108522 - DNA, 17 bp, synthetic construct
  source 1..17: mol_type = other DNA
cccaacacagggctctg

SEQ ID NO: 108523 - DNA, 17 bp, synthetic construct
  source 1..17: mol_type = other DNA
ccaacacagggctctgg

SEQ ID NO: 108524 - DNA, 17 bp, synthetic construct
  source 1..17: mol_type = other DNA
caacacagggctctggg

SEQ ID NO: 108525 - DNA, 17 bp, synthetic construct
  source 1..17: mol_type = other DNA
aacacagggctctgggg

SEQ ID NO: 108526 - DNA, 17 bp, synthetic construct
  source 1..17: mol_type = other DNA
acacagggctctggggc

SEQ ID NO: 108527 - DNA, 17 bp, synthetic construct
  source 1..17: mol_type = other DNA
cacagggctctggggcc

SEQ ID NO: 108528 - DNA, 17 bp, synthetic construct
  source 1..17: mol_type = other DNA
acagggctctggggccc

SEQ ID NO: 108529 - DNA, 17 bp, synthetic construct
  source 1..17: mol_type = other DNA
cagggctctggggcccc

SEQ ID NO: 108530 - DNA, 17 bp, synthetic construct
  source 1..17: mol_type = other DNA
agggctctggggcccca

SEQ ID NO: 108531 - DNA, 17 bp, synthetic construct
  source 1..17: mol_type = other DNA
gggctctggggccccac

SEQ ID NO: 108532 - DNA, 17 bp, synthetic construct
  source 1..17: mol_type = other DNA
ggctctggggccccacg

SEQ ID NO: 108533 - DNA, 17 bp, synthetic construct
  source 1..17: mol_type = other DNA
gctctggggccccacgg

SEQ ID NO: 108534 - DNA, 17 bp, synthetic construct
  source 1..17: mol_type = other DNA
ctctggggccccacggg

SEQ ID NO: 108535 - DNA, 17 bp, synthetic construct
  source 1..17: mol_type = other DNA
tctggggccccacgggc

SEQ ID NO: 108536 - DNA, 17 bp, synthetic construct
  source 1..17: mol_type = other DNA
ctggggccccacgggct

SEQ ID NO: 108537 - DNA, 17 bp, synthetic construct
  source 1..17: mol_type = other DNA
tggggccccacgggctc

SEQ ID NO: 108538 - DNA, 17 bp, synthetic construct
  source 1..17: mol_type = other DNA
ggggccccacgggctca

SEQ ID NO: 108539 - DNA, 17 bp, synthetic construct
  source 1..17: mol_type = other DNA
gggccccacgggctcac

SEQ ID NO: 108540 - DNA, 17 bp, synthetic construct
  source 1..17: mol_type = other DNA
ggccccacgggctcaca

SEQ ID NO: 108541 - DNA, 17 bp, synthetic construct
  source 1..17: mol_type = other DNA
gccccacgggctcacag

SEQ ID NO: 108542 - DNA, 17 bp, synthetic construct
  source 1..17: mol_type = other DNA
ccccacgggctcacagt

SEQ ID NO: 108543 - DNA, 17 bp, synthetic construct
  source 1..17: mol_type = other DNA
cccacgggctcacagtg

SEQ ID NO: 108544 - DNA, 17 bp, synthetic construct
  source 1..17: mol_type = other DNA
ccacgggctcacagtgt

SEQ ID NO: 108545 - DNA, 17 bp, synthetic construct
  source 1..17: mol_type = other DNA
cacgggctcacagtgtc

SEQ ID NO: 108546 - DNA, 17 bp, synthetic construct
  source 1..17: mol_type = other DNA
acgggctcacagtgtca

SEQ ID NO: 108547 - DNA, 17 bp, synthetic construct
  source 1..17: mol_type = other DNA
cgggctcacagtgtcag

SEQ ID NO: 108548 - DNA, 17 bp, synthetic construct
  source 1..17: mol_type = other DNA
gggctcacagtgtcagg

SEQ ID NO: 108549 - DNA, 17 bp, synthetic construct
  source 1..17: mol_type = other DNA
ggctcacagtgtcagga

SEQ ID NO: 108550 - DNA, 17 bp, synthetic construct
  source 1..17: mol_type = other DNA
gctcacagtgtcaggaa

SEQ ID NO: 108551 - DNA, 17 bp, synthetic construct
  source 1..17: mol_type = other DNA
ctcacagtgtcaggaaa

SEQ ID NO: 108552 - DNA, 17 bp, synthetic construct
  source 1..17: mol_type = other DNA
tcacagtgtcaggaaac

SEQ ID NO: 108553 - DNA, 17 bp, synthetic construct
  source 1..17: mol_type = other DNA
cacagtgtcaggaaact

SEQ ID NO: 108554 - DNA, 17 bp, synthetic construct
  source 1..17: mol_type = other DNA
acagtgtcaggaaactc

SEQ ID NO: 108555 - DNA, 17 bp, synthetic construct
  source 1..17: mol_type = other DNA
cagtgtcaggaaactca

SEQ ID NO: 108556 - DNA, 17 bp, synthetic construct
  source 1..17: mol_type = other DNA
agtgtcaggaaactcag

SEQ ID NO: 108557 - DNA, 17 bp, synthetic construct
  source 1..17: mol_type = other DNA
gtgtcaggaaactcagg

SEQ ID NO: 108558 - DNA, 17 bp, synthetic construct
  source 1..17: mol_type = other DNA
tgtcaggaaactcaggg

SEQ ID NO: 108559 - DNA, 17 bp, synthetic construct
  source 1..17: mol_type = other DNA
gtcaggaaactcagggg

SEQ ID NO: 108560 - DNA, 17 bp, synthetic construct
  source 1..17: mol_type = other DNA
tcaggaaactcaggggc

SEQ ID NO: 108561 - DNA, 17 bp, synthetic construct
  source 1..17: mol_type = other DNA
caggaaactcaggggct

SEQ ID NO: 108562 - DNA, 17 bp, synthetic construct
  source 1..17: mol_type = other DNA
aggaaactcaggggctg

SEQ ID NO: 108563 - DNA, 17 bp, synthetic construct
  source 1..17: mol_type = other DNA
ggaaactcaggggctgg

SEQ ID NO: 108564 - DNA, 17 bp, synthetic construct
  source 1..17: mol_type = other DNA
gaaactcaggggctggc

SEQ ID NO: 108565 - DNA, 17 bp, synthetic construct
  source 1..17: mol_type = other DNA
aaactcaggggctggct

SEQ ID NO: 108566 - DNA, 17 bp, synthetic construct
  source 1..17: mol_type = other DNA
aactcaggggctggctt

SEQ ID NO: 108567 - DNA, 17 bp, synthetic construct
  source 1..17: mol_type = other DNA
actcaggggctggcttg

SEQ ID NO: 108568 - DNA, 17 bp, synthetic construct
  source 1..17: mol_type = other DNA
ctcaggggctggcttgg

SEQ ID NO: 108569 - DNA, 17 bp, synthetic construct
  source 1..17: mol_type = other DNA
tcaggggctggcttgga

SEQ ID NO: 108570 - DNA, 17 bp, synthetic construct
  source 1..17: mol_type = other DNA
caggggctggcttggat

SEQ ID NO: 108571 - DNA, 17 bp, synthetic construct
  source 1..17: mol_type = other DNA
aggggctggcttggatg

SEQ ID NO: 108572 - DNA, 17 bp, synthetic construct
  source 1..17: mol_type = other DNA
ggggctggcttggatgg

SEQ ID NO: 108573 - DNA, 17 bp, synthetic construct
  source 1..17: mol_type = other DNA
gggctggcttggatggg

SEQ ID NO: 108574 - DNA, 17 bp, synthetic construct
  source 1..17: mol_type = other DNA
ggctggcttggatgggg

SEQ ID NO: 108575 - DNA, 17 bp, synthetic construct
  source 1..17: mol_type = other DNA
gctggcttggatggggt

SEQ ID NO: 108576 - DNA, 17 bp, synthetic construct
  source 1..17: mol_type = other DNA
ctggcttggatggggtg

SEQ ID NO: 108577 - DNA, 17 bp, synthetic construct
  source 1..17: mol_type = other DNA
tggcttggatggggtgt

SEQ ID NO: 108578 - DNA, 17 bp, synthetic construct
  source 1..17: mol_type = other DNA
ggcttggatggggtgtc

SEQ ID NO: 108579 - DNA, 17 bp, synthetic construct
  source 1..17: mol_type = other DNA
gcttggatggggtgtcc

SEQ ID NO: 108580 - DNA, 17 bp, synthetic construct
  source 1..17: mol_type = other DNA
cttggatggggtgtcca

SEQ ID NO: 108581 - DNA, 17 bp, synthetic construct
  source 1..17: mol_type = other DNA
ttggatggggtgtccag

SEQ ID NO: 108582 - DNA, 17 bp, synthetic construct
  source 1..17: mol_type = other DNA
tggatggggtgtccagg

SEQ ID NO: 108583 - DNA, 17 bp, synthetic construct
  source 1..17: mol_type = other DNA
ggatggggtgtccagga

SEQ ID NO: 108584 - DNA, 17 bp, synthetic construct
  source 1..17: mol_type = other DNA
gatggggtgtccaggag

SEQ ID NO: 108585 - DNA, 17 bp, synthetic construct
  source 1..17: mol_type = other DNA
atggggtgtccaggaga

SEQ ID NO: 108586 - DNA, 17 bp, synthetic construct
  source 1..17: mol_type = other DNA
tggggtgtccaggagaa

SEQ ID NO: 108587 - DNA, 17 bp, synthetic construct
  source 1..17: mol_type = other DNA
ggggtgtccaggagaag

SEQ ID NO: 108588 - DNA, 17 bp, synthetic construct
  source 1..17: mol_type = other DNA
gggtgtccaggagaagg

SEQ ID NO: 108589 - DNA, 17 bp, synthetic construct
  source 1..17: mol_type = other DNA
ggtgtccaggagaaggt

SEQ ID NO: 108590 - DNA, 17 bp, synthetic construct
  source 1..17: mol_type = other DNA
gtgtccaggagaaggtg

SEQ ID NO: 108591 - DNA, 17 bp, synthetic construct
  source 1..17: mol_type = other DNA
tgtccaggagaaggtgg

SEQ ID NO: 108592 - DNA, 17 bp, synthetic construct
  source 1..17: mol_type = other DNA
gtccaggagaaggtggg

SEQ ID NO: 108593 - DNA, 17 bp, synthetic construct
  source 1..17: mol_type = other DNA
tccaggagaaggtgggc

SEQ ID NO: 108594 - DNA, 17 bp, synthetic construct
  source 1..17: mol_type = other DNA
ccaggagaaggtgggcc

SEQ ID NO: 108595 - DNA, 17 bp, synthetic construct
  source 1..17: mol_type = other DNA
caggagaaggtgggccc

SEQ ID NO: 108596 - DNA, 17 bp, synthetic construct
  source 1..17: mol_type = other DNA
aggagaaggtgggcccc

SEQ ID NO: 108597 - DNA, 17 bp, synthetic construct
  source 1..17: mol_type = other DNA
ggagaaggtgggcccct

SEQ ID NO: 108598 - DNA, 17 bp, synthetic construct
  source 1..17: mol_type = other DNA
gagaaggtgggcccctg

SEQ ID NO: 108599 - DNA, 17 bp, synthetic construct
  source 1..17: mol_type = other DNA
agaaggtgggcccctga

SEQ ID NO: 108600 - DNA, 17 bp, synthetic construct
  source 1..17: mol_type = other DNA
gaaggtgggcccctgac

SEQ ID NO: 108601 - DNA, 17 bp, synthetic construct
  source 1..17: mol_type = other DNA
aaggtgggcccctgacc

SEQ ID NO: 108602 - DNA, 17 bp, synthetic construct
  source 1..17: mol_type = other DNA
aggtgggcccctgaccg

SEQ ID NO: 108603 - DNA, 17 bp, synthetic construct
  source 1..17: mol_type = other DNA
ggtgggcccctgaccgc

SEQ ID NO: 108604 - DNA, 17 bp, synthetic construct
  source 1..17: mol_type = other DNA
gtgggcccctgaccgca

SEQ ID NO: 108605 - DNA, 17 bp, synthetic construct
  source 1..17: mol_type = other DNA
tgggcccctgaccgcag

SEQ ID NO: 108606 - DNA, 17 bp, synthetic construct
  source 1..17: mol_type = other DNA
gggcccctgaccgcagg

SEQ ID NO: 108607 - DNA, 17 bp, synthetic construct
  source 1..17: mol_type = other DNA
ggcccctgaccgcaggg

SEQ ID NO: 108608 - DNA, 17 bp, synthetic construct
  source 1..17: mol_type = other DNA
gcccctgaccgcagggc

SEQ ID NO: 108609 - DNA, 17 bp, synthetic construct
  source 1..17: mol_type = other DNA
cccctgaccgcagggca

SEQ ID NO: 108610 - DNA, 17 bp, synthetic construct
  source 1..17: mol_type = other DNA
ccctgaccgcagggcaa

SEQ ID NO: 108611 - DNA, 17 bp, synthetic construct
  source 1..17: mol_type = other DNA
cctgaccgcagggcaag

SEQ ID NO: 108612 - DNA, 17 bp, synthetic construct
  source 1..17: mol_type = other DNA
ctgaccgcagggcaagg

SEQ ID NO: 108613 - DNA, 17 bp, synthetic construct
  source 1..17: mol_type = other DNA
tgaccgcagggcaaggc

SEQ ID NO: 108614 - DNA, 17 bp, synthetic construct
  source 1..17: mol_type = other DNA
gaccgcagggcaaggcc

SEQ ID NO: 108615 - DNA, 17 bp, synthetic construct
  source 1..17: mol_type = other DNA
accgcagggcaaggccc

SEQ ID NO: 108616 - DNA, 17 bp, synthetic construct
  source 1..17: mol_type = other DNA
ccgcagggcaaggcccc

SEQ ID NO: 108617 - DNA, 17 bp, synthetic construct
  source 1..17: mol_type = other DNA
cgcagggcaaggcccct

SEQ ID NO: 108618 - DNA, 17 bp, synthetic construct
  source 1..17: mol_type = other DNA
gcagggcaaggcccctg

SEQ ID NO: 108619 - DNA, 17 bp, synthetic construct
  source 1..17: mol_type = other DNA
cagggcaaggcccctgg

SEQ ID NO: 108620 - DNA, 17 bp, synthetic construct
  source 1..17: mol_type = other DNA
agggcaaggcccctggg

SEQ ID NO: 108621 - DNA, 17 bp, synthetic construct
  source 1..17: mol_type = other DNA
gggcaaggcccctggga

SEQ ID NO: 108622 - DNA, 17 bp, synthetic construct
  source 1..17: mol_type = other DNA
ggcaaggcccctgggag

SEQ ID NO: 108623 - DNA, 17 bp, synthetic construct
  source 1..17: mol_type = other DNA
gcaaggcccctgggaga

SEQ ID NO: 108624 - DNA, 17 bp, synthetic construct
  source 1..17: mol_type = other DNA
caaggcccctgggagac

SEQ ID NO: 108625 - DNA, 17 bp, synthetic construct
  source 1..17: mol_type = other DNA
aaggcccctgggagacc

SEQ ID NO: 108626 - DNA, 17 bp, synthetic construct
  source 1..17: mol_type = other DNA
aggcccctgggagacca

SEQ ID NO: 108627 - DNA, 17 bp, synthetic construct
  source 1..17: mol_type = other DNA
ggcccctgggagaccac

SEQ ID NO: 108628 - DNA, 17 bp, synthetic construct
  source 1..17: mol_type = other DNA
gcccctgggagaccacc

SEQ ID NO: 108629 - DNA, 17 bp, synthetic construct
  source 1..17: mol_type = other DNA
cccctgggagaccaccg

SEQ ID NO: 108630 - DNA, 17 bp, synthetic construct
  source 1..17: mol_type = other DNA
ccctgggagaccaccga

SEQ ID NO: 108631 - DNA, 17 bp, synthetic construct
  source 1..17: mol_type = other DNA
cctgggagaccaccgaa

SEQ ID NO: 108632 - DNA, 17 bp, synthetic construct
  source 1..17: mol_type = other DNA
ctgggagaccaccgaaa

SEQ ID NO: 108633 - DNA, 17 bp, synthetic construct
  source 1..17: mol_type = other DNA
tgggagaccaccgaaag

SEQ ID NO: 108634 - DNA, 17 bp, synthetic construct
  source 1..17: mol_type = other DNA
gggagaccaccgaaagg

SEQ ID NO: 108635 - DNA, 17 bp, synthetic construct
  source 1..17: mol_type = other DNA
ggagaccaccgaaaggg

SEQ ID NO: 108636 - DNA, 17 bp, synthetic construct
  source 1..17: mol_type = other DNA
gagaccaccgaaagggt

SEQ ID NO: 108637 - DNA, 17 bp, synthetic construct
  source 1..17: mol_type = other DNA
agaccaccgaaagggtc

SEQ ID NO: 108638 - DNA, 17 bp, synthetic construct
  source 1..17: mol_type = other DNA
gaccaccgaaagggtct

SEQ ID NO: 108639 - DNA, 17 bp, synthetic construct
  source 1..17: mol_type = other DNA
accaccgaaagggtctt

SEQ ID NO: 108640 - DNA, 17 bp, synthetic construct
  source 1..17: mol_type = other DNA
ccaccgaaagggtcttg

SEQ ID NO: 108641 - DNA, 17 bp, synthetic construct
  source 1..17: mol_type = other DNA
caccgaaagggtcttgg

SEQ ID NO: 108642 - DNA, 17 bp, synthetic construct
  source 1..17: mol_type = other DNA
accgaaagggtcttggt

SEQ ID NO: 108643 - DNA, 17 bp, synthetic construct
  source 1..17: mol_type = other DNA
ccgaaagggtcttggtc

SEQ ID NO: 108644 - DNA, 17 bp, synthetic construct
  source 1..17: mol_type = other DNA
cgaaagggtcttggtct

SEQ ID NO: 108645 - DNA, 17 bp, synthetic construct
  source 1..17: mol_type = other DNA
gaaagggtcttggtctt

SEQ ID NO: 108646 - DNA, 17 bp, synthetic construct
  source 1..17: mol_type = other DNA
aaagggtcttggtcttg

SEQ ID NO: 108647 - DNA, 17 bp, synthetic construct
  source 1..17: mol_type = other DNA
aagggtcttggtcttgg

SEQ ID NO: 108648 - DNA, 17 bp, synthetic construct
  source 1..17: mol_type = other DNA
agggtcttggtcttggg

SEQ ID NO: 108649 - DNA, 17 bp, synthetic construct
  source 1..17: mol_type = other DNA
gggtcttggtcttgggg

SEQ ID NO: 108650 - DNA, 17 bp, synthetic construct
  source 1..17: mol_type = other DNA
ggtcttggtcttggggg

SEQ ID NO: 108651 - DNA, 17 bp, synthetic construct
  source 1..17: mol_type = other DNA
gtcttggtcttgggggt

SEQ ID NO: 108652 - DNA, 17 bp, synthetic construct
  source 1..17: mol_type = other DNA
tcttggtcttgggggtg

SEQ ID NO: 108653 - DNA, 17 bp, synthetic construct
  source 1..17: mol_type = other DNA
cttggtcttgggggtgg

SEQ ID NO: 108654 - DNA, 17 bp, synthetic construct
  source 1..17: mol_type = other DNA
ttggtcttgggggtggg

SEQ ID NO: 108655 - DNA, 17 bp, synthetic construct
  source 1..17: mol_type = other DNA
tggtcttgggggtggga

SEQ ID NO: 108656 - DNA, 17 bp, synthetic construct
  source 1..17: mol_type = other DNA
ggtcttgggggtgggac

SEQ ID NO: 108657 - DNA, 17 bp, synthetic construct
  source 1..17: mol_type = other DNA
gtcttgggggtgggaca

SEQ ID NO: 108658 - DNA, 17 bp, synthetic construct
  source 1..17: mol_type = other DNA
tcttgggggtgggacag

SEQ ID NO: 108659 - DNA, 17 bp, synthetic construct
  source 1..17: mol_type = other DNA
cttgggggtgggacagg

SEQ ID NO: 108660 - DNA, 17 bp, synthetic construct
  source 1..17: mol_type = other DNA
ttgggggtgggacagga

SEQ ID NO: 108661 - DNA, 17 bp, synthetic construct
  source 1..17: mol_type = other DNA
tgggggtgggacaggag

SEQ ID NO: 108662 - DNA, 17 bp, synthetic construct
  source 1..17: mol_type = other DNA
gggggtgggacaggagt

SEQ ID NO: 108663 - DNA, 17 bp, synthetic construct
  source 1..17: mol_type = other DNA
ggggtgggacaggagtg

SEQ ID NO: 108664 - DNA, 17 bp, synthetic construct
  source 1..17: mol_type = other DNA
gggtgggacaggagtgg

SEQ ID NO: 108665 - DNA, 17 bp, synthetic construct
  source 1..17: mol_type = other DNA
ggtgggacaggagtggg

SEQ ID NO: 108666 - DNA, 17 bp, synthetic construct
  source 1..17: mol_type = other DNA
gtgggacaggagtgggc

SEQ ID NO: 108667 - DNA, 17 bp, synthetic construct
  source 1..17: mol_type = other DNA
tgggacaggagtgggca

SEQ ID NO: 108668 - DNA, 17 bp, synthetic construct
  source 1..17: mol_type = other DNA
gggacaggagtgggcaa

SEQ ID NO: 108669 - DNA, 17 bp, synthetic construct
  source 1..17: mol_type = other DNA
ggacaggagtgggcaat

SEQ ID NO: 108670 - DNA, 17 bp, synthetic construct
  source 1..17: mol_type = other DNA
gacaggagtgggcaatg

SEQ ID NO: 108671 - DNA, 17 bp, synthetic construct
  source 1..17: mol_type = other DNA
acaggagtgggcaatgg

SEQ ID NO: 108672 - DNA, 17 bp, synthetic construct
  source 1..17: mol_type = other DNA
caggagtgggcaatggg

SEQ ID NO: 108673 - DNA, 17 bp, synthetic construct
  source 1..17: mol_type = other DNA
aggagtgggcaatgggg

SEQ ID NO: 108674 - DNA, 17 bp, synthetic construct
  source 1..17: mol_type = other DNA
ggagtgggcaatggggg

SEQ ID NO: 108675 - DNA, 17 bp, synthetic construct
  source 1..17: mol_type = other DNA
gagtgggcaatggggga

SEQ ID NO: 108676 - DNA, 17 bp, synthetic construct
  source 1..17: mol_type = other DNA
agtgggcaatgggggag

SEQ ID NO: 108677 - DNA, 17 bp, synthetic construct
  source 1..17: mol_type = other DNA
gtgggcaatgggggagg

SEQ ID NO: 108678 - DNA, 17 bp, synthetic construct
  source 1..17: mol_type = other DNA
tgggcaatgggggaggg

SEQ ID NO: 108679 - DNA, 17 bp, synthetic construct
  source 1..17: mol_type = other DNA
gggcaatgggggagggg

SEQ ID NO: 108680 - DNA, 17 bp, synthetic construct
  source 1..17: mol_type = other DNA
ggcaatgggggaggggg

SEQ ID NO: 108681 - DNA, 17 bp, synthetic construct
  source 1..17: mol_type = other DNA
gcaatgggggagggggt

SEQ ID NO: 108682 - DNA, 17 bp, synthetic construct
  source 1..17: mol_type = other DNA
caatgggggagggggtc

SEQ ID NO: 108683 - DNA, 17 bp, synthetic construct
  source 1..17: mol_type = other DNA
aatgggggagggggtca

SEQ ID NO: 108684 - DNA, 17 bp, synthetic construct
  source 1..17: mol_type = other DNA
atgggggagggggtcac

SEQ ID NO: 108685 - DNA, 17 bp, synthetic construct
  source 1..17: mol_type = other DNA
tgggggagggggtcaca

SEQ ID NO: 108686 - DNA, 17 bp, synthetic construct
  source 1..17: mol_type = other DNA
gggggagggggtcacag

SEQ ID NO: 108687 - DNA, 17 bp, synthetic construct
  source 1..17: mol_type = other DNA
ggggagggggtcacagc

SEQ ID NO: 108688 - DNA, 17 bp, synthetic construct
  source 1..17: mol_type = other DNA
gggagggggtcacagct

SEQ ID NO: 108689 - DNA, 17 bp, synthetic construct
  source 1..17: mol_type = other DNA
ggagggggtcacagctg

SEQ ID NO: 108690 - DNA, 17 bp, synthetic construct
  source 1..17: mol_type = other DNA
gagggggtcacagctgg

SEQ ID NO: 108691 - DNA, 17 bp, synthetic construct
  source 1..17: mol_type = other DNA
agggggtcacagctggg

SEQ ID NO: 108692 - DNA, 17 bp, synthetic construct
  source 1..17: mol_type = other DNA
gggggtcacagctgggg

SEQ ID NO: 108693 - DNA, 17 bp, synthetic construct
  source 1..17: mol_type = other DNA
ggggtcacagctggggg

SEQ ID NO: 108694 - DNA, 17 bp, synthetic construct
  source 1..17: mol_type = other DNA
gggtcacagctgggggt

SEQ ID NO: 108695 - DNA, 17 bp, synthetic construct
  source 1..17: mol_type = other DNA
ggtcacagctgggggtc

SEQ ID NO: 108696 - DNA, 17 bp, synthetic construct
  source 1..17: mol_type = other DNA
gtcacagctgggggtct

SEQ ID NO: 108697 - DNA, 17 bp, synthetic construct
  source 1..17: mol_type = other DNA
tcacagctgggggtctc

SEQ ID NO: 108698 - DNA, 17 bp, synthetic construct
  source 1..17: mol_type = other DNA
cacagctgggggtctct

SEQ ID NO: 108699 - DNA, 17 bp, synthetic construct
  source 1..17: mol_type = other DNA
acagctgggggtctctc

SEQ ID NO: 108700 - DNA, 17 bp, synthetic construct
  source 1..17: mol_type = other DNA
cagctgggggtctctct

SEQ ID NO: 108701 - DNA, 17 bp, synthetic construct
  source 1..17: mol_type = other DNA
agctgggggtctctctg

SEQ ID NO: 108702 - DNA, 17 bp, synthetic construct
  source 1..17: mol_type = other DNA
gctgggggtctctctgg

SEQ ID NO: 108703 - DNA, 17 bp, synthetic construct
  source 1..17: mol_type = other DNA
ctgggggtctctctgga

SEQ ID NO: 108704 - DNA, 17 bp, synthetic construct
  source 1..17: mol_type = other DNA
tgggggtctctctggag

SEQ ID NO: 108705 - DNA, 17 bp, synthetic construct
  source 1..17: mol_type = other DNA
gggggtctctctggagc

SEQ ID NO: 108706 - DNA, 17 bp, synthetic construct
  source 1..17: mol_type = other DNA
ggggtctctctggagcc

SEQ ID NO: 108707 - DNA, 17 bp, synthetic construct
  source 1..17: mol_type = other DNA
gggtctctctggagccc

SEQ ID NO: 108708 - DNA, 17 bp, synthetic construct
  source 1..17: mol_type = other DNA
ggtctctctggagcccc

SEQ ID NO: 108709 - DNA, 17 bp, synthetic construct
  source 1..17: mol_type = other DNA
gtctctctggagcccca

SEQ ID NO: 108710 - DNA, 17 bp, synthetic construct
  source 1..17: mol_type = other DNA
tctctctggagccccat

SEQ ID NO: 108711 - DNA, 17 bp, synthetic construct
  source 1..17: mol_type = other DNA
ctctctggagccccatg

SEQ ID NO: 108712 - DNA, 17 bp, synthetic construct
  source 1..17: mol_type = other DNA
tctctggagccccatga

SEQ ID NO: 108713 - DNA, 17 bp, synthetic construct
  source 1..17: mol_type = other DNA
ctctggagccccatgag

SEQ ID NO: 108714 - DNA, 17 bp, synthetic construct
  source 1..17: mol_type = other DNA
tctggagccccatgagg

SEQ ID NO: 108715 - DNA, 17 bp, synthetic construct
  source 1..17: mol_type = other DNA
ctggagccccatgaggc

SEQ ID NO: 108716 - DNA, 17 bp, synthetic construct
  source 1..17: mol_type = other DNA
tggagccccatgaggcc

SEQ ID NO: 108717 - DNA, 17 bp, synthetic construct
  source 1..17: mol_type = other DNA
ggagccccatgaggccc

SEQ ID NO: 108718 - DNA, 17 bp, synthetic construct
  source 1..17: mol_type = other DNA
gagccccatgaggccca

SEQ ID NO: 108719 - DNA, 17 bp, synthetic construct
  source 1..17: mol_type = other DNA
agccccatgaggcccag

SEQ ID NO: 108720 - DNA, 17 bp, synthetic construct
  source 1..17: mol_type = other DNA
gccccatgaggcccagg

SEQ ID NO: 108721 - DNA, 17 bp, synthetic construct
  source 1..17: mol_type = other DNA
ccccatgaggcccaggc

SEQ ID NO: 108722 - DNA, 17 bp, synthetic construct
  source 1..17: mol_type = other DNA
cccatgaggcccaggca

SEQ ID NO: 108723 - DNA, 17 bp, synthetic construct
  source 1..17: mol_type = other DNA
ccatgaggcccaggcat

SEQ ID NO: 108724 - DNA, 17 bp, synthetic construct
  source 1..17: mol_type = other DNA
catgaggcccaggcatc

SEQ ID NO: 108725 - DNA, 17 bp, synthetic construct
  source 1..17: mol_type = other DNA
atgaggcccaggcatca

SEQ ID NO: 108726 - DNA, 17 bp, synthetic construct
  source 1..17: mol_type = other DNA
tgaggcccaggcatcag

SEQ ID NO: 108727 - DNA, 17 bp, synthetic construct
  source 1..17: mol_type = other DNA
gaggcccaggcatcaga

SEQ ID NO: 108728 - DNA, 17 bp, synthetic construct
  source 1..17: mol_type = other DNA
aggcccaggcatcagag

SEQ ID NO: 108729 - DNA, 17 bp, synthetic construct
  source 1..17: mol_type = other DNA
ggcccaggcatcagagt

SEQ ID NO: 108730 - DNA, 17 bp, synthetic construct
  source 1..17: mol_type = other DNA
gcccaggcatcagagtg

SEQ ID NO: 108731 - DNA, 17 bp, synthetic construct
  source 1..17: mol_type = other DNA
cccaggcatcagagtga

SEQ ID NO: 108732 - DNA, 17 bp, synthetic construct
  source 1..17: mol_type = other DNA
ccaggcatcagagtgag

SEQ ID NO: 108733 - DNA, 17 bp, synthetic construct
  source 1..17: mol_type = other DNA
caggcatcagagtgagc

SEQ ID NO: 108734 - DNA, 17 bp, synthetic construct
  source 1..17: mol_type = other DNA
aggcatcagagtgagca

SEQ ID NO: 108735 - DNA, 17 bp, synthetic construct
  source 1..17: mol_type = other DNA
ggcatcagagtgagcag

SEQ ID NO: 108736 - DNA, 17 bp, synthetic construct
  source 1..17: mol_type = other DNA
gcatcagagtgagcagg

SEQ ID NO: 108737 - DNA, 17 bp, synthetic construct
  source 1..17: mol_type = other DNA
catcagagtgagcaggg

SEQ ID NO: 108738 - DNA, 17 bp, synthetic construct
  source 1..17: mol_type = other DNA
atcagagtgagcagggg

SEQ ID NO: 108739 - DNA, 17 bp, synthetic construct
  source 1..17: mol_type = other DNA
tcagagtgagcaggggc

SEQ ID NO: 108740 - DNA, 17 bp, synthetic construct
  source 1..17: mol_type = other DNA
cagagtgagcaggggca

SEQ ID NO: 108741 - DNA, 17 bp, synthetic construct
  source 1..17: mol_type = other DNA
agagtgagcaggggcag

SEQ ID NO: 108742 - DNA, 17 bp, synthetic construct
  source 1..17: mol_type = other DNA
gagtgagcaggggcagg

SEQ ID NO: 108743 - DNA, 17 bp, synthetic construct
  source 1..17: mol_type = other DNA
agtgagcaggggcaggc

SEQ ID NO: 108744 - DNA, 17 bp, synthetic construct
  source 1..17: mol_type = other DNA
gtgagcaggggcaggct

SEQ ID NO: 108745 - DNA, 17 bp, synthetic construct
  source 1..17: mol_type = other DNA
tgagcaggggcaggctt

SEQ ID NO: 108746 - DNA, 17 bp, synthetic construct
  source 1..17: mol_type = other DNA
gagcaggggcaggctta

SEQ ID NO: 108747 - DNA, 17 bp, synthetic construct
  source 1..17: mol_type = other DNA
agcaggggcaggcttag

SEQ ID NO: 108748 - DNA, 17 bp, synthetic construct
  source 1..17: mol_type = other DNA
gcaggggcaggcttagc

SEQ ID NO: 108749 - DNA, 17 bp, synthetic construct
  source 1..17: mol_type = other DNA
caggggcaggcttagcg

SEQ ID NO: 108750 - DNA, 17 bp, synthetic construct
  source 1..17: mol_type = other DNA
aggggcaggcttagcgt

SEQ ID NO: 108751 - DNA, 17 bp, synthetic construct
  source 1..17: mol_type = other DNA
ggggcaggcttagcgtg

SEQ ID NO: 108752 - DNA, 17 bp, synthetic construct
  source 1..17: mol_type = other DNA
gggcaggcttagcgtgg

SEQ ID NO: 108753 - DNA, 17 bp, synthetic construct
  source 1..17: mol_type = other DNA
ggcaggcttagcgtgga

SEQ ID NO: 108754 - DNA, 17 bp, synthetic construct
  source 1..17: mol_type = other DNA
gcaggcttagcgtggac

SEQ ID NO: 108755 - DNA, 17 bp, synthetic construct
  source 1..17: mol_type = other DNA
caggcttagcgtggacc

SEQ ID NO: 108756 - DNA, 17 bp, synthetic construct
  source 1..17: mol_type = other DNA
aggcttagcgtggaccc

SEQ ID NO: 108757 - DNA, 17 bp, synthetic construct
  source 1..17: mol_type = other DNA
ggcttagcgtggacccc

SEQ ID NO: 108758 - DNA, 17 bp, synthetic construct
  source 1..17: mol_type = other DNA
gcttagcgtggacccct

SEQ ID NO: 108759 - DNA, 17 bp, synthetic construct
  source 1..17: mol_type = other DNA
cttagcgtggacccctg

SEQ ID NO: 108760 - DNA, 17 bp, synthetic construct
  source 1..17: mol_type = other DNA
ttagcgtggacccctgt

SEQ ID NO: 108761 - DNA, 17 bp, synthetic construct
  source 1..17: mol_type = other DNA
tagcgtggacccctgtc

SEQ ID NO: 108762 - DNA, 17 bp, synthetic construct
  source 1..17: mol_type = other DNA
agcgtggacccctgtcc

SEQ ID NO: 108763 - DNA, 17 bp, synthetic construct
  source 1..17: mol_type = other DNA
gcgtggacccctgtcca

SEQ ID NO: 108764 - DNA, 17 bp, synthetic construct
  source 1..17: mol_type = other DNA
cgtggacccctgtccag

SEQ ID NO: 108765 - DNA, 17 bp, synthetic construct
  source 1..17: mol_type = other DNA
gtggacccctgtccagg

SEQ ID NO: 108766 - DNA, 17 bp, synthetic construct
  source 1..17: mol_type = other DNA
tggacccctgtccagga

SEQ ID NO: 108767 - DNA, 17 bp, synthetic construct
  source 1..17: mol_type = other DNA
ggacccctgtccaggac

SEQ ID NO: 108768 - DNA, 17 bp, synthetic construct
  source 1..17: mol_type = other DNA
gacccctgtccaggacc

SEQ ID NO: 108769 - DNA, 17 bp, synthetic construct
  source 1..17: mol_type = other DNA
acccctgtccaggaccg

SEQ ID NO: 108770 - DNA, 17 bp, synthetic construct
  source 1..17: mol_type = other DNA
cccctgtccaggaccgg

SEQ ID NO: 108771 - DNA, 17 bp, synthetic construct
  source 1..17: mol_type = other DNA
ccctgtccaggaccggc

SEQ ID NO: 108772 - DNA, 17 bp, synthetic construct
  source 1..17: mol_type = other DNA
cctgtccaggaccggct

SEQ ID NO: 108773 - DNA, 17 bp, synthetic construct
  source 1..17: mol_type = other DNA
ctgtccaggaccggctc

SEQ ID NO: 108774 - DNA, 17 bp, synthetic construct
  source 1..17: mol_type = other DNA
tgtccaggaccggctct

SEQ ID NO: 108775 - DNA, 17 bp, synthetic construct
  source 1..17: mol_type = other DNA
gtccaggaccggctcta

SEQ ID NO: 108776 - DNA, 17 bp, synthetic construct
  source 1..17: mol_type = other DNA
tccaggaccggctctac

SEQ ID NO: 108777 - DNA, 17 bp, synthetic construct
  source 1..17: mol_type = other DNA
ccaggaccggctctacc

SEQ ID NO: 108778 - DNA, 17 bp, synthetic construct
  source 1..17: mol_type = other DNA
caggaccggctctaccc

SEQ ID NO: 108779 - DNA, 17 bp, synthetic construct
  source 1..17: mol_type = other DNA
aggaccggctctaccct

SEQ ID NO: 108780 - DNA, 17 bp, synthetic construct
  source 1..17: mol_type = other DNA
ggaccggctctaccctt

SEQ ID NO: 108781 - DNA, 17 bp, synthetic construct
  source 1..17: mol_type = other DNA
gaccggctctacccttc

SEQ ID NO: 108782 - DNA, 17 bp, synthetic construct
  source 1..17: mol_type = other DNA
accggctctacccttca

SEQ ID NO: 108783 - DNA, 17 bp, synthetic construct
  source 1..17: mol_type = other DNA
ccggctctacccttcac

SEQ ID NO: 108784 - DNA, 17 bp, synthetic construct
  source 1..17: mol_type = other DNA
cggctctacccttcacg

SEQ ID NO: 108785 - DNA, 17 bp, synthetic construct
  source 1..17: mol_type = other DNA
ggctctacccttcacga

SEQ ID NO: 108786 - DNA, 17 bp, synthetic construct
  source 1..17: mol_type = other DNA
gctctacccttcacgac

SEQ ID NO: 108787 - DNA, 17 bp, synthetic construct
  source 1..17: mol_type = other DNA
ctctacccttcacgacc

SEQ ID NO: 108788 - DNA, 17 bp, synthetic construct
  source 1..17: mol_type = other DNA
tctacccttcacgacct

SEQ ID NO: 108789 - DNA, 17 bp, synthetic construct
  source 1..17: mol_type = other DNA
ctacccttcacgacctc

SEQ ID NO: 108790 - DNA, 17 bp, synthetic construct
  source 1..17: mol_type = other DNA
tacccttcacgacctcc

SEQ ID NO: 108791 - DNA, 17 bp, synthetic construct
  source 1..17: mol_type = other DNA
acccttcacgacctccc

SEQ ID NO: 108792 - DNA, 17 bp, synthetic construct
  source 1..17: mol_type = other DNA
cccttcacgacctccct

SEQ ID NO: 108793 - DNA, 17 bp, synthetic construct
  source 1..17: mol_type = other DNA
ccttcacgacctccctg

SEQ ID NO: 108794 - DNA, 17 bp, synthetic construct
  source 1..17: mol_type = other DNA
cttcacgacctccctgg

SEQ ID NO: 108795 - DNA, 17 bp, synthetic construct
  source 1..17: mol_type = other DNA
ttcacgacctccctggg

SEQ ID NO: 108796 - DNA, 17 bp, synthetic construct
  source 1..17: mol_type = other DNA
tcacgacctccctgggg

SEQ ID NO: 108797 - DNA, 17 bp, synthetic construct
  source 1..17: mol_type = other DNA
cacgacctccctgggga

SEQ ID NO: 108798 - DNA, 17 bp, synthetic construct
  source 1..17: mol_type = other DNA
acgacctccctggggat

SEQ ID NO: 108799 - DNA, 17 bp, synthetic construct
  source 1..17: mol_type = other DNA
cgacctccctggggatc

SEQ ID NO: 108800 - DNA, 17 bp, synthetic construct
  source 1..17: mol_type = other DNA
gacctccctggggatca

SEQ ID NO: 108801 - DNA, 17 bp, synthetic construct
  source 1..17: mol_type = other DNA
acctccctggggatcac

SEQ ID NO: 108802 - DNA, 17 bp, synthetic construct
  source 1..17: mol_type = other DNA
cctccctggggatcaca

SEQ ID NO: 108803 - DNA, 17 bp, synthetic construct
  source 1..17: mol_type = other DNA
ctccctggggatcacag

SEQ ID NO: 108804 - DNA, 17 bp, synthetic construct
  source 1..17: mol_type = other DNA
tccctggggatcacagc

SEQ ID NO: 108805 - DNA, 17 bp, synthetic construct
  source 1..17: mol_type = other DNA
ccctggggatcacagct

SEQ ID NO: 108806 - DNA, 17 bp, synthetic construct
  source 1..17: mol_type = other DNA
cctggggatcacagctg

SEQ ID NO: 108807 - DNA, 17 bp, synthetic construct
  source 1..17: mol_type = other DNA
ctggggatcacagctgg

SEQ ID NO: 108808 - DNA, 17 bp, synthetic construct
  source 1..17: mol_type = other DNA
tggggatcacagctggc

SEQ ID NO: 108809 - DNA, 17 bp, synthetic construct
  source 1..17: mol_type = other DNA
ggggatcacagctggca

SEQ ID NO: 108810 - DNA, 17 bp, synthetic construct
  source 1..17: mol_type = other DNA
gggatcacagctggcag

SEQ ID NO: 108811 - DNA, 17 bp, synthetic construct
  source 1..17: mol_type = other DNA
ggatcacagctggcagg

SEQ ID NO: 108812 - DNA, 17 bp, synthetic construct
  source 1..17: mol_type = other DNA
gatcacagctggcaggg

SEQ ID NO: 108813 - DNA, 17 bp, synthetic construct
  source 1..17: mol_type = other DNA
atcacagctggcagggc

SEQ ID NO: 108814 - DNA, 17 bp, synthetic construct
  source 1..17: mol_type = other DNA
tcacagctggcagggca

SEQ ID NO: 108815 - DNA, 17 bp, synthetic construct
  source 1..17: mol_type = other DNA
cacagctggcagggcag

SEQ ID NO: 108816 - DNA, 17 bp, synthetic construct
  source 1..17: mol_type = other DNA
acagctggcagggcagg

SEQ ID NO: 108817 - DNA, 17 bp, synthetic construct
  source 1..17: mol_type = other DNA
cagctggcagggcaggt

SEQ ID NO: 108818 - DNA, 17 bp, synthetic construct
  source 1..17: mol_type = other DNA
agctggcagggcaggtg

SEQ ID NO: 108819 - DNA, 17 bp, synthetic construct
  source 1..17: mol_type = other DNA
gctggcagggcaggtga

SEQ ID NO: 108820 - DNA, 17 bp, synthetic construct
  source 1..17: mol_type = other DNA
ctggcagggcaggtgag

SEQ ID NO: 108821 - DNA, 17 bp, synthetic construct
  source 1..17: mol_type = other DNA
tggcagggcaggtgagg

SEQ ID NO: 108822 - DNA, 17 bp, synthetic construct
  source 1..17: mol_type = other DNA
ggcagggcaggtgaggg

SEQ ID NO: 108823 - DNA, 17 bp, synthetic construct
  source 1..17: mol_type = other DNA
gcagggcaggtgagggt

SEQ ID NO: 108824 - DNA, 17 bp, synthetic construct
  source 1..17: mol_type = other DNA
cagggcaggtgagggta

SEQ ID NO: 108825 - DNA, 17 bp, synthetic construct
  source 1..17: mol_type = other DNA
agggcaggtgagggtac

SEQ ID NO: 108826 - DNA, 17 bp, synthetic construct
  source 1..17: mol_type = other DNA
gggcaggtgagggtacc

SEQ ID NO: 108827 - DNA, 17 bp, synthetic construct
  source 1..17: mol_type = other DNA
ggcaggtgagggtacca

SEQ ID NO: 108828 - DNA, 17 bp, synthetic construct
  source 1..17: mol_type = other DNA
gcaggtgagggtaccac

SEQ ID NO: 108829 - DNA, 17 bp, synthetic construct
  source 1..17: mol_type = other DNA
caggtgagggtaccacc

SEQ ID NO: 108830 - DNA, 17 bp, synthetic construct
  source 1..17: mol_type = other DNA
aggtgagggtaccaccc

SEQ ID NO: 108831 - DNA, 17 bp, synthetic construct
  source 1..17: mol_type = other DNA
ggtgagggtaccaccct

SEQ ID NO: 108832 - DNA, 17 bp, synthetic construct
  source 1..17: mol_type = other DNA
gtgagggtaccaccctc

SEQ ID NO: 108833 - DNA, 17 bp, synthetic construct
  source 1..17: mol_type = other DNA
tgagggtaccaccctca

SEQ ID NO: 108834 - DNA, 17 bp, synthetic construct
  source 1..17: mol_type = other DNA
gagggtaccaccctcaa

SEQ ID NO: 108835 - DNA, 17 bp, synthetic construct
  source 1..17: mol_type = other DNA
agggtaccaccctcaag

SEQ ID NO: 108836 - DNA, 17 bp, synthetic construct
  source 1..17: mol_type = other DNA
gggtaccaccctcaagg

SEQ ID NO: 108837 - DNA, 17 bp, synthetic construct
  source 1..17: mol_type = other DNA
ggtaccaccctcaaggg

SEQ ID NO: 108838 - DNA, 17 bp, synthetic construct
  source 1..17: mol_type = other DNA
gtaccaccctcaagggt

SEQ ID NO: 108839 - DNA, 17 bp, synthetic construct
  source 1..17: mol_type = other DNA
taccaccctcaagggtt

SEQ ID NO: 108840 - DNA, 17 bp, synthetic construct
  source 1..17: mol_type = other DNA
accaccctcaagggttg

SEQ ID NO: 108841 - DNA, 17 bp, synthetic construct
  source 1..17: mol_type = other DNA
ccaccctcaagggttgc

SEQ ID NO: 108842 - DNA, 17 bp, synthetic construct
  source 1..17: mol_type = other DNA
caccctcaagggttgca

SEQ ID NO: 108843 - DNA, 17 bp, synthetic construct
  source 1..17: mol_type = other DNA
accctcaagggttgcac

SEQ ID NO: 108844 - DNA, 17 bp, synthetic construct
  source 1..17: mol_type = other DNA
ccctcaagggttgcaca

SEQ ID NO: 108845 - DNA, 17 bp, synthetic construct
  source 1..17: mol_type = other DNA
cctcaagggttgcacag

SEQ ID NO: 108846 - DNA, 17 bp, synthetic construct
  source 1..17: mol_type = other DNA
ctcaagggttgcacagc

SEQ ID NO: 108847 - DNA, 17 bp, synthetic construct
  source 1..17: mol_type = other DNA
tcaagggttgcacagcc

SEQ ID NO: 108848 - DNA, 17 bp, synthetic construct
  source 1..17: mol_type = other DNA
caagggttgcacagcca

SEQ ID NO: 108849 - DNA, 17 bp, synthetic construct
  source 1..17: mol_type = other DNA
aagggttgcacagccag

SEQ ID NO: 108850 - DNA, 17 bp, synthetic construct
  source 1..17: mol_type = other DNA
agggttgcacagccagc

SEQ ID NO: 108851 - DNA, 17 bp, synthetic construct
  source 1..17: mol_type = other DNA
gggttgcacagccagcc

SEQ ID NO: 108852 - DNA, 17 bp, synthetic construct
  source 1..17: mol_type = other DNA
ggttgcacagccagccg

SEQ ID NO: 108853 - DNA, 17 bp, synthetic construct
  source 1..17: mol_type = other DNA
gttgcacagccagccgc

SEQ ID NO: 108854 - DNA, 17 bp, synthetic construct
  source 1..17: mol_type = other DNA
ttgcacagccagccgca

SEQ ID NO: 108855 - DNA, 17 bp, synthetic construct
  source 1..17: mol_type = other DNA
tgcacagccagccgcaa

SEQ ID NO: 108856 - DNA, 17 bp, synthetic construct
  source 1..17: mol_type = other DNA
gcacagccagccgcaag

SEQ ID NO: 108857 - DNA, 17 bp, synthetic construct
  source 1..17: mol_type = other DNA
cacagccagccgcaaga

SEQ ID NO: 108858 - DNA, 17 bp, synthetic construct
  source 1..17: mol_type = other DNA
acagccagccgcaagag

SEQ ID NO: 108859 - DNA, 17 bp, synthetic construct
  source 1..17: mol_type = other DNA
cagccagccgcaagagc

SEQ ID NO: 108860 - DNA, 17 bp, synthetic construct
  source 1..17: mol_type = other DNA
agccagccgcaagagcc

SEQ ID NO: 108861 - DNA, 17 bp, synthetic construct
  source 1..17: mol_type = other DNA
gccagccgcaagagccc

SEQ ID NO: 108862 - DNA, 17 bp, synthetic construct
  source 1..17: mol_type = other DNA
ccagccgcaagagcccc

SEQ ID NO: 108863 - DNA, 17 bp, synthetic construct
  source 1..17: mol_type = other DNA
cagccgcaagagccccg

SEQ ID NO: 108864 - DNA, 17 bp, synthetic construct
  source 1..17: mol_type = other DNA
agccgcaagagccccgg

SEQ ID NO: 108865 - DNA, 17 bp, synthetic construct
  source 1..17: mol_type = other DNA
gccgcaagagccccggc

SEQ ID NO: 108866 - DNA, 17 bp, synthetic construct
  source 1..17: mol_type = other DNA
ccgcaagagccccggcc

SEQ ID NO: 108867 - DNA, 17 bp, synthetic construct
  source 1..17: mol_type = other DNA
cgcaagagccccggcct

SEQ ID NO: 108868 - DNA, 17 bp, synthetic construct
  source 1..17: mol_type = other DNA
gcaagagccccggcctc

SEQ ID NO: 108869 - DNA, 17 bp, synthetic construct
  source 1..17: mol_type = other DNA
caagagccccggcctca

SEQ ID NO: 108870 - DNA, 17 bp, synthetic construct
  source 1..17: mol_type = other DNA
aagagccccggcctcaa

SEQ ID NO: 108871 - DNA, 17 bp, synthetic construct
  source 1..17: mol_type = other DNA
agagccccggcctcaac

SEQ ID NO: 108872 - DNA, 17 bp, synthetic construct
  source 1..17: mol_type = other DNA
gagccccggcctcaacc

SEQ ID NO: 108873 - DNA, 17 bp, synthetic construct
  source 1..17: mol_type = other DNA
agccccggcctcaaccc

SEQ ID NO: 108874 - DNA, 17 bp, synthetic construct
  source 1..17: mol_type = other DNA
gccccggcctcaaccca

SEQ ID NO: 108875 - DNA, 17 bp, synthetic construct
  source 1..17: mol_type = other DNA
ccccggcctcaacccac

SEQ ID NO: 108876 - DNA, 17 bp, synthetic construct
  source 1..17: mol_type = other DNA
cccggcctcaacccacg

SEQ ID NO: 108877 - DNA, 17 bp, synthetic construct
  source 1..17: mol_type = other DNA
ccggcctcaacccacgc

SEQ ID NO: 108878 - DNA, 17 bp, synthetic construct
  source 1..17: mol_type = other DNA
cggcctcaacccacgct

SEQ ID NO: 108879 - DNA, 17 bp, synthetic construct
  source 1..17: mol_type = other DNA
ggcctcaacccacgctc

SEQ ID NO: 108880 - DNA, 17 bp, synthetic construct
  source 1..17: mol_type = other DNA
gcctcaacccacgctcg

SEQ ID NO: 108881 - DNA, 17 bp, synthetic construct
  source 1..17: mol_type = other DNA
cctcaacccacgctcga

SEQ ID NO: 108882 - DNA, 17 bp, synthetic construct
  source 1..17: mol_type = other DNA
ctcaacccacgctcgac

SEQ ID NO: 108883 - DNA, 17 bp, synthetic construct
  source 1..17: mol_type = other DNA
tcaacccacgctcgact

SEQ ID NO: 108884 - DNA, 17 bp, synthetic construct
  source 1..17: mol_type = other DNA
caacccacgctcgactc

SEQ ID NO: 108885 - DNA, 17 bp, synthetic construct
  source 1..17: mol_type = other DNA
aacccacgctcgactcc

SEQ ID NO: 108886 - DNA, 17 bp, synthetic construct
  source 1..17: mol_type = other DNA
acccacgctcgactccc

SEQ ID NO: 108887 - DNA, 17 bp, synthetic construct
  source 1..17: mol_type = other DNA
cccacgctcgactccca

SEQ ID NO: 108888 - DNA, 17 bp, synthetic construct
  source 1..17: mol_type = other DNA
ccacgctcgactcccac

SEQ ID NO: 108889 - DNA, 17 bp, synthetic construct
  source 1..17: mol_type = other DNA
cacgctcgactcccacg

SEQ ID NO: 108890 - DNA, 17 bp, synthetic construct
  source 1..17: mol_type = other DNA
acgctcgactcccacgg

SEQ ID NO: 108891 - DNA, 17 bp, synthetic construct
  source 1..17: mol_type = other DNA
cgctcgactcccacggc

SEQ ID NO: 108892 - DNA, 17 bp, synthetic construct
  source 1..17: mol_type = other DNA
gctcgactcccacggcc

SEQ ID NO: 108893 - DNA, 17 bp, synthetic construct
  source 1..17: mol_type = other DNA
ctcgactcccacggccc

SEQ ID NO: 108894 - DNA, 17 bp, synthetic construct
  source 1..17: mol_type = other DNA
tcgactcccacggccca

SEQ ID NO: 108895 - DNA, 17 bp, synthetic construct
  source 1..17: mol_type = other DNA
cgactcccacggcccat

SEQ ID NO: 108896 - DNA, 17 bp, synthetic construct
  source 1..17: mol_type = other DNA
gactcccacggcccatc

SEQ ID NO: 108897 - DNA, 17 bp, synthetic construct
  source 1..17: mol_type = other DNA
actcccacggcccatct

SEQ ID NO: 108898 - DNA, 17 bp, synthetic construct
  source 1..17: mol_type = other DNA
ctcccacggcccatctg

SEQ ID NO: 108899 - DNA, 17 bp, synthetic construct
  source 1..17: mol_type = other DNA
tcccacggcccatctgt

SEQ ID NO: 108900 - DNA, 17 bp, synthetic construct
  source 1..17: mol_type = other DNA
cccacggcccatctgtg

SEQ ID NO: 108901 - DNA, 17 bp, synthetic construct
  source 1..17: mol_type = other DNA
ccacggcccatctgtgg

SEQ ID NO: 108902 - DNA, 17 bp, synthetic construct
  source 1..17: mol_type = other DNA
cacggcccatctgtggg

SEQ ID NO: 108903 - DNA, 17 bp, synthetic construct
  source 1..17: mol_type = other DNA
acggcccatctgtgggc

SEQ ID NO: 108904 - DNA, 17 bp, synthetic construct
  source 1..17: mol_type = other DNA
cggcccatctgtgggca

SEQ ID NO: 108905 - DNA, 17 bp, synthetic construct
  source 1..17: mol_type = other DNA
ggcccatctgtgggcat

SEQ ID NO: 108906 - DNA, 17 bp, synthetic construct
  source 1..17: mol_type = other DNA
gcccatctgtgggcatc

SEQ ID NO: 108907 - DNA, 17 bp, synthetic construct
  source 1..17: mol_type = other DNA
cccatctgtgggcatct

SEQ ID NO: 108908 - DNA, 17 bp, synthetic construct
  source 1..17: mol_type = other DNA
ccatctgtgggcatctc

SEQ ID NO: 108909 - DNA, 17 bp, synthetic construct
  source 1..17: mol_type = other DNA
catctgtgggcatctca

SEQ ID NO: 108910 - DNA, 17 bp, synthetic construct
  source 1..17: mol_type = other DNA
atctgtgggcatctcat

SEQ ID NO: 108911 - DNA, 17 bp, synthetic construct
  source 1..17: mol_type = other DNA
tctgtgggcatctcatg

SEQ ID NO: 108912 - DNA, 17 bp, synthetic construct
  source 1..17: mol_type = other DNA
ctgtgggcatctcatgc

SEQ ID NO: 108913 - DNA, 17 bp, synthetic construct
  source 1..17: mol_type = other DNA
tgtgggcatctcatgcc

SEQ ID NO: 108914 - DNA, 17 bp, synthetic construct
  source 1..17: mol_type = other DNA
gtgggcatctcatgccg

SEQ ID NO: 108915 - DNA, 17 bp, synthetic construct
  source 1..17: mol_type = other DNA
tgggcatctcatgccgc

SEQ ID NO: 108916 - DNA, 17 bp, synthetic construct
  source 1..17: mol_type = other DNA
gggcatctcatgccgca

SEQ ID NO: 108917 - DNA, 17 bp, synthetic construct
  source 1..17: mol_type = other DNA
ggcatctcatgccgcac

SEQ ID NO: 108918 - DNA, 17 bp, synthetic construct
  source 1..17: mol_type = other DNA
gcatctcatgccgcacg

SEQ ID NO: 108919 - DNA, 17 bp, synthetic construct
  source 1..17: mol_type = other DNA
catctcatgccgcacgg

SEQ ID NO: 108920 - DNA, 17 bp, synthetic construct
  source 1..17: mol_type = other DNA
atctcatgccgcacggg

SEQ ID NO: 108921 - DNA, 17 bp, synthetic construct
  source 1..17: mol_type = other DNA
tctcatgccgcacgggc

SEQ ID NO: 108922 - DNA, 17 bp, synthetic construct
  source 1..17: mol_type = other DNA
ctcatgccgcacgggct

SEQ ID NO: 108923 - DNA, 17 bp, synthetic construct
  source 1..17: mol_type = other DNA
tcatgccgcacgggctg

SEQ ID NO: 108924 - DNA, 17 bp, synthetic construct
  source 1..17: mol_type = other DNA
catgccgcacgggctgc

SEQ ID NO: 108925 - DNA, 17 bp, synthetic construct
  source 1..17: mol_type = other DNA
atgccgcacgggctgcc

SEQ ID NO: 108926 - DNA, 17 bp, synthetic construct
  source 1..17: mol_type = other DNA
tgccgcacgggctgcct

SEQ ID NO: 108927 - DNA, 17 bp, synthetic construct
  source 1..17: mol_type = other DNA
gccgcacgggctgcctg

SEQ ID NO: 108928 - DNA, 17 bp, synthetic construct
  source 1..17: mol_type = other DNA
ccgcacgggctgcctgg

SEQ ID NO: 108929 - DNA, 17 bp, synthetic construct
  source 1..17: mol_type = other DNA
cgcacgggctgcctggc

SEQ ID NO: 108930 - DNA, 17 bp, synthetic construct
  source 1..17: mol_type = other DNA
gcacgggctgcctggct

SEQ ID NO: 108931 - DNA, 17 bp, synthetic construct
  source 1..17: mol_type = other DNA
cacgggctgcctggctc

SEQ ID NO: 108932 - DNA, 17 bp, synthetic construct
  source 1..17: mol_type = other DNA
acgggctgcctggctct

SEQ ID NO: 108933 - DNA, 17 bp, synthetic construct
  source 1..17: mol_type = other DNA
cgggctgcctggctctc

SEQ ID NO: 108934 - DNA, 17 bp, synthetic construct
  source 1..17: mol_type = other DNA
gggctgcctggctctca

SEQ ID NO: 108935 - DNA, 17 bp, synthetic construct
  source 1..17: mol_type = other DNA
ggctgcctggctctcag

SEQ ID NO: 108936 - DNA, 17 bp, synthetic construct
  source 1..17: mol_type = other DNA
gctgcctggctctcagc

SEQ ID NO: 108937 - DNA, 17 bp, synthetic construct
  source 1..17: mol_type = other DNA
ctgcctggctctcagcc

SEQ ID NO: 108938 - DNA, 17 bp, synthetic construct
  source 1..17: mol_type = other DNA
tgcctggctctcagccg

SEQ ID NO: 108939 - DNA, 17 bp, synthetic construct
  source 1..17: mol_type = other DNA
gcctggctctcagccga

SEQ ID NO: 108940 - DNA, 17 bp, synthetic construct
  source 1..17: mol_type = other DNA
cctggctctcagccgag

SEQ ID NO: 108941 - DNA, 17 bp, synthetic construct
  source 1..17: mol_type = other DNA
ctggctctcagccgagc

SEQ ID NO: 108942 - DNA, 17 bp, synthetic construct
  source 1..17: mol_type = other DNA
tggctctcagccgagcg

SEQ ID NO: 108943 - DNA, 17 bp, synthetic construct
  source 1..17: mol_type = other DNA
ggctctcagccgagcgt

SEQ ID NO: 108944 - DNA, 17 bp, synthetic construct
  source 1..17: mol_type = other DNA
gctctcagccgagcgtt

SEQ ID NO: 108945 - DNA, 17 bp, synthetic construct
  source 1..17: mol_type = other DNA
ctctcagccgagcgttt

SEQ ID NO: 108946 - DNA, 17 bp, synthetic construct
  source 1..17: mol_type = other DNA
tctcagccgagcgtttt

SEQ ID NO: 108947 - DNA, 17 bp, synthetic construct
  source 1..17: mol_type = other DNA
ctcagccgagcgttttc

SEQ ID NO: 108948 - DNA, 17 bp, synthetic construct
  source 1..17: mol_type = other DNA
tcagccgagcgttttcc

SEQ ID NO: 108949 - DNA, 17 bp, synthetic construct
  source 1..17: mol_type = other DNA
cagccgagcgttttccc

SEQ ID NO: 108950 - DNA, 17 bp, synthetic construct
  source 1..17: mol_type = other DNA
agccgagcgttttccct

SEQ ID NO: 108951 - DNA, 17 bp, synthetic construct
  source 1..17: mol_type = other DNA
gccgagcgttttccctc

SEQ ID NO: 108952 - DNA, 17 bp, synthetic construct
  source 1..17: mol_type = other DNA
ccgagcgttttccctcg

SEQ ID NO: 108953 - DNA, 17 bp, synthetic construct
  source 1..17: mol_type = other DNA
cgagcgttttccctcgt

SEQ ID NO: 108954 - DNA, 17 bp, synthetic construct
  source 1..17: mol_type = other DNA
gagcgttttccctcgtc

SEQ ID NO: 108955 - DNA, 17 bp, synthetic construct
  source 1..17: mol_type = other DNA
agcgttttccctcgtct

SEQ ID NO: 108956 - DNA, 17 bp, synthetic construct
  source 1..17: mol_type = other DNA
gcgttttccctcgtctg

SEQ ID NO: 108957 - DNA, 17 bp, synthetic construct
  source 1..17: mol_type = other DNA
cgttttccctcgtctgc

SEQ ID NO: 108958 - DNA, 17 bp, synthetic construct
  source 1..17: mol_type = other DNA
gttttccctcgtctgct

SEQ ID NO: 108959 - DNA, 17 bp, synthetic construct
  source 1..17: mol_type = other DNA
ttttccctcgtctgctg

SEQ ID NO: 108960 - DNA, 17 bp, synthetic construct
  source 1..17: mol_type = other DNA
tttccctcgtctgctgt

SEQ ID NO: 108961 - DNA, 17 bp, synthetic construct
  source 1..17: mol_type = other DNA
ttccctcgtctgctgtc

SEQ ID NO: 108962 - DNA, 17 bp, synthetic construct
  source 1..17: mol_type = other DNA
tccctcgtctgctgtct

SEQ ID NO: 108963 - DNA, 17 bp, synthetic construct
  source 1..17: mol_type = other DNA
ccctcgtctgctgtctc

SEQ ID NO: 108964 - DNA, 17 bp, synthetic construct
  source 1..17: mol_type = other DNA
cctcgtctgctgtctct

SEQ ID NO: 108965 - DNA, 17 bp, synthetic construct
  source 1..17: mol_type = other DNA
ctcgtctgctgtctctt

SEQ ID NO: 108966 - DNA, 17 bp, synthetic construct
  source 1..17: mol_type = other DNA
tcgtctgctgtctcttg

SEQ ID NO: 108967 - DNA, 17 bp, synthetic construct
  source 1..17: mol_type = other DNA
cgtctgctgtctcttgg

SEQ ID NO: 108968 - DNA, 17 bp, synthetic construct
  source 1..17: mol_type = other DNA
gtctgctgtctcttggc

SEQ ID NO: 108969 - DNA, 17 bp, synthetic construct
  source 1..17: mol_type = other DNA
tctgctgtctcttggcc

SEQ ID NO: 108970 - DNA, 17 bp, synthetic construct
  source 1..17: mol_type = other DNA
ctgctgtctcttggcca

SEQ ID NO: 108971 - DNA, 17 bp, synthetic construct
  source 1..17: mol_type = other DNA
tgctgtctcttggccag

SEQ ID NO: 108972 - DNA, 17 bp, synthetic construct
  source 1..17: mol_type = other DNA
gctgtctcttggccaga

SEQ ID NO: 108973 - DNA, 17 bp, synthetic construct
  source 1..17: mol_type = other DNA
ctgtctcttggccagag

SEQ ID NO: 108974 - DNA, 17 bp, synthetic construct
  source 1..17: mol_type = other DNA
tgtctcttggccagagc

SEQ ID NO: 108975 - DNA, 17 bp, synthetic construct
  source 1..17: mol_type = other DNA
gtctcttggccagagcc

SEQ ID NO: 108976 - DNA, 17 bp, synthetic construct
  source 1..17: mol_type = other DNA
tctcttggccagagccg

SEQ ID NO: 108977 - DNA, 17 bp, synthetic construct
  source 1..17: mol_type = other DNA
ctcttggccagagccgc

SEQ ID NO: 108978 - DNA, 17 bp, synthetic construct
  source 1..17: mol_type = other DNA
tcttggccagagccgca

SEQ ID NO: 108979 - DNA, 17 bp, synthetic construct
  source 1..17: mol_type = other DNA
cttggccagagccgcag

SEQ ID NO: 108980 - DNA, 17 bp, synthetic construct
  source 1..17: mol_type = other DNA
ttggccagagccgcagc

SEQ ID NO: 108981 - DNA, 17 bp, synthetic construct
  source 1..17: mol_type = other DNA
tggccagagccgcagca

SEQ ID NO: 108982 - DNA, 17 bp, synthetic construct
  source 1..17: mol_type = other DNA
ggccagagccgcagcat

SEQ ID NO: 108983 - DNA, 17 bp, synthetic construct
  source 1..17: mol_type = other DNA
gccagagccgcagcatt

SEQ ID NO: 108984 - DNA, 17 bp, synthetic construct
  source 1..17: mol_type = other DNA
ccagagccgcagcatta

SEQ ID NO: 108985 - DNA, 17 bp, synthetic construct
  source 1..17: mol_type = other DNA
cagagccgcagcattaa

SEQ ID NO: 108986 - DNA, 17 bp, synthetic construct
  source 1..17: mol_type = other DNA
agagccgcagcattaat

SEQ ID NO: 108987 - DNA, 17 bp, synthetic construct
  source 1..17: mol_type = other DNA
gagccgcagcattaata

SEQ ID NO: 108988 - DNA, 17 bp, synthetic construct
  source 1..17: mol_type = other DNA
agccgcagcattaatac

SEQ ID NO: 108989 - DNA, 17 bp, synthetic construct
  source 1..17: mol_type = other DNA
gccgcagcattaatact

SEQ ID NO: 108990 - DNA, 17 bp, synthetic construct
  source 1..17: mol_type = other DNA
ccgcagcattaatactt

SEQ ID NO: 108991 - DNA, 17 bp, synthetic construct
  source 1..17: mol_type = other DNA
cgcagcattaatactta

SEQ ID NO: 108992 - DNA, 17 bp, synthetic construct
  source 1..17: mol_type = other DNA
gcagcattaatacttac

SEQ ID NO: 108993 - DNA, 17 bp, synthetic construct
  source 1..17: mol_type = other DNA
cagcattaatacttact

SEQ ID NO: 108994 - DNA, 17 bp, synthetic construct
  source 1..17: mol_type = other DNA
agcattaatacttactg

SEQ ID NO: 108995 - DNA, 17 bp, synthetic construct
  source 1..17: mol_type = other DNA
gcattaatacttactgt

SEQ ID NO: 108996 - DNA, 17 bp, synthetic construct
  source 1..17: mol_type = other DNA
cattaatacttactgtc

SEQ ID NO: 108997 - DNA, 17 bp, synthetic construct
  source 1..17: mol_type = other DNA
attaatacttactgtca

SEQ ID NO: 108998 - DNA, 17 bp, synthetic construct
  source 1..17: mol_type = other DNA
ttaatacttactgtcaa

SEQ ID NO: 108999 - DNA, 17 bp, synthetic construct
  source 1..17: mol_type = other DNA
taatacttactgtcaat

SEQ ID NO: 109000 - DNA, 17 bp, synthetic construct
  source 1..17: mol_type = other DNA
aatacttactgtcaata

SEQ ID NO: 109001 - DNA, 17 bp, synthetic construct
  source 1..17: mol_type = other DNA
atacttactgtcaatag

SEQ ID NO: 109002 - DNA, 17 bp, synthetic construct
  source 1..17: mol_type = other DNA
tacttactgtcaataga

SEQ ID NO: 109003 - DNA, 17 bp, synthetic construct
  source 1..17: mol_type = other DNA
acttactgtcaatagag

SEQ ID NO: 109004 - DNA, 17 bp, synthetic construct
  source 1..17: mol_type = other DNA
cttactgtcaatagaga

SEQ ID NO: 109005 - DNA, 17 bp, synthetic construct
  source 1..17: mol_type = other DNA
ttactgtcaatagagaa

SEQ ID NO: 109006 - DNA, 17 bp, synthetic construct
  source 1..17: mol_type = other DNA
tactgtcaatagagaaa

SEQ ID NO: 109007 - DNA, 17 bp, synthetic construct
  source 1..17: mol_type = other DNA
actgtcaatagagaaag

SEQ ID NO: 109008 - DNA, 17 bp, synthetic construct
  source 1..17: mol_type = other DNA
ctgtcaatagagaaaga

SEQ ID NO: 109009 - DNA, 17 bp, synthetic construct
  source 1..17: mol_type = other DNA
tgtcaatagagaaagat

SEQ ID NO: 109010 - DNA, 17 bp, synthetic construct
  source 1..17: mol_type = other DNA
gtcaatagagaaagatg

SEQ ID NO: 109011 - DNA, 17 bp, synthetic construct
  source 1..17: mol_type = other DNA
tcaatagagaaagatgc

SEQ ID NO: 109012 - DNA, 17 bp, synthetic construct
  source 1..17: mol_type = other DNA
caatagagaaagatgca

SEQ ID NO: 109013 - DNA, 17 bp, synthetic construct
  source 1..17: mol_type = other DNA
aatagagaaagatgcag

SEQ ID NO: 109014 - DNA, 17 bp, synthetic construct
  source 1..17: mol_type = other DNA
atagagaaagatgcagc

SEQ ID NO: 109015 - DNA, 17 bp, synthetic construct
  source 1..17: mol_type = other DNA
tagagaaagatgcagcc

SEQ ID NO: 109016 - DNA, 17 bp, synthetic construct
  source 1..17: mol_type = other DNA
agagaaagatgcagccc

SEQ ID NO: 109017 - DNA, 17 bp, synthetic construct
  source 1..17: mol_type = other DNA
gagaaagatgcagcccc

SEQ ID NO: 109018 - DNA, 17 bp, synthetic construct
  source 1..17: mol_type = other DNA
agaaagatgcagcccca

SEQ ID NO: 109019 - DNA, 17 bp, synthetic construct
  source 1..17: mol_type = other DNA
gaaagatgcagccccag

SEQ ID NO: 109020 - DNA, 17 bp, synthetic construct
  source 1..17: mol_type = other DNA
aaagatgcagccccagg

SEQ ID NO: 109021 - DNA, 17 bp, synthetic construct
  source 1..17: mol_type = other DNA
aagatgcagccccaggg

SEQ ID NO: 109022 - DNA, 17 bp, synthetic construct
  source 1..17: mol_type = other DNA
agatgcagccccagggg

SEQ ID NO: 109023 - DNA, 17 bp, synthetic construct
  source 1..17: mol_type = other DNA
gatgcagccccaggggc

SEQ ID NO: 109024 - DNA, 17 bp, synthetic construct
  source 1..17: mol_type = other DNA
atgcagccccaggggcc

SEQ ID NO: 109025 - DNA, 17 bp, synthetic construct
  source 1..17: mol_type = other DNA
tgcagccccaggggcca

SEQ ID NO: 109026 - DNA, 17 bp, synthetic construct
  source 1..17: mol_type = other DNA
gcagccccaggggccac

SEQ ID NO: 109027 - DNA, 17 bp, synthetic construct
  source 1..17: mol_type = other DNA
cagccccaggggccacc

SEQ ID NO: 109028 - DNA, 17 bp, synthetic construct
  source 1..17: mol_type = other DNA
agccccaggggccaccg

SEQ ID NO: 109029 - DNA, 17 bp, synthetic construct
  source 1..17: mol_type = other DNA
gccccaggggccaccgg

SEQ ID NO: 109030 - DNA, 17 bp, synthetic construct
  source 1..17: mol_type = other DNA
ccccaggggccaccggg

SEQ ID NO: 109031 - DNA, 17 bp, synthetic construct
  source 1..17: mol_type = other DNA
cccaggggccaccggga

SEQ ID NO: 109032 - DNA, 17 bp, synthetic construct
  source 1..17: mol_type = other DNA
ccaggggccaccgggag

SEQ ID NO: 109033 - DNA, 17 bp, synthetic construct
  source 1..17: mol_type = other DNA
caggggccaccgggaga

SEQ ID NO: 109034 - DNA, 17 bp, synthetic construct
  source 1..17: mol_type = other DNA
aggggccaccgggagac

SEQ ID NO: 109035 - DNA, 17 bp, synthetic construct
  source 1..17: mol_type = other DNA
ggggccaccgggagaca

SEQ ID NO: 109036 - DNA, 17 bp, synthetic construct
  source 1..17: mol_type = other DNA
gggccaccgggagacac

SEQ ID NO: 109037 - DNA, 17 bp, synthetic construct
  source 1..17: mol_type = other DNA
ggccaccgggagacacc

SEQ ID NO: 109038 - DNA, 17 bp, synthetic construct
  source 1..17: mol_type = other DNA
gccaccgggagacaccc

SEQ ID NO: 109039 - DNA, 17 bp, synthetic construct
  source 1..17: mol_type = other DNA
ccaccgggagacaccca

SEQ ID NO: 109040 - DNA, 17 bp, synthetic construct
  source 1..17: mol_type = other DNA
caccgggagacacccag

SEQ ID NO: 109041 - DNA, 17 bp, synthetic construct
  source 1..17: mol_type = other DNA
accgggagacacccagc

SEQ ID NO: 109042 - DNA, 17 bp, synthetic construct
  source 1..17: mol_type = other DNA
ccgggagacacccagcc

SEQ ID NO: 109043 - DNA, 17 bp, synthetic construct
  source 1..17: mol_type = other DNA
cgggagacacccagccg

SEQ ID NO: 109044 - DNA, 17 bp, synthetic construct
  source 1..17: mol_type = other DNA
gggagacacccagccgg

SEQ ID NO: 109045 - DNA, 17 bp, synthetic construct
  source 1..17: mol_type = other DNA
ggagacacccagccggg

SEQ ID NO: 109046 - DNA, 17 bp, synthetic construct
  source 1..17: mol_type = other DNA
gagacacccagccgggc

SEQ ID NO: 109047 - DNA, 17 bp, synthetic construct
  source 1..17: mol_type = other DNA
agacacccagccgggct

SEQ ID NO: 109048 - DNA, 17 bp, synthetic construct
  source 1..17: mol_type = other DNA
gacacccagccgggctg

SEQ ID NO: 109049 - DNA, 17 bp, synthetic construct
  source 1..17: mol_type = other DNA
acacccagccgggctgg

SEQ ID NO: 109050 - DNA, 17 bp, synthetic construct
  source 1..17: mol_type = other DNA
cacccagccgggctggc

SEQ ID NO: 109051 - DNA, 17 bp, synthetic construct
  source 1..17: mol_type = other DNA
acccagccgggctggcc

SEQ ID NO: 109052 - DNA, 17 bp, synthetic construct
  source 1..17: mol_type = other DNA
cccagccgggctggcca

SEQ ID NO: 109053 - DNA, 17 bp, synthetic construct
  source 1..17: mol_type = other DNA
ccagccgggctggccat

SEQ ID NO: 109054 - DNA, 17 bp, synthetic construct
  source 1..17: mol_type = other DNA
cagccgggctggccatg

SEQ ID NO: 109055 - DNA, 17 bp, synthetic construct
  source 1..17: mol_type = other DNA
agccgggctggccatga

SEQ ID NO: 109056 - DNA, 17 bp, synthetic construct
  source 1..17: mol_type = other DNA
gccgggctggccatgag

SEQ ID NO: 109057 - DNA, 17 bp, synthetic construct
  source 1..17: mol_type = other DNA
ccgggctggccatgagg

SEQ ID NO: 109058 - DNA, 17 bp, synthetic construct
  source 1..17: mol_type = other DNA
cgggctggccatgaggc

SEQ ID NO: 109059 - DNA, 17 bp, synthetic construct
  source 1..17: mol_type = other DNA
gggctggccatgaggct

SEQ ID NO: 109060 - DNA, 17 bp, synthetic construct
  source 1..17: mol_type = other DNA
ggctggccatgaggctg

SEQ ID NO: 109061 - DNA, 17 bp, synthetic construct
  source 1..17: mol_type = other DNA
gctggccatgaggctgc

SEQ ID NO: 109062 - DNA, 17 bp, synthetic construct
  source 1..17: mol_type = other DNA
ctggccatgaggctgct

SEQ ID NO: 109063 - DNA, 17 bp, synthetic construct
  source 1..17: mol_type = other DNA
tggccatgaggctgctg

SEQ ID NO: 109064 - DNA, 17 bp, synthetic construct
  source 1..17: mol_type = other DNA
ggccatgaggctgctgc

SEQ ID NO: 109065 - DNA, 17 bp, synthetic construct
  source 1..17: mol_type = other DNA
gccatgaggctgctgca

SEQ ID NO: 109066 - DNA, 17 bp, synthetic construct
  source 1..17: mol_type = other DNA
ccatgaggctgctgcag

SEQ ID NO: 109067 - DNA, 17 bp, synthetic construct
  source 1..17: mol_type = other DNA
catgaggctgctgcagc

SEQ ID NO: 109068 - DNA, 17 bp, synthetic construct
  source 1..17: mol_type = other DNA
atgaggctgctgcagcc

SEQ ID NO: 109069 - DNA, 17 bp, synthetic construct
  source 1..17: mol_type = other DNA
tgaggctgctgcagccc

SEQ ID NO: 109070 - DNA, 17 bp, synthetic construct
  source 1..17: mol_type = other DNA
gaggctgctgcagcccc

SEQ ID NO: 109071 - DNA, 17 bp, synthetic construct
  source 1..17: mol_type = other DNA
aggctgctgcagcccct

SEQ ID NO: 109072 - DNA, 17 bp, synthetic construct
  source 1..17: mol_type = other DNA
ggctgctgcagcccctc

SEQ ID NO: 109073 - DNA, 17 bp, synthetic construct
  source 1..17: mol_type = other DNA
gctgctgcagcccctcc

SEQ ID NO: 109074 - DNA, 17 bp, synthetic construct
  source 1..17: mol_type = other DNA
ctgctgcagcccctccc

SEQ ID NO: 109075 - DNA, 17 bp, synthetic construct
  source 1..17: mol_type = other DNA
tgctgcagcccctccct

SEQ ID NO: 109076 - DNA, 17 bp, synthetic construct
  source 1..17: mol_type = other DNA
gctgcagcccctccctg

SEQ ID NO: 109077 - DNA, 17 bp, synthetic construct
  source 1..17: mol_type = other DNA
ctgcagcccctccctgc

SEQ ID NO: 109078 - DNA, 17 bp, synthetic construct
  source 1..17: mol_type = other DNA
tgcagcccctccctgcc

SEQ ID NO: 109079 - DNA, 17 bp, synthetic construct
  source 1..17: mol_type = other DNA
gcagcccctccctgccc

SEQ ID NO: 109080 - DNA, 17 bp, synthetic construct
  source 1..17: mol_type = other DNA
cagcccctccctgcccc

SEQ ID NO: 109081 - DNA, 17 bp, synthetic construct
  source 1..17: mol_type = other DNA
agcccctccctgccccg

SEQ ID NO: 109082 - DNA, 17 bp, synthetic construct
  source 1..17: mol_type = other DNA
gcccctccctgccccgc

SEQ ID NO: 109083 - DNA, 17 bp, synthetic construct
  source 1..17: mol_type = other DNA
cccctccctgccccgcc

SEQ ID NO: 109084 - DNA, 17 bp, synthetic construct
  source 1..17: mol_type = other DNA
ccctccctgccccgccc

SEQ ID NO: 109085 - DNA, 17 bp, synthetic construct
  source 1..17: mol_type = other DNA
cctccctgccccgccct

SEQ ID NO: 109086 - DNA, 17 bp, synthetic construct
  source 1..17: mol_type = other DNA
ctccctgccccgccctc

SEQ ID NO: 109087 - DNA, 17 bp, synthetic construct
  source 1..17: mol_type = other DNA
tccctgccccgccctcc

SEQ ID NO: 109088 - DNA, 17 bp, synthetic construct
  source 1..17: mol_type = other DNA
ccctgccccgccctcca

SEQ ID NO: 109089 - DNA, 17 bp, synthetic construct
  source 1..17: mol_type = other DNA
cctgccccgccctccac

SEQ ID NO: 109090 - DNA, 17 bp, synthetic construct
  source 1..17: mol_type = other DNA
ctgccccgccctccacc

SEQ ID NO: 109091 - DNA, 17 bp, synthetic construct
  source 1..17: mol_type = other DNA
tgccccgccctccaccc

SEQ ID NO: 109092 - DNA, 17 bp, synthetic construct
  source 1..17: mol_type = other DNA
gccccgccctccacccc

SEQ ID NO: 109093 - DNA, 17 bp, synthetic construct
  source 1..17: mol_type = other DNA
ccccgccctccaccccc

SEQ ID NO: 109094 - DNA, 17 bp, synthetic construct
  source 1..17: mol_type = other DNA
cccgccctccaccccct

SEQ ID NO: 109095 - DNA, 17 bp, synthetic construct
  source 1..17: mol_type = other DNA
ccgccctccaccccctc

SEQ ID NO: 109096 - DNA, 17 bp, synthetic construct
  source 1..17: mol_type = other DNA
cgccctccaccccctcc

SEQ ID NO: 109097 - DNA, 17 bp, synthetic construct
  source 1..17: mol_type = other DNA
gccctccaccccctccc

SEQ ID NO: 109098 - DNA, 17 bp, synthetic construct
  source 1..17: mol_type = other DNA
ccctccaccccctccca

SEQ ID NO: 109099 - DNA, 17 bp, synthetic construct
  source 1..17: mol_type = other DNA
cctccaccccctcccaa

SEQ ID NO: 109100 - DNA, 17 bp, synthetic construct
  source 1..17: mol_type = other DNA
ctccaccccctcccaag

SEQ ID NO: 109101 - DNA, 17 bp, synthetic construct
  source 1..17: mol_type = other DNA
tccaccccctcccaagc

SEQ ID NO: 109102 - DNA, 17 bp, synthetic construct
  source 1..17: mol_type = other DNA
ccaccccctcccaagct

SEQ ID NO: 109103 - DNA, 17 bp, synthetic construct
  source 1..17: mol_type = other DNA
caccccctcccaagctt

SEQ ID NO: 109104 - DNA, 17 bp, synthetic construct
  source 1..17: mol_type = other DNA
accccctcccaagcttg

SEQ ID NO: 109105 - DNA, 17 bp, synthetic construct
  source 1..17: mol_type = other DNA
ccccctcccaagcttgg

SEQ ID NO: 109106 - DNA, 17 bp, synthetic construct
  source 1..17: mol_type = other DNA
cccctcccaagcttggg

SEQ ID NO: 109107 - DNA, 17 bp, synthetic construct
  source 1..17: mol_type = other DNA
ccctcccaagcttgggg

SEQ ID NO: 109108 - DNA, 17 bp, synthetic construct
  source 1..17: mol_type = other DNA
cctcccaagcttggggt

SEQ ID NO: 109109 - DNA, 17 bp, synthetic construct
  source 1..17: mol_type = other DNA
ctcccaagcttggggtc

SEQ ID NO: 109110 - DNA, 17 bp, synthetic construct
  source 1..17: mol_type = other DNA
tcccaagcttggggtct

SEQ ID NO: 109111 - DNA, 17 bp, synthetic construct
  source 1..17: mol_type = other DNA
cccaagcttggggtctg

SEQ ID NO: 109112 - DNA, 17 bp, synthetic construct
  source 1..17: mol_type = other DNA
ccaagcttggggtctgg

SEQ ID NO: 109113 - DNA, 17 bp, synthetic construct
  source 1..17: mol_type = other DNA
caagcttggggtctggg

SEQ ID NO: 109114 - DNA, 17 bp, synthetic construct
  source 1..17: mol_type = other DNA
aagcttggggtctgggc

SEQ ID NO: 109115 - DNA, 17 bp, synthetic construct
  source 1..17: mol_type = other DNA
agcttggggtctgggct

SEQ ID NO: 109116 - DNA, 17 bp, synthetic construct
  source 1..17: mol_type = other DNA
gcttggggtctgggctg

SEQ ID NO: 109117 - DNA, 17 bp, synthetic construct
  source 1..17: mol_type = other DNA
cttggggtctgggctgg

SEQ ID NO: 109118 - DNA, 17 bp, synthetic construct
  source 1..17: mol_type = other DNA
ttggggtctgggctggg

SEQ ID NO: 109119 - DNA, 17 bp, synthetic construct
  source 1..17: mol_type = other DNA
tggggtctgggctgggc

SEQ ID NO: 109120 - DNA, 17 bp, synthetic construct
  source 1..17: mol_type = other DNA
ggggtctgggctgggca

SEQ ID NO: 109121 - DNA, 17 bp, synthetic construct
  source 1..17: mol_type = other DNA
gggtctgggctgggcag

SEQ ID NO: 109122 - DNA, 17 bp, synthetic construct
  source 1..17: mol_type = other DNA
ggtctgggctgggcagg

SEQ ID NO: 109123 - DNA, 17 bp, synthetic construct
  source 1..17: mol_type = other DNA
gtctgggctgggcaggt

SEQ ID NO: 109124 - DNA, 17 bp, synthetic construct
  source 1..17: mol_type = other DNA
tctgggctgggcaggtg

SEQ ID NO: 109125 - DNA, 17 bp, synthetic construct
  source 1..17: mol_type = other DNA
ctgggctgggcaggtga

SEQ ID NO: 109126 - DNA, 17 bp, synthetic construct
  source 1..17: mol_type = other DNA
tgggctgggcaggtgag

SEQ ID NO: 109127 - DNA, 17 bp, synthetic construct
  source 1..17: mol_type = other DNA
gggctgggcaggtgagg

SEQ ID NO: 109128 - DNA, 17 bp, synthetic construct
  source 1..17: mol_type = other DNA
ggctgggcaggtgaggc

SEQ ID NO: 109129 - DNA, 17 bp, synthetic construct
  source 1..17: mol_type = other DNA
gctgggcaggtgaggct

SEQ ID NO: 109130 - DNA, 17 bp, synthetic construct
  source 1..17: mol_type = other DNA
ctgggcaggtgaggctc

SEQ ID NO: 109131 - DNA, 17 bp, synthetic construct
  source 1..17: mol_type = other DNA
tgggcaggtgaggctcc

SEQ ID NO: 109132 - DNA, 17 bp, synthetic construct
  source 1..17: mol_type = other DNA
gggcaggtgaggctccc

SEQ ID NO: 109133 - DNA, 17 bp, synthetic construct
  source 1..17: mol_type = other DNA
ggcaggtgaggctccct

SEQ ID NO: 109134 - DNA, 17 bp, synthetic construct
  source 1..17: mol_type = other DNA
gcaggtgaggctccctg

SEQ ID NO: 109135 - DNA, 17 bp, synthetic construct
  source 1..17: mol_type = other DNA
caggtgaggctccctgg

SEQ ID NO: 109136 - DNA, 17 bp, synthetic construct
  source 1..17: mol_type = other DNA
aggtgaggctccctggg

SEQ ID NO: 109137 - DNA, 17 bp, synthetic construct
  source 1..17: mol_type = other DNA
ggtgaggctccctgggg

SEQ ID NO: 109138 - DNA, 17 bp, synthetic construct
  source 1..17: mol_type = other DNA
gtgaggctccctggggt

SEQ ID NO: 109139 - DNA, 17 bp, synthetic construct
  source 1..17: mol_type = other DNA
tgaggctccctggggtc

SEQ ID NO: 109140 - DNA, 17 bp, synthetic construct
  source 1..17: mol_type = other DNA
gaggctccctggggtct

SEQ ID NO: 109141 - DNA, 17 bp, synthetic construct
  source 1..17: mol_type = other DNA
aggctccctggggtctc

SEQ ID NO: 109142 - DNA, 17 bp, synthetic construct
  source 1..17: mol_type = other DNA
ggctccctggggtctct

SEQ ID NO: 109143 - DNA, 17 bp, synthetic construct
  source 1..17: mol_type = other DNA
gctccctggggtctctc

SEQ ID NO: 109144 - DNA, 17 bp, synthetic construct
  source 1..17: mol_type = other DNA
ctccctggggtctctct

SEQ ID NO: 109145 - DNA, 17 bp, synthetic construct
  source 1..17: mol_type = other DNA
tccctggggtctctctc

SEQ ID NO: 109146 - DNA, 17 bp, synthetic construct
  source 1..17: mol_type = other DNA
ccctggggtctctctcc

SEQ ID NO: 109147 - DNA, 17 bp, synthetic construct
  source 1..17: mol_type = other DNA
cctggggtctctctcca

SEQ ID NO: 109148 - DNA, 17 bp, synthetic construct
  source 1..17: mol_type = other DNA
ctggggtctctctccat

SEQ ID NO: 109149 - DNA, 17 bp, synthetic construct
  source 1..17: mol_type = other DNA
tggggtctctctccatc

SEQ ID NO: 109150 - DNA, 17 bp, synthetic construct
  source 1..17: mol_type = other DNA
ggggtctctctccatct

SEQ ID NO: 109151 - DNA, 17 bp, synthetic construct
  source 1..17: mol_type = other DNA
gggtctctctccatctg

SEQ ID NO: 109152 - DNA, 17 bp, synthetic construct
  source 1..17: mol_type = other DNA
ggtctctctccatctgt

SEQ ID NO: 109153 - DNA, 17 bp, synthetic construct
  source 1..17: mol_type = other DNA
gtctctctccatctgtg

SEQ ID NO: 109154 - DNA, 17 bp, synthetic construct
  source 1..17: mol_type = other DNA
tctctctccatctgtgg

SEQ ID NO: 109155 - DNA, 17 bp, synthetic construct
  source 1..17: mol_type = other DNA
ctctctccatctgtgga

SEQ ID NO: 109156 - DNA, 17 bp, synthetic construct
  source 1..17: mol_type = other DNA
tctctccatctgtggaa

SEQ ID NO: 109157 - DNA, 17 bp, synthetic construct
  source 1..17: mol_type = other DNA
ctctccatctgtggaag

SEQ ID NO: 109158 - DNA, 17 bp, synthetic construct
  source 1..17: mol_type = other DNA
tctccatctgtggaagg

SEQ ID NO: 109159 - DNA, 17 bp, synthetic construct
  source 1..17: mol_type = other DNA
ctccatctgtggaaggg

SEQ ID NO: 109160 - DNA, 17 bp, synthetic construct
  source 1..17: mol_type = other DNA
tccatctgtggaaggga

SEQ ID NO: 109161 - DNA, 17 bp, synthetic construct
  source 1..17: mol_type = other DNA
ccatctgtggaagggag

SEQ ID NO: 109162 - DNA, 17 bp, synthetic construct
  source 1..17: mol_type = other DNA
catctgtggaagggagg

SEQ ID NO: 109163 - DNA, 17 bp, synthetic construct
  source 1..17: mol_type = other DNA
atctgtggaagggaggc

SEQ ID NO: 109164 - DNA, 17 bp, synthetic construct
  source 1..17: mol_type = other DNA
tctgtggaagggaggct

SEQ ID NO: 109165 - DNA, 17 bp, synthetic construct
  source 1..17: mol_type = other DNA
ctgtggaagggaggctg

SEQ ID NO: 109166 - DNA, 17 bp, synthetic construct
  source 1..17: mol_type = other DNA
tgtggaagggaggctgg

SEQ ID NO: 109167 - DNA, 17 bp, synthetic construct
  source 1..17: mol_type = other DNA
gtggaagggaggctggg

SEQ ID NO: 109168 - DNA, 17 bp, synthetic construct
  source 1..17: mol_type = other DNA
tggaagggaggctgggt

SEQ ID NO: 109169 - DNA, 17 bp, synthetic construct
  source 1..17: mol_type = other DNA
ggaagggaggctgggtg

SEQ ID NO: 109170 - DNA, 17 bp, synthetic construct
  source 1..17: mol_type = other DNA
gaagggaggctgggtgg

SEQ ID NO: 109171 - DNA, 17 bp, synthetic construct
  source 1..17: mol_type = other DNA
aagggaggctgggtggt

SEQ ID NO: 109172 - DNA, 17 bp, synthetic construct
  source 1..17: mol_type = other DNA
agggaggctgggtggtc

SEQ ID NO: 109173 - DNA, 17 bp, synthetic construct
  source 1..17: mol_type = other DNA
gggaggctgggtggtca

SEQ ID NO: 109174 - DNA, 17 bp, synthetic construct
  source 1..17: mol_type = other DNA
ggaggctgggtggtcag

SEQ ID NO: 109175 - DNA, 17 bp, synthetic construct
  source 1..17: mol_type = other DNA
gaggctgggtggtcagc

SEQ ID NO: 109176 - DNA, 17 bp, synthetic construct
  source 1..17: mol_type = other DNA
aggctgggtggtcagca

SEQ ID NO: 109177 - DNA, 17 bp, synthetic construct
  source 1..17: mol_type = other DNA
ggctgggtggtcagcag

SEQ ID NO: 109178 - DNA, 17 bp, synthetic construct
  source 1..17: mol_type = other DNA
gctgggtggtcagcagg

SEQ ID NO: 109179 - DNA, 17 bp, synthetic construct
  source 1..17: mol_type = other DNA
ctgggtggtcagcaggg

SEQ ID NO: 109180 - DNA, 17 bp, synthetic construct
  source 1..17: mol_type = other DNA
tgggtggtcagcagggc

SEQ ID NO: 109181 - DNA, 17 bp, synthetic construct
  source 1..17: mol_type = other DNA
gggtggtcagcagggct

SEQ ID NO: 109182 - DNA, 17 bp, synthetic construct
  source 1..17: mol_type = other DNA
ggtggtcagcagggctg

SEQ ID NO: 109183 - DNA, 17 bp, synthetic construct
  source 1..17: mol_type = other DNA
gtggtcagcagggctgg

SEQ ID NO: 109184 - DNA, 17 bp, synthetic construct
  source 1..17: mol_type = other DNA
tggtcagcagggctgga

SEQ ID NO: 109185 - DNA, 17 bp, synthetic construct
  source 1..17: mol_type = other DNA
ggtcagcagggctggag

SEQ ID NO: 109186 - DNA, 17 bp, synthetic construct
  source 1..17: mol_type = other DNA
gtcagcagggctggagg

SEQ ID NO: 109187 - DNA, 17 bp, synthetic construct
  source 1..17: mol_type = other DNA
tcagcagggctggaggc

SEQ ID NO: 109188 - DNA, 17 bp, synthetic construct
  source 1..17: mol_type = other DNA
cagcagggctggaggca

SEQ ID NO: 109189 - DNA, 17 bp, synthetic construct
  source 1..17: mol_type = other DNA
agcagggctggaggcag

SEQ ID NO: 109190 - DNA, 17 bp, synthetic construct
  source 1..17: mol_type = other DNA
gcagggctggaggcagg

SEQ ID NO: 109191 - DNA, 17 bp, synthetic construct
  source 1..17: mol_type = other DNA
cagggctggaggcaggg

SEQ ID NO: 109192 - DNA, 17 bp, synthetic construct
  source 1..17: mol_type = other DNA
agggctggaggcagggg

SEQ ID NO: 109193 - DNA, 17 bp, synthetic construct
  source 1..17: mol_type = other DNA
gggctggaggcaggggg

SEQ ID NO: 109194 - DNA, 17 bp, synthetic construct
  source 1..17: mol_type = other DNA
ggctggaggcagggggc

SEQ ID NO: 109195 - DNA, 17 bp, synthetic construct
  source 1..17: mol_type = other DNA
gctggaggcagggggct

SEQ ID NO: 109196 - DNA, 17 bp, synthetic construct
  source 1..17: mol_type = other DNA
ctggaggcagggggctt

SEQ ID NO: 109197 - DNA, 17 bp, synthetic construct
  source 1..17: mol_type = other DNA
tggaggcagggggcttc

SEQ ID NO: 109198 - DNA, 17 bp, synthetic construct
  source 1..17: mol_type = other DNA
ggaggcagggggcttcc

SEQ ID NO: 109199 - DNA, 17 bp, synthetic construct
  source 1..17: mol_type = other DNA
gaggcagggggcttccc

SEQ ID NO: 109200 - DNA, 17 bp, synthetic construct
  source 1..17: mol_type = other DNA
aggcagggggcttcccc

SEQ ID NO: 109201 - DNA, 17 bp, synthetic construct
  source 1..17: mol_type = other DNA
ggcagggggcttccccc

SEQ ID NO: 109202 - DNA, 17 bp, synthetic construct
  source 1..17: mol_type = other DNA
gcagggggcttccccca

SEQ ID NO: 109203 - DNA, 17 bp, synthetic construct
  source 1..17: mol_type = other DNA
cagggggcttcccccag

SEQ ID NO: 109204 - DNA, 17 bp, synthetic construct
  source 1..17: mol_type = other DNA
agggggcttcccccagt

SEQ ID NO: 109205 - DNA, 17 bp, synthetic construct
  source 1..17: mol_type = other DNA
gggggcttcccccagtg

SEQ ID NO: 109206 - DNA, 17 bp, synthetic construct
  source 1..17: mol_type = other DNA
ggggcttcccccagtgg

SEQ ID NO: 109207 - DNA, 17 bp, synthetic construct
  source 1..17: mol_type = other DNA
gggcttcccccagtggc

SEQ ID NO: 109208 - DNA, 17 bp, synthetic construct
  source 1..17: mol_type = other DNA
ggcttcccccagtggct

SEQ ID NO: 109209 - DNA, 17 bp, synthetic construct
  source 1..17: mol_type = other DNA
gcttcccccagtggctc

SEQ ID NO: 109210 - DNA, 17 bp, synthetic construct
  source 1..17: mol_type = other DNA
cttcccccagtggctcc

SEQ ID NO: 109211 - DNA, 17 bp, synthetic construct
  source 1..17: mol_type = other DNA
ttcccccagtggctccc

SEQ ID NO: 109212 - DNA, 17 bp, synthetic construct
  source 1..17: mol_type = other DNA
tcccccagtggctccca

SEQ ID NO: 109213 - DNA, 17 bp, synthetic construct
  source 1..17: mol_type = other DNA
cccccagtggctcccag

SEQ ID NO: 109214 - DNA, 17 bp, synthetic construct
  source 1..17: mol_type = other DNA
ccccagtggctcccagc

SEQ ID NO: 109215 - DNA, 17 bp, synthetic construct
  source 1..17: mol_type = other DNA
cccagtggctcccagcc

SEQ ID NO: 109216 - DNA, 17 bp, synthetic construct
  source 1..17: mol_type = other DNA
ccagtggctcccagcct

SEQ ID NO: 109217 - DNA, 17 bp, synthetic construct
  source 1..17: mol_type = other DNA
cagtggctcccagcctg

SEQ ID NO: 109218 - DNA, 17 bp, synthetic construct
  source 1..17: mol_type = other DNA
agtggctcccagcctgg

SEQ ID NO: 109219 - DNA, 17 bp, synthetic construct
  source 1..17: mol_type = other DNA
gtggctcccagcctggg

SEQ ID NO: 109220 - DNA, 17 bp, synthetic construct
  source 1..17: mol_type = other DNA
tggctcccagcctgggc

SEQ ID NO: 109221 - DNA, 17 bp, synthetic construct
  source 1..17: mol_type = other DNA
ggctcccagcctgggcc

SEQ ID NO: 109222 - DNA, 17 bp, synthetic construct
  source 1..17: mol_type = other DNA
gctcccagcctgggccc

SEQ ID NO: 109223 - DNA, 17 bp, synthetic construct
  source 1..17: mol_type = other DNA
ctcccagcctgggcccg

SEQ ID NO: 109224 - DNA, 17 bp, synthetic construct
  source 1..17: mol_type = other DNA
tcccagcctgggcccgg

SEQ ID NO: 109225 - DNA, 17 bp, synthetic construct
  source 1..17: mol_type = other DNA
cccagcctgggcccggg

SEQ ID NO: 109226 - DNA, 17 bp, synthetic construct
  source 1..17: mol_type = other DNA
ccagcctgggcccgggg

SEQ ID NO: 109227 - DNA, 17 bp, synthetic construct
  source 1..17: mol_type = other DNA
cagcctgggcccggggg

SEQ ID NO: 109228 - DNA, 17 bp, synthetic construct
  source 1..17: mol_type = other DNA
agcctgggcccgggggg

SEQ ID NO: 109229 - DNA, 17 bp, synthetic construct
  source 1..17: mol_type = other DNA
gcctgggcccgggggga

SEQ ID NO: 109230 - DNA, 17 bp, synthetic construct
  source 1..17: mol_type = other DNA
cctgggcccggggggag

SEQ ID NO: 109231 - DNA, 17 bp, synthetic construct
  source 1..17: mol_type = other DNA
ctgggcccggggggagc

SEQ ID NO: 109232 - DNA, 17 bp, synthetic construct
  source 1..17: mol_type = other DNA
tgggcccggggggagct

SEQ ID NO: 109233 - DNA, 17 bp, synthetic construct
  source 1..17: mol_type = other DNA
gggcccggggggagctg

SEQ ID NO: 109234 - DNA, 17 bp, synthetic construct
  source 1..17: mol_type = other DNA
ggcccggggggagctgc

SEQ ID NO: 109235 - DNA, 17 bp, synthetic construct
  source 1..17: mol_type = other DNA
gcccggggggagctgcg

SEQ ID NO: 109236 - DNA, 17 bp, synthetic construct
  source 1..17: mol_type = other DNA
cccggggggagctgcgt

SEQ ID NO: 109237 - DNA, 17 bp, synthetic construct
  source 1..17: mol_type = other DNA
ccggggggagctgcgtc

SEQ ID NO: 109238 - DNA, 17 bp, synthetic construct
  source 1..17: mol_type = other DNA
cggggggagctgcgtct

SEQ ID NO: 109239 - DNA, 17 bp, synthetic construct
  source 1..17: mol_type = other DNA
ggggggagctgcgtctg

SEQ ID NO: 109240 - DNA, 17 bp, synthetic construct
  source 1..17: mol_type = other DNA
gggggagctgcgtctgg

SEQ ID NO: 109241 - DNA, 17 bp, synthetic construct
  source 1..17: mol_type = other DNA
ggggagctgcgtctggc

SEQ ID NO: 109242 - DNA, 17 bp, synthetic construct
  source 1..17: mol_type = other DNA
gggagctgcgtctggct

SEQ ID NO: 109243 - DNA, 17 bp, synthetic construct
  source 1..17: mol_type = other DNA
ggagctgcgtctggctg

SEQ ID NO: 109244 - DNA, 17 bp, synthetic construct
  source 1..17: mol_type = other DNA
gagctgcgtctggctgc

SEQ ID NO: 109245 - DNA, 17 bp, synthetic construct
  source 1..17: mol_type = other DNA
agctgcgtctggctgca

SEQ ID NO: 109246 - DNA, 17 bp, synthetic construct
  source 1..17: mol_type = other DNA
gctgcgtctggctgcaa

SEQ ID NO: 109247 - DNA, 17 bp, synthetic construct
  source 1..17: mol_type = other DNA
ctgcgtctggctgcaag

SEQ ID NO: 109248 - DNA, 17 bp, synthetic construct
  source 1..17: mol_type = other DNA
tgcgtctggctgcaagg

SEQ ID NO: 109249 - DNA, 17 bp, synthetic construct
  source 1..17: mol_type = other DNA
gcgtctggctgcaaggt

SEQ ID NO: 109250 - DNA, 17 bp, synthetic construct
  source 1..17: mol_type = other DNA
cgtctggctgcaaggtt

SEQ ID NO: 109251 - DNA, 17 bp, synthetic construct
  source 1..17: mol_type = other DNA
gtctggctgcaaggttt

SEQ ID NO: 109252 - DNA, 17 bp, synthetic construct
  source 1..17: mol_type = other DNA
tctggctgcaaggtttg

SEQ ID NO: 109253 - DNA, 17 bp, synthetic construct
  source 1..17: mol_type = other DNA
ctggctgcaaggtttgg

SEQ ID NO: 109254 - DNA, 17 bp, synthetic construct
  source 1..17: mol_type = other DNA
tggctgcaaggtttggg

SEQ ID NO: 109255 - DNA, 17 bp, synthetic construct
  source 1..17: mol_type = other DNA
ggctgcaaggtttgggg

SEQ ID NO: 109256 - DNA, 17 bp, synthetic construct
  source 1..17: mol_type = other DNA
gctgcaaggtttggggg

SEQ ID NO: 109257 - DNA, 17 bp, synthetic construct
  source 1..17: mol_type = other DNA
ctgcaaggtttgggggc

SEQ ID NO: 109258 - DNA, 17 bp, synthetic construct
  source 1..17: mol_type = other DNA
tgcaaggtttgggggct

SEQ ID NO: 109259 - DNA, 17 bp, synthetic construct
  source 1..17: mol_type = other DNA
gcaaggtttgggggctg

SEQ ID NO: 109260 - DNA, 17 bp, synthetic construct
  source 1..17: mol_type = other DNA
caaggtttgggggctgg

SEQ ID NO: 109261 - DNA, 17 bp, synthetic construct
  source 1..17: mol_type = other DNA
aaggtttgggggctggt

SEQ ID NO: 109262 - DNA, 17 bp, synthetic construct
  source 1..17: mol_type = other DNA
aggtttgggggctggtt

SEQ ID NO: 109263 - DNA, 17 bp, synthetic construct
  source 1..17: mol_type = other DNA
ggtttgggggctggttt

SEQ ID NO: 109264 - DNA, 17 bp, synthetic construct
  source 1..17: mol_type = other DNA
gtttgggggctggtttg

SEQ ID NO: 109265 - DNA, 17 bp, synthetic construct
  source 1..17: mol_type = other DNA
tttgggggctggtttga

SEQ ID NO: 109266 - DNA, 17 bp, synthetic construct
  source 1..17: mol_type = other DNA
ttgggggctggtttgac

SEQ ID NO: 109267 - DNA, 17 bp, synthetic construct
  source 1..17: mol_type = other DNA
tgggggctggtttgacc

SEQ ID NO: 109268 - DNA, 17 bp, synthetic construct
  source 1..17: mol_type = other DNA
gggggctggtttgacca

SEQ ID NO: 109269 - DNA, 17 bp, synthetic construct
  source 1..17: mol_type = other DNA
ggggctggtttgaccag

SEQ ID NO: 109270 - DNA, 17 bp, synthetic construct
  source 1..17: mol_type = other DNA
gggctggtttgaccaga

SEQ ID NO: 109271 - DNA, 17 bp, synthetic construct
  source 1..17: mol_type = other DNA
ggctggtttgaccagaa

SEQ ID NO: 109272 - DNA, 17 bp, synthetic construct
  source 1..17: mol_type = other DNA
gctggtttgaccagaat

SEQ ID NO: 109273 - DNA, 17 bp, synthetic construct
  source 1..17: mol_type = other DNA
ctggtttgaccagaata

SEQ ID NO: 109274 - DNA, 17 bp, synthetic construct
  source 1..17: mol_type = other DNA
tggtttgaccagaatag

SEQ ID NO: 109275 - DNA, 17 bp, synthetic construct
  source 1..17: mol_type = other DNA
ggtttgaccagaatagc

SEQ ID NO: 109276 - DNA, 17 bp, synthetic construct
  source 1..17: mol_type = other DNA
gtttgaccagaatagcc

SEQ ID NO: 109277 - DNA, 17 bp, synthetic construct
  source 1..17: mol_type = other DNA
tttgaccagaatagcca

SEQ ID NO: 109278 - DNA, 17 bp, synthetic construct
  source 1..17: mol_type = other DNA
ttgaccagaatagccac

SEQ ID NO: 109279 - DNA, 17 bp, synthetic construct
  source 1..17: mol_type = other DNA
tgaccagaatagccacc

SEQ ID NO: 109280 - DNA, 17 bp, synthetic construct
  source 1..17: mol_type = other DNA
gaccagaatagccacct

SEQ ID NO: 109281 - DNA, 17 bp, synthetic construct
  source 1..17: mol_type = other DNA
accagaatagccacctc

SEQ ID NO: 109282 - DNA, 17 bp, synthetic construct
  source 1..17: mol_type = other DNA
ccagaatagccacctcc

SEQ ID NO: 109283 - DNA, 17 bp, synthetic construct
  source 1..17: mol_type = other DNA
cagaatagccacctcct

SEQ ID NO: 109284 - DNA, 17 bp, synthetic construct
  source 1..17: mol_type = other DNA
agaatagccacctcctt

SEQ ID NO: 109285 - DNA, 17 bp, synthetic construct
  source 1..17: mol_type = other DNA
gaatagccacctccttg

SEQ ID NO: 109286 - DNA, 17 bp, synthetic construct
  source 1..17: mol_type = other DNA
aatagccacctccttgc

SEQ ID NO: 109287 - DNA, 17 bp, synthetic construct
  source 1..17: mol_type = other DNA
atagccacctccttgca

SEQ ID NO: 109288 - DNA, 17 bp, synthetic construct
  source 1..17: mol_type = other DNA
tagccacctccttgcat

SEQ ID NO: 109289 - DNA, 17 bp, synthetic construct
  source 1..17: mol_type = other DNA
agccacctccttgcatc

SEQ ID NO: 109290 - DNA, 17 bp, synthetic construct
  source 1..17: mol_type = other DNA
gccacctccttgcatct

SEQ ID NO: 109291 - DNA, 17 bp, synthetic construct
  source 1..17: mol_type = other DNA
ccacctccttgcatctg

SEQ ID NO: 109292 - DNA, 17 bp, synthetic construct
  source 1..17: mol_type = other DNA
cacctccttgcatctga

SEQ ID NO: 109293 - DNA, 17 bp, synthetic construct
  source 1..17: mol_type = other DNA
acctccttgcatctgat

SEQ ID NO: 109294 - DNA, 17 bp, synthetic construct
  source 1..17: mol_type = other DNA
cctccttgcatctgatt

SEQ ID NO: 109295 - DNA, 17 bp, synthetic construct
  source 1..17: mol_type = other DNA
ctccttgcatctgattc

SEQ ID NO: 109296 - DNA, 17 bp, synthetic construct
  source 1..17: mol_type = other DNA
tccttgcatctgattct

SEQ ID NO: 109297 - DNA, 17 bp, synthetic construct
  source 1..17: mol_type = other DNA
ccttgcatctgattctt

SEQ ID NO: 109298 - DNA, 17 bp, synthetic construct
  source 1..17: mol_type = other DNA
cttgcatctgattcttc

SEQ ID NO: 109299 - DNA, 17 bp, synthetic construct
  source 1..17: mol_type = other DNA
ttgcatctgattcttcc

SEQ ID NO: 109300 - DNA, 17 bp, synthetic construct
  source 1..17: mol_type = other DNA
tgcatctgattcttccg

SEQ ID NO: 109301 - DNA, 17 bp, synthetic construct
  source 1..17: mol_type = other DNA
gcatctgattcttccgg

SEQ ID NO: 109302 - DNA, 17 bp, synthetic construct
  source 1..17: mol_type = other DNA
catctgattcttccggg

SEQ ID NO: 109303 - DNA, 17 bp, synthetic construct
  source 1..17: mol_type = other DNA
atctgattcttccgggc

SEQ ID NO: 109304 - DNA, 17 bp, synthetic construct
  source 1..17: mol_type = other DNA
tctgattcttccgggcc

SEQ ID NO: 109305 - DNA, 17 bp, synthetic construct
  source 1..17: mol_type = other DNA
ctgattcttccgggcca

SEQ ID NO: 109306 - DNA, 17 bp, synthetic construct
  source 1..17: mol_type = other DNA
tgattcttccgggccat

SEQ ID NO: 109307 - DNA, 17 bp, synthetic construct
  source 1..17: mol_type = other DNA
gattcttccgggccatg

SEQ ID NO: 109308 - DNA, 17 bp, synthetic construct
  source 1..17: mol_type = other DNA
attcttccgggccatgc

SEQ ID NO: 109309 - DNA, 17 bp, synthetic construct
  source 1..17: mol_type = other DNA
ttcttccgggccatgca

SEQ ID NO: 109310 - DNA, 17 bp, synthetic construct
  source 1..17: mol_type = other DNA
tcttccgggccatgcag

SEQ ID NO: 109311 - DNA, 17 bp, synthetic construct
  source 1..17: mol_type = other DNA
cttccgggccatgcagc

SEQ ID NO: 109312 - DNA, 17 bp, synthetic construct
  source 1..17: mol_type = other DNA
ttccgggccatgcagcc

SEQ ID NO: 109313 - DNA, 17 bp, synthetic construct
  source 1..17: mol_type = other DNA
tccgggccatgcagcct

SEQ ID NO: 109314 - DNA, 17 bp, synthetic construct
  source 1..17: mol_type = other DNA
ccgggccatgcagcctt

SEQ ID NO: 109315 - DNA, 17 bp, synthetic construct
  source 1..17: mol_type = other DNA
cgggccatgcagccttg

SEQ ID NO: 109316 - DNA, 17 bp, synthetic construct
  source 1..17: mol_type = other DNA
gggccatgcagccttgg

SEQ ID NO: 109317 - DNA, 17 bp, synthetic construct
  source 1..17: mol_type = other DNA
ggccatgcagccttggc

SEQ ID NO: 109318 - DNA, 17 bp, synthetic construct
  source 1..17: mol_type = other DNA
gccatgcagccttggct

SEQ ID NO: 109319 - DNA, 17 bp, synthetic construct
  source 1..17: mol_type = other DNA
ccatgcagccttggctc

SEQ ID NO: 109320 - DNA, 17 bp, synthetic construct
  source 1..17: mol_type = other DNA
catgcagccttggctcc

SEQ ID NO: 109321 - DNA, 17 bp, synthetic construct
  source 1..17: mol_type = other DNA
atgcagccttggctccc

SEQ ID NO: 109322 - DNA, 17 bp, synthetic construct
  source 1..17: mol_type = other DNA
tgcagccttggctcccc

SEQ ID NO: 109323 - DNA, 17 bp, synthetic construct
  source 1..17: mol_type = other DNA
gcagccttggctcccct

SEQ ID NO: 109324 - DNA, 17 bp, synthetic construct
  source 1..17: mol_type = other DNA
cagccttggctcccctc

SEQ ID NO: 109325 - DNA, 17 bp, synthetic construct
  source 1..17: mol_type = other DNA
agccttggctcccctca

SEQ ID NO: 109326 - DNA, 17 bp, synthetic construct
  source 1..17: mol_type = other DNA
gccttggctcccctcac

SEQ ID NO: 109327 - DNA, 17 bp, synthetic construct
  source 1..17: mol_type = other DNA
ccttggctcccctcacc

SEQ ID NO: 109328 - DNA, 17 bp, synthetic construct
  source 1..17: mol_type = other DNA
cttggctcccctcacct

SEQ ID NO: 109329 - DNA, 17 bp, synthetic construct
  source 1..17: mol_type = other DNA
ttggctcccctcacctg

SEQ ID NO: 109330 - DNA, 17 bp, synthetic construct
  source 1..17: mol_type = other DNA
tggctcccctcacctga

SEQ ID NO: 109331 - DNA, 17 bp, synthetic construct
  source 1..17: mol_type = other DNA
ggctcccctcacctgag

SEQ ID NO: 109332 - DNA, 17 bp, synthetic construct
  source 1..17: mol_type = other DNA
gctcccctcacctgagc

SEQ ID NO: 109333 - DNA, 17 bp, synthetic construct
  source 1..17: mol_type = other DNA
ctcccctcacctgagca

SEQ ID NO: 109334 - DNA, 17 bp, synthetic construct
  source 1..17: mol_type = other DNA
tcccctcacctgagcag

SEQ ID NO: 109335 - DNA, 17 bp, synthetic construct
  source 1..17: mol_type = other DNA
cccctcacctgagcagg

SEQ ID NO: 109336 - DNA, 17 bp, synthetic construct
  source 1..17: mol_type = other DNA
ccctcacctgagcaggc

SEQ ID NO: 109337 - DNA, 17 bp, synthetic construct
  source 1..17: mol_type = other DNA
cctcacctgagcaggca

SEQ ID NO: 109338 - DNA, 17 bp, synthetic construct
  source 1..17: mol_type = other DNA
ctcacctgagcaggcag

SEQ ID NO: 109339 - DNA, 17 bp, synthetic construct
  source 1..17: mol_type = other DNA
tcacctgagcaggcagg

SEQ ID NO: 109340 - DNA, 17 bp, synthetic construct
  source 1..17: mol_type = other DNA
cacctgagcaggcaggg

SEQ ID NO: 109341 - DNA, 17 bp, synthetic construct
  source 1..17: mol_type = other DNA
acctgagcaggcagggc

SEQ ID NO: 109342 - DNA, 17 bp, synthetic construct
  source 1..17: mol_type = other DNA
cctgagcaggcagggcc

SEQ ID NO: 109343 - DNA, 17 bp, synthetic construct
  source 1..17: mol_type = other DNA
ctgagcaggcagggcct

SEQ ID NO: 109344 - DNA, 17 bp, synthetic construct
  source 1..17: mol_type = other DNA
tgagcaggcagggccta

SEQ ID NO: 109345 - DNA, 17 bp, synthetic construct
  source 1..17: mol_type = other DNA
gagcaggcagggcctag

SEQ ID NO: 109346 - DNA, 17 bp, synthetic construct
  source 1..17: mol_type = other DNA
agcaggcagggcctagg

SEQ ID NO: 109347 - DNA, 17 bp, synthetic construct
  source 1..17: mol_type = other DNA
gcaggcagggcctaggg

SEQ ID NO: 109348 - DNA, 17 bp, synthetic construct
  source 1..17: mol_type = other DNA
caggcagggcctaggga

SEQ ID NO: 109349 - DNA, 17 bp, synthetic construct
  source 1..17: mol_type = other DNA
aggcagggcctagggac

SEQ ID NO: 109350 - DNA, 17 bp, synthetic construct
  source 1..17: mol_type = other DNA
ggcagggcctagggact

SEQ ID NO: 109351 - DNA, 17 bp, synthetic construct
  source 1..17: mol_type = other DNA
gcagggcctagggactc

SEQ ID NO: 109352 - DNA, 17 bp, synthetic construct
  source 1..17: mol_type = other DNA
cagggcctagggactct

SEQ ID NO: 109353 - DNA, 17 bp, synthetic construct
  source 1..17: mol_type = other DNA
agggcctagggactctc

SEQ ID NO: 109354 - DNA, 17 bp, synthetic construct
  source 1..17: mol_type = other DNA
gggcctagggactctca

SEQ ID NO: 109355 - DNA, 17 bp, synthetic construct
  source 1..17: mol_type = other DNA
ggcctagggactctcag

SEQ ID NO: 109356 - DNA, 17 bp, synthetic construct
  source 1..17: mol_type = other DNA
gcctagggactctcagc

SEQ ID NO: 109357 - DNA, 17 bp, synthetic construct
  source 1..17: mol_type = other DNA
cctagggactctcagcc

SEQ ID NO: 109358 - DNA, 17 bp, synthetic construct
  source 1..17: mol_type = other DNA
ctagggactctcagccc

SEQ ID NO: 109359 - DNA, 17 bp, synthetic construct
  source 1..17: mol_type = other DNA
tagggactctcagccca

SEQ ID NO: 109360 - DNA, 17 bp, synthetic construct
  source 1..17: mol_type = other DNA
agggactctcagcccac

SEQ ID NO: 109361 - DNA, 17 bp, synthetic construct
  source 1..17: mol_type = other DNA
gggactctcagcccacc

SEQ ID NO: 109362 - DNA, 17 bp, synthetic construct
  source 1..17: mol_type = other DNA
ggactctcagcccaccc

SEQ ID NO: 109363 - DNA, 17 bp, synthetic construct
  source 1..17: mol_type = other DNA
gactctcagcccacccg

SEQ ID NO: 109364 - DNA, 17 bp, synthetic construct
  source 1..17: mol_type = other DNA
actctcagcccacccgt

SEQ ID NO: 109365 - DNA, 17 bp, synthetic construct
  source 1..17: mol_type = other DNA
ctctcagcccacccgtc

SEQ ID NO: 109366 - DNA, 17 bp, synthetic construct
  source 1..17: mol_type = other DNA
tctcagcccacccgtcc

SEQ ID NO: 109367 - DNA, 17 bp, synthetic construct
  source 1..17: mol_type = other DNA
ctcagcccacccgtcct

SEQ ID NO: 109368 - DNA, 17 bp, synthetic construct
  source 1..17: mol_type = other DNA
tcagcccacccgtcctc

SEQ ID NO: 109369 - DNA, 17 bp, synthetic construct
  source 1..17: mol_type = other DNA
cagcccacccgtcctcc

SEQ ID NO: 109370 - DNA, 17 bp, synthetic construct
  source 1..17: mol_type = other DNA
agcccacccgtcctcct

SEQ ID NO: 109371 - DNA, 17 bp, synthetic construct
  source 1..17: mol_type = other DNA
gcccacccgtcctcctg

SEQ ID NO: 109372 - DNA, 17 bp, synthetic construct
  source 1..17: mol_type = other DNA
cccacccgtcctcctgt

SEQ ID NO: 109373 - DNA, 17 bp, synthetic construct
  source 1..17: mol_type = other DNA
ccacccgtcctcctgtc

SEQ ID NO: 109374 - DNA, 17 bp, synthetic construct
  source 1..17: mol_type = other DNA
cacccgtcctcctgtcc

SEQ ID NO: 109375 - DNA, 17 bp, synthetic construct
  source 1..17: mol_type = other DNA
acccgtcctcctgtcct

SEQ ID NO: 109376 - DNA, 17 bp, synthetic construct
  source 1..17: mol_type = other DNA
cccgtcctcctgtcctc

SEQ ID NO: 109377 - DNA, 17 bp, synthetic construct
  source 1..17: mol_type = other DNA
ccgtcctcctgtcctcc

SEQ ID NO: 109378 - DNA, 17 bp, synthetic construct
  source 1..17: mol_type = other DNA
cgtcctcctgtcctcca

SEQ ID NO: 109379 - DNA, 17 bp, synthetic construct
  source 1..17: mol_type = other DNA
gtcctcctgtcctccac

SEQ ID NO: 109380 - DNA, 17 bp, synthetic construct
  source 1..17: mol_type = other DNA
tcctcctgtcctccacg

SEQ ID NO: 109381 - DNA, 17 bp, synthetic construct
  source 1..17: mol_type = other DNA
cctcctgtcctccacgc

SEQ ID NO: 109382 - DNA, 17 bp, synthetic construct
  source 1..17: mol_type = other DNA
ctcctgtcctccacgca

SEQ ID NO: 109383 - DNA, 17 bp, synthetic construct
  source 1..17: mol_type = other DNA
tcctgtcctccacgcac

SEQ ID NO: 109384 - DNA, 17 bp, synthetic construct
  source 1..17: mol_type = other DNA
cctgtcctccacgcacg

SEQ ID NO: 109385 - DNA, 17 bp, synthetic construct
  source 1..17: mol_type = other DNA
ctgtcctccacgcacgt

SEQ ID NO: 109386 - DNA, 17 bp, synthetic construct
  source 1..17: mol_type = other DNA
tgtcctccacgcacgtc

SEQ ID NO: 109387 - DNA, 17 bp, synthetic construct
  source 1..17: mol_type = other DNA
gtcctccacgcacgtcc

SEQ ID NO: 109388 - DNA, 17 bp, synthetic construct
  source 1..17: mol_type = other DNA
tcctccacgcacgtcca

SEQ ID NO: 109389 - DNA, 17 bp, synthetic construct
  source 1..17: mol_type = other DNA
cctccacgcacgtccaa

SEQ ID NO: 109390 - DNA, 17 bp, synthetic construct
  source 1..17: mol_type = other DNA
ctccacgcacgtccaag

SEQ ID NO: 109391 - DNA, 17 bp, synthetic construct
  source 1..17: mol_type = other DNA
tccacgcacgtccaagt

SEQ ID NO: 109392 - DNA, 17 bp, synthetic construct
  source 1..17: mol_type = other DNA
ccacgcacgtccaagtt

SEQ ID NO: 109393 - DNA, 17 bp, synthetic construct
  source 1..17: mol_type = other DNA
cacgcacgtccaagttg

SEQ ID NO: 109394 - DNA, 17 bp, synthetic construct
  source 1..17: mol_type = other DNA
acgcacgtccaagttgg

SEQ ID NO: 109395 - DNA, 17 bp, synthetic construct
  source 1..17: mol_type = other DNA
cgcacgtccaagttggg

SEQ ID NO: 109396 - DNA, 17 bp, synthetic construct
  source 1..17: mol_type = other DNA
gcacgtccaagttgggg

SEQ ID NO: 109397 - DNA, 17 bp, synthetic construct
  source 1..17: mol_type = other DNA
cacgtccaagttgggga

SEQ ID NO: 109398 - DNA, 17 bp, synthetic construct
  source 1..17: mol_type = other DNA
acgtccaagttggggag

SEQ ID NO: 109399 - DNA, 17 bp, synthetic construct
  source 1..17: mol_type = other DNA
cgtccaagttggggaga

SEQ ID NO: 109400 - DNA, 17 bp, synthetic construct
  source 1..17: mol_type = other DNA
gtccaagttggggagat

SEQ ID NO: 109401 - DNA, 17 bp, synthetic construct
  source 1..17: mol_type = other DNA
tccaagttggggagatc

SEQ ID NO: 109402 - DNA, 17 bp, synthetic construct
  source 1..17: mol_type = other DNA
ccaagttggggagatca

SEQ ID NO: 109403 - DNA, 17 bp, synthetic construct
  source 1..17: mol_type = other DNA
caagttggggagatcaa

SEQ ID NO: 109404 - DNA, 17 bp, synthetic construct
  source 1..17: mol_type = other DNA
aagttggggagatcaag

SEQ ID NO: 109405 - DNA, 17 bp, synthetic construct
  source 1..17: mol_type = other DNA
agttggggagatcaagc

SEQ ID NO: 109406 - DNA, 17 bp, synthetic construct
  source 1..17: mol_type = other DNA
gttggggagatcaagcc

SEQ ID NO: 109407 - DNA, 17 bp, synthetic construct
  source 1..17: mol_type = other DNA
ttggggagatcaagccc

SEQ ID NO: 109408 - DNA, 17 bp, synthetic construct
  source 1..17: mol_type = other DNA
tggggagatcaagccct

SEQ ID NO: 109409 - DNA, 17 bp, synthetic construct
  source 1..17: mol_type = other DNA
ggggagatcaagccctt

SEQ ID NO: 109410 - DNA, 17 bp, synthetic construct
  source 1..17: mol_type = other DNA
gggagatcaagcccttg

SEQ ID NO: 109411 - DNA, 17 bp, synthetic construct
  source 1..17: mol_type = other DNA
ggagatcaagcccttgg

SEQ ID NO: 109412 - DNA, 17 bp, synthetic construct
  source 1..17: mol_type = other DNA
gagatcaagcccttggc

SEQ ID NO: 109413 - DNA, 17 bp, synthetic construct
  source 1..17: mol_type = other DNA
agatcaagcccttggca

SEQ ID NO: 109414 - DNA, 17 bp, synthetic construct
  source 1..17: mol_type = other DNA
gatcaagcccttggcag

SEQ ID NO: 109415 - DNA, 17 bp, synthetic construct
  source 1..17: mol_type = other DNA
atcaagcccttggcagg

SEQ ID NO: 109416 - DNA, 17 bp, synthetic construct
  source 1..17: mol_type = other DNA
tcaagcccttggcaggg

SEQ ID NO: 109417 - DNA, 17 bp, synthetic construct
  source 1..17: mol_type = other DNA
caagcccttggcaggga

SEQ ID NO: 109418 - DNA, 17 bp, synthetic construct
  source 1..17: mol_type = other DNA
aagcccttggcagggac

SEQ ID NO: 109419 - DNA, 17 bp, synthetic construct
  source 1..17: mol_type = other DNA
agcccttggcagggact

SEQ ID NO: 109420 - DNA, 17 bp, synthetic construct
  source 1..17: mol_type = other DNA
gcccttggcagggactg

SEQ ID NO: 109421 - DNA, 17 bp, synthetic construct
  source 1..17: mol_type = other DNA
cccttggcagggactgt

SEQ ID NO: 109422 - DNA, 17 bp, synthetic construct
  source 1..17: mol_type = other DNA
ccttggcagggactgtg

SEQ ID NO: 109423 - DNA, 17 bp, synthetic construct
  source 1..17: mol_type = other DNA
cttggcagggactgtgc

SEQ ID NO: 109424 - DNA, 17 bp, synthetic construct
  source 1..17: mol_type = other DNA
ttggcagggactgtgct

SEQ ID NO: 109425 - DNA, 17 bp, synthetic construct
  source 1..17: mol_type = other DNA
tggcagggactgtgctt

SEQ ID NO: 109426 - DNA, 17 bp, synthetic construct
  source 1..17: mol_type = other DNA
ggcagggactgtgcttt

SEQ ID NO: 109427 - DNA, 17 bp, synthetic construct
  source 1..17: mol_type = other DNA
gcagggactgtgcttta

SEQ ID NO: 109428 - DNA, 17 bp, synthetic construct
  source 1..17: mol_type = other DNA
cagggactgtgctttag

SEQ ID NO: 109429 - DNA, 17 bp, synthetic construct
  source 1..17: mol_type = other DNA
agggactgtgctttagt

SEQ ID NO: 109430 - DNA, 17 bp, synthetic construct
  source 1..17: mol_type = other DNA
gggactgtgctttagtc

SEQ ID NO: 109431 - DNA, 17 bp, synthetic construct
  source 1..17: mol_type = other DNA
ggactgtgctttagtca

SEQ ID NO: 109432 - DNA, 17 bp, synthetic construct
  source 1..17: mol_type = other DNA
gactgtgctttagtcac

SEQ ID NO: 109433 - DNA, 17 bp, synthetic construct
  source 1..17: mol_type = other DNA
actgtgctttagtcacc

SEQ ID NO: 109434 - DNA, 17 bp, synthetic construct
  source 1..17: mol_type = other DNA
ctgtgctttagtcacca

SEQ ID NO: 109435 - DNA, 17 bp, synthetic construct
  source 1..17: mol_type = other DNA
tgtgctttagtcaccag

SEQ ID NO: 109436 - DNA, 17 bp, synthetic construct
  source 1..17: mol_type = other DNA
gtgctttagtcaccaga

SEQ ID NO: 109437 - DNA, 17 bp, synthetic construct
  source 1..17: mol_type = other DNA
tgctttagtcaccagat

SEQ ID NO: 109438 - DNA, 17 bp, synthetic construct
  source 1..17: mol_type = other DNA
gctttagtcaccagatg

SEQ ID NO: 109439 - DNA, 17 bp, synthetic construct
  source 1..17: mol_type = other DNA
ctttagtcaccagatgc

SEQ ID NO: 109440 - DNA, 17 bp, synthetic construct
  source 1..17: mol_type = other DNA
tttagtcaccagatgca

SEQ ID NO: 109441 - DNA, 17 bp, synthetic construct
  source 1..17: mol_type = other DNA
ttagtcaccagatgcac

SEQ ID NO: 109442 - DNA, 17 bp, synthetic construct
  source 1..17: mol_type = other DNA
tagtcaccagatgcacg

SEQ ID NO: 109443 - DNA, 17 bp, synthetic construct
  source 1..17: mol_type = other DNA
agtcaccagatgcacgt

SEQ ID NO: 109444 - DNA, 17 bp, synthetic construct
  source 1..17: mol_type = other DNA
gtcaccagatgcacgtc

SEQ ID NO: 109445 - DNA, 17 bp, synthetic construct
  source 1..17: mol_type = other DNA
tcaccagatgcacgtcc

SEQ ID NO: 109446 - DNA, 17 bp, synthetic construct
  source 1..17: mol_type = other DNA
caccagatgcacgtcct

SEQ ID NO: 109447 - DNA, 17 bp, synthetic construct
  source 1..17: mol_type = other DNA
accagatgcacgtcctg

SEQ ID NO: 109448 - DNA, 17 bp, synthetic construct
  source 1..17: mol_type = other DNA
ccagatgcacgtcctgt

SEQ ID NO: 109449 - DNA, 17 bp, synthetic construct
  source 1..17: mol_type = other DNA
cagatgcacgtcctgtg

SEQ ID NO: 109450 - DNA, 17 bp, synthetic construct
  source 1..17: mol_type = other DNA
agatgcacgtcctgtgg

SEQ ID NO: 109451 - DNA, 17 bp, synthetic construct
  source 1..17: mol_type = other DNA
gatgcacgtcctgtggc

SEQ ID NO: 109452 - DNA, 17 bp, synthetic construct
  source 1..17: mol_type = other DNA
atgcacgtcctgtggcc

SEQ ID NO: 109453 - DNA, 17 bp, synthetic construct
  source 1..17: mol_type = other DNA
tgcacgtcctgtggccg

SEQ ID NO: 109454 - DNA, 17 bp, synthetic construct
  source 1..17: mol_type = other DNA
gcacgtcctgtggccgg

SEQ ID NO: 109455 - DNA, 17 bp, synthetic construct
  source 1..17: mol_type = other DNA
cacgtcctgtggccggg

SEQ ID NO: 109456 - DNA, 17 bp, synthetic construct
  source 1..17: mol_type = other DNA
acgtcctgtggccgggg

SEQ ID NO: 109457 - DNA, 17 bp, synthetic construct
  source 1..17: mol_type = other DNA
cgtcctgtggccgggga

SEQ ID NO: 109458 - DNA, 17 bp, synthetic construct
  source 1..17: mol_type = other DNA
gtcctgtggccggggaa

SEQ ID NO: 109459 - DNA, 17 bp, synthetic construct
  source 1..17: mol_type = other DNA
tcctgtggccggggaag

SEQ ID NO: 109460 - DNA, 17 bp, synthetic construct
  source 1..17: mol_type = other DNA
cctgtggccggggaagg

SEQ ID NO: 109461 - DNA, 17 bp, synthetic construct
  source 1..17: mol_type = other DNA
ctgtggccggggaaggc

SEQ ID NO: 109462 - DNA, 17 bp, synthetic construct
  source 1..17: mol_type = other DNA
tgtggccggggaaggca

SEQ ID NO: 109463 - DNA, 17 bp, synthetic construct
  source 1..17: mol_type = other DNA
gtggccggggaaggcag

SEQ ID NO: 109464 - DNA, 17 bp, synthetic construct
  source 1..17: mol_type = other DNA
tggccggggaaggcagc

SEQ ID NO: 109465 - DNA, 17 bp, synthetic construct
  source 1..17: mol_type = other DNA
ggccggggaaggcagcc

SEQ ID NO: 109466 - DNA, 17 bp, synthetic construct
  source 1..17: mol_type = other DNA
gccggggaaggcagccc

SEQ ID NO: 109467 - DNA, 17 bp, synthetic construct
  source 1..17: mol_type = other DNA
ccggggaaggcagccct

SEQ ID NO: 109468 - DNA, 17 bp, synthetic construct
  source 1..17: mol_type = other DNA
cggggaaggcagccctg

SEQ ID NO: 109469 - DNA, 17 bp, synthetic construct
  source 1..17: mol_type = other DNA
ggggaaggcagccctgc

SEQ ID NO: 109470 - DNA, 17 bp, synthetic construct
  source 1..17: mol_type = other DNA
gggaaggcagccctgca

SEQ ID NO: 109471 - DNA, 17 bp, synthetic construct
  source 1..17: mol_type = other DNA
ggaaggcagccctgcac

SEQ ID NO: 109472 - DNA, 17 bp, synthetic construct
  source 1..17: mol_type = other DNA
gaaggcagccctgcaca

SEQ ID NO: 109473 - DNA, 17 bp, synthetic construct
  source 1..17: mol_type = other DNA
aaggcagccctgcacag

SEQ ID NO: 109474 - DNA, 17 bp, synthetic construct
  source 1..17: mol_type = other DNA
aggcagccctgcacaga

SEQ ID NO: 109475 - DNA, 17 bp, synthetic construct
  source 1..17: mol_type = other DNA
ggcagccctgcacagag

SEQ ID NO: 109476 - DNA, 17 bp, synthetic construct
  source 1..17: mol_type = other DNA
gcagccctgcacagagc

SEQ ID NO: 109477 - DNA, 17 bp, synthetic construct
  source 1..17: mol_type = other DNA
cagccctgcacagagca

SEQ ID NO: 109478 - DNA, 17 bp, synthetic construct
  source 1..17: mol_type = other DNA
agccctgcacagagcag

SEQ ID NO: 109479 - DNA, 17 bp, synthetic construct
  source 1..17: mol_type = other DNA
gccctgcacagagcagc

SEQ ID NO: 109480 - DNA, 17 bp, synthetic construct
  source 1..17: mol_type = other DNA
ccctgcacagagcagct

SEQ ID NO: 109481 - DNA, 17 bp, synthetic construct
  source 1..17: mol_type = other DNA
cctgcacagagcagctt

SEQ ID NO: 109482 - DNA, 17 bp, synthetic construct
  source 1..17: mol_type = other DNA
ctgcacagagcagcttc

SEQ ID NO: 109483 - DNA, 17 bp, synthetic construct
  source 1..17: mol_type = other DNA
tgcacagagcagcttca

SEQ ID NO: 109484 - DNA, 17 bp, synthetic construct
  source 1..17: mol_type = other DNA
gcacagagcagcttcat

SEQ ID NO: 109485 - DNA, 17 bp, synthetic construct
  source 1..17: mol_type = other DNA
cacagagcagcttcatg

SEQ ID NO: 109486 - DNA, 17 bp, synthetic construct
  source 1..17: mol_type = other DNA
acagagcagcttcatgt

SEQ ID NO: 109487 - DNA, 17 bp, synthetic construct
  source 1..17: mol_type = other DNA
cagagcagcttcatgtt

SEQ ID NO: 109488 - DNA, 17 bp, synthetic construct
  source 1..17: mol_type = other DNA
agagcagcttcatgtta

SEQ ID NO: 109489 - DNA, 17 bp, synthetic construct
  source 1..17: mol_type = other DNA
gagcagcttcatgttag

SEQ ID NO: 109490 - DNA, 17 bp, synthetic construct
  source 1..17: mol_type = other DNA
agcagcttcatgttagg

SEQ ID NO: 109491 - DNA, 17 bp, synthetic construct
  source 1..17: mol_type = other DNA
gcagcttcatgttaggg

SEQ ID NO: 109492 - DNA, 17 bp, synthetic construct
  source 1..17: mol_type = other DNA
cagcttcatgttagggg

SEQ ID NO: 109493 - DNA, 17 bp, synthetic construct
  source 1..17: mol_type = other DNA
agcttcatgttagggga

SEQ ID NO: 109494 - DNA, 17 bp, synthetic construct
  source 1..17: mol_type = other DNA
gcttcatgttaggggac

SEQ ID NO: 109495 - DNA, 17 bp, synthetic construct
  source 1..17: mol_type = other DNA
cttcatgttaggggaca

SEQ ID NO: 109496 - DNA, 17 bp, synthetic construct
  source 1..17: mol_type = other DNA
ttcatgttaggggacac

SEQ ID NO: 109497 - DNA, 17 bp, synthetic construct
  source 1..17: mol_type = other DNA
tcatgttaggggacaca

SEQ ID NO: 109498 - DNA, 17 bp, synthetic construct
  source 1..17: mol_type = other DNA
catgttaggggacacac

SEQ ID NO: 109499 - DNA, 17 bp, synthetic construct
  source 1..17: mol_type = other DNA
atgttaggggacacacc

SEQ ID NO: 109500 - DNA, 17 bp, synthetic construct
  source 1..17: mol_type = other DNA
tgttaggggacacaccc

SEQ ID NO: 109501 - DNA, 17 bp, synthetic construct
  source 1..17: mol_type = other DNA
gttaggggacacacccc

SEQ ID NO: 109502 - DNA, 17 bp, synthetic construct
  source 1..17: mol_type = other DNA
ttaggggacacacccca

SEQ ID NO: 109503 - DNA, 17 bp, synthetic construct
  source 1..17: mol_type = other DNA
taggggacacaccccaa

SEQ ID NO: 109504 - DNA, 17 bp, synthetic construct
  source 1..17: mol_type = other DNA
aggggacacaccccaaa

SEQ ID NO: 109505 - DNA, 17 bp, synthetic construct
  source 1..17: mol_type = other DNA
ggggacacaccccaaag

SEQ ID NO: 109506 - DNA, 17 bp, synthetic construct
  source 1..17: mol_type = other DNA
gggacacaccccaaagt

SEQ ID NO: 109507 - DNA, 17 bp, synthetic construct
  source 1..17: mol_type = other DNA
ggacacaccccaaagtg

SEQ ID NO: 109508 - DNA, 17 bp, synthetic construct
  source 1..17: mol_type = other DNA
gacacaccccaaagtga

SEQ ID NO: 109509 - DNA, 17 bp, synthetic construct
  source 1..17: mol_type = other DNA
acacaccccaaagtgat

SEQ ID NO: 109510 - DNA, 17 bp, synthetic construct
  source 1..17: mol_type = other DNA
cacaccccaaagtgatg

SEQ ID NO: 109511 - DNA, 17 bp, synthetic construct
  source 1..17: mol_type = other DNA
acaccccaaagtgatgg

SEQ ID NO: 109512 - DNA, 17 bp, synthetic construct
  source 1..17: mol_type = other DNA
caccccaaagtgatggg

SEQ ID NO: 109513 - DNA, 17 bp, synthetic construct
  source 1..17: mol_type = other DNA
accccaaagtgatgggg

SEQ ID NO: 109514 - DNA, 17 bp, synthetic construct
  source 1..17: mol_type = other DNA
ccccaaagtgatggggt

SEQ ID NO: 109515 - DNA, 17 bp, synthetic construct
  source 1..17: mol_type = other DNA
cccaaagtgatggggtg

SEQ ID NO: 109516 - DNA, 17 bp, synthetic construct
  source 1..17: mol_type = other DNA
ccaaagtgatggggtgg

SEQ ID NO: 109517 - DNA, 17 bp, synthetic construct
  source 1..17: mol_type = other DNA
caaagtgatggggtggc

SEQ ID NO: 109518 - DNA, 17 bp, synthetic construct
  source 1..17: mol_type = other DNA
aaagtgatggggtggct

SEQ ID NO: 109519 - DNA, 17 bp, synthetic construct
  source 1..17: mol_type = other DNA
aagtgatggggtggctg

SEQ ID NO: 109520 - DNA, 17 bp, synthetic construct
  source 1..17: mol_type = other DNA
agtgatggggtggctgg

SEQ ID NO: 109521 - DNA, 17 bp, synthetic construct
  source 1..17: mol_type = other DNA
gtgatggggtggctggt

SEQ ID NO: 109522 - DNA, 17 bp, synthetic construct
  source 1..17: mol_type = other DNA
tgatggggtggctggtg

SEQ ID NO: 109523 - DNA, 17 bp, synthetic construct
  source 1..17: mol_type = other DNA
gatggggtggctggtgg

SEQ ID NO: 109524 - DNA, 17 bp, synthetic construct
  source 1..17: mol_type = other DNA
atggggtggctggtggt

SEQ ID NO: 109525 - DNA, 17 bp, synthetic construct
  source 1..17: mol_type = other DNA
tggggtggctggtggtg

SEQ ID NO: 109526 - DNA, 17 bp, synthetic construct
  source 1..17: mol_type = other DNA
ggggtggctggtggtgg

SEQ ID NO: 109527 - DNA, 17 bp, synthetic construct
  source 1..17: mol_type = other DNA
gggtggctggtggtggg

SEQ ID NO: 109528 - DNA, 17 bp, synthetic construct
  source 1..17: mol_type = other DNA
ggtggctggtggtgggc

SEQ ID NO: 109529 - DNA, 17 bp, synthetic construct
  source 1..17: mol_type = other DNA
gtggctggtggtgggca

SEQ ID NO: 109530 - DNA, 17 bp, synthetic construct
  source 1..17: mol_type = other DNA
tggctggtggtgggcac

SEQ ID NO: 109531 - DNA, 17 bp, synthetic construct
  source 1..17: mol_type = other DNA
ggctggtggtgggcact

SEQ ID NO: 109532 - DNA, 17 bp, synthetic construct
  source 1..17: mol_type = other DNA
gctggtggtgggcactt

SEQ ID NO: 109533 - DNA, 17 bp, synthetic construct
  source 1..17: mol_type = other DNA
ctggtggtgggcacttc

SEQ ID NO: 109534 - DNA, 17 bp, synthetic construct
  source 1..17: mol_type = other DNA
tggtggtgggcacttct

SEQ ID NO: 109535 - DNA, 17 bp, synthetic construct
  source 1..17: mol_type = other DNA
ggtggtgggcacttctc

SEQ ID NO: 109536 - DNA, 17 bp, synthetic construct
  source 1..17: mol_type = other DNA
gtggtgggcacttctct

SEQ ID NO: 109537 - DNA, 17 bp, synthetic construct
  source 1..17: mol_type = other DNA
tggtgggcacttctctg

SEQ ID NO: 109538 - DNA, 17 bp, synthetic construct
  source 1..17: mol_type = other DNA
ggtgggcacttctctgg

SEQ ID NO: 109539 - DNA, 17 bp, synthetic construct
  source 1..17: mol_type = other DNA
gtgggcacttctctggc

SEQ ID NO: 109540 - DNA, 17 bp, synthetic construct
  source 1..17: mol_type = other DNA
tgggcacttctctggct

SEQ ID NO: 109541 - DNA, 17 bp, synthetic construct
  source 1..17: mol_type = other DNA
gggcacttctctggcta

SEQ ID NO: 109542 - DNA, 17 bp, synthetic construct
  source 1..17: mol_type = other DNA
ggcacttctctggctac

SEQ ID NO: 109543 - DNA, 17 bp, synthetic construct
  source 1..17: mol_type = other DNA
gcacttctctggctaca

SEQ ID NO: 109544 - DNA, 17 bp, synthetic construct
  source 1..17: mol_type = other DNA
cacttctctggctacaa

SEQ ID NO: 109545 - DNA, 17 bp, synthetic construct
  source 1..17: mol_type = other DNA
acttctctggctacaag

SEQ ID NO: 109546 - DNA, 17 bp, synthetic construct
  source 1..17: mol_type = other DNA
cttctctggctacaaga

SEQ ID NO: 109547 - DNA, 17 bp, synthetic construct
  source 1..17: mol_type = other DNA
ttctctggctacaagat

SEQ ID NO: 109548 - DNA, 17 bp, synthetic construct
  source 1..17: mol_type = other DNA
tctctggctacaagatg

SEQ ID NO: 109549 - DNA, 17 bp, synthetic construct
  source 1..17: mol_type = other DNA
ctctggctacaagatgg

SEQ ID NO: 109550 - DNA, 17 bp, synthetic construct
  source 1..17: mol_type = other DNA
tctggctacaagatgga

SEQ ID NO: 109551 - DNA, 17 bp, synthetic construct
  source 1..17: mol_type = other DNA
ctggctacaagatggag

SEQ ID NO: 109552 - DNA, 17 bp, synthetic construct
  source 1..17: mol_type = other DNA
tggctacaagatggagg

SEQ ID NO: 109553 - DNA, 17 bp, synthetic construct
  source 1..17: mol_type = other DNA
ggctacaagatggaggc

SEQ ID NO: 109554 - DNA, 17 bp, synthetic construct
  source 1..17: mol_type = other DNA
gctacaagatggaggcc

SEQ ID NO: 109555 - DNA, 17 bp, synthetic construct
  source 1..17: mol_type = other DNA
ctacaagatggaggccc

SEQ ID NO: 109556 - DNA, 17 bp, synthetic construct
  source 1..17: mol_type = other DNA
tacaagatggaggccca

SEQ ID NO: 109557 - DNA, 17 bp, synthetic construct
  source 1..17: mol_type = other DNA
acaagatggaggcccag

SEQ ID NO: 109558 - DNA, 17 bp, synthetic construct
  source 1..17: mol_type = other DNA
caagatggaggcccagg

SEQ ID NO: 109559 - DNA, 17 bp, synthetic construct
  source 1..17: mol_type = other DNA
aagatggaggcccaggt

SEQ ID NO: 109560 - DNA, 17 bp, synthetic construct
  source 1..17: mol_type = other DNA
agatggaggcccaggtg

SEQ ID NO: 109561 - DNA, 17 bp, synthetic construct
  source 1..17: mol_type = other DNA
gatggaggcccaggtgg

SEQ ID NO: 109562 - DNA, 17 bp, synthetic construct
  source 1..17: mol_type = other DNA
atggaggcccaggtggt

SEQ ID NO: 109563 - DNA, 17 bp, synthetic construct
  source 1..17: mol_type = other DNA
tggaggcccaggtggtc

SEQ ID NO: 109564 - DNA, 17 bp, synthetic construct
  source 1..17: mol_type = other DNA
ggaggcccaggtggtcc

SEQ ID NO: 109565 - DNA, 17 bp, synthetic construct
  source 1..17: mol_type = other DNA
gaggcccaggtggtcca

SEQ ID NO: 109566 - DNA, 17 bp, synthetic construct
  source 1..17: mol_type = other DNA
aggcccaggtggtccag

SEQ ID NO: 109567 - DNA, 17 bp, synthetic construct
  source 1..17: mol_type = other DNA
ggcccaggtggtccagc

SEQ ID NO: 109568 - DNA, 17 bp, synthetic construct
  source 1..17: mol_type = other DNA
gcccaggtggtccagcc

SEQ ID NO: 109569 - DNA, 17 bp, synthetic construct
  source 1..17: mol_type = other DNA
cccaggtggtccagccc

SEQ ID NO: 109570 - DNA, 17 bp, synthetic construct
  source 1..17: mol_type = other DNA
ccaggtggtccagccca

SEQ ID NO: 109571 - DNA, 17 bp, synthetic construct
  source 1..17: mol_type = other DNA
caggtggtccagcccaa

SEQ ID NO: 109572 - DNA, 17 bp, synthetic construct
  source 1..17: mol_type = other DNA
aggtggtccagcccaag

SEQ ID NO: 109573 - DNA, 17 bp, synthetic construct
  source 1..17: mol_type = other DNA
ggtggtccagcccaagg

SEQ ID NO: 109574 - DNA, 17 bp, synthetic construct
  source 1..17: mol_type = other DNA
gtggtccagcccaagga

SEQ ID NO: 109575 - DNA, 17 bp, synthetic construct
  source 1..17: mol_type = other DNA
tggtccagcccaaggag

SEQ ID NO: 109576 - DNA, 17 bp, synthetic construct
  source 1..17: mol_type = other DNA
ggtccagcccaaggagg

SEQ ID NO: 109577 - DNA, 17 bp, synthetic construct
  source 1..17: mol_type = other DNA
gtccagcccaaggaggg

SEQ ID NO: 109578 - DNA, 17 bp, synthetic construct
  source 1..17: mol_type = other DNA
tccagcccaaggagggc

SEQ ID NO: 109579 - DNA, 17 bp, synthetic construct
  source 1..17: mol_type = other DNA
ccagcccaaggagggca

SEQ ID NO: 109580 - DNA, 17 bp, synthetic construct
  source 1..17: mol_type = other DNA
cagcccaaggagggcac

SEQ ID NO: 109581 - DNA, 17 bp, synthetic construct
  source 1..17: mol_type = other DNA
agcccaaggagggcact

SEQ ID NO: 109582 - DNA, 17 bp, synthetic construct
  source 1..17: mol_type = other DNA
gcccaaggagggcactg

SEQ ID NO: 109583 - DNA, 17 bp, synthetic construct
  source 1..17: mol_type = other DNA
cccaaggagggcactgc

SEQ ID NO: 109584 - DNA, 17 bp, synthetic construct
  source 1..17: mol_type = other DNA
ccaaggagggcactgca

SEQ ID NO: 109585 - DNA, 17 bp, synthetic construct
  source 1..17: mol_type = other DNA
caaggagggcactgcac

SEQ ID NO: 109586 - DNA, 17 bp, synthetic construct
  source 1..17: mol_type = other DNA
aaggagggcactgcacg

SEQ ID NO: 109587 - DNA, 17 bp, synthetic construct
  source 1..17: mol_type = other DNA
aggagggcactgcacgg

SEQ ID NO: 109588 - DNA, 17 bp, synthetic construct
  source 1..17: mol_type = other DNA
ggagggcactgcacgga

SEQ ID NO: 109589 - DNA, 17 bp, synthetic construct
  source 1..17: mol_type = other DNA
gagggcactgcacggag

SEQ ID NO: 109590 - DNA, 17 bp, synthetic construct
  source 1..17: mol_type = other DNA
agggcactgcacggagc

SEQ ID NO: 109591 - DNA, 17 bp, synthetic construct
  source 1..17: mol_type = other DNA
gggcactgcacggagca

SEQ ID NO: 109592 - DNA, 17 bp, synthetic construct
  source 1..17: mol_type = other DNA
ggcactgcacggagcag

SEQ ID NO: 109593 - DNA, 17 bp, synthetic construct
  source 1..17: mol_type = other DNA
gcactgcacggagcaga

SEQ ID NO: 109594 - DNA, 17 bp, synthetic construct
  source 1..17: mol_type = other DNA
cactgcacggagcagat

SEQ ID NO: 109595 - DNA, 17 bp, synthetic construct
  source 1..17: mol_type = other DNA
actgcacggagcagata

SEQ ID NO: 109596 - DNA, 17 bp, synthetic construct
  source 1..17: mol_type = other DNA
ctgcacggagcagataa

SEQ ID NO: 109597 - DNA, 17 bp, synthetic construct
  source 1..17: mol_type = other DNA
tgcacggagcagataac

SEQ ID NO: 109598 - DNA, 17 bp, synthetic construct
  source 1..17: mol_type = other DNA
gcacggagcagataacc

SEQ ID NO: 109599 - DNA, 17 bp, synthetic construct
  source 1..17: mol_type = other DNA
cacggagcagataacca

SEQ ID NO: 109600 - DNA, 17 bp, synthetic construct
  source 1..17: mol_type = other DNA
acggagcagataaccaa

SEQ ID NO: 109601 - DNA, 17 bp, synthetic construct
  source 1..17: mol_type = other DNA
cggagcagataaccaag

SEQ ID NO: 109602 - DNA, 17 bp, synthetic construct
  source 1..17: mol_type = other DNA
ggagcagataaccaagg

SEQ ID NO: 109603 - DNA, 17 bp, synthetic construct
  source 1..17: mol_type = other DNA
gagcagataaccaaggg

SEQ ID NO: 109604 - DNA, 17 bp, synthetic construct
  source 1..17: mol_type = other DNA
agcagataaccaagggc

SEQ ID NO: 109605 - DNA, 17 bp, synthetic construct
  source 1..17: mol_type = other DNA
gcagataaccaagggca

SEQ ID NO: 109606 - DNA, 17 bp, synthetic construct
  source 1..17: mol_type = other DNA
cagataaccaagggcag

SEQ ID NO: 109607 - DNA, 17 bp, synthetic construct
  source 1..17: mol_type = other DNA
agataaccaagggcagt

SEQ ID NO: 109608 - DNA, 17 bp, synthetic construct
  source 1..17: mol_type = other DNA
gataaccaagggcagtc

SEQ ID NO: 109609 - DNA, 17 bp, synthetic construct
  source 1..17: mol_type = other DNA
ataaccaagggcagtca

SEQ ID NO: 109610 - DNA, 17 bp, synthetic construct
  source 1..17: mol_type = other DNA
taaccaagggcagtcag

SEQ ID NO: 109611 - DNA, 17 bp, synthetic construct
  source 1..17: mol_type = other DNA
aaccaagggcagtcagc

SEQ ID NO: 109612 - DNA, 17 bp, synthetic construct
  source 1..17: mol_type = other DNA
accaagggcagtcagcc

SEQ ID NO: 109613 - DNA, 17 bp, synthetic construct
  source 1..17: mol_type = other DNA
ccaagggcagtcagcct

SEQ ID NO: 109614 - DNA, 17 bp, synthetic construct
  source 1..17: mol_type = other DNA
caagggcagtcagcctg

SEQ ID NO: 109615 - DNA, 17 bp, synthetic construct
  source 1..17: mol_type = other DNA
aagggcagtcagcctgg

SEQ ID NO: 109616 - DNA, 17 bp, synthetic construct
  source 1..17: mol_type = other DNA
agggcagtcagcctggg

SEQ ID NO: 109617 - DNA, 17 bp, synthetic construct
  source 1..17: mol_type = other DNA
gggcagtcagcctgggc

SEQ ID NO: 109618 - DNA, 17 bp, synthetic construct
  source 1..17: mol_type = other DNA
ggcagtcagcctgggca

SEQ ID NO: 109619 - DNA, 17 bp, synthetic construct
  source 1..17: mol_type = other DNA
gcagtcagcctgggcag

SEQ ID NO: 109620 - DNA, 17 bp, synthetic construct
  source 1..17: mol_type = other DNA
cagtcagcctgggcagg

SEQ ID NO: 109621 - DNA, 17 bp, synthetic construct
  source 1..17: mol_type = other DNA
agtcagcctgggcaggg

SEQ ID NO: 109622 - DNA, 17 bp, synthetic construct
  source 1..17: mol_type = other DNA
gtcagcctgggcagggg

SEQ ID NO: 109623 - DNA, 17 bp, synthetic construct
  source 1..17: mol_type = other DNA
tcagcctgggcagggga

SEQ ID NO: 109624 - DNA, 17 bp, synthetic construct
  source 1..17: mol_type = other DNA
cagcctgggcaggggag

SEQ ID NO: 109625 - DNA, 17 bp, synthetic construct
  source 1..17: mol_type = other DNA
agcctgggcaggggagg

SEQ ID NO: 109626 - DNA, 17 bp, synthetic construct
  source 1..17: mol_type = other DNA
gcctgggcaggggaggg

SEQ ID NO: 109627 - DNA, 17 bp, synthetic construct
  source 1..17: mol_type = other DNA
cctgggcaggggagggg

SEQ ID NO: 109628 - DNA, 17 bp, synthetic construct
  source 1..17: mol_type = other DNA
ctgggcaggggaggggc

SEQ ID NO: 109629 - DNA, 17 bp, synthetic construct
  source 1..17: mol_type = other DNA
tgggcaggggaggggct

SEQ ID NO: 109630 - DNA, 17 bp, synthetic construct
  source 1..17: mol_type = other DNA
gggcaggggaggggctg

SEQ ID NO: 109631 - DNA, 17 bp, synthetic construct
  source 1..17: mol_type = other DNA
ggcaggggaggggctgc

SEQ ID NO: 109632 - DNA, 17 bp, synthetic construct
  source 1..17: mol_type = other DNA
gcaggggaggggctgcc

SEQ ID NO: 109633 - DNA, 17 bp, synthetic construct
  source 1..17: mol_type = other DNA
caggggaggggctgcct

SEQ ID NO: 109634 - DNA, 17 bp, synthetic construct
  source 1..17: mol_type = other DNA
aggggaggggctgcctg

SEQ ID NO: 109635 - DNA, 17 bp, synthetic construct
  source 1..17: mol_type = other DNA
ggggaggggctgcctgg

SEQ ID NO: 109636 - DNA, 17 bp, synthetic construct
  source 1..17: mol_type = other DNA
gggaggggctgcctggg

SEQ ID NO: 109637 - DNA, 17 bp, synthetic construct
  source 1..17: mol_type = other DNA
ggaggggctgcctgggg

SEQ ID NO: 109638 - DNA, 17 bp, synthetic construct
  source 1..17: mol_type = other DNA
gaggggctgcctggggg

SEQ ID NO: 109639 - DNA, 17 bp, synthetic construct
  source 1..17: mol_type = other DNA
aggggctgcctgggggg

SEQ ID NO: 109640 - DNA, 17 bp, synthetic construct
  source 1..17: mol_type = other DNA
ggggctgcctggggggg

SEQ ID NO: 109641 - DNA, 17 bp, synthetic construct
  source 1..17: mol_type = other DNA
gggctgcctggggggga

SEQ ID NO: 109642 - DNA, 17 bp, synthetic construct
  source 1..17: mol_type = other DNA
ggctgcctgggggggag

SEQ ID NO: 109643 - DNA, 17 bp, synthetic construct
  source 1..17: mol_type = other DNA
gctgcctgggggggagg

SEQ ID NO: 109644 - DNA, 17 bp, synthetic construct
  source 1..17: mol_type = other DNA
ctgcctgggggggaggg

SEQ ID NO: 109645 - DNA, 17 bp, synthetic construct
  source 1..17: mol_type = other DNA
tgcctgggggggagggg

SEQ ID NO: 109646 - DNA, 17 bp, synthetic construct
  source 1..17: mol_type = other DNA
gcctgggggggaggggt

SEQ ID NO: 109647 - DNA, 17 bp, synthetic construct
  source 1..17: mol_type = other DNA
cctgggggggaggggtt

SEQ ID NO: 109648 - DNA, 17 bp, synthetic construct
  source 1..17: mol_type = other DNA
ctgggggggaggggttg

SEQ ID NO: 109649 - DNA, 17 bp, synthetic construct
  source 1..17: mol_type = other DNA
tgggggggaggggttgc

SEQ ID NO: 109650 - DNA, 17 bp, synthetic construct
  source 1..17: mol_type = other DNA
gggggggaggggttgcc

SEQ ID NO: 109651 - DNA, 17 bp, synthetic construct
  source 1..17: mol_type = other DNA
ggggggaggggttgcct

SEQ ID NO: 109652 - DNA, 17 bp, synthetic construct
  source 1..17: mol_type = other DNA
gggggaggggttgcctg

SEQ ID NO: 109653 - DNA, 17 bp, synthetic construct
  source 1..17: mol_type = other DNA
ggggaggggttgcctgg

SEQ ID NO: 109654 - DNA, 17 bp, synthetic construct
  source 1..17: mol_type = other DNA
gggaggggttgcctggg

SEQ ID NO: 109655 - DNA, 17 bp, synthetic construct
  source 1..17: mol_type = other DNA
ggaggggttgcctgggt

SEQ ID NO: 109656 - DNA, 17 bp, synthetic construct
  source 1..17: mol_type = other DNA
gaggggttgcctgggtt

SEQ ID NO: 109657 - DNA, 17 bp, synthetic construct
  source 1..17: mol_type = other DNA
aggggttgcctgggttg

SEQ ID NO: 109658 - DNA, 17 bp, synthetic construct
  source 1..17: mol_type = other DNA
ggggttgcctgggttgg

SEQ ID NO: 109659 - DNA, 17 bp, synthetic construct
  source 1..17: mol_type = other DNA
gggttgcctgggttggg

SEQ ID NO: 109660 - DNA, 17 bp, synthetic construct
  source 1..17: mol_type = other DNA
ggttgcctgggttgggg

SEQ ID NO: 109661 - DNA, 17 bp, synthetic construct
  source 1..17: mol_type = other DNA
gttgcctgggttgggga

SEQ ID NO: 109662 - DNA, 17 bp, synthetic construct
  source 1..17: mol_type = other DNA
ttgcctgggttggggag

SEQ ID NO: 109663 - DNA, 17 bp, synthetic construct
  source 1..17: mol_type = other DNA
tgcctgggttggggagg

SEQ ID NO: 109664 - DNA, 17 bp, synthetic construct
  source 1..17: mol_type = other DNA
gcctgggttggggaggg

SEQ ID NO: 109665 - DNA, 17 bp, synthetic construct
  source 1..17: mol_type = other DNA
cctgggttggggagggg

SEQ ID NO: 109666 - DNA, 17 bp, synthetic construct
  source 1..17: mol_type = other DNA
ctgggttggggaggggc

SEQ ID NO: 109667 - DNA, 17 bp, synthetic construct
  source 1..17: mol_type = other DNA
tgggttggggaggggct

SEQ ID NO: 109668 - DNA, 17 bp, synthetic construct
  source 1..17: mol_type = other DNA
gggttggggaggggctg

SEQ ID NO: 109669 - DNA, 17 bp, synthetic construct
  source 1..17: mol_type = other DNA
ggttggggaggggctgt

SEQ ID NO: 109670 - DNA, 17 bp, synthetic construct
  source 1..17: mol_type = other DNA
gttggggaggggctgtc

SEQ ID NO: 109671 - DNA, 17 bp, synthetic construct
  source 1..17: mol_type = other DNA
ttggggaggggctgtct

SEQ ID NO: 109672 - DNA, 17 bp, synthetic construct
  source 1..17: mol_type = other DNA
tggggaggggctgtctg

SEQ ID NO: 109673 - DNA, 17 bp, synthetic construct
  source 1..17: mol_type = other DNA
ggggaggggctgtctgg

SEQ ID NO: 109674 - DNA, 17 bp, synthetic construct
  source 1..17: mol_type = other DNA
gggaggggctgtctggg

SEQ ID NO: 109675 - DNA, 17 bp, synthetic construct
  source 1..17: mol_type = other DNA
ggaggggctgtctgggg

SEQ ID NO: 109676 - DNA, 17 bp, synthetic construct
  source 1..17: mol_type = other DNA
gaggggctgtctggggc

SEQ ID NO: 109677 - DNA, 17 bp, synthetic construct
  source 1..17: mol_type = other DNA
aggggctgtctggggca

SEQ ID NO: 109678 - DNA, 17 bp, synthetic construct
  source 1..17: mol_type = other DNA
ggggctgtctggggcag

SEQ ID NO: 109679 - DNA, 17 bp, synthetic construct
  source 1..17: mol_type = other DNA
gggctgtctggggcagg

SEQ ID NO: 109680 - DNA, 17 bp, synthetic construct
  source 1..17: mol_type = other DNA
ggctgtctggggcaggg

SEQ ID NO: 109681 - DNA, 17 bp, synthetic construct
  source 1..17: mol_type = other DNA
gctgtctggggcagggg

SEQ ID NO: 109682 - DNA, 17 bp, synthetic construct
  source 1..17: mol_type = other DNA
ctgtctggggcagggga

SEQ ID NO: 109683 - DNA, 17 bp, synthetic construct
  source 1..17: mol_type = other DNA
tgtctggggcaggggag

SEQ ID NO: 109684 - DNA, 17 bp, synthetic construct
  source 1..17: mol_type = other DNA
gtctggggcaggggagg

SEQ ID NO: 109685 - DNA, 17 bp, synthetic construct
  source 1..17: mol_type = other DNA
tctggggcaggggagga

SEQ ID NO: 109686 - DNA, 17 bp, synthetic construct
  source 1..17: mol_type = other DNA
ctggggcaggggaggag

SEQ ID NO: 109687 - DNA, 17 bp, synthetic construct
  source 1..17: mol_type = other DNA
tggggcaggggaggagc

SEQ ID NO: 109688 - DNA, 17 bp, synthetic construct
  source 1..17: mol_type = other DNA
ggggcaggggaggagct

SEQ ID NO: 109689 - DNA, 17 bp, synthetic construct
  source 1..17: mol_type = other DNA
gggcaggggaggagctg

SEQ ID NO: 109690 - DNA, 17 bp, synthetic construct
  source 1..17: mol_type = other DNA
ggcaggggaggagctgc

SEQ ID NO: 109691 - DNA, 17 bp, synthetic construct
  source 1..17: mol_type = other DNA
gcaggggaggagctgcc

SEQ ID NO: 109692 - DNA, 17 bp, synthetic construct
  source 1..17: mol_type = other DNA
caggggaggagctgcct

SEQ ID NO: 109693 - DNA, 17 bp, synthetic construct
  source 1..17: mol_type = other DNA
aggggaggagctgcctg

SEQ ID NO: 109694 - DNA, 17 bp, synthetic construct
  source 1..17: mol_type = other DNA
ggggaggagctgcctgg

SEQ ID NO: 109695 - DNA, 17 bp, synthetic construct
  source 1..17: mol_type = other DNA
gggaggagctgcctggg

SEQ ID NO: 109696 - DNA, 17 bp, synthetic construct
  source 1..17: mol_type = other DNA
ggaggagctgcctgggg

SEQ ID NO: 109697 - DNA, 17 bp, synthetic construct
  source 1..17: mol_type = other DNA
gaggagctgcctggggc

SEQ ID NO: 109698 - DNA, 17 bp, synthetic construct
  source 1..17: mol_type = other DNA
aggagctgcctggggcg

SEQ ID NO: 109699 - DNA, 17 bp, synthetic construct
  source 1..17: mol_type = other DNA
ggagctgcctggggcgg

SEQ ID NO: 109700 - DNA, 17 bp, synthetic construct
  source 1..17: mol_type = other DNA
gagctgcctggggcggg

SEQ ID NO: 109701 - DNA, 17 bp, synthetic construct
  source 1..17: mol_type = other DNA
agctgcctggggcgggg

SEQ ID NO: 109702 - DNA, 17 bp, synthetic construct
  source 1..17: mol_type = other DNA
gctgcctggggcggggg

SEQ ID NO: 109703 - DNA, 17 bp, synthetic construct
  source 1..17: mol_type = other DNA
ctgcctggggcggggga

SEQ ID NO: 109704 - DNA, 17 bp, synthetic construct
  source 1..17: mol_type = other DNA
tgcctggggcgggggag

SEQ ID NO: 109705 - DNA, 17 bp, synthetic construct
  source 1..17: mol_type = other DNA
gcctggggcgggggagg

SEQ ID NO: 109706 - DNA, 17 bp, synthetic construct
  source 1..17: mol_type = other DNA
cctggggcgggggaggg

SEQ ID NO: 109707 - DNA, 17 bp, synthetic construct
  source 1..17: mol_type = other DNA
ctggggcgggggagggg

SEQ ID NO: 109708 - DNA, 17 bp, synthetic construct
  source 1..17: mol_type = other DNA
tggggcgggggaggggc

SEQ ID NO: 109709 - DNA, 17 bp, synthetic construct
  source 1..17: mol_type = other DNA
ggggcgggggaggggct

SEQ ID NO: 109710 - DNA, 17 bp, synthetic construct
  source 1..17: mol_type = other DNA
gggcgggggaggggctg

SEQ ID NO: 109711 - DNA, 17 bp, synthetic construct
  source 1..17: mol_type = other DNA
ggcgggggaggggctgt

SEQ ID NO: 109712 - DNA, 17 bp, synthetic construct
  source 1..17: mol_type = other DNA
gcgggggaggggctgta

SEQ ID NO: 109713 - DNA, 17 bp, synthetic construct
  source 1..17: mol_type = other DNA
cgggggaggggctgtag

SEQ ID NO: 109714 - DNA, 17 bp, synthetic construct
  source 1..17: mol_type = other DNA
gggggaggggctgtagg

SEQ ID NO: 109715 - DNA, 17 bp, synthetic construct
  source 1..17: mol_type = other DNA
ggggaggggctgtaggg

SEQ ID NO: 109716 - DNA, 17 bp, synthetic construct
  source 1..17: mol_type = other DNA
gggaggggctgtagggc

SEQ ID NO: 109717 - DNA, 17 bp, synthetic construct
  source 1..17: mol_type = other DNA
ggaggggctgtagggcc

SEQ ID NO: 109718 - DNA, 17 bp, synthetic construct
  source 1..17: mol_type = other DNA
gaggggctgtagggcca

SEQ ID NO: 109719 - DNA, 17 bp, synthetic construct
  source 1..17: mol_type = other DNA
aggggctgtagggccag

SEQ ID NO: 109720 - DNA, 17 bp, synthetic construct
  source 1..17: mol_type = other DNA
ggggctgtagggccagg

SEQ ID NO: 109721 - DNA, 17 bp, synthetic construct
  source 1..17: mol_type = other DNA
gggctgtagggccaggg

SEQ ID NO: 109722 - DNA, 17 bp, synthetic construct
  source 1..17: mol_type = other DNA
ggctgtagggccaggga

SEQ ID NO: 109723 - DNA, 17 bp, synthetic construct
  source 1..17: mol_type = other DNA
gctgtagggccagggag

SEQ ID NO: 109724 - DNA, 17 bp, synthetic construct
  source 1..17: mol_type = other DNA
ctgtagggccagggagg

SEQ ID NO: 109725 - DNA, 17 bp, synthetic construct
  source 1..17: mol_type = other DNA
tgtagggccagggaggg

SEQ ID NO: 109726 - DNA, 17 bp, synthetic construct
  source 1..17: mol_type = other DNA
gtagggccagggagggg

SEQ ID NO: 109727 - DNA, 17 bp, synthetic construct
  source 1..17: mol_type = other DNA
tagggccagggaggggc

SEQ ID NO: 109728 - DNA, 17 bp, synthetic construct
  source 1..17: mol_type = other DNA
agggccagggaggggct

SEQ ID NO: 109729 - DNA, 17 bp, synthetic construct
  source 1..17: mol_type = other DNA
gggccagggaggggctg

SEQ ID NO: 109730 - DNA, 17 bp, synthetic construct
  source 1..17: mol_type = other DNA
ggccagggaggggctgc

SEQ ID NO: 109731 - DNA, 17 bp, synthetic construct
  source 1..17: mol_type = other DNA
gccagggaggggctgcc

SEQ ID NO: 109732 - DNA, 17 bp, synthetic construct
  source 1..17: mol_type = other DNA
ccagggaggggctgcct

SEQ ID NO: 109733 - DNA, 17 bp, synthetic construct
  source 1..17: mol_type = other DNA
cagggaggggctgcctg

SEQ ID NO: 109734 - DNA, 17 bp, synthetic construct
  source 1..17: mol_type = other DNA
agggaggggctgcctgg

SEQ ID NO: 109735 - DNA, 17 bp, synthetic construct
  source 1..17: mol_type = other DNA
gggaggggctgcctggg

SEQ ID NO: 109736 - DNA, 17 bp, synthetic construct
  source 1..17: mol_type = other DNA
ggaggggctgcctgggg

SEQ ID NO: 109737 - DNA, 17 bp, synthetic construct
  source 1..17: mol_type = other DNA
gaggggctgcctggggc

SEQ ID NO: 109738 - DNA, 17 bp, synthetic construct
  source 1..17: mol_type = other DNA
aggggctgcctggggct

SEQ ID NO: 109739 - DNA, 17 bp, synthetic construct
  source 1..17: mol_type = other DNA
ggggctgcctggggctg

SEQ ID NO: 109740 - DNA, 17 bp, synthetic construct
  source 1..17: mol_type = other DNA
gggctgcctggggctgg

SEQ ID NO: 109741 - DNA, 17 bp, synthetic construct
  source 1..17: mol_type = other DNA
ggctgcctggggctggg

SEQ ID NO: 109742 - DNA, 17 bp, synthetic construct
  source 1..17: mol_type = other DNA
gctgcctggggctgggg

SEQ ID NO: 109743 - DNA, 17 bp, synthetic construct
  source 1..17: mol_type = other DNA
ctgcctggggctgggga

SEQ ID NO: 109744 - DNA, 17 bp, synthetic construct
  source 1..17: mol_type = other DNA
tgcctggggctggggag

SEQ ID NO: 109745 - DNA, 17 bp, synthetic construct
  source 1..17: mol_type = other DNA
gcctggggctggggagg

SEQ ID NO: 109746 - DNA, 17 bp, synthetic construct
  source 1..17: mol_type = other DNA
cctggggctggggaggg

SEQ ID NO: 109747 - DNA, 17 bp, synthetic construct
  source 1..17: mol_type = other DNA
ctggggctggggagggg

SEQ ID NO: 109748 - DNA, 17 bp, synthetic construct
  source 1..17: mol_type = other DNA
tggggctggggaggggc

SEQ ID NO: 109749 - DNA, 17 bp, synthetic construct
  source 1..17: mol_type = other DNA
ggggctggggaggggct

SEQ ID NO: 109750 - DNA, 17 bp, synthetic construct
  source 1..17: mol_type = other DNA
gggctggggaggggctg

SEQ ID NO: 109751 - DNA, 17 bp, synthetic construct
  source 1..17: mol_type = other DNA
ggctggggaggggctgc

SEQ ID NO: 109752 - DNA, 17 bp, synthetic construct
  source 1..17: mol_type = other DNA
gctggggaggggctgct

SEQ ID NO: 109753 - DNA, 17 bp, synthetic construct
  source 1..17: mol_type = other DNA
ctggggaggggctgctg

SEQ ID NO: 109754 - DNA, 17 bp, synthetic construct
  source 1..17: mol_type = other DNA
tggggaggggctgctgg

SEQ ID NO: 109755 - DNA, 17 bp, synthetic construct
  source 1..17: mol_type = other DNA
ggggaggggctgctggg

SEQ ID NO: 109756 - DNA, 17 bp, synthetic construct
  source 1..17: mol_type = other DNA
gggaggggctgctgggg

SEQ ID NO: 109757 - DNA, 17 bp, synthetic construct
  source 1..17: mol_type = other DNA
ggaggggctgctggggt

SEQ ID NO: 109758 - DNA, 17 bp, synthetic construct
  source 1..17: mol_type = other DNA
gaggggctgctggggtg

SEQ ID NO: 109759 - DNA, 17 bp, synthetic construct
  source 1..17: mol_type = other DNA
aggggctgctggggtgg

SEQ ID NO: 109760 - DNA, 17 bp, synthetic construct
  source 1..17: mol_type = other DNA
ggggctgctggggtggg

SEQ ID NO: 109761 - DNA, 17 bp, synthetic construct
  source 1..17: mol_type = other DNA
gggctgctggggtgggg

SEQ ID NO: 109762 - DNA, 17 bp, synthetic construct
  source 1..17: mol_type = other DNA
ggctgctggggtgggga

SEQ ID NO: 109763 - DNA, 17 bp, synthetic construct
  source 1..17: mol_type = other DNA
gctgctggggtggggag

SEQ ID NO: 109764 - DNA, 17 bp, synthetic construct
  source 1..17: mol_type = other DNA
ctgctggggtggggagg

SEQ ID NO: 109765 - DNA, 17 bp, synthetic construct
  source 1..17: mol_type = other DNA
tgctggggtggggaggg

SEQ ID NO: 109766 - DNA, 17 bp, synthetic construct
  source 1..17: mol_type = other DNA
gctggggtggggagggg

SEQ ID NO: 109767 - DNA, 17 bp, synthetic construct
  source 1..17: mol_type = other DNA
ctggggtggggaggggc

SEQ ID NO: 109768 - DNA, 17 bp, synthetic construct
  source 1..17: mol_type = other DNA
tggggtggggaggggct

SEQ ID NO: 109769 - DNA, 17 bp, synthetic construct
  source 1..17: mol_type = other DNA
ggggtggggaggggctg

SEQ ID NO: 109770 - DNA, 17 bp, synthetic construct
  source 1..17: mol_type = other DNA
gggtggggaggggctgc

SEQ ID NO: 109771 - DNA, 17 bp, synthetic construct
  source 1..17: mol_type = other DNA
ggtggggaggggctgcc

SEQ ID NO: 109772 - DNA, 17 bp, synthetic construct
  source 1..17: mol_type = other DNA
gtggggaggggctgcct

SEQ ID NO: 109773 - DNA, 17 bp, synthetic construct
  source 1..17: mol_type = other DNA
tggggaggggctgcctg

SEQ ID NO: 109774 - DNA, 17 bp, synthetic construct
  source 1..17: mol_type = other DNA
ggggaggggctgcctgc

SEQ ID NO: 109775 - DNA, 17 bp, synthetic construct
  source 1..17: mol_type = other DNA
gggaggggctgcctgcg

SEQ ID NO: 109776 - DNA, 17 bp, synthetic construct
  source 1..17: mol_type = other DNA
ggaggggctgcctgcgg

SEQ ID NO: 109777 - DNA, 17 bp, synthetic construct
  source 1..17: mol_type = other DNA
gaggggctgcctgcggc

SEQ ID NO: 109778 - DNA, 17 bp, synthetic construct
  source 1..17: mol_type = other DNA
aggggctgcctgcggcg

SEQ ID NO: 109779 - DNA, 17 bp, synthetic construct
  source 1..17: mol_type = other DNA
ggggctgcctgcggcgg

SEQ ID NO: 109780 - DNA, 17 bp, synthetic construct
  source 1..17: mol_type = other DNA
gggctgcctgcggcggg

SEQ ID NO: 109781 - DNA, 17 bp, synthetic construct
  source 1..17: mol_type = other DNA
ggctgcctgcggcggga

SEQ ID NO: 109782 - DNA, 17 bp, synthetic construct
  source 1..17: mol_type = other DNA
gctgcctgcggcgggag

SEQ ID NO: 109783 - DNA, 17 bp, synthetic construct
  source 1..17: mol_type = other DNA
ctgcctgcggcgggagc

SEQ ID NO: 109784 - DNA, 17 bp, synthetic construct
  source 1..17: mol_type = other DNA
tgcctgcggcgggagcc

SEQ ID NO: 109785 - DNA, 17 bp, synthetic construct
  source 1..17: mol_type = other DNA
gcctgcggcgggagccg

SEQ ID NO: 109786 - DNA, 17 bp, synthetic construct
  source 1..17: mol_type = other DNA
cctgcggcgggagccgg

SEQ ID NO: 109787 - DNA, 17 bp, synthetic construct
  source 1..17: mol_type = other DNA
ctgcggcgggagccggg

SEQ ID NO: 109788 - DNA, 17 bp, synthetic construct
  source 1..17: mol_type = other DNA
tgcggcgggagccgggg

SEQ ID NO: 109789 - DNA, 17 bp, synthetic construct
  source 1..17: mol_type = other DNA
gcggcgggagccggggc

SEQ ID NO: 109790 - DNA, 17 bp, synthetic construct
  source 1..17: mol_type = other DNA
cggcgggagccggggcg

SEQ ID NO: 109791 - DNA, 17 bp, synthetic construct
  source 1..17: mol_type = other DNA
ggcgggagccggggcgt

SEQ ID NO: 109792 - DNA, 17 bp, synthetic construct
  source 1..17: mol_type = other DNA
gcgggagccggggcgtg

SEQ ID NO: 109793 - DNA, 17 bp, synthetic construct
  source 1..17: mol_type = other DNA
cgggagccggggcgtgg

SEQ ID NO: 109794 - DNA, 17 bp, synthetic construct
  source 1..17: mol_type = other DNA
gggagccggggcgtggg

SEQ ID NO: 109795 - DNA, 17 bp, synthetic construct
  source 1..17: mol_type = other DNA
ggagccggggcgtggga

SEQ ID NO: 109796 - DNA, 17 bp, synthetic construct
  source 1..17: mol_type = other DNA
gagccggggcgtgggag

SEQ ID NO: 109797 - DNA, 17 bp, synthetic construct
  source 1..17: mol_type = other DNA
agccggggcgtgggagt

SEQ ID NO: 109798 - DNA, 17 bp, synthetic construct
  source 1..17: mol_type = other DNA
gccggggcgtgggagtg

SEQ ID NO: 109799 - DNA, 17 bp, synthetic construct
  source 1..17: mol_type = other DNA
ccggggcgtgggagtgg

SEQ ID NO: 109800 - DNA, 17 bp, synthetic construct
  source 1..17: mol_type = other DNA
cggggcgtgggagtggc

SEQ ID NO: 109801 - DNA, 17 bp, synthetic construct
  source 1..17: mol_type = other DNA
ggggcgtgggagtggct

SEQ ID NO: 109802 - DNA, 17 bp, synthetic construct
  source 1..17: mol_type = other DNA
gggcgtgggagtggctg

SEQ ID NO: 109803 - DNA, 17 bp, synthetic construct
  source 1..17: mol_type = other DNA
ggcgtgggagtggctgg

SEQ ID NO: 109804 - DNA, 17 bp, synthetic construct
  source 1..17: mol_type = other DNA
gcgtgggagtggctggt

SEQ ID NO: 109805 - DNA, 17 bp, synthetic construct
  source 1..17: mol_type = other DNA
cgtgggagtggctggtt

SEQ ID NO: 109806 - DNA, 17 bp, synthetic construct
  source 1..17: mol_type = other DNA
gtgggagtggctggttg

SEQ ID NO: 109807 - DNA, 17 bp, synthetic construct
  source 1..17: mol_type = other DNA
tgggagtggctggttgg

SEQ ID NO: 109808 - DNA, 17 bp, synthetic construct
  source 1..17: mol_type = other DNA
gggagtggctggttggg

SEQ ID NO: 109809 - DNA, 17 bp, synthetic construct
  source 1..17: mol_type = other DNA
ggagtggctggttgggc

SEQ ID NO: 109810 - DNA, 17 bp, synthetic construct
  source 1..17: mol_type = other DNA
gagtggctggttgggct

SEQ ID NO: 109811 - DNA, 17 bp, synthetic construct
  source 1..17: mol_type = other DNA
agtggctggttgggctg

SEQ ID NO: 109812 - DNA, 17 bp, synthetic construct
  source 1..17: mol_type = other DNA
gtggctggttgggctgg

SEQ ID NO: 109813 - DNA, 17 bp, synthetic construct
  source 1..17: mol_type = other DNA
tggctggttgggctggc

SEQ ID NO: 109814 - DNA, 17 bp, synthetic construct
  source 1..17: mol_type = other DNA
ggctggttgggctggca

SEQ ID NO: 109815 - DNA, 17 bp, synthetic construct
  source 1..17: mol_type = other DNA
gctggttgggctggcac

SEQ ID NO: 109816 - DNA, 17 bp, synthetic construct
  source 1..17: mol_type = other DNA
ctggttgggctggcaca

SEQ ID NO: 109817 - DNA, 17 bp, synthetic construct
  source 1..17: mol_type = other DNA
tggttgggctggcacac

SEQ ID NO: 109818 - DNA, 17 bp, synthetic construct
  source 1..17: mol_type = other DNA
ggttgggctggcacaca

SEQ ID NO: 109819 - DNA, 17 bp, synthetic construct
  source 1..17: mol_type = other DNA
gttgggctggcacacag

SEQ ID NO: 109820 - DNA, 17 bp, synthetic construct
  source 1..17: mol_type = other DNA
ttgggctggcacacagg

SEQ ID NO: 109821 - DNA, 17 bp, synthetic construct
  source 1..17: mol_type = other DNA
tgggctggcacacaggg

SEQ ID NO: 109822 - DNA, 17 bp, synthetic construct
  source 1..17: mol_type = other DNA
gggctggcacacagggg

SEQ ID NO: 109823 - DNA, 17 bp, synthetic construct
  source 1..17: mol_type = other DNA
ggctggcacacaggggc

SEQ ID NO: 109824 - DNA, 17 bp, synthetic construct
  source 1..17: mol_type = other DNA
gctggcacacaggggca

SEQ ID NO: 109825 - DNA, 17 bp, synthetic construct
  source 1..17: mol_type = other DNA
ctggcacacaggggcag

SEQ ID NO: 109826 - DNA, 17 bp, synthetic construct
  source 1..17: mol_type = other DNA
tggcacacaggggcagg

SEQ ID NO: 109827 - DNA, 17 bp, synthetic construct
  source 1..17: mol_type = other DNA
ggcacacaggggcaggg

SEQ ID NO: 109828 - DNA, 17 bp, synthetic construct
  source 1..17: mol_type = other DNA
gcacacaggggcagggc

SEQ ID NO: 109829 - DNA, 17 bp, synthetic construct
  source 1..17: mol_type = other DNA
cacacaggggcagggct

SEQ ID NO: 109830 - DNA, 17 bp, synthetic construct
  source 1..17: mol_type = other DNA
acacaggggcagggctg

SEQ ID NO: 109831 - DNA, 17 bp, synthetic construct
  source 1..17: mol_type = other DNA
cacaggggcagggctgt

SEQ ID NO: 109832 - DNA, 17 bp, synthetic construct
  source 1..17: mol_type = other DNA
acaggggcagggctgtg

SEQ ID NO: 109833 - DNA, 17 bp, synthetic construct
  source 1..17: mol_type = other DNA
caggggcagggctgtga

SEQ ID NO: 109834 - DNA, 17 bp, synthetic construct
  source 1..17: mol_type = other DNA
aggggcagggctgtgag

SEQ ID NO: 109835 - DNA, 17 bp, synthetic construct
  source 1..17: mol_type = other DNA
ggggcagggctgtgagc

SEQ ID NO: 109836 - DNA, 17 bp, synthetic construct
  source 1..17: mol_type = other DNA
gggcagggctgtgagct

SEQ ID NO: 109837 - DNA, 17 bp, synthetic construct
  source 1..17: mol_type = other DNA
ggcagggctgtgagctg

SEQ ID NO: 109838 - DNA, 17 bp, synthetic construct
  source 1..17: mol_type = other DNA
gcagggctgtgagctgt

SEQ ID NO: 109839 - DNA, 17 bp, synthetic construct
  source 1..17: mol_type = other DNA
cagggctgtgagctgtg

SEQ ID NO: 109840 - DNA, 17 bp, synthetic construct
  source 1..17: mol_type = other DNA
agggctgtgagctgtgg

SEQ ID NO: 109841 - DNA, 17 bp, synthetic construct
  source 1..17: mol_type = other DNA
gggctgtgagctgtggg

SEQ ID NO: 109842 - DNA, 17 bp, synthetic construct
  source 1..17: mol_type = other DNA
ggctgtgagctgtgggt

SEQ ID NO: 109843 - DNA, 17 bp, synthetic construct
  source 1..17: mol_type = other DNA
gctgtgagctgtgggtc

SEQ ID NO: 109844 - DNA, 17 bp, synthetic construct
  source 1..17: mol_type = other DNA
ctgtgagctgtgggtcg

SEQ ID NO: 109845 - DNA, 17 bp, synthetic construct
  source 1..17: mol_type = other DNA
tgtgagctgtgggtcgg

SEQ ID NO: 109846 - DNA, 17 bp, synthetic construct
  source 1..17: mol_type = other DNA
gtgagctgtgggtcggg

SEQ ID NO: 109847 - DNA, 17 bp, synthetic construct
  source 1..17: mol_type = other DNA
tgagctgtgggtcgggg

SEQ ID NO: 109848 - DNA, 17 bp, synthetic construct
  source 1..17: mol_type = other DNA
gagctgtgggtcggggt

SEQ ID NO: 109849 - DNA, 17 bp, synthetic construct
  source 1..17: mol_type = other DNA
agctgtgggtcggggtg

SEQ ID NO: 109850 - DNA, 17 bp, synthetic construct
  source 1..17: mol_type = other DNA
gctgtgggtcggggtgg

SEQ ID NO: 109851 - DNA, 17 bp, synthetic construct
  source 1..17: mol_type = other DNA
ctgtgggtcggggtgga

SEQ ID NO: 109852 - DNA, 17 bp, synthetic construct
  source 1..17: mol_type = other DNA
tgtgggtcggggtggag

SEQ ID NO: 109853 - DNA, 17 bp, synthetic construct
  source 1..17: mol_type = other DNA
gtgggtcggggtggagg

SEQ ID NO: 109854 - DNA, 17 bp, synthetic construct
  source 1..17: mol_type = other DNA
tgggtcggggtggagga

SEQ ID NO: 109855 - DNA, 17 bp, synthetic construct
  source 1..17: mol_type = other DNA
gggtcggggtggaggac

SEQ ID NO: 109856 - DNA, 17 bp, synthetic construct
  source 1..17: mol_type = other DNA
ggtcggggtggaggact

SEQ ID NO: 109857 - DNA, 17 bp, synthetic construct
  source 1..17: mol_type = other DNA
gtcggggtggaggactc

SEQ ID NO: 109858 - DNA, 17 bp, synthetic construct
  source 1..17: mol_type = other DNA
tcggggtggaggactca

SEQ ID NO: 109859 - DNA, 17 bp, synthetic construct
  source 1..17: mol_type = other DNA
cggggtggaggactcag

SEQ ID NO: 109860 - DNA, 17 bp, synthetic construct
  source 1..17: mol_type = other DNA
ggggtggaggactcagg

SEQ ID NO: 109861 - DNA, 17 bp, synthetic construct
  source 1..17: mol_type = other DNA
gggtggaggactcaggg

SEQ ID NO: 109862 - DNA, 17 bp, synthetic construct
  source 1..17: mol_type = other DNA
ggtggaggactcaggga

SEQ ID NO: 109863 - DNA, 17 bp, synthetic construct
  source 1..17: mol_type = other DNA
gtggaggactcagggat

SEQ ID NO: 109864 - DNA, 17 bp, synthetic construct
  source 1..17: mol_type = other DNA
tggaggactcagggatc

SEQ ID NO: 109865 - DNA, 17 bp, synthetic construct
  source 1..17: mol_type = other DNA
ggaggactcagggatcg

SEQ ID NO: 109866 - DNA, 17 bp, synthetic construct
  source 1..17: mol_type = other DNA
gaggactcagggatcgg

SEQ ID NO: 109867 - DNA, 17 bp, synthetic construct
  source 1..17: mol_type = other DNA
aggactcagggatcggc

SEQ ID NO: 109868 - DNA, 17 bp, synthetic construct
  source 1..17: mol_type = other DNA
ggactcagggatcggct

SEQ ID NO: 109869 - DNA, 17 bp, synthetic construct
  source 1..17: mol_type = other DNA
gactcagggatcggctg

SEQ ID NO: 109870 - DNA, 17 bp, synthetic construct
  source 1..17: mol_type = other DNA
actcagggatcggctgg

SEQ ID NO: 109871 - DNA, 17 bp, synthetic construct
  source 1..17: mol_type = other DNA
ctcagggatcggctggc

SEQ ID NO: 109872 - DNA, 17 bp, synthetic construct
  source 1..17: mol_type = other DNA
tcagggatcggctggct

SEQ ID NO: 109873 - DNA, 17 bp, synthetic construct
  source 1..17: mol_type = other DNA
cagggatcggctggctt

SEQ ID NO: 109874 - DNA, 17 bp, synthetic construct
  source 1..17: mol_type = other DNA
agggatcggctggcttt

SEQ ID NO: 109875 - DNA, 17 bp, synthetic construct
  source 1..17: mol_type = other DNA
gggatcggctggctttc

SEQ ID NO: 109876 - DNA, 17 bp, synthetic construct
  source 1..17: mol_type = other DNA
ggatcggctggctttct

SEQ ID NO: 109877 - DNA, 17 bp, synthetic construct
  source 1..17: mol_type = other DNA
gatcggctggctttctg

SEQ ID NO: 109878 - DNA, 17 bp, synthetic construct
  source 1..17: mol_type = other DNA
atcggctggctttctgg

SEQ ID NO: 109879 - DNA, 17 bp, synthetic construct
  source 1..17: mol_type = other DNA
tcggctggctttctggg

SEQ ID NO: 109880 - DNA, 17 bp, synthetic construct
  source 1..17: mol_type = other DNA
cggctggctttctggga

SEQ ID NO: 109881 - DNA, 17 bp, synthetic construct
  source 1..17: mol_type = other DNA
ggctggctttctgggaa

SEQ ID NO: 109882 - DNA, 17 bp, synthetic construct
  source 1..17: mol_type = other DNA
gctggctttctgggaaa

SEQ ID NO: 109883 - DNA, 17 bp, synthetic construct
  source 1..17: mol_type = other DNA
ctggctttctgggaaag

SEQ ID NO: 109884 - DNA, 17 bp, synthetic construct
  source 1..17: mol_type = other DNA
tggctttctgggaaagg

SEQ ID NO: 109885 - DNA, 17 bp, synthetic construct
  source 1..17: mol_type = other DNA
ggctttctgggaaaggc

SEQ ID NO: 109886 - DNA, 17 bp, synthetic construct
  source 1..17: mol_type = other DNA
gctttctgggaaaggca

SEQ ID NO: 109887 - DNA, 17 bp, synthetic construct
  source 1..17: mol_type = other DNA
ctttctgggaaaggcag

SEQ ID NO: 109888 - DNA, 17 bp, synthetic construct
  source 1..17: mol_type = other DNA
tttctgggaaaggcagt

SEQ ID NO: 109889 - DNA, 17 bp, synthetic construct
  source 1..17: mol_type = other DNA
ttctgggaaaggcagtc

SEQ ID NO: 109890 - DNA, 17 bp, synthetic construct
  source 1..17: mol_type = other DNA
tctgggaaaggcagtca

SEQ ID NO: 109891 - DNA, 17 bp, synthetic construct
  source 1..17: mol_type = other DNA
ctgggaaaggcagtcaa

SEQ ID NO: 109892 - DNA, 17 bp, synthetic construct
  source 1..17: mol_type = other DNA
tgggaaaggcagtcaac

SEQ ID NO: 109893 - DNA, 17 bp, synthetic construct
  source 1..17: mol_type = other DNA
gggaaaggcagtcaacc

SEQ ID NO: 109894 - DNA, 17 bp, synthetic construct
  source 1..17: mol_type = other DNA
ggaaaggcagtcaacct

SEQ ID NO: 109895 - DNA, 17 bp, synthetic construct
  source 1..17: mol_type = other DNA
gaaaggcagtcaacctg

SEQ ID NO: 109896 - DNA, 17 bp, synthetic construct
  source 1..17: mol_type = other DNA
aaaggcagtcaacctgg

SEQ ID NO: 109897 - DNA, 17 bp, synthetic construct
  source 1..17: mol_type = other DNA
aaggcagtcaacctgga

SEQ ID NO: 109898 - DNA, 17 bp, synthetic construct
  source 1..17: mol_type = other DNA
aggcagtcaacctggat

SEQ ID NO: 109899 - DNA, 17 bp, synthetic construct
  source 1..17: mol_type = other DNA
ggcagtcaacctggatc

SEQ ID NO: 109900 - DNA, 17 bp, synthetic construct
  source 1..17: mol_type = other DNA
gcagtcaacctggatct

SEQ ID NO: 109901 - DNA, 17 bp, synthetic construct
  source 1..17: mol_type = other DNA
cagtcaacctggatctc

SEQ ID NO: 109902 - DNA, 17 bp, synthetic construct
  source 1..17: mol_type = other DNA
agtcaacctggatctct

SEQ ID NO: 109903 - DNA, 17 bp, synthetic construct
  source 1..17: mol_type = other DNA
gtcaacctggatctctg

SEQ ID NO: 109904 - DNA, 17 bp, synthetic construct
  source 1..17: mol_type = other DNA
tcaacctggatctctgg

SEQ ID NO: 109905 - DNA, 17 bp, synthetic construct
  source 1..17: mol_type = other DNA
caacctggatctctgga

SEQ ID NO: 109906 - DNA, 17 bp, synthetic construct
  source 1..17: mol_type = other DNA
aacctggatctctggag

SEQ ID NO: 109907 - DNA, 17 bp, synthetic construct
  source 1..17: mol_type = other DNA
acctggatctctggagg

SEQ ID NO: 109908 - DNA, 17 bp, synthetic construct
  source 1..17: mol_type = other DNA
cctggatctctggaggc

SEQ ID NO: 109909 - DNA, 17 bp, synthetic construct
  source 1..17: mol_type = other DNA
ctggatctctggaggcg

SEQ ID NO: 109910 - DNA, 17 bp, synthetic construct
  source 1..17: mol_type = other DNA
tggatctctggaggcgg

SEQ ID NO: 109911 - DNA, 17 bp, synthetic construct
  source 1..17: mol_type = other DNA
ggatctctggaggcggc

SEQ ID NO: 109912 - DNA, 17 bp, synthetic construct
  source 1..17: mol_type = other DNA
gatctctggaggcggcc

SEQ ID NO: 109913 - DNA, 17 bp, synthetic construct
  source 1..17: mol_type = other DNA
atctctggaggcggccc

SEQ ID NO: 109914 - DNA, 17 bp, synthetic construct
  source 1..17: mol_type = other DNA
tctctggaggcggcccc

SEQ ID NO: 109915 - DNA, 17 bp, synthetic construct
  source 1..17: mol_type = other DNA
ctctggaggcggcccct

SEQ ID NO: 109916 - DNA, 17 bp, synthetic construct
  source 1..17: mol_type = other DNA
tctggaggcggcccctg

SEQ ID NO: 109917 - DNA, 17 bp, synthetic construct
  source 1..17: mol_type = other DNA
ctggaggcggcccctgt

SEQ ID NO: 109918 - DNA, 17 bp, synthetic construct
  source 1..17: mol_type = other DNA
tggaggcggcccctgtg

SEQ ID NO: 109919 - DNA, 17 bp, synthetic construct
  source 1..17: mol_type = other DNA
ggaggcggcccctgtgg

SEQ ID NO: 109920 - DNA, 17 bp, synthetic construct
  source 1..17: mol_type = other DNA
gaggcggcccctgtggt

SEQ ID NO: 109921 - DNA, 17 bp, synthetic construct
  source 1..17: mol_type = other DNA
aggcggcccctgtggtg

SEQ ID NO: 109922 - DNA, 17 bp, synthetic construct
  source 1..17: mol_type = other DNA
ggcggcccctgtggtgg

SEQ ID NO: 109923 - DNA, 17 bp, synthetic construct
  source 1..17: mol_type = other DNA
gcggcccctgtggtggt

SEQ ID NO: 109924 - DNA, 17 bp, synthetic construct
  source 1..17: mol_type = other DNA
cggcccctgtggtggtt

SEQ ID NO: 109925 - DNA, 17 bp, synthetic construct
  source 1..17: mol_type = other DNA
ggcccctgtggtggttc

SEQ ID NO: 109926 - DNA, 17 bp, synthetic construct
  source 1..17: mol_type = other DNA
gcccctgtggtggttcc

SEQ ID NO: 109927 - DNA, 17 bp, synthetic construct
  source 1..17: mol_type = other DNA
cccctgtggtggttccc

SEQ ID NO: 109928 - DNA, 17 bp, synthetic construct
  source 1..17: mol_type = other DNA
ccctgtggtggttccca

SEQ ID NO: 109929 - DNA, 17 bp, synthetic construct
  source 1..17: mol_type = other DNA
cctgtggtggttcccag

SEQ ID NO: 109930 - DNA, 17 bp, synthetic construct
  source 1..17: mol_type = other DNA
ctgtggtggttcccaga

SEQ ID NO: 109931 - DNA, 17 bp, synthetic construct
  source 1..17: mol_type = other DNA
tgtggtggttcccagat

SEQ ID NO: 109932 - DNA, 17 bp, synthetic construct
  source 1..17: mol_type = other DNA
gtggtggttcccagatg

SEQ ID NO: 109933 - DNA, 17 bp, synthetic construct
  source 1..17: mol_type = other DNA
tggtggttcccagatgt

SEQ ID NO: 109934 - DNA, 17 bp, synthetic construct
  source 1..17: mol_type = other DNA
ggtggttcccagatgtc

SEQ ID NO: 109935 - DNA, 17 bp, synthetic construct
  source 1..17: mol_type = other DNA
gtggttcccagatgtca

SEQ ID NO: 109936 - DNA, 17 bp, synthetic construct
  source 1..17: mol_type = other DNA
tggttcccagatgtcag

SEQ ID NO: 109937 - DNA, 17 bp, synthetic construct
  source 1..17: mol_type = other DNA
ggttcccagatgtcagc

SEQ ID NO: 109938 - DNA, 17 bp, synthetic construct
  source 1..17: mol_type = other DNA
gttcccagatgtcagca

SEQ ID NO: 109939 - DNA, 17 bp, synthetic construct
  source 1..17: mol_type = other DNA
ttcccagatgtcagcag

SEQ ID NO: 109940 - DNA, 17 bp, synthetic construct
  source 1..17: mol_type = other DNA
tcccagatgtcagcagg

SEQ ID NO: 109941 - DNA, 17 bp, synthetic construct
  source 1..17: mol_type = other DNA
cccagatgtcagcagga

SEQ ID NO: 109942 - DNA, 17 bp, synthetic construct
  source 1..17: mol_type = other DNA
ccagatgtcagcaggac

SEQ ID NO: 109943 - DNA, 17 bp, synthetic construct
  source 1..17: mol_type = other DNA
cagatgtcagcaggacc

SEQ ID NO: 109944 - DNA, 17 bp, synthetic construct
  source 1..17: mol_type = other DNA
agatgtcagcaggacct

SEQ ID NO: 109945 - DNA, 17 bp, synthetic construct
  source 1..17: mol_type = other DNA
gatgtcagcaggacctg

SEQ ID NO: 109946 - DNA, 17 bp, synthetic construct
  source 1..17: mol_type = other DNA
atgtcagcaggacctgg

SEQ ID NO: 109947 - DNA, 17 bp, synthetic construct
  source 1..17: mol_type = other DNA
tgtcagcaggacctggc

SEQ ID NO: 109948 - DNA, 17 bp, synthetic construct
  source 1..17: mol_type = other DNA
gtcagcaggacctggct

SEQ ID NO: 109949 - DNA, 17 bp, synthetic construct
  source 1..17: mol_type = other DNA
tcagcaggacctggctg

SEQ ID NO: 109950 - DNA, 17 bp, synthetic construct
  source 1..17: mol_type = other DNA
cagcaggacctggctgg

SEQ ID NO: 109951 - DNA, 17 bp, synthetic construct
  source 1..17: mol_type = other DNA
agcaggacctggctgga

SEQ ID NO: 109952 - DNA, 17 bp, synthetic construct
  source 1..17: mol_type = other DNA
gcaggacctggctggaa

SEQ ID NO: 109953 - DNA, 17 bp, synthetic construct
  source 1..17: mol_type = other DNA
caggacctggctggaaa

SEQ ID NO: 109954 - DNA, 17 bp, synthetic construct
  source 1..17: mol_type = other DNA
aggacctggctggaaaa

SEQ ID NO: 109955 - DNA, 17 bp, synthetic construct
  source 1..17: mol_type = other DNA
ggacctggctggaaaag

SEQ ID NO: 109956 - DNA, 17 bp, synthetic construct
  source 1..17: mol_type = other DNA
gacctggctggaaaagc

SEQ ID NO: 109957 - DNA, 17 bp, synthetic construct
  source 1..17: mol_type = other DNA
acctggctggaaaagcc

SEQ ID NO: 109958 - DNA, 17 bp, synthetic construct
  source 1..17: mol_type = other DNA
cctggctggaaaagcca

SEQ ID NO: 109959 - DNA, 17 bp, synthetic construct
  source 1..17: mol_type = other DNA
ctggctggaaaagccag

SEQ ID NO: 109960 - DNA, 17 bp, synthetic construct
  source 1..17: mol_type = other DNA
tggctggaaaagccagg

SEQ ID NO: 109961 - DNA, 17 bp, synthetic construct
  source 1..17: mol_type = other DNA
ggctggaaaagccaggc

SEQ ID NO: 109962 - DNA, 17 bp, synthetic construct
  source 1..17: mol_type = other DNA
gctggaaaagccaggca

SEQ ID NO: 109963 - DNA, 17 bp, synthetic construct
  source 1..17: mol_type = other DNA
ctggaaaagccaggcag

SEQ ID NO: 109964 - DNA, 17 bp, synthetic construct
  source 1..17: mol_type = other DNA
tggaaaagccaggcagg

SEQ ID NO: 109965 - DNA, 17 bp, synthetic construct
  source 1..17: mol_type = other DNA
ggaaaagccaggcaggg

SEQ ID NO: 109966 - DNA, 17 bp, synthetic construct
  source 1..17: mol_type = other DNA
gaaaagccaggcagggc

SEQ ID NO: 109967 - DNA, 17 bp, synthetic construct
  source 1..17: mol_type = other DNA
aaaagccaggcagggcc

SEQ ID NO: 109968 - DNA, 17 bp, synthetic construct
  source 1..17: mol_type = other DNA
aaagccaggcagggcca

SEQ ID NO: 109969 - DNA, 17 bp, synthetic construct
  source 1..17: mol_type = other DNA
aagccaggcagggccag

SEQ ID NO: 109970 - DNA, 17 bp, synthetic construct
  source 1..17: mol_type = other DNA
agccaggcagggccagg

SEQ ID NO: 109971 - DNA, 17 bp, synthetic construct
  source 1..17: mol_type = other DNA
gccaggcagggccaggc

SEQ ID NO: 109972 - DNA, 17 bp, synthetic construct
  source 1..17: mol_type = other DNA
ccaggcagggccaggcc

SEQ ID NO: 109973 - DNA, 17 bp, synthetic construct
  source 1..17: mol_type = other DNA
caggcagggccaggcca

SEQ ID NO: 109974 - DNA, 17 bp, synthetic construct
  source 1..17: mol_type = other DNA
aggcagggccaggccag

SEQ ID NO: 109975 - DNA, 17 bp, synthetic construct
  source 1..17: mol_type = other DNA
ggcagggccaggccaga

SEQ ID NO: 109976 - DNA, 17 bp, synthetic construct
  source 1..17: mol_type = other DNA
gcagggccaggccagag

SEQ ID NO: 109977 - DNA, 17 bp, synthetic construct
  source 1..17: mol_type = other DNA
cagggccaggccagagt

SEQ ID NO: 109978 - DNA, 17 bp, synthetic construct
  source 1..17: mol_type = other DNA
agggccaggccagagtg

SEQ ID NO: 109979 - DNA, 17 bp, synthetic construct
  source 1..17: mol_type = other DNA
gggccaggccagagtgc

SEQ ID NO: 109980 - DNA, 17 bp, synthetic construct
  source 1..17: mol_type = other DNA
ggccaggccagagtgcg

SEQ ID NO: 109981 - DNA, 17 bp, synthetic construct
  source 1..17: mol_type = other DNA
gccaggccagagtgcga

SEQ ID NO: 109982 - DNA, 17 bp, synthetic construct
  source 1..17: mol_type = other DNA
ccaggccagagtgcgaa

SEQ ID NO: 109983 - DNA, 17 bp, synthetic construct
  source 1..17: mol_type = other DNA
caggccagagtgcgaac

SEQ ID NO: 109984 - DNA, 17 bp, synthetic construct
  source 1..17: mol_type = other DNA
aggccagagtgcgaacc

SEQ ID NO: 109985 - DNA, 17 bp, synthetic construct
  source 1..17: mol_type = other DNA
ggccagagtgcgaacca

SEQ ID NO: 109986 - DNA, 17 bp, synthetic construct
  source 1..17: mol_type = other DNA
gccagagtgcgaaccac

SEQ ID NO: 109987 - DNA, 17 bp, synthetic construct
  source 1..17: mol_type = other DNA
ccagagtgcgaaccaca

SEQ ID NO: 109988 - DNA, 17 bp, synthetic construct
  source 1..17: mol_type = other DNA
cagagtgcgaaccacag

SEQ ID NO: 109989 - DNA, 17 bp, synthetic construct
  source 1..17: mol_type = other DNA
agagtgcgaaccacagg

SEQ ID NO: 109990 - DNA, 17 bp, synthetic construct
  source 1..17: mol_type = other DNA
gagtgcgaaccacaggg

SEQ ID NO: 109991 - DNA, 17 bp, synthetic construct
  source 1..17: mol_type = other DNA
agtgcgaaccacagggc

SEQ ID NO: 109992 - DNA, 17 bp, synthetic construct
  source 1..17: mol_type = other DNA
gtgcgaaccacagggcc

SEQ ID NO: 109993 - DNA, 17 bp, synthetic construct
  source 1..17: mol_type = other DNA
tgcgaaccacagggccg

SEQ ID NO: 109994 - DNA, 17 bp, synthetic construct
  source 1..17: mol_type = other DNA
gcgaaccacagggccgg

SEQ ID NO: 109995 - DNA, 17 bp, synthetic construct
  source 1..17: mol_type = other DNA
cgaaccacagggccggc

SEQ ID NO: 109996 - DNA, 17 bp, synthetic construct
  source 1..17: mol_type = other DNA
gaaccacagggccggcc

SEQ ID NO: 109997 - DNA, 17 bp, synthetic construct
  source 1..17: mol_type = other DNA
aaccacagggccggccc

SEQ ID NO: 109998 - DNA, 17 bp, synthetic construct
  source 1..17: mol_type = other DNA
accacagggccggcccc

SEQ ID NO: 109999 - DNA, 17 bp, synthetic construct
  source 1..17: mol_type = other DNA
ccacagggccggcccct

SEQ ID NO: 110000 - DNA, 17 bp, synthetic construct
  source 1..17: mol_type = other DNA
cacagggccggcccctc

SEQ ID NO: 110001 - DNA, 17 bp, synthetic construct
  source 1..17: mol_type = other DNA
acagggccggcccctcg

SEQ ID NO: 110002 - DNA, 17 bp, synthetic construct
  source 1..17: mol_type = other DNA
cagggccggcccctcgc

SEQ ID NO: 110003 - DNA, 17 bp, synthetic construct
  source 1..17: mol_type = other DNA
agggccggcccctcgct

SEQ ID NO: 110004 - DNA, 17 bp, synthetic construct
  source 1..17: mol_type = other DNA
gggccggcccctcgctg

SEQ ID NO: 110005 - DNA, 17 bp, synthetic construct
  source 1..17: mol_type = other DNA
ggccggcccctcgctga

SEQ ID NO: 110006 - DNA, 17 bp, synthetic construct
  source 1..17: mol_type = other DNA
gccggcccctcgctgag

SEQ ID NO: 110007 - DNA, 17 bp, synthetic construct
  source 1..17: mol_type = other DNA
ccggcccctcgctgagc

SEQ ID NO: 110008 - DNA, 17 bp, synthetic construct
  source 1..17: mol_type = other DNA
cggcccctcgctgagcc

SEQ ID NO: 110009 - DNA, 17 bp, synthetic construct
  source 1..17: mol_type = other DNA
ggcccctcgctgagccc

SEQ ID NO: 110010 - DNA, 17 bp, synthetic construct
  source 1..17: mol_type = other DNA
gcccctcgctgagccct

SEQ ID NO: 110011 - DNA, 17 bp, synthetic construct
  source 1..17: mol_type = other DNA
cccctcgctgagccctg

SEQ ID NO: 110012 - DNA, 17 bp, synthetic construct
  source 1..17: mol_type = other DNA
ccctcgctgagccctga

SEQ ID NO: 110013 - DNA, 17 bp, synthetic construct
  source 1..17: mol_type = other DNA
cctcgctgagccctgac

SEQ ID NO: 110014 - DNA, 17 bp, synthetic construct
  source 1..17: mol_type = other DNA
ctcgctgagccctgacc

SEQ ID NO: 110015 - DNA, 17 bp, synthetic construct
  source 1..17: mol_type = other DNA
tcgctgagccctgacca

SEQ ID NO: 110016 - DNA, 17 bp, synthetic construct
  source 1..17: mol_type = other DNA
cgctgagccctgaccat

SEQ ID NO: 110017 - DNA, 17 bp, synthetic construct
  source 1..17: mol_type = other DNA
gctgagccctgaccatg

SEQ ID NO: 110018 - DNA, 17 bp, synthetic construct
  source 1..17: mol_type = other DNA
ctgagccctgaccatgc

SEQ ID NO: 110019 - DNA, 17 bp, synthetic construct
  source 1..17: mol_type = other DNA
tgagccctgaccatgct

SEQ ID NO: 110020 - DNA, 17 bp, synthetic construct
  source 1..17: mol_type = other DNA
gagccctgaccatgctg

SEQ ID NO: 110021 - DNA, 17 bp, synthetic construct
  source 1..17: mol_type = other DNA
agccctgaccatgctgt

SEQ ID NO: 110022 - DNA, 17 bp, synthetic construct
  source 1..17: mol_type = other DNA
gccctgaccatgctgtg

SEQ ID NO: 110023 - DNA, 17 bp, synthetic construct
  source 1..17: mol_type = other DNA
ccctgaccatgctgtgg

SEQ ID NO: 110024 - DNA, 17 bp, synthetic construct
  source 1..17: mol_type = other DNA
cctgaccatgctgtggg

SEQ ID NO: 110025 - DNA, 17 bp, synthetic construct
  source 1..17: mol_type = other DNA
ctgaccatgctgtgggg

SEQ ID NO: 110026 - DNA, 17 bp, synthetic construct
  source 1..17: mol_type = other DNA
tgaccatgctgtggggg

SEQ ID NO: 110027 - DNA, 17 bp, synthetic construct
  source 1..17: mol_type = other DNA
gaccatgctgtgggggc

SEQ ID NO: 110028 - DNA, 17 bp, synthetic construct
  source 1..17: mol_type = other DNA
accatgctgtgggggct

SEQ ID NO: 110029 - DNA, 17 bp, synthetic construct
  source 1..17: mol_type = other DNA
ccatgctgtgggggctg

SEQ ID NO: 110030 - DNA, 17 bp, synthetic construct
  source 1..17: mol_type = other DNA
catgctgtgggggctgg

SEQ ID NO: 110031 - DNA, 17 bp, synthetic construct
  source 1..17: mol_type = other DNA
atgctgtgggggctggg

SEQ ID NO: 110032 - DNA, 17 bp, synthetic construct
  source 1..17: mol_type = other DNA
tgctgtgggggctgggg

SEQ ID NO: 110033 - DNA, 17 bp, synthetic construct
  source 1..17: mol_type = other DNA
gctgtgggggctggggc

SEQ ID NO: 110034 - DNA, 17 bp, synthetic construct
  source 1..17: mol_type = other DNA
ctgtgggggctggggcc

SEQ ID NO: 110035 - DNA, 17 bp, synthetic construct
  source 1..17: mol_type = other DNA
tgtgggggctggggcct

SEQ ID NO: 110036 - DNA, 17 bp, synthetic construct
  source 1..17: mol_type = other DNA
gtgggggctggggcctc

SEQ ID NO: 110037 - DNA, 17 bp, synthetic construct
  source 1..17: mol_type = other DNA
tgggggctggggcctca

SEQ ID NO: 110038 - DNA, 17 bp, synthetic construct
  source 1..17: mol_type = other DNA
gggggctggggcctcac

SEQ ID NO: 110039 - DNA, 17 bp, synthetic construct
  source 1..17: mol_type = other DNA
ggggctggggcctcacc

SEQ ID NO: 110040 - DNA, 17 bp, synthetic construct
  source 1..17: mol_type = other DNA
gggctggggcctcacct

SEQ ID NO: 110041 - DNA, 17 bp, synthetic construct
  source 1..17: mol_type = other DNA
ggctggggcctcacctc

SEQ ID NO: 110042 - DNA, 17 bp, synthetic construct
  source 1..17: mol_type = other DNA
gctggggcctcacctcc

SEQ ID NO: 110043 - DNA, 17 bp, synthetic construct
  source 1..17: mol_type = other DNA
ctggggcctcacctccc

SEQ ID NO: 110044 - DNA, 17 bp, synthetic construct
  source 1..17: mol_type = other DNA
tggggcctcacctccca

SEQ ID NO: 110045 - DNA, 17 bp, synthetic construct
  source 1..17: mol_type = other DNA
ggggcctcacctcccac

SEQ ID NO: 110046 - DNA, 17 bp, synthetic construct
  source 1..17: mol_type = other DNA
gggcctcacctcccacc

SEQ ID NO: 110047 - DNA, 17 bp, synthetic construct
  source 1..17: mol_type = other DNA
ggcctcacctcccacct

SEQ ID NO: 110048 - DNA, 17 bp, synthetic construct
  source 1..17: mol_type = other DNA
gcctcacctcccacctc

SEQ ID NO: 110049 - DNA, 17 bp, synthetic construct
  source 1..17: mol_type = other DNA
cctcacctcccacctcc

SEQ ID NO: 110050 - DNA, 17 bp, synthetic construct
  source 1..17: mol_type = other DNA
ctcacctcccacctccc

SEQ ID NO: 110051 - DNA, 17 bp, synthetic construct
  source 1..17: mol_type = other DNA
tcacctcccacctcccc

SEQ ID NO: 110052 - DNA, 17 bp, synthetic construct
  source 1..17: mol_type = other DNA
cacctcccacctcccca

SEQ ID NO: 110053 - DNA, 17 bp, synthetic construct
  source 1..17: mol_type = other DNA
acctcccacctccccac

SEQ ID NO: 110054 - DNA, 17 bp, synthetic construct
  source 1..17: mol_type = other DNA
cctcccacctccccaca

SEQ ID NO: 110055 - DNA, 17 bp, synthetic construct
  source 1..17: mol_type = other DNA
ctcccacctccccacag

SEQ ID NO: 110056 - DNA, 17 bp, synthetic construct
  source 1..17: mol_type = other DNA
tcccacctccccacaga

SEQ ID NO: 110057 - DNA, 17 bp, synthetic construct
  source 1..17: mol_type = other DNA
cccacctccccacagag

SEQ ID NO: 110058 - DNA, 17 bp, synthetic construct
  source 1..17: mol_type = other DNA
ccacctccccacagaga

SEQ ID NO: 110059 - DNA, 17 bp, synthetic construct
  source 1..17: mol_type = other DNA
cacctccccacagagag

SEQ ID NO: 110060 - DNA, 17 bp, synthetic construct
  source 1..17: mol_type = other DNA
acctccccacagagagt

SEQ ID NO: 110061 - DNA, 17 bp, synthetic construct
  source 1..17: mol_type = other DNA
cctccccacagagagtc

SEQ ID NO: 110062 - DNA, 17 bp, synthetic construct
  source 1..17: mol_type = other DNA
ctccccacagagagtct

SEQ ID NO: 110063 - DNA, 17 bp, synthetic construct
  source 1..17: mol_type = other DNA
tccccacagagagtctc

SEQ ID NO: 110064 - DNA, 17 bp, synthetic construct
  source 1..17: mol_type = other DNA
ccccacagagagtctca

SEQ ID NO: 110065 - DNA, 17 bp, synthetic construct
  source 1..17: mol_type = other DNA
cccacagagagtctcag

SEQ ID NO: 110066 - DNA, 17 bp, synthetic construct
  source 1..17: mol_type = other DNA
ccacagagagtctcaga

SEQ ID NO: 110067 - DNA, 17 bp, synthetic construct
  source 1..17: mol_type = other DNA
cacagagagtctcagat

SEQ ID NO: 110068 - DNA, 17 bp, synthetic construct
  source 1..17: mol_type = other DNA
acagagagtctcagatc

SEQ ID NO: 110069 - DNA, 17 bp, synthetic construct
  source 1..17: mol_type = other DNA
cagagagtctcagatca

SEQ ID NO: 110070 - DNA, 17 bp, synthetic construct
  source 1..17: mol_type = other DNA
agagagtctcagatcag

SEQ ID NO: 110071 - DNA, 17 bp, synthetic construct
  source 1..17: mol_type = other DNA
gagagtctcagatcagg

SEQ ID NO: 110072 - DNA, 17 bp, synthetic construct
  source 1..17: mol_type = other DNA
agagtctcagatcagga

SEQ ID NO: 110073 - DNA, 17 bp, synthetic construct
  source 1..17: mol_type = other DNA
gagtctcagatcaggat

SEQ ID NO: 110074 - DNA, 17 bp, synthetic construct
  source 1..17: mol_type = other DNA
agtctcagatcaggatc

SEQ ID NO: 110075 - DNA, 17 bp, synthetic construct
  source 1..17: mol_type = other DNA
gtctcagatcaggatcc

SEQ ID NO: 110076 - DNA, 17 bp, synthetic construct
  source 1..17: mol_type = other DNA
tctcagatcaggatcca

SEQ ID NO: 110077 - DNA, 17 bp, synthetic construct
  source 1..17: mol_type = other DNA
ctcagatcaggatccag

SEQ ID NO: 110078 - DNA, 17 bp, synthetic construct
  source 1..17: mol_type = other DNA
tcagatcaggatccagg

SEQ ID NO: 110079 - DNA, 17 bp, synthetic construct
  source 1..17: mol_type = other DNA
cagatcaggatccaggg

SEQ ID NO: 110080 - DNA, 17 bp, synthetic construct
  source 1..17: mol_type = other DNA
agatcaggatccaggga

SEQ ID NO: 110081 - DNA, 17 bp, synthetic construct
  source 1..17: mol_type = other DNA
gatcaggatccagggag

SEQ ID NO: 110082 - DNA, 17 bp, synthetic construct
  source 1..17: mol_type = other DNA
atcaggatccagggagg

SEQ ID NO: 110083 - DNA, 17 bp, synthetic construct
  source 1..17: mol_type = other DNA
tcaggatccagggagga

SEQ ID NO: 110084 - DNA, 17 bp, synthetic construct
  source 1..17: mol_type = other DNA
caggatccagggaggag

SEQ ID NO: 110085 - DNA, 17 bp, synthetic construct
  source 1..17: mol_type = other DNA
aggatccagggaggagc

SEQ ID NO: 110086 - DNA, 17 bp, synthetic construct
  source 1..17: mol_type = other DNA
ggatccagggaggagct

SEQ ID NO: 110087 - DNA, 17 bp, synthetic construct
  source 1..17: mol_type = other DNA
gatccagggaggagctc

SEQ ID NO: 110088 - DNA, 17 bp, synthetic construct
  source 1..17: mol_type = other DNA
atccagggaggagctct

SEQ ID NO: 110089 - DNA, 17 bp, synthetic construct
  source 1..17: mol_type = other DNA
tccagggaggagctctg

SEQ ID NO: 110090 - DNA, 17 bp, synthetic construct
  source 1..17: mol_type = other DNA
ccagggaggagctctgg

SEQ ID NO: 110091 - DNA, 17 bp, synthetic construct
  source 1..17: mol_type = other DNA
cagggaggagctctggg

SEQ ID NO: 110092 - DNA, 17 bp, synthetic construct
  source 1..17: mol_type = other DNA
agggaggagctctgggg

SEQ ID NO: 110093 - DNA, 17 bp, synthetic construct
  source 1..17: mol_type = other DNA
gggaggagctctggggt

SEQ ID NO: 110094 - DNA, 17 bp, synthetic construct
  source 1..17: mol_type = other DNA
ggaggagctctggggtc

SEQ ID NO: 110095 - DNA, 17 bp, synthetic construct
  source 1..17: mol_type = other DNA
gaggagctctggggtcc

SEQ ID NO: 110096 - DNA, 17 bp, synthetic construct
  source 1..17: mol_type = other DNA
aggagctctggggtcct

SEQ ID NO: 110097 - DNA, 17 bp, synthetic construct
  source 1..17: mol_type = other DNA
ggagctctggggtcctg

SEQ ID NO: 110098 - DNA, 17 bp, synthetic construct
  source 1..17: mol_type = other DNA
gagctctggggtcctgt

SEQ ID NO: 110099 - DNA, 17 bp, synthetic construct
  source 1..17: mol_type = other DNA
agctctggggtcctgtg

SEQ ID NO: 110100 - DNA, 17 bp, synthetic construct
  source 1..17: mol_type = other DNA
gctctggggtcctgtga

SEQ ID NO: 110101 - DNA, 17 bp, synthetic construct
  source 1..17: mol_type = other DNA
ctctggggtcctgtgaa

SEQ ID NO: 110102 - DNA, 17 bp, synthetic construct
  source 1..17: mol_type = other DNA
tctggggtcctgtgaag

SEQ ID NO: 110103 - DNA, 17 bp, synthetic construct
  source 1..17: mol_type = other DNA
ctggggtcctgtgaagg

SEQ ID NO: 110104 - DNA, 17 bp, synthetic construct
  source 1..17: mol_type = other DNA
tggggtcctgtgaaggg

SEQ ID NO: 110105 - DNA, 17 bp, synthetic construct
  source 1..17: mol_type = other DNA
ggggtcctgtgaagggg

SEQ ID NO: 110106 - DNA, 17 bp, synthetic construct
  source 1..17: mol_type = other DNA
gggtcctgtgaaggggg

SEQ ID NO: 110107 - DNA, 17 bp, synthetic construct
  source 1..17: mol_type = other DNA
ggtcctgtgaagggggc

SEQ ID NO: 110108 - DNA, 17 bp, synthetic construct
  source 1..17: mol_type = other DNA
gtcctgtgaagggggcg

SEQ ID NO: 110109 - DNA, 17 bp, synthetic construct
  source 1..17: mol_type = other DNA
tcctgtgaagggggcgc

SEQ ID NO: 110110 - DNA, 17 bp, synthetic construct
  source 1..17: mol_type = other DNA
cctgtgaagggggcgcc

SEQ ID NO: 110111 - DNA, 17 bp, synthetic construct
  source 1..17: mol_type = other DNA
ctgtgaagggggcgccc

SEQ ID NO: 110112 - DNA, 17 bp, synthetic construct
  source 1..17: mol_type = other DNA
tgtgaagggggcgcccc

SEQ ID NO: 110113 - DNA, 17 bp, synthetic construct
  source 1..17: mol_type = other DNA
gtgaagggggcgcccca

SEQ ID NO: 110114 - DNA, 17 bp, synthetic construct
  source 1..17: mol_type = other DNA
tgaagggggcgccccaa

SEQ ID NO: 110115 - DNA, 17 bp, synthetic construct
  source 1..17: mol_type = other DNA
gaagggggcgccccaac

SEQ ID NO: 110116 - DNA, 17 bp, synthetic construct
  source 1..17: mol_type = other DNA
aagggggcgccccaacc

SEQ ID NO: 110117 - DNA, 17 bp, synthetic construct
  source 1..17: mol_type = other DNA
agggggcgccccaaccc

SEQ ID NO: 110118 - DNA, 17 bp, synthetic construct
  source 1..17: mol_type = other DNA
gggggcgccccaaccca

SEQ ID NO: 110119 - DNA, 17 bp, synthetic construct
  source 1..17: mol_type = other DNA
ggggcgccccaacccaa

SEQ ID NO: 110120 - DNA, 17 bp, synthetic construct
  source 1..17: mol_type = other DNA
gggcgccccaacccaaa

SEQ ID NO: 110121 - DNA, 17 bp, synthetic construct
  source 1..17: mol_type = other DNA
ggcgccccaacccaaac

SEQ ID NO: 110122 - DNA, 17 bp, synthetic construct
  source 1..17: mol_type = other DNA
gcgccccaacccaaact

SEQ ID NO: 110123 - DNA, 17 bp, synthetic construct
  source 1..17: mol_type = other DNA
cgccccaacccaaactg

SEQ ID NO: 110124 - DNA, 17 bp, synthetic construct
  source 1..17: mol_type = other DNA
gccccaacccaaactgg

SEQ ID NO: 110125 - DNA, 17 bp, synthetic construct
  source 1..17: mol_type = other DNA
ccccaacccaaactggg

SEQ ID NO: 110126 - DNA, 17 bp, synthetic construct
  source 1..17: mol_type = other DNA
cccaacccaaactgggc

SEQ ID NO: 110127 - DNA, 17 bp, synthetic construct
  source 1..17: mol_type = other DNA
ccaacccaaactgggca

SEQ ID NO: 110128 - DNA, 17 bp, synthetic construct
  source 1..17: mol_type = other DNA
caacccaaactgggcag

SEQ ID NO: 110129 - DNA, 17 bp, synthetic construct
  source 1..17: mol_type = other DNA
aacccaaactgggcaga

SEQ ID NO: 110130 - DNA, 17 bp, synthetic construct
  source 1..17: mol_type = other DNA
acccaaactgggcagac

SEQ ID NO: 110131 - DNA, 17 bp, synthetic construct
  source 1..17: mol_type = other DNA
cccaaactgggcagaca

SEQ ID NO: 110132 - DNA, 17 bp, synthetic construct
  source 1..17: mol_type = other DNA
ccaaactgggcagacaa

SEQ ID NO: 110133 - DNA, 17 bp, synthetic construct
  source 1..17: mol_type = other DNA
caaactgggcagacaat

SEQ ID NO: 110134 - DNA, 17 bp, synthetic construct
  source 1..17: mol_type = other DNA
aaactgggcagacaatg

SEQ ID NO: 110135 - DNA, 17 bp, synthetic construct
  source 1..17: mol_type = other DNA
aactgggcagacaatgg

SEQ ID NO: 110136 - DNA, 17 bp, synthetic construct
  source 1..17: mol_type = other DNA
actgggcagacaatggc

SEQ ID NO: 110137 - DNA, 17 bp, synthetic construct
  source 1..17: mol_type = other DNA
ctgggcagacaatggcc

SEQ ID NO: 110138 - DNA, 17 bp, synthetic construct
  source 1..17: mol_type = other DNA
tgggcagacaatggccg

SEQ ID NO: 110139 - DNA, 17 bp, synthetic construct
  source 1..17: mol_type = other DNA
gggcagacaatggccgg

SEQ ID NO: 110140 - DNA, 17 bp, synthetic construct
  source 1..17: mol_type = other DNA
ggcagacaatggccggg

SEQ ID NO: 110141 - DNA, 17 bp, synthetic construct
  source 1..17: mol_type = other DNA
gcagacaatggccgggg

SEQ ID NO: 110142 - DNA, 17 bp, synthetic construct
  source 1..17: mol_type = other DNA
cagacaatggccggggg

SEQ ID NO: 110143 - DNA, 17 bp, synthetic construct
  source 1..17: mol_type = other DNA
agacaatggccgggggt

SEQ ID NO: 110144 - DNA, 17 bp, synthetic construct
  source 1..17: mol_type = other DNA
gacaatggccgggggtc

SEQ ID NO: 110145 - DNA, 17 bp, synthetic construct
  source 1..17: mol_type = other DNA
acaatggccgggggtcc

SEQ ID NO: 110146 - DNA, 17 bp, synthetic construct
  source 1..17: mol_type = other DNA
caatggccgggggtcct

SEQ ID NO: 110147 - DNA, 17 bp, synthetic construct
  source 1..17: mol_type = other DNA
aatggccgggggtcctc

SEQ ID NO: 110148 - DNA, 17 bp, synthetic construct
  source 1..17: mol_type = other DNA
atggccgggggtcctca

SEQ ID NO: 110149 - DNA, 17 bp, synthetic construct
  source 1..17: mol_type = other DNA
tggccgggggtcctcag

SEQ ID NO: 110150 - DNA, 17 bp, synthetic construct
  source 1..17: mol_type = other DNA
ggccgggggtcctcaga

SEQ ID NO: 110151 - DNA, 17 bp, synthetic construct
  source 1..17: mol_type = other DNA
gccgggggtcctcagag

SEQ ID NO: 110152 - DNA, 17 bp, synthetic construct
  source 1..17: mol_type = other DNA
ccgggggtcctcagagt

SEQ ID NO: 110153 - DNA, 17 bp, synthetic construct
  source 1..17: mol_type = other DNA
cgggggtcctcagagtc

SEQ ID NO: 110154 - DNA, 17 bp, synthetic construct
  source 1..17: mol_type = other DNA
gggggtcctcagagtcc

SEQ ID NO: 110155 - DNA, 17 bp, synthetic construct
  source 1..17: mol_type = other DNA
ggggtcctcagagtcct

SEQ ID NO: 110156 - DNA, 17 bp, synthetic construct
  source 1..17: mol_type = other DNA
gggtcctcagagtcctg

SEQ ID NO: 110157 - DNA, 17 bp, synthetic construct
  source 1..17: mol_type = other DNA
ggtcctcagagtcctgt

SEQ ID NO: 110158 - DNA, 17 bp, synthetic construct
  source 1..17: mol_type = other DNA
gtcctcagagtcctgtg

SEQ ID NO: 110159 - DNA, 17 bp, synthetic construct
  source 1..17: mol_type = other DNA
tcctcagagtcctgtgg

SEQ ID NO: 110160 - DNA, 17 bp, synthetic construct
  source 1..17: mol_type = other DNA
cctcagagtcctgtggg

SEQ ID NO: 110161 - DNA, 17 bp, synthetic construct
  source 1..17: mol_type = other DNA
ctcagagtcctgtgggt

SEQ ID NO: 110162 - DNA, 17 bp, synthetic construct
  source 1..17: mol_type = other DNA
tcagagtcctgtgggtt

SEQ ID NO: 110163 - DNA, 17 bp, synthetic construct
  source 1..17: mol_type = other DNA
cagagtcctgtgggttg

SEQ ID NO: 110164 - DNA, 17 bp, synthetic construct
  source 1..17: mol_type = other DNA
agagtcctgtgggttgg

SEQ ID NO: 110165 - DNA, 17 bp, synthetic construct
  source 1..17: mol_type = other DNA
gagtcctgtgggttgga

SEQ ID NO: 110166 - DNA, 17 bp, synthetic construct
  source 1..17: mol_type = other DNA
agtcctgtgggttggag

SEQ ID NO: 110167 - DNA, 17 bp, synthetic construct
  source 1..17: mol_type = other DNA
gtcctgtgggttggagc

SEQ ID NO: 110168 - DNA, 17 bp, synthetic construct
  source 1..17: mol_type = other DNA
tcctgtgggttggagct

SEQ ID NO: 110169 - DNA, 17 bp, synthetic construct
  source 1..17: mol_type = other DNA
cctgtgggttggagctg

SEQ ID NO: 110170 - DNA, 17 bp, synthetic construct
  source 1..17: mol_type = other DNA
ctgtgggttggagctgc

SEQ ID NO: 110171 - DNA, 17 bp, synthetic construct
  source 1..17: mol_type = other DNA
tgtgggttggagctgcc

SEQ ID NO: 110172 - DNA, 17 bp, synthetic construct
  source 1..17: mol_type = other DNA
gtgggttggagctgcct

SEQ ID NO: 110173 - DNA, 17 bp, synthetic construct
  source 1..17: mol_type = other DNA
tgggttggagctgcctc

SEQ ID NO: 110174 - DNA, 17 bp, synthetic construct
  source 1..17: mol_type = other DNA
gggttggagctgcctcc

SEQ ID NO: 110175 - DNA, 17 bp, synthetic construct
  source 1..17: mol_type = other DNA
ggttggagctgcctcct

SEQ ID NO: 110176 - DNA, 17 bp, synthetic construct
  source 1..17: mol_type = other DNA
gttggagctgcctcctc

SEQ ID NO: 110177 - DNA, 17 bp, synthetic construct
  source 1..17: mol_type = other DNA
ttggagctgcctcctcc

SEQ ID NO: 110178 - DNA, 17 bp, synthetic construct
  source 1..17: mol_type = other DNA
tggagctgcctcctccc

SEQ ID NO: 110179 - DNA, 17 bp, synthetic construct
  source 1..17: mol_type = other DNA
ggagctgcctcctccca

SEQ ID NO: 110180 - DNA, 17 bp, synthetic construct
  source 1..17: mol_type = other DNA
gagctgcctcctcccag

SEQ ID NO: 110181 - DNA, 17 bp, synthetic construct
  source 1..17: mol_type = other DNA
agctgcctcctcccagc

SEQ ID NO: 110182 - DNA, 17 bp, synthetic construct
  source 1..17: mol_type = other DNA
gctgcctcctcccagcc

SEQ ID NO: 110183 - DNA, 17 bp, synthetic construct
  source 1..17: mol_type = other DNA
ctgcctcctcccagcct

SEQ ID NO: 110184 - DNA, 17 bp, synthetic construct
  source 1..17: mol_type = other DNA
tgcctcctcccagcctc

SEQ ID NO: 110185 - DNA, 17 bp, synthetic construct
  source 1..17: mol_type = other DNA
gcctcctcccagcctcc

SEQ ID NO: 110186 - DNA, 17 bp, synthetic construct
  source 1..17: mol_type = other DNA
cctcctcccagcctcca

SEQ ID NO: 110187 - DNA, 17 bp, synthetic construct
  source 1..17: mol_type = other DNA
ctcctcccagcctccat

SEQ ID NO: 110188 - DNA, 17 bp, synthetic construct
  source 1..17: mol_type = other DNA
tcctcccagcctccatg

SEQ ID NO: 110189 - DNA, 17 bp, synthetic construct
  source 1..17: mol_type = other DNA
cctcccagcctccatgg

SEQ ID NO: 110190 - DNA, 17 bp, synthetic construct
  source 1..17: mol_type = other DNA
ctcccagcctccatggg

SEQ ID NO: 110191 - DNA, 17 bp, synthetic construct
  source 1..17: mol_type = other DNA
tcccagcctccatgggg

SEQ ID NO: 110192 - DNA, 17 bp, synthetic construct
  source 1..17: mol_type = other DNA
cccagcctccatggggt

SEQ ID NO: 110193 - DNA, 17 bp, synthetic construct
  source 1..17: mol_type = other DNA
ccagcctccatggggtt

SEQ ID NO: 110194 - DNA, 17 bp, synthetic construct
  source 1..17: mol_type = other DNA
cagcctccatggggttg

SEQ ID NO: 110195 - DNA, 17 bp, synthetic construct
  source 1..17: mol_type = other DNA
agcctccatggggttgg

SEQ ID NO: 110196 - DNA, 17 bp, synthetic construct
  source 1..17: mol_type = other DNA
gcctccatggggttggt

SEQ ID NO: 110197 - DNA, 17 bp, synthetic construct
  source 1..17: mol_type = other DNA
cctccatggggttggtg

SEQ ID NO: 110198 - DNA, 17 bp, synthetic construct
  source 1..17: mol_type = other DNA
ctccatggggttggtgg

SEQ ID NO: 110199 - DNA, 17 bp, synthetic construct
  source 1..17: mol_type = other DNA
tccatggggttggtggg

SEQ ID NO: 110200 - DNA, 17 bp, synthetic construct
  source 1..17: mol_type = other DNA
ccatggggttggtgggt

SEQ ID NO: 110201 - DNA, 17 bp, synthetic construct
  source 1..17: mol_type = other DNA
catggggttggtgggtg

SEQ ID NO: 110202 - DNA, 17 bp, synthetic construct
  source 1..17: mol_type = other DNA
atggggttggtgggtga

SEQ ID NO: 110203 - DNA, 17 bp, synthetic construct
  source 1..17: mol_type = other DNA
tggggttggtgggtgag

SEQ ID NO: 110204 - DNA, 17 bp, synthetic construct
  source 1..17: mol_type = other DNA
ggggttggtgggtgagg

SEQ ID NO: 110205 - DNA, 17 bp, synthetic construct
  source 1..17: mol_type = other DNA
gggttggtgggtgaggc

SEQ ID NO: 110206 - DNA, 17 bp, synthetic construct
  source 1..17: mol_type = other DNA
ggttggtgggtgaggcc

SEQ ID NO: 110207 - DNA, 17 bp, synthetic construct
  source 1..17: mol_type = other DNA
gttggtgggtgaggcct

SEQ ID NO: 110208 - DNA, 17 bp, synthetic construct
  source 1..17: mol_type = other DNA
ttggtgggtgaggcctt

SEQ ID NO: 110209 - DNA, 17 bp, synthetic construct
  source 1..17: mol_type = other DNA
tggtgggtgaggccttg

SEQ ID NO: 110210 - DNA, 17 bp, synthetic construct
  source 1..17: mol_type = other DNA
ggtgggtgaggccttgc

SEQ ID NO: 110211 - DNA, 17 bp, synthetic construct
  source 1..17: mol_type = other DNA
gtgggtgaggccttgcc

SEQ ID NO: 110212 - DNA, 17 bp, synthetic construct
  source 1..17: mol_type = other DNA
tgggtgaggccttgccc

SEQ ID NO: 110213 - DNA, 17 bp, synthetic construct
  source 1..17: mol_type = other DNA
gggtgaggccttgcccg

SEQ ID NO: 110214 - DNA, 17 bp, synthetic construct
  source 1..17: mol_type = other DNA
ggtgaggccttgcccgg

SEQ ID NO: 110215 - DNA, 17 bp, synthetic construct
  source 1..17: mol_type = other DNA
gtgaggccttgcccgga

SEQ ID NO: 110216 - DNA, 17 bp, synthetic construct
  source 1..17: mol_type = other DNA
tgaggccttgcccggag

SEQ ID NO: 110217 - DNA, 17 bp, synthetic construct
  source 1..17: mol_type = other DNA
gaggccttgcccggagg

SEQ ID NO: 110218 - DNA, 17 bp, synthetic construct
  source 1..17: mol_type = other DNA
aggccttgcccggaggc

SEQ ID NO: 110219 - DNA, 17 bp, synthetic construct
  source 1..17: mol_type = other DNA
ggccttgcccggaggcg

SEQ ID NO: 110220 - DNA, 17 bp, synthetic construct
  source 1..17: mol_type = other DNA
gccttgcccggaggcgg

SEQ ID NO: 110221 - DNA, 17 bp, synthetic construct
  source 1..17: mol_type = other DNA
ccttgcccggaggcggt

SEQ ID NO: 110222 - DNA, 17 bp, synthetic construct
  source 1..17: mol_type = other DNA
cttgcccggaggcggtg

SEQ ID NO: 110223 - DNA, 17 bp, synthetic construct
  source 1..17: mol_type = other DNA
ttgcccggaggcggtgg

SEQ ID NO: 110224 - DNA, 17 bp, synthetic construct
  source 1..17: mol_type = other DNA
tgcccggaggcggtggt

SEQ ID NO: 110225 - DNA, 17 bp, synthetic construct
  source 1..17: mol_type = other DNA
gcccggaggcggtggtc

SEQ ID NO: 110226 - DNA, 17 bp, synthetic construct
  source 1..17: mol_type = other DNA
cccggaggcggtggtca

SEQ ID NO: 110227 - DNA, 17 bp, synthetic construct
  source 1..17: mol_type = other DNA
ccggaggcggtggtcag

SEQ ID NO: 110228 - DNA, 17 bp, synthetic construct
  source 1..17: mol_type = other DNA
cggaggcggtggtcagc

SEQ ID NO: 110229 - DNA, 17 bp, synthetic construct
  source 1..17: mol_type = other DNA
ggaggcggtggtcagcc

SEQ ID NO: 110230 - DNA, 17 bp, synthetic construct
  source 1..17: mol_type = other DNA
gaggcggtggtcagcct

SEQ ID NO: 110231 - DNA, 17 bp, synthetic construct
  source 1..17: mol_type = other DNA
aggcggtggtcagcctg

SEQ ID NO: 110232 - DNA, 17 bp, synthetic construct
  source 1..17: mol_type = other DNA
ggcggtggtcagcctgg

SEQ ID NO: 110233 - DNA, 17 bp, synthetic construct
  source 1..17: mol_type = other DNA
gcggtggtcagcctggg

SEQ ID NO: 110234 - DNA, 17 bp, synthetic construct
  source 1..17: mol_type = other DNA
cggtggtcagcctgggg

SEQ ID NO: 110235 - DNA, 17 bp, synthetic construct
  source 1..17: mol_type = other DNA
ggtggtcagcctggggg

SEQ ID NO: 110236 - DNA, 17 bp, synthetic construct
  source 1..17: mol_type = other DNA
gtggtcagcctggggga

SEQ ID NO: 110237 - DNA, 17 bp, synthetic construct
  source 1..17: mol_type = other DNA
tggtcagcctgggggac

SEQ ID NO: 110238 - DNA, 17 bp, synthetic construct
  source 1..17: mol_type = other DNA
ggtcagcctgggggacc

SEQ ID NO: 110239 - DNA, 17 bp, synthetic construct
  source 1..17: mol_type = other DNA
gtcagcctgggggacct

SEQ ID NO: 110240 - DNA, 17 bp, synthetic construct
  source 1..17: mol_type = other DNA
tcagcctgggggacctt

SEQ ID NO: 110241 - DNA, 17 bp, synthetic construct
  source 1..17: mol_type = other DNA
cagcctgggggaccttg

SEQ ID NO: 110242 - DNA, 17 bp, synthetic construct
  source 1..17: mol_type = other DNA
agcctgggggaccttgg

SEQ ID NO: 110243 - DNA, 17 bp, synthetic construct
  source 1..17: mol_type = other DNA
gcctgggggaccttggg

SEQ ID NO: 110244 - DNA, 17 bp, synthetic construct
  source 1..17: mol_type = other DNA
cctgggggaccttgggc

SEQ ID NO: 110245 - DNA, 17 bp, synthetic construct
  source 1..17: mol_type = other DNA
ctgggggaccttgggcg

SEQ ID NO: 110246 - DNA, 17 bp, synthetic construct
  source 1..17: mol_type = other DNA
tgggggaccttgggcgg

SEQ ID NO: 110247 - DNA, 17 bp, synthetic construct
  source 1..17: mol_type = other DNA
gggggaccttgggcggc

SEQ ID NO: 110248 - DNA, 17 bp, synthetic construct
  source 1..17: mol_type = other DNA
ggggaccttgggcggcc

SEQ ID NO: 110249 - DNA, 17 bp, synthetic construct
  source 1..17: mol_type = other DNA
gggaccttgggcggcca

SEQ ID NO: 110250 - DNA, 17 bp, synthetic construct
  source 1..17: mol_type = other DNA
ggaccttgggcggccat

SEQ ID NO: 110251 - DNA, 17 bp, synthetic construct
  source 1..17: mol_type = other DNA
gaccttgggcggccatc

SEQ ID NO: 110252 - DNA, 17 bp, synthetic construct
  source 1..17: mol_type = other DNA
accttgggcggccatcc

SEQ ID NO: 110253 - DNA, 17 bp, synthetic construct
  source 1..17: mol_type = other DNA
ccttgggcggccatccc

SEQ ID NO: 110254 - DNA, 17 bp, synthetic construct
  source 1..17: mol_type = other DNA
cttgggcggccatccca

SEQ ID NO: 110255 - DNA, 17 bp, synthetic construct
  source 1..17: mol_type = other DNA
ttgggcggccatcccag

SEQ ID NO: 110256 - DNA, 17 bp, synthetic construct
  source 1..17: mol_type = other DNA
tgggcggccatcccagt

SEQ ID NO: 110257 - DNA, 17 bp, synthetic construct
  source 1..17: mol_type = other DNA
gggcggccatcccagta

SEQ ID NO: 110258 - DNA, 17 bp, synthetic construct
  source 1..17: mol_type = other DNA
ggcggccatcccagtat

SEQ ID NO: 110259 - DNA, 17 bp, synthetic construct
  source 1..17: mol_type = other DNA
gcggccatcccagtatc

SEQ ID NO: 110260 - DNA, 17 bp, synthetic construct
  source 1..17: mol_type = other DNA
cggccatcccagtatca

SEQ ID NO: 110261 - DNA, 17 bp, synthetic construct
  source 1..17: mol_type = other DNA
ggccatcccagtatcaa

SEQ ID NO: 110262 - DNA, 17 bp, synthetic construct
  source 1..17: mol_type = other DNA
gccatcccagtatcaac

SEQ ID NO: 110263 - DNA, 17 bp, synthetic construct
  source 1..17: mol_type = other DNA
ccatcccagtatcaacg

SEQ ID NO: 110264 - DNA, 17 bp, synthetic construct
  source 1..17: mol_type = other DNA
catcccagtatcaacgg

SEQ ID NO: 110265 - DNA, 17 bp, synthetic construct
  source 1..17: mol_type = other DNA
atcccagtatcaacggc

SEQ ID NO: 110266 - DNA, 17 bp, synthetic construct
  source 1..17: mol_type = other DNA
tcccagtatcaacggcc

SEQ ID NO: 110267 - DNA, 17 bp, synthetic construct
  source 1..17: mol_type = other DNA
cccagtatcaacggcca

SEQ ID NO: 110268 - DNA, 17 bp, synthetic construct
  source 1..17: mol_type = other DNA
ccagtatcaacggccac

SEQ ID NO: 110269 - DNA, 17 bp, synthetic construct
  source 1..17: mol_type = other DNA
cagtatcaacggccaca

SEQ ID NO: 110270 - DNA, 17 bp, synthetic construct
  source 1..17: mol_type = other DNA
agtatcaacggccacac

SEQ ID NO: 110271 - DNA, 17 bp, synthetic construct
  source 1..17: mol_type = other DNA
gtatcaacggccacaca

SEQ ID NO: 110272 - DNA, 17 bp, synthetic construct
  source 1..17: mol_type = other DNA
tatcaacggccacacag

SEQ ID NO: 110273 - DNA, 17 bp, synthetic construct
  source 1..17: mol_type = other DNA
atcaacggccacacagc

SEQ ID NO: 110274 - DNA, 17 bp, synthetic construct
  source 1..17: mol_type = other DNA
tcaacggccacacagct

SEQ ID NO: 110275 - DNA, 17 bp, synthetic construct
  source 1..17: mol_type = other DNA
caacggccacacagctt

SEQ ID NO: 110276 - DNA, 17 bp, synthetic construct
  source 1..17: mol_type = other DNA
aacggccacacagcttg

SEQ ID NO: 110277 - DNA, 17 bp, synthetic construct
  source 1..17: mol_type = other DNA
acggccacacagcttgc

SEQ ID NO: 110278 - DNA, 17 bp, synthetic construct
  source 1..17: mol_type = other DNA
cggccacacagcttgcg

SEQ ID NO: 110279 - DNA, 17 bp, synthetic construct
  source 1..17: mol_type = other DNA
ggccacacagcttgcgc

SEQ ID NO: 110280 - DNA, 17 bp, synthetic construct
  source 1..17: mol_type = other DNA
gccacacagcttgcgcg

SEQ ID NO: 110281 - DNA, 17 bp, synthetic construct
  source 1..17: mol_type = other DNA
ccacacagcttgcgcgg

SEQ ID NO: 110282 - DNA, 17 bp, synthetic construct
  source 1..17: mol_type = other DNA
cacacagcttgcgcggc

SEQ ID NO: 110283 - DNA, 17 bp, synthetic construct
  source 1..17: mol_type = other DNA
acacagcttgcgcggcc

SEQ ID NO: 110284 - DNA, 17 bp, synthetic construct
  source 1..17: mol_type = other DNA
cacagcttgcgcggccc

SEQ ID NO: 110285 - DNA, 17 bp, synthetic construct
  source 1..17: mol_type = other DNA
acagcttgcgcggccca

SEQ ID NO: 110286 - DNA, 17 bp, synthetic construct
  source 1..17: mol_type = other DNA
cagcttgcgcggcccag

SEQ ID NO: 110287 - DNA, 17 bp, synthetic construct
  source 1..17: mol_type = other DNA
agcttgcgcggcccaga

SEQ ID NO: 110288 - DNA, 17 bp, synthetic construct
  source 1..17: mol_type = other DNA
gcttgcgcggcccagag

SEQ ID NO: 110289 - DNA, 17 bp, synthetic construct
  source 1..17: mol_type = other DNA
cttgcgcggcccagagt

SEQ ID NO: 110290 - DNA, 17 bp, synthetic construct
  source 1..17: mol_type = other DNA
ttgcgcggcccagagtc

SEQ ID NO: 110291 - DNA, 17 bp, synthetic construct
  source 1..17: mol_type = other DNA
tgcgcggcccagagtcc

SEQ ID NO: 110292 - DNA, 17 bp, synthetic construct
  source 1..17: mol_type = other DNA
gcgcggcccagagtcct

SEQ ID NO: 110293 - DNA, 17 bp, synthetic construct
  source 1..17: mol_type = other DNA
cgcggcccagagtcctg

SEQ ID NO: 110294 - DNA, 17 bp, synthetic construct
  source 1..17: mol_type = other DNA
gcggcccagagtcctgc

SEQ ID NO: 110295 - DNA, 17 bp, synthetic construct
  source 1..17: mol_type = other DNA
cggcccagagtcctgcc

SEQ ID NO: 110296 - DNA, 17 bp, synthetic construct
  source 1..17: mol_type = other DNA
ggcccagagtcctgccc

SEQ ID NO: 110297 - DNA, 17 bp, synthetic construct
  source 1..17: mol_type = other DNA
gcccagagtcctgcccc

SEQ ID NO: 110298 - DNA, 17 bp, synthetic construct
  source 1..17: mol_type = other DNA
cccagagtcctgccccc

SEQ ID NO: 110299 - DNA, 17 bp, synthetic construct
  source 1..17: mol_type = other DNA
ccagagtcctgccccca

SEQ ID NO: 110300 - DNA, 17 bp, synthetic construct
  source 1..17: mol_type = other DNA
cagagtcctgcccccag

SEQ ID NO: 110301 - DNA, 17 bp, synthetic construct
  source 1..17: mol_type = other DNA
agagtcctgcccccagc

SEQ ID NO: 110302 - DNA, 17 bp, synthetic construct
  source 1..17: mol_type = other DNA
gagtcctgcccccagcc

SEQ ID NO: 110303 - DNA, 17 bp, synthetic construct
  source 1..17: mol_type = other DNA
agtcctgcccccagcct

SEQ ID NO: 110304 - DNA, 17 bp, synthetic construct
  source 1..17: mol_type = other DNA
gtcctgcccccagcctg

SEQ ID NO: 110305 - DNA, 17 bp, synthetic construct
  source 1..17: mol_type = other DNA
tcctgcccccagcctgc

SEQ ID NO: 110306 - DNA, 17 bp, synthetic construct
  source 1..17: mol_type = other DNA
cctgcccccagcctgcc

SEQ ID NO: 110307 - DNA, 17 bp, synthetic construct
  source 1..17: mol_type = other DNA
ctgcccccagcctgccc

SEQ ID NO: 110308 - DNA, 17 bp, synthetic construct
  source 1..17: mol_type = other DNA
tgcccccagcctgcccc

SEQ ID NO: 110309 - DNA, 17 bp, synthetic construct
  source 1..17: mol_type = other DNA
gcccccagcctgcccca

SEQ ID NO: 110310 - DNA, 17 bp, synthetic construct
  source 1..17: mol_type = other DNA
cccccagcctgccccac

SEQ ID NO: 110311 - DNA, 17 bp, synthetic construct
  source 1..17: mol_type = other DNA
ccccagcctgccccact

SEQ ID NO: 110312 - DNA, 17 bp, synthetic construct
  source 1..17: mol_type = other DNA
cccagcctgccccactc

SEQ ID NO: 110313 - DNA, 17 bp, synthetic construct
  source 1..17: mol_type = other DNA
ccagcctgccccactcg

SEQ ID NO: 110314 - DNA, 17 bp, synthetic construct
  source 1..17: mol_type = other DNA
cagcctgccccactcgc

SEQ ID NO: 110315 - DNA, 17 bp, synthetic construct
  source 1..17: mol_type = other DNA
agcctgccccactcgcc

SEQ ID NO: 110316 - DNA, 17 bp, synthetic construct
  source 1..17: mol_type = other DNA
gcctgccccactcgccc

SEQ ID NO: 110317 - DNA, 17 bp, synthetic construct
  source 1..17: mol_type = other DNA
cctgccccactcgccct

SEQ ID NO: 110318 - DNA, 17 bp, synthetic construct
  source 1..17: mol_type = other DNA
ctgccccactcgccctg

SEQ ID NO: 110319 - DNA, 17 bp, synthetic construct
  source 1..17: mol_type = other DNA
tgccccactcgccctga

SEQ ID NO: 110320 - DNA, 17 bp, synthetic construct
  source 1..17: mol_type = other DNA
gccccactcgccctgac

SEQ ID NO: 110321 - DNA, 17 bp, synthetic construct
  source 1..17: mol_type = other DNA
ccccactcgccctgact

SEQ ID NO: 110322 - DNA, 17 bp, synthetic construct
  source 1..17: mol_type = other DNA
cccactcgccctgactt

SEQ ID NO: 110323 - DNA, 17 bp, synthetic construct
  source 1..17: mol_type = other DNA
ccactcgccctgactta

SEQ ID NO: 110324 - DNA, 17 bp, synthetic construct
  source 1..17: mol_type = other DNA
cactcgccctgacttag

SEQ ID NO: 110325 - DNA, 17 bp, synthetic construct
  source 1..17: mol_type = other DNA
actcgccctgacttagg

SEQ ID NO: 110326 - DNA, 17 bp, synthetic construct
  source 1..17: mol_type = other DNA
ctcgccctgacttagga

SEQ ID NO: 110327 - DNA, 17 bp, synthetic construct
  source 1..17: mol_type = other DNA
tcgccctgacttaggat

SEQ ID NO: 110328 - DNA, 17 bp, synthetic construct
  source 1..17: mol_type = other DNA
cgccctgacttaggatc

SEQ ID NO: 110329 - DNA, 17 bp, synthetic construct
  source 1..17: mol_type = other DNA
gccctgacttaggatct

SEQ ID NO: 110330 - DNA, 17 bp, synthetic construct
  source 1..17: mol_type = other DNA
ccctgacttaggatcta

SEQ ID NO: 110331 - DNA, 17 bp, synthetic construct
  source 1..17: mol_type = other DNA
cctgacttaggatctag

SEQ ID NO: 110332 - DNA, 17 bp, synthetic construct
  source 1..17: mol_type = other DNA
ctgacttaggatctagt

SEQ ID NO: 110333 - DNA, 17 bp, synthetic construct
  source 1..17: mol_type = other DNA
tgacttaggatctagtt

SEQ ID NO: 110334 - DNA, 17 bp, synthetic construct
  source 1..17: mol_type = other DNA
gacttaggatctagttc

SEQ ID NO: 110335 - DNA, 17 bp, synthetic construct
  source 1..17: mol_type = other DNA
acttaggatctagttcg

SEQ ID NO: 110336 - DNA, 17 bp, synthetic construct
  source 1..17: mol_type = other DNA
cttaggatctagttcga

SEQ ID NO: 110337 - DNA, 17 bp, synthetic construct
  source 1..17: mol_type = other DNA
ttaggatctagttcgaa

SEQ ID NO: 110338 - DNA, 17 bp, synthetic construct
  source 1..17: mol_type = other DNA
taggatctagttcgaaa

SEQ ID NO: 110339 - DNA, 17 bp, synthetic construct
  source 1..17: mol_type = other DNA
aggatctagttcgaaac

SEQ ID NO: 110340 - DNA, 17 bp, synthetic construct
  source 1..17: mol_type = other DNA
ggatctagttcgaaact

SEQ ID NO: 110341 - DNA, 17 bp, synthetic construct
  source 1..17: mol_type = other DNA
gatctagttcgaaactg

SEQ ID NO: 110342 - DNA, 17 bp, synthetic construct
  source 1..17: mol_type = other DNA
atctagttcgaaactgg

SEQ ID NO: 110343 - DNA, 17 bp, synthetic construct
  source 1..17: mol_type = other DNA
tctagttcgaaactggt

SEQ ID NO: 110344 - DNA, 17 bp, synthetic construct
  source 1..17: mol_type = other DNA
ctagttcgaaactggtt

SEQ ID NO: 110345 - DNA, 17 bp, synthetic construct
  source 1..17: mol_type = other DNA
tagttcgaaactggttc

SEQ ID NO: 110346 - DNA, 17 bp, synthetic construct
  source 1..17: mol_type = other DNA
agttcgaaactggttct

SEQ ID NO: 110347 - DNA, 17 bp, synthetic construct
  source 1..17: mol_type = other DNA
gttcgaaactggttctg

SEQ ID NO: 110348 - DNA, 17 bp, synthetic construct
  source 1..17: mol_type = other DNA
ttcgaaactggttctgt

SEQ ID NO: 110349 - DNA, 17 bp, synthetic construct
  source 1..17: mol_type = other DNA
tcgaaactggttctgtg

SEQ ID NO: 110350 - DNA, 17 bp, synthetic construct
  source 1..17: mol_type = other DNA
cgaaactggttctgtgt

SEQ ID NO: 110351 - DNA, 17 bp, synthetic construct
  source 1..17: mol_type = other DNA
gaaactggttctgtgtt

SEQ ID NO: 110352 - DNA, 17 bp, synthetic construct
  source 1..17: mol_type = other DNA
aaactggttctgtgttt

SEQ ID NO: 110353 - DNA, 17 bp, synthetic construct
  source 1..17: mol_type = other DNA
aactggttctgtgttta

SEQ ID NO: 110354 - DNA, 17 bp, synthetic construct
  source 1..17: mol_type = other DNA
actggttctgtgtttag

SEQ ID NO: 110355 - DNA, 17 bp, synthetic construct
  source 1..17: mol_type = other DNA
ctggttctgtgtttagg

SEQ ID NO: 110356 - DNA, 17 bp, synthetic construct
  source 1..17: mol_type = other DNA
tggttctgtgtttaggt

SEQ ID NO: 110357 - DNA, 17 bp, synthetic construct
  source 1..17: mol_type = other DNA
ggttctgtgtttaggtt

SEQ ID NO: 110358 - DNA, 17 bp, synthetic construct
  source 1..17: mol_type = other DNA
gttctgtgtttaggttt

SEQ ID NO: 110359 - DNA, 17 bp, synthetic construct
  source 1..17: mol_type = other DNA
ttctgtgtttaggtttc

SEQ ID NO: 110360 - DNA, 17 bp, synthetic construct
  source 1..17: mol_type = other DNA
tctgtgtttaggtttct

SEQ ID NO: 110361 - DNA, 17 bp, synthetic construct
  source 1..17: mol_type = other DNA
ctgtgtttaggtttctg

SEQ ID NO: 110362 - DNA, 17 bp, synthetic construct
  source 1..17: mol_type = other DNA
tgtgtttaggtttctgc

SEQ ID NO: 110363 - DNA, 17 bp, synthetic construct
  source 1..17: mol_type = other DNA
gtgtttaggtttctgct

SEQ ID NO: 110364 - DNA, 17 bp, synthetic construct
  source 1..17: mol_type = other DNA
tgtttaggtttctgcta

SEQ ID NO: 110365 - DNA, 17 bp, synthetic construct
  source 1..17: mol_type = other DNA
gtttaggtttctgctaa

SEQ ID NO: 110366 - DNA, 17 bp, synthetic construct
  source 1..17: mol_type = other DNA
tttaggtttctgctaag

SEQ ID NO: 110367 - DNA, 17 bp, synthetic construct
  source 1..17: mol_type = other DNA
ttaggtttctgctaagt

SEQ ID NO: 110368 - DNA, 17 bp, synthetic construct
  source 1..17: mol_type = other DNA
taggtttctgctaagtc

SEQ ID NO: 110369 - DNA, 17 bp, synthetic construct
  source 1..17: mol_type = other DNA
aggtttctgctaagtca

SEQ ID NO: 110370 - DNA, 17 bp, synthetic construct
  source 1..17: mol_type = other DNA
ggtttctgctaagtcac

SEQ ID NO: 110371 - DNA, 17 bp, synthetic construct
  source 1..17: mol_type = other DNA
gtttctgctaagtcacg

SEQ ID NO: 110372 - DNA, 17 bp, synthetic construct
  source 1..17: mol_type = other DNA
tttctgctaagtcacgc

SEQ ID NO: 110373 - DNA, 17 bp, synthetic construct
  source 1..17: mol_type = other DNA
ttctgctaagtcacgcc

SEQ ID NO: 110374 - DNA, 17 bp, synthetic construct
  source 1..17: mol_type = other DNA
tctgctaagtcacgcct

SEQ ID NO: 110375 - DNA, 17 bp, synthetic construct
  source 1..17: mol_type = other DNA
ctgctaagtcacgcctg

SEQ ID NO: 110376 - DNA, 17 bp, synthetic construct
  source 1..17: mol_type = other DNA
tgctaagtcacgcctgg

SEQ ID NO: 110377 - DNA, 17 bp, synthetic construct
  source 1..17: mol_type = other DNA
gctaagtcacgcctgga

SEQ ID NO: 110378 - DNA, 17 bp, synthetic construct
  source 1..17: mol_type = other DNA
ctaagtcacgcctggaa

SEQ ID NO: 110379 - DNA, 17 bp, synthetic construct
  source 1..17: mol_type = other DNA
taagtcacgcctggaag

SEQ ID NO: 110380 - DNA, 17 bp, synthetic construct
  source 1..17: mol_type = other DNA
aagtcacgcctggaagg

SEQ ID NO: 110381 - DNA, 17 bp, synthetic construct
  source 1..17: mol_type = other DNA
agtcacgcctggaaggc

SEQ ID NO: 110382 - DNA, 17 bp, synthetic construct
  source 1..17: mol_type = other DNA
gtcacgcctggaaggct

SEQ ID NO: 110383 - DNA, 17 bp, synthetic construct
  source 1..17: mol_type = other DNA
tcacgcctggaaggctc

SEQ ID NO: 110384 - DNA, 17 bp, synthetic construct
  source 1..17: mol_type = other DNA
cacgcctggaaggctcc

SEQ ID NO: 110385 - DNA, 17 bp, synthetic construct
  source 1..17: mol_type = other DNA
acgcctggaaggctcca

SEQ ID NO: 110386 - DNA, 17 bp, synthetic construct
  source 1..17: mol_type = other DNA
cgcctggaaggctccaa

SEQ ID NO: 110387 - DNA, 17 bp, synthetic construct
  source 1..17: mol_type = other DNA
gcctggaaggctccaag

SEQ ID NO: 110388 - DNA, 17 bp, synthetic construct
  source 1..17: mol_type = other DNA
cctggaaggctccaagt

SEQ ID NO: 110389 - DNA, 17 bp, synthetic construct
  source 1..17: mol_type = other DNA
ctggaaggctccaagtg

SEQ ID NO: 110390 - DNA, 17 bp, synthetic construct
  source 1..17: mol_type = other DNA
tggaaggctccaagtgt

SEQ ID NO: 110391 - DNA, 17 bp, synthetic construct
  source 1..17: mol_type = other DNA
ggaaggctccaagtgtg

SEQ ID NO: 110392 - DNA, 17 bp, synthetic construct
  source 1..17: mol_type = other DNA
gaaggctccaagtgtgt

SEQ ID NO: 110393 - DNA, 17 bp, synthetic construct
  source 1..17: mol_type = other DNA
aaggctccaagtgtgtc

SEQ ID NO: 110394 - DNA, 17 bp, synthetic construct
  source 1..17: mol_type = other DNA
aggctccaagtgtgtcc

SEQ ID NO: 110395 - DNA, 17 bp, synthetic construct
  source 1..17: mol_type = other DNA
ggctccaagtgtgtcct

SEQ ID NO: 110396 - DNA, 17 bp, synthetic construct
  source 1..17: mol_type = other DNA
gctccaagtgtgtcctc

SEQ ID NO: 110397 - DNA, 17 bp, synthetic construct
  source 1..17: mol_type = other DNA
ctccaagtgtgtcctcc

SEQ ID NO: 110398 - DNA, 17 bp, synthetic construct
  source 1..17: mol_type = other DNA
tccaagtgtgtcctcct

SEQ ID NO: 110399 - DNA, 17 bp, synthetic construct
  source 1..17: mol_type = other DNA
ccaagtgtgtcctccta

SEQ ID NO: 110400 - DNA, 17 bp, synthetic construct
  source 1..17: mol_type = other DNA
caagtgtgtcctcctaa

SEQ ID NO: 110401 - DNA, 17 bp, synthetic construct
  source 1..17: mol_type = other DNA
aagtgtgtcctcctaac

SEQ ID NO: 110402 - DNA, 17 bp, synthetic construct
  source 1..17: mol_type = other DNA
agtgtgtcctcctaaca

SEQ ID NO: 110403 - DNA, 17 bp, synthetic construct
  source 1..17: mol_type = other DNA
gtgtgtcctcctaacaa

SEQ ID NO: 110404 - DNA, 17 bp, synthetic construct
  source 1..17: mol_type = other DNA
tgtgtcctcctaacaaa

SEQ ID NO: 110405 - DNA, 17 bp, synthetic construct
  source 1..17: mol_type = other DNA
gtgtcctcctaacaaag

SEQ ID NO: 110406 - DNA, 17 bp, synthetic construct
  source 1..17: mol_type = other DNA
tgtcctcctaacaaagc

SEQ ID NO: 110407 - DNA, 17 bp, synthetic construct
  source 1..17: mol_type = other DNA
gtcctcctaacaaagct

SEQ ID NO: 110408 - DNA, 17 bp, synthetic construct
  source 1..17: mol_type = other DNA
tcctcctaacaaagctg

SEQ ID NO: 110409 - DNA, 17 bp, synthetic construct
  source 1..17: mol_type = other DNA
cctcctaacaaagctgg

SEQ ID NO: 110410 - DNA, 17 bp, synthetic construct
  source 1..17: mol_type = other DNA
ctcctaacaaagctggt

SEQ ID NO: 110411 - DNA, 17 bp, synthetic construct
  source 1..17: mol_type = other DNA
tcctaacaaagctggtc

SEQ ID NO: 110412 - DNA, 17 bp, synthetic construct
  source 1..17: mol_type = other DNA
cctaacaaagctggtct

SEQ ID NO: 110413 - DNA, 17 bp, synthetic construct
  source 1..17: mol_type = other DNA
ctaacaaagctggtctt

SEQ ID NO: 110414 - DNA, 17 bp, synthetic construct
  source 1..17: mol_type = other DNA
taacaaagctggtcttt

SEQ ID NO: 110415 - DNA, 17 bp, synthetic construct
  source 1..17: mol_type = other DNA
aacaaagctggtctttg

SEQ ID NO: 110416 - DNA, 17 bp, synthetic construct
  source 1..17: mol_type = other DNA
acaaagctggtctttgt

SEQ ID NO: 110417 - DNA, 17 bp, synthetic construct
  source 1..17: mol_type = other DNA
caaagctggtctttgtc

SEQ ID NO: 110418 - DNA, 17 bp, synthetic construct
  source 1..17: mol_type = other DNA
aaagctggtctttgtcc

SEQ ID NO: 110419 - DNA, 17 bp, synthetic construct
  source 1..17: mol_type = other DNA
aagctggtctttgtcct

SEQ ID NO: 110420 - DNA, 17 bp, synthetic construct
  source 1..17: mol_type = other DNA
agctggtctttgtcctt

SEQ ID NO: 110421 - DNA, 17 bp, synthetic construct
  source 1..17: mol_type = other DNA
gctggtctttgtccttc

SEQ ID NO: 110422 - DNA, 17 bp, synthetic construct
  source 1..17: mol_type = other DNA
ctggtctttgtccttct

SEQ ID NO: 110423 - DNA, 17 bp, synthetic construct
  source 1..17: mol_type = other DNA
tggtctttgtccttctc

SEQ ID NO: 110424 - DNA, 17 bp, synthetic construct
  source 1..17: mol_type = other DNA
ggtctttgtccttctcc

SEQ ID NO: 110425 - DNA, 17 bp, synthetic construct
  source 1..17: mol_type = other DNA
gtctttgtccttctcca

SEQ ID NO: 110426 - DNA, 17 bp, synthetic construct
  source 1..17: mol_type = other DNA
tctttgtccttctccaa

SEQ ID NO: 110427 - DNA, 17 bp, synthetic construct
  source 1..17: mol_type = other DNA
ctttgtccttctccaag

SEQ ID NO: 110428 - DNA, 17 bp, synthetic construct
  source 1..17: mol_type = other DNA
tttgtccttctccaagg

SEQ ID NO: 110429 - DNA, 17 bp, synthetic construct
  source 1..17: mol_type = other DNA
ttgtccttctccaaggg

SEQ ID NO: 110430 - DNA, 17 bp, synthetic construct
  source 1..17: mol_type = other DNA
tgtccttctccaaggga

SEQ ID NO: 110431 - DNA, 17 bp, synthetic construct
  source 1..17: mol_type = other DNA
gtccttctccaagggat

SEQ ID NO: 110432 - DNA, 17 bp, synthetic construct
  source 1..17: mol_type = other DNA
tccttctccaagggatg

SEQ ID NO: 110433 - DNA, 17 bp, synthetic construct
  source 1..17: mol_type = other DNA
ccttctccaagggatgt

SEQ ID NO: 110434 - DNA, 17 bp, synthetic construct
  source 1..17: mol_type = other DNA
cttctccaagggatgtg

SEQ ID NO: 110435 - DNA, 17 bp, synthetic construct
  source 1..17: mol_type = other DNA
ttctccaagggatgtgt

SEQ ID NO: 110436 - DNA, 17 bp, synthetic construct
  source 1..17: mol_type = other DNA
tctccaagggatgtgtg

SEQ ID NO: 110437 - DNA, 17 bp, synthetic construct
  source 1..17: mol_type = other DNA
ctccaagggatgtgtgg

SEQ ID NO: 110438 - DNA, 17 bp, synthetic construct
  source 1..17: mol_type = other DNA
tccaagggatgtgtggg

SEQ ID NO: 110439 - DNA, 17 bp, synthetic construct
  source 1..17: mol_type = other DNA
ccaagggatgtgtggga

SEQ ID NO: 110440 - DNA, 17 bp, synthetic construct
  source 1..17: mol_type = other DNA
caagggatgtgtgggat

SEQ ID NO: 110441 - DNA, 17 bp, synthetic construct
  source 1..17: mol_type = other DNA
aagggatgtgtgggatg

SEQ ID NO: 110442 - DNA, 17 bp, synthetic construct
  source 1..17: mol_type = other DNA
agggatgtgtgggatgg

SEQ ID NO: 110443 - DNA, 17 bp, synthetic construct
  source 1..17: mol_type = other DNA
gggatgtgtgggatggg

SEQ ID NO: 110444 - DNA, 17 bp, synthetic construct
  source 1..17: mol_type = other DNA
ggatgtgtgggatgggg

SEQ ID NO: 110445 - DNA, 17 bp, synthetic construct
  source 1..17: mol_type = other DNA
gatgtgtgggatggggc

SEQ ID NO: 110446 - DNA, 17 bp, synthetic construct
  source 1..17: mol_type = other DNA
atgtgtgggatggggcg

SEQ ID NO: 110447 - DNA, 17 bp, synthetic construct
  source 1..17: mol_type = other DNA
tgtgtgggatggggcga

SEQ ID NO: 110448 - DNA, 17 bp, synthetic construct
  source 1..17: mol_type = other DNA
gtgtgggatggggcgaa

SEQ ID NO: 110449 - DNA, 17 bp, synthetic construct
  source 1..17: mol_type = other DNA
tgtgggatggggcgaaa

SEQ ID NO: 110450 - DNA, 17 bp, synthetic construct
  source 1..17: mol_type = other DNA
gtgggatggggcgaaat

SEQ ID NO: 110451 - DNA, 17 bp, synthetic construct
  source 1..17: mol_type = other DNA
tgggatggggcgaaatc

SEQ ID NO: 110452 - DNA, 17 bp, synthetic construct
  source 1..17: mol_type = other DNA
gggatggggcgaaatcc

SEQ ID NO: 110453 - DNA, 17 bp, synthetic construct
  source 1..17: mol_type = other DNA
ggatggggcgaaatccc

SEQ ID NO: 110454 - DNA, 17 bp, synthetic construct
  source 1..17: mol_type = other DNA
gatggggcgaaatcccc

SEQ ID NO: 110455 - DNA, 17 bp, synthetic construct
  source 1..17: mol_type = other DNA
atggggcgaaatccccc

SEQ ID NO: 110456 - DNA, 17 bp, synthetic construct
  source 1..17: mol_type = other DNA
tggggcgaaatcccccc

SEQ ID NO: 110457 - DNA, 17 bp, synthetic construct
  source 1..17: mol_type = other DNA
ggggcgaaatcccccct

SEQ ID NO: 110458 - DNA, 17 bp, synthetic construct
  source 1..17: mol_type = other DNA
gggcgaaatcccccctt

SEQ ID NO: 110459 - DNA, 17 bp, synthetic construct
  source 1..17: mol_type = other DNA
ggcgaaatccccccttg

SEQ ID NO: 110460 - DNA, 17 bp, synthetic construct
  source 1..17: mol_type = other DNA
gcgaaatccccccttgg

SEQ ID NO: 110461 - DNA, 17 bp, synthetic construct
  source 1..17: mol_type = other DNA
cgaaatccccccttggg

SEQ ID NO: 110462 - DNA, 17 bp, synthetic construct
  source 1..17: mol_type = other DNA
gaaatccccccttgggg

SEQ ID NO: 110463 - DNA, 17 bp, synthetic construct
  source 1..17: mol_type = other DNA
aaatccccccttggggc

SEQ ID NO: 110464 - DNA, 17 bp, synthetic construct
  source 1..17: mol_type = other DNA
aatccccccttggggcg

SEQ ID NO: 110465 - DNA, 17 bp, synthetic construct
  source 1..17: mol_type = other DNA
atccccccttggggcgg

SEQ ID NO: 110466 - DNA, 17 bp, synthetic construct
  source 1..17: mol_type = other DNA
tccccccttggggcggc

SEQ ID NO: 110467 - DNA, 17 bp, synthetic construct
  source 1..17: mol_type = other DNA
ccccccttggggcggcc

SEQ ID NO: 110468 - DNA, 17 bp, synthetic construct
  source 1..17: mol_type = other DNA
cccccttggggcggcca

SEQ ID NO: 110469 - DNA, 17 bp, synthetic construct
  source 1..17: mol_type = other DNA
ccccttggggcggccaa

SEQ ID NO: 110470 - DNA, 17 bp, synthetic construct
  source 1..17: mol_type = other DNA
cccttggggcggccaac

SEQ ID NO: 110471 - DNA, 17 bp, synthetic construct
  source 1..17: mol_type = other DNA
ccttggggcggccaacg

SEQ ID NO: 110472 - DNA, 17 bp, synthetic construct
  source 1..17: mol_type = other DNA
cttggggcggccaacgc

SEQ ID NO: 110473 - DNA, 17 bp, synthetic construct
  source 1..17: mol_type = other DNA
ttggggcggccaacgcc

SEQ ID NO: 110474 - DNA, 17 bp, synthetic construct
  source 1..17: mol_type = other DNA
tggggcggccaacgcct

SEQ ID NO: 110475 - DNA, 17 bp, synthetic construct
  source 1..17: mol_type = other DNA
ggggcggccaacgcctt

SEQ ID NO: 110476 - DNA, 17 bp, synthetic construct
  source 1..17: mol_type = other DNA
gggcggccaacgccttt

SEQ ID NO: 110477 - DNA, 17 bp, synthetic construct
  source 1..17: mol_type = other DNA
ggcggccaacgcctttt

SEQ ID NO: 110478 - DNA, 17 bp, synthetic construct
  source 1..17: mol_type = other DNA
gcggccaacgccttttc

SEQ ID NO: 110479 - DNA, 17 bp, synthetic construct
  source 1..17: mol_type = other DNA
cggccaacgccttttcc

SEQ ID NO: 110480 - DNA, 17 bp, synthetic construct
  source 1..17: mol_type = other DNA
ggccaacgccttttcct

SEQ ID NO: 110481 - DNA, 17 bp, synthetic construct
  source 1..17: mol_type = other DNA
gccaacgccttttcctg

SEQ ID NO: 110482 - DNA, 17 bp, synthetic construct
  source 1..17: mol_type = other DNA
ccaacgccttttcctga

SEQ ID NO: 110483 - DNA, 17 bp, synthetic construct
  source 1..17: mol_type = other DNA
caacgccttttcctgat

SEQ ID NO: 110484 - DNA, 17 bp, synthetic construct
  source 1..17: mol_type = other DNA
aacgccttttcctgatt

SEQ ID NO: 110485 - DNA, 17 bp, synthetic construct
  source 1..17: mol_type = other DNA
acgccttttcctgattc

SEQ ID NO: 110486 - DNA, 17 bp, synthetic construct
  source 1..17: mol_type = other DNA
cgccttttcctgattcc

SEQ ID NO: 110487 - DNA, 17 bp, synthetic construct
  source 1..17: mol_type = other DNA
gccttttcctgattcca

SEQ ID NO: 110488 - DNA, 17 bp, synthetic construct
  source 1..17: mol_type = other DNA
ccttttcctgattccat

SEQ ID NO: 110489 - DNA, 17 bp, synthetic construct
  source 1..17: mol_type = other DNA
cttttcctgattccatt

SEQ ID NO: 110490 - DNA, 17 bp, synthetic construct
  source 1..17: mol_type = other DNA
ttttcctgattccattt

SEQ ID NO: 110491 - DNA, 17 bp, synthetic construct
  source 1..17: mol_type = other DNA
tttcctgattccatttt

SEQ ID NO: 110492 - DNA, 17 bp, synthetic construct
  source 1..17: mol_type = other DNA
ttcctgattccattttc

SEQ ID NO: 110493 - DNA, 17 bp, synthetic construct
  source 1..17: mol_type = other DNA
tcctgattccattttct

SEQ ID NO: 110494 - DNA, 17 bp, synthetic construct
  source 1..17: mol_type = other DNA
cctgattccattttctc

SEQ ID NO: 110495 - DNA, 17 bp, synthetic construct
  source 1..17: mol_type = other DNA
ctgattccattttctcc

SEQ ID NO: 110496 - DNA, 17 bp, synthetic construct
  source 1..17: mol_type = other DNA
tgattccattttctccc

SEQ ID NO: 110497 - DNA, 17 bp, synthetic construct
  source 1..17: mol_type = other DNA
gattccattttctcccc

SEQ ID NO: 110498 - DNA, 17 bp, synthetic construct
  source 1..17: mol_type = other DNA
attccattttctccccc

SEQ ID NO: 110499 - DNA, 17 bp, synthetic construct
  source 1..17: mol_type = other DNA
ttccattttctccccca

SEQ ID NO: 110500 - DNA, 17 bp, synthetic construct
  source 1..17: mol_type = other DNA
tccattttctcccccat

SEQ ID NO: 110501 - DNA, 17 bp, synthetic construct
  source 1..17: mol_type = other DNA
ccattttctcccccatc

SEQ ID NO: 110502 - DNA, 17 bp, synthetic construct
  source 1..17: mol_type = other DNA
cattttctcccccatcc

SEQ ID NO: 110503 - DNA, 17 bp, synthetic construct
  source 1..17: mol_type = other DNA
attttctcccccatccc

SEQ ID NO: 110504 - DNA, 17 bp, synthetic construct
  source 1..17: mol_type = other DNA
ttttctcccccatccct

SEQ ID NO: 110505 - DNA, 17 bp, synthetic construct
  source 1..17: mol_type = other DNA
tttctcccccatccctt

SEQ ID NO: 110506 - DNA, 17 bp, synthetic construct
  source 1..17: mol_type = other DNA
ttctcccccatcccttg

SEQ ID NO: 110507 - DNA, 17 bp, synthetic construct
  source 1..17: mol_type = other DNA
tctcccccatcccttga

SEQ ID NO: 110508 - DNA, 17 bp, synthetic construct
  source 1..17: mol_type = other DNA
ctcccccatcccttgag

SEQ ID NO: 110509 - DNA, 17 bp, synthetic construct
  source 1..17: mol_type = other DNA
tcccccatcccttgaga

SEQ ID NO: 110510 - DNA, 17 bp, synthetic construct
  source 1..17: mol_type = other DNA
cccccatcccttgagaa

SEQ ID NO: 110511 - DNA, 17 bp, synthetic construct
  source 1..17: mol_type = other DNA
ccccatcccttgagaag

SEQ ID NO: 110512 - DNA, 17 bp, synthetic construct
  source 1..17: mol_type = other DNA
cccatcccttgagaagg

SEQ ID NO: 110513 - DNA, 17 bp, synthetic construct
  source 1..17: mol_type = other DNA
ccatcccttgagaagga

SEQ ID NO: 110514 - DNA, 17 bp, synthetic construct
  source 1..17: mol_type = other DNA
catcccttgagaaggag

SEQ ID NO: 110515 - DNA, 17 bp, synthetic construct
  source 1..17: mol_type = other DNA
atcccttgagaaggagg

SEQ ID NO: 110516 - DNA, 17 bp, synthetic construct
  source 1..17: mol_type = other DNA
tcccttgagaaggaggc

SEQ ID NO: 110517 - DNA, 17 bp, synthetic construct
  source 1..17: mol_type = other DNA
cccttgagaaggaggca

SEQ ID NO: 110518 - DNA, 17 bp, synthetic construct
  source 1..17: mol_type = other DNA
ccttgagaaggaggcac

SEQ ID NO: 110519 - DNA, 17 bp, synthetic construct
  source 1..17: mol_type = other DNA
cttgagaaggaggcacc

SEQ ID NO: 110520 - DNA, 17 bp, synthetic construct
  source 1..17: mol_type = other DNA
ttgagaaggaggcacca

SEQ ID NO: 110521 - DNA, 17 bp, synthetic construct
  source 1..17: mol_type = other DNA
tgagaaggaggcaccat

SEQ ID NO: 110522 - DNA, 17 bp, synthetic construct
  source 1..17: mol_type = other DNA
gagaaggaggcaccatc

SEQ ID NO: 110523 - DNA, 17 bp, synthetic construct
  source 1..17: mol_type = other DNA
agaaggaggcaccatcc

SEQ ID NO: 110524 - DNA, 17 bp, synthetic construct
  source 1..17: mol_type = other DNA
gaaggaggcaccatccc

SEQ ID NO: 110525 - DNA, 17 bp, synthetic construct
  source 1..17: mol_type = other DNA
aaggaggcaccatcccc

SEQ ID NO: 110526 - DNA, 17 bp, synthetic construct
  source 1..17: mol_type = other DNA
aggaggcaccatccccg

SEQ ID NO: 110527 - DNA, 17 bp, synthetic construct
  source 1..17: mol_type = other DNA
ggaggcaccatccccgc

SEQ ID NO: 110528 - DNA, 17 bp, synthetic construct
  source 1..17: mol_type = other DNA
gaggcaccatccccgcc

SEQ ID NO: 110529 - DNA, 17 bp, synthetic construct
  source 1..17: mol_type = other DNA
aggcaccatccccgcct

SEQ ID NO: 110530 - DNA, 17 bp, synthetic construct
  source 1..17: mol_type = other DNA
ggcaccatccccgcctg

SEQ ID NO: 110531 - DNA, 17 bp, synthetic construct
  source 1..17: mol_type = other DNA
gcaccatccccgcctgt

SEQ ID NO: 110532 - DNA, 17 bp, synthetic construct
  source 1..17: mol_type = other DNA
caccatccccgcctgtc

SEQ ID NO: 110533 - DNA, 17 bp, synthetic construct
  source 1..17: mol_type = other DNA
accatccccgcctgtca

SEQ ID NO: 110534 - DNA, 17 bp, synthetic construct
  source 1..17: mol_type = other DNA
ccatccccgcctgtcag

SEQ ID NO: 110535 - DNA, 17 bp, synthetic construct
  source 1..17: mol_type = other DNA
catccccgcctgtcagt

SEQ ID NO: 110536 - DNA, 17 bp, synthetic construct
  source 1..17: mol_type = other DNA
atccccgcctgtcagtc

SEQ ID NO: 110537 - DNA, 17 bp, synthetic construct
  source 1..17: mol_type = other DNA
tccccgcctgtcagtcg

SEQ ID NO: 110538 - DNA, 17 bp, synthetic construct
  source 1..17: mol_type = other DNA
ccccgcctgtcagtcgg

SEQ ID NO: 110539 - DNA, 17 bp, synthetic construct
  source 1..17: mol_type = other DNA
cccgcctgtcagtcggg

SEQ ID NO: 110540 - DNA, 17 bp, synthetic construct
  source 1..17: mol_type = other DNA
ccgcctgtcagtcgggg

SEQ ID NO: 110541 - DNA, 17 bp, synthetic construct
  source 1..17: mol_type = other DNA
cgcctgtcagtcgggga

SEQ ID NO: 110542 - DNA, 17 bp, synthetic construct
  source 1..17: mol_type = other DNA
gcctgtcagtcggggac

SEQ ID NO: 110543 - DNA, 17 bp, synthetic construct
  source 1..17: mol_type = other DNA
cctgtcagtcggggaca

SEQ ID NO: 110544 - DNA, 17 bp, synthetic construct
  source 1..17: mol_type = other DNA
ctgtcagtcggggacag

SEQ ID NO: 110545 - DNA, 17 bp, synthetic construct
  source 1..17: mol_type = other DNA
tgtcagtcggggacagg

SEQ ID NO: 110546 - DNA, 17 bp, synthetic construct
  source 1..17: mol_type = other DNA
gtcagtcggggacaggg

SEQ ID NO: 110547 - DNA, 17 bp, synthetic construct
  source 1..17: mol_type = other DNA
tcagtcggggacagggc

SEQ ID NO: 110548 - DNA, 17 bp, synthetic construct
  source 1..17: mol_type = other DNA
cagtcggggacagggca

SEQ ID NO: 110549 - DNA, 17 bp, synthetic construct
  source 1..17: mol_type = other DNA
agtcggggacagggcag

SEQ ID NO: 110550 - DNA, 17 bp, synthetic construct
  source 1..17: mol_type = other DNA
gtcggggacagggcagg

SEQ ID NO: 110551 - DNA, 17 bp, synthetic construct
  source 1..17: mol_type = other DNA
tcggggacagggcaggc

SEQ ID NO: 110552 - DNA, 17 bp, synthetic construct
  source 1..17: mol_type = other DNA
cggggacagggcaggcc

SEQ ID NO: 110553 - DNA, 17 bp, synthetic construct
  source 1..17: mol_type = other DNA
ggggacagggcaggccg

SEQ ID NO: 110554 - DNA, 17 bp, synthetic construct
  source 1..17: mol_type = other DNA
gggacagggcaggccgt

SEQ ID NO: 110555 - DNA, 17 bp, synthetic construct
  source 1..17: mol_type = other DNA
ggacagggcaggccgtg

SEQ ID NO: 110556 - DNA, 17 bp, synthetic construct
  source 1..17: mol_type = other DNA
gacagggcaggccgtgc

SEQ ID NO: 110557 - DNA, 17 bp, synthetic construct
  source 1..17: mol_type = other DNA
acagggcaggccgtgct

SEQ ID NO: 110558 - DNA, 17 bp, synthetic construct
  source 1..17: mol_type = other DNA
cagggcaggccgtgctg

SEQ ID NO: 110559 - DNA, 17 bp, synthetic construct
  source 1..17: mol_type = other DNA
agggcaggccgtgctgg

SEQ ID NO: 110560 - DNA, 17 bp, synthetic construct
  source 1..17: mol_type = other DNA
gggcaggccgtgctggg

SEQ ID NO: 110561 - DNA, 17 bp, synthetic construct
  source 1..17: mol_type = other DNA
ggcaggccgtgctgggg

SEQ ID NO: 110562 - DNA, 17 bp, synthetic construct
  source 1..17: mol_type = other DNA
gcaggccgtgctggggg

SEQ ID NO: 110563 - DNA, 17 bp, synthetic construct
  source 1..17: mol_type = other DNA
caggccgtgctgggggc

SEQ ID NO: 110564 - DNA, 17 bp, synthetic construct
  source 1..17: mol_type = other DNA
aggccgtgctgggggca

SEQ ID NO: 110565 - DNA, 17 bp, synthetic construct
  source 1..17: mol_type = other DNA
ggccgtgctgggggcag

SEQ ID NO: 110566 - DNA, 17 bp, synthetic construct
  source 1..17: mol_type = other DNA
gccgtgctgggggcagc

SEQ ID NO: 110567 - DNA, 17 bp, synthetic construct
  source 1..17: mol_type = other DNA
ccgtgctgggggcagct

SEQ ID NO: 110568 - DNA, 17 bp, synthetic construct
  source 1..17: mol_type = other DNA
cgtgctgggggcagctc

SEQ ID NO: 110569 - DNA, 17 bp, synthetic construct
  source 1..17: mol_type = other DNA
gtgctgggggcagctca

SEQ ID NO: 110570 - DNA, 17 bp, synthetic construct
  source 1..17: mol_type = other DNA
tgctgggggcagctcag

SEQ ID NO: 110571 - DNA, 17 bp, synthetic construct
  source 1..17: mol_type = other DNA
gctgggggcagctcagg

SEQ ID NO: 110572 - DNA, 17 bp, synthetic construct
  source 1..17: mol_type = other DNA
ctgggggcagctcaggg

SEQ ID NO: 110573 - DNA, 17 bp, synthetic construct
  source 1..17: mol_type = other DNA
tgggggcagctcagggc

SEQ ID NO: 110574 - DNA, 17 bp, synthetic construct
  source 1..17: mol_type = other DNA
gggggcagctcagggct

SEQ ID NO: 110575 - DNA, 17 bp, synthetic construct
  source 1..17: mol_type = other DNA
ggggcagctcagggctc

SEQ ID NO: 110576 - DNA, 17 bp, synthetic construct
  source 1..17: mol_type = other DNA
gggcagctcagggctcc

SEQ ID NO: 110577 - DNA, 17 bp, synthetic construct
  source 1..17: mol_type = other DNA
ggcagctcagggctccc

SEQ ID NO: 110578 - DNA, 17 bp, synthetic construct
  source 1..17: mol_type = other DNA
gcagctcagggctccct

SEQ ID NO: 110579 - DNA, 17 bp, synthetic construct
  source 1..17: mol_type = other DNA
cagctcagggctccctg

SEQ ID NO: 110580 - DNA, 17 bp, synthetic construct
  source 1..17: mol_type = other DNA
agctcagggctccctgc

SEQ ID NO: 110581 - DNA, 17 bp, synthetic construct
  source 1..17: mol_type = other DNA
gctcagggctccctgct

SEQ ID NO: 110582 - DNA, 17 bp, synthetic construct
  source 1..17: mol_type = other DNA
ctcagggctccctgctg

SEQ ID NO: 110583 - DNA, 17 bp, synthetic construct
  source 1..17: mol_type = other DNA
tcagggctccctgctgg

SEQ ID NO: 110584 - DNA, 17 bp, synthetic construct
  source 1..17: mol_type = other DNA
cagggctccctgctgga

SEQ ID NO: 110585 - DNA, 17 bp, synthetic construct
  source 1..17: mol_type = other DNA
agggctccctgctggaa

SEQ ID NO: 110586 - DNA, 17 bp, synthetic construct
  source 1..17: mol_type = other DNA
gggctccctgctggaag

SEQ ID NO: 110587 - DNA, 17 bp, synthetic construct
  source 1..17: mol_type = other DNA
ggctccctgctggaagc

SEQ ID NO: 110588 - DNA, 17 bp, synthetic construct
  source 1..17: mol_type = other DNA
gctccctgctggaagct

SEQ ID NO: 110589 - DNA, 17 bp, synthetic construct
  source 1..17: mol_type = other DNA
ctccctgctggaagctt

SEQ ID NO: 110590 - DNA, 17 bp, synthetic construct
  source 1..17: mol_type = other DNA
tccctgctggaagcttc

SEQ ID NO: 110591 - DNA, 17 bp, synthetic construct
  source 1..17: mol_type = other DNA
ccctgctggaagcttcc

SEQ ID NO: 110592 - DNA, 17 bp, synthetic construct
  source 1..17: mol_type = other DNA
cctgctggaagcttcca

SEQ ID NO: 110593 - DNA, 17 bp, synthetic construct
  source 1..17: mol_type = other DNA
ctgctggaagcttccat

SEQ ID NO: 110594 - DNA, 17 bp, synthetic construct
  source 1..17: mol_type = other DNA
tgctggaagcttccatc

SEQ ID NO: 110595 - DNA, 17 bp, synthetic construct
  source 1..17: mol_type = other DNA
gctggaagcttccatcc

SEQ ID NO: 110596 - DNA, 17 bp, synthetic construct
  source 1..17: mol_type = other DNA
ctggaagcttccatccc

SEQ ID NO: 110597 - DNA, 17 bp, synthetic construct
  source 1..17: mol_type = other DNA
tggaagcttccatcccg

SEQ ID NO: 110598 - DNA, 17 bp, synthetic construct
  source 1..17: mol_type = other DNA
ggaagcttccatcccgc

SEQ ID NO: 110599 - DNA, 17 bp, synthetic construct
  source 1..17: mol_type = other DNA
gaagcttccatcccgca

SEQ ID NO: 110600 - DNA, 17 bp, synthetic construct
  source 1..17: mol_type = other DNA
aagcttccatcccgcag

SEQ ID NO: 110601 - DNA, 17 bp, synthetic construct
  source 1..17: mol_type = other DNA
agcttccatcccgcagg

SEQ ID NO: 110602 - DNA, 17 bp, synthetic construct
  source 1..17: mol_type = other DNA
gcttccatcccgcaggc

SEQ ID NO: 110603 - DNA, 17 bp, synthetic construct
  source 1..17: mol_type = other DNA
cttccatcccgcaggct

SEQ ID NO: 110604 - DNA, 17 bp, synthetic construct
  source 1..17: mol_type = other DNA
ttccatcccgcaggctt

SEQ ID NO: 110605 - DNA, 17 bp, synthetic construct
  source 1..17: mol_type = other DNA
tccatcccgcaggcttt

SEQ ID NO: 110606 - DNA, 17 bp, synthetic construct
  source 1..17: mol_type = other DNA
ccatcccgcaggctttc

SEQ ID NO: 110607 - DNA, 17 bp, synthetic construct
  source 1..17: mol_type = other DNA
catcccgcaggctttcc

SEQ ID NO: 110608 - DNA, 17 bp, synthetic construct
  source 1..17: mol_type = other DNA
atcccgcaggctttcca

SEQ ID NO: 110609 - DNA, 17 bp, synthetic construct
  source 1..17: mol_type = other DNA
tcccgcaggctttccat

SEQ ID NO: 110610 - DNA, 17 bp, synthetic construct
  source 1..17: mol_type = other DNA
cccgcaggctttccata

SEQ ID NO: 110611 - DNA, 17 bp, synthetic construct
  source 1..17: mol_type = other DNA
ccgcaggctttccatag

SEQ ID NO: 110612 - DNA, 17 bp, synthetic construct
  source 1..17: mol_type = other DNA
cgcaggctttccatagc

SEQ ID NO: 110613 - DNA, 17 bp, synthetic construct
  source 1..17: mol_type = other DNA
gcaggctttccatagca

SEQ ID NO: 110614 - DNA, 17 bp, synthetic construct
  source 1..17: mol_type = other DNA
caggctttccatagcat

SEQ ID NO: 110615 - DNA, 17 bp, synthetic construct
  source 1..17: mol_type = other DNA
aggctttccatagcatt

SEQ ID NO: 110616 - DNA, 17 bp, synthetic construct
  source 1..17: mol_type = other DNA
ggctttccatagcattg

SEQ ID NO: 110617 - DNA, 17 bp, synthetic construct
  source 1..17: mol_type = other DNA
gctttccatagcattga

SEQ ID NO: 110618 - DNA, 17 bp, synthetic construct
  source 1..17: mol_type = other DNA
ctttccatagcattgag

SEQ ID NO: 110619 - DNA, 17 bp, synthetic construct
  source 1..17: mol_type = other DNA
tttccatagcattgagc

SEQ ID NO: 110620 - DNA, 17 bp, synthetic construct
  source 1..17: mol_type = other DNA
ttccatagcattgagca

SEQ ID NO: 110621 - DNA, 17 bp, synthetic construct
  source 1..17: mol_type = other DNA
tccatagcattgagcag

SEQ ID NO: 110622 - DNA, 17 bp, synthetic construct
  source 1..17: mol_type = other DNA
ccatagcattgagcagg

SEQ ID NO: 110623 - DNA, 17 bp, synthetic construct
  source 1..17: mol_type = other DNA
catagcattgagcagga

SEQ ID NO: 110624 - DNA, 17 bp, synthetic construct
  source 1..17: mol_type = other DNA
atagcattgagcaggag

SEQ ID NO: 110625 - DNA, 17 bp, synthetic construct
  source 1..17: mol_type = other DNA
tagcattgagcaggagc

SEQ ID NO: 110626 - DNA, 17 bp, synthetic construct
  source 1..17: mol_type = other DNA
agcattgagcaggagcg

SEQ ID NO: 110627 - DNA, 17 bp, synthetic construct
  source 1..17: mol_type = other DNA
gcattgagcaggagcgg

SEQ ID NO: 110628 - DNA, 17 bp, synthetic construct
  source 1..17: mol_type = other DNA
cattgagcaggagcgga

SEQ ID NO: 110629 - DNA, 17 bp, synthetic construct
  source 1..17: mol_type = other DNA
attgagcaggagcggag

SEQ ID NO: 110630 - DNA, 17 bp, synthetic construct
  source 1..17: mol_type = other DNA
ttgagcaggagcggagg

SEQ ID NO: 110631 - DNA, 17 bp, synthetic construct
  source 1..17: mol_type = other DNA
tgagcaggagcggaggc

SEQ ID NO: 110632 - DNA, 17 bp, synthetic construct
  source 1..17: mol_type = other DNA
gagcaggagcggaggca

SEQ ID NO: 110633 - DNA, 17 bp, synthetic construct
  source 1..17: mol_type = other DNA
agcaggagcggaggcat

SEQ ID NO: 110634 - DNA, 17 bp, synthetic construct
  source 1..17: mol_type = other DNA
gcaggagcggaggcatc

SEQ ID NO: 110635 - DNA, 17 bp, synthetic construct
  source 1..17: mol_type = other DNA
caggagcggaggcatct

SEQ ID NO: 110636 - DNA, 17 bp, synthetic construct
  source 1..17: mol_type = other DNA
aggagcggaggcatctg

SEQ ID NO: 110637 - DNA, 17 bp, synthetic construct
  source 1..17: mol_type = other DNA
ggagcggaggcatctgc

SEQ ID NO: 110638 - DNA, 17 bp, synthetic construct
  source 1..17: mol_type = other DNA
gagcggaggcatctgcg

SEQ ID NO: 110639 - DNA, 17 bp, synthetic construct
  source 1..17: mol_type = other DNA
agcggaggcatctgcgg

SEQ ID NO: 110640 - DNA, 17 bp, synthetic construct
  source 1..17: mol_type = other DNA
gcggaggcatctgcggc

SEQ ID NO: 110641 - DNA, 17 bp, synthetic construct
  source 1..17: mol_type = other DNA
cggaggcatctgcggct

SEQ ID NO: 110642 - DNA, 17 bp, synthetic construct
  source 1..17: mol_type = other DNA
ggaggcatctgcggctg

SEQ ID NO: 110643 - DNA, 17 bp, synthetic construct
  source 1..17: mol_type = other DNA
gaggcatctgcggctga

SEQ ID NO: 110644 - DNA, 17 bp, synthetic construct
  source 1..17: mol_type = other DNA
aggcatctgcggctgac

SEQ ID NO: 110645 - DNA, 17 bp, synthetic construct
  source 1..17: mol_type = other DNA
ggcatctgcggctgacg

SEQ ID NO: 110646 - DNA, 17 bp, synthetic construct
  source 1..17: mol_type = other DNA
gcatctgcggctgacgg

SEQ ID NO: 110647 - DNA, 17 bp, synthetic construct
  source 1..17: mol_type = other DNA
catctgcggctgacggt

SEQ ID NO: 110648 - DNA, 17 bp, synthetic construct
  source 1..17: mol_type = other DNA
atctgcggctgacggtt

SEQ ID NO: 110649 - DNA, 17 bp, synthetic construct
  source 1..17: mol_type = other DNA
tctgcggctgacggttg

SEQ ID NO: 110650 - DNA, 17 bp, synthetic construct
  source 1..17: mol_type = other DNA
ctgcggctgacggttgg

SEQ ID NO: 110651 - DNA, 17 bp, synthetic construct
  source 1..17: mol_type = other DNA
tgcggctgacggttggg

SEQ ID NO: 110652 - DNA, 17 bp, synthetic construct
  source 1..17: mol_type = other DNA
gcggctgacggttgggg

SEQ ID NO: 110653 - DNA, 17 bp, synthetic construct
  source 1..17: mol_type = other DNA
cggctgacggttggggt

SEQ ID NO: 110654 - DNA, 17 bp, synthetic construct
  source 1..17: mol_type = other DNA
ggctgacggttggggtg

SEQ ID NO: 110655 - DNA, 17 bp, synthetic construct
  source 1..17: mol_type = other DNA
gctgacggttggggtgg

SEQ ID NO: 110656 - DNA, 17 bp, synthetic construct
  source 1..17: mol_type = other DNA
ctgacggttggggtggc

SEQ ID NO: 110657 - DNA, 17 bp, synthetic construct
  source 1..17: mol_type = other DNA
tgacggttggggtggcc

SEQ ID NO: 110658 - DNA, 17 bp, synthetic construct
  source 1..17: mol_type = other DNA
gacggttggggtggcct

SEQ ID NO: 110659 - DNA, 17 bp, synthetic construct
  source 1..17: mol_type = other DNA
acggttggggtggcctg

SEQ ID NO: 110660 - DNA, 17 bp, synthetic construct
  source 1..17: mol_type = other DNA
cggttggggtggcctga

SEQ ID NO: 110661 - DNA, 17 bp, synthetic construct
  source 1..17: mol_type = other DNA
ggttggggtggcctgag

SEQ ID NO: 110662 - DNA, 17 bp, synthetic construct
  source 1..17: mol_type = other DNA
gttggggtggcctgagc

SEQ ID NO: 110663 - DNA, 17 bp, synthetic construct
  source 1..17: mol_type = other DNA
ttggggtggcctgagcg

SEQ ID NO: 110664 - DNA, 17 bp, synthetic construct
  source 1..17: mol_type = other DNA
tggggtggcctgagcgg

SEQ ID NO: 110665 - DNA, 17 bp, synthetic construct
  source 1..17: mol_type = other DNA
ggggtggcctgagcggc

SEQ ID NO: 110666 - DNA, 17 bp, synthetic construct
  source 1..17: mol_type = other DNA
gggtggcctgagcggct

SEQ ID NO: 110667 - DNA, 17 bp, synthetic construct
  source 1..17: mol_type = other DNA
ggtggcctgagcggctg

SEQ ID NO: 110668 - DNA, 17 bp, synthetic construct
  source 1..17: mol_type = other DNA
gtggcctgagcggctgg

SEQ ID NO: 110669 - DNA, 17 bp, synthetic construct
  source 1..17: mol_type = other DNA
tggcctgagcggctggg

SEQ ID NO: 110670 - DNA, 17 bp, synthetic construct
  source 1..17: mol_type = other DNA
ggcctgagcggctgggg

SEQ ID NO: 110671 - DNA, 17 bp, synthetic construct
  source 1..17: mol_type = other DNA
gcctgagcggctgggga

SEQ ID NO: 110672 - DNA, 17 bp, synthetic construct
  source 1..17: mol_type = other DNA
cctgagcggctggggag

SEQ ID NO: 110673 - DNA, 17 bp, synthetic construct
  source 1..17: mol_type = other DNA
ctgagcggctggggagg

SEQ ID NO: 110674 - DNA, 17 bp, synthetic construct
  source 1..17: mol_type = other DNA
tgagcggctggggagga

SEQ ID NO: 110675 - DNA, 17 bp, synthetic construct
  source 1..17: mol_type = other DNA
gagcggctggggaggag

SEQ ID NO: 110676 - DNA, 17 bp, synthetic construct
  source 1..17: mol_type = other DNA
agcggctggggaggagt

SEQ ID NO: 110677 - DNA, 17 bp, synthetic construct
  source 1..17: mol_type = other DNA
gcggctggggaggagtc

SEQ ID NO: 110678 - DNA, 17 bp, synthetic construct
  source 1..17: mol_type = other DNA
cggctggggaggagtcc

SEQ ID NO: 110679 - DNA, 17 bp, synthetic construct
  source 1..17: mol_type = other DNA
ggctggggaggagtccc

SEQ ID NO: 110680 - DNA, 17 bp, synthetic construct
  source 1..17: mol_type = other DNA
gctggggaggagtcccg

SEQ ID NO: 110681 - DNA, 17 bp, synthetic construct
  source 1..17: mol_type = other DNA
ctggggaggagtcccgg

SEQ ID NO: 110682 - DNA, 17 bp, synthetic construct
  source 1..17: mol_type = other DNA
tggggaggagtcccggc

SEQ ID NO: 110683 - DNA, 17 bp, synthetic construct
  source 1..17: mol_type = other DNA
ggggaggagtcccggcc

SEQ ID NO: 110684 - DNA, 17 bp, synthetic construct
  source 1..17: mol_type = other DNA
gggaggagtcccggcct

SEQ ID NO: 110685 - DNA, 17 bp, synthetic construct
  source 1..17: mol_type = other DNA
ggaggagtcccggcctt

SEQ ID NO: 110686 - DNA, 17 bp, synthetic construct
  source 1..17: mol_type = other DNA
gaggagtcccggccttg

SEQ ID NO: 110687 - DNA, 17 bp, synthetic construct
  source 1..17: mol_type = other DNA
aggagtcccggccttgg

SEQ ID NO: 110688 - DNA, 17 bp, synthetic construct
  source 1..17: mol_type = other DNA
ggagtcccggccttggc

SEQ ID NO: 110689 - DNA, 17 bp, synthetic construct
  source 1..17: mol_type = other DNA
gagtcccggccttggcc

SEQ ID NO: 110690 - DNA, 17 bp, synthetic construct
  source 1..17: mol_type = other DNA
agtcccggccttggcca

SEQ ID NO: 110691 - DNA, 17 bp, synthetic construct
  source 1..17: mol_type = other DNA
gtcccggccttggccac

SEQ ID NO: 110692 - DNA, 17 bp, synthetic construct
  source 1..17: mol_type = other DNA
tcccggccttggccaca

SEQ ID NO: 110693 - DNA, 17 bp, synthetic construct
  source 1..17: mol_type = other DNA
cccggccttggccacag

SEQ ID NO: 110694 - DNA, 17 bp, synthetic construct
  source 1..17: mol_type = other DNA
ccggccttggccacagt

SEQ ID NO: 110695 - DNA, 17 bp, synthetic construct
  source 1..17: mol_type = other DNA
cggccttggccacagtg

SEQ ID NO: 110696 - DNA, 17 bp, synthetic construct
  source 1..17: mol_type = other DNA
ggccttggccacagtgt

SEQ ID NO: 110697 - DNA, 17 bp, synthetic construct
  source 1..17: mol_type = other DNA
gccttggccacagtgtg

SEQ ID NO: 110698 - DNA, 17 bp, synthetic construct
  source 1..17: mol_type = other DNA
ccttggccacagtgtgt

SEQ ID NO: 110699 - DNA, 17 bp, synthetic construct
  source 1..17: mol_type = other DNA
cttggccacagtgtgtc

SEQ ID NO: 110700 - DNA, 17 bp, synthetic construct
  source 1..17: mol_type = other DNA
ttggccacagtgtgtcg

SEQ ID NO: 110701 - DNA, 17 bp, synthetic construct
  source 1..17: mol_type = other DNA
tggccacagtgtgtcgt

SEQ ID NO: 110702 - DNA, 17 bp, synthetic construct
  source 1..17: mol_type = other DNA
ggccacagtgtgtcgtg

SEQ ID NO: 110703 - DNA, 17 bp, synthetic construct
  source 1..17: mol_type = other DNA
gccacagtgtgtcgtga

SEQ ID NO: 110704 - DNA, 17 bp, synthetic construct
  source 1..17: mol_type = other DNA
ccacagtgtgtcgtgag

SEQ ID NO: 110705 - DNA, 17 bp, synthetic construct
  source 1..17: mol_type = other DNA
cacagtgtgtcgtgagg

SEQ ID NO: 110706 - DNA, 17 bp, synthetic construct
  source 1..17: mol_type = other DNA
acagtgtgtcgtgaggg

SEQ ID NO: 110707 - DNA, 17 bp, synthetic construct
  source 1..17: mol_type = other DNA
cagtgtgtcgtgagggt

SEQ ID NO: 110708 - DNA, 17 bp, synthetic construct
  source 1..17: mol_type = other DNA
agtgtgtcgtgagggtg

SEQ ID NO: 110709 - DNA, 17 bp, synthetic construct
  source 1..17: mol_type = other DNA
gtgtgtcgtgagggtga

SEQ ID NO: 110710 - DNA, 17 bp, synthetic construct
  source 1..17: mol_type = other DNA
tgtgtcgtgagggtgaa

SEQ ID NO: 110711 - DNA, 17 bp, synthetic construct
  source 1..17: mol_type = other DNA
gtgtcgtgagggtgaac

SEQ ID NO: 110712 - DNA, 17 bp, synthetic construct
  source 1..17: mol_type = other DNA
tgtcgtgagggtgaacc

SEQ ID NO: 110713 - DNA, 17 bp, synthetic construct
  source 1..17: mol_type = other DNA
gtcgtgagggtgaacct

SEQ ID NO: 110714 - DNA, 17 bp, synthetic construct
  source 1..17: mol_type = other DNA
tcgtgagggtgaacctg

SEQ ID NO: 110715 - DNA, 17 bp, synthetic construct
  source 1..17: mol_type = other DNA
cgtgagggtgaacctgc

SEQ ID NO: 110716 - DNA, 17 bp, synthetic construct
  source 1..17: mol_type = other DNA
gtgagggtgaacctgca

SEQ ID NO: 110717 - DNA, 17 bp, synthetic construct
  source 1..17: mol_type = other DNA
tgagggtgaacctgcag

SEQ ID NO: 110718 - DNA, 17 bp, synthetic construct
  source 1..17: mol_type = other DNA
gagggtgaacctgcagg

SEQ ID NO: 110719 - DNA, 17 bp, synthetic construct
  source 1..17: mol_type = other DNA
agggtgaacctgcaggg

SEQ ID NO: 110720 - DNA, 17 bp, synthetic construct
  source 1..17: mol_type = other DNA
gggtgaacctgcagggc

SEQ ID NO: 110721 - DNA, 17 bp, synthetic construct
  source 1..17: mol_type = other DNA
ggtgaacctgcagggca

SEQ ID NO: 110722 - DNA, 17 bp, synthetic construct
  source 1..17: mol_type = other DNA
gtgaacctgcagggcat

SEQ ID NO: 110723 - DNA, 17 bp, synthetic construct
  source 1..17: mol_type = other DNA
tgaacctgcagggcatg

SEQ ID NO: 110724 - DNA, 17 bp, synthetic construct
  source 1..17: mol_type = other DNA
gaacctgcagggcatgg

SEQ ID NO: 110725 - DNA, 17 bp, synthetic construct
  source 1..17: mol_type = other DNA
aacctgcagggcatgga

SEQ ID NO: 110726 - DNA, 17 bp, synthetic construct
  source 1..17: mol_type = other DNA
acctgcagggcatggag

SEQ ID NO: 110727 - DNA, 17 bp, synthetic construct
  source 1..17: mol_type = other DNA
cctgcagggcatggaga

SEQ ID NO: 110728 - DNA, 17 bp, synthetic construct
  source 1..17: mol_type = other DNA
ctgcagggcatggagac

SEQ ID NO: 110729 - DNA, 17 bp, synthetic construct
  source 1..17: mol_type = other DNA
tgcagggcatggagacc

SEQ ID NO: 110730 - DNA, 17 bp, synthetic construct
  source 1..17: mol_type = other DNA
gcagggcatggagaccg

SEQ ID NO: 110731 - DNA, 17 bp, synthetic construct
  source 1..17: mol_type = other DNA
cagggcatggagaccgc

SEQ ID NO: 110732 - DNA, 17 bp, synthetic construct
  source 1..17: mol_type = other DNA
agggcatggagaccgcc

SEQ ID NO: 110733 - DNA, 17 bp, synthetic construct
  source 1..17: mol_type = other DNA
gggcatggagaccgcca

SEQ ID NO: 110734 - DNA, 17 bp, synthetic construct
  source 1..17: mol_type = other DNA
ggcatggagaccgccac

SEQ ID NO: 110735 - DNA, 17 bp, synthetic construct
  source 1..17: mol_type = other DNA
gcatggagaccgccacc

SEQ ID NO: 110736 - DNA, 17 bp, synthetic construct
  source 1..17: mol_type = other DNA
catggagaccgccacca

SEQ ID NO: 110737 - DNA, 17 bp, synthetic construct
  source 1..17: mol_type = other DNA
atggagaccgccaccaa

SEQ ID NO: 110738 - DNA, 17 bp, synthetic construct
  source 1..17: mol_type = other DNA
tggagaccgccaccaag

SEQ ID NO: 110739 - DNA, 17 bp, synthetic construct
  source 1..17: mol_type = other DNA
ggagaccgccaccaagg

SEQ ID NO: 110740 - DNA, 17 bp, synthetic construct
  source 1..17: mol_type = other DNA
gagaccgccaccaagga

SEQ ID NO: 110741 - DNA, 17 bp, synthetic construct
  source 1..17: mol_type = other DNA
agaccgccaccaaggac

SEQ ID NO: 110742 - DNA, 17 bp, synthetic construct
  source 1..17: mol_type = other DNA
gaccgccaccaaggacc

SEQ ID NO: 110743 - DNA, 17 bp, synthetic construct
  source 1..17: mol_type = other DNA
accgccaccaaggaccc

SEQ ID NO: 110744 - DNA, 17 bp, synthetic construct
  source 1..17: mol_type = other DNA
ccgccaccaaggacccc

SEQ ID NO: 110745 - DNA, 17 bp, synthetic construct
  source 1..17: mol_type = other DNA
cgccaccaaggacccca

SEQ ID NO: 110746 - DNA, 17 bp, synthetic construct
  source 1..17: mol_type = other DNA
gccaccaaggaccccac

SEQ ID NO: 110747 - DNA, 17 bp, synthetic construct
  source 1..17: mol_type = other DNA
ccaccaaggaccccaca

SEQ ID NO: 110748 - DNA, 17 bp, synthetic construct
  source 1..17: mol_type = other DNA
caccaaggaccccacat

SEQ ID NO: 110749 - DNA, 17 bp, synthetic construct
  source 1..17: mol_type = other DNA
accaaggaccccacatg

SEQ ID NO: 110750 - DNA, 17 bp, synthetic construct
  source 1..17: mol_type = other DNA
ccaaggaccccacatgc

SEQ ID NO: 110751 - DNA, 17 bp, synthetic construct
  source 1..17: mol_type = other DNA
caaggaccccacatgcg

SEQ ID NO: 110752 - DNA, 17 bp, synthetic construct
  source 1..17: mol_type = other DNA
aaggaccccacatgcgg

SEQ ID NO: 110753 - DNA, 17 bp, synthetic construct
  source 1..17: mol_type = other DNA
aggaccccacatgcggc

SEQ ID NO: 110754 - DNA, 17 bp, synthetic construct
  source 1..17: mol_type = other DNA
ggaccccacatgcggct

SEQ ID NO: 110755 - DNA, 17 bp, synthetic construct
  source 1..17: mol_type = other DNA
gaccccacatgcggctg

SEQ ID NO: 110756 - DNA, 17 bp, synthetic construct
  source 1..17: mol_type = other DNA
accccacatgcggctgc

SEQ ID NO: 110757 - DNA, 17 bp, synthetic construct
  source 1..17: mol_type = other DNA
ccccacatgcggctgcc

SEQ ID NO: 110758 - DNA, 17 bp, synthetic construct
  source 1..17: mol_type = other DNA
cccacatgcggctgccg

SEQ ID NO: 110759 - DNA, 17 bp, synthetic construct
  source 1..17: mol_type = other DNA
ccacatgcggctgccgc

SEQ ID NO: 110760 - DNA, 17 bp, synthetic construct
  source 1..17: mol_type = other DNA
cacatgcggctgccgca

SEQ ID NO: 110761 - DNA, 17 bp, synthetic construct
  source 1..17: mol_type = other DNA
acatgcggctgccgcac

SEQ ID NO: 110762 - DNA, 17 bp, synthetic construct
  source 1..17: mol_type = other DNA
catgcggctgccgcacc

SEQ ID NO: 110763 - DNA, 17 bp, synthetic construct
  source 1..17: mol_type = other DNA
atgcggctgccgcacca

SEQ ID NO: 110764 - DNA, 17 bp, synthetic construct
  source 1..17: mol_type = other DNA
tgcggctgccgcaccag

SEQ ID NO: 110765 - DNA, 17 bp, synthetic construct
  source 1..17: mol_type = other DNA
gcggctgccgcaccagg

SEQ ID NO: 110766 - DNA, 17 bp, synthetic construct
  source 1..17: mol_type = other DNA
cggctgccgcaccaggg

SEQ ID NO: 110767 - DNA, 17 bp, synthetic construct
  source 1..17: mol_type = other DNA
ggctgccgcaccaggga

SEQ ID NO: 110768 - DNA, 17 bp, synthetic construct
  source 1..17: mol_type = other DNA
gctgccgcaccagggat

SEQ ID NO: 110769 - DNA, 17 bp, synthetic construct
  source 1..17: mol_type = other DNA
ctgccgcaccagggatg

SEQ ID NO: 110770 - DNA, 17 bp, synthetic construct
  source 1..17: mol_type = other DNA
tgccgcaccagggatgt

SEQ ID NO: 110771 - DNA, 17 bp, synthetic construct
  source 1..17: mol_type = other DNA
gccgcaccagggatgtg

SEQ ID NO: 110772 - DNA, 17 bp, synthetic construct
  source 1..17: mol_type = other DNA
ccgcaccagggatgtgg

SEQ ID NO: 110773 - DNA, 17 bp, synthetic construct
  source 1..17: mol_type = other DNA
cgcaccagggatgtggc

SEQ ID NO: 110774 - DNA, 17 bp, synthetic construct
  source 1..17: mol_type = other DNA
gcaccagggatgtggcc

SEQ ID NO: 110775 - DNA, 17 bp, synthetic construct
  source 1..17: mol_type = other DNA
caccagggatgtggcca

SEQ ID NO: 110776 - DNA, 17 bp, synthetic construct
  source 1..17: mol_type = other DNA
accagggatgtggccag

SEQ ID NO: 110777 - DNA, 17 bp, synthetic construct
  source 1..17: mol_type = other DNA
ccagggatgtggccagg

SEQ ID NO: 110778 - DNA, 17 bp, synthetic construct
  source 1..17: mol_type = other DNA
cagggatgtggccaggt

SEQ ID NO: 110779 - DNA, 17 bp, synthetic construct
  source 1..17: mol_type = other DNA
agggatgtggccaggtc

SEQ ID NO: 110780 - DNA, 17 bp, synthetic construct
  source 1..17: mol_type = other DNA
gggatgtggccaggtcc

SEQ ID NO: 110781 - DNA, 17 bp, synthetic construct
  source 1..17: mol_type = other DNA
ggatgtggccaggtccg

SEQ ID NO: 110782 - DNA, 17 bp, synthetic construct
  source 1..17: mol_type = other DNA
gatgtggccaggtccgt

SEQ ID NO: 110783 - DNA, 17 bp, synthetic construct
  source 1..17: mol_type = other DNA
atgtggccaggtccgtg

SEQ ID NO: 110784 - DNA, 17 bp, synthetic construct
  source 1..17: mol_type = other DNA
tgtggccaggtccgtgg

SEQ ID NO: 110785 - DNA, 17 bp, synthetic construct
  source 1..17: mol_type = other DNA
gtggccaggtccgtggt

SEQ ID NO: 110786 - DNA, 17 bp, synthetic construct
  source 1..17: mol_type = other DNA
tggccaggtccgtggtt

SEQ ID NO: 110787 - DNA, 17 bp, synthetic construct
  source 1..17: mol_type = other DNA
ggccaggtccgtggttg

SEQ ID NO: 110788 - DNA, 17 bp, synthetic construct
  source 1..17: mol_type = other DNA
gccaggtccgtggttgg

SEQ ID NO: 110789 - DNA, 17 bp, synthetic construct
  source 1..17: mol_type = other DNA
ccaggtccgtggttggg

SEQ ID NO: 110790 - DNA, 17 bp, synthetic construct
  source 1..17: mol_type = other DNA
caggtccgtggttgggt

SEQ ID NO: 110791 - DNA, 17 bp, synthetic construct
  source 1..17: mol_type = other DNA
aggtccgtggttgggtt

SEQ ID NO: 110792 - DNA, 17 bp, synthetic construct
  source 1..17: mol_type = other DNA
ggtccgtggttgggttc

SEQ ID NO: 110793 - DNA, 17 bp, synthetic construct
  source 1..17: mol_type = other DNA
gtccgtggttgggttcg

SEQ ID NO: 110794 - DNA, 17 bp, synthetic construct
  source 1..17: mol_type = other DNA
tccgtggttgggttcgt

SEQ ID NO: 110795 - DNA, 17 bp, synthetic construct
  source 1..17: mol_type = other DNA
ccgtggttgggttcgtg

SEQ ID NO: 110796 - DNA, 17 bp, synthetic construct
  source 1..17: mol_type = other DNA
cgtggttgggttcgtgg

SEQ ID NO: 110797 - DNA, 17 bp, synthetic construct
  source 1..17: mol_type = other DNA
gtggttgggttcgtggc

SEQ ID NO: 110798 - DNA, 17 bp, synthetic construct
  source 1..17: mol_type = other DNA
tggttgggttcgtggct

SEQ ID NO: 110799 - DNA, 17 bp, synthetic construct
  source 1..17: mol_type = other DNA
ggttgggttcgtggctg

SEQ ID NO: 110800 - DNA, 17 bp, synthetic construct
  source 1..17: mol_type = other DNA
gttgggttcgtggctgg

SEQ ID NO: 110801 - DNA, 17 bp, synthetic construct
  source 1..17: mol_type = other DNA
ttgggttcgtggctggc

SEQ ID NO: 110802 - DNA, 17 bp, synthetic construct
  source 1..17: mol_type = other DNA
tgggttcgtggctggca

SEQ ID NO: 110803 - DNA, 17 bp, synthetic construct
  source 1..17: mol_type = other DNA
gggttcgtggctggcag

SEQ ID NO: 110804 - DNA, 17 bp, synthetic construct
  source 1..17: mol_type = other DNA
ggttcgtggctggcagc

SEQ ID NO: 110805 - DNA, 17 bp, synthetic construct
  source 1..17: mol_type = other DNA
gttcgtggctggcagcc

SEQ ID NO: 110806 - DNA, 17 bp, synthetic construct
  source 1..17: mol_type = other DNA
ttcgtggctggcagcca

SEQ ID NO: 110807 - DNA, 17 bp, synthetic construct
  source 1..17: mol_type = other DNA
tcgtggctggcagccac

SEQ ID NO: 110808 - DNA, 17 bp, synthetic construct
  source 1..17: mol_type = other DNA
cgtggctggcagccaca

SEQ ID NO: 110809 - DNA, 17 bp, synthetic construct
  source 1..17: mol_type = other DNA
gtggctggcagccacat

SEQ ID NO: 110810 - DNA, 17 bp, synthetic construct
  source 1..17: mol_type = other DNA
tggctggcagccacatc

SEQ ID NO: 110811 - DNA, 17 bp, synthetic construct
  source 1..17: mol_type = other DNA
ggctggcagccacatct

SEQ ID NO: 110812 - DNA, 17 bp, synthetic construct
  source 1..17: mol_type = other DNA
gctggcagccacatcta

SEQ ID NO: 110813 - DNA, 17 bp, synthetic construct
  source 1..17: mol_type = other DNA
ctggcagccacatctag

SEQ ID NO: 110814 - DNA, 17 bp, synthetic construct
  source 1..17: mol_type = other DNA
tggcagccacatctagt

SEQ ID NO: 110815 - DNA, 17 bp, synthetic construct
  source 1..17: mol_type = other DNA
ggcagccacatctagtt

SEQ ID NO: 110816 - DNA, 17 bp, synthetic construct
  source 1..17: mol_type = other DNA
gcagccacatctagttc

SEQ ID NO: 110817 - DNA, 17 bp, synthetic construct
  source 1..17: mol_type = other DNA
cagccacatctagttcc

SEQ ID NO: 110818 - DNA, 17 bp, synthetic construct
  source 1..17: mol_type = other DNA
agccacatctagttcct

SEQ ID NO: 110819 - DNA, 17 bp, synthetic construct
  source 1..17: mol_type = other DNA
gccacatctagttcctc

SEQ ID NO: 110820 - DNA, 17 bp, synthetic construct
  source 1..17: mol_type = other DNA
ccacatctagttcctca

SEQ ID NO: 110821 - DNA, 17 bp, synthetic construct
  source 1..17: mol_type = other DNA
cacatctagttcctcac

SEQ ID NO: 110822 - DNA, 17 bp, synthetic construct
  source 1..17: mol_type = other DNA
acatctagttcctcact

SEQ ID NO: 110823 - DNA, 17 bp, synthetic construct
  source 1..17: mol_type = other DNA
catctagttcctcactg

SEQ ID NO: 110824 - DNA, 17 bp, synthetic construct
  source 1..17: mol_type = other DNA
atctagttcctcactga

SEQ ID NO: 110825 - DNA, 17 bp, synthetic construct
  source 1..17: mol_type = other DNA
tctagttcctcactgac

SEQ ID NO: 110826 - DNA, 17 bp, synthetic construct
  source 1..17: mol_type = other DNA
ctagttcctcactgact

SEQ ID NO: 110827 - DNA, 17 bp, synthetic construct
  source 1..17: mol_type = other DNA
tagttcctcactgactc

SEQ ID NO: 110828 - DNA, 17 bp, synthetic construct
  source 1..17: mol_type = other DNA
agttcctcactgactcc

SEQ ID NO: 110829 - DNA, 17 bp, synthetic construct
  source 1..17: mol_type = other DNA
gttcctcactgactccc

SEQ ID NO: 110830 - DNA, 17 bp, synthetic construct
  source 1..17: mol_type = other DNA
ttcctcactgactccca

SEQ ID NO: 110831 - DNA, 17 bp, synthetic construct
  source 1..17: mol_type = other DNA
tcctcactgactcccat

SEQ ID NO: 110832 - DNA, 17 bp, synthetic construct
  source 1..17: mol_type = other DNA
cctcactgactcccatt

SEQ ID NO: 110833 - DNA, 17 bp, synthetic construct
  source 1..17: mol_type = other DNA
ctcactgactcccattc

SEQ ID NO: 110834 - DNA, 17 bp, synthetic construct
  source 1..17: mol_type = other DNA
tcactgactcccattcc

SEQ ID NO: 110835 - DNA, 17 bp, synthetic construct
  source 1..17: mol_type = other DNA
cactgactcccattccc

SEQ ID NO: 110836 - DNA, 17 bp, synthetic construct
  source 1..17: mol_type = other DNA
actgactcccattccct

SEQ ID NO: 110837 - DNA, 17 bp, synthetic construct
  source 1..17: mol_type = other DNA
ctgactcccattccctc

SEQ ID NO: 110838 - DNA, 17 bp, synthetic construct
  source 1..17: mol_type = other DNA
tgactcccattccctct

SEQ ID NO: 110839 - DNA, 17 bp, synthetic construct
  source 1..17: mol_type = other DNA
gactcccattccctctt

SEQ ID NO: 110840 - DNA, 17 bp, synthetic construct
  source 1..17: mol_type = other DNA
actcccattccctcttc

SEQ ID NO: 110841 - DNA, 17 bp, synthetic construct
  source 1..17: mol_type = other DNA
ctcccattccctcttcc

SEQ ID NO: 110842 - DNA, 17 bp, synthetic construct
  source 1..17: mol_type = other DNA
tcccattccctcttccc

SEQ ID NO: 110843 - DNA, 17 bp, synthetic construct
  source 1..17: mol_type = other DNA
cccattccctcttccca

SEQ ID NO: 110844 - DNA, 17 bp, synthetic construct
  source 1..17: mol_type = other DNA
ccattccctcttcccac

SEQ ID NO: 110845 - DNA, 17 bp, synthetic construct
  source 1..17: mol_type = other DNA
cattccctcttcccaca

SEQ ID NO: 110846 - DNA, 17 bp, synthetic construct
  source 1..17: mol_type = other DNA
attccctcttcccacag

SEQ ID NO: 110847 - DNA, 17 bp, synthetic construct
  source 1..17: mol_type = other DNA
ttccctcttcccacaga

SEQ ID NO: 110848 - DNA, 17 bp, synthetic construct
  source 1..17: mol_type = other DNA
tccctcttcccacagag

SEQ ID NO: 110849 - DNA, 17 bp, synthetic construct
  source 1..17: mol_type = other DNA
ccctcttcccacagaga

SEQ ID NO: 110850 - DNA, 17 bp, synthetic construct
  source 1..17: mol_type = other DNA
cctcttcccacagagac

SEQ ID NO: 110851 - DNA, 17 bp, synthetic construct
  source 1..17: mol_type = other DNA
ctcttcccacagagacc

SEQ ID NO: 110852 - DNA, 17 bp, synthetic construct
  source 1..17: mol_type = other DNA
tcttcccacagagaccc

SEQ ID NO: 110853 - DNA, 17 bp, synthetic construct
  source 1..17: mol_type = other DNA
cttcccacagagaccca

SEQ ID NO: 110854 - DNA, 17 bp, synthetic construct
  source 1..17: mol_type = other DNA
ttcccacagagacccag

SEQ ID NO: 110855 - DNA, 17 bp, synthetic construct
  source 1..17: mol_type = other DNA
tcccacagagacccagg

SEQ ID NO: 110856 - DNA, 17 bp, synthetic construct
  source 1..17: mol_type = other DNA
cccacagagacccaggg

SEQ ID NO: 110857 - DNA, 17 bp, synthetic construct
  source 1..17: mol_type = other DNA
ccacagagacccagggc

SEQ ID NO: 110858 - DNA, 17 bp, synthetic construct
  source 1..17: mol_type = other DNA
cacagagacccagggcc

SEQ ID NO: 110859 - DNA, 17 bp, synthetic construct
  source 1..17: mol_type = other DNA
acagagacccagggccc

SEQ ID NO: 110860 - DNA, 17 bp, synthetic construct
  source 1..17: mol_type = other DNA
cagagacccagggccct

SEQ ID NO: 110861 - DNA, 17 bp, synthetic construct
  source 1..17: mol_type = other DNA
agagacccagggccctg

SEQ ID NO: 110862 - DNA, 17 bp, synthetic construct
  source 1..17: mol_type = other DNA
gagacccagggccctgt

SEQ ID NO: 110863 - DNA, 17 bp, synthetic construct
  source 1..17: mol_type = other DNA
agacccagggccctgtg

SEQ ID NO: 110864 - DNA, 17 bp, synthetic construct
  source 1..17: mol_type = other DNA
gacccagggccctgtgg

SEQ ID NO: 110865 - DNA, 17 bp, synthetic construct
  source 1..17: mol_type = other DNA
acccagggccctgtgga

SEQ ID NO: 110866 - DNA, 17 bp, synthetic construct
  source 1..17: mol_type = other DNA
cccagggccctgtggag

SEQ ID NO: 110867 - DNA, 17 bp, synthetic construct
  source 1..17: mol_type = other DNA
ccagggccctgtggagc

SEQ ID NO: 110868 - DNA, 17 bp, synthetic construct
  source 1..17: mol_type = other DNA
cagggccctgtggagcc

SEQ ID NO: 110869 - DNA, 17 bp, synthetic construct
  source 1..17: mol_type = other DNA
agggccctgtggagccg

SEQ ID NO: 110870 - DNA, 17 bp, synthetic construct
  source 1..17: mol_type = other DNA
gggccctgtggagccga

SEQ ID NO: 110871 - DNA, 17 bp, synthetic construct
  source 1..17: mol_type = other DNA
ggccctgtggagccgag

SEQ ID NO: 110872 - DNA, 17 bp, synthetic construct
  source 1..17: mol_type = other DNA
gccctgtggagccgagc

SEQ ID NO: 110873 - DNA, 17 bp, synthetic construct
  source 1..17: mol_type = other DNA
ccctgtggagccgagct

SEQ ID NO: 110874 - DNA, 17 bp, synthetic construct
  source 1..17: mol_type = other DNA
cctgtggagccgagctg

SEQ ID NO: 110875 - DNA, 17 bp, synthetic construct
  source 1..17: mol_type = other DNA
ctgtggagccgagctgg

SEQ ID NO: 110876 - DNA, 17 bp, synthetic construct
  source 1..17: mol_type = other DNA
tgtggagccgagctggg

SEQ ID NO: 110877 - DNA, 17 bp, synthetic construct
  source 1..17: mol_type = other DNA
gtggagccgagctggga

SEQ ID NO: 110878 - DNA, 17 bp, synthetic construct
  source 1..17: mol_type = other DNA
tggagccgagctgggag

SEQ ID NO: 110879 - DNA, 17 bp, synthetic construct
  source 1..17: mol_type = other DNA
ggagccgagctgggaga

SEQ ID NO: 110880 - DNA, 17 bp, synthetic construct
  source 1..17: mol_type = other DNA
gagccgagctgggagaa

SEQ ID NO: 110881 - DNA, 17 bp, synthetic construct
  source 1..17: mol_type = other DNA
agccgagctgggagaat

SEQ ID NO: 110882 - DNA, 17 bp, synthetic construct
  source 1..17: mol_type = other DNA
gccgagctgggagaatg

SEQ ID NO: 110883 - DNA, 17 bp, synthetic construct
  source 1..17: mol_type = other DNA
ccgagctgggagaatgc

SEQ ID NO: 110884 - DNA, 17 bp, synthetic construct
  source 1..17: mol_type = other DNA
cgagctgggagaatgca

SEQ ID NO: 110885 - DNA, 17 bp, synthetic construct
  source 1..17: mol_type = other DNA
gagctgggagaatgcag

SEQ ID NO: 110886 - DNA, 17 bp, synthetic construct
  source 1..17: mol_type = other DNA
agctgggagaatgcagg

SEQ ID NO: 110887 - DNA, 17 bp, synthetic construct
  source 1..17: mol_type = other DNA
gctgggagaatgcaggg

SEQ ID NO: 110888 - DNA, 17 bp, synthetic construct
  source 1..17: mol_type = other DNA
ctgggagaatgcagggc

SEQ ID NO: 110889 - DNA, 17 bp, synthetic construct
  source 1..17: mol_type = other DNA
tgggagaatgcagggca

SEQ ID NO: 110890 - DNA, 17 bp, synthetic construct
  source 1..17: mol_type = other DNA
gggagaatgcagggcac

SEQ ID NO: 110891 - DNA, 17 bp, synthetic construct
  source 1..17: mol_type = other DNA
ggagaatgcagggcaca

SEQ ID NO: 110892 - DNA, 17 bp, synthetic construct
  source 1..17: mol_type = other DNA
gagaatgcagggcacac

SEQ ID NO: 110893 - DNA, 17 bp, synthetic construct
  source 1..17: mol_type = other DNA
agaatgcagggcacacc

SEQ ID NO: 110894 - DNA, 17 bp, synthetic construct
  source 1..17: mol_type = other DNA
gaatgcagggcacacca

SEQ ID NO: 110895 - DNA, 17 bp, synthetic construct
  source 1..17: mol_type = other DNA
aatgcagggcacaccat

SEQ ID NO: 110896 - DNA, 17 bp, synthetic construct
  source 1..17: mol_type = other DNA
atgcagggcacaccatg

SEQ ID NO: 110897 - DNA, 17 bp, synthetic construct
  source 1..17: mol_type = other DNA
tgcagggcacaccatgg

SEQ ID NO: 110898 - DNA, 17 bp, synthetic construct
  source 1..17: mol_type = other DNA
gcagggcacaccatgga

SEQ ID NO: 110899 - DNA, 17 bp, synthetic construct
  source 1..17: mol_type = other DNA
cagggcacaccatggat

SEQ ID NO: 110900 - DNA, 17 bp, synthetic construct
  source 1..17: mol_type = other DNA
agggcacaccatggatg

SEQ ID NO: 110901 - DNA, 17 bp, synthetic construct
  source 1..17: mol_type = other DNA
gggcacaccatggatgg

SEQ ID NO: 110902 - DNA, 17 bp, synthetic construct
  source 1..17: mol_type = other DNA
ggcacaccatggatggc

SEQ ID NO: 110903 - DNA, 17 bp, synthetic construct
  source 1..17: mol_type = other DNA
gcacaccatggatggcg

SEQ ID NO: 110904 - DNA, 17 bp, synthetic construct
  source 1..17: mol_type = other DNA
cacaccatggatggcgg

SEQ ID NO: 110905 - DNA, 17 bp, synthetic construct
  source 1..17: mol_type = other DNA
acaccatggatggcggt

SEQ ID NO: 110906 - DNA, 17 bp, synthetic construct
  source 1..17: mol_type = other DNA
caccatggatggcggta

SEQ ID NO: 110907 - DNA, 17 bp, synthetic construct
  source 1..17: mol_type = other DNA
accatggatggcggtat

SEQ ID NO: 110908 - DNA, 17 bp, synthetic construct
  source 1..17: mol_type = other DNA
ccatggatggcggtatg

SEQ ID NO: 110909 - DNA, 17 bp, synthetic construct
  source 1..17: mol_type = other DNA
catggatggcggtatgt

SEQ ID NO: 110910 - DNA, 17 bp, synthetic construct
  source 1..17: mol_type = other DNA
atggatggcggtatgtg

SEQ ID NO: 110911 - DNA, 17 bp, synthetic construct
  source 1..17: mol_type = other DNA
tggatggcggtatgtgg

SEQ ID NO: 110912 - DNA, 17 bp, synthetic construct
  source 1..17: mol_type = other DNA
ggatggcggtatgtggc

SEQ ID NO: 110913 - DNA, 17 bp, synthetic construct
  source 1..17: mol_type = other DNA
gatggcggtatgtggcc

SEQ ID NO: 110914 - DNA, 17 bp, synthetic construct
  source 1..17: mol_type = other DNA
atggcggtatgtggcca

SEQ ID NO: 110915 - DNA, 17 bp, synthetic construct
  source 1..17: mol_type = other DNA
tggcggtatgtggccag

SEQ ID NO: 110916 - DNA, 17 bp, synthetic construct
  source 1..17: mol_type = other DNA
ggcggtatgtggccagg

SEQ ID NO: 110917 - DNA, 17 bp, synthetic construct
  source 1..17: mol_type = other DNA
gcggtatgtggccaggt

SEQ ID NO: 110918 - DNA, 17 bp, synthetic construct
  source 1..17: mol_type = other DNA
cggtatgtggccaggtt

SEQ ID NO: 110919 - DNA, 17 bp, synthetic construct
  source 1..17: mol_type = other DNA
ggtatgtggccaggttc

SEQ ID NO: 110920 - DNA, 17 bp, synthetic construct
  source 1..17: mol_type = other DNA
gtatgtggccaggttcg

SEQ ID NO: 110921 - DNA, 17 bp, synthetic construct
  source 1..17: mol_type = other DNA
tatgtggccaggttcgg

SEQ ID NO: 110922 - DNA, 17 bp, synthetic construct
  source 1..17: mol_type = other DNA
atgtggccaggttcggg

SEQ ID NO: 110923 - DNA, 17 bp, synthetic construct
  source 1..17: mol_type = other DNA
tgtggccaggttcgggg

SEQ ID NO: 110924 - DNA, 17 bp, synthetic construct
  source 1..17: mol_type = other DNA
gtggccaggttcggggg

SEQ ID NO: 110925 - DNA, 17 bp, synthetic construct
  source 1..17: mol_type = other DNA
tggccaggttcgggggt

SEQ ID NO: 110926 - DNA, 17 bp, synthetic construct
  source 1..17: mol_type = other DNA
ggccaggttcgggggtg

SEQ ID NO: 110927 - DNA, 17 bp, synthetic construct
  source 1..17: mol_type = other DNA
gccaggttcgggggtgg

SEQ ID NO: 110928 - DNA, 17 bp, synthetic construct
  source 1..17: mol_type = other DNA
ccaggttcgggggtggg

SEQ ID NO: 110929 - DNA, 17 bp, synthetic construct
  source 1..17: mol_type = other DNA
caggttcgggggtgggg

SEQ ID NO: 110930 - DNA, 17 bp, synthetic construct
  source 1..17: mol_type = other DNA
aggttcgggggtggggg

SEQ ID NO: 110931 - DNA, 17 bp, synthetic construct
  source 1..17: mol_type = other DNA
ggttcgggggtgggggg

SEQ ID NO: 110932 - DNA, 17 bp, synthetic construct
  source 1..17: mol_type = other DNA
gttcgggggtggggggt

SEQ ID NO: 110933 - DNA, 17 bp, synthetic construct
  source 1..17: mol_type = other DNA
ttcgggggtggggggtt

SEQ ID NO: 110934 - DNA, 17 bp, synthetic construct
  source 1..17: mol_type = other DNA
tcgggggtggggggttc

SEQ ID NO: 110935 - DNA, 17 bp, synthetic construct
  source 1..17: mol_type = other DNA
cgggggtggggggttcc

SEQ ID NO: 110936 - DNA, 17 bp, synthetic construct
  source 1..17: mol_type = other DNA
gggggtggggggttcct

SEQ ID NO: 110937 - DNA, 17 bp, synthetic construct
  source 1..17: mol_type = other DNA
ggggtggggggttcctg

SEQ ID NO: 110938 - DNA, 17 bp, synthetic construct
  source 1..17: mol_type = other DNA
gggtggggggttcctga

SEQ ID NO: 110939 - DNA, 17 bp, synthetic construct
  source 1..17: mol_type = other DNA
ggtggggggttcctgac

SEQ ID NO: 110940 - DNA, 17 bp, synthetic construct
  source 1..17: mol_type = other DNA
gtggggggttcctgacc

SEQ ID NO: 110941 - DNA, 17 bp, synthetic construct
  source 1..17: mol_type = other DNA
tggggggttcctgacca

SEQ ID NO: 110942 - DNA, 17 bp, synthetic construct
  source 1..17: mol_type = other DNA
ggggggttcctgaccag

SEQ ID NO: 110943 - DNA, 17 bp, synthetic construct
  source 1..17: mol_type = other DNA
gggggttcctgaccagg

SEQ ID NO: 110944 - DNA, 17 bp, synthetic construct
  source 1..17: mol_type = other DNA
ggggttcctgaccaggc

SEQ ID NO: 110945 - DNA, 17 bp, synthetic construct
  source 1..17: mol_type = other DNA
gggttcctgaccaggct

SEQ ID NO: 110946 - DNA, 17 bp, synthetic construct
  source 1..17: mol_type = other DNA
ggttcctgaccaggctg

SEQ ID NO: 110947 - DNA, 17 bp, synthetic construct
  source 1..17: mol_type = other DNA
gttcctgaccaggctgg

SEQ ID NO: 110948 - DNA, 17 bp, synthetic construct
  source 1..17: mol_type = other DNA
ttcctgaccaggctgga

SEQ ID NO: 110949 - DNA, 17 bp, synthetic construct
  source 1..17: mol_type = other DNA
tcctgaccaggctggag

SEQ ID NO: 110950 - DNA, 17 bp, synthetic construct
  source 1..17: mol_type = other DNA
cctgaccaggctggagg

SEQ ID NO: 110951 - DNA, 17 bp, synthetic construct
  source 1..17: mol_type = other DNA
ctgaccaggctggaggg

SEQ ID NO: 110952 - DNA, 17 bp, synthetic construct
  source 1..17: mol_type = other DNA
tgaccaggctggagggg

SEQ ID NO: 110953 - DNA, 17 bp, synthetic construct
  source 1..17: mol_type = other DNA
gaccaggctggaggggc

SEQ ID NO: 110954 - DNA, 17 bp, synthetic construct
  source 1..17: mol_type = other DNA
accaggctggaggggct

SEQ ID NO: 110955 - DNA, 17 bp, synthetic construct
  source 1..17: mol_type = other DNA
ccaggctggaggggctg

SEQ ID NO: 110956 - DNA, 17 bp, synthetic construct
  source 1..17: mol_type = other DNA
caggctggaggggctgg

SEQ ID NO: 110957 - DNA, 17 bp, synthetic construct
  source 1..17: mol_type = other DNA
aggctggaggggctgga

SEQ ID NO: 110958 - DNA, 17 bp, synthetic construct
  source 1..17: mol_type = other DNA
ggctggaggggctggaa

SEQ ID NO: 110959 - DNA, 17 bp, synthetic construct
  source 1..17: mol_type = other DNA
gctggaggggctggaat

SEQ ID NO: 110960 - DNA, 17 bp, synthetic construct
  source 1..17: mol_type = other DNA
ctggaggggctggaatt

SEQ ID NO: 110961 - DNA, 17 bp, synthetic construct
  source 1..17: mol_type = other DNA
tggaggggctggaattt

SEQ ID NO: 110962 - DNA, 17 bp, synthetic construct
  source 1..17: mol_type = other DNA
ggaggggctggaatttg

SEQ ID NO: 110963 - DNA, 17 bp, synthetic construct
  source 1..17: mol_type = other DNA
gaggggctggaatttgg

SEQ ID NO: 110964 - DNA, 17 bp, synthetic construct
  source 1..17: mol_type = other DNA
aggggctggaatttggg

SEQ ID NO: 110965 - DNA, 17 bp, synthetic construct
  source 1..17: mol_type = other DNA
ggggctggaatttgggc

SEQ ID NO: 110966 - DNA, 17 bp, synthetic construct
  source 1..17: mol_type = other DNA
gggctggaatttgggct

SEQ ID NO: 110967 - DNA, 17 bp, synthetic construct
  source 1..17: mol_type = other DNA
ggctggaatttgggctg

SEQ ID NO: 110968 - DNA, 17 bp, synthetic construct
  source 1..17: mol_type = other DNA
gctggaatttgggctgg

SEQ ID NO: 110969 - DNA, 17 bp, synthetic construct
  source 1..17: mol_type = other DNA
ctggaatttgggctggg

SEQ ID NO: 110970 - DNA, 17 bp, synthetic construct
  source 1..17: mol_type = other DNA
tggaatttgggctgggg

SEQ ID NO: 110971 - DNA, 17 bp, synthetic construct
  source 1..17: mol_type = other DNA
ggaatttgggctggggc

SEQ ID NO: 110972 - DNA, 17 bp, synthetic construct
  source 1..17: mol_type = other DNA
gaatttgggctggggca

SEQ ID NO: 110973 - DNA, 17 bp, synthetic construct
  source 1..17: mol_type = other DNA
aatttgggctggggcag

SEQ ID NO: 110974 - DNA, 17 bp, synthetic construct
  source 1..17: mol_type = other DNA
atttgggctggggcagg

SEQ ID NO: 110975 - DNA, 17 bp, synthetic construct
  source 1..17: mol_type = other DNA
tttgggctggggcaggc

SEQ ID NO: 110976 - DNA, 17 bp, synthetic construct
  source 1..17: mol_type = other DNA
ttgggctggggcaggca

SEQ ID NO: 110977 - DNA, 17 bp, synthetic construct
  source 1..17: mol_type = other DNA
tgggctggggcaggcag

SEQ ID NO: 110978 - DNA, 17 bp, synthetic construct
  source 1..17: mol_type = other DNA
gggctggggcaggcaga

SEQ ID NO: 110979 - DNA, 17 bp, synthetic construct
  source 1..17: mol_type = other DNA
ggctggggcaggcagac

SEQ ID NO: 110980 - DNA, 17 bp, synthetic construct
  source 1..17: mol_type = other DNA
gctggggcaggcagacg

SEQ ID NO: 110981 - DNA, 17 bp, synthetic construct
  source 1..17: mol_type = other DNA
ctggggcaggcagacgc

SEQ ID NO: 110982 - DNA, 17 bp, synthetic construct
  source 1..17: mol_type = other DNA
tggggcaggcagacgcc

SEQ ID NO: 110983 - DNA, 17 bp, synthetic construct
  source 1..17: mol_type = other DNA
ggggcaggcagacgcct

SEQ ID NO: 110984 - DNA, 17 bp, synthetic construct
  source 1..17: mol_type = other DNA
gggcaggcagacgcctc

SEQ ID NO: 110985 - DNA, 17 bp, synthetic construct
  source 1..17: mol_type = other DNA
ggcaggcagacgcctct

SEQ ID NO: 110986 - DNA, 17 bp, synthetic construct
  source 1..17: mol_type = other DNA
gcaggcagacgcctctc

SEQ ID NO: 110987 - DNA, 17 bp, synthetic construct
  source 1..17: mol_type = other DNA
caggcagacgcctctcc

SEQ ID NO: 110988 - DNA, 17 bp, synthetic construct
  source 1..17: mol_type = other DNA
aggcagacgcctctcca

SEQ ID NO: 110989 - DNA, 17 bp, synthetic construct
  source 1..17: mol_type = other DNA
ggcagacgcctctccaa

SEQ ID NO: 110990 - DNA, 17 bp, synthetic construct
  source 1..17: mol_type = other DNA
gcagacgcctctccaag

SEQ ID NO: 110991 - DNA, 17 bp, synthetic construct
  source 1..17: mol_type = other DNA
cagacgcctctccaagc

SEQ ID NO: 110992 - DNA, 17 bp, synthetic construct
  source 1..17: mol_type = other DNA
agacgcctctccaagca

SEQ ID NO: 110993 - DNA, 17 bp, synthetic construct
  source 1..17: mol_type = other DNA
gacgcctctccaagcag

SEQ ID NO: 110994 - DNA, 17 bp, synthetic construct
  source 1..17: mol_type = other DNA
acgcctctccaagcagc

SEQ ID NO: 110995 - DNA, 17 bp, synthetic construct
  source 1..17: mol_type = other DNA
cgcctctccaagcagcc

SEQ ID NO: 110996 - DNA, 17 bp, synthetic construct
  source 1..17: mol_type = other DNA
gcctctccaagcagcca

SEQ ID NO: 110997 - DNA, 17 bp, synthetic construct
  source 1..17: mol_type = other DNA
cctctccaagcagccat

SEQ ID NO: 110998 - DNA, 17 bp, synthetic construct
  source 1..17: mol_type = other DNA
ctctccaagcagccatg

SEQ ID NO: 110999 - DNA, 17 bp, synthetic construct
  source 1..17: mol_type = other DNA
tctccaagcagccatgc

SEQ ID NO: 111000 - DNA, 17 bp, synthetic construct
  source 1..17: mol_type = other DNA
ctccaagcagccatgcg

SEQ ID NO: 111001 - DNA, 17 bp, synthetic construct
  source 1..17: mol_type = other DNA
tccaagcagccatgcgt

SEQ ID NO: 111002 - DNA, 17 bp, synthetic construct
  source 1..17: mol_type = other DNA
ccaagcagccatgcgtc

SEQ ID NO: 111003 - DNA, 17 bp, synthetic construct
  source 1..17: mol_type = other DNA
caagcagccatgcgtct

SEQ ID NO: 111004 - DNA, 17 bp, synthetic construct
  source 1..17: mol_type = other DNA
aagcagccatgcgtctg

SEQ ID NO: 111005 - DNA, 17 bp, synthetic construct
  source 1..17: mol_type = other DNA
agcagccatgcgtctga

SEQ ID NO: 111006 - DNA, 17 bp, synthetic construct
  source 1..17: mol_type = other DNA
gcagccatgcgtctgac

SEQ ID NO: 111007 - DNA, 17 bp, synthetic construct
  source 1..17: mol_type = other DNA
cagccatgcgtctgaca

SEQ ID NO: 111008 - DNA, 17 bp, synthetic construct
  source 1..17: mol_type = other DNA
agccatgcgtctgacag

SEQ ID NO: 111009 - DNA, 17 bp, synthetic construct
  source 1..17: mol_type = other DNA
gccatgcgtctgacaga

SEQ ID NO: 111010 - DNA, 17 bp, synthetic construct
  source 1..17: mol_type = other DNA
ccatgcgtctgacagag

SEQ ID NO: 111011 - DNA, 17 bp, synthetic construct
  source 1..17: mol_type = other DNA
catgcgtctgacagaga

SEQ ID NO: 111012 - DNA, 17 bp, synthetic construct
  source 1..17: mol_type = other DNA
atgcgtctgacagagac

SEQ ID NO: 111013 - DNA, 17 bp, synthetic construct
  source 1..17: mol_type = other DNA
tgcgtctgacagagacc

SEQ ID NO: 111014 - DNA, 17 bp, synthetic construct
  source 1..17: mol_type = other DNA
gcgtctgacagagaccc

SEQ ID NO: 111015 - DNA, 17 bp, synthetic construct
  source 1..17: mol_type = other DNA
cgtctgacagagaccct

SEQ ID NO: 111016 - DNA, 17 bp, synthetic construct
  source 1..17: mol_type = other DNA
gtctgacagagaccctc

SEQ ID NO: 111017 - DNA, 17 bp, synthetic construct
  source 1..17: mol_type = other DNA
tctgacagagaccctcc

SEQ ID NO: 111018 - DNA, 17 bp, synthetic construct
  source 1..17: mol_type = other DNA
ctgacagagaccctccc

SEQ ID NO: 111019 - DNA, 17 bp, synthetic construct
  source 1..17: mol_type = other DNA
tgacagagaccctccct

SEQ ID NO: 111020 - DNA, 17 bp, synthetic construct
  source 1..17: mol_type = other DNA
gacagagaccctccctg

SEQ ID NO: 111021 - DNA, 17 bp, synthetic construct
  source 1..17: mol_type = other DNA
acagagaccctccctgg

SEQ ID NO: 111022 - DNA, 17 bp, synthetic construct
  source 1..17: mol_type = other DNA
cagagaccctccctggg

SEQ ID NO: 111023 - DNA, 17 bp, synthetic construct
  source 1..17: mol_type = other DNA
agagaccctccctgggt

SEQ ID NO: 111024 - DNA, 17 bp, synthetic construct
  source 1..17: mol_type = other DNA
gagaccctccctgggtc

SEQ ID NO: 111025 - DNA, 17 bp, synthetic construct
  source 1..17: mol_type = other DNA
agaccctccctgggtcc

SEQ ID NO: 111026 - DNA, 17 bp, synthetic construct
  source 1..17: mol_type = other DNA
gaccctccctgggtccc

SEQ ID NO: 111027 - DNA, 17 bp, synthetic construct
  source 1..17: mol_type = other DNA
accctccctgggtcccc

SEQ ID NO: 111028 - DNA, 17 bp, synthetic construct
  source 1..17: mol_type = other DNA
ccctccctgggtcccct

SEQ ID NO: 111029 - DNA, 17 bp, synthetic construct
  source 1..17: mol_type = other DNA
cctccctgggtcccctg

SEQ ID NO: 111030 - DNA, 17 bp, synthetic construct
  source 1..17: mol_type = other DNA
ctccctgggtcccctgc

SEQ ID NO: 111031 - DNA, 17 bp, synthetic construct
  source 1..17: mol_type = other DNA
tccctgggtcccctgcc

SEQ ID NO: 111032 - DNA, 17 bp, synthetic construct
  source 1..17: mol_type = other DNA
ccctgggtcccctgccc

SEQ ID NO: 111033 - DNA, 17 bp, synthetic construct
  source 1..17: mol_type = other DNA
cctgggtcccctgccca

SEQ ID NO: 111034 - DNA, 17 bp, synthetic construct
  source 1..17: mol_type = other DNA
ctgggtcccctgcccag

SEQ ID NO: 111035 - DNA, 17 bp, synthetic construct
  source 1..17: mol_type = other DNA
tgggtcccctgcccagg

SEQ ID NO: 111036 - DNA, 17 bp, synthetic construct
  source 1..17: mol_type = other DNA
gggtcccctgcccagga

SEQ ID NO: 111037 - DNA, 17 bp, synthetic construct
  source 1..17: mol_type = other DNA
ggtcccctgcccaggac

SEQ ID NO: 111038 - DNA, 17 bp, synthetic construct
  source 1..17: mol_type = other DNA
gtcccctgcccaggaca

SEQ ID NO: 111039 - DNA, 17 bp, synthetic construct
  source 1..17: mol_type = other DNA
tcccctgcccaggacaa

SEQ ID NO: 111040 - DNA, 17 bp, synthetic construct
  source 1..17: mol_type = other DNA
cccctgcccaggacaat

SEQ ID NO: 111041 - DNA, 17 bp, synthetic construct
  source 1..17: mol_type = other DNA
ccctgcccaggacaata

SEQ ID NO: 111042 - DNA, 17 bp, synthetic construct
  source 1..17: mol_type = other DNA
cctgcccaggacaatac

SEQ ID NO: 111043 - DNA, 17 bp, synthetic construct
  source 1..17: mol_type = other DNA
ctgcccaggacaatacc

SEQ ID NO: 111044 - DNA, 17 bp, synthetic construct
  source 1..17: mol_type = other DNA
tgcccaggacaataccc

SEQ ID NO: 111045 - DNA, 17 bp, synthetic construct
  source 1..17: mol_type = other DNA
gcccaggacaataccca

SEQ ID NO: 111046 - DNA, 17 bp, synthetic construct
  source 1..17: mol_type = other DNA
cccaggacaatacccag

SEQ ID NO: 111047 - DNA, 17 bp, synthetic construct
  source 1..17: mol_type = other DNA
ccaggacaatacccagc

SEQ ID NO: 111048 - DNA, 17 bp, synthetic construct
  source 1..17: mol_type = other DNA
caggacaatacccagca

SEQ ID NO: 111049 - DNA, 17 bp, synthetic construct
  source 1..17: mol_type = other DNA
aggacaatacccagcac

SEQ ID NO: 111050 - DNA, 17 bp, synthetic construct
  source 1..17: mol_type = other DNA
ggacaatacccagcacc

SEQ ID NO: 111051 - DNA, 17 bp, synthetic construct
  source 1..17: mol_type = other DNA
gacaatacccagcaccc

SEQ ID NO: 111052 - DNA, 17 bp, synthetic construct
  source 1..17: mol_type = other DNA
acaatacccagcacccg

SEQ ID NO: 111053 - DNA, 17 bp, synthetic construct
  source 1..17: mol_type = other DNA
caatacccagcacccga

SEQ ID NO: 111054 - DNA, 17 bp, synthetic construct
  source 1..17: mol_type = other DNA
aatacccagcacccgag

SEQ ID NO: 111055 - DNA, 17 bp, synthetic construct
  source 1..17: mol_type = other DNA
atacccagcacccgagg

SEQ ID NO: 111056 - DNA, 17 bp, synthetic construct
  source 1..17: mol_type = other DNA
tacccagcacccgaggc

SEQ ID NO: 111057 - DNA, 17 bp, synthetic construct
  source 1..17: mol_type = other DNA
acccagcacccgaggcg

SEQ ID NO: 111058 - DNA, 17 bp, synthetic construct
  source 1..17: mol_type = other DNA
cccagcacccgaggcgg

SEQ ID NO: 111059 - DNA, 17 bp, synthetic construct
  source 1..17: mol_type = other DNA
ccagcacccgaggcgga

SEQ ID NO: 111060 - DNA, 17 bp, synthetic construct
  source 1..17: mol_type = other DNA
cagcacccgaggcggag

SEQ ID NO: 111061 - DNA, 17 bp, synthetic construct
  source 1..17: mol_type = other DNA
agcacccgaggcggagc

SEQ ID NO: 111062 - DNA, 17 bp, synthetic construct
  source 1..17: mol_type = other DNA
gcacccgaggcggagct

SEQ ID NO: 111063 - DNA, 17 bp, synthetic construct
  source 1..17: mol_type = other DNA
cacccgaggcggagctt

SEQ ID NO: 111064 - DNA, 17 bp, synthetic construct
  source 1..17: mol_type = other DNA
acccgaggcggagcttg

SEQ ID NO: 111065 - DNA, 17 bp, synthetic construct
  source 1..17: mol_type = other DNA
cccgaggcggagcttgg

SEQ ID NO: 111066 - DNA, 17 bp, synthetic construct
  source 1..17: mol_type = other DNA
ccgaggcggagcttggt

SEQ ID NO: 111067 - DNA, 17 bp, synthetic construct
  source 1..17: mol_type = other DNA
cgaggcggagcttggtg

SEQ ID NO: 111068 - DNA, 17 bp, synthetic construct
  source 1..17: mol_type = other DNA
gaggcggagcttggtgc

SEQ ID NO: 111069 - DNA, 17 bp, synthetic construct
  source 1..17: mol_type = other DNA
aggcggagcttggtgct

SEQ ID NO: 111070 - DNA, 17 bp, synthetic construct
  source 1..17: mol_type = other DNA
ggcggagcttggtgctc

SEQ ID NO: 111071 - DNA, 17 bp, synthetic construct
  source 1..17: mol_type = other DNA
gcggagcttggtgctcc

SEQ ID NO: 111072 - DNA, 17 bp, synthetic construct
  source 1..17: mol_type = other DNA
cggagcttggtgctcca

SEQ ID NO: 111073 - DNA, 17 bp, synthetic construct
  source 1..17: mol_type = other DNA
ggagcttggtgctccaa

SEQ ID NO: 111074 - DNA, 17 bp, synthetic construct
  source 1..17: mol_type = other DNA
gagcttggtgctccaaa

SEQ ID NO: 111075 - DNA, 17 bp, synthetic construct
  source 1..17: mol_type = other DNA
agcttggtgctccaaag

SEQ ID NO: 111076 - DNA, 17 bp, synthetic construct
  source 1..17: mol_type = other DNA
gcttggtgctccaaaga

SEQ ID NO: 111077 - DNA, 17 bp, synthetic construct
  source 1..17: mol_type = other DNA
cttggtgctccaaagaa

SEQ ID NO: 111078 - DNA, 17 bp, synthetic construct
  source 1..17: mol_type = other DNA
ttggtgctccaaagaag

SEQ ID NO: 111079 - DNA, 17 bp, synthetic construct
  source 1..17: mol_type = other DNA
tggtgctccaaagaaga

SEQ ID NO: 111080 - DNA, 17 bp, synthetic construct
  source 1..17: mol_type = other DNA
ggtgctccaaagaagag

SEQ ID NO: 111081 - DNA, 17 bp, synthetic construct
  source 1..17: mol_type = other DNA
gtgctccaaagaagagg

SEQ ID NO: 111082 - DNA, 17 bp, synthetic construct
  source 1..17: mol_type = other DNA
tgctccaaagaagagga

SEQ ID NO: 111083 - DNA, 17 bp, synthetic construct
  source 1..17: mol_type = other DNA
gctccaaagaagaggaa

SEQ ID NO: 111084 - DNA, 17 bp, synthetic construct
  source 1..17: mol_type = other DNA
ctccaaagaagaggaaa

SEQ ID NO: 111085 - DNA, 17 bp, synthetic construct
  source 1..17: mol_type = other DNA
tccaaagaagaggaaag

SEQ ID NO: 111086 - DNA, 17 bp, synthetic construct
  source 1..17: mol_type = other DNA
ccaaagaagaggaaagt

SEQ ID NO: 111087 - DNA, 17 bp, synthetic construct
  source 1..17: mol_type = other DNA
caaagaagaggaaagtg

SEQ ID NO: 111088 - DNA, 17 bp, synthetic construct
  source 1..17: mol_type = other DNA
aaagaagaggaaagtgc

SEQ ID NO: 111089 - DNA, 17 bp, synthetic construct
  source 1..17: mol_type = other DNA
aagaagaggaaagtgca

SEQ ID NO: 111090 - DNA, 17 bp, synthetic construct
  source 1..17: mol_type = other DNA
agaagaggaaagtgcag

SEQ ID NO: 111091 - DNA, 17 bp, synthetic construct
  source 1..17: mol_type = other DNA
gaagaggaaagtgcaga

SEQ ID NO: 111092 - DNA, 17 bp, synthetic construct
  source 1..17: mol_type = other DNA
aagaggaaagtgcagag

SEQ ID NO: 111093 - DNA, 17 bp, synthetic construct
  source 1..17: mol_type = other DNA
agaggaaagtgcagagc

SEQ ID NO: 111094 - DNA, 17 bp, synthetic construct
  source 1..17: mol_type = other DNA
gaggaaagtgcagagca

SEQ ID NO: 111095 - DNA, 17 bp, synthetic construct
  source 1..17: mol_type = other DNA
aggaaagtgcagagcag

SEQ ID NO: 111096 - DNA, 17 bp, synthetic construct
  source 1..17: mol_type = other DNA
ggaaagtgcagagcaga

SEQ ID NO: 111097 - DNA, 17 bp, synthetic construct
  source 1..17: mol_type = other DNA
gaaagtgcagagcagag

SEQ ID NO: 111098 - DNA, 17 bp, synthetic construct
  source 1..17: mol_type = other DNA
aaagtgcagagcagaga

SEQ ID NO: 111099 - DNA, 17 bp, synthetic construct
  source 1..17: mol_type = other DNA
aagtgcagagcagagag

SEQ ID NO: 111100 - DNA, 17 bp, synthetic construct
  source 1..17: mol_type = other DNA
agtgcagagcagagaga

SEQ ID NO: 111101 - DNA, 17 bp, synthetic construct
  source 1..17: mol_type = other DNA
gtgcagagcagagagac

SEQ ID NO: 111102 - DNA, 17 bp, synthetic construct
  source 1..17: mol_type = other DNA
tgcagagcagagagaca

SEQ ID NO: 111103 - DNA, 17 bp, synthetic construct
  source 1..17: mol_type = other DNA
gcagagcagagagacat

SEQ ID NO: 111104 - DNA, 17 bp, synthetic construct
  source 1..17: mol_type = other DNA
cagagcagagagacatg

SEQ ID NO: 111105 - DNA, 17 bp, synthetic construct
  source 1..17: mol_type = other DNA
agagcagagagacatgc

SEQ ID NO: 111106 - DNA, 17 bp, synthetic construct
  source 1..17: mol_type = other DNA
gagcagagagacatgca

SEQ ID NO: 111107 - DNA, 17 bp, synthetic construct
  source 1..17: mol_type = other DNA
agcagagagacatgcac

SEQ ID NO: 111108 - DNA, 17 bp, synthetic construct
  source 1..17: mol_type = other DNA
gcagagagacatgcaca

SEQ ID NO: 111109 - DNA, 17 bp, synthetic construct
  source 1..17: mol_type = other DNA
cagagagacatgcacac

SEQ ID NO: 111110 - DNA, 17 bp, synthetic construct
  source 1..17: mol_type = other DNA
agagagacatgcacaca

SEQ ID NO: 111111 - DNA, 17 bp, synthetic construct
  source 1..17: mol_type = other DNA
gagagacatgcacacag

SEQ ID NO: 111112 - DNA, 17 bp, synthetic construct
  source 1..17: mol_type = other DNA
agagacatgcacacaga

SEQ ID NO: 111113 - DNA, 17 bp, synthetic construct
  source 1..17: mol_type = other DNA
gagacatgcacacagaa

SEQ ID NO: 111114 - DNA, 17 bp, synthetic construct
  source 1..17: mol_type = other DNA
agacatgcacacagaag

SEQ ID NO: 111115 - DNA, 17 bp, synthetic construct
  source 1..17: mol_type = other DNA
gacatgcacacagaagc

SEQ ID NO: 111116 - DNA, 17 bp, synthetic construct
  source 1..17: mol_type = other DNA
acatgcacacagaagca

SEQ ID NO: 111117 - DNA, 17 bp, synthetic construct
  source 1..17: mol_type = other DNA
catgcacacagaagcac

SEQ ID NO: 111118 - DNA, 17 bp, synthetic construct
  source 1..17: mol_type = other DNA
atgcacacagaagcaca

SEQ ID NO: 111119 - DNA, 17 bp, synthetic construct
  source 1..17: mol_type = other DNA
tgcacacagaagcacac

SEQ ID NO: 111120 - DNA, 17 bp, synthetic construct
  source 1..17: mol_type = other DNA
gcacacagaagcacacg

SEQ ID NO: 111121 - DNA, 17 bp, synthetic construct
  source 1..17: mol_type = other DNA
cacacagaagcacacgc

SEQ ID NO: 111122 - DNA, 17 bp, synthetic construct
  source 1..17: mol_type = other DNA
acacagaagcacacgcg

SEQ ID NO: 111123 - DNA, 17 bp, synthetic construct
  source 1..17: mol_type = other DNA
cacagaagcacacgcgt

SEQ ID NO: 111124 - DNA, 17 bp, synthetic construct
  source 1..17: mol_type = other DNA
acagaagcacacgcgtg

SEQ ID NO: 111125 - DNA, 17 bp, synthetic construct
  source 1..17: mol_type = other DNA
cagaagcacacgcgtgg

SEQ ID NO: 111126 - DNA, 17 bp, synthetic construct
  source 1..17: mol_type = other DNA
agaagcacacgcgtgga

SEQ ID NO: 111127 - DNA, 17 bp, synthetic construct
  source 1..17: mol_type = other DNA
gaagcacacgcgtggac

SEQ ID NO: 111128 - DNA, 17 bp, synthetic construct
  source 1..17: mol_type = other DNA
aagcacacgcgtggaca

SEQ ID NO: 111129 - DNA, 17 bp, synthetic construct
  source 1..17: mol_type = other DNA
agcacacgcgtggacag

SEQ ID NO: 111130 - DNA, 17 bp, synthetic construct
  source 1..17: mol_type = other DNA
gcacacgcgtggacagg

SEQ ID NO: 111131 - DNA, 17 bp, synthetic construct
  source 1..17: mol_type = other DNA
cacacgcgtggacaggc

SEQ ID NO: 111132 - DNA, 17 bp, synthetic construct
  source 1..17: mol_type = other DNA
acacgcgtggacaggca

SEQ ID NO: 111133 - DNA, 17 bp, synthetic construct
  source 1..17: mol_type = other DNA
cacgcgtggacaggcac

SEQ ID NO: 111134 - DNA, 17 bp, synthetic construct
  source 1..17: mol_type = other DNA
acgcgtggacaggcaca

SEQ ID NO: 111135 - DNA, 17 bp, synthetic construct
  source 1..17: mol_type = other DNA
cgcgtggacaggcacat

SEQ ID NO: 111136 - DNA, 17 bp, synthetic construct
  source 1..17: mol_type = other DNA
gcgtggacaggcacatg

SEQ ID NO: 111137 - DNA, 17 bp, synthetic construct
  source 1..17: mol_type = other DNA
cgtggacaggcacatgc

SEQ ID NO: 111138 - DNA, 17 bp, synthetic construct
  source 1..17: mol_type = other DNA
gtggacaggcacatgcg

SEQ ID NO: 111139 - DNA, 17 bp, synthetic construct
  source 1..17: mol_type = other DNA
tggacaggcacatgcgt

SEQ ID NO: 111140 - DNA, 17 bp, synthetic construct
  source 1..17: mol_type = other DNA
ggacaggcacatgcgtg

SEQ ID NO: 111141 - DNA, 17 bp, synthetic construct
  source 1..17: mol_type = other DNA
gacaggcacatgcgtgc

SEQ ID NO: 111142 - DNA, 17 bp, synthetic construct
  source 1..17: mol_type = other DNA
acaggcacatgcgtgcc

SEQ ID NO: 111143 - DNA, 17 bp, synthetic construct
  source 1..17: mol_type = other DNA
caggcacatgcgtgccc

SEQ ID NO: 111144 - DNA, 17 bp, synthetic construct
  source 1..17: mol_type = other DNA
aggcacatgcgtgccca

SEQ ID NO: 111145 - DNA, 17 bp, synthetic construct
  source 1..17: mol_type = other DNA
ggcacatgcgtgcccac

SEQ ID NO: 111146 - DNA, 17 bp, synthetic construct
  source 1..17: mol_type = other DNA
gcacatgcgtgcccaca

SEQ ID NO: 111147 - DNA, 17 bp, synthetic construct
  source 1..17: mol_type = other DNA
cacatgcgtgcccacac

SEQ ID NO: 111148 - DNA, 17 bp, synthetic construct
  source 1..17: mol_type = other DNA
acatgcgtgcccacact

SEQ ID NO: 111149 - DNA, 17 bp, synthetic construct
  source 1..17: mol_type = other DNA
catgcgtgcccacactt

SEQ ID NO: 111150 - DNA, 17 bp, synthetic construct
  source 1..17: mol_type = other DNA
atgcgtgcccacactta

SEQ ID NO: 111151 - DNA, 17 bp, synthetic construct
  source 1..17: mol_type = other DNA
tgcgtgcccacacttac

SEQ ID NO: 111152 - DNA, 17 bp, synthetic construct
  source 1..17: mol_type = other DNA
gcgtgcccacacttaca

SEQ ID NO: 111153 - DNA, 17 bp, synthetic construct
  source 1..17: mol_type = other DNA
cgtgcccacacttacac

SEQ ID NO: 111154 - DNA, 17 bp, synthetic construct
  source 1..17: mol_type = other DNA
gtgcccacacttacact

SEQ ID NO: 111155 - DNA, 17 bp, synthetic construct
  source 1..17: mol_type = other DNA
tgcccacacttacactg

SEQ ID NO: 111156 - DNA, 17 bp, synthetic construct
  source 1..17: mol_type = other DNA
gcccacacttacactgg

SEQ ID NO: 111157 - DNA, 17 bp, synthetic construct
  source 1..17: mol_type = other DNA
cccacacttacactggc

SEQ ID NO: 111158 - DNA, 17 bp, synthetic construct
  source 1..17: mol_type = other DNA
ccacacttacactggca

SEQ ID NO: 111159 - DNA, 17 bp, synthetic construct
  source 1..17: mol_type = other DNA
cacacttacactggcac

SEQ ID NO: 111160 - DNA, 17 bp, synthetic construct
  source 1..17: mol_type = other DNA
acacttacactggcaca

SEQ ID NO: 111161 - DNA, 17 bp, synthetic construct
  source 1..17: mol_type = other DNA
cacttacactggcacac

SEQ ID NO: 111162 - DNA, 17 bp, synthetic construct
  source 1..17: mol_type = other DNA
acttacactggcacaca

SEQ ID NO: 111163 - DNA, 17 bp, synthetic construct
  source 1..17: mol_type = other DNA
cttacactggcacacac

SEQ ID NO: 111164 - DNA, 17 bp, synthetic construct
  source 1..17: mol_type = other DNA
ttacactggcacacaca

SEQ ID NO: 111165 - DNA, 17 bp, synthetic construct
  source 1..17: mol_type = other DNA
tacactggcacacacat

SEQ ID NO: 111166 - DNA, 17 bp, synthetic construct
  source 1..17: mol_type = other DNA
acactggcacacacatg

SEQ ID NO: 111167 - DNA, 17 bp, synthetic construct
  source 1..17: mol_type = other DNA
cactggcacacacatgt

SEQ ID NO: 111168 - DNA, 17 bp, synthetic construct
  source 1..17: mol_type = other DNA
actggcacacacatgtg

SEQ ID NO: 111169 - DNA, 17 bp, synthetic construct
  source 1..17: mol_type = other DNA
ctggcacacacatgtgt

SEQ ID NO: 111170 - DNA, 17 bp, synthetic construct
  source 1..17: mol_type = other DNA
tggcacacacatgtgtg

SEQ ID NO: 111171 - DNA, 17 bp, synthetic construct
  source 1..17: mol_type = other DNA
ggcacacacatgtgtgc

SEQ ID NO: 111172 - DNA, 17 bp, synthetic construct
  source 1..17: mol_type = other DNA
gcacacacatgtgtgca

SEQ ID NO: 111173 - DNA, 17 bp, synthetic construct
  source 1..17: mol_type = other DNA
cacacacatgtgtgcac

SEQ ID NO: 111174 - DNA, 17 bp, synthetic construct
  source 1..17: mol_type = other DNA
acacacatgtgtgcaca

SEQ ID NO: 111175 - DNA, 17 bp, synthetic construct
  source 1..17: mol_type = other DNA
cacacatgtgtgcacac

SEQ ID NO: 111176 - DNA, 17 bp, synthetic construct
  source 1..17: mol_type = other DNA
acacatgtgtgcacaca

SEQ ID NO: 111177 - DNA, 17 bp, synthetic construct
  source 1..17: mol_type = other DNA
cacatgtgtgcacacac

SEQ ID NO: 111178 - DNA, 17 bp, synthetic construct
  source 1..17: mol_type = other DNA
acatgtgtgcacacaca

SEQ ID NO: 111179 - DNA, 17 bp, synthetic construct
  source 1..17: mol_type = other DNA
catgtgtgcacacacag

SEQ ID NO: 111180 - DNA, 17 bp, synthetic construct
  source 1..17: mol_type = other DNA
atgtgtgcacacacagg

SEQ ID NO: 111181 - DNA, 17 bp, synthetic construct
  source 1..17: mol_type = other DNA
tgtgtgcacacacaggc

SEQ ID NO: 111182 - DNA, 17 bp, synthetic construct
  source 1..17: mol_type = other DNA
gtgtgcacacacaggcc

SEQ ID NO: 111183 - DNA, 17 bp, synthetic construct
  source 1..17: mol_type = other DNA
tgtgcacacacaggcca

SEQ ID NO: 111184 - DNA, 17 bp, synthetic construct
  source 1..17: mol_type = other DNA
gtgcacacacaggccaa

SEQ ID NO: 111185 - DNA, 17 bp, synthetic construct
  source 1..17: mol_type = other DNA
tgcacacacaggccaaa

SEQ ID NO: 111186 - DNA, 17 bp, synthetic construct
  source 1..17: mol_type = other DNA
gcacacacaggccaaaa

SEQ ID NO: 111187 - DNA, 17 bp, synthetic construct
  source 1..17: mol_type = other DNA
cacacacaggccaaaac

SEQ ID NO: 111188 - DNA, 17 bp, synthetic construct
  source 1..17: mol_type = other DNA
acacacaggccaaaaca

SEQ ID NO: 111189 - DNA, 17 bp, synthetic construct
  source 1..17: mol_type = other DNA
cacacaggccaaaacac

SEQ ID NO: 111190 - DNA, 17 bp, synthetic construct
  source 1..17: mol_type = other DNA
acacaggccaaaacaca

SEQ ID NO: 111191 - DNA, 17 bp, synthetic construct
  source 1..17: mol_type = other DNA
cacaggccaaaacacaa

SEQ ID NO: 111192 - DNA, 17 bp, synthetic construct
  source 1..17: mol_type = other DNA
acaggccaaaacacaag

SEQ ID NO: 111193 - DNA, 17 bp, synthetic construct
  source 1..17: mol_type = other DNA
caggccaaaacacaagg

SEQ ID NO: 111194 - DNA, 17 bp, synthetic construct
  source 1..17: mol_type = other DNA
aggccaaaacacaaggg

SEQ ID NO: 111195 - DNA, 17 bp, synthetic construct
  source 1..17: mol_type = other DNA
ggccaaaacacaagggc

SEQ ID NO: 111196 - DNA, 17 bp, synthetic construct
  source 1..17: mol_type = other DNA
gccaaaacacaagggca

SEQ ID NO: 111197 - DNA, 17 bp, synthetic construct
  source 1..17: mol_type = other DNA
ccaaaacacaagggcag

SEQ ID NO: 111198 - DNA, 17 bp, synthetic construct
  source 1..17: mol_type = other DNA
caaaacacaagggcagc

SEQ ID NO: 111199 - DNA, 17 bp, synthetic construct
  source 1..17: mol_type = other DNA
aaaacacaagggcagca

SEQ ID NO: 111200 - DNA, 17 bp, synthetic construct
  source 1..17: mol_type = other DNA
aaacacaagggcagcag

SEQ ID NO: 111201 - DNA, 17 bp, synthetic construct
  source 1..17: mol_type = other DNA
aacacaagggcagcagt

SEQ ID NO: 111202 - DNA, 17 bp, synthetic construct
  source 1..17: mol_type = other DNA
acacaagggcagcagtg

SEQ ID NO: 111203 - DNA, 17 bp, synthetic construct
  source 1..17: mol_type = other DNA
cacaagggcagcagtgt

SEQ ID NO: 111204 - DNA, 17 bp, synthetic construct
  source 1..17: mol_type = other DNA
acaagggcagcagtgtt

SEQ ID NO: 111205 - DNA, 17 bp, synthetic construct
  source 1..17: mol_type = other DNA
caagggcagcagtgttt

SEQ ID NO: 111206 - DNA, 17 bp, synthetic construct
  source 1..17: mol_type = other DNA
aagggcagcagtgtttg

SEQ ID NO: 111207 - DNA, 17 bp, synthetic construct
  source 1..17: mol_type = other DNA
agggcagcagtgtttgt

SEQ ID NO: 111208 - DNA, 17 bp, synthetic construct
  source 1..17: mol_type = other DNA
gggcagcagtgtttgtg

SEQ ID NO: 111209 - DNA, 17 bp, synthetic construct
  source 1..17: mol_type = other DNA
ggcagcagtgtttgtgg

SEQ ID NO: 111210 - DNA, 17 bp, synthetic construct
  source 1..17: mol_type = other DNA
gcagcagtgtttgtggg

SEQ ID NO: 111211 - DNA, 17 bp, synthetic construct
  source 1..17: mol_type = other DNA
cagcagtgtttgtgggg

SEQ ID NO: 111212 - DNA, 17 bp, synthetic construct
  source 1..17: mol_type = other DNA
agcagtgtttgtggggc

SEQ ID NO: 111213 - DNA, 17 bp, synthetic construct
  source 1..17: mol_type = other DNA
gcagtgtttgtggggca

SEQ ID NO: 111214 - DNA, 17 bp, synthetic construct
  source 1..17: mol_type = other DNA
cagtgtttgtggggcag

SEQ ID NO: 111215 - DNA, 17 bp, synthetic construct
  source 1..17: mol_type = other DNA
agtgtttgtggggcaga

SEQ ID NO: 111216 - DNA, 17 bp, synthetic construct
  source 1..17: mol_type = other DNA
gtgtttgtggggcagac

SEQ ID NO: 111217 - DNA, 17 bp, synthetic construct
  source 1..17: mol_type = other DNA
tgtttgtggggcagaca

SEQ ID NO: 111218 - DNA, 17 bp, synthetic construct
  source 1..17: mol_type = other DNA
gtttgtggggcagacag

SEQ ID NO: 111219 - DNA, 17 bp, synthetic construct
  source 1..17: mol_type = other DNA
tttgtggggcagacagg

SEQ ID NO: 111220 - DNA, 17 bp, synthetic construct
  source 1..17: mol_type = other DNA
ttgtggggcagacaggg

SEQ ID NO: 111221 - DNA, 17 bp, synthetic construct
  source 1..17: mol_type = other DNA
tgtggggcagacagggc

SEQ ID NO: 111222 - DNA, 17 bp, synthetic construct
  source 1..17: mol_type = other DNA
gtggggcagacagggcc

SEQ ID NO: 111223 - DNA, 17 bp, synthetic construct
  source 1..17: mol_type = other DNA
tggggcagacagggcca

SEQ ID NO: 111224 - DNA, 17 bp, synthetic construct
  source 1..17: mol_type = other DNA
ggggcagacagggccaa

SEQ ID NO: 111225 - DNA, 17 bp, synthetic construct
  source 1..17: mol_type = other DNA
gggcagacagggccaag

SEQ ID NO: 111226 - DNA, 17 bp, synthetic construct
  source 1..17: mol_type = other DNA
ggcagacagggccaagg

SEQ ID NO: 111227 - DNA, 17 bp, synthetic construct
  source 1..17: mol_type = other DNA
gcagacagggccaaggg

SEQ ID NO: 111228 - DNA, 17 bp, synthetic construct
  source 1..17: mol_type = other DNA
cagacagggccaagggt

SEQ ID NO: 111229 - DNA, 17 bp, synthetic construct
  source 1..17: mol_type = other DNA
agacagggccaagggta

SEQ ID NO: 111230 - DNA, 17 bp, synthetic construct
  source 1..17: mol_type = other DNA
gacagggccaagggtaa

SEQ ID NO: 111231 - DNA, 17 bp, synthetic construct
  source 1..17: mol_type = other DNA
acagggccaagggtaaa

SEQ ID NO: 111232 - DNA, 17 bp, synthetic construct
  source 1..17: mol_type = other DNA
cagggccaagggtaaag

SEQ ID NO: 111233 - DNA, 17 bp, synthetic construct
  source 1..17: mol_type = other DNA
agggccaagggtaaagg

SEQ ID NO: 111234 - DNA, 17 bp, synthetic construct
  source 1..17: mol_type = other DNA
gggccaagggtaaaggg

SEQ ID NO: 111235 - DNA, 17 bp, synthetic construct
  source 1..17: mol_type = other DNA
ggccaagggtaaagggg

SEQ ID NO: 111236 - DNA, 17 bp, synthetic construct
  source 1..17: mol_type = other DNA
gccaagggtaaaggggc

SEQ ID NO: 111237 - DNA, 17 bp, synthetic construct
  source 1..17: mol_type = other DNA
ccaagggtaaaggggct

SEQ ID NO: 111238 - DNA, 17 bp, synthetic construct
  source 1..17: mol_type = other DNA
caagggtaaaggggctg

SEQ ID NO: 111239 - DNA, 17 bp, synthetic construct
  source 1..17: mol_type = other DNA
aagggtaaaggggctgc

SEQ ID NO: 111240 - DNA, 17 bp, synthetic construct
  source 1..17: mol_type = other DNA
agggtaaaggggctgcc

SEQ ID NO: 111241 - DNA, 17 bp, synthetic construct
  source 1..17: mol_type = other DNA
gggtaaaggggctgcct

SEQ ID NO: 111242 - DNA, 17 bp, synthetic construct
  source 1..17: mol_type = other DNA
ggtaaaggggctgcctt

SEQ ID NO: 111243 - DNA, 17 bp, synthetic construct
  source 1..17: mol_type = other DNA
gtaaaggggctgccttg

SEQ ID NO: 111244 - DNA, 17 bp, synthetic construct
  source 1..17: mol_type = other DNA
taaaggggctgccttgg

SEQ ID NO: 111245 - DNA, 17 bp, synthetic construct
  source 1..17: mol_type = other DNA
aaaggggctgccttggc

SEQ ID NO: 111246 - DNA, 17 bp, synthetic construct
  source 1..17: mol_type = other DNA
aaggggctgccttggcc

SEQ ID NO: 111247 - DNA, 17 bp, synthetic construct
  source 1..17: mol_type = other DNA
aggggctgccttggccc

SEQ ID NO: 111248 - DNA, 17 bp, synthetic construct
  source 1..17: mol_type = other DNA
ggggctgccttggcccc

SEQ ID NO: 111249 - DNA, 17 bp, synthetic construct
  source 1..17: mol_type = other DNA
gggctgccttggcccca

SEQ ID NO: 111250 - DNA, 17 bp, synthetic construct
  source 1..17: mol_type = other DNA
ggctgccttggccccag

SEQ ID NO: 111251 - DNA, 17 bp, synthetic construct
  source 1..17: mol_type = other DNA
gctgccttggccccagc

SEQ ID NO: 111252 - DNA, 17 bp, synthetic construct
  source 1..17: mol_type = other DNA
ctgccttggccccagcc

SEQ ID NO: 111253 - DNA, 17 bp, synthetic construct
  source 1..17: mol_type = other DNA
tgccttggccccagccc

SEQ ID NO: 111254 - DNA, 17 bp, synthetic construct
  source 1..17: mol_type = other DNA
gccttggccccagccca

SEQ ID NO: 111255 - DNA, 17 bp, synthetic construct
  source 1..17: mol_type = other DNA
ccttggccccagcccat

SEQ ID NO: 111256 - DNA, 17 bp, synthetic construct
  source 1..17: mol_type = other DNA
cttggccccagcccatc

SEQ ID NO: 111257 - DNA, 17 bp, synthetic construct
  source 1..17: mol_type = other DNA
ttggccccagcccatca

SEQ ID NO: 111258 - DNA, 17 bp, synthetic construct
  source 1..17: mol_type = other DNA
tggccccagcccatcag

SEQ ID NO: 111259 - DNA, 17 bp, synthetic construct
  source 1..17: mol_type = other DNA
ggccccagcccatcagt

SEQ ID NO: 111260 - DNA, 17 bp, synthetic construct
  source 1..17: mol_type = other DNA
gccccagcccatcagtt

SEQ ID NO: 111261 - DNA, 17 bp, synthetic construct
  source 1..17: mol_type = other DNA
ccccagcccatcagttt

SEQ ID NO: 111262 - DNA, 17 bp, synthetic construct
  source 1..17: mol_type = other DNA
cccagcccatcagtttt

SEQ ID NO: 111263 - DNA, 17 bp, synthetic construct
  source 1..17: mol_type = other DNA
ccagcccatcagttttg

SEQ ID NO: 111264 - DNA, 17 bp, synthetic construct
  source 1..17: mol_type = other DNA
cagcccatcagttttgg

SEQ ID NO: 111265 - DNA, 17 bp, synthetic construct
  source 1..17: mol_type = other DNA
agcccatcagttttggg

SEQ ID NO: 111266 - DNA, 17 bp, synthetic construct
  source 1..17: mol_type = other DNA
gcccatcagttttgggc

SEQ ID NO: 111267 - DNA, 17 bp, synthetic construct
  source 1..17: mol_type = other DNA
cccatcagttttgggct

SEQ ID NO: 111268 - DNA, 17 bp, synthetic construct
  source 1..17: mol_type = other DNA
ccatcagttttgggctc

SEQ ID NO: 111269 - DNA, 17 bp, synthetic construct
  source 1..17: mol_type = other DNA
catcagttttgggctcc

SEQ ID NO: 111270 - DNA, 17 bp, synthetic construct
  source 1..17: mol_type = other DNA
atcagttttgggctccc

SEQ ID NO: 111271 - DNA, 17 bp, synthetic construct
  source 1..17: mol_type = other DNA
tcagttttgggctcccc

SEQ ID NO: 111272 - DNA, 17 bp, synthetic construct
  source 1..17: mol_type = other DNA
cagttttgggctcccct

SEQ ID NO: 111273 - DNA, 17 bp, synthetic construct
  source 1..17: mol_type = other DNA
agttttgggctcccctt

SEQ ID NO: 111274 - DNA, 17 bp, synthetic construct
  source 1..17: mol_type = other DNA
gttttgggctccccttc

SEQ ID NO: 111275 - DNA, 17 bp, synthetic construct
  source 1..17: mol_type = other DNA
ttttgggctccccttca

SEQ ID NO: 111276 - DNA, 17 bp, synthetic construct
  source 1..17: mol_type = other DNA
tttgggctccccttcaa

SEQ ID NO: 111277 - DNA, 17 bp, synthetic construct
  source 1..17: mol_type = other DNA
ttgggctccccttcaac

SEQ ID NO: 111278 - DNA, 17 bp, synthetic construct
  source 1..17: mol_type = other DNA
tgggctccccttcaact

SEQ ID NO: 111279 - DNA, 17 bp, synthetic construct
  source 1..17: mol_type = other DNA
gggctccccttcaactc

SEQ ID NO: 111280 - DNA, 17 bp, synthetic construct
  source 1..17: mol_type = other DNA
ggctccccttcaactct

SEQ ID NO: 111281 - DNA, 17 bp, synthetic construct
  source 1..17: mol_type = other DNA
gctccccttcaactctg

SEQ ID NO: 111282 - DNA, 17 bp, synthetic construct
  source 1..17: mol_type = other DNA
ctccccttcaactctgg

SEQ ID NO: 111283 - DNA, 17 bp, synthetic construct
  source 1..17: mol_type = other DNA
tccccttcaactctggt

SEQ ID NO: 111284 - DNA, 17 bp, synthetic construct
  source 1..17: mol_type = other DNA
ccccttcaactctggtg

SEQ ID NO: 111285 - DNA, 17 bp, synthetic construct
  source 1..17: mol_type = other DNA
cccttcaactctggtgg

SEQ ID NO: 111286 - DNA, 17 bp, synthetic construct
  source 1..17: mol_type = other DNA
ccttcaactctggtggc

SEQ ID NO: 111287 - DNA, 17 bp, synthetic construct
  source 1..17: mol_type = other DNA
cttcaactctggtggct

SEQ ID NO: 111288 - DNA, 17 bp, synthetic construct
  source 1..17: mol_type = other DNA
ttcaactctggtggctg

SEQ ID NO: 111289 - DNA, 17 bp, synthetic construct
  source 1..17: mol_type = other DNA
tcaactctggtggctgg

SEQ ID NO: 111290 - DNA, 17 bp, synthetic construct
  source 1..17: mol_type = other DNA
caactctggtggctggc

SEQ ID NO: 111291 - DNA, 17 bp, synthetic construct
  source 1..17: mol_type = other DNA
aactctggtggctggcg

SEQ ID NO: 111292 - DNA, 17 bp, synthetic construct
  source 1..17: mol_type = other DNA
actctggtggctggcga

SEQ ID NO: 111293 - DNA, 17 bp, synthetic construct
  source 1..17: mol_type = other DNA
ctctggtggctggcgag

SEQ ID NO: 111294 - DNA, 17 bp, synthetic construct
  source 1..17: mol_type = other DNA
tctggtggctggcgagg

SEQ ID NO: 111295 - DNA, 17 bp, synthetic construct
  source 1..17: mol_type = other DNA
ctggtggctggcgagga

SEQ ID NO: 111296 - DNA, 17 bp, synthetic construct
  source 1..17: mol_type = other DNA
tggtggctggcgaggag

SEQ ID NO: 111297 - DNA, 17 bp, synthetic construct
  source 1..17: mol_type = other DNA
ggtggctggcgaggagg

SEQ ID NO: 111298 - DNA, 17 bp, synthetic construct
  source 1..17: mol_type = other DNA
gtggctggcgaggaggg

SEQ ID NO: 111299 - DNA, 17 bp, synthetic construct
  source 1..17: mol_type = other DNA
tggctggcgaggagggt

SEQ ID NO: 111300 - DNA, 17 bp, synthetic construct
  source 1..17: mol_type = other DNA
ggctggcgaggagggtg

SEQ ID NO: 111301 - DNA, 17 bp, synthetic construct
  source 1..17: mol_type = other DNA
gctggcgaggagggtgg

SEQ ID NO: 111302 - DNA, 17 bp, synthetic construct
  source 1..17: mol_type = other DNA
ctggcgaggagggtggg

SEQ ID NO: 111303 - DNA, 17 bp, synthetic construct
  source 1..17: mol_type = other DNA
tggcgaggagggtgggc

SEQ ID NO: 111304 - DNA, 17 bp, synthetic construct
  source 1..17: mol_type = other DNA
ggcgaggagggtgggcc

SEQ ID NO: 111305 - DNA, 17 bp, synthetic construct
  source 1..17: mol_type = other DNA
gcgaggagggtgggccc

SEQ ID NO: 111306 - DNA, 17 bp, synthetic construct
  source 1..17: mol_type = other DNA
cgaggagggtgggcccc

SEQ ID NO: 111307 - DNA, 17 bp, synthetic construct
  source 1..17: mol_type = other DNA
gaggagggtgggccccg

SEQ ID NO: 111308 - DNA, 17 bp, synthetic construct
  source 1..17: mol_type = other DNA
aggagggtgggccccgg

SEQ ID NO: 111309 - DNA, 17 bp, synthetic construct
  source 1..17: mol_type = other DNA
ggagggtgggccccggg

SEQ ID NO: 111310 - DNA, 17 bp, synthetic construct
  source 1..17: mol_type = other DNA
gagggtgggccccgggg

SEQ ID NO: 111311 - DNA, 17 bp, synthetic construct
  source 1..17: mol_type = other DNA
agggtgggccccgggga

SEQ ID NO: 111312 - DNA, 17 bp, synthetic construct
  source 1..17: mol_type = other DNA
gggtgggccccggggag

SEQ ID NO: 111313 - DNA, 17 bp, synthetic construct
  source 1..17: mol_type = other DNA
ggtgggccccggggagg

SEQ ID NO: 111314 - DNA, 17 bp, synthetic construct
  source 1..17: mol_type = other DNA
gtgggccccggggaggg

SEQ ID NO: 111315 - DNA, 17 bp, synthetic construct
  source 1..17: mol_type = other DNA
tgggccccggggagggt

SEQ ID NO: 111316 - DNA, 17 bp, synthetic construct
  source 1..17: mol_type = other DNA
gggccccggggagggtg

SEQ ID NO: 111317 - DNA, 17 bp, synthetic construct
  source 1..17: mol_type = other DNA
ggccccggggagggtgt

SEQ ID NO: 111318 - DNA, 17 bp, synthetic construct
  source 1..17: mol_type = other DNA
gccccggggagggtgtc

SEQ ID NO: 111319 - DNA, 17 bp, synthetic construct
  source 1..17: mol_type = other DNA
ccccggggagggtgtct

SEQ ID NO: 111320 - DNA, 17 bp, synthetic construct
  source 1..17: mol_type = other DNA
cccggggagggtgtctc

SEQ ID NO: 111321 - DNA, 17 bp, synthetic construct
  source 1..17: mol_type = other DNA
ccggggagggtgtctct

SEQ ID NO: 111322 - DNA, 17 bp, synthetic construct
  source 1..17: mol_type = other DNA
cggggagggtgtctctg

SEQ ID NO: 111323 - DNA, 17 bp, synthetic construct
  source 1..17: mol_type = other DNA
ggggagggtgtctctgc

SEQ ID NO: 111324 - DNA, 17 bp, synthetic construct
  source 1..17: mol_type = other DNA
gggagggtgtctctgct

SEQ ID NO: 111325 - DNA, 17 bp, synthetic construct
  source 1..17: mol_type = other DNA
ggagggtgtctctgctt

SEQ ID NO: 111326 - DNA, 17 bp, synthetic construct
  source 1..17: mol_type = other DNA
gagggtgtctctgcttc

SEQ ID NO: 111327 - DNA, 17 bp, synthetic construct
  source 1..17: mol_type = other DNA
agggtgtctctgcttcc

SEQ ID NO: 111328 - DNA, 17 bp, synthetic construct
  source 1..17: mol_type = other DNA
gggtgtctctgcttccc

SEQ ID NO: 111329 - DNA, 17 bp, synthetic construct
  source 1..17: mol_type = other DNA
ggtgtctctgcttcccc

SEQ ID NO: 111330 - DNA, 17 bp, synthetic construct
  source 1..17: mol_type = other DNA
gtgtctctgcttcccct

SEQ ID NO: 111331 - DNA, 17 bp, synthetic construct
  source 1..17: mol_type = other DNA
tgtctctgcttcccctt

SEQ ID NO: 111332 - DNA, 17 bp, synthetic construct
  source 1..17: mol_type = other DNA
gtctctgcttccccttc

SEQ ID NO: 111333 - DNA, 17 bp, synthetic construct
  source 1..17: mol_type = other DNA
tctctgcttccccttcc

SEQ ID NO: 111334 - DNA, 17 bp, synthetic construct
  source 1..17: mol_type = other DNA
ctctgcttccccttcct

SEQ ID NO: 111335 - DNA, 17 bp, synthetic construct
  source 1..17: mol_type = other DNA
tctgcttccccttcctg

SEQ ID NO: 111336 - DNA, 17 bp, synthetic construct
  source 1..17: mol_type = other DNA
ctgcttccccttcctgg

SEQ ID NO: 111337 - DNA, 17 bp, synthetic construct
  source 1..17: mol_type = other DNA
tgcttccccttcctggc

SEQ ID NO: 111338 - DNA, 17 bp, synthetic construct
  source 1..17: mol_type = other DNA
gcttccccttcctggcc

SEQ ID NO: 111339 - DNA, 17 bp, synthetic construct
  source 1..17: mol_type = other DNA
cttccccttcctggcca

SEQ ID NO: 111340 - DNA, 17 bp, synthetic construct
  source 1..17: mol_type = other DNA
ttccccttcctggccac

SEQ ID NO: 111341 - DNA, 17 bp, synthetic construct
  source 1..17: mol_type = other DNA
tccccttcctggccacg

SEQ ID NO: 111342 - DNA, 17 bp, synthetic construct
  source 1..17: mol_type = other DNA
ccccttcctggccacgt

SEQ ID NO: 111343 - DNA, 17 bp, synthetic construct
  source 1..17: mol_type = other DNA
cccttcctggccacgtt

SEQ ID NO: 111344 - DNA, 17 bp, synthetic construct
  source 1..17: mol_type = other DNA
ccttcctggccacgttc

SEQ ID NO: 111345 - DNA, 17 bp, synthetic construct
  source 1..17: mol_type = other DNA
cttcctggccacgttcc

SEQ ID NO: 111346 - DNA, 17 bp, synthetic construct
  source 1..17: mol_type = other DNA
ttcctggccacgttcct

SEQ ID NO: 111347 - DNA, 17 bp, synthetic construct
  source 1..17: mol_type = other DNA
tcctggccacgttcctg

SEQ ID NO: 111348 - DNA, 17 bp, synthetic construct
  source 1..17: mol_type = other DNA
cctggccacgttcctgg

SEQ ID NO: 111349 - DNA, 17 bp, synthetic construct
  source 1..17: mol_type = other DNA
ctggccacgttcctggg

SEQ ID NO: 111350 - DNA, 17 bp, synthetic construct
  source 1..17: mol_type = other DNA
tggccacgttcctgggg

SEQ ID NO: 111351 - DNA, 17 bp, synthetic construct
  source 1..17: mol_type = other DNA
ggccacgttcctggggt

SEQ ID NO: 111352 - DNA, 17 bp, synthetic construct
  source 1..17: mol_type = other DNA
gccacgttcctggggtg

SEQ ID NO: 111353 - DNA, 17 bp, synthetic construct
  source 1..17: mol_type = other DNA
ccacgttcctggggtga

SEQ ID NO: 111354 - DNA, 17 bp, synthetic construct
  source 1..17: mol_type = other DNA
cacgttcctggggtgac

SEQ ID NO: 111355 - DNA, 17 bp, synthetic construct
  source 1..17: mol_type = other DNA
acgttcctggggtgacc

SEQ ID NO: 111356 - DNA, 17 bp, synthetic construct
  source 1..17: mol_type = other DNA
cgttcctggggtgacca

SEQ ID NO: 111357 - DNA, 17 bp, synthetic construct
  source 1..17: mol_type = other DNA
gttcctggggtgaccag

SEQ ID NO: 111358 - DNA, 17 bp, synthetic construct
  source 1..17: mol_type = other DNA
ttcctggggtgaccagc

SEQ ID NO: 111359 - DNA, 17 bp, synthetic construct
  source 1..17: mol_type = other DNA
tcctggggtgaccagcc

SEQ ID NO: 111360 - DNA, 17 bp, synthetic construct
  source 1..17: mol_type = other DNA
cctggggtgaccagcct

SEQ ID NO: 111361 - DNA, 17 bp, synthetic construct
  source 1..17: mol_type = other DNA
ctggggtgaccagcctt

SEQ ID NO: 111362 - DNA, 17 bp, synthetic construct
  source 1..17: mol_type = other DNA
tggggtgaccagccttc

SEQ ID NO: 111363 - DNA, 17 bp, synthetic construct
  source 1..17: mol_type = other DNA
ggggtgaccagccttca

SEQ ID NO: 111364 - DNA, 17 bp, synthetic construct
  source 1..17: mol_type = other DNA
gggtgaccagccttcac

SEQ ID NO: 111365 - DNA, 17 bp, synthetic construct
  source 1..17: mol_type = other DNA
ggtgaccagccttcacc

SEQ ID NO: 111366 - DNA, 17 bp, synthetic construct
  source 1..17: mol_type = other DNA
gtgaccagccttcaccc

SEQ ID NO: 111367 - DNA, 17 bp, synthetic construct
  source 1..17: mol_type = other DNA
tgaccagccttcaccca

SEQ ID NO: 111368 - DNA, 17 bp, synthetic construct
  source 1..17: mol_type = other DNA
gaccagccttcacccac

SEQ ID NO: 111369 - DNA, 17 bp, synthetic construct
  source 1..17: mol_type = other DNA
accagccttcacccaca

SEQ ID NO: 111370 - DNA, 17 bp, synthetic construct
  source 1..17: mol_type = other DNA
ccagccttcacccacag

SEQ ID NO: 111371 - DNA, 17 bp, synthetic construct
  source 1..17: mol_type = other DNA
cagccttcacccacagg

SEQ ID NO: 111372 - DNA, 17 bp, synthetic construct
  source 1..17: mol_type = other DNA
agccttcacccacaggt

SEQ ID NO: 111373 - DNA, 17 bp, synthetic construct
  source 1..17: mol_type = other DNA
gccttcacccacaggtg

SEQ ID NO: 111374 - DNA, 17 bp, synthetic construct
  source 1..17: mol_type = other DNA
ccttcacccacaggtgc

SEQ ID NO: 111375 - DNA, 17 bp, synthetic construct
  source 1..17: mol_type = other DNA
cttcacccacaggtgcc

SEQ ID NO: 111376 - DNA, 17 bp, synthetic construct
  source 1..17: mol_type = other DNA
ttcacccacaggtgccc

SEQ ID NO: 111377 - DNA, 17 bp, synthetic construct
  source 1..17: mol_type = other DNA
tcacccacaggtgcccc

SEQ ID NO: 111378 - DNA, 17 bp, synthetic construct
  source 1..17: mol_type = other DNA
cacccacaggtgccccg

SEQ ID NO: 111379 - DNA, 17 bp, synthetic construct
  source 1..17: mol_type = other DNA
acccacaggtgccccga

SEQ ID NO: 111380 - DNA, 17 bp, synthetic construct
  source 1..17: mol_type = other DNA
cccacaggtgccccgac

SEQ ID NO: 111381 - DNA, 17 bp, synthetic construct
  source 1..17: mol_type = other DNA
ccacaggtgccccgacg

SEQ ID NO: 111382 - DNA, 17 bp, synthetic construct
  source 1..17: mol_type = other DNA
cacaggtgccccgacgt

SEQ ID NO: 111383 - DNA, 17 bp, synthetic construct
  source 1..17: mol_type = other DNA
acaggtgccccgacgtc

SEQ ID NO: 111384 - DNA, 17 bp, synthetic construct
  source 1..17: mol_type = other DNA
caggtgccccgacgtcc

SEQ ID NO: 111385 - DNA, 17 bp, synthetic construct
  source 1..17: mol_type = other DNA
aggtgccccgacgtcct

SEQ ID NO: 111386 - DNA, 17 bp, synthetic construct
  source 1..17: mol_type = other DNA
ggtgccccgacgtcctc

SEQ ID NO: 111387 - DNA, 17 bp, synthetic construct
  source 1..17: mol_type = other DNA
gtgccccgacgtcctcg

SEQ ID NO: 111388 - DNA, 17 bp, synthetic construct
  source 1..17: mol_type = other DNA
tgccccgacgtcctcgc

SEQ ID NO: 111389 - DNA, 17 bp, synthetic construct
  source 1..17: mol_type = other DNA
gccccgacgtcctcgcc

SEQ ID NO: 111390 - DNA, 17 bp, synthetic construct
  source 1..17: mol_type = other DNA
ccccgacgtcctcgccc

SEQ ID NO: 111391 - DNA, 17 bp, synthetic construct
  source 1..17: mol_type = other DNA
cccgacgtcctcgccca

SEQ ID NO: 111392 - DNA, 17 bp, synthetic construct
  source 1..17: mol_type = other DNA
ccgacgtcctcgcccac

SEQ ID NO: 111393 - DNA, 17 bp, synthetic construct
  source 1..17: mol_type = other DNA
cgacgtcctcgcccacc

SEQ ID NO: 111394 - DNA, 17 bp, synthetic construct
  source 1..17: mol_type = other DNA
gacgtcctcgcccaccc

SEQ ID NO: 111395 - DNA, 17 bp, synthetic construct
  source 1..17: mol_type = other DNA
acgtcctcgcccacccg

SEQ ID NO: 111396 - DNA, 17 bp, synthetic construct
  source 1..17: mol_type = other DNA
cgtcctcgcccacccgg

SEQ ID NO: 111397 - DNA, 17 bp, synthetic construct
  source 1..17: mol_type = other DNA
gtcctcgcccacccggc

SEQ ID NO: 111398 - DNA, 17 bp, synthetic construct
  source 1..17: mol_type = other DNA
tcctcgcccacccggcg

SEQ ID NO: 111399 - DNA, 17 bp, synthetic construct
  source 1..17: mol_type = other DNA
cctcgcccacccggcgc

SEQ ID NO: 111400 - DNA, 17 bp, synthetic construct
  source 1..17: mol_type = other DNA
ctcgcccacccggcgcg

SEQ ID NO: 111401 - DNA, 17 bp, synthetic construct
  source 1..17: mol_type = other DNA
tcgcccacccggcgcgt

SEQ ID NO: 111402 - DNA, 17 bp, synthetic construct
  source 1..17: mol_type = other DNA
cgcccacccggcgcgtg

SEQ ID NO: 111403 - DNA, 17 bp, synthetic construct
  source 1..17: mol_type = other DNA
gcccacccggcgcgtga

SEQ ID NO: 111404 - DNA, 17 bp, synthetic construct
  source 1..17: mol_type = other DNA
cccacccggcgcgtgag

SEQ ID NO: 111405 - DNA, 17 bp, synthetic construct
  source 1..17: mol_type = other DNA
ccacccggcgcgtgagc

SEQ ID NO: 111406 - DNA, 17 bp, synthetic construct
  source 1..17: mol_type = other DNA
cacccggcgcgtgagct

SEQ ID NO: 111407 - DNA, 17 bp, synthetic construct
  source 1..17: mol_type = other DNA
acccggcgcgtgagctt

SEQ ID NO: 111408 - DNA, 17 bp, synthetic construct
  source 1..17: mol_type = other DNA
cccggcgcgtgagcttt

SEQ ID NO: 111409 - DNA, 17 bp, synthetic construct
  source 1..17: mol_type = other DNA
ccggcgcgtgagctttg

SEQ ID NO: 111410 - DNA, 17 bp, synthetic construct
  source 1..17: mol_type = other DNA
cggcgcgtgagctttgt

SEQ ID NO: 111411 - DNA, 17 bp, synthetic construct
  source 1..17: mol_type = other DNA
ggcgcgtgagctttgtt

SEQ ID NO: 111412 - DNA, 17 bp, synthetic construct
  source 1..17: mol_type = other DNA
gcgcgtgagctttgttc

SEQ ID NO: 111413 - DNA, 17 bp, synthetic construct
  source 1..17: mol_type = other DNA
cgcgtgagctttgttcc

SEQ ID NO: 111414 - DNA, 17 bp, synthetic construct
  source 1..17: mol_type = other DNA
gcgtgagctttgttcca

SEQ ID NO: 111415 - DNA, 17 bp, synthetic construct
  source 1..17: mol_type = other DNA
cgtgagctttgttccac

SEQ ID NO: 111416 - DNA, 17 bp, synthetic construct
  source 1..17: mol_type = other DNA
gtgagctttgttccacc

SEQ ID NO: 111417 - DNA, 17 bp, synthetic construct
  source 1..17: mol_type = other DNA
tgagctttgttccaccc

SEQ ID NO: 111418 - DNA, 17 bp, synthetic construct
  source 1..17: mol_type = other DNA
gagctttgttccacccg

SEQ ID NO: 111419 - DNA, 17 bp, synthetic construct
  source 1..17: mol_type = other DNA
agctttgttccacccgt

SEQ ID NO: 111420 - DNA, 17 bp, synthetic construct
  source 1..17: mol_type = other DNA
gctttgttccacccgtc

SEQ ID NO: 111421 - DNA, 17 bp, synthetic construct
  source 1..17: mol_type = other DNA
ctttgttccacccgtca

SEQ ID NO: 111422 - DNA, 17 bp, synthetic construct
  source 1..17: mol_type = other DNA
tttgttccacccgtcac

SEQ ID NO: 111423 - DNA, 17 bp, synthetic construct
  source 1..17: mol_type = other DNA
ttgttccacccgtcact

SEQ ID NO: 111424 - DNA, 17 bp, synthetic construct
  source 1..17: mol_type = other DNA
tgttccacccgtcactg

SEQ ID NO: 111425 - DNA, 17 bp, synthetic construct
  source 1..17: mol_type = other DNA
gttccacccgtcactgt

SEQ ID NO: 111426 - DNA, 17 bp, synthetic construct
  source 1..17: mol_type = other DNA
ttccacccgtcactgtc

SEQ ID NO: 111427 - DNA, 17 bp, synthetic construct
  source 1..17: mol_type = other DNA
tccacccgtcactgtct

SEQ ID NO: 111428 - DNA, 17 bp, synthetic construct
  source 1..17: mol_type = other DNA
ccacccgtcactgtctt

SEQ ID NO: 111429 - DNA, 17 bp, synthetic construct
  source 1..17: mol_type = other DNA
cacccgtcactgtcttc

SEQ ID NO: 111430 - DNA, 17 bp, synthetic construct
  source 1..17: mol_type = other DNA
acccgtcactgtcttcc

SEQ ID NO: 111431 - DNA, 17 bp, synthetic construct
  source 1..17: mol_type = other DNA
cccgtcactgtcttccc

SEQ ID NO: 111432 - DNA, 17 bp, synthetic construct
  source 1..17: mol_type = other DNA
ccgtcactgtcttcccc

SEQ ID NO: 111433 - DNA, 17 bp, synthetic construct
  source 1..17: mol_type = other DNA
cgtcactgtcttcccca

SEQ ID NO: 111434 - DNA, 17 bp, synthetic construct
  source 1..17: mol_type = other DNA
gtcactgtcttccccag

SEQ ID NO: 111435 - DNA, 17 bp, synthetic construct
  source 1..17: mol_type = other DNA
tcactgtcttccccagc

SEQ ID NO: 111436 - DNA, 17 bp, synthetic construct
  source 1..17: mol_type = other DNA
cactgtcttccccagcc

SEQ ID NO: 111437 - DNA, 17 bp, synthetic construct
  source 1..17: mol_type = other DNA
actgtcttccccagcct

SEQ ID NO: 111438 - DNA, 17 bp, synthetic construct
  source 1..17: mol_type = other DNA
ctgtcttccccagcctg

SEQ ID NO: 111439 - DNA, 17 bp, synthetic construct
  source 1..17: mol_type = other DNA
tgtcttccccagcctga

SEQ ID NO: 111440 - DNA, 17 bp, synthetic construct
  source 1..17: mol_type = other DNA
gtcttccccagcctgag

SEQ ID NO: 111441 - DNA, 17 bp, synthetic construct
  source 1..17: mol_type = other DNA
tcttccccagcctgagc

SEQ ID NO: 111442 - DNA, 17 bp, synthetic construct
  source 1..17: mol_type = other DNA
cttccccagcctgagcc

SEQ ID NO: 111443 - DNA, 17 bp, synthetic construct
  source 1..17: mol_type = other DNA
ttccccagcctgagccg

SEQ ID NO: 111444 - DNA, 17 bp, synthetic construct
  source 1..17: mol_type = other DNA
tccccagcctgagccgt

SEQ ID NO: 111445 - DNA, 17 bp, synthetic construct
  source 1..17: mol_type = other DNA
ccccagcctgagccgta

SEQ ID NO: 111446 - DNA, 17 bp, synthetic construct
  source 1..17: mol_type = other DNA
cccagcctgagccgtaa

SEQ ID NO: 111447 - DNA, 17 bp, synthetic construct
  source 1..17: mol_type = other DNA
ccagcctgagccgtaag

SEQ ID NO: 111448 - DNA, 17 bp, synthetic construct
  source 1..17: mol_type = other DNA
cagcctgagccgtaagc

SEQ ID NO: 111449 - DNA, 17 bp, synthetic construct
  source 1..17: mol_type = other DNA
agcctgagccgtaagca

SEQ ID NO: 111450 - DNA, 17 bp, synthetic construct
  source 1..17: mol_type = other DNA
gcctgagccgtaagcag

SEQ ID NO: 111451 - DNA, 17 bp, synthetic construct
  source 1..17: mol_type = other DNA
cctgagccgtaagcaga

SEQ ID NO: 111452 - DNA, 17 bp, synthetic construct
  source 1..17: mol_type = other DNA
ctgagccgtaagcagat

SEQ ID NO: 111453 - DNA, 17 bp, synthetic construct
  source 1..17: mol_type = other DNA
tgagccgtaagcagatg

SEQ ID NO: 111454 - DNA, 17 bp, synthetic construct
  source 1..17: mol_type = other DNA
gagccgtaagcagatgc

SEQ ID NO: 111455 - DNA, 17 bp, synthetic construct
  source 1..17: mol_type = other DNA
agccgtaagcagatgct

SEQ ID NO: 111456 - DNA, 17 bp, synthetic construct
  source 1..17: mol_type = other DNA
gccgtaagcagatgctg

SEQ ID NO: 111457 - DNA, 17 bp, synthetic construct
  source 1..17: mol_type = other DNA
ccgtaagcagatgctgc

SEQ ID NO: 111458 - DNA, 17 bp, synthetic construct
  source 1..17: mol_type = other DNA
cgtaagcagatgctgcc

SEQ ID NO: 111459 - DNA, 17 bp, synthetic construct
  source 1..17: mol_type = other DNA
gtaagcagatgctgccc

SEQ ID NO: 111460 - DNA, 17 bp, synthetic construct
  source 1..17: mol_type = other DNA
taagcagatgctgcccc

SEQ ID NO: 111461 - DNA, 17 bp, synthetic construct
  source 1..17: mol_type = other DNA
aagcagatgctgcccct

SEQ ID NO: 111462 - DNA, 17 bp, synthetic construct
  source 1..17: mol_type = other DNA
agcagatgctgcccctg

SEQ ID NO: 111463 - DNA, 17 bp, synthetic construct
  source 1..17: mol_type = other DNA
gcagatgctgcccctgc

SEQ ID NO: 111464 - DNA, 17 bp, synthetic construct
  source 1..17: mol_type = other DNA
cagatgctgcccctgcc

SEQ ID NO: 111465 - DNA, 17 bp, synthetic construct
  source 1..17: mol_type = other DNA
agatgctgcccctgcca

SEQ ID NO: 111466 - DNA, 17 bp, synthetic construct
  source 1..17: mol_type = other DNA
gatgctgcccctgccag

SEQ ID NO: 111467 - DNA, 17 bp, synthetic construct
  source 1..17: mol_type = other DNA
atgctgcccctgccagc

SEQ ID NO: 111468 - DNA, 17 bp, synthetic construct
  source 1..17: mol_type = other DNA
tgctgcccctgccagcc

SEQ ID NO: 111469 - DNA, 17 bp, synthetic construct
  source 1..17: mol_type = other DNA
gctgcccctgccagccg

SEQ ID NO: 111470 - DNA, 17 bp, synthetic construct
  source 1..17: mol_type = other DNA
ctgcccctgccagccgg

SEQ ID NO: 111471 - DNA, 17 bp, synthetic construct
  source 1..17: mol_type = other DNA
tgcccctgccagccggg

SEQ ID NO: 111472 - DNA, 17 bp, synthetic construct
  source 1..17: mol_type = other DNA
gcccctgccagccggga

SEQ ID NO: 111473 - DNA, 17 bp, synthetic construct
  source 1..17: mol_type = other DNA
cccctgccagccgggaa

SEQ ID NO: 111474 - DNA, 17 bp, synthetic construct
  source 1..17: mol_type = other DNA
ccctgccagccgggaag

SEQ ID NO: 111475 - DNA, 17 bp, synthetic construct
  source 1..17: mol_type = other DNA
cctgccagccgggaagg

SEQ ID NO: 111476 - DNA, 17 bp, synthetic construct
  source 1..17: mol_type = other DNA
ctgccagccgggaaggg

SEQ ID NO: 111477 - DNA, 17 bp, synthetic construct
  source 1..17: mol_type = other DNA
tgccagccgggaagggg

SEQ ID NO: 111478 - DNA, 17 bp, synthetic construct
  source 1..17: mol_type = other DNA
gccagccgggaaggggg

SEQ ID NO: 111479 - DNA, 17 bp, synthetic construct
  source 1..17: mol_type = other DNA
ccagccgggaagggggt

SEQ ID NO: 111480 - DNA, 17 bp, synthetic construct
  source 1..17: mol_type = other DNA
cagccgggaagggggtg

SEQ ID NO: 111481 - DNA, 17 bp, synthetic construct
  source 1..17: mol_type = other DNA
agccgggaagggggtgt

SEQ ID NO: 111482 - DNA, 17 bp, synthetic construct
  source 1..17: mol_type = other DNA
gccgggaagggggtgtt

SEQ ID NO: 111483 - DNA, 17 bp, synthetic construct
  source 1..17: mol_type = other DNA
ccgggaagggggtgttt

SEQ ID NO: 111484 - DNA, 17 bp, synthetic construct
  source 1..17: mol_type = other DNA
cgggaagggggtgtttg

SEQ ID NO: 111485 - DNA, 17 bp, synthetic construct
  source 1..17: mol_type = other DNA
gggaagggggtgtttgc

SEQ ID NO: 111486 - DNA, 17 bp, synthetic construct
  source 1..17: mol_type = other DNA
ggaagggggtgtttgcc

SEQ ID NO: 111487 - DNA, 17 bp, synthetic construct
  source 1..17: mol_type = other DNA
gaagggggtgtttgcca

SEQ ID NO: 111488 - DNA, 17 bp, synthetic construct
  source 1..17: mol_type = other DNA
aagggggtgtttgccag

SEQ ID NO: 111489 - DNA, 17 bp, synthetic construct
  source 1..17: mol_type = other DNA
agggggtgtttgccagt

SEQ ID NO: 111490 - DNA, 17 bp, synthetic construct
  source 1..17: mol_type = other DNA
gggggtgtttgccagtc

SEQ ID NO: 111491 - DNA, 17 bp, synthetic construct
  source 1..17: mol_type = other DNA
ggggtgtttgccagtcc

SEQ ID NO: 111492 - DNA, 17 bp, synthetic construct
  source 1..17: mol_type = other DNA
gggtgtttgccagtccc

SEQ ID NO: 111493 - DNA, 17 bp, synthetic construct
  source 1..17: mol_type = other DNA
ggtgtttgccagtccca

SEQ ID NO: 111494 - DNA, 17 bp, synthetic construct
  source 1..17: mol_type = other DNA
gtgtttgccagtcccaa

SEQ ID NO: 111495 - DNA, 17 bp, synthetic construct
  source 1..17: mol_type = other DNA
tgtttgccagtcccaaa

SEQ ID NO: 111496 - DNA, 17 bp, synthetic construct
  source 1..17: mol_type = other DNA
gtttgccagtcccaaag

SEQ ID NO: 111497 - DNA, 17 bp, synthetic construct
  source 1..17: mol_type = other DNA
tttgccagtcccaaagg

SEQ ID NO: 111498 - DNA, 17 bp, synthetic construct
  source 1..17: mol_type = other DNA
ttgccagtcccaaaggt

SEQ ID NO: 111499 - DNA, 17 bp, synthetic construct
  source 1..17: mol_type = other DNA
tgccagtcccaaaggtg

SEQ ID NO: 111500 - DNA, 17 bp, synthetic construct
  source 1..17: mol_type = other DNA
gccagtcccaaaggtgg

SEQ ID NO: 111501 - DNA, 17 bp, synthetic construct
  source 1..17: mol_type = other DNA
ccagtcccaaaggtggg

SEQ ID NO: 111502 - DNA, 17 bp, synthetic construct
  source 1..17: mol_type = other DNA
cagtcccaaaggtgggg

SEQ ID NO: 111503 - DNA, 17 bp, synthetic construct
  source 1..17: mol_type = other DNA
agtcccaaaggtggggg

SEQ ID NO: 111504 - DNA, 17 bp, synthetic construct
  source 1..17: mol_type = other DNA
gtcccaaaggtgggggc

SEQ ID NO: 111505 - DNA, 17 bp, synthetic construct
  source 1..17: mol_type = other DNA
tcccaaaggtgggggcc

SEQ ID NO: 111506 - DNA, 17 bp, synthetic construct
  source 1..17: mol_type = other DNA
cccaaaggtgggggccc

SEQ ID NO: 111507 - DNA, 17 bp, synthetic construct
  source 1..17: mol_type = other DNA
ccaaaggtgggggccca

SEQ ID NO: 111508 - DNA, 17 bp, synthetic construct
  source 1..17: mol_type = other DNA
caaaggtgggggcccag

SEQ ID NO: 111509 - DNA, 17 bp, synthetic construct
  source 1..17: mol_type = other DNA
aaaggtgggggcccaga

SEQ ID NO: 111510 - DNA, 17 bp, synthetic construct
  source 1..17: mol_type = other DNA
aaggtgggggcccagat

SEQ ID NO: 111511 - DNA, 17 bp, synthetic construct
  source 1..17: mol_type = other DNA
aggtgggggcccagatc

SEQ ID NO: 111512 - DNA, 17 bp, synthetic construct
  source 1..17: mol_type = other DNA
ggtgggggcccagatct

SEQ ID NO: 111513 - DNA, 17 bp, synthetic construct
  source 1..17: mol_type = other DNA
gtgggggcccagatcta

SEQ ID NO: 111514 - DNA, 17 bp, synthetic construct
  source 1..17: mol_type = other DNA
tgggggcccagatctag

SEQ ID NO: 111515 - DNA, 17 bp, synthetic construct
  source 1..17: mol_type = other DNA
gggggcccagatctagg

SEQ ID NO: 111516 - DNA, 17 bp, synthetic construct
  source 1..17: mol_type = other DNA
ggggcccagatctaggg

SEQ ID NO: 111517 - DNA, 17 bp, synthetic construct
  source 1..17: mol_type = other DNA
gggcccagatctagggg

SEQ ID NO: 111518 - DNA, 17 bp, synthetic construct
  source 1..17: mol_type = other DNA
ggcccagatctaggggt

SEQ ID NO: 111519 - DNA, 17 bp, synthetic construct
  source 1..17: mol_type = other DNA
gcccagatctaggggtg

SEQ ID NO: 111520 - DNA, 17 bp, synthetic construct
  source 1..17: mol_type = other DNA
cccagatctaggggtgc

SEQ ID NO: 111521 - DNA, 17 bp, synthetic construct
  source 1..17: mol_type = other DNA
ccagatctaggggtgca

SEQ ID NO: 111522 - DNA, 17 bp, synthetic construct
  source 1..17: mol_type = other DNA
cagatctaggggtgcag

SEQ ID NO: 111523 - DNA, 17 bp, synthetic construct
  source 1..17: mol_type = other DNA
agatctaggggtgcagc

SEQ ID NO: 111524 - DNA, 17 bp, synthetic construct
  source 1..17: mol_type = other DNA
gatctaggggtgcagct

SEQ ID NO: 111525 - DNA, 17 bp, synthetic construct
  source 1..17: mol_type = other DNA
atctaggggtgcagctg

SEQ ID NO: 111526 - DNA, 17 bp, synthetic construct
  source 1..17: mol_type = other DNA
tctaggggtgcagctgc

SEQ ID NO: 111527 - DNA, 17 bp, synthetic construct
  source 1..17: mol_type = other DNA
ctaggggtgcagctgcc

SEQ ID NO: 111528 - DNA, 17 bp, synthetic construct
  source 1..17: mol_type = other DNA
taggggtgcagctgcca

SEQ ID NO: 111529 - DNA, 17 bp, synthetic construct
  source 1..17: mol_type = other DNA
aggggtgcagctgccac

SEQ ID NO: 111530 - DNA, 17 bp, synthetic construct
  source 1..17: mol_type = other DNA
ggggtgcagctgccacc

SEQ ID NO: 111531 - DNA, 17 bp, synthetic construct
  source 1..17: mol_type = other DNA
gggtgcagctgccacca

SEQ ID NO: 111532 - DNA, 17 bp, synthetic construct
  source 1..17: mol_type = other DNA
ggtgcagctgccaccag

SEQ ID NO: 111533 - DNA, 17 bp, synthetic construct
  source 1..17: mol_type = other DNA
gtgcagctgccaccagg

SEQ ID NO: 111534 - DNA, 17 bp, synthetic construct
  source 1..17: mol_type = other DNA
tgcagctgccaccaggt

SEQ ID NO: 111535 - DNA, 17 bp, synthetic construct
  source 1..17: mol_type = other DNA
gcagctgccaccaggtg

SEQ ID NO: 111536 - DNA, 17 bp, synthetic construct
  source 1..17: mol_type = other DNA
cagctgccaccaggtgg

SEQ ID NO: 111537 - DNA, 17 bp, synthetic construct
  source 1..17: mol_type = other DNA
agctgccaccaggtggg

SEQ ID NO: 111538 - DNA, 17 bp, synthetic construct
  source 1..17: mol_type = other DNA
gctgccaccaggtgggg

SEQ ID NO: 111539 - DNA, 17 bp, synthetic construct
  source 1..17: mol_type = other DNA
ctgccaccaggtggggc

SEQ ID NO: 111540 - DNA, 17 bp, synthetic construct
  source 1..17: mol_type = other DNA
tgccaccaggtggggcc

SEQ ID NO: 111541 - DNA, 17 bp, synthetic construct
  source 1..17: mol_type = other DNA
gccaccaggtggggccg

SEQ ID NO: 111542 - DNA, 17 bp, synthetic construct
  source 1..17: mol_type = other DNA
ccaccaggtggggccgt

SEQ ID NO: 111543 - DNA, 17 bp, synthetic construct
  source 1..17: mol_type = other DNA
caccaggtggggccgtt

SEQ ID NO: 111544 - DNA, 17 bp, synthetic construct
  source 1..17: mol_type = other DNA
accaggtggggccgttg

SEQ ID NO: 111545 - DNA, 17 bp, synthetic construct
  source 1..17: mol_type = other DNA
ccaggtggggccgttgg

SEQ ID NO: 111546 - DNA, 17 bp, synthetic construct
  source 1..17: mol_type = other DNA
caggtggggccgttggg

SEQ ID NO: 111547 - DNA, 17 bp, synthetic construct
  source 1..17: mol_type = other DNA
aggtggggccgttgggc

SEQ ID NO: 111548 - DNA, 17 bp, synthetic construct
  source 1..17: mol_type = other DNA
ggtggggccgttgggcc

SEQ ID NO: 111549 - DNA, 17 bp, synthetic construct
  source 1..17: mol_type = other DNA
gtggggccgttgggcca

SEQ ID NO: 111550 - DNA, 17 bp, synthetic construct
  source 1..17: mol_type = other DNA
tggggccgttgggccag

SEQ ID NO: 111551 - DNA, 17 bp, synthetic construct
  source 1..17: mol_type = other DNA
ggggccgttgggccaga

SEQ ID NO: 111552 - DNA, 17 bp, synthetic construct
  source 1..17: mol_type = other DNA
gggccgttgggccagac

SEQ ID NO: 111553 - DNA, 17 bp, synthetic construct
  source 1..17: mol_type = other DNA
ggccgttgggccagacc

SEQ ID NO: 111554 - DNA, 17 bp, synthetic construct
  source 1..17: mol_type = other DNA
gccgttgggccagaccc

SEQ ID NO: 111555 - DNA, 17 bp, synthetic construct
  source 1..17: mol_type = other DNA
ccgttgggccagaccca

SEQ ID NO: 111556 - DNA, 17 bp, synthetic construct
  source 1..17: mol_type = other DNA
cgttgggccagacccag

SEQ ID NO: 111557 - DNA, 17 bp, synthetic construct
  source 1..17: mol_type = other DNA
gttgggccagacccaga

SEQ ID NO: 111558 - DNA, 17 bp, synthetic construct
  source 1..17: mol_type = other DNA
ttgggccagacccagag

SEQ ID NO: 111559 - DNA, 17 bp, synthetic construct
  source 1..17: mol_type = other DNA
tgggccagacccagagt

SEQ ID NO: 111560 - DNA, 17 bp, synthetic construct
  source 1..17: mol_type = other DNA
gggccagacccagagtc

SEQ ID NO: 111561 - DNA, 17 bp, synthetic construct
  source 1..17: mol_type = other DNA
ggccagacccagagtcc

SEQ ID NO: 111562 - DNA, 17 bp, synthetic construct
  source 1..17: mol_type = other DNA
gccagacccagagtcct

SEQ ID NO: 111563 - DNA, 17 bp, synthetic construct
  source 1..17: mol_type = other DNA
ccagacccagagtcctc

SEQ ID NO: 111564 - DNA, 17 bp, synthetic construct
  source 1..17: mol_type = other DNA
cagacccagagtcctcc

SEQ ID NO: 111565 - DNA, 17 bp, synthetic construct
  source 1..17: mol_type = other DNA
agacccagagtcctccg

SEQ ID NO: 111566 - DNA, 17 bp, synthetic construct
  source 1..17: mol_type = other DNA
gacccagagtcctccgt

SEQ ID NO: 111567 - DNA, 17 bp, synthetic construct
  source 1..17: mol_type = other DNA
acccagagtcctccgtg

SEQ ID NO: 111568 - DNA, 17 bp, synthetic construct
  source 1..17: mol_type = other DNA
cccagagtcctccgtgt

SEQ ID NO: 111569 - DNA, 17 bp, synthetic construct
  source 1..17: mol_type = other DNA
ccagagtcctccgtgtg

SEQ ID NO: 111570 - DNA, 17 bp, synthetic construct
  source 1..17: mol_type = other DNA
cagagtcctccgtgtgg

SEQ ID NO: 111571 - DNA, 17 bp, synthetic construct
  source 1..17: mol_type = other DNA
agagtcctccgtgtggg

SEQ ID NO: 111572 - DNA, 17 bp, synthetic construct
  source 1..17: mol_type = other DNA
gagtcctccgtgtgggc

SEQ ID NO: 111573 - DNA, 17 bp, synthetic construct
  source 1..17: mol_type = other DNA
agtcctccgtgtgggcg

SEQ ID NO: 111574 - DNA, 17 bp, synthetic construct
  source 1..17: mol_type = other DNA
gtcctccgtgtgggcgg

SEQ ID NO: 111575 - DNA, 17 bp, synthetic construct
  source 1..17: mol_type = other DNA
tcctccgtgtgggcggt

SEQ ID NO: 111576 - DNA, 17 bp, synthetic construct
  source 1..17: mol_type = other DNA
cctccgtgtgggcggtc

SEQ ID NO: 111577 - DNA, 17 bp, synthetic construct
  source 1..17: mol_type = other DNA
ctccgtgtgggcggtct

SEQ ID NO: 111578 - DNA, 17 bp, synthetic construct
  source 1..17: mol_type = other DNA
tccgtgtgggcggtctc

SEQ ID NO: 111579 - DNA, 17 bp, synthetic construct
  source 1..17: mol_type = other DNA
ccgtgtgggcggtctcc

SEQ ID NO: 111580 - DNA, 17 bp, synthetic construct
  source 1..17: mol_type = other DNA
cgtgtgggcggtctcct

SEQ ID NO: 111581 - DNA, 17 bp, synthetic construct
  source 1..17: mol_type = other DNA
gtgtgggcggtctcctg

SEQ ID NO: 111582 - DNA, 17 bp, synthetic construct
  source 1..17: mol_type = other DNA
tgtgggcggtctcctgg

SEQ ID NO: 111583 - DNA, 17 bp, synthetic construct
  source 1..17: mol_type = other DNA
gtgggcggtctcctggt

SEQ ID NO: 111584 - DNA, 17 bp, synthetic construct
  source 1..17: mol_type = other DNA
tgggcggtctcctggtc

SEQ ID NO: 111585 - DNA, 17 bp, synthetic construct
  source 1..17: mol_type = other DNA
gggcggtctcctggtca

SEQ ID NO: 111586 - DNA, 17 bp, synthetic construct
  source 1..17: mol_type = other DNA
ggcggtctcctggtcac

SEQ ID NO: 111587 - DNA, 17 bp, synthetic construct
  source 1..17: mol_type = other DNA
gcggtctcctggtcact

SEQ ID NO: 111588 - DNA, 17 bp, synthetic construct
  source 1..17: mol_type = other DNA
cggtctcctggtcactg

SEQ ID NO: 111589 - DNA, 17 bp, synthetic construct
  source 1..17: mol_type = other DNA
ggtctcctggtcactgg

SEQ ID NO: 111590 - DNA, 17 bp, synthetic construct
  source 1..17: mol_type = other DNA
gtctcctggtcactggc

SEQ ID NO: 111591 - DNA, 17 bp, synthetic construct
  source 1..17: mol_type = other DNA
tctcctggtcactggcc

SEQ ID NO: 111592 - DNA, 17 bp, synthetic construct
  source 1..17: mol_type = other DNA
ctcctggtcactggcca

SEQ ID NO: 111593 - DNA, 17 bp, synthetic construct
  source 1..17: mol_type = other DNA
tcctggtcactggccac

SEQ ID NO: 111594 - DNA, 17 bp, synthetic construct
  source 1..17: mol_type = other DNA
cctggtcactggccacc

SEQ ID NO: 111595 - DNA, 17 bp, synthetic construct
  source 1..17: mol_type = other DNA
ctggtcactggccaccc

SEQ ID NO: 111596 - DNA, 17 bp, synthetic construct
  source 1..17: mol_type = other DNA
tggtcactggccaccct

SEQ ID NO: 111597 - DNA, 17 bp, synthetic construct
  source 1..17: mol_type = other DNA
ggtcactggccaccctg

SEQ ID NO: 111598 - DNA, 17 bp, synthetic construct
  source 1..17: mol_type = other DNA
gtcactggccaccctgg

SEQ ID NO: 111599 - DNA, 17 bp, synthetic construct
  source 1..17: mol_type = other DNA
tcactggccaccctggg

SEQ ID NO: 111600 - DNA, 17 bp, synthetic construct
  source 1..17: mol_type = other DNA
cactggccaccctgggg

SEQ ID NO: 111601 - DNA, 17 bp, synthetic construct
  source 1..17: mol_type = other DNA
actggccaccctggggg

SEQ ID NO: 111602 - DNA, 17 bp, synthetic construct
  source 1..17: mol_type = other DNA
ctggccaccctggggga

SEQ ID NO: 111603 - DNA, 17 bp, synthetic construct
  source 1..17: mol_type = other DNA
tggccaccctgggggat

SEQ ID NO: 111604 - DNA, 17 bp, synthetic construct
  source 1..17: mol_type = other DNA
ggccaccctgggggatg

SEQ ID NO: 111605 - DNA, 17 bp, synthetic construct
  source 1..17: mol_type = other DNA
gccaccctgggggatgg

SEQ ID NO: 111606 - DNA, 17 bp, synthetic construct
  source 1..17: mol_type = other DNA
ccaccctgggggatggg

SEQ ID NO: 111607 - DNA, 17 bp, synthetic construct
  source 1..17: mol_type = other DNA
caccctgggggatgggg

SEQ ID NO: 111608 - DNA, 17 bp, synthetic construct
  source 1..17: mol_type = other DNA
accctgggggatgggga

SEQ ID NO: 111609 - DNA, 17 bp, synthetic construct
  source 1..17: mol_type = other DNA
ccctgggggatggggac

SEQ ID NO: 111610 - DNA, 17 bp, synthetic construct
  source 1..17: mol_type = other DNA
cctgggggatggggacg

SEQ ID NO: 111611 - DNA, 17 bp, synthetic construct
  source 1..17: mol_type = other DNA
ctgggggatggggacgg

SEQ ID NO: 111612 - DNA, 17 bp, synthetic construct
  source 1..17: mol_type = other DNA
tgggggatggggacggg

SEQ ID NO: 111613 - DNA, 17 bp, synthetic construct
  source 1..17: mol_type = other DNA
gggggatggggacgggt

SEQ ID NO: 111614 - DNA, 17 bp, synthetic construct
  source 1..17: mol_type = other DNA
ggggatggggacgggtc

SEQ ID NO: 111615 - DNA, 17 bp, synthetic construct
  source 1..17: mol_type = other DNA
gggatggggacgggtca

SEQ ID NO: 111616 - DNA, 17 bp, synthetic construct
  source 1..17: mol_type = other DNA
ggatggggacgggtcag

SEQ ID NO: 111617 - DNA, 17 bp, synthetic construct
  source 1..17: mol_type = other DNA
gatggggacgggtcagg

SEQ ID NO: 111618 - DNA, 17 bp, synthetic construct
  source 1..17: mol_type = other DNA
atggggacgggtcaggg

SEQ ID NO: 111619 - DNA, 17 bp, synthetic construct
  source 1..17: mol_type = other DNA
tggggacgggtcagggg

SEQ ID NO: 111620 - DNA, 17 bp, synthetic construct
  source 1..17: mol_type = other DNA
ggggacgggtcaggggt

SEQ ID NO: 111621 - DNA, 17 bp, synthetic construct
  source 1..17: mol_type = other DNA
gggacgggtcaggggtc

SEQ ID NO: 111622 - DNA, 17 bp, synthetic construct
  source 1..17: mol_type = other DNA
ggacgggtcaggggtct

SEQ ID NO: 111623 - DNA, 17 bp, synthetic construct
  source 1..17: mol_type = other DNA
gacgggtcaggggtctt

SEQ ID NO: 111624 - DNA, 17 bp, synthetic construct
  source 1..17: mol_type = other DNA
acgggtcaggggtcttg

SEQ ID NO: 111625 - DNA, 17 bp, synthetic construct
  source 1..17: mol_type = other DNA
cgggtcaggggtcttgg

SEQ ID NO: 111626 - DNA, 17 bp, synthetic construct
  source 1..17: mol_type = other DNA
gggtcaggggtcttgga

SEQ ID NO: 111627 - DNA, 17 bp, synthetic construct
  source 1..17: mol_type = other DNA
ggtcaggggtcttggag

SEQ ID NO: 111628 - DNA, 17 bp, synthetic construct
  source 1..17: mol_type = other DNA
gtcaggggtcttggagc

SEQ ID NO: 111629 - DNA, 17 bp, synthetic construct
  source 1..17: mol_type = other DNA
tcaggggtcttggagca

SEQ ID NO: 111630 - DNA, 17 bp, synthetic construct
  source 1..17: mol_type = other DNA
caggggtcttggagcaa

SEQ ID NO: 111631 - DNA, 17 bp, synthetic construct
  source 1..17: mol_type = other DNA
aggggtcttggagcaaa

SEQ ID NO: 111632 - DNA, 17 bp, synthetic construct
  source 1..17: mol_type = other DNA
ggggtcttggagcaaaa

SEQ ID NO: 111633 - DNA, 17 bp, synthetic construct
  source 1..17: mol_type = other DNA
gggtcttggagcaaaac

SEQ ID NO: 111634 - DNA, 17 bp, synthetic construct
  source 1..17: mol_type = other DNA
ggtcttggagcaaaaca

SEQ ID NO: 111635 - DNA, 17 bp, synthetic construct
  source 1..17: mol_type = other DNA
gtcttggagcaaaacag

SEQ ID NO: 111636 - DNA, 17 bp, synthetic construct
  source 1..17: mol_type = other DNA
tcttggagcaaaacaga

SEQ ID NO: 111637 - DNA, 17 bp, synthetic construct
  source 1..17: mol_type = other DNA
cttggagcaaaacagac

SEQ ID NO: 111638 - DNA, 17 bp, synthetic construct
  source 1..17: mol_type = other DNA
ttggagcaaaacagacg

SEQ ID NO: 111639 - DNA, 17 bp, synthetic construct
  source 1..17: mol_type = other DNA
tggagcaaaacagacgc

SEQ ID NO: 111640 - DNA, 17 bp, synthetic construct
  source 1..17: mol_type = other DNA
ggagcaaaacagacgca

SEQ ID NO: 111641 - DNA, 17 bp, synthetic construct
  source 1..17: mol_type = other DNA
gagcaaaacagacgcag

SEQ ID NO: 111642 - DNA, 17 bp, synthetic construct
  source 1..17: mol_type = other DNA
agcaaaacagacgcagt

SEQ ID NO: 111643 - DNA, 17 bp, synthetic construct
  source 1..17: mol_type = other DNA
gcaaaacagacgcagtc

SEQ ID NO: 111644 - DNA, 17 bp, synthetic construct
  source 1..17: mol_type = other DNA
caaaacagacgcagtcc

SEQ ID NO: 111645 - DNA, 17 bp, synthetic construct
  source 1..17: mol_type = other DNA
aaaacagacgcagtcca

SEQ ID NO: 111646 - DNA, 17 bp, synthetic construct
  source 1..17: mol_type = other DNA
aaacagacgcagtccag

SEQ ID NO: 111647 - DNA, 17 bp, synthetic construct
  source 1..17: mol_type = other DNA
aacagacgcagtccagg

SEQ ID NO: 111648 - DNA, 17 bp, synthetic construct
  source 1..17: mol_type = other DNA
acagacgcagtccaggg

SEQ ID NO: 111649 - DNA, 17 bp, synthetic construct
  source 1..17: mol_type = other DNA
cagacgcagtccagggt

SEQ ID NO: 111650 - DNA, 17 bp, synthetic construct
  source 1..17: mol_type = other DNA
agacgcagtccagggtg

SEQ ID NO: 111651 - DNA, 17 bp, synthetic construct
  source 1..17: mol_type = other DNA
gacgcagtccagggtga

SEQ ID NO: 111652 - DNA, 17 bp, synthetic construct
  source 1..17: mol_type = other DNA
acgcagtccagggtgag

SEQ ID NO: 111653 - DNA, 17 bp, synthetic construct
  source 1..17: mol_type = other DNA
cgcagtccagggtgagc

SEQ ID NO: 111654 - DNA, 17 bp, synthetic construct
  source 1..17: mol_type = other DNA
gcagtccagggtgagcc

SEQ ID NO: 111655 - DNA, 17 bp, synthetic construct
  source 1..17: mol_type = other DNA
cagtccagggtgagcca

SEQ ID NO: 111656 - DNA, 17 bp, synthetic construct
  source 1..17: mol_type = other DNA
agtccagggtgagccag

SEQ ID NO: 111657 - DNA, 17 bp, synthetic construct
  source 1..17: mol_type = other DNA
gtccagggtgagccagg

SEQ ID NO: 111658 - DNA, 17 bp, synthetic construct
  source 1..17: mol_type = other DNA
tccagggtgagccaggc

SEQ ID NO: 111659 - DNA, 17 bp, synthetic construct
  source 1..17: mol_type = other DNA
ccagggtgagccaggca

SEQ ID NO: 111660 - DNA, 17 bp, synthetic construct
  source 1..17: mol_type = other DNA
cagggtgagccaggcag

SEQ ID NO: 111661 - DNA, 17 bp, synthetic construct
  source 1..17: mol_type = other DNA
agggtgagccaggcagg

SEQ ID NO: 111662 - DNA, 17 bp, synthetic construct
  source 1..17: mol_type = other DNA
gggtgagccaggcaggg

SEQ ID NO: 111663 - DNA, 17 bp, synthetic construct
  source 1..17: mol_type = other DNA
ggtgagccaggcagggc

SEQ ID NO: 111664 - DNA, 17 bp, synthetic construct
  source 1..17: mol_type = other DNA
gtgagccaggcagggca

SEQ ID NO: 111665 - DNA, 17 bp, synthetic construct
  source 1..17: mol_type = other DNA
tgagccaggcagggcac

SEQ ID NO: 111666 - DNA, 17 bp, synthetic construct
  source 1..17: mol_type = other DNA
gagccaggcagggcaca

SEQ ID NO: 111667 - DNA, 17 bp, synthetic construct
  source 1..17: mol_type = other DNA
agccaggcagggcacag

SEQ ID NO: 111668 - DNA, 17 bp, synthetic construct
  source 1..17: mol_type = other DNA
gccaggcagggcacagc

SEQ ID NO: 111669 - DNA, 17 bp, synthetic construct
  source 1..17: mol_type = other DNA
ccaggcagggcacagcc

SEQ ID NO: 111670 - DNA, 17 bp, synthetic construct
  source 1..17: mol_type = other DNA
caggcagggcacagcca

SEQ ID NO: 111671 - DNA, 17 bp, synthetic construct
  source 1..17: mol_type = other DNA
aggcagggcacagccag

SEQ ID NO: 111672 - DNA, 17 bp, synthetic construct
  source 1..17: mol_type = other DNA
ggcagggcacagccagc

SEQ ID NO: 111673 - DNA, 17 bp, synthetic construct
  source 1..17: mol_type = other DNA
gcagggcacagccagca

SEQ ID NO: 111674 - DNA, 17 bp, synthetic construct
  source 1..17: mol_type = other DNA
cagggcacagccagcag

SEQ ID NO: 111675 - DNA, 17 bp, synthetic construct
  source 1..17: mol_type = other DNA
agggcacagccagcagc

SEQ ID NO: 111676 - DNA, 17 bp, synthetic construct
  source 1..17: mol_type = other DNA
gggcacagccagcagcc

SEQ ID NO: 111677 - DNA, 17 bp, synthetic construct
  source 1..17: mol_type = other DNA
ggcacagccagcagccg

SEQ ID NO: 111678 - DNA, 17 bp, synthetic construct
  source 1..17: mol_type = other DNA
gcacagccagcagccga

SEQ ID NO: 111679 - DNA, 17 bp, synthetic construct
  source 1..17: mol_type = other DNA
cacagccagcagccgac

SEQ ID NO: 111680 - DNA, 17 bp, synthetic construct
  source 1..17: mol_type = other DNA
acagccagcagccgacc

SEQ ID NO: 111681 - DNA, 17 bp, synthetic construct
  source 1..17: mol_type = other DNA
cagccagcagccgacca

SEQ ID NO: 111682 - DNA, 17 bp, synthetic construct
  source 1..17: mol_type = other DNA
agccagcagccgaccat

SEQ ID NO: 111683 - DNA, 17 bp, synthetic construct
  source 1..17: mol_type = other DNA
gccagcagccgaccatg

SEQ ID NO: 111684 - DNA, 17 bp, synthetic construct
  source 1..17: mol_type = other DNA
ccagcagccgaccatgg

SEQ ID NO: 111685 - DNA, 17 bp, synthetic construct
  source 1..17: mol_type = other DNA
cagcagccgaccatggg

SEQ ID NO: 111686 - DNA, 17 bp, synthetic construct
  source 1..17: mol_type = other DNA
agcagccgaccatgggc

SEQ ID NO: 111687 - DNA, 17 bp, synthetic construct
  source 1..17: mol_type = other DNA
gcagccgaccatgggct

SEQ ID NO: 111688 - DNA, 17 bp, synthetic construct
  source 1..17: mol_type = other DNA
cagccgaccatgggctt

SEQ ID NO: 111689 - DNA, 17 bp, synthetic construct
  source 1..17: mol_type = other DNA
agccgaccatgggcttt

SEQ ID NO: 111690 - DNA, 17 bp, synthetic construct
  source 1..17: mol_type = other DNA
gccgaccatgggctttt

SEQ ID NO: 111691 - DNA, 17 bp, synthetic construct
  source 1..17: mol_type = other DNA
ccgaccatgggcttttc

SEQ ID NO: 111692 - DNA, 17 bp, synthetic construct
  source 1..17: mol_type = other DNA
cgaccatgggcttttcc

SEQ ID NO: 111693 - DNA, 17 bp, synthetic construct
  source 1..17: mol_type = other DNA
gaccatgggcttttcca

SEQ ID NO: 111694 - DNA, 17 bp, synthetic construct
  source 1..17: mol_type = other DNA
accatgggcttttccat

SEQ ID NO: 111695 - DNA, 17 bp, synthetic construct
  source 1..17: mol_type = other DNA
ccatgggcttttccatt

SEQ ID NO: 111696 - DNA, 17 bp, synthetic construct
  source 1..17: mol_type = other DNA
catgggcttttccattc

SEQ ID NO: 111697 - DNA, 17 bp, synthetic construct
  source 1..17: mol_type = other DNA
atgggcttttccattcc

SEQ ID NO: 111698 - DNA, 17 bp, synthetic construct
  source 1..17: mol_type = other DNA
tgggcttttccattcca

SEQ ID NO: 111699 - DNA, 17 bp, synthetic construct
  source 1..17: mol_type = other DNA
gggcttttccattccaa

SEQ ID NO: 111700 - DNA, 17 bp, synthetic construct
  source 1..17: mol_type = other DNA
ggcttttccattccaaa

SEQ ID NO: 111701 - DNA, 17 bp, synthetic construct
  source 1..17: mol_type = other DNA
gcttttccattccaaaa

SEQ ID NO: 111702 - DNA, 17 bp, synthetic construct
  source 1..17: mol_type = other DNA
cttttccattccaaaaa

SEQ ID NO: 111703 - DNA, 17 bp, synthetic construct
  source 1..17: mol_type = other DNA
ttttccattccaaaaac

SEQ ID NO: 111704 - DNA, 17 bp, synthetic construct
  source 1..17: mol_type = other DNA
tttccattccaaaaacc

SEQ ID NO: 111705 - DNA, 17 bp, synthetic construct
  source 1..17: mol_type = other DNA
ttccattccaaaaacca

SEQ ID NO: 111706 - DNA, 17 bp, synthetic construct
  source 1..17: mol_type = other DNA
tccattccaaaaaccag

SEQ ID NO: 111707 - DNA, 17 bp, synthetic construct
  source 1..17: mol_type = other DNA
ccattccaaaaaccagg

SEQ ID NO: 111708 - DNA, 17 bp, synthetic construct
  source 1..17: mol_type = other DNA
cattccaaaaaccaggg

SEQ ID NO: 111709 - DNA, 17 bp, synthetic construct
  source 1..17: mol_type = other DNA
attccaaaaaccagggt

SEQ ID NO: 111710 - DNA, 17 bp, synthetic construct
  source 1..17: mol_type = other DNA
ttccaaaaaccagggtg

SEQ ID NO: 111711 - DNA, 17 bp, synthetic construct
  source 1..17: mol_type = other DNA
tccaaaaaccagggtgc

SEQ ID NO: 111712 - DNA, 17 bp, synthetic construct
  source 1..17: mol_type = other DNA
ccaaaaaccagggtgcc

SEQ ID NO: 111713 - DNA, 17 bp, synthetic construct
  source 1..17: mol_type = other DNA
caaaaaccagggtgcct

SEQ ID NO: 111714 - DNA, 17 bp, synthetic construct
  source 1..17: mol_type = other DNA
aaaaaccagggtgcctc

SEQ ID NO: 111715 - DNA, 17 bp, synthetic construct
  source 1..17: mol_type = other DNA
aaaaccagggtgcctcg

SEQ ID NO: 111716 - DNA, 17 bp, synthetic construct
  source 1..17: mol_type = other DNA
aaaccagggtgcctcgg

SEQ ID NO: 111717 - DNA, 17 bp, synthetic construct
  source 1..17: mol_type = other DNA
aaccagggtgcctcggc

SEQ ID NO: 111718 - DNA, 17 bp, synthetic construct
  source 1..17: mol_type = other DNA
accagggtgcctcggcc

SEQ ID NO: 111719 - DNA, 17 bp, synthetic construct
  source 1..17: mol_type = other DNA
ccagggtgcctcggccc

SEQ ID NO: 111720 - DNA, 17 bp, synthetic construct
  source 1..17: mol_type = other DNA
cagggtgcctcggccca

SEQ ID NO: 111721 - DNA, 17 bp, synthetic construct
  source 1..17: mol_type = other DNA
agggtgcctcggcccag

SEQ ID NO: 111722 - DNA, 17 bp, synthetic construct
  source 1..17: mol_type = other DNA
gggtgcctcggcccagg

SEQ ID NO: 111723 - DNA, 17 bp, synthetic construct
  source 1..17: mol_type = other DNA
ggtgcctcggcccaggg

SEQ ID NO: 111724 - DNA, 17 bp, synthetic construct
  source 1..17: mol_type = other DNA
gtgcctcggcccagggg

SEQ ID NO: 111725 - DNA, 17 bp, synthetic construct
  source 1..17: mol_type = other DNA
tgcctcggcccagggga

SEQ ID NO: 111726 - DNA, 17 bp, synthetic construct
  source 1..17: mol_type = other DNA
gcctcggcccaggggag

SEQ ID NO: 111727 - DNA, 17 bp, synthetic construct
  source 1..17: mol_type = other DNA
cctcggcccaggggagg

SEQ ID NO: 111728 - DNA, 17 bp, synthetic construct
  source 1..17: mol_type = other DNA
ctcggcccaggggaggc

SEQ ID NO: 111729 - DNA, 17 bp, synthetic construct
  source 1..17: mol_type = other DNA
tcggcccaggggaggct

SEQ ID NO: 111730 - DNA, 17 bp, synthetic construct
  source 1..17: mol_type = other DNA
cggcccaggggaggcta

SEQ ID NO: 111731 - DNA, 17 bp, synthetic construct
  source 1..17: mol_type = other DNA
ggcccaggggaggctac

SEQ ID NO: 111732 - DNA, 17 bp, synthetic construct
  source 1..17: mol_type = other DNA
gcccaggggaggctacc

SEQ ID NO: 111733 - DNA, 17 bp, synthetic construct
  source 1..17: mol_type = other DNA
cccaggggaggctaccc

SEQ ID NO: 111734 - DNA, 17 bp, synthetic construct
  source 1..17: mol_type = other DNA
ccaggggaggctacccc

SEQ ID NO: 111735 - DNA, 17 bp, synthetic construct
  source 1..17: mol_type = other DNA
caggggaggctaccccg

SEQ ID NO: 111736 - DNA, 17 bp, synthetic construct
  source 1..17: mol_type = other DNA
aggggaggctaccccgt

SEQ ID NO: 111737 - DNA, 17 bp, synthetic construct
  source 1..17: mol_type = other DNA
ggggaggctaccccgtg

SEQ ID NO: 111738 - DNA, 17 bp, synthetic construct
  source 1..17: mol_type = other DNA
gggaggctaccccgtgg

SEQ ID NO: 111739 - DNA, 17 bp, synthetic construct
  source 1..17: mol_type = other DNA
ggaggctaccccgtggg

SEQ ID NO: 111740 - DNA, 17 bp, synthetic construct
  source 1..17: mol_type = other DNA
gaggctaccccgtgggg

SEQ ID NO: 111741 - DNA, 17 bp, synthetic construct
  source 1..17: mol_type = other DNA
aggctaccccgtggggg

SEQ ID NO: 111742 - DNA, 17 bp, synthetic construct
  source 1..17: mol_type = other DNA
ggctaccccgtgggggg

SEQ ID NO: 111743 - DNA, 17 bp, synthetic construct
  source 1..17: mol_type = other DNA
gctaccccgtggggggc

SEQ ID NO: 111744 - DNA, 17 bp, synthetic construct
  source 1..17: mol_type = other DNA
ctaccccgtggggggct

SEQ ID NO: 111745 - DNA, 17 bp, synthetic construct
  source 1..17: mol_type = other DNA
taccccgtggggggctg

SEQ ID NO: 111746 - DNA, 17 bp, synthetic construct
  source 1..17: mol_type = other DNA
accccgtggggggctgg

SEQ ID NO: 111747 - DNA, 17 bp, synthetic construct
  source 1..17: mol_type = other DNA
ccccgtggggggctggc

SEQ ID NO: 111748 - DNA, 17 bp, synthetic construct
  source 1..17: mol_type = other DNA
cccgtggggggctggca

SEQ ID NO: 111749 - DNA, 17 bp, synthetic construct
  source 1..17: mol_type = other DNA
ccgtggggggctggcat

SEQ ID NO: 111750 - DNA, 17 bp, synthetic construct
  source 1..17: mol_type = other DNA
cgtggggggctggcatg

SEQ ID NO: 111751 - DNA, 17 bp, synthetic construct
  source 1..17: mol_type = other DNA
gtggggggctggcatgg

SEQ ID NO: 111752 - DNA, 17 bp, synthetic construct
  source 1..17: mol_type = other DNA
tggggggctggcatggg

SEQ ID NO: 111753 - DNA, 17 bp, synthetic construct
  source 1..17: mol_type = other DNA
ggggggctggcatgggg

SEQ ID NO: 111754 - DNA, 17 bp, synthetic construct
  source 1..17: mol_type = other DNA
gggggctggcatgggga

SEQ ID NO: 111755 - DNA, 17 bp, synthetic construct
  source 1..17: mol_type = other DNA
ggggctggcatggggat

SEQ ID NO: 111756 - DNA, 17 bp, synthetic construct
  source 1..17: mol_type = other DNA
gggctggcatggggatg

SEQ ID NO: 111757 - DNA, 17 bp, synthetic construct
  source 1..17: mol_type = other DNA
ggctggcatggggatgg

SEQ ID NO: 111758 - DNA, 17 bp, synthetic construct
  source 1..17: mol_type = other DNA
gctggcatggggatggg

SEQ ID NO: 111759 - DNA, 17 bp, synthetic construct
  source 1..17: mol_type = other DNA
ctggcatggggatgggc

SEQ ID NO: 111760 - DNA, 17 bp, synthetic construct
  source 1..17: mol_type = other DNA
tggcatggggatgggcc

SEQ ID NO: 111761 - DNA, 17 bp, synthetic construct
  source 1..17: mol_type = other DNA
ggcatggggatgggcct

SEQ ID NO: 111762 - DNA, 17 bp, synthetic construct
  source 1..17: mol_type = other DNA
gcatggggatgggcctc

SEQ ID NO: 111763 - DNA, 17 bp, synthetic construct
  source 1..17: mol_type = other DNA
catggggatgggcctca

SEQ ID NO: 111764 - DNA, 17 bp, synthetic construct
  source 1..17: mol_type = other DNA
atggggatgggcctcat

SEQ ID NO: 111765 - DNA, 17 bp, synthetic construct
  source 1..17: mol_type = other DNA
tggggatgggcctcatc

SEQ ID NO: 111766 - DNA, 17 bp, synthetic construct
  source 1..17: mol_type = other DNA
ggggatgggcctcatcc

SEQ ID NO: 111767 - DNA, 17 bp, synthetic construct
  source 1..17: mol_type = other DNA
gggatgggcctcatccc

SEQ ID NO: 111768 - DNA, 17 bp, synthetic construct
  source 1..17: mol_type = other DNA
ggatgggcctcatcccg

SEQ ID NO: 111769 - DNA, 17 bp, synthetic construct
  source 1..17: mol_type = other DNA
gatgggcctcatcccgc

SEQ ID NO: 111770 - DNA, 17 bp, synthetic construct
  source 1..17: mol_type = other DNA
atgggcctcatcccgcg

SEQ ID NO: 111771 - DNA, 17 bp, synthetic construct
  source 1..17: mol_type = other DNA
tgggcctcatcccgcgc

SEQ ID NO: 111772 - DNA, 17 bp, synthetic construct
  source 1..17: mol_type = other DNA
gggcctcatcccgcgct

SEQ ID NO: 111773 - DNA, 17 bp, synthetic construct
  source 1..17: mol_type = other DNA
ggcctcatcccgcgctc

SEQ ID NO: 111774 - DNA, 17 bp, synthetic construct
  source 1..17: mol_type = other DNA
gcctcatcccgcgctcc

SEQ ID NO: 111775 - DNA, 17 bp, synthetic construct
  source 1..17: mol_type = other DNA
cctcatcccgcgctccc

SEQ ID NO: 111776 - DNA, 17 bp, synthetic construct
  source 1..17: mol_type = other DNA
ctcatcccgcgctcccc

SEQ ID NO: 111777 - DNA, 17 bp, synthetic construct
  source 1..17: mol_type = other DNA
tcatcccgcgctcccca

SEQ ID NO: 111778 - DNA, 17 bp, synthetic construct
  source 1..17: mol_type = other DNA
catcccgcgctccccac

SEQ ID NO: 111779 - DNA, 17 bp, synthetic construct
  source 1..17: mol_type = other DNA
atcccgcgctccccaca

SEQ ID NO: 111780 - DNA, 17 bp, synthetic construct
  source 1..17: mol_type = other DNA
tcccgcgctccccacag

SEQ ID NO: 111781 - DNA, 17 bp, synthetic construct
  source 1..17: mol_type = other DNA
cccgcgctccccacagc

SEQ ID NO: 111782 - DNA, 17 bp, synthetic construct
  source 1..17: mol_type = other DNA
ccgcgctccccacagcc

SEQ ID NO: 111783 - DNA, 17 bp, synthetic construct
  source 1..17: mol_type = other DNA
cgcgctccccacagccc

SEQ ID NO: 111784 - DNA, 17 bp, synthetic construct
  source 1..17: mol_type = other DNA
gcgctccccacagccct

SEQ ID NO: 111785 - DNA, 17 bp, synthetic construct
  source 1..17: mol_type = other DNA
cgctccccacagccctg

SEQ ID NO: 111786 - DNA, 17 bp, synthetic construct
  source 1..17: mol_type = other DNA
gctccccacagccctga

SEQ ID NO: 111787 - DNA, 17 bp, synthetic construct
  source 1..17: mol_type = other DNA
ctccccacagccctgaa

SEQ ID NO: 111788 - DNA, 17 bp, synthetic construct
  source 1..17: mol_type = other DNA
tccccacagccctgaac

SEQ ID NO: 111789 - DNA, 17 bp, synthetic construct
  source 1..17: mol_type = other DNA
ccccacagccctgaacc

SEQ ID NO: 111790 - DNA, 17 bp, synthetic construct
  source 1..17: mol_type = other DNA
cccacagccctgaaccc

SEQ ID NO: 111791 - DNA, 17 bp, synthetic construct
  source 1..17: mol_type = other DNA
ccacagccctgaacccg

SEQ ID NO: 111792 - DNA, 17 bp, synthetic construct
  source 1..17: mol_type = other DNA
cacagccctgaacccgg

SEQ ID NO: 111793 - DNA, 17 bp, synthetic construct
  source 1..17: mol_type = other DNA
acagccctgaacccggc

SEQ ID NO: 111794 - DNA, 17 bp, synthetic construct
  source 1..17: mol_type = other DNA
cagccctgaacccggcg

SEQ ID NO: 111795 - DNA, 17 bp, synthetic construct
  source 1..17: mol_type = other DNA
agccctgaacccggcgc

SEQ ID NO: 111796 - DNA, 17 bp, synthetic construct
  source 1..17: mol_type = other DNA
gccctgaacccggcgca

SEQ ID NO: 111797 - DNA, 17 bp, synthetic construct
  source 1..17: mol_type = other DNA
ccctgaacccggcgcac

SEQ ID NO: 111798 - DNA, 17 bp, synthetic construct
  source 1..17: mol_type = other DNA
cctgaacccggcgcaca

SEQ ID NO: 111799 - DNA, 17 bp, synthetic construct
  source 1..17: mol_type = other DNA
ctgaacccggcgcacaa

SEQ ID NO: 111800 - DNA, 17 bp, synthetic construct
  source 1..17: mol_type = other DNA
tgaacccggcgcacaat

SEQ ID NO: 111801 - DNA, 17 bp, synthetic construct
  source 1..17: mol_type = other DNA
gaacccggcgcacaatg

SEQ ID NO: 111802 - DNA, 17 bp, synthetic construct
  source 1..17: mol_type = other DNA
aacccggcgcacaatgg

SEQ ID NO: 111803 - DNA, 17 bp, synthetic construct
  source 1..17: mol_type = other DNA
acccggcgcacaatggg

SEQ ID NO: 111804 - DNA, 17 bp, synthetic construct
  source 1..17: mol_type = other DNA
cccggcgcacaatgggc

SEQ ID NO: 111805 - DNA, 17 bp, synthetic construct
  source 1..17: mol_type = other DNA
ccggcgcacaatgggcg

SEQ ID NO: 111806 - DNA, 17 bp, synthetic construct
  source 1..17: mol_type = other DNA
cggcgcacaatgggcgg

SEQ ID NO: 111807 - DNA, 17 bp, synthetic construct
  source 1..17: mol_type = other DNA
ggcgcacaatgggcggg

SEQ ID NO: 111808 - DNA, 17 bp, synthetic construct
  source 1..17: mol_type = other DNA
gcgcacaatgggcgggt

SEQ ID NO: 111809 - DNA, 17 bp, synthetic construct
  source 1..17: mol_type = other DNA
cgcacaatgggcgggtg

SEQ ID NO: 111810 - DNA, 17 bp, synthetic construct
  source 1..17: mol_type = other DNA
gcacaatgggcgggtgt

SEQ ID NO: 111811 - DNA, 17 bp, synthetic construct
  source 1..17: mol_type = other DNA
cacaatgggcgggtgtg

SEQ ID NO: 111812 - DNA, 17 bp, synthetic construct
  source 1..17: mol_type = other DNA
acaatgggcgggtgtgc

SEQ ID NO: 111813 - DNA, 17 bp, synthetic construct
  source 1..17: mol_type = other DNA
caatgggcgggtgtgca

SEQ ID NO: 111814 - DNA, 17 bp, synthetic construct
  source 1..17: mol_type = other DNA
aatgggcgggtgtgcag

SEQ ID NO: 111815 - DNA, 17 bp, synthetic construct
  source 1..17: mol_type = other DNA
atgggcgggtgtgcagc

SEQ ID NO: 111816 - DNA, 17 bp, synthetic construct
  source 1..17: mol_type = other DNA
tgggcgggtgtgcagca

SEQ ID NO: 111817 - DNA, 17 bp, synthetic construct
  source 1..17: mol_type = other DNA
gggcgggtgtgcagcac

SEQ ID NO: 111818 - DNA, 17 bp, synthetic construct
  source 1..17: mol_type = other DNA
ggcgggtgtgcagcacc

SEQ ID NO: 111819 - DNA, 17 bp, synthetic construct
  source 1..17: mol_type = other DNA
gcgggtgtgcagcacct

SEQ ID NO: 111820 - DNA, 17 bp, synthetic construct
  source 1..17: mol_type = other DNA
cgggtgtgcagcacctg

SEQ ID NO: 111821 - DNA, 17 bp, synthetic construct
  source 1..17: mol_type = other DNA
gggtgtgcagcacctgg

SEQ ID NO: 111822 - DNA, 17 bp, synthetic construct
  source 1..17: mol_type = other DNA
ggtgtgcagcacctggg

SEQ ID NO: 111823 - DNA, 17 bp, synthetic construct
  source 1..17: mol_type = other DNA
gtgtgcagcacctgggg

SEQ ID NO: 111824 - DNA, 17 bp, synthetic construct
  source 1..17: mol_type = other DNA
tgtgcagcacctggggt

SEQ ID NO: 111825 - DNA, 17 bp, synthetic construct
  source 1..17: mol_type = other DNA
gtgcagcacctggggtg

SEQ ID NO: 111826 - DNA, 17 bp, synthetic construct
  source 1..17: mol_type = other DNA
tgcagcacctggggtga

SEQ ID NO: 111827 - DNA, 17 bp, synthetic construct
  source 1..17: mol_type = other DNA
gcagcacctggggtgac

SEQ ID NO: 111828 - DNA, 17 bp, synthetic construct
  source 1..17: mol_type = other DNA
cagcacctggggtgact

SEQ ID NO: 111829 - DNA, 17 bp, synthetic construct
  source 1..17: mol_type = other DNA
agcacctggggtgactt

SEQ ID NO: 111830 - DNA, 17 bp, synthetic construct
  source 1..17: mol_type = other DNA
gcacctggggtgacttc

SEQ ID NO: 111831 - DNA, 17 bp, synthetic construct
  source 1..17: mol_type = other DNA
cacctggggtgacttcc

SEQ ID NO: 111832 - DNA, 17 bp, synthetic construct
  source 1..17: mol_type = other DNA
acctggggtgacttcca

SEQ ID NO: 111833 - DNA, 17 bp, synthetic construct
  source 1..17: mol_type = other DNA
cctggggtgacttccac

SEQ ID NO: 111834 - DNA, 17 bp, synthetic construct
  source 1..17: mol_type = other DNA
ctggggtgacttccact

SEQ ID NO: 111835 - DNA, 17 bp, synthetic construct
  source 1..17: mol_type = other DNA
tggggtgacttccacta

SEQ ID NO: 111836 - DNA, 17 bp, synthetic construct
  source 1..17: mol_type = other DNA
ggggtgacttccactac

SEQ ID NO: 111837 - DNA, 17 bp, synthetic construct
  source 1..17: mol_type = other DNA
gggtgacttccactaca

SEQ ID NO: 111838 - DNA, 17 bp, synthetic construct
  source 1..17: mol_type = other DNA
ggtgacttccactacaa

SEQ ID NO: 111839 - DNA, 17 bp, synthetic construct
  source 1..17: mol_type = other DNA
gtgacttccactacaag

SEQ ID NO: 111840 - DNA, 17 bp, synthetic construct
  source 1..17: mol_type = other DNA
tgacttccactacaaga

SEQ ID NO: 111841 - DNA, 17 bp, synthetic construct
  source 1..17: mol_type = other DNA
gacttccactacaagac

SEQ ID NO: 111842 - DNA, 17 bp, synthetic construct
  source 1..17: mol_type = other DNA
acttccactacaagacc

SEQ ID NO: 111843 - DNA, 17 bp, synthetic construct
  source 1..17: mol_type = other DNA
cttccactacaagacct

SEQ ID NO: 111844 - DNA, 17 bp, synthetic construct
  source 1..17: mol_type = other DNA
ttccactacaagacctt

SEQ ID NO: 111845 - DNA, 17 bp, synthetic construct
  source 1..17: mol_type = other DNA
tccactacaagaccttc

SEQ ID NO: 111846 - DNA, 17 bp, synthetic construct
  source 1..17: mol_type = other DNA
ccactacaagaccttcg

SEQ ID NO: 111847 - DNA, 17 bp, synthetic construct
  source 1..17: mol_type = other DNA
cactacaagaccttcga

SEQ ID NO: 111848 - DNA, 17 bp, synthetic construct
  source 1..17: mol_type = other DNA
actacaagaccttcgac

SEQ ID NO: 111849 - DNA, 17 bp, synthetic construct
  source 1..17: mol_type = other DNA
ctacaagaccttcgacg

SEQ ID NO: 111850 - DNA, 17 bp, synthetic construct
  source 1..17: mol_type = other DNA
tacaagaccttcgacgg

SEQ ID NO: 111851 - DNA, 17 bp, synthetic construct
  source 1..17: mol_type = other DNA
acaagaccttcgacggc

SEQ ID NO: 111852 - DNA, 17 bp, synthetic construct
  source 1..17: mol_type = other DNA
caagaccttcgacggcg

SEQ ID NO: 111853 - DNA, 17 bp, synthetic construct
  source 1..17: mol_type = other DNA
aagaccttcgacggcga

SEQ ID NO: 111854 - DNA, 17 bp, synthetic construct
  source 1..17: mol_type = other DNA
agaccttcgacggcgac

SEQ ID NO: 111855 - DNA, 17 bp, synthetic construct
  source 1..17: mol_type = other DNA
gaccttcgacggcgacg

SEQ ID NO: 111856 - DNA, 17 bp, synthetic construct
  source 1..17: mol_type = other DNA
accttcgacggcgacgt

SEQ ID NO: 111857 - DNA, 17 bp, synthetic construct
  source 1..17: mol_type = other DNA
ccttcgacggcgacgtc

SEQ ID NO: 111858 - DNA, 17 bp, synthetic construct
  source 1..17: mol_type = other DNA
cttcgacggcgacgtct

SEQ ID NO: 111859 - DNA, 17 bp, synthetic construct
  source 1..17: mol_type = other DNA
ttcgacggcgacgtctt

SEQ ID NO: 111860 - DNA, 17 bp, synthetic construct
  source 1..17: mol_type = other DNA
tcgacggcgacgtcttc

SEQ ID NO: 111861 - DNA, 17 bp, synthetic construct
  source 1..17: mol_type = other DNA
cgacggcgacgtcttcc

SEQ ID NO: 111862 - DNA, 17 bp, synthetic construct
  source 1..17: mol_type = other DNA
gacggcgacgtcttccg

SEQ ID NO: 111863 - DNA, 17 bp, synthetic construct
  source 1..17: mol_type = other DNA
acggcgacgtcttccgc

SEQ ID NO: 111864 - DNA, 17 bp, synthetic construct
  source 1..17: mol_type = other DNA
cggcgacgtcttccgct

SEQ ID NO: 111865 - DNA, 17 bp, synthetic construct
  source 1..17: mol_type = other DNA
ggcgacgtcttccgctt

SEQ ID NO: 111866 - DNA, 17 bp, synthetic construct
  source 1..17: mol_type = other DNA
gcgacgtcttccgcttc

SEQ ID NO: 111867 - DNA, 17 bp, synthetic construct
  source 1..17: mol_type = other DNA
cgacgtcttccgcttcc

SEQ ID NO: 111868 - DNA, 17 bp, synthetic construct
  source 1..17: mol_type = other DNA
gacgtcttccgcttccc

SEQ ID NO: 111869 - DNA, 17 bp, synthetic construct
  source 1..17: mol_type = other DNA
acgtcttccgcttccct

SEQ ID NO: 111870 - DNA, 17 bp, synthetic construct
  source 1..17: mol_type = other DNA
cgtcttccgcttccctg

SEQ ID NO: 111871 - DNA, 17 bp, synthetic construct
  source 1..17: mol_type = other DNA
gtcttccgcttccctgg

SEQ ID NO: 111872 - DNA, 17 bp, synthetic construct
  source 1..17: mol_type = other DNA
tcttccgcttccctggc

SEQ ID NO: 111873 - DNA, 17 bp, synthetic construct
  source 1..17: mol_type = other DNA
cttccgcttccctggcc

SEQ ID NO: 111874 - DNA, 17 bp, synthetic construct
  source 1..17: mol_type = other DNA
ttccgcttccctggcct

SEQ ID NO: 111875 - DNA, 17 bp, synthetic construct
  source 1..17: mol_type = other DNA
tccgcttccctggcctt

SEQ ID NO: 111876 - DNA, 17 bp, synthetic construct
  source 1..17: mol_type = other DNA
ccgcttccctggccttt

SEQ ID NO: 111877 - DNA, 17 bp, synthetic construct
  source 1..17: mol_type = other DNA
cgcttccctggcctttg

SEQ ID NO: 111878 - DNA, 17 bp, synthetic construct
  source 1..17: mol_type = other DNA
gcttccctggcctttgc

SEQ ID NO: 111879 - DNA, 17 bp, synthetic construct
  source 1..17: mol_type = other DNA
cttccctggcctttgca

SEQ ID NO: 111880 - DNA, 17 bp, synthetic construct
  source 1..17: mol_type = other DNA
ttccctggcctttgcaa

SEQ ID NO: 111881 - DNA, 17 bp, synthetic construct
  source 1..17: mol_type = other DNA
tccctggcctttgcaac

SEQ ID NO: 111882 - DNA, 17 bp, synthetic construct
  source 1..17: mol_type = other DNA
ccctggcctttgcaact

SEQ ID NO: 111883 - DNA, 17 bp, synthetic construct
  source 1..17: mol_type = other DNA
cctggcctttgcaacta

SEQ ID NO: 111884 - DNA, 17 bp, synthetic construct
  source 1..17: mol_type = other DNA
ctggcctttgcaactac

SEQ ID NO: 111885 - DNA, 17 bp, synthetic construct
  source 1..17: mol_type = other DNA
tggcctttgcaactacg

SEQ ID NO: 111886 - DNA, 17 bp, synthetic construct
  source 1..17: mol_type = other DNA
ggcctttgcaactacgt

SEQ ID NO: 111887 - DNA, 17 bp, synthetic construct
  source 1..17: mol_type = other DNA
gcctttgcaactacgtg

SEQ ID NO: 111888 - DNA, 17 bp, synthetic construct
  source 1..17: mol_type = other DNA
cctttgcaactacgtgt

SEQ ID NO: 111889 - DNA, 17 bp, synthetic construct
  source 1..17: mol_type = other DNA
ctttgcaactacgtgtt

SEQ ID NO: 111890 - DNA, 17 bp, synthetic construct
  source 1..17: mol_type = other DNA
tttgcaactacgtgttc

SEQ ID NO: 111891 - DNA, 17 bp, synthetic construct
  source 1..17: mol_type = other DNA
ttgcaactacgtgttct

SEQ ID NO: 111892 - DNA, 17 bp, synthetic construct
  source 1..17: mol_type = other DNA
tgcaactacgtgttctc

SEQ ID NO: 111893 - DNA, 17 bp, synthetic construct
  source 1..17: mol_type = other DNA
gcaactacgtgttctct

SEQ ID NO: 111894 - DNA, 17 bp, synthetic construct
  source 1..17: mol_type = other DNA
caactacgtgttctctg

SEQ ID NO: 111895 - DNA, 17 bp, synthetic construct
  source 1..17: mol_type = other DNA
aactacgtgttctctga

SEQ ID NO: 111896 - DNA, 17 bp, synthetic construct
  source 1..17: mol_type = other DNA
actacgtgttctctgag

SEQ ID NO: 111897 - DNA, 17 bp, synthetic construct
  source 1..17: mol_type = other DNA
ctacgtgttctctgagc

SEQ ID NO: 111898 - DNA, 17 bp, synthetic construct
  source 1..17: mol_type = other DNA
tacgtgttctctgagca

SEQ ID NO: 111899 - DNA, 17 bp, synthetic construct
  source 1..17: mol_type = other DNA
acgtgttctctgagcac

SEQ ID NO: 111900 - DNA, 17 bp, synthetic construct
  source 1..17: mol_type = other DNA
cgtgttctctgagcact

SEQ ID NO: 111901 - DNA, 17 bp, synthetic construct
  source 1..17: mol_type = other DNA
gtgttctctgagcactg

SEQ ID NO: 111902 - DNA, 17 bp, synthetic construct
  source 1..17: mol_type = other DNA
tgttctctgagcactgc

SEQ ID NO: 111903 - DNA, 17 bp, synthetic construct
  source 1..17: mol_type = other DNA
gttctctgagcactgcc

SEQ ID NO: 111904 - DNA, 17 bp, synthetic construct
  source 1..17: mol_type = other DNA
ttctctgagcactgccg

SEQ ID NO: 111905 - DNA, 17 bp, synthetic construct
  source 1..17: mol_type = other DNA
tctctgagcactgccgc

SEQ ID NO: 111906 - DNA, 17 bp, synthetic construct
  source 1..17: mol_type = other DNA
ctctgagcactgccgcg

SEQ ID NO: 111907 - DNA, 17 bp, synthetic construct
  source 1..17: mol_type = other DNA
tctgagcactgccgcgc

SEQ ID NO: 111908 - DNA, 17 bp, synthetic construct
  source 1..17: mol_type = other DNA
ctgagcactgccgcgcc

SEQ ID NO: 111909 - DNA, 17 bp, synthetic construct
  source 1..17: mol_type = other DNA
tgagcactgccgcgccg

SEQ ID NO: 111910 - DNA, 17 bp, synthetic construct
  source 1..17: mol_type = other DNA
gagcactgccgcgccgc

SEQ ID NO: 111911 - DNA, 17 bp, synthetic construct
  source 1..17: mol_type = other DNA
agcactgccgcgccgcc

SEQ ID NO: 111912 - DNA, 17 bp, synthetic construct
  source 1..17: mol_type = other DNA
gcactgccgcgccgcct

SEQ ID NO: 111913 - DNA, 17 bp, synthetic construct
  source 1..17: mol_type = other DNA
cactgccgcgccgccta

SEQ ID NO: 111914 - DNA, 17 bp, synthetic construct
  source 1..17: mol_type = other DNA
actgccgcgccgcctac

SEQ ID NO: 111915 - DNA, 17 bp, synthetic construct
  source 1..17: mol_type = other DNA
ctgccgcgccgcctacg

SEQ ID NO: 111916 - DNA, 17 bp, synthetic construct
  source 1..17: mol_type = other DNA
tgccgcgccgcctacga

SEQ ID NO: 111917 - DNA, 17 bp, synthetic construct
  source 1..17: mol_type = other DNA
gccgcgccgcctacgag

SEQ ID NO: 111918 - DNA, 17 bp, synthetic construct
  source 1..17: mol_type = other DNA
ccgcgccgcctacgagg

SEQ ID NO: 111919 - DNA, 17 bp, synthetic construct
  source 1..17: mol_type = other DNA
cgcgccgcctacgagga

SEQ ID NO: 111920 - DNA, 17 bp, synthetic construct
  source 1..17: mol_type = other DNA
gcgccgcctacgaggac

SEQ ID NO: 111921 - DNA, 17 bp, synthetic construct
  source 1..17: mol_type = other DNA
cgccgcctacgaggact

SEQ ID NO: 111922 - DNA, 17 bp, synthetic construct
  source 1..17: mol_type = other DNA
gccgcctacgaggactt

SEQ ID NO: 111923 - DNA, 17 bp, synthetic construct
  source 1..17: mol_type = other DNA
ccgcctacgaggacttc

SEQ ID NO: 111924 - DNA, 17 bp, synthetic construct
  source 1..17: mol_type = other DNA
cgcctacgaggacttca

SEQ ID NO: 111925 - DNA, 17 bp, synthetic construct
  source 1..17: mol_type = other DNA
gcctacgaggacttcaa

SEQ ID NO: 111926 - DNA, 17 bp, synthetic construct
  source 1..17: mol_type = other DNA
cctacgaggacttcaac

SEQ ID NO: 111927 - DNA, 17 bp, synthetic construct
  source 1..17: mol_type = other DNA
ctacgaggacttcaacg

SEQ ID NO: 111928 - DNA, 17 bp, synthetic construct
  source 1..17: mol_type = other DNA
tacgaggacttcaacgt

SEQ ID NO: 111929 - DNA, 17 bp, synthetic construct
  source 1..17: mol_type = other DNA
acgaggacttcaacgtc

SEQ ID NO: 111930 - DNA, 17 bp, synthetic construct
  source 1..17: mol_type = other DNA
cgaggacttcaacgtcc

SEQ ID NO: 111931 - DNA, 17 bp, synthetic construct
  source 1..17: mol_type = other DNA
gaggacttcaacgtcca

SEQ ID NO: 111932 - DNA, 17 bp, synthetic construct
  source 1..17: mol_type = other DNA
aggacttcaacgtccag

SEQ ID NO: 111933 - DNA, 17 bp, synthetic construct
  source 1..17: mol_type = other DNA
ggacttcaacgtccagc

SEQ ID NO: 111934 - DNA, 17 bp, synthetic construct
  source 1..17: mol_type = other DNA
gacttcaacgtccagct

SEQ ID NO: 111935 - DNA, 17 bp, synthetic construct
  source 1..17: mol_type = other DNA
acttcaacgtccagcta

SEQ ID NO: 111936 - DNA, 17 bp, synthetic construct
  source 1..17: mol_type = other DNA
cttcaacgtccagctac

SEQ ID NO: 111937 - DNA, 17 bp, synthetic construct
  source 1..17: mol_type = other DNA
ttcaacgtccagctacg

SEQ ID NO: 111938 - DNA, 17 bp, synthetic construct
  source 1..17: mol_type = other DNA
tcaacgtccagctacgc

SEQ ID NO: 111939 - DNA, 17 bp, synthetic construct
  source 1..17: mol_type = other DNA
caacgtccagctacgcc

SEQ ID NO: 111940 - DNA, 17 bp, synthetic construct
  source 1..17: mol_type = other DNA
aacgtccagctacgccg

SEQ ID NO: 111941 - DNA, 17 bp, synthetic construct
  source 1..17: mol_type = other DNA
acgtccagctacgccga

SEQ ID NO: 111942 - DNA, 17 bp, synthetic construct
  source 1..17: mol_type = other DNA
cgtccagctacgccgag

SEQ ID NO: 111943 - DNA, 17 bp, synthetic construct
  source 1..17: mol_type = other DNA
gtccagctacgccgagg

SEQ ID NO: 111944 - DNA, 17 bp, synthetic construct
  source 1..17: mol_type = other DNA
tccagctacgccgaggc

SEQ ID NO: 111945 - DNA, 17 bp, synthetic construct
  source 1..17: mol_type = other DNA
ccagctacgccgaggcc

SEQ ID NO: 111946 - DNA, 17 bp, synthetic construct
  source 1..17: mol_type = other DNA
cagctacgccgaggcct

SEQ ID NO: 111947 - DNA, 17 bp, synthetic construct
  source 1..17: mol_type = other DNA
agctacgccgaggccta

SEQ ID NO: 111948 - DNA, 17 bp, synthetic construct
  source 1..17: mol_type = other DNA
gctacgccgaggcctag

SEQ ID NO: 111949 - DNA, 17 bp, synthetic construct
  source 1..17: mol_type = other DNA
ctacgccgaggcctagt

SEQ ID NO: 111950 - DNA, 17 bp, synthetic construct
  source 1..17: mol_type = other DNA
tacgccgaggcctagtg

SEQ ID NO: 111951 - DNA, 17 bp, synthetic construct
  source 1..17: mol_type = other DNA
acgccgaggcctagtgg

SEQ ID NO: 111952 - DNA, 17 bp, synthetic construct
  source 1..17: mol_type = other DNA
cgccgaggcctagtggg

SEQ ID NO: 111953 - DNA, 17 bp, synthetic construct
  source 1..17: mol_type = other DNA
gccgaggcctagtgggc

SEQ ID NO: 111954 - DNA, 17 bp, synthetic construct
  source 1..17: mol_type = other DNA
ccgaggcctagtgggct

SEQ ID NO: 111955 - DNA, 17 bp, synthetic construct
  source 1..17: mol_type = other DNA
cgaggcctagtgggctc

SEQ ID NO: 111956 - DNA, 17 bp, synthetic construct
  source 1..17: mol_type = other DNA
gaggcctagtgggctcc

SEQ ID NO: 111957 - DNA, 17 bp, synthetic construct
  source 1..17: mol_type = other DNA
aggcctagtgggctcca

SEQ ID NO: 111958 - DNA, 17 bp, synthetic construct
  source 1..17: mol_type = other DNA
ggcctagtgggctccag

SEQ ID NO: 111959 - DNA, 17 bp, synthetic construct
  source 1..17: mol_type = other DNA
gcctagtgggctccagg

SEQ ID NO: 111960 - DNA, 17 bp, synthetic construct
  source 1..17: mol_type = other DNA
cctagtgggctccaggc

SEQ ID NO: 111961 - DNA, 17 bp, synthetic construct
  source 1..17: mol_type = other DNA
ctagtgggctccaggcc

SEQ ID NO: 111962 - DNA, 17 bp, synthetic construct
  source 1..17: mol_type = other DNA
tagtgggctccaggcct

SEQ ID NO: 111963 - DNA, 17 bp, synthetic construct
  source 1..17: mol_type = other DNA
agtgggctccaggcctg

SEQ ID NO: 111964 - DNA, 17 bp, synthetic construct
  source 1..17: mol_type = other DNA
gtgggctccaggcctgt

SEQ ID NO: 111965 - DNA, 17 bp, synthetic construct
  source 1..17: mol_type = other DNA
tgggctccaggcctgtg

SEQ ID NO: 111966 - DNA, 17 bp, synthetic construct
  source 1..17: mol_type = other DNA
gggctccaggcctgtgg

SEQ ID NO: 111967 - DNA, 17 bp, synthetic construct
  source 1..17: mol_type = other DNA
ggctccaggcctgtggt

SEQ ID NO: 111968 - DNA, 17 bp, synthetic construct
  source 1..17: mol_type = other DNA
gctccaggcctgtggtc

SEQ ID NO: 111969 - DNA, 17 bp, synthetic construct
  source 1..17: mol_type = other DNA
ctccaggcctgtggtca

SEQ ID NO: 111970 - DNA, 17 bp, synthetic construct
  source 1..17: mol_type = other DNA
tccaggcctgtggtcac

SEQ ID NO: 111971 - DNA, 17 bp, synthetic construct
  source 1..17: mol_type = other DNA
ccaggcctgtggtcacc

SEQ ID NO: 111972 - DNA, 17 bp, synthetic construct
  source 1..17: mol_type = other DNA
caggcctgtggtcaccc

SEQ ID NO: 111973 - DNA, 17 bp, synthetic construct
  source 1..17: mol_type = other DNA
aggcctgtggtcacccg

SEQ ID NO: 111974 - DNA, 17 bp, synthetic construct
  source 1..17: mol_type = other DNA
ggcctgtggtcacccgt

SEQ ID NO: 111975 - DNA, 17 bp, synthetic construct
  source 1..17: mol_type = other DNA
gcctgtggtcacccgtg

SEQ ID NO: 111976 - DNA, 17 bp, synthetic construct
  source 1..17: mol_type = other DNA
cctgtggtcacccgtgt

SEQ ID NO: 111977 - DNA, 17 bp, synthetic construct
  source 1..17: mol_type = other DNA
ctgtggtcacccgtgtt

SEQ ID NO: 111978 - DNA, 17 bp, synthetic construct
  source 1..17: mol_type = other DNA
tgtggtcacccgtgttg

SEQ ID NO: 111979 - DNA, 17 bp, synthetic construct
  source 1..17: mol_type = other DNA
gtggtcacccgtgttgt

SEQ ID NO: 111980 - DNA, 17 bp, synthetic construct
  source 1..17: mol_type = other DNA
tggtcacccgtgttgtc

SEQ ID NO: 111981 - DNA, 17 bp, synthetic construct
  source 1..17: mol_type = other DNA
ggtcacccgtgttgtca

SEQ ID NO: 111982 - DNA, 17 bp, synthetic construct
  source 1..17: mol_type = other DNA
gtcacccgtgttgtcat

SEQ ID NO: 111983 - DNA, 17 bp, synthetic construct
  source 1..17: mol_type = other DNA
tcacccgtgttgtcatc

SEQ ID NO: 111984 - DNA, 17 bp, synthetic construct
  source 1..17: mol_type = other DNA
cacccgtgttgtcatca

SEQ ID NO: 111985 - DNA, 17 bp, synthetic construct
  source 1..17: mol_type = other DNA
acccgtgttgtcatcaa

SEQ ID NO: 111986 - DNA, 17 bp, synthetic construct
  source 1..17: mol_type = other DNA
cccgtgttgtcatcaag

SEQ ID NO: 111987 - DNA, 17 bp, synthetic construct
  source 1..17: mol_type = other DNA
ccgtgttgtcatcaagg

SEQ ID NO: 111988 - DNA, 17 bp, synthetic construct
  source 1..17: mol_type = other DNA
cgtgttgtcatcaaggc

SEQ ID NO: 111989 - DNA, 17 bp, synthetic construct
  source 1..17: mol_type = other DNA
gtgttgtcatcaaggcc

SEQ ID NO: 111990 - DNA, 17 bp, synthetic construct
  source 1..17: mol_type = other DNA
tgttgtcatcaaggccc

SEQ ID NO: 111991 - DNA, 17 bp, synthetic construct
  source 1..17: mol_type = other DNA
gttgtcatcaaggccca

SEQ ID NO: 111992 - DNA, 17 bp, synthetic construct
  source 1..17: mol_type = other DNA
ttgtcatcaaggcccag

SEQ ID NO: 111993 - DNA, 17 bp, synthetic construct
  source 1..17: mol_type = other DNA
tgtcatcaaggcccagg

SEQ ID NO: 111994 - DNA, 17 bp, synthetic construct
  source 1..17: mol_type = other DNA
gtcatcaaggcccaggg

SEQ ID NO: 111995 - DNA, 17 bp, synthetic construct
  source 1..17: mol_type = other DNA
tcatcaaggcccagggg

SEQ ID NO: 111996 - DNA, 17 bp, synthetic construct
  source 1..17: mol_type = other DNA
catcaaggcccaggggc

SEQ ID NO: 111997 - DNA, 17 bp, synthetic construct
  source 1..17: mol_type = other DNA
atcaaggcccaggggct

SEQ ID NO: 111998 - DNA, 17 bp, synthetic construct
  source 1..17: mol_type = other DNA
tcaaggcccaggggctg

SEQ ID NO: 111999 - DNA, 17 bp, synthetic construct
  source 1..17: mol_type = other DNA
caaggcccaggggctgg

SEQ ID NO: 112000 - DNA, 17 bp, synthetic construct
  source 1..17: mol_type = other DNA
aaggcccaggggctggt

SEQ ID NO: 112001 - DNA, 17 bp, synthetic construct
  source 1..17: mol_type = other DNA
aggcccaggggctggtg

SEQ ID NO: 112002 - DNA, 17 bp, synthetic construct
  source 1..17: mol_type = other DNA
ggcccaggggctggtgc

SEQ ID NO: 112003 - DNA, 17 bp, synthetic construct
  source 1..17: mol_type = other DNA
gcccaggggctggtgct

SEQ ID NO: 112004 - DNA, 17 bp, synthetic construct
  source 1..17: mol_type = other DNA
cccaggggctggtgctg

SEQ ID NO: 112005 - DNA, 17 bp, synthetic construct
  source 1..17: mol_type = other DNA
ccaggggctggtgctgg

SEQ ID NO: 112006 - DNA, 17 bp, synthetic construct
  source 1..17: mol_type = other DNA
caggggctggtgctgga

SEQ ID NO: 112007 - DNA, 17 bp, synthetic construct
  source 1..17: mol_type = other DNA
aggggctggtgctggag

SEQ ID NO: 112008 - DNA, 17 bp, synthetic construct
  source 1..17: mol_type = other DNA
ggggctggtgctggagg

SEQ ID NO: 112009 - DNA, 17 bp, synthetic construct
  source 1..17: mol_type = other DNA
gggctggtgctggaggc

SEQ ID NO: 112010 - DNA, 17 bp, synthetic construct
  source 1..17: mol_type = other DNA
ggctggtgctggaggcg

SEQ ID NO: 112011 - DNA, 17 bp, synthetic construct
  source 1..17: mol_type = other DNA
gctggtgctggaggcgt

SEQ ID NO: 112012 - DNA, 17 bp, synthetic construct
  source 1..17: mol_type = other DNA
ctggtgctggaggcgtc

SEQ ID NO: 112013 - DNA, 17 bp, synthetic construct
  source 1..17: mol_type = other DNA
tggtgctggaggcgtcc

SEQ ID NO: 112014 - DNA, 17 bp, synthetic construct
  source 1..17: mol_type = other DNA
ggtgctggaggcgtcca

SEQ ID NO: 112015 - DNA, 17 bp, synthetic construct
  source 1..17: mol_type = other DNA
gtgctggaggcgtccaa

SEQ ID NO: 112016 - DNA, 17 bp, synthetic construct
  source 1..17: mol_type = other DNA
tgctggaggcgtccaac

SEQ ID NO: 112017 - DNA, 17 bp, synthetic construct
  source 1..17: mol_type = other DNA
gctggaggcgtccaacg

SEQ ID NO: 112018 - DNA, 17 bp, synthetic construct
  source 1..17: mol_type = other DNA
ctggaggcgtccaacgg

SEQ ID NO: 112019 - DNA, 17 bp, synthetic construct
  source 1..17: mol_type = other DNA
tggaggcgtccaacggc

SEQ ID NO: 112020 - DNA, 17 bp, synthetic construct
  source 1..17: mol_type = other DNA
ggaggcgtccaacggct

SEQ ID NO: 112021 - DNA, 17 bp, synthetic construct
  source 1..17: mol_type = other DNA
gaggcgtccaacggctc

SEQ ID NO: 112022 - DNA, 17 bp, synthetic construct
  source 1..17: mol_type = other DNA
aggcgtccaacggctcc

SEQ ID NO: 112023 - DNA, 17 bp, synthetic construct
  source 1..17: mol_type = other DNA
ggcgtccaacggctccg

SEQ ID NO: 112024 - DNA, 17 bp, synthetic construct
  source 1..17: mol_type = other DNA
gcgtccaacggctccgt

SEQ ID NO: 112025 - DNA, 17 bp, synthetic construct
  source 1..17: mol_type = other DNA
cgtccaacggctccgtc

SEQ ID NO: 112026 - DNA, 17 bp, synthetic construct
  source 1..17: mol_type = other DNA
gtccaacggctccgtcc

SEQ ID NO: 112027 - DNA, 17 bp, synthetic construct
  source 1..17: mol_type = other DNA
tccaacggctccgtcct

SEQ ID NO: 112028 - DNA, 17 bp, synthetic construct
  source 1..17: mol_type = other DNA
ccaacggctccgtcctc

SEQ ID NO: 112029 - DNA, 17 bp, synthetic construct
  source 1..17: mol_type = other DNA
caacggctccgtcctca

SEQ ID NO: 112030 - DNA, 17 bp, synthetic construct
  source 1..17: mol_type = other DNA
aacggctccgtcctcat

SEQ ID NO: 112031 - DNA, 17 bp, synthetic construct
  source 1..17: mol_type = other DNA
acggctccgtcctcatc

SEQ ID NO: 112032 - DNA, 17 bp, synthetic construct
  source 1..17: mol_type = other DNA
cggctccgtcctcatca

SEQ ID NO: 112033 - DNA, 17 bp, synthetic construct
  source 1..17: mol_type = other DNA
ggctccgtcctcatcaa

SEQ ID NO: 112034 - DNA, 17 bp, synthetic construct
  source 1..17: mol_type = other DNA
gctccgtcctcatcaat

SEQ ID NO: 112035 - DNA, 17 bp, synthetic construct
  source 1..17: mol_type = other DNA
ctccgtcctcatcaatg

SEQ ID NO: 112036 - DNA, 17 bp, synthetic construct
  source 1..17: mol_type = other DNA
tccgtcctcatcaatgg

SEQ ID NO: 112037 - DNA, 17 bp, synthetic construct
  source 1..17: mol_type = other DNA
ccgtcctcatcaatggg

SEQ ID NO: 112038 - DNA, 17 bp, synthetic construct
  source 1..17: mol_type = other DNA
cgtcctcatcaatgggc

SEQ ID NO: 112039 - DNA, 17 bp, synthetic construct
  source 1..17: mol_type = other DNA
gtcctcatcaatgggca

SEQ ID NO: 112040 - DNA, 17 bp, synthetic construct
  source 1..17: mol_type = other DNA
tcctcatcaatgggcag

SEQ ID NO: 112041 - DNA, 17 bp, synthetic construct
  source 1..17: mol_type = other DNA
cctcatcaatgggcagc

SEQ ID NO: 112042 - DNA, 17 bp, synthetic construct
  source 1..17: mol_type = other DNA
ctcatcaatgggcagcg

SEQ ID NO: 112043 - DNA, 17 bp, synthetic construct
  source 1..17: mol_type = other DNA
tcatcaatgggcagcgg

SEQ ID NO: 112044 - DNA, 17 bp, synthetic construct
  source 1..17: mol_type = other DNA
catcaatgggcagcggt

SEQ ID NO: 112045 - DNA, 17 bp, synthetic construct
  source 1..17: mol_type = other DNA
atcaatgggcagcggtg

SEQ ID NO: 112046 - DNA, 17 bp, synthetic construct
  source 1..17: mol_type = other DNA
tcaatgggcagcggtga

SEQ ID NO: 112047 - DNA, 17 bp, synthetic construct
  source 1..17: mol_type = other DNA
caatgggcagcggtgag

SEQ ID NO: 112048 - DNA, 17 bp, synthetic construct
  source 1..17: mol_type = other DNA
aatgggcagcggtgagc

SEQ ID NO: 112049 - DNA, 17 bp, synthetic construct
  source 1..17: mol_type = other DNA
atgggcagcggtgagcc

SEQ ID NO: 112050 - DNA, 17 bp, synthetic construct
  source 1..17: mol_type = other DNA
tgggcagcggtgagccg

SEQ ID NO: 112051 - DNA, 17 bp, synthetic construct
  source 1..17: mol_type = other DNA
gggcagcggtgagccgg

SEQ ID NO: 112052 - DNA, 17 bp, synthetic construct
  source 1..17: mol_type = other DNA
ggcagcggtgagccggc

SEQ ID NO: 112053 - DNA, 17 bp, synthetic construct
  source 1..17: mol_type = other DNA
gcagcggtgagccggcc

SEQ ID NO: 112054 - DNA, 17 bp, synthetic construct
  source 1..17: mol_type = other DNA
cagcggtgagccggcca

SEQ ID NO: 112055 - DNA, 17 bp, synthetic construct
  source 1..17: mol_type = other DNA
agcggtgagccggccac

SEQ ID NO: 112056 - DNA, 17 bp, synthetic construct
  source 1..17: mol_type = other DNA
gcggtgagccggccacc

SEQ ID NO: 112057 - DNA, 17 bp, synthetic construct
  source 1..17: mol_type = other DNA
cggtgagccggccaccc

SEQ ID NO: 112058 - DNA, 17 bp, synthetic construct
  source 1..17: mol_type = other DNA
ggtgagccggccaccct

SEQ ID NO: 112059 - DNA, 17 bp, synthetic construct
  source 1..17: mol_type = other DNA
gtgagccggccaccctg

SEQ ID NO: 112060 - DNA, 17 bp, synthetic construct
  source 1..17: mol_type = other DNA
tgagccggccaccctgg

SEQ ID NO: 112061 - DNA, 17 bp, synthetic construct
  source 1..17: mol_type = other DNA
gagccggccaccctggg

SEQ ID NO: 112062 - DNA, 17 bp, synthetic construct
  source 1..17: mol_type = other DNA
agccggccaccctgggg

SEQ ID NO: 112063 - DNA, 17 bp, synthetic construct
  source 1..17: mol_type = other DNA
gccggccaccctgggga

SEQ ID NO: 112064 - DNA, 17 bp, synthetic construct
  source 1..17: mol_type = other DNA
ccggccaccctggggag

SEQ ID NO: 112065 - DNA, 17 bp, synthetic construct
  source 1..17: mol_type = other DNA
cggccaccctggggagg

SEQ ID NO: 112066 - DNA, 17 bp, synthetic construct
  source 1..17: mol_type = other DNA
ggccaccctggggaggg

SEQ ID NO: 112067 - DNA, 17 bp, synthetic construct
  source 1..17: mol_type = other DNA
gccaccctggggagggg

SEQ ID NO: 112068 - DNA, 17 bp, synthetic construct
  source 1..17: mol_type = other DNA
ccaccctggggaggggc

SEQ ID NO: 112069 - DNA, 17 bp, synthetic construct
  source 1..17: mol_type = other DNA
caccctggggaggggcg

SEQ ID NO: 112070 - DNA, 17 bp, synthetic construct
  source 1..17: mol_type = other DNA
accctggggaggggcga

SEQ ID NO: 112071 - DNA, 17 bp, synthetic construct
  source 1..17: mol_type = other DNA
ccctggggaggggcgag

SEQ ID NO: 112072 - DNA, 17 bp, synthetic construct
  source 1..17: mol_type = other DNA
cctggggaggggcgagg

SEQ ID NO: 112073 - DNA, 17 bp, synthetic construct
  source 1..17: mol_type = other DNA
ctggggaggggcgaggg

SEQ ID NO: 112074 - DNA, 17 bp, synthetic construct
  source 1..17: mol_type = other DNA
tggggaggggcgagggc

SEQ ID NO: 112075 - DNA, 17 bp, synthetic construct
  source 1..17: mol_type = other DNA
ggggaggggcgagggcc

SEQ ID NO: 112076 - DNA, 17 bp, synthetic construct
  source 1..17: mol_type = other DNA
gggaggggcgagggccg

SEQ ID NO: 112077 - DNA, 17 bp, synthetic construct
  source 1..17: mol_type = other DNA
ggaggggcgagggccgg

SEQ ID NO: 112078 - DNA, 17 bp, synthetic construct
  source 1..17: mol_type = other DNA
gaggggcgagggccggg

SEQ ID NO: 112079 - DNA, 17 bp, synthetic construct
  source 1..17: mol_type = other DNA
aggggcgagggccgggc

SEQ ID NO: 112080 - DNA, 17 bp, synthetic construct
  source 1..17: mol_type = other DNA
ggggcgagggccgggcc

SEQ ID NO: 112081 - DNA, 17 bp, synthetic construct
  source 1..17: mol_type = other DNA
gggcgagggccgggcca

SEQ ID NO: 112082 - DNA, 17 bp, synthetic construct
  source 1..17: mol_type = other DNA
ggcgagggccgggccac

SEQ ID NO: 112083 - DNA, 17 bp, synthetic construct
  source 1..17: mol_type = other DNA
gcgagggccgggccaca

SEQ ID NO: 112084 - DNA, 17 bp, synthetic construct
  source 1..17: mol_type = other DNA
cgagggccgggccacac

SEQ ID NO: 112085 - DNA, 17 bp, synthetic construct
  source 1..17: mol_type = other DNA
gagggccgggccacaca

SEQ ID NO: 112086 - DNA, 17 bp, synthetic construct
  source 1..17: mol_type = other DNA
agggccgggccacacag

SEQ ID NO: 112087 - DNA, 17 bp, synthetic construct
  source 1..17: mol_type = other DNA
gggccgggccacacagt

SEQ ID NO: 112088 - DNA, 17 bp, synthetic construct
  source 1..17: mol_type = other DNA
ggccgggccacacagtg

SEQ ID NO: 112089 - DNA, 17 bp, synthetic construct
  source 1..17: mol_type = other DNA
gccgggccacacagtgt

SEQ ID NO: 112090 - DNA, 17 bp, synthetic construct
  source 1..17: mol_type = other DNA
ccgggccacacagtgtg

SEQ ID NO: 112091 - DNA, 17 bp, synthetic construct
  source 1..17: mol_type = other DNA
cgggccacacagtgtga

SEQ ID NO: 112092 - DNA, 17 bp, synthetic construct
  source 1..17: mol_type = other DNA
gggccacacagtgtgac

SEQ ID NO: 112093 - DNA, 17 bp, synthetic construct
  source 1..17: mol_type = other DNA
ggccacacagtgtgacc

SEQ ID NO: 112094 - DNA, 17 bp, synthetic construct
  source 1..17: mol_type = other DNA
gccacacagtgtgacct

SEQ ID NO: 112095 - DNA, 17 bp, synthetic construct
  source 1..17: mol_type = other DNA
ccacacagtgtgacctc

SEQ ID NO: 112096 - DNA, 17 bp, synthetic construct
  source 1..17: mol_type = other DNA
cacacagtgtgacctcc

SEQ ID NO: 112097 - DNA, 17 bp, synthetic construct
  source 1..17: mol_type = other DNA
acacagtgtgacctccc

SEQ ID NO: 112098 - DNA, 17 bp, synthetic construct
  source 1..17: mol_type = other DNA
cacagtgtgacctcccc

SEQ ID NO: 112099 - DNA, 17 bp, synthetic construct
  source 1..17: mol_type = other DNA
acagtgtgacctcccca

SEQ ID NO: 112100 - DNA, 17 bp, synthetic construct
  source 1..17: mol_type = other DNA
cagtgtgacctccccac

SEQ ID NO: 112101 - DNA, 17 bp, synthetic construct
  source 1..17: mol_type = other DNA
agtgtgacctccccaca

SEQ ID NO: 112102 - DNA, 17 bp, synthetic construct
  source 1..17: mol_type = other DNA
gtgtgacctccccacac

SEQ ID NO: 112103 - DNA, 17 bp, synthetic construct
  source 1..17: mol_type = other DNA
tgtgacctccccacacg

SEQ ID NO: 112104 - DNA, 17 bp, synthetic construct
  source 1..17: mol_type = other DNA
gtgacctccccacacgg

SEQ ID NO: 112105 - DNA, 17 bp, synthetic construct
  source 1..17: mol_type = other DNA
tgacctccccacacggc

SEQ ID NO: 112106 - DNA, 17 bp, synthetic construct
  source 1..17: mol_type = other DNA
gacctccccacacggcc

SEQ ID NO: 112107 - DNA, 17 bp, synthetic construct
  source 1..17: mol_type = other DNA
acctccccacacggcca

SEQ ID NO: 112108 - DNA, 17 bp, synthetic construct
  source 1..17: mol_type = other DNA
cctccccacacggccat

SEQ ID NO: 112109 - DNA, 17 bp, synthetic construct
  source 1..17: mol_type = other DNA
ctccccacacggccatg

SEQ ID NO: 112110 - DNA, 17 bp, synthetic construct
  source 1..17: mol_type = other DNA
tccccacacggccatgt

SEQ ID NO: 112111 - DNA, 17 bp, synthetic construct
  source 1..17: mol_type = other DNA
ccccacacggccatgtc

SEQ ID NO: 112112 - DNA, 17 bp, synthetic construct
  source 1..17: mol_type = other DNA
cccacacggccatgtct

SEQ ID NO: 112113 - DNA, 17 bp, synthetic construct
  source 1..17: mol_type = other DNA
ccacacggccatgtctg

SEQ ID NO: 112114 - DNA, 17 bp, synthetic construct
  source 1..17: mol_type = other DNA
cacacggccatgtctga

SEQ ID NO: 112115 - DNA, 17 bp, synthetic construct
  source 1..17: mol_type = other DNA
acacggccatgtctgac

SEQ ID NO: 112116 - DNA, 17 bp, synthetic construct
  source 1..17: mol_type = other DNA
cacggccatgtctgacc

SEQ ID NO: 112117 - DNA, 17 bp, synthetic construct
  source 1..17: mol_type = other DNA
acggccatgtctgacct

SEQ ID NO: 112118 - DNA, 17 bp, synthetic construct
  source 1..17: mol_type = other DNA
cggccatgtctgacctg

SEQ ID NO: 112119 - DNA, 17 bp, synthetic construct
  source 1..17: mol_type = other DNA
ggccatgtctgacctgg

SEQ ID NO: 112120 - DNA, 17 bp, synthetic construct
  source 1..17: mol_type = other DNA
gccatgtctgacctggg

SEQ ID NO: 112121 - DNA, 17 bp, synthetic construct
  source 1..17: mol_type = other DNA
ccatgtctgacctgggc

SEQ ID NO: 112122 - DNA, 17 bp, synthetic construct
  source 1..17: mol_type = other DNA
catgtctgacctgggcc

SEQ ID NO: 112123 - DNA, 17 bp, synthetic construct
  source 1..17: mol_type = other DNA
atgtctgacctgggcca

SEQ ID NO: 112124 - DNA, 17 bp, synthetic construct
  source 1..17: mol_type = other DNA
tgtctgacctgggccag

SEQ ID NO: 112125 - DNA, 17 bp, synthetic construct
  source 1..17: mol_type = other DNA
gtctgacctgggccagg

SEQ ID NO: 112126 - DNA, 17 bp, synthetic construct
  source 1..17: mol_type = other DNA
tctgacctgggccaggg

SEQ ID NO: 112127 - DNA, 17 bp, synthetic construct
  source 1..17: mol_type = other DNA
ctgacctgggccagggc

SEQ ID NO: 112128 - DNA, 17 bp, synthetic construct
  source 1..17: mol_type = other DNA
tgacctgggccagggct

SEQ ID NO: 112129 - DNA, 17 bp, synthetic construct
  source 1..17: mol_type = other DNA
gacctgggccagggctg

SEQ ID NO: 112130 - DNA, 17 bp, synthetic construct
  source 1..17: mol_type = other DNA
acctgggccagggctgg

SEQ ID NO: 112131 - DNA, 17 bp, synthetic construct
  source 1..17: mol_type = other DNA
cctgggccagggctggg

SEQ ID NO: 112132 - DNA, 17 bp, synthetic construct
  source 1..17: mol_type = other DNA
ctgggccagggctgggg

SEQ ID NO: 112133 - DNA, 17 bp, synthetic construct
  source 1..17: mol_type = other DNA
tgggccagggctggggg

SEQ ID NO: 112134 - DNA, 17 bp, synthetic construct
  source 1..17: mol_type = other DNA
gggccagggctgggggg

SEQ ID NO: 112135 - DNA, 17 bp, synthetic construct
  source 1..17: mol_type = other DNA
ggccagggctggggggg

SEQ ID NO: 112136 - DNA, 17 bp, synthetic construct
  source 1..17: mol_type = other DNA
gccagggctgggggggg

SEQ ID NO: 112137 - DNA, 17 bp, synthetic construct
  source 1..17: mol_type = other DNA
ccagggctggggggggg

SEQ ID NO: 112138 - DNA, 17 bp, synthetic construct
  source 1..17: mol_type = other DNA
cagggctgggggggggt

SEQ ID NO: 112139 - DNA, 17 bp, synthetic construct
  source 1..17: mol_type = other DNA
agggctgggggggggtt

SEQ ID NO: 112140 - DNA, 17 bp, synthetic construct
  source 1..17: mol_type = other DNA
gggctgggggggggttg

SEQ ID NO: 112141 - DNA, 17 bp, synthetic construct
  source 1..17: mol_type = other DNA
ggctgggggggggttgg

SEQ ID NO: 112142 - DNA, 17 bp, synthetic construct
  source 1..17: mol_type = other DNA
gctgggggggggttggg

SEQ ID NO: 112143 - DNA, 17 bp, synthetic construct
  source 1..17: mol_type = other DNA
ctgggggggggttgggt

SEQ ID NO: 112144 - DNA, 17 bp, synthetic construct
  source 1..17: mol_type = other DNA
tgggggggggttgggtg

SEQ ID NO: 112145 - DNA, 17 bp, synthetic construct
  source 1..17: mol_type = other DNA
gggggggggttgggtgg

SEQ ID NO: 112146 - DNA, 17 bp, synthetic construct
  source 1..17: mol_type = other DNA
ggggggggttgggtggg

SEQ ID NO: 112147 - DNA, 17 bp, synthetic construct
  source 1..17: mol_type = other DNA
gggggggttgggtgggc

SEQ ID NO: 112148 - DNA, 17 bp, synthetic construct
  source 1..17: mol_type = other DNA
ggggggttgggtgggca

SEQ ID NO: 112149 - DNA, 17 bp, synthetic construct
  source 1..17: mol_type = other DNA
gggggttgggtgggcag

SEQ ID NO: 112150 - DNA, 17 bp, synthetic construct
  source 1..17: mol_type = other DNA
ggggttgggtgggcagg

SEQ ID NO: 112151 - DNA, 17 bp, synthetic construct
  source 1..17: mol_type = other DNA
gggttgggtgggcaggc

SEQ ID NO: 112152 - DNA, 17 bp, synthetic construct
  source 1..17: mol_type = other DNA
ggttgggtgggcaggca

SEQ ID NO: 112153 - DNA, 17 bp, synthetic construct
  source 1..17: mol_type = other DNA
gttgggtgggcaggcag

SEQ ID NO: 112154 - DNA, 17 bp, synthetic construct
  source 1..17: mol_type = other DNA
ttgggtgggcaggcagc

SEQ ID NO: 112155 - DNA, 17 bp, synthetic construct
  source 1..17: mol_type = other DNA
tgggtgggcaggcagcc

SEQ ID NO: 112156 - DNA, 17 bp, synthetic construct
  source 1..17: mol_type = other DNA
gggtgggcaggcagcca

SEQ ID NO: 112157 - DNA, 17 bp, synthetic construct
  source 1..17: mol_type = other DNA
ggtgggcaggcagccag

SEQ ID NO: 112158 - DNA, 17 bp, synthetic construct
  source 1..17: mol_type = other DNA
gtgggcaggcagccagg

SEQ ID NO: 112159 - DNA, 17 bp, synthetic construct
  source 1..17: mol_type = other DNA
tgggcaggcagccagga

SEQ ID NO: 112160 - DNA, 17 bp, synthetic construct
  source 1..17: mol_type = other DNA
gggcaggcagccaggag

SEQ ID NO: 112161 - DNA, 17 bp, synthetic construct
  source 1..17: mol_type = other DNA
ggcaggcagccaggaga

SEQ ID NO: 112162 - DNA, 17 bp, synthetic construct
  source 1..17: mol_type = other DNA
gcaggcagccaggagag

SEQ ID NO: 112163 - DNA, 17 bp, synthetic construct
  source 1..17: mol_type = other DNA
caggcagccaggagagc

SEQ ID NO: 112164 - DNA, 17 bp, synthetic construct
  source 1..17: mol_type = other DNA
aggcagccaggagagcg

SEQ ID NO: 112165 - DNA, 17 bp, synthetic construct
  source 1..17: mol_type = other DNA
ggcagccaggagagcgg

SEQ ID NO: 112166 - DNA, 17 bp, synthetic construct
  source 1..17: mol_type = other DNA
gcagccaggagagcggg

SEQ ID NO: 112167 - DNA, 17 bp, synthetic construct
  source 1..17: mol_type = other DNA
cagccaggagagcgggg

SEQ ID NO: 112168 - DNA, 17 bp, synthetic construct
  source 1..17: mol_type = other DNA
agccaggagagcggggc

SEQ ID NO: 112169 - DNA, 17 bp, synthetic construct
  source 1..17: mol_type = other DNA
gccaggagagcggggcc

SEQ ID NO: 112170 - DNA, 17 bp, synthetic construct
  source 1..17: mol_type = other DNA
ccaggagagcggggccc

SEQ ID NO: 112171 - DNA, 17 bp, synthetic construct
  source 1..17: mol_type = other DNA
caggagagcggggccca

SEQ ID NO: 112172 - DNA, 17 bp, synthetic construct
  source 1..17: mol_type = other DNA
aggagagcggggcccag

SEQ ID NO: 112173 - DNA, 17 bp, synthetic construct
  source 1..17: mol_type = other DNA
ggagagcggggcccagg

SEQ ID NO: 112174 - DNA, 17 bp, synthetic construct
  source 1..17: mol_type = other DNA
gagagcggggcccaggg

SEQ ID NO: 112175 - DNA, 17 bp, synthetic construct
  source 1..17: mol_type = other DNA
agagcggggcccaggga

SEQ ID NO: 112176 - DNA, 17 bp, synthetic construct
  source 1..17: mol_type = other DNA
gagcggggcccagggag

SEQ ID NO: 112177 - DNA, 17 bp, synthetic construct
  source 1..17: mol_type = other DNA
agcggggcccagggaga

SEQ ID NO: 112178 - DNA, 17 bp, synthetic construct
  source 1..17: mol_type = other DNA
gcggggcccagggagag

SEQ ID NO: 112179 - DNA, 17 bp, synthetic construct
  source 1..17: mol_type = other DNA
cggggcccagggagaga

SEQ ID NO: 112180 - DNA, 17 bp, synthetic construct
  source 1..17: mol_type = other DNA
ggggcccagggagagac

SEQ ID NO: 112181 - DNA, 17 bp, synthetic construct
  source 1..17: mol_type = other DNA
gggcccagggagagacc

SEQ ID NO: 112182 - DNA, 17 bp, synthetic construct
  source 1..17: mol_type = other DNA
ggcccagggagagaccc

SEQ ID NO: 112183 - DNA, 17 bp, synthetic construct
  source 1..17: mol_type = other DNA
gcccagggagagacccc

SEQ ID NO: 112184 - DNA, 17 bp, synthetic construct
  source 1..17: mol_type = other DNA
cccagggagagaccccg

SEQ ID NO: 112185 - DNA, 17 bp, synthetic construct
  source 1..17: mol_type = other DNA
ccagggagagaccccgc

SEQ ID NO: 112186 - DNA, 17 bp, synthetic construct
  source 1..17: mol_type = other DNA
cagggagagaccccgct

SEQ ID NO: 112187 - DNA, 17 bp, synthetic construct
  source 1..17: mol_type = other DNA
agggagagaccccgctg

SEQ ID NO: 112188 - DNA, 17 bp, synthetic construct
  source 1..17: mol_type = other DNA
gggagagaccccgctgt

SEQ ID NO: 112189 - DNA, 17 bp, synthetic construct
  source 1..17: mol_type = other DNA
ggagagaccccgctgtc

SEQ ID NO: 112190 - DNA, 17 bp, synthetic construct
  source 1..17: mol_type = other DNA
gagagaccccgctgtct

SEQ ID NO: 112191 - DNA, 17 bp, synthetic construct
  source 1..17: mol_type = other DNA
agagaccccgctgtctg

SEQ ID NO: 112192 - DNA, 17 bp, synthetic construct
  source 1..17: mol_type = other DNA
gagaccccgctgtctgc

SEQ ID NO: 112193 - DNA, 17 bp, synthetic construct
  source 1..17: mol_type = other DNA
agaccccgctgtctgcg

SEQ ID NO: 112194 - DNA, 17 bp, synthetic construct
  source 1..17: mol_type = other DNA
gaccccgctgtctgcgc

SEQ ID NO: 112195 - DNA, 17 bp, synthetic construct
  source 1..17: mol_type = other DNA
accccgctgtctgcgca

SEQ ID NO: 112196 - DNA, 17 bp, synthetic construct
  source 1..17: mol_type = other DNA
ccccgctgtctgcgcag

SEQ ID NO: 112197 - DNA, 17 bp, synthetic construct
  source 1..17: mol_type = other DNA
cccgctgtctgcgcagg

SEQ ID NO: 112198 - DNA, 17 bp, synthetic construct
  source 1..17: mol_type = other DNA
ccgctgtctgcgcaggg

SEQ ID NO: 112199 - DNA, 17 bp, synthetic construct
  source 1..17: mol_type = other DNA
cgctgtctgcgcaggga

SEQ ID NO: 112200 - DNA, 17 bp, synthetic construct
  source 1..17: mol_type = other DNA
gctgtctgcgcagggag

SEQ ID NO: 112201 - DNA, 17 bp, synthetic construct
  source 1..17: mol_type = other DNA
ctgtctgcgcagggagg

SEQ ID NO: 112202 - DNA, 17 bp, synthetic construct
  source 1..17: mol_type = other DNA
tgtctgcgcagggagga

SEQ ID NO: 112203 - DNA, 17 bp, synthetic construct
  source 1..17: mol_type = other DNA
gtctgcgcagggaggag

SEQ ID NO: 112204 - DNA, 17 bp, synthetic construct
  source 1..17: mol_type = other DNA
tctgcgcagggaggagc

SEQ ID NO: 112205 - DNA, 17 bp, synthetic construct
  source 1..17: mol_type = other DNA
ctgcgcagggaggagct

SEQ ID NO: 112206 - DNA, 17 bp, synthetic construct
  source 1..17: mol_type = other DNA
tgcgcagggaggagctg

SEQ ID NO: 112207 - DNA, 17 bp, synthetic construct
  source 1..17: mol_type = other DNA
gcgcagggaggagctgc

SEQ ID NO: 112208 - DNA, 17 bp, synthetic construct
  source 1..17: mol_type = other DNA
cgcagggaggagctgcc

SEQ ID NO: 112209 - DNA, 17 bp, synthetic construct
  source 1..17: mol_type = other DNA
gcagggaggagctgcct

SEQ ID NO: 112210 - DNA, 17 bp, synthetic construct
  source 1..17: mol_type = other DNA
cagggaggagctgcctt

SEQ ID NO: 112211 - DNA, 17 bp, synthetic construct
  source 1..17: mol_type = other DNA
agggaggagctgcctta

SEQ ID NO: 112212 - DNA, 17 bp, synthetic construct
  source 1..17: mol_type = other DNA
gggaggagctgccttac

SEQ ID NO: 112213 - DNA, 17 bp, synthetic construct
  source 1..17: mol_type = other DNA
ggaggagctgccttaca

SEQ ID NO: 112214 - DNA, 17 bp, synthetic construct
  source 1..17: mol_type = other DNA
gaggagctgccttacag

SEQ ID NO: 112215 - DNA, 17 bp, synthetic construct
  source 1..17: mol_type = other DNA
aggagctgccttacagc

SEQ ID NO: 112216 - DNA, 17 bp, synthetic construct
  source 1..17: mol_type = other DNA
ggagctgccttacagcc

SEQ ID NO: 112217 - DNA, 17 bp, synthetic construct
  source 1..17: mol_type = other DNA
gagctgccttacagccg

SEQ ID NO: 112218 - DNA, 17 bp, synthetic construct
  source 1..17: mol_type = other DNA
agctgccttacagccgc

SEQ ID NO: 112219 - DNA, 17 bp, synthetic construct
  source 1..17: mol_type = other DNA
gctgccttacagccgca

SEQ ID NO: 112220 - DNA, 17 bp, synthetic construct
  source 1..17: mol_type = other DNA
ctgccttacagccgcac

SEQ ID NO: 112221 - DNA, 17 bp, synthetic construct
  source 1..17: mol_type = other DNA
tgccttacagccgcact

SEQ ID NO: 112222 - DNA, 17 bp, synthetic construct
  source 1..17: mol_type = other DNA
gccttacagccgcactg

SEQ ID NO: 112223 - DNA, 17 bp, synthetic construct
  source 1..17: mol_type = other DNA
ccttacagccgcactgg

SEQ ID NO: 112224 - DNA, 17 bp, synthetic construct
  source 1..17: mol_type = other DNA
cttacagccgcactggc

SEQ ID NO: 112225 - DNA, 17 bp, synthetic construct
  source 1..17: mol_type = other DNA
ttacagccgcactggcc

SEQ ID NO: 112226 - DNA, 17 bp, synthetic construct
  source 1..17: mol_type = other DNA
tacagccgcactggcct

SEQ ID NO: 112227 - DNA, 17 bp, synthetic construct
  source 1..17: mol_type = other DNA
acagccgcactggcctc

SEQ ID NO: 112228 - DNA, 17 bp, synthetic construct
  source 1..17: mol_type = other DNA
cagccgcactggcctcc

SEQ ID NO: 112229 - DNA, 17 bp, synthetic construct
  source 1..17: mol_type = other DNA
agccgcactggcctcct

SEQ ID NO: 112230 - DNA, 17 bp, synthetic construct
  source 1..17: mol_type = other DNA
gccgcactggcctcctg

SEQ ID NO: 112231 - DNA, 17 bp, synthetic construct
  source 1..17: mol_type = other DNA
ccgcactggcctcctgg

SEQ ID NO: 112232 - DNA, 17 bp, synthetic construct
  source 1..17: mol_type = other DNA
cgcactggcctcctggt

SEQ ID NO: 112233 - DNA, 17 bp, synthetic construct
  source 1..17: mol_type = other DNA
gcactggcctcctggtg

SEQ ID NO: 112234 - DNA, 17 bp, synthetic construct
  source 1..17: mol_type = other DNA
cactggcctcctggtgg

SEQ ID NO: 112235 - DNA, 17 bp, synthetic construct
  source 1..17: mol_type = other DNA
actggcctcctggtgga

SEQ ID NO: 112236 - DNA, 17 bp, synthetic construct
  source 1..17: mol_type = other DNA
ctggcctcctggtggag

SEQ ID NO: 112237 - DNA, 17 bp, synthetic construct
  source 1..17: mol_type = other DNA
tggcctcctggtggagc

SEQ ID NO: 112238 - DNA, 17 bp, synthetic construct
  source 1..17: mol_type = other DNA
ggcctcctggtggagca

SEQ ID NO: 112239 - DNA, 17 bp, synthetic construct
  source 1..17: mol_type = other DNA
gcctcctggtggagcag

SEQ ID NO: 112240 - DNA, 17 bp, synthetic construct
  source 1..17: mol_type = other DNA
cctcctggtggagcaga

SEQ ID NO: 112241 - DNA, 17 bp, synthetic construct
  source 1..17: mol_type = other DNA
ctcctggtggagcagag

SEQ ID NO: 112242 - DNA, 17 bp, synthetic construct
  source 1..17: mol_type = other DNA
tcctggtggagcagagc

SEQ ID NO: 112243 - DNA, 17 bp, synthetic construct
  source 1..17: mol_type = other DNA
cctggtggagcagagcg

SEQ ID NO: 112244 - DNA, 17 bp, synthetic construct
  source 1..17: mol_type = other DNA
ctggtggagcagagcgg

SEQ ID NO: 112245 - DNA, 17 bp, synthetic construct
  source 1..17: mol_type = other DNA
tggtggagcagagcggg

SEQ ID NO: 112246 - DNA, 17 bp, synthetic construct
  source 1..17: mol_type = other DNA
ggtggagcagagcgggg

SEQ ID NO: 112247 - DNA, 17 bp, synthetic construct
  source 1..17: mol_type = other DNA
gtggagcagagcgggga

SEQ ID NO: 112248 - DNA, 17 bp, synthetic construct
  source 1..17: mol_type = other DNA
tggagcagagcggggac

SEQ ID NO: 112249 - DNA, 17 bp, synthetic construct
  source 1..17: mol_type = other DNA
ggagcagagcggggact

SEQ ID NO: 112250 - DNA, 17 bp, synthetic construct
  source 1..17: mol_type = other DNA
gagcagagcggggacta

SEQ ID NO: 112251 - DNA, 17 bp, synthetic construct
  source 1..17: mol_type = other DNA
agcagagcggggactac

SEQ ID NO: 112252 - DNA, 17 bp, synthetic construct
  source 1..17: mol_type = other DNA
gcagagcggggactaca

SEQ ID NO: 112253 - DNA, 17 bp, synthetic construct
  source 1..17: mol_type = other DNA
cagagcggggactacat

SEQ ID NO: 112254 - DNA, 17 bp, synthetic construct
  source 1..17: mol_type = other DNA
agagcggggactacatc

SEQ ID NO: 112255 - DNA, 17 bp, synthetic construct
  source 1..17: mol_type = other DNA
gagcggggactacatca

SEQ ID NO: 112256 - DNA, 17 bp, synthetic construct
  source 1..17: mol_type = other DNA
agcggggactacatcaa

SEQ ID NO: 112257 - DNA, 17 bp, synthetic construct
  source 1..17: mol_type = other DNA
gcggggactacatcaag

SEQ ID NO: 112258 - DNA, 17 bp, synthetic construct
  source 1..17: mol_type = other DNA
cggggactacatcaagg

SEQ ID NO: 112259 - DNA, 17 bp, synthetic construct
  source 1..17: mol_type = other DNA
ggggactacatcaaggt

SEQ ID NO: 112260 - DNA, 17 bp, synthetic construct
  source 1..17: mol_type = other DNA
gggactacatcaaggtc

SEQ ID NO: 112261 - DNA, 17 bp, synthetic construct
  source 1..17: mol_type = other DNA
ggactacatcaaggtca

SEQ ID NO: 112262 - DNA, 17 bp, synthetic construct
  source 1..17: mol_type = other DNA
gactacatcaaggtcag

SEQ ID NO: 112263 - DNA, 17 bp, synthetic construct
  source 1..17: mol_type = other DNA
actacatcaaggtcagc

SEQ ID NO: 112264 - DNA, 17 bp, synthetic construct
  source 1..17: mol_type = other DNA
ctacatcaaggtcagca

SEQ ID NO: 112265 - DNA, 17 bp, synthetic construct
  source 1..17: mol_type = other DNA
tacatcaaggtcagcat

SEQ ID NO: 112266 - DNA, 17 bp, synthetic construct
  source 1..17: mol_type = other DNA
acatcaaggtcagcatc

SEQ ID NO: 112267 - DNA, 17 bp, synthetic construct
  source 1..17: mol_type = other DNA
catcaaggtcagcatcc

SEQ ID NO: 112268 - DNA, 17 bp, synthetic construct
  source 1..17: mol_type = other DNA
atcaaggtcagcatccg

SEQ ID NO: 112269 - DNA, 17 bp, synthetic construct
  source 1..17: mol_type = other DNA
tcaaggtcagcatccgg

SEQ ID NO: 112270 - DNA, 17 bp, synthetic construct
  source 1..17: mol_type = other DNA
caaggtcagcatccggc

SEQ ID NO: 112271 - DNA, 17 bp, synthetic construct
  source 1..17: mol_type = other DNA
aaggtcagcatccggct

SEQ ID NO: 112272 - DNA, 17 bp, synthetic construct
  source 1..17: mol_type = other DNA
aggtcagcatccggctg

SEQ ID NO: 112273 - DNA, 17 bp, synthetic construct
  source 1..17: mol_type = other DNA
ggtcagcatccggctgg

SEQ ID NO: 112274 - DNA, 17 bp, synthetic construct
  source 1..17: mol_type = other DNA
gtcagcatccggctggt

SEQ ID NO: 112275 - DNA, 17 bp, synthetic construct
  source 1..17: mol_type = other DNA
tcagcatccggctggtg

SEQ ID NO: 112276 - DNA, 17 bp, synthetic construct
  source 1..17: mol_type = other DNA
cagcatccggctggtgc

SEQ ID NO: 112277 - DNA, 17 bp, synthetic construct
  source 1..17: mol_type = other DNA
agcatccggctggtgct

SEQ ID NO: 112278 - DNA, 17 bp, synthetic construct
  source 1..17: mol_type = other DNA
gcatccggctggtgctg

SEQ ID NO: 112279 - DNA, 17 bp, synthetic construct
  source 1..17: mol_type = other DNA
catccggctggtgctga

SEQ ID NO: 112280 - DNA, 17 bp, synthetic construct
  source 1..17: mol_type = other DNA
atccggctggtgctgac

SEQ ID NO: 112281 - DNA, 17 bp, synthetic construct
  source 1..17: mol_type = other DNA
tccggctggtgctgaca

SEQ ID NO: 112282 - DNA, 17 bp, synthetic construct
  source 1..17: mol_type = other DNA
ccggctggtgctgacat

SEQ ID NO: 112283 - DNA, 17 bp, synthetic construct
  source 1..17: mol_type = other DNA
cggctggtgctgacatt

SEQ ID NO: 112284 - DNA, 17 bp, synthetic construct
  source 1..17: mol_type = other DNA
ggctggtgctgacattc

SEQ ID NO: 112285 - DNA, 17 bp, synthetic construct
  source 1..17: mol_type = other DNA
gctggtgctgacattcc

SEQ ID NO: 112286 - DNA, 17 bp, synthetic construct
  source 1..17: mol_type = other DNA
ctggtgctgacattcct

SEQ ID NO: 112287 - DNA, 17 bp, synthetic construct
  source 1..17: mol_type = other DNA
tggtgctgacattcctg

SEQ ID NO: 112288 - DNA, 17 bp, synthetic construct
  source 1..17: mol_type = other DNA
ggtgctgacattcctgt

SEQ ID NO: 112289 - DNA, 17 bp, synthetic construct
  source 1..17: mol_type = other DNA
gtgctgacattcctgtg

SEQ ID NO: 112290 - DNA, 17 bp, synthetic construct
  source 1..17: mol_type = other DNA
tgctgacattcctgtgg

SEQ ID NO: 112291 - DNA, 17 bp, synthetic construct
  source 1..17: mol_type = other DNA
gctgacattcctgtgga

SEQ ID NO: 112292 - DNA, 17 bp, synthetic construct
  source 1..17: mol_type = other DNA
ctgacattcctgtggaa

SEQ ID NO: 112293 - DNA, 17 bp, synthetic construct
  source 1..17: mol_type = other DNA
tgacattcctgtggaac

SEQ ID NO: 112294 - DNA, 17 bp, synthetic construct
  source 1..17: mol_type = other DNA
gacattcctgtggaacg

SEQ ID NO: 112295 - DNA, 17 bp, synthetic construct
  source 1..17: mol_type = other DNA
acattcctgtggaacgg

SEQ ID NO: 112296 - DNA, 17 bp, synthetic construct
  source 1..17: mol_type = other DNA
cattcctgtggaacgga

SEQ ID NO: 112297 - DNA, 17 bp, synthetic construct
  source 1..17: mol_type = other DNA
attcctgtggaacggag

SEQ ID NO: 112298 - DNA, 17 bp, synthetic construct
  source 1..17: mol_type = other DNA
ttcctgtggaacggaga

SEQ ID NO: 112299 - DNA, 17 bp, synthetic construct
  source 1..17: mol_type = other DNA
tcctgtggaacggagag

SEQ ID NO: 112300 - DNA, 17 bp, synthetic construct
  source 1..17: mol_type = other DNA
cctgtggaacggagagg

SEQ ID NO: 112301 - DNA, 17 bp, synthetic construct
  source 1..17: mol_type = other DNA
ctgtggaacggagagga

SEQ ID NO: 112302 - DNA, 17 bp, synthetic construct
  source 1..17: mol_type = other DNA
tgtggaacggagaggac

SEQ ID NO: 112303 - DNA, 17 bp, synthetic construct
  source 1..17: mol_type = other DNA
gtggaacggagaggaca

SEQ ID NO: 112304 - DNA, 17 bp, synthetic construct
  source 1..17: mol_type = other DNA
tggaacggagaggacag

SEQ ID NO: 112305 - DNA, 17 bp, synthetic construct
  source 1..17: mol_type = other DNA
ggaacggagaggacagt

SEQ ID NO: 112306 - DNA, 17 bp, synthetic construct
  source 1..17: mol_type = other DNA
gaacggagaggacagtg

SEQ ID NO: 112307 - DNA, 17 bp, synthetic construct
  source 1..17: mol_type = other DNA
aacggagaggacagtgc

SEQ ID NO: 112308 - DNA, 17 bp, synthetic construct
  source 1..17: mol_type = other DNA
acggagaggacagtgcc

SEQ ID NO: 112309 - DNA, 17 bp, synthetic construct
  source 1..17: mol_type = other DNA
cggagaggacagtgccc

SEQ ID NO: 112310 - DNA, 17 bp, synthetic construct
  source 1..17: mol_type = other DNA
ggagaggacagtgccct

SEQ ID NO: 112311 - DNA, 17 bp, synthetic construct
  source 1..17: mol_type = other DNA
gagaggacagtgccctg

SEQ ID NO: 112312 - DNA, 17 bp, synthetic construct
  source 1..17: mol_type = other DNA
agaggacagtgccctgg

SEQ ID NO: 112313 - DNA, 17 bp, synthetic construct
  source 1..17: mol_type = other DNA
gaggacagtgccctggt

SEQ ID NO: 112314 - DNA, 17 bp, synthetic construct
  source 1..17: mol_type = other DNA
aggacagtgccctggtg

SEQ ID NO: 112315 - DNA, 17 bp, synthetic construct
  source 1..17: mol_type = other DNA
ggacagtgccctggtga

SEQ ID NO: 112316 - DNA, 17 bp, synthetic construct
  source 1..17: mol_type = other DNA
gacagtgccctggtgag

SEQ ID NO: 112317 - DNA, 17 bp, synthetic construct
  source 1..17: mol_type = other DNA
acagtgccctggtgagg

SEQ ID NO: 112318 - DNA, 17 bp, synthetic construct
  source 1..17: mol_type = other DNA
cagtgccctggtgagga

SEQ ID NO: 112319 - DNA, 17 bp, synthetic construct
  source 1..17: mol_type = other DNA
agtgccctggtgaggaa

SEQ ID NO: 112320 - DNA, 17 bp, synthetic construct
  source 1..17: mol_type = other DNA
gtgccctggtgaggaag

SEQ ID NO: 112321 - DNA, 17 bp, synthetic construct
  source 1..17: mol_type = other DNA
tgccctggtgaggaagc

SEQ ID NO: 112322 - DNA, 17 bp, synthetic construct
  source 1..17: mol_type = other DNA
gccctggtgaggaagcc

SEQ ID NO: 112323 - DNA, 17 bp, synthetic construct
  source 1..17: mol_type = other DNA
ccctggtgaggaagccc

SEQ ID NO: 112324 - DNA, 17 bp, synthetic construct
  source 1..17: mol_type = other DNA
cctggtgaggaagcccc

SEQ ID NO: 112325 - DNA, 17 bp, synthetic construct
  source 1..17: mol_type = other DNA
ctggtgaggaagccccc

SEQ ID NO: 112326 - DNA, 17 bp, synthetic construct
  source 1..17: mol_type = other DNA
tggtgaggaagccccct

SEQ ID NO: 112327 - DNA, 17 bp, synthetic construct
  source 1..17: mol_type = other DNA
ggtgaggaagccccctc

SEQ ID NO: 112328 - DNA, 17 bp, synthetic construct
  source 1..17: mol_type = other DNA
gtgaggaagccccctcg

SEQ ID NO: 112329 - DNA, 17 bp, synthetic construct
  source 1..17: mol_type = other DNA
tgaggaagccccctcgc

SEQ ID NO: 112330 - DNA, 17 bp, synthetic construct
  source 1..17: mol_type = other DNA
gaggaagccccctcgcc

SEQ ID NO: 112331 - DNA, 17 bp, synthetic construct
  source 1..17: mol_type = other DNA
aggaagccccctcgccc

SEQ ID NO: 112332 - DNA, 17 bp, synthetic construct
  source 1..17: mol_type = other DNA
ggaagccccctcgcccc

SEQ ID NO: 112333 - DNA, 17 bp, synthetic construct
  source 1..17: mol_type = other DNA
gaagccccctcgcccct

SEQ ID NO: 112334 - DNA, 17 bp, synthetic construct
  source 1..17: mol_type = other DNA
aagccccctcgcccctt

SEQ ID NO: 112335 - DNA, 17 bp, synthetic construct
  source 1..17: mol_type = other DNA
agccccctcgccccttg

SEQ ID NO: 112336 - DNA, 17 bp, synthetic construct
  source 1..17: mol_type = other DNA
gccccctcgccccttgc

SEQ ID NO: 112337 - DNA, 17 bp, synthetic construct
  source 1..17: mol_type = other DNA
ccccctcgccccttgcc

SEQ ID NO: 112338 - DNA, 17 bp, synthetic construct
  source 1..17: mol_type = other DNA
cccctcgccccttgccc

SEQ ID NO: 112339 - DNA, 17 bp, synthetic construct
  source 1..17: mol_type = other DNA
ccctcgccccttgcccc

SEQ ID NO: 112340 - DNA, 17 bp, synthetic construct
  source 1..17: mol_type = other DNA
cctcgccccttgcccct

SEQ ID NO: 112341 - DNA, 17 bp, synthetic construct
  source 1..17: mol_type = other DNA
ctcgccccttgcccctt

SEQ ID NO: 112342 - DNA, 17 bp, synthetic construct
  source 1..17: mol_type = other DNA
tcgccccttgccccttc

SEQ ID NO: 112343 - DNA, 17 bp, synthetic construct
  source 1..17: mol_type = other DNA
cgccccttgccccttca

SEQ ID NO: 112344 - DNA, 17 bp, synthetic construct
  source 1..17: mol_type = other DNA
gccccttgccccttcag

SEQ ID NO: 112345 - DNA, 17 bp, synthetic construct
  source 1..17: mol_type = other DNA
ccccttgccccttcagg

SEQ ID NO: 112346 - DNA, 17 bp, synthetic construct
  source 1..17: mol_type = other DNA
cccttgccccttcaggc

SEQ ID NO: 112347 - DNA, 17 bp, synthetic construct
  source 1..17: mol_type = other DNA
ccttgccccttcaggcc

SEQ ID NO: 112348 - DNA, 17 bp, synthetic construct
  source 1..17: mol_type = other DNA
cttgccccttcaggcct

SEQ ID NO: 112349 - DNA, 17 bp, synthetic construct
  source 1..17: mol_type = other DNA
ttgccccttcaggcctg

SEQ ID NO: 112350 - DNA, 17 bp, synthetic construct
  source 1..17: mol_type = other DNA
tgccccttcaggcctgg

SEQ ID NO: 112351 - DNA, 17 bp, synthetic construct
  source 1..17: mol_type = other DNA
gccccttcaggcctggc

SEQ ID NO: 112352 - DNA, 17 bp, synthetic construct
  source 1..17: mol_type = other DNA
ccccttcaggcctggcc

SEQ ID NO: 112353 - DNA, 17 bp, synthetic construct
  source 1..17: mol_type = other DNA
cccttcaggcctggcca

SEQ ID NO: 112354 - DNA, 17 bp, synthetic construct
  source 1..17: mol_type = other DNA
ccttcaggcctggccac

SEQ ID NO: 112355 - DNA, 17 bp, synthetic construct
  source 1..17: mol_type = other DNA
cttcaggcctggccaca

SEQ ID NO: 112356 - DNA, 17 bp, synthetic construct
  source 1..17: mol_type = other DNA
ttcaggcctggccacaa

SEQ ID NO: 112357 - DNA, 17 bp, synthetic construct
  source 1..17: mol_type = other DNA
tcaggcctggccacaaa

SEQ ID NO: 112358 - DNA, 17 bp, synthetic construct
  source 1..17: mol_type = other DNA
caggcctggccacaaaa

SEQ ID NO: 112359 - DNA, 17 bp, synthetic construct
  source 1..17: mol_type = other DNA
aggcctggccacaaaac

SEQ ID NO: 112360 - DNA, 17 bp, synthetic construct
  source 1..17: mol_type = other DNA
ggcctggccacaaaacc

SEQ ID NO: 112361 - DNA, 17 bp, synthetic construct
  source 1..17: mol_type = other DNA
gcctggccacaaaaccc

SEQ ID NO: 112362 - DNA, 17 bp, synthetic construct
  source 1..17: mol_type = other DNA
cctggccacaaaacccc

SEQ ID NO: 112363 - DNA, 17 bp, synthetic construct
  source 1..17: mol_type = other DNA
ctggccacaaaaccccc

SEQ ID NO: 112364 - DNA, 17 bp, synthetic construct
  source 1..17: mol_type = other DNA
tggccacaaaaccccca

SEQ ID NO: 112365 - DNA, 17 bp, synthetic construct
  source 1..17: mol_type = other DNA
ggccacaaaacccccac

SEQ ID NO: 112366 - DNA, 17 bp, synthetic construct
  source 1..17: mol_type = other DNA
gccacaaaacccccacc

SEQ ID NO: 112367 - DNA, 17 bp, synthetic construct
  source 1..17: mol_type = other DNA
ccacaaaacccccaccg

SEQ ID NO: 112368 - DNA, 17 bp, synthetic construct
  source 1..17: mol_type = other DNA
cacaaaacccccaccgg

SEQ ID NO: 112369 - DNA, 17 bp, synthetic construct
  source 1..17: mol_type = other DNA
acaaaacccccaccggg

SEQ ID NO: 112370 - DNA, 17 bp, synthetic construct
  source 1..17: mol_type = other DNA
caaaacccccaccgggg

SEQ ID NO: 112371 - DNA, 17 bp, synthetic construct
  source 1..17: mol_type = other DNA
aaaacccccaccggggg

SEQ ID NO: 112372 - DNA, 17 bp, synthetic construct
  source 1..17: mol_type = other DNA
aaacccccaccgggggt

SEQ ID NO: 112373 - DNA, 17 bp, synthetic construct
  source 1..17: mol_type = other DNA
aacccccaccgggggtc

SEQ ID NO: 112374 - DNA, 17 bp, synthetic construct
  source 1..17: mol_type = other DNA
acccccaccgggggtcg

SEQ ID NO: 112375 - DNA, 17 bp, synthetic construct
  source 1..17: mol_type = other DNA
cccccaccgggggtcga

SEQ ID NO: 112376 - DNA, 17 bp, synthetic construct
  source 1..17: mol_type = other DNA
ccccaccgggggtcgag

SEQ ID NO: 112377 - DNA, 17 bp, synthetic construct
  source 1..17: mol_type = other DNA
cccaccgggggtcgagg

SEQ ID NO: 112378 - DNA, 17 bp, synthetic construct
  source 1..17: mol_type = other DNA
ccaccgggggtcgaggg

SEQ ID NO: 112379 - DNA, 17 bp, synthetic construct
  source 1..17: mol_type = other DNA
caccgggggtcgaggga

SEQ ID NO: 112380 - DNA, 17 bp, synthetic construct
  source 1..17: mol_type = other DNA
accgggggtcgagggat

SEQ ID NO: 112381 - DNA, 17 bp, synthetic construct
  source 1..17: mol_type = other DNA
ccgggggtcgagggatg

SEQ ID NO: 112382 - DNA, 17 bp, synthetic construct
  source 1..17: mol_type = other DNA
cgggggtcgagggatgc

SEQ ID NO: 112383 - DNA, 17 bp, synthetic construct
  source 1..17: mol_type = other DNA
gggggtcgagggatgcc

SEQ ID NO: 112384 - DNA, 17 bp, synthetic construct
  source 1..17: mol_type = other DNA
ggggtcgagggatgcct

SEQ ID NO: 112385 - DNA, 17 bp, synthetic construct
  source 1..17: mol_type = other DNA
gggtcgagggatgcctc

SEQ ID NO: 112386 - DNA, 17 bp, synthetic construct
  source 1..17: mol_type = other DNA
ggtcgagggatgcctcc

SEQ ID NO: 112387 - DNA, 17 bp, synthetic construct
  source 1..17: mol_type = other DNA
gtcgagggatgcctccc

SEQ ID NO: 112388 - DNA, 17 bp, synthetic construct
  source 1..17: mol_type = other DNA
tcgagggatgcctccct

SEQ ID NO: 112389 - DNA, 17 bp, synthetic construct
  source 1..17: mol_type = other DNA
cgagggatgcctccctg

SEQ ID NO: 112390 - DNA, 17 bp, synthetic construct
  source 1..17: mol_type = other DNA
gagggatgcctccctgg

SEQ ID NO: 112391 - DNA, 17 bp, synthetic construct
  source 1..17: mol_type = other DNA
agggatgcctccctggg

SEQ ID NO: 112392 - DNA, 17 bp, synthetic construct
  source 1..17: mol_type = other DNA
gggatgcctccctgggc

SEQ ID NO: 112393 - DNA, 17 bp, synthetic construct
  source 1..17: mol_type = other DNA
ggatgcctccctgggct

SEQ ID NO: 112394 - DNA, 17 bp, synthetic construct
  source 1..17: mol_type = other DNA
gatgcctccctgggctt

SEQ ID NO: 112395 - DNA, 17 bp, synthetic construct
  source 1..17: mol_type = other DNA
atgcctccctgggcttg

SEQ ID NO: 112396 - DNA, 17 bp, synthetic construct
  source 1..17: mol_type = other DNA
tgcctccctgggcttgg

SEQ ID NO: 112397 - DNA, 17 bp, synthetic construct
  source 1..17: mol_type = other DNA
gcctccctgggcttggg

SEQ ID NO: 112398 - DNA, 17 bp, synthetic construct
  source 1..17: mol_type = other DNA
cctccctgggcttgggg

SEQ ID NO: 112399 - DNA, 17 bp, synthetic construct
  source 1..17: mol_type = other DNA
ctccctgggcttggggt

SEQ ID NO: 112400 - DNA, 17 bp, synthetic construct
  source 1..17: mol_type = other DNA
tccctgggcttggggtc

SEQ ID NO: 112401 - DNA, 17 bp, synthetic construct
  source 1..17: mol_type = other DNA
ccctgggcttggggtca

SEQ ID NO: 112402 - DNA, 17 bp, synthetic construct
  source 1..17: mol_type = other DNA
cctgggcttggggtcac

SEQ ID NO: 112403 - DNA, 17 bp, synthetic construct
  source 1..17: mol_type = other DNA
ctgggcttggggtcacg

SEQ ID NO: 112404 - DNA, 17 bp, synthetic construct
  source 1..17: mol_type = other DNA
tgggcttggggtcacgg

SEQ ID NO: 112405 - DNA, 17 bp, synthetic construct
  source 1..17: mol_type = other DNA
gggcttggggtcacggg

SEQ ID NO: 112406 - DNA, 17 bp, synthetic construct
  source 1..17: mol_type = other DNA
ggcttggggtcacgggg

SEQ ID NO: 112407 - DNA, 17 bp, synthetic construct
  source 1..17: mol_type = other DNA
gcttggggtcacggggc

SEQ ID NO: 112408 - DNA, 17 bp, synthetic construct
  source 1..17: mol_type = other DNA
cttggggtcacggggct

SEQ ID NO: 112409 - DNA, 17 bp, synthetic construct
  source 1..17: mol_type = other DNA
ttggggtcacggggctt

SEQ ID NO: 112410 - DNA, 17 bp, synthetic construct
  source 1..17: mol_type = other DNA
tggggtcacggggcttg

SEQ ID NO: 112411 - DNA, 17 bp, synthetic construct
  source 1..17: mol_type = other DNA
ggggtcacggggcttgg

SEQ ID NO: 112412 - DNA, 17 bp, synthetic construct
  source 1..17: mol_type = other DNA
gggtcacggggcttggg

SEQ ID NO: 112413 - DNA, 17 bp, synthetic construct
  source 1..17: mol_type = other DNA
ggtcacggggcttgggg

SEQ ID NO: 112414 - DNA, 17 bp, synthetic construct
  source 1..17: mol_type = other DNA
gtcacggggcttggggc

SEQ ID NO: 112415 - DNA, 17 bp, synthetic construct
  source 1..17: mol_type = other DNA
tcacggggcttggggca

SEQ ID NO: 112416 - DNA, 17 bp, synthetic construct
  source 1..17: mol_type = other DNA
cacggggcttggggcat

SEQ ID NO: 112417 - DNA, 17 bp, synthetic construct
  source 1..17: mol_type = other DNA
acggggcttggggcatg

SEQ ID NO: 112418 - DNA, 17 bp, synthetic construct
  source 1..17: mol_type = other DNA
cggggcttggggcatgt

SEQ ID NO: 112419 - DNA, 17 bp, synthetic construct
  source 1..17: mol_type = other DNA
ggggcttggggcatgtt

SEQ ID NO: 112420 - DNA, 17 bp, synthetic construct
  source 1..17: mol_type = other DNA
gggcttggggcatgttg

SEQ ID NO: 112421 - DNA, 17 bp, synthetic construct
  source 1..17: mol_type = other DNA
ggcttggggcatgttgc

SEQ ID NO: 112422 - DNA, 17 bp, synthetic construct
  source 1..17: mol_type = other DNA
gcttggggcatgttgcc

SEQ ID NO: 112423 - DNA, 17 bp, synthetic construct
  source 1..17: mol_type = other DNA
cttggggcatgttgcca

SEQ ID NO: 112424 - DNA, 17 bp, synthetic construct
  source 1..17: mol_type = other DNA
ttggggcatgttgccag

SEQ ID NO: 112425 - DNA, 17 bp, synthetic construct
  source 1..17: mol_type = other DNA
tggggcatgttgccagt

SEQ ID NO: 112426 - DNA, 17 bp, synthetic construct
  source 1..17: mol_type = other DNA
ggggcatgttgccagtg

SEQ ID NO: 112427 - DNA, 17 bp, synthetic construct
  source 1..17: mol_type = other DNA
gggcatgttgccagtgt

SEQ ID NO: 112428 - DNA, 17 bp, synthetic construct
  source 1..17: mol_type = other DNA
ggcatgttgccagtgtg

SEQ ID NO: 112429 - DNA, 17 bp, synthetic construct
  source 1..17: mol_type = other DNA
gcatgttgccagtgtgg

SEQ ID NO: 112430 - DNA, 17 bp, synthetic construct
  source 1..17: mol_type = other DNA
catgttgccagtgtggg

SEQ ID NO: 112431 - DNA, 17 bp, synthetic construct
  source 1..17: mol_type = other DNA
atgttgccagtgtgggg

SEQ ID NO: 112432 - DNA, 17 bp, synthetic construct
  source 1..17: mol_type = other DNA
tgttgccagtgtgggga

SEQ ID NO: 112433 - DNA, 17 bp, synthetic construct
  source 1..17: mol_type = other DNA
gttgccagtgtggggat

SEQ ID NO: 112434 - DNA, 17 bp, synthetic construct
  source 1..17: mol_type = other DNA
ttgccagtgtggggatc

SEQ ID NO: 112435 - DNA, 17 bp, synthetic construct
  source 1..17: mol_type = other DNA
tgccagtgtggggatca

SEQ ID NO: 112436 - DNA, 17 bp, synthetic construct
  source 1..17: mol_type = other DNA
gccagtgtggggatcag

SEQ ID NO: 112437 - DNA, 17 bp, synthetic construct
  source 1..17: mol_type = other DNA
ccagtgtggggatcaga

SEQ ID NO: 112438 - DNA, 17 bp, synthetic construct
  source 1..17: mol_type = other DNA
cagtgtggggatcagag

SEQ ID NO: 112439 - DNA, 17 bp, synthetic construct
  source 1..17: mol_type = other DNA
agtgtggggatcagagg

SEQ ID NO: 112440 - DNA, 17 bp, synthetic construct
  source 1..17: mol_type = other DNA
gtgtggggatcagaggt

SEQ ID NO: 112441 - DNA, 17 bp, synthetic construct
  source 1..17: mol_type = other DNA
tgtggggatcagaggtc

SEQ ID NO: 112442 - DNA, 17 bp, synthetic construct
  source 1..17: mol_type = other DNA
gtggggatcagaggtcc

SEQ ID NO: 112443 - DNA, 17 bp, synthetic construct
  source 1..17: mol_type = other DNA
tggggatcagaggtcct

SEQ ID NO: 112444 - DNA, 17 bp, synthetic construct
  source 1..17: mol_type = other DNA
ggggatcagaggtcctg

SEQ ID NO: 112445 - DNA, 17 bp, synthetic construct
  source 1..17: mol_type = other DNA
gggatcagaggtcctga

SEQ ID NO: 112446 - DNA, 17 bp, synthetic construct
  source 1..17: mol_type = other DNA
ggatcagaggtcctgag

SEQ ID NO: 112447 - DNA, 17 bp, synthetic construct
  source 1..17: mol_type = other DNA
gatcagaggtcctgagg

SEQ ID NO: 112448 - DNA, 17 bp, synthetic construct
  source 1..17: mol_type = other DNA
atcagaggtcctgaggc

SEQ ID NO: 112449 - DNA, 17 bp, synthetic construct
  source 1..17: mol_type = other DNA
tcagaggtcctgaggct

SEQ ID NO: 112450 - DNA, 17 bp, synthetic construct
  source 1..17: mol_type = other DNA
cagaggtcctgaggctg

SEQ ID NO: 112451 - DNA, 17 bp, synthetic construct
  source 1..17: mol_type = other DNA
agaggtcctgaggctgg

SEQ ID NO: 112452 - DNA, 17 bp, synthetic construct
  source 1..17: mol_type = other DNA
gaggtcctgaggctgga

SEQ ID NO: 112453 - DNA, 17 bp, synthetic construct
  source 1..17: mol_type = other DNA
aggtcctgaggctggag

SEQ ID NO: 112454 - DNA, 17 bp, synthetic construct
  source 1..17: mol_type = other DNA
ggtcctgaggctggagc

SEQ ID NO: 112455 - DNA, 17 bp, synthetic construct
  source 1..17: mol_type = other DNA
gtcctgaggctggagct

SEQ ID NO: 112456 - DNA, 17 bp, synthetic construct
  source 1..17: mol_type = other DNA
tcctgaggctggagctg

SEQ ID NO: 112457 - DNA, 17 bp, synthetic construct
  source 1..17: mol_type = other DNA
cctgaggctggagctgc

SEQ ID NO: 112458 - DNA, 17 bp, synthetic construct
  source 1..17: mol_type = other DNA
ctgaggctggagctgcc

SEQ ID NO: 112459 - DNA, 17 bp, synthetic construct
  source 1..17: mol_type = other DNA
tgaggctggagctgccc

SEQ ID NO: 112460 - DNA, 17 bp, synthetic construct
  source 1..17: mol_type = other DNA
gaggctggagctgcccc

SEQ ID NO: 112461 - DNA, 17 bp, synthetic construct
  source 1..17: mol_type = other DNA
aggctggagctgcccct

SEQ ID NO: 112462 - DNA, 17 bp, synthetic construct
  source 1..17: mol_type = other DNA
ggctggagctgcccctc

SEQ ID NO: 112463 - DNA, 17 bp, synthetic construct
  source 1..17: mol_type = other DNA
gctggagctgcccctcc

SEQ ID NO: 112464 - DNA, 17 bp, synthetic construct
  source 1..17: mol_type = other DNA
ctggagctgcccctccc

SEQ ID NO: 112465 - DNA, 17 bp, synthetic construct
  source 1..17: mol_type = other DNA
tggagctgcccctcccc

SEQ ID NO: 112466 - DNA, 17 bp, synthetic construct
  source 1..17: mol_type = other DNA
ggagctgcccctcccca

SEQ ID NO: 112467 - DNA, 17 bp, synthetic construct
  source 1..17: mol_type = other DNA
gagctgcccctccccac

SEQ ID NO: 112468 - DNA, 17 bp, synthetic construct
  source 1..17: mol_type = other DNA
agctgcccctccccact

SEQ ID NO: 112469 - DNA, 17 bp, synthetic construct
  source 1..17: mol_type = other DNA
gctgcccctccccactc

SEQ ID NO: 112470 - DNA, 17 bp, synthetic construct
  source 1..17: mol_type = other DNA
ctgcccctccccactct

SEQ ID NO: 112471 - DNA, 17 bp, synthetic construct
  source 1..17: mol_type = other DNA
tgcccctccccactctc

SEQ ID NO: 112472 - DNA, 17 bp, synthetic construct
  source 1..17: mol_type = other DNA
gcccctccccactctca

SEQ ID NO: 112473 - DNA, 17 bp, synthetic construct
  source 1..17: mol_type = other DNA
cccctccccactctcag

SEQ ID NO: 112474 - DNA, 17 bp, synthetic construct
  source 1..17: mol_type = other DNA
ccctccccactctcagc

SEQ ID NO: 112475 - DNA, 17 bp, synthetic construct
  source 1..17: mol_type = other DNA
cctccccactctcagct

SEQ ID NO: 112476 - DNA, 17 bp, synthetic construct
  source 1..17: mol_type = other DNA
ctccccactctcagctg

SEQ ID NO: 112477 - DNA, 17 bp, synthetic construct
  source 1..17: mol_type = other DNA
tccccactctcagctgg

SEQ ID NO: 112478 - DNA, 17 bp, synthetic construct
  source 1..17: mol_type = other DNA
ccccactctcagctgga

SEQ ID NO: 112479 - DNA, 17 bp, synthetic construct
  source 1..17: mol_type = other DNA
cccactctcagctggag

SEQ ID NO: 112480 - DNA, 17 bp, synthetic construct
  source 1..17: mol_type = other DNA
ccactctcagctggagc

SEQ ID NO: 112481 - DNA, 17 bp, synthetic construct
  source 1..17: mol_type = other DNA
cactctcagctggagct

SEQ ID NO: 112482 - DNA, 17 bp, synthetic construct
  source 1..17: mol_type = other DNA
actctcagctggagctg

SEQ ID NO: 112483 - DNA, 17 bp, synthetic construct
  source 1..17: mol_type = other DNA
ctctcagctggagctgg

SEQ ID NO: 112484 - DNA, 17 bp, synthetic construct
  source 1..17: mol_type = other DNA
tctcagctggagctgga

SEQ ID NO: 112485 - DNA, 17 bp, synthetic construct
  source 1..17: mol_type = other DNA
ctcagctggagctggat

SEQ ID NO: 112486 - DNA, 17 bp, synthetic construct
  source 1..17: mol_type = other DNA
tcagctggagctggatc

SEQ ID NO: 112487 - DNA, 17 bp, synthetic construct
  source 1..17: mol_type = other DNA
cagctggagctggatcc

SEQ ID NO: 112488 - DNA, 17 bp, synthetic construct
  source 1..17: mol_type = other DNA
agctggagctggatccc

SEQ ID NO: 112489 - DNA, 17 bp, synthetic construct
  source 1..17: mol_type = other DNA
gctggagctggatccca

SEQ ID NO: 112490 - DNA, 17 bp, synthetic construct
  source 1..17: mol_type = other DNA
ctggagctggatcccaa

SEQ ID NO: 112491 - DNA, 17 bp, synthetic construct
  source 1..17: mol_type = other DNA
tggagctggatcccaaa

SEQ ID NO: 112492 - DNA, 17 bp, synthetic construct
  source 1..17: mol_type = other DNA
ggagctggatcccaaat

SEQ ID NO: 112493 - DNA, 17 bp, synthetic construct
  source 1..17: mol_type = other DNA
gagctggatcccaaata

SEQ ID NO: 112494 - DNA, 17 bp, synthetic construct
  source 1..17: mol_type = other DNA
agctggatcccaaatac

SEQ ID NO: 112495 - DNA, 17 bp, synthetic construct
  source 1..17: mol_type = other DNA
gctggatcccaaatacg

SEQ ID NO: 112496 - DNA, 17 bp, synthetic construct
  source 1..17: mol_type = other DNA
ctggatcccaaatacgc

SEQ ID NO: 112497 - DNA, 17 bp, synthetic construct
  source 1..17: mol_type = other DNA
tggatcccaaatacgcc

SEQ ID NO: 112498 - DNA, 17 bp, synthetic construct
  source 1..17: mol_type = other DNA
ggatcccaaatacgcca

SEQ ID NO: 112499 - DNA, 17 bp, synthetic construct
  source 1..17: mol_type = other DNA
gatcccaaatacgccaa

SEQ ID NO: 112500 - DNA, 17 bp, synthetic construct
  source 1..17: mol_type = other DNA
atcccaaatacgccaac

SEQ ID NO: 112501 - DNA, 17 bp, synthetic construct
  source 1..17: mol_type = other DNA
tcccaaatacgccaacc

SEQ ID NO: 112502 - DNA, 17 bp, synthetic construct
  source 1..17: mol_type = other DNA
cccaaatacgccaacca

SEQ ID NO: 112503 - DNA, 17 bp, synthetic construct
  source 1..17: mol_type = other DNA
ccaaatacgccaaccag

SEQ ID NO: 112504 - DNA, 17 bp, synthetic construct
  source 1..17: mol_type = other DNA
caaatacgccaaccaga

SEQ ID NO: 112505 - DNA, 17 bp, synthetic construct
  source 1..17: mol_type = other DNA
aaatacgccaaccagac

SEQ ID NO: 112506 - DNA, 17 bp, synthetic construct
  source 1..17: mol_type = other DNA
aatacgccaaccagacc

SEQ ID NO: 112507 - DNA, 17 bp, synthetic construct
  source 1..17: mol_type = other DNA
atacgccaaccagacct

SEQ ID NO: 112508 - DNA, 17 bp, synthetic construct
  source 1..17: mol_type = other DNA
tacgccaaccagacctg

SEQ ID NO: 112509 - DNA, 17 bp, synthetic construct
  source 1..17: mol_type = other DNA
acgccaaccagacctgt

SEQ ID NO: 112510 - DNA, 17 bp, synthetic construct
  source 1..17: mol_type = other DNA
cgccaaccagacctgtg

SEQ ID NO: 112511 - DNA, 17 bp, synthetic construct
  source 1..17: mol_type = other DNA
gccaaccagacctgtgg

SEQ ID NO: 112512 - DNA, 17 bp, synthetic construct
  source 1..17: mol_type = other DNA
ccaaccagacctgtggc

SEQ ID NO: 112513 - DNA, 17 bp, synthetic construct
  source 1..17: mol_type = other DNA
caaccagacctgtggcc

SEQ ID NO: 112514 - DNA, 17 bp, synthetic construct
  source 1..17: mol_type = other DNA
aaccagacctgtggcct

SEQ ID NO: 112515 - DNA, 17 bp, synthetic construct
  source 1..17: mol_type = other DNA
accagacctgtggcctg

SEQ ID NO: 112516 - DNA, 17 bp, synthetic construct
  source 1..17: mol_type = other DNA
ccagacctgtggcctgt

SEQ ID NO: 112517 - DNA, 17 bp, synthetic construct
  source 1..17: mol_type = other DNA
cagacctgtggcctgtg

SEQ ID NO: 112518 - DNA, 17 bp, synthetic construct
  source 1..17: mol_type = other DNA
agacctgtggcctgtgt

SEQ ID NO: 112519 - DNA, 17 bp, synthetic construct
  source 1..17: mol_type = other DNA
gacctgtggcctgtgtg

SEQ ID NO: 112520 - DNA, 17 bp, synthetic construct
  source 1..17: mol_type = other DNA
acctgtggcctgtgtgg

SEQ ID NO: 112521 - DNA, 17 bp, synthetic construct
  source 1..17: mol_type = other DNA
cctgtggcctgtgtggg

SEQ ID NO: 112522 - DNA, 17 bp, synthetic construct
  source 1..17: mol_type = other DNA
ctgtggcctgtgtgggg

SEQ ID NO: 112523 - DNA, 17 bp, synthetic construct
  source 1..17: mol_type = other DNA
tgtggcctgtgtgggga

SEQ ID NO: 112524 - DNA, 17 bp, synthetic construct
  source 1..17: mol_type = other DNA
gtggcctgtgtggggac

SEQ ID NO: 112525 - DNA, 17 bp, synthetic construct
  source 1..17: mol_type = other DNA
tggcctgtgtggggact

SEQ ID NO: 112526 - DNA, 17 bp, synthetic construct
  source 1..17: mol_type = other DNA
ggcctgtgtggggactt

SEQ ID NO: 112527 - DNA, 17 bp, synthetic construct
  source 1..17: mol_type = other DNA
gcctgtgtggggacttc

SEQ ID NO: 112528 - DNA, 17 bp, synthetic construct
  source 1..17: mol_type = other DNA
cctgtgtggggacttca

SEQ ID NO: 112529 - DNA, 17 bp, synthetic construct
  source 1..17: mol_type = other DNA
ctgtgtggggacttcaa

SEQ ID NO: 112530 - DNA, 17 bp, synthetic construct
  source 1..17: mol_type = other DNA
tgtgtggggacttcaac

SEQ ID NO: 112531 - DNA, 17 bp, synthetic construct
  source 1..17: mol_type = other DNA
gtgtggggacttcaacg

SEQ ID NO: 112532 - DNA, 17 bp, synthetic construct
  source 1..17: mol_type = other DNA
tgtggggacttcaacgg

SEQ ID NO: 112533 - DNA, 17 bp, synthetic construct
  source 1..17: mol_type = other DNA
gtggggacttcaacggc

SEQ ID NO: 112534 - DNA, 17 bp, synthetic construct
  source 1..17: mol_type = other DNA
tggggacttcaacggcc

SEQ ID NO: 112535 - DNA, 17 bp, synthetic construct
  source 1..17: mol_type = other DNA
ggggacttcaacggcct

SEQ ID NO: 112536 - DNA, 17 bp, synthetic construct
  source 1..17: mol_type = other DNA
gggacttcaacggcctc

SEQ ID NO: 112537 - DNA, 17 bp, synthetic construct
  source 1..17: mol_type = other DNA
ggacttcaacggcctcc

SEQ ID NO: 112538 - DNA, 17 bp, synthetic construct
  source 1..17: mol_type = other DNA
gacttcaacggcctccc

SEQ ID NO: 112539 - DNA, 17 bp, synthetic construct
  source 1..17: mol_type = other DNA
acttcaacggcctcccg

SEQ ID NO: 112540 - DNA, 17 bp, synthetic construct
  source 1..17: mol_type = other DNA
cttcaacggcctcccgg

SEQ ID NO: 112541 - DNA, 17 bp, synthetic construct
  source 1..17: mol_type = other DNA
ttcaacggcctcccggc

SEQ ID NO: 112542 - DNA, 17 bp, synthetic construct
  source 1..17: mol_type = other DNA
tcaacggcctcccggcc

SEQ ID NO: 112543 - DNA, 17 bp, synthetic construct
  source 1..17: mol_type = other DNA
caacggcctcccggcct

SEQ ID NO: 112544 - DNA, 17 bp, synthetic construct
  source 1..17: mol_type = other DNA
aacggcctcccggcctt

SEQ ID NO: 112545 - DNA, 17 bp, synthetic construct
  source 1..17: mol_type = other DNA
acggcctcccggccttc

SEQ ID NO: 112546 - DNA, 17 bp, synthetic construct
  source 1..17: mol_type = other DNA
cggcctcccggccttca

SEQ ID NO: 112547 - DNA, 17 bp, synthetic construct
  source 1..17: mol_type = other DNA
ggcctcccggccttcaa

SEQ ID NO: 112548 - DNA, 17 bp, synthetic construct
  source 1..17: mol_type = other DNA
gcctcccggccttcaac

SEQ ID NO: 112549 - DNA, 17 bp, synthetic construct
  source 1..17: mol_type = other DNA
cctcccggccttcaacg

SEQ ID NO: 112550 - DNA, 17 bp, synthetic construct
  source 1..17: mol_type = other DNA
ctcccggccttcaacga

SEQ ID NO: 112551 - DNA, 17 bp, synthetic construct
  source 1..17: mol_type = other DNA
tcccggccttcaacgag

SEQ ID NO: 112552 - DNA, 17 bp, synthetic construct
  source 1..17: mol_type = other DNA
cccggccttcaacgagt

SEQ ID NO: 112553 - DNA, 17 bp, synthetic construct
  source 1..17: mol_type = other DNA
ccggccttcaacgagtt

SEQ ID NO: 112554 - DNA, 17 bp, synthetic construct
  source 1..17: mol_type = other DNA
cggccttcaacgagttc

SEQ ID NO: 112555 - DNA, 17 bp, synthetic construct
  source 1..17: mol_type = other DNA
ggccttcaacgagttct

SEQ ID NO: 112556 - DNA, 17 bp, synthetic construct
  source 1..17: mol_type = other DNA
gccttcaacgagttcta

SEQ ID NO: 112557 - DNA, 17 bp, synthetic construct
  source 1..17: mol_type = other DNA
ccttcaacgagttctat

SEQ ID NO: 112558 - DNA, 17 bp, synthetic construct
  source 1..17: mol_type = other DNA
cttcaacgagttctatg

SEQ ID NO: 112559 - DNA, 17 bp, synthetic construct
  source 1..17: mol_type = other DNA
ttcaacgagttctatgc

SEQ ID NO: 112560 - DNA, 17 bp, synthetic construct
  source 1..17: mol_type = other DNA
tcaacgagttctatgcc

SEQ ID NO: 112561 - DNA, 17 bp, synthetic construct
  source 1..17: mol_type = other DNA
caacgagttctatgccc

SEQ ID NO: 112562 - DNA, 17 bp, synthetic construct
  source 1..17: mol_type = other DNA
aacgagttctatgccca

SEQ ID NO: 112563 - DNA, 17 bp, synthetic construct
  source 1..17: mol_type = other DNA
acgagttctatgcccac

SEQ ID NO: 112564 - DNA, 17 bp, synthetic construct
  source 1..17: mol_type = other DNA
cgagttctatgcccaca

SEQ ID NO: 112565 - DNA, 17 bp, synthetic construct
  source 1..17: mol_type = other DNA
gagttctatgcccacag

SEQ ID NO: 112566 - DNA, 17 bp, synthetic construct
  source 1..17: mol_type = other DNA
agttctatgcccacagt

SEQ ID NO: 112567 - DNA, 17 bp, synthetic construct
  source 1..17: mol_type = other DNA
gttctatgcccacagtg

SEQ ID NO: 112568 - DNA, 17 bp, synthetic construct
  source 1..17: mol_type = other DNA
ttctatgcccacagtga

SEQ ID NO: 112569 - DNA, 17 bp, synthetic construct
  source 1..17: mol_type = other DNA
tctatgcccacagtgag

SEQ ID NO: 112570 - DNA, 17 bp, synthetic construct
  source 1..17: mol_type = other DNA
ctatgcccacagtgagt

SEQ ID NO: 112571 - DNA, 17 bp, synthetic construct
  source 1..17: mol_type = other DNA
tatgcccacagtgagtg

SEQ ID NO: 112572 - DNA, 17 bp, synthetic construct
  source 1..17: mol_type = other DNA
atgcccacagtgagtgc

SEQ ID NO: 112573 - DNA, 17 bp, synthetic construct
  source 1..17: mol_type = other DNA
tgcccacagtgagtgcc

SEQ ID NO: 112574 - DNA, 17 bp, synthetic construct
  source 1..17: mol_type = other DNA
gcccacagtgagtgcca

SEQ ID NO: 112575 - DNA, 17 bp, synthetic construct
  source 1..17: mol_type = other DNA
cccacagtgagtgccac

SEQ ID NO: 112576 - DNA, 17 bp, synthetic construct
  source 1..17: mol_type = other DNA
ccacagtgagtgccacc

SEQ ID NO: 112577 - DNA, 17 bp, synthetic construct
  source 1..17: mol_type = other DNA
cacagtgagtgccacct

SEQ ID NO: 112578 - DNA, 17 bp, synthetic construct
  source 1..17: mol_type = other DNA
acagtgagtgccacctg

SEQ ID NO: 112579 - DNA, 17 bp, synthetic construct
  source 1..17: mol_type = other DNA
cagtgagtgccacctgg

SEQ ID NO: 112580 - DNA, 17 bp, synthetic construct
  source 1..17: mol_type = other DNA
agtgagtgccacctggg

SEQ ID NO: 112581 - DNA, 17 bp, synthetic construct
  source 1..17: mol_type = other DNA
gtgagtgccacctgggt

SEQ ID NO: 112582 - DNA, 17 bp, synthetic construct
  source 1..17: mol_type = other DNA
tgagtgccacctgggtg

SEQ ID NO: 112583 - DNA, 17 bp, synthetic construct
  source 1..17: mol_type = other DNA
gagtgccacctgggtga

SEQ ID NO: 112584 - DNA, 17 bp, synthetic construct
  source 1..17: mol_type = other DNA
agtgccacctgggtgag

SEQ ID NO: 112585 - DNA, 17 bp, synthetic construct
  source 1..17: mol_type = other DNA
gtgccacctgggtgagg

SEQ ID NO: 112586 - DNA, 17 bp, synthetic construct
  source 1..17: mol_type = other DNA
tgccacctgggtgaggg

SEQ ID NO: 112587 - DNA, 17 bp, synthetic construct
  source 1..17: mol_type = other DNA
gccacctgggtgagggg

SEQ ID NO: 112588 - DNA, 17 bp, synthetic construct
  source 1..17: mol_type = other DNA
ccacctgggtgaggggg

SEQ ID NO: 112589 - DNA, 17 bp, synthetic construct
  source 1..17: mol_type = other DNA
cacctgggtgagggggc

SEQ ID NO: 112590 - DNA, 17 bp, synthetic construct
  source 1..17: mol_type = other DNA
acctgggtgagggggcg

SEQ ID NO: 112591 - DNA, 17 bp, synthetic construct
  source 1..17: mol_type = other DNA
cctgggtgagggggcgg

SEQ ID NO: 112592 - DNA, 17 bp, synthetic construct
  source 1..17: mol_type = other DNA
ctgggtgagggggcggt

SEQ ID NO: 112593 - DNA, 17 bp, synthetic construct
  source 1..17: mol_type = other DNA
tgggtgagggggcggtg

SEQ ID NO: 112594 - DNA, 17 bp, synthetic construct
  source 1..17: mol_type = other DNA
gggtgagggggcggtga

SEQ ID NO: 112595 - DNA, 17 bp, synthetic construct
  source 1..17: mol_type = other DNA
ggtgagggggcggtgac

SEQ ID NO: 112596 - DNA, 17 bp, synthetic construct
  source 1..17: mol_type = other DNA
gtgagggggcggtgacc

SEQ ID NO: 112597 - DNA, 17 bp, synthetic construct
  source 1..17: mol_type = other DNA
tgagggggcggtgacca

SEQ ID NO: 112598 - DNA, 17 bp, synthetic construct
  source 1..17: mol_type = other DNA
gagggggcggtgaccaa

SEQ ID NO: 112599 - DNA, 17 bp, synthetic construct
  source 1..17: mol_type = other DNA
agggggcggtgaccaat

SEQ ID NO: 112600 - DNA, 17 bp, synthetic construct
  source 1..17: mol_type = other DNA
gggggcggtgaccaatt

SEQ ID NO: 112601 - DNA, 17 bp, synthetic construct
  source 1..17: mol_type = other DNA
ggggcggtgaccaatta

SEQ ID NO: 112602 - DNA, 17 bp, synthetic construct
  source 1..17: mol_type = other DNA
gggcggtgaccaattat

SEQ ID NO: 112603 - DNA, 17 bp, synthetic construct
  source 1..17: mol_type = other DNA
ggcggtgaccaattatg

SEQ ID NO: 112604 - DNA, 17 bp, synthetic construct
  source 1..17: mol_type = other DNA
gcggtgaccaattatgt

SEQ ID NO: 112605 - DNA, 17 bp, synthetic construct
  source 1..17: mol_type = other DNA
cggtgaccaattatgtc

SEQ ID NO: 112606 - DNA, 17 bp, synthetic construct
  source 1..17: mol_type = other DNA
ggtgaccaattatgtcg

SEQ ID NO: 112607 - DNA, 17 bp, synthetic construct
  source 1..17: mol_type = other DNA
gtgaccaattatgtcgg

SEQ ID NO: 112608 - DNA, 17 bp, synthetic construct
  source 1..17: mol_type = other DNA
tgaccaattatgtcggc

SEQ ID NO: 112609 - DNA, 17 bp, synthetic construct
  source 1..17: mol_type = other DNA
gaccaattatgtcggcc

SEQ ID NO: 112610 - DNA, 17 bp, synthetic construct
  source 1..17: mol_type = other DNA
accaattatgtcggcca

SEQ ID NO: 112611 - DNA, 17 bp, synthetic construct
  source 1..17: mol_type = other DNA
ccaattatgtcggccaa

SEQ ID NO: 112612 - DNA, 17 bp, synthetic construct
  source 1..17: mol_type = other DNA
caattatgtcggccaac

SEQ ID NO: 112613 - DNA, 17 bp, synthetic construct
  source 1..17: mol_type = other DNA
aattatgtcggccaacg

SEQ ID NO: 112614 - DNA, 17 bp, synthetic construct
  source 1..17: mol_type = other DNA
attatgtcggccaacga

SEQ ID NO: 112615 - DNA, 17 bp, synthetic construct
  source 1..17: mol_type = other DNA
ttatgtcggccaacgaa

SEQ ID NO: 112616 - DNA, 17 bp, synthetic construct
  source 1..17: mol_type = other DNA
tatgtcggccaacgaag

SEQ ID NO: 112617 - DNA, 17 bp, synthetic construct
  source 1..17: mol_type = other DNA
atgtcggccaacgaaga

SEQ ID NO: 112618 - DNA, 17 bp, synthetic construct
  source 1..17: mol_type = other DNA
tgtcggccaacgaagag

SEQ ID NO: 112619 - DNA, 17 bp, synthetic construct
  source 1..17: mol_type = other DNA
gtcggccaacgaagagc

SEQ ID NO: 112620 - DNA, 17 bp, synthetic construct
  source 1..17: mol_type = other DNA
tcggccaacgaagagcc

SEQ ID NO: 112621 - DNA, 17 bp, synthetic construct
  source 1..17: mol_type = other DNA
cggccaacgaagagcca

SEQ ID NO: 112622 - DNA, 17 bp, synthetic construct
  source 1..17: mol_type = other DNA
ggccaacgaagagccac

SEQ ID NO: 112623 - DNA, 17 bp, synthetic construct
  source 1..17: mol_type = other DNA
gccaacgaagagccaca

SEQ ID NO: 112624 - DNA, 17 bp, synthetic construct
  source 1..17: mol_type = other DNA
ccaacgaagagccacag

SEQ ID NO: 112625 - DNA, 17 bp, synthetic construct
  source 1..17: mol_type = other DNA
caacgaagagccacagt

SEQ ID NO: 112626 - DNA, 17 bp, synthetic construct
  source 1..17: mol_type = other DNA
aacgaagagccacagtc

SEQ ID NO: 112627 - DNA, 17 bp, synthetic construct
  source 1..17: mol_type = other DNA
acgaagagccacagtcc

SEQ ID NO: 112628 - DNA, 17 bp, synthetic construct
  source 1..17: mol_type = other DNA
cgaagagccacagtccc

SEQ ID NO: 112629 - DNA, 17 bp, synthetic construct
  source 1..17: mol_type = other DNA
gaagagccacagtcccg

SEQ ID NO: 112630 - DNA, 17 bp, synthetic construct
  source 1..17: mol_type = other DNA
aagagccacagtcccgg

SEQ ID NO: 112631 - DNA, 17 bp, synthetic construct
  source 1..17: mol_type = other DNA
agagccacagtcccggg

SEQ ID NO: 112632 - DNA, 17 bp, synthetic construct
  source 1..17: mol_type = other DNA
gagccacagtcccgggg

SEQ ID NO: 112633 - DNA, 17 bp, synthetic construct
  source 1..17: mol_type = other DNA
agccacagtcccgggga

SEQ ID NO: 112634 - DNA, 17 bp, synthetic construct
  source 1..17: mol_type = other DNA
gccacagtcccggggag

SEQ ID NO: 112635 - DNA, 17 bp, synthetic construct
  source 1..17: mol_type = other DNA
ccacagtcccggggagg

SEQ ID NO: 112636 - DNA, 17 bp, synthetic construct
  source 1..17: mol_type = other DNA
cacagtcccggggaggc

SEQ ID NO: 112637 - DNA, 17 bp, synthetic construct
  source 1..17: mol_type = other DNA
acagtcccggggaggcc

SEQ ID NO: 112638 - DNA, 17 bp, synthetic construct
  source 1..17: mol_type = other DNA
cagtcccggggaggccg

SEQ ID NO: 112639 - DNA, 17 bp, synthetic construct
  source 1..17: mol_type = other DNA
agtcccggggaggccgg

SEQ ID NO: 112640 - DNA, 17 bp, synthetic construct
  source 1..17: mol_type = other DNA
gtcccggggaggccggg

SEQ ID NO: 112641 - DNA, 17 bp, synthetic construct
  source 1..17: mol_type = other DNA
tcccggggaggccggga

SEQ ID NO: 112642 - DNA, 17 bp, synthetic construct
  source 1..17: mol_type = other DNA
cccggggaggccgggag

SEQ ID NO: 112643 - DNA, 17 bp, synthetic construct
  source 1..17: mol_type = other DNA
ccggggaggccgggagg

SEQ ID NO: 112644 - DNA, 17 bp, synthetic construct
  source 1..17: mol_type = other DNA
cggggaggccgggaggg

SEQ ID NO: 112645 - DNA, 17 bp, synthetic construct
  source 1..17: mol_type = other DNA
ggggaggccgggagggg

SEQ ID NO: 112646 - DNA, 17 bp, synthetic construct
  source 1..17: mol_type = other DNA
gggaggccgggaggggg

SEQ ID NO: 112647 - DNA, 17 bp, synthetic construct
  source 1..17: mol_type = other DNA
ggaggccgggagggggc

SEQ ID NO: 112648 - DNA, 17 bp, synthetic construct
  source 1..17: mol_type = other DNA
gaggccgggagggggcg

SEQ ID NO: 112649 - DNA, 17 bp, synthetic construct
  source 1..17: mol_type = other DNA
aggccgggagggggcgg

SEQ ID NO: 112650 - DNA, 17 bp, synthetic construct
  source 1..17: mol_type = other DNA
ggccgggagggggcgga

SEQ ID NO: 112651 - DNA, 17 bp, synthetic construct
  source 1..17: mol_type = other DNA
gccgggagggggcggag

SEQ ID NO: 112652 - DNA, 17 bp, synthetic construct
  source 1..17: mol_type = other DNA
ccgggagggggcggagt

SEQ ID NO: 112653 - DNA, 17 bp, synthetic construct
  source 1..17: mol_type = other DNA
cgggagggggcggagtg

SEQ ID NO: 112654 - DNA, 17 bp, synthetic construct
  source 1..17: mol_type = other DNA
gggagggggcggagtgg

SEQ ID NO: 112655 - DNA, 17 bp, synthetic construct
  source 1..17: mol_type = other DNA
ggagggggcggagtggg

SEQ ID NO: 112656 - DNA, 17 bp, synthetic construct
  source 1..17: mol_type = other DNA
gagggggcggagtgggg

SEQ ID NO: 112657 - DNA, 17 bp, synthetic construct
  source 1..17: mol_type = other DNA
agggggcggagtgggga

SEQ ID NO: 112658 - DNA, 17 bp, synthetic construct
  source 1..17: mol_type = other DNA
gggggcggagtggggac

SEQ ID NO: 112659 - DNA, 17 bp, synthetic construct
  source 1..17: mol_type = other DNA
ggggcggagtggggacc

SEQ ID NO: 112660 - DNA, 17 bp, synthetic construct
  source 1..17: mol_type = other DNA
gggcggagtggggaccg

SEQ ID NO: 112661 - DNA, 17 bp, synthetic construct
  source 1..17: mol_type = other DNA
ggcggagtggggaccgg

SEQ ID NO: 112662 - DNA, 17 bp, synthetic construct
  source 1..17: mol_type = other DNA
gcggagtggggaccggg

SEQ ID NO: 112663 - DNA, 17 bp, synthetic construct
  source 1..17: mol_type = other DNA
cggagtggggaccgggc

SEQ ID NO: 112664 - DNA, 17 bp, synthetic construct
  source 1..17: mol_type = other DNA
ggagtggggaccgggca

SEQ ID NO: 112665 - DNA, 17 bp, synthetic construct
  source 1..17: mol_type = other DNA
gagtggggaccgggcac

SEQ ID NO: 112666 - DNA, 17 bp, synthetic construct
  source 1..17: mol_type = other DNA
agtggggaccgggcacc

SEQ ID NO: 112667 - DNA, 17 bp, synthetic construct
  source 1..17: mol_type = other DNA
gtggggaccgggcacca

SEQ ID NO: 112668 - DNA, 17 bp, synthetic construct
  source 1..17: mol_type = other DNA
tggggaccgggcaccag

SEQ ID NO: 112669 - DNA, 17 bp, synthetic construct
  source 1..17: mol_type = other DNA
ggggaccgggcaccagg

SEQ ID NO: 112670 - DNA, 17 bp, synthetic construct
  source 1..17: mol_type = other DNA
gggaccgggcaccaggc

SEQ ID NO: 112671 - DNA, 17 bp, synthetic construct
  source 1..17: mol_type = other DNA
ggaccgggcaccaggca

SEQ ID NO: 112672 - DNA, 17 bp, synthetic construct
  source 1..17: mol_type = other DNA
gaccgggcaccaggcag

SEQ ID NO: 112673 - DNA, 17 bp, synthetic construct
  source 1..17: mol_type = other DNA
accgggcaccaggcagg

SEQ ID NO: 112674 - DNA, 17 bp, synthetic construct
  source 1..17: mol_type = other DNA
ccgggcaccaggcaggg

SEQ ID NO: 112675 - DNA, 17 bp, synthetic construct
  source 1..17: mol_type = other DNA
cgggcaccaggcaggga

SEQ ID NO: 112676 - DNA, 17 bp, synthetic construct
  source 1..17: mol_type = other DNA
gggcaccaggcagggag

SEQ ID NO: 112677 - DNA, 17 bp, synthetic construct
  source 1..17: mol_type = other DNA
ggcaccaggcagggagg

SEQ ID NO: 112678 - DNA, 17 bp, synthetic construct
  source 1..17: mol_type = other DNA
gcaccaggcagggaggg

SEQ ID NO: 112679 - DNA, 17 bp, synthetic construct
  source 1..17: mol_type = other DNA
caccaggcagggagggg

SEQ ID NO: 112680 - DNA, 17 bp, synthetic construct
  source 1..17: mol_type = other DNA
accaggcagggaggggc

SEQ ID NO: 112681 - DNA, 17 bp, synthetic construct
  source 1..17: mol_type = other DNA
ccaggcagggaggggcc

SEQ ID NO: 112682 - DNA, 17 bp, synthetic construct
  source 1..17: mol_type = other DNA
caggcagggaggggcca

SEQ ID NO: 112683 - DNA, 17 bp, synthetic construct
  source 1..17: mol_type = other DNA
aggcagggaggggccac

SEQ ID NO: 112684 - DNA, 17 bp, synthetic construct
  source 1..17: mol_type = other DNA
ggcagggaggggccacg

SEQ ID NO: 112685 - DNA, 17 bp, synthetic construct
  source 1..17: mol_type = other DNA
gcagggaggggccacga

SEQ ID NO: 112686 - DNA, 17 bp, synthetic construct
  source 1..17: mol_type = other DNA
cagggaggggccacgag

SEQ ID NO: 112687 - DNA, 17 bp, synthetic construct
  source 1..17: mol_type = other DNA
agggaggggccacgagg

SEQ ID NO: 112688 - DNA, 17 bp, synthetic construct
  source 1..17: mol_type = other DNA
gggaggggccacgagga

SEQ ID NO: 112689 - DNA, 17 bp, synthetic construct
  source 1..17: mol_type = other DNA
ggaggggccacgaggac

SEQ ID NO: 112690 - DNA, 17 bp, synthetic construct
  source 1..17: mol_type = other DNA
gaggggccacgaggact

SEQ ID NO: 112691 - DNA, 17 bp, synthetic construct
  source 1..17: mol_type = other DNA
aggggccacgaggactg

SEQ ID NO: 112692 - DNA, 17 bp, synthetic construct
  source 1..17: mol_type = other DNA
ggggccacgaggactgt

SEQ ID NO: 112693 - DNA, 17 bp, synthetic construct
  source 1..17: mol_type = other DNA
gggccacgaggactgtg

SEQ ID NO: 112694 - DNA, 17 bp, synthetic construct
  source 1..17: mol_type = other DNA
ggccacgaggactgtgc

SEQ ID NO: 112695 - DNA, 17 bp, synthetic construct
  source 1..17: mol_type = other DNA
gccacgaggactgtgcc

SEQ ID NO: 112696 - DNA, 17 bp, synthetic construct
  source 1..17: mol_type = other DNA
ccacgaggactgtgccc

SEQ ID NO: 112697 - DNA, 17 bp, synthetic construct
  source 1..17: mol_type = other DNA
cacgaggactgtgccct

SEQ ID NO: 112698 - DNA, 17 bp, synthetic construct
  source 1..17: mol_type = other DNA
acgaggactgtgcccta

SEQ ID NO: 112699 - DNA, 17 bp, synthetic construct
  source 1..17: mol_type = other DNA
cgaggactgtgccctac

SEQ ID NO: 112700 - DNA, 17 bp, synthetic construct
  source 1..17: mol_type = other DNA
gaggactgtgccctaca

SEQ ID NO: 112701 - DNA, 17 bp, synthetic construct
  source 1..17: mol_type = other DNA
aggactgtgccctacat

SEQ ID NO: 112702 - DNA, 17 bp, synthetic construct
  source 1..17: mol_type = other DNA
ggactgtgccctacatg

SEQ ID NO: 112703 - DNA, 17 bp, synthetic construct
  source 1..17: mol_type = other DNA
gactgtgccctacatgg

SEQ ID NO: 112704 - DNA, 17 bp, synthetic construct
  source 1..17: mol_type = other DNA
actgtgccctacatggt

SEQ ID NO: 112705 - DNA, 17 bp, synthetic construct
  source 1..17: mol_type = other DNA
ctgtgccctacatggtg

SEQ ID NO: 112706 - DNA, 17 bp, synthetic construct
  source 1..17: mol_type = other DNA
tgtgccctacatggtgg

SEQ ID NO: 112707 - DNA, 17 bp, synthetic construct
  source 1..17: mol_type = other DNA
gtgccctacatggtggg

SEQ ID NO: 112708 - DNA, 17 bp, synthetic construct
  source 1..17: mol_type = other DNA
tgccctacatggtggga

SEQ ID NO: 112709 - DNA, 17 bp, synthetic construct
  source 1..17: mol_type = other DNA
gccctacatggtgggag

SEQ ID NO: 112710 - DNA, 17 bp, synthetic construct
  source 1..17: mol_type = other DNA
ccctacatggtgggagg

SEQ ID NO: 112711 - DNA, 17 bp, synthetic construct
  source 1..17: mol_type = other DNA
cctacatggtgggagga

SEQ ID NO: 112712 - DNA, 17 bp, synthetic construct
  source 1..17: mol_type = other DNA
ctacatggtgggaggag

SEQ ID NO: 112713 - DNA, 17 bp, synthetic construct
  source 1..17: mol_type = other DNA
tacatggtgggaggagt

SEQ ID NO: 112714 - DNA, 17 bp, synthetic construct
  source 1..17: mol_type = other DNA
acatggtgggaggagtg

SEQ ID NO: 112715 - DNA, 17 bp, synthetic construct
  source 1..17: mol_type = other DNA
catggtgggaggagtgc

SEQ ID NO: 112716 - DNA, 17 bp, synthetic construct
  source 1..17: mol_type = other DNA
atggtgggaggagtgcc

SEQ ID NO: 112717 - DNA, 17 bp, synthetic construct
  source 1..17: mol_type = other DNA
tggtgggaggagtgccc

SEQ ID NO: 112718 - DNA, 17 bp, synthetic construct
  source 1..17: mol_type = other DNA
ggtgggaggagtgcccc

SEQ ID NO: 112719 - DNA, 17 bp, synthetic construct
  source 1..17: mol_type = other DNA
gtgggaggagtgcccct

SEQ ID NO: 112720 - DNA, 17 bp, synthetic construct
  source 1..17: mol_type = other DNA
tgggaggagtgcccctc

SEQ ID NO: 112721 - DNA, 17 bp, synthetic construct
  source 1..17: mol_type = other DNA
gggaggagtgcccctcg

SEQ ID NO: 112722 - DNA, 17 bp, synthetic construct
  source 1..17: mol_type = other DNA
ggaggagtgcccctcgg

SEQ ID NO: 112723 - DNA, 17 bp, synthetic construct
  source 1..17: mol_type = other DNA
gaggagtgcccctcggg

SEQ ID NO: 112724 - DNA, 17 bp, synthetic construct
  source 1..17: mol_type = other DNA
aggagtgcccctcgggg

SEQ ID NO: 112725 - DNA, 17 bp, synthetic construct
  source 1..17: mol_type = other DNA
ggagtgcccctcggggg

SEQ ID NO: 112726 - DNA, 17 bp, synthetic construct
  source 1..17: mol_type = other DNA
gagtgcccctcgggggt

SEQ ID NO: 112727 - DNA, 17 bp, synthetic construct
  source 1..17: mol_type = other DNA
agtgcccctcgggggtg

SEQ ID NO: 112728 - DNA, 17 bp, synthetic construct
  source 1..17: mol_type = other DNA
gtgcccctcgggggtgt

SEQ ID NO: 112729 - DNA, 17 bp, synthetic construct
  source 1..17: mol_type = other DNA
tgcccctcgggggtgtt

SEQ ID NO: 112730 - DNA, 17 bp, synthetic construct
  source 1..17: mol_type = other DNA
gcccctcgggggtgttg

SEQ ID NO: 112731 - DNA, 17 bp, synthetic construct
  source 1..17: mol_type = other DNA
cccctcgggggtgttgg

SEQ ID NO: 112732 - DNA, 17 bp, synthetic construct
  source 1..17: mol_type = other DNA
ccctcgggggtgttggg

SEQ ID NO: 112733 - DNA, 17 bp, synthetic construct
  source 1..17: mol_type = other DNA
cctcgggggtgttgggc

SEQ ID NO: 112734 - DNA, 17 bp, synthetic construct
  source 1..17: mol_type = other DNA
ctcgggggtgttgggcc

SEQ ID NO: 112735 - DNA, 17 bp, synthetic construct
  source 1..17: mol_type = other DNA
tcgggggtgttgggccc

SEQ ID NO: 112736 - DNA, 17 bp, synthetic construct
  source 1..17: mol_type = other DNA
cgggggtgttgggccct

SEQ ID NO: 112737 - DNA, 17 bp, synthetic construct
  source 1..17: mol_type = other DNA
gggggtgttgggcccta

SEQ ID NO: 112738 - DNA, 17 bp, synthetic construct
  source 1..17: mol_type = other DNA
ggggtgttgggccctag

SEQ ID NO: 112739 - DNA, 17 bp, synthetic construct
  source 1..17: mol_type = other DNA
gggtgttgggccctagg

SEQ ID NO: 112740 - DNA, 17 bp, synthetic construct
  source 1..17: mol_type = other DNA
ggtgttgggccctaggc

SEQ ID NO: 112741 - DNA, 17 bp, synthetic construct
  source 1..17: mol_type = other DNA
gtgttgggccctaggca

SEQ ID NO: 112742 - DNA, 17 bp, synthetic construct
  source 1..17: mol_type = other DNA
tgttgggccctaggcag

SEQ ID NO: 112743 - DNA, 17 bp, synthetic construct
  source 1..17: mol_type = other DNA
gttgggccctaggcagg

SEQ ID NO: 112744 - DNA, 17 bp, synthetic construct
  source 1..17: mol_type = other DNA
ttgggccctaggcagga

SEQ ID NO: 112745 - DNA, 17 bp, synthetic construct
  source 1..17: mol_type = other DNA
tgggccctaggcaggag

SEQ ID NO: 112746 - DNA, 17 bp, synthetic construct
  source 1..17: mol_type = other DNA
gggccctaggcaggagt

SEQ ID NO: 112747 - DNA, 17 bp, synthetic construct
  source 1..17: mol_type = other DNA
ggccctaggcaggagtg

SEQ ID NO: 112748 - DNA, 17 bp, synthetic construct
  source 1..17: mol_type = other DNA
gccctaggcaggagtgg

SEQ ID NO: 112749 - DNA, 17 bp, synthetic construct
  source 1..17: mol_type = other DNA
ccctaggcaggagtggg

SEQ ID NO: 112750 - DNA, 17 bp, synthetic construct
  source 1..17: mol_type = other DNA
cctaggcaggagtggga

SEQ ID NO: 112751 - DNA, 17 bp, synthetic construct
  source 1..17: mol_type = other DNA
ctaggcaggagtgggag

SEQ ID NO: 112752 - DNA, 17 bp, synthetic construct
  source 1..17: mol_type = other DNA
taggcaggagtgggagt

SEQ ID NO: 112753 - DNA, 17 bp, synthetic construct
  source 1..17: mol_type = other DNA
aggcaggagtgggagtc

SEQ ID NO: 112754 - DNA, 17 bp, synthetic construct
  source 1..17: mol_type = other DNA
ggcaggagtgggagtcc

SEQ ID NO: 112755 - DNA, 17 bp, synthetic construct
  source 1..17: mol_type = other DNA
gcaggagtgggagtcct

SEQ ID NO: 112756 - DNA, 17 bp, synthetic construct
  source 1..17: mol_type = other DNA
caggagtgggagtcctc

SEQ ID NO: 112757 - DNA, 17 bp, synthetic construct
  source 1..17: mol_type = other DNA
aggagtgggagtcctct

SEQ ID NO: 112758 - DNA, 17 bp, synthetic construct
  source 1..17: mol_type = other DNA
ggagtgggagtcctctg

SEQ ID NO: 112759 - DNA, 17 bp, synthetic construct
  source 1..17: mol_type = other DNA
gagtgggagtcctctgg

SEQ ID NO: 112760 - DNA, 17 bp, synthetic construct
  source 1..17: mol_type = other DNA
agtgggagtcctctggc

SEQ ID NO: 112761 - DNA, 17 bp, synthetic construct
  source 1..17: mol_type = other DNA
gtgggagtcctctggcc

SEQ ID NO: 112762 - DNA, 17 bp, synthetic construct
  source 1..17: mol_type = other DNA
tgggagtcctctggcct

SEQ ID NO: 112763 - DNA, 17 bp, synthetic construct
  source 1..17: mol_type = other DNA
gggagtcctctggcctg

SEQ ID NO: 112764 - DNA, 17 bp, synthetic construct
  source 1..17: mol_type = other DNA
ggagtcctctggcctgg

SEQ ID NO: 112765 - DNA, 17 bp, synthetic construct
  source 1..17: mol_type = other DNA
gagtcctctggcctggg

SEQ ID NO: 112766 - DNA, 17 bp, synthetic construct
  source 1..17: mol_type = other DNA
agtcctctggcctgggc

SEQ ID NO: 112767 - DNA, 17 bp, synthetic construct
  source 1..17: mol_type = other DNA
gtcctctggcctgggct

SEQ ID NO: 112768 - DNA, 17 bp, synthetic construct
  source 1..17: mol_type = other DNA
tcctctggcctgggctc

SEQ ID NO: 112769 - DNA, 17 bp, synthetic construct
  source 1..17: mol_type = other DNA
cctctggcctgggctca

SEQ ID NO: 112770 - DNA, 17 bp, synthetic construct
  source 1..17: mol_type = other DNA
ctctggcctgggctcag

SEQ ID NO: 112771 - DNA, 17 bp, synthetic construct
  source 1..17: mol_type = other DNA
tctggcctgggctcagg

SEQ ID NO: 112772 - DNA, 17 bp, synthetic construct
  source 1..17: mol_type = other DNA
ctggcctgggctcagga

SEQ ID NO: 112773 - DNA, 17 bp, synthetic construct
  source 1..17: mol_type = other DNA
tggcctgggctcaggaa

SEQ ID NO: 112774 - DNA, 17 bp, synthetic construct
  source 1..17: mol_type = other DNA
ggcctgggctcaggaag

SEQ ID NO: 112775 - DNA, 17 bp, synthetic construct
  source 1..17: mol_type = other DNA
gcctgggctcaggaagt

SEQ ID NO: 112776 - DNA, 17 bp, synthetic construct
  source 1..17: mol_type = other DNA
cctgggctcaggaagtg

SEQ ID NO: 112777 - DNA, 17 bp, synthetic construct
  source 1..17: mol_type = other DNA
ctgggctcaggaagtgg

SEQ ID NO: 112778 - DNA, 17 bp, synthetic construct
  source 1..17: mol_type = other DNA
tgggctcaggaagtggg

SEQ ID NO: 112779 - DNA, 17 bp, synthetic construct
  source 1..17: mol_type = other DNA
gggctcaggaagtggga

SEQ ID NO: 112780 - DNA, 17 bp, synthetic construct
  source 1..17: mol_type = other DNA
ggctcaggaagtgggag

SEQ ID NO: 112781 - DNA, 17 bp, synthetic construct
  source 1..17: mol_type = other DNA
gctcaggaagtgggagc

SEQ ID NO: 112782 - DNA, 17 bp, synthetic construct
  source 1..17: mol_type = other DNA
ctcaggaagtgggagcc

SEQ ID NO: 112783 - DNA, 17 bp, synthetic construct
  source 1..17: mol_type = other DNA
tcaggaagtgggagccc

SEQ ID NO: 112784 - DNA, 17 bp, synthetic construct
  source 1..17: mol_type = other DNA
caggaagtgggagccca

SEQ ID NO: 112785 - DNA, 17 bp, synthetic construct
  source 1..17: mol_type = other DNA
aggaagtgggagcccat

SEQ ID NO: 112786 - DNA, 17 bp, synthetic construct
  source 1..17: mol_type = other DNA
ggaagtgggagcccata

SEQ ID NO: 112787 - DNA, 17 bp, synthetic construct
  source 1..17: mol_type = other DNA
gaagtgggagcccatat

SEQ ID NO: 112788 - DNA, 17 bp, synthetic construct
  source 1..17: mol_type = other DNA
aagtgggagcccatatc

SEQ ID NO: 112789 - DNA, 17 bp, synthetic construct
  source 1..17: mol_type = other DNA
agtgggagcccatatct

SEQ ID NO: 112790 - DNA, 17 bp, synthetic construct
  source 1..17: mol_type = other DNA
gtgggagcccatatctt

SEQ ID NO: 112791 - DNA, 17 bp, synthetic construct
  source 1..17: mol_type = other DNA
tgggagcccatatcttg

SEQ ID NO: 112792 - DNA, 17 bp, synthetic construct
  source 1..17: mol_type = other DNA
gggagcccatatcttgt

SEQ ID NO: 112793 - DNA, 17 bp, synthetic construct
  source 1..17: mol_type = other DNA
ggagcccatatcttgtc

SEQ ID NO: 112794 - DNA, 17 bp, synthetic construct
  source 1..17: mol_type = other DNA
gagcccatatcttgtcc

SEQ ID NO: 112795 - DNA, 17 bp, synthetic construct
  source 1..17: mol_type = other DNA
agcccatatcttgtccc

SEQ ID NO: 112796 - DNA, 17 bp, synthetic construct
  source 1..17: mol_type = other DNA
gcccatatcttgtcccc

SEQ ID NO: 112797 - DNA, 17 bp, synthetic construct
  source 1..17: mol_type = other DNA
cccatatcttgtcccca

SEQ ID NO: 112798 - DNA, 17 bp, synthetic construct
  source 1..17: mol_type = other DNA
ccatatcttgtccccag

SEQ ID NO: 112799 - DNA, 17 bp, synthetic construct
  source 1..17: mol_type = other DNA
catatcttgtccccagg

SEQ ID NO: 112800 - DNA, 17 bp, synthetic construct
  source 1..17: mol_type = other DNA
atatcttgtccccagga

SEQ ID NO: 112801 - DNA, 17 bp, synthetic construct
  source 1..17: mol_type = other DNA
tatcttgtccccaggag

SEQ ID NO: 112802 - DNA, 17 bp, synthetic construct
  source 1..17: mol_type = other DNA
atcttgtccccaggagc

SEQ ID NO: 112803 - DNA, 17 bp, synthetic construct
  source 1..17: mol_type = other DNA
tcttgtccccaggagcc

SEQ ID NO: 112804 - DNA, 17 bp, synthetic construct
  source 1..17: mol_type = other DNA
cttgtccccaggagccc

SEQ ID NO: 112805 - DNA, 17 bp, synthetic construct
  source 1..17: mol_type = other DNA
ttgtccccaggagcccc

SEQ ID NO: 112806 - DNA, 17 bp, synthetic construct
  source 1..17: mol_type = other DNA
tgtccccaggagcccct

SEQ ID NO: 112807 - DNA, 17 bp, synthetic construct
  source 1..17: mol_type = other DNA
gtccccaggagcccctc

SEQ ID NO: 112808 - DNA, 17 bp, synthetic construct
  source 1..17: mol_type = other DNA
tccccaggagcccctca

SEQ ID NO: 112809 - DNA, 17 bp, synthetic construct
  source 1..17: mol_type = other DNA
ccccaggagcccctcag

SEQ ID NO: 112810 - DNA, 17 bp, synthetic construct
  source 1..17: mol_type = other DNA
cccaggagcccctcaga

SEQ ID NO: 112811 - DNA, 17 bp, synthetic construct
  source 1..17: mol_type = other DNA
ccaggagcccctcagag

SEQ ID NO: 112812 - DNA, 17 bp, synthetic construct
  source 1..17: mol_type = other DNA
caggagcccctcagagc

SEQ ID NO: 112813 - DNA, 17 bp, synthetic construct
  source 1..17: mol_type = other DNA
aggagcccctcagagcc

SEQ ID NO: 112814 - DNA, 17 bp, synthetic construct
  source 1..17: mol_type = other DNA
ggagcccctcagagcca

SEQ ID NO: 112815 - DNA, 17 bp, synthetic construct
  source 1..17: mol_type = other DNA
gagcccctcagagccac

SEQ ID NO: 112816 - DNA, 17 bp, synthetic construct
  source 1..17: mol_type = other DNA
agcccctcagagccacc

SEQ ID NO: 112817 - DNA, 17 bp, synthetic construct
  source 1..17: mol_type = other DNA
gcccctcagagccacca

SEQ ID NO: 112818 - DNA, 17 bp, synthetic construct
  source 1..17: mol_type = other DNA
cccctcagagccaccac

SEQ ID NO: 112819 - DNA, 17 bp, synthetic construct
  source 1..17: mol_type = other DNA
ccctcagagccaccaca

SEQ ID NO: 112820 - DNA, 17 bp, synthetic construct
  source 1..17: mol_type = other DNA
cctcagagccaccacac

SEQ ID NO: 112821 - DNA, 17 bp, synthetic construct
  source 1..17: mol_type = other DNA
ctcagagccaccacacc

SEQ ID NO: 112822 - DNA, 17 bp, synthetic construct
  source 1..17: mol_type = other DNA
tcagagccaccacaccc

SEQ ID NO: 112823 - DNA, 17 bp, synthetic construct
  source 1..17: mol_type = other DNA
cagagccaccacacccc

SEQ ID NO: 112824 - DNA, 17 bp, synthetic construct
  source 1..17: mol_type = other DNA
agagccaccacacccct

SEQ ID NO: 112825 - DNA, 17 bp, synthetic construct
  source 1..17: mol_type = other DNA
gagccaccacacccctg

SEQ ID NO: 112826 - DNA, 17 bp, synthetic construct
  source 1..17: mol_type = other DNA
agccaccacacccctgc

SEQ ID NO: 112827 - DNA, 17 bp, synthetic construct
  source 1..17: mol_type = other DNA
gccaccacacccctgct

SEQ ID NO: 112828 - DNA, 17 bp, synthetic construct
  source 1..17: mol_type = other DNA
ccaccacacccctgctt

SEQ ID NO: 112829 - DNA, 17 bp, synthetic construct
  source 1..17: mol_type = other DNA
caccacacccctgcttt

SEQ ID NO: 112830 - DNA, 17 bp, synthetic construct
  source 1..17: mol_type = other DNA
accacacccctgctttc

SEQ ID NO: 112831 - DNA, 17 bp, synthetic construct
  source 1..17: mol_type = other DNA
ccacacccctgctttct

SEQ ID NO: 112832 - DNA, 17 bp, synthetic construct
  source 1..17: mol_type = other DNA
cacacccctgctttctt

SEQ ID NO: 112833 - DNA, 17 bp, synthetic construct
  source 1..17: mol_type = other DNA
acacccctgctttcttc

SEQ ID NO: 112834 - DNA, 17 bp, synthetic construct
  source 1..17: mol_type = other DNA
cacccctgctttcttcc

SEQ ID NO: 112835 - DNA, 17 bp, synthetic construct
  source 1..17: mol_type = other DNA
acccctgctttcttccc

SEQ ID NO: 112836 - DNA, 17 bp, synthetic construct
  source 1..17: mol_type = other DNA
cccctgctttcttcccg

SEQ ID NO: 112837 - DNA, 17 bp, synthetic construct
  source 1..17: mol_type = other DNA
ccctgctttcttcccgg

SEQ ID NO: 112838 - DNA, 17 bp, synthetic construct
  source 1..17: mol_type = other DNA
cctgctttcttcccggc

SEQ ID NO: 112839 - DNA, 17 bp, synthetic construct
  source 1..17: mol_type = other DNA
ctgctttcttcccggca

SEQ ID NO: 112840 - DNA, 17 bp, synthetic construct
  source 1..17: mol_type = other DNA
tgctttcttcccggcag

SEQ ID NO: 112841 - DNA, 17 bp, synthetic construct
  source 1..17: mol_type = other DNA
gctttcttcccggcaga

SEQ ID NO: 112842 - DNA, 17 bp, synthetic construct
  source 1..17: mol_type = other DNA
ctttcttcccggcagac

SEQ ID NO: 112843 - DNA, 17 bp, synthetic construct
  source 1..17: mol_type = other DNA
tttcttcccggcagacg

SEQ ID NO: 112844 - DNA, 17 bp, synthetic construct
  source 1..17: mol_type = other DNA
ttcttcccggcagacgc

SEQ ID NO: 112845 - DNA, 17 bp, synthetic construct
  source 1..17: mol_type = other DNA
tcttcccggcagacgcc

SEQ ID NO: 112846 - DNA, 17 bp, synthetic construct
  source 1..17: mol_type = other DNA
cttcccggcagacgcca

SEQ ID NO: 112847 - DNA, 17 bp, synthetic construct
  source 1..17: mol_type = other DNA
ttcccggcagacgccag

SEQ ID NO: 112848 - DNA, 17 bp, synthetic construct
  source 1..17: mol_type = other DNA
tcccggcagacgccagg

SEQ ID NO: 112849 - DNA, 17 bp, synthetic construct
  source 1..17: mol_type = other DNA
cccggcagacgccaggc

SEQ ID NO: 112850 - DNA, 17 bp, synthetic construct
  source 1..17: mol_type = other DNA
ccggcagacgccaggct

SEQ ID NO: 112851 - DNA, 17 bp, synthetic construct
  source 1..17: mol_type = other DNA
cggcagacgccaggctg

SEQ ID NO: 112852 - DNA, 17 bp, synthetic construct
  source 1..17: mol_type = other DNA
ggcagacgccaggctga

SEQ ID NO: 112853 - DNA, 17 bp, synthetic construct
  source 1..17: mol_type = other DNA
gcagacgccaggctgac

SEQ ID NO: 112854 - DNA, 17 bp, synthetic construct
  source 1..17: mol_type = other DNA
cagacgccaggctgacc

SEQ ID NO: 112855 - DNA, 17 bp, synthetic construct
  source 1..17: mol_type = other DNA
agacgccaggctgaccc

SEQ ID NO: 112856 - DNA, 17 bp, synthetic construct
  source 1..17: mol_type = other DNA
gacgccaggctgacccc

SEQ ID NO: 112857 - DNA, 17 bp, synthetic construct
  source 1..17: mol_type = other DNA
acgccaggctgaccccg

SEQ ID NO: 112858 - DNA, 17 bp, synthetic construct
  source 1..17: mol_type = other DNA
cgccaggctgaccccgc

SEQ ID NO: 112859 - DNA, 17 bp, synthetic construct
  source 1..17: mol_type = other DNA
gccaggctgaccccgct

SEQ ID NO: 112860 - DNA, 17 bp, synthetic construct
  source 1..17: mol_type = other DNA
ccaggctgaccccgctc

SEQ ID NO: 112861 - DNA, 17 bp, synthetic construct
  source 1..17: mol_type = other DNA
caggctgaccccgctcc

SEQ ID NO: 112862 - DNA, 17 bp, synthetic construct
  source 1..17: mol_type = other DNA
aggctgaccccgctcca

SEQ ID NO: 112863 - DNA, 17 bp, synthetic construct
  source 1..17: mol_type = other DNA
ggctgaccccgctccag

SEQ ID NO: 112864 - DNA, 17 bp, synthetic construct
  source 1..17: mol_type = other DNA
gctgaccccgctccagt

SEQ ID NO: 112865 - DNA, 17 bp, synthetic construct
  source 1..17: mol_type = other DNA
ctgaccccgctccagtt

SEQ ID NO: 112866 - DNA, 17 bp, synthetic construct
  source 1..17: mol_type = other DNA
tgaccccgctccagttt

SEQ ID NO: 112867 - DNA, 17 bp, synthetic construct
  source 1..17: mol_type = other DNA
gaccccgctccagtttg

SEQ ID NO: 112868 - DNA, 17 bp, synthetic construct
  source 1..17: mol_type = other DNA
accccgctccagtttgg

SEQ ID NO: 112869 - DNA, 17 bp, synthetic construct
  source 1..17: mol_type = other DNA
ccccgctccagtttggg

SEQ ID NO: 112870 - DNA, 17 bp, synthetic construct
  source 1..17: mol_type = other DNA
cccgctccagtttggga

SEQ ID NO: 112871 - DNA, 17 bp, synthetic construct
  source 1..17: mol_type = other DNA
ccgctccagtttgggaa

SEQ ID NO: 112872 - DNA, 17 bp, synthetic construct
  source 1..17: mol_type = other DNA
cgctccagtttgggaac

SEQ ID NO: 112873 - DNA, 17 bp, synthetic construct
  source 1..17: mol_type = other DNA
gctccagtttgggaacc

SEQ ID NO: 112874 - DNA, 17 bp, synthetic construct
  source 1..17: mol_type = other DNA
ctccagtttgggaacct

SEQ ID NO: 112875 - DNA, 17 bp, synthetic construct
  source 1..17: mol_type = other DNA
tccagtttgggaacctg

SEQ ID NO: 112876 - DNA, 17 bp, synthetic construct
  source 1..17: mol_type = other DNA
ccagtttgggaacctgc

SEQ ID NO: 112877 - DNA, 17 bp, synthetic construct
  source 1..17: mol_type = other DNA
cagtttgggaacctgca

SEQ ID NO: 112878 - DNA, 17 bp, synthetic construct
  source 1..17: mol_type = other DNA
agtttgggaacctgcag

SEQ ID NO: 112879 - DNA, 17 bp, synthetic construct
  source 1..17: mol_type = other DNA
gtttgggaacctgcaga

SEQ ID NO: 112880 - DNA, 17 bp, synthetic construct
  source 1..17: mol_type = other DNA
tttgggaacctgcagaa

SEQ ID NO: 112881 - DNA, 17 bp, synthetic construct
  source 1..17: mol_type = other DNA
ttgggaacctgcagaag

SEQ ID NO: 112882 - DNA, 17 bp, synthetic construct
  source 1..17: mol_type = other DNA
tgggaacctgcagaagt

SEQ ID NO: 112883 - DNA, 17 bp, synthetic construct
  source 1..17: mol_type = other DNA
gggaacctgcagaagtt

SEQ ID NO: 112884 - DNA, 17 bp, synthetic construct
  source 1..17: mol_type = other DNA
ggaacctgcagaagttg

SEQ ID NO: 112885 - DNA, 17 bp, synthetic construct
  source 1..17: mol_type = other DNA
gaacctgcagaagttgg

SEQ ID NO: 112886 - DNA, 17 bp, synthetic construct
  source 1..17: mol_type = other DNA
aacctgcagaagttgga

SEQ ID NO: 112887 - DNA, 17 bp, synthetic construct
  source 1..17: mol_type = other DNA
acctgcagaagttggat

SEQ ID NO: 112888 - DNA, 17 bp, synthetic construct
  source 1..17: mol_type = other DNA
cctgcagaagttggatg

SEQ ID NO: 112889 - DNA, 17 bp, synthetic construct
  source 1..17: mol_type = other DNA
ctgcagaagttggatgg

SEQ ID NO: 112890 - DNA, 17 bp, synthetic construct
  source 1..17: mol_type = other DNA
tgcagaagttggatggg

SEQ ID NO: 112891 - DNA, 17 bp, synthetic construct
  source 1..17: mol_type = other DNA
gcagaagttggatgggc

SEQ ID NO: 112892 - DNA, 17 bp, synthetic construct
  source 1..17: mol_type = other DNA
cagaagttggatgggcc

SEQ ID NO: 112893 - DNA, 17 bp, synthetic construct
  source 1..17: mol_type = other DNA
agaagttggatgggccc

SEQ ID NO: 112894 - DNA, 17 bp, synthetic construct
  source 1..17: mol_type = other DNA
gaagttggatgggccca

SEQ ID NO: 112895 - DNA, 17 bp, synthetic construct
  source 1..17: mol_type = other DNA
aagttggatgggcccac

SEQ ID NO: 112896 - DNA, 17 bp, synthetic construct
  source 1..17: mol_type = other DNA
agttggatgggcccacg

SEQ ID NO: 112897 - DNA, 17 bp, synthetic construct
  source 1..17: mol_type = other DNA
gttggatgggcccacgg

SEQ ID NO: 112898 - DNA, 17 bp, synthetic construct
  source 1..17: mol_type = other DNA
ttggatgggcccacgga

SEQ ID NO: 112899 - DNA, 17 bp, synthetic construct
  source 1..17: mol_type = other DNA
tggatgggcccacggag

SEQ ID NO: 112900 - DNA, 17 bp, synthetic construct
  source 1..17: mol_type = other DNA
ggatgggcccacggagc

SEQ ID NO: 112901 - DNA, 17 bp, synthetic construct
  source 1..17: mol_type = other DNA
gatgggcccacggagca

SEQ ID NO: 112902 - DNA, 17 bp, synthetic construct
  source 1..17: mol_type = other DNA
atgggcccacggagcag

SEQ ID NO: 112903 - DNA, 17 bp, synthetic construct
  source 1..17: mol_type = other DNA
tgggcccacggagcagt

SEQ ID NO: 112904 - DNA, 17 bp, synthetic construct
  source 1..17: mol_type = other DNA
gggcccacggagcagtg

SEQ ID NO: 112905 - DNA, 17 bp, synthetic construct
  source 1..17: mol_type = other DNA
ggcccacggagcagtgc

SEQ ID NO: 112906 - DNA, 17 bp, synthetic construct
  source 1..17: mol_type = other DNA
gcccacggagcagtgcc

SEQ ID NO: 112907 - DNA, 17 bp, synthetic construct
  source 1..17: mol_type = other DNA
cccacggagcagtgccc

SEQ ID NO: 112908 - DNA, 17 bp, synthetic construct
  source 1..17: mol_type = other DNA
ccacggagcagtgcccg

SEQ ID NO: 112909 - DNA, 17 bp, synthetic construct
  source 1..17: mol_type = other DNA
cacggagcagtgcccgg

SEQ ID NO: 112910 - DNA, 17 bp, synthetic construct
  source 1..17: mol_type = other DNA
acggagcagtgcccgga

SEQ ID NO: 112911 - DNA, 17 bp, synthetic construct
  source 1..17: mol_type = other DNA
cggagcagtgcccggac

SEQ ID NO: 112912 - DNA, 17 bp, synthetic construct
  source 1..17: mol_type = other DNA
ggagcagtgcccggacc

SEQ ID NO: 112913 - DNA, 17 bp, synthetic construct
  source 1..17: mol_type = other DNA
gagcagtgcccggaccc

SEQ ID NO: 112914 - DNA, 17 bp, synthetic construct
  source 1..17: mol_type = other DNA
agcagtgcccggacccg

SEQ ID NO: 112915 - DNA, 17 bp, synthetic construct
  source 1..17: mol_type = other DNA
gcagtgcccggacccgc

SEQ ID NO: 112916 - DNA, 17 bp, synthetic construct
  source 1..17: mol_type = other DNA
cagtgcccggacccgct

SEQ ID NO: 112917 - DNA, 17 bp, synthetic construct
  source 1..17: mol_type = other DNA
agtgcccggacccgctg

SEQ ID NO: 112918 - DNA, 17 bp, synthetic construct
  source 1..17: mol_type = other DNA
gtgcccggacccgctgc

SEQ ID NO: 112919 - DNA, 17 bp, synthetic construct
  source 1..17: mol_type = other DNA
tgcccggacccgctgcc

SEQ ID NO: 112920 - DNA, 17 bp, synthetic construct
  source 1..17: mol_type = other DNA
gcccggacccgctgccc

SEQ ID NO: 112921 - DNA, 17 bp, synthetic construct
  source 1..17: mol_type = other DNA
cccggacccgctgccct

SEQ ID NO: 112922 - DNA, 17 bp, synthetic construct
  source 1..17: mol_type = other DNA
ccggacccgctgccctt

SEQ ID NO: 112923 - DNA, 17 bp, synthetic construct
  source 1..17: mol_type = other DNA
cggacccgctgcccttg

SEQ ID NO: 112924 - DNA, 17 bp, synthetic construct
  source 1..17: mol_type = other DNA
ggacccgctgcccttgc

SEQ ID NO: 112925 - DNA, 17 bp, synthetic construct
  source 1..17: mol_type = other DNA
gacccgctgcccttgcc

SEQ ID NO: 112926 - DNA, 17 bp, synthetic construct
  source 1..17: mol_type = other DNA
acccgctgcccttgccg

SEQ ID NO: 112927 - DNA, 17 bp, synthetic construct
  source 1..17: mol_type = other DNA
cccgctgcccttgccgg

SEQ ID NO: 112928 - DNA, 17 bp, synthetic construct
  source 1..17: mol_type = other DNA
ccgctgcccttgccggc

SEQ ID NO: 112929 - DNA, 17 bp, synthetic construct
  source 1..17: mol_type = other DNA
cgctgcccttgccggcc

SEQ ID NO: 112930 - DNA, 17 bp, synthetic construct
  source 1..17: mol_type = other DNA
gctgcccttgccggccg

SEQ ID NO: 112931 - DNA, 17 bp, synthetic construct
  source 1..17: mol_type = other DNA
ctgcccttgccggccgg

SEQ ID NO: 112932 - DNA, 17 bp, synthetic construct
  source 1..17: mol_type = other DNA
tgcccttgccggccggc

SEQ ID NO: 112933 - DNA, 17 bp, synthetic construct
  source 1..17: mol_type = other DNA
gcccttgccggccggca

SEQ ID NO: 112934 - DNA, 17 bp, synthetic construct
  source 1..17: mol_type = other DNA
cccttgccggccggcaa

SEQ ID NO: 112935 - DNA, 17 bp, synthetic construct
  source 1..17: mol_type = other DNA
ccttgccggccggcaac

SEQ ID NO: 112936 - DNA, 17 bp, synthetic construct
  source 1..17: mol_type = other DNA
cttgccggccggcaact

SEQ ID NO: 112937 - DNA, 17 bp, synthetic construct
  source 1..17: mol_type = other DNA
ttgccggccggcaactg

SEQ ID NO: 112938 - DNA, 17 bp, synthetic construct
  source 1..17: mol_type = other DNA
tgccggccggcaactgc

SEQ ID NO: 112939 - DNA, 17 bp, synthetic construct
  source 1..17: mol_type = other DNA
gccggccggcaactgca

SEQ ID NO: 112940 - DNA, 17 bp, synthetic construct
  source 1..17: mol_type = other DNA
ccggccggcaactgcac

SEQ ID NO: 112941 - DNA, 17 bp, synthetic construct
  source 1..17: mol_type = other DNA
cggccggcaactgcacg

SEQ ID NO: 112942 - DNA, 17 bp, synthetic construct
  source 1..17: mol_type = other DNA
ggccggcaactgcacgg

SEQ ID NO: 112943 - DNA, 17 bp, synthetic construct
  source 1..17: mol_type = other DNA
gccggcaactgcacgga

SEQ ID NO: 112944 - DNA, 17 bp, synthetic construct
  source 1..17: mol_type = other DNA
ccggcaactgcacggac

SEQ ID NO: 112945 - DNA, 17 bp, synthetic construct
  source 1..17: mol_type = other DNA
cggcaactgcacggacg

SEQ ID NO: 112946 - DNA, 17 bp, synthetic construct
  source 1..17: mol_type = other DNA
ggcaactgcacggacga

SEQ ID NO: 112947 - DNA, 17 bp, synthetic construct
  source 1..17: mol_type = other DNA
gcaactgcacggacgag

SEQ ID NO: 112948 - DNA, 17 bp, synthetic construct
  source 1..17: mol_type = other DNA
caactgcacggacgagg

SEQ ID NO: 112949 - DNA, 17 bp, synthetic construct
  source 1..17: mol_type = other DNA
aactgcacggacgaggt

SEQ ID NO: 112950 - DNA, 17 bp, synthetic construct
  source 1..17: mol_type = other DNA
actgcacggacgaggtg

SEQ ID NO: 112951 - DNA, 17 bp, synthetic construct
  source 1..17: mol_type = other DNA
ctgcacggacgaggtga

SEQ ID NO: 112952 - DNA, 17 bp, synthetic construct
  source 1..17: mol_type = other DNA
tgcacggacgaggtgag

SEQ ID NO: 112953 - DNA, 17 bp, synthetic construct
  source 1..17: mol_type = other DNA
gcacggacgaggtgagt

SEQ ID NO: 112954 - DNA, 17 bp, synthetic construct
  source 1..17: mol_type = other DNA
cacggacgaggtgagtc

SEQ ID NO: 112955 - DNA, 17 bp, synthetic construct
  source 1..17: mol_type = other DNA
acggacgaggtgagtcc

SEQ ID NO: 112956 - DNA, 17 bp, synthetic construct
  source 1..17: mol_type = other DNA
cggacgaggtgagtccc

SEQ ID NO: 112957 - DNA, 17 bp, synthetic construct
  source 1..17: mol_type = other DNA
ggacgaggtgagtcccc

SEQ ID NO: 112958 - DNA, 17 bp, synthetic construct
  source 1..17: mol_type = other DNA
gacgaggtgagtccccc

SEQ ID NO: 112959 - DNA, 17 bp, synthetic construct
  source 1..17: mol_type = other DNA
acgaggtgagtcccccg

SEQ ID NO: 112960 - DNA, 17 bp, synthetic construct
  source 1..17: mol_type = other DNA
cgaggtgagtcccccgc

SEQ ID NO: 112961 - DNA, 17 bp, synthetic construct
  source 1..17: mol_type = other DNA
gaggtgagtcccccgcc

SEQ ID NO: 112962 - DNA, 17 bp, synthetic construct
  source 1..17: mol_type = other DNA
aggtgagtcccccgcca

SEQ ID NO: 112963 - DNA, 17 bp, synthetic construct
  source 1..17: mol_type = other DNA
ggtgagtcccccgccac

SEQ ID NO: 112964 - DNA, 17 bp, synthetic construct
  source 1..17: mol_type = other DNA
gtgagtcccccgccacc

SEQ ID NO: 112965 - DNA, 17 bp, synthetic construct
  source 1..17: mol_type = other DNA
tgagtcccccgccaccc

SEQ ID NO: 112966 - DNA, 17 bp, synthetic construct
  source 1..17: mol_type = other DNA
gagtcccccgccacccc

SEQ ID NO: 112967 - DNA, 17 bp, synthetic construct
  source 1..17: mol_type = other DNA
agtcccccgccaccccc

SEQ ID NO: 112968 - DNA, 17 bp, synthetic construct
  source 1..17: mol_type = other DNA
gtcccccgccaccccca

SEQ ID NO: 112969 - DNA, 17 bp, synthetic construct
  source 1..17: mol_type = other DNA
tcccccgccacccccag

SEQ ID NO: 112970 - DNA, 17 bp, synthetic construct
  source 1..17: mol_type = other DNA
cccccgccacccccagc

SEQ ID NO: 112971 - DNA, 17 bp, synthetic construct
  source 1..17: mol_type = other DNA
ccccgccacccccagct

SEQ ID NO: 112972 - DNA, 17 bp, synthetic construct
  source 1..17: mol_type = other DNA
cccgccacccccagctc

SEQ ID NO: 112973 - DNA, 17 bp, synthetic construct
  source 1..17: mol_type = other DNA
ccgccacccccagctcc

SEQ ID NO: 112974 - DNA, 17 bp, synthetic construct
  source 1..17: mol_type = other DNA
cgccacccccagctcct

SEQ ID NO: 112975 - DNA, 17 bp, synthetic construct
  source 1..17: mol_type = other DNA
gccacccccagctcctg

SEQ ID NO: 112976 - DNA, 17 bp, synthetic construct
  source 1..17: mol_type = other DNA
ccacccccagctcctgg

SEQ ID NO: 112977 - DNA, 17 bp, synthetic construct
  source 1..17: mol_type = other DNA
cacccccagctcctggg

SEQ ID NO: 112978 - DNA, 17 bp, synthetic construct
  source 1..17: mol_type = other DNA
acccccagctcctgggc

SEQ ID NO: 112979 - DNA, 17 bp, synthetic construct
  source 1..17: mol_type = other DNA
cccccagctcctgggca

SEQ ID NO: 112980 - DNA, 17 bp, synthetic construct
  source 1..17: mol_type = other DNA
ccccagctcctgggcag

SEQ ID NO: 112981 - DNA, 17 bp, synthetic construct
  source 1..17: mol_type = other DNA
cccagctcctgggcagg

SEQ ID NO: 112982 - DNA, 17 bp, synthetic construct
  source 1..17: mol_type = other DNA
ccagctcctgggcaggg

SEQ ID NO: 112983 - DNA, 17 bp, synthetic construct
  source 1..17: mol_type = other DNA
cagctcctgggcaggga

SEQ ID NO: 112984 - DNA, 17 bp, synthetic construct
  source 1..17: mol_type = other DNA
agctcctgggcagggac

SEQ ID NO: 112985 - DNA, 17 bp, synthetic construct
  source 1..17: mol_type = other DNA
gctcctgggcagggacg

SEQ ID NO: 112986 - DNA, 17 bp, synthetic construct
  source 1..17: mol_type = other DNA
ctcctgggcagggacgg

SEQ ID NO: 112987 - DNA, 17 bp, synthetic construct
  source 1..17: mol_type = other DNA
tcctgggcagggacggc

SEQ ID NO: 112988 - DNA, 17 bp, synthetic construct
  source 1..17: mol_type = other DNA
cctgggcagggacggcc

SEQ ID NO: 112989 - DNA, 17 bp, synthetic construct
  source 1..17: mol_type = other DNA
ctgggcagggacggcct

SEQ ID NO: 112990 - DNA, 17 bp, synthetic construct
  source 1..17: mol_type = other DNA
tgggcagggacggcctc

SEQ ID NO: 112991 - DNA, 17 bp, synthetic construct
  source 1..17: mol_type = other DNA
gggcagggacggcctcc

SEQ ID NO: 112992 - DNA, 17 bp, synthetic construct
  source 1..17: mol_type = other DNA
ggcagggacggcctcca

SEQ ID NO: 112993 - DNA, 17 bp, synthetic construct
  source 1..17: mol_type = other DNA
gcagggacggcctccag

SEQ ID NO: 112994 - DNA, 17 bp, synthetic construct
  source 1..17: mol_type = other DNA
cagggacggcctccagg

SEQ ID NO: 112995 - DNA, 17 bp, synthetic construct
  source 1..17: mol_type = other DNA
agggacggcctccaggt

SEQ ID NO: 112996 - DNA, 17 bp, synthetic construct
  source 1..17: mol_type = other DNA
gggacggcctccaggtc

SEQ ID NO: 112997 - DNA, 17 bp, synthetic construct
  source 1..17: mol_type = other DNA
ggacggcctccaggtcc

SEQ ID NO: 112998 - DNA, 17 bp, synthetic construct
  source 1..17: mol_type = other DNA
gacggcctccaggtcca

SEQ ID NO: 112999 - DNA, 17 bp, synthetic construct
  source 1..17: mol_type = other DNA
acggcctccaggtccag

SEQ ID NO: 113000 - DNA, 17 bp, synthetic construct
  source 1..17: mol_type = other DNA
cggcctccaggtccagg

SEQ ID NO: 113001 - DNA, 17 bp, synthetic construct
  source 1..17: mol_type = other DNA
ggcctccaggtccaggg

SEQ ID NO: 113002 - DNA, 17 bp, synthetic construct
  source 1..17: mol_type = other DNA
gcctccaggtccagggg

SEQ ID NO: 113003 - DNA, 17 bp, synthetic construct
  source 1..17: mol_type = other DNA
cctccaggtccaggggg

SEQ ID NO: 113004 - DNA, 17 bp, synthetic construct
  source 1..17: mol_type = other DNA
ctccaggtccaggggga

SEQ ID NO: 113005 - DNA, 17 bp, synthetic construct
  source 1..17: mol_type = other DNA
tccaggtccagggggag

SEQ ID NO: 113006 - DNA, 17 bp, synthetic construct
  source 1..17: mol_type = other DNA
ccaggtccagggggagc

SEQ ID NO: 113007 - DNA, 17 bp, synthetic construct
  source 1..17: mol_type = other DNA
caggtccagggggagct

SEQ ID NO: 113008 - DNA, 17 bp, synthetic construct
  source 1..17: mol_type = other DNA
aggtccagggggagctg

SEQ ID NO: 113009 - DNA, 17 bp, synthetic construct
  source 1..17: mol_type = other DNA
ggtccagggggagctgg

SEQ ID NO: 113010 - DNA, 17 bp, synthetic construct
  source 1..17: mol_type = other DNA
gtccagggggagctggg

SEQ ID NO: 113011 - DNA, 17 bp, synthetic construct
  source 1..17: mol_type = other DNA
tccagggggagctgggc

SEQ ID NO: 113012 - DNA, 17 bp, synthetic construct
  source 1..17: mol_type = other DNA
ccagggggagctgggcc

SEQ ID NO: 113013 - DNA, 17 bp, synthetic construct
  source 1..17: mol_type = other DNA
cagggggagctgggccg

SEQ ID NO: 113014 - DNA, 17 bp, synthetic construct
  source 1..17: mol_type = other DNA
agggggagctgggccga

SEQ ID NO: 113015 - DNA, 17 bp, synthetic construct
  source 1..17: mol_type = other DNA
gggggagctgggccgag

SEQ ID NO: 113016 - DNA, 17 bp, synthetic construct
  source 1..17: mol_type = other DNA
ggggagctgggccgagg

SEQ ID NO: 113017 - DNA, 17 bp, synthetic construct
  source 1..17: mol_type = other DNA
gggagctgggccgaggt

SEQ ID NO: 113018 - DNA, 17 bp, synthetic construct
  source 1..17: mol_type = other DNA
ggagctgggccgaggtc

SEQ ID NO: 113019 - DNA, 17 bp, synthetic construct
  source 1..17: mol_type = other DNA
gagctgggccgaggtct

SEQ ID NO: 113020 - DNA, 17 bp, synthetic construct
  source 1..17: mol_type = other DNA
agctgggccgaggtctg

SEQ ID NO: 113021 - DNA, 17 bp, synthetic construct
  source 1..17: mol_type = other DNA
gctgggccgaggtctga

SEQ ID NO: 113022 - DNA, 17 bp, synthetic construct
  source 1..17: mol_type = other DNA
ctgggccgaggtctgag

SEQ ID NO: 113023 - DNA, 17 bp, synthetic construct
  source 1..17: mol_type = other DNA
tgggccgaggtctgagg

SEQ ID NO: 113024 - DNA, 17 bp, synthetic construct
  source 1..17: mol_type = other DNA
gggccgaggtctgagga

SEQ ID NO: 113025 - DNA, 17 bp, synthetic construct
  source 1..17: mol_type = other DNA
ggccgaggtctgaggaa

SEQ ID NO: 113026 - DNA, 17 bp, synthetic construct
  source 1..17: mol_type = other DNA
gccgaggtctgaggaat

SEQ ID NO: 113027 - DNA, 17 bp, synthetic construct
  source 1..17: mol_type = other DNA
ccgaggtctgaggaatg

SEQ ID NO: 113028 - DNA, 17 bp, synthetic construct
  source 1..17: mol_type = other DNA
cgaggtctgaggaatgt

SEQ ID NO: 113029 - DNA, 17 bp, synthetic construct
  source 1..17: mol_type = other DNA
gaggtctgaggaatgtt

SEQ ID NO: 113030 - DNA, 17 bp, synthetic construct
  source 1..17: mol_type = other DNA
aggtctgaggaatgttc

SEQ ID NO: 113031 - DNA, 17 bp, synthetic construct
  source 1..17: mol_type = other DNA
ggtctgaggaatgttcc

SEQ ID NO: 113032 - DNA, 17 bp, synthetic construct
  source 1..17: mol_type = other DNA
gtctgaggaatgttccc

SEQ ID NO: 113033 - DNA, 17 bp, synthetic construct
  source 1..17: mol_type = other DNA
tctgaggaatgttccca

SEQ ID NO: 113034 - DNA, 17 bp, synthetic construct
  source 1..17: mol_type = other DNA
ctgaggaatgttcccag

SEQ ID NO: 113035 - DNA, 17 bp, synthetic construct
  source 1..17: mol_type = other DNA
tgaggaatgttcccagc

SEQ ID NO: 113036 - DNA, 17 bp, synthetic construct
  source 1..17: mol_type = other DNA
gaggaatgttcccagct

SEQ ID NO: 113037 - DNA, 17 bp, synthetic construct
  source 1..17: mol_type = other DNA
aggaatgttcccagctg

SEQ ID NO: 113038 - DNA, 17 bp, synthetic construct
  source 1..17: mol_type = other DNA
ggaatgttcccagctgg

SEQ ID NO: 113039 - DNA, 17 bp, synthetic construct
  source 1..17: mol_type = other DNA
gaatgttcccagctggt

SEQ ID NO: 113040 - DNA, 17 bp, synthetic construct
  source 1..17: mol_type = other DNA
aatgttcccagctggtg

SEQ ID NO: 113041 - DNA, 17 bp, synthetic construct
  source 1..17: mol_type = other DNA
atgttcccagctggtgg

SEQ ID NO: 113042 - DNA, 17 bp, synthetic construct
  source 1..17: mol_type = other DNA
tgttcccagctggtgga

SEQ ID NO: 113043 - DNA, 17 bp, synthetic construct
  source 1..17: mol_type = other DNA
gttcccagctggtggag

SEQ ID NO: 113044 - DNA, 17 bp, synthetic construct
  source 1..17: mol_type = other DNA
ttcccagctggtggaga

SEQ ID NO: 113045 - DNA, 17 bp, synthetic construct
  source 1..17: mol_type = other DNA
tcccagctggtggagag

SEQ ID NO: 113046 - DNA, 17 bp, synthetic construct
  source 1..17: mol_type = other DNA
cccagctggtggagaga

SEQ ID NO: 113047 - DNA, 17 bp, synthetic construct
  source 1..17: mol_type = other DNA
ccagctggtggagagat

SEQ ID NO: 113048 - DNA, 17 bp, synthetic construct
  source 1..17: mol_type = other DNA
cagctggtggagagatg

SEQ ID NO: 113049 - DNA, 17 bp, synthetic construct
  source 1..17: mol_type = other DNA
agctggtggagagatgg

SEQ ID NO: 113050 - DNA, 17 bp, synthetic construct
  source 1..17: mol_type = other DNA
gctggtggagagatggt

SEQ ID NO: 113051 - DNA, 17 bp, synthetic construct
  source 1..17: mol_type = other DNA
ctggtggagagatggtg

SEQ ID NO: 113052 - DNA, 17 bp, synthetic construct
  source 1..17: mol_type = other DNA
tggtggagagatggtgc

SEQ ID NO: 113053 - DNA, 17 bp, synthetic construct
  source 1..17: mol_type = other DNA
ggtggagagatggtgcc

SEQ ID NO: 113054 - DNA, 17 bp, synthetic construct
  source 1..17: mol_type = other DNA
gtggagagatggtgcca

SEQ ID NO: 113055 - DNA, 17 bp, synthetic construct
  source 1..17: mol_type = other DNA
tggagagatggtgccat

SEQ ID NO: 113056 - DNA, 17 bp, synthetic construct
  source 1..17: mol_type = other DNA
ggagagatggtgccatt

SEQ ID NO: 113057 - DNA, 17 bp, synthetic construct
  source 1..17: mol_type = other DNA
gagagatggtgccattg

SEQ ID NO: 113058 - DNA, 17 bp, synthetic construct
  source 1..17: mol_type = other DNA
agagatggtgccattgg

SEQ ID NO: 113059 - DNA, 17 bp, synthetic construct
  source 1..17: mol_type = other DNA
gagatggtgccattgga

SEQ ID NO: 113060 - DNA, 17 bp, synthetic construct
  source 1..17: mol_type = other DNA
agatggtgccattggag

SEQ ID NO: 113061 - DNA, 17 bp, synthetic construct
  source 1..17: mol_type = other DNA
gatggtgccattggagg

SEQ ID NO: 113062 - DNA, 17 bp, synthetic construct
  source 1..17: mol_type = other DNA
atggtgccattggaggg

SEQ ID NO: 113063 - DNA, 17 bp, synthetic construct
  source 1..17: mol_type = other DNA
tggtgccattggaggga

SEQ ID NO: 113064 - DNA, 17 bp, synthetic construct
  source 1..17: mol_type = other DNA
ggtgccattggagggag

SEQ ID NO: 113065 - DNA, 17 bp, synthetic construct
  source 1..17: mol_type = other DNA
gtgccattggagggagg

SEQ ID NO: 113066 - DNA, 17 bp, synthetic construct
  source 1..17: mol_type = other DNA
tgccattggagggaggc

SEQ ID NO: 113067 - DNA, 17 bp, synthetic construct
  source 1..17: mol_type = other DNA
gccattggagggaggcc

SEQ ID NO: 113068 - DNA, 17 bp, synthetic construct
  source 1..17: mol_type = other DNA
ccattggagggaggccg

SEQ ID NO: 113069 - DNA, 17 bp, synthetic construct
  source 1..17: mol_type = other DNA
cattggagggaggccgg

SEQ ID NO: 113070 - DNA, 17 bp, synthetic construct
  source 1..17: mol_type = other DNA
attggagggaggccggg

SEQ ID NO: 113071 - DNA, 17 bp, synthetic construct
  source 1..17: mol_type = other DNA
ttggagggaggccgggc

SEQ ID NO: 113072 - DNA, 17 bp, synthetic construct
  source 1..17: mol_type = other DNA
tggagggaggccgggca

SEQ ID NO: 113073 - DNA, 17 bp, synthetic construct
  source 1..17: mol_type = other DNA
ggagggaggccgggcag

SEQ ID NO: 113074 - DNA, 17 bp, synthetic construct
  source 1..17: mol_type = other DNA
gagggaggccgggcagc

SEQ ID NO: 113075 - DNA, 17 bp, synthetic construct
  source 1..17: mol_type = other DNA
agggaggccgggcagcc

SEQ ID NO: 113076 - DNA, 17 bp, synthetic construct
  source 1..17: mol_type = other DNA
gggaggccgggcagcca

SEQ ID NO: 113077 - DNA, 17 bp, synthetic construct
  source 1..17: mol_type = other DNA
ggaggccgggcagccac

SEQ ID NO: 113078 - DNA, 17 bp, synthetic construct
  source 1..17: mol_type = other DNA
gaggccgggcagccacc

SEQ ID NO: 113079 - DNA, 17 bp, synthetic construct
  source 1..17: mol_type = other DNA
aggccgggcagccaccc

SEQ ID NO: 113080 - DNA, 17 bp, synthetic construct
  source 1..17: mol_type = other DNA
ggccgggcagccaccct

SEQ ID NO: 113081 - DNA, 17 bp, synthetic construct
  source 1..17: mol_type = other DNA
gccgggcagccaccctc

SEQ ID NO: 113082 - DNA, 17 bp, synthetic construct
  source 1..17: mol_type = other DNA
ccgggcagccaccctct

SEQ ID NO: 113083 - DNA, 17 bp, synthetic construct
  source 1..17: mol_type = other DNA
cgggcagccaccctctg

SEQ ID NO: 113084 - DNA, 17 bp, synthetic construct
  source 1..17: mol_type = other DNA
gggcagccaccctctgt

SEQ ID NO: 113085 - DNA, 17 bp, synthetic construct
  source 1..17: mol_type = other DNA
ggcagccaccctctgtg

SEQ ID NO: 113086 - DNA, 17 bp, synthetic construct
  source 1..17: mol_type = other DNA
gcagccaccctctgtgt

SEQ ID NO: 113087 - DNA, 17 bp, synthetic construct
  source 1..17: mol_type = other DNA
cagccaccctctgtgtg

SEQ ID NO: 113088 - DNA, 17 bp, synthetic construct
  source 1..17: mol_type = other DNA
agccaccctctgtgtgc

SEQ ID NO: 113089 - DNA, 17 bp, synthetic construct
  source 1..17: mol_type = other DNA
gccaccctctgtgtgct

SEQ ID NO: 113090 - DNA, 17 bp, synthetic construct
  source 1..17: mol_type = other DNA
ccaccctctgtgtgctc

SEQ ID NO: 113091 - DNA, 17 bp, synthetic construct
  source 1..17: mol_type = other DNA
caccctctgtgtgctca

SEQ ID NO: 113092 - DNA, 17 bp, synthetic construct
  source 1..17: mol_type = other DNA
accctctgtgtgctcag

SEQ ID NO: 113093 - DNA, 17 bp, synthetic construct
  source 1..17: mol_type = other DNA
ccctctgtgtgctcagt

SEQ ID NO: 113094 - DNA, 17 bp, synthetic construct
  source 1..17: mol_type = other DNA
cctctgtgtgctcagtt

SEQ ID NO: 113095 - DNA, 17 bp, synthetic construct
  source 1..17: mol_type = other DNA
ctctgtgtgctcagttc

SEQ ID NO: 113096 - DNA, 17 bp, synthetic construct
  source 1..17: mol_type = other DNA
tctgtgtgctcagttcc

SEQ ID NO: 113097 - DNA, 17 bp, synthetic construct
  source 1..17: mol_type = other DNA
ctgtgtgctcagttcca

SEQ ID NO: 113098 - DNA, 17 bp, synthetic construct
  source 1..17: mol_type = other DNA
tgtgtgctcagttccac

SEQ ID NO: 113099 - DNA, 17 bp, synthetic construct
  source 1..17: mol_type = other DNA
gtgtgctcagttccacg

SEQ ID NO: 113100 - DNA, 17 bp, synthetic construct
  source 1..17: mol_type = other DNA
tgtgctcagttccacgg

SEQ ID NO: 113101 - DNA, 17 bp, synthetic construct
  source 1..17: mol_type = other DNA
gtgctcagttccacggt

SEQ ID NO: 113102 - DNA, 17 bp, synthetic construct
  source 1..17: mol_type = other DNA
tgctcagttccacggta

SEQ ID NO: 113103 - DNA, 17 bp, synthetic construct
  source 1..17: mol_type = other DNA
gctcagttccacggtac

SEQ ID NO: 113104 - DNA, 17 bp, synthetic construct
  source 1..17: mol_type = other DNA
ctcagttccacggtaca

SEQ ID NO: 113105 - DNA, 17 bp, synthetic construct
  source 1..17: mol_type = other DNA
tcagttccacggtacac

SEQ ID NO: 113106 - DNA, 17 bp, synthetic construct
  source 1..17: mol_type = other DNA
cagttccacggtacaca

SEQ ID NO: 113107 - DNA, 17 bp, synthetic construct
  source 1..17: mol_type = other DNA
agttccacggtacacac

SEQ ID NO: 113108 - DNA, 17 bp, synthetic construct
  source 1..17: mol_type = other DNA
gttccacggtacacact

SEQ ID NO: 113109 - DNA, 17 bp, synthetic construct
  source 1..17: mol_type = other DNA
ttccacggtacacactg

SEQ ID NO: 113110 - DNA, 17 bp, synthetic construct
  source 1..17: mol_type = other DNA
tccacggtacacactgt

SEQ ID NO: 113111 - DNA, 17 bp, synthetic construct
  source 1..17: mol_type = other DNA
ccacggtacacactgtc

SEQ ID NO: 113112 - DNA, 17 bp, synthetic construct
  source 1..17: mol_type = other DNA
cacggtacacactgtcc

SEQ ID NO: 113113 - DNA, 17 bp, synthetic construct
  source 1..17: mol_type = other DNA
acggtacacactgtccg

SEQ ID NO: 113114 - DNA, 17 bp, synthetic construct
  source 1..17: mol_type = other DNA
cggtacacactgtccga

SEQ ID NO: 113115 - DNA, 17 bp, synthetic construct
  source 1..17: mol_type = other DNA
ggtacacactgtccgag

SEQ ID NO: 113116 - DNA, 17 bp, synthetic construct
  source 1..17: mol_type = other DNA
gtacacactgtccgagt

SEQ ID NO: 113117 - DNA, 17 bp, synthetic construct
  source 1..17: mol_type = other DNA
tacacactgtccgagtg

SEQ ID NO: 113118 - DNA, 17 bp, synthetic construct
  source 1..17: mol_type = other DNA
acacactgtccgagtgt

SEQ ID NO: 113119 - DNA, 17 bp, synthetic construct
  source 1..17: mol_type = other DNA
cacactgtccgagtgtg

SEQ ID NO: 113120 - DNA, 17 bp, synthetic construct
  source 1..17: mol_type = other DNA
acactgtccgagtgtgg

SEQ ID NO: 113121 - DNA, 17 bp, synthetic construct
  source 1..17: mol_type = other DNA
cactgtccgagtgtggt

SEQ ID NO: 113122 - DNA, 17 bp, synthetic construct
  source 1..17: mol_type = other DNA
actgtccgagtgtggtg

SEQ ID NO: 113123 - DNA, 17 bp, synthetic construct
  source 1..17: mol_type = other DNA
ctgtccgagtgtggtga

SEQ ID NO: 113124 - DNA, 17 bp, synthetic construct
  source 1..17: mol_type = other DNA
tgtccgagtgtggtgac

SEQ ID NO: 113125 - DNA, 17 bp, synthetic construct
  source 1..17: mol_type = other DNA
gtccgagtgtggtgacg

SEQ ID NO: 113126 - DNA, 17 bp, synthetic construct
  source 1..17: mol_type = other DNA
tccgagtgtggtgacgt

SEQ ID NO: 113127 - DNA, 17 bp, synthetic construct
  source 1..17: mol_type = other DNA
ccgagtgtggtgacgtg

SEQ ID NO: 113128 - DNA, 17 bp, synthetic construct
  source 1..17: mol_type = other DNA
cgagtgtggtgacgtgc

SEQ ID NO: 113129 - DNA, 17 bp, synthetic construct
  source 1..17: mol_type = other DNA
gagtgtggtgacgtgcg

SEQ ID NO: 113130 - DNA, 17 bp, synthetic construct
  source 1..17: mol_type = other DNA
agtgtggtgacgtgcgt

SEQ ID NO: 113131 - DNA, 17 bp, synthetic construct
  source 1..17: mol_type = other DNA
gtgtggtgacgtgcgtg

SEQ ID NO: 113132 - DNA, 17 bp, synthetic construct
  source 1..17: mol_type = other DNA
tgtggtgacgtgcgtgt

SEQ ID NO: 113133 - DNA, 17 bp, synthetic construct
  source 1..17: mol_type = other DNA
gtggtgacgtgcgtgtt

SEQ ID NO: 113134 - DNA, 17 bp, synthetic construct
  source 1..17: mol_type = other DNA
tggtgacgtgcgtgttc

SEQ ID NO: 113135 - DNA, 17 bp, synthetic construct
  source 1..17: mol_type = other DNA
ggtgacgtgcgtgttca

SEQ ID NO: 113136 - DNA, 17 bp, synthetic construct
  source 1..17: mol_type = other DNA
gtgacgtgcgtgttcat

SEQ ID NO: 113137 - DNA, 17 bp, synthetic construct
  source 1..17: mol_type = other DNA
tgacgtgcgtgttcatc

SEQ ID NO: 113138 - DNA, 17 bp, synthetic construct
  source 1..17: mol_type = other DNA
gacgtgcgtgttcatca

SEQ ID NO: 113139 - DNA, 17 bp, synthetic construct
  source 1..17: mol_type = other DNA
acgtgcgtgttcatcag

SEQ ID NO: 113140 - DNA, 17 bp, synthetic construct
  source 1..17: mol_type = other DNA
cgtgcgtgttcatcagg

SEQ ID NO: 113141 - DNA, 17 bp, synthetic construct
  source 1..17: mol_type = other DNA
gtgcgtgttcatcaggc

SEQ ID NO: 113142 - DNA, 17 bp, synthetic construct
  source 1..17: mol_type = other DNA
tgcgtgttcatcaggcc

SEQ ID NO: 113143 - DNA, 17 bp, synthetic construct
  source 1..17: mol_type = other DNA
gcgtgttcatcaggcca

SEQ ID NO: 113144 - DNA, 17 bp, synthetic construct
  source 1..17: mol_type = other DNA
cgtgttcatcaggccac

SEQ ID NO: 113145 - DNA, 17 bp, synthetic construct
  source 1..17: mol_type = other DNA
gtgttcatcaggccacg

SEQ ID NO: 113146 - DNA, 17 bp, synthetic construct
  source 1..17: mol_type = other DNA
tgttcatcaggccacgc

SEQ ID NO: 113147 - DNA, 17 bp, synthetic construct
  source 1..17: mol_type = other DNA
gttcatcaggccacgcg

SEQ ID NO: 113148 - DNA, 17 bp, synthetic construct
  source 1..17: mol_type = other DNA
ttcatcaggccacgcgt

SEQ ID NO: 113149 - DNA, 17 bp, synthetic construct
  source 1..17: mol_type = other DNA
tcatcaggccacgcgtg

SEQ ID NO: 113150 - DNA, 17 bp, synthetic construct
  source 1..17: mol_type = other DNA
catcaggccacgcgtgt

SEQ ID NO: 113151 - DNA, 17 bp, synthetic construct
  source 1..17: mol_type = other DNA
atcaggccacgcgtgtg

SEQ ID NO: 113152 - DNA, 17 bp, synthetic construct
  source 1..17: mol_type = other DNA
tcaggccacgcgtgtgc

SEQ ID NO: 113153 - DNA, 17 bp, synthetic construct
  source 1..17: mol_type = other DNA
caggccacgcgtgtgcc

SEQ ID NO: 113154 - DNA, 17 bp, synthetic construct
  source 1..17: mol_type = other DNA
aggccacgcgtgtgccc

SEQ ID NO: 113155 - DNA, 17 bp, synthetic construct
  source 1..17: mol_type = other DNA
ggccacgcgtgtgccca

SEQ ID NO: 113156 - DNA, 17 bp, synthetic construct
  source 1..17: mol_type = other DNA
gccacgcgtgtgcccat

SEQ ID NO: 113157 - DNA, 17 bp, synthetic construct
  source 1..17: mol_type = other DNA
ccacgcgtgtgcccatc

SEQ ID NO: 113158 - DNA, 17 bp, synthetic construct
  source 1..17: mol_type = other DNA
cacgcgtgtgcccatct

SEQ ID NO: 113159 - DNA, 17 bp, synthetic construct
  source 1..17: mol_type = other DNA
acgcgtgtgcccatctg

SEQ ID NO: 113160 - DNA, 17 bp, synthetic construct
  source 1..17: mol_type = other DNA
cgcgtgtgcccatctgt

SEQ ID NO: 113161 - DNA, 17 bp, synthetic construct
  source 1..17: mol_type = other DNA
gcgtgtgcccatctgtg

SEQ ID NO: 113162 - DNA, 17 bp, synthetic construct
  source 1..17: mol_type = other DNA
cgtgtgcccatctgtgt

SEQ ID NO: 113163 - DNA, 17 bp, synthetic construct
  source 1..17: mol_type = other DNA
gtgtgcccatctgtgtg

SEQ ID NO: 113164 - DNA, 17 bp, synthetic construct
  source 1..17: mol_type = other DNA
tgtgcccatctgtgtga

SEQ ID NO: 113165 - DNA, 17 bp, synthetic construct
  source 1..17: mol_type = other DNA
gtgcccatctgtgtgag

SEQ ID NO: 113166 - DNA, 17 bp, synthetic construct
  source 1..17: mol_type = other DNA
tgcccatctgtgtgagc

SEQ ID NO: 113167 - DNA, 17 bp, synthetic construct
  source 1..17: mol_type = other DNA
gcccatctgtgtgagca

SEQ ID NO: 113168 - DNA, 17 bp, synthetic construct
  source 1..17: mol_type = other DNA
cccatctgtgtgagcaa

SEQ ID NO: 113169 - DNA, 17 bp, synthetic construct
  source 1..17: mol_type = other DNA
ccatctgtgtgagcaaa

SEQ ID NO: 113170 - DNA, 17 bp, synthetic construct
  source 1..17: mol_type = other DNA
catctgtgtgagcaaac

SEQ ID NO: 113171 - DNA, 17 bp, synthetic construct
  source 1..17: mol_type = other DNA
atctgtgtgagcaaaca

SEQ ID NO: 113172 - DNA, 17 bp, synthetic construct
  source 1..17: mol_type = other DNA
tctgtgtgagcaaacac

SEQ ID NO: 113173 - DNA, 17 bp, synthetic construct
  source 1..17: mol_type = other DNA
ctgtgtgagcaaacaca

SEQ ID NO: 113174 - DNA, 17 bp, synthetic construct
  source 1..17: mol_type = other DNA
tgtgtgagcaaacacag

SEQ ID NO: 113175 - DNA, 17 bp, synthetic construct
  source 1..17: mol_type = other DNA
gtgtgagcaaacacagg

SEQ ID NO: 113176 - DNA, 17 bp, synthetic construct
  source 1..17: mol_type = other DNA
tgtgagcaaacacaggc

SEQ ID NO: 113177 - DNA, 17 bp, synthetic construct
  source 1..17: mol_type = other DNA
gtgagcaaacacaggcc

SEQ ID NO: 113178 - DNA, 17 bp, synthetic construct
  source 1..17: mol_type = other DNA
tgagcaaacacaggccc

SEQ ID NO: 113179 - DNA, 17 bp, synthetic construct
  source 1..17: mol_type = other DNA
gagcaaacacaggccca

SEQ ID NO: 113180 - DNA, 17 bp, synthetic construct
  source 1..17: mol_type = other DNA
agcaaacacaggcccat

SEQ ID NO: 113181 - DNA, 17 bp, synthetic construct
  source 1..17: mol_type = other DNA
gcaaacacaggcccatg

SEQ ID NO: 113182 - DNA, 17 bp, synthetic construct
  source 1..17: mol_type = other DNA
caaacacaggcccatgc

SEQ ID NO: 113183 - DNA, 17 bp, synthetic construct
  source 1..17: mol_type = other DNA
aaacacaggcccatgct

SEQ ID NO: 113184 - DNA, 17 bp, synthetic construct
  source 1..17: mol_type = other DNA
aacacaggcccatgctg

SEQ ID NO: 113185 - DNA, 17 bp, synthetic construct
  source 1..17: mol_type = other DNA
acacaggcccatgctgc

SEQ ID NO: 113186 - DNA, 17 bp, synthetic construct
  source 1..17: mol_type = other DNA
cacaggcccatgctgca

SEQ ID NO: 113187 - DNA, 17 bp, synthetic construct
  source 1..17: mol_type = other DNA
acaggcccatgctgcac

SEQ ID NO: 113188 - DNA, 17 bp, synthetic construct
  source 1..17: mol_type = other DNA
caggcccatgctgcaca

SEQ ID NO: 113189 - DNA, 17 bp, synthetic construct
  source 1..17: mol_type = other DNA
aggcccatgctgcacag

SEQ ID NO: 113190 - DNA, 17 bp, synthetic construct
  source 1..17: mol_type = other DNA
ggcccatgctgcacagg

SEQ ID NO: 113191 - DNA, 17 bp, synthetic construct
  source 1..17: mol_type = other DNA
gcccatgctgcacaggc

SEQ ID NO: 113192 - DNA, 17 bp, synthetic construct
  source 1..17: mol_type = other DNA
cccatgctgcacaggct

SEQ ID NO: 113193 - DNA, 17 bp, synthetic construct
  source 1..17: mol_type = other DNA
ccatgctgcacaggctg

SEQ ID NO: 113194 - DNA, 17 bp, synthetic construct
  source 1..17: mol_type = other DNA
catgctgcacaggctgg

SEQ ID NO: 113195 - DNA, 17 bp, synthetic construct
  source 1..17: mol_type = other DNA
atgctgcacaggctggg

SEQ ID NO: 113196 - DNA, 17 bp, synthetic construct
  source 1..17: mol_type = other DNA
tgctgcacaggctgggc

SEQ ID NO: 113197 - DNA, 17 bp, synthetic construct
  source 1..17: mol_type = other DNA
gctgcacaggctgggct

SEQ ID NO: 113198 - DNA, 17 bp, synthetic construct
  source 1..17: mol_type = other DNA
ctgcacaggctgggctg

SEQ ID NO: 113199 - DNA, 17 bp, synthetic construct
  source 1..17: mol_type = other DNA
tgcacaggctgggctga

SEQ ID NO: 113200 - DNA, 17 bp, synthetic construct
  source 1..17: mol_type = other DNA
gcacaggctgggctgag

SEQ ID NO: 113201 - DNA, 17 bp, synthetic construct
  source 1..17: mol_type = other DNA
cacaggctgggctgagg

SEQ ID NO: 113202 - DNA, 17 bp, synthetic construct
  source 1..17: mol_type = other DNA
acaggctgggctgaggg

SEQ ID NO: 113203 - DNA, 17 bp, synthetic construct
  source 1..17: mol_type = other DNA
caggctgggctgagggt

SEQ ID NO: 113204 - DNA, 17 bp, synthetic construct
  source 1..17: mol_type = other DNA
aggctgggctgagggtg

SEQ ID NO: 113205 - DNA, 17 bp, synthetic construct
  source 1..17: mol_type = other DNA
ggctgggctgagggtgg

SEQ ID NO: 113206 - DNA, 17 bp, synthetic construct
  source 1..17: mol_type = other DNA
gctgggctgagggtggg

SEQ ID NO: 113207 - DNA, 17 bp, synthetic construct
  source 1..17: mol_type = other DNA
ctgggctgagggtgggc

SEQ ID NO: 113208 - DNA, 17 bp, synthetic construct
  source 1..17: mol_type = other DNA
tgggctgagggtgggca

SEQ ID NO: 113209 - DNA, 17 bp, synthetic construct
  source 1..17: mol_type = other DNA
gggctgagggtgggcac

SEQ ID NO: 113210 - DNA, 17 bp, synthetic construct
  source 1..17: mol_type = other DNA
ggctgagggtgggcact

SEQ ID NO: 113211 - DNA, 17 bp, synthetic construct
  source 1..17: mol_type = other DNA
gctgagggtgggcactc

SEQ ID NO: 113212 - DNA, 17 bp, synthetic construct
  source 1..17: mol_type = other DNA
ctgagggtgggcactcg

SEQ ID NO: 113213 - DNA, 17 bp, synthetic construct
  source 1..17: mol_type = other DNA
tgagggtgggcactcgg

SEQ ID NO: 113214 - DNA, 17 bp, synthetic construct
  source 1..17: mol_type = other DNA
gagggtgggcactcggg

SEQ ID NO: 113215 - DNA, 17 bp, synthetic construct
  source 1..17: mol_type = other DNA
agggtgggcactcggga

SEQ ID NO: 113216 - DNA, 17 bp, synthetic construct
  source 1..17: mol_type = other DNA
gggtgggcactcgggaa

SEQ ID NO: 113217 - DNA, 17 bp, synthetic construct
  source 1..17: mol_type = other DNA
ggtgggcactcgggaag

SEQ ID NO: 113218 - DNA, 17 bp, synthetic construct
  source 1..17: mol_type = other DNA
gtgggcactcgggaagc

SEQ ID NO: 113219 - DNA, 17 bp, synthetic construct
  source 1..17: mol_type = other DNA
tgggcactcgggaagcc

SEQ ID NO: 113220 - DNA, 17 bp, synthetic construct
  source 1..17: mol_type = other DNA
gggcactcgggaagccc

SEQ ID NO: 113221 - DNA, 17 bp, synthetic construct
  source 1..17: mol_type = other DNA
ggcactcgggaagcccg

SEQ ID NO: 113222 - DNA, 17 bp, synthetic construct
  source 1..17: mol_type = other DNA
gcactcgggaagcccgg

SEQ ID NO: 113223 - DNA, 17 bp, synthetic construct
  source 1..17: mol_type = other DNA
cactcgggaagcccgga

SEQ ID NO: 113224 - DNA, 17 bp, synthetic construct
  source 1..17: mol_type = other DNA
actcgggaagcccggag

SEQ ID NO: 113225 - DNA, 17 bp, synthetic construct
  source 1..17: mol_type = other DNA
ctcgggaagcccggagc

SEQ ID NO: 113226 - DNA, 17 bp, synthetic construct
  source 1..17: mol_type = other DNA
tcgggaagcccggagcc

SEQ ID NO: 113227 - DNA, 17 bp, synthetic construct
  source 1..17: mol_type = other DNA
cgggaagcccggagcca

SEQ ID NO: 113228 - DNA, 17 bp, synthetic construct
  source 1..17: mol_type = other DNA
gggaagcccggagccag

SEQ ID NO: 113229 - DNA, 17 bp, synthetic construct
  source 1..17: mol_type = other DNA
ggaagcccggagccagc

SEQ ID NO: 113230 - DNA, 17 bp, synthetic construct
  source 1..17: mol_type = other DNA
gaagcccggagccagcc

SEQ ID NO: 113231 - DNA, 17 bp, synthetic construct
  source 1..17: mol_type = other DNA
aagcccggagccagccc

SEQ ID NO: 113232 - DNA, 17 bp, synthetic construct
  source 1..17: mol_type = other DNA
agcccggagccagccct

SEQ ID NO: 113233 - DNA, 17 bp, synthetic construct
  source 1..17: mol_type = other DNA
gcccggagccagccctt

SEQ ID NO: 113234 - DNA, 17 bp, synthetic construct
  source 1..17: mol_type = other DNA
cccggagccagcccttc

SEQ ID NO: 113235 - DNA, 17 bp, synthetic construct
  source 1..17: mol_type = other DNA
ccggagccagcccttcc

SEQ ID NO: 113236 - DNA, 17 bp, synthetic construct
  source 1..17: mol_type = other DNA
cggagccagcccttccc

SEQ ID NO: 113237 - DNA, 17 bp, synthetic construct
  source 1..17: mol_type = other DNA
ggagccagcccttccca

SEQ ID NO: 113238 - DNA, 17 bp, synthetic construct
  source 1..17: mol_type = other DNA
gagccagcccttcccac

SEQ ID NO: 113239 - DNA, 17 bp, synthetic construct
  source 1..17: mol_type = other DNA
agccagcccttcccacc

SEQ ID NO: 113240 - DNA, 17 bp, synthetic construct
  source 1..17: mol_type = other DNA
gccagcccttcccacca

SEQ ID NO: 113241 - DNA, 17 bp, synthetic construct
  source 1..17: mol_type = other DNA
ccagcccttcccaccag

SEQ ID NO: 113242 - DNA, 17 bp, synthetic construct
  source 1..17: mol_type = other DNA
cagcccttcccaccagc

SEQ ID NO: 113243 - DNA, 17 bp, synthetic construct
  source 1..17: mol_type = other DNA
agcccttcccaccagca

SEQ ID NO: 113244 - DNA, 17 bp, synthetic construct
  source 1..17: mol_type = other DNA
gcccttcccaccagcag

SEQ ID NO: 113245 - DNA, 17 bp, synthetic construct
  source 1..17: mol_type = other DNA
cccttcccaccagcagg

SEQ ID NO: 113246 - DNA, 17 bp, synthetic construct
  source 1..17: mol_type = other DNA
ccttcccaccagcaggt

SEQ ID NO: 113247 - DNA, 17 bp, synthetic construct
  source 1..17: mol_type = other DNA
cttcccaccagcaggtg

SEQ ID NO: 113248 - DNA, 17 bp, synthetic construct
  source 1..17: mol_type = other DNA
ttcccaccagcaggtgg

SEQ ID NO: 113249 - DNA, 17 bp, synthetic construct
  source 1..17: mol_type = other DNA
tcccaccagcaggtgga

SEQ ID NO: 113250 - DNA, 17 bp, synthetic construct
  source 1..17: mol_type = other DNA
cccaccagcaggtggac

SEQ ID NO: 113251 - DNA, 17 bp, synthetic construct
  source 1..17: mol_type = other DNA
ccaccagcaggtggact

SEQ ID NO: 113252 - DNA, 17 bp, synthetic construct
  source 1..17: mol_type = other DNA
caccagcaggtggactc

SEQ ID NO: 113253 - DNA, 17 bp, synthetic construct
  source 1..17: mol_type = other DNA
accagcaggtggactca

SEQ ID NO: 113254 - DNA, 17 bp, synthetic construct
  source 1..17: mol_type = other DNA
ccagcaggtggactcag

SEQ ID NO: 113255 - DNA, 17 bp, synthetic construct
  source 1..17: mol_type = other DNA
cagcaggtggactcaga

SEQ ID NO: 113256 - DNA, 17 bp, synthetic construct
  source 1..17: mol_type = other DNA
agcaggtggactcagaa

SEQ ID NO: 113257 - DNA, 17 bp, synthetic construct
  source 1..17: mol_type = other DNA
gcaggtggactcagaag

SEQ ID NO: 113258 - DNA, 17 bp, synthetic construct
  source 1..17: mol_type = other DNA
caggtggactcagaagg

SEQ ID NO: 113259 - DNA, 17 bp, synthetic construct
  source 1..17: mol_type = other DNA
aggtggactcagaaggg

SEQ ID NO: 113260 - DNA, 17 bp, synthetic construct
  source 1..17: mol_type = other DNA
ggtggactcagaagggg

SEQ ID NO: 113261 - DNA, 17 bp, synthetic construct
  source 1..17: mol_type = other DNA
gtggactcagaaggggc

SEQ ID NO: 113262 - DNA, 17 bp, synthetic construct
  source 1..17: mol_type = other DNA
tggactcagaaggggcc

SEQ ID NO: 113263 - DNA, 17 bp, synthetic construct
  source 1..17: mol_type = other DNA
ggactcagaaggggcct

SEQ ID NO: 113264 - DNA, 17 bp, synthetic construct
  source 1..17: mol_type = other DNA
gactcagaaggggcctg

SEQ ID NO: 113265 - DNA, 17 bp, synthetic construct
  source 1..17: mol_type = other DNA
actcagaaggggcctgg

SEQ ID NO: 113266 - DNA, 17 bp, synthetic construct
  source 1..17: mol_type = other DNA
ctcagaaggggcctgga

SEQ ID NO: 113267 - DNA, 17 bp, synthetic construct
  source 1..17: mol_type = other DNA
tcagaaggggcctggag

SEQ ID NO: 113268 - DNA, 17 bp, synthetic construct
  source 1..17: mol_type = other DNA
cagaaggggcctggagg

SEQ ID NO: 113269 - DNA, 17 bp, synthetic construct
  source 1..17: mol_type = other DNA
agaaggggcctggaggc

SEQ ID NO: 113270 - DNA, 17 bp, synthetic construct
  source 1..17: mol_type = other DNA
gaaggggcctggaggct

SEQ ID NO: 113271 - DNA, 17 bp, synthetic construct
  source 1..17: mol_type = other DNA
aaggggcctggaggctc

SEQ ID NO: 113272 - DNA, 17 bp, synthetic construct
  source 1..17: mol_type = other DNA
aggggcctggaggctcc

SEQ ID NO: 113273 - DNA, 17 bp, synthetic construct
  source 1..17: mol_type = other DNA
ggggcctggaggctcca

SEQ ID NO: 113274 - DNA, 17 bp, synthetic construct
  source 1..17: mol_type = other DNA
gggcctggaggctccag

SEQ ID NO: 113275 - DNA, 17 bp, synthetic construct
  source 1..17: mol_type = other DNA
ggcctggaggctccagg

SEQ ID NO: 113276 - DNA, 17 bp, synthetic construct
  source 1..17: mol_type = other DNA
gcctggaggctccagga

SEQ ID NO: 113277 - DNA, 17 bp, synthetic construct
  source 1..17: mol_type = other DNA
cctggaggctccaggat

SEQ ID NO: 113278 - DNA, 17 bp, synthetic construct
  source 1..17: mol_type = other DNA
ctggaggctccaggatc

SEQ ID NO: 113279 - DNA, 17 bp, synthetic construct
  source 1..17: mol_type = other DNA
tggaggctccaggatcc

SEQ ID NO: 113280 - DNA, 17 bp, synthetic construct
  source 1..17: mol_type = other DNA
ggaggctccaggatccc

SEQ ID NO: 113281 - DNA, 17 bp, synthetic construct
  source 1..17: mol_type = other DNA
gaggctccaggatcccc

SEQ ID NO: 113282 - DNA, 17 bp, synthetic construct
  source 1..17: mol_type = other DNA
aggctccaggatcccca

SEQ ID NO: 113283 - DNA, 17 bp, synthetic construct
  source 1..17: mol_type = other DNA
ggctccaggatccccaa

SEQ ID NO: 113284 - DNA, 17 bp, synthetic construct
  source 1..17: mol_type = other DNA
gctccaggatccccaaa

SEQ ID NO: 113285 - DNA, 17 bp, synthetic construct
  source 1..17: mol_type = other DNA
ctccaggatccccaaac

SEQ ID NO: 113286 - DNA, 17 bp, synthetic construct
  source 1..17: mol_type = other DNA
tccaggatccccaaacc

SEQ ID NO: 113287 - DNA, 17 bp, synthetic construct
  source 1..17: mol_type = other DNA
ccaggatccccaaacca

SEQ ID NO: 113288 - DNA, 17 bp, synthetic construct
  source 1..17: mol_type = other DNA
caggatccccaaaccag

SEQ ID NO: 113289 - DNA, 17 bp, synthetic construct
  source 1..17: mol_type = other DNA
aggatccccaaaccagc

SEQ ID NO: 113290 - DNA, 17 bp, synthetic construct
  source 1..17: mol_type = other DNA
ggatccccaaaccagca

SEQ ID NO: 113291 - DNA, 17 bp, synthetic construct
  source 1..17: mol_type = other DNA
gatccccaaaccagcag

SEQ ID NO: 113292 - DNA, 17 bp, synthetic construct
  source 1..17: mol_type = other DNA
atccccaaaccagcagg

SEQ ID NO: 113293 - DNA, 17 bp, synthetic construct
  source 1..17: mol_type = other DNA
tccccaaaccagcagga

SEQ ID NO: 113294 - DNA, 17 bp, synthetic construct
  source 1..17: mol_type = other DNA
ccccaaaccagcaggat

SEQ ID NO: 113295 - DNA, 17 bp, synthetic construct
  source 1..17: mol_type = other DNA
cccaaaccagcaggatc

SEQ ID NO: 113296 - DNA, 17 bp, synthetic construct
  source 1..17: mol_type = other DNA
ccaaaccagcaggatct

SEQ ID NO: 113297 - DNA, 17 bp, synthetic construct
  source 1..17: mol_type = other DNA
caaaccagcaggatctc

SEQ ID NO: 113298 - DNA, 17 bp, synthetic construct
  source 1..17: mol_type = other DNA
aaaccagcaggatctct

SEQ ID NO: 113299 - DNA, 17 bp, synthetic construct
  source 1..17: mol_type = other DNA
aaccagcaggatctctg

SEQ ID NO: 113300 - DNA, 17 bp, synthetic construct
  source 1..17: mol_type = other DNA
accagcaggatctctga

SEQ ID NO: 113301 - DNA, 17 bp, synthetic construct
  source 1..17: mol_type = other DNA
ccagcaggatctctgag

SEQ ID NO: 113302 - DNA, 17 bp, synthetic construct
  source 1..17: mol_type = other DNA
cagcaggatctctgagc

SEQ ID NO: 113303 - DNA, 17 bp, synthetic construct
  source 1..17: mol_type = other DNA
agcaggatctctgagcc

SEQ ID NO: 113304 - DNA, 17 bp, synthetic construct
  source 1..17: mol_type = other DNA
gcaggatctctgagcct

SEQ ID NO: 113305 - DNA, 17 bp, synthetic construct
  source 1..17: mol_type = other DNA
caggatctctgagcctt

SEQ ID NO: 113306 - DNA, 17 bp, synthetic construct
  source 1..17: mol_type = other DNA
aggatctctgagcctta

SEQ ID NO: 113307 - DNA, 17 bp, synthetic construct
  source 1..17: mol_type = other DNA
ggatctctgagccttaa

SEQ ID NO: 113308 - DNA, 17 bp, synthetic construct
  source 1..17: mol_type = other DNA
gatctctgagccttaag

SEQ ID NO: 113309 - DNA, 17 bp, synthetic construct
  source 1..17: mol_type = other DNA
atctctgagccttaagt

SEQ ID NO: 113310 - DNA, 17 bp, synthetic construct
  source 1..17: mol_type = other DNA
tctctgagccttaagtt

SEQ ID NO: 113311 - DNA, 17 bp, synthetic construct
  source 1..17: mol_type = other DNA
ctctgagccttaagttg

SEQ ID NO: 113312 - DNA, 17 bp, synthetic construct
  source 1..17: mol_type = other DNA
tctgagccttaagttgt

SEQ ID NO: 113313 - DNA, 17 bp, synthetic construct
  source 1..17: mol_type = other DNA
ctgagccttaagttgtg

SEQ ID NO: 113314 - DNA, 17 bp, synthetic construct
  source 1..17: mol_type = other DNA
tgagccttaagttgtgc

SEQ ID NO: 113315 - DNA, 17 bp, synthetic construct
  source 1..17: mol_type = other DNA
gagccttaagttgtgct

SEQ ID NO: 113316 - DNA, 17 bp, synthetic construct
  source 1..17: mol_type = other DNA
agccttaagttgtgctg

SEQ ID NO: 113317 - DNA, 17 bp, synthetic construct
  source 1..17: mol_type = other DNA
gccttaagttgtgctgt

SEQ ID NO: 113318 - DNA, 17 bp, synthetic construct
  source 1..17: mol_type = other DNA
ccttaagttgtgctgtg

SEQ ID NO: 113319 - DNA, 17 bp, synthetic construct
  source 1..17: mol_type = other DNA
cttaagttgtgctgtga

SEQ ID NO: 113320 - DNA, 17 bp, synthetic construct
  source 1..17: mol_type = other DNA
ttaagttgtgctgtgaa

SEQ ID NO: 113321 - DNA, 17 bp, synthetic construct
  source 1..17: mol_type = other DNA
taagttgtgctgtgaat

SEQ ID NO: 113322 - DNA, 17 bp, synthetic construct
  source 1..17: mol_type = other DNA
aagttgtgctgtgaatg

SEQ ID NO: 113323 - DNA, 17 bp, synthetic construct
  source 1..17: mol_type = other DNA
agttgtgctgtgaatga

SEQ ID NO: 113324 - DNA, 17 bp, synthetic construct
  source 1..17: mol_type = other DNA
gttgtgctgtgaatgac

SEQ ID NO: 113325 - DNA, 17 bp, synthetic construct
  source 1..17: mol_type = other DNA
ttgtgctgtgaatgaca

SEQ ID NO: 113326 - DNA, 17 bp, synthetic construct
  source 1..17: mol_type = other DNA
tgtgctgtgaatgacag

SEQ ID NO: 113327 - DNA, 17 bp, synthetic construct
  source 1..17: mol_type = other DNA
gtgctgtgaatgacagc

SEQ ID NO: 113328 - DNA, 17 bp, synthetic construct
  source 1..17: mol_type = other DNA
tgctgtgaatgacagca

SEQ ID NO: 113329 - DNA, 17 bp, synthetic construct
  source 1..17: mol_type = other DNA
gctgtgaatgacagcat

SEQ ID NO: 113330 - DNA, 17 bp, synthetic construct
  source 1..17: mol_type = other DNA
ctgtgaatgacagcatg

SEQ ID NO: 113331 - DNA, 17 bp, synthetic construct
  source 1..17: mol_type = other DNA
tgtgaatgacagcatga

SEQ ID NO: 113332 - DNA, 17 bp, synthetic construct
  source 1..17: mol_type = other DNA
gtgaatgacagcatgag

SEQ ID NO: 113333 - DNA, 17 bp, synthetic construct
  source 1..17: mol_type = other DNA
tgaatgacagcatgagc

SEQ ID NO: 113334 - DNA, 17 bp, synthetic construct
  source 1..17: mol_type = other DNA
gaatgacagcatgagcc

SEQ ID NO: 113335 - DNA, 17 bp, synthetic construct
  source 1..17: mol_type = other DNA
aatgacagcatgagccc

SEQ ID NO: 113336 - DNA, 17 bp, synthetic construct
  source 1..17: mol_type = other DNA
atgacagcatgagcccc

SEQ ID NO: 113337 - DNA, 17 bp, synthetic construct
  source 1..17: mol_type = other DNA
tgacagcatgagccccc

SEQ ID NO: 113338 - DNA, 17 bp, synthetic construct
  source 1..17: mol_type = other DNA
gacagcatgagcccccc

SEQ ID NO: 113339 - DNA, 17 bp, synthetic construct
  source 1..17: mol_type = other DNA
acagcatgagcccccct

SEQ ID NO: 113340 - DNA, 17 bp, synthetic construct
  source 1..17: mol_type = other DNA
cagcatgagcccccctg

SEQ ID NO: 113341 - DNA, 17 bp, synthetic construct
  source 1..17: mol_type = other DNA
agcatgagcccccctgt

SEQ ID NO: 113342 - DNA, 17 bp, synthetic construct
  source 1..17: mol_type = other DNA
gcatgagcccccctgtg

SEQ ID NO: 113343 - DNA, 17 bp, synthetic construct
  source 1..17: mol_type = other DNA
catgagcccccctgtga

SEQ ID NO: 113344 - DNA, 17 bp, synthetic construct
  source 1..17: mol_type = other DNA
atgagcccccctgtgag

SEQ ID NO: 113345 - DNA, 17 bp, synthetic construct
  source 1..17: mol_type = other DNA
tgagcccccctgtgagc

SEQ ID NO: 113346 - DNA, 17 bp, synthetic construct
  source 1..17: mol_type = other DNA
gagcccccctgtgagct

SEQ ID NO: 113347 - DNA, 17 bp, synthetic construct
  source 1..17: mol_type = other DNA
agcccccctgtgagctg

SEQ ID NO: 113348 - DNA, 17 bp, synthetic construct
  source 1..17: mol_type = other DNA
gcccccctgtgagctgg

SEQ ID NO: 113349 - DNA, 17 bp, synthetic construct
  source 1..17: mol_type = other DNA
cccccctgtgagctggg

SEQ ID NO: 113350 - DNA, 17 bp, synthetic construct
  source 1..17: mol_type = other DNA
ccccctgtgagctgggc

SEQ ID NO: 113351 - DNA, 17 bp, synthetic construct
  source 1..17: mol_type = other DNA
cccctgtgagctgggcc

SEQ ID NO: 113352 - DNA, 17 bp, synthetic construct
  source 1..17: mol_type = other DNA
ccctgtgagctgggccc

SEQ ID NO: 113353 - DNA, 17 bp, synthetic construct
  source 1..17: mol_type = other DNA
cctgtgagctgggcccc

SEQ ID NO: 113354 - DNA, 17 bp, synthetic construct
  source 1..17: mol_type = other DNA
ctgtgagctgggccccg

SEQ ID NO: 113355 - DNA, 17 bp, synthetic construct
  source 1..17: mol_type = other DNA
tgtgagctgggccccgc

SEQ ID NO: 113356 - DNA, 17 bp, synthetic construct
  source 1..17: mol_type = other DNA
gtgagctgggccccgca

SEQ ID NO: 113357 - DNA, 17 bp, synthetic construct
  source 1..17: mol_type = other DNA
tgagctgggccccgcag

SEQ ID NO: 113358 - DNA, 17 bp, synthetic construct
  source 1..17: mol_type = other DNA
gagctgggccccgcagc

SEQ ID NO: 113359 - DNA, 17 bp, synthetic construct
  source 1..17: mol_type = other DNA
agctgggccccgcagcc

SEQ ID NO: 113360 - DNA, 17 bp, synthetic construct
  source 1..17: mol_type = other DNA
gctgggccccgcagccg

SEQ ID NO: 113361 - DNA, 17 bp, synthetic construct
  source 1..17: mol_type = other DNA
ctgggccccgcagccgg

SEQ ID NO: 113362 - DNA, 17 bp, synthetic construct
  source 1..17: mol_type = other DNA
tgggccccgcagccggc

SEQ ID NO: 113363 - DNA, 17 bp, synthetic construct
  source 1..17: mol_type = other DNA
gggccccgcagccggca

SEQ ID NO: 113364 - DNA, 17 bp, synthetic construct
  source 1..17: mol_type = other DNA
ggccccgcagccggcag

SEQ ID NO: 113365 - DNA, 17 bp, synthetic construct
  source 1..17: mol_type = other DNA
gccccgcagccggcagc

SEQ ID NO: 113366 - DNA, 17 bp, synthetic construct
  source 1..17: mol_type = other DNA
ccccgcagccggcagcc

SEQ ID NO: 113367 - DNA, 17 bp, synthetic construct
  source 1..17: mol_type = other DNA
cccgcagccggcagccc

SEQ ID NO: 113368 - DNA, 17 bp, synthetic construct
  source 1..17: mol_type = other DNA
ccgcagccggcagccct

SEQ ID NO: 113369 - DNA, 17 bp, synthetic construct
  source 1..17: mol_type = other DNA
cgcagccggcagccctg

SEQ ID NO: 113370 - DNA, 17 bp, synthetic construct
  source 1..17: mol_type = other DNA
gcagccggcagccctgg

SEQ ID NO: 113371 - DNA, 17 bp, synthetic construct
  source 1..17: mol_type = other DNA
cagccggcagccctggg

SEQ ID NO: 113372 - DNA, 17 bp, synthetic construct
  source 1..17: mol_type = other DNA
agccggcagccctgggc

SEQ ID NO: 113373 - DNA, 17 bp, synthetic construct
  source 1..17: mol_type = other DNA
gccggcagccctgggcc

SEQ ID NO: 113374 - DNA, 17 bp, synthetic construct
  source 1..17: mol_type = other DNA
ccggcagccctgggcct

SEQ ID NO: 113375 - DNA, 17 bp, synthetic construct
  source 1..17: mol_type = other DNA
cggcagccctgggcctg

SEQ ID NO: 113376 - DNA, 17 bp, synthetic construct
  source 1..17: mol_type = other DNA
ggcagccctgggcctgg

SEQ ID NO: 113377 - DNA, 17 bp, synthetic construct
  source 1..17: mol_type = other DNA
gcagccctgggcctggg

SEQ ID NO: 113378 - DNA, 17 bp, synthetic construct
  source 1..17: mol_type = other DNA
cagccctgggcctgggg

SEQ ID NO: 113379 - DNA, 17 bp, synthetic construct
  source 1..17: mol_type = other DNA
agccctgggcctgggga

SEQ ID NO: 113380 - DNA, 17 bp, synthetic construct
  source 1..17: mol_type = other DNA
gccctgggcctggggac

SEQ ID NO: 113381 - DNA, 17 bp, synthetic construct
  source 1..17: mol_type = other DNA
ccctgggcctggggacg

SEQ ID NO: 113382 - DNA, 17 bp, synthetic construct
  source 1..17: mol_type = other DNA
cctgggcctggggacgg

SEQ ID NO: 113383 - DNA, 17 bp, synthetic construct
  source 1..17: mol_type = other DNA
ctgggcctggggacgga

SEQ ID NO: 113384 - DNA, 17 bp, synthetic construct
  source 1..17: mol_type = other DNA
tgggcctggggacggag

SEQ ID NO: 113385 - DNA, 17 bp, synthetic construct
  source 1..17: mol_type = other DNA
gggcctggggacggagg

SEQ ID NO: 113386 - DNA, 17 bp, synthetic construct
  source 1..17: mol_type = other DNA
ggcctggggacggagga

SEQ ID NO: 113387 - DNA, 17 bp, synthetic construct
  source 1..17: mol_type = other DNA
gcctggggacggaggac

SEQ ID NO: 113388 - DNA, 17 bp, synthetic construct
  source 1..17: mol_type = other DNA
cctggggacggaggaca

SEQ ID NO: 113389 - DNA, 17 bp, synthetic construct
  source 1..17: mol_type = other DNA
ctggggacggaggacac

SEQ ID NO: 113390 - DNA, 17 bp, synthetic construct
  source 1..17: mol_type = other DNA
tggggacggaggacact

SEQ ID NO: 113391 - DNA, 17 bp, synthetic construct
  source 1..17: mol_type = other DNA
ggggacggaggacactc

SEQ ID NO: 113392 - DNA, 17 bp, synthetic construct
  source 1..17: mol_type = other DNA
gggacggaggacactca

SEQ ID NO: 113393 - DNA, 17 bp, synthetic construct
  source 1..17: mol_type = other DNA
ggacggaggacactcag

SEQ ID NO: 113394 - DNA, 17 bp, synthetic construct
  source 1..17: mol_type = other DNA
gacggaggacactcagc

SEQ ID NO: 113395 - DNA, 17 bp, synthetic construct
  source 1..17: mol_type = other DNA
acggaggacactcagca

SEQ ID NO: 113396 - DNA, 17 bp, synthetic construct
  source 1..17: mol_type = other DNA
cggaggacactcagcac

SEQ ID NO: 113397 - DNA, 17 bp, synthetic construct
  source 1..17: mol_type = other DNA
ggaggacactcagcact

SEQ ID NO: 113398 - DNA, 17 bp, synthetic construct
  source 1..17: mol_type = other DNA
gaggacactcagcactg

SEQ ID NO: 113399 - DNA, 17 bp, synthetic construct
  source 1..17: mol_type = other DNA
aggacactcagcactgg

SEQ ID NO: 113400 - DNA, 17 bp, synthetic construct
  source 1..17: mol_type = other DNA
ggacactcagcactgga

SEQ ID NO: 113401 - DNA, 17 bp, synthetic construct
  source 1..17: mol_type = other DNA
gacactcagcactggac

SEQ ID NO: 113402 - DNA, 17 bp, synthetic construct
  source 1..17: mol_type = other DNA
acactcagcactggact

SEQ ID NO: 113403 - DNA, 17 bp, synthetic construct
  source 1..17: mol_type = other DNA
cactcagcactggactg

SEQ ID NO: 113404 - DNA, 17 bp, synthetic construct
  source 1..17: mol_type = other DNA
actcagcactggactgc

SEQ ID NO: 113405 - DNA, 17 bp, synthetic construct
  source 1..17: mol_type = other DNA
ctcagcactggactgcc

SEQ ID NO: 113406 - DNA, 17 bp, synthetic construct
  source 1..17: mol_type = other DNA
tcagcactggactgccc

SEQ ID NO: 113407 - DNA, 17 bp, synthetic construct
  source 1..17: mol_type = other DNA
cagcactggactgccct

SEQ ID NO: 113408 - DNA, 17 bp, synthetic construct
  source 1..17: mol_type = other DNA
agcactggactgccctg

SEQ ID NO: 113409 - DNA, 17 bp, synthetic construct
  source 1..17: mol_type = other DNA
gcactggactgccctga

SEQ ID NO: 113410 - DNA, 17 bp, synthetic construct
  source 1..17: mol_type = other DNA
cactggactgccctgaa

SEQ ID NO: 113411 - DNA, 17 bp, synthetic construct
  source 1..17: mol_type = other DNA
actggactgccctgaac

SEQ ID NO: 113412 - DNA, 17 bp, synthetic construct
  source 1..17: mol_type = other DNA
ctggactgccctgaacc

SEQ ID NO: 113413 - DNA, 17 bp, synthetic construct
  source 1..17: mol_type = other DNA
tggactgccctgaacct

SEQ ID NO: 113414 - DNA, 17 bp, synthetic construct
  source 1..17: mol_type = other DNA
ggactgccctgaacctg

SEQ ID NO: 113415 - DNA, 17 bp, synthetic construct
  source 1..17: mol_type = other DNA
gactgccctgaacctgc

SEQ ID NO: 113416 - DNA, 17 bp, synthetic construct
  source 1..17: mol_type = other DNA
actgccctgaacctgcc

SEQ ID NO: 113417 - DNA, 17 bp, synthetic construct
  source 1..17: mol_type = other DNA
ctgccctgaacctgccg

SEQ ID NO: 113418 - DNA, 17 bp, synthetic construct
  source 1..17: mol_type = other DNA
tgccctgaacctgccgg

SEQ ID NO: 113419 - DNA, 17 bp, synthetic construct
  source 1..17: mol_type = other DNA
gccctgaacctgccggg

SEQ ID NO: 113420 - DNA, 17 bp, synthetic construct
  source 1..17: mol_type = other DNA
ccctgaacctgccgggc

SEQ ID NO: 113421 - DNA, 17 bp, synthetic construct
  source 1..17: mol_type = other DNA
cctgaacctgccgggct

SEQ ID NO: 113422 - DNA, 17 bp, synthetic construct
  source 1..17: mol_type = other DNA
ctgaacctgccgggctg

SEQ ID NO: 113423 - DNA, 17 bp, synthetic construct
  source 1..17: mol_type = other DNA
tgaacctgccgggctgc

SEQ ID NO: 113424 - DNA, 17 bp, synthetic construct
  source 1..17: mol_type = other DNA
gaacctgccgggctgcc

SEQ ID NO: 113425 - DNA, 17 bp, synthetic construct
  source 1..17: mol_type = other DNA
aacctgccgggctgccc

SEQ ID NO: 113426 - DNA, 17 bp, synthetic construct
  source 1..17: mol_type = other DNA
acctgccgggctgccca

SEQ ID NO: 113427 - DNA, 17 bp, synthetic construct
  source 1..17: mol_type = other DNA
cctgccgggctgcccag

SEQ ID NO: 113428 - DNA, 17 bp, synthetic construct
  source 1..17: mol_type = other DNA
ctgccgggctgcccaga

SEQ ID NO: 113429 - DNA, 17 bp, synthetic construct
  source 1..17: mol_type = other DNA
tgccgggctgcccagag

SEQ ID NO: 113430 - DNA, 17 bp, synthetic construct
  source 1..17: mol_type = other DNA
gccgggctgcccagaga

SEQ ID NO: 113431 - DNA, 17 bp, synthetic construct
  source 1..17: mol_type = other DNA
ccgggctgcccagagag

SEQ ID NO: 113432 - DNA, 17 bp, synthetic construct
  source 1..17: mol_type = other DNA
cgggctgcccagagagg

SEQ ID NO: 113433 - DNA, 17 bp, synthetic construct
  source 1..17: mol_type = other DNA
gggctgcccagagaggc

SEQ ID NO: 113434 - DNA, 17 bp, synthetic construct
  source 1..17: mol_type = other DNA
ggctgcccagagaggcg

SEQ ID NO: 113435 - DNA, 17 bp, synthetic construct
  source 1..17: mol_type = other DNA
gctgcccagagaggcgg

SEQ ID NO: 113436 - DNA, 17 bp, synthetic construct
  source 1..17: mol_type = other DNA
ctgcccagagaggcggg

SEQ ID NO: 113437 - DNA, 17 bp, synthetic construct
  source 1..17: mol_type = other DNA
tgcccagagaggcgggg

SEQ ID NO: 113438 - DNA, 17 bp, synthetic construct
  source 1..17: mol_type = other DNA
gcccagagaggcggggc

SEQ ID NO: 113439 - DNA, 17 bp, synthetic construct
  source 1..17: mol_type = other DNA
cccagagaggcggggcc

SEQ ID NO: 113440 - DNA, 17 bp, synthetic construct
  source 1..17: mol_type = other DNA
ccagagaggcggggcct

SEQ ID NO: 113441 - DNA, 17 bp, synthetic construct
  source 1..17: mol_type = other DNA
cagagaggcggggcctc

SEQ ID NO: 113442 - DNA, 17 bp, synthetic construct
  source 1..17: mol_type = other DNA
agagaggcggggcctcc

SEQ ID NO: 113443 - DNA, 17 bp, synthetic construct
  source 1..17: mol_type = other DNA
gagaggcggggcctcca

SEQ ID NO: 113444 - DNA, 17 bp, synthetic construct
  source 1..17: mol_type = other DNA
agaggcggggcctccac

SEQ ID NO: 113445 - DNA, 17 bp, synthetic construct
  source 1..17: mol_type = other DNA
gaggcggggcctccacc

SEQ ID NO: 113446 - DNA, 17 bp, synthetic construct
  source 1..17: mol_type = other DNA
aggcggggcctccacct

SEQ ID NO: 113447 - DNA, 17 bp, synthetic construct
  source 1..17: mol_type = other DNA
ggcggggcctccacctc

SEQ ID NO: 113448 - DNA, 17 bp, synthetic construct
  source 1..17: mol_type = other DNA
gcggggcctccacctcc

SEQ ID NO: 113449 - DNA, 17 bp, synthetic construct
  source 1..17: mol_type = other DNA
cggggcctccacctccc

SEQ ID NO: 113450 - DNA, 17 bp, synthetic construct
  source 1..17: mol_type = other DNA
ggggcctccacctcccc

SEQ ID NO: 113451 - DNA, 17 bp, synthetic construct
  source 1..17: mol_type = other DNA
gggcctccacctcccct

SEQ ID NO: 113452 - DNA, 17 bp, synthetic construct
  source 1..17: mol_type = other DNA
ggcctccacctcccctc

SEQ ID NO: 113453 - DNA, 17 bp, synthetic construct
  source 1..17: mol_type = other DNA
gcctccacctcccctcc

SEQ ID NO: 113454 - DNA, 17 bp, synthetic construct
  source 1..17: mol_type = other DNA
cctccacctcccctcct

SEQ ID NO: 113455 - DNA, 17 bp, synthetic construct
  source 1..17: mol_type = other DNA
ctccacctcccctcctt

SEQ ID NO: 113456 - DNA, 17 bp, synthetic construct
  source 1..17: mol_type = other DNA
tccacctcccctccttg

SEQ ID NO: 113457 - DNA, 17 bp, synthetic construct
  source 1..17: mol_type = other DNA
ccacctcccctccttgg

SEQ ID NO: 113458 - DNA, 17 bp, synthetic construct
  source 1..17: mol_type = other DNA
cacctcccctccttggc

SEQ ID NO: 113459 - DNA, 17 bp, synthetic construct
  source 1..17: mol_type = other DNA
acctcccctccttggct

SEQ ID NO: 113460 - DNA, 17 bp, synthetic construct
  source 1..17: mol_type = other DNA
cctcccctccttggctc

SEQ ID NO: 113461 - DNA, 17 bp, synthetic construct
  source 1..17: mol_type = other DNA
ctcccctccttggctcc

SEQ ID NO: 113462 - DNA, 17 bp, synthetic construct
  source 1..17: mol_type = other DNA
tcccctccttggctccg

SEQ ID NO: 113463 - DNA, 17 bp, synthetic construct
  source 1..17: mol_type = other DNA
cccctccttggctccgc

SEQ ID NO: 113464 - DNA, 17 bp, synthetic construct
  source 1..17: mol_type = other DNA
ccctccttggctccgcc

SEQ ID NO: 113465 - DNA, 17 bp, synthetic construct
  source 1..17: mol_type = other DNA
cctccttggctccgcct

SEQ ID NO: 113466 - DNA, 17 bp, synthetic construct
  source 1..17: mol_type = other DNA
ctccttggctccgcctc

SEQ ID NO: 113467 - DNA, 17 bp, synthetic construct
  source 1..17: mol_type = other DNA
tccttggctccgcctcc

SEQ ID NO: 113468 - DNA, 17 bp, synthetic construct
  source 1..17: mol_type = other DNA
ccttggctccgcctcct

SEQ ID NO: 113469 - DNA, 17 bp, synthetic construct
  source 1..17: mol_type = other DNA
cttggctccgcctcctg

SEQ ID NO: 113470 - DNA, 17 bp, synthetic construct
  source 1..17: mol_type = other DNA
ttggctccgcctcctgg

SEQ ID NO: 113471 - DNA, 17 bp, synthetic construct
  source 1..17: mol_type = other DNA
tggctccgcctcctggg

SEQ ID NO: 113472 - DNA, 17 bp, synthetic construct
  source 1..17: mol_type = other DNA
ggctccgcctcctgggg

SEQ ID NO: 113473 - DNA, 17 bp, synthetic construct
  source 1..17: mol_type = other DNA
gctccgcctcctggggt

SEQ ID NO: 113474 - DNA, 17 bp, synthetic construct
  source 1..17: mol_type = other DNA
ctccgcctcctggggtg

SEQ ID NO: 113475 - DNA, 17 bp, synthetic construct
  source 1..17: mol_type = other DNA
tccgcctcctggggtgg

SEQ ID NO: 113476 - DNA, 17 bp, synthetic construct
  source 1..17: mol_type = other DNA
ccgcctcctggggtggg

SEQ ID NO: 113477 - DNA, 17 bp, synthetic construct
  source 1..17: mol_type = other DNA
cgcctcctggggtgggg

SEQ ID NO: 113478 - DNA, 17 bp, synthetic construct
  source 1..17: mol_type = other DNA
gcctcctggggtggggg

SEQ ID NO: 113479 - DNA, 17 bp, synthetic construct
  source 1..17: mol_type = other DNA
cctcctggggtgggggt

SEQ ID NO: 113480 - DNA, 17 bp, synthetic construct
  source 1..17: mol_type = other DNA
ctcctggggtgggggtc

SEQ ID NO: 113481 - DNA, 17 bp, synthetic construct
  source 1..17: mol_type = other DNA
tcctggggtgggggtct

SEQ ID NO: 113482 - DNA, 17 bp, synthetic construct
  source 1..17: mol_type = other DNA
cctggggtgggggtctg

SEQ ID NO: 113483 - DNA, 17 bp, synthetic construct
  source 1..17: mol_type = other DNA
ctggggtgggggtctgc

SEQ ID NO: 113484 - DNA, 17 bp, synthetic construct
  source 1..17: mol_type = other DNA
tggggtgggggtctgca

SEQ ID NO: 113485 - DNA, 17 bp, synthetic construct
  source 1..17: mol_type = other DNA
ggggtgggggtctgcac

SEQ ID NO: 113486 - DNA, 17 bp, synthetic construct
  source 1..17: mol_type = other DNA
gggtgggggtctgcacc

SEQ ID NO: 113487 - DNA, 17 bp, synthetic construct
  source 1..17: mol_type = other DNA
ggtgggggtctgcacct

SEQ ID NO: 113488 - DNA, 17 bp, synthetic construct
  source 1..17: mol_type = other DNA
gtgggggtctgcacctt

SEQ ID NO: 113489 - DNA, 17 bp, synthetic construct
  source 1..17: mol_type = other DNA
tgggggtctgcaccttt

SEQ ID NO: 113490 - DNA, 17 bp, synthetic construct
  source 1..17: mol_type = other DNA
gggggtctgcacctttc

SEQ ID NO: 113491 - DNA, 17 bp, synthetic construct
  source 1..17: mol_type = other DNA
ggggtctgcacctttct

SEQ ID NO: 113492 - DNA, 17 bp, synthetic construct
  source 1..17: mol_type = other DNA
gggtctgcacctttctt

SEQ ID NO: 113493 - DNA, 17 bp, synthetic construct
  source 1..17: mol_type = other DNA
ggtctgcacctttcttg

SEQ ID NO: 113494 - DNA, 17 bp, synthetic construct
  source 1..17: mol_type = other DNA
gtctgcacctttcttgg

SEQ ID NO: 113495 - DNA, 17 bp, synthetic construct
  source 1..17: mol_type = other DNA
tctgcacctttcttggg

SEQ ID NO: 113496 - DNA, 17 bp, synthetic construct
  source 1..17: mol_type = other DNA
ctgcacctttcttgggc

SEQ ID NO: 113497 - DNA, 17 bp, synthetic construct
  source 1..17: mol_type = other DNA
tgcacctttcttgggcg

SEQ ID NO: 113498 - DNA, 17 bp, synthetic construct
  source 1..17: mol_type = other DNA
gcacctttcttgggcgc

SEQ ID NO: 113499 - DNA, 17 bp, synthetic construct
  source 1..17: mol_type = other DNA
cacctttcttgggcgct

SEQ ID NO: 113500 - DNA, 17 bp, synthetic construct
  source 1..17: mol_type = other DNA
acctttcttgggcgctt

SEQ ID NO: 113501 - DNA, 17 bp, synthetic construct
  source 1..17: mol_type = other DNA
cctttcttgggcgctta

SEQ ID NO: 113502 - DNA, 17 bp, synthetic construct
  source 1..17: mol_type = other DNA
ctttcttgggcgcttac

SEQ ID NO: 113503 - DNA, 17 bp, synthetic construct
  source 1..17: mol_type = other DNA
tttcttgggcgcttact

SEQ ID NO: 113504 - DNA, 17 bp, synthetic construct
  source 1..17: mol_type = other DNA
ttcttgggcgcttactc

SEQ ID NO: 113505 - DNA, 17 bp, synthetic construct
  source 1..17: mol_type = other DNA
tcttgggcgcttactcc

SEQ ID NO: 113506 - DNA, 17 bp, synthetic construct
  source 1..17: mol_type = other DNA
cttgggcgcttactcca

SEQ ID NO: 113507 - DNA, 17 bp, synthetic construct
  source 1..17: mol_type = other DNA
ttgggcgcttactccac

SEQ ID NO: 113508 - DNA, 17 bp, synthetic construct
  source 1..17: mol_type = other DNA
tgggcgcttactccacg

SEQ ID NO: 113509 - DNA, 17 bp, synthetic construct
  source 1..17: mol_type = other DNA
gggcgcttactccacgg

SEQ ID NO: 113510 - DNA, 17 bp, synthetic construct
  source 1..17: mol_type = other DNA
ggcgcttactccacggg

SEQ ID NO: 113511 - DNA, 17 bp, synthetic construct
  source 1..17: mol_type = other DNA
gcgcttactccacgggc

SEQ ID NO: 113512 - DNA, 17 bp, synthetic construct
  source 1..17: mol_type = other DNA
cgcttactccacgggca

SEQ ID NO: 113513 - DNA, 17 bp, synthetic construct
  source 1..17: mol_type = other DNA
gcttactccacgggcag

SEQ ID NO: 113514 - DNA, 17 bp, synthetic construct
  source 1..17: mol_type = other DNA
cttactccacgggcagg

SEQ ID NO: 113515 - DNA, 17 bp, synthetic construct
  source 1..17: mol_type = other DNA
ttactccacgggcaggc

SEQ ID NO: 113516 - DNA, 17 bp, synthetic construct
  source 1..17: mol_type = other DNA
tactccacgggcaggca

SEQ ID NO: 113517 - DNA, 17 bp, synthetic construct
  source 1..17: mol_type = other DNA
actccacgggcaggcac

SEQ ID NO: 113518 - DNA, 17 bp, synthetic construct
  source 1..17: mol_type = other DNA
ctccacgggcaggcaca

SEQ ID NO: 113519 - DNA, 17 bp, synthetic construct
  source 1..17: mol_type = other DNA
tccacgggcaggcacat

SEQ ID NO: 113520 - DNA, 17 bp, synthetic construct
  source 1..17: mol_type = other DNA
ccacgggcaggcacatc

SEQ ID NO: 113521 - DNA, 17 bp, synthetic construct
  source 1..17: mol_type = other DNA
cacgggcaggcacatcc

SEQ ID NO: 113522 - DNA, 17 bp, synthetic construct
  source 1..17: mol_type = other DNA
acgggcaggcacatccg

SEQ ID NO: 113523 - DNA, 17 bp, synthetic construct
  source 1..17: mol_type = other DNA
cgggcaggcacatccgg

SEQ ID NO: 113524 - DNA, 17 bp, synthetic construct
  source 1..17: mol_type = other DNA
gggcaggcacatccgga

SEQ ID NO: 113525 - DNA, 17 bp, synthetic construct
  source 1..17: mol_type = other DNA
ggcaggcacatccggag

SEQ ID NO: 113526 - DNA, 17 bp, synthetic construct
  source 1..17: mol_type = other DNA
gcaggcacatccggagt

SEQ ID NO: 113527 - DNA, 17 bp, synthetic construct
  source 1..17: mol_type = other DNA
caggcacatccggagta

SEQ ID NO: 113528 - DNA, 17 bp, synthetic construct
  source 1..17: mol_type = other DNA
aggcacatccggagtag

SEQ ID NO: 113529 - DNA, 17 bp, synthetic construct
  source 1..17: mol_type = other DNA
ggcacatccggagtagg

SEQ ID NO: 113530 - DNA, 17 bp, synthetic construct
  source 1..17: mol_type = other DNA
gcacatccggagtaggg

SEQ ID NO: 113531 - DNA, 17 bp, synthetic construct
  source 1..17: mol_type = other DNA
cacatccggagtagggg

SEQ ID NO: 113532 - DNA, 17 bp, synthetic construct
  source 1..17: mol_type = other DNA
acatccggagtagggga

SEQ ID NO: 113533 - DNA, 17 bp, synthetic construct
  source 1..17: mol_type = other DNA
catccggagtaggggat

SEQ ID NO: 113534 - DNA, 17 bp, synthetic construct
  source 1..17: mol_type = other DNA
atccggagtaggggatc

SEQ ID NO: 113535 - DNA, 17 bp, synthetic construct
  source 1..17: mol_type = other DNA
tccggagtaggggatcc

SEQ ID NO: 113536 - DNA, 17 bp, synthetic construct
  source 1..17: mol_type = other DNA
ccggagtaggggatccc

SEQ ID NO: 113537 - DNA, 17 bp, synthetic construct
  source 1..17: mol_type = other DNA
cggagtaggggatcccc

SEQ ID NO: 113538 - DNA, 17 bp, synthetic construct
  source 1..17: mol_type = other DNA
ggagtaggggatccccg

SEQ ID NO: 113539 - DNA, 17 bp, synthetic construct
  source 1..17: mol_type = other DNA
gagtaggggatccccgg

SEQ ID NO: 113540 - DNA, 17 bp, synthetic construct
  source 1..17: mol_type = other DNA
agtaggggatccccggt

SEQ ID NO: 113541 - DNA, 17 bp, synthetic construct
  source 1..17: mol_type = other DNA
gtaggggatccccggtc

SEQ ID NO: 113542 - DNA, 17 bp, synthetic construct
  source 1..17: mol_type = other DNA
taggggatccccggtca

SEQ ID NO: 113543 - DNA, 17 bp, synthetic construct
  source 1..17: mol_type = other DNA
aggggatccccggtcac

SEQ ID NO: 113544 - DNA, 17 bp, synthetic construct
  source 1..17: mol_type = other DNA
ggggatccccggtcacg

SEQ ID NO: 113545 - DNA, 17 bp, synthetic construct
  source 1..17: mol_type = other DNA
gggatccccggtcacgg

SEQ ID NO: 113546 - DNA, 17 bp, synthetic construct
  source 1..17: mol_type = other DNA
ggatccccggtcacggg

SEQ ID NO: 113547 - DNA, 17 bp, synthetic construct
  source 1..17: mol_type = other DNA
gatccccggtcacgggt

SEQ ID NO: 113548 - DNA, 17 bp, synthetic construct
  source 1..17: mol_type = other DNA
atccccggtcacgggtc

SEQ ID NO: 113549 - DNA, 17 bp, synthetic construct
  source 1..17: mol_type = other DNA
tccccggtcacgggtca

SEQ ID NO: 113550 - DNA, 17 bp, synthetic construct
  source 1..17: mol_type = other DNA
ccccggtcacgggtcac

SEQ ID NO: 113551 - DNA, 17 bp, synthetic construct
  source 1..17: mol_type = other DNA
cccggtcacgggtcact

SEQ ID NO: 113552 - DNA, 17 bp, synthetic construct
  source 1..17: mol_type = other DNA
ccggtcacgggtcactc

SEQ ID NO: 113553 - DNA, 17 bp, synthetic construct
  source 1..17: mol_type = other DNA
cggtcacgggtcactcc

SEQ ID NO: 113554 - DNA, 17 bp, synthetic construct
  source 1..17: mol_type = other DNA
ggtcacgggtcactccc

SEQ ID NO: 113555 - DNA, 17 bp, synthetic construct
  source 1..17: mol_type = other DNA
gtcacgggtcactcccc

SEQ ID NO: 113556 - DNA, 17 bp, synthetic construct
  source 1..17: mol_type = other DNA
tcacgggtcactcccca

SEQ ID NO: 113557 - DNA, 17 bp, synthetic construct
  source 1..17: mol_type = other DNA
cacgggtcactccccaa

SEQ ID NO: 113558 - DNA, 17 bp, synthetic construct
  source 1..17: mol_type = other DNA
acgggtcactccccaag

SEQ ID NO: 113559 - DNA, 17 bp, synthetic construct
  source 1..17: mol_type = other DNA
cgggtcactccccaagg

SEQ ID NO: 113560 - DNA, 17 bp, synthetic construct
  source 1..17: mol_type = other DNA
gggtcactccccaaggg

SEQ ID NO: 113561 - DNA, 17 bp, synthetic construct
  source 1..17: mol_type = other DNA
ggtcactccccaagggc

SEQ ID NO: 113562 - DNA, 17 bp, synthetic construct
  source 1..17: mol_type = other DNA
gtcactccccaagggcc

SEQ ID NO: 113563 - DNA, 17 bp, synthetic construct
  source 1..17: mol_type = other DNA
tcactccccaagggcca

SEQ ID NO: 113564 - DNA, 17 bp, synthetic construct
  source 1..17: mol_type = other DNA
cactccccaagggccaa

SEQ ID NO: 113565 - DNA, 17 bp, synthetic construct
  source 1..17: mol_type = other DNA
actccccaagggccaag

SEQ ID NO: 113566 - DNA, 17 bp, synthetic construct
  source 1..17: mol_type = other DNA
ctccccaagggccaagc

SEQ ID NO: 113567 - DNA, 17 bp, synthetic construct
  source 1..17: mol_type = other DNA
tccccaagggccaagca

SEQ ID NO: 113568 - DNA, 17 bp, synthetic construct
  source 1..17: mol_type = other DNA
ccccaagggccaagcag

SEQ ID NO: 113569 - DNA, 17 bp, synthetic construct
  source 1..17: mol_type = other DNA
cccaagggccaagcaga

SEQ ID NO: 113570 - DNA, 17 bp, synthetic construct
  source 1..17: mol_type = other DNA
ccaagggccaagcagag

SEQ ID NO: 113571 - DNA, 17 bp, synthetic construct
  source 1..17: mol_type = other DNA
caagggccaagcagagc

SEQ ID NO: 113572 - DNA, 17 bp, synthetic construct
  source 1..17: mol_type = other DNA
aagggccaagcagagct

SEQ ID NO: 113573 - DNA, 17 bp, synthetic construct
  source 1..17: mol_type = other DNA
agggccaagcagagctc

SEQ ID NO: 113574 - DNA, 17 bp, synthetic construct
  source 1..17: mol_type = other DNA
gggccaagcagagctct

SEQ ID NO: 113575 - DNA, 17 bp, synthetic construct
  source 1..17: mol_type = other DNA
ggccaagcagagctctg

SEQ ID NO: 113576 - DNA, 17 bp, synthetic construct
  source 1..17: mol_type = other DNA
gccaagcagagctctgc

SEQ ID NO: 113577 - DNA, 17 bp, synthetic construct
  source 1..17: mol_type = other DNA
ccaagcagagctctgca

SEQ ID NO: 113578 - DNA, 17 bp, synthetic construct
  source 1..17: mol_type = other DNA
caagcagagctctgcat

SEQ ID NO: 113579 - DNA, 17 bp, synthetic construct
  source 1..17: mol_type = other DNA
aagcagagctctgcatg

SEQ ID NO: 113580 - DNA, 17 bp, synthetic construct
  source 1..17: mol_type = other DNA
agcagagctctgcatgg

SEQ ID NO: 113581 - DNA, 17 bp, synthetic construct
  source 1..17: mol_type = other DNA
gcagagctctgcatggc

SEQ ID NO: 113582 - DNA, 17 bp, synthetic construct
  source 1..17: mol_type = other DNA
cagagctctgcatggcc

SEQ ID NO: 113583 - DNA, 17 bp, synthetic construct
  source 1..17: mol_type = other DNA
agagctctgcatggcca

SEQ ID NO: 113584 - DNA, 17 bp, synthetic construct
  source 1..17: mol_type = other DNA
gagctctgcatggccac

SEQ ID NO: 113585 - DNA, 17 bp, synthetic construct
  source 1..17: mol_type = other DNA
agctctgcatggccaca

SEQ ID NO: 113586 - DNA, 17 bp, synthetic construct
  source 1..17: mol_type = other DNA
gctctgcatggccacag

SEQ ID NO: 113587 - DNA, 17 bp, synthetic construct
  source 1..17: mol_type = other DNA
ctctgcatggccacagt

SEQ ID NO: 113588 - DNA, 17 bp, synthetic construct
  source 1..17: mol_type = other DNA
tctgcatggccacagtg

SEQ ID NO: 113589 - DNA, 17 bp, synthetic construct
  source 1..17: mol_type = other DNA
ctgcatggccacagtgg

SEQ ID NO: 113590 - DNA, 17 bp, synthetic construct
  source 1..17: mol_type = other DNA
tgcatggccacagtggg

SEQ ID NO: 113591 - DNA, 17 bp, synthetic construct
  source 1..17: mol_type = other DNA
gcatggccacagtgggt

SEQ ID NO: 113592 - DNA, 17 bp, synthetic construct
  source 1..17: mol_type = other DNA
catggccacagtgggtg

SEQ ID NO: 113593 - DNA, 17 bp, synthetic construct
  source 1..17: mol_type = other DNA
atggccacagtgggtgg

SEQ ID NO: 113594 - DNA, 17 bp, synthetic construct
  source 1..17: mol_type = other DNA
tggccacagtgggtgga

SEQ ID NO: 113595 - DNA, 17 bp, synthetic construct
  source 1..17: mol_type = other DNA
ggccacagtgggtggaa

SEQ ID NO: 113596 - DNA, 17 bp, synthetic construct
  source 1..17: mol_type = other DNA
gccacagtgggtggaag

SEQ ID NO: 113597 - DNA, 17 bp, synthetic construct
  source 1..17: mol_type = other DNA
ccacagtgggtggaagg

SEQ ID NO: 113598 - DNA, 17 bp, synthetic construct
  source 1..17: mol_type = other DNA
cacagtgggtggaaggg

SEQ ID NO: 113599 - DNA, 17 bp, synthetic construct
  source 1..17: mol_type = other DNA
acagtgggtggaagggg

SEQ ID NO: 113600 - DNA, 17 bp, synthetic construct
  source 1..17: mol_type = other DNA
cagtgggtggaaggggt

SEQ ID NO: 113601 - DNA, 17 bp, synthetic construct
  source 1..17: mol_type = other DNA
agtgggtggaaggggtg

SEQ ID NO: 113602 - DNA, 17 bp, synthetic construct
  source 1..17: mol_type = other DNA
gtgggtggaaggggtgg

SEQ ID NO: 113603 - DNA, 17 bp, synthetic construct
  source 1..17: mol_type = other DNA
tgggtggaaggggtggg

SEQ ID NO: 113604 - DNA, 17 bp, synthetic construct
  source 1..17: mol_type = other DNA
gggtggaaggggtgggg

SEQ ID NO: 113605 - DNA, 17 bp, synthetic construct
  source 1..17: mol_type = other DNA
ggtggaaggggtggggc

SEQ ID NO: 113606 - DNA, 17 bp, synthetic construct
  source 1..17: mol_type = other DNA
gtggaaggggtggggct

SEQ ID NO: 113607 - DNA, 17 bp, synthetic construct
  source 1..17: mol_type = other DNA
tggaaggggtggggctg

SEQ ID NO: 113608 - DNA, 17 bp, synthetic construct
  source 1..17: mol_type = other DNA
ggaaggggtggggctgg

SEQ ID NO: 113609 - DNA, 17 bp, synthetic construct
  source 1..17: mol_type = other DNA
gaaggggtggggctggg

SEQ ID NO: 113610 - DNA, 17 bp, synthetic construct
  source 1..17: mol_type = other DNA
aaggggtggggctgggt

SEQ ID NO: 113611 - DNA, 17 bp, synthetic construct
  source 1..17: mol_type = other DNA
aggggtggggctgggta

SEQ ID NO: 113612 - DNA, 17 bp, synthetic construct
  source 1..17: mol_type = other DNA
ggggtggggctgggtac

SEQ ID NO: 113613 - DNA, 17 bp, synthetic construct
  source 1..17: mol_type = other DNA
gggtggggctgggtaca

SEQ ID NO: 113614 - DNA, 17 bp, synthetic construct
  source 1..17: mol_type = other DNA
ggtggggctgggtacaa

SEQ ID NO: 113615 - DNA, 17 bp, synthetic construct
  source 1..17: mol_type = other DNA
gtggggctgggtacaag

SEQ ID NO: 113616 - DNA, 17 bp, synthetic construct
  source 1..17: mol_type = other DNA
tggggctgggtacaagg

SEQ ID NO: 113617 - DNA, 17 bp, synthetic construct
  source 1..17: mol_type = other DNA
ggggctgggtacaagga

SEQ ID NO: 113618 - DNA, 17 bp, synthetic construct
  source 1..17: mol_type = other DNA
gggctgggtacaaggaa

SEQ ID NO: 113619 - DNA, 17 bp, synthetic construct
  source 1..17: mol_type = other DNA
ggctgggtacaaggaac

SEQ ID NO: 113620 - DNA, 17 bp, synthetic construct
  source 1..17: mol_type = other DNA
gctgggtacaaggaacc

SEQ ID NO: 113621 - DNA, 17 bp, synthetic construct
  source 1..17: mol_type = other DNA
ctgggtacaaggaaccc

SEQ ID NO: 113622 - DNA, 17 bp, synthetic construct
  source 1..17: mol_type = other DNA
tgggtacaaggaacccc

SEQ ID NO: 113623 - DNA, 17 bp, synthetic construct
  source 1..17: mol_type = other DNA
gggtacaaggaaccccg

SEQ ID NO: 113624 - DNA, 17 bp, synthetic construct
  source 1..17: mol_type = other DNA
ggtacaaggaaccccga

SEQ ID NO: 113625 - DNA, 17 bp, synthetic construct
  source 1..17: mol_type = other DNA
gtacaaggaaccccgac

SEQ ID NO: 113626 - DNA, 17 bp, synthetic construct
  source 1..17: mol_type = other DNA
tacaaggaaccccgaca

SEQ ID NO: 113627 - DNA, 17 bp, synthetic construct
  source 1..17: mol_type = other DNA
acaaggaaccccgacag

SEQ ID NO: 113628 - DNA, 17 bp, synthetic construct
  source 1..17: mol_type = other DNA
caaggaaccccgacagg

SEQ ID NO: 113629 - DNA, 17 bp, synthetic construct
  source 1..17: mol_type = other DNA
aaggaaccccgacaggg

SEQ ID NO: 113630 - DNA, 17 bp, synthetic construct
  source 1..17: mol_type = other DNA
aggaaccccgacaggga

SEQ ID NO: 113631 - DNA, 17 bp, synthetic construct
  source 1..17: mol_type = other DNA
ggaaccccgacagggag

SEQ ID NO: 113632 - DNA, 17 bp, synthetic construct
  source 1..17: mol_type = other DNA
gaaccccgacagggaga

SEQ ID NO: 113633 - DNA, 17 bp, synthetic construct
  source 1..17: mol_type = other DNA
aaccccgacagggagag

SEQ ID NO: 113634 - DNA, 17 bp, synthetic construct
  source 1..17: mol_type = other DNA
accccgacagggagagg

SEQ ID NO: 113635 - DNA, 17 bp, synthetic construct
  source 1..17: mol_type = other DNA
ccccgacagggagaggg

SEQ ID NO: 113636 - DNA, 17 bp, synthetic construct
  source 1..17: mol_type = other DNA
cccgacagggagagggc

SEQ ID NO: 113637 - DNA, 17 bp, synthetic construct
  source 1..17: mol_type = other DNA
ccgacagggagagggct

SEQ ID NO: 113638 - DNA, 17 bp, synthetic construct
  source 1..17: mol_type = other DNA
cgacagggagagggctt

SEQ ID NO: 113639 - DNA, 17 bp, synthetic construct
  source 1..17: mol_type = other DNA
gacagggagagggcttc

SEQ ID NO: 113640 - DNA, 17 bp, synthetic construct
  source 1..17: mol_type = other DNA
acagggagagggcttcc

SEQ ID NO: 113641 - DNA, 17 bp, synthetic construct
  source 1..17: mol_type = other DNA
cagggagagggcttccc

SEQ ID NO: 113642 - DNA, 17 bp, synthetic construct
  source 1..17: mol_type = other DNA
agggagagggcttcccg

SEQ ID NO: 113643 - DNA, 17 bp, synthetic construct
  source 1..17: mol_type = other DNA
gggagagggcttcccgg

SEQ ID NO: 113644 - DNA, 17 bp, synthetic construct
  source 1..17: mol_type = other DNA
ggagagggcttcccggc

SEQ ID NO: 113645 - DNA, 17 bp, synthetic construct
  source 1..17: mol_type = other DNA
gagagggcttcccggcc

SEQ ID NO: 113646 - DNA, 17 bp, synthetic construct
  source 1..17: mol_type = other DNA
agagggcttcccggcct

SEQ ID NO: 113647 - DNA, 17 bp, synthetic construct
  source 1..17: mol_type = other DNA
gagggcttcccggcctg

SEQ ID NO: 113648 - DNA, 17 bp, synthetic construct
  source 1..17: mol_type = other DNA
agggcttcccggcctgg

SEQ ID NO: 113649 - DNA, 17 bp, synthetic construct
  source 1..17: mol_type = other DNA
gggcttcccggcctggc

SEQ ID NO: 113650 - DNA, 17 bp, synthetic construct
  source 1..17: mol_type = other DNA
ggcttcccggcctggcc

SEQ ID NO: 113651 - DNA, 17 bp, synthetic construct
  source 1..17: mol_type = other DNA
gcttcccggcctggcct

SEQ ID NO: 113652 - DNA, 17 bp, synthetic construct
  source 1..17: mol_type = other DNA
cttcccggcctggcctg

SEQ ID NO: 113653 - DNA, 17 bp, synthetic construct
  source 1..17: mol_type = other DNA
ttcccggcctggcctgc

SEQ ID NO: 113654 - DNA, 17 bp, synthetic construct
  source 1..17: mol_type = other DNA
tcccggcctggcctgcc

SEQ ID NO: 113655 - DNA, 17 bp, synthetic construct
  source 1..17: mol_type = other DNA
cccggcctggcctgcca

SEQ ID NO: 113656 - DNA, 17 bp, synthetic construct
  source 1..17: mol_type = other DNA
ccggcctggcctgccat

SEQ ID NO: 113657 - DNA, 17 bp, synthetic construct
  source 1..17: mol_type = other DNA
cggcctggcctgccatg

SEQ ID NO: 113658 - DNA, 17 bp, synthetic construct
  source 1..17: mol_type = other DNA
ggcctggcctgccatgg

SEQ ID NO: 113659 - DNA, 17 bp, synthetic construct
  source 1..17: mol_type = other DNA
gcctggcctgccatggg

SEQ ID NO: 113660 - DNA, 17 bp, synthetic construct
  source 1..17: mol_type = other DNA
cctggcctgccatgggt

SEQ ID NO: 113661 - DNA, 17 bp, synthetic construct
  source 1..17: mol_type = other DNA
ctggcctgccatgggtc

SEQ ID NO: 113662 - DNA, 17 bp, synthetic construct
  source 1..17: mol_type = other DNA
tggcctgccatgggtcc

SEQ ID NO: 113663 - DNA, 17 bp, synthetic construct
  source 1..17: mol_type = other DNA
ggcctgccatgggtcct

SEQ ID NO: 113664 - DNA, 17 bp, synthetic construct
  source 1..17: mol_type = other DNA
gcctgccatgggtccta

SEQ ID NO: 113665 - DNA, 17 bp, synthetic construct
  source 1..17: mol_type = other DNA
cctgccatgggtcctat

SEQ ID NO: 113666 - DNA, 17 bp, synthetic construct
  source 1..17: mol_type = other DNA
ctgccatgggtcctatt

SEQ ID NO: 113667 - DNA, 17 bp, synthetic construct
  source 1..17: mol_type = other DNA
tgccatgggtcctattc

SEQ ID NO: 113668 - DNA, 17 bp, synthetic construct
  source 1..17: mol_type = other DNA
gccatgggtcctattcc

SEQ ID NO: 113669 - DNA, 17 bp, synthetic construct
  source 1..17: mol_type = other DNA
ccatgggtcctattcca

SEQ ID NO: 113670 - DNA, 17 bp, synthetic construct
  source 1..17: mol_type = other DNA
catgggtcctattccag

SEQ ID NO: 113671 - DNA, 17 bp, synthetic construct
  source 1..17: mol_type = other DNA
atgggtcctattccagc

SEQ ID NO: 113672 - DNA, 17 bp, synthetic construct
  source 1..17: mol_type = other DNA
tgggtcctattccagca

SEQ ID NO: 113673 - DNA, 17 bp, synthetic construct
  source 1..17: mol_type = other DNA
gggtcctattccagcac

SEQ ID NO: 113674 - DNA, 17 bp, synthetic construct
  source 1..17: mol_type = other DNA
ggtcctattccagcacc

SEQ ID NO: 113675 - DNA, 17 bp, synthetic construct
  source 1..17: mol_type = other DNA
gtcctattccagcaccg

SEQ ID NO: 113676 - DNA, 17 bp, synthetic construct
  source 1..17: mol_type = other DNA
tcctattccagcaccgt

SEQ ID NO: 113677 - DNA, 17 bp, synthetic construct
  source 1..17: mol_type = other DNA
cctattccagcaccgtg

SEQ ID NO: 113678 - DNA, 17 bp, synthetic construct
  source 1..17: mol_type = other DNA
ctattccagcaccgtgg

SEQ ID NO: 113679 - DNA, 17 bp, synthetic construct
  source 1..17: mol_type = other DNA
tattccagcaccgtggc

SEQ ID NO: 113680 - DNA, 17 bp, synthetic construct
  source 1..17: mol_type = other DNA
attccagcaccgtggca

SEQ ID NO: 113681 - DNA, 17 bp, synthetic construct
  source 1..17: mol_type = other DNA
ttccagcaccgtggcag

SEQ ID NO: 113682 - DNA, 17 bp, synthetic construct
  source 1..17: mol_type = other DNA
tccagcaccgtggcagc

SEQ ID NO: 113683 - DNA, 17 bp, synthetic construct
  source 1..17: mol_type = other DNA
ccagcaccgtggcagcc

SEQ ID NO: 113684 - DNA, 17 bp, synthetic construct
  source 1..17: mol_type = other DNA
cagcaccgtggcagccc

SEQ ID NO: 113685 - DNA, 17 bp, synthetic construct
  source 1..17: mol_type = other DNA
agcaccgtggcagcccc

SEQ ID NO: 113686 - DNA, 17 bp, synthetic construct
  source 1..17: mol_type = other DNA
gcaccgtggcagccccc

SEQ ID NO: 113687 - DNA, 17 bp, synthetic construct
  source 1..17: mol_type = other DNA
caccgtggcagccccca

SEQ ID NO: 113688 - DNA, 17 bp, synthetic construct
  source 1..17: mol_type = other DNA
accgtggcagcccccat

SEQ ID NO: 113689 - DNA, 17 bp, synthetic construct
  source 1..17: mol_type = other DNA
ccgtggcagcccccatg

SEQ ID NO: 113690 - DNA, 17 bp, synthetic construct
  source 1..17: mol_type = other DNA
cgtggcagcccccatgg

SEQ ID NO: 113691 - DNA, 17 bp, synthetic construct
  source 1..17: mol_type = other DNA
gtggcagcccccatgga

SEQ ID NO: 113692 - DNA, 17 bp, synthetic construct
  source 1..17: mol_type = other DNA
tggcagcccccatggat

SEQ ID NO: 113693 - DNA, 17 bp, synthetic construct
  source 1..17: mol_type = other DNA
ggcagcccccatggatg

SEQ ID NO: 113694 - DNA, 17 bp, synthetic construct
  source 1..17: mol_type = other DNA
gcagcccccatggatgg

SEQ ID NO: 113695 - DNA, 17 bp, synthetic construct
  source 1..17: mol_type = other DNA
cagcccccatggatggc

SEQ ID NO: 113696 - DNA, 17 bp, synthetic construct
  source 1..17: mol_type = other DNA
agcccccatggatggca

SEQ ID NO: 113697 - DNA, 17 bp, synthetic construct
  source 1..17: mol_type = other DNA
gcccccatggatggcag

SEQ ID NO: 113698 - DNA, 17 bp, synthetic construct
  source 1..17: mol_type = other DNA
cccccatggatggcagg

SEQ ID NO: 113699 - DNA, 17 bp, synthetic construct
  source 1..17: mol_type = other DNA
ccccatggatggcaggg

SEQ ID NO: 113700 - DNA, 17 bp, synthetic construct
  source 1..17: mol_type = other DNA
cccatggatggcagggg

SEQ ID NO: 113701 - DNA, 17 bp, synthetic construct
  source 1..17: mol_type = other DNA
ccatggatggcaggggt

SEQ ID NO: 113702 - DNA, 17 bp, synthetic construct
  source 1..17: mol_type = other DNA
catggatggcaggggtg

SEQ ID NO: 113703 - DNA, 17 bp, synthetic construct
  source 1..17: mol_type = other DNA
atggatggcaggggtgc

SEQ ID NO: 113704 - DNA, 17 bp, synthetic construct
  source 1..17: mol_type = other DNA
tggatggcaggggtgcc

SEQ ID NO: 113705 - DNA, 17 bp, synthetic construct
  source 1..17: mol_type = other DNA
ggatggcaggggtgccc

SEQ ID NO: 113706 - DNA, 17 bp, synthetic construct
  source 1..17: mol_type = other DNA
gatggcaggggtgccca

SEQ ID NO: 113707 - DNA, 17 bp, synthetic construct
  source 1..17: mol_type = other DNA
atggcaggggtgcccag

SEQ ID NO: 113708 - DNA, 17 bp, synthetic construct
  source 1..17: mol_type = other DNA
tggcaggggtgcccagc

SEQ ID NO: 113709 - DNA, 17 bp, synthetic construct
  source 1..17: mol_type = other DNA
ggcaggggtgcccagcc

SEQ ID NO: 113710 - DNA, 17 bp, synthetic construct
  source 1..17: mol_type = other DNA
gcaggggtgcccagcct

SEQ ID NO: 113711 - DNA, 17 bp, synthetic construct
  source 1..17: mol_type = other DNA
caggggtgcccagcctg

SEQ ID NO: 113712 - DNA, 17 bp, synthetic construct
  source 1..17: mol_type = other DNA
aggggtgcccagcctgg

SEQ ID NO: 113713 - DNA, 17 bp, synthetic construct
  source 1..17: mol_type = other DNA
ggggtgcccagcctggc

SEQ ID NO: 113714 - DNA, 17 bp, synthetic construct
  source 1..17: mol_type = other DNA
gggtgcccagcctggcc

SEQ ID NO: 113715 - DNA, 17 bp, synthetic construct
  source 1..17: mol_type = other DNA
ggtgcccagcctggccc

SEQ ID NO: 113716 - DNA, 17 bp, synthetic construct
  source 1..17: mol_type = other DNA
gtgcccagcctggccca

SEQ ID NO: 113717 - DNA, 17 bp, synthetic construct
  source 1..17: mol_type = other DNA
tgcccagcctggcccac

SEQ ID NO: 113718 - DNA, 17 bp, synthetic construct
  source 1..17: mol_type = other DNA
gcccagcctggcccact

SEQ ID NO: 113719 - DNA, 17 bp, synthetic construct
  source 1..17: mol_type = other DNA
cccagcctggcccactg

SEQ ID NO: 113720 - DNA, 17 bp, synthetic construct
  source 1..17: mol_type = other DNA
ccagcctggcccactgt

SEQ ID NO: 113721 - DNA, 17 bp, synthetic construct
  source 1..17: mol_type = other DNA
cagcctggcccactgtg

SEQ ID NO: 113722 - DNA, 17 bp, synthetic construct
  source 1..17: mol_type = other DNA
agcctggcccactgtgc

SEQ ID NO: 113723 - DNA, 17 bp, synthetic construct
  source 1..17: mol_type = other DNA
gcctggcccactgtgct

SEQ ID NO: 113724 - DNA, 17 bp, synthetic construct
  source 1..17: mol_type = other DNA
cctggcccactgtgctc

SEQ ID NO: 113725 - DNA, 17 bp, synthetic construct
  source 1..17: mol_type = other DNA
ctggcccactgtgctcc

SEQ ID NO: 113726 - DNA, 17 bp, synthetic construct
  source 1..17: mol_type = other DNA
tggcccactgtgctccc

SEQ ID NO: 113727 - DNA, 17 bp, synthetic construct
  source 1..17: mol_type = other DNA
ggcccactgtgctcccc

SEQ ID NO: 113728 - DNA, 17 bp, synthetic construct
  source 1..17: mol_type = other DNA
gcccactgtgctcccca

SEQ ID NO: 113729 - DNA, 17 bp, synthetic construct
  source 1..17: mol_type = other DNA
cccactgtgctccccag

SEQ ID NO: 113730 - DNA, 17 bp, synthetic construct
  source 1..17: mol_type = other DNA
ccactgtgctccccagg

SEQ ID NO: 113731 - DNA, 17 bp, synthetic construct
  source 1..17: mol_type = other DNA
cactgtgctccccagga

SEQ ID NO: 113732 - DNA, 17 bp, synthetic construct
  source 1..17: mol_type = other DNA
actgtgctccccaggag

SEQ ID NO: 113733 - DNA, 17 bp, synthetic construct
  source 1..17: mol_type = other DNA
ctgtgctccccaggagg

SEQ ID NO: 113734 - DNA, 17 bp, synthetic construct
  source 1..17: mol_type = other DNA
tgtgctccccaggaggg

SEQ ID NO: 113735 - DNA, 17 bp, synthetic construct
  source 1..17: mol_type = other DNA
gtgctccccaggagggc

SEQ ID NO: 113736 - DNA, 17 bp, synthetic construct
  source 1..17: mol_type = other DNA
tgctccccaggagggca

SEQ ID NO: 113737 - DNA, 17 bp, synthetic construct
  source 1..17: mol_type = other DNA
gctccccaggagggcat

SEQ ID NO: 113738 - DNA, 17 bp, synthetic construct
  source 1..17: mol_type = other DNA
ctccccaggagggcatc

SEQ ID NO: 113739 - DNA, 17 bp, synthetic construct
  source 1..17: mol_type = other DNA
tccccaggagggcatct

SEQ ID NO: 113740 - DNA, 17 bp, synthetic construct
  source 1..17: mol_type = other DNA
ccccaggagggcatctg

SEQ ID NO: 113741 - DNA, 17 bp, synthetic construct
  source 1..17: mol_type = other DNA
cccaggagggcatctgc

SEQ ID NO: 113742 - DNA, 17 bp, synthetic construct
  source 1..17: mol_type = other DNA
ccaggagggcatctgcc

SEQ ID NO: 113743 - DNA, 17 bp, synthetic construct
  source 1..17: mol_type = other DNA
caggagggcatctgcca

SEQ ID NO: 113744 - DNA, 17 bp, synthetic construct
  source 1..17: mol_type = other DNA
aggagggcatctgccac

SEQ ID NO: 113745 - DNA, 17 bp, synthetic construct
  source 1..17: mol_type = other DNA
ggagggcatctgccacc

SEQ ID NO: 113746 - DNA, 17 bp, synthetic construct
  source 1..17: mol_type = other DNA
gagggcatctgccaccg

SEQ ID NO: 113747 - DNA, 17 bp, synthetic construct
  source 1..17: mol_type = other DNA
agggcatctgccaccgc

SEQ ID NO: 113748 - DNA, 17 bp, synthetic construct
  source 1..17: mol_type = other DNA
gggcatctgccaccgca

SEQ ID NO: 113749 - DNA, 17 bp, synthetic construct
  source 1..17: mol_type = other DNA
ggcatctgccaccgcac

SEQ ID NO: 113750 - DNA, 17 bp, synthetic construct
  source 1..17: mol_type = other DNA
gcatctgccaccgcacc

SEQ ID NO: 113751 - DNA, 17 bp, synthetic construct
  source 1..17: mol_type = other DNA
catctgccaccgcaccc

SEQ ID NO: 113752 - DNA, 17 bp, synthetic construct
  source 1..17: mol_type = other DNA
atctgccaccgcaccct

SEQ ID NO: 113753 - DNA, 17 bp, synthetic construct
  source 1..17: mol_type = other DNA
tctgccaccgcaccctg

SEQ ID NO: 113754 - DNA, 17 bp, synthetic construct
  source 1..17: mol_type = other DNA
ctgccaccgcaccctgc

SEQ ID NO: 113755 - DNA, 17 bp, synthetic construct
  source 1..17: mol_type = other DNA
tgccaccgcaccctgct

SEQ ID NO: 113756 - DNA, 17 bp, synthetic construct
  source 1..17: mol_type = other DNA
gccaccgcaccctgctg

SEQ ID NO: 113757 - DNA, 17 bp, synthetic construct
  source 1..17: mol_type = other DNA
ccaccgcaccctgctgg

SEQ ID NO: 113758 - DNA, 17 bp, synthetic construct
  source 1..17: mol_type = other DNA
caccgcaccctgctggg

SEQ ID NO: 113759 - DNA, 17 bp, synthetic construct
  source 1..17: mol_type = other DNA
accgcaccctgctgggg

SEQ ID NO: 113760 - DNA, 17 bp, synthetic construct
  source 1..17: mol_type = other DNA
ccgcaccctgctggggc

SEQ ID NO: 113761 - DNA, 17 bp, synthetic construct
  source 1..17: mol_type = other DNA
cgcaccctgctggggcc

SEQ ID NO: 113762 - DNA, 17 bp, synthetic construct
  source 1..17: mol_type = other DNA
gcaccctgctggggccg

SEQ ID NO: 113763 - DNA, 17 bp, synthetic construct
  source 1..17: mol_type = other DNA
caccctgctggggccgg

SEQ ID NO: 113764 - DNA, 17 bp, synthetic construct
  source 1..17: mol_type = other DNA
accctgctggggccggc

SEQ ID NO: 113765 - DNA, 17 bp, synthetic construct
  source 1..17: mol_type = other DNA
ccctgctggggccggcc

SEQ ID NO: 113766 - DNA, 17 bp, synthetic construct
  source 1..17: mol_type = other DNA
cctgctggggccggcct

SEQ ID NO: 113767 - DNA, 17 bp, synthetic construct
  source 1..17: mol_type = other DNA
ctgctggggccggcctt

SEQ ID NO: 113768 - DNA, 17 bp, synthetic construct
  source 1..17: mol_type = other DNA
tgctggggccggccttt

SEQ ID NO: 113769 - DNA, 17 bp, synthetic construct
  source 1..17: mol_type = other DNA
gctggggccggcctttg

SEQ ID NO: 113770 - DNA, 17 bp, synthetic construct
  source 1..17: mol_type = other DNA
ctggggccggcctttgc

SEQ ID NO: 113771 - DNA, 17 bp, synthetic construct
  source 1..17: mol_type = other DNA
tggggccggcctttgcg

SEQ ID NO: 113772 - DNA, 17 bp, synthetic construct
  source 1..17: mol_type = other DNA
ggggccggcctttgcgg

SEQ ID NO: 113773 - DNA, 17 bp, synthetic construct
  source 1..17: mol_type = other DNA
gggccggcctttgcgga

SEQ ID NO: 113774 - DNA, 17 bp, synthetic construct
  source 1..17: mol_type = other DNA
ggccggcctttgcggag

SEQ ID NO: 113775 - DNA, 17 bp, synthetic construct
  source 1..17: mol_type = other DNA
gccggcctttgcggagt

SEQ ID NO: 113776 - DNA, 17 bp, synthetic construct
  source 1..17: mol_type = other DNA
ccggcctttgcggagtg

SEQ ID NO: 113777 - DNA, 17 bp, synthetic construct
  source 1..17: mol_type = other DNA
cggcctttgcggagtgc

SEQ ID NO: 113778 - DNA, 17 bp, synthetic construct
  source 1..17: mol_type = other DNA
ggcctttgcggagtgcc

SEQ ID NO: 113779 - DNA, 17 bp, synthetic construct
  source 1..17: mol_type = other DNA
gcctttgcggagtgcca

SEQ ID NO: 113780 - DNA, 17 bp, synthetic construct
  source 1..17: mol_type = other DNA
cctttgcggagtgccac

SEQ ID NO: 113781 - DNA, 17 bp, synthetic construct
  source 1..17: mol_type = other DNA
ctttgcggagtgccacg

SEQ ID NO: 113782 - DNA, 17 bp, synthetic construct
  source 1..17: mol_type = other DNA
tttgcggagtgccacgc

SEQ ID NO: 113783 - DNA, 17 bp, synthetic construct
  source 1..17: mol_type = other DNA
ttgcggagtgccacgca

SEQ ID NO: 113784 - DNA, 17 bp, synthetic construct
  source 1..17: mol_type = other DNA
tgcggagtgccacgcac

SEQ ID NO: 113785 - DNA, 17 bp, synthetic construct
  source 1..17: mol_type = other DNA
gcggagtgccacgcact

SEQ ID NO: 113786 - DNA, 17 bp, synthetic construct
  source 1..17: mol_type = other DNA
cggagtgccacgcactg

SEQ ID NO: 113787 - DNA, 17 bp, synthetic construct
  source 1..17: mol_type = other DNA
ggagtgccacgcactgg

SEQ ID NO: 113788 - DNA, 17 bp, synthetic construct
  source 1..17: mol_type = other DNA
gagtgccacgcactggt

SEQ ID NO: 113789 - DNA, 17 bp, synthetic construct
  source 1..17: mol_type = other DNA
agtgccacgcactggtg

SEQ ID NO: 113790 - DNA, 17 bp, synthetic construct
  source 1..17: mol_type = other DNA
gtgccacgcactggtgg

SEQ ID NO: 113791 - DNA, 17 bp, synthetic construct
  source 1..17: mol_type = other DNA
tgccacgcactggtgga

SEQ ID NO: 113792 - DNA, 17 bp, synthetic construct
  source 1..17: mol_type = other DNA
gccacgcactggtggac

SEQ ID NO: 113793 - DNA, 17 bp, synthetic construct
  source 1..17: mol_type = other DNA
ccacgcactggtggaca

SEQ ID NO: 113794 - DNA, 17 bp, synthetic construct
  source 1..17: mol_type = other DNA
cacgcactggtggacag

SEQ ID NO: 113795 - DNA, 17 bp, synthetic construct
  source 1..17: mol_type = other DNA
acgcactggtggacagc

SEQ ID NO: 113796 - DNA, 17 bp, synthetic construct
  source 1..17: mol_type = other DNA
cgcactggtggacagca

SEQ ID NO: 113797 - DNA, 17 bp, synthetic construct
  source 1..17: mol_type = other DNA
gcactggtggacagcac

SEQ ID NO: 113798 - DNA, 17 bp, synthetic construct
  source 1..17: mol_type = other DNA
cactggtggacagcact

SEQ ID NO: 113799 - DNA, 17 bp, synthetic construct
  source 1..17: mol_type = other DNA
actggtggacagcactg

SEQ ID NO: 113800 - DNA, 17 bp, synthetic construct
  source 1..17: mol_type = other DNA
ctggtggacagcactgc

SEQ ID NO: 113801 - DNA, 17 bp, synthetic construct
  source 1..17: mol_type = other DNA
tggtggacagcactgcg

SEQ ID NO: 113802 - DNA, 17 bp, synthetic construct
  source 1..17: mol_type = other DNA
ggtggacagcactgcgt

SEQ ID NO: 113803 - DNA, 17 bp, synthetic construct
  source 1..17: mol_type = other DNA
gtggacagcactgcgta

SEQ ID NO: 113804 - DNA, 17 bp, synthetic construct
  source 1..17: mol_type = other DNA
tggacagcactgcgtac

SEQ ID NO: 113805 - DNA, 17 bp, synthetic construct
  source 1..17: mol_type = other DNA
ggacagcactgcgtacc

SEQ ID NO: 113806 - DNA, 17 bp, synthetic construct
  source 1..17: mol_type = other DNA
gacagcactgcgtacct

SEQ ID NO: 113807 - DNA, 17 bp, synthetic construct
  source 1..17: mol_type = other DNA
acagcactgcgtacctg

SEQ ID NO: 113808 - DNA, 17 bp, synthetic construct
  source 1..17: mol_type = other DNA
cagcactgcgtacctgg

SEQ ID NO: 113809 - DNA, 17 bp, synthetic construct
  source 1..17: mol_type = other DNA
agcactgcgtacctggc

SEQ ID NO: 113810 - DNA, 17 bp, synthetic construct
  source 1..17: mol_type = other DNA
gcactgcgtacctggcc

SEQ ID NO: 113811 - DNA, 17 bp, synthetic construct
  source 1..17: mol_type = other DNA
cactgcgtacctggccg

SEQ ID NO: 113812 - DNA, 17 bp, synthetic construct
  source 1..17: mol_type = other DNA
actgcgtacctggccgc

SEQ ID NO: 113813 - DNA, 17 bp, synthetic construct
  source 1..17: mol_type = other DNA
ctgcgtacctggccgcc

SEQ ID NO: 113814 - DNA, 17 bp, synthetic construct
  source 1..17: mol_type = other DNA
tgcgtacctggccgcct

SEQ ID NO: 113815 - DNA, 17 bp, synthetic construct
  source 1..17: mol_type = other DNA
gcgtacctggccgcctg

SEQ ID NO: 113816 - DNA, 17 bp, synthetic construct
  source 1..17: mol_type = other DNA
cgtacctggccgcctgc

SEQ ID NO: 113817 - DNA, 17 bp, synthetic construct
  source 1..17: mol_type = other DNA
gtacctggccgcctgcg

SEQ ID NO: 113818 - DNA, 17 bp, synthetic construct
  source 1..17: mol_type = other DNA
tacctggccgcctgcgc

SEQ ID NO: 113819 - DNA, 17 bp, synthetic construct
  source 1..17: mol_type = other DNA
acctggccgcctgcgcc

SEQ ID NO: 113820 - DNA, 17 bp, synthetic construct
  source 1..17: mol_type = other DNA
cctggccgcctgcgccc

SEQ ID NO: 113821 - DNA, 17 bp, synthetic construct
  source 1..17: mol_type = other DNA
ctggccgcctgcgccca

SEQ ID NO: 113822 - DNA, 17 bp, synthetic construct
  source 1..17: mol_type = other DNA
tggccgcctgcgcccag

SEQ ID NO: 113823 - DNA, 17 bp, synthetic construct
  source 1..17: mol_type = other DNA
ggccgcctgcgcccagg

SEQ ID NO: 113824 - DNA, 17 bp, synthetic construct
  source 1..17: mol_type = other DNA
gccgcctgcgcccagga

SEQ ID NO: 113825 - DNA, 17 bp, synthetic construct
  source 1..17: mol_type = other DNA
ccgcctgcgcccaggac

SEQ ID NO: 113826 - DNA, 17 bp, synthetic construct
  source 1..17: mol_type = other DNA
cgcctgcgcccaggacc

SEQ ID NO: 113827 - DNA, 17 bp, synthetic construct
  source 1..17: mol_type = other DNA
gcctgcgcccaggacct

SEQ ID NO: 113828 - DNA, 17 bp, synthetic construct
  source 1..17: mol_type = other DNA
cctgcgcccaggacctg

SEQ ID NO: 113829 - DNA, 17 bp, synthetic construct
  source 1..17: mol_type = other DNA
ctgcgcccaggacctgt

SEQ ID NO: 113830 - DNA, 17 bp, synthetic construct
  source 1..17: mol_type = other DNA
tgcgcccaggacctgtg

SEQ ID NO: 113831 - DNA, 17 bp, synthetic construct
  source 1..17: mol_type = other DNA
gcgcccaggacctgtgc

SEQ ID NO: 113832 - DNA, 17 bp, synthetic construct
  source 1..17: mol_type = other DNA
cgcccaggacctgtgcc

SEQ ID NO: 113833 - DNA, 17 bp, synthetic construct
  source 1..17: mol_type = other DNA
gcccaggacctgtgccg

SEQ ID NO: 113834 - DNA, 17 bp, synthetic construct
  source 1..17: mol_type = other DNA
cccaggacctgtgccgc

SEQ ID NO: 113835 - DNA, 17 bp, synthetic construct
  source 1..17: mol_type = other DNA
ccaggacctgtgccgct

SEQ ID NO: 113836 - DNA, 17 bp, synthetic construct
  source 1..17: mol_type = other DNA
caggacctgtgccgctg

SEQ ID NO: 113837 - DNA, 17 bp, synthetic construct
  source 1..17: mol_type = other DNA
aggacctgtgccgctgc

SEQ ID NO: 113838 - DNA, 17 bp, synthetic construct
  source 1..17: mol_type = other DNA
ggacctgtgccgctgcc

SEQ ID NO: 113839 - DNA, 17 bp, synthetic construct
  source 1..17: mol_type = other DNA
gacctgtgccgctgccc

SEQ ID NO: 113840 - DNA, 17 bp, synthetic construct
  source 1..17: mol_type = other DNA
acctgtgccgctgcccc

SEQ ID NO: 113841 - DNA, 17 bp, synthetic construct
  source 1..17: mol_type = other DNA
cctgtgccgctgcccca

SEQ ID NO: 113842 - DNA, 17 bp, synthetic construct
  source 1..17: mol_type = other DNA
ctgtgccgctgccccac

SEQ ID NO: 113843 - DNA, 17 bp, synthetic construct
  source 1..17: mol_type = other DNA
tgtgccgctgccccacc

SEQ ID NO: 113844 - DNA, 17 bp, synthetic construct
  source 1..17: mol_type = other DNA
gtgccgctgccccacct

SEQ ID NO: 113845 - DNA, 17 bp, synthetic construct
  source 1..17: mol_type = other DNA
tgccgctgccccacctg

SEQ ID NO: 113846 - DNA, 17 bp, synthetic construct
  source 1..17: mol_type = other DNA
gccgctgccccacctgc

SEQ ID NO: 113847 - DNA, 17 bp, synthetic construct
  source 1..17: mol_type = other DNA
ccgctgccccacctgcc

SEQ ID NO: 113848 - DNA, 17 bp, synthetic construct
  source 1..17: mol_type = other DNA
cgctgccccacctgccc

SEQ ID NO: 113849 - DNA, 17 bp, synthetic construct
  source 1..17: mol_type = other DNA
gctgccccacctgcccg

SEQ ID NO: 113850 - DNA, 17 bp, synthetic construct
  source 1..17: mol_type = other DNA
ctgccccacctgcccgt

SEQ ID NO: 113851 - DNA, 17 bp, synthetic construct
  source 1..17: mol_type = other DNA
tgccccacctgcccgtg

SEQ ID NO: 113852 - DNA, 17 bp, synthetic construct
  source 1..17: mol_type = other DNA
gccccacctgcccgtgt

SEQ ID NO: 113853 - DNA, 17 bp, synthetic construct
  source 1..17: mol_type = other DNA
ccccacctgcccgtgtg

SEQ ID NO: 113854 - DNA, 17 bp, synthetic construct
  source 1..17: mol_type = other DNA
cccacctgcccgtgtgc

SEQ ID NO: 113855 - DNA, 17 bp, synthetic construct
  source 1..17: mol_type = other DNA
ccacctgcccgtgtgcc

SEQ ID NO: 113856 - DNA, 17 bp, synthetic construct
  source 1..17: mol_type = other DNA
cacctgcccgtgtgcca

SEQ ID NO: 113857 - DNA, 17 bp, synthetic construct
  source 1..17: mol_type = other DNA
acctgcccgtgtgccac

SEQ ID NO: 113858 - DNA, 17 bp, synthetic construct
  source 1..17: mol_type = other DNA
cctgcccgtgtgccacc

SEQ ID NO: 113859 - DNA, 17 bp, synthetic construct
  source 1..17: mol_type = other DNA
ctgcccgtgtgccacct

SEQ ID NO: 113860 - DNA, 17 bp, synthetic construct
  source 1..17: mol_type = other DNA
tgcccgtgtgccacctt

SEQ ID NO: 113861 - DNA, 17 bp, synthetic construct
  source 1..17: mol_type = other DNA
gcccgtgtgccaccttt

SEQ ID NO: 113862 - DNA, 17 bp, synthetic construct
  source 1..17: mol_type = other DNA
cccgtgtgccacctttg

SEQ ID NO: 113863 - DNA, 17 bp, synthetic construct
  source 1..17: mol_type = other DNA
ccgtgtgccacctttgt

SEQ ID NO: 113864 - DNA, 17 bp, synthetic construct
  source 1..17: mol_type = other DNA
cgtgtgccacctttgtg

SEQ ID NO: 113865 - DNA, 17 bp, synthetic construct
  source 1..17: mol_type = other DNA
gtgtgccacctttgtgg

SEQ ID NO: 113866 - DNA, 17 bp, synthetic construct
  source 1..17: mol_type = other DNA
tgtgccacctttgtgga

SEQ ID NO: 113867 - DNA, 17 bp, synthetic construct
  source 1..17: mol_type = other DNA
gtgccacctttgtggaa

SEQ ID NO: 113868 - DNA, 17 bp, synthetic construct
  source 1..17: mol_type = other DNA
tgccacctttgtggaat

SEQ ID NO: 113869 - DNA, 17 bp, synthetic construct
  source 1..17: mol_type = other DNA
gccacctttgtggaata

SEQ ID NO: 113870 - DNA, 17 bp, synthetic construct
  source 1..17: mol_type = other DNA
ccacctttgtggaatac

SEQ ID NO: 113871 - DNA, 17 bp, synthetic construct
  source 1..17: mol_type = other DNA
cacctttgtggaatact

SEQ ID NO: 113872 - DNA, 17 bp, synthetic construct
  source 1..17: mol_type = other DNA
acctttgtggaatactc

SEQ ID NO: 113873 - DNA, 17 bp, synthetic construct
  source 1..17: mol_type = other DNA
cctttgtggaatactca

SEQ ID NO: 113874 - DNA, 17 bp, synthetic construct
  source 1..17: mol_type = other DNA
ctttgtggaatactcac

SEQ ID NO: 113875 - DNA, 17 bp, synthetic construct
  source 1..17: mol_type = other DNA
tttgtggaatactcacg

SEQ ID NO: 113876 - DNA, 17 bp, synthetic construct
  source 1..17: mol_type = other DNA
ttgtggaatactcacgc

SEQ ID NO: 113877 - DNA, 17 bp, synthetic construct
  source 1..17: mol_type = other DNA
tgtggaatactcacgcc

SEQ ID NO: 113878 - DNA, 17 bp, synthetic construct
  source 1..17: mol_type = other DNA
gtggaatactcacgcca

SEQ ID NO: 113879 - DNA, 17 bp, synthetic construct
  source 1..17: mol_type = other DNA
tggaatactcacgccag

SEQ ID NO: 113880 - DNA, 17 bp, synthetic construct
  source 1..17: mol_type = other DNA
ggaatactcacgccagt

SEQ ID NO: 113881 - DNA, 17 bp, synthetic construct
  source 1..17: mol_type = other DNA
gaatactcacgccagtg

SEQ ID NO: 113882 - DNA, 17 bp, synthetic construct
  source 1..17: mol_type = other DNA
aatactcacgccagtgc

SEQ ID NO: 113883 - DNA, 17 bp, synthetic construct
  source 1..17: mol_type = other DNA
atactcacgccagtgcg

SEQ ID NO: 113884 - DNA, 17 bp, synthetic construct
  source 1..17: mol_type = other DNA
tactcacgccagtgcgc

SEQ ID NO: 113885 - DNA, 17 bp, synthetic construct
  source 1..17: mol_type = other DNA
actcacgccagtgcgcc

SEQ ID NO: 113886 - DNA, 17 bp, synthetic construct
  source 1..17: mol_type = other DNA
ctcacgccagtgcgccc

SEQ ID NO: 113887 - DNA, 17 bp, synthetic construct
  source 1..17: mol_type = other DNA
tcacgccagtgcgccca

SEQ ID NO: 113888 - DNA, 17 bp, synthetic construct
  source 1..17: mol_type = other DNA
cacgccagtgcgcccac

SEQ ID NO: 113889 - DNA, 17 bp, synthetic construct
  source 1..17: mol_type = other DNA
acgccagtgcgcccacg

SEQ ID NO: 113890 - DNA, 17 bp, synthetic construct
  source 1..17: mol_type = other DNA
cgccagtgcgcccacgc

SEQ ID NO: 113891 - DNA, 17 bp, synthetic construct
  source 1..17: mol_type = other DNA
gccagtgcgcccacgcg

SEQ ID NO: 113892 - DNA, 17 bp, synthetic construct
  source 1..17: mol_type = other DNA
ccagtgcgcccacgcgg

SEQ ID NO: 113893 - DNA, 17 bp, synthetic construct
  source 1..17: mol_type = other DNA
cagtgcgcccacgcggg

SEQ ID NO: 113894 - DNA, 17 bp, synthetic construct
  source 1..17: mol_type = other DNA
agtgcgcccacgcgggg

SEQ ID NO: 113895 - DNA, 17 bp, synthetic construct
  source 1..17: mol_type = other DNA
gtgcgcccacgcggggg

SEQ ID NO: 113896 - DNA, 17 bp, synthetic construct
  source 1..17: mol_type = other DNA
tgcgcccacgcgggggg

SEQ ID NO: 113897 - DNA, 17 bp, synthetic construct
  source 1..17: mol_type = other DNA
gcgcccacgcggggggc

SEQ ID NO: 113898 - DNA, 17 bp, synthetic construct
  source 1..17: mol_type = other DNA
cgcccacgcggggggcc

SEQ ID NO: 113899 - DNA, 17 bp, synthetic construct
  source 1..17: mol_type = other DNA
gcccacgcggggggcca

SEQ ID NO: 113900 - DNA, 17 bp, synthetic construct
  source 1..17: mol_type = other DNA
cccacgcggggggccag

SEQ ID NO: 113901 - DNA, 17 bp, synthetic construct
  source 1..17: mol_type = other DNA
ccacgcggggggccagc

SEQ ID NO: 113902 - DNA, 17 bp, synthetic construct
  source 1..17: mol_type = other DNA
cacgcggggggccagcc

SEQ ID NO: 113903 - DNA, 17 bp, synthetic construct
  source 1..17: mol_type = other DNA
acgcggggggccagccg

SEQ ID NO: 113904 - DNA, 17 bp, synthetic construct
  source 1..17: mol_type = other DNA
cgcggggggccagccgc

SEQ ID NO: 113905 - DNA, 17 bp, synthetic construct
  source 1..17: mol_type = other DNA
gcggggggccagccgcg

SEQ ID NO: 113906 - DNA, 17 bp, synthetic construct
  source 1..17: mol_type = other DNA
cggggggccagccgcgg

SEQ ID NO: 113907 - DNA, 17 bp, synthetic construct
  source 1..17: mol_type = other DNA
ggggggccagccgcgga

SEQ ID NO: 113908 - DNA, 17 bp, synthetic construct
  source 1..17: mol_type = other DNA
gggggccagccgcggaa

SEQ ID NO: 113909 - DNA, 17 bp, synthetic construct
  source 1..17: mol_type = other DNA
ggggccagccgcggaac

SEQ ID NO: 113910 - DNA, 17 bp, synthetic construct
  source 1..17: mol_type = other DNA
gggccagccgcggaact

SEQ ID NO: 113911 - DNA, 17 bp, synthetic construct
  source 1..17: mol_type = other DNA
ggccagccgcggaactg

SEQ ID NO: 113912 - DNA, 17 bp, synthetic construct
  source 1..17: mol_type = other DNA
gccagccgcggaactgg

SEQ ID NO: 113913 - DNA, 17 bp, synthetic construct
  source 1..17: mol_type = other DNA
ccagccgcggaactgga

SEQ ID NO: 113914 - DNA, 17 bp, synthetic construct
  source 1..17: mol_type = other DNA
cagccgcggaactggag

SEQ ID NO: 113915 - DNA, 17 bp, synthetic construct
  source 1..17: mol_type = other DNA
agccgcggaactggagg

SEQ ID NO: 113916 - DNA, 17 bp, synthetic construct
  source 1..17: mol_type = other DNA
gccgcggaactggaggt

SEQ ID NO: 113917 - DNA, 17 bp, synthetic construct
  source 1..17: mol_type = other DNA
ccgcggaactggaggtg

SEQ ID NO: 113918 - DNA, 17 bp, synthetic construct
  source 1..17: mol_type = other DNA
cgcggaactggaggtgc

SEQ ID NO: 113919 - DNA, 17 bp, synthetic construct
  source 1..17: mol_type = other DNA
gcggaactggaggtgcc

SEQ ID NO: 113920 - DNA, 17 bp, synthetic construct
  source 1..17: mol_type = other DNA
cggaactggaggtgccc

SEQ ID NO: 113921 - DNA, 17 bp, synthetic construct
  source 1..17: mol_type = other DNA
ggaactggaggtgccct

SEQ ID NO: 113922 - DNA, 17 bp, synthetic construct
  source 1..17: mol_type = other DNA
gaactggaggtgccctg

SEQ ID NO: 113923 - DNA, 17 bp, synthetic construct
  source 1..17: mol_type = other DNA
aactggaggtgccctga

SEQ ID NO: 113924 - DNA, 17 bp, synthetic construct
  source 1..17: mol_type = other DNA
actggaggtgccctgag

SEQ ID NO: 113925 - DNA, 17 bp, synthetic construct
  source 1..17: mol_type = other DNA
ctggaggtgccctgagc

SEQ ID NO: 113926 - DNA, 17 bp, synthetic construct
  source 1..17: mol_type = other DNA
tggaggtgccctgagct

SEQ ID NO: 113927 - DNA, 17 bp, synthetic construct
  source 1..17: mol_type = other DNA
ggaggtgccctgagctc

SEQ ID NO: 113928 - DNA, 17 bp, synthetic construct
  source 1..17: mol_type = other DNA
gaggtgccctgagctct

SEQ ID NO: 113929 - DNA, 17 bp, synthetic construct
  source 1..17: mol_type = other DNA
aggtgccctgagctctg

SEQ ID NO: 113930 - DNA, 17 bp, synthetic construct
  source 1..17: mol_type = other DNA
ggtgccctgagctctgc

SEQ ID NO: 113931 - DNA, 17 bp, synthetic construct
  source 1..17: mol_type = other DNA
gtgccctgagctctgcc

SEQ ID NO: 113932 - DNA, 17 bp, synthetic construct
  source 1..17: mol_type = other DNA
tgccctgagctctgccg

SEQ ID NO: 113933 - DNA, 17 bp, synthetic construct
  source 1..17: mol_type = other DNA
gccctgagctctgccgt

SEQ ID NO: 113934 - DNA, 17 bp, synthetic construct
  source 1..17: mol_type = other DNA
ccctgagctctgccgtg

SEQ ID NO: 113935 - DNA, 17 bp, synthetic construct
  source 1..17: mol_type = other DNA
cctgagctctgccgtga

SEQ ID NO: 113936 - DNA, 17 bp, synthetic construct
  source 1..17: mol_type = other DNA
ctgagctctgccgtgag

SEQ ID NO: 113937 - DNA, 17 bp, synthetic construct
  source 1..17: mol_type = other DNA
tgagctctgccgtgagt

SEQ ID NO: 113938 - DNA, 17 bp, synthetic construct
  source 1..17: mol_type = other DNA
gagctctgccgtgagtg

SEQ ID NO: 113939 - DNA, 17 bp, synthetic construct
  source 1..17: mol_type = other DNA
agctctgccgtgagtgc

SEQ ID NO: 113940 - DNA, 17 bp, synthetic construct
  source 1..17: mol_type = other DNA
gctctgccgtgagtgct

SEQ ID NO: 113941 - DNA, 17 bp, synthetic construct
  source 1..17: mol_type = other DNA
ctctgccgtgagtgctc

SEQ ID NO: 113942 - DNA, 17 bp, synthetic construct
  source 1..17: mol_type = other DNA
tctgccgtgagtgctcc

SEQ ID NO: 113943 - DNA, 17 bp, synthetic construct
  source 1..17: mol_type = other DNA
ctgccgtgagtgctccc

SEQ ID NO: 113944 - DNA, 17 bp, synthetic construct
  source 1..17: mol_type = other DNA
tgccgtgagtgctccca

SEQ ID NO: 113945 - DNA, 17 bp, synthetic construct
  source 1..17: mol_type = other DNA
gccgtgagtgctcccag

SEQ ID NO: 113946 - DNA, 17 bp, synthetic construct
  source 1..17: mol_type = other DNA
ccgtgagtgctcccagg

SEQ ID NO: 113947 - DNA, 17 bp, synthetic construct
  source 1..17: mol_type = other DNA
cgtgagtgctcccaggg

SEQ ID NO: 113948 - DNA, 17 bp, synthetic construct
  source 1..17: mol_type = other DNA
gtgagtgctcccagggc

SEQ ID NO: 113949 - DNA, 17 bp, synthetic construct
  source 1..17: mol_type = other DNA
tgagtgctcccagggcc

SEQ ID NO: 113950 - DNA, 17 bp, synthetic construct
  source 1..17: mol_type = other DNA
gagtgctcccagggcct

SEQ ID NO: 113951 - DNA, 17 bp, synthetic construct
  source 1..17: mol_type = other DNA
agtgctcccagggcctt

SEQ ID NO: 113952 - DNA, 17 bp, synthetic construct
  source 1..17: mol_type = other DNA
gtgctcccagggccttc

SEQ ID NO: 113953 - DNA, 17 bp, synthetic construct
  source 1..17: mol_type = other DNA
tgctcccagggccttcg

SEQ ID NO: 113954 - DNA, 17 bp, synthetic construct
  source 1..17: mol_type = other DNA
gctcccagggccttcgc

SEQ ID NO: 113955 - DNA, 17 bp, synthetic construct
  source 1..17: mol_type = other DNA
ctcccagggccttcgcc

SEQ ID NO: 113956 - DNA, 17 bp, synthetic construct
  source 1..17: mol_type = other DNA
tcccagggccttcgcca

SEQ ID NO: 113957 - DNA, 17 bp, synthetic construct
  source 1..17: mol_type = other DNA
cccagggccttcgccag

SEQ ID NO: 113958 - DNA, 17 bp, synthetic construct
  source 1..17: mol_type = other DNA
ccagggccttcgccagg

SEQ ID NO: 113959 - DNA, 17 bp, synthetic construct
  source 1..17: mol_type = other DNA
cagggccttcgccaggg

SEQ ID NO: 113960 - DNA, 17 bp, synthetic construct
  source 1..17: mol_type = other DNA
agggccttcgccaggga

SEQ ID NO: 113961 - DNA, 17 bp, synthetic construct
  source 1..17: mol_type = other DNA
gggccttcgccagggat

SEQ ID NO: 113962 - DNA, 17 bp, synthetic construct
  source 1..17: mol_type = other DNA
ggccttcgccagggatt

SEQ ID NO: 113963 - DNA, 17 bp, synthetic construct
  source 1..17: mol_type = other DNA
gccttcgccagggattg

SEQ ID NO: 113964 - DNA, 17 bp, synthetic construct
  source 1..17: mol_type = other DNA
ccttcgccagggattgt

SEQ ID NO: 113965 - DNA, 17 bp, synthetic construct
  source 1..17: mol_type = other DNA
cttcgccagggattgtg

SEQ ID NO: 113966 - DNA, 17 bp, synthetic construct
  source 1..17: mol_type = other DNA
ttcgccagggattgtgc

SEQ ID NO: 113967 - DNA, 17 bp, synthetic construct
  source 1..17: mol_type = other DNA
tcgccagggattgtgcc

SEQ ID NO: 113968 - DNA, 17 bp, synthetic construct
  source 1..17: mol_type = other DNA
cgccagggattgtgcca

SEQ ID NO: 113969 - DNA, 17 bp, synthetic construct
  source 1..17: mol_type = other DNA
gccagggattgtgccag

SEQ ID NO: 113970 - DNA, 17 bp, synthetic construct
  source 1..17: mol_type = other DNA
ccagggattgtgccaga

SEQ ID NO: 113971 - DNA, 17 bp, synthetic construct
  source 1..17: mol_type = other DNA
cagggattgtgccagag

SEQ ID NO: 113972 - DNA, 17 bp, synthetic construct
  source 1..17: mol_type = other DNA
agggattgtgccagaga

SEQ ID NO: 113973 - DNA, 17 bp, synthetic construct
  source 1..17: mol_type = other DNA
gggattgtgccagagag

SEQ ID NO: 113974 - DNA, 17 bp, synthetic construct
  source 1..17: mol_type = other DNA
ggattgtgccagagaga

SEQ ID NO: 113975 - DNA, 17 bp, synthetic construct
  source 1..17: mol_type = other DNA
gattgtgccagagagaa

SEQ ID NO: 113976 - DNA, 17 bp, synthetic construct
  source 1..17: mol_type = other DNA
attgtgccagagagaag

SEQ ID NO: 113977 - DNA, 17 bp, synthetic construct
  source 1..17: mol_type = other DNA
ttgtgccagagagaagg

SEQ ID NO: 113978 - DNA, 17 bp, synthetic construct
  source 1..17: mol_type = other DNA
tgtgccagagagaaggg

SEQ ID NO: 113979 - DNA, 17 bp, synthetic construct
  source 1..17: mol_type = other DNA
gtgccagagagaagggg

SEQ ID NO: 113980 - DNA, 17 bp, synthetic construct
  source 1..17: mol_type = other DNA
tgccagagagaaggggc

SEQ ID NO: 113981 - DNA, 17 bp, synthetic construct
  source 1..17: mol_type = other DNA
gccagagagaaggggca

SEQ ID NO: 113982 - DNA, 17 bp, synthetic construct
  source 1..17: mol_type = other DNA
ccagagagaaggggcag

SEQ ID NO: 113983 - DNA, 17 bp, synthetic construct
  source 1..17: mol_type = other DNA
cagagagaaggggcagg

SEQ ID NO: 113984 - DNA, 17 bp, synthetic construct
  source 1..17: mol_type = other DNA
agagagaaggggcaggg

SEQ ID NO: 113985 - DNA, 17 bp, synthetic construct
  source 1..17: mol_type = other DNA
gagagaaggggcagggg

SEQ ID NO: 113986 - DNA, 17 bp, synthetic construct
  source 1..17: mol_type = other DNA
agagaaggggcaggggg

SEQ ID NO: 113987 - DNA, 17 bp, synthetic construct
  source 1..17: mol_type = other DNA
gagaaggggcaggggga

SEQ ID NO: 113988 - DNA, 17 bp, synthetic construct
  source 1..17: mol_type = other DNA
agaaggggcagggggag

SEQ ID NO: 113989 - DNA, 17 bp, synthetic construct
  source 1..17: mol_type = other DNA
gaaggggcagggggagc

SEQ ID NO: 113990 - DNA, 17 bp, synthetic construct
  source 1..17: mol_type = other DNA
aaggggcagggggagcg

SEQ ID NO: 113991 - DNA, 17 bp, synthetic construct
  source 1..17: mol_type = other DNA
aggggcagggggagcgc

SEQ ID NO: 113992 - DNA, 17 bp, synthetic construct
  source 1..17: mol_type = other DNA
ggggcagggggagcgcc

SEQ ID NO: 113993 - DNA, 17 bp, synthetic construct
  source 1..17: mol_type = other DNA
gggcagggggagcgcct

SEQ ID NO: 113994 - DNA, 17 bp, synthetic construct
  source 1..17: mol_type = other DNA
ggcagggggagcgcctt

SEQ ID NO: 113995 - DNA, 17 bp, synthetic construct
  source 1..17: mol_type = other DNA
gcagggggagcgccttg

SEQ ID NO: 113996 - DNA, 17 bp, synthetic construct
  source 1..17: mol_type = other DNA
cagggggagcgccttgg

SEQ ID NO: 113997 - DNA, 17 bp, synthetic construct
  source 1..17: mol_type = other DNA
agggggagcgccttggg

SEQ ID NO: 113998 - DNA, 17 bp, synthetic construct
  source 1..17: mol_type = other DNA
gggggagcgccttgggg

SEQ ID NO: 113999 - DNA, 17 bp, synthetic construct
  source 1..17: mol_type = other DNA
ggggagcgccttggggg

SEQ ID NO: 114000 - DNA, 17 bp, synthetic construct
  source 1..17: mol_type = other DNA
gggagcgccttgggggc

SEQ ID NO: 114001 - DNA, 17 bp, synthetic construct
  source 1..17: mol_type = other DNA
ggagcgccttgggggcc

SEQ ID NO: 114002 - DNA, 17 bp, synthetic construct
  source 1..17: mol_type = other DNA
gagcgccttgggggcca

SEQ ID NO: 114003 - DNA, 17 bp, synthetic construct
  source 1..17: mol_type = other DNA
agcgccttgggggccac

SEQ ID NO: 114004 - DNA, 17 bp, synthetic construct
  source 1..17: mol_type = other DNA
gcgccttgggggccact

SEQ ID NO: 114005 - DNA, 17 bp, synthetic construct
  source 1..17: mol_type = other DNA
cgccttgggggccactg

SEQ ID NO: 114006 - DNA, 17 bp, synthetic construct
  source 1..17: mol_type = other DNA
gccttgggggccactgg

SEQ ID NO: 114007 - DNA, 17 bp, synthetic construct
  source 1..17: mol_type = other DNA
ccttgggggccactggg

SEQ ID NO: 114008 - DNA, 17 bp, synthetic construct
  source 1..17: mol_type = other DNA
cttgggggccactgggg

SEQ ID NO: 114009 - DNA, 17 bp, synthetic construct
  source 1..17: mol_type = other DNA
ttgggggccactggggg

SEQ ID NO: 114010 - DNA, 17 bp, synthetic construct
  source 1..17: mol_type = other DNA
tgggggccactgggggt

SEQ ID NO: 114011 - DNA, 17 bp, synthetic construct
  source 1..17: mol_type = other DNA
gggggccactgggggtg

SEQ ID NO: 114012 - DNA, 17 bp, synthetic construct
  source 1..17: mol_type = other DNA
ggggccactgggggtgg

SEQ ID NO: 114013 - DNA, 17 bp, synthetic construct
  source 1..17: mol_type = other DNA
gggccactgggggtggg

SEQ ID NO: 114014 - DNA, 17 bp, synthetic construct
  source 1..17: mol_type = other DNA
ggccactgggggtgggg

SEQ ID NO: 114015 - DNA, 17 bp, synthetic construct
  source 1..17: mol_type = other DNA
gccactgggggtgggga

SEQ ID NO: 114016 - DNA, 17 bp, synthetic construct
  source 1..17: mol_type = other DNA
ccactgggggtggggag

SEQ ID NO: 114017 - DNA, 17 bp, synthetic construct
  source 1..17: mol_type = other DNA
cactgggggtggggagg

SEQ ID NO: 114018 - DNA, 17 bp, synthetic construct
  source 1..17: mol_type = other DNA
actgggggtggggaggc

SEQ ID NO: 114019 - DNA, 17 bp, synthetic construct
  source 1..17: mol_type = other DNA
ctgggggtggggaggcc

SEQ ID NO: 114020 - DNA, 17 bp, synthetic construct
  source 1..17: mol_type = other DNA
tgggggtggggaggcct

SEQ ID NO: 114021 - DNA, 17 bp, synthetic construct
  source 1..17: mol_type = other DNA
gggggtggggaggcctg

SEQ ID NO: 114022 - DNA, 17 bp, synthetic construct
  source 1..17: mol_type = other DNA
ggggtggggaggcctgg

SEQ ID NO: 114023 - DNA, 17 bp, synthetic construct
  source 1..17: mol_type = other DNA
gggtggggaggcctggg

SEQ ID NO: 114024 - DNA, 17 bp, synthetic construct
  source 1..17: mol_type = other DNA
ggtggggaggcctgggg

SEQ ID NO: 114025 - DNA, 17 bp, synthetic construct
  source 1..17: mol_type = other DNA
gtggggaggcctggggg

SEQ ID NO: 114026 - DNA, 17 bp, synthetic construct
  source 1..17: mol_type = other DNA
tggggaggcctggggga

SEQ ID NO: 114027 - DNA, 17 bp, synthetic construct
  source 1..17: mol_type = other DNA
ggggaggcctgggggac

SEQ ID NO: 114028 - DNA, 17 bp, synthetic construct
  source 1..17: mol_type = other DNA
gggaggcctgggggaca

SEQ ID NO: 114029 - DNA, 17 bp, synthetic construct
  source 1..17: mol_type = other DNA
ggaggcctgggggacag

SEQ ID NO: 114030 - DNA, 17 bp, synthetic construct
  source 1..17: mol_type = other DNA
gaggcctgggggacagg

SEQ ID NO: 114031 - DNA, 17 bp, synthetic construct
  source 1..17: mol_type = other DNA
aggcctgggggacaggg

SEQ ID NO: 114032 - DNA, 17 bp, synthetic construct
  source 1..17: mol_type = other DNA
ggcctgggggacagggg

SEQ ID NO: 114033 - DNA, 17 bp, synthetic construct
  source 1..17: mol_type = other DNA
gcctgggggacaggggt

SEQ ID NO: 114034 - DNA, 17 bp, synthetic construct
  source 1..17: mol_type = other DNA
cctgggggacaggggtg

SEQ ID NO: 114035 - DNA, 17 bp, synthetic construct
  source 1..17: mol_type = other DNA
ctgggggacaggggtgg

SEQ ID NO: 114036 - DNA, 17 bp, synthetic construct
  source 1..17: mol_type = other DNA
tgggggacaggggtgga

SEQ ID NO: 114037 - DNA, 17 bp, synthetic construct
  source 1..17: mol_type = other DNA
gggggacaggggtggag

SEQ ID NO: 114038 - DNA, 17 bp, synthetic construct
  source 1..17: mol_type = other DNA
ggggacaggggtggagg

SEQ ID NO: 114039 - DNA, 17 bp, synthetic construct
  source 1..17: mol_type = other DNA
gggacaggggtggaggg

SEQ ID NO: 114040 - DNA, 17 bp, synthetic construct
  source 1..17: mol_type = other DNA
ggacaggggtggagggc

SEQ ID NO: 114041 - DNA, 17 bp, synthetic construct
  source 1..17: mol_type = other DNA
gacaggggtggagggca

SEQ ID NO: 114042 - DNA, 17 bp, synthetic construct
  source 1..17: mol_type = other DNA
acaggggtggagggcag

SEQ ID NO: 114043 - DNA, 17 bp, synthetic construct
  source 1..17: mol_type = other DNA
caggggtggagggcaga

SEQ ID NO: 114044 - DNA, 17 bp, synthetic construct
  source 1..17: mol_type = other DNA
aggggtggagggcagag

SEQ ID NO: 114045 - DNA, 17 bp, synthetic construct
  source 1..17: mol_type = other DNA
ggggtggagggcagagg

SEQ ID NO: 114046 - DNA, 17 bp, synthetic construct
  source 1..17: mol_type = other DNA
gggtggagggcagagga

SEQ ID NO: 114047 - DNA, 17 bp, synthetic construct
  source 1..17: mol_type = other DNA
ggtggagggcagaggac

SEQ ID NO: 114048 - DNA, 17 bp, synthetic construct
  source 1..17: mol_type = other DNA
gtggagggcagaggacc

SEQ ID NO: 114049 - DNA, 17 bp, synthetic construct
  source 1..17: mol_type = other DNA
tggagggcagaggaccc

SEQ ID NO: 114050 - DNA, 17 bp, synthetic construct
  source 1..17: mol_type = other DNA
ggagggcagaggaccca

SEQ ID NO: 114051 - DNA, 17 bp, synthetic construct
  source 1..17: mol_type = other DNA
gagggcagaggacccac

SEQ ID NO: 114052 - DNA, 17 bp, synthetic construct
  source 1..17: mol_type = other DNA
agggcagaggacccacc

SEQ ID NO: 114053 - DNA, 17 bp, synthetic construct
  source 1..17: mol_type = other DNA
gggcagaggacccaccc

SEQ ID NO: 114054 - DNA, 17 bp, synthetic construct
  source 1..17: mol_type = other DNA
ggcagaggacccacccc

SEQ ID NO: 114055 - DNA, 17 bp, synthetic construct
  source 1..17: mol_type = other DNA
gcagaggacccacccca

SEQ ID NO: 114056 - DNA, 17 bp, synthetic construct
  source 1..17: mol_type = other DNA
cagaggacccaccccag

SEQ ID NO: 114057 - DNA, 17 bp, synthetic construct
  source 1..17: mol_type = other DNA
agaggacccaccccagg

SEQ ID NO: 114058 - DNA, 17 bp, synthetic construct
  source 1..17: mol_type = other DNA
gaggacccaccccaggc

SEQ ID NO: 114059 - DNA, 17 bp, synthetic construct
  source 1..17: mol_type = other DNA
aggacccaccccaggca

SEQ ID NO: 114060 - DNA, 17 bp, synthetic construct
  source 1..17: mol_type = other DNA
ggacccaccccaggcat

SEQ ID NO: 114061 - DNA, 17 bp, synthetic construct
  source 1..17: mol_type = other DNA
gacccaccccaggcata

SEQ ID NO: 114062 - DNA, 17 bp, synthetic construct
  source 1..17: mol_type = other DNA
acccaccccaggcatag

SEQ ID NO: 114063 - DNA, 17 bp, synthetic construct
  source 1..17: mol_type = other DNA
cccaccccaggcatagt

SEQ ID NO: 114064 - DNA, 17 bp, synthetic construct
  source 1..17: mol_type = other DNA
ccaccccaggcatagtg

SEQ ID NO: 114065 - DNA, 17 bp, synthetic construct
  source 1..17: mol_type = other DNA
caccccaggcatagtgg

SEQ ID NO: 114066 - DNA, 17 bp, synthetic construct
  source 1..17: mol_type = other DNA
accccaggcatagtggg

SEQ ID NO: 114067 - DNA, 17 bp, synthetic construct
  source 1..17: mol_type = other DNA
ccccaggcatagtgggc

SEQ ID NO: 114068 - DNA, 17 bp, synthetic construct
  source 1..17: mol_type = other DNA
cccaggcatagtgggca

SEQ ID NO: 114069 - DNA, 17 bp, synthetic construct
  source 1..17: mol_type = other DNA
ccaggcatagtgggcag

SEQ ID NO: 114070 - DNA, 17 bp, synthetic construct
  source 1..17: mol_type = other DNA
caggcatagtgggcaga

SEQ ID NO: 114071 - DNA, 17 bp, synthetic construct
  source 1..17: mol_type = other DNA
aggcatagtgggcagag

SEQ ID NO: 114072 - DNA, 17 bp, synthetic construct
  source 1..17: mol_type = other DNA
ggcatagtgggcagagg

SEQ ID NO: 114073 - DNA, 17 bp, synthetic construct
  source 1..17: mol_type = other DNA
gcatagtgggcagaggc

SEQ ID NO: 114074 - DNA, 17 bp, synthetic construct
  source 1..17: mol_type = other DNA
catagtgggcagaggcc

SEQ ID NO: 114075 - DNA, 17 bp, synthetic construct
  source 1..17: mol_type = other DNA
atagtgggcagaggcca

SEQ ID NO: 114076 - DNA, 17 bp, synthetic construct
  source 1..17: mol_type = other DNA
tagtgggcagaggccac

SEQ ID NO: 114077 - DNA, 17 bp, synthetic construct
  source 1..17: mol_type = other DNA
agtgggcagaggccacc

SEQ ID NO: 114078 - DNA, 17 bp, synthetic construct
  source 1..17: mol_type = other DNA
gtgggcagaggccaccc

SEQ ID NO: 114079 - DNA, 17 bp, synthetic construct
  source 1..17: mol_type = other DNA
tgggcagaggccacccc

SEQ ID NO: 114080 - DNA, 17 bp, synthetic construct
  source 1..17: mol_type = other DNA
gggcagaggccacccca

SEQ ID NO: 114081 - DNA, 17 bp, synthetic construct
  source 1..17: mol_type = other DNA
ggcagaggccaccccag

SEQ ID NO: 114082 - DNA, 17 bp, synthetic construct
  source 1..17: mol_type = other DNA
gcagaggccaccccagg

SEQ ID NO: 114083 - DNA, 17 bp, synthetic construct
  source 1..17: mol_type = other DNA
cagaggccaccccagga

SEQ ID NO: 114084 - DNA, 17 bp, synthetic construct
  source 1..17: mol_type = other DNA
agaggccaccccaggac

SEQ ID NO: 114085 - DNA, 17 bp, synthetic construct
  source 1..17: mol_type = other DNA
gaggccaccccaggacc

SEQ ID NO: 114086 - DNA, 17 bp, synthetic construct
  source 1..17: mol_type = other DNA
aggccaccccaggaccc

SEQ ID NO: 114087 - DNA, 17 bp, synthetic construct
  source 1..17: mol_type = other DNA
ggccaccccaggacccc

SEQ ID NO: 114088 - DNA, 17 bp, synthetic construct
  source 1..17: mol_type = other DNA
gccaccccaggacccca

SEQ ID NO: 114089 - DNA, 17 bp, synthetic construct
  source 1..17: mol_type = other DNA
ccaccccaggaccccag

SEQ ID NO: 114090 - DNA, 17 bp, synthetic construct
  source 1..17: mol_type = other DNA
caccccaggaccccagg

SEQ ID NO: 114091 - DNA, 17 bp, synthetic construct
  source 1..17: mol_type = other DNA
accccaggaccccagga

SEQ ID NO: 114092 - DNA, 17 bp, synthetic construct
  source 1..17: mol_type = other DNA
ccccaggaccccaggag

SEQ ID NO: 114093 - DNA, 17 bp, synthetic construct
  source 1..17: mol_type = other DNA
cccaggaccccaggagg

SEQ ID NO: 114094 - DNA, 17 bp, synthetic construct
  source 1..17: mol_type = other DNA
ccaggaccccaggaggg

SEQ ID NO: 114095 - DNA, 17 bp, synthetic construct
  source 1..17: mol_type = other DNA
caggaccccaggagggg

SEQ ID NO: 114096 - DNA, 17 bp, synthetic construct
  source 1..17: mol_type = other DNA
aggaccccaggaggggg

SEQ ID NO: 114097 - DNA, 17 bp, synthetic construct
  source 1..17: mol_type = other DNA
ggaccccaggagggggt

SEQ ID NO: 114098 - DNA, 17 bp, synthetic construct
  source 1..17: mol_type = other DNA
gaccccaggagggggtg

SEQ ID NO: 114099 - DNA, 17 bp, synthetic construct
  source 1..17: mol_type = other DNA
accccaggagggggtgg

SEQ ID NO: 114100 - DNA, 17 bp, synthetic construct
  source 1..17: mol_type = other DNA
ccccaggagggggtggg

SEQ ID NO: 114101 - DNA, 17 bp, synthetic construct
  source 1..17: mol_type = other DNA
cccaggagggggtgggg

SEQ ID NO: 114102 - DNA, 17 bp, synthetic construct
  source 1..17: mol_type = other DNA
ccaggagggggtggggc

SEQ ID NO: 114103 - DNA, 17 bp, synthetic construct
  source 1..17: mol_type = other DNA
caggagggggtggggcc

SEQ ID NO: 114104 - DNA, 17 bp, synthetic construct
  source 1..17: mol_type = other DNA
aggagggggtggggcct

SEQ ID NO: 114105 - DNA, 17 bp, synthetic construct
  source 1..17: mol_type = other DNA
ggagggggtggggcctc

SEQ ID NO: 114106 - DNA, 17 bp, synthetic construct
  source 1..17: mol_type = other DNA
gagggggtggggcctcc

SEQ ID NO: 114107 - DNA, 17 bp, synthetic construct
  source 1..17: mol_type = other DNA
agggggtggggcctccg

SEQ ID NO: 114108 - DNA, 17 bp, synthetic construct
  source 1..17: mol_type = other DNA
gggggtggggcctccgg

SEQ ID NO: 114109 - DNA, 17 bp, synthetic construct
  source 1..17: mol_type = other DNA
ggggtggggcctccggg

SEQ ID NO: 114110 - DNA, 17 bp, synthetic construct
  source 1..17: mol_type = other DNA
gggtggggcctccgggg

SEQ ID NO: 114111 - DNA, 17 bp, synthetic construct
  source 1..17: mol_type = other DNA
ggtggggcctccggggg

SEQ ID NO: 114112 - DNA, 17 bp, synthetic construct
  source 1..17: mol_type = other DNA
gtggggcctccgggggc

SEQ ID NO: 114113 - DNA, 17 bp, synthetic construct
  source 1..17: mol_type = other DNA
tggggcctccgggggct

SEQ ID NO: 114114 - DNA, 17 bp, synthetic construct
  source 1..17: mol_type = other DNA
ggggcctccgggggctg

SEQ ID NO: 114115 - DNA, 17 bp, synthetic construct
  source 1..17: mol_type = other DNA
gggcctccgggggctgc

SEQ ID NO: 114116 - DNA, 17 bp, synthetic construct
  source 1..17: mol_type = other DNA
ggcctccgggggctgca

SEQ ID NO: 114117 - DNA, 17 bp, synthetic construct
  source 1..17: mol_type = other DNA
gcctccgggggctgcag

SEQ ID NO: 114118 - DNA, 17 bp, synthetic construct
  source 1..17: mol_type = other DNA
cctccgggggctgcagg

SEQ ID NO: 114119 - DNA, 17 bp, synthetic construct
  source 1..17: mol_type = other DNA
ctccgggggctgcagga

SEQ ID NO: 114120 - DNA, 17 bp, synthetic construct
  source 1..17: mol_type = other DNA
tccgggggctgcaggag

SEQ ID NO: 114121 - DNA, 17 bp, synthetic construct
  source 1..17: mol_type = other DNA
ccgggggctgcaggaga

SEQ ID NO: 114122 - DNA, 17 bp, synthetic construct
  source 1..17: mol_type = other DNA
cgggggctgcaggagaa

SEQ ID NO: 114123 - DNA, 17 bp, synthetic construct
  source 1..17: mol_type = other DNA
gggggctgcaggagaag

SEQ ID NO: 114124 - DNA, 17 bp, synthetic construct
  source 1..17: mol_type = other DNA
ggggctgcaggagaagg

SEQ ID NO: 114125 - DNA, 17 bp, synthetic construct
  source 1..17: mol_type = other DNA
gggctgcaggagaagga

SEQ ID NO: 114126 - DNA, 17 bp, synthetic construct
  source 1..17: mol_type = other DNA
ggctgcaggagaaggag

SEQ ID NO: 114127 - DNA, 17 bp, synthetic construct
  source 1..17: mol_type = other DNA
gctgcaggagaaggaga

SEQ ID NO: 114128 - DNA, 17 bp, synthetic construct
  source 1..17: mol_type = other DNA
ctgcaggagaaggagag

SEQ ID NO: 114129 - DNA, 17 bp, synthetic construct
  source 1..17: mol_type = other DNA
tgcaggagaaggagagg

SEQ ID NO: 114130 - DNA, 17 bp, synthetic construct
  source 1..17: mol_type = other DNA
gcaggagaaggagaggc

SEQ ID NO: 114131 - DNA, 17 bp, synthetic construct
  source 1..17: mol_type = other DNA
caggagaaggagaggct

SEQ ID NO: 114132 - DNA, 17 bp, synthetic construct
  source 1..17: mol_type = other DNA
aggagaaggagaggctg

SEQ ID NO: 114133 - DNA, 17 bp, synthetic construct
  source 1..17: mol_type = other DNA
ggagaaggagaggctgt

SEQ ID NO: 114134 - DNA, 17 bp, synthetic construct
  source 1..17: mol_type = other DNA
gagaaggagaggctgtg

SEQ ID NO: 114135 - DNA, 17 bp, synthetic construct
  source 1..17: mol_type = other DNA
agaaggagaggctgtgg

SEQ ID NO: 114136 - DNA, 17 bp, synthetic construct
  source 1..17: mol_type = other DNA
gaaggagaggctgtgga

SEQ ID NO: 114137 - DNA, 17 bp, synthetic construct
  source 1..17: mol_type = other DNA
aaggagaggctgtggag

SEQ ID NO: 114138 - DNA, 17 bp, synthetic construct
  source 1..17: mol_type = other DNA
aggagaggctgtggaga

SEQ ID NO: 114139 - DNA, 17 bp, synthetic construct
  source 1..17: mol_type = other DNA
ggagaggctgtggagag

SEQ ID NO: 114140 - DNA, 17 bp, synthetic construct
  source 1..17: mol_type = other DNA
gagaggctgtggagagg

SEQ ID NO: 114141 - DNA, 17 bp, synthetic construct
  source 1..17: mol_type = other DNA
agaggctgtggagaggc

SEQ ID NO: 114142 - DNA, 17 bp, synthetic construct
  source 1..17: mol_type = other DNA
gaggctgtggagaggct

SEQ ID NO: 114143 - DNA, 17 bp, synthetic construct
  source 1..17: mol_type = other DNA
aggctgtggagaggctg

SEQ ID NO: 114144 - DNA, 17 bp, synthetic construct
  source 1..17: mol_type = other DNA
ggctgtggagaggctgt

SEQ ID NO: 114145 - DNA, 17 bp, synthetic construct
  source 1..17: mol_type = other DNA
gctgtggagaggctgtg

SEQ ID NO: 114146 - DNA, 17 bp, synthetic construct
  source 1..17: mol_type = other DNA
ctgtggagaggctgtgc

SEQ ID NO: 114147 - DNA, 17 bp, synthetic construct
  source 1..17: mol_type = other DNA
tgtggagaggctgtgca

SEQ ID NO: 114148 - DNA, 17 bp, synthetic construct
  source 1..17: mol_type = other DNA
gtggagaggctgtgcag

SEQ ID NO: 114149 - DNA, 17 bp, synthetic construct
  source 1..17: mol_type = other DNA
tggagaggctgtgcagc

SEQ ID NO: 114150 - DNA, 17 bp, synthetic construct
  source 1..17: mol_type = other DNA
ggagaggctgtgcagca

SEQ ID NO: 114151 - DNA, 17 bp, synthetic construct
  source 1..17: mol_type = other DNA
gagaggctgtgcagcag

SEQ ID NO: 114152 - DNA, 17 bp, synthetic construct
  source 1..17: mol_type = other DNA
agaggctgtgcagcagg

SEQ ID NO: 114153 - DNA, 17 bp, synthetic construct
  source 1..17: mol_type = other DNA
gaggctgtgcagcaggt

SEQ ID NO: 114154 - DNA, 17 bp, synthetic construct
  source 1..17: mol_type = other DNA
aggctgtgcagcaggtg

SEQ ID NO: 114155 - DNA, 17 bp, synthetic construct
  source 1..17: mol_type = other DNA
ggctgtgcagcaggtgg

SEQ ID NO: 114156 - DNA, 17 bp, synthetic construct
  source 1..17: mol_type = other DNA
gctgtgcagcaggtggc

SEQ ID NO: 114157 - DNA, 17 bp, synthetic construct
  source 1..17: mol_type = other DNA
ctgtgcagcaggtggcg

SEQ ID NO: 114158 - DNA, 17 bp, synthetic construct
  source 1..17: mol_type = other DNA
tgtgcagcaggtggcgg

SEQ ID NO: 114159 - DNA, 17 bp, synthetic construct
  source 1..17: mol_type = other DNA
gtgcagcaggtggcggg

SEQ ID NO: 114160 - DNA, 17 bp, synthetic construct
  source 1..17: mol_type = other DNA
tgcagcaggtggcgggg

SEQ ID NO: 114161 - DNA, 17 bp, synthetic construct
  source 1..17: mol_type = other DNA
gcagcaggtggcggggg

SEQ ID NO: 114162 - DNA, 17 bp, synthetic construct
  source 1..17: mol_type = other DNA
cagcaggtggcgggggc

SEQ ID NO: 114163 - DNA, 17 bp, synthetic construct
  source 1..17: mol_type = other DNA
agcaggtggcgggggct

SEQ ID NO: 114164 - DNA, 17 bp, synthetic construct
  source 1..17: mol_type = other DNA
gcaggtggcgggggctg

SEQ ID NO: 114165 - DNA, 17 bp, synthetic construct
  source 1..17: mol_type = other DNA
caggtggcgggggctgg

SEQ ID NO: 114166 - DNA, 17 bp, synthetic construct
  source 1..17: mol_type = other DNA
aggtggcgggggctggg

SEQ ID NO: 114167 - DNA, 17 bp, synthetic construct
  source 1..17: mol_type = other DNA
ggtggcgggggctgggg

SEQ ID NO: 114168 - DNA, 17 bp, synthetic construct
  source 1..17: mol_type = other DNA
gtggcgggggctggggc

SEQ ID NO: 114169 - DNA, 17 bp, synthetic construct
  source 1..17: mol_type = other DNA
tggcgggggctggggct

SEQ ID NO: 114170 - DNA, 17 bp, synthetic construct
  source 1..17: mol_type = other DNA
ggcgggggctggggctg

SEQ ID NO: 114171 - DNA, 17 bp, synthetic construct
  source 1..17: mol_type = other DNA
gcgggggctggggctgg

SEQ ID NO: 114172 - DNA, 17 bp, synthetic construct
  source 1..17: mol_type = other DNA
cgggggctggggctgga

SEQ ID NO: 114173 - DNA, 17 bp, synthetic construct
  source 1..17: mol_type = other DNA
gggggctggggctggag

SEQ ID NO: 114174 - DNA, 17 bp, synthetic construct
  source 1..17: mol_type = other DNA
ggggctggggctggagg

SEQ ID NO: 114175 - DNA, 17 bp, synthetic construct
  source 1..17: mol_type = other DNA
gggctggggctggaggg

SEQ ID NO: 114176 - DNA, 17 bp, synthetic construct
  source 1..17: mol_type = other DNA
ggctggggctggagggt

SEQ ID NO: 114177 - DNA, 17 bp, synthetic construct
  source 1..17: mol_type = other DNA
gctggggctggagggtg

SEQ ID NO: 114178 - DNA, 17 bp, synthetic construct
  source 1..17: mol_type = other DNA
ctggggctggagggtgg

SEQ ID NO: 114179 - DNA, 17 bp, synthetic construct
  source 1..17: mol_type = other DNA
tggggctggagggtgga

SEQ ID NO: 114180 - DNA, 17 bp, synthetic construct
  source 1..17: mol_type = other DNA
ggggctggagggtggag

SEQ ID NO: 114181 - DNA, 17 bp, synthetic construct
  source 1..17: mol_type = other DNA
gggctggagggtggagc

SEQ ID NO: 114182 - DNA, 17 bp, synthetic construct
  source 1..17: mol_type = other DNA
ggctggagggtggagct

SEQ ID NO: 114183 - DNA, 17 bp, synthetic construct
  source 1..17: mol_type = other DNA
gctggagggtggagctg

SEQ ID NO: 114184 - DNA, 17 bp, synthetic construct
  source 1..17: mol_type = other DNA
ctggagggtggagctgc
